(19) United States
(12) Patent Application Publication
(10) Pub. No.: US 2025/0352577 A1
(43) Pub. Date: Nov. 20, 2025

(54) TUMOR NEOANTIGENIC PEPTIDES AND USES THEREOF

(71) Applicants: MNEMO THERAPEUTICS, Paris (FR); INSTITUT CURIE, Paris (FR); INSERM, Paris (FR)

(72) Inventors: Sebastian AMIGORENA, Paris (FR); Marianne BURBAGE, Paris (FR); Alexandre HOUY, Vitry sur Seine (FR); Joshua WATERFALL, Paris (FR); Marc-Henri STERN, Paris (FR); Benjamin SADACCA, Paris (FR); Antonela MERLOTTI IPPOLITO, Paris (FR); Yago ARRIBAS DE SANDOVAL, Paris (FR); Christel GOUDOT, Le Blanc Mesnil (FR)

(21) Appl. No.: 18/549,995

(22) PCT Filed: Mar. 11, 2022
(86) PCT No.: PCT/EP2022/056353

§ 371 Date: Sep. 11, 2023

(30) Foreign Application Priority Data
Mar. 11, 2021 (EP) 21305302.8
Mar. 2, 2022 (EP) 22305239.0

(51) Int. Cl. A61K 35/17; A61K 39/00; A61K 40/11; A61K 40/15; A61K 40/31; A61K 40/32; A61K 40/42; A61K 45/06; A61P 35/00; C07K 14/725; C07K 14/74; C07K 16/28

(52) U.S. Cl. CPC A61K 35/17; A61K 39/001111; A61K 40/11; A61K 40/15; A61K 40/31; A61K 40/32; A61K 40/421; A61K 45/06; A61P 35/00; C07K 14/7051; C07K 14/70539; C07K 16/2809; C07K 16/283; A61K 2039/572; A61K 2239/13; A61K 2239/29; C07K 2319/00; C07K 2319/31

(57) ABSTRACT

The present disclosure provides tumor neoantigenic peptide sequences and nucleotide sequences encoding such peptide sequences; a vaccine or immunogenic composition capable of raising a specific T-cell response comprising one or more of the neoantigenic peptides, or comprising nucleic acid encoding one or more of the neoantigenic peptides; an antibody, or an antigen-binding fragment thereof, a T cell receptor (TCR), or a chimeric antigen receptor (CAR) that specifically binds such neoantigenic peptides; methods of producing such antibodies, TCRs or CARs; polynucleotides encoding such neoantigenic peptides, antibodies, CARs or TCRs, optionally linked to a heterologous regulatory control sequence; immune cells that specifically bind to such neoantigenic peptides; and dendritic cells or antigen presenting cells that have been pulsed with one or more of the neoantigenic peptides; and methods of using such products in particular therapeutic uses of these products.

### FIELD OF THE DISCLOSURE

[0001] The present disclosure provides neoantigenic peptides encoded by transposable element (TE)-exon fusion transcripts, nucleic acids, vaccines, antibodies and immune cells that can be used in cancer therapy.

### BACKGROUND

[0002] Harnessing the immune system to generate effective responses against tumors is a central goal of cancer immunotherapy. Part of the effective immune response involves T lymphocytes specific for tumor antigens. T cell activation requires their interaction with antigen-presenting cells (APCs), commonly dendritic cells (DCs), expressing TCR-cognate peptides presented in the context of a major histocompatibility molecule (MHC) and co-stimulation signals. Subsequently, activated T cells can recognize peptide-MHC complexes presented by all cell types, even malignant cells. Neoplasms often contain infiltrating T lymphocytes reactive with tumor cells.

[0003] However, the efficiency of immune responses against tumors is severely dampened by various immunosuppressive strategies developed by tumors; e.g., tumor cells express receptors that provide inhibitory signals to infiltrating T cells, or they secrete inhibitory cytokines. The development of checkpoint blockade therapy has provided means to bypass some of these mechanisms, leading to more efficient killing of cancer cells. The promising results yielded by this approach have opened up new avenues for the development of T cell-based immunotherapy. Checkpoint inhibitors are, however, effective in a minority of patients and only in limited types of cancer.

[0004] A major goal in immunotherapy is to increase the proportion of responding patients and extend the cancer indications. Vaccination, administration of anti-tumor antibodies, or administration of immune cells specific for tumor antigens have all been proposed to increase the anti-tumor immune response, and can be administered alone, with other therapies such as chemotherapy or radiation, or as a combination therapy with checkpoint blockers. The selection of antigens able to trigger anti-tumor immunity without targeting healthy tissues has been a long-standing challenge.

[0005] The search for tumor neoantigens has mostly been focused on mutated sequences appearing as in cancer cells. These antigens are unique to each patient. Tumor antigens (the ones preferentially expressed in tumor cells) are, however, self-antigens that represent poor targets for vaccination (probably due to central tolerance). Identifying shared true neoantigens (absent from tissues) is a major challenge for the field.

[0006] A few prior reports regarding transposable elements (TE) in tumors include (Helman, E. et al. (2014). Genome Res) (Schiavetti, F. et al. (2002). Cancer Res., Takahashi, Y. et al. (2008). J. Clin. Invest). (Chiappinelli, K. B. et al. (2015). Cell, Roulois, D. et al. (2015). Cell). However, the relationship of TE to the antigenic landscape presented by tumor cells has not been investigated in depth.

[0007] New tumor neoantigens would be of interest and might improve or reduce the cost of cancer therapy in particular in the case of vaccination and adoptive cell therapy.

### SUMMARY

[0008] The inventors have now discovered that non-canonical alternative splicing events between exons and TEs, also named herein JETs (junctions between TEs and exons) can be a source of tumor antigens and more particularly a source of tumor-specific antigens. The present disclosure therefore provides tumor neoantigenic peptide sequences and nucleotide sequences encoding such peptide sequences; a vaccine or immunogenic composition capable of raising a specific T-cell response comprising one or more of the neoantigenic peptides, or comprising nucleic acid encoding one or more of the neoantigenic peptides; an antibody, or an antigen-binding fragment thereof, a T cell receptor (TCR), or a chimeric antigen receptor (CAR) that specifically binds such neoantigenic peptides; methods of producing such antibodies, TCRs or CARs; polynucleotides encoding such neoantigenic peptides, antibodies, CARs or TCRs, optionally linked to a heterologous regulatory control sequence; immune cells that specifically bind to such neoantigenic peptides; and dendritic cells or antigen presenting cells that have been pulsed with one or more of the neoantigenic peptides; and methods of using such products. The present disclosure provides tumor neoantigenic peptides comprising at least 8 amino acids, optionally wherein said neoantigenic peptides are encoded by a part of an open reading frame (ORF) from a fusion transcript sequence comprising a transposable element (TE) sequence and an exonic sequence. While in some embodiments, the tumor neoantigenic peptide is at least 8 amino acids in length, and/or up to about 25 amino acids in length, antibodies, TCRs or CARs that specifically bind the neoantigenic peptide may bind a peptide sequence of at least 4, at least 5, at least 6, or at least 7 amino acids.

[0009] According to the present disclosure, “neoantigen peptide characteristics” include neoantigenic peptide derived from fusion transcripts (splicing variants) wherein:
[0010] the TE sequence can be located in 5′ end of the fusion transcript sequence and the exonic sequence can be located in 3′ end of the fusion transcript sequence, and the part of the ORF of said fusion transcript sequence, which encodes the neoantigenic peptide, can overlap the junction;
[0011] the TE sequence can be located in 5′ end of the fusion transcript sequence and the exonic sequence can be located in 3′ end of the fusion transcript sequence, and the part of ORF which encodes said tumor neoantigenic peptide, can be downstream of the junction such that the open reading frame is non-canonical;
[0012] the TE sequence can be located in 3′ end of the fusion transcript sequence and the exonic sequence can be located in 5′ end of the fusion transcript sequence and the part of the ORF of said fusion transcript sequence, which encodes the tumor neoantigenic peptide, can overlap the junction; or
[0013] the TE sequence is located in 3′ end of the fusion transcript sequence and the exonic sequence is located in 5′ end of the chimeric transcript sequence, the part of the ORF which encodes a tumor neoantigenic peptide, is downstream of the junction between the exonic sequence and the TE sequence, optionally wherein the peptide sequence which is thus encoded by the pure TE sequence is non-canonical.

[0014] The TE sequences can be selected from the TE class I: Endogenous Retro Virus (ERVs), Long interspersed nuclear elements (LINEs) and short interspersed nuclear element (SINEs) and MaLR sequences or the DNA transposons of class II.

[0015] The present disclosure notably provides an isolated tumor neoantigenic peptide comprising at least 8 amino acids of SEQ ID NO:1-29744 and 29753-31346 and optionally comprising a transposable element (TE) sequence and an exonic sequence, wherein said ORF overlaps the junction between the TE and the exonic sequence, is pure TE and/or is non-canonical.

[0016] Most particularly, the present disclosure provides an isolated tumor neoantigenic peptide, according to claim 1 wherein the peptide is from any one of SEQ NO: 1-29744 and 29753-31346, including a fragment thereof, and comprises at least a portion of a TE-derived amino acid sequence or is from any one of SEQ ID NO:1-29744 and 29753-31346. In some embodiments, the neoantigenic peptide overlaps the breakpoint between, the TE-derived amino acid sequence and the exon-derived amino acid sequence. In other embodiments, the neoantigenic peptide is derived from a pure TE sequence. In yet other embodiments, the neoantigenic peptide is encoded by a non-canonical ORF downstream of the junction between the TE-derived amino acid sequence and the exon-derived amino acid sequence.

[0017] In one embodiment, the tumor neoantigenic peptide is 8 or 9 amino acids long, notably 8 to 11, and binds to at least one MHC class I molecule.

[0018] In another embodiment, the tumor neoantigenic peptide is from 13 to 25 amino acids long, and binds to at least one MHC class II molecule of said subject.

[0019] Said neoantigenic peptides are typically expressed at higher levels, or higher frequency, in tumor samples compared to normal, optionally said neoantigenic peptides are not expressed in normal tissue samples (i.e. normal healthy cells), or not detectably expressed in normal healthy samples.

[0020] In some embodiments said neoantigenic peptides are expressed in at least 1%, 5%, 10%, 15%, 20% 25% or even at least 30% of subjects from a population of subjects suffering from cancer and notably from a population of subjects suffering from cancer, notably from lung cancer, more particularly Non-small cell lung cancer (NSCLC), even more particularly from lung adenocarcinoma (LUAD).

[0021] Typically, the neoantigenic peptides bind MHC class I or class II with a binding affinity Kd of less than about 10⁻⁴, 10⁻⁵, 10⁻⁶, 10⁻⁷, 10⁻⁸ or 10⁻⁹ M (lower numbers indicating higher binding affinity).

[0022] Typically, the neoantigenic peptides bind MHC class I with a binding affinity of less than 2% percentile rank score predicted by NetMHCpan 4.0

[0023] Typically, the neoantigenic peptides bind MHC class II with a binding affinity of less than 10% percentile rank score predicted by NetMHCpanII 3.2.

### the Present Disclosure Also Encompasses:

[0024] a population of autologous dendritic cells or antigen presenting cells that have been pulsed with one or more of the peptides as herein defined, or transfected with a polynucleotide encoding one or more of the peptides as herein described;
[0025] a vaccine or immunogenic composition, notably a sterile vaccine or immunogenic composition, capable of raising a specific T-cell response comprising
   [0026] a. one or more neoantigenic peptides as herein defined,
   [0027] b. one or more polynucleotides encoding a neoantigenic peptide as herein defined, optionally wherein the one or more polynucleotides are linked to a heterologous regulatory control nucleotide sequence; or
   [0028] c. a population of autologous dendritic cells or antigen presenting cells (notably artificial APC) that have been pulsed or loaded with one or more of the peptides as herein defined,
[0029] optionally in combination with a physiologically or pharmacologically acceptable buffer, carrier, excipient, immunostimulant and/or adjuvant.
[0030] an antibody, or an antigen-binding fragment thereof, a T cell receptor (TCR), or a chimeric antigen receptor (CAR) that has been selected for its binding affinity to a neoantigenic peptide from any one of SEQ ID NO:1-29744 and 29753-31346, including a portion thereof, e.g. of a length at least 4, 5, 6 7, or 8 amino acids, or a composition comprising such antibody, antigen-binding fragment thereof, TCR or CAR.
[0031] a polynucleotide encoding a neoantigenic peptide, an antibody, a CAR or a TCR as herein defined, typically operatively linked to a heterologous regulatory control nucleotide sequence, and a vector encoding such polynucleotide, or a vaccine or immunogenic composition comprising such polynucleotide or vector;
[0032] an immune cell, or a population or immune cells that targets one or more neoantigenic peptides from any one of SEQ ID NO:1-29744 and 29753-31346, including a portion thereof, e.g. of a length at least 4, 5, 6 7, or 8 amino acids, wherein the population of immune cells preferably targets a plurality of different tumor neoantigenic peptides as herein disclosed, or a composition comprising such immune cells or population of immune cells optionally in combination with a physiologically or pharmacologically acceptable buffer, carrier, excipient, immunostimulant and/or adjuvant.

[0033] Typically, the antibody or antigen-binding fragment thereof, TCR or CAR binds a neoantigenic peptide, optionally in association with an MHC molecule, or optionally expressed on the surface of a cell, with a Kd affinity of about 10⁻⁶ M or less.

[0034] In some embodiments, the T cell receptor can be made soluble and fused to an antibody fragment directed to a T cell antigen, optionally wherein the targeted antigen is CD3 or CD16.

[0035] In some embodiments, the antibody can be a multispecific antibody that further targets at least an immune cell antigen, optionally wherein the immune cell is a T cell, a NK cell or a dendritic cell, optionally wherein the targeted antigen is CD3, CD16, CD30 or a TCR. In any of the embodiments relating to an antibody, the antibody can be chimeric, humanized, or human, and may be IgG, e.g. IgG1, IgG2, IgG3, IgG4.

[0036] The immune cell can be typically a T cell or a NK cell, a CD4+ and/or CD8+ cell, a TILs/tumor derived CD8 T cells, a central memory CD8+ T cells, a Treg, a MAIT, or a γδ T cell. The cell can also be autologous or allogenic. Methods of preparing such immune cells are also contemplated, for example, by delivering a nucleic acid or vector encoding any of the antibody, TCR, or CAR described herein to the cell, in vivo or ex vivo.

[0037] The immune cell, e.g. T cell, can comprises comprise a recombinant antigen receptor selected from T cell receptor and chimeric antigen receptor as herein described, wherein the antigen is a tumor neoantigenic receptor as herein disclosed.

[0038] The present disclosure also encompasses a method of producing an antibody, TCR or CAR that specifically binds a neoantigenic peptide as herein described and comprising the step of selecting an antibody, TCR or CAR that binds to a tumor neoantigen peptide of the present disclosure, optionally in association with an MHC or HLA molecule, or optionally expressed on the surface of a cell, optionally with a Kd binding affinity of about 10⁻⁶ M or less. Antibodies, TCRs and CARs selected by said method are also part of the present application, and thus any references to antibodies, TCRs or CARs herein also means an antibody, TCR or CAR that has been selected by said method.

[0039] A polynucleotide encoding a neoantigenic peptide as herein defined, or encoding an antibody, a CAR or a TCR as herein defined, optionally linked to a heterologous regulatory control sequence are also part of the present application.

[0040] As per the present disclosure, the neoantigenic peptide, the population of dendritic cells, the vaccine or immunogenic composition, the polynucleotide or the vector encoding the peptide can be used in cancer vaccination therapy of a subject; or for treating cancer in a subject suffering from cancer or at risk of cancer; or can be used for inhibiting proliferation of cancer cells. Typically, the peptide(s) bind at least one MHC molecule of said subject. Treatment as used herein includes both prophylactic and therapeutic treatment.

[0041] As per the present disclosure, the antibody or the antigen-binding fragment thereof, the multispecific antibody, the TCR, the CAR, the polynucleotide, or the vector encoding such antibody, TCR or CAR, or the immune cells, as herein defined can be used in the treatment of cancer in a subject in need thereof, the subject suffering from cancer or at risk of cancer, or can be used for inhibiting proliferation of cancer cells. Still as per the present disclosure, the population of immune cells as herein defined can be used in cell therapy of a subject suffering from cancer or at risk of cancer, or can be used for inhibiting proliferation of cancer cells.

[0042] Pharmaceutical compositions comprising any of the foregoing, optionally with a sterile pharmaceutically acceptable excipient(s), carrier, and/or buffer are also contemplated as well as methods of using them.

[0043] In any of the embodiments described herein, the Cancer Therapeutic Products as above defined can be administered in combination with at least one further therapeutic agent. Such further therapeutic agent can typically be a chemotherapeutic agent, or an immunotherapeutic agent.

[0044] For example, according to the present disclosure, any of the Cancer Therapeutic Products can be administered in combination with an anti-immunosuppressive/immunostimulatory agent. For example, the subject is further administered with one or more checkpoint inhibitors typically selected from PD-1 inhibitors, PD-L1 inhibitors, Lag-3 inhibitors, Tim-3 inhibitors, TIGIT inhibitors, BTLA inhibitors, V-domain Ig suppressor of T-cell activation (VISTA) inhibitors and CTLA-4 inhibitors, or IDO inhibitors.

[0045] Various embodiments of the methods, neoantigenic peptides and Cancer Therapeutic Products are described in detailed below. Except for alternatives clearly mentioned, combinations of such embodiments are encompassed by the present application.

### DETAILED DISCLOSURE

[0046] Transposable elements (TEs) expression in normal tissues is silenced by DNA methylation established early during embryonic development. An additional layer of inhibition is provided by histone modifications. TEs can be re-activated in tumor cells. The inventors have discovered and provided clear evidence that non-canonical alternative splicing events between exons and TEs can be a source of tumor antigens, in particular of tumor-specific antigens.

[0047] The Inventors have developed a method for identifying a tumor antigen, and notably a tumor specific antigen. In particular, the inventors have identified a method for identifying tumor antigens derived from junctions between TEs and exons (JETs). In some embodiments, the present invention therefore relates to a method for identifying, or selecting, a tumor neoantigenic peptide encoded by a fusion transcript (i.e.: JET) sequence comprising a part of a TE sequence and a part of an exonic sequence.

[0048] The neoantigenic tumor specific peptides, in particular neoantigenic peptides from any one of SEQ ID NO:1-29744 and 29753-31346, identified by the method according to the present disclosure are highly immunogenic. Indeed, because they are derived from fusion transcripts (also named herein JETs), composed of a transposable element, TE, and an exonic sequence, which are absent from normal cells, the peptides of the present disclosure are expected to exhibit very low immunological tolerance.

[0049] The present disclosure also allows selecting peptides having shared tumor neoepitopes among a population of patients. Such shared tumor peptides are of high therapeutic interest since they may be used in immunotherapy for a large population of patients.

### Definitions

[0050] According to the present disclosure, the term “disease” refers to any pathological state, including cancer diseases, in particular those forms of cancer diseases described herein.

[0051] The term “normal” refers to the healthy state or the conditions in a healthy subject or tissue, i.e., non-pathological conditions, wherein “healthy” preferably means non-cancerous.

[0052] Cancer (medical term: malignant neoplasm) is a class of diseases in which a group of cells display uncontrolled growth (division beyond the normal limits), invasion (intrusion on and destruction of adjacent tissues), and sometimes metastasis (spread to other locations in the body via lymph or blood). These three malignant properties of cancers differentiate them from benign tumors, which are self-limited, and do not invade or metastasize. Most cancers form a tumor but some, like leukemia, do not.

[0053] Malignant tumor is essentially synonymous with cancer. Malignancy, malignant neoplasm, and malignant tumor are essentially synonymous with cancer.

[0054] As used herein, the term “tumor” or “tumor disease” refers to an abnormal growth of cells (called neoplastic cells, tumorigenesis cells or tumor cells) preferably forming a swelling or lesion. By “tumor cell” is meant an abnormal cell that grows by a rapid, uncontrolled cellular proliferation and continues to grow after the stimuli that initiated the new growth cease. Tumors show partial or complete lack of structural organization and functional coordination with the normal tissue, and usually form a distinct mass of tissue, which may be either benign, pre-malignant or malignant.

[0055] A benign tumor is a tumor that lacks all three of the malignant properties of a cancer. Thus, by definition, a benign tumor does not grow in an unlimited, aggressive manner, does not invade surrounding tissues, and does not spread to non-adjacent tissues (metastasize).

[0056] Neoplasm is an abnormal mass of tissue as a result of neoplasia. Neoplasia (new growth in Greek) is the abnormal proliferation of cells. The growth of the cells exceeds, and is uncoordinated with that of the normal tissues around it. The growth persists in the same excessive manner even after cessation of the stimuli. It usually causes a lump or tumor. Neoplasms may be benign, pre-malignant or malignant.

[0057] “Growth of a tumor” or “tumor growth” according to the present disclosure relates to the tendency of a tumor to increase its size and/or to the tendency of tumor cells to proliferate.

[0058] For purposes of the present disclosure, the terms “cancer” and “cancer disease” are used interchangeably with the terms “tumor” and “tumor disease”.

[0059] Cancers are classified by the type of cell that resembles the tumor and, therefore, the tissue presumed to be the origin of the tumor. These are the histology and the location, respectively.

[0060] According to the present application, cancer may affect any one of the following tissues or organs: breast; liver; kidney; heart, mediastinum, pleura; floor of mouth; lip; salivary glands; tongue; gums; oral cavity; palate; tonsil; larynx; trachea; bronchus, lung; pharynx, hypopharynx, oropharynx, nasopharynx; esophagus; digestive organs such as stomach, intrahepatic bile ducts, biliary tract, pancreas, small intestine, colon; rectum; urinary organs such as bladder, gallbladder, ureter; rectosigmoid junction; anus, anal canal; skin; bone; joints, articular cartilage of limbs; eye and adnexa; brain; peripheral nerves, autonomic nervous system; spinal cord, cranial nerves, meninges; and various parts of the central nervous system; connective, subcutaneous and other soft tissues; retroperitoneum, peritoneum; adrenal gland; thyroid gland; endocrine glands and related structures; female genital organs such as ovary, uterus, cervix uteri; corpus uteri, vagina, vulva; male genital organs such as penis, testis and prostate gland; hematopoietic and reticuloendothelial systems; blood; lymph nodes; thymus.

[0061] The term “cancer” according to the disclosure therefore comprises leukemias, seminomas, melanomas, teratomas, lymphomas, neuroblastomas, gliomas, rectal cancer, endometrial cancer, kidney cancer, adrenal cancer, thyroid cancer, blood cancer, skin cancer, cancer of the brain, cervical cancer, intestinal cancer, liver cancer, colon cancer, stomach cancer, intestine cancer, head and neck cancer, gastrointestinal cancer, lymph node cancer, esophagus cancer, colorectal cancer, pancreas cancer, ear, nose and throat (ENT) cancer, breast cancer, prostate cancer, cancer of the uterus, ovarian cancer and lung cancer and the metastases thereof. Examples thereof are lung carcinomas, mamma carcinomas, prostate carcinomas, colon carcinomas, renal cell carcinomas, cervical carcinomas, or metastases of the cancer types or tumors described above. The term cancer according to the present disclosure also comprises cancer metastases and relapse of cancer.

[0062] The main types of lung cancer are small cell lung carcinoma (SCLC) and non-small cell lung carcinoma (NSCLC). There are three main sub-types of the non-small cell lung carcinomas: squamous cell lung carcinoma, lung adenocarcinoma (LUAD), and large cell lung carcinoma. Adenocarcinomas account for approximately 10% of lung cancers. This cancer usually is seen peripherally in the lungs, as opposed to small cell lung cancer and squamous cell lung cancer, which both tend to be more centrally located.

[0063] By “metastasis” is meant the spread of cancer cells from its original site to another part of the body. The formation of metastasis is a very complex process and depends on detachment of malignant cells from the primary tumor, invasion of the extracellular matrix, penetration of the endothelial basement membranes to enter the body cavity and vessels, and then, after being transported by the blood, infiltration of target organs. Finally, the growth of a new tumor, i.e. a secondary tumor or metastatic tumor, at the target site depends on angiogenesis. Tumor metastasis often occurs even after the removal of the primary tumor because tumor cells or components may remain and develop metastatic potential. In one embodiment, the term “metastasis” according to the present disclosure relates to “distant metastasis” which relates to a metastasis which is remote from the primary tumor and the regional lymph node system.

[0064] The cells of a secondary or metastatic tumor are like those in the original tumor. This means, for example, that, if ovarian cancer metastasizes to the liver, the secondary tumor is made up of abnormal ovarian cells, not of abnormal liver cells. The tumor in the liver is then called metastatic ovarian cancer, not liver cancer.

[0065] A relapse or recurrence occurs when a person is affected again by a condition that affected them in the past. For example, if a patient has suffered from a tumor disease, has received a successful treatment of said disease and again develops said disease said newly developed disease may be considered as relapse or recurrence. However, according to the present disclosure, a relapse or recurrence of a tumor disease may but does not necessarily occur at the site of the original tumor disease. Thus, for example, if a patient has suffered from ovarian tumor and has received a successful treatment a relapse or recurrence may be the occurrence of an ovarian tumor or the occurrence of a tumor at a site different to ovary. A relapse or recurrence of a tumor also includes situations wherein a tumor occurs at a site different to the site of the original tumor as well as at the site of the original tumor. Preferably, the original tumor for which the patient has received a treatment is a primary tumor and the tumor at a site different to the site of the original tumor is a secondary or metastatic tumor.

[0066] By “treat” is meant to administer a compound or composition as described herein to a subject in order to prevent or eliminate a disease, including reducing the size of a tumor or the number of tumors in a subject; arrest or slow a disease in a subject; inhibit or slow the development of a new disease in a subject; decrease the frequency or severity of symptoms and/or recurrences in a subject who currently has or who previously has had a disease; and/or prolong, i.e. increase the lifespan of the subject. In particular, the term “treatment of a disease” includes curing, shortening the duration, ameliorating, preventing, slowing down or inhibiting progression or worsening, or preventing or delaying the onset of a disease or the symptoms thereof.

[0067] By “being at risk” is meant a subject, i.e. a patient, that is identified as having a higher than normal chance of developing a disease, in particular cancer, compared to the general population. In addition, a subject who has had, or who currently has, a disease, in particular cancer, is a subject who has an increased risk for developing a disease, as such a subject may continue to develop a disease. Subjects who currently have, or who have had, a cancer also have an increased risk for cancer metastases.

[0068] The therapeutically active agents, vaccines and compositions described herein may be administered via any conventional route, including by injection or infusion.

[0069] The agents described herein are administered in effective amounts. An “effective amount” refers to the amount which achieves a desired reaction or a desired effect alone or together with further doses or together with further therapeutic agents. In the case of treatment of a particular disease or of a particular condition, the desired reaction preferably relates to inhibition of the course of the disease. This comprises slowing down the progress of the disease and, in particular, interrupting or reversing the progress of the disease. The desired reaction in a treatment of a disease or of a condition may also be delay of the onset or a prevention of the onset of said disease or said condition.

[0070] An effective amount of an agent described herein will depend on the condition to be treated, the severity of the disease, the individual parameters of the patient, including age, physiological condition, size and weight, the duration of treatment, the type of an accompanying therapy (if present), the specific route of administration and similar factors. Accordingly, the doses administered of the agents described herein may depend on various of such parameters. In the case that a reaction in a patient is insufficient with an initial dose, higher doses (or effectively higher doses achieved by a different, more localized route of administration) may be used.

[0071] The pharmaceutical compositions as herein described are preferably sterile and contain an effective amount of the therapeutically active substance to generate the desired reaction or the desired effect.

[0072] The pharmaceutical compositions as herein described are generally administered in pharmaceutically compatible amounts and in pharmaceutically compatible preparation. The term “pharmaceutically compatible” refers to a nontoxic material which does not interact with the action of the active component of the pharmaceutical composition. Preparations of this kind may usually contain salts, buffer substances, preservatives, carriers, supplementing immunity-enhancing substances such as adjuvants, e.g. CpG oligonucleotides, cytokines, chemokines, saponin, GM-CSF and/or RNA and, where appropriate, other therapeutically active compounds. When used in medicine, the salts should be pharmaceutically compatible.

[0073] As used herein, the term “nucleic acid molecules” include any nucleic acid molecule that encodes a polypeptide of interest or a fragment thereof. Such nucleic acid molecules need not be 100% homologous or identical with an endogenous nucleic acid sequence but may exhibit substantial identity. Polynucleotides having “substantial identity” or “substantial homology” to an endogenous sequence are typically capable of hybridizing with at least one strand of a double-stranded nucleic acid molecule. By “hybridize” is meant a pair to form a double-stranded molecule between complementary polynucleotide sequences (e.g., a gene described herein), or portions thereof, under various conditions of stringency. (See, e.g., Wahl, G. M. and S. L. Berger (1987) Methods Enzymol. 152:399; Kimmel, A. R. (1987) Methods Enzymol. 152:507). For example, stringent salt concentration will ordinarily be less than about 750 mM NaCl and 75 mM trisodium citrate, e.g., less than about 500 mM NaCl and 50 mM trisodium citrate, or less than about 250 mM NaCl and 25 mM trisodium citrate. Low stringency hybridization can be obtained in the absence of organic solvent, e.g., formamide, while high stringency hybridization can be obtained in the presence of at least about 35% formamide, e.g., at least about 50% formamide. Stringent temperature conditions will ordinarily include temperatures of at least about 30° C., at least about 37° C., or at least about 42° C. Varying additional parameters, such as hybridization time, the concentration of detergent, e.g., sodium dodecyl sulfate (SDS), and the inclusion or exclusion of carrier DNA, are well known to those skilled in the art. Various levels of stringency are accomplished by combining these various conditions as needed. In certain embodiments, hybridization will occur at 30° C. in 750 mM NaCl, 75 mM trisodium citrate, and 1% SDS. In certain embodiments, hybridization will occur at 37° C. in 500 mM NaCl, 50 mM trisodium citrate, 1% SDS, 35% formamide, and 100 μg/ml denatured salmon sperm DNA (ssDNA). In certain embodiments, hybridization will occur at 42° C. in 250 mM NaCl, 25 mM trisodium citrate, 1% SDS, 50% formamide, and 200 μg/ml ssDNA. ETseful variations on these conditions will be readily apparent to those skilled in the art. For most applications, washing steps that follow hybridization will also vary in stringency. Wash stringency conditions can be defined by salt concentration and by temperature. As above, wash stringency can be increased by decreasing salt concentration or by increasing temperature. For example, stringent salt concentration for the wash steps can be less than about 30 mM NaCl and 3 mM trisodium citrate, e.g., less than about 15 mM NaCl and 1.5 mM trisodium citrate. Stringent temperature conditions for the wash steps will ordinarily include a temperature of at least about 25° C., of at least about 42° C., or of at least about 68° C. In certain embodiments, wash steps will occur at 25° C. in 30 mM NaCl, 3 mM trisodium citrate, and 0.1% SDS. In certain embodiments, wash steps will occur at 42° C. in 15 mM NaCl, 1.5 mM trisodium citrate, and 0.1% SDS. In certain embodiments, wash steps will occur at 68° C. in 15 mM NaCl, 1.5 mM trisodium citrate, and 0.1% SDS. Additional variations on these conditions will be readily apparent to those skilled in the art. Hybridization techniques are well known to those skilled in the art and are described, for example, in Benton and Davis (Science 196:180, 1977); Grunstein and Rogness (Proc. Natl. Acad. Sci., USA 72:3961, 1975); Ausubel et al. (Current Protocols in Molecular Biology, Wiley Interscience, New York, 2001); Berger and Kimmel (Guide to Molecular Cloning Techniques, 1987, Academic Press, New York); and Sambrook et al., Molecular Cloning: A Laboratory Manual, Cold Spring Harbor Laboratory Press, New York.

[0074] By “substantially identical” or “substantially homologous” is meant a polypeptide or nucleic acid molecule exhibiting at least about 50% homologous or identical to a reference amino acid sequence (for example, any one of the amino acid sequences described herein) or nucleic acid sequence (for example, any one of the nucleic acid sequences described herein). In certain embodiments, such a sequence is at least about 60%, at least about 65%, at least about 70%, at least about 75%, at least about 80%, at least about 85%, at least about 90%, at least about 95%, at least about 99%, or at least about 100% homologous or identical to the sequence of the amino acid or nucleic acid used for comparison.

[0075] Sequence identity can be measured by using sequence analysis software (for example, Sequence Analysis Software Package of the Genetics Computer Group, University of Wisconsin Biotechnology Center, 1710 University Avenue, Madison, Wis. 53705, BLAST, BESTFIT, GAP, or PILEUP/PRETTYBOX programs). Such software matches identical or similar sequences by assigning degrees of homology to various substitutions, deletions, and/or other modifications. Conservative substitutions typically include substitutions within the following groups: glycine, alanine; valine, isoleucine, leucine; aspartic acid, glutamic acid, asparagine, glutamine; serine, threonine; lysine, arginine; and phenylalanine, tyrosine. In an exemplary approach to determining the degree of identity, a BLAST program may be used, with a probability score between e−3 and e−100 indicating a closely related sequence.

[0076] By “analog” is meant a structurally related polypeptide or nucleic acid molecule having the function of a reference polypeptide or nucleic acid molecule.

[0077] Unless specifically stated or obvious from context, as used herein, the term “about” is to be understood as within a range of normal tolerance in the art, for example within 2 standard deviations of the mean. About can be understood as within 50%, 45%, 40%, 35%, 30%, 25%, 20%, 15%, 10%, 9%, 8%, 7%, 6%, 5%, 4%, 3%, 2%, 1%, 0.5%, 0.1%, 0.05%, or 0.01% of the stated value. Unless otherwise clear from context, all numerical values provided herein are modified by the term about.

[0078] A “transposable element” as used herein is a repeated DNA sequence DNA sequences that is able to move from one location to another in the genome either through an RNA copy generated by a reverse transcriptase (Class I TEs, retrotransposons), or by excising themselves from their original location (Class II TEs, or DNA transposons). It thus includes both class I (retrotransposons, including those containing LTRs, LINEs and SINEs) and class II (DNA transposons) endogenously part of the genome (i.e.: not from infection). This includes both autonomous and non-autonomous elements from both classes. According to the present disclosure the TE sequences can be for example selected from TE of class I, such as retrotransposons including Endogenous RetroVirus (ERVs), Long interspersed nuclear elements (LINEs) and short interspersed nuclear element (SINEs) and mammalian long terminal repeat transposon (MaLR), and TE of class II, such as DNA transposons endogenously part of the genome.

[0079] Retrotransposons are by far more abundant and their characteristics are similar to retroviruses, such as HIV. Retrotransposons function via reverse transcription of an RNA intermediate replicative mechanism. They are commonly grouped into three main orders: retrotransposons with long terminal repeats (LTRs) flanking the retroelement main body, which encode reverse transcriptase, similar to retroviruses; retroposons with long interspersed nuclear elements (LINES, LINE-1s, or L1s), which encode reverse transcriptase but lack LTRs, and are transcribed by RNA polymerase II; and retrotransposons with short interspersed nuclear elements (SINEs) that do not encode reverse transcriptase and are transcribed by RNA polymerase III. DNA transposons have a transposition mechanism that do not involve an RNA intermediate. The transpositions are catalyzed by several transposase enzymes. LTRs include endogenous retroviruses (ERVs), while non-LTR TEs subdivide into long-interspersed (LINEs) and short interspersed elements (SINEs), nonautonomous transposons mobilized by the LINE integration machinery. These lineages are composed of phylogenetically related families, further branching out into multiple subfamilies, each originating from one precursor copy. With time, the accumulation of mutations introduced divergence in the consensus sequence within members of each subfamily. For review on TE retrotransposon, see Richardson, Sandra R et al. “The Influence of LINE-1 and SINE Retrotransposons on Mammalian Genomes.” Microbiology spectrum vol. 3,2 (2015): MDNA3-0061-2014.

[0080] A typical L1 element is approximately 6,000 base pairs (bp) long and consists of two non-overlapping open reading frames (ORF) which are flanked by untranslated regions (UTR) and target site duplications. LINE-1 retrotransposons have been amplifying in mammalian genomes for greater than 160 million years. In humans, the vast majority of LINE-1 sequences have amplified since the divergence of the ancestral mouse and human lineages approximately 65-75 million years ago. Sequence comparisons between individual genomic LINE-1 sequences and a consensus sequence derived from modern, active LINE-1s can be used to estimate the age of genomic LINE-1s (Khan H, Smit A, Boissinot S; Genome Res. 2006 January; 16 (1): 78-87). L1 subfamilies typically categorize into old (LIM, AluJ), intermediate (L1P, L1PB, AluS), young (L1HS, L1PA, AluY) and related (HAL, FAM) subfamilies. In humans, the only autonomously active family is the long-interspersed element-1 (LINE-1 or L1), however a few L1 copies are still retrotransposition competent, all of them belonging to the youngest human-specific L1HS subfamily. SVA elements comprise an evolutionarily young, non-autonomous retrotransposon family that arose in primate lineages approximately 25 million years ago (Hancks D C, Kazazian H H Jr, Semin Cancer Biol. 2010 August; 20(4):234-45). A typical SVA element is approximately 2,000 bp and has a composite structure that consists of: 1) a hexameric CCCTCT repeat; 2) an inverted Alu-like element repeat; 3) a set of GC-rich variable nucleotide tandem repeats (VNTRs); 4) a SINE-R sequence that shares homology with HERVK-10, an inactive LTR retrotransposon; and 5) a canonical cleavage polyadenylation specificity factor (CPSF) binding site that is followed by a poly (A) tract. The youngest SVA subfamilies include SVA-D, SVA-E, SVA-F, and SVA-F1 subfamilies.

[0081] A “messenger RNA (mRNA)” is a single-stranded RNA molecule that corresponds to the genetic sequence of a gene and is read by the ribosome in the process of producing a protein. mRNA is created during the process of transcription, where the enzyme RNA polymerase converts genes into primary transcript mRNA (also known as pre-mRNA). This pre-mRNA usually still contains introns, regions that will not go on to code for the final amino acid sequence. These are removed in the process of RNA splicing, leaving only exons, regions that will encode the protein. This exon sequence constitutes mature mRNA. Mature mRNA is then read by the ribosome, and, utilizing amino acids carried by transfer RNA (tRNA), the ribosome creates the peptide sequence a process called translation.

[0082] A “transcript” as herein intended is a messenger RNA (or mRNA) or a part of a mRNA which is expressed by an organism, notably in a particular tissue or even in a particular tissue. Expression of a transcript varies depending on many factors. Expression of a transcript may be modified in a cancer cell as compared to a normal healthy cell.

[0083] A “transcriptome” as herein intended is the full set of messenger RNA, or mRNA, molecules expressed or transcribed by the gene of a cell. In some embodiments, the term “transcriptome” can also be used to describe the array of mRNA transcripts produced in a particular cell (or tissue type). In contrast with the genome, which is characterized by its stability, the transcriptome actively changes. In fact, an organism's transcriptome varies depending on many factors, including stage of development, environmental and physiological conditions. Typically, also, the transcriptome is modified in a cancer cell as compared to a corresponding normal healthy cell. Typically, the transcriptome as herein intended is the human transcriptome. The terms “transcriptomic pattern” and “transcriptome” are used herein as synonyms.

[0084] A reading frame is a way of dividing the sequence of nucleotides in a nucleic acid (DNA or RNA) molecule into a set of consecutive, non-overlapping triplets.

[0085] An open reading frame (ORF) is the part of a reading frame that has the ability to be translated into a peptide. An ORF is a continuous stretch of codons that contain a start codon (for example AUG) at a transcription starting site (TSS) and a stop codon (for example UAA, UAG or UGA). An ATG codon within the ORF (not necessarily the first) may indicate where translation starts. The transcription termination site is located after the ORF, beyond the translation stop codon. In eukaryotic genes with multiple exons, ORFs span intron/exon regions, which may be spliced together after transcription of the ORF to yield the final mRNA for protein translation.

[0086] A “canonical ORF” as herein intended is a protein coding sequence with specified reading frame within a mRNA sequence which is described or annotated in databases such as for example Ensembl genome/transcriptome/proteome database collection (typically HG19). Typically, a canonical ORF is the same as one of the exons in normal healthy cells.

[0087] A “non-canonical ORF” as herein intended is a protein coding sequence with specified reading frame within a mRNA sequence which is not described (i.e. unannotated) in genome databases such as for example in Ensembl genome/transcriptome/proteome database. Typically, a non-canonical ORF means thus that the reading frame is shifted compared to the usual reading frame of exons in normal healthy cells. In some embodiments however, a non-canonical can be described in genome databases (such as Ensembl database), but the mRNA sequence represents minor species in normal cells. By minor species it is typically intended less that 5%, notably less than 2%, or preferentially less than 1% species in normal cells.

[0088] An exon is any part of a gene that will encode a part of the final mature RNA produced by that gene after introns have been removed by RNA splicing. The term exon refers to both the DNA sequence within a gene and to the corresponding sequence in RNA transcripts. In RNA splicing, introns are removed, and exons are covalently joined to one another as part of generating the mature messenger RNA. An exonic sequence as per the present applicant comprises at least a portion of one or more exons. Typically, the exonic sequence comprises at least a portion of one or 2 exons.

[0089] The untranslated sequences in 3′ end and in 5′ end (3′UTR and 5′UTR) present in mature RNA after splicing are exonic sequences, but are non-coding sequences because these sequences are located upstream of the start codon for the translation (5′UTR) or downstream of the stop codon ending the translation (3′UTR).

[0090] In the present application, the terms “fusion transcript”, “chimeric transcripts” “TE-exon transcript”, or “Junction Exon-TE” (JET) are used indifferently as synonyms. A “fusion or a chimeric” “transcript or sequence”, as per the present disclosure is defined as a transcript that aligns in part with an exon sequence and in part with a transposable element (TE) sequence. A fusion, or chimeric, transcript is also shortly named herein JET (junction between exon and TE). Typically, a fusion transcript according to the present description has a normalized number of read greater than 2.10-6. The normalized number of reads is defined as the number of reads that cover the fusion divided by the library size of the sample.

[0091] The term “peptide or polypeptide,” is used interchangeably with “neoantigenic peptide or polypeptide” in the present specification to designate a series of residues, typically L-amino acids, connected one to the other, typically by peptide bonds between the α-amino and carboxyl groups of adjacent amino acids. The polypeptides or peptides can be a variety of lengths, either in their neutral (uncharged) forms or in forms which are salts, and either free of modifications such as glycosylation, side chain oxidation, or phosphorylation or containing these modifications, subject to the condition that the modification does not destroy the biological activity of the polypeptides as herein described.

[0092] As used herein pJETs are peptides or polypeptides derived from (i.e. encoded by) chimeric/fusion transcripts or JETs. pJETs are also named herein translated JETs.

[0093] A “reference genome, or “representative genome” is a digital nucleic acid sequence data base, assembled by scientists as a representative example of species set of genes. As they are often assembled from the sequencing of DNA from a number of donors, reference genomes do not accurately represent the set of genes of any single individual (animal or person). Instead a reference provides a haploid mosaic of different DNA sequences from each donor.

[0094] RNA-Seq (named as an abbreviation of RNA sequencing) is a sequencing technique which uses next-generation sequencing (NGS) to reveal the presence and quantity of RNA (typically messenger RNA, mRNA) in a biological sample and generates an enormous numbers of raw sequencing reads (typically at least in the tens of millions). Single-cell RNA sequencing (scRNA-Seq) provides the expression profiles of an individual cell. A read refers to an RNA sequence from one RNA fragment from a biological sample or a single cell. The RNA sample that was sequenced is called the RNA library. RNA sequencing data are thus typically called RNA reads.

[0095] In the present application, “MHC molecule” or “HLA molecule” refers to at least one MHC/HLA class I molecule or at least one MHC/HLA Class II molecule. MHC class I proteins form a functional receptor on most nucleated cells of the body. There are 3 major MHC class I genes in HLA: HLA-A, HLA-B, HLA-C and three minor genes HLA-E, HLA-F and HLA-G. 32-microglobulin binds with major and minor gene subunits to produce a heterodimer. MHC molecules of class I consist of a heavy chain and a light chain and can bind a peptide of about 8 to 11 amino acids, but usually 8 or 9 amino acids, if this peptide has suitable binding motifs, and presenting it to cytotoxic T-lymphocytes. The binding of the peptide is stabilized at its two ends by contacts between atoms in the main chain of the peptide and invariant sites in the peptide-binding groove of all MHC class I molecules. There are invariant sites at both ends of the groove which bind the amino and carboxy termini of the peptide. Variations in peptide length are accommodated by a kinking in the peptide backbone, often at proline or glycine residues that allow the required flexibility. The peptide bound by the MHC molecules of class I usually originates from an endogenous protein antigen. As an example, the heavy chain of the MHC molecules of class I is typically an HLA-A, HLA-B or HLA-C monomer, and the light chain is β-2-microglobulin, in humans. There are 3 major and 2 minor MHC class II proteins encoded by the HLA. The genes of the class II combine to form heterodimeric (αβ) protein receptors that are typically expressed on the surface of antigen-presenting cells. The peptide bound by the MHC molecules of class II usually originates from an extracellular or exogenous protein antigen. As an example, the α-chain and the β-chain are in particular HLA-DR, HLA-DQ and HLA-DP monomers, in humans. MHC class II molecules are capable of binding a peptide of about 8 to 20 amino acids, notably from 10 to 25 amino acids or from 13 to 25 amino acids if this peptide has suitable binding motifs, and of presenting it to T-helper cells. The peptide lies in an extended conformation along the MHC II peptide-binding groove which (unlike the MHC class I peptide-binding groove) is open at both ends. It is held in place mainly by main-chain atom contacts with conserved residues that line the peptide-binding groove.

[0096] The term “peptidome” refers to the complete set of peptides expressed by a particular genome, or present within a particular organism or cell type (such as a cancer cell). Proteomic analysis (proteomics) thus refers to the separation, identification, and quantification of the entire set of peptides or proteins expressed by a genome, a cell, or a tissue at a specific point in time.

[0097] Proteomics analysis are typically based on two major techniques, namely two-dimensional gel electrophoresis (2-DGE) (Harper S et al., In: Coligan J E, Dunn B M, Speicher D W, Wing-field PT, editors. Current Protocols in Protein Science. John Wiley & Sons; Hoboken, N.J.: 1998. pp. 10.4.1-10.4.36) and Mass Spectrometry (MS) (Aebersold & Mann, 2003), which are both powerful methods for the analysis of complex mixtures of proteins. HPLC is an alternative separation technique for proteomic studies, especially in separation and identification of low-molecular-weight proteins and peptides (Garbis et al., 2005). MS allows the determination of the molecular mass of proteins or peptides based on the mass to charge ratio (m/z) of ions in the gas phase. The terms “gel-based” or “gel-free” proteomics are used in relation to the applied separation techniques, 2-DGE or HPLC; proteomics approaches can also be “bottom-up” or “top-down,” which basically identify proteins from their protease (e.g., trypsin) digests or, as a whole, via a mass spectrometer, respectively.

[0098] Bottom-up proteomics is a common method to identify proteins from a biological sample (tissue(s) or cells) and characterize their amino acid sequences and post-translational modifications by proteolytic digestion of proteins prior to analysis by mass spectrometry. The crude protein extract is enzymatically digested, followed by one or more dimensions of separation of the peptides typically by liquid chromatography coupled to mass spectrometry, a technique known as shotgun proteomics. By comparing the masses of the proteolytic peptides or their tandem mass spectra with those predicted from a sequence database or annotated peptide spectral in a peptide spectral library, peptides can be identified, and multiple peptide identifications assembled into a protein identification.

[0099] In top-down proteomics, intact proteins are purified prior to digestion and/or fragmentation either within the mass spectrometer or by 2D electrophoresis. Top-down proteomics either uses an ion trapping mass spectrometer to store an isolated protein ion for mass measurement and tandem mass spectrometry (MS/MS) analysis or other protein purification methods such as two-dimensional gel electrophoresis in conjunction with MS/MS.

[0100] From the data generated by the MS, the protein is either sequenced de novo by manual mass analyses of the spectra or processed automatically via sequence search engines such as SEQUEST, Mascot, Phenyx, X! Tandem, and OMSSA. These algorithms are developed based on the correlation between experimental and theoretical MS/MS data; the latter being generated from in silico digestion of protein databases such as UniProt/Swiss-Prot (Deutsch, Lam, & Aebersold, 2008).

[0101] The term “immunopeptidome”, also commonly named “immunopeptidomic pattern”, “pMHC repertoire”, or “MHC-ligandome” or “HLA ligandome”, refers to the complete set of peptides within a particular cell type, which are bound to at least one MHC/HLA molecule at the cell surface. Correspondingly, “immunopeptidomics” has emerged as a term to describe analysis of the MHC/HLA-ligandome. The most common immunopeptidomics methods rely on mass spectrometry (MS). Immunopeptidomics samples are generally prepared by isolating MHCs, for example by using an allele-specific antibody, pan-specific antibody, or engineered affinity tag system, from lysed cells or tissues. Isolated complexes are acid eluted, and peptides are purified from the MHC molecules using molecular weight cut-off filtration (MWCO), solid phase extraction or other techniques, and are subsequently analyzed by MS (see for example for review L. E. Stopfer et al., Immuno-Oncology and Technology, Volume 11, 2021,100042).

[0102] As used herein, the term “antibody” means not only intact antibody molecules, but also fragments of antibody molecules that retain immunogen-binding ability. Such fragments are also well known in the art and are regularly employed both in vitro and in vivo. Accordingly, as used herein, the term “antibody” means not only intact immunoglobulin molecules but also the well-known active fragments F(ab′)2, and Fab.

[0103] F(ab′)₂, and Fab fragments that lack the Fc fragment of intact antibody, clear more rapidly from the circulation, and may have less non-specific tissue binding of an intact antibody (Wahl et ah, J. Nucl. Med. 24:316-325 (1983).

[0104] As used herein, antibodies include whole native antibodies, bispecific antibodies; chimeric antibodies; Fab, Fab′, single chain V region fragments (scFv), fusion polypeptides, and unconventional antibodies.

[0105] In certain embodiments, an antibody is a glycoprotein comprising at least two heavy (H) chains and two light (L) chains inter-connected by disulfide bonds. Each heavy chain is comprised of a heavy chain variable region (abbreviated herein as V_{H}) and a heavy chain constant (CH) region. The heavy chain constant region is comprised of three domains, CH1, CH2 and CH3. Each light chain is comprised of a light chain variable region (abbreviated herein as V_{L}) and a light chain constant C_{L} region. The light chain constant region is comprised of one domain, C_{L}. The V_{H} and V_{L} regions can be further sub-divided into regions of hypervariability, termed complementarity determining regions (CDR), interspersed with regions that are more conserved, termed framework regions (FR). Each V_{H} and V_{L} is composed of three CDRs and four FRs arranged from amino-terminus to carboxy-terminus in the following order: FR1, CDR1, FR2, CDR2, FR3, CDR3, FR4.

[0106] The variable regions of the heavy and light chains contain a binding domain that interacts with an antigen. The constant regions of the antibodies may mediate the binding of the immunoglobulin to host tissues or factors, including various cells of the immune system (e.g., effector cells) and the first component (Clq) of the classical complement system.

[0107] As used herein, “CDRs” are defined as the complementarity determining region amino acid sequences of an antibody which are the hypervariable regions of immunoglobulin heavy and light chains (See, e.g., Rabat et al., Sequences of Proteins of Immunological Interest, 4th U. S. Department of Health and Human Services, National Institutes of Health (1987). Generally, antibodies comprise three heavy chain and three light chain CDRs or CDR regions in the variable region. CDRs provide the majority of contact residues for the binding of the antibody to the antigen or epitope. In certain embodiments, the CDRs regions are delineated using the Rabat system (Rabat, E. A., et al. (1991) Sequences of Proteins of Immunological Interest, Fifth Edition, ET.S. Department of Health and Human Services, NIH Publication No. 91-3242).

[0108] As used herein, the term “single-chain variable fragment” or “scFv” is a fusion protein of the variable regions of the heavy (V_{H}) and light chains (V_{L}) of an immunoglobulin covalently linked to form a V_{H}:V_{L} heterodimer. The V_{H} and V_{L} are either joined directly or joined by a peptide-encoding linker (e.g., 10, 15, 20, 25 amino acids), which connects the N-terminus of the V_{H} with the C-terminus of the V_{L}, or the C-terminus of the V_{H} with the N-terminus of the V_{L}. The linker is usually rich in glycine for flexibility, as well as serine or threonine for solubility. Despite removal of the constant regions and the introduction of a linker, scFv proteins retain the specificity of the original immunoglobulin. Single chain Fv polypeptide antibodies can be expressed from a nucleic acid including V_{H}- and V_{L}-encoding sequences as described by Huston, et al. (Proc. Nat. Acad. Sci. USA, 85:5879-5883, 1988). See, also, U.S. Pat. Nos. 5,091,513, 5,132,405 and 4,956,778; and U.S. Patent Publication Nos. 20050196754 and 20050196754.

[0109] As used herein, the term “affinity” is meant a measure of binding strength. Affinity can depend on the closeness of stereochemical fit between antibody combining sites and antigen determinants, on the size of the area of contact between them, and/or on the distribution of charged and hydrophobic groups. As used herein, the term “affinity” also includes “avidity”, which refers to the strength of the antigen-antibody bond after formation of reversible complexes. Methods for calculating the affinity of an antibody for an antigen are known in the art, including, but not limited to, various antigen-binding experiments, e.g., functional assays (e.g., flow cytometry assay), surface plasmon resonance assays such as BIACORE assays, and kinetic exclusion assays such as KINEXA assays.

[0110] The term “chimeric antigen receptor” or “CAR” as used herein refers to a molecule comprising an extracellular antigen-binding domain that is fused to an intracellular signalling domain that is capable of activating or stimulating an immunoresponsive cell, and a transmembrane domain. In certain embodiments, the extracellular antigen-binding domain of a CAR comprises a scFv. The scFv can be derived from fusing the variable heavy and light regions of an antibody. Alternatively or additionally, the scFv may be derived from Fab's (instead of from an antibody, e.g., obtained from Fab libraries). In certain embodiments, the scFv is fused to the transmembrane domain and then to the intracellular signaling domain. In certain embodiments, the CAR has a high binding affinity or avidity for the antigen.

[0111] The term “antigen-binding domain” as used herein refers to a domain capable of specifically binding a particular antigenic determinant or set of antigenic determinants present on a cell.

[0112] The term “immune cell” as herein intended typically encompasses T cells, Natural Killer T cells, CD4+/CD8+ T cells, TILs/tumor derived CD8 T cells, central memory CD8+ T cells, Treg, MAIT, γδ T cells, human embryonic stem cells, and pluripotent stem cells from which lymphoid cells may be differentiated.

[0113] By “isolated cell” is meant a cell that is separated from the molecular and/or cellular components that naturally accompany the cell.

[0114] The terms “isolated,” “purified,” or “biologically pure” refer to material that is free to varying degrees from components which normally accompany it as found in its native state. “Isolate” denotes a degree of separation from original source or surroundings. “Purify” denotes a degree of separation that is higher than isolation. A “purified” or “biologically pure” protein is sufficiently free of other materials such that any impurities do not materially affect the biological properties of the protein or cause other adverse consequences. That is, a nucleic acid or peptide is purified if it is substantially free of cellular material, viral material, or culture medium when produced by recombinant DNA techniques, or chemical precursors or other chemicals when chemically synthesized. Purity and homogeneity are typically determined using analytical chemistry techniques, for example, polyacrylamide gel electrophoresis or high performance liquid chromatography. The term “purified” can denote that a nucleic acid or protein gives rise to essentially one band in an electrophoretic gel. For a protein that can be subjected to modifications, for example, phosphorylation or glycosylation, different modifications may give rise to different isolated proteins, which can be separately purified.

[0115] Unless specifically stated or obvious from context, as used herein, the term “about” is to be understood as within a range of normal tolerance in the art, for example within 2 standard deviations of the mean. About can be understood as within 20%, 15%, 10%, 9%, 8%, 7%, 6%, 5%, 4%, 3%, 2%, 1%, 0.5%, 0.1%, 0.05%, or 0.01% of the stated value. Unless otherwise clear from context, all numerical values provided herein are modified by the term about.

### Method for Selecting a Tumor Neoantigenic Peptide

[0116] The method for selecting a tumor neoantigenic peptide as per the present disclosure comprises
[0117] a step of identifying, among mRNA sequences from a cancer cell sample of a subject, a fusion transcript (JET) sequence comprising a transposable element (TE) sequence and an exonic sequence, and including an open reading frame (ORF), and
[0118] a step of selecting a tumor neoantigenic peptide of at least 8 amino acids, encoded by a part of said ORF of the fusion transcript sequence,
   wherein said ORF overlaps the junction between the TE and the exonic sequence, is pure TE and/or is non-canonical, and
   wherein said tumor neoantigenic peptide binds to at least one Major Histocompatibility Complex (MHC) molecule of said subject.

[0119] Typically, a peptide translated from a part of non-canonical ORF of an exonic sequence is recognized as non-self by the immune system.

[0120] In some embodiments, the exonic sequence is from an oncogene and/or a tumor suppressor gene or one of their mutated variants.

[0121] Conceptually, cancer is a result of consecutive somatic mutation accumulation. Many studies have shown that both the gain of function in oncogenes and the loss of function in tumor-suppressor genes are required for the development of cancer from a normal cell. For a diploid organism, gain-of-function mutations are often dominant or semi-dominant, whereas loss-of-function mutations are usually recessive. Two-hit hypothesis of oncogenesis proposes that the development of cancer is initiated by the loss of both alleles of a tumor-suppressor gene.

[0122] Oncogenes (also named cancer genes) are genes whose action positively promotes cell proliferation or growth. The normal nonmutant versions are known as proto-oncogenes. The mutant versions are excessively or inappropriately active leading to tumor growth. Oncogenes can be identified in the Cancer Gene Marker Database (CGMD) (Pradeepkiran, J., Sainath, S., Kramthi Kumar, K. et al. CGMD: Sci Rep 5, 12035 (2015) “An integrated database of cancer genes and markers”). Oncogenes (ONCs) can also be downloaded from Network of Cancer Genes database (NCG 5.0) (An O, Dall'Olio G M, Mourikis T P, Ciccarelli F D, Nucleic Acids Res. 2016 Jan. 4; 44(D1):D992-9; “NCG 5.0: updates of a manually curated repository of cancer genes and associated properties from cancer mutational screenings”). Non-limitatives examples of oncogenes include: L-MYC, LYL-1, LYT-10, LYT-10/Cal, MAS, MDM-2, MLL, MOS, MTG8/AML1, MYB, MYH11/CBFB, NEU, N-MYC, OST, PAX-5, PBX1/E2A, PIM-1, PRAD-1, RAF, RAR/PML, RAS-H, RAS-K, RAS-N, REL/NRG, RET, RHOM1, RHOM2, ROS, SKI, SIS, SET/CAN, SRC, TAL1, TAL2, TAN-1, TIAM1, TSC2, and TRK.

[0123] Tumor suppressor genes (also named anti-oncogenes) represent the opposite side of cell growth control, normally acting to inhibit cell proliferation and tumor development. Thus tumor suppressor genes are genes that normally suppress cell division or growth. Loss of TSG function promotes uncontrolled cell division and tumor growth. Rb, a tumor suppressor gene that was identified by the genetic analysis of retinoblastoma an encoding a transcriptional regulatory protein, served as the prototype for the identification of additional tumor suppressor genes that contribute to the development of many different human cancers. Tumor suppressor genes are notably described in “Cooper G M. The Cell: A Molecular Approach. 2nd edition. Sunderland (MA): Sinauer Associates; 2000. Tumor Suppressor Genes”. Tumor-suppressor genes (TSGs) can also be downloaded from Tumor Suppressor Gene database (TSGene 2.0) (see for reference Zhao M, Kim P, Mitra R, Zhao J, Zhao Z; Nucleic Acids Res. 2016 Jan. 4; 44 (D1): D1023-31; “TSGene 2.0: an updated literature-based knowledgebase for tumor suppressor genes”). In this context, non-limitative examples of tumor suppressor genes include: APC, BRCA1, BRCA2, DPC4, INK4, MADR2, NF1, NF2, p53, PTC, PTEN, Rb, RB1, VHL, WT1, BUB1, BUBR1, TGF-βRII, Axin, DPC4, p300, PPARγ, p16, DPC4, PTEN, and hSNF5.

[0124] Oncogenes, tumor suppressor genes or “double agent” genes (with both oncogenic and tumor-suppressor functions) can be systematically identified through database search and text mining. Indeed, information on oncogenes or tumor suppressor genes can typically be found in Ensembl database (but see also Shen L, Shi Q, Wang W. Double agents: genes with both oncogenic and tumor-suppressor functions. Oncogenesis. 2018; 7(3):25. Published 2018 Mar. 13). Double agent genes may be identified as genes overlapped between the two above mentioned databases (see also Shen et al., Oncogenesis 2018 above).

[0125] Without to be bound by any theory, the inventors believe that selection of fusion wherein the exonic sequence is from an oncogene and/or a tumor suppressor gene is of high relevance for the reason below:

[0126] TE insertion in oncogenes can alter their oncogenic activity. Insertion of TE sequences in oncogene active domains could therefore result in constitutive activity of the oncogenes, similar to driver mutations. These fusions giving chimeric oncogenes could thus represent a new family of oncogenic proteins. If this is the case, targeting the activity of these new “fusion oncogenes” with small molecule antagonists could represent a potential therapeutic approach for cancer where these chimeric oncogenes are expressed.

[0127] TE insertions in tumor suppressors could inactivate their suppressor functions, leading typically to a loss of function (for example through introduction of stop codons, changes in ORF or disruptive amino acid stretches), thereby contributing to the oncogenic process.

[0128] Fusions implicating cancer driver genes would be excellent targets for adoptive cell therapies, antibodies, ADCs, T cell engagers, etc. If they are involved in oncogenesis, fusions oncogenes are expected to be more specific for cancer cells, and thus to reduce the development of resistances (because of the oncogenic activity of the target).

[0129] In some embodiments, the TE sequence is located in 5′ end of the fusion transcript sequence (it is also said that the TE sequence is the donor sequence) and the exonic sequence is located in 3′ end of the fusion transcript sequence with respect to the junction (the exon sequence is thus called an acceptor sequence). The expression “is located in 5′ end of the fusion transcript sequence” means that the element is located upstream of the junction in the fusion transcript sequence. The expression “is located in 3′ end of the fusion transcript sequence” means that the element is located downstream of the junction in the fusion transcript sequence.

[0130] In a particular embodiment, the TE sequence is located in 5′ end of the fusion transcript (JET) sequence and the exonic sequence is located in 3′ end of the fusion transcript (JET) sequence, and the part of the ORF of said fusion transcript (JET) sequence, which encodes the neoantigenic peptide (pJET), overlaps the junction. In this case, the ORF can be canonical or non-canonical. It is understood that the ORF may comprise the junction but the neoantigenic peptide (pJET) may not derive from the junction. In some embodiments however, where the neoantigenic peptide has a sequence which is derived from the junction sequence, the obtained peptide is thus encoded by both TE sequence and exonic sequence.

[0131] The expression “the part of the ORF is overlapping or overlaps the junction between the TE sequence and the exonic sequence”, means that said junction is contained in the part of the ORF of the fusion transcript (JET) sequence, which encodes said neoantigenic peptide (pJET).

[0132] In embodiments wherein (i) the part of the ORF encoding the neoantigenic peptide is overlapping the junction between the TE sequence and the exonic sequence, and (ii) the TE sequence and the exonic sequence are respectively in 5′ end and 3′ end of the fusion transcript (JET) sequence, said part of the ORF typically encodes a neoantigenic peptide of at least 8 amino acids, including at least between 1 to 6 amino acids, notably 2 to 6 from the TE sequence and at least between 1 and 6, notably 2 to 6 amino acids from the exonic sequence.

[0133] In another embodiment wherein the TE sequence is located in 5′ end of the fusion transcript (JET) sequence and the exonic sequence is located in 3′ end of the fusion transcript (JET) sequence, the part of ORF which encodes said neoantigenic peptide, is downstream of the junction and the ORF is thus non-canonical.

[0134] The expression “the part of the ORF is downstream of the junction” means that the part of the ORF encoding the neoantigenic peptide (pJET) is not overlapping the junction, but it is contained in the 3′ end part of said fusion transcript sequence with respect to the junction. In this embodiment, as the 3′ end part with respect to the junction, is the exonic sequence, the part of the ORF encoding the neoantigenic peptide is thus contained in the exonic sequence. Thus, as the part of the ORF is only located in the exonic sequence, the obtained peptide is therefore encoded by the exonic sequence, in a non-canonical ORF. Thus, in the particular embodiment wherein the exonic sequence is located in 3′ end of the fusion transcript (JET) sequence with respect to the junction, and wherein the part of the ORF which encodes the neoantigenic peptide is downstream of the junction with a non-canonical reading frame, the part of the ORF of the fusion transcript (JET) sequence encodes a neoantigenic peptide including 0 amino acid from the TE sequence, and at least 8 amino acids from the exonic sequence.

[0135] In another embodiment, the TE sequence is located in 3′ end of the fusion transcript (JET) sequence and the exonic sequence is located in 5′ end of the fusion transcript sequence with respect to the junction.

[0136] In some embodiments, the TE sequence is located in 3′ end of the fusion transcript (JET) sequence and the exonic sequence is located in 5′ end of the fusion transcript sequence and the part of the ORF of said fusion transcript sequence, which encodes a neoantigenic peptide, is overlapping the junction between the TE sequence and the exonic sequence. In this case, the ORF can also be canonical or non-canonical. The obtained peptide (pJET) is encoded by both TE sequence and exonic sequence.

[0137] In the particular embodiment wherein the part of the ORF encoding the neoantigenic peptide (pJET), is overlapping the junction between the exonic sequence and the TE sequence, and wherein the exonic sequence and the TE sequence are respectively in 5′ end and 3′ end of the fusion transcript (JET) sequence, said part of the ORF encodes a neoantigenic peptide (pJET) of at least 8 amino acids, including at least between 1 to 6, notably 2 to 6 amino acids from the TE sequence and at least between 1 and 6, notably 2 to 6 amino acids from the exonic sequence.

[0138] In still another embodiment, the TE sequence is located in 3′ end of the fusion transcript (JET) sequence, the exonic sequence is located in 5′ end of the fusion transcript sequence, and the part of the ORF which encodes a neoantigenic peptide (pJET), is downstream of the junction between the exonic sequence and the TE sequence. Optionally, the peptide sequence (pJET) which is thus encoded by the pure TE sequence is non-canonical.

[0139] In this embodiment, as the 3′ end part with respect to the junction is the TE sequence, the part of the ORF encoding the neoantigenic peptide is therefore encoded by the TE sequence. Thus, the part of the ORF encodes a neoantigenic peptide including no amino acid from the exonic sequence and at least 8 amino acids from the TE sequence. In the particular embodiment wherein the TE sequence is located in 3′ end of the fusion transcript sequence with respect to the junction, and the part of the ORF which encodes the neoantigenic peptide is downstream the junction, the part of the ORF of the fusion transcript (JET) sequence encodes a neoantigenic peptide (pJET) including 0 amino acid from the exonic sequence, and at least 8 amino acids from the TE sequence.

[0140] A tumor neoantigenic peptide is a peptide that arises from somatic alterations (classically mutations in the DNA sequence), is recognized as different from self, and is presented by antigen-presenting cells (APC), such as dendritic cells (DC) and tumor cells themselves. Cross-presentation plays an important role as the APC is able to translocate exogenous antigens from the phagosome into the cytosol for proteolytic cleavage into the major histocompatibility complex I (MHC I) epitopes by the proteasome.

[0141] In the present disclosure the alteration corresponds to the transcription of fusion mRNA sequences that comprise a transposable element (TE) sequence and an exonic sequence (JET). This may arise from somatic (i.e.: specifically in the tumor clone) transposition. It may also arise not from de novo transposition but from tumor specific transcriptional de-repression such that a TE and nearby gene are co-transcribed.

[0142] A neoantigenic peptide (pJET) according to the present disclosure may be completely absent from normal healthy samples (i.e., not expressed in normal healthy samples) and thus be specific to tumor samples. Alternatively, it may be expressed at low levels in normal cells and/or disproportionately expressed on tumor samples as compared to normal (healthy) samples.

[0143] It can also be selectively expressed by the cell lineage from which the cancer evolved.

[0144] Cancer or tumor samples according to the present disclosure can be isolated from any solid tumor or non-solid tumor of any of the tissues or organs as defined previously, for example, breast cancer, lung cancer and/or melanoma. In some embodiments cancer samples are from Acute Myeloid Leukemia, Adrenocortical Carcinoma, Bladder Urothelial Carcinoma, Breast Ductal Carcinoma, Breast Lobular Carcinoma, Cervical Carcinoma, Cholangiocarcinoma, Colorectal Adenocarcinoma, Esophageal Carcinoma, Gastric Adenocarcinoma, Glioblastoma Multiforme, Head and Neck Squamous Cell Carcinoma, Hepatocellular Carcinoma, Kidney Chromophobe Carcinoma, Kidney Clear Cell Carcinoma, Kidney Papillary Cell Carcinoma, Lower Grade Glioma, Lung Adenocarcinoma, Lung Squamous Cell Carcinoma, Mesothelioma, Ovarian Serous Adenocarcinoma, Pancreatic Ductal Adenocarcinoma, Paraganglioma & Pheochromocytoma, Prostate Adenocarcinoma, Sarcoma, Skin Cutaneous Melanoma, Testicular Germ Cell Cancer, Thymoma, Thyroid Papillary Carcinoma, Uterine Carcinosarcoma, Uterine Corpus Endometrioid Carcinoma or Uveal Melanoma samples. In a particular embodiment, cancer samples are from lung cancer samples, notably from LUAD samples.

[0145] Typically, as per the present disclosure, the step of identifying the fusion transcript sequences is carried out by mapping mRNA sequences from cancer sample against a reference genome, and then distinguishing normal and abnormal (non-canonical) junctions.

[0146] According to the present disclosure, normal junctions correspond to junctions between donor and acceptor on the same strand and not too far apart (e.g.: typically not on different chromosomes).

[0147] According to the present disclosure, abnormal junctions correspond to junctions between donor and acceptor sequences on different chromosomes, or in cis (same chromosomes) but on different strands (no matter the order and the 5′-3′ sense).

[0148] mRNA sequences typically usable according to the present disclosure are RNA seq data (as illustrated in the results herein). RNA seq data are typically obtained from purified RNA obtained from a cell or a tissue sample, fragmented and reverse-transcribed into cDNA. The obtained cDNA are then amplified and sequenced (next-generation sequencing-NGS) on a high-throughput platform (such as for example the Illumina GA/HiSeq-see http://www.illumina.com-, SOLID or Roche 454). This process generates millions of short reads taken from one end of the cDNA fragments. A common variant on this process is to generate reads from both ends of each cDNA fragment, known as “paired-end” reads.

[0149] In some embodiments, the mRNA sequences can be mapped against a corresponding reference genome or transcriptome (such as the human reference genome Hg19 ENSEMBL (RNA sequences, GRCh37) with an adapted software, such as for example: Spliced Transcripts Alignment to a Reference (i.e.: STAR-see Dobin, Alexander et al. “STAR: ultrafast universal RNA-seq aligner.” Bioinformatics (Oxford, England) vol. 29,1 (2013): 15-21), TopHat2 (Kim, Daehwan et al. “TopHat2: accurate alignment of transcriptomes in the presence of insertions, deletions and gene fusions.” Genome biology vol. 14,4 R36. 25 Apr. 2013, doi: 10.1186/gb-2013-14-4-r36) or HISAT (Kim, Daehwan et al. “HISAT: a fast spliced aligner with low memory requirements.” Nature methods vol. 12,4 (2015): 357-60. doi: 10.1038/nmeth.3317). STAR is a standalone software that uses sequential maximum mappable seed search followed by seed clustering and stitching to align RNA-seq reads. It can typically detect canonical junctions, non-canonical splices, and fusion/chimeric transcripts. Typically, detection of the junctions can be performed as detailed in the results based on the definitions from ENSEMBL and RepeatMasker databases respectively, downloaded from the UCSC Genome Browser. Thus, in some embodiments, the normal and abnormal junctions are determined in silico using dedicated databases, such as for example Ensembl and Repeatmasker databases, and the fusion transcripts having junctions between a TE and an exonic sequence are extracted in silico.

[0150] More particularly, in some embodiments, RNAseq reads from a sample (or cell) of interest are aligned to a reference genome (such as typically the hg19 genome) using typically STAR two-pass mode27 to identify un-annotated junctions. As previously indicated JETs are identified as a junction between an exon (most particularly a coding DNA sequence—CDS-exon) and a TE (or repeated element, RE). As per the present disclosure TE (or RE) can be identified (i.e. filtered) according to the definition of commonly used databases in the field such as ENSEMBL (GRCh37) and RepeatMasker.

[0151] According to the present disclosure, the mRNA sequences can come from all types of cancer cell or tumor cell sample(s). The tumor may be a solid or a non-solid tumor. In particular, the mRNA sequences come from any tissues or organs affected by a cancer or tumor as previously defined, for example from breast cancer, lung cancer and/or melanoma. In a particular embodiment, mRNA sequences are from LUAD samples. Tumor samples can be for example obtained from the Cancer Genome Atlas (TCGA). In some embodiments, the mRNA sequences are obtained from cell lines such as for example tumor cell lines from the Cancer Cell Line Encyclopedia (CCLE).

[0152] In some embodiments, the number of splicing reads can be normalized by the number of unique mapped reads. Typically JETs with a level of expression over 2.10-7 are selected.

[0153] In some embodiments of the present disclosure, the fusion transcript sequences are shared in more than 1%; notably more than 5%, more than 10%, more than 15%, more than 20% or even more than 25% of cancer samples (typically obtained from various patients, for example from the cancer samples collected for a given cancer type in the TCGA) and/or cell lines. In some embodiments, a fusion transcript (JET) sequence as per the present disclosure is shared in cancer samples from more than 1%; notably more than 2%, more than 5%, more than 10%, more than 15%, more than 20% or even more than 25% of the subjects suffering from a cancer. Alternatively, or additionally, the fusion (JET) transcript sequence may be specific for a cancer type of shared between several cancer types. Alternatively, or in addition, a fusion transcript sequence can be expressed in at least 1; 2; 3; 4; 5; 6; 7; 8; 9; 10; 11; 12; 13; 14; 15; 16; 17; 18; 19; 20 cell lines (typically from the CCLE).

[0154] According to the present disclosure, the fusion (JET) transcript sequences are expressed at higher levels in tumor cells compared to normal healthy cells. In some embodiments, the fusion transcript sequence is expressed in cancer cells (obtained from one or more cancer samples and/or one or more cell lines) and not in healthy cells (obtained from one or more tissue samples or one or more cell lines), in particular not in thymus healthy cells. In some embodiments a JET is considered not expressed in a cell when its expression level is below 2.10⁻⁷, notably below 2.10⁻⁸ and typically not detectable. Such fusion (JET) transcript may be called tumor specific fusion (JET) as per the present disclosure. Fusion transcripts that are expressed at higher level(s) in tumor cells as compared to normal cell, typically that are disproportionally expressed in cancers cells as compared to normal cells as defined above may be called tumor associated fusion transcripts (TAF) as per the present disclosure. Tumor associated fusion transcripts may be selected according to the present application if they are present in more than 10% of the tumor samples (for example in more than 1, notably more than 2%, more than 5% and in particular more than 10% of tumor samples obtained from the TCGA database for the same cancer type) and in less than 20% of the normal samples (for example juxta-tumor samples from the TCGA). Alternatively, or in addition, a fusion transcript sequence can be expressed in at least 1; 2; 3; 4; 5; 6; 7; 8; 9; 10; 11; 12; 13; 14; 15; 16; 17; 18; 19; 20 cell lines.

[0155] In some embodiments, the method further comprises a step of determining, optionally in silico or using in vitro techniques (see notably the examples for illustration), the binding affinity of the tumor neoantigenic peptide with at least one MHC molecule of the said subject suffering from a cancer.

[0156] When the method is carried out on human samples, the method may comprise a step of determining the patient's class I or class I Major Histocompatibility Complex (MHC, aka human leukocyte antigen (HLA) alleles). It is to be noticed that as MHC alleles for laboratory mice are generally known such that this step may not be necessary in that particular context. In the present application, “MHC molecule” refers to at least one MHC class I molecule or at least one MHC Class II molecule.

[0157] An MHC allele database is carried out by analyzing known sequences of MHC I and MHC II and determining allelic variability for each domain. This can be typically determined in silico using appropriate software algorithms well-known in the field. Several tools have been developed to obtain HLA allele information from genome-wide sequencing data (whole-exome, whole-genome, and RNA sequencing data), including OptiType, Polysolver, PHLAT, HLAreporter, HLAforest, HLAminer, and seq2HLA (see Kiyotani K et al., Immunopharmacogenomics towards personalized cancer immunotherapy targeting neoantigens; Cancer Science 2018; 109:542-549). For example, the seq2 hla tool (see Boegel S, Lower M, Schafer M, et al. HLA typing from RNA-Seq sequence reads. Genome Med. 2012; 4:102), which is well designed to perform the method as herein disclosed is an in silico method written in python and R, which takes standard RNA-Seq sequence reads in fastq format as input, uses a bowtie index (Langmead B, et al., Ultrafast and memory-efficient alignment of short DNA sequences to the human genome. Genome Biol. 2009, 10: R25-10.1186/gb-2009-10-3-r25) comprising all HLA alleles and outputs the most likely HLA class I and class II genotypes (in 4 digit resolution), a p-value for each call, and the expression of each class.

[0158] Typically, the sequences having junctions between a TE and an exonic sequence (JETs) are extracted in silico. The affinity of all possible peptides encoded by each sequence for each MHC allele from the patient (or mouse) can be for example determined in silico using computational methods to predict peptide binding-affinity to HLA molecules. Indeed, accurate prediction approaches are based on artificial neural networks with predicted IC₅₀. For example, NetMHCpan software which has been modified from NetMHC to predict peptides binding to alleles for which no ligands have been reported, is well appropriate to implement the method as herein disclosed (Lundegaard C et al., NetMHC-3.0: accurate web accessible predictions of human, mouse and monkey MHC class I affinities for peptides of length 8-11; Nucleic Acids Res. 2008; 36: W509-W512; Nielsen M et al. NetMHCpan, a method for quantitative predictions of peptide binding to any HLA-A and -B locus protein of known sequence. PLOS One. 2007; 2: e796, but see also Kiyotani K et al., Immunopharmacogenomics towards personalized cancer immunotherapy targeting neoantigens; Cancer Science 2018; 109:542-549 and Yarchoan M et al., Nat rev. cancer 2017; 17(4):209-222). NetMHCpan software predicts binding of peptides to any MHC molecule of known sequence using artificial neural networks (ANNs). The method is trained on a combination of more than 180,000 quantitative binding data and MS derived MHC eluted ligands. The binding affinity data covers 172 MHC molecules from human (HLA-A, B, C, E), mouse (H-2), cattle (BoLA), primates (Patr, Mamu, Gogo) and swine (SLA). The MS eluted ligand data covers 55 HLA and mouse alleles.

[0159] In example embodiments, neoantigenic peptides encoded by fusion (JETs) transcripts as above described and having a Kd affinity for MHC alleles of less than 10⁻⁴. 10⁻⁵, 10⁻⁶, 10⁻⁷ M or less than 500 nM, notably less than 50 nM are selected as tumor neoantigenic peptides.

[0160] As above mentioned, affinity of the selected peptide for MHC alleles can be determined in silico using appropriate software such as netMHCpan. Thus, in some embodiments, neoantigenic peptides bind MHC class I with a binding affinity of less than 2% percentile rank score predicted by NetMHCpan 4.0. In other embodiments, the neoantigenic peptides bind MHC class II with a binding affinity of less than 10% percentile rank score predicted by NetMHCpanII 3.2.

[0161] Affinity can also (alternatively or in addition) be estimated in vitro, for example by using MHC tetramer formation assay as described in the results included therein (see example 2, point 2.1 and 2.2.2). Commercial assays for example from ImmunAware® can typically be used by the skilled person (EasYmers® kits are from ImmunAware® are notably used according to their training guide). Typically, binding affinity is determined as a percentage of binding to a positive control. Generally, peptides showing a percentage of binding of at least 30%, notably at least 40% or even at least 50% of the positive control are selected. Typically, the neoantigenic peptide as per the present disclosure, and typically obtainable as per the present method, binds at least one HLA/MHC molecule with an affinity sufficient for the peptide to be presented on the surface of a cell as an antigen. Generally, the neoantigenic peptide has an IC₅₀ affinity of less than 10⁻⁴, or 10⁻⁵, or 10⁻⁶, or 10⁻⁷ or less than 500 nM, at least less than 250 nM, at least less than 200 nM, at least less than 150 nM, at least less than 100 nM, at least less than 50 nM or less for at least one HLA/MHC molecule (lower numbers indicating greater binding affinity), typically a molecule of said subject suffering from a cancer.

[0162] Further optional steps according to the present method may thus independently include:
[0163] a step of exclusion of fusion transcripts or predicted peptides expressed at high levels or high frequency on healthy cells. An alignment of the fusion transcript sequence against the RNAseq data of healthy cells, typically allows determining the relative amount of fusion transcript sequence(s) present in healthy cells; In one embodiment, fusion transcripts or predicted peptides expressed on healthy cells are discarded.
[0164] a step to confirm that a tumor neoantigenic peptide is not expressed in healthy cells of the subject. This step can be carried out using typically the Basic local alignment search tool (BLAST) and performing alignment of the sequence of the neoantigenic peptide against the proteome of healthy cells; Preferably, peptides that align against the proteome of normal healthy cells (for example using BLAST) are discarded.
[0165] a step to confirm that the fusion transcript or predicted peptide is expressed in cancer cells of the subject. The presence of the selected fusion transcript sequence in cancer cells can be checked typically by RT-PCR in mRNA extracted from cancer cell sample.

[0166] In some embodiments, the present method can also include a step wherein the identified fusion (JETs) transcripts are in silico translated to generate a JET-derived protein database (JET-db). Typically, Strand-indexed JETs containing gene as donor can be translated using the canonical ORF from the implicated gene until the first stop codon after the breakpoint. In JETs where TE was the donor, the 3 possible ORFs can be translated and only the sequence found more proximal to the breakpoint and between two stop codons is typically kept. This JET db (typically also concatenated to the human proteome) can be then interrogated in mass spectrometry based proteomic datasets obtained from tumor samples and/or tumor cell lines which typically consist in proteomics data obtained from tumors samples and/or tumor cell lines. In some embodiments, public mass spectrometry datasets can be used. This embodiment is notably well described in the results provided in the present application. Such analysis also to identify JET-derived peptides or proteins.

[0167] In more specific embodiments, the JETdb (typically concatenated to the human proteome) can be interrogated to immunopeptidomics mass spectrometry-based datasets as also detailed in the examples included herein. This embodiment allows to identify JET-derived peptides or proteins (pJETs) that are presented to MHC molecules.

[0168] To ensure that JET-derived peptides did not match with canonical proteins or peptides derived from JETs found in normal samples, identified peptides can be filtered for example with UniProt/TrEMBL database and/or with in silico translated JETs from normal (including for example juxta-tumor) samples or cell(s) (for example from public databases such as the TCGA or the CCLE).

### Neoantigenic Peptides

[0169] The present disclosure also relates to an isolated tumor neoantigenic peptide comprising at least 8, 9, 10, 11, or 12 amino acids, encoded by a portion of an open reading frame (ORF) from a fusion transcript that is a human mRNA sequence comprising a transposable element (TE) sequence and an exonic sequence. The peptide may be 8-9, 8-10, 8-11, 12-25, 13-25, 12-20, or 13-20 amino acids in length. Although the ORF overlaps a junction between a TE sequence and an exonic sequence, it is understood that the tumor neoantigenic peptide itself may not comprise the junction.

[0170] More particularly, the present disclosure provides a selection of isolated neoantigenic tumor peptide candidates obtained from the fusion transcripts predicted from the bioinformatic tumor transcriptome database TCGA (The Cancer Genome Atlas).

[0171] This step has been detailed in the above section (detailed description and previous examples) of the present application. Briefly, and as previously mentioned, in these fusion transcripts, the TE can be donor (in 5′ position) or acceptor (in 3′ acceptor) and correspondingly the exon can be acceptor or donor. TE-exon splicing results in the incorporation of parts of the “non-coding” genome into the coding genome, thereby exposing non-coding genomic sequences to the translation machinery. These fusions (or chimeric) transcripts also named JET (Junction Exon TE) include an ORF (open reading frame). When the TE is acceptor, the ORF of the fusion transcript is canonical (i.e. the same as the canonical transcript), whereas when the TE is the donor the ORF can be canonical (generally ORF1) or can be shifted by 1 or 2 nucleotides (typically ORFs 2 and 3 respectively). The fusion transcripts include not only the fused TE and exon sequences but can also further include exon(s), upstream the fusion breakpoint (between the exon and the TE) if the exon is donor or downstream the fusion breakpoint is the TE is donor, corresponding to the various transcript isoforms. Amino acid sequences SEQ ID NO:1-29596 and 30434-31346 correspond to the in silico translated sequences of all the transcripts (splice variants) including a fusion event (a fusion between an exonic sequence and TE sequence also named herein JET for “Junction Exon TE”), which are thus also named “fusion transcripts” or “chimeric transcripts”. Amino acid sequences are also named translated fusion transcripts or shortly “translated fusions” or “translated JETs” or “pJETs. Sequences SEQ ID NO: 1-4722, 30434-30520, 30761-30802, 30965-31030; 31202-31228 are translated amino acid sequences from exon donor derived fusion transcripts. Sequences SEQ ID NO:4723-29596, 30521-30760, 30803-30964, 31031-31201, 31229-31346 are translated amino acid sequences from TE donor derived fusion transcripts. Tables 9; 11; 13; 15; and 17 and 10; 12; 14; 16; and 18 herein provides the reference, location and coordinate of the donor sequence (exon or TE) and acceptor sequence (TE or exon respectively) such that each fusion transcript sequence can be unambiguously retrieved. Tables 9; 11; 13; 15; and 17 and tables 10; 12; 14; 16; and 18 also assign each transcript to the corresponding translated fusion transcripts identified as SEQ ID NO: 1-29744 and 29753-31346. For each translated fusion transcript, the position of the breakpoint (between the exonic and TE sequences) is provided such that it is possible to identify for each of the amino acid sequences of SEQ ID NO:1-29744 and 29753-31346, the TE-derived sequence and the exon-derived sequence.

[0172] Thus, the present disclosure encompasses isolated tumor neoantigenic peptides, optionally comprising at least 8 amino acids, wherein said neoantigenic peptides are encoded by a part of an open reading frame (ORF) from a fusion transcript encoding any one of SEQ ID NO:1-29744 and 29753-31346 and comprising a transposable element (TE) sequence and an exonic sequence, wherein said ORF overlaps the junction between the TE and the exonic sequence, is pure TE and/or is non-canonical.

[0173] In some embodiments, the present disclosure encompasses isolated tumor neoantigenic peptide, optionally of at least 8 amino acids, wherein the neoantigenic peptide:
[0174] is a part of any one of the sequences of SEQ ID NO:1-29744 and 29753-31346 or a fragment thereof, and comprises a TE-derived amino acid sequence, or
[0175] is a part of any one of the sequence of SEQ ID NO: 1-29744 and 29753-31346 or a fragment thereof and is encoded by a fusion wherein the exon is the donor. Typically said neoantigenic peptides are derived from a part of a non-canonical ORF of a fusion transcript as above defined.

[0176] In some embodiments, the neoantigenic peptide overlaps the breakpoint between the TE-derived sequence and the exon-derived sequence of the translated fusion transcripts of any one of SEQ ID NO:1-29744 and 29753-31346, including fragments thereof. In other embodiments the neoantigenic peptide consists in or comprises a pure TE-derived sequence from a translated fusion transcripts of any one of SEQ ID NO:1-29744 and 29753-31346, including fragments thereof.

[0177] In some embodiments the neoantigenic peptide comprises at least 8, 9, 10, 11 or 12 amino acids.

[0178] The peptide may be 8-9, 8-10, 8-11, 12-25, 13-25, 12-20, or 13-20 amino acids in length and fulfills one or more of the neoantigen peptide characteristics described above. The N-terminus of the peptide of at least 8 amino acids may be encoded by the triplet codon starting at any of nucleotide positions 1, 2, 3, 4, 5, 6, 7, 8, 9, 10, 11, 12, 13, 14, 15, 16, 17, 18, and higher (it being understood that the disclosure contemplates a start position that is any of the integers between 1 and 8000 without having to list every number between 1 and 8000). More specifically, the N terminus of the neoantigenic peptide of at least 8 amino acids may start at any of amino acid positions 1, 2, 3, 4, 5, 6, 7, 8, 9, 10, 11, 12, 13, 14, 15, 16, 17, 18, and higher (it being understood that the disclosure contemplates a start position that is any of the integers between 1 and 15000 without having to list every number between 1 and 15000) of any one of the sequences SEQ ID NO: 1-29744 and 29753-31346. Typically however, and as mentioned above, the neoantigenic peptide:
[0179] is a fragment of any one of the sequence of SEQ ID NO:1-29744 and 29753-31346 and comprises a TE-derived amino acid sequence, or
[0180] is a fragment of any one of the sequence of SEQ ID NO: 1-29744 and 29753-31346. Typically said neoantigenic peptides are derived from a part of a non-canonical ORF of a fusion transcript as above defined.

[0181] In some embodiments, the neoantigenic peptide overlaps the breakpoint between the TE-derived sequence and the exon-derived sequence of the translated fusion transcripts of any one of SEQ ID NO:1-29744 and 29753-31346. In other embodiments the neoantigenic peptide consists in or comprises a pure TE-derived sequence from a translated fusion transcripts of any one of SEQ ID NO: 1-29744 and 29753-31346.

[0182] A peptide as above defined is typically obtainable according to the method of the present disclosure and thus encompasses one or more of the characteristics as previously described. In particular a neoantigenic peptide as per the present disclosure may exhibit one or a combination of the following further characteristics:
[0183] It binds or specifically binds MHC class I of a subject and is 8 to 11 amino acids, notably 8, 9, 10, or 11 amino acids. Typically the neoantigenic peptide is 8 or 9 amino acids long, and binds to at least one MHC class I molecule of the subject; or alternatively, it binds to at least one MHC class II molecule of said subject and contains from 12 to 25 amino acids, notably is 12, 13, 14, 15, 16, 17, 18, 19, 20, 21, 22, 23, 24 or 25 amino acids long.
[0184] It binds at least one HLA/MHC molecule of said subject suffering from a cancer with an affinity sufficient for the peptide to be presented on the surface of a cell as an antigen. Typically the neoantigenic peptide has an IC₅₀ of less than 10⁻⁴, or 10⁻⁵, or 10⁻⁶, or 10⁻⁷ or less than 500 nM, at least less than 250 nM, at least less than 200 nM, at least less than 150 nM, at least less than 100 nM, at least less than 50 nM or less (lower numbers indicating greater binding affinity).
[0185] It does not induce a significant autoimmune response and/or invoke immunological tolerance when administered to a subject.
[0186] It is expressed at higher levels in tumor samples compared to normal healthy samples. Typically, as per the present disclosure, a fusion transcript may be selected if it is present in more than 1%, notably more than 2%, more than 5% and typically more than 10% of the tumor samples (from the same or different tumor type, typically from one or more subjects typically from TCGA tumor samples) and in less than 20%, notably less than 15%, less than 10%, less than 5%, less than 2% or even less than 1% of the normal samples. Alternatively, or in addition, the transcript can be identified in one or more (at least 2, 5, 10, 20, 50, 100 cell lines such as for example from the CCLE) In some embodiments, the neoantigenic is more specifically a tumor specific antigen (TSA), i.e.: it is only expressed in cancer sample and not in normal samples, or is expressed at relatively low levels in normal samples (e.g. the expressed mRNA sequences represent minor species in normal cells from normal samples).
[0187] It comprises the junction between the TE sequence and the exonic sequence, in other words it is encoded by a part of a TE sequence and a part of an exonic sequence, the ORF being either canonical or non-canonical or
[0188] It is encoded by a non-canonical ORF of an exonic sequence or
[0189] It is encoded by the TE sequence, optionally in a non-canonical ORF

[0190] A tumor neoantigenic peptide may first be validated by RT transcription analysis of fusion transcripts sequence in tumors cell from a subject. Typically also, immunization with a tumor neoantigenic peptide as per the present disclosure elicits a T cell response

[0191] Affinity for MHC alleles can be determined by known techniques in the field and notably in silico or in vitro as exemplified above;

[0192] In a particular embodiment, a tumor neoantigenic peptide as per the present disclosure binds to a MHC molecule present in at least 1%, 5%, 10%, 15%, 20%, 25% or more of subjects. Notably, a tumor neoantigenic peptide as herein disclosed is expressed in at least 1%, 5%, 10%, 15%, 20%, 25% of subjects from a population of subjects suffering from cancer

[0193] More particularly, a tumor neoantigenic peptide of the present disclosure is capable of eliciting an immune response against a tumor present in at least 1%, 5%, 10%, 15%, 20%, or 25% of the subjects in the population of subjects suffering from cancer.

[0194] As previously defined, cancer may affect any one of the following tissues or organs: breast; liver; kidney; heart, mediastinum, pleura; floor of mouth; lip; salivary glands; tongue; gums; oral cavity; palate; tonsil; larynx; trachea; bronchus, lung; pharynx, hypopharynx, oropharynx, nasopharynx; esophagus; digestive organs such as stomach, intrahepatic bile ducts, biliary tract, pancreas, small intestine, colon; rectum; urinary organs such as bladder, gallbladder, ureter; rectosigmoid junction; anus, anal canal; skin; bone; joints, articular cartilage of limbs; eye and adnexa; brain; peripheral nerves, autonomic nervous system; spinal cord, cranial nerves, meninges; and various parts of the central nervous system; connective, subcutaneous and other soft tissues; retroperitoneum, peritoneum; adrenal gland; thyroid gland; endocrine glands and related structures; female genital organs such as ovary, uterus, cervix uteri; corpus uteri, vagina, vulva; male genital organs such as penis, testis and prostate gland; hematopoietic and reticuloendothelial systems; blood; lymph nodes; thymus. For example, the tumors or cancers as per the present application includes leukemias, seminomas, melanomas, teratomas, lymphomas, neuroblastomas, gliomas, rectal cancer, endometrial cancer, kidney cancer, adrenal cancer, thyroid cancer, blood cancer, skin cancer, cancer of the brain, cervical cancer, intestinal cancer, liver cancer, colon cancer, stomach cancer, intestine cancer, head and neck cancer, gastrointestinal cancer, lymph node cancer, esophagus cancer, colorectal cancer, pancreas cancer, ear, nose and throat (ENT) cancer, breast cancer, prostate cancer, cancer of the uterus, ovarian cancer and lung cancer and the metastases thereof. Examples thereof are lung carcinomas, mamma carcinomas, prostate carcinomas, colon carcinomas, renal cell carcinomas, cervical carcinomas, or metastases of the cancer types or tumors described above. The term cancer according to the present disclosure also comprises cancer metastases and relapse of cancer.

[0195] Typically, a neoantigenic peptide as per the present disclosure does not induce a significant autoimmune response and/or invoke immunological tolerance when administered to a subject. Tolerating mechanisms involve clonal deletion, ignorance, anergy, or suppression in the host w the reduction in the number of high-affinity self-reactive T cells.

[0196] The neoantigenic peptide can also be modified by extending or decreasing the compound's amino acid sequence, e.g., by the addition or deletion of amino acids. The peptides can also be modified by altering the order or composition of certain residues, it being readily appreciated that certain amino acid residues essential for biological activity, e.g., those at critical contact sites or conserved residues, may generally not be altered without an adverse effect on biological activity. The non-critical amino acids need not be limited to those naturally occurring in proteins, such as L-α-amino acids, or their D-isomers, but may include non-natural amino acids as well, such as β-γ-δ-amino acids, as well as many derivatives of L-α-amino acids.

[0197] Typically, a series of peptides with single amino acid substitutions are employed to determine the effect of electrostatic charge, hydrophobicity, etc. on binding. For instance, a series of positively charged (e.g., Lys or Arg) or negatively charged (e.g., Glu) amino acid substitutions are made along the length of the peptide revealing different patterns of sensitivity towards various MHC molecules and T cell receptors. In addition, multiple substitutions using small, relatively neutral moieties such as Ala, Gly, Pro, or similar residues may be employed. The substitutions may be homo-oligomers or hetero-oligomers. The number and types of residues which are substituted or added depend on the spacing necessary between essential contact points and certain functional attributes which are sought (e.g., hydrophobicity versus hydrophilicity). Increased binding affinity for an MHC molecule or T cell receptor may also be achieved by such substitutions, compared to the affinity of the parent peptide. In any event, such substitutions should employ amino acid residues or other molecular fragments chosen to avoid, for example, steric and charge interference which might disrupt binding.

[0198] Amino acid substitutions are typically of single residues. Substitutions, deletions, insertions or any combination thereof may be combined to arrive at a final peptide. Substitutional variants are those in which at least one residue of a peptide has been removed and a different residue inserted in its place. Such substitutions are generally made in accordance with the following Table 1 when it is desired to finely modulate the characteristics of the peptide.

TABLE 1

| Original | Exemplary |
|---|---|
| residue | substitution |
| Ala | Ser |
| Arg | Lys, His |
| Asn | Gln |
| Asp | Glu |
| Cys | Ser |
| Gln | Asn |
| Glu | Asp |
| Gly | Pro |
| His | Lys, Arg |
| Ile | Leu, Val |
| Leu | Ile, Val |
| Lys | Tyr, Trp |
| Met | Thr |
| Phe | Ser |
| Ser | Tyr, Phe |
| Tyr | Trp, Phe |
| Val | Ile, Leu |
| Pro | Gly |

[0199] Substantial changes in function (e.g., affinity for MHC molecules or T cell receptors) are made by selecting substitutions that are less conservative than those in above Table, i.e., selecting residues that differ more significantly in their effect on maintaining (a) the structure of the peptide backbone in the area of the substitution, for example as a sheet or helical conformation, (b) the charge or hydrophobicity of the molecule at the target site or (c) the bulk of the side chain. The substitutions which in general are expected to produce the greatest changes in peptide properties will be those in which (a) hydrophilic residue, e.g. seryl, is substituted for (or by) a hydrophobic residue, e.g. leucyl, isoleucyl, phenylalanyl, valyl or alanyl; (b) a residue having an electropositive side chain, e.g., lysl, arginyl, or histidyl, is substituted for (or by) an electronegative residue, e.g. glutamyl or aspartyl; or (c) a residue having a bulky side chain, e.g. phenylalanine, is substituted for (or by) one not having a side chain, e.g., glycine.

[0200] The peptides and polypeptides may also comprise isosteres of two or more residues in the neoantigenic peptide or polypeptides. An isostere as defined here is a sequence of two or more residues that can be substituted for a second sequence because the steric conformation of the first sequence fits a binding site specific for the second sequence. The term specifically includes peptide backbone modifications well known to those skilled in the art. Such modifications include modifications of the amide nitrogen, the α-carbon, amide carbonyl, complete replacement of the amide bond, extensions, deletions or backbone crosslinks. See, generally, Spatola, Chemistry and Biochemistry of Amino Acids, Peptides and Proteins, Vol. VII (Weinstein ed., 1983).

[0201] In addition, the neoantigenic peptide may be conjugated to a carrier protein, a ligand, or an antibody. Half-life of the peptide may be improved by PEGylation, glycosylation, polysialylation, HESylation, recombinant PEG mimetics, Fc fusion, albumin fusion, nanoparticle attachment, nanoparticulate encapsulation, cholesterol fusion, iron fusion, or acylation.

[0202] Modifications of peptides and polypeptides with various amino acid mimetics or unnatural amino acids are particularly useful in increasing the stability of the peptide and polypeptide in vivo. Stability can be assayed in a number of ways. For instance, peptidases and various biological media, such as human plasma and serum, have been used to test stability. See, e.g., Verhoef et al., Eur. J. Drug Metab Pharmacokin. 11:291-302 (1986). Half life of the peptides of the present disclosure is conveniently determined using a 25% human serum (v/v) assay. The protocol is generally as follows. Pooled human serum (Type AB, non-heat inactivated) is delipidated by centrifugation before use. The serum is then diluted to 25% with RPMI tissue culture media and used to test peptide stability. At predetermined time intervals a small amount of reaction solution is removed and added to either 6% aqueous trichloracetic acid or ethanol. The cloudy reaction sample is cooled (4° C.) for 15 minutes and then spun to pellet the precipitated serum proteins. The presence of the peptides is then determined by reversed-phase HPLC using stability-specific chromatography conditions.

[0203] The peptides and polypeptides may be modified to provide desired attributes other than improved serum half-life. For instance, the ability of the peptides to induce CTL activity can be enhanced by linkage to a sequence which contains at least one epitope that is capable of inducing a T helper cell response. Particularly preferred immunogenic peptides/T helper conjugates are linked by a spacer molecule. The spacer is typically comprised of relatively small, neutral molecules, such as amino acids or amino acid mimetics, which are substantially uncharged under physiological conditions. The spacers are typically selected from, e.g., Ala, Gly, or other neutral spacers of nonpolar amino acids or neutral polar amino acids. It will be understood that the optionally present spacer need not be comprised of the same residues and thus may be a hetero- or homo-oligomer. When present, the spacer will usually be at least one or two residues, more usually three to six residues. Alternatively, the peptide may be linked to the T helper peptide without a spacer.

[0204] The neoantigenic peptide may be linked to the T helper peptide either directly or via a spacer either at the amino or carboxy terminus of the peptide. The amino terminus of either the neoantigenic peptide or the T helper peptide may be acylated. Exemplary T helper peptides include tetanus toxoid 830-843, influenza 307-319, malaria circumsporozoite 382-398 and 378-389

[0205] Multiple neoantigenic peptides described herein can also be linked together, optionally by a spacer.

### Peptide Productions, Polynucleotides and Vectors

[0206] Proteins or peptides may be made by any technique known to those of skill in the art, including the expression of proteins, polypeptides or peptides through standard molecular biological techniques, the isolation of proteins or peptides from natural sources, or the chemical synthesis of proteins or peptides. The nucleotide and protein, polypeptide and peptide sequences corresponding to various genes have been previously disclosed, and may be found at computerized databases known to those of ordinary skill in the art. One such database is the National Center for Biotechnology Information's Genbank and GenPept databases located at the National Institutes of Health website. The coding regions for known genes may be amplified and/or expressed using the techniques disclosed herein or as would be known to those of ordinary skill in the art. Alternatively, various commercial preparations of proteins, polypeptides and peptides are known to those of skill in the art.

[0207] In a further aspect the present disclosure provides a nucleic acid (e.g. polynucleotide) encoding a neoantigenic peptide as herein disclosed. The polynucleotide may be selected from DNA, cDNA, PNA, CNA, RNA, either single- and/or double-stranded, or native or stabilized forms of polynucleotides, such as for example polynucleotides with a phosphorothiate backbone, or combinations thereof and it may or may not contain introns so long as it codes for the peptide. Only peptides that contain naturally occurring amino acid residues joined by naturally occurring peptide bonds are encodable by a polynucleotide.

[0208] A still further aspect of the disclosure provides an expression vector capable of expressing a neoantigenic peptide as herein disclosed. Expression vectors for different cell types are well known in the art and can be selected without undue experimentation. Generally, the DNA is inserted into an expression vector, such as a plasmid, in proper orientation and correct reading frame for expression. The expression vector will comprise the appropriate heterologous transcriptional and/or translational regulatory control nucleotide sequences recognized by the desired host. The polynucleotide encoding the tumor neoantigenic peptide may be linked to such heterologous regulatory control nucleotide sequences or may be non-adjacent yet operably linked to such heterologous regulatory control nucleotide sequences. The vector is then introduced into the host through standard techniques. Guidance can be found for example in Sambrook et al. (1989) Molecular Cloning, A Laboratory Manual, Cold Spring Harbor Laboratory, Cold Spring Harbor, N.Y.

### Antigen Presenting Cells (APCs)

[0209] The present disclosure also encompasses a population of antigen presenting cells that have been pulsed with one or more of the peptides as previously defined and/or obtainable in a method as previously described. Preferably, the antigen presenting cells are dendritic cell (DCs) or artificial antigen presenting cells (aAPCs) (see Neal, Lillian R et al. “The Basics of Artificial Antigen Presenting Cells in T Cell-Based Cancer Immunotherapies.” Journal of immunology research and therapy vol. 2,1 (2017): 68-79). Dendritic cells (DC) are professional antigen-presenting cells (APC) that have an extraordinary capacity to stimulate naive T-cells and initiate primary immune responses to pathogens. Indeed, the main role of mature DCs are to sense antigens and produce mediators that activate other immune cells, particularly T cells. DCs are potent stimulators for lymphocyte activation as they express MHC molecules that trigger TCRs (signal 1) and co-stimulatory molecules (signal 2) on T cells. Additionally, DCs also secrete cytokines that support T cell expansion. T cells require presented antigen in the form of a processed peptide to recognize foreign pathogens or tumor. Presentation of peptide epitopes derived from pathogen/tumor proteins is achieved through MHC molecules. MHC class I (MHC-I) and MHC class II (MHC-II) molecules present processed peptides to CD8+ T cells and CD4+ T cells, respectively. Importantly, DCs home to inflammatory sites containing abundant T cell populations to foster an immune response. Thus, DCs can be a crucial component of any immunotherapeutic approach, as they are intimately involved with the activation of the adaptive immune response. In the context of vaccines, DC therapy can enhance T cell immune responses to a desired target in healthy volunteers or patients with infectious disease or cancer. In one embodiment, APCS are artificial APC, which are genetically modified to express the desired T-cell co-stimulatory molecules, human HLA alleles and/or cytokines. Such artificial antigen presenting cells (aAPC) are able to provide the requirements for adequate T-cell engagement, co-stimulation, as well as sustained release of cytokines that allow for controlled T-cell expansion. These cells are not subject to the constraints of time and limited availability and can be stored in small aliquots for subsequent use in generating T-cell lines from different donors, thus representing an off the shelf reagent for immunotherapy applications. Expression of potent co-stimulatory signals on these aAPC endows this system with higher efficiency lending to increased efficacy of adoptive immunotherapy. Furthermore, aAPC can be engineered to express genes directing release of specific cytokines to facilitate the preferential expansion of desirable T-cell subsets for adoptive transfer; such as long lived memory T-cells (see for review Hasan A H et al.. Artificial Antigen Presenting Cells: An Off the Shelf Approach for Generation of Desirable T-Cell Populations for Broad Application of Adoptive Immunotherapy; Adv Genet Eng. 2015; 4(3): 130, Kim J V, Latouche J B, Rivière I, Sadelain M. The ABCs of artificial antigen presentation. Nat Biotechnol. 2004; 22:403-410 or Wang C, Sun W, Ye Y, Bomba H N, Gu Z. Bioengineering of Artificial Antigen Presenting Cells and Lymphoid Organs. Theranostics 2017; 7(14):3504-3516).

[0210] Typically, the dendritic cells are autologous dendritic cells that are pulsed with a neoantigenic peptide as herein disclosed. The peptide may be any suitable peptide that gives rise to an appropriate T-cell response. The antigen-presenting cell (or stimulator cell) typically has an MHC class I or II molecule on its surface, and in one embodiment is substantially incapable of itself loading the MHC class I or II molecule with the selected antigen. The MHC class I or II molecule may readily be loaded with the selected antigen in vitro.

[0211] As an alternative the antigen presenting cell may comprise an expression construct encoding a tumor neoantigenic peptide as herein disclosed. The polynucleotide may be any suitable polynucleotide as previously defined and it is preferred that it is capable of transducing the dendritic cell, thus resulting in the presentation of a peptide and induction of immunity

[0212] Thus the present disclosure encompasses a population of APCs than can be pulsed or loaded with the neoantigenic peptide as herein disclosed, genetically modified (via DNA or RNA transfer) to express at least one neoantigenic peptide as herein disclosed, or that comprise an expression construct encoding a tumor neoantigenic peptide of the present disclosure. Typically the population of APCs is pulsed or loaded, modified to express or comprises at least one, at least 5, at least 10, at least 15, or at least 20 different neoantigenic peptide or expression construct encoding it.

[0213] The present disclosure also encompasses compositions comprising APCs as herein disclosed. APCs can be suspended in any known physiologically compatible pharmaceutical carrier, such as cell culture medium, physiological saline, phosphate-buffered saline, cell culture medium, or the like, to form a physiologically acceptable, aqueous pharmaceutical composition. Parenteral vehicles include sodium chloride solution, Ringer's dextrose, dextrose and sodium chloride, lactated Ringer's. Other substances may be added as desired such as antimicrobials. As used herein, a “carrier” refers to any substance suitable as a vehicle for delivering an APC to a suitable in vitro or in vivo site of action. As such, carriers can act as an excipient for formulation of a therapeutic or experimental reagent containing an APC. Preferred carriers are capable of maintaining an APC in a form that is capable of interacting with a T cell. Examples of such carriers include, but are not limited to water, phosphate buffered saline, saline, Ringer's solution, dextrose solution, serum-containing solutions, Hank's solution and other aqueous physiologically balanced solutions or cell culture medium. Aqueous carriers can also contain suitable auxiliary substances required to approximate the physiological conditions of the recipient, for example, enhancement of chemical stability and isotonicity. Suitable auxiliary substances include, for example, sodium acetate, sodium chloride, sodium lactate, potassium chloride, calcium chloride, sorbitan monolaurate, triethanolamine oleate, and other substances used to produce phosphate buffer, Tris buffer, and bicarbonate buffer.

### Vaccine Compositions

[0214] The present disclosure further encompasses a vaccine or immunogenic composition capable of raising a specific T-cell response comprising:
[0215] one or more neoantigenic peptides as herein defined,
[0216] one or more polynucleotides encoding a neoantigenic peptide as herein defined; and/or
[0217] a population of antigen presenting cells (such as autologous dendritic cells or artificial APC) as described above.

[0218] Preferably, neoantigenic peptide which are encoded by tumor specific fusions as previously defined are used in vaccine compositions as per the present disclosure. Said neoantigenic peptide can be also named tumor specific peptides. Preferably also polynucleotides encoding tumor specific peptides are used as per the present disclosure.

[0219] A suitable vaccine or immunogenic composition will preferably contain between 1 and 20 neoantigenic peptides, more preferably 2, 3, 4, 5, 6, 7, 8, 9, 10, 11, 12, 13, 14, 15, 16, 17, 18, 19, 20, 21, 22, 23, 24, 25 different neoantigenic peptides, further preferred 6, 7, 8, 9, 10 11, 12, 13, or 14 different neoantigenic peptides, and most preferably 12, 13 or 14 different neoantigenic peptides.

[0220] The neoantigenic peptide(s) may be linked to a carrier protein. Where the composition contains two or more neoantigenic peptides, the two or more (e.g. 2-25) peptides may be linearly linked by a spacer molecule as described above, e.g. a spacer comprising 2-6 nonpolar or neutral amino acids.

[0221] In one embodiment of the present disclosure the different neoantigenic peptides, encoding polynucleotides, vectors, or APCs are selected so that one vaccine or immunogenic composition comprises neoantigenic peptides capable of associating with different MHC molecules, such as different MHC class I molecules. Preferably, such neoantigenic peptides are capable of associating with the most frequently occurring MHC class I molecules, e.g. different fragments capable of associating with at least 2 preferred, more preferably at least 3 preferred, even more preferably at least 4 preferred MHC class I molecules. In some embodiments, the compositions comprise peptides, encoding polynucleotides, vectors, or APCs capable of associating with one or more MHC class II molecules. The MHC is optionally HLA-A, -B, -C, -DP, -DQ, or -DR.

[0222] The vaccine or immunogenic composition is capable of raising a specific cytotoxic T-cells response and/or a specific helper T-cell response.

[0223] Thus, in a particular embodiment, the present disclosure also relates to a neoantigenic peptide as described above, wherein the neoantigenic peptide has a tumor specific neoepitope and is included in a vaccine or immunogenic composition. A vaccine composition is to be understood as meaning a composition for generating immunity for the prophylaxis and/or treatment of diseases. Accordingly, vaccines are medicines which comprise or generate antigens and are intended to be used in humans or animals for generating specific defense and protective substance by vaccination. An “immunogenic composition” is to be understood as meaning a composition that comprises or generates antigen(s) and is capable of eliciting an antigen-specific humoral or cellular immune response, e.g. T-cell response.

[0224] In a preferred embodiment, the neoantigenic peptide according to the disclosure is 8 or 9 residues long, or from 13 to 25 residues long. When the peptide is less than 20 residues, in order to have a peptide better suited for in vivo immunization, said neoantigenic peptide, is optionally flanked by additional amino acids to obtain an immunization peptide of more amino acids, usually more than 20.

[0225] Pharmaceutical compositions (i.e., the vaccine or immunogenic composition) comprising a peptide as herein described may be administered to an individual already suffering from cancer. In therapeutic applications, compositions are administered to a patient in an amount sufficient to elicit an effective CTL response to the tumor antigen and to cure or at least partially arrest symptoms and/or complications. An amount adequate to accomplish this is defined as “therapeutically effective dose.” Amounts effective for this use will depend on, e.g., the peptide composition, the manner of administration, the stage and severity of the disease being treated, the weight and general state of health of the patient, and the judgment of the prescribing physician, but generally range for the initial immunization (that is for therapeutic or prophylactic administration) from about 1.0 μg to about 50,000 μg of peptide for a 70 kg patient, followed by boosting dosages or from about 1.0 μg to about 10,000 μg of peptide pursuant to a boosting regimen over weeks to months depending upon the patient's response and condition by measuring specific CTL activity in the patient's blood. It must be kept in mind that the peptide and compositions of the present invention may generally be employed in serious disease states, that is, life-threatening or potentially life threatening situations, especially when the cancer has metastasized. In such cases, in view of the minimization of extraneous substances and the relative nontoxic nature of the peptide, it is possible and may be felt desirable by the treating physician to administer substantial excesses of these peptide compositions.

[0226] For therapeutic use, administration should begin at the detection or surgical removal of tumors. This is followed by boosting doses until at least symptoms are substantially abated and for a period thereafter.

[0227] The vaccine or immunogenic compositions for therapeutic treatment are intended for parenteral, topical, nasal, oral or local administration. Preferably, the pharmaceutical compositions are administered parenterally, e.g., intravenously, subcutaneously, intradermally, or intramuscularly. The compositions may be administered at the site of surgical excision to induce a local immune response to the tumor.

[0228] The vaccine or immunogenic composition may be a pharmaceutical composition which additionally comprises a pharmaceutically acceptable adjuvant, immunostimulatory agent, stabilizer, carrier, diluent, excipient and/or any other materials well known to those skilled in the art. Such materials should be non-toxic and should not interfere with the efficacy of the active ingredient. The carrier is preferably an aqueous carrier but its precise nature of the carrier or other material will depend on the route of administration. A variety of aqueous carriers may be used, e.g., water, buffered water, 0.9% saline, 0.3% glycine, hyaluronic acid and the like. These compositions may be sterilized by conventional, well known sterilization techniques, or may be sterile filtered. The resulting aqueous solutions may be packaged for use as is, or lyophilized, the lyophilized preparation being combined with a sterile solution prior to administration. The compositions may further contain pharmaceutically acceptable auxiliary substances as required to approximate physiological conditions, such as pH adjusting and buffering agents, tonicity adjusting agents, wetting agents and the like, for example, sodium acetate, sodium lactate, sodium chloride, potassium chloride, calcium chloride, sorbitan monolaurate, triethanolamine oleate, etc. See, for example, Butterfield, B M J. 2015 22; 350 for a discussion of cancer vaccines.

[0229] Example adjuvants that increase or expand the immune response of a host to an antigenic compound include emulsifiers, muramyl dipeptides, avridine, aqueous adjuvants such as aluminum hydroxide, chitosan-based adjuvants, saponins, oils, Amphigen, LPS, bacterial cell wall extracts, bacterial DNA, CpG sequences, synthetic oligonucleotides, cytokines and combinations thereof. Emulsifier include, for example, potassium, sodium and ammonium salts of lauric and oleic acid, calcium, magnesium and aluminum salts of fatty acids, organic sulfonates such as sodium lauryl sulfate, cetyltrhethylammonlum bromide, glycerylesters, polyoxyethylene glycol esters and ethers, and sorbitan fatty acid esters and their polyoxyethylene, acacia, gelatin, lecithin and/or cholesterol. Adjuvants that comprise an oil component include mineral oil, a vegetable oil, or an animal oil. Other adjuvants include Freund's Complete Adjuvant (FCA) or Freund's Incomplete Adjuvant (FIA). Cytokines useful as additional immunostimulatory agents include interferon alpha, interleukin-2 (IL-2), and granulocyte macrophage-colony stimulating factor (GM-CSF), or combinations thereof.

[0230] The concentration of peptides as herein described in the vaccine or immunogenic formulations can vary widely, i.e., from less than about 0.1%, usually at or at least about 2% to as much as 20% to 50% or more by weight, and will be selected primarily by fluid volumes, viscosities, etc., in accordance with the particular mode of administration selected.

[0231] The peptides as herein described may also be administered via liposomes, which target the peptides to a particular cells tissue, such as lymphoid tissue. Liposomes are also useful in increasing the half-life of the peptides. Liposomes include emulsions, foams, micelles, insoluble monolayers, liquid crystals, phospholipid dispersions, lamellar layers and the like. In these preparations the peptide to be delivered is incorporated as part of a liposome, alone or in conjunction with a molecule which binds to, e.g., a receptor prevalent among lymphoid cells, such as monoclonal antibodies which bind to the CD45 antigen, or with other therapeutic or immunogenic compositions. Thus, liposomes filled with a desired peptide of the invention can be directed to the site of lymphoid cells, where the liposomes then deliver the selected therapeutic/immunogenic peptide compositions. Liposomes for use in the invention are formed from standard vesicle-forming lipids, which generally include neutral and negatively charged phospholipids and a sterol, such as cholesterol. The selection of lipids is generally guided by consideration of, e.g., liposome size, acid lability and stability of the liposomes in the blood stream. A variety of methods are available for preparing liposomes, as described in, e.g., Szoka et al., Ann. Rev. Biophys. Bioeng. 9; 467 (1980), USA U.S. Pat. Nos. 4,235,871, 4,501,728 U.S. Pat. Nos. 4,501,728, 4,837,028, and 5,019,369.

[0232] For targeting to the immune cells, a ligand to be incorporated into the liposome can include, e.g., antibodies or fragments thereof specific for cell surface determinants of the desired immune system cells. A liposome suspension containing a peptide may be administered intravenously, locally, topically, etc. in a dose which varies according to, inter alia, the manner of administration, the peptide being delivered, and the stage of the disease being treated.

[0233] For solid compositions, conventional or nanoparticle nontoxic solid carriers may be used which include, for example, pharmaceutical grades of mannitol, lactose, starch, magnesium stearate, sodium saccharin, talcum, cellulose, glucose, sucrose, magnesium carbonate, and the like. For oral administration, a pharmaceutically acceptable nontoxic composition is formed by incorporating any of the normally employed excipients, such as those carriers previously listed, and generally 10-95% of active ingredient, that is, one or more peptides of the invention, and more preferably at a concentration of 25%-75%.

[0234] For aerosol administration, the immunogenic peptides are preferably supplied in finely divided form along with a surfactant and propellant. Typical percentages of peptides are 0.01%-20% by weight, preferably 1%-10%. The surfactant must, of course, be nontoxic, and preferably soluble in the propellant. Representative of such agents are the esters or partial esters of fatty acids containing from 6 to 22 carbon atoms, such as caproic, octanoic, lauric, palmitic, stearic, linoleic, linolenic, eleosteric and oleic acids with an aliphatic polyhydric alcohol or its cyclic anhydride. Mixed esters, such as mixed or natural glycerides may be employed. The surfactant may constitute 0.1%-20% by weight of the composition, preferably 0.25-5%. The balance of the composition is ordinarily propellant. A carrier can also be included as desired, as with, e.g., lecithin for intranasal delivery.

[0235] Cytotoxic T-cells (CTLs) recognize an antigen in the form of a peptide bound to an MHC molecule rather than the intact foreign antigen itself. The MHC molecule itself is located at the cell surface of an antigen presenting cell. Thus, an activation of CTLs is only possible if a trimeric complex of peptide antigen, MHC molecule, and antigen presenting cell (APC) is present. Correspondingly, it may enhance the immune response if not only the peptide is used for activation of CTLs, but if additionally APCs with the respective MHC molecule are added. Therefore, in some embodiments the vaccine or immunogenic composition according to the present disclosure alternatively or additionally contains at least one antigen presenting cell, preferably a population of APCs.

[0236] The vaccine or immunogenic composition may thus be delivered in the form of a cell, such as an antigen presenting cell, for example as a dendritic cell vaccine. The antigen presenting cells such as a dendritic cell may be pulsed or loaded with a neoantigenic peptide as herein disclosed, may comprise an expression construct encoding a neoantigenic peptide as herein disclosed, or may be genetically modified (via DNA or RNA transfer) to express one, two or more of the herein disclosed neoantigenic peptides, for example at least 2, 3, 4, 5, 6, 7, 8, 9, or 10 neoantigenic peptides.

[0237] Suitable vaccines or immunogenic compositions may also be in the form of DNA or RNA relating to neoantigenic peptides as described herein. For example, DNA or RNA encoding one or more neoantigenic peptides or proteins derived therefrom may be used as the vaccine, for example by direct injection to a subject. For example, DNA or RNA encoding at least 2, 3, 4, 5, 6, 7, 8, 9, 10, 11, 12, 13, 14, 15, 16, 17, 18, 19, 20, 21, 22, 23, 24 or 25 neoantigenic peptides or proteins derived therefrom.

[0238] A number of methods are conveniently used to deliver the nucleic acids to the patient. For instance, the nucleic acid can be delivered directly, as “naked DNA”. This approach is described, for instance, in Wolff et al., Science 247:1465-1468 (1990) as well as USAU.S. U.S. Pat. Nos. 5,580,859 and 5,589,466. The nucleic acids can also be administered using ballistic delivery as described, for instance, in U.S. Pat. No. 5,204,253. Particles comprised solely of DNA can be administered. Alternatively, DNA can be adhered to particles, such as gold particles.

[0239] The nucleic acids can also be delivered complexed to cationic compounds, such as cationic lipids. Lipid-mediated gene delivery methods are described, for instance, in 9618372WOAWO 96/18372; 9324640WOAWO 93/24640; Mannino & Gould-Fogerite, BioTechniques 6 (7): 682-691 (1988); 5279833USARose U.S. Pat. Nos. 5,279,833; 9,106,309WOAWO 91/06309; and Felgner et al., Proc. Natl. Acad. Sci. USA 84:7413-7414 (1987).

[0240] Delivery systems may optionally include cell-penetrating peptides, nanoparticulate encapsulation, virus like particles, liposomes, or any combination thereof. Cell penetrating peptides include TAT peptide, herpes simplex virus VP22, transportan, Antp. Liposomes may be used as a delivery system. Listeria vaccines or electroporation may also be used.

[0241] The one or more neoantigenic peptides may also be delivered via a bacterial or viral vector containing DNA or RNA sequences which encode one or more neoantigenic peptides. The DNA or RNA may be delivered as a vector itself or within attenuated bacteria virus or live attenuated virus, such as vaccinia or fowlpox. This approach involves the use of vaccinia virus as a vector to express nucleotide sequences that encode the peptide of the invention. Upon introduction into an acutely or chronically infected host or into a noninfected host, the recombinant vaccinia virus expresses the immunogenic peptide, and thereby elicits a host CTL response. Vaccinia vectors and methods useful in immunization protocols are described in, e.g., U.S. Pat. No. 4,722,848. Another vector is BCG (Bacille Calmette Guerin). BCG vectors are described in Stover et al. (Nature 351:456-460 (1991)). A wide variety of other vectors useful for therapeutic administration or immunization of the peptides of the invention, e.g., Salmonella typhi vectors and the like, will be apparent to those skilled in the art from the description herein.

[0242] An appropriate mean of administering nucleic acids encoding the peptides as herein described involves the use of minigene constructs encoding multiple epitopes. To create a DNA sequence encoding the selected CTL epitopes (minigene) for expression in human cells, the amino acid sequences of the epitopes are reverse translated. A human codon usage table is used to guide the codon choice for each amino acid. These epitope-encoding DNA sequences are directly adjoined, creating a continuous polypeptide sequence. To optimize expression and/or immunogenicity, additional elements can be incorporated into the minigene design. Examples of amino acid sequence that could be reverse translated and included in the minigene sequence include: helper T lymphocyte, epitopes, a leader (signal) sequence, and an endoplasmic reticulum retention signal. In addition, MHC presentation of CTL epitopes may be improved by including synthetic (e.g. poly-alanine) or naturally-occurring flanking sequences adjacent to the CTL epitopes.

[0243] The minigene sequence is converted to DNA by assembling oligonucleotides that encode the plus and minus strands of the minigene. Overlapping oligonucleotides (30-100 bases long) are synthesized, phosphorylated, purified and annealed under appropriate conditions using well known techniques. The ends of the oligonucleotides are joined using T4 DNA ligase. This synthetic minigene, encoding the CTL epitope polypeptide, can then cloned into a desired expression vector.

[0244] Standard regulatory sequences well known to those of skill in the art are included in the vector to ensure expression in the target cells. Thus, the DNA or RNA encoding the neoantigenic peptide(s) may typically be operably linked to one or more of:
[0245] a promoter that can be used to drive nucleic acid molecule expression. AAV ITR can serve as a promoter and is advantageous for eliminating the need for an additional promoter element. For ubiquitous expression, the following promoters can be used: CMV (notably human cytomegalovirus immediate early promoter (hCMV-IE)), CAG, CBh, PGK, SV40, RSV, Ferritin heavy or light chains, etc. For brain expression, the following promoters can be used: Synapsinl for all neurons, CaMKIIalpha for excitatory neurons, GAD67 or GAD65 or VGAT for GABAergic neurons, etc. Promoters used to drive RNA synthesis can include: Pol III promoters such as U6 or HI. The use of a Pol II promoter and intronic cassettes can be used to express guide RNA (gRNA). Typically, the promoter includes a down-stream cloning site for minigene insertion. For examples of suitable promoters sequences, see notably U.S. Pat. Nos. 5,580,859 and 5,589,466.
[0246] Transcriptional transactivators or other enhancer elements, which can also increase transcription activity, e.g. the regulatory R region from the 5′ long terminal repeat (LTR) of human T-cell leukemia virus type 1 (HTLV-1) (which when combined with a CMV promoter has been shown to induce higher cellular immune response).
[0247] Translation optimizing sequences e.g. a Kozak sequence flanking the AUG initiator codon (ACCAUGG) within mRNA, and codon optimization.

[0248] Additional vector modifications may be desired to optimize minigene expression and immunogenicity. In some cases, introns are required for efficient gene expression, and one or more synthetic or naturally-occurring introns could be incorporated into the transcribed region of the minigene. The inclusion of mRNA stabilization sequences can also be considered for increasing minigene expression. It has recently been proposed that immunostimulatory sequences (ISSs or CpGs) play a role in the immunogenicity of DNA′ vaccines. These sequences could be included in the vector, outside the minigene coding sequence, if found to enhance immunogenicity.

[0249] In some embodiments, a bicistronic expression vector, to allow production of the minigene-encoded epitopes and a second protein included to enhance or decrease immunogenicity can be used.

[0250] DNA vaccines or immunogenic compositions as herein described can be enhanced by co-delivering cytokines that promote cell-mediated immune responses, such as IL-2, IL-12, IL-18, GM-CSF and IFNγ. CXC chemokines such as IL-8, and CC chemokines such as macrophage inflammatory protein (MIP)-1α, MIP-3α, MIP-3β, and RANTES, may increase the potency of the immune response. DNA vaccine immunogenicity can also be enhanced by co-delivering plasmid-encoded cytokine-inducing molecules (e.g. LeIF), co-stimulatory and adhesion molecules, e.g. B7-1 (CD80) and/or B7-2 (CD86). Helper (HTL) epitopes could be joined to intracellular targeting signals and expressed separately from the CTL epitopes. This would allow direction of the HTL epitopes to a cell compartment different than the CTL epitopes. If required, this could facilitate more efficient entry of HTL epitopes into the MHC class II pathway, thereby improving CTL induction. In contrast to CTL induction, specifically decreasing the immune response by co-expression of immunosuppressive molecules (e.g. TGF-β) may be beneficial in certain diseases.

[0251] Once an expression vector is selected, the minigene is cloned into the polylinker region downstream of the promoter. This plasmid is transformed into an appropriate E. coli strain, and DNA is prepared using standard techniques. The orientation and DNA sequence of the minigene, as well as all other elements included in the vector, are confirmed using restriction mapping and DNA sequence analysis. Bacterial cells harboring the correct plasmid can be stored as a master cell bank and a working cell bank.

[0252] Purified plasmid DNA can be prepared for injection using a variety of formulations. The simplest of these is reconstitution of lyophilized DNA in sterile phosphate-buffer saline (PBS). A variety of methods have been described, and new techniques may become available. As noted above, nucleic acids are conveniently formulated with cationic lipids. In addition, glycolipids, fusogenic liposomes, peptides and compounds referred to collectively as protective, interactive, non-condensing (PINC) could also be complexed to purified plasmid DNA to influence variables such as stability, intramuscular dispersion, or trafficking to specific organs or cell types.

[0253] Vaccines or immunogenic compositions comprising peptides may be administered in combination with vaccines or immunogenic compositions comprising polynucleotide encoding the peptides. For example, administration of peptide vaccine and DNA vaccine may be alternated in a prime-boost protocol. For example, priming with a peptide immunogenic composition and boosting with a DNA immunogenic composition is contemplated, as is priming with a DNA immunogenic composition and boosting with a peptide immunogenic composition.

[0254] The present disclosure also encompasses a method for producing a vaccine composition comprising the steps of:
[0255] a) Optionally, identifying at least one neoantigenic peptide according to the method as previously described;
[0256] b) producing said at least one neoantigenic peptide, at least one polypeptide encoding neoantigenic peptide(s), or at least a vector comprising said polypeptide(s) as described herein; and
[0257] c) optionally adding physiologically acceptable buffer, excipient and/or adjuvant and producing a vaccine with said at least one neoantigenic peptide, polypeptide or vector.
   Another aspect of the present disclosure, is a method for producing a DC vaccine, wherein said DCs present at least one neoantigenic peptide as herein disclosed.

### Antibodies TCRs, CARs and Derivatives Thereof

[0258] The present disclosure also relates to an antibody or an antigen-binding fragment thereof that specifically binds a neoantigenic peptide as herein defined.

[0259] In some embodiments, the neoantigenic peptide is in association with an MHC or HLA molecule.

[0260] Typically, said antibody, or antigen-binding fragment thereof binds a neoantigenic peptide as herein defined, alone or optionally in association with an MHC or HLA molecule (i.e., peptide MHC complex) with a dissociation constant (K_{d}) of about 2×10⁻⁷ M or less. In certain embodiments, the K_{d} is about 2×10⁻⁷ M or less, about 1×10⁻⁷ M or less, about 9×10⁻⁸ M or less, about 1×10⁻⁸ M or less, about 9×10⁻⁹ M or less, about 5×10⁻⁹ M or less, about 4×10⁻⁹ M or less, about 3×10⁻⁹ or less, about 2×10⁻⁹ M or less, or about 1×10⁻⁹ M or less, or about 1×10⁻¹⁰ M or less, or about 1×10⁻¹² M or less. In certain non-limiting embodiments, the K_{d} is from about 1.5×10⁻⁶ M to about 2.7×10⁻¹² M.

[0261] The present disclosure thus includes antibodies targeting MHC-restricted peptides and in particular targeting neoantigenic peptides as herein defined in association with at an MHC (or HLA) molecule (peptide MHC complex) or TCR-like antibodies (see notably for detailed description and method of production Høydahl, Lene Støkken et al. “Targeting the MHC Ligandome by Use of TCR-Like Antibodies.” Antibodies (Basel, Switzerland) vol. 8,2 32. 9 May 2019, doi: 10.3390/antib8020032; He, Qinghua et al. “TCR-like antibodies in cancer immunotherapy.” Journal of hematology & oncology vol. 12,1 99. 14 Sep. 2019, doi: 10.1186/s13045-019-0788-4; Trenevska I, Li D, Banham A H. Therapeutic Antibodies against Intracellular Tumor Antigens. Front Immunol. 2017 Aug. 18; 8:1001. doi: 10.3389/fimmu.2017.01001. PMID: 28868054; PMCID: PMC5563323; or. Chang A Y, Gejman R S, Brea E J, Oh C Y, Mathias M D, Pankov D, Casey E, Dao T, Scheinberg D A. Opportunities and challenges for TCR mimic antibodies in cancer therapy. Expert Opin Biol Ther. 2016 August; 16(8):979-87. doi: 10.1080/14712598.2016.1176138. Epub 2016 Apr. 27. PMID: 27094818; PMCID: PMC4936943).

[0262] In some embodiments, TCR-like antibodies can also be conjugated with cytotoxic organic compounds, such as antibody-drug conjugates (ADCs), radionuclides, and protein toxins, to mediate the specific killing of tumor cells (Dao T, et al. Therapeutic bispecific T-cell engager antibody targeting the intracellular oncoprotein WT1. Nat Biotechnol. 2015; 33(10):1079-1086). Furthermore, immunomodulators or secondary antibodies can be conjugated with the TCR-like antibodies to mediate specific immune responses around the tumor site, as in bi-specific T cell engagers (BiTE) (Trenevska I, Li D, Banham A H. Therapeutic antibodies against intracellular tumor antigens. Front Immunol. 2017; 8:1001).

[0263] To promote the infiltration and recognition of tumor cells by lymphocytes T (LT), another strategy consists in using antibodies capable of recognizing more than one antigenic target simultaneously and more particularly two antigenic targets simultaneously. There are many formats of bispecific antibodies. BiTE (bi-specific T-cell engager) are the first to have been developed. These are proteins of fusion consisting of two scFvs (variable domains heavy VH and light V_{L} chains) from two antibodies linked by a binding peptide: one recognizes the LT marker (CD3+) and the other a tumor antigen. The goal is to favor recruitment and activation of LTs in contact with tumor, thus leading to cell lysis tumor (See for review Patrick A. Baeuerle and Carsten Reinhardt; Bispecific T-Cell Engaging Antibodies for Cancer Therapy; Cancer Res 2009; 69: (12). Jun. 15, 2009; and Galaine et al., Innovations & Thérapeutiques en Oncologie, vol. 3-n°3-7, mai-août 2017).

[0264] In a particular embodiment, said antibody is thus a bi-specific T-cell engager (BiTE), typically derived from a TCR-like antibody that specifically binds a tumor neoantigenic peptide as herein defined, optionally in association with a MHC or an HLA molecule and which further targets at least an immune cell antigen. Typically, the immune cell is a T cell, a NK cell or a dendritic cell. In this context, the targeted immune cell antigen may be for example CD3, CD16, CD30 or a TCR.

[0265] The term “antibody” herein is used in the broadest sense and includes polyclonal and monoclonal antibodies, including intact antibodies and functional (antigen-binding) antibody fragments, including fragment antigen binding (Fab) fragments, F(ab′)2 fragments, Fab′ fragments, Fv fragments, recombinant IgG (rlgG) fragments, variable heavy chain (V_{H}) regions capable of specifically binding the antigen, single chain antibody fragments, including single chain variable fragments (scFv), and single domain antibodies (e.g., VHH antibodies, sdAb, sdFv, nanobody) fragments. The term encompasses genetically engineered and/or otherwise variants modified forms of immunoglobulins, such as intrabodies, peptibodies, chimeric antibodies, fully human antibodies, humanized antibodies, and heteroconjugate antibodies, multispecific, e.g., bispecific, antibodies, diabodies, triabodies, and tetrabodies, tandem di-scFv, tandem tri-scFv. Unless otherwise stated, the term “antibody” should be understood to encompass functional antibody and fragments thereof. The term also encompasses intact or full-length antibodies, including antibodies of any class or sub-class, including IgG and sub-classes thereof, IgG1, IgG2, IgG3, IgG4, IgM, IgE, IgA, and IgD. In some embodiments, the antibody comprises a light chain variable domain and a heavy chain variable domain, e.g. in an scFv format.

[0266] Antibodies include variant polypeptide species that have one or more amino acid substitutions, insertions, or deletions in the native amino acid sequence, provided that the antibody retains or substantially retains its specific binding function. Conservative substitutions of amino acids are well known and described above.

[0267] The present disclosure further includes a method of producing an antibody, or antigen-binding fragment thereof, comprising a step of selecting antibodies that bind to a tumor neoantigen peptide as herein defined, optionally in association with an MHC or HLA molecule, with a dissociation constant (K_{d}) of about 2×10⁻⁷ M or less. In certain embodiments, the K_{d} is about 2×10⁻⁷ M or less, about 1×10⁻⁷ M or less, about 9×10⁻⁸ M or less, about 1×10⁻⁸ M or less, about 9×10⁻⁹ M or less, about 5×10⁻⁹ M or less, about 4×10⁻⁹ M or less, about 3×10⁻⁹ or less, about 2×10⁻⁹ M or less, or about 1×10⁻⁹ M or less, or about 1×10⁻¹⁰ M or less, or about 1×10⁻¹² M or less.

[0268] In certain embodiments, the antibody is of murine, human or camelid (e.g., lama) origin.

[0269] In some embodiments, the antibodies are selected from a library of human antibody sequences. In some embodiments, the antibodies are generated by immunizing an animal with a polypeptide comprising the neoantigenic peptide, optionally in association with an MHC or HLA molecule, followed by the selection step.

[0270] Antibodies including chimeric, humanized or human antibodies can be further affinity matured and selected as described above. Humanized antibodies contain rodent-sequence derived CDR regions; typically the rodent CDRs are engrafted into a human framework, and some of the human framework residues may be back-mutated to the original rodent framework residue to preserve affinity, and/or one or a few of the CDR residues may be mutated to increase affinity. Fully human antibodies have no murine sequence, and are typically produced via phage display technologies of human antibody libraries, or immunization of transgenic mice whose native immunoglobin loci have been replaced with segments of human immunoglobulin loci.

[0271] Antibodies produced by said method, as well as immune cells expressing such antibodies or fragments thereof are also encompassed by the present disclosure.

[0272] The present disclosure also encompasses pharmaceutical compositions comprising one or more antibodies as herein disclosed alone or in combination with at least one other agent, such as a stabilizing compound, which may be administered in any sterile, biocompatible pharmaceutical carrier and optionally formulated with formulated with sterile pharmaceutically acceptable buffer(s), diluent(s), and/or excipient(s). Pharmaceutically acceptable carriers typically enhance or stabilize the composition, and/or can be used to facilitate preparation of the composition. Pharmaceutically acceptable carriers include solvents, dispersion media, coatings, antibacterial and antifungal agents, isotonic and absorption delaying agents, and the like that are physiologically compatible and in some embodiments pharmaceutically inert.

[0273] Administration of a pharmaceutical composition comprising antibodies as herein disclosed can be accomplished orally or parenterally. Methods of parenteral delivery include topical, intra-arterial (directly to the tumor), intramuscular, spinal, subcutaneous, intramedullary, intrathecal, intraventricular, intravenous, intraperitoneal, or intranasal administration.

[0274] Thus, in addition to the active ingredients, these pharmaceutical compositions may contain suitable pharmaceutically acceptable carriers comprising excipients and auxiliaries which facilitate processing of the active compounds into preparations which can be used pharmaceutically. Further details on techniques for formulation and administration may be found in the latest edition of Remington's Pharmaceutical Sciences (Ed. Maack Publishing Co, Easton, Pa.).

[0275] Depending on the route of administration, the active compound, i.e., antibody, bispecific and multispecific molecule, may be coated in a material to protect the compound from the action of acids and other natural conditions that may inactivate the compound.

[0276] The composition is typically sterile and preferably fluid. Proper fluidity can be maintained, for example, by use of coating such as lecithin, by maintenance of required particle size in the case of dispersion and by use of surfactants. In many cases, it is preferable to include isotonic agents, for example, sugars, polyalcohols such as mannitol or sorbitol, and sodium chloride in the composition. Long-term absorption of the injectable compositions can be brought about by including in the composition an agent which delays absorption, for example, aluminum monostearate or gelatin.

[0277] Pharmaceutical compositions for oral administration can be formulated using pharmaceutically acceptable carriers well known in the art in dosages suitable for oral administration. Such carriers enable the pharmaceutical compositions to be formulated as tablets, pills, dragees, capsules, liquids, gels, syrups, slurries, suspensions and the like, for ingestion by the patient.

[0278] Pharmaceutical preparations for oral use can be obtained through combination of active compounds with solid excipient, optionally grinding a resulting mixture, and processing the mixture of granules, after adding suitable auxiliaries, if desired, to obtain tablets or dragee cores. Suitable excipients are carbohydrate or protein fillers such as sugars, including lactose, sucrose, mannitol, or sorbitol; starch from corn, wheat, rice, potato, or other plants; cellulose such as methyl, cellulose, hydroxypropylmethylcellulose, or sodium carboxymethylcellulose; and gums including arabic and tragacanth; and proteins such as gelatin and collagen. If desired, disintegrating or solubilizing agents may be added, such as the cross-linked polyvinyl pyrrolidone, agar, alginic acid, or a salt thereof, such as sodium alginate.

[0279] Dragee cores are provided with suitable coatings such as concentrated sugar solutions, which may also contain gum arabic, talc, polyvinylpyrrolidone, carbopol gel, polyethylene glycol and/or titanium dioxide, lacquer solutions, and suitable organic solvents or solvent mixtures. Dyestuffs or pigments may be added to the tablets or dragee coatings for product identification or to characterize the quantity of active compound, ie. dosage.

[0280] Pharmaceutical preparations that can be used orally include push-fit capsules made of gelatin, as well as soft, sealed capsules made of gelatin and a coating such as glycerol or sorbitol. Push-fit capsules can contain active ingredients mixed with a filler or binders such as lactose or starches, lubricants such as talc or magnesium stearate, and optionally, stabilizers. In soft capsules, the active compounds may be dissolved or suspended in suitable liquids, such as fatty oils, liquid paraffin, or liquid polyethylene glycol with or without stabilizers.

[0281] Pharmaceutical formulations for parenteral administration include aqueous solutions of active compounds. For injection, the pharmaceutical compositions of the invention may be formulated in aqueous solutions, preferably in physiologically compatible buffers such as Hank's solution, Ringer's solution, or physiologically buffered saline. Aqueous injection suspensions may contain substances that increase viscosity of the suspension, such as sodium carboxymethyl cellulose, sorbitol, or dextran. Additionally, suspensions of the active compounds may be prepared as appropriate oily injection suspensions. Suitable lipophilic solvents or vehicles include fatty oils such as sesame oil, or synthetic fatty acid esters, such as ethyl oleate or triglycerides, or liposomes. Optionally, the suspension may also contain suitable stabilizers or agents which increase the solubility of the compounds to allow for the preparation of highly concentrated solutions.

[0282] For topical or nasal administration, penetrants appropriate to the particular barrier to be permeated are used in the formulation. Such penetrants are generally known in the art.

[0283] Pharmaceutical compositions of the disclosure can be prepared in accordance with methods well known and routinely practiced in the art. See. e.g., Remington: The Science and Practice of Pharmacy, Mack Publishing Co., 20th ed., 2000; and Sustained and Controlled Release Drug Delivery Systems, J R. Robinson, ed., Marcel Dekker, Inc., New York, 1978. Pharmaceutical compositions are preferably manufactured under GMP conditions.

[0284] The present disclosure also encompasses a recombinant T cell receptor (TCR) that targets a neoantigenic peptide as herein defined in association with an MHC or HLA molecule.

[0285] The present disclosure further includes a method of producing a TCR, or an antigen-binding fragment thereof, comprising a step of selecting TCRs that bind to a tumor neoantigen peptide as herein defined, optionally in association with an MHC or HLA molecule, with a dissociation constant (K_{d}) of about 2×10⁻⁷ M or less. In certain embodiments, the K_{d} is about 2×10⁻⁷ M or less, about 1×10⁻⁷ M or less, about 9×10⁻⁸ M or less, about 1×10⁻⁸ M or less, about 9×10⁻⁹ M or less, about 5×10⁻⁹ M or less, about 4×10⁻⁹ M or less, about 3×10⁻⁹ or less, about 2×10⁻⁹ M or less, or about 1×10⁻⁹ M or less, or about 1×10⁻¹⁰ M or less, or about 1×10⁻¹² M or less . . . .

[0286] Nucleic acid encoding the TCR can be obtained from a variety of sources, such as by polymerase chain reaction (PCR) amplification of naturally occurring TCR DNA sequences, followed by expression of antibody variable regions, followed by the selecting step described above. In some embodiments, the TCR is obtained from T-cells isolated from a patient, or from cultured T-cell hybridomas. In some embodiments, the TCR clone for a target antigen has been generated in transgenic mice engineered with human immune system genes (e.g., the human leukocyte antigen system, or HLA). See, e.g., tumor antigens (see, e.g., Parkhurst et al. (2009) Clin Cancer Res. 15:169-180 and Cohen et al. (2005) J Immunol. 175:5799-5808. In some embodiments, phage display is used to isolate TCRs against a target antigen (see, e.g., Varela-Rohena et al. (2008) Nat Med. 14:1390-1395 and Li (2005) Nat Biotechnol. 23:349-354.

[0287] A “T cell receptor” or “TCR” refers to a molecule that contains a variable α and β chains (also known as TCRa and TCRb, respectively) or a variable γ and δ chains (also known as TCRg and TCRd, respectively) and that is capable of specifically binding to an antigen peptide bound to a MHC receptor. In some embodiments, the TCR is in the αβ form. Typically, TCRs that exist in αβ and γδ forms are generally structurally similar, but T cells expressing them may have distinct anatomical locations or functions. A TCR can be found on the surface of a cell or in soluble form. Generally, a TCR is found on the surface of T cells (or T lymphocytes) where it is generally responsible for recognizing antigens bound to major histocompatibility complex (MHC) molecules through its extracellular binding domain. In some embodiments, a TCR also can contain a constant domain, a transmembrane domain and/or a short cytoplasmic tail (see, e.g., Janeway et ah, Immunobiology: The Immune System in Health and Disease, 3rd Ed., Current Biology Publications, p. 4:33, 1997). For example, in some aspects, each chain of the TCR can possess one N-terminal immunoglobulin variable domain, one immunoglobulin constant domain, a transmembrane region, and a short cytoplasmic tail at the C-terminal end. In some embodiments, a TCR is associated with invariant proteins of the CD3 complex involved in mediating signal transduction. Unless otherwise stated, the term “TCR” should be understood to encompass functional TCR fragments thereof. The term also encompasses intact or full-length TCRs, including TCRs in the αβ form or γδ form.

[0288] Thus, for purposes herein, reference to a TCR includes any TCR or functional fragment, such as an antigen-binding portion of a TCR that binds to a specific antigenic peptide bound in an MHC molecule, i.e. MHC-peptide complex. An “antigen-binding portion” or antigen-binding fragment” of a TCR, which can be used interchangeably, refers to a molecule that contains a portion of the structural domains of a TCR, but that binds the antigen (e.g. MHC-peptide complex) to which the full TCR binds. In some cases, an antigen-binding portion contains the variable domains of a TCR, such as variable a chain and variable β chain of a TCR, sufficient to form a binding site for binding to a specific MHC-peptide complex, such as generally where each chain contains three complementarity determining regions.

[0289] In some embodiments, the variable domains of the TCR chains associate to form loops, or complementarity determining regions (CDRs) analogous to immunoglobulins, which confer antigen recognition and determine peptide specificity by forming the binding site of the TCR molecule and determine peptide specificity. Typically, like immunoglobulins, the CDRs are separated by framework regions (FRs) {see, e.g., Jores et al., Pwc. Nat'l Acad. Sci. U.S.A. 87:9138, 1990; Chothia et al., EMBO J. 7:3745, 1988; see also Lefranc et al., Dev. Comp. Immunol. 27:55, 2003). In some embodiments, CDR3 is the main CDR responsible for recognizing processed antigen, although CDR1 of the alpha chain has also been shown to interact with the N-terminal part of the antigenic peptide, whereas CDR1 of the beta chain interacts with the C-terminal part of the peptide. CDR2 is thought to recognize the MHC molecule. In some embodiments, the variable region of the β-chain can contain a further hypervariability (HV4) region.

[0290] In some embodiments, the TCR chains contain a constant domain. For example, like immunoglobulins, the extracellular portion of TCR chains {e.g., α-chain, β-chain) can contain two immunoglobulin domains, a variable domain {e.g., Va or Vp; typically amino acids 1 to 116 based on Kabat numbering Kabat et al., “Sequences of Proteins of Immunological Interest, US Dept. Health and Human Services, Public Health Service National Institutes of Health, 1991, 5th ed.) at the N-terminus, and one constant domain {e.g., α-chain constant domain or Ca, typically amino acids 117 to 259 based on Kabat, β-chain constant domain or Cp, typically amino acids 117 to 295 based on Kabat) adjacent to the cell membrane. For example, in some cases, the extracellular portion of the TCR formed by the two chains contains two membrane-proximal constant domains, and two membrane-distal variable domains containing CDRs. The constant domain of the TCR domain contains short connecting sequences in which a cysteine residue forms a disulfide bond, making a link between the two chains. In some embodiments, a TCR may have an additional cysteine residue in each of the α and β chains such that the TCR contains two disulfide bonds in the constant domains.

[0291] In some embodiments, the TCR chains can contain a transmembrane domain. In some embodiments, the transmembrane domain is positively charged. In some cases, the TCR chains contain a cytoplasmic tail. In some cases, the structure allows the TCR to associate with other molecules like CD3. For example, a TCR containing constant domains with a transmembrane region can anchor the protein in the cell membrane and associate with invariant subunits of the CD3 signaling apparatus or complex.

[0292] Generally, CD3 is a multi-protein complex that can possess three distinct chains (γ, δ, and ε) in mammals and the ζ-chain. For example, in mammals the complex can contain a CD3γ chain, a CD3ζ chain, two CD3s chains, and a homodimer of CD3ζ chains. The CD3y, CD35, and CD3s chains are highly related cell surface proteins of the immunoglobulin superfamily containing a single immunoglobulin domain. The transmembrane regions of the CD3y, CD35, and CD3s chains are negatively charged, which is a characteristic that allows these chains to associate with the positively charged T cell receptor chains. The intracellular tails of the CD3y, CD35, and CD3s chains each contain a single conserved motif known as an immunoreceptor tyrosine-based activation motif or ITAM, whereas each CD3 chain has three. Generally, ITAMs are involved in the signaling capacity of the TCR complex. These accessory molecules have negatively charged transmembrane regions and play a role in propagating the signal from the TCR into the cell. The CD3-and-chains, together with the TCR, form what is known as the T cell receptor complex.

[0293] In some embodiments, the TCR may be a heterodimer of two chains α and β (or optionally γ and δ) or it may be a single chain TCR construct. In some embodiments, the TCR is a heterodimer containing two separate chains (α and β chains or γ and δ chains) that are linked, such as by a disulfide bond or disulfide bonds.

[0294] While T-cell receptors (TCRs) are transmembrane proteins and do not naturally exist in soluble form, antibodies can be secreted as well as membrane bound. Importantly, TCRs have the advantage over antibodies that they in principle can recognize peptides generated from all degraded cellular proteins, both intra- and extracellular, when presented in the context of MHC molecules. Thus TCRs have important therapeutic potential.

[0295] The present disclosure also relates to soluble T-cell receptors (sTCRs) that contain the antigen recognition part directed against a tumor neoantigenic peptide as herein disclosed (see notably Walseng E, Wälchli S, Fallang L E, Yang W, Vefferstad A, Areffard A, et al. (2015) Soluble T-Cell Receptors Produced in Human Cells for Targeted Delivery. PLoS ONE 10(4): e0119559). In a particular embodiment, the soluble TCR can be fused to an antibody fragment directed to a T cell antigen, optionally wherein the targeted antigen is CD3 or CD16 (see for example Boudousquie, Caroline et al. “Polyfunctional response by ImmTAC (IMCgp100) redirected CD8+ and CD4+ T cells.” Immunology vol. 152,3 (2017): 425-438. doi: 10.1111/imm.12779).

[0296] In certain embodiments, the present disclosure encompasses Recombinant HLA-independent (or non-HLA restricted) T cell receptors (referred to as “HI-TCRs”) that bind to a neoantigenic peptide as herein defined in an HLA-independent manner. “HI-TCRs” as herein intended and which are well-suited to the present invention are described in International Application No. WO 2019/157454. Thus, typically HI-TCRs according to the present disclosure comprise an antigen binding chain that comprises: (a) an antigen-binding domain (as previously defined) that binds to an antigen in an HLA-independent manner, for example, an antigen-binding fragment of an immunoglobulin variable region; and (b) a constant domain that is capable of associating with (and consequently activating) a CD33 polypeptide. Because typically TCRs bind antigen in a HLA-dependent manner, the antigen-binding domain that binds in an HLA-independent manner is heterologous. Preferably, the antigen-binding domain or fragment thereof comprises: (i) an antigen-binding domain comprising or consisting of an heavy chain variable region (V_{H}) of an antibody and/or (ii) a light chain variable region (V_{L}) of an antibody. The constant domain of the TCR is, for example, a native or modified TRAC polypeptide, or a native or modified TRBC polypeptide. The constant domain of the TCR is, for example, a native TCR constant domain (alpha or beta) or fragment thereof. Unlike chimeric antigen receptors, which typically themselves comprise an intracellular signaling domain, the HI-TCR does not directly produce an activating signal; instead, the antigen-binding chain associates with and consequently activates a CD3ζ polypeptide. The immune cells comprising the recombinant TCR provide superior activity when the antigen has a low density on the cell surface of less than about 10,000 molecules per cell.

[0297] The CD3ζ polypeptide is, for example, a native CD3ζ polypeptide or a modified CD3ζ polypeptide. The CD3ζ polypeptide is optionally fused to an intracellular domain of a co-stimulatory molecule or a fragment thereof. Alternatively, the antigen binding domain optionally comprises a co-stimulatory region, e.g. intracellular domain, that is capable of stimulating an immunoresponsive cell upon the binding of the antigen binding chain to the antigen. Example co-stimulatory molecules include CD28, 4-1BB, OX40, ICOS, DAP-10, fragments thereof, or a combination thereof.

[0298] In some embodiments, the recombinant HI-TCR is expressed by a transgene that is integrated at an endogenous gene locus of the immunoresponsive cell, for example, a CD3δ locus, a CD3ε locus, a CD247 locus, a B2M locus, a TRAC locus, a TRBC locus, a TRDC locus and/or a TRGC locus. In most embodiments, expression of the recombinant HI-TCR is driven from the endogenous TRAC or TRBC gene locus. In some embodiments, the transgene encoding a portion of the recombinant HI-TCR is integrated into the endogenous TRAC and/or TRBC locus in a manner that disrupts or abolishes the endogenous expression of a TCR comprising a native TCR α chain and/or a native TCR β chain. This disruption prevents or eliminates mispairing between the recombinant TCR and a native TCR α chain and/or a native TCR β chain in the immunoresponsive cell. The endogenous gene locus may also comprise a modified transcription terminator region, for example, a TK transcription terminator, a GCSF transcription terminator, a TCRA transcription terminator, an HBB transcription terminator, a bovine growth hormone transcription terminator, an SV40 transcription terminator, and a P2A element.

[0299] In some embodiments of the present disclosure, the recombinant TCR and typically the HI-TCR comprises an extracellular antigen-binding domain which is capable of dimerizing with a second extracellular antigen-binding domain. Typically, the second extracellular antigen-binding domain binds a tumor antigen, preferably wherein the tumor antigen is selected from pHER95, CD19, MUC16, MUC1, CAIX, CEA, CD8, CD7, CD10, CD20, CD22, CD30, CD70, CLL1, CD33, CD34, CD38, CD41, CD44, CD49f, CD56, CD74, CD133, CD138, EGP-2, EGP-40, EpCAM, Erb-B2, Erb-B3, Erb-B4, FBP, Fetal acetylcholine receptor, folate receptor-a, GD2, GD3, HER-2, hTERT, IL-13R-a2, κ-light chain, KDR, LeY, L1 cell adhesion molecule, MAGE-A1, Mesothelin, MAGEA3, p53, MART1, GP100, Proteinase3 (PR1), Tyrosinase, Survivin, hTERT, EphA2, NKG2D ligands, NY-ESO-1, oncofetal antigen (h5T4), PSCA, PSMA, ROR1, TAG-72, VEGF-R2, WT-1, BCMA, CD123, CD44V6, NKCS1, EGFIR, EGFR-VIII, CD99, CD70, ADGRE2, CCR1, LILRB2, LILRB4, PRAME, and ERBB.

[0300] The present disclosure also encompasses a chimeric antigen receptor (CAR) which is directed against a tumor neoantigenic peptide as herein disclosed. CARs are fusion proteins comprising an antigen-binding domain, typically derived from an antibody, linked to the signalling domain of the TCR complex. CARs can be used to direct immune cells, such as T-cells or NK T cells, against a tumor neoantigenic peptide as previously defined with a suitable antigen-binding domain selected.

[0301] The antigen-binding domain of a CAR is typically based on a scFv (single chain variable fragment) derived from an antibody. In addition to an N-terminal, extracellular antibody-binding domain, CARs typically may comprise a hinge domain, which functions as a spacer to extend the antigen-binding domain away from the plasma membrane of the immune effector cell on which it is expressed, a transmembrane (TM) domain, an intracellular signalling domain (e.g. the signalling domain from the zeta chain of the CD3 molecule (CD35) of the TCR complex, or an equivalent) and optionally one or more co-stimulatory domains which may assist in signalling or functionality of the cell expressing the CAR. Signalling domains from co-stimulatory molecules including CD28, OX-40 (CD134), and 4-1BB (CD137) can be added alone (second generation) or in combination (third generation) to enhance survival and increase proliferation of CAR modified T cells. Potential co-stimulatory domains also include ICOS-1, CD27, GITR, and DAP10.

### Thus, the CAR May Include

[0302] (1) In its extracellular portion, one or more antigen binding molecules, such as one or more antigen-binding fragment, domain, or portion of an antibody, or one or more antibody variable domains, and/or antibody molecules.
[0303] (2) In its transmembrane portion, a transmembrane domain derived from human T cell receptor-alpha or -beta chain, a CD3 zeta chain, CD28, CD3-epsilon, CD45, CD4, CD5, CD8, CD9, CD16, CD22, CD33, CD37, CD64, CD80, CD86, CD134, CD137, ICOS, CD154, or a GITR. In some embodiments, the transmembrane domain is derived from CD28, CD8 or CD3-zeta.
[0304] (3) One or more co-stimulatory domains, such as co-stimulatory domains derived from human CD28, 4-1BB (CD137), ICOS-1, CD27, OX 40 (CD137), DAP10, and GITR (AITR). In some embodiments, the CAR comprises co-stimulating domains of both CD28 and 4-1BB.
[0305] (4) In its intracellular signalling domain, an intracellular signalling domain comprising one or more ITAMs, for example, the intracellular signalling domain is CD3-zeta, or a variant thereof lacking one or two ITAMs (e.g. ITAM3 and ITAM2), or the intracellular signalling domain is derived from FcεRIγ.

[0306] The CAR can be designed to recognize tumor neoantigenic peptide alone or in association with an HLA or MHC molecule.

[0307] The moieties used to bind to antigen include three general categories, either single-chain antibody fragments (scFvs) derived from antibodies, Fab's selected from libraries, or natural ligands that engage their cognate receptor (for the first-generation CARs). Successful examples in each of these categories are notably reported in Sadelain M, Brentjens R, Riviere I. The basic principles of chimeric antigen receptor (CAR) design. Cancer discovery. 2013; 3(4):388-398 (see notably table 1) and are included in the present application.

[0308] Antibodies include chimeric, humanized or human antibodies, and can be further affinity matured and selected as described above. Chimeric or humanized scFv's derived from rodent immunoglobulins (e.g. mice, rat) are commonly used, as they are easily derived from well-characterized monoclonal antibodies. Humanized antibodies contain rodent-sequence derived CDR regions; typically, the rodent CDRs are engrafted into a human framework, and some of the human framework residues may be back-mutated to the original rodent framework residue to preserve affinity, and/or one or a few of the CDR residues may be mutated to increase affinity. Fully human antibodies have no murine sequences, and are typically produced via phage display technologies of human antibody libraries, or immunization of transgenic mice whose native immunoglobin loci have been replaced with segments of human immunoglobulin loci. Variants of the antibodies can be produced that have one or more amino acid substitutions, insertions, or deletions in the native amino acid sequence, wherein the antibody retains or substantially retains its specific binding function. Conservative substitutions of amino acids are well known and described above. Further variants may also be produced that have improved affinity for the antigen.

[0309] Typically, the CAR includes an antigen-binding domain as previously defined from an antibody molecule, such as a single-chain antibody fragment (scFv) derived from the variable heavy (V_{H}) and variable light (V_{L}) chains of a monoclonal antibody (mAb).

[0310] In some aspects, the antigen-binding, domain of the CAR is linked to one or more transmembrane and intracellular signaling domains. In some embodiments, the CAR includes a transmembrane domain fused to the extracellular domain of the CAR. In one embodiment, the transmembrane domain that is naturally associated with one of the domains in the CAR is used. In some instances, the transmembrane domain is selected or modified by amino acid substitution to avoid binding of such domains to the transmembrane domains of the same or different surface membrane proteins to minimize interactions with other members of the receptor complex.

[0311] The transmembrane domain in some embodiments is derived either from a natural or from a synthetic source. Where the source is natural, the domain can be derived from any membrane-bound or transmembrane protein. Transmembrane regions include those derived from (i.e. comprise at least the transmembrane region(s) of) the alpha, beta or zeta chain of the T-cell receptor, CD28, CD3 epsilon, CD45, CD4, CD5, CD8, CD9, CD16, CD22, CD33, CD37, CD64, CD80, CD86, CD 134, CD137, CD154, ICOS or a GITR). The transmembrane domain can also be synthetic. In some embodiments, the transmembrane domain is derived from CD28, CD8 or CD3-zeta.

[0312] In some embodiments, a short oligo- or polypeptide linker, for example, a linker of between 2 and 10 amino acids in length, is present and forms a linkage between the transmembrane domain and the cytoplasmic signaling domain of the CAR.

[0313] The CAR generally includes at least one intracellular signaling component or components. First generation CARs typically had the intracellular domain from the CD3ζ-chain, which is the primary transmitter of signals from endogenous TCRs. Second generation CARs typically further comprise intracellular signaling domains from various costimulatory protein receptors (e.g., CD28, 41BB (CD28), ICOS) to the cytoplasmic tail of the CAR to provide additional signals to the T cell. Co-stimulatory domains include domains derived from human CD28, 4-1BB (CD137), ICOS-1, CD27, OX 40 (CD137), DAP10, and GITR (AITR). Combinations of two co-stimulatory domains are contemplated, e.g. CD28 and 4-1BB, or CD28 and OX40. Third generation CARs combine multiple signaling domains, such as CD3z-CD28-4-1BB or CD3z-CD28-OX40, to augment potency.

[0314] The intracellular signaling domain can be from an intracellular component of the TCR complex, such as a TCR CD3+ chain that mediates T-cell activation and cytotoxicity, e.g., the CD3 zeta chain. Alternative intracellular signaling domains include FcεRIγ. The intracellular signaling domain may comprise a modified CD3 zeta polypeptide lacking one or two of its three immunoreceptor tyrosine-based activation motifs (ITAMs), wherein the ITAMs are ITAM1, ITAM2 and ITAM3 (numbered from the N-terminus to the C-terminus). The intracellular signaling region of CD3-zeta is residues 22-164 of SEQ ID NO: 4. ITAM1 is located around amino acid residues 61-89, ITAM2 around amino acid residues 100-128, and ITAM3 around residues 131-159. Thus, the modified CD3 zeta polypeptide may have any one of ITAM1, ITAM2, or ITAM3 inactivated. Alternatively, the modified CD3 zeta polypeptide may have any two ITAMs inactivated, e.g. ITAM2 and ITAM3, or ITAM1 and ITAM2. Preferably, ITAM3 is inactivated, e.g. deleted. More preferably, ITAM2 and ITAM3 are inactivated, e.g. deleted, leaving ITAM1. For example, one modified CD3 zeta polypeptide retains only ITAM1 and the remaining CD3ζ domain is deleted (residues 90-164). As another example, ITAM1 is substituted with the amino acid sequence of ITAM3, and the remaining CD3ζ domain is deleted (residues 90-164). See, for example, Bridgeman et al., Clin. Exp. Immunol. 175(2): 258-67 (2014); Zhao et al., J. Immunol. 183(9):5563-74 (2009); Maus et al., WO 2018/132506; Sadelain et al., WO/2019/133969, Feucht et al., Nat Med. 25(1):82-88 (2019).

[0315] Thus, in some aspects, the antigen binding domain is linked to one or more cell signaling modules. In some embodiments, cell signaling modules include CD3 transmembrane domain, CD3 intracellular signaling domains, and/or other CD transmembrane domains. The CAR can also further include a portion of one or more additional molecules such as Fc receptor γ, CD8, CD4, CD25, or CD16.

[0316] In some embodiments, upon ligation of the CAR, the cytoplasmic domain or intracellular signaling domain of the CAR activates at least one of the normal effector functions or responses of the corresponding non-engineered immune cell (typically a T cell). For example, the CAR can induce a function of a T cell such as cytolytic activity or T-helper activity, secretion of cytokines or other factors.

[0317] In some embodiments, the intracellular signaling domain(s) include the cytoplasmic sequences of the T cell receptor (TCR), and in some aspects also those of co-receptors that in the natural context act in concert with such receptor to initiate signal transduction following antigen-specific receptor engagement, and/or a variant of such molecules, and/or any synthetic sequence that has the same functional capability.

[0318] T cell activation is in some aspects described as being mediated by two classes of cytoplasmic signaling sequences: those that initiate antigen-dependent primary activation through the TCR (primary cytoplasmic signaling sequences), and those that act in an antigen-independent manner to provide a secondary or co-stimulatory signal (secondary cytoplasmic signaling sequences). In some aspects, the CAR includes one or both of such signaling components.

[0319] In some aspects, the CAR includes a primary cytoplasmic signaling sequence that regulates primary activation of the TCR complex either in a stimulatory way, or in an inhibitory way. Primary cytoplasmic signaling sequences that act in a stimulatory manner may contain signaling motifs which are known as immunoreceptor tyrosine-based activation motifs or ITAMs. Examples of ITAM containing primary cytoplasmic signaling sequences include those derived from TCR zeta, FcR gamma, FcR beta, CD3 gamma, CD3 delta, CD3 epsilon, CDS, CD22, CD79a, CD79b, and CD66d. In some embodiments, cytoplasmic signaling molecule(s) in the CAR contain(s) a cytoplasmic signaling domain, portion thereof, or sequence derived from CD3 zeta.

[0320] The CAR can also include a signaling domain and/or transmembrane portion of a costimulatory receptor, such as CD28, 4-1BB, OX40, DAP10, and ICOS. In some aspects, the same CAR includes both the activating and costimulatory components; alternatively, the activating domain is provided by one CAR whereas the costimulatory component is provided by another CAR recognizing another antigen.

[0321] Thus, in some embodiments, the CAR may include:
[0322] (1) In its extracellular portion, one or more antigen binding molecules, such as one or more antigen-binding fragment, domain, or portion of an antibody, or one or more antibody variable domains (heavy chain and/or light chain), and/or antibody molecules.
[0323] (2) In its transmembrane portion, a transmembrane domain derived from human T cell receptor-alpha or -beta chain, a CD3 zeta chain, CD28, CD3-epsilon, CD45, CD4, CD5, CD8, CD9, CD16, CD22, CD33, CD37, CD64, CD80, CD86, CD134, CD137, ICOS, CD154, or a GITR. In some embodiments, the transmembrane domain is derived from CD28, CD8 or CD3-zeta.
[0324] (3) One or more co-stimulatory domains, such as co-stimulatory domains derived from human CD28, 4-1BB (CD137), ICOS-1, CD27, OX 40 (CD137), DAP10, and GITR (AITR). In some embodiments, the CAR comprises co-stimulating domains of both CD28 and 4-1BB.
[0325] (4) In its intracellular signalling domain, one or more intracellular signalling domain(s) comprising one or more ITAMs, for example: the intracellular signalling domain or a portion thereof from CD3-zeta, or a variant thereof lacking one or two ITAMs (e.g.: ITAM3 and/or ITAM2 see also as detailed above and bibliographic references), FcR gamma, FcR beta, CD3 gamma, CD3 delta, CD3 epsilon, CDS, CD22, CD79a, CD79b, and/or CD66d, notably selected from the intracellular domain of CD3-zeta, or a variant thereof lacking one or two ITAMs (e.g.: ITAM3 and ITAM2), or the intracellular signalling of FcεRIγ or a variant thereof.

[0326] The CAR or other antigen-specific receptor can also be an inhibitory CAR (e.g. iCAR) and includes intracellular components that dampen or suppress a response, such as an immune response. Examples of such intracellular signaling components are those found on immune checkpoint molecules, including PD-1, CTLA4, LAG3, BTLA, OX2R, TIM-3, TIGIT, LAIR-1, PGE2 receptors, EP2/4 Adenosine receptors including A2AR. In some aspects, the engineered cell includes an inhibitory CAR including a signaling domain of or derived from such an inhibitory molecule, such that it serves to dampen the response of the cell. Such CARs are used, for example, to reduce the likelihood of off-target effects when the antigen recognized by the activating receptor, e.g., CAR, is also expressed, or may also be expressed, on the surface of normal cells.

[0327] In some embodiments, the CAR is a MHC-restricted antibody-based chimeric antigen receptor or TCR-like CAR. Typically, such CAR comprises an antibody or a fragment thereof targeting a MHC restricted neoantigenic peptide as previously defined. A non-limiting example of a CAR MHC-restricted antibody-based CAR which general structure is typically well-suited according to the present disclosure can be found in Maus M V, Plotkin J, Jakka G, et al. An MHC-restricted antibody-based chimeric antigen receptor requires TCR-like affinity to maintain antigen specificity. Mol Ther Oncolytics. 2017; 3:1-9.

[0328] Exemplary antigen receptors, including CARs and recombinant TCRs, as well as methods for engineering and introducing the receptors into cells, include those described, for example, in international patent application publication numbers WO200014257, WO2013126726, WO2012/129514, WO2014031687, WO2013/166321, WO2013/071154, WO2013/123061, WO2019157454, U.S. patent application publication numbers US2002131960, US2013287748, US20130149337, U.S. Pat. Nos. 6,451,995, 7,446,190, 8,252,592, 8,339,645, 8,398,282, 7,446,179, 6,410,319, 7,070,995, 7,265,209, 7,354,762, 7,446,191, 8,324,353, and 8,479,118, and European patent application number EP2537416, and/or those described by Sadelain et al., Cancer Discov. 2013 April; 3(4): 388-398; Davila et al. (2013) PLoS ONE 8(4): e61338; Turtle et al., Curr. Opin. Immunol., 2012 October; 24(5): 633-39; Wu et al., Cancer, 2012 Mar. 18(2): 160-75. In some aspects, the genetically engineered antigen receptors include a CAR as described in U.S. Pat. No. 7,446,190, and those described in International Patent Application Publication No.: WO/2014055668 A1.

[0329] The present disclosure also encompasses polynucleotides encoding antibodies, antigen-binding fragments or derivatives thereof, TCRs and CARs as previously described as well as vector comprising said polynucleotide(s).

### Immune Cells

[0330] The present disclosure further encompasses an immune cell, notably an isolated immune cell which target one or more tumor neoantigenic peptides as previously described. In more specific embodiments the present disclosure encompasses an immune cell, notably an isolated immune cell expressing a recombinant CAR or TCR as previously defined.

[0331] As used herein, the term “immune cell” includes cells that are of hematopoietic origin and that play a role in the immune response. Immune cells include lymphocytes, such as B cells and T cells, natural killer cells, myeloid cells, such as monocytes, macrophages, eosinophils, mast cells, basophils, and granulocytes.

[0332] As used herein, the term “T cell” includes cells bearing a T cell receptor (TCR), in particular TCR directed against a tumor neoantigenic peptide as herein disclosed. T-cells according to the present disclosure can be selected from the group consisting of inflammatory T-lymphocytes, cytotoxic T-lymphocytes, regulatory T-lymphocytes, Mucosal-Associated Invariant T cells (MAIT), γδ T cell, tumour infiltrating lymphocyte (TILs) or helper T-lymphocytes included both type 1 and 2 helper T cells and Th17 helper cells. In another embodiment, said cell can be derived from the group consisting of CD4+ T-lymphocytes and CD8+ T-lymphocytes. Said immune cells may originate from a healthy donor or from a subject suffering from a cancer. In some embodiments, the immune cell is an allogenic or autologous cell. In some embodiments, the immune cell is selected from T cells, Natural Killer T cells, CD4+/CD8+ T cells, TILs/tumor derived CD8 T cells, central memory CD8+ T cells, Treg, MAIT, γδ T cells, human embryonic stem cells, and pluripotent stem cells from which lymphoid cells may be differentiated. Immune cells can be extracted from blood or derived from stem cells. The stem cells can be adult stem cells, embryonic stem cells, more particularly non-human stem cells, cord blood stem cells, progenitor cells, bone marrow stem cells, induced pluripotent stem cells, totipotent stem cells or hematopoietic stem cells. Representative human cells are CD34+ cells. T-cells can be obtained from a number of non-limiting sources, including peripheral blood mononuclear cells, bone marrow, lymph node tissue, cord blood, thymus tissue, tissue from a site of infection, ascites, pleural effusion, spleen tissue, and tumors. In certain embodiments, T-cells can be obtained from a unit of blood collected from a subject using any number of techniques known to the skilled person, such as FICOLL™ separation. In one embodiment, cells from the circulating blood of a subject are obtained by apheresis. In certain embodiments, T-cells are isolated from PBMCs. PBMCs may be isolated from buffy coats obtained by density gradient centrifugation of whole blood, for instance centrifugation through a LYMPHOPREP™ gradient, a PERCOLL™ gradient or a FICOLL™ gradient. T-cells may be isolated from PBMCs by depletion of the monocytes, for instance by using CD14 DYNABEADS®. In some embodiments, red blood cells may be lysed prior to the density gradient centrifugation. In another embodiment, said cell can be derived from a healthy donor, from a subject diagnosed with cancer. The cell can be autologous or allogeneic.

[0333] In allogeneic immune cell therapy, immune cells are collected from healthy donors, rather than the patient. Typically these are HLA matched to reduce the likelihood of graft vs. host disease. Alternatively, universal ‘off the shelf’ products that may not require HLA matching comprise modifications designed to reduce graft vs. host disease, such as disruption or removal of the TCRαβ receptor. See Graham et al., Cells. 2018 October; 7(10): 155 for a review. Because a single gene encodes the alpha chain (TRAC) rather than the two genes encoding the beta chain, the TRAC locus is a typical target for removing or disrupting TCRαβ receptor expression. Alternatively, inhibitors of TCRαβ signalling may be expressed, e.g. truncated forms of CD35 can act as a TCR inhibitory molecule. Disruption or removal of HLA class I molecules has also been employed. For example, Torikai et al., Blood. 2013; 122:1341-1349 used ZFNs to knock out the HLA-A locus, while Ren et al., Clin. Cancer Res. 2017; 23:2255-2266 knocked out Beta-2 microglobulin (B2M), which is required for HLA class I expression. Ren et al. simultaneously knocked out TCRαβ, B2M and the immune-checkpoint PD1. Generally, the immune cells are activated and expanded to be utilized in the adoptive cell therapy. The immune cells as herein disclosed can be expanded in vivo or ex vivo. The immune cells, in particular T-cells can be activated and expanded generally using methods known in the art. Generally the T-cells are expanded by contact with a surface having attached thereto an agent that stimulates a CD3/TCR complex associated signal and a ligand that stimulates a co-stimulatory molecule on the surface of the T cells.

[0334] In one embodiment of the present disclosure, the immune cell can be modified to be directed to tumor neoantigenic peptides as previously defined. In a particular embodiment, said immune cell may express a recombinant antigen receptor directed to said neoantigenic peptide its cell surface. By “recombinant” is meant an antigen receptor which is not encoded by the cell in its native state, i.e. it is heterologous, non-endogenous. Expression of the recombinant antigen receptor can thus be seen to introduce new antigen specificity to the immune cell, causing the cell to recognise and bind a previously described peptide. The antigen receptor may be isolated from any useful source. In some embodiments, the cells comprise one or more nucleic acids introduced via genetic engineering that encode one or more antigen receptors, wherein the antigen include at least one tumor neoantigenic peptide as per the present disclosure.

[0335] Among the antigen receptors as per the present disclosure are genetically engineered T cell receptors (TCRs) and components thereof, as well as functional non-TCR antigen receptors, such as chimeric antigen receptors (CAR) as previously described.

[0336] Methods by which immune cells can be genetically modified to express a recombinant antigen receptor are well known in the art. A nucleic acid molecule encoding the antigen receptor may be introduced into the cell in the form of e.g. a vector, or any other suitable nucleic acid construct. Vectors, and their required components, are well known in the art. Nucleic acid molecules encoding antigen receptors can be generated using any method known in the art, e.g. molecular cloning using PCR. Antigen receptor sequences can be modified using commonly-used methods, such as site-directed mutagenesis.

[0337] In some embodiments, the immune cell is cell wherein the gene encoding the Suv39 h1 protein, and in particular the human suv39 h1 protein (referenced 043463 in UNIPROT), is disrupted. In some embodiments, the immune cell comprises a recombinant HLA-independent (or non-HLA restricted) T cell receptors (referred to as “HI-TCRs”) that bind to an antigen of interest in an HLA-independent manner are described in International Application No. WO 2019/157454. Such HI-TCRs comprise an antigen binding chain that comprises: (a) an antigen-binding domain that binds to an antigen in an HLA-independent manner, for example, an antigen-binding fragment of an immunoglobulin variable region; and (b) a constant domain that is capable of associating with (and consequently activating) a CD3ζ polypeptide. Because typically TCRs bind antigen in a HLA-dependent manner, the antigen-binding domain that binds in an HLA-independent manner must be heterologous. Preferably, the antigen-binding domain or fragment thereof comprises: (i) a heavy chain variable region (V_{H}) of an antibody and/or (ii) a light chain variable region (V_{L}) of an antibody. The constant domain of the TCR is, for example, a native or modified TRAC polypeptide, or a native or modified TRBC polypeptide. The constant domain of the TCR is, for example, a native TCR constant domain (alpha or beta) or fragment thereof. Unlike chimeric antigen receptors, which typically themselves comprise an intracellular signaling domain, the HI-TCR does not directly produce an activating signal; instead, the antigen-binding chain associates with and consequently activates a CD3 ζ polypeptide. The immune cells comprising the recombinant TCR provide superior activity when the antigen has a low density on the cell surface of less than about 10,000 molecules per cell.

[0338] The CD3ζ polypeptide is, for example, a native CD3 ζ polypeptide or a modified CD3ζ polypeptide. The CD3ζ polypeptide is optionally fused to an intracellular domain of a co-stimulatory molecule or a fragment thereof. Alternatively, the antigen binding domain optionally comprises a co-stimulatory region, e.g. intracellular domain, that is capable of stimulating an immunoresponsive cell upon the binding of the antigen binding chain to the antigen. Example co-stimulatory molecules include CD28, 4-1BB, OX40, ICOS, DAP-10, fragments thereof, or a combination thereof.

[0339] In some embodiments of the present disclosure, the immune cell is a cell wherein (a) the SUV39H1 gene is inactivated, (b) the antigen-specific receptor is a modified TCR comprising a heterologous (or recombinant) antigen-binding domain and a native TCR constant domain or fragment thereof, and the antigen-specific receptor is capable of activating a CD3 zeta polypeptide. For example, the immune cell may further comprise at least one chimeric costimulatory receptor (CCR) and/or at least one chimeric antigen receptor, for example as previously defined.

[0340] In a related aspect, the immune cells, particularly if allogeneic, may be designed to reduce graft vs. host disease, such that the cells comprise inactivated (e.g. disrupted or deleted) TCRαβ receptor. In such cases, the nucleic acid encoding the antigen-binding domain of the HI-TCR (typically as previously defined) is conveniently inserted into the endogenous TRAC locus and/or TRBC locus of the immune cell. The insertion of the HI-TCR nucleic acid sequence, or another smaller mutation, can disrupt or abolish the endogenous expression of a TCR comprising a native TCR alpha chain and/or a native TCR beta chain. The insertion or mutation may reduce endogenous TCR expression by at least about 50%, 60%, 70%, 75%, 80%, 85%, 90%, 95%, 98%, or 99%. Because a single gene encodes the alpha chain (TRAC) rather than the two genes encoding the beta chain, the TRAC locus is a typical target for reducing TCRαβ receptor expression. Thus, the nucleic acid encoding the antigen-specific receptor (e.g. CAR or TCR) may be integrated into the TRAC locus at a location, preferably in the 5′ region of the first exon (SEQ ID NO: 3), that significantly reduces expression of a functional TCR alpha chain. See, e.g., Jantz et al., WO 2017/062451; Sadelain et al., WO 2017/180989; Torikai et al,. Blood, 119(2): 5697-705 (2012); Eyquem et al., Nature. 2017 Mar. 2; 543(7643):113-117. Expression of the endogenous TCR alpha may be reduced by at least about 50%, 60%, 70%, 75%, 80%, 85%, 90%, 95%, 98%, or 99%. In such embodiments, expression of the nucleic acid encoding the antigen-specific receptor is optionally under control of the endogenous TCR-alpha or endogenous TCR-beta promoter.

[0341] Optionally, the immune cell also comprises a modified CD3 with a single active ITAM domain, and optionally the CD3 may further comprise one or more or two or more costimulatory domains. In some embodiments, the CD3 comprises two costimulatory domains, optionally CD28 and 4-1BB. The modified CD3 with a single active ITAM domain can comprise, for example, a modified CD3zeta intracellular signaling domain in which ITAM2 and ITAM3 have been inactivated, or ITAM1 and ITAM2 have been inactivated. In some embodiments, a modified CD3 zeta polypeptide retains only ITAM1 and the remaining CD3ζ domain is deleted (residues 90-164). As another example, ITAM1 is substituted with the amino acid sequence of ITAM3, and the remaining CD3ζ domain is deleted (residues 90-164).

[0342] The modified immune cells disclosed herein may comprise combinations of two or more, or three or more, or four or more, of the foregoing aspects.

[0343] For example, the modified immune cell is an immune cell wherein (a) the antigen-specific receptor is a modified TCR comprising a heterologous (or recombinant) antigen-binding domain (typically as previously defined) and a native TCR constant domain or fragment thereof, and the antigen-specific receptor is capable of activating a CD3 zeta polypeptide, and/or the antigen-specific receptor is a CAR, and optionally (b) the SUV39H1 gene is inactivated, and optionally (c) the immune cell comprises a modified CD3 with a single active ITAM domain, e.g. in which ITAM2 and ITAM3 have been inactivated, and optionally (d) the TCR is under control of an endogenous TRAC and/or TRBC promoter, and optionally (e) expression of native TCR-alpha chain and/or native TCR-beta chain are disrupted or abolished. In further embodiments, the cell may comprise at least one chimeric costimulatory receptor (CCR). In some embodiments, the tumor antigen is selected from pHER95, CD19, MUC16, MUC1, CAIX, CEA, CD8, CD7, CD10, CD20, CD22, CD30, CD70, CLL1, CD33, CD34, CD38, CD41, CD44, CD49f, CD56, CD74, CD133, CD138, EGP-2, EGP-40, EpCAM, Erb-B2, Erb-B3, Erb-B4, FBP, Fetal acetylcholine receptor, folate receptor-a, GD2, GD3, HER-2, hTERT, IL-13R-a2, κ-light chain, KDR, LeY, L1 cell adhesion molecule, MAGE-A1, Mesothelin, MAGEA3, p53, MART1, GP100, Proteinase3 (PR1), Tyrosinase, Survivin, hTERT, EphA2, NKG2D ligands, NY-ESO-1, oncofetal antigen (h5T4), PSCA, PSMA, ROR1, TAG-72, VEGF-R2, WT-1, BCMA, CD123, CD44V6, NKCS1, EGFIR, EGFR-VIII, CD99, CD70, ADGRE2, CCR1, LILRB2, LILRB4, PRAME, and ERBB.]

[0344] In some embodiments, the recombinant HI-TCR is expressed by a transgene that is integrated at an endogenous gene locus of the immunoresponsive cell, for example, a CD3δ locus, a CD3ε locus, a CD247 locus, a B2M locus, a TRAC locus, a TRBC locus, a TRDC locus and/or a TRGC locus. In most embodiments, expression of the recombinant HI-TCR is driven from the endogenous TRAC or TRBC gene locus. In some embodiments, the transgene encoding a portion of the recombinant HI-TCR is integrated into the endogenous TRAC and/or TRBC locus in a manner that disrupts or abolishes the endogenous expression of a TCR comprising a native TCR α chain and/or a native TCR β chain. This disruption prevents or eliminates mispairing between the recombinant TCR and a native TCR α chain and/or a native TCR β chain in the immunoresponsive cell. The endogenous gene locus may also comprise a modified transcription terminator region, for example, a TK transcription terminator, a GCSF transcription terminator, a TCRA transcription terminator, an HBB transcription terminator, a bovine growth hormone transcription terminator, an SV40 transcription terminator, and a P2A element.

[0345] The present disclosure also relates to a method for providing an immune cell, and in particular a T cell population which targets a tumor neoantigenic peptide as herein disclosed, in particular an immune cell and notably a T cell population expressing a TCR or a CAR in particular an MHC-restricted antibody-based chimeric antigen receptor as previously defined.

[0346] The T cell population may comprise CD8+ T cells, CD4+ T cells or CD8+ and CD4+ T cells.

[0347] Immune cell populations produced in accordance with the present disclosure may be enriched with immune cells that are specific to, i.e. target, the tumor neoantigenic peptide of the present disclosure. That is, the immune cell population that is produced in accordance with the present disclosure will have an increased number of immune cells that target one or more tumor neoantigenic peptide. For example, the immune cell population of the disclosure will have an increased number of immune cells that target a tumor neoantigenic peptide compared with the immune cells in the sample isolated from the subject. That is to say, the composition of the immune cell population will differ from that of a “native” immune cell population (i.e. a population that has not undergone the identification and expansion steps discussed herein), in that the percentage or proportion of immune cells that target a tumor neoantigenic peptide will be increased.

[0348] Immune cell populations produced in accordance with the present disclosure may be enriched with immune cells that are specific to, i.e. target, tumor neoantigenic peptide. That is, the T cell population that is produced in accordance with the present disclosure will have an increased number of immune cells that target one or more tumor neoantigenic peptide of the present disclosure. For example, the immune cell population of the present disclosure will have an increased number of immune cells that target a tumor neoantigenic peptide compared with the immune cells in the sample isolated from the subject. That is to say, the composition of the immune cell population will differ from that of a “native” immune cell population (i.e. a population that has not undergone the identification and expansion steps discussed herein), in that the percentage or proportion of immune cells that target a tumor neoantigenic peptide will be increased.

[0349] The immune cell population according to the present disclosure may have at least about 0.2, 0.3, 0.4, 0.5, 0.6, 0.7, 0.8, 0.9, 1, 2, 3, 4, 5, 6, 7, 8, 9, 10, 11, 12, 13, 14, 15, 16, 17, 18, 19, 20, 25, 30, 35, 40, 45, 50, 55, 60, 65, 70, 75, 80, 85, 90, 95 or 100% T cells that target a tumor neoantigenic peptide as herein disclosed. For example, the immune cell population may have about 0.2%-5%, 5%-10%, 10-20%, 20-30%, 30-40%, 40-50%, 50-70% or 70-100% immune cells that target a tumor neoantigenic peptide of the present disclosure.

[0350] An expanded population of tumor neoantigenic peptide-reactive immune cells may have a higher activity than a population of immune cells not expanded, for example, using a tumor neoantigenic peptide. Reference to “activity” may represent the response of the immune cell population to restimulation with a tumor neoantigenic peptide, e.g. a peptide corresponding to the peptide used for expansion, or a mix of tumor neoantigenic peptide. Suitable methods for assaying the response are known in the art. For example, cytokine production may be measured (e.g. IL2 or IFNy production may be measured). The reference to a “higher activity” includes, for example, a 1-5, 5-10, 10-20, 20-50, 50-100, 100-500, 500-1000-fold increase in activity. In one aspect the activity may be more than 1000-fold higher.

[0351] In a preferred embodiment present disclosure provides a plurality or population, i.e. more than one, of immune cells wherein the plurality of immune cells comprises a immune cell, notably a T cell, which recognizes a clonal tumor neoantigenic peptide and a T cell which recognizes a different clonal tumor neoantigenic peptide. As such, the present disclosure provides a plurality of immune cells, notably T cells, which recognize different clonal tumor neoantigenic peptide.

[0352] Different immune cells, notably T cells, in the plurality or population may alternatively have different TCRs which recognize the same tumor neoantigenic peptide.

[0353] In a preferred embodiment the number of clonal tumor neoantigenic peptide recognized by the plurality of T cells is from 2 to 1000. For example, the number of clonal neo-antigens recognized may be 2, 3, 4, 5, 6, 7, 8, 9, 10, 20, 50, 100, 150, 200, 250, 300, 350, 400, 450, 500, 550, 600, 650, 700, 750, 800, 850, 900, 950 or 1000, preferably 2 to 100. There may be a plurality of immune cells, notably T cells, with different TCRs but which recognize the same clonal neo-antigen.

[0354] The immune cell and in particular the T cell population may be all or primarily composed of CD8+ T cells, or all or primarily composed of a mixture of CD8+ T cells and CD4+ T cells or all or primarily composed of CD4+ T cells.

[0355] In particular embodiments, the T cell population is generated from T cells isolated from a subject with a tumor. For example, the T cell population may be generated from T cells in a sample isolated from a subject with a tumor. The sample may be a tumor sample, a peripheral blood sample or a sample from other tissues of the subject.

[0356] In a particular embodiment the immune cell population is generated from a sample from the tumor in which the tumor neoantigenic peptide is identified. In other words, the immune cell and notably the T cell population is isolated from a sample derived from the tumor of a patient to be treated. Such T cells are referred to herein as ‘tumor infiltrating lymphocytes’ (TILs).

[0357] T cells may be isolated using methods which are well known in the art. For example, T cells may be purified from single cell suspensions generated from samples on the basis of expression of CD3, CD4 or CD8. T cells may be enriched from samples by passage through a Ficoll-paque gradient.

### Cancer Therapeutic Methods

[0358] In any of the embodiments, the Cancer Therapeutic Products described herein may be used in methods for inhibiting proliferation of cancer cells. The Cancer Therapeutic Products described herein may also be used in the treatment of cancer, in patients suffering from cancer, or for the prophylactic treatment of cancer, in patients at risk of cancer.

[0359] Cancers that can be treated using the therapy described herein include any solid or non-solid tumors as previously defined. Of particular interest according to the present disclosure are breast cancer, melanoma and lung cancer.

[0360] Cancers includes also the cancers which are refractory to treatment with other chemotherapeutics. The term “refractory, as used herein refers to a cancer (and/or metastases thereof), which shows no or only weak antiproliferative response (e.g., no or only weak inhibition of tumor growth) after treatment with another chemotherapeutic agent. These are cancers that cannot be treated satisfactorily with other chemotherapeutics. Refractory cancers encompass not only (i) cancers where one or more chemotherapeutics have already failed during treatment of a patient, but also (ii) cancers that can be shown to be refractory by other means, e.g., biopsy and culture in the presence of chemotherapeutics.

[0361] The therapy described herein is also applicable to the treatment of patients in need thereof who have not been previously treated.

[0362] A subject as per the present disclosure is typically a patient in need thereof that has been diagnosed with cancer or is at risk of developing cancer. The subject is typically a human, dog, cat, horse or any animal in which a tumor specific immune response is desired.

[0363] The present disclosure also pertains to a neoantigenic peptide, a population of APCs, a vaccine or immunogenic composition, a polynucleotide encoding a neoantigenic peptide or a vector as previously defined for use in cancer vaccination therapy of a subject or for treating cancer in a subject, wherein the peptide(s) binds at least one MHC molecule of said subject.

[0364] The present disclosure also provides a method for treating cancer in a subject comprising administering a vaccine or immunogenic composition as described herein to said subject in a therapeutically effective amount to treat the subject. The method may additionally comprise the step of identifying a subject who has cancer.

[0365] The present disclosure also relates to a method of treating cancer comprising producing an antibody or antigen-binding fragment thereof by the method as herein described and administering to a subject with cancer said antibody or antigen-binding fragment thereof, or with an immune cell expressing said antibody or antigen-binding fragment thereof, in a therapeutically effective amount to treat said subject.

[0366] The present disclosure also relates to an antibody (including variants and derivatives thereof) in particular a TCR-like antibody, a T cell receptor (TCR) (including variants and derivatives thereof), or a CAR (including variants and derivatives thereof), in particular an MHC-restricted antibody-based chimeric antigen receptor, which are directed against a tumor neoantigenic peptide as herein described, for use in cancer therapy of a subject, wherein the tumor neoantigenic peptide binds at least one MHC molecule of said subject.

[0367] The present disclosure also relates to an antibody (including variants and derivatives thereof) in particular a TCR-like antibody, a T cell receptor (TCR) (including variants and derivatives thereof), or a CAR (including variants and derivatives thereof), in particular an MHC-restricted antibody-based chimeric antigen receptor, which are directed against a tumor neoantigenic peptide as herein described, optionally in association with an MHC or HLA molecule, or an immune cell which targets a neoantigenic peptide, as previously defined, for use in adoptive cell or CAR-T cell therapy in a subject, wherein the tumor neoantigenic peptide binds at least one MHC molecule of said subject. Typically, the skilled person is able to select an appropriate antigen receptor which binds and recognizes a tumor neoantigenic peptide as previously defined with which to redirect an immune cell to be used for use in cancer cell therapy. In a particular embodiment, the immune cell for use in the method of the present disclosure is a redirected T-cell, e.g. a redirected CD8+ and/or CD4+ T-cell.

[0368] In some embodiments, cancer treatment, vaccination therapy and/or adoptive cell cancer therapy as above described are administered in combination with additional cancer therapies. In particular, the T cell compositions according to the present disclosure may be administered in combination with checkpoint blockade therapy, co-stimulatory antibodies, chemotherapy and/or radiotherapy, targeted therapy or monoclonal antibody therapy.

[0369] Checkpoint inhibitors include, but are not limited to, PD-1 inhibitors, PD-L1 inhibitors, Lag-3 inhibitors, Tim-3 inhibitors, TIGIT inhibitors, BTLA inhibitors, V-domain Ig suppressor of T-cell activation (VISTA) inhibitors and CTLA-4 inhibitors, IDO inhibitors for example. Co-stimulatory antibodies deliver positive signals through immune-regulatory receptors including but not limited to ICOS, CD137, CD27 OX-40 and GITR. In a preferred embodiment the checkpoint inhibitor is a CTLA-4 inhibitor.

[0370] A chemotherapeutic entity as used herein refers to an entity which is destructive to a cell, that is the entity reduces the viability of the cell. The chemotherapeutic entity may be a cytotoxic drug. A chemotherapeutic agent contemplated includes, without limitation, alkylating agents, anthracyclines, epothilones, nitrosoureas, ethylenimines/methylmelamine, alkyl sulfonates, alkylating agents, antimetabolites, pyrimidine analogs, epipodophyllotoxins, enzymes such as L-asparaginase; biological response modifiers such as IFNa, IL-2, G-CSF and GM-CSF; platinum coordination complexes such as cisplatin, oxaliplatin and carboplatin, anthracenediones, substituted urea such as hydroxyurea, methylhydrazine derivatives including N-methylhydrazine (MIH) and procarbazine, adrenocortical suppressants such as mitotane (o,ρ′-DDD) and aminoglutethimide; hormones and antagonists including adrenocorticosteroid antagonists such as prednisone and equivalents, dexamethasone and aminoglutethimide; progestin such as hydroxyprogesterone caproate, medroxyprogesterone acetate and megestrol acetate; estrogen such as diethylstilbestrol and ethinyl estradiol equivalents; antiestrogen such as tamoxifen; androgens including testosterone propionate and fluoxymesterone/equivalents; antiandrogens such as flutamide, gonadotropin-releasing hormone analogs and leuprolide; and non-steroidal antiandrogens such as flutamide.

[0371] ‘In combination’ may refer to administration of the additional therapy before, at the same time as or after administration of the T cell composition according to the present disclosure.

[0372] In addition or as an alternative to the combination with checkpoint blockade, the T cell composition of the present disclosure may also be genetically modified to render them resistant to immune-checkpoints using gene-editing technologies including but not limited to TALEN and Crispr/Cas. Such methods are known in the art, see e.g. US20140120622. Gene editing technologies may be used to prevent the expression of immune checkpoints expressed by T cells including but not limited to PD-1, Lag-3, Tim-3, TIGIT, BTLA CTLA-4 and combinations of these. The T cell as discussed here may be modified by any of these methods.

[0373] The T cell according to the present disclosure may also be genetically modified to express molecules increasing homing into tumours and or to deliver inflammatory mediators into the tumour microenvironment, including but not limited to cytokines, soluble immune-regulatory receptors and/or ligands.

[0374] In a particular embodiment, said tumor neoantigenic peptide is used in cancer vaccination therapy in combination with another immunotherapy such as immune checkpoint therapy, more particularly in combination with antibodies anti-PD1, anti-PDL1, anti-CTLA-4, anti-TIM-3, anti-LAG3, anti-GITR.

### BRIEF DESCRIPTION OF THE DRAWINGS

[0375] FIG. 1: Tumor neoantigenic peptides (or TE-derived epitopes) having a predicted affinity for MHC alleles of less than 500 nM, identified by the in silico method according to the disclosure in the tumor mouse lines B16F10-OVA cells (A) and in MCA101-OVA cells (B) and identified both in the two lines (C).

[0376] FIG. 2: (A) RT-PCR gels of amplification of the fusion transcript sequence encoding the neoantigenic peptide N25, in cDNA of tumor mouse lines B16F10-OVA and MCA101-OVA. (B) RT-PCR gels of amplification of the fusion transcript sequence encoding the neoantigenic peptide N26, in cDNA of tumor mouse lines B16F10, B16F10-OVA and MCA101-OVA.

[0377] FIG. 3: (A) Detection of peptide-reactive IFNg-secreting cells by ELISPOT in inguinal lymph nodes from immunized animals with DMSO (negative control), OVA (ovalbumin) (positive control), peptide N25 or peptide N26. (B) IFNg spots for 10\hat{ }5 cells for immunized animals with DMSO (negative control), SIINFEKL (positive control), N25 or N26 peptide.

[0378] FIG. 4: (A) Evolution of the tumor volume (mm3) in mice beforehand immunized with DMSO, OVA or N25L peptide, following the days after the injection of tumor cells B16F10-OVA into said immunized mice. (B) Evolution of the tumor volume (mm3) in mice beforehand immunized with DMSO, OVA or N26L peptide, following the days after the injection of tumor cells B16F10-OVA into said immunized mice.

[0379] FIG. 5: TCGA data sets for 784 luminal, 100 HER2+, 197 TNBC, 112 normal breast tissue, 516 primary lung adenocarcinomas (primary tumor) and 59 normal lung tissue (solid tissue normal), were analyzed by the method for identifying fusion transcript sequence encoded tumor neoantigenic peptide described. (A) Number of fusion transcript sequence (TE-exon fusions) in different subtypes of breast cancer (HER2+, TNBC, normal breast tissue and luminal). (B) Number of fusion transcript sequence (TE-exon fusions) in different subtypes of lung cancer (primary lung adenocarcinomas, normal lung tissue).

[0380] FIG. 6: 8-9 amino acid-long peptides predicted from TE-gene fusion products from each sample were tested in silico for binding to the predicted HLA alleles expressed in the same sample. Shown are peptides with predicted affinity below 500 nM for at least one HLA-A, -B, or -C allele from each sample. (A) Samples of different subtypes of breast cancer (HER2+, TNBC, normal breast tissue and luminal). (B) Samples of different subtypes of lung cancer (non-small cell lung cancer, normal lung tissue).

[0381] FIG. 7: Distribution of tumor-specific peptides per patient across breast tumor subtypes. (A) Numbers of tumor-specific HLA-binding peptides per subtypes of breast cancer patient are shown. (B) Numbers of predicted tumor neoantigenic peptides shared across luminal subtypes samples (n=784) (abscissa). (C) Numbers of predicted tumor neoantigenic peptides shared across HER2+ subtypes samples (n=100) (abscissa). (D) Numbers of predicted tumor neoantigenic peptides shared across TNBC subtypes samples (n=197) (abscissa).

[0382] FIG. 8: (A) Numbers of tumor-specific HLA-binding peptides per primary lung adenocarcinomas (LUAD) sample (lung cancer). (B) Distribution of tumor-specific peptides per patient across lung adenocarcinomas. Numbers of predicted tumor neoantigenic peptides shared across primary tumor subtypes samples (n=516) (abscissa).

[0383] FIG. 9: Reconstruction of the fusion nucleotide sequence when the donor is the exon (A) and when the donor is the TE (B).

[0384] FIG. 10: Binding of chimeric transcripts-derived peptides to HLA-A2. Binding to HLA-A2 allele of predicted peptides from the most frequent chimeric fusions were validated by flow cytometry using tetramer formation assay. The results are shown as percentage of binding relative to positive control. Dotted line indicates the threshold considered to confirm the binding to this allele.

[0385] FIG. 11. Immunogenicity of fusion transcripts-derived peptides and reactive CD8+ T cells generation. (A) Frequencies of pJET (fusion transcript derived peptides) specific tetramer-positive CD8+ T cells expanded from 6 different healthy donors in in vitro immunogenicity assays using 6 different healthy donors. (B) Cytokine secretion of CTL-clones after stimulation with different concentration of specific peptide. On the right is listed the CTL-clones generated and their peptide specificity. (C) Killing assay for CTL-clone 9 in co-culture with target cells loaded with 2 different peptide concentration in combination with anti-MHC-I antibodies or Isotype control (Left panel), or with un-loaded targets cells at different ratios (Right panel). (D) Killing assays for CTL-clone 9, 80 and 64 when co-cultured with peptide unloaded target cells in combination with anti-MHCI-I antibodies or isotype control. Effector:Target ratio is indicated in each individual plot. H1650 were used as target cells for each plot of this figure.

[0386] FIG. 12. Expression of TCR recognizing fusion-derived peptides. Transduced Jurkat-reporter cells with TCR sequence derived from CTL-clone 9 co-cultured with target cells alone, or loaded with 2 different peptide concentration. Plots show percentage of positive Jurkat cells for the 3 reporter genes evaluated by flow cytometry, using H1650 cell line as target cells (upper plots) or H1395 cell line as target cells (lower plots). Negative control: non-transduced Jurkat cells. No peptide: transduced Jurkat cells co-cultured with peptide unloaded target cells. Positive control: Transduced Jurkat cells stimulated with PMA/ionomycin.

[0387] FIG. 13. Tumor infiltrating lymphocytes recognizing fusion transcripts-derived peptides. Percentage of tetramer positive CD8 T cells for the indicated fusion transcript-derived peptides found in tumor infiltrating lymphocytes (TILs) expanded in the presence of fusion transcripts-derived peptide's mix+IL2 (A) or only with IL-2 (B).

[0388] FIG. 14. Phenotype of CD8+ T cells recognizing fusion transcripts-derived peptides in LUAD patient's derived samples. Percentage of tetramer positive CD8 T cells recognizing fusion transcripts-derived peptides present in tumor, juxta tumor, lymph nodes and blood samples derived from LUAD Patient 2 (A, upper panel) and Patient 3 (B, upper panel). In lower panel of figure (A) and (B) is shown the percentage of Naïve (CCR7+CD45+), Central Memory (CM, CCR7+CD45−), Effector Memory (EM, CCR7−CD45−) and Terminal Effector (TE, CCR7−CD45+) cells of tetramer positive parental cell population.

[0389] FIG. 15. Immunopeptidomics analysis of lung tumor samples. Fusion transcript-derived peptide sequences were searched in public MHC-I immunopeptidomes datasets. Each column represents a different sample. Each row represents a different peptide sequence (specify on the right). Colored squares indicate in which sample is found each fusion transcript-derived peptide. Publications describing each sample data-sets are annotated on the top.

[0390] FIG. 16. Immunopeptidomics. A. Identification of JET derived peptides across 17 primary lung tumors and the human adenocarcinoma cell line A549, treated or not, with interferon gamma. Peptides are shown in rows and samples in columns. B. Boxplot showing the comparison of MS/MS scores obtained from the annotated peptidome (canonical peptides) and from the pJET peptidome. C. Comparison of the frequencies of peptides identified from the annotated peptidome (canonical peptides) and the pJET peptidome at different amino acid peptide lengths.

[0391] FIG. 17. Binding of ER-derived peptides to HLA-A2 molecule. Peptides-HLA-A*02:01 complex formation for synthesized chimeric transcripts-derived peptides. Percentage of complex formation relative to positive control (CMV pp 65 495-503) is represented. The mutated (MelA Mut) and non-mutated (MelA) sequences of Melan-A were used as strong and weak binder peptides controls, respectively. ‘Negative’ indicates staining background. Dashed line indicates the minimum complex formation value needed to consider a peptide as good binder to HLA-A*0201 (50% of positive control).

[0392] FIG. 18.A. Activation of Jurkat cells transduced with CTL-clones-derived TCRs recognizing chimeric transcripts-derived peptides after co-culture with target cells loaded with relevant/specific or an irrelevant/unrelated peptide (Melan-A). B. Activation of Jurkat cells transduced with CTL-clones-derived TCRs recognizing chimeric transcripts-derived peptides after co-culture with target cells loaded with relevant peptide or unrelated peptide (Melan-A), in presence or absence of anti-MHC-I blocking antibody (W6/32) or isotype control. PMA/Ionomycin was used as a positive control of activation and target cells without loading peptides were used as negative control of activation. H1395 LUAD cell line were used as target cells. CTL-clone from which each TCR is derived is indicated on the top and peptide specificity between brackets, showing aminoacidic sequence of chimeric transcript-derived peptide recognized by each of these TCR. This peptide sequence is the specific/relevant peptide used in each case to load target cells. Melan-A and MelA Mut both refer to the unrelated peptide (ELAGIGILTV).

[0393] FIG. 19: A. Heatmap summarizing the frequency of CD8+ T cells recognizing chimeric transcript-derived peptides found ex-vivo without T cell expansions. Only peptide specificities found in at least one tissue are shown (total evaluated patients=4). B. CCR7 and CD45RA percentages in tetramer positive cells summarized in A. after ex-vivo staining for patient 2 and patient 5. (no data available for Patient 1). C. Heatmap summarizing specific tetramer positive cells recognizing chimeric transcripts-derived peptides after in-vitro expansions at day 20 on CD8+ T cells from tumor, juxta tumor or tumor-draining LN samples in the 5 patients analyzed. Only peptide specificities found in at least one tissue are shown. Black squares highlight peptide specificities found also ex-vivo in the same tissue and patient.

### EXAMPLES

### 1. Example 1: Identification of Fusion Transcript Sequence Encoded Tumor Neoantigenic Peptide

### 1.1 Proof of Concept in Mice

[0394] To detect individual and shared tumor neoantigenic peptide issued from fusion transcripts sequences, a bioinformatics pipeline has been developed. This pipeline is designed to identify tumor-specific mRNA sequences composed in part of a TE sequence and in part of an exonic sequence. This pipeline implies determining the MHC alleles. For each human sample, the Class I and Class II MHC alleles can be determined using the seq2 hla (v2.2) tool (bitbucket.org/sebastian_boegel/seq2 hla). For mouse models, murine H-2 alleles are generally known. The bioinformatics method comprises the mapping of transcripts from RNA-sequencing against the reference genome. For the proof of concept analyses described here, mm10 was used for mouse and hg19 for human. Different versions of assembled genomes can be used for example hg19, hg38, mm9 or mm10. This mapping is carried out with STAR (v2.5.3a) (github.com/alexdobin/STAR), with the following setting:
[0395] For allowing multi-hits mapping the parameter outFilterMultimapNmax which sets the maximum number of loci, the read is allowed to map to, is set at 1000, and
[0396] For detecting the abnormal junction (fusion), the parameter chimSegmentMin which sets the minimum length of fusion segment, is set at 10, the parameter chimJunctionOverhangMin which sets the minimum overhang for a fusion junction is set at 10.

[0397] Normal (from SJ.out.tab output file) and abnormal (from Chimeric.out.junction output file) junctions are annotated using Ensembl and repeatmasker databases. Normal junctions define all the junctions that match the parameters used for the mapping (maximum intron length <=1,000,000 bp (set by—alignIntronMax), same chromosome and well oriented) and abnormal ones are junctions that do not match with at least one of the previous criteria. This mean that a TE/Exon junction could be in both junction type but a Exon/Exon junction must be in normal file (SJ.out.tab). Transcript sequences comprising a junction between a TE sequence and an exonic sequence are extracted in silico. From the area of the transcript sequence which overlaps the junction, or downstream of the junction when out-of-frame (reading frame non-canonical), the software predicts, in all reading frames, all possible peptides of 8 or 9 mers. Then, the binding affinity of all these possible peptides for the MHC alleles previously defined for the matched sample is determined netMHCpan (v3.4) (cbs.dtu.dk/services/NetMHCpan/). There are currently more than a dozen various prediction algorithms for predicting the binding affinity of peptides, with NetMHC being the most widely used and validated algorithm for neoantigen prediction pipelines.

[0398] Peptides with either less than 500 nM or with a percentile rank less than 2% are considered as potential neo-antigens. Each splice site (donor or acceptor) is uniquely annotated as TE or as Exon. The part in the 5′ end is qualified “donor”, and the part in the 3′ is qualified “acceptor”.

[0399] Predicted HLA-binding peptides shared between cancer and normal tissues are excluded from further analyses.

[0400] This method has been applied to RNAseq data obtained from 7 well-characterized murine tumor cell lines (B16F10, B16F10-OVA, MCA101, MCA101-OVA, MC38, MC38-GFP, MC38-GFP-OVA). The cell lines with the extension-OVA corresponding to the same model but further expressing ovalbumin. In this study, this line is considered as the similar model, that is to say for example that an assay carried out on the cell line from B16F10-OVA is considered as a repeat of an assay carried out on the cell line from B16F10.

[0401] A list of candidate peptides has been obtained with these parameters (FIGS. 1A, 1B and 1C), some were specific to particular cell lines (FIGS. 1A and 1B), and some were shared between the two tumor cell lines (FIG. 1C).

[0402] For validation, we selected a range of peptides, expressed either in B16F10-OVA or MCA101-OVA, with predicted affinities less than 500 nM. Peptides were selected trying to optimize the ratio between number of reads and predicted affinity for MHC-I.

[0403] Four predicted tumor neoantigenic peptides were selected and characterized by identifying the TE and the exonic sequence (table 2).

TABLE 2
Characterization of 4 predicted tumor neoantigenic
peptides selected by the method

| Peptide | Cell line | Donor | Acceptor | Predicted affinity |
|---|---|---|---|---|
| N25 | B16/B16-OVA | ERV-MaLR | Chmp3, exon2 | H2-Db, 51.8937 |
| | | (subfamily | | |
| | | MTA) | | |
| N26 | MCA/MCA-OVA | SINE- | Angel2, exon2 | H2-Kb, 392.0384 |
| | MC38-GFP/MC38- | Alu(B1F) | | |
| | OVAGFP | | | |
| N90 | MCA/MCA-OVA | Predicted gene | ERVL-MaLR | H2-Kb, 403.8959 |
| | | 45873 | (subfamily | and 50.5416 |
| | | | ORR1A2-int) | |
| N94 | MCA/MCA-OVA | Rsrc1 | ERV1 (subfamily | H2-Kb, 431.0564 |
| | MC38-GFP/MC38- | | RLTR4 MM-int) | |
| | OVAGFP | | | |

### 1.2 Validation by RT-PCR of the Fusion Transcript Sequence

[0404] First, a validation by regular RT-PCR has been performed, using primer pairs with one primer in the TE sequence, and the other one in the exonic sequence.

[0405] For the RNA extraction and reverse transcription, 3-5.10⁶ cells were lyzed in 500 μL Trizol, and 100 μL phenol-chloroform added to the lyzates prior centrifugation. Aqueous phase was collected, mixed in a 1:1 ratio with 100% EtOH and transferred to RNAeasy minikit columns. RNA was then collected following manufacturer's instructions (including on column DNAse treatment). After RNA elution, DNA contaminants were further removed by treatment with Turbo DNAse (Fisher scientific), according to manufacturer's instructions). RNA concentration was measured using a nanodrop, and 1 μg of RNA used for reverse transcription. First strand synthesis was performed with Superscript III (Life technologies) using oligodT (15) as primers, according to manufacturer's instructions. Primers were ordered from Eurogentec. PCR reactions were performed using Taq polymerase. After identification of optimal conditions for each reaction, PCR products were extracted from agarose gels, and sequencing was performed using GATC lightrun. Sequence alignment was checked with APE software.

[0406] Using this approach, bands matching predicted size for N25, N26, N90 and N94 were detected, respectively in the cell lines identified in Table 2 (See FIG. 2A for N25). Interestingly, although N26 was detected only in MCA and MC38 cells in silico by RNAseq as previously described in the pipeline, using RT-PCR we detected a band corresponding to N26 in B16F10-OVA cells (FIG. 2B), indicating that this sequence is shared between three independent tumor cell lines (MCA, MC38 and B16F10). By re-analyzing the RNAseq data, we found that the N26 junction was present in B16F10-OVA cells, but below the detection threshold of the algorithm. Moreover, sequencing of the RT-PCR product showed exact match with sequences predicted by the algorithm.

### 1.3 In Vivo Immunization of Mice

[0407] To validate these candidates in vivo, short (9-mers) peptides corresponding to neoantigenic peptide which binds to the MHC class I sequences, were synthetized. For the in vivo assays, long (27-mers) peptides, which include the flanking regions to the predicted MHC-binding short peptides of 9 mers, were synthetized, because this length is better suited for in vivo immunization. B16F10 OVA and MCA101-OVA were maintained in RPMI, Glutamax, 10% FCS, 1% penicillin-streptomycin and passaged using TrypLE. Cells were kept in culture for a maximum of one month, and new vials were thawed for each in vivo experiment. C57BL6J recipient mice were immunized with 100 μg long peptide (N25L or N26L), SIINFEKL peptide (short OVA peptide), OVA (Sigma) or DMSO, each with 50 μg polyI:C, by subcutaneous injection into the flank. Immunizations were repeated 7 days after primary immunization. 3 days later (10 days after primary immunization), animals were sacrificed and numbers of peptide-specific IFNg-secreting CD8 T cells in inguinal lymph nodes were detected by ELISPOT (FIG. 3A). Short peptides (N25, N26, or SIINFEKL) or DMSO at 10 μg·mL⁻¹ were used to restimulate T cells. Alternatively, 7 days after secondary immunization, animals were injected subcutaneously with 2.5.10⁵ B16F10-OVA or 5.10⁵ MCA-OVA cells in PBS. We found that N25, and to a lesser extent N26 were able to induce immune responses (FIG. 3B).

### 1.4 In Vivo Treatment of Mice with Tumor

[0408] To test whether these peptides were protective against tumor cells, we immunized C57BL6 mice with 100 mg peptides N25L or N26L, or OVA (control peptide) and 50 μg polyI:C in PBS at d0 and d7, and at d14, we injected 2.5.10⁵ B16F10-OVA cells to mice immunized with OVA, N25L and N26L. B16F10 OVA and MCA101-OVA were maintained in RPMI, Glutamax, 10% FCS, 1% penicillin-streptomycin and passaged using TrypLE. Cells were kept in culture for a maximum of one month, and new vials were thawed for each in vivo experiment. C57BL6J recipient mice were immunized with 100 μg long peptide (N25L or N26L), OVA (Sigma) or DMSO, each with 50 μg polyI:C, by subcutaneous injection into the flank. Immunizations were repeated 7 days after primary immunization.

[0409] Short peptides (N25, N26, or SIINFEKL) or DMSO at 10 μg·mL⁻¹ were used to restimulate T cells. Alternatively, 7 days after secondary immunization, animals were injected subcutaneously with 2.5.10⁵ B16F10-OVA or 5.10⁵ MCA-OVA cells in PBS. Tumor size was measured twice weekly using a manual caliper, and animal health status monitored throughout the experiment timeframe (FIGS. 4A and 4B). Animals were sacrificed when tumor volume reached 1 mm3. Strikingly, we observed that N25L significantly delayed the formation of B16OVA tumors, in a more efficient way than OVA. Moreover, we obtained a similar result upon N26L immunization.

### 2 Example 2: Identification of Human Lung Adenocarcinoma (LUAD) Neoantigenic Peptides Derived from Fusion Transcripts Composed of a TE Element and an Exonic Sequence

### 2.1 Material and Methods

[0410] RNA extraction. Tumour and juxtatumour samples were cut into pieces of #1 mm3 and resuspended in 700 μl RTL lysis buffer (Quiagen) supplemented with 1% β-mercaptoethanol and homogenized using Perecellys 24 Tissue Homogenizer (Bertin Technologies). Total RNA isolation was performed using RNeasy Micro Kit (Qiagen) following manufacturer instructions. Total RNA from tumour cell lines were extracted from 5.106 tumor cell lines using the same procedure.

[0411] PCR and Sequencing. Primers were designed using APE software. For each sample, 1 μg of RNA was retrotranscribed into cDNA using SuperScript III Reverse transcriptase (ThermoFisher), as indicated by the provider. PCR reaction was performed using GoTaq G2 Hot Start Polymerase (Promega). All primers were used in a concentration of 0.5 μM. Reactions were carried out in Veriti™ 96-Well Thermal Cycler (ThermoFisher). PCR products were loaded in LabChip GX (Caliper LifeSciences) and analysed by LabChip GX Software (v4.2).

[0412] PCR reactions were repeated for those samples with an amplification product on the expected size. Then, the PCR products were run in a 2% agarose gel SYBR Free Dye ( 1/10000) (Invitrogen). The specific bands were cut and the DNA products were purified using QIAquick Gel Extraction Kit (Qiagen) following manufacturer instructions. Finally, these products were sequenced by EuroFins Scientific. The resulting sequences were compared to the expected one using Serial Cloner software.

[0413] Tetramer formation. HLA-A2 monomers were purchased from ImmunAware® and the formation of tetramers was evaluated with synthetic ER-derived peptides following manufacturer instructions. Briefly, synthetic HLA-A2 monomers were incubated with synthetic peptides during 48 h at 18° C. Tetramerization was done by further incubation of monomers with biotinylated-sepharose. Finally, tetramer formation was measured by flow cytometry using a PE-conjugated anti-β2-microglobulin antibody. As a positive control we used a peptide derived from CMV provided by the manufacturer.

[0414] In experiments addressed to evaluate the presence of specific CD8+ T cells, the tetramerization step was performed by incubating the monomers with different combinations of fluorescent streptavidin (PE, APC, PE-Cy5, PE-CF594, BV421, BV711 and FITC).

[0415] Priming of naïve CTLs. PBMCs were obtained by Ficoll gradient separation from HLA-A2+ healthy blood donors. CD14+, CD4+ and CD8+ cells were purified by positive selection using magnetic beads (Miltenyi Biotec). While CD4+ and CD8+ T cells were cryopreserved until the experiment day, CD14+ fraction was cultured in the presence of IL-4 (50 ng/mL) and GM-CSF (10 ng/mL) at 106 cells/mL during 5 days to obtain moDCs. After this period of time, the moDCs were maturated with LPS and incubated with synthetic ER-derived peptides at a final concentration of 1 μg/mL for 2 hours. Finally, peptide-loaded moDCs were co-cultured with autologous CD4+ and CD8+ T cells in culture medium supplemented with IL-2 (10 U/ml) and IL-7 (100 ng/ml). The ER-derived peptide stimulation of specific CD8+ CTL populations was assessed by MHC-I tetramer staining by flow cytometry using a combination of two-color tetramer for each peptide.

[0416] Tetramer Staining. Cells were resuspended in PBS, stained with Live/Dead Aqua-405 nm (ThermoFisher) during 20 minutes at 4° C. and washed once. After that, cells were resuspended in PBS-1% BSA containing the mix of SA-coupled tetramers and incubated in the dark at room temperature during 20 minutes. Without further washing, surface antibodies were added in PBS-1% BSA and cells were incubated 20 minutes in the dark at 4° C. Surface antibodies were a combination of anti-CD3-BV650+ anti-CD8-PECy7 in combination with anti-CCR7-AF700+ anti-CD45RA-BUV395 when required. Finally, cells were washed twice and resuspended in FACS buffer for flow cytometry analysis.

[0417] CTL-clones generation. Tetramer positive cells were single-cell FACS sorted (ARIA-sorter, BD) in U bottom 96-well plates. Sorted cells were collected in 100 μl of RPMI 10% human serum AB (Sigma-Aldrich) containing 150.000 feeders' cells. Finally, 100 μl of AIM-medium containing IL-2 (3000 IU/ml) and anti-CD3 ζ 100 μg/ml, OKT3 clone from Miltenyi) were added and cells were cultured during 15-20 days maximum. When evident cell growth was observed in wells, we perform a second round of expansions with new feeders' cells for an additional period of 15 days maximum. Cells were feed and split as necessary during this period with the same culture media (AIM-RPMI 50/50+5% Human Serum) but only containing IL-2 at 500 IU/ml. Finally, expanded clones were checked for their specificity by FACs-tetramer staining and only clones with >85% of tetramer positive clones were used for further analysis.

[0418] Killing assays. To perform killing assays, xCELLigence RTCA S16 Real Time Cell Analyzer was used. H1650 cell-line were plated at 0.5×10⁶ cells/ml in pre-coated 16 well plates. One day after, cells were incubated or not during 1 h with different concentration of the correspondent synthetic peptides. After that, cells were washed twice with culture medium and incubated or not for additional 30 minutes with anti-MHC-I antibodies (clone W6/32, 50 μg/well) or isotype control at the same concentration. Without additional wash, CTL-clones were added at the correspondent ratio. The complete assay was done in free-serum culture medium in a final volume of 200 at 37° C. connected to the xCELLigence system. Impedance variation (cell-index) was measured in real-time during 40 h. Each condition was performed by duplicates.

[0419] Cytokine secretion and Jurkat cells activation. 50,000 H1650 cells were plated in 96-well plate in culture medium supplemented with 5% of fetal bovine serum. The day after, cells were culture during 1-2 h with synthetic peptides at different final concentrations. After that, cells were washed twice, CTL-clones were added at 1:1 ratio and co-cultured during 18 h with peptide-loaded target cells. Culture supernatants were collected and cytokine concentration analyzed by cytokine beads arrays (CBA, BD Biosciences) following manufacturer's instructions.

[0420] The same experiment was performed using transduced Jurkat cells instead of CTL-clones and two different types of target cells: H1650 and H1395 cell lines. In this assay, after co-cultured with peptide-loaded target cells, Jurkat cells were assessed by flow cytometry analyzing the expression of reporter markers. PMA/Ionomycin was used as positive control to activate Jurkat cells.

[0421] Tissues and Blood samples. Lung tumor, juxta tumor and lymph nodes samples were cut into small pieces and digested using a mix of collagenase-I (2 mg/ml), hyaluronidase (2 mg/ml) and DNasa (25 μg/ml) in a final volume of 2 ml culture medium (CO₂ independent medium+5) during 40 min at 37° C. After digestion single cell suspensions were collected through a cell Strainer and washed. Tumor and Juxta tumor suspensions were enriched on lymphocyte fractions by a ficoll gradient. After that cells were staining for tetramer analysis by FACs as described before.

[0422] Blood samples were seeded on a ficoll gradient and PBMCs were isolated. After that, PBMCs were enriched for CD8+ T cells using EasyStep Human CD8+ T cell Enrichment Kit (STEMCELL Technologies). Finally, enriched cells were stained for tetramer analysis as described before.

[0423] Tumor infiltrating lymphocytes (TILs) cultures. Tumor tissue was cut into small pieces (1-3 mm3 size, 6-12 pieces maximum). Each tumor fragment was transferred into individual wells from 24-well plates and cultured in a final volume of 2 ml RPMI 10% Human Serum+IL-2 6000 IU/ml. Cells were feed/split as necessary during 15-20 days and cryopreserve or analyzed for tetramer staining.

[0424] TCR cloning. Total RNA was extracted from CTL-clones and retrotranscribed into cDNA using SuperScript III (ThermoFisher). TCRα and β were amplified by PCR as described in Li et al 2019. DNA products were run in 2% agarose gels and sequenced after gel band extraction (Qiagen). TCR V regions (α and β) were concatenated with murine TCR constant chain and cloned into a PEW-pEF1A-inactEGFP vector and amplified in transformed bacteria.

[0425] Jurkat transduction. Lentivirus particles were produced by HEK-293 FT cell line transfected with TCR-expression plasmids together with envelope (pVSVG) and packaging (psPAX2) plasmids. After 64 h, supernatant was collected and lentivirus particles were concentrated using 100 kDa centrifugal filter (Sigma-Aldrich). Lentivirus suspension was transferred by spinoculation into TCR-negative Jurkat cells expressing reporter genes (NFAT-GPF, NF-KB-CFP and AP-1-mCherry). After 5 days, transduction efficiency was evaluated by FACS using anti-murine TCR-β antibody (Clone H57-597). This Jurkat cells were described in Rosskopf S. et al. 2018.

[0426] Mass spectrometry data analysis. Public immunopeptidomics raw data derived from MHC-eluted peptides were analysed using ProteomeDiscoverer 1.4 (ThermoFisher) with the following parameters: no-enzyme, peptide length 8-15 aa, precursor mass tolerance 20 ppm and fragment mass tolerance 0.02 Da. Methionine was enabled as variable modification and a false discovery rate (FDR) of 1% was applied. MS/MS spectra were searched against the human proteome from Uniprot/SwissProt (updated 6 Mar. 2020) concatenated with the list of all fusion transcripts-derived proteins from lung TCGA projects. Finally, peptides matching with Uniprot database or with translated fusion transcripts present in lung normal samples were discarded.

### 2.2 Results: Identification of Fusion Transcript Sequences Encoding Tumor Neoantigenic Peptide in Human Subject

### 2.2.1 Characterization of Neoantigens

[0427] First the TE-Exon fusion transcript landscape was characterized in normal samples from TCGA public database. A total of 8876 unique fusions were identified in 679 normal samples from 19 different tissues (bile duct, bladder, brain, breast, cervical, colon, head and neck, kidneys, liver, pancreas, PCPG, prostate, rectum, sarcoma, skin, thymus, thyroid, uterine). Specific fusions to each tissue type were found with a very small portion of pan-tissue fusion transcripts. These results suggest that a dedicated tissue specific regulatory mechanism is associated with these fusion transcripts.

[0428] Then the number of identified fusions in 514 LUAD samples from TCGA has been compared to their 59 normal associated pulmonary samples present in TCGA. On average, 235 fusions were identified in NSCLC samples, compared with 200 in healthy lung samples (Wilcoxon pvalue=9×10⁻¹⁰). 8269 total unique fusions were identified in NSCLC tumors.

[0429] A first category of fusions called TSF (tumor specific fusion) was obtained as those found in at least 1% of tumor samples and in none of the normal samples. 210 fusions were thus defined as TSF.

[0430] Some high-frequency fusion transcripts in tumors and low frequency in normal cells may also be good candidates for neo-antigens. Thus, a second category called TAF (tumor associated fusion) was notably defined as fusions present in less than 4% of normal tissues, notably less than 2%, and more than 10% of the tumors and that is over expressed in tumors compared to normal tissue samples.

### Fusion Sequence:

[0431] In order to reconstruct the fusion nucleotide sequence, the sequence of the donor on chromosome “Donor_Chromosome_X” from “Donor_start X” to “Donor_Breakpoint_X” on strand “Donor_strand_X” and the acceptor sequence on the chromosome “Acceptor_Chromosome_X” starting from “Acceptor_Breakpoint_X” to “Acceptor_end_X” on the strand “Acceptor_strand_X” have been extracted from the Ensembl HG19 human assembly database. It is to be noted that the use of the Ensembl HG19 human database is not limitative and that any other adapted database may be used such as NCBI reference Sequence Database (RefSeq).
[0432] Care should be taken to take the reverse complement of the sequence if the fusion is present on the minus strand.
[0433] The “fusion sequence” consists of the donor sequence followed by the acceptor sequence.

### Nucleotide Sequence of the Fusion Transcript:

[0434] On the basis of the known canonical transcripts in which the exon is involved, all the “fusion transcripts” were reconstructed.

when the Donor is the Exon (See FIG. 9A)
[0435] it starts with the beginning of the canonical transcript to the donor exon and replace the complete canonical exon sequence with the fusion sequence. In this case, the fusion transcript stops after the TE sequence of the acceptor.
   when the Donor is the TE (FIG. 9B)
[0436] The sequence begins at the canonical position of the acceptor exon in the transcript and forget all exons upstream. The canonical sequence of the acceptor exon was replaced with the fusion sequence and the transcript was reconstructed until the end.

[0437] Each nucleotide sequence of size k (i.e. from 24 to 75 nucleotides) of the fusion transcript (translation of the first k-mer starts at the first nucleotide of the fusion transcript, translation of the second k-mer starts at the second nucleotide of the fusion transcript, etc.) was then translated into a peptide sequence.

[0438] The obtained peptides are then further analyzed with NetMHCpan for MHC binding prediction. Affinity for binding to at least one of the known human alleles was thus predicted, (see also example 1 for further illustration) for each k-mer present in the sequence.

[0439] The peptides were then further screened against a reference proteome, typically for human subject against all sequences present in Uniprot (representing all the sequences encoded in the human exome). Peptides were considered equal to those in Uniprot if they had the same amino acid sequence or if they only differed in the amino acid in the first or last position. All these equal sequences were then discarded from the candidate list. 117 peptide sequences derived from these 230 fusion transcripts where thus predicted to bind to HLA-A2: 01 (see table 3 below).

TABLE 3
Peptides LUAD

| Peptide | Peptide | Peptide |
|---|---|---|
| sequence | sequence | sequence |
| RLLHLESFL | TLGGLMPVL | LMTSSIMSV |
| TLMNLVQVL | FLQGSITFI | MLMKTVWQA |
| ILHSLVTGV | MLLLYIWQV | SLQPEDMAL |
| FMMEQVGLA | YLKIMPVHL | KILTYFPMV |
| AMDGKELSL | HTLGGLMPV | FLGTRVTRV |
| TLAYGKYYI | YIMARVLFV | SLMQSGSPV |
| GLIQLIWLA | FILRTDHYI | VLMWTMAHL |
| GMVDGGSNI | IMSSAIAYL | LLGETKVYV |
| YLWTTFFPL | FIIGILQLA | KILTYFPMV |
| ALWEAKMII | YLLQEIYGI | SLLERGLEA |
| WLSSRVTQL | GVFPVVIQA | VLSSLNVPL |
| AILPKANTV | ALVHLPSQL | FLERKSIRV |
| VLLFEVELV | GLHPAKPQV | FVGSSTFYL |
| GLDTGLQGM | MLVTWELAL | FLYTGDFFL |
| SLLDGTQLF | VLLTNTIWL | SVGPFALTV |
| GLPTGYLFV | ALVHLPSQL | NLALPLPKV |
| LLDRFGYHV | CLIDEMPEA | VLESGLYQV |
| SLLEETQAI | ALMGGFMKT | MLVAITVLI |
| MLLVQPAEL | LLLHLPLXL | FMDDAKILF |
| GLLNISHTA | TLQDKNLGL | ALVHLPSQL |
| HLYEPWFPV | ILANLPPAL | ILTASITSI |
| YLQGLPLPL | PLWDGMAGL | AMDGKELSL |
| KAVEGILAV | GLDHQTHPL | SLGWNISGV |
| MIYEENNRL | GMFLLPPQL | MISAFPNEV |
| YLPYFLKSL | RLADHLSFC | RLTHELPGI |
| GLYSLSSVV | RMRDQLPAL | LLFSDGEKV |
| LMISRTPEV | GLLHAEVAL | RLNESTTFV |
| LLGGPSVFL | SLQNCQVSV | KLEELKSFV |
| ILSGYGPCV | VISAFPSEV | SINEEIQTV |
| FLPDLDRPL | ALAIAALEL | RLHDGPLRA |
| AMDGKELSL | VLDGLDVLL | MISAFPNEV |
| RMDFEDLGL | ELFPPLFMA | ILHTSVPFL |
| TLIFNPTEI | FLIVAEILI | YLENMVSGV |
| LLPGLLLLL | IVAEILISL | QLLGRLESL |
| LLLVHQHAV | KAVEGILAV | RLLHLESFL |
| FLDDAPPGT | YLPHLPQVL | ALLRQMEGI |
| VLIRYVWTL | MLLDPMGGI | TLNKDFQEV |
| YLCGHLHTL | RLLHLESFL | IMEQGDLSV |
| VLSQLTILI | YLAYILYFV | RLLHLESFL |

### 2.2.2 Validation on HLA-A2 Associated Peptides

[0440] Given that HLA-A2 allele is expressed in almost 50% of the Caucasian population, together with the existence of different technical tools, validations were focused on HLA-A2-associated peptides.

[0441] In the following paragraphs TE-Exon derived-transcripts is used interchangeably with “fusion transcripts” and the term “TE-derived peptides” is used interchangeably with “fusion transcripts-derived peptides.

### Expression of TE-Exon Derived-Transcripts in Lung Adenocarcinoma Samples

[0442] To experimentally validate the predicted TE-Exon transcripts, the expression by PCR in LUAD tumor samples and tumor cell lines was validated firstly. Specific primers for each chimeric fusion were thus designed, in order to have one of them binding to the TE part and the other to the Exon part of the fusion. The results were further confirmed by sequencing of the PCR products.

[0443] In particular, specific primers were designed in such a way that the forward primer was binding in the “donor” sequence and the reverse primer was binding in the “acceptor” sequence of the reconstructed fusion sequence. PCR reactions were run on RNA derived from lung tumor samples and human tumor cell lines. Amplifications products were seeded on agarose gels and bands found on the expected size were cut and sequenced. Finally, sequenced PCR products were compared with the reconstructed fusion sequence.

[0444] Using this approach, it was possible to confirm the presence of predicted fusion transcripts both in LUAD tumor samples and tumor cell lines. Table 4 below summarizes the results found for 8 of the most frequent chimeric fusions with a predicted peptide associated to bind with high affinity to HLA-A2 allele.

TABLE 4
Most frequent fusion transcript validation. The most frequent fusions
peptides were validated by PCR in 15 LUAD tumor samples and 6 LUAD tumor
cell lines. The status ‘Yes’ or ‘No’ in the table below indicates
the presence or absence of the PCR product on the expected size. When
the PCR product was further validated by sequencing, is denoted as ‘Yes’.

| | Frequency | TE-Exon fusion derived-peptides asociated to bind HLA-A2 | | | |
|---|---|---|---|---|---|
| | peptide | 119 | 48 | 28 | 24 |
| | sequence | RLLHLESFL | MLMKTVWQA | FLGTRVTRV | AILPKANTV |
| LUAD | H1975 | Yes | Yes | No | No |
| tumor cell | H1650 | Yes | No | No | No |
| lines | H1299 | Yes | No | No | No |
| | A549 | Yes | Yes | No | No |
| | H2052 | Yes | No | No | No |
| | HCC827 | Yes | Yes | No | No |
| LUAD | Tumor 1 | Yes | No | No | No |
| tumor | Tumor 2 | Yes | Yes | No | No |
| samples | Tumor 3 | Yes | No | No | No |
| | Tumor 4 | Yes | No | No | No |
| | Tumor 5 | Yes | No | No | No |
| | Tumor 6 | Yes | No | No | Yes |
| | Tumor 7 | Yes | No | No | No |
| | Tumor 8 | Yes | No | No | No |
| | Tumor 9 | Yes | No | No | No |
| | Tumor 10 | Yes | Yes | Yes | Yes |
| | Tumor 11 | Yes | Yes | No | No |
| | Tumor 12 | Yes | Yes | Yes | Yes |
| | Tumor 13 | Yes | Yes | No | Yes |
| | Tumor 14 | Yes | Yes | Yes | Yes |
| | Tumor 15 | No | No | No | No |

| | TE-Exon fusion derived-peptides asociated to bind HLA-A2 | | | |
|---|---|---|---|---|
| | 23 | 19 | 18 | 16 |
| | YLPYFLKSL | AMDGKELSL | FLIVAEILI | RLADHLSFC |
| LUAD | Yes | No | No | No |
| tumor cell | No | No | No | Yes |
| lines | No | No | No | Yes |
| | Yes | No | No | No |
| | No | No | No | No |
| | Yes | yes | No | No |
| LUAD | Yes | Yes | No | Yes |
| tumor | Yes | Yes | No | No |
| samples | Yes | No | No | Yes |
| | Yes | Yes | No | No |
| | No | No | No | No |
| | Yes | Yes | Yes | Yes |
| | No | Yes | No | No |
| | Yes | Yes | No | No |
| | No | Yes | Yes | No |
| | Yes | Yes | Yes | No |
| | Yes | Yes | Yes | No |
| | Yes | Yes | No | No |
| | Yes | No | No | Yes |
| | Yes | Yes | No | Yes |
| | No | Yes | No | No |

### Binding of ER-Derived Peptides to HLA-A2 Molecule

[0445] Once confirmed the expression of chimeric transcripts, the derived-peptides were synthetized and their binding to HLA-A2 was confirmed. Because monomer stabilization and tetramer formation are only possible in the presence of a high affinity binding peptide, the formation of HLA-A2 tetramers was estimated in the presence of synthetized peptides by flow cytometry. All predicted peptides were able to stabilize tetramer formation, showing a percentage of fluorescence higher than 50% relative to positive control. As positive control, a known high affinity binding peptide to HLA-A2 derived from Cytomegalovirus (CMV) was used. This result confirmed the predicted high affinity binding to HLA-A2 allele. FIG. 10 shows the result for 10 peptides derived from the most frequent fusions peptides.

[0446] FIG. 17 shows a new set of peptides, also derived from frequent chimeric transcripts, with a confirmed binding to HLA-A2 using the same peptide-MHC-I complex formation assay. As a positive control of complex formation, we used both CMV pp 65 495-503 (NLVPMVATV) and the mutated sequence of Melan-A (MelA mut, ELAGIGILTV), both known good binders to HLA-A2. The non-mutated sequence of Melan-A (MelA) was used as a control of low binder peptide. Negative is recombinant HLA-A2 molecule without any peptide.

### Immunogenicity of ER-Derived Peptides

[0447] The following step after binding validation to HLA-A2 allele, was to test the immunogenicity of predicted peptides. Priming assays were thus performed to test the ability of identified peptides to expand specific cytotoxic T cells. PBMCs from HLA-A2+ healthy donors were used to generate monocyte derived-DCs (moDCs). After loading the moDCs with a mix of synthetic peptides, autologous co-culture was performed with CD4+ and CD8+ T cells. Finally, the expansion of specific CD8+ T cells was analysed by flow cytometry using two-colours tetramer staining. As a control of specific expansion, the co-culture was performed in the absence of peptides. By using this approach in one donor, it has been possible to identify and expand specific CD8+ T cells recognizing 6 of the most frequent chimeric fusion derived-peptides (RLLHLESFL, LLGETKVYV, AILPKANTV, RLADHLSFC, FLIVAEILI, YLWTTFFPL). This result is evidenced by an increase in at least one magnitude order of the percentage of tetramer positive cells compared to control test among total CD8+ T cells.

[0448] The same experiment was performed in order to evaluate the response in additional 5 donors. FIG. 11A summarizes the results obtained for the total of 6 donors analyzed in which we found specific CD8+ T expansions for 23 out of 29 of the most frequent fusions transcripts-derived peptides (YLWTTFFPL, FLGTRVTRV, RLADHLSFC, LLGETKVYV, MLVTWELAL, MLMKTVWQA, SLMQSGSPV, AILPKANTV, AMDGKELSL, LLDRFGYHV, GLLNISHTA, ILTASITSI, ILSGYGPCV, RQAPGFHHA, GLPSHVELA, ILHSLVTGV, LLHLESFLV, VLLTNTIWL, LLTSWHLYL, RLLHLESFL, YLPYFLKSL, VLMWTMAHL, YLQGLPLPL). As a positive of expansions, mutated Melan-A peptide (ELAGIGILTV) were used. These experiments show that these peptides are able to induce an immune response and confirms the immunogenicity of ER-derived peptides.

### Generation of Cytotoxic T Lymphocytes Clones Recognizing ER-Derived Peptides

[0449] Expanded CD8+ tetramer positive T-cells from immunogenicity assays (FIG. 11A) were single cell FACS-sorted in order to generate cytotoxic T lymphocytes (CTLs) clones. 10 clones recognizing 5 different ER-derived peptides were generated: YLWTTFFPL, LLGETKVYV, MLVTWELAL, MLMKTVWQA, RLADHLSF. These peptides are listed in Table 3 as peptide 9, 86, 53, 80 and 64 respectively. It will be referred to these numbers to indicate the specificity of each generated CTL-clone. For example, CTL-clone 9 recognize ER-derived peptide 9. In a second set of experiments a new CTL-clone 17 was generated recognizing peptide 17 (LLDRFGYHV).

[0450] In order to evaluate the cytotoxic capacity of generated CTL-clones, two different functional assays were conducted using the H1650 cell line as target cells. This is a LUAD-derived tumor cell line expressing HLA-A2 allele.

[0451] First, the ability of CTL-clones to secret cytokines after exposure to ER-derived peptides was measured. After co-cultured of the CTL-clones with the target cells loaded with the specific ER-derived peptides during 18 h, secretion of INF-γ, TNF and Granzyme-B (Gr-B) was measured in culture supernatants. All CTL-clones were activated after exposure specific ER-derived peptides, secreting cytokines in a dose-dependent manner (FIG. 11B).

[0452] In a second set of experiments, CTL clones killing capacity was assessed. CTL-clones were co-cultured in different conditions with target cells loaded or not with ER-derived peptides. Using xCELLigence system the real-time impedance variation in a target cells monolayer was measured. In these assays, a decrease in cell-index is related with a decrease in the number of cells in the monolayer reflecting cell viability.

[0453] When CTL-clone 9 was co-culture in 1:1 ratio with target cells loaded with ER-derived peptide 9, a decrease in cell-index over time was observed, compared to the control cells (target cells alone). This cell-index decrease was inhibited when co-culture was performed in the presence of blocking anti-MHC-I antibody (+ anti-MHC-I). Performing the co-culture using the same concentration of isotype control (+ isotype) did not inhibit the decrease in cell-index. Moreover, the amount of the decrease increased when target cells were loaded with a higher concentration of peptide (1 pM compared to 1 uM) (FIG. 11C, left panel). These result show that cytotoxic T cells can recognize peptides encoded by a fusion transcript as herein described and kill target tumor cells expressing such peptides.

[0454] It was then demonstrated that ER-derived peptides are naturally expressed and presented by target cells, such said target target-cells can thus be killed by co-culturing them with CTL-clones without external addition of peptides. To this aim, co-culture of CTL-clone 9 with H1650 target cells at different ratios were performed. The right panel of FIG. 11C, shows that CTL-9 was able to kill target cells at a ratio effector-target of 4:1 as compared to the control cells (target cells alone). Moreover, killing efficacy is increased at higher ratios (8:1). No killing of target cells was evidenced at lower ratios (2:1).

[0455] Finally, similar experiments were performed with CTL-clone 9, CTL-clone 64, and CTL-clone 80 showing a specific killing of target cells that could be also inhibited when the co-culture is performed in the presence of anti-MCH-I antibodies (FIG. 11D).

[0456] All together, these results confirm that cytotoxic T cells that recognizes several different peptides encoded by a fusion transcript as herein described can recognize and kill tumor cells expressing said specific fusion transcripts-derived peptides and that this effect is due to the specific recognition of peptides in the context of MHC-I molecules. Moreover, the fact that CTL-clones are able to kill target cells without addition of external peptides, provide clear evidence that fusion transcripts-derived peptides are naturally expressed and presented by an LUAD tumor cell line.

### Generation of Engineered T-Cells Recognizing Fusion-Derived Peptides

[0457] Jurkat cells transduced with lentiviral vector encoding for CTL-9 TCR sequence were co-cultured with two different target cells, H1650 and H1395. Both are LUAD-derived cell lines express HLA-A2 allele. TCR-mediated activation of Jurkat cells was evaluated by flow cytometry as an increase in the fluorescence of reporter genes (NFAT-GPF, NF-KB-CFP and AP-1-mCherry). Preliminary results showed that Jurkat cells are activated when co-cultured with both target cells compared to negative control (non-transduced Jurkat cells). Furthermore, this activation increased in a dose-dependent manner when the co-culture was performed with target cells loaded with specific peptides. PMA/ionomycin was used as positive control (FIG. 12).

[0458] These results were repeated in another set of experiments and similar ones were obtained with Jurkat cells transduced with lentiviral vector encoding TCR sequences from CTL-86 and CTL-53 and CTL-17. Transduced Jurkat cells were activated by co-culture with a target tumor cell line loaded with the corresponding ER-derived peptide (Specific/Relevant peptide) but not with the control Melan-A peptide (Unrelated/Irrelevant peptide, ELAGIGILTV) (FIG. 18A). As expected, activation is inhibited by blocking with anti-HLA-I antibodies (FIG. 18B). TCRs expressed by the generated CTL-clones are thus specific to the corresponding HLA-A2 presented ER-derived peptides. Table 4bis lists the sequences of re-expressed TCRs.

[0459] These results are in line with the results shown in FIGS. 11C and D, showing that LUAD-derived tumor cells express TE-derived peptides. Furthermore, these results also highlight the technical relevance of CTL-clones TCR sequences in the development of engineered T cells.

TABLE 4bis
TCR sequences derived from CTL-clones recognizing chimeric transcripts-derived
peptides.

| TCR | Speci- | TCRalpha | | TCRbeta | | | | |
|---|---|---|---|---|---|---|---|---|
| number | ficity | V | J | V | D | J | CDR3alpha | CDR3beta |
| 1 | LLDRFGY | TRAV41* | TRAJ34* | TRBV6- | TRBD1* | TRBJ-2* | CAVLLDNTD | CASSRLQGALE |
| | HV | 01 | 01 | 5*01 | 01 | 01 | KLIF | LFF |
| 2 | YLWTTFF | TRAV12* | TRAJ44* | TRBV7- | TRBD1* | TRBJ2- | CAVNTRGTAS | CASSLGGGTDT |
| | PL | 2*03 | 01 | 6*01 | 01 | 3*01 | KLTF | QYF |
| 3 | LLGETKV | TRAV12- | TRAJ49* | TRBV2* | TRBD2* | TRBJ-7* | CAVFTGNQFY | CASLSGESYEQ |
| | YV | 3*01 | 01 | 02 | 01 | 01 | F | YF |
| 4 | MLVTWE | TRAV35* | TRAJ54* | TRBV13* | TRBD2* | TRBJ2- | CAGQLAGAQ | CASSPSRDGQE |
| | LAL | 01 | 01 | 01 | 01 | 5*01 | KLVF | TQYF |

### Presence of CD8+ Cells Recognizing Fusion-Derived Peptides in LUAD Patients

[0460] It was then aimed to identify the presence of CTL cells recognizing fusion-derived peptides in LUAD tumor samples.

[0461] In a first set of experiments tumor infiltrating lymphocytes (TILs) expanded with a mix of TE-derived peptides and Il-2, or only with Il-2, were analyzed by tetramer staining. As is shown in FIGS. 13A and B, CD8+ T-cells cells recognizing fusion-derived peptides were found in TILs derived from LUAD patients.

[0462] It was then showed that tetramer positive cells could be detected and their phenotype in non-expanded CD8+ T cells derived from fresh tumor samples was further assessed. Using this strategy, CD8+ T cells present in Tumor, juxta-tumor, invaded lymph-nodes and blood derived from LUAD patient samples were thus analyzed. The cell phenotype was determined based on the expression of surface markers CCR7 and CD45RA for Naïve (CCR7+CD45+), Central Memory (CM, CCR7+CD45RA−) Effector Memory (EM, CCR7−CD45−) and Terminal Effectors (TE, CCR7−CD45+) T cells. Interestingly, tetramer positive cells found in tumor tissues shared preferentially a memory phenotype whereas naïve cells (CCR7+CD45+) are found mostly in cells derived from lymph nodes (FIGS. 14A and B). Patient 2 and 3 are the same in FIG. 13 and FIG. 14.

[0463] All samples tested derived from HLA-A2+ patients.

[0464] The presence of tetramer positive cells with a memory phenotype in tumor tissues, together with the presence of tetramer positive cells in TILs, provide evidence that an immune response is generated against TE-derived peptides in these patients. Moreover, the existence of naïve tetramer positive cells in lymph nodes shows that an immune response against these particularly TE-derived peptides can be generated.

[0465] In a second cohort of 5 primary, untreated, LUAD tumor, juxta-tumor, tumor-draining lymph node and blood samples from LUAD cancer HLA-A2+ patients were analyzed. Half of each sample was analyzed directly ex-vivo by isolating CD8+ T cells without in-vitro expansions, and the other half was cultured in-vitro for 20 days either with chimeric transcript-derived peptide mixed with IL-2 (patients 1 and 2) or with IL-2 alone (patients 3, 4, 5), aiming to amplify in the samples, the populations of specific T cells recognizing Chimeric transcript-derived peptides. T cells were identified using double color tetramer staining. Antibodies directed CCR7 and CD45RA were also added to the non-expanded cells to distinguish naïve and memory cells. Expansions were considered with 5 or more double tetramer-labelled cells. FIG. 19A shows a summary of the 7 “Chimeric transcript-derived peptide specific” tetramer-positive T cell populations found in the 4 patients analyzed directly ex-vivo (one of the patient samples could not be analyzed for technical reasons). CCR7/CD45RA labeling showed that all tetramer-positive T cells detected in tumor samples have a clear effector/memory phenotype, whereas in blood and lymph nodes the “Chimeric transcript-derived peptide specific” tetramer-positive T cells have variable proportions of less differentiated, CCR7+naïve and/or central memory phenotypes.

[0466] Therefore, these results demonstrate that primary human NSCLC tumors contain chimeric transcript-derived peptide specific memory T cells (FIG. 19B).

[0467] A summary of expanded, tetramer+CD8+ T cells, is shown in FIG. 19C. For the majority of peptide specificities, T cells were expanded from both the tumor and the matched invaded lymph nodes (LN) analyzed only in 2 patients, and in some cases from the matched juxta-tumor samples (Jt) (FIG. 19C). 5 out of 7 specific tetramer positive populations were also found at Day 20 in the same patient and tissue found ex-vivo without T cell expansions (FIG. 19A and bold squares on FIG. 19C).

[0468] These results provide thus evidence that chimeric transcript-derived peptide specific T cells are present in tumors, tumor-draining lymph nodes and sometimes in juxta-tumor tissue and blood of LUAD patients before and after in-vitro expansion, consistent with the existence of chimeric transcripts-derived peptide specific immune responses in LUAD patients.

### Peptide Identification by Mass Spectrometry in LUAD Biopsies.

[0469] Presentation by MHC class I molecules on the tumour cell surface is required for ER-derived peptides in order to be recognized by cytotoxic T cells. In order to confirm that predicted peptides are express on MHC class I molecules, public data from MHC I immunopeptidome derived from 3 LUAD biopsies (Laumont C M et al., “Noncoding regions are the main source of targetable tumor-specific antigens” Sci Transl Med. 2018 10(470)) were used. OpenMS Software was used to analyse the raw data uploaded to PRIDE database from MHC-I immunopurification of 3 LUAD tumours (PXD009752, PXD009754 and PXD009755). Having in mind that data-dependent acquisition in proteomics only allows the identification of those sequences contained in a target database (generally the whole human proteome); the peptides as per the present application had not been previously identified because they derive from non-coding sequences. The MS/MS identifications incorporating the sequences of the herein predicted peptides in the target database has been re-analyzed. Five peptides among the 3 samples biopsies (peptides ID: 3304, 269, 757, 1810, 3953) were found. To perform this analysis, all predicted peptides derived from chimeric fusions present in at least 5 samples in the TCGA binding to any MHC I allele were considered. This result confirms the expression of chimeric fusion-derived peptides on MHC class I molecules in LUAD tumors.

[0470] Later, we extended our analysis to new lung immunopeptidomics datasets (Bulik-Sullivan et al. Nat. Biotec 2018, Chong et al. Nat. Comm. 2020 and Javitt et al. Front Immunol 2019). Of note, all datasets were generated with fresh lung tumor samples with the exception of Javitt et al. Front Immunol 2019 containing LUAD tumor cell line. For this second analysis, ProteomeDiscoverer 1.4 Software was used to identify the ER-derived peptides. Considering the 4 datasets, 23 unique ER-derived peptides were present in at least one of the total 19 immunopeptidomic samples. In FIG. 15, ER-derived peptides (rows) identified in each MHC sample (column) are indicated with a grey square. On the right, the peptide sequence found is indicated. Interestingly, some of them were observed in more than 1 MHC sample indicating that they are shared across samples. These results confirm that fusion transcripts-derived peptides are processed and presented by HLA-I molecules on tumor cells surface.

[0471] Peptide RLADHLSFC derived from a fusion transcript where the gene part of the fusion is a tumor suppressor gene (Fusion ID: chr22: 29117506:→chr22: 29115473:-/gene involved: CHEK2) and peptide GLPSHVELA derived from a fusion transcript where the gene part is an oncogene (Fusion ID: chr6: 117763597:→chr6: 117739669:-/gene involved: ROS1). Interestingly, both peptides were found to be immunogenic (FIG. 11A) and particularly for peptide RLADHLSFC, results show in FIG. 11D indicate that could be express by H1650 cell line. Furthermore, we found TILs recognizing peptide GLPSHVELA (FIG. 12A), which indicates that this fusion transcript-derived peptide could be express in LUAD tumor samples.

### 3 Example 3: Identification Neoantigenic Peptides Derived from Fusion Transcripts Composed of a TE Element and an Exonic Sequence from Various Cancer Samples

[0472] 9184 samples from 32 different cancer types (Acute Myeloid Leukemia, Adrenocortical Carcinoma, Bladder Urothelial Carcinoma, Breast Ductal Carcinoma, Breast Lobular Carcinoma, Cervical Carcinoma, Cholangiocarcinoma, Colorectal Adenocarcinoma, Esophageal Carcinoma, Gastric Adenocarcinoma, Glioblastoma Multiforme, Head and Neck Squamous Cell Carcinoma, Hepatocellular Carcinoma, Kidney Chromophobe Carcinoma, Kidney Clear Cell Carcinoma, Kidney Papillary Cell Carcinoma, Lower Grade Glioma, Lung Adenocarcinoma, Lung Squamous Cell Carcinoma, Mesothelioma, Ovarian Serous Adenocarcinoma, Pancreatic Ductal Adenocarcinoma, Paraganglioma & Pheochromocytoma, Prostate Adenocarcinoma, Sarcoma, Skin Cutaneous Melanoma, Testicular Germ Cell Cancer, Thymoma, Thyroid Papillary Carcinoma, Uterine Carcinosarcoma, Uterine Corpus Endometrioid Carcinoma and Uveal Melanoma) were analyzed according to the method as previously described.

[0473] 16580 fusion transcripts were identified.

### 4 Example 4: Proteomics Results

### Results

### Total Proteomics

[0474] Mass spectrometry-based proteomics has emerged as a powerful tool to interrogate the actual protein content of a given cell preparation. To confirm that JETs are indeed translated into proteins, mass spectrometry output files (called raw files) generated from cell lines and fresh tumors were analyzed to identify different populations of JET-derived peptides. This study has been grouped into two different analyses, each one providing a different and complementary type of information, that demonstrate that JET derived proteins can reliably be detected in a tumor sample or in a tumor cell line.

[0475] First it was demonstrated that proteins derived from the JETs were found to be highly recurrent in CCLE dataset. Therefore, the in-silico translated junctions from all those JET mRNA sequences predicted in more than 7 different cell lines in the CCLE cohort were used and interrogated to the mass spectrometry raw files from Nusinow et al. 2020, which consists in the proteomics analysis of 375 cell lines from CCLE. These cell lines were grouped in TMT10plex, generating a total amount of 42 MS/MS output files. This MS-based proteomics analysis led to the identification of 186 JET derived proteins, containing at least 1 peptide overlapping the splicing junction (Table 5).

TABLE 5

| | | Recurrence |
|---|---|---|
| | | in |
| Sequence | Chimeric_id | dataset |
| SSTGPADLK | chr20:42212014:+>chr20:42213492:+ | 72 |
| MLLGLLAK | chr7:20686997:+>chr7:20687158:+ | 72 |
| MGISIVK | chr8:74872000:−>chr8:74871067:− | 72 |
| IQSFTNISFSMPHR | chr1:44680991:+>chr1:44683983:+ | 63 |
| TQEVEVAVNR | chr7:73776406:+>chr7:73778585:+ | 45 |
| MASASPTIK | chr3:53915693:−>chr3:53914136:− | 36 |
| ETDLITVTGSSFLTHR | chrX:57620887:+>chrX:57667223:+ | 36 |
| EAENEVQTAK | chr7:116555100:+>chr7:116556114:+ | 36 |
| LNIHLLMVTSSVTSSSILINLDR | chr13:41835827:−>chr13:41835011:− | 36 |
| DLELEIPFGPAIPLLGSCSQCR | chr11:129978600:+>chr11:129979324:+ | 36 |
| MILESTYHNTLHIAMK | chr6:17835789:−>chr6:17834302:− | 36 |
| MLAPENSDIGLAAWGR | chr20:32888526:−>chr20:32883391:− | 36 |
| TQEAELAGVATVR | chr3:122863676:+>chr3:122864369:+ | 27 |
| TSLHSIPVTVGRR | chr17:42188097:−>chr17:42182463:− | 27 |
| AEIAPLHSSLGDK | chr5:132253438:−>chr5:132240096:− | 27 |
| MLGAVAHNCDPSTLR | chr12:57081782:−>chr12:57080459:− | 27 |
| GPAPEPPSMR | chr19:50010181:+>chr19:50027764:+ | 27 |
| MACNMGLEKGEK | chr5:179238682:+>chr5:179250858:+ | 27 |
| MASICPFLK | chr20:49307663:−>chr20:49307455:− | 27 |
| EIETILANPENK | chr6:130374597:+>chr6:130376316:+ | 27 |
| QAQCSTDSTLWYFMHGVCR | chr3:12604393:+>chr3:12610374:+ | 18 |
| LASTTSVSEEDVSSR | chr12:79996543:−>chr12:79990438:− | 18 |
| AIAQGIQELR | chr17:43475315:−>chr17:43474814:− | 18 |
| TCPSAMIVSFLK | chr10:51747031:+>chr10:51749068:+ | 18 |
| VQLAGNTLPSTPCWTR | chr9:130924301:+>chr9:130925722:+ | 18 |
| GLEFETSLANVVQLPNSIVFSVTR | chr18:19147325:−>chr18:19146167:− | 18 |
| KESLEASMMLK | chr9:88264917:−>chr9:88261333:− | 18 |
| VETLCATLWGFGK | chr10:102711867:+>chr10:102716208:+ | 18 |
| MMAHLCIFGLQSR | chr5:86704905:−>chr5:86704003:− | 18 |
| VSTSHVGPWVSP | chr5:1475076:−>chr5:1474800:− | 18 |
| NLLDIDAPVTGWQELK | chr4:102117073:−>chr4:102104428:− | 18 |
| AKIAPAEGPDVSER | chr3:185370866:−>chr3:185369956:− | 18 |
| EAEEPSDNGPLFTELK | chr14:97307963:+>chr14:97312432:+ | 18 |
| MAGLVFQWLR | chr3:136005373:+>chr3:136012598:+ | 18 |
| ISQLQIWDTAGQER | chr3:128828867:−>chr3:128814012:− | 18 |
| VISAFPSELQSQCTK | chr6:100379769:−>chr6:100369131:− | 18 |
| TAQLPEQLMTWHSR | chr22:37870550:−>chr22:37861756:− | 18 |
| LLNITAGLGSDGTIR | chr6:34511797:−>chr6:34511385:− | 18 |
| MGTVAHAYNPSTLGGR | chr2:48593264:+>chr2:48600431:+ | 18 |
| MLPPFVLAVTMGLSVVK | chr3:15058779:+>chr3:15062260:+ | 18 |
| QADHLMPGVQDQPNMTSVP | chr11:18491675:−>chr11:18490765:− | 18 |
| WAGHSASCSSLRK | chr22:18351213:−>chr22:18348778:− | 18 |
| TFMMIHCHLMNNMSCR | chr3:10160654:+>chr3:10167310:+ | 9 |
| GQIGILLWNSMGTMQQPR | chr20:30254794:−>chr20:30253889:− | 9 |
| APTDSTLCTLCK | chr17:62609987:−>chr17:62602758:− | 9 |
| LREPIDNLTPEER | chr20:34315958:−>chr20:34313077:− | 9 |
| EWSGIQKATLMDLQLSDSNFRR | chr18:244302:−>chr18:226901:− | 9 |
| TSLANMVVFPLMK | chr2:98263129:+>chr2:98263530:+ | 9 |
| IWLTEDATALLQRPGWR | chr11:44960717:−>chr11:44959917:− | 9 |
| METGIISLLPPWGGRPSAVR | chr1:6531548:−>chr1:6531300:− | 9 |
| GNLLIISLDAK | chr17:65894534:+>chr17:65899905:+ | 9 |
| TSSGLPLILHCVYAK | chr16:82201145:−>chr16:82197799:− | 9 |
| SGVQDQPGQQGPVTLHK | chr10:28824988:+>chr10:28872328:+ | 9 |
| WADHLTSGVR | chr10:95225471:−>chr10:95216694:− | 9 |
| MNDSCIFRPETDSDIMELTDR | chr19:19976808:+>chr19:19982937:+ | 9 |
| IVEQTLK | chr13:115035095:+>chr13:115037659:+ | 9 |
| MELTIPGEGK | chr2:99224660:−>chr2:99220654:− | 9 |
| HFIAMMYFK | chr5:145540727:−>chr5:145540049:− | 9 |
| ETFFLQQQGNDAK | chr16:89607754:+>chr16:89611056:+ | 9 |
| QLQVCVLQIMGSCVPSCPTP | chr11:64643083:−>chr11:64641990:− | 9 |
| EAEASQAAQEAEINAR | chr1:183107957:+>chr1:183109539:+ | 9 |
| YSNVLEMAWLQYA | chr12:63961380:−>chr12:63954442:− | 9 |
| MATVAHTSLATVEDFQIRPHTLY | chr2:37520065:−>chr2:37518142:− | 9 |
| VHSYK | | |
| LPIFFFGTHETLLGGR | chr9:15506559:−>chr9:15492223:− | 9 |
| QASRALPPCPWNTQTSGSR | chr10:6010739:−>chr10:6008302:− | 9 |
| LDIGFPSLQNYR | chr17:47441711:+>chr17:47450375:+ | 9 |
| TLPSLDDLR | chr7:72720556:−>chr7:72719094:− | 9 |
| LLVNDPETAVK | chr12:112149997:+>chr12:112150302:+ | 9 |
| LQEMGPLGVPQR | chr14:105335983:+>chr14:105342593:+ | 9 |
| TSLANMDMFK | chr12:72301769:+>chr12:72307606:+ | 9 |
| MGAVVHACKPSTLGGR | chr15:42151606:−>chr15:42151178:− | 9 |
| KQAQKDCPTHSGVS | chr17:43536749:−>chr17:43531638:− | 9 |
| SEGIRIMEMLLK | chr5:145153908:−>chr5:145144563:− | 9 |
| GFGPSTMLGTQK | chr1:193028315:−>chr1:193022970:− | 9 |
| MTKLLSPIR | chr22:32787416:−>chr22:32784086:− | 9 |
| WLTPVIPALWEAER | chr8:103282996:−>chr8:103282411:− | 9 |
| ETTLAFK | chr1:240569786:+>chr1:240601361:+ | 9 |
| ATALQPGR | chr1:45988450:−>chr1:45981479:− | 9 |
| ITSVVMVDEAHER | chr6:30629093:−>chr6:30628019:− | 9 |
| SQYCTPALEAETK | chr17:78263365:+>chr17:78263458:+ | 9 |
| TLTFLGPLQFR | chr19:20025631:+>chr19:20026089:+ | 9 |
| TPEVEATVPLQK | chr22:42085308:+>chr22:42089467:+ | 9 |
| VILIFFPECYAK | chr22:31947110:+>chr22:31952928:+ | 9 |
| DGDHPSQHDGVLLCCPGWSTM | chr9:96211969:−>chr9:96210771:− | 9 |
| GGSHLQSQHFGRPR | chr21:34973474:−>chr21:34971554:− | 9 |
| SVSTIFLTCSR | chr10:1100108:−>chr10:1090111:− | 9 |
| MGTVAHACNPCTLGG | chr20:17550856:+>chr20:17565018:+ | 9 |
| TPGRNGHLESGHLK | chr7:102793520:+>chr7:102939015:+ | 9 |
| SGFSFLLGIVGF | chr12:22831248:+>chr12:22837417:+ | 9 |
| EIETLHHPSTGVILADHK | chr13:44432917:−>chr13:44413224:− | 9 |
| TIAQMIDSTVALPLEAT | chr8:38697785:+>chr8:38698832:+ | 9 |
| NQSQSHLNVGLLASR | chr9:21808999:+>chr9:21815432:+ | 9 |
| SVERFLQEDQMFHQEK | chr9:97843062:+>chr9:97909493:+ | 9 |
| MELTIPGVGHSSGSLNEGK | chr2:99224633:−>chr2:99220654:− | 9 |
| ESLEASMMLK | chr9:88264917:−>chr9:88261333:− | 9 |
| LLITAEDQSMWIQS | chr13:113897987:+>chr13:113898724:+ | 9 |
| QAWWIMPIIPALWEAK | chr2:10135488:+>chr2:10136007:+ | 9 |
| MESQMVEQLCSR | chr8:66633382:−>chr8:66631730:− | 9 |
| GLTGEFSITR | chr5:1257816:−>chr5:1255526:− | 9 |
| GGEFAPSWDCKP | chr2:37490123:−>chr2:37487527:− | 9 |
| CLTTLFGSFR | chr7:107256834:+>chr7:107258773:+ | 9 |
| SQHFGRPSCVPLPATGVK | chr12:69249761:−>chr12:69236109;− | 9 |
| EQLSQAEAVALK | chr6:17837109:−>chr6:17835895:− | 9 |
| GQVLGPWPSR | chr19:1045618:+>chr19:1046229:+ | 9 |
| TGAQPPATMPLNVSFTNR | chr8:128749923:+>chr8:128750494:+ | 9 |
| TGIPSATLIR | chr22:46193106:+>chr22:46202839:+ | 9 |
| EQTDVMHQNIYD | chr5:414855:+>chr5:422844:+ | 9 |
| FVDVTECQACSANSR | chr22:25019883:+>chr22:25023093:+ | 9 |
| IRDSEELIGR | chr15:79649214:+>chr15:79703742:+ | 9 |
| DHIMFSLFEK | chr1:116206078:+>chr1:116206282:+ | 9 |
| DSGSTTWCFIQK | chr12:112169999:+>chr12:112171727:+ | 9 |
| GFPSHMSLGYHFQCPIPR | chr2:28190310:+>chr2:28210860:+ | 9 |
| CPEMLPTSQTLR | chr12:110470515:+>chr12:110471602:+ | 9 |
| FLQQCLLLLVSLEVFR | chr19:54502735:+>chr19:54515205:+ | 9 |
| TAGGQQQALPLGSPR | chr17:45356073:+>chr17:45360720:+ | 9 |
| SVTVSHNPQLGPSGCR | chr5:133691774:−>chr5:133686118:− | 9 |
| AVTANGYQMLDGK | chr2:43779972:−>chr2:43779478:− | 9 |
| FPSGILCVIMPGR | chr6:3432328:−>chr6:3416089:− | 9 |
| HDYDEDLVQEASSEDVLGVHMV | chr5:177450333:+>chr5:177462097:+ | 9 |
| DK | | |
| CNPSTLGDQAEK | chr2:231040909:−>chr2:231037675:− | 9 |
| AEISCQQPAPGPR | chr19:49832179:+>chr19:49838971:+ | 9 |
| GQEMETIPANTLIQEDILDTGNDK | chr12:86274547:+>chr12:86276001:+ | 9 |
| GGFHHDCK | chr7:84736037:−>chr7:84727281:− | 9 |
| LWTSLPAPMFSR | chr20:60835987:+>chr20:60838672:+ | 9 |
| CMCLEYPAVVEFAPFQK | chr13:115049839:+>chr13:115051777:+ | 9 |
| LIISIFLVHSPK | chr12:7125578:−>chr12:7120720:− | 9 |
| GATWTGSSPQGSWDFTR | chr7:75083158:−>chr7:75070925:− | 9 |
| TVTVPAQELK | chr9:128421519:−>chr9:128420078:− | 9 |
| ENTMAENELQV | chr10:112572705:+>chr10:112576399:+ | 9 |
| TPMELELPPASHFEFIGSSANCR | chr2:37570066:+>chr2:37579932:+ | 9 |
| GLLWSGMALTGSLRVTQR | chr22:36007617:−>chr22:36007153:− | 9 |
| GLSDHVQLSQSHSTSFHVSPK | chr16:90158141:−>chr16:90141431:− | 9 |
| MILESTYHNTLHIAMKAPELK | chr6:17835789:−>chr6:17834302:− | 9 |
| CPETFLDGTLGR | chr19:4703015:−>chr19:4702728:− | 9 |
| SYQLRPGTMIEWGNYWR | chr7:56052571:+>chr7:56059164:+ | 9 |
| TILANTVMAR | chr16:2115231:+>chr16:2115520:+ | 9 |
| MELTIPGVGK | chr2:99224656:−>chr2:99220650:− | 9 |
| SSPQAIQMVATLGTTTCCSFDNLL | chr7:50595367:−>chr7:50571757:− | 9 |
| EVGPICNK | | |
| GDPGIDAR | chr21:43290029:−>chr21:43280481:− | 9 |
| MAFSGSQAPYLSPDPK | chr17:25958330:+>chr17:25965125:+ | 9 |
| TIAQGNLSNTDVQAAKRSCSYL | chr16:21987564:+>chr16:21988399:+ | 9 |
| MQENTLRAPTDSTLWHPPHYK | chr14:60442915:+>chr14:60443943:+ | 9 |
| DQPGQHGPGMRPPLGLR | chr1:222838358:+>chr1:222838651:+ | 9 |
| EAPTYITWTIRR | chr1:51218110:−>chr1:51210447:− | 9 |
| DLVGGYTPGTPYK | chr2:131824664:−>chr2:131813268:− | 9 |
| GLNEAIFMIPTNPPPTFR | chr8:99648370:−>chr8:99608397:− | 9 |
| DAAALLLANEAR | chr6:110774731:−>chr6:110768193:− | 9 |
| ATSLWYFMAAQAK | chr2:42615589:−>chr2:42580483:− | 9 |
| MDLVQVSGSLGSPVLSCK | chr10:104231153:+>chr10:104231667:+ | 9 |
| QHQEVTLYGLK | chr15:99433697:+>chr15:99434554:+ | 9 |
| LVSLSQYWEK | chr18:74574245:+>chr18:74580641:+ | 9 |
| TGTTPVYSSQHEQHR | chr1:178806756:+>chr1:178846633:+ | 9 |
| QATGMDLEVIILSDITQK | chr6:129786434:+>chr6:129788349:+ | 9 |
| LLALLDVLK | chr1:22263648:−>chr1:22224962:− | 9 |
| GIGYPAWAMK | chr2:131840150:−>chr2:131829742:− | 9 |
| MESQLQIEETTLLR | chr16:4667729:+>chr16:4700366:+ | 9 |
| GLLGLAGMRPELR | chr3:40555431:+>chr3:40557351:+ | 9 |
| GQEMETILANMISR | chr9:96211969:−>chr9:96209979:− | 9 |
| ICRPGAAAAARHPGSPGGQLAPR | chr16:29692733:+>chr16:29705985:+ | 9 |
| ELGVTAGGLPTR | chr12:42795298:+>chr12:42835117:+ | 9 |
| GNLDTKTPGMPK | chr10:12280484:+>chr10:12301986:+ | 9 |
| LLELQGLPLMPSR | chr19:53119971:−>chr19:53097557:− | 9 |
| AGGSLEAGGK | chr7:44883388:−>chr7:44882953:− | 9 |
| EGDVVLYCSSATFCATSQSGTGE | chr2:219296440:+>chr2:219296580:+ | 9 |
| VR | | |
| STNDELDELR | chr18:8708134:+>chr18:8718422:+ | 9 |
| INSAHLQTLSAGK | chr15:49600974:+>chr15:49611801:+ | 9 |
| MGLSPASAPRPQTCFSLSTTK | chr17:17735071:−>chr17:17723835:− | 9 |
| MLADRSMSSSLSASQLHTVNMR | chr17:38177572:−>chr17:38176606:− | 9 |
| GTQVFVTGYTPWQR | chr20:1532337:−>chr20:1530245:− | 9 |
| METDLECSDSR | chr5:68551355:+>chr5:68551980:+ | 9 |
| TLLPGTLR | chr7:129915476:+>chr7:129916468:+ | 9 |
| WLMPVIPALGR | chr1:160283437:−>chr1:160282957:− | 9 |
| LLGAEIAPLHSSLDGLS | chr9:97214855:+>chr9:97216240:+ | 9 |
| DPAIALQPGPQSER | chr15:79168112:+>chr15:79170555:+ | 9 |
| MAHTLQYFK | chr8:72942008:+>chr8:72964774:+ | 9 |
| MAHTLQYFKSSQHQR | chr8:72942008:+>chr8:72964774:+ | 9 |
| MISAFPTEGQR | chr11:74830434:+>chr11:74873700:+ | 9 |
| MDFMNAEILLK | chr19:49834874:−>chr19:49797810:− | 9 |
| SEEPLRPAAAPSENALR | chr9:119602892:−>chr9:119583062:− | 9 |
| TSPVAGPALPPNYK | chr13:45576476:+>chr13:45578440:+ | 9 |
| EYLEYEDTAQR | chr2:113956803:+>chr2:113966557:+ | 9 |
| QNLHEIGL WR | chr12:42835231:+>chr12:42836287:+ | 9 |
| AGGSLEAK | chr19:6365650:+>chr19:6366269:+ | 9 |
| AMSQINFFTNDPASAIGEYEDLR | chr10:118750845:−>chr10:118738819:− | 9 |
| LELALLAPQACR | chr8:53483830:−>chr8:53455005:− | 9 |
| SLVLEGFLINSKPENACEPI | chr3:149581921:+>chr3:149589816:+ | 9 |
| TVTDSTLWIASSPGGLSPADCGAS | chr3:77121427:+>chr3:77147165:+ | 9 |
| FR | | |
| IASTQEADVVVAR | chr5:94876747:−>chr5:94876534:− | 9 |
| LLRELQVMYGMLVFTLVLR | chr11:76708271:+>chr11:76709807:+ | 9 |

[0476] The identification of peptides overlapping splicing regions is less sensitive likely due to 1) the lower abundance in the whole proteome of the sequence of interest compared to a non-spliced region and 2) splicing motifs code in around 40% of the cases for a lysine (K) or arginine (R) amino acids, which are also the cleavage sites for trypsin (i.e.: the enzyme used for MS sample processing). Therefore, the above-mentioned protocol probably leads to an underestimated of the presence of JET-derived proteins in tumor samples and cell lines.

[0477] It has been then demonstrated that tumor-specific JETs were indeed translated. Focusing on lung tumors, lung tumor-specific JETs predicted in TCGA and CCLE projects were in silico translated and interrogated against 2 different mass spectrometry output datasets: Nusinow et al. 2020 (CCLE proteomics dataset) and Stewart et al. 2019 (lung primary tumours proteomics dataset). This analysis provided information about JET-derived proteins not only in the context of a cell line, but also in cancer human samples. In cell lines, we were able to identify 221 peptides overlapping the splicing site of 206 JET-derived proteins (Table 6).

TABLE 6

| Sequence | chimeric_Tx_Id | Recurrence |
|---|---|---|
| HTDLQATAIGK | chr12:104824437:+:Charlie6>chr12:104995684: | 108 |
| | +:ENST00000546689 | |
| YISLIYTNYAEGK | chr11:67352712:+:ENST00000398603>chr11: | 81 |
| | 67361105:+:LTR22A | |
| AQWLTPVIPALWEAEAGE | chr1:36637320:+:AluSp>chr1:36638065:+: | 45 |
| SPERPR | ENST00000530729 | |
| MILSSIR | chr6:144066592:+:L3>chr6:144070122:+: | 45 |
| | ENST00000427704 | |
| MGISIVK | chr8:74872000:− | 36 |
| | :ENST00000520242>chr8:74871067:−:Tigger3b | |
| LLINRMVTL | chr5:52197198:+:MLT1D>chr5:52201593:+: | 36 |
| | ENST00000282588 | |
| MGAVAHTCNPSTLGGQGK | chr12:104645612:+:AluSc>chr12:104651797:+: | 36 |
| | ENST00000429002 | |
| ALVNLSFVTGVSSMTFMM | chr2:270006:+:MER39>chr2:271866:+: | 36 |
| GNICR | ENST.0000442386 | |
| APVSDEK | chr7:130069134:−:L3>chr7:130067859:− | 27 |
| | :ENST00000541543 | |
| MNSLSIR | chr9:128638776:+:Tigger2a>chr9:128677965:+: | 27 |
| | ENST00000491787 | |
| ALELGVVSQPSVYR | chr1:223852296:−:MIRb>chr1:223842101:− | 27 |
| | :ENST00000419193 | |
| MGAVTHTCNPSTLEGR | chr2:207009280:−:AluJo>chr2:207008856:− | 27 |
| | :ENST00000432169 | |
| ELLHGTEGGEHR | chr17:27441216:−:L3>chr17:27441115:− | 27 |
| | :ENST00000531253 | |
| VAASSPIMRK | chr11:71728382:−:MIR>chr11:71727576:− | 18 |
| | :ENST00000358965 | |
| TITLEVEPR | chr17:16285735:+:ENST00000535788>chr17: | 18 |
| | 16300446:+:MER4B | |
| MGAVAHTCNPSTLEGQDC | chr3:185370866:−:AluSx1>chr3:185369956:− | 18 |
| PCGRPRR | :ENST00000421047 | |
| EAEEPSDNGPLFTELK | chr14:97307963:+:AluSx>chr14:97312432:+: | 18 |
| | ENST00000216639 | |
| LQDSTGSWEK | chrX:40570189:−:MER8>chrX:40569381:− | 18 |
| | :ENST00000324817 | |
| GLPSHAELIR | chr12:16168469:+:THE1D>chr12:16185476:+: | 18 |
| | ENST00000531803 | |
| CNPSTLGDQAEK | chr2:231040909:−:AluJb>chr2:231037675:− | 18 |
| | :ENST00000258381 | |
| QLQSANYGHMQASCLSIK | chr12:52639328:+:ENST00000331817>chr12: | 18 |
| | 52645561:+:MER58A | |
| AHLNERNTLQEENK | chr18:20537359:+:L2c>chr18:20555116:+: | 18 |
| | ENST00000582354 | |
| DLYANTVMSVELNAASGT | chr7:5567728:− | 18 |
| R | :ENST00000331789>chr7:5522250:−:MIRb | |
| TEEMPQLNFGMAVLYGG | chr3:107447807:+:ENST00000415149>chr3: | 18 |
| MCL | 107448789:+:AluJr | |
| ENLPSIQPGMVLQAVAHL | chr5:140764890:+:ENST00000518325>chr5: | 18 |
| HGR | 140765965:+:BC200 | |
| LLNATHQIGCQYTHR | chr1:160314616:+:ENST00000421914>chr1: | 18 |
| | 230653304:+:MLT1B | |
| MAVVAHACNLNSFGGQG | chr3:49096310:−:AluSp>chr3:49065271:− | 18 |
| PAWFLR | :ENST00000429182 | |
| MVWVGTIGSGPK | chr17:59856034:− | 18 |
| | :MamRep1161>chr17:59853923:− | |
| | :ENST00000259008 | |
| NLLDIDAPVTGWQELK | chr4:102117073:− | 18 |
| | :ENST00000525819>chr4:102104428:−:MLT1J | |
| VISAFPSELQSQCTK | chr6:100379769:−:L1PA3>chr6:100369131:− | 18 |
| | :ENST00000281806 | |
| MACNMGLEKGEK | chr5:179238682:+:MER61− | 18 |
| | int>chr5:179250858:+:ENST00000504627 | |
| MLDNLMYDYELNWVR | chr14:106801819:−:LIME2>chr14:106518589:− | 18 |
| | :ENST00000390598 | |
| AKIAPAEGPDVSER | chr3:185370866:−:AluSx1>chr3:185369956:− | 18 |
| | :ENST00000346192 | |
| MVLLVR | chr2:189861722:+:(TA)n>chr2:189861891:+: | 18 |
| | ENST00000304636 | |
| VGGSRVLGGDQ | chr6:30690007:+:AluSc>chr6:30690314:+: | 18 |
| | ENST00000327892 | |
| NTQLTMWLPQLIWTK | chr7:127304880:+:MER21C>chr7:127347646:+ | 18 |
| | :ENST00000354725 | |
| MCQKEVMEQSAGR | chr2:133425973:− | 18 |
| | :ENST00000345008>chr2:133381838:− | |
| | :MLT1B | |
| MAQWLMPVIPALWEAQIH | chr2:224652913:−:AluSz>chr2:224642586:− | 9 |
| FILLFSR | :ENST00000396653 | |
| LLSSSMHTLQTK | chrX:38146409:+:CT−rich>chrX:38146366:− | 9 |
| | ENST00000378505 | |
| QQMLVCFVNLDVNK | chr2:228948057:−:LIPA8>chr2:228892259:− | 9 |
| | :ENST00000344657 | |
| MASTISAGCGGGACGPSYS | chr20:62284680:− | 9 |
| GG | :ENST00000370053>chr20:62277869:−:AluY | |
| LLDEAAGEGEAAGR | chr15:83103156:+:ENST00000358583>chr15: | 9 |
| | 83193188:+:GA−rich | |
| TSPVAGPALPPNYK | chr13:45576476:+:7SLRNA>chr13:45578440:+ | 9 |
| | :ENST00000361121 | |
| LSTVVDADEIIVLDQEK | chrX:74280058:− | 9 |
| | :ENST00000529949>chrX:74267940:−:L1MB8 | |
| MDFMNAEILLK | chr19:49834874:−:MLT1J2>chr19:49797810:− | 9 |
| | :ENST00000335875 | |
| MATVAHTSLATVEDFQIRP | chr2:37520065:−:AluJb>chr2:37518142:− | 9 |
| HTLYVHSYK | :ENST00000443187 | |
| METQADLVSQEPQALLDS | chr7:99674926:− | 9 |
| ALREAEAGR | :ENST00000428683>chr7:99674180:−:AluSc8 | |
| LLITAEDQSMWIQS | chr13:113897987:+:L1MC5>chr13:113898724: | 9 |
| | +:ENST00000326335 | |
| LADLFGWSQLIYNHITEYK | chr4:2886393:+:ENST00000398129>chr4: | 9 |
| | 2888303:+:L2a | |
| LLHHQLHMMLDK | chr1:145474732:+:ENST00000323397>chr1: | 9 |
| | 145476653:+:MIR3 | |
| LSPLPSNSCVTWGGYR | chr7:7498396:−:MIRb>chr7:7495743:− | 9 |
| | :ENST00000399429 | |
| MILESTYHNTLHIAMK | chr6:17835789:−:MIR>chr6:17834302:− | 9 |
| | :ENST00000378814 | |
| MQENTLRAPTDSTLWHPP | chr14:60442915:+:MER1A>chr14:60443943:+: | 9 |
| HYK | ENST00000254271 | |
| MMVNCHAHFWVSTYLSP | chr8:74209664:+:ENST00000521928>chr8: | 9 |
| HLL | 74216833:+:L2 | |
| SQVMDVDTLY | chr3:98618227:−:AluSc8>chr3:98600611:− | 9 |
| | :ENST00000326857 | |
| TDDSLGLGLK | chr11:14737526:+:L1PA2>chr11:14793483:+: | 9 |
| | ENST00000282096 | |
| GHEFETSLANMVIQLLK | chr7:154793407:−:AluSq>chr7:154790494:− | 9 |
| | :ENST00000457196 | |
| MDGQMMDTGVDK | chr4:2453586:+:(TGGA)n>chr4:2453869:+: | 9 |
| | ENST00000506607 | |
| HLEDYMEHTPPPR | chr2:95476942:+:MIR>chr2:95540521:+: | 9 |
| | ENST00000295201 | |
| IFTYQICK | chr15:72463983:−:L1M5>chr15:72462280:− | 9 |
| | :ENST00000564129 | |
| TENLGSILSWWHNK | chr3:72442890:−:L1MC4a>chr3:72428578:− | 9 |
| | :ENST00000477973 | |
| MGGATSPLLSSAK | chr17:56588640:−:MIRb>chr17:56586202:− | 9 |
| | :ENST00000579925 | |
| MISAFPTEGQR | chr11:74830434:+:L1PA4>chr11:74873700:+: | 9 |
| | ENST00000289575 | |
| TFTMIHFHLITR | chr12:4948527:+:Tigger2a>chr12:4959904:+: | 9 |
| | ENST00000542998 | |
| LLPPCQPGSSLSSK | chr16:18565603:−:MIR>chr16:18540905:− | 9 |
| | :ENST00000569051 | |
| GLFSQAEIR | chr6:123549550:−:THE1C>chr6:123545276:− | 9 |
| | :ENST00000398178 | |
| MAALTIATGLAVD | chr11:77850610:− | 9 |
| | :ENST00000530454>chr11:77848691:−:Tigger1 | |
| MYMAHGLTQSTK | chr5:153529506:+:L2c>chr5:153674376:+: | 9 |
| | ENST00000425427 | |
| EFETSLGLWQAMR | chr9:15573873:+:AluJo>chr9:15578847:+: | 9 |
| | ENST00000535968 | |
| TAELPKPSISSNNSNPK | chr19:42217314:+:Tigger4a>chr19:42311149:+: | 9 |
| | ENST00000415495 | |
| VQDHPGQHGEAIGK | chrX:47312190:−:AluSx>chrX:47308873:− | 9 |
| | :ENST00000432977 | |
| TSLGNMINDK | chr15:64365987:−:AluJr4>chr15:64365216:− | 9 |
| | :ENST00000300030 | |
| MLPPFVLAVTMGLSVVK | chr3:15058779:+:L2c>chr3:15062260:+: | 9 |
| | ENST00000323373 | |
| QIGCYQGFAFAWK | chr11:69488615:−:AluJo>chr11:69486587:− | 9 |
| | :ENST00000542341 | |
| SQGSGLNFIDLMVR | chr16:77786496:+:MIR3>chr16:77850818:+: | 9 |
| | ENST00000302536 | |
| AWEAEIMVKYLLFMWEIK | chr2:177179106:+:AluSz6>chr2:177191553:+: | 9 |
| | ENST00000249442 | |
| ATVWLGSGDEK | chr16:50651682:+:MER91A>chr16:50655550:+ | 9 |
| | :ENST00000268459 | |
| DNTDSVVFEDVAVNFTQE | chr19:12635610:−:L1MB3>chr19:12577664:− | 9 |
| EWALLGPSQK | :ENST00000598753 | |
| QSLSEELK | chr2:211453855:+:LTR16C>chr2:211454830:+: | 9 |
| | ENST00000430249 | |
| AAAVAAKAEAVSPAK | chr19:39833216:+:(CGG)n>chr19:39866290:+: | 9 |
| | ENST00000598913 | |
| KLILCLNDCK | chr12:104518408:−:MER33>chr12:104517201:− | 9 |
| | :ENST00000240055 | |
| TGAQPPATMPLNVSFTNR | chr8:128749923:+:G− | 9 |
| | rich>chr8:128750494:+:ENST00000377970 | |
| DLEFETSLANK | chr10:103896914:+:AluSx1>chr10:103897607: | 9 |
| | +:ENST00000278070 | |
| LSSQHLGGQEPEQLPEKR | chr1:19410263:−:AluJo>chr1:19408067:− | 9 |
| | :ENST00000375224 | |
| TPEVEATVPLQK | chr22:42085308:+:AluSx1>chr22:42089467:+: | 9 |
| | ENST00000402966 | |
| ISQLQIWDTAGQER | chr3:128828867:−:AluJo>chr3:128814012:− | 9 |
| | :ENST00000457077 | |
| VILIFFPECYAK | chr22:31947110:+:L2>chr22:31952928:+: | 9 |
| | ENST00000450787 | |
| IRDSEELIGR | chr15:79649214:+:LIME4a>chr15:79703742:+: | 9 |
| | ENST00000424155 | |
| MLAPENSDIGLAAWGR | chr20:32888526:−:L2b>chr20:32883391:− | 9 |
| | :ENST00000217426 | |
| QETPMAADEGSAEK | chr9:140606077:+:L1MB7>chr9:140611078:+: | 9 |
| | ENST00000460843 | |
| MLADRSMSSSLSASQLHT | chr17:38177572:−:MIRb>chr17:38176606:− | 9 |
| VNMR | :ENST00000394126 | |
| LGVGSDSEVEER | chr12:124157140:+:AluJo>chr12:124158165:+: | 9 |
| | ENST00000303372 | |
| IQEAEVAVK | chr17:48743773:+:AluSp>chr17:48744915:+: | 9 |
| | ENST00000502426 | |
| IDMISCVWK | chr2:223509604:−:MER44A>chr2:223507626:− | 9 |
| | ENST00000281828 | |
| MGVVAHTCNPNTLGGQGI | chr11:125450741:+:AluSx1>chr11:125451107: | 9 |
| EMHQR | +:ENST00000278903 | |
| EDQMSSWSISTSVQPSGR | chr1:208254106:−:MIRb>chr1:208252795:− | 9 |
| | :ENST00000367033 | |
| MLLTHWLNLADHWR | chrX:63029083:−:MIR3>chrX:62944591:− | 9 |
| | :ENST00000253401 | |
| MEQFVQVYNWIDV | chr6:39290104:− | 9 |
| | :ENST00000507712>chr6:39289934:−:MIR3 | |
| LLSSLFSEPTCLILVSPQ | chr17:43026722:−:L2c>chr17:43013726:− | 9 |
| | :ENST00000590129 | |
| TAQLPEQLMTWHSR | chr22:37870550:− | 9 |
| | :ENST00000356998>chr22:37861756:−:L2a | |
| SYQLRPGTMIEWGNYWR | chr7:56052571:+:ENST00000322090>chr7: | 9 |
| | 56059164:+:AluSp | |
| QEDPLNLTCPSCGITFAPK | chr16:4052808:−:AluSx>chr16:4043511:− | 9 |
| | :ENST00000571467 | |
| TQEAEVANAASK | chr18:19241710:−:AluSp>chr18:19239304:− | 9 |
| | :ENST00000289119 | |
| ITSVVMVDEAHER | chr6:30629093:−:AluY>chr6:30628019:− | 9 |
| | :ENST00000376442 | |
| NIFSCISMGNFGGPGK | chr1:92518215:+:ENST00000370383>chr1: | 9 |
| | 92524420:+:LTR86B1 | |
| VISAFPSEVPGSSHSGVPDS | chr16:21059883:−:LIPA2>chr16:21051265:− | 9 |
| GR | :ENST00000415178 | |
| DILMYMVWWCVPMMPAT | chr2:225400245:− | 9 |
| RR | :ENST00000409096>chr2:225395962:−:AluSz | |
| GQEIQTILANTCIPR | chr1:10478650:+:AluSc>chr1:10478883:+: | 9 |
| | ENST00000270776 | |
| METDLECSDSR | chr5:68551355:+:ENST00000502604>chr5: | 9 |
| | 68551980:+:AluJo | |
| MLSFMRPPQPCFLYSLWN | chr9:17365375:+:MSTA>chr9:17366615:+: | 9 |
| | ENST00000380647 | |
| MLEKLEFEDEVPGP | chr7:151329155:− | 9 |
| | :ENST00000493872>chr7:151297948:−:MIRb | |
| MELTIPGVGHSSGSLNEGK | chr2:99224633:−:MIRb>chr2:99220654:− | 9 |
| | :ENST00000328709 | |
| MASICPFLK | chr20:49307663:− | 9 |
| | :ENST00000535356>chr20:49307455:−:MIR3 | |
| AFLAMIHSVSSMK | chr7:151865652:−:UCON26>chr7:151864463:− | 9 |
| | :ENST00000355193 | |
| LSLSEDTDNSSLSPPPAK | chrX:19072648:−:L1ME4a>chrX:19058342:− | 9 |
| | :ENST00000357991 | |
| LHHWTPAWAAEK | chr17:80441180:+:AluSx>chr17:80443373:+: | 9 |
| | ENST00000457415 | |
| TISPFTGK | chr15:29384448:+:MER58A>chr15:29385278:+ | 9 |
| | :ENST00000561069 | |
| MSAALMFDAVHVVVSAV | chr19:42559834:−:L2a>chr19:42558624:− | 9 |
| R | :ENST00000301218 | |
| MLLTTFVIHGR | chr17:15939279:−:Tigger1>chr17:15938258:− | 9 |
| | :ENST00000395851 | |
| MLLTTFVIHGRR | chr17:15939279:−:Tigger1>chr17:15938258:− | 9 |
| | ENST00000395851 | |
| EYIVPMLTGLQPIMIIQ | chr5:139864383:+:L1ME3A>chr5:139864706:+ | 9 |
| | :ENST00000421134 | |
| PQNSTASVSEAER | chr1:21588222:−:L2c>chr1:21586885:− | 9 |
| | :ENST00000473505 | |
| SVSTIFLTCSR | chr10:1100108:−:Tigger1>chr10:1090111:− | 9 |
| | :ENST00000381344 | |
| MVILESMVSLTQELCPVA | chr14:24530511:+:MIRc>chr14:24530706:+: | 9 |
| MR | ENST00000342740 | |
| VSTEEEK | chr15:51201329:+:MIRb>chr15:51204275:+: | 9 |
| | ENST00000558439 | |
| MAHLLPNVSEETVSPTR | chr9:123334133:−:L2b>chr9:123330666:− | 9 |
| | :ENST00000481266 | |
| MGTVADTCDPSTLGGGVC | chr2:201751637:−:AluJo>chr2:201750495:− | 9 |
| DTAYR | :ENST00000415562 | |
| MLQPSQEVGTISK | chr4:157831776:−:L1MD2>chr4:157782641:− | 9 |
| | :ENST00000274071 | |
| TQSLGVDEVTIVNILTNRS | chr15:60689166:−:MIRc>chr15:60656722:− | 9 |
| N | :ENST00000559370 | |
| MPGPLRSLEMAR | chr19:20278169:+:ENST00000597083>chr19: | 9 |
| | 20281106:+:AluSx1 | |
| VMGLVIPDVPK | chr13:96595382:−:L1ME3F>chr13:96592345:− | 9 |
| | :ENST00000376747 | |
| LHHCTPAWLTER | chr9:33878600:+:AluJb>chr9:33886879:+: | 9 |
| | ENST00000263228 | |
| MLSTSWTLPR | chr20:30459529:−:L2a>chr20:30457400:− | 9 |
| | :ENST00000278979 | |
| LAPALLSAMIFAVLWSTR | chr17:64403546:+:MSTA>chr17:64492319:+: | 9 |
| | ENST00000284384 | |
| NGISGQVLK | chr2:238991995:+:ENST00000433750>chr2: | 9 |
| | 238992535:+:L1MDa | |
| MQLDQICISFDEGK | chr22:50947090:+:Charlie9>chr22:50954876:+: | 9 |
| | ENST00000299821 | |
| MGAWLTPDTGVGK | chr18:9766693:+:AluJr4>chr18:9775275:+: | 9 |
| | ENST00000578921 | |
| STNDELDELR | chr18:8708134:+:L2c>chr18:8718422:+: | 9 |
| | ENST00000306329 | |
| EAEAGESLKPGR | chr17:421135:−:AluJr>chr17:420873:− | 9 |
| | ENST00000574029 | |
| SQILGMQSLALVAQSGVQ | chr11:17098209:−:FRAM>chr11:17098094:− | 9 |
| WR | :ENST00000533969 | |
| WQIYSGPLPTSPGAACLPC | chr16:57483993:+:LIME2z>chr16:57484952:+: | 9 |
| FSCGAK | ENST00000262507 | |
| EYLEYEDTAQR | chr2:113956803:+:ENST00000245796>chr2: | 9 |
| | 113966557:+:L4 | |
| SSGAQGEYAGLATIR | chr9:6566281:−:L1MC5>chr9:6565429:− | 9 |
| | :ENST00000321612 | |
| AGGSGSVVIWTVPTGSWQ | chr15:75629457:+:AluJr>chr15:75630403:+: | 9 |
| K | ENST00000564815 | |
| VNGYPNYLIR | chr14:45702609:−:L2a>chr14:45702023:− | 9 |
| | :ENST00000453142 | |
| MASAWEGGAWR | chr14:105195833:+:(GCGTG)n>chr14: | 9 |
| | 105196166:+:ENST00000555486 | |
| CMCLEYPAVVEFAPFQK | chr13:115049839:+:(TG)n>chr13:115051777:+: | 9 |
| | ENST00000375299 | |
| TSLANMVGMFK | chr6:136924515:−:AluSx1>chr6:136923117:− | 9 |
| | :ENST00000359015 | |
| FSEASVAMLPVQLWNR | chr6:147981955:+:MSTA>chr6:148058453:+: | 9 |
| | ENST00000566741 | |
| VETLCATLWGFGK | chr10:102711867:+:AluSz>chr10:102716208:+: | 9 |
| | ENST00000370269 | |
| MDLVQVSGSLGSPVLSCK | chr10:104231153:+:ENST00000366277>chr10: | 9 |
| | 104231667:+:MIR3 | |
| MVAGPTYLGDLCPPK | chr14:94523351:−:MIR>chr14:94521530:− | 9 |
| | :ENST00000330836 | |
| HCHALMPK | chr12:15701267:+:L1MC4a>chr12:15702028:+: | 9 |
| | ENST00000535311 | |
| ASGSQGMFK | chr8:95855580:+:AluSx3>chr8:95861690:+: | 9 |
| | ENST00000343161 | |
| IVESGDTPK | chr2:25505735:−:Charlie24>chr2:25505580:− | 9 |
| | :ENST00000406659 | |
| ASGSLEGPFVTWR | chr19:15297447:−:AluSx>chr19:15296490:− | 9 |
| | :ENST00000263388 | |
| ENTMAENELQV | chr10:112572705:+:ENST00000369519>chr10: | 9 |
| | 112576399:+:L2a | |
| TVTVPAQELK | chr9:128421519:−:MIR>chr9:128420078:− | 9 |
| | :ENST00000373496 | |
| NLQLSAHLLTSSLK | chr9:112168615:−:MER102a>chr9:112166888:− | 9 |
| | :ENST00000374541 | |
| NLDLLEGMESTQMPK | chr13:38183213:−:LIMEf>chr13:38171419:− | 9 |
| | :ENST00000541481 | |
| LDGHAGDLDIEDDMK | chr14:62187825:+:AluSg4>chr14:62188227:+: | 9 |
| | ENST00000394997 | |
| MTKLLSPIR | chr22:32787416:−:AluSx1>chr22:32784086:− | 9 |
| | :ENST00000216038 | |
| YEEEIRTCR | chr6:24551662:− | 9 |
| | :ENST00000543707>chr6:24541573:−:MLT1B | |
| QAWRLMPVIPAHWEAEV | chr7:156789005:−:AluJo>chr7:156786875:− | 9 |
| K | :ENST00000469500 | |
| AEIALLHSSLGNREK | chrX:114878268:+:AluSx>chrX:114879341:+: | 9 |
| | ENST00000537301 | |
| TFWTNDDPGLEVLVPEGG | chr6:134528494:− | 9 |
| VLPETQQ | :ENST00000367858>chr6:134508473:−:ERVL− | |
| | B4−int | |
| QEAEIPGANLNVEILSSCR | chr1:117629144:+:ENST00000369466>chr1: | 9 |
| | 117630672:+:L2c | |
| LNEGASGLDGKPGSR | chr4:109762023:−:MIRb>chr4:109755546:− | 9 |
| | :ENST00000494183 | |
| MESQLQIEETTLLR | chr16:4667729:+:AluJb>chr16:4700366:+: | 9 |
| | ENST00000588994 | |
| MSDPVFLSLSLLVCETGDH | chr9:20361021:−:MIR>chr9:20360839:− | 9 |
| EKRNGR | :ENST00000380338 | |
| ICHFLSVTGSLLR | chr2:74071187:+:MIR>chr2:74071940:+: | 9 |
| | ENST00000424659 | |
| MSSINPNTSATWK | chr14:90416441:− | 9 |
| | :ENST00000267544>chr14:90416136:−:THE1B | |
| IILANTFSK | chr3:185328562:+:AluY>chr3:185329439:+: | 9 |
| | ENST00000545472 | |
| FCRLLNGLGEEIK | chr10:28247767:−:MIRb>chr10:28233891:− | 9 |
| | :ENST00000537576 | |
| AQEFETSLGNMFR | chr12:95596369:−:FLAMC>chr12:95566520:− | 9 |
| | :ENST00000451107 | |
| MSDQEKGPIVSSGVR | chr2:203103163:− | 9 |
| | :ENST00000392244>chr2:203098881:− | |
| | Charlie4z | |
| TNYAASSYLSLTPEQWK | chr22:23204348:+:LIMA4A>chr22:23248706: | 9 |
| | +:ENST00000390325 | |
| TSLGNMLTADPR | chr14:35778674:+:AluSx>chr14:35779946:+: | 9 |
| | ENST00000556506 | |
| SPVTMEQLICK | chr2:90074903:+:MER70− | 9 |
| | int>chr2:90139454:+:ENST00000492446 | |
| GAGPAVPGGPVPAGATLT | chr17:2627917:+:GCrich>chr14:106330469:− | 9 |
| TGAR | :ENST00000461719 | |
| GQEFETSLANMETPGR | chr16:3718260:−:AluSx>chr16:3716119:− | 9 |
| | :ENST00000576335 | |
| FVDVTECQACSANSR | chr22:21567354:− | 9 |
| | :ENST00000424627>chr22:21564141:−:L2b | |
| TELNIVPVPR | chr19:41438041:+:L2b>chr19:41509906:+: | 9 |
| | ENST00000330446 | |
| MTLATDGTADMFGIR | chr3:4927407:− | 9 |
| | :ENST00000441894>chr3:4898429:−:MLT1D | |
| MELSAQFAATTTTPPRPLG | chr11:58943356:+:MIR3>chr11:58949212:+: | 9 |
| R | ENST00000227451 | |
| EAIALCHFFFNISGILLWYP | chr4:25676447:+:L3>chr4:25677757:+: | 9 |
| IPFTR | ENST00000503434 | |
| DAAALLLANEAR | chr6:110774731:−:LTR40c>chr6:110768193:− | 9 |
| | ENST00000434949 | |
| MELTIPGVGK | chr2:99224656:−:MIRb>chr2:99220650:− | 9 |
| | :ENST00000328709 | |
| METPAQLLFLLLLWLPAE | chr2:89442543:− | 9 |
| AGGIMR | :ENST00000492167>chr2:89438968:−:AluYb8 | |
| MGAVTHIWNPRTLGGQDP | chr17:40046175:−:AluSq2>chr17:40043956:− | 9 |
| DHR | :ENST00000353196 | |
| LTMGSTGCDRPLDK | chr14:106717516:−:L1MC>chr14:106641752:− | 9 |
| | :ENST00000390605 | |
| WGGQAPPGQPPRPGGR | chr19:39346300:−:SVAD>chr19:39338074:− | 9 |
| | :ENST00000601449 | |
| LRQEQLLEPRMQR | chr19:50809471:+:AluSp>chr19:50812982:+: | 9 |
| | ENST00000262269 | |
| TLEVEGK | chr12:76520433:−:AluSx1>chr12:76443026:− | 9 |
| | :ENST00000431879 | |
| NLEASWATR | chr16:14738989:+:AluJr>chr16:14742245:+: | 9 |
| | ENST00000570219 | |
| ELYPGQFKPPICLL | chr19:39380329:− | 9 |
| | :ENST00000358931>chr19:39380152:−:MIR | |
| MLVSASQDGK | chr7:100274628:+:AluJo>chr7:100274975:+: | 9 |
| | ENST00000412215 | |
| AGFYEQMNGPVAG | chr8:144745326:−:AluSz>chr8:144668944:− | 9 |
| | ENST00000531931 | |
| MLGTRPHGR | chr11:73445789:−:MER1B>chr11:73441868:− | 9 |
| | :ENST00000336083 | |
| LAVNSPPVEPPEQHSR | chr1:53346501:+:MLT1E1A>chr1:53347143:+: | 9 |
| | ENST00000371532 | |
| MIVMNDQMDSSLK | chr10:64976967:− | 9 |
| | :ENST00000402544>chr10:64445839:−:L2c | |
| MGTVAHACNTSTLGGQEH | chr22:21577153:−:AluJb>chr22:21104282:− | 9 |
| CEGLR | :ENST00000255882 | |
| MSLCILSMK | chr19:9939645:+:MIRb>chr19:9940641:+: | 9 |
| | ENST00000586895 | |
| IPTVTPGAASSC | chr17:62544114:−:MER5B>chr17:62499650:− | 9 |
| | ENST00000450599 | |
| TITDAELPIYR | chr14:51362421:+:HERVH− | 9 |
| | int>chr14:51368547:+:ENST00000353130 | |
| GLEWVSQISESTNSL | chr14:107048816:− | 9 |
| | :ENST00000390627>chr14:107047602:− | |
| | :LTR13 | |
| VAVSVLSPGK | chr11:69063184:+:ENST00000308946>chr11: | 9 |
| | 69084301:+:MIRb | |
| GQVIGEIDEETDSALDLGNI | chr7:117829683:+:AluSq2>chr7:117831971:+: | 9 |
| R | ENST00000422760 | |
| DQPGQHGPGMRPPLGLR | chr1:222838358:+:AluJb>chr1:222838651:+: | 9 |
| | ENST00000344441 | |
| VILVNLGSSAEWVFQR | chr9:123165587:−:L2c>chr9:123165349:− | 9 |
| | ENST00000416449 | |
| TTALQPGHSDLVTAR | chr9:127988405:+:AluSx>chr9:127990189:+: | 9 |
| | ENST00000259460 | |

[0478] In lung primary tumors, 167 JET-derived proteins were identified (FIG. 16A and Table 7).

TABLE 7

| Sequence | chimeric_id_all | Recurrence |
|---|---|---|
| LSVLSQPK | chr2:134035154:+:L1M5>chr22:23248512:+:ENST00000390325 | 100 |
| SNLNTGVPS | chr2:90214357:+:L1ME3>chr2:90249278:+:ENST00000468879, | 99 |
| R | chr2:90214357:+:L1ME3>chr2:90260131:+:ENST00000471857 | |
| LDSQYVER | chr19:18432008:−:L2a>chr19:18426875:−:ENST00000593829 | 81 |
| DIVRSDLEG | chr22:45565558:+:LTR13A>chr22:45566869:+:ENST00000434760 | 71 |
| KR | | |
| AEIAPLNSSL | chr19:8529495:+:AluSq2>chr19:8530208:+:ENST00000348943 | 46 |
| GR | | |
| TFTGGAVIV | chr20:44410315:−:MER68>chr20:44404241:−:ENST00000337205 | 35 |
| QK | | |
| VETSDEEIHK | chr1:226016613:+:ENST00000445856>chr1:226018885:+:MER58B, | 32 |
| K | chr1:226016613:+:ENST00000445856>chr1:226018885:+:MER58B | |
| SQLLERPRQ | chr19:17387073:+:AluSq2>chr19:17387304:+:ENST00000596335, | 31 |
| ENRLNLGAS | chr19:17387073:+:AluSq2>chr19:17387304:+:ENST00000598188, | |
| R | chr19:17387073:+:AluSq2>chr19:17387304:+:ENST00000599474, | |
| | chr19:17387073:+:AluSq2>chr19:17387304:+:ENST00000601938, | |
| | chr19:17387073:+:AluSq2>chr19:17387304:+:ENST00000602066 | |
| LSLGSRIDQI | chr3:4867430:−:ENST00000449914>chr3:4859235:−:L1MC4 | 30 |
| NISR | | |
| NGKFPSLLT | chr6:35419093:+:L2b>chr6:35438040:+:ENST00000322203 | 26 |
| HNENMVAK | | |
| ACLAEGR | chr3:40501213:+:AluY>chr3:40502924:+:ENST00000338970 | 25 |
| ILNCQKAM | chr9:140458886:−:ENST00000277540>chr9:140458662:−:L2 | 24 |
| APSFR | | |
| TEFLSFMNT | chr1:152006124:−:ENST00000271638>chr1:152005339:−:MIRc, | 23 |
| ELAAFTKK | chr1:152006124:−:ENST00000271638>chr1:152005339:−:MIRc | |
| VLGVGSTR | chr1:46675049:+:HAL1>chr1:46685371:+:ENST00000371980 | 21 |
| QNLQQAQC | chrX:38015613:−:MER5A1>chrX:38013836:−:ENST00000432886, | 20 |
| GLDLR | chrX:38015613:−:MER5A1>chrX:38013836:−:ENST00000432886, | |
| | chrX:38015613:−:MER5A1>chrX:38013836:−:ENST00000432886 | |
| MRRPGQAS | chr9:130213388:−:MIR3>chr9:130213083:−:ENST00000361436, | 15 |
| AFLGLSFFTL | chr9:130213388:−:MIR3>chr9:130213083:−:ENST00000361436, | |
| YLR | chr9:130213388:−:MIR3>chr9:130213083:−:ENST00000361436, | |
| | chr9:130213388:−:MIR3>chr9:130213083:−:ENST00000536368, | |
| | chr9:130213388:−:MIR3>chr9:130213083:−:ENST00000536368, | |
| | chr9:130213388:−:MIR3>chr9:130213083:−:ENST00000536368 | |
| TQGGSMGN | chr2:114668071:+:MER21B>chr2:114670749:+:ENST00000263238, | 15 |
| SSSSR | chr2:114668071:+:MER21B>chr2:114670749:+:ENST00000263238, | |
| | chr2:114668071:+:MER21B>chr2:114670749:+:ENST00000415792, | |
| | chr2:114668071:+:MER21B>chr2:114670749:+:ENST00000415792, | |
| | chr2:114668071:+:MER21B>chr2:114670749:+:ENST00000446821, | |
| | chr2:114668071:+:MER21B>chr2:114670749:+:ENST00000446821 | |
| NLDNLPSRL | chr18:66490653:+:MER51E>chr18:66505943:+:ENST00000584775 | 14 |
| SIR | | |
| VVSKVEFVH | chr7:156483036:−:Charlie7a>chr7:156480885:−:ENST00000353442 | 14 |
| FLAFIK | | |
| LPRTGIGAP | chr7:94018589:+:L2c>chr7:94057721:+:ENST00000297268 | 14 |
| RTR | | |
| MGWMGEA | chr9:130341201:−:ENST00000373314>chr9:130334967:−:MIRb | 12 |
| VR | | |
| MALSQCGP | chr19:53754789:−:ENST00000333952>chr19:53750572:−:MER30 | 12 |
| GKPK | | |
| LLITTSAGGR | chr3:194340620:−:L3>chr3:194337998:−:ENST00000392432 | 12 |
| LSCAASGFT | chr14:106866613:−:ENST00000390618>chr14:106764783:−:AluJb | 12 |
| LR | | |
| ASQASVPPA | chr2:112896307:+:ENST00000331203>chr2:112896389:+:C−rich | 11 |
| SLPCPSR | | |
| ASVTLIR | chr3:44887389:+:MER65D>chr3:44889477:+:ENST00000326047 | 11 |
| MNSLSIR | chr9:128638776:+:Tigger2a>chr9:128677965:+:ENST00000342287, | 11 |
| | chr9:128638776:+:Tigger2a>chr9:128677965:+:ENST00000373487, | |
| | chr9:128638776:+:Tigger2a>chr9:128677965:+:ENST00000373489, | |
| | chr9:128638776:+:Tigger2a>chr9:128677965:+:ENST00000428092, | |
| | chr9:128638776:+:Tigger2a>chr9:128677965:+:ENST00000491787 | |
| APVTGWQE | chr4:102117073:−:ENST00000492351>chr4:102104428:−:MLT1J | 11 |
| LK | | |
| MEAYTPKLT | chr11:18373993:+:ENST00000526630>chr11:18374659:+:AluSq2 | 11 |
| QLLK | | |
| SHLLGRLSQ | chr1:234516671:+:AluSx>chr1:234519469:+:ENST00000366615 | 11 |
| ENHWNLIK | | |
| GLEFETSLA | chr4:25395102:+:AluSz6>chr4:25395461:+:ENST00000315368 | 8 |
| NMHGKK | | |
| TNVQQTTD | chr14:31588916:−:ENST00000399332>chr14:31586842:−:L1ME4a, | 8 |
| LEIPPPGTV | chr14:31588916:−:ENST00000399332>chr14:31586842:−:L1ME4a, | |
| GYCAVK | chr14:31588916:−:ENST00000553957>chr14:31586842:−:L1ME4a, | |
| | chr14:31588916:−:ENST00000553957>chr14:31586842:−:L1ME4a | |
| LARHGWAE | chr8:54994449:−:AluSq2>chr8:54978373:−:ENST00000316963, | 8 |
| AFAGIRSSHI | chr8:54994449:−:AluSq2>chr8:54978373:−:ENST00000343231, | |
| K | chr8:54994449:−:AluSq2>chr8:54978373:−:ENST00000518546 | |
| MATVYFTR | chr19:49497180:+:ENST00000595090>chr19:49497762:+:L2a | 8 |
| ATSQCK | | |
| LGGSSCLVA | chr20:35116711:+:MIR>chr20:35125108:+:ENST00000373907, | 8 |
| YKK | chr20:35116711:+:MIR>chr20:35125108:+:ENST00000373913 | |
| LLIYAASNG | chr2:90199062:+:ENST00000390276>chr2:90207369:+:MER66−int, | 8 |
| HSGQQ | chr2:90199062:+:ENST00000390276>chr2:90207369:+:MER66−int | |
| MAACLGLP | chr2:172725191:−:ENST00000392592>chr2:172723793:−:SVA_D, | 8 |
| K | chr2:172725191:−:ENST00000392592>chr2:172723793:−:SVA_D | |
| MSLGLSIHH | chr17:37028428:+:MIR3>chr17:37034339:+:ENST00000318008 | 8 |
| LSDGSGIK | | |
| AEDTATSCR | chr14:106573251:−:ENST00000390601>chr14:106558237:−:L1PB4 | 8 |
| AK | | |
| ISSEQLFCFT | chr19:32948256:+:L4>chr19:32949006:+:ENST00000392250 | 7 |
| LINPK | | |
| AIALQPGQQ | chrX:114878268:+:AluSx>chrX:114879341:+:ENST00000355899, | 7 |
| RETR | chrX:114878268:+:AluSx>chrX:114879341:+:ENST00000497870 | |
| MGVVAHAC | chr7:6508832:−:AluY>chr7:6505954:−:ENST00000258739 | 7 |
| NSSTLGGQD | | |
| PLDLLHLPG | | |
| VR | | |
| MELTIPGEG | chr2:99224660:−:MIRb>chr2:99220654:−:ENST00000328709,chr2: | 7 |
| K | 99224660:−:MIRb>chr2:99220654:−:ENST00000328709,chr2:99224660:− | |
| | :MIRb>chr2:99220654:−:ENST00000328709 | |
| MAAAALRD | chr19:57999351:+:ENST00000354197>chr19:58024390:+:LTR3B | 7 |
| PAQSR | | |
| GPSPSGAEP | chr17:43880005:+:Tigger12>chr17:43884376:+:ENST00000347197, | 6 |
| R | chr17:43880005:+:Tigger12>chr17:43884376:+:ENST00000352855 | |
| LLSSSMHTL | chrX:38146409:+:CT−rich>chrX:38146366:−:ENST00000318842, | 4 |
| QTK | chrX:38146409:+:CT−rich>chrX:38146366:−:ENST00000378505, | |
| | chrX:38146409:+:CT−rich>chrX:38146366:−:ENST00000482855 | |
| SSRPAWPT | chr19:55882935:−:AluSx>chr19:55880309:−:ENST00000264563 | 4 |
| WCLPPGPG | | |
| R | | |
| MTDGGLAL | chr12:110873462:−:AluSz>chr12:110873022:−:ENST00000228825 | 4 |
| QFWNHFVC | chr22:42077159:−:L1MC4a>chr22:42076368:−:ENST00000355257 | 4 |
| IVEETEADV | | |
| NPK | | |
| GLILLEQDTA | chr9:15619847:+:Tigger1>chr9:15623265:+:ENST00000297641, | 4 |
| VQNMHK | chr9:15619847:+:Tigger1>chr9:15623265:+:ENST00000380701, | |
| | chr9:15619847:+:Tigger1>chr9:15623265:+:ENST00000535968 | |
| LASVFQLQL | chr10:29778636:−:AluJb>chr10:29777685:−:ENST00000375400 | 4 |
| LR | | |
| DASKGVSLH | chrX:138286221:−:ENST00000370603>chrX:138072779:−:THE1B | 4 |
| K | | |
| YAGRPLQCL | chr11:684898:−:ENST00000382409>chr11:681362:−:AluSx | 4 |
| IQDGILNPH | | |
| AASCTCAAC | | |
| CDDMTLLLR | | |
| FQTSGLQNC | chr10:98044785:−:MLT1C>chr10:98006805:−:ENST00000224337, | 4 |
| SFKRWSMIL | chr10:98044785:−:MLT1C>chr10:98006805:−:ENST00000224337 | |
| K | | |
| QLWTLIGM | chr2:42612922:−:MER34B>chr2:42580483:−:ENST00000468711 | 4 |
| EMVPEESTL | | |
| TSLGIK | | |
| PAAVALACN | chr1:234538581:−:AluJb>chr1:234537008:−:ENST00000040877 | 4 |
| PSTLRGRG | | |
| MPR | | |
| VIHDNFGIV | chr12:6646556:+:ENST00000229239>chr12:6648679:+:MIRb, | 4 |
| EGLMTVTPK | chr12:6646556:+:ENST00000396856>chr12:6648679:+:MIRb, | |
| | chr12:6646556:+:ENST00000396858>chr12:6648679:+:MIRb | |
| EFETSLANM | chr14:50950778:−:AluSx1>chr14:50949134:−:ENST00000013125 | 4 |
| LLDHYQNCK | | |
| AHSTLQDEA | chr19:17683411:+:ENST00000252599>chr19:17684363:+:AluJb | 4 |
| ESFMHVQL | | |
| EVMVR | | |
| HLEEATVAE | chr2:118715941:−:ENST00000319432>chr2:118715754:−:MER58A, | 4 |
| LSSCR | chr2:118715941:−:ENST00000376300>chr2:118715754:−:MER58A | |
| SLNLYNCNS | chr1:94660048:−:MLT1A0>chr1:94655639:−:ENST00000552844 | 4 |
| GAILTTMLA | chr5:149627335:−:ENST00000348628>chr5:149626005:−:MER102b | 4 |
| TRNFSDAVA | | |
| SLDPRSCDS | | |
| R | | |
| QMTQVTM | chr7:74461534:−:AluJr>chr7:74457217:−:ENST00000329959 | 4 |
| PGEPVDVAC | | |
| GVDHMVTL | | |
| AK | | |
| QVISAFPTEI | chr3:51405623:+:L1PA5>chr3:51411918:+:ENST00000266037 | 4 |
| STAMPVK | | |
| WVYEVQAG | chr13:33100704:+:L1MC5>chr19:41270986:+:ENST00000243563, | 4 |
| AARDALQG | chr13:33100704:+:L1MC5>chr19:41270986:+:ENST00000601393 | |
| FK | | |
| QVDCLGPG | chr8:141451863:−:AluJr>chr8:141449296:−:ENST00000389327 | 4 |
| VPDQPGQH | | |
| DITRSGAK | | |
| YEEASIPFVG | chr1:182920453:−:ENST00000367547>chr1:182915515:−:HAL1, | 4 |
| ILVEK | chr1:182920453:−:ENST00000423786>chr1:182915515:−:HAL1 | |
| QEQSSSPA | chr1:51946945:−:ENST00000371730>chr1:51945188:−:L1PA5 | 4 |
| MEQSWME | | |
| NDFDKLTEL | | |
| GFRR | | |
| LFFLLLTSCR | chr22:41650398:+:CT−rich>chr22:41648969:−:ENST00000405486 | 4 |
| AASRGVTFL | chr10:70722825:+:AluJo>chr10:70723047:+:ENST00000354185 | 4 |
| FPIQAK | | |
| NPSTLGGQ | chr16:16171648:+:AluSx>chr16:16173209:+:ENST00000349029, | 4 |
| ASPSPSPK | chr16:16171648:+:AluSx>chr16:16173209:+:ENST00000349029, | |
| | chr16:16171648:+:AluSx>chr16:16173209:+:ENST00000351154, | |
| | chr16:16171648:+:AluSx>chr16:16173209:+:ENST00000351154, | |
| | chr16:16171648:+:AluSx>chr16:16173209:+:ENST00000399410, | |
| | chr16:16171648:+:AluSx>chr16:16173209:+:ENST00000399410 | |
| IIQVWWHV | chr7:116527485:+:AluJo>chr7:116528181:+:ENST00000361183, | 4 |
| PVVPAAQE | chr7:116527485:+:AluJo>chr7:116528181:+:ENST00000426421, | |
| AEVR | chr7:116527485:+:AluJo>chr7:116528181:+:ENST00000458284, | |
| | chr7:116527485:+:AluJo>chr7:116528181:+:ENST00000490693 | |
| MWSGLPSR | chr2:180610440:−:ENST00000409343>chr2:180493215:−:L1MC5 | 4 |
| GLPIFK | | |
| FLGLGFFICN | chr15:81281080:−:MIR3>chr15:81274523:−:ENST00000561312 | 4 |
| MRR | | |
| AEIAPLHSSL | chr7:138950208:+:AluSc8>chr7:138951079:+:ENST00000288561, | 4 |
| GDRAAK | chr7:138950208:+:AluSc8>chr7:138951079:+:ENST00000483726 | |
| LLPVIPELWE | chr10:95240482:−:AluSx>chr10:95216694:−:ENST00000358334 | 4 |
| AEMR | | |
| MDGPAEPQ | chr19:49055580:+:ENST00000201586>chr19:49066561:+:L1ME2z | 4 |
| IPGLWDTYE | | |
| DDISEISYLP | | |
| KR | | |
| NLGSVWWL | chr8:146016536:−:MIRb>chr8:146015855:−:ENST00000394920 | 4 |
| EVAELTNPS | | |
| TSLGNMCVI | chr21:45165696:+:AluJb>chr21:45165960:+:ENST00000468090 | 4 |
| QSWVTSGT | | |
| AK | | |
| EAANMILVD | chr16:84488590:+:ENST00000262429>chr16:84490583:+:L1HS | 4 |
| DDFSAIIIGK | | |
| MAHAYNPS | chr17:62480081:−:AluJb>chr17:62479091:−:ENST00000539111, | 4 |
| TLGSQAPIK | chr17:62480081:−:AluJb>chr17:62479091:−:ENST00000581355 | |
| MQVSLHPK | chr8:105152976:+:L2b>chr8:105160835:+:ENST00000408894 | 4 |
| CKADK | | |
| GQLRPHTW | chr19:10200199:+:MIRb>chr19:10200333:+:ENST00000253110, | 4 |
| LSIRSTR | chr19:10200199:+:MIRb>chr19:10200333:+:ENST00000587710, | |
| | chr19:10200199:+:MIRb>chr19:10200333:+:ENST00000590378, | |
| | chr19:10200199:+:MIRb>chr19:10200333:+:ENST00000593131 | |
| MMKPGLAS | chr7:37989696:+:L1MB3>chr7:37989802:+:ENST00000476620, | 4 |
| IQSRIAILSR | chr7:37989704:+:L1MB3>chr7:37989802:+:ENST00000476620 | |
| WRHGTPA | chr2:102014362:−:AluSq2>chr2:102014186:−:ENST00000376826 | 4 |
| WLIQVLLED | | |
| ETTESAVK | | |
| TDSREAEFP | chr15:51201329:+:MIRb>chr15:51204275:+:ENST00000561441 | 4 |
| QKK | | |
| ATVLFYSYKP | chr19:32948256:+:L4>chr19:32949006:+:ENST00000392250, | 4 |
| K | chr19:32948256:+:L4>chr19:32949006:+:ENST00000586987, | |
| | chr19:32948256:+:L4>chr19:32949006:+:ENST00000588648 | |
| LLLSSLSSLG | chr1:156962904:−:MIRb>chr1:156955965:−:ENST00000361409, | 4 |
| DSAPER | chr1:156962904:−:MIRb>chr1:156955965:−:ENST00000368194 | |
| DLGQVISLD | chr20:1106051:+:MIR3>chr20:1106141:+:ENST00000333082 | 4 |
| LHIFICEVSR | | |
| VPMIR | | |
| ILWWSQGK | chr12:123839145:−:MIR3>chr12:123834988:−:ENST00000267176 | 4 |
| SLGLSFHICII | chr15:83100895:+:MIRb>chr15:83103066:+:ENST00000561062 | 4 |
| EAAGRGGE | | |
| AVK | | |
| VISAFPSEVS | chr9:18711328:+:L1PA3>chr9:18721534:+:ENST00000380548 | 4 |
| RR | | |
| MISSTSVYA | chr2:164591413:−:ENST00000409634>chr2:164561904:−:MIR3 | 4 |
| PK | | |
| GLPSHTELS | chr14:78340168:+:THE1C>chr14:78353434:+:ENST00000238561 | 4 |
| MICSRASM | | |
| TPLWGRPP | | |
| WPR | | |
| GIPSQVELA | chr7:81946024:−:THE1B>chr7:81799925:−:ENST00000356860 | 4 |
| WHWKR | | |
| VTLGISSPVK | chr19:3368020:+:MIR3>chr19:3449012:+:ENST00000341919, | 4 |
| K | chr19:3368020:+:MIR3>chr19:3449012:+:ENST00000346156, | |
| | chr19:3368020:+:MIR3>chr19:3449012:+:ENST00000589123 | |
| ICKAMLELLE | chr10:5056964:−:PABL_B−int>chr10:5037645:−:ENST00000380753 | 4 |
| DPVLCALAK | | |
| TCAMAQNI | chr8:99019829:+:ENST00000521689>chr8:99025486:+:Tigger12c, | 4 |
| PEGQKLDILL | chr8:99019829:+:ENST00000522025>chr8:99025486:+:Tigger12c, | |
| NK | chr8:99019829:+:ENST00000524308>chr8:99025486:+:Tigger12c | |
| HVVQGIQII | chr13:92560311:+:ENST00000377067>chr13:92572670:+:HAL1 | 4 |
| R | | |
| VTGSLQDG | chr17:39976301:+:MIRc>chr17:39977199:+:ENST00000321562 | 4 |
| MTTGPPRR | | |
| R | | |
| YLSPEAEVA | chr14:73754128:−:AluSz6>chr14:73754022:−:ENST00000554546 | 4 |
| VSRDCATAL | | |
| QPGVK | | |
| QLLCIVSNQ | chr12:49658051:+:MIRb>chr12:49663248:+:ENST00000541364, | 4 |
| K | chr12:49658051:+:MIRb>chr12:49663248:+:ENST00000552125 | |
| FVSDEMSK | chr20:33644499:−:L1ME3E>chr20:33642834:−:ENST00000252015, | 4 |
| DCLSILYNTC | chr20:33644499:−:L1ME3E>chr20:33642834:−:ENST00000451813 | |
| VCTEGVTK | | |
| QLEYLARIQ | chr8:74464247:−:ENST00000517542>chr8:74420593:−:Tigger1, | 4 |
| GFQASLFPE | chr8:74464247:−:ENST00000521210>chr8:74420593:−:Tigger1, | |
| TQQY | chr8:74464247:−:ENST00000521451>chr8:74420593:−:Tigger1, | |
| | chr8:74464247:−:ENST00000521727>chr8:74420593:−:Tigger1, | |
| | chr8:74464247:−:ENST00000522695>chr8:74420593:−:Tigger1, | |
| | chr8:74464247:−:ENST00000523533>chr8:74420593:−:Tigger1, | |
| | chr8:74464247:−:ENST00000523558>chr8:74420593:−:Tigger1, | |
| | chr8:74464247:−:ENST00000524300>chr8:74420593:−:Tigger1 | |
| LQGERISGN | chr17:73725517:+:ENST00000579662>chr17:73726063:+:AluJo | 4 |
| LDAPEGGFD | | |
| AILQTAVCT | | |
| K | | |
| LLEILGATIE | chr16:29692733:+:Charlie4z>chr16:29708317:+:ENST00000395384, | 4 |
| NSR | chr17:39696603:−:MIR>chr17:39681525:−:ENST00000361566, | |
| | chr17:39696603:−:MIR>chr17:39681525:−:ENST00000361566 | |
| MTKLLSPIR | chr22:32787416:−:AluSx1>chr22:32784086:−:ENST00000216038 | 4 |
| VLILCQHEAL | chr17:53344521:+:MIRb>chr17:53345112:+:ENST00000226067 | 4 |
| VK | | |
| DDSEPGMP | chr12:56685415:−:L3>chr12:56680404:−:ENST00000351328,chr12: | 4 |
| VLPPR | 56685415:−:L3>chr12:56680404:−:ENST00000552688 | |
| QWTEILHFT | chr11:60665318:−:ENST00000227524>chr11:60663297:−:Tigger1, | 4 |
| DFPISLDTTIL | chr11:60665318:−:ENST00000227524>chr11:60663297:−:Tigger1, | |
| K | chr11:60665318:−:ENST00000535326>chr11:60663297:−:Tigger1, | |
| | chr11:60665318:−:ENST00000535326>chr11:60663297:−:Tigger1 | |
| MSVLGELS | chr14:75593608:−:ENST00000238616>chr14:75593104:−:MIRc | 4 |
| GQEIKTILAN | chr14:53079781:+:AluY>chr14:53211570:+:ENST00000442123, | 4 |
| TEWTYPMR | chr14:53108136:+:AluY>chr14:53211570:+:ENST00000442123, | |
| | chr14:53201596:+:AluY>chr14:53211570:+:ENST00000442123 | |
| FSSHSEMVII | chr18:9858290:+:MIRc>chr18:9859225:+:ENST00000578921 | 4 |
| TTITSNSQG | | |
| EAAR | | |
| TENQTPHVL | chr4:87716976:+:L1PA6>chr4:87718027:+:ENST00000411767 | 4 |
| THRPPK | | |
| QAFLEQTRP | chr3:127878586:+:L2a>chr3:127965679:+:ENST00000254730, | 4 |
| LR | chr3:127878586:+:L2a>chr3:127965679:+:ENST00000483457, | |
| | chr5:43583569:−:MER39B>chr5:43556101:−:ENST00000306846, | |
| | chr5:43583569:−:MER39B>chr5:43556101:−:ENST00000306846, | |
| | chr5:43583569:−:MER39B>chr5:43556101:−:ENST00000306846 | |
| ESFSDFSSSIL | chr19:16201431:+:L2c>chr19:16204346:+:ENST00000344824 | 4 |
| K | | |
| QVLWLMP | chr4:3344780:+:ENST00000514268>chr4:3377116:+:(CCCCAG)n | 4 |
| MIPALSEAE | | |
| AAGSLETSL | | |
| GNMTSAW | | |
| CR | | |
| QTDHLRPG | chr1:28810817:+:AluSx>chr1:28815682:+:ENST00000373839, | 4 |
| VQHQSGQH | chr1:28810817:+:AluSx>chr1:28815682:+:ENST00000373839, | |
| SK | chr1:28810817:+:AluSx>chr1:28815682:+:ENST00000373839 | |
| IEDFGVHCK | chr8:67968754:−:ENST00000357849>chr8:67967541:−:L2a | 4 |
| QMTSHLTK | | |
| YFDYWGQG | chr14:106330435:−:ENST00000461719>chr14:106301002:−:MER65−int | 4 |
| TLVTQSPPS | | |
| K | | |
| AVALYEGTL | chr2:238451319:+:(TGG)n>chr2:238454100:+:ENST00000445024 | 4 |
| SLCSEDLK | | |
| MPSLNTSRP | chr22:22689234:+:L1PA8>chr22:22712477:+:ENST00000390294, | 4 |
| SGVPDRFSG | chr22:22689234:+:L1PA8>chr22:22735583:+:ENST00000390297 | |
| SK | | |
| IVGNMFNQ | chr13:77572426:+:MIRc>chr13:77574593:+:ENST00000377453 | 4 |
| MAK | | |
| LLIYAAATR | chr2:90537978:−:ENST00000443397>chr2:89942712:−:MLT1D | 4 |
| LFSIHLLSAL | chr4:55076146:−:L2a>chr2:89160766:−:ENST00000390240 | 4 |
| GPK | | |
| LCPAATLSE | chr20:35779434:+:SVA_B>chr20:35812583:+:ENST00000237530 | 4 |
| R | | |
| TVEQGVGV | chr11:64042841:+:MIRb>chr11:64085797:+:ENST00000265462, | 4 |
| WR | chr11:64042841:+:MIRb>chr11:64085797:+:ENST00000265462, | |
| | chr11:64042841:+:MIRb>chr11:64085797:+:ENST00000347941, | |
| | chr11:64042841:+:MIRb>chr11:64085797:+:ENST00000347941 | |
| GLEWIGTK | chr14:106877762:−:ENST00000390619>chr14:106859351:−:MLT1C | 4 |
| QRPLCCDEQ | chr1:153635838:−:AluJr4>chr1:153635752:−:ENST00000361891, | 4 |
| PHQTAFGPK | chr1:153635838:−:AluJr4>chr1:153635752:−:ENST00000361891, | |
| | chr1:153635838:−:AluJr4>chr1:153635752:−:ENST00000361891 | |
| MIVMNDQ | chr10:64976967:−:ENST00000402544>chr10:64445839:−:L2c | 4 |
| MDSSLK | | |
| PGVVAHAC | chr19:39144970:+:AluSz>chr19:39191240:+:ENST00000252699, | 4 |
| NPSTLGGRD | chr19:39144970:+:AluSz>chr19:39191240:+:ENST00000252699, | |
| LHGMVQLP | chr19:39144970:+:AluSz>chr19:39191240:+:ENST00000252699 | |
| PAEGR | | |
| MSPQLLTPG | chr14:106662989:−:HERVS71−int>chr14:106641867:−:ENST00000390605 | 4 |
| SGAHSQVQ | | |
| LVQSGAEVK | | |
| LLEGEECRN | chr12:52910421:−:ENST00000252242>chr12:52900057:−:L1MC1 | 4 |
| LASKK | | |
| PGMMAHA | chr6:31360872:−:AluSg>chr6:31324570:−:ENST00000412585 | 4 |
| CNPSTLGGR | | |
| GGWIMR | | |
| LFPGQPMV | chr14:70383468:+:L2a>chr14:70418855:+:ENST00000361956 | 4 |
| SNK | | |
| TAPPLSPLA | chr14:51363531:+:LTR7>chr14:51368547:+:ENST00000337334 | 4 |
| DSLCGLSPP | | |
| APR | | |
| NLHQSNFSL | chr4:5827221:−:ENST00000324989>chr4:5744561:−:MER66C,chr4: | 3 |
| SGEAKYPPR | 5827221:−:ENST00000397890>chr4:5744561:−:MER66C,chr4:5827221:− | |
| | :ENST00000512574>chr4:5744561:−:MER66C | |
| SCIFTISKIDD | chr6:74208780:+:MER104>chr6:74210297:+:ENST00000415954 | 3 |
| R | | |
| LHELMERTI | chr1:212870303:−:ENST00000243440>chr1:212869254:−:L2 | 3 |
| FLITQIR | | |
| EAEAGESLE | chr4:17818661:+:AluSc>chr4:17818884:+:ENST00000251496 | 3 |
| SDAVKQAM | | |
| QK | | |
| KKADATLLK | chr14:23350226:+:AluSc>chr14:23353883:+:ENST00000267396, | 3 |
| | chr14:23350226:+:AluSc>chr14:23353883:+:ENST00000536884 | |
| MVEGDQLP | chr1:183811061:+:Tigger4a>chr1:183816700:+:ENST00000304685, | 3 |
| PGHTVSQYE | chr1:183811061:+:Tigger4a>chr1:183816700:+:ENST00000539189 | |
| TCK | | |
| VCNKNFDD | chr2:122259789:−:L2a>chr2:122227536:−:ENST00000263710, | 3 |
| EDSVDGNR | chr2:122259789:−:L2a>chr2:122227536:−:ENST00000397587, | |
| PSSASSTSSK | chr2:122259789:−:L2a>chr2:122227536:−:ENST00000409078, | |
| | chr2:122259789:−:L2a>chr2:122227536:−:ENST00000418989, | |
| | chr2:122259789:−:L2a>chr2:122227536:−:ENST00000449975, | |
| | chr2:122259789:−:L2a>chr2:122227536:−:ENST00000452274, | |
| | chr2:122259789:−:L2a>chr2:122227536:−:ENST00000455322, | |
| | chr2:122259789:−:L2a>chr2:122227536:−:ENST00000541377, | |
| | chr2:122259789:−:L2a>chr2:122227536:−:ENST00000541859, | |
| | chr2:122259789:−:L2a>chr2:122227536:−:ENST00000545861 | |
| MLETLTLISS | chr19:58288037:+:ENST00000391702>chr19:58308975:+:AluSp | 3 |
| LGGLR | | |
| STNVLCTLF | chr2:131117848:+:L2a>chr2:131126706:+:ENST00000175756, | 3 |
| MLNLPDLEE | chr2:131117848:+:L2a>chr2:131126706:+:ENST00000175756 | |
| K | | |
| QEQSSSPA | chr1:51946945:−:ENST00000371730>chr1:51945188:−:L1PA5 | 3 |
| MEQSWME | | |
| NDFDKLTEL | | |
| GFRR | | |
| MILSSIR | chr6:144066592:+:L3>chr6:144070122:+:ENST00000367584 | 3 |
| MGAVAQAC | chr3:10237009:+:AluJo>chr3:10242053:+:ENST00000256458 | 3 |
| NPSTLGGQ | | |
| GKPAPEIR | | |
| YVLAAPEWT | chr10:22168673:−:Tigger1>chr10:22095028:−:ENST00000376980 | 3 |
| EEDLSQLTR | | |
| SMVK | | |
| HPSFRPAM | chr20:25838731:−:SST1>chr20:25755948:−:ENST00000376403 | 3 |
| TVWVGK | | |
| ALEPGRGSE | chr17:5200809:+:MIRb>chr17:5235244:+:ENST00000262477 | 3 |
| EAKCSITSCT | | |
| R | | |
| QVLQHPWK | chr3:118831521:−:L1PA3>chr3:118649122:−:ENST00000425327 | 3 |
| SLRPAATPS | chr1:217697476:−:SVA_D>chr1:217688231:−:ENST00000366935 | 3 |
| GK | | |
| HRRQISTAM | chr3:51405599:+:L1PA5>chr3:51411918:+:ENST00000266037 | 3 |
| PVK | | |
| TSSGLPLILH | chr7:33001530:+:MER1A>chr7:33014229:+:ENST00000242209 | 3 |
| YAMTETPLS | | |
| MCLWEK | | |
| LLDASQFGR | chr1:243449699:+:ENST00000435549>chr1:243451519:+:AluJb | 3 |
| MITR | | |
| SQHFGRPR | chr7:101810334:+:AluSx1>chr7:101813726:+:ENST00000437600 | 3 |
| QVDYLR | | |
| IQNSQVGIA | chr3:9476785:+:AluSp>chr3:9477412:+:ENST00000450326 | 3 |
| VQQK | | |
| QPPRPNQL | chr20:43581385:+:L2b>chr20:43586984:+:ENST00000372826 | 3 |
| CRR | | |
| LQAEYMAA | chr19:10561170:+:MIRb>chr19:10561279:+:ENST00000592685 | 3 |
| SLGHGGPR | | |
| DTVDVLK | chr3:50089360:+:L1MB7>chr3:50091768:+:ENST00000425608 | 3 |
| AASNQISGV | chr2:90010195:−:LTR62>chr2:89246936:−:ENST00000496168 | 3 |
| PSR | | |
| LSWRGSGKI | chr14:106552518:−:ENST00000390600>chr14:106279761:−:L1PA13, | 3 |
| TK | chr14:106815952:−:ENST00000390615>chr14:106279761:−:L1PA13 | |
| QELSILTMQ | chr18:33758286:+:L1ME1>chr18:33775220:+:ENST00000261326 | 3 |
| VPPCSPR | | |
| LSCAASGFT | chr14:107048875:−:ENST00000390627>chr14:107025026:−:L1PB3, | 3 |
| VK | chr14:107131236:−:ENST00000390632>chr14:107025026:−:L1PB3 | |
| QAPGQGLE | chr14:107170059:−:ENST00000390633>chr14:107126752:−:L1ME2, | 3 |
| WMGGIIPIF | chr14:107170059:−:ENST00000390633>chr14:107126752:−:L1ME2 | |
| GTRNYRK | | |
| VCTWTPFN | chr5:302190:+:(TG)n>chr5:304292:+:ENST00000505221, | 3 |
| PVTVR | chr5:302190:+:(TG)n>chr5:304292:+:ENST00000505221, | |
| | chr5:302190:+:(TG)n>chr5:304292:+:ENST00000505221, | |
| | chr5:302190:+:(TG)n>chr5:304292:+:ENST00000506909, | |
| | chr5:302190:+:(TG)n>chr5:304292:+:ENST00000506909, | |
| | chr5:302190:+:(TG)n>chr5:304292:+:ENST00000506909, | |
| | chr5:302190:+:(TG)n>chr5:304292:+:ENST00000507473, | |
| | chr5:302190:+:(TG)n>chr5:304292:+:ENST00000507473, | |
| | chr5:302190:+:(TG)n>chr5:304292:+:ENST00000507473, | |
| | chr5:302190:+:(TG)n>chr5:304292:+:ENST00000507528, | |
| | chr5:302190:+:(TG)n>chr5:304292:+:ENST00000507528, | |
| | chr5:302190:+:(TG)n>chr5:304292:+:ENST00000507528 | |

[0479] Importantly, a group of 10 JET-derived proteins were found to be highly recurrent across the dataset, which were also highly reliable according to their MS/MS spectra. In addition, an overexpression of JET-derived proteins was detected in tumor samples annotated as inflammatory, which could be associated to higher interferon-γ levels, and therefore an increased expression of transposable elements. These results provide a clear evidence that JETs encode for coding sequences that are translated into protein sequences. Mass spectrometry-based proteomics is thus a useful tool for from the validation of coding JETs.

### Immunopeptidomics

[0480] Proteomic analysis provides evidence of the existence of JET-derived proteins within the cell, but it does not elucidate the contribution of those proteins to the repertoire of major histocompatibility complex class I (HLA-I in humans)-associated peptides (also referred to as the immunopeptidome). Presentation by MHC class I molecules (named HLA-I in humans) on the tumor cell surface is indeed required for JET-derived peptides (pJETs) to be recognized by cytotoxic T cells. To demonstrate that JETs can be effectively processed and presented by HLA-I, the presence of lung tumor-specific pJET was searched in MS-based immunopeptidomics datasets (FIG. 16A-Table 8).

TABLE 8

| | | Recurrence |
|---|---|---|
| | | in |
| Sequence | chimeric_id | peptidome |
| RATKPTVQK | chr22:19103521:−>chr22:19077003:− | 8 |
| MTSQTMVNK | chr17:34139989:+>chr17:34147028:+ | 5 |
| RTHQQAPLK | chr20:45967949:−>chr20:45938948:− | 5 |
| VAAAESHPL | chr9:136210283:+>chr9:136216428:+ | 5 |
| GIRPPTSVR | chr12:120659973:−>chr12:120659561:− | 4 |
| AQMSVPFNR | chr13:38183213:−>chr13:38171419:− | 4 |
| SLSPPLVSK | chr19:46646469:+>chr19:46663672:+ | 4 |
| AVNGKFVGR | chr5:10384580:+>chr5:10387106:+ | 4 |
| IQNEIHAQR | chr5:43583569:−>chr5:43556101:− | 4 |
| RLDHQRAEK | chr1:180975232:−>chr1:180974599:− | 3 |
| RWKEVPSVPR | chr10:123969561:+>chr10:123969912:+ | 3 |
| GVQQYHLLSW | chr10:72644921:−>chr10:72642242:− | 3 |
| RLATAPSEK | chr10:99601433:+>chr10:99619215:+ | 3 |
| YLPDFYFGKF | chr11:108084796:−>chr11:108068147:− | 3 |
| TVKTKSLM | chr11:117024976:+>chr11:117030650:+ | 3 |
| HSKALSLSK | chr11:118278445:+>chr11:118279715:+ | 3 |
| KTKNLPMQEK | chr11:19146727:+>chr11:19164530:+ | 3 |
| KTKDLDQFLK | chr12:41157000:+>chr12:41312441:+ | 3 |
| GGGYNDFGNY | chr12:54631910:+>chr12:54677621:+ | 3 |
| TEIILRIK | chr14:75593406:−>chr14:75593104:− | 3 |
| RMFWIPKTK | chr15:50744825:+>chr15:50751197:+ | 3 |
| VWMRSPLSTF | chr15:60657933:−>chr15:60656722:− | 3 |
| LPDLAGLAHL | chr16:47626347:+>chr16:47627411:+ | 3 |
| KVLGDVATK | chr2:171927080:−>chr2:171917666:− | 3 |
| MVKPPSLLK | chr2:44554937:+>chr16:75263893:− | 3 |
| ESFYGIGTTRW | chr5:140080670:+>chr5:140081591:+ | 3 |
| SIKQLQLLK | chr6:7300909:−>chr6:7299056:− | 3 |
| SVVSVLVQK | chr8:41859766:−>chr8:41845081:− | 3 |
| ALRAVTLTAK | chr1:151239815:+>chr1:151245271:+ | 2 |
| YLMPSQLWKA | chr1:207504641:+>chr1:207506243:+ | 2 |
| EQLDILENI | chr1:33142971:+>chr1:33145245:+ | 2 |
| RSPDHPRAEY | chr1:38258152:+>chr1:38274660:+ | 2 |
| ITSWFVPRPW | chr1:45227052:+>chr1:45241706:+ | 2 |
| NELDKFIVF | chr10:120938004:−>chr10:120936665:− | 2 |
| SHKASLNKF | chr10:47173898:−>chr10:47139994:− | 2 |
| GTVPKSKAL | chr10:5058029:−>chr10:5043873:− | 2 |
| FMMEQVGLAIRS | chr10:5060092:−>chr10:5043783:− | 2 |
| MELALRSQL | chr11:102093793:+>chr11:102094353:+ | 2 |
| RVLLKEELTTPK | chr11:13465223:−>chr11:13443385:− | 2 |
| PSSPRPSSL | chr11:17486945:−>chr11:17485151:− | 2 |
| GSGKRTSSQLKP | chr11:44148906:+>chr11:44151595:+ | 2 |
| STSYSISSK | chr11:61132342:+>chr11:61133517:+ | 2 |
| RTQSSTIQIR | chr11:61196370:−>chr11:61189080:− | 2 |
| QEDLGQRGY | chr11:785039:+>chr11:810272:+ | 2 |
| ETEKDRRPW | chr12:104681628:+>chr12:104682709:+ | 2 |
| RRLQGATAMVR | chr12:20704505:+>chr20:57470710:+ | 2 |
| WRFQSCPPTTY | chr12:53835233:+>chr12:53836479:+ | 2 |
| AVMTEVVLSK | chr12:54862609:−>chr12:54857081:− | 2 |
| STSIYSTL | chr12:56867593:−>chr12:56867378:− | 2 |
| APKRNTSAL | chr13:38183213:−>chr13:38171419:− | 2 |
| RSVSARPPR | chr13:42456176:−>chr13:42442613:− | 2 |
| SVAWPFSFPK | chr13:53015205:−>chr13:53013303:− | 2 |
| TPNLRTIY | chr13:76192906:−>chr13:76104323:− | 2 |
| SIQHSDLLY | chr13:99992819:+>chr13:100009388:+ | 2 |
| SVKQGTGTSW | chr14:102196928:+>chr14:102197694:+ | 2 |
| KSQKLREQIK | chr14:107277425:−>chr14:106478239:− | 2 |
| RRQQLITRF | chr14:24686695:−>chr14:24686429:− | 2 |
| KSQLLERL | chr14:77914837:−>chr14:77913291:− | 2 |
| GLFFMKQSV | chr15:79168112:+>chr15:79170555:+ | 2 |
| RENGFVKKF | chr15:80254313:−>chr15:80253516:− | 2 |
| NEQAALSEAKVGGS | chr16:30778197:+>chr16:30778878:+ | 2 |
| HELQSHHF | chr16:69773838:−>chr16:69752437:− | 2 |
| NEIRISEA | chr16:80584267:+>chr16:80584412:+ | 2 |
| APRMLPIQAV | chr17:25597844:+>chr17:25630393:+ | 2 |
| EAEVARWL | chr17:57171332:−>chr17:57168701:− | 2 |
| RLCPAAPSEK | chr17:67192427:−>chr17:67190636:− | 2 |
| APRGPSGTQEM | chr19:3624569:−>chr19:3624160:− | 2 |
| STHPPPPSGL | chr19:3782560:−>chr19:3781670:− | 2 |
| LYSRYKKLQQHSGAK | chr19:40478151:+>chr19:40491610:+ | 2 |
| AAAVNQGLSY | chr19:40540857:−>chr19:40534017:− | 2 |
| LWPSPVNLRF | chr19:42217314:+>chr19:42311149:+ | 2 |
| VSLSPPLVSK | chr19:46646469:+>chr19:46663672:+ | 2 |
| VAAAAARVL | chr19:8323741:+>chr19:8326572:+ | 2 |
| WRTSALGQR | chr2:158306719:−>chr2:158300518:− | 2 |
| KYKLLDIGYRK | chr2:224817241:+>chr2:224824251:+ | 2 |
| KFTRFFVK | chr2:24029041:−>chr2:24021193:− | 2 |
| LHQKGGITF | chr2:24198120:+>chr2:24199839:+ | 2 |
| QPSQTQVPL | chr2:28859785:+>chr2:28863793:+ | 2 |
| ETFPGKSTF | chr2:30856371:+>chr2:30862983:+ | 2 |
| DVLDKFMSF | chr2:70488518:+>chr2:70489942:+ | 2 |
| GRWITPSNR | chr2:89166769:−>chr2:89157082:− | 2 |
| SAALQALKR | chr20:32408074:+>chr20:32436273:+ | 2 |
| TATQRPTPM | chr20:34710669:+>chr20:34761806:+ | 2 |
| RLLVPSSPK | chr20:44540197:−>chr20:44540102:− | 2 |
| TEATVDTSF | chr20:60770037:+>chr20:60770858:+ | 2 |
| LASREAIL | chr20:9457400:+>chr20:9484605:+ | 2 |
| HDLVRISM | chr21:27105478:−>chr21:27102112:− | 2 |
| NPQFLISMILQR | chr21:27105526:−>chr21:27102112:− | 2 |
| MRATKPTVQK | chr22:19103521:−>chr22:19077003:− | 2 |
| SAAAGIVGR | chr22:39716401:−>chr22:39714597:− | 2 |
| HTMGFWLTK | chr3:10160654:+>chr3:10188198:+ | 2 |
| SPRDEGKVFR | chr3:120840551:+>chr3:120866822:+ | 2 |
| QALYCQLLTY | chr3:132948195:+>chr3:132969129:+ | 2 |
| GTFPFAFSL | chr3:185198511:−>chr3:185194935:− | 2 |
| KTFPLSKSPK | chr4:106617004:−>chr4:106616825:− | 2 |
| KVLEKYWLYK | chr4:123834362:−>chr4:123833778:− | 2 |
| TTDAAIRY | chr5:10384580:+>chr5:10387106:+ | 2 |
| QAQPTLRPPK | chr5:133406533:−>chr5:133326845:− | 2 |
| AQPTLRPPK | chr5:133406533:−>chr5:133326845:− | 2 |
| KPAVARAR | chr5:134415207:−>chr5:134367163:− | 2 |
| ESFYGIGTTR | chr5:140080670:+>chr5:140081591:+ | 2 |
| RRNQETGAVQR | chr5:1503092:−>chr5:1501718:− | 2 |
| ATDNDFSRRNLY | chr5:1503092:−>chr5:1501718:− | 2 |
| EVVSTSYRR | chr5:87546068:−>chr5:87524345:− | 2 |
| KLRDPTDSTLR | chr6:109427293:+>chr6:109466422:+ | 2 |
| SPSADRVVAL | chr6:43395970:+>chr6:43399880:+ | 2 |
| KVSSPESGLSNR | chr7:101514832:+>chr7:101559395:+ | 2 |
| DIISAFHPF | chr7:103845571:−>chr7:103844682:− | 2 |
| AVFSLRPIPR | chr7:32555261:+>chr7:32582753:+ | 2 |
| GRFPSQAQL | chr7:40618566:+>chr7:40789033:+ | 2 |
| DIFQQQISR | chr7:56036577:+>chr7:56045819:+ | 2 |
| SVSATSVQK | chr9:101867407:+>chr9:101891137:+ | 2 |
| VHCDPTKGF | chr9:71770431:+>chr9:71827464:+ | 2 |
| IVQHTEISSK | chrX:122865506:−>chrX:122846758:− | 2 |

[0481] HLA-I peptidomics identified 116 tumor-specific pJETs across 17 primary lung tumors and 2 tumor cell lines (one of the two cell lines was treated with interferon gamma). Interestingly, some pJETs were found in more than 1 sample, indicating that they are shared epitopes. Importantly, pJETs showed similar MS/MS identification scores and peptide length distributions as the annotated peptidome (FIGS. 16B and C). To further validate the reliability of the identifications, MS/MS spectra were manually verified, and 8 of them were confirmed with MS/MS spectra of the corresponding synthetic peptides. These results fully confirmed that the present method if reliable for the identification of pJETS that are presented by HLA-I molecules on tumor cells and are therefore accessible to cytotoxic cells.

### Methods

### Total Proteomics

[0482] For the discovery of JETs (junctions exon-transposable element) at the proteome level, two sources of mass spectrometry datasets were used. Firstly, a publicly available dataset of 504 mass spectrometry raw files corresponding to 375 cell lines of the CCLE (Cancer Cell Line Encyclopedia) were used. The original study associated to these analyses was described and published by Nusinow and colleagues in Cell in 2020 (DOI: 10.1016/j.cell.2019.12.023). The second source of data was lung primary tumours obtained from Stewart et al. in Cell 2019 (raw files downloaded from PRIDE database-accession code PXD010357).

[0483] Briefly, in both datasets, total protein extracts were obtained from cell lines or tumours and were subsequently digested with trypsin. The resulting peptides were chemically labelled with isobaric tags using TMT, where different samples were analysed in the same experiment, together with an internal reference standard. Peptides were fractionated offline through HPLC and different fractions from each experiment were run on the mass spectrometer separately (Orbitrap Fusion or Orbitrap Fusion Lumos, from Thermo-Fisher). Further details regarding the experimental procedures and analysis are available in the corresponding publications.

[0484] Raw output files from mass spectrometry runs were interrogated using Proteome Discoverer 2.4 (Thermo-Fisher), with Sequest-HT as search engine. Two customized databases were used to query the mass spectrometry peaks, both of them including Swissprot and TrEMBL canonical sequences, as well as the in silico translation of chimeric sequences predicted from different datasets. One of databases, the “CCLE-recurrent”, included those JETs found in at least 7 samples of the CCLE mRNA-seq collection. The other database, the “lung-specific”, was constructed adding to the canonical sequences those tumor-specific JETs detected on lung cell lines from CCLE. Thus, two different outputs were obtained, according to the library of predictions set as reference. Protein cleavage was specified as Trypsin allowing for a maximum of 2 miss-cleavages. Peptide FDR was set to 1% while protein FDR was allowed to 100%, to focus our search on the investigation of peptides. The mass tolerance for peptides was 4.5 ppm and fragment tolerance 0.02 Da. Carbamidomethylation of Cysteines was set as fixed modification. For the quantification, signals from TMT reporters were obtained using MS2 or MS3 fragmentation, paired with the MS2 scans for peptide identification.

### Cell Lysis and HLA-ABC-Peptide Complexes Purification

[0485] Dry pellets from H1650 cells were resuspended in lysis buffer and sonicated. The sample was centrifuged 12 min at 5500 g and 4° C. to remove nuclei and organelles. The supernatant was collected and ultracentrifuged at 72000 g for 1 h at 4° C. to extract the membranes and the pellet was resuspended with solubilization buffer. After overnight incubation at 4° C., the sample was ultracentrifuged at 55000 g for 1 h at 4° C. to pellet the non-solubilized membranes. Solubilized membranes were incubated overnight with CNBr-activated Sepharose beads (GE Healthcare Life Sciences) coupled to anti-HLA-ABC W6/32 antibody. After washing, peptide-HLA-ABC complexes were eluted with 0.25% TFA. The eluted material was cleaned by a C18 tip before mass spectrometry. Eluted samples were analyzed by Liquid Chromatography-Mass spectrometry (LC-MS) using an Orbitrap Fusion Lumos™ Tribrid (ThermoFisher) equipped with a nanoESI source and coupled to a nanochromatographic system. LC separation was done using a 140-min acetonitrile gradient. Analyses were performed in a Top Speed (most intense) data-dependent mode using a Higher-energy Collisional Dissociation (HCD).

### Immunopeptidomics

[0486] Mass spectrometry output files (called raw files) were downloaded from PRIDE database (dataset identifiers: PXD013649, MSV000082648, PXD009752, PXD009754, PXD009755 and PXD009936) or generated in house (for the H1650 cell line). Raw files were processed using ProteomeDiscoverer 2.4 (ThermoFisher) with the following parameters: no-enzyme, precursor mass tolerance 20 ppm and fragment mass tolerance 0.02 Da. Methionine and N-acetylation were enabled as variable modifications. Using Percolator, a false discovery rate (FDR) of 1% was applied at peptide level and no FDR was used at protein level. MS/MS spectra were searched against the human proteome from Uniprot/SwissProt with isoforms concatenated with the in-silico translated lung tumour-specific JETs.

[0487] Identified peptides in each sample were processed individually to GibbsCluster 2.0 Server and each cluster was attributed to a HLA-I allele. Only peptides grouped to a given cluster were kept for further analyses. To ensure that JET-derived peptides are not found in canonical proteins, identified peptides were filtered with UniProt/TrEMBL database. Leucine and isoleucine were treated as equivalent. Remaining sequences were aligned to the translated junction using our own custom R scripts. Only those peptides overlapping the junction or in gene frameshift were kept. Finally, spectrums from identified peptides were checked manually.

[0488] Synthetic peptides (HPLC purity of 95%) were injected in a LTQ Orbitrap and/or in a Orbitrap Fusion Lumos (CID/HCD). Raw files were analysed with ProteomeDiscoverer 2.5 (ThermoFisher). Spectrums were exported and compared to the endogenous peptide using Msnbase R package. Only PSM with the same charge between synthetic and endogenous and without modifications were analysed.

[0489] The following tables 9 and 10 respectively refer to the detailed identification of the neoantigenic peptides of SEQ ID NO 1 to 4722 translated from fusion transcripts wherein the exon is the donor and the neoantigenic peptides of SEQ ID NO 4723 to 29596 translated from fusion transcripts wherein the TE is the donor.

[0490] In table 9, columns 1-14 refer to the following items: Column 1: Fusion_id; Colum 2: Donor_Chromosome_Exon; Colum 3: Donor_start_Exon; Colum 4: Donor_Breakpoint_Exon; Colum 5: Donor_strand_Exon; Colum 6: Acceptor_Chromosome_TE: Colum 7: Acceptor_Breakpoint_TE; Colum 8: Acceptor_end_TE; Colum 9: Acceptor_strand_TE; Colum 10: Fusion_type; Colum 11: Donor tx_name_Exon; Colum 12: Breakpoint_position_in_AA; Colum 13: Position; Colum 14: Tissue.

[0491] In table 10, columns 1-15 refer to the following items: Column 1: Fusion_id; Colum 2: Donor_Chromosome_TE; Colum 3: Donor_start_TE; Colum 4: Donor_Breakpoint_TE; Colum 5: Donor_strand_TE; Colum 6: Acceptor_Chromosome_Exon; Colum 7: Acceptor_Breakpoint_Exon; Colum 8: Acceptor_end_Exon; Colum 9: Acceptor_strand_Exon; Colum 10: Fusion_type; Colum 11: Acceptor_tx_name_Exon; Colum 12: Breakpoint_position_in_AA; Colum 13: Position; Colum 14: Position (SEQ ID NO:); Column 15: Tissue

[0492] The column named “position” refers to the various chimeric proteins (identified by their SEQ ID NO) that are derived from splice variants of the same JET (or fusion). In table 10, the SEQ ID NO of the chimeric protein (column 14) can be obtained by adding 4722 to the number(s) provided in column 13.

[0493] The column 12 in each table gives the position of the breakpoint between the exon-derived aa sequence and the TE-derived aa sequence respectively for each of the chimeric proteins (if more than one) of the previous column (position).

[0494] In the following tables 11-17, columns 1-13 refer to the following items

| | Fusions (donor: exon) | Fusions (donor: TE) |
|---|---|---|
| 1 | Fusion_id | Fusion_id |
| 2 | Donor_Chromosome_Exon | Donor_Chromosome_TE |
| 3 | Donor_start_Exon | Donor_start_TE |
| 4 | Donor_Breakpoint_Exon | Donor_Breakpoint_TE |
| 5 | Donor_tx_name_Exon | Donor_tx_name_TE |
| 6 | Donor_strand_Exon | Donor_strand_TE |
| 7 | Acceptor_Chromosome_TE | Acceptor_Chromosome_exon |
| 8 | Acceptor_Breakpoint_TE | Acceptor_Breakpoint_exon |
| 9 | Acceptor_end_TE | Acceptor_end_exon |
| 10 | Acceptor_strand_TE | Acceptor_strand_exon |
| 11 | Chimeric protein (i.e. | Chimeric protein (i.e. |
| | translated JET) reference | translated JET) reference |
| 12 | Breakpoint_position_in_AA | Breakpoint_position_in_AA |
| 13 | Tissue | Tissue |

[0495] Column 11 refers to the various chimeric proteins (identified by their SEQ ID NO) that are derived from splice variants of the same JET (or fusion).
[0496] In table 11, the SEQ ID NO of the chimeric protein can be obtained by adding 30433 to the number(s) provided.
[0497] In table 12, the SEQ ID NO of the chimeric protein can be obtained by adding 30433 to the number(s) provided.
[0498] In table 13, the SEQ ID NO of the chimeric protein can be obtained by adding 30760 to the number(s) provided.
[0499] In table 14, the SEQ ID NO of the chimeric protein can be obtained by adding 30760 to the number(s) provided.
[0500] In table 15, the SEQ ID NO of the chimeric protein can be obtained by adding 30964 to the number(s) provided.
[0501] In table 16, the SEQ ID NO of the chimeric protein can be obtained by adding 30964 to the number(s) provided.
[0502] In table 17, the SEQ ID NO of the chimeric protein can be obtained by adding 31201 to the number(s) provided.
[0503] In table 18, the SEQ ID NO of the chimeric protein can be obtained by adding 31201 to the number(s) provided.

Lengthy table referenced here
US20250352577A1-20251120-T00001
Please refer to the end of the specification for access instructions.

Lengthy table referenced here
US20250352577A1-20251120-T00002
Please refer to the end of the specification for access instructions.

Lengthy table referenced here
US20250352577A1-20251120-T00003
Please refer to the end of the specification for access instructions.

### DESCRIPTION OF THE SEQUENCES

| SEQ ID NO: | Sequence description |
|---|---|
| 1-4722 | Translated peptides from transcripts table 9: exon donor |
| 4723-29596 | Translated peptides from transcripts table 10: TE donor |
| 29597-29713 | LUAD peptides of table 3 (117) |
| 20714-29744 | Additional peptides from FIGS. 11-16 (31) |
| 29745-29752 | CDRs sequences table 4bis (8) |
| 29753-29941 | Table 5 peptides from MS (189) |
| 29942-30152 | Table 6 peptides from MS (211) |
| 30153-30319 | Table 7 peptides from MS (167) |
| 30320-30433 | Table 8 peptides from MS (114) |
| 30434-30520 | Translated peptides (JETs of table 11: exon donor) (87) |
| 30521-30760 | Translated peptides (JETs of table 12: TE donor) (240) |
| 30761-30802 | Translated peptides (JETs of table 13: exon donor) (42) |
| 30803-30964 | Translated peptides (JETs of table 14: TE donor) (162) |
| 30965-31030 | Translated peptides (JETs of table 15: exon donor) (66) |
| 31031-31201 | Translated peptides (JETs of table 16: TE donor) (171) |
| 31202-31228 | Translated peptides (JETs of table 17: exon donor) (27) |
| 31229-31346 | Translated peptides (JETs of table 18: TE donor) (118) |

LENGTHY TABLES
The patent application contains a lengthy table section. A copy of the table is available in electronic form from the USPTO web site (https://seqdata.uspto.gov/docdetail?docId=US20250352577A1). An electronic copy of the table will also be available from the USPTO upon request and payment of the fee set forth in 37 CFR 1.19(b)(3).

1. An isolated tumor neoantigenic peptide comprising at least 4, 5, 6, 7 or 8 amino acids of any one of SEQ ID NO:1-29744 and 29753-31346.

2. An isolated tumor neoantigenic peptide, according to claim 1 wherein (a) the peptide is from any one of SEQ ID NO:1-29744 and 29753-31346 or a fragment thereof, and comprises at least a portion of TE-derived amino acid sequence from any one of SEQ ID NO:1-29744 and 29753-31346, optionally (i) a fragment that overlaps the breakpoint between, the TE-derived amino acid sequence and an exon-derived amino acid sequence or, optionally (ii) a pure TE sequence; or (b) the peptide is from any one of SEQ ID NO: 1-29744 and 29753-31346 or a fragment thereof, and is encoded by a non-canonical ORF downstream of the junction between the TE-derived amino acid sequence and the exon derived amino acid sequence.

3. The isolated tumor neoantigenic peptide according to claim 1, wherein said neoantigenic peptide
is expressed at higher levels in tumor cells compared to normal healthy cells;
is expressed in at least 1% of subjects from a population of subjects suffering from cancer; and/or
binds MHC class I or class II with a Kd binding affinity of less than about 10⁻⁵ M.

4. A population of autologous dendritic cells or antigen presenting cells that have been pulsed with one or more of the neoantigenic peptides of claim 1 or transfected with a polynucleotide encoding one or more of the peptides of claim 1.

5. A vaccine or immunogenic composition capable of raising a specific T-cell response comprising
a. one or more neoantigenic peptides of claim 1, optionally with a physiologically acceptable buffer, carrier, or excipient, and/or optionally with an adjuvant or immunostimulant;
b. one or more polynucleotides encoding one or more of the neoantigenic peptides of claim 1, optionally linked to a heterologous regulatory control nucleotide sequence; and/or
c. a population of antigen presenting cells that have been pulsed with one or more of the neoantigenic peptides of claim 1 or transfected with a polynucleotide encoding one or more of the neoantigenic peptides of claim 1.

6. An antibody, or an antigen-binding fragment thereof, a T cell receptor (TCR), or a chimeric antigen receptor (CAR) that specifically binds one or more of the neoantigenic peptides of claim 1, optionally in association with an MHC molecule, with a Kd affinity of about 10⁻⁶ M or less, optionally wherein the antibody is a TCR-like antibody or the CAR is a TCR-like antibody-based CAR.

7. A method of producing an antibody, TCR or CAR that specifically binds one or more of the neoantigenic peptides of claim 1, comprising the step of selecting an antibody, TCR or CAR that binds to one or more of the tumor neoantigen peptides claim 1, optionally in association with an MHC or HLA molecule, or optionally expressed on the surface of a cell, with a Kd binding affinity of about 10⁻⁶ M or less.

8. An antibody, TCR or CAR produced by the method of claim 7.

9. A T cell receptor according to claim 8, wherein said T cell receptor is made soluble or a TCR-like antibody fused to an antibody fragment directed to a T cell antigen, optionally wherein the targeted antigen is CD3 or CD16.

10. An antibody, TCR or CAR according to claim 6, wherein said antibody is a multispecific antibody that further targets at least an immune cell antigen, optionally wherein the immune cell is a T cell, a NK cell or a dendritic cell, optionally wherein the targeted antigen is CD3, CD16, CD30 or a TCR, optionally wherein the immune cell is defective for the Suv39 h1 gene.

11. A polynucleotide encoding one or more of the neoantigenic peptides of claim 1, or an antibody, a CAR or a TCR that specifically binds one or more of the neoantigenic peptides of claim 1, optionally linked to a heterologous regulatory control sequence.

12. A vector comprising the polynucleotide of claim 11.

13. An immune cell that specifically binds to one or more neoantigenic peptides of claim 1, optionally wherein the immune cell is defective for the Suv39 h1 gene.

14. The immune cell of claim 13, which is an allogenic or autologous cell selected from T cells, Natural Killer T cells, CD4+/CD8+ T cells, TILs/tumor derived CD8 T cells, central memory CDS+ T cells, Treg, MAIT, γδ T cells, human embryonic stem cells, and pluripotent stem cells from which lymphoid cells may be differentiated.

15. A T cell according to claim 9, which comprises
a T cell receptor that specifically binds one or more neoantigenic peptides of claim 1, or
a TCR or a CAR that specifically binds one or more of the neoantigenic peptides of claim 1, optionally wherein the CAR is an MHC-restricted antibody-based chimeric antigen receptor.

16. A method of inhibiting cancer cell proliferation or treating cancer in a subject comprising administering to a subject in need thereof one or more of the neoantigenic peptides of claim 1, a population of dendritic cells that have been pulsed with one or more of the neoantigenic peptides of claim 1 or transfected with a polynucleotide encoding one or more of the neoantigenic peptides of claim 1, a polynucleotide encoding one or more of the neoantigenic peptides of claim 1 or a vector comprising a polynucleotide encoding one or more of the neoantigenic peptides of claim 1, or a vaccine or immunogenic composition comprising any of the foregoing.

17. A method of inhibiting cancer cell proliferation or treating cancer comprising administering to a subject in need thereof an antibody or antigen-binding fragment thereof, a TCR, and/or a CAR that specifically binds one or more of the neoantigenic peptide of claim 1, and/or
a polynucleotide encoding said antibody, antigen-binding fragment, TCR or CAR, or a vector comprising said polynucleotide.

18. A method of treating cancer via cell therapy comprising administering an immune cell that specifically binds to one or more neoantigenic peptides of claim 1, optionally wherein the immune cell is defective for the Suv39 h1 gene.

19. The method of claim 16 at least one further therapeutic agent.

20. The method of claim 19, wherein said at least one further therapeutic agent is a chemotherapeutic agent, or an immunotherapeutic agent, optionally a checkpoint inhibitor.

The application's sequence listing, which the Patent Office published only in electronic form, follows.

SEQUENCE LISTING (31346 sequences)

SEQ ID NO: 1 - protein, 198 aa, Artificial Sequence
  Synthetic polypeptide
MPMILGYWDIRGLAHAIRLLLEYTDSSYEEKKYTMGDAPDYDRSQWLNEKFKLGLDFPNLPYLIDGAHKITQSNAILCYIARKHNLCGETEEEKIRVDILENQTMDNHMQLGMICYNPEFEKLKPKYLEELPEKLKLYSEFLGKRPWFAGNKITFVDFLVYDVLDLHRIFEPKCLDAFPNLKDFISRFESTQHRVESS

SEQ ID NO: 2 - protein, 217 aa, Artificial Sequence
  Synthetic polypeptide
MPMILGYWDIRGLAHAIRLLLEYTDSSYEEKKYTMGDAPDYDRSQWLNEKFKLGLDFPNGMLGSLVAQLSFAGFPSIQLPYLIDGAHKITQSNAILCYIARKHNLCGETEEEKIRVDILENQTMDNHMQLGMICYNPEFEKLKPKYLEELPEKLKLYSEFLGKRPWFAGNKITFVDFLVYDVLDLHRIFEPKCLDAFPNLKDFISRFESTQHRVESS

SEQ ID NO: 3 - protein, 263 aa, Artificial Sequence
  Synthetic polypeptide
MEPGPDGPAASGPAAIREGWFRETCSLWPGQALSLQVEQLLHHRRSRYQDILVFRSKTYGNVLVLDGVIQCTERDEFSYQEMIANLPLCSHPNPRKVLIIGGGDGGVLREVVKHPSVESVVQCEIDEDVIQVSKKFLPGMAIGYSSSKLTLHVGDGFEFMKQNQDAFDVIITDSSDPMGPAESLFKESYYQLMKTALKEDGVLCCQGECQWLHLDLIKEMRQFCQSLFPVVAYAYCTIPTYPSGQIGFMLCSKNPARCGVSCL

SEQ ID NO: 4 - protein, 43 aa, Artificial Sequence
  Synthetic polypeptide
QRPDRLHAVQQEPGQVRCLMPVIPAFWETKVGGSLEVRSTRPA

SEQ ID NO: 5 - protein, 177 aa, Artificial Sequence
  Synthetic polypeptide
MAVGNINELPENILLELFTHVPARQLLLNCRLVCSLWRDLIDLVTLWKRKCLREGFITEDWDQPVADWKIFYFLRSLHRNLLHNPCAEEGFEFWSLDVNGGDEWKVEDLSRDQRKEFPNDQVRSQARLRVQVPAVRSAPVVRARASGDLPARPGDHPAEERCQVEGGVVAHASYLGG

SEQ ID NO: 6 - protein, 177 aa, Artificial Sequence; identical to SEQ ID NO: 5
  Synthetic polypeptide

SEQ ID NO: 7 - protein, 177 aa, Artificial Sequence; identical to SEQ ID NO: 5
  Synthetic polypeptide

SEQ ID NO: 8 - protein, 233 aa, Artificial Sequence
  Synthetic polypeptide
MAVGNINELPENILLELFTHVPARQLLLNCRLVCSLWRDLIDLVTLWKRKCLREGFITEDWDQPVADWKIFYFLRSLHRNLLHNPCAEEGFEFWSLDVNGGDEWKVEDLSRDQRKEFPNDQVKKYFVTSYYTCLKSQVVDLKAEGYWEELMDTTRPDIEVKDWFAARPDCGSKYQLCVQLLSSAHAPLGTFQPDPATIQQKSDAKWREAWWHMPATWEAEAEESLESRRRRLP

SEQ ID NO: 9 - protein, 233 aa, Artificial Sequence; identical to SEQ ID NO: 8
  Synthetic polypeptide

SEQ ID NO: 10 - protein, 209 aa, Artificial Sequence
  Synthetic polypeptide
MAVGNINELPENILLELFTHVPARQLLLNCRLVCSLWRDLIDLVTLWKRKCLREGFITEDWDQPVADWKIFYFLRSLHRNLLHNPCAEEGFEFWSLDVNGGDEWKVEDLSRDQRKEFPNDQHLPQVPGGGPQGRRVLGGADGYHTAGHRGQGLVRSQARLRVQVPAVRSAPVVRARASGDLPARPGDHPAEERCQVEGGVVAHASYLGG

SEQ ID NO: 11 - protein, 21 aa, Artificial Sequence
  Synthetic polypeptide
CTGTSCTTRALKRGSSSGAWM

SEQ ID NO: 12 - protein, 85 aa, Artificial Sequence
  Synthetic polypeptide
QVPGGGPQGRRVLGGADGYHTAGHRGQGLVRSQARLRVQVPAVRSAPVVRARASGDLPARPGDHPAEERCQVEGGVVAHASYLGG

SEQ ID NO: 13 - protein, 44 aa, Artificial Sequence
  Synthetic polypeptide
MVLLTSRMKPLTSRIISIIIILAGAIALIIGFGISVSGVSLSAA

SEQ ID NO: 14 - protein, 41 aa, Artificial Sequence
  Synthetic polypeptide
MASLGQILFWSIISIIIILAGAIALIIGFGISVSGVSLSAA

SEQ ID NO: 15 - protein, 41 aa, Artificial Sequence; identical to SEQ ID NO: 14
  Synthetic polypeptide

SEQ ID NO: 16 - protein, 51 aa, Artificial Sequence
  Synthetic polypeptide
MVLLTSRMKPLTSRIISIIIILAGAIALIIGFGISGVSAFASFSFSLATAM

SEQ ID NO: 17 - protein, 48 aa, Artificial Sequence
  Synthetic polypeptide
MASLGQILFWSIISIIIILAGAIALIIGFGISGVSAFASFSFSLATAM

SEQ ID NO: 18 - protein, 48 aa, Artificial Sequence; identical to SEQ ID NO: 17
  Synthetic polypeptide

SEQ ID NO: 19 - protein, 33 aa, Artificial Sequence
  Synthetic polypeptide
MELPAVNLKVILLGHWLLTTWSLWARQLCLSGS

SEQ ID NO: 20 - protein, 33 aa, Artificial Sequence; identical to SEQ ID NO: 19
  Synthetic polypeptide

SEQ ID NO: 21 - protein, 33 aa, Artificial Sequence; identical to SEQ ID NO: 19
  Synthetic polypeptide

SEQ ID NO: 22 - protein, 33 aa, Artificial Sequence; identical to SEQ ID NO: 19
  Synthetic polypeptide

SEQ ID NO: 23 - protein, 33 aa, Artificial Sequence; identical to SEQ ID NO: 19
  Synthetic polypeptide

SEQ ID NO: 24 - protein, 33 aa, Artificial Sequence; identical to SEQ ID NO: 19
  Synthetic polypeptide

SEQ ID NO: 25 - protein, 45 aa, Artificial Sequence
  Synthetic polypeptide
MELPAVNLKCASSSVPRNHPHVILLGHWLLTTWSLWARQLCLSGS

SEQ ID NO: 26 - protein, 209 aa, Artificial Sequence
  Synthetic polypeptide
MRPLLLLALLGWLLLAEAKGDAKPEAPCCQEGLRAGGSGSLHLGRDFTVLAGARGSPSPSVSSIPRFWIPGSDNLLVLTVATKETEGFRRFKRSAQFFNYKIQALGLGEDWNVEKGTSAGGGQKVRLLKKALEKHADKEDLVILFADSYDVLFASGPRELLKKFRQARSQVVFSAEELIYPDRRLETKYPVVSDGKRFLGSGGLQCRMS

SEQ ID NO: 27 - protein, 209 aa, Artificial Sequence; identical to SEQ ID NO: 26
  Synthetic polypeptide

SEQ ID NO: 28 - protein, 162 aa, Artificial Sequence
  Synthetic polypeptide
MRPLLLLALLGWLLLAEAKGDAKPEDNLLVLTVATKETEGFRRFKRSAQFFNYKIQALGLGEDWNVEKGTSAGGGQKVRLLKKALEKHADKEDLVILFADSYDVLFASGPRELLKKFRQARSQVVFSAEELIYPDRRLETKYPVVSDGKRFLGSGGLQCRMS

SEQ ID NO: 29 - protein, 162 aa, Artificial Sequence; identical to SEQ ID NO: 28
  Synthetic polypeptide

SEQ ID NO: 30 - protein, 119 aa, Artificial Sequence
  Synthetic polypeptide
MTVEFEECVKDSPRFRATIDEVETDVVEIEAKLDKLVKLCSGMVEAGKAYVSTSRLFVSGVRDLSQQCQGDTVISECLQRFADSLQEVVNYHMILFDQAQRSVRQQLQSFVKEPGGACL

SEQ ID NO: 31 - protein, 77 aa, Artificial Sequence
  Synthetic polypeptide
MVEAGKAYVSTSRLFVSGVRDLSQQCQGDTVISECLQRFADSLQEVVNYHMILFDQAQRSVRQQLQSFVKEPGGACL

SEQ ID NO: 32 - protein, 20 aa, Artificial Sequence
  Synthetic polypeptide
FGQWAWQIERNMAEKLQLQV

SEQ ID NO: 33 - protein, 4124 aa, Artificial Sequence
  Synthetic polypeptide
MLEGLVAWVLNTYLGKYVNNLNTDQLSVALLKGAVELENLPLKKDALKELELPFEVKAGFIGKVTLQIPFYRPHVDPWVISISSLHLIGAPEKIQDFNDEKEKLLERERKKALLQALEEKWKNDRQQKGESYWYSVTASVVTRIVENIELKIQDVHLRFEDGVTNPSHPFAFGICIKNVSMQNAVNEPVQKLMRKKQLDVAEFSIYWDVDCTLLGDLPQMELQEAMARSMESRSHHYVLEPVFASALLKRNCSKKPLRSRHSPRIDCDIQLETIPLKLSQLQYRQIMEFLKELERKERQVKFRRWKPKVAISKNCREWWYFALNANLYEIREQRKRCTWDFMLHRARDAVSYTDKYFNKLKGGLLSTDDKEEMCRIEEEQSFEELKILRELVHDRFHKQEELAESLREPQFDSPGACPGAPEPGGGSGMLQYLQSWFPGWGGWYGQQTPEGNVVEGLSAEQQEQWIPEEILGTEEFFDPTADASCMNTYTKRDHVFAKLNLQLQRGTVTLLHKEQGTPQMNESAFMQLEFSDVKLLAESLPRRNSSLLSVRLGGLFLRDLATEGTMFPLLVFPNPQKEVGRVSQSFGLQTTSADRSDHYPAADPDGPVFEMLYERNPAHSHFERRLNVSTRPLNIIYNPQAIKKVADFFYKGKVHTSGFGYQSELELRVAEAARRQYNKLKMQTKAEIRQTLDRLLVGDFIEESKRWTVRLDISAPQVIFPDDFKFKNPVLVVVDLGRMLLTNTQDNSRRKSRDGSASEETQFSDDEYKTPLATPPNTPPPESSSSNGEKTPPFSGVEFSEEQLQAHLMSTKMYERYSLSFMDLQIMVGRVKDNWKHVQDIDVGPTHVVEKFNVHLQLERRLIYTSDPKYPGAVLSGNLPDLKIHINEDKISALKNCFALLTTPEMKTSDTQIKEKIFPQEEQRGSLQDSVMNLTQSIVLLEQHTREVLVESQLLLAEFKVNCMQLGVESNGRYISVLKVFGTNAHFVKRPYDAEVSLTVHGLLLVDTMQTYGADFDLLMASHKNLSFDIPTGSLRDSRAQSPVSGPNVAHLTDGATLNDRSATSVSLDKILTKEQESLIKLEYQFVSSECPSMNLDSTLQVISLQVNNLDIILNPETIVELIGFLQKSFPKEKDDLSPQPLMTDFERSFREQGTYQSTYEQNTEVAVEIHRLNLLLLRTVGMANREKYGRKIATASIGGTKVNVSMGSTFDMNGSLGCLQLMDLTQDNVKNQYVVSIGNSVGYENIISDIGYFESVFVRMEDAALTEALSFTFVERSKQECFLNLKMASLHYNHSAKFLKELTLSMDELEENFRGMLKSAATKVTTVLATKTAEYSEMVSLFETPRKTREPFILEENEIYGFDLASSHLDTVKLILNINIESPVVSIPRKPGSPELLVGHLGQIFIQNFVAGDDESRSDRLQVEIKDIKLYSLNCTQLAGREAVGSEGSRMFCPPSGSGSANSQEEAHFTRHDFFESLHRGQAFHILNNTTIQFKLEKIPIERESELTFSLSPDDLGTSSIMKIEGKFVNPVQVVLAKHVYEQVLQTLDNLVYSEDLNKYPASATSSPCPDSPLPPLSTCGESSVERKENGLFSHSSLSNTSQKSLSVKEVKSFTQIQATFCISELQVQLSGDLTLGAQGLVSLKFQDFEVEFSKDHPQTLSIQIALHSLLMEDLLEKNPDSKYKNLMVSRGAPKPSSLAQKEYLSQSCPSVSNVEYPDMPRSLPSHMEEAPNVFQLYQRPTSASRKKQKEVQDKDYPLTPPPSPTVDEPKILVGKSKFDDSLVHINIFLVDKKHPEFSSSYNRVNRSIDVDFNCLDVLITLQTWVVILDFFGIGSTADNHAMRLPPEGILHNVKLEPHASMESGLQDPVNTKLDLKVHSLSLVLNKTTSELAKANVSKLVAHLEMIEGDLALQGSIGSLSLSDLTCHGEFYRERFTTSGEEALIFQTFKYGRPDPLLRREHDIRVSLRMASVQYVHTQRFQAEVVAFIQHFTQLQDVLGRQRAAIEGQTVRDQAQRCSRVLLDIEAGAPVLLIPESSRSNNLIVANLGKLKVKNKFLFAGFPGTFSLQDKESVPSASPTGIPKHSLRKTTSTEEPRGTHSQGQFTMPLAGMSLGSLKSEFVPSTSTKQQGPQPTLSVGQESSSPEDHVCLLDCVVVDLQDMDIFAAERHPREYSKAPEDSSGDLIFPSYFVRQTGGSLLTEPCRLKLQVERNLDKEISHTVPDISIHGNLSSVHCSLDLYKYKLIRGLLENNLGEPIEEFMRPYDLQDPRIHTVLSGEVYTCMCFLIDMVNVSLELKDPKRKEGAGSLARFDFKKCKLLYESFSNQTKSINLVSHSMMAFDTRYAGQKTSPGMTNVFSCIFQPAKNSSTTQGSIQIELHFRSTKDSSCFTVVLNNLRVFLIFDWLLLVHDFLHTPSDIKKQNHVTPSRHRNSSSESAIVPKTVKSGVVTKRSSLPVSNERHLEVKVNVTGTEFVVIEDVSCFDTNAIILKGTTVLTYKPRFVDRPFSGSLFGIEVFSCRLGNEHDTALSIVDPVQIQMELVGNSSYQNSSGLMDAFNSEDFPPVLEIQLQALDIRLSYNDVQLFLAIAKSIPEQANAAVPDSVALESDSVGTYLPGASRVGEEIREGTRHTLDPVLELQLARLQELGFSMDDCRKALLACQGQLKKAASWLFKNAEPLKSLSLASTSRDSPGAVAAPLISGVEIKAESVCICFIDDCMDCDVPLAELTFSRLNFLQRVRTSPEGYAHFTLSGDYYNRALSGWEPFIEPWPCSVSWQQQAASRLHPPRLKLEAKAKPRLDINITSVLIDQYVSTKESWMADYCKDDKDIESAKSEDWMGSSVDPPCFGQTEVKTPKRRQPFVPFALRNHTGCTLWFATLTTTPTRAALSHSGSPGVVPEGNGTFLDDTHNVSEWREVLTGEEIPFEFEARGKLRHRHTHDLRIHQLQVRVNGWEQVSPVSVDKVGTFFRYAAPDKNSSSSTIGSPSSRTNIIHPQVYFSSLPPVRVVFAVTMEGSARKVITVRSALIVRNRLETPMELRLDSPSAPDKPVVLPAIMPGDSFAVPLHLTSWRLQARPKGLGVFFCKAPIHWTNVVKTAEISSSKRECHSMDTEKSRFFRFCVAIKKENYPDYMPSNIFSDSAKQIFRQPGHTIYLLPTVVICNLLPCELDFYVKGMPINGTLKPGKEAALHTADTSQNIELGVSLENFPLCKELLIPPGTQNYMVRMRLYDVNRRQLNLTIRIVCRAEGSLKIFISAPYWLINKTGLPLIFRQDNAKTDAAGQFEEHELARSLSPLLFCYADKEQPNLCTMRIGRGIHPEGMPGWCQGFSLDGGSGVRALKVIQQGNRPGLIYNIGIDVKKGRGRYIDTCMVIFAPRYLLDNKSSHKLAFAQREFARGQGTANPEGYISTLPGSSVVFHWPRNDYDQLLCVRLMDVPNCIWSGGFEVNKNNSFHINMRDTLGKCFFLRVEITLRGATYRISFSDTDQLPPPFRIDNFSKVPVVFTQHGVAEPRLRTEVKPMTSLDYAWDEPTLPPFITLTVKGAGSSEINCNMNDFQDNRQLYYENFIYIAATYTFSGLQEGTGRPVASNKAITCAELVLDVSPKTQRVILKKKEPGKRSQLWRMTGTGMLAHEGSSVPHNPNKPSAARSTEGSAILDIAGLAAVTDNRYEPLMLRKPDRRRSTTQTWSFREGKLTCGLHGLVVQAKGGLSGLFDGAEVVLGPDTSMELLGPVPPEQQFINQKMRPGSGMLSIRVIPDGPTRALQITDFCHRKSSRSYEVDELPVTEQELQKLKNPDTEQELEVLVRLEGGIGLSLINKVPEELVFASLTGINVHYTQLATSHMLELSIQDVQVDNQLIGTTQPFMLYVTPLSNENEVIETGPAVQVNAVKFPSKSALTNIYKHLMITAQRFTVQIEEKLLLKLLSFFGYDQAESEVEKYDENLHEKTAEQGGTPIRYYFENLKISIPQIKLSVFTSNKLPLDLKALKSTLGFPLIRFEDAVINLDPFTRVHPYETKEFIINDILKHFQEELLSQAARILGSVDFLGNPMGLLNDVSEGVTGLIKYGNVGGLIRNVTHGVSNSAAKCWALGQPQLLVSHVIMKREQILYSGPCCQMTSPSCQLM

SEQ ID NO: 34 - protein, 4149 aa, Artificial Sequence
  Synthetic polypeptide
MLEGLVAWVLNTYLGKYVNNLNTDQLSVALLKGAVELENLPLKKDALKELELPFEVKAGFIGKVTLQIPFYRPHVDPWVISISSLHLIGAPEKIQDFNDEKEKLLERERKKALLQALEEKWKNDRQQKGESYWYSVTASVVTRIVENIELKIQDVHLRFEDGVTNPSHPFAFGICIKNVSMQNAVNEPVQKLMRKKQLDVAEFSIYWDVDCTLLGDLPQMELQEAMARSMESRSHHYVLEPVFASALLKRNCSKKPLRSRHSPRIDCDIQLETIPLKLSQLQYRQIMEFLKELERKERQVKFRRWKPKVAISKNCREWWYFALNANLYEIREQRKRCTWDFMLHRARDAVSYTDKYFNKLKGGLLSTDDKEEMCRIEEEQSFEELKILRELVHDRFHKQEELAESLREPQFDSPGACPGAPEPGGGSGMLQYLQSWFPGWGGWYGQQTPEGNVVEGLSAEQQEQWIPEEILGTEEFFDPTADASCMNTYTKRDHVFAKLNLQLQRGTVTLLHKEQGTPQMNESAFMQLEFSDVKLLAESLPRRNSSLLSVRLGGLFLRDLATEGTMFPLLVFPNPQKEVGRVSQSFGLQTTSADRSDHYPAADPDGPVFEMLYERNPAHSHFERRLNVSTRPLNIIYNPQAIKKVADFFYKGKVHTSGFGYQSELELRVAEAARRQYNKLKMQTKAEIRQTLDRLLVGDFIEESKRWTVRLDISAPQVIFPDDFKFKNPVLVVVDLGRMLLTNTQDNSRRKSRDGSASEETQFSDDEYKTPLATPPNTPPPESSSSNGEKTPPFSGVEFSEEQLQAHLMSTKMYERYSLSFMDLQIMVGRVKDNWKHVQDIDVGPTHVVEKFNVHLQLERRLIYTSDPKYPGAVLSGNLPDLKIHINEDKISALKNCFALLTTPEMKTSDTQIKEKIFPQEEQRGSLQDSVMNLTQSIVLLEQHTREVLVESQLLLAEFKVNCMQLGVESNGRYISVLKVFGTNAHFVKRPYDAEVSLTVHGLLLVDTMQTYGADFDLLMASHKNLSFDIPTGSLRDSRAQSPVSGPNVAHLTDGATLNDRSATSVSLDKILTKEQESLIKLEYQFVSSECPSMNLDSTLQVISLQVNNLDIILNPETIVELIGFLQKSFPKEKDDLSPQPLMTDFERSFREQGTYQSTYEQNTEVAVEIHRLNLLLLRTVGMANREKYGRKIATASIGGTKVNVSMGSTFDMNGSLGCLQLMDLTQDNVKNQYVVSIGNSVGYENIISDIGYFESVFVRMEDAALTEALSFTFVERSKQECFLNLKMASLHYNHSAKFLKELTLSMDELEENFRGMLKSAATKVTTVLATKTAEYSEMVSLFETPRKTREPFILEENEIYGFDLASSHLDTVKLILNINIESPVVSIPRKPGSPELLVGHLGQIFIQNFVAGDDESRSDRLQVEIKDIKLYSLNCTQLAGREAVGSEGSRMFCPPSGSGSANSQEEAHFTRHDFFESLHRGQAFHILNNTTIQFKLEKIPIERESELTFSLSPDDLGTSSIMKIEGKFVNPVQVVLAKHVYEQVLQTLDNLVYSEDLNKYPASATSSPCPDSPLPPLSTCGESSVERKENGLFSHSSLSNTSQKSLSVKEVKSFTQIQATFCISELQVQLSGDLTLGAQGLVSLKFQDFEVEFSKDHPQTLSIQIALHSLLMEDLLEKNPDSKYKNLMVSRGAPKPSSLAQKEYLSQSCPSVSNVEYPDMPRSLPSHMEEAPNVFQLYQRPTSASRKKQKEVQDKDYPLTPPPSPTVDEPKILVGKSKFDDSLVHINIFLVDKKHPEFSSSYNRVNRSIDVDFNCLDVLITLQTWVVILDFFGIGSTADNHAMRLPPEGILHNVKLEPHASMESGLQDPVNTKLDLKVHSLSLVLNKTTSELAKANVSKLVAHLEMIEGDLALQGSIGSLSLSDLTCHGEFYRERFTTSGEEALIFQTFKYGRPDPLLRREHDIRVSLRMASVQYVHTQRFQAEVVAFIQHFTQLQDVLGRQRAAIEGQTVRDQAQRCSRVLLDIEAGAPVLLIPESSRSNNLIVANLGKLKVKNKFLFAGFPGTFSLQDKESVPSASPTGIPKHSLRKTTSTEEPRGTHSQGQFTMPLAGMSLGSLKSEFVPSTSTKQQGPQPTLSVGQESSSPEDHVCLLDCVVVDLQDMDIFAAERHPREYSKAPEDSSGDLIFPSYFVRQTGGSLLTEPCRLKLQVERNLDKEISHTVPDISIHGNLSSVHCSLDLYKYKLIRGLLENNLGEPIEEFMRPYDLQDPRIHTVLSGEVYTCMCFLIDMVNVSLELKDPKRKEGAGSLARFDFKKCKLLYESFSNQTKSINLVSHSMMAFDTRYAGQKTSPGMTNVFSCIFQPAKNSSTTQGSIQIELHFRSTKDSSCFTVVLNNLRVFLIFDWLLLVHDFLHTPSDIKKQNHVTPSRHRNSSSESAIVPKTVKSGVVTKRSSLPVSNERHLEVKVNVTGTEFVVIEDVSCFDTNAIILKGTTVLTYKPRFVDRPFSGSLFGIEVFSCRLGNEHDTALSIVDPVQIQMELVGNSSYQNSSGLMDAFNSEDFPPVLEIQLQALDIRLSYNDVQLFLAIAKSIPEQANAAVPDSVALESDSVGTYLPGASRVGEEIREGTRHTLDPVLELQLARLQELGFSMDDCRKALLACQGQLKKAASWLFKNAEPLKSLSLASTSRDSPGAVAAPLISGVEIKAESVCICFIDDCMDCDVPLAELTFSRLNFLQRVRTSPEGYAHFTLSGDYYNRALSGWEPFIEPWPCSVSWQQQAASRLHPPRLKLEAKAKPRLDINITSVLIDQYVSTKESWMADYCKDDKDIESAKSEDWMGSSVDPPCFGQSLPLVYLRTRSTASLTNLEHQIYARAEVKTPKRRQPFVPFALRNHTGCTLWFATLTTTPTRAALSHSGSPGVVPEGNGTFLDDTHNVSEWREVLTGEEIPFEFEARGKLRHRHTHDLRIHQLQVRVNGWEQVSPVSVDKVGTFFRYAAPDKNSSSSTIGSPSSRTNIIHPQVYFSSLPPVRVVFAVTMEGSARKVITVRSALIVRNRLETPMELRLDSPSAPDKPVVLPAIMPGDSFAVPLHLTSWRLQARPKGLGVFFCKAPIHWTNVVKTAEISSSKRECHSMDTEKSRFFRFCVAIKKENYPDYMPSNIFSDSAKQIFRQPGHTIYLLPTVVICNLLPCELDFYVKGMPINGTLKPGKEAALHTADTSQNIELGVSLENFPLCKELLIPPGTQNYMVRMRLYDVNRRQLNLTIRIVCRAEGSLKIFISAPYWLINKTGLPLIFRQDNAKTDAAGQFEEHELARSLSPLLFCYADKEQPNLCTMRIGRGIHPEGMPGWCQGFSLDGGSGVRALKVIQQGNRPGLIYNIGIDVKKGRGRYIDTCMVIFAPRYLLDNKSSHKLAFAQREFARGQGTANPEGYISTLPGSSVVFHWPRNDYDQLLCVRLMDVPNCIWSGGFEVNKNNSFHINMRDTLGKCFFLRVEITLRGATYRISFSDTDQLPPPFRIDNFSKVPVVFTQHGVAEPRLRTEVKPMTSLDYAWDEPTLPPFITLTVKGAGSSEINCNMNDFQDNRQLYYENFIYIAATYTFSGLQEGTGRPVASNKAITCAELVLDVSPKTQRVILKKKEPGKRSQLWRMTGTGMLAHEGSSVPHNPNKPSAARSTEGSAILDIAGLAAVTDNRYEPLMLRKPDRRRSTTQTWSFREGKLTCGLHGLVVQAKGGLSGLFDGAEVVLGPDTSMELLGPVPPEQQFINQKMRPGSGMLSIRVIPDGPTRALQITDFCHRKSSRSYEVDELPVTEQELQKLKNPDTEQELEVLVRLEGGIGLSLINKVPEELVFASLTGINVHYTQLATSHMLELSIQDVQVDNQLIGTTQPFMLYVTPLSNENEVIETGPAVQVNAVKFPSKSALTNIYKHLMITAQRFTVQIEEKLLLKLLSFFGYDQAESEVEKYDENLHEKTAEQGGTPIRYYFENLKISIPQIKLSVFTSNKLPLDLKALKSTLGFPLIRFEDAVINLDPFTRVHPYETKEFIINDILKHFQEELLSQAARILGSVDFLGNPMGLLNDVSEGVTGLIKYGNVGGLIRNVTHGVSNSAAKCWALGQPQLLVSHVIMKREQILYSGPCCQMTSPSCQLM

SEQ ID NO: 35 - protein, 147 aa, Artificial Sequence
  Synthetic polypeptide
MRGEKLSKALKSTLGFPLIRFEDAVINLDPFTRVHPYETKEFIINDILKHFQEELLSQAARILGSVDFLGNPMGLLNDVSEGVTGLIKYGNVGGLIRNVTHGVSNSAAKCWALGQPQLLVSHVIMKREQILYSGPCCQMTSPSCQLM

SEQ ID NO: 36 - protein, 68 aa, Artificial Sequence
  Synthetic polypeptide
MPEIRVTPLGAGQDVGRSCILVSIAGKNVMLDCGMHMGFNDDRRFPDFSYITQNGRLTDFLDCVIIRL

SEQ ID NO: 37 - protein, 68 aa, Artificial Sequence; identical to SEQ ID NO: 36
  Synthetic polypeptide

SEQ ID NO: 38 - protein, 68 aa, Artificial Sequence; identical to SEQ ID NO: 36
  Synthetic polypeptide

SEQ ID NO: 39 - protein, 68 aa, Artificial Sequence; identical to SEQ ID NO: 36
  Synthetic polypeptide

SEQ ID NO: 40 - protein, 68 aa, Artificial Sequence; identical to SEQ ID NO: 36
  Synthetic polypeptide

SEQ ID NO: 41 - protein, 74 aa, Artificial Sequence
  Synthetic polypeptide
MCGAGFGHFEWLAGGGAGQDVGRSCILVSIAGKNVMLDCGMHMGFNDDRRFPDFSYITQNGRLTDFLDCVIIRL

SEQ ID NO: 42 - protein, 74 aa, Artificial Sequence; identical to SEQ ID NO: 41
  Synthetic polypeptide

SEQ ID NO: 43 - protein, 39 aa, Artificial Sequence
  Synthetic polypeptide
MLDCGMHMGFNDDRRFPDFSYITQNGRLTDFLDCVIIRL

SEQ ID NO: 44 - protein, 115 aa, Artificial Sequence
  Synthetic polypeptide
MPEIRVTPLGACPVLSWNLVLPPGRGSRAPSSTDTRTGFHVLPHGVSASSEGAPRPGAGQDVGRSCILVSIAGKNVMLDCGMHMGFNDDRRFPDFSYITQNGRLTDFLDCVIIRL

SEQ ID NO: 45 - protein, 69 aa, Artificial Sequence
  Synthetic polypeptide
MPEIRVTPLVGAGQDVGRSCILVSIAGKNVMLDCGMHMGFNDDRRFPDFSYITQNGRLTDFLDCVIIRL

SEQ ID NO: 46 - protein, 128 aa, Artificial Sequence
  Synthetic polypeptide
MPEIRVTPLGACPVLSWNLVLPPGRGSRAPSSTDTRTGFHVLPHGPLGCGPVILMCGAGFGHFEWLAGGGAGQDVGRSCILVSIAGKNVMLDCGMHMGFNDDRRFPDFSYITQNGRLTDFLDCVIIRL

SEQ ID NO: 47 - protein, 75 aa, Artificial Sequence
  Synthetic polypeptide
MPEIRVTPLGAGQDVGRSCILVSIAGKNVMLDCGMHMGFNDDRRFPDFSYITQNGRLTDFLDCVIISSTQPVLTA

SEQ ID NO: 48 - protein, 75 aa, Artificial Sequence; identical to SEQ ID NO: 47
  Synthetic polypeptide

SEQ ID NO: 49 - protein, 75 aa, Artificial Sequence; identical to SEQ ID NO: 47
  Synthetic polypeptide

SEQ ID NO: 50 - protein, 75 aa, Artificial Sequence; identical to SEQ ID NO: 47
  Synthetic polypeptide

SEQ ID NO: 51 - protein, 75 aa, Artificial Sequence; identical to SEQ ID NO: 47
  Synthetic polypeptide

SEQ ID NO: 52 - protein, 81 aa, Artificial Sequence
  Synthetic polypeptide
MCGAGFGHFEWLAGGGAGQDVGRSCILVSIAGKNVMLDCGMHMGFNDDRRFPDFSYITQNGRLTDFLDCVIISSTQPVLTA

SEQ ID NO: 53 - protein, 81 aa, Artificial Sequence; identical to SEQ ID NO: 52
  Synthetic polypeptide

SEQ ID NO: 54 - protein, 46 aa, Artificial Sequence
  Synthetic polypeptide
MLDCGMHMGFNDDRRFPDFSYITQNGRLTDFLDCVIISSTQPVLTA

SEQ ID NO: 55 - protein, 122 aa, Artificial Sequence
  Synthetic polypeptide
MPEIRVTPLGACPVLSWNLVLPPGRGSRAPSSTDTRTGFHVLPHGVSASSEGAPRPGAGQDVGRSCILVSIAGKNVMLDCGMHMGFNDDRRFPDFSYITQNGRLTDFLDCVIISSTQPVLTA

SEQ ID NO: 56 - protein, 76 aa, Artificial Sequence
  Synthetic polypeptide
MPEIRVTPLVGAGQDVGRSCILVSIAGKNVMLDCGMHMGFNDDRRFPDFSYITQNGRLTDFLDCVIISSTQPVLTA

SEQ ID NO: 57 - protein, 135 aa, Artificial Sequence
  Synthetic polypeptide
MPEIRVTPLGACPVLSWNLVLPPGRGSRAPSSTDTRTGFHVLPHGPLGCGPVILMCGAGFGHFEWLAGGGAGQDVGRSCILVSIAGKNVMLDCGMHMGFNDDRRFPDFSYITQNGRLTDFLDCVIISSTQPVLTA

SEQ ID NO: 58 - protein, 2386 aa, Artificial Sequence
  Synthetic polypeptide
MSNGYRTLSQHLNDLKKENFSLKLRIYFLEERMQQKYEASREDIYKRNIELKVEVESLKRELQDKKQHLDKTWADVENLNSQNEAELRRQFEERQQETEHVYELLENKIQLLQEESRLAKNEAARMAALVEAEKECNLELSEKLKGVTKNWEDVPGDQVKPDQYTEALAQRDKRIEELNQSLAAQERLVEQLSREKQQLLHLLEEPTSMEVQPMTEELLKQQKLNSHETTITQQSVSDSHLAELQEKIQQTEATNKILQEKLNEMSYELKCAQESSQKQDGTIQNLKETLKSRERETEELYQVIEGQNDTMAKLREMLHQSQLGQLHSSEGTSPAQQQVALLDLQSALFCSQLEIQKLQRVVRQKERQLADAKQCVQFVEAAAHESEQQKEASWKHNQELRKALQQLQEELQNKSQQLRAWEAEKYNEIRTQEQNIQHLNHSLSHKEQLLQEFRELLQYRDNSDKTLEANEMLLEKLRQRIHDKAVALERAIDEKFSALEEKEKELRQLRLAVRERDHDLERLRDVLSSNEATMQSMESLLRAKGLEVEQLSTTCQNLQWLKEEMETKFSRWQKEQESIIQQLQTSLHDRNKEVEDLSATLLCKLGPGQSEIAEELCQRLQRKERMLQDLLSDRNKQVLEHEMEIQGLLQSVSTREQESQAAAEKLVQALMERNSELQALRQYLGGRDSLMSQAPISNQQAEVTPTGCLGKQTDQGSMQIPSRDDSTSLTAKEDVSIPRSTLGDLDTVAGLEKELSNAKEELELMAKKERESQMELSALQSMMAVQEEELQVQAADMESLTRNIQIKEDLIKDLQMQLVDPEDIPAMERLTQEVLLLREKVASVESQGQEISGNRRQQLLLMLEGLVDERSRLNEALQAERQLYSSLVKFHAHPESSERDRTLQVELEGAQVLRSRLEEVLGRSLERLNRLETLAAIGGAAAGDDTEDTSTEFTDSIEEEAAHHSHQQLVKVALEKSLATVETQNPSFSPPSPMGGDSNRCLQEEMLHLRAEFHQHLEEKRKAEEELKELKAQIEEAGFSSVSHIRNTMLSLCLENAELKEQMGEAMSDGWEIEEDKEKGEVMVETVVTKEGLSESSLQAEFRKLQGKLKNAHNIINLLKEQLVLSSKEGNSKLTPELLVHLTSTIERINTELVGSPGKHQHQEEGNVTVRPFPRPQSLDLGATFTVDAHQLDNQSQPRDPGPQSAFSLPGSTQHLRSQLSQCKQRYQDLQEKLLLSEATVFAQANELEKYRVMLTGESLVKQDSKQIQVDLQDLGYETCGRSENEAEREETTSPECEEHNSLKEMVLMEGLCSEQGRRGSTLASSSERKPLENQLGKQEEFRVYGKSENILVLRKDIKDLKAQLQNANKVIQNLKSRVRSLSVTSDYSSSLERPWKLRAVGTLEGSSPHSVPDEDEGWLSDGTGAFYSPGLQAKKDLESLIQRVSQLEAQLPKNGLEEKLAEELRSASWPGKYDSLIQDQARELSYLRQKIREGRGICYLITRHAKDTVKSFEDLLRSNDIDYYLGQSFREQLAQGSQLTERLTSKLSTKDHKSEKDQAGLEPLALRLSRELQEKEKVIEVLQAKLDARSLTPSSSHALSDSHRSPSSTSFLSDELEACSDMDIVSEYTHYEEKKASPSHSDSIHHSSHSAVLSSKPSSTSASQGAKAESNSNPISLPTPQNTPKEANQAHSGFHFHSIPKLASLPQAPLPSAPSSFLPFSPTGPLLLGCCETPVVSLAEAQQELQMLQKQLGESASTVPPASTATLLSNDLEADSSYYLNSAQPHSPPRGTIELGRILEPGYLGSSGKWDVMRPQKGSVSGDLSSGSSVYQLNSKPTGADLLEEHLGEIRNLRQRLEESICINDRLREQLEHRLTSTARGRGSTSNFYSQGLESIPQLCNENRVLREDNRRLQAQLSHVSREHSQETESLREALLSSRSHLQELEKELEHQKVERQQLLEDLREKQQEVLHFREERLSLQENDSRLQHKLVLLQQQCEEKQQLFESLQSELQIYEALYGNSKKGLKAYSLDACHQIPLSSDLSHLVAEVRALRGQLEQSIQGNNCLRLQLQQQLESGAGKASLSPSSINQNFPASTDPGNKQLLLQDSAVSPPVRDVGMNSPALVFPSSASSTPGSETPIINRANGLGLDTSPVMKTPPKLEGDATDGSFANKHGRHVIGHIDDYSALRQQIAEGKLLVKKIVSLVRSACSFPGLEAQGTEVLGSKGIHELRSSTSALHHALEESASLLTMFWRAALPSTHIPVLPGKVGESTERELLELRTKVSKQERLLQSTTEHLKNANQQKESMEQFIVSQLTRTHDVLKKARTNLEEPCKKRSHQKSLKQQERCLRRNKQVMHDRYMCQSGPCSCICNNTHWSNFMAIS

SEQ ID NO: 59 - protein, 260 aa, Artificial Sequence
  Synthetic polypeptide
MSFLIDSSIMITSQILFFGFGWLFFMRQLFKDYEIRQYVVQVIFSVTFAFSCTMFELIIFEILGVLNSSSRYFHWKMNLCVILLILVFMVPFYIGYFIVSNIRLLHKQRLLFSCLLWLTFMYFFWKLGDPFPILSPKHGILSIEQLISRVGVIGVTLMALLSGFGAVNCPYTYMSYFLRNVTDTDILALERRLLQTMDMIISKKKRMAMARRTMFQKGEVHNKPSGFWGMIKSVTTSASGSETSLSLCAKWITPWHKTIP

SEQ ID NO: 60 - protein, 7 aa, Artificial Sequence
  Synthetic polypeptide
GKPSGGQ

SEQ ID NO: 61 - protein, 34 aa, Artificial Sequence
  Synthetic polypeptide
TLMPAQLWTHLSQPRAQLTEFSAGPSIWRRMITT

SEQ ID NO: 62 - protein, 389 aa, Artificial Sequence
  Synthetic polypeptide
MVLESTMVCVDNSEYMRNGDFLPTRLQAQQDAVNIVCHSKTRSNPENNVGLITLANDCEVLTTLTPDTGRILSKLHTVQPKGKITFCTGIRVAHLALKHRQGKNHKMRIIAFVGSPVEDNEKDLVKLAKRLKKEKVNVDIINFGEEEVNTEKLTAFVNTLNGKDGTGSHLVTVPPGPSLADALISSPILAGEGGAMLGLGASDFEFGVDPSADPELALALRVSMEEQRQRQEEEARRAAAASAAEAGIATTGTEDSDDALLKMTISQQEFGRTGLPDLSSMTEEEQIAYAMQMSLQGAEFGQAESADIDASSAMDTSEPAKEEDDYDVMQDPEFLQSVLENLPGVDPNNEAIRNAMGSLASQATKDGKKDKKEEDKKCNTHHEGLQLHS

SEQ ID NO: 63 - protein, 392 aa, Artificial Sequence
  Synthetic polypeptide
MVLESTMVCVDNSEYMRNGDFLPTRLQAQQDAVNIVCHSKTRSNPENNVGLITLANDCEVLTTLTPDTGRILSKLHTVQPKGKITFCTGIRVAHLALKHRQGKNHKMRIIAFVGSPVEDNEKDLVKLAKRLKKEKVNVDIINFGEEEVNTEKLTAFVNTLNGKDGTGSHLVTVPPGPSLADALISSPILAGEGGAMLGLGASDFEFGVDPSADPELALALRVSMEEQRQRQEEEARRAAAASAAEAGIATTGTEGERDSDDALLKMTISQQEFGRTGLPDLSSMTEEEQIAYAMQMSLQGAEFGQAESADIDASSAMDTSEPAKEEDDYDVMQDPEFLQSVLENLPGVDPNNEAIRNAMGSLASQATKDGKKDKKEEDKKCNTHHEGLQLHS

SEQ ID NO: 64 - protein, 7 aa, Artificial Sequence
  Synthetic polypeptide
GKPSGGQ

SEQ ID NO: 65 - protein, 34 aa, Artificial Sequence; identical to SEQ ID NO: 61
  Synthetic polypeptide

SEQ ID NO: 66 - protein, 402 aa, Artificial Sequence
  Synthetic polypeptide
MVLESTMVCVDNSEYMRNGDFLPTRLQAQQDAVNIVCHSKTRSNPENNVGLITLANDCEVLTTLTPDTGRILSKLHTVQPKGKITFCTGIRVAHLALKHRQGKNHKMRIIAFVGSPVEDNEKDLVKLAKRLKKEKVNVDIINFGEEEVNTEKLTAFVNTLNGKDGTGSHLVTVPPGPSLADALISSPILAGEGGAMLGLGASDFEFGVDPSADPELALALRVSMEEQRQRQEEEARRAAAASAAEAGIATTGTEDSDDALLKMTISQQEFGRTGLPDLSSMTEEEQIAYAMQMSLQGAEFGQAESADIDASSAMDTSEPAKEEDDYDVMQDPEFLQSVLENLPGVDPNNEAIRNAMGSLASQATKDGKKDKKEEDKKSAASLLKPARPRTHREERTTPDAPP

SEQ ID NO: 67 - protein, 405 aa, Artificial Sequence
  Synthetic polypeptide
MVLESTMVCVDNSEYMRNGDFLPTRLQAQQDAVNIVCHSKTRSNPENNVGLITLANDCEVLTTLTPDTGRILSKLHTVQPKGKITFCTGIRVAHLALKHRQGKNHKMRIIAFVGSPVEDNEKDLVKLAKRLKKEKVNVDIINFGEEEVNTEKLTAFVNTLNGKDGTGSHLVTVPPGPSLADALISSPILAGEGGAMLGLGASDFEFGVDPSADPELALALRVSMEEQRQRQEEEARRAAAASAAEAGIATTGTEGERDSDDALLKMTISQQEFGRTGLPDLSSMTEEEQIAYAMQMSLQGAEFGQAESADIDASSAMDTSEPAKEEDDYDVMQDPEFLQSVLENLPGVDPNNEAIRNAMGSLASQATKDGKKDKKEEDKKSAASLLKPARPRTHREERTTPDAPP

SEQ ID NO: 68 - protein, 397 aa, Artificial Sequence
  Synthetic polypeptide
MVLESTMVCVDNSEYMRNGDFLPTRLQAQQDAVNIVCHSKTRSNPENNVGLITLANDCEVLTTLTPDTGRILSKLHTVQPKGKITFCTGIRVAHLALKHRQGKNHKMRIIAFVGSPVEDNEKDLVKLAKRLKKEKVNVDIINFGEEEVNTEKLTAFVNTLNGKDGTGSHLVTVPPGPSLADALISSPILAGEGGAMLGLGASDFEFGVDPSADPELALALRVSMEEQRQRQEEEARRAAAASAAEAGIATTGTEDSDDALLKMTISQQEFGRTGLPDLSSMTEEEQIAYAMQMSLQGAEFGQAESADIDASSAMDTSEPAKEEDDYDVMQDPEFLQSVLENLPGVDPNNEAIRNAMGSLASQATKDGKKDKKEEDKKNVCFMTGLLVCFVHCYISST

SEQ ID NO: 69 - protein, 400 aa, Artificial Sequence
  Synthetic polypeptide
MVLESTMVCVDNSEYMRNGDFLPTRLQAQQDAVNIVCHSKTRSNPENNVGLITLANDCEVLTTLTPDTGRILSKLHTVQPKGKITFCTGIRVAHLALKHRQGKNHKMRIIAFVGSPVEDNEKDLVKLAKRLKKEKVNVDIINFGEEEVNTEKLTAFVNTLNGKDGTGSHLVTVPPGPSLADALISSPILAGEGGAMLGLGASDFEFGVDPSADPELALALRVSMEEQRQRQEEEARRAAAASAAEAGIATTGTEGERDSDDALLKMTISQQEFGRTGLPDLSSMTEEEQIAYAMQMSLQGAEFGQAESADIDASSAMDTSEPAKEEDDYDVMQDPEFLQSVLENLPGVDPNNEAIRNAMGSLASQATKDGKKDKKEEDKKNVCFMTGLLVCFVHCYISST

SEQ ID NO: 70 - protein, 7 aa, Artificial Sequence
  Synthetic polypeptide
GKPSGGQ

SEQ ID NO: 71 - protein, 34 aa, Artificial Sequence; identical to SEQ ID NO: 61
  Synthetic polypeptide

SEQ ID NO: 72 - protein, 92 aa, Artificial Sequence
  Synthetic polypeptide
MNGTRNWCTLVDVHPEDQAAVYLKGRSGDKMIHEKNINQLKSEVQYIQEARNCLQKLREDISSKLDRNLGDSLHRQEIQVWDVEGISKCLLD

SEQ ID NO: 73 - protein, 151 aa, Artificial Sequence
  Synthetic polypeptide
MNGTRNWCTLVDVHPEDQAAGSVDILRLTLQGELTGDELEHIAQKAGRKTYAMVSSHSAGHSLASELVESHDGHEEIIKVYLKGRSGDKMIHEKNINQLKSEVQYIQEARNCLQKLREDISSKLDRNLGDSLHRQEIQVWDVEGISKCLLD

SEQ ID NO: 74 - protein, 126 aa, Artificial Sequence
  Synthetic polypeptide
MNGTRNWCTLVDVHPEDQAAAGRKTYAMVSSHSAGHSLASELVESHDGHEEIIKVYLKGRSGDKMIHEKNINQLKSEVQYIQEARNCLQKLREDISSKLDRNLGDSLHRQEIQVWDVEGISKCLLD

SEQ ID NO: 75 - protein, 170 aa, Artificial Sequence
  Synthetic polypeptide
MSSPGMTSLQLEKEECMQCVPCSPRTRVALLELYRAMCQGSVDILRLTLQGELTGDELEHIAQKAGRKTYAMVSSHSAGHSLASELVESHDGHEEIIKVYLKGRSGDKMIHEKNINQLKSEVQYIQEARNCLQKLREDISSKLDRNLGDSLHRQEIQVWDVEGISKCLLD

SEQ ID NO: 76 - protein, 53 aa, Artificial Sequence
  Synthetic polypeptide
MAKISSPTETERCIESLIAVFQKYAGKDGYNYTLSKTEFLSFMNTELAAFTKV

SEQ ID NO: 77 - protein, 62 aa, Artificial Sequence
  Synthetic polypeptide
MAKISSPTETERCIESLIAVFQKYAGKDGYNYTLSKTEFLSFMNTELAAFTKKMRYKGVIII

SEQ ID NO: 78 - protein, 75 aa, Artificial Sequence
  Synthetic polypeptide
MCSSLEQALAVLVTTFHKYSCQEGDKFKLSKGEMKELLHKELPSFVGEKVDEEGLKKLMGSLDENSDQQVDFQER

SEQ ID NO: 79 - protein, 75 aa, Artificial Sequence; identical to SEQ ID NO: 78
  Synthetic polypeptide

SEQ ID NO: 80 - protein, 75 aa, Artificial Sequence; identical to SEQ ID NO: 78
  Synthetic polypeptide

SEQ ID NO: 81 - protein, 75 aa, Artificial Sequence; identical to SEQ ID NO: 78
  Synthetic polypeptide

SEQ ID NO: 82 - protein, 42 aa, Artificial Sequence
  Synthetic polypeptide
MKELLHKELPSFVGEKVDEEGLKKLMGSLDENSDQQVDFQER

SEQ ID NO: 83 - protein, 1018 aa, Artificial Sequence
  Synthetic polypeptide
MPGPRRPAGSRLRLLLLLLLPPLLLLLRGSHAGNLTVAVVLPLANTSYPWSWARVGPAVELALAQVKARPDLLPGWTVRTVLGSSENALGVCSDTAAPLAAVDLKWEHNPAVFLGPGCVYAAAPVGRFTAHWRVPLLTAGAPALGFGVKDEYALTTRAGPSYAKLGDFVAALHRRLGWERQALMLYAYRPGDEEHCFFLVEGLFMRVRDRLNITVDHLEFAEDDLSHYTRLLRTMPRKGRVIYICSSPDAFRTLMLLALEAGLCGEDYVFFHLDIFGQSLQGGQGPAPRRPWERGDGQDVSARQAFQAAKIITYKDPDNPEYLEFLKQLKHLAYEQFNFTMEDGLVNTIPASFHDGLLLYIQAVTETLAHGGTVTDGENITQRMWNRSFQGVTGYLKIDSSGDRETDFSLWDMDPENGAFRVVLNYNGTSQELVAVSGRKLNWPLGYPPPDIPKCGFDNEDPACNQDHLSTLEVLALVGSLSLLGILIVSFFIYRKMQLEKELASELWRVRWEDVEPSSLERHLRSAGSRLTLSGRGSNYGSLLTTEGQFQVFAKTAYYKGNLVAVKRVNRKRIELTRKVLFELKHMRDVQNEHLTRFVGACTDPPNICILTEYCPRGSLQDILENESITLDWMFRYSLTNDIVKGMLFLHNGAICSHGNLKSSNCVVDGRFVLKITDYGLESFRDLDPEQGHTVYAKKLWTAPELLRMASPPVRGSQAGDVYSFGIILQEIALRSGVFHVEGLDLSPKEIIERVTRGEQPPFRPSLALQSHLEELGLLMQRCWAEDPQERPPFQQIRLTLRKFNRENSSNILDNLLSRMEQYANNLEELVEERTQAYLEEKRKAEALLYQILPHSVAEQLKRGETVQAEAFDSVTIYFSDIVGFTALSAESTPMQVVTLLNDLYTCFDAVIDNFDVYKVETIGDAYMVVSGLPVRNGRLHACEVARMALALLDAVRSFRIRHRPQEQLRLRIGIHTGPVCAGVVGLKMPRYCLFGDTVNTASRMESNGEARCDGRLL

SEQ ID NO: 84 - protein, 55 aa, Artificial Sequence
  Synthetic polypeptide
MELQKGKGAAAAAAASGAAGGGGGGAGAGAPGGGRLLLSTSLDAKDELEEISAHR

SEQ ID NO: 85 - protein, 55 aa, Artificial Sequence; identical to SEQ ID NO: 84
  Synthetic polypeptide

SEQ ID NO: 86 - protein, 406 aa, Artificial Sequence
  Synthetic polypeptide
MDTSGHFHDSGVGDLDEDPKCPCPSSGDEQQQQQQQQQQQQPPPPAPPAAPQQPLGPSLQPQPPQLQQQQQQQQQQQQQQPPHPLSQLAQLQSQPVHPGLLHSSPTAFRAPPSSNSTAILHPSSRQGSQLNLNDHLLGHSPSSTATSGPGGGSRHRQASPLVHRRDSNPFTEIAMSSCKYSGGVMKPLSRLSASRRNLIEAETEGQPLQLFSPSNPPEIVISSREDNHAHQTLLHHPNATHNHQHAGTTASSTTFPKANKRKNQNIGYKLGHRRALFEKRKRLSDYALIFGMFGIVVMVIETELSWGLYSKDSMFSLALKCLISLSTIILLGLIIAYHTREVQGGRGSYRRGSRTSDGEAGGWSGGRRGYEAGKAGPLWKLEKQGNGFPRLIFGKEPALRTTSTLV

SEQ ID NO: 87 - protein, 101 aa, Artificial Sequence
  Synthetic polypeptide
MERPIKDSMFSLALKCLISLSTIILLGLIIAYHTREVQGGRGSYRRGSRTSDGEAGGWSGGRRGYEAGKAGPLWKLEKQGNGFPRLIFGKEPALRTTSTLV

SEQ ID NO: 88 - protein, 93 aa, Artificial Sequence
  Synthetic polypeptide
MFSLALKCLISLSTIILLGLIIAYHTREVQGGRGSYRRGSRTSDGEAGGWSGGRRGYEAGKAGPLWKLEKQGNGFPRLIFGKEPALRTTSTLV

SEQ ID NO: 89 - protein, 66 aa, Artificial Sequence
  Synthetic polypeptide
MRLLPLLRTVLWAAFLGSPLRGGSSLRHVVYWNSSNPSVSPALLAESPLGKSRDLPNLIYLTCIMG

SEQ ID NO: 90 - protein, 66 aa, Artificial Sequence; identical to SEQ ID NO: 89
  Synthetic polypeptide

SEQ ID NO: 91 - protein, 66 aa, Artificial Sequence; identical to SEQ ID NO: 89
  Synthetic polypeptide

SEQ ID NO: 92 - protein, 66 aa, Artificial Sequence; identical to SEQ ID NO: 89
  Synthetic polypeptide

SEQ ID NO: 93 - protein, 66 aa, Artificial Sequence; identical to SEQ ID NO: 89
  Synthetic polypeptide

SEQ ID NO: 94 - protein, 637 aa, Artificial Sequence
  Synthetic polypeptide
MSQGPPTGESSEPEAKVLHTKRLYRAVVEAVHRLDLILCNKTAYQEVFKPENISLRNKLRELCVKLMFLHPVDYGRKAEELLWRKVYYEVIQLIKTNKKHIHSRSTLECAYRTHLVAGIGFYQHLLLYIQSHYQLELQCCIDWTHVTDPLIGCKKPVSASGKEMDWAQMACHRCLVYLGDLSRYQNELAGVDTELLAERFYYQALSVAPQIGMPFNQLGTLAGSKYYNVEAMYCYLRCIQSEVSFEGAYGNLKRLYDKAAKMYHQLKKCETRKLSPGKKRCKDIKRLLVNFMYLQSLLQPKSSSVDSELTSLCQSVLEDFNLCLFYLPSSPNLSLASEDEEEYESGYAFLPDLLIFQMVIICLMCVHSLERAGSKQYSAAIAFTLALFSHLVNHVNIRLQAELEEGENPVPAFQSDGTDEPESKEPVEKEEEPDPEPPPVTPQVGEGRKSRKFSRLSCLRRRRHPPKVGDDSDLSEGFESDSSHDSARASEGSDSGSDKSLEGGGTAFDAETDSEMNSQESRSDLEDMEEEEGTRSPTLEPPRGRSEAPDSLNGPLGPSEASIASNLQAMSTQMFQTKRCFRLAPTFSNLLLQPTTNPHTSASHRPCVNGDVDKPSEPVPNTVSGTWMGLKNYRMTE

SEQ ID NO: 95 - protein, 345 aa, Artificial Sequence
  Synthetic polypeptide
MTEQETLALLEVKRSDSPEKSSPQALVPNGRQPEGEGGAESPGAESLRVGSSAGSPTAIEGAEDGLDSTVSEAATLPWGTGPQPSAPFPDPPGWRDIEPEPPESEPLTKLEELPEDDANLLPEKAARAFVPIDLQCIERQPQEDLIVRCEAGEGECRTFMPPRVTHPDPTERKWAEAVVRPPGCSCGGCGSCGDREWLRAVASVGAALILFPCLLYGAYAFLPFDVPRLPTMSSRLIYTLRCGVFATFPIVLGILVYGLSLLCFSALRPFGEPRREVEIHRRYVAQSVQLFILYFFNLAVLSTYLPQDTLKLLPLLTGLFAVSRCVILDQSYLTLGILVSSSARG

SEQ ID NO: 96 - protein, 345 aa, Artificial Sequence; identical to SEQ ID NO: 95
  Synthetic polypeptide

SEQ ID NO: 97 - protein, 107 aa, Artificial Sequence
  Synthetic polypeptide
MTEQETLALLEVKRDPGVRAEPVMLFCPSALWGATAGGGDPPAICGPVGPALYSLLLQPGRAFHLPAPGYPQTAPSAHWSLCRLPMCDLGPVLLNPWNLSFFICKRI

SEQ ID NO: 98 - protein, 107 aa, Artificial Sequence; identical to SEQ ID NO: 97
  Synthetic polypeptide

SEQ ID NO: 99 - protein, 350 aa, Artificial Sequence
  Synthetic polypeptide
MVFVGFGFLMVFLQRYGFSSVGFTFLLAAFALQWSTLVQGFLHSFHGGHIHVGVESMINADFCAGAVLISFGAVLGKTGPTQLLLMALLEVVLFGINEFVLLHLLGVRVWGGMESGVGGGQGQPLSQERGGGGGVLPLTPPPQVRDAGGSMTIHTFGAYFGLVLSRVLYRPQLEKSKHRQGSVYHSDLFAMIGTIFLWIFWPSFNAALTALGAGQHRTALNTYYSLAASTLGTFALSALVGEDGRLDMPILESKFKVQDTCGVHNLHGMPGVLGALLGVLVAGLATHEAYGDGLESVFPLIAEGQRSATSQAMHQLFGLFVTLMFASVGGGLGGIILALQGCCDYSGKQD

SEQ ID NO: 100 - protein, 359 aa, Artificial Sequence
  Synthetic polypeptide
MVFVGFGFLMVFLQRYGFSSVGFTFLLAAFALQWSTLVQGFLHSFHGGHIHVGVESMINADFCAGAVLISFGAVLGKTGPTQLLLMALLEVVLFGINEFVLLHLLGVRDAGGSMTIHTFGAYFGLVLSRVLYRPQLEKSKHRQGSVYHSDLFAMIGTIFLWIFWPSFNAALTALGAGQHRTALNTYYSLAASTLGTFALSALVGEDGRLDMVHIQNAALAGGVVVGTSSEMMLTPFGALAAGFLAGTVSTLGYKFFTPILESKFKVQDTCGVHNLHGMPGVLGALLGVLVAGLATHEAYGDGLESVFPLIAEGQRSATSQAMHQLFGLFVTLMFASVGGGLGGIILALQGCCDYSGKQD

SEQ ID NO: 101 - protein, 428 aa, Artificial Sequence
  Synthetic polypeptide
MAGSPSRAAGRRLQLPLLCLFLQGATAVLFAVFVRYNHKTDAALWHRSNHSNADNEFYFRYPSFQDVHAMVFVGFGFLMVFLQRYGFSSVGFTFLLAAFALQWSTLVQGFLHSFHGGHIHVGVESMINADFCAGAVLISFGAVLGKTGPTQLLLMALLEVVLFGINEFVLLHLLGVRDAGGSMTIHTFGAYFGLVLSRVLYRPQLEKSKHRQGSVYHSDLFAMIGTIFLWIFWPSFNAALTALGAGQHRTALNTYYSLAASTLGTFALSALVGEDGRLDMVHIQNAALAGGVVVGTSSEMMLTPFGALAAGFLAGTVSTLGYKFFTPILESKFKVQDTCGVHNLHGMPGVLGALLGVLVAGLATHEAYGDGLESVFPLIAEGQRSATSQAMHQLFGLFVTLMFASVGGGLGGIILALQGCCDYSGKQD

SEQ ID NO: 102 - protein, 428 aa, Artificial Sequence; identical to SEQ ID NO: 101
  Synthetic polypeptide

SEQ ID NO: 103 - protein, 396 aa, Artificial Sequence
  Synthetic polypeptide
MVFVGFGFLMVFLQRYGFSSVGFTFLLAAFALQWSTLVQGFLHSFHGGHIHVGVESMINADFCAGAVLISFGAVLGKTGPTQLLLMALLEVVLFGINEFVLLHLLGVRVWGGMESGVGGGQGQPLSQERGGGGGVLPLTPPPQVRDAGGSMTIHTFGAYFGLVLSRVLYRPQLEKSKHRQGSVYHSDLFAMIGTIFLWIFWPSFNAALTALGAGQHRTALNTYYSLAASTLGTFALSALVGEDGRLDMVHIQNAALAGGVVVGTSSEMMLTPFGALAAGFLAGTVSTLGYKFFTPILESKFKVQDTCGVHNLHGMPGVLGALLGVLVAGLATHEAYGDGLESVFPLIAEGQRSATSQAMHQLFGLFVTLMFASVGGGLGGIILALQGCCDYSGKQD

SEQ ID NO: 104 - protein, 336 aa, Artificial Sequence
  Synthetic polypeptide
MVFVGFGFLMVFLQRYGFSSVGFTFLLAAFALQWSTLVQGFLHSFHGGHIHVGVESMINADFCAGAVLISFGAVLGKTGPTQLLLMALLEVVLFGINEFVLLHLLGVRVWGGMESGVGGGQGQPLSQERGGGGGVLPLTPPPQVRDAGGSMTIHTFGAYFGLVLSRVLYRPQLEKSKHRQGSVYHSDLFAMIGTIFLWIFWPSFNAALTALGAGQHRTALNTYYSLAASTLGTFALSALVGEDGRLDMPILESKFKVQDTCGVHNLHGMPGVLGALLGVLVAGLATHEAYGDGLESVFPLIAEGQRSATSQAMHQLFGLFVTLMFASVGGGLGGLL

SEQ ID NO: 105 - protein, 345 aa, Artificial Sequence
  Synthetic polypeptide
MVFVGFGFLMVFLQRYGFSSVGFTFLLAAFALQWSTLVQGFLHSFHGGHIHVGVESMINADFCAGAVLISFGAVLGKTGPTQLLLMALLEVVLFGINEFVLLHLLGVRDAGGSMTIHTFGAYFGLVLSRVLYRPQLEKSKHRQGSVYHSDLFAMIGTIFLWIFWPSFNAALTALGAGQHRTALNTYYSLAASTLGTFALSALVGEDGRLDMVHIQNAALAGGVVVGTSSEMMLTPFGALAAGFLAGTVSTLGYKFFTPILESKFKVQDTCGVHNLHGMPGVLGALLGVLVAGLATHEAYGDGLESVFPLIAEGQRSATSQAMHQLFGLFVTLMFASVGGGLGGLL

SEQ ID NO: 106 - protein, 414 aa, Artificial Sequence
  Synthetic polypeptide
MAGSPSRAAGRRLQLPLLCLFLQGATAVLFAVFVRYNHKTDAALWHRSNHSNADNEFYFRYPSFQDVHAMVFVGFGFLMVFLQRYGFSSVGFTFLLAAFALQWSTLVQGFLHSFHGGHIHVGVESMINADFCAGAVLISFGAVLGKTGPTQLLLMALLEVVLFGINEFVLLHLLGVRDAGGSMTIHTFGAYFGLVLSRVLYRPQLEKSKHRQGSVYHSDLFAMIGTIFLWIFWPSFNAALTALGAGQHRTALNTYYSLAASTLGTFALSALVGEDGRLDMVHIQNAALAGGVVVGTSSEMMLTPFGALAAGFLAGTVSTLGYKFFTPILESKFKVQDTCGVHNLHGMPGVLGALLGVLVAGLATHEAYGDGLESVFPLIAEGQRSATSQAMHQLFGLFVTLMFASVGGGLGGLL

SEQ ID NO: 107 - protein, 414 aa, Artificial Sequence; identical to SEQ ID NO: 106
  Synthetic polypeptide

SEQ ID NO: 108 - protein, 382 aa, Artificial Sequence
  Synthetic polypeptide
MVFVGFGFLMVFLQRYGFSSVGFTFLLAAFALQWSTLVQGFLHSFHGGHIHVGVESMINADFCAGAVLISFGAVLGKTGPTQLLLMALLEVVLFGINEFVLLHLLGVRVWGGMESGVGGGQGQPLSQERGGGGGVLPLTPPPQVRDAGGSMTIHTFGAYFGLVLSRVLYRPQLEKSKHRQGSVYHSDLFAMIGTIFLWIFWPSFNAALTALGAGQHRTALNTYYSLAASTLGTFALSALVGEDGRLDMVHIQNAALAGGVVVGTSSEMMLTPFGALAAGFLAGTVSTLGYKFFTPILESKFKVQDTCGVHNLHGMPGVLGALLGVLVAGLATHEAYGDGLESVFPLIAEGQRSATSQAMHQLFGLFVTLMFASVGGGLGGLL

SEQ ID NO: 109 - protein, 105 aa, Artificial Sequence
  Synthetic polypeptide
MRRGARGKPASRAGGRGLSEGLEPRGLTSTRGYKRRRETSLVRATFHPPSTPVGTASHLGRVGSAPPSHPPSSVWTIEPHPAPRTAPGRWSVCGRIQEGASFLSG

SEQ ID NO: 110 - protein, 87 aa, Artificial Sequence
  Synthetic polypeptide
GPPEQSLLLTEAWSWASKKKQPHLFSGVIVGGHLWLLGFSPGAGGFCTTLPPSFLRVDDRATSSTTDSSRAVERLWENPGRGLIPVW

SEQ ID NO: 111 - protein, 73 aa, Artificial Sequence
  Synthetic polypeptide
MFLTEDLITFNLRNFLLFQLWESSFSPGAGGFCTTLPPSFLRVDDRATSSTTDSSRAVERLWENPGRGLIPVW

SEQ ID NO: 112 - protein, 86 aa, Artificial Sequence
  Synthetic polypeptide
PPEQSLLLTEAWSWASKKKQPHLFSGVIVGGHLWLLGFSPGAGGFCTTLPPSFLRVDDRATSSTTDSSRAVERLWENPGRGLIPVW

SEQ ID NO: 113 - protein, 89 aa, Artificial Sequence
  Synthetic polypeptide
MRRGARGKPASRAGGRGLSEGLEPRGLTSTRGYKRRRETSLVRATFHPPSTPVGTASHLGRVGSAPPSHPPSSVWTIEPHPAPRTAPGR

SEQ ID NO: 114 - protein, 71 aa, Artificial Sequence
  Synthetic polypeptide
GPPEQSLLLTEAWSWASKKKQPHLFSGVIVGGHLWLLGFSPGAGGFCTTLPPSFLRVDDRATSSTTDSSRA

SEQ ID NO: 115 - protein, 57 aa, Artificial Sequence
  Synthetic polypeptide
MFLTEDLITFNLRNFLLFQLWESSFSPGAGGFCTTLPPSFLRVDDRATSSTTDSSRA

SEQ ID NO: 116 - protein, 70 aa, Artificial Sequence
  Synthetic polypeptide
PPEQSLLLTEAWSWASKKKQPHLFSGVIVGGHLWLLGFSPGAGGFCTTLPPSFLRVDDRATSSTTDSSRA

SEQ ID NO: 117 - protein, 41 aa, Artificial Sequence
  Synthetic polypeptide
PAAGATRTVSPPHRSLELGIQEEAASFVFWCHRRWPPMAFG

SEQ ID NO: 118 - protein, 38 aa, Artificial Sequence
  Synthetic polypeptide
GPPEQSLLLTEAWSWASKKKQPHLFSGVIVGGHLWLLG

SEQ ID NO: 119 - protein, 37 aa, Artificial Sequence
  Synthetic polypeptide
PPEQSLLLTEAWSWASKKKQPHLFSGVIVGGHLWLLG

SEQ ID NO: 120 - protein, 355 aa, Artificial Sequence
  Synthetic polypeptide
MAQLFLPLLAALVLAQAPAALADVLEGDSSEDRAFRVRIAGDAPLQGVLGGALTIPCHVHYLRPPPSRRAVLGSPRVKWTFLSRGREAEVLVARGVRVKVNEAYRFRVALPAYPASLTDVSLALSELRPNDSGIYRCEVQHGIDDSSDAVEVKVKGVVFLYREGSARYAFSFSGAQEACARIGAHIATPEQLYAAYLGGYEQCDAGWLSDQTVRYPIQTPREACYGDMDGFPGVRNYGVVDPDDLYDVYCYAEDLNGELFLGDPPEKLTLEEARAYCQERGAEIATTGQLYAAWDGGLDHCSPGWLADGSVRYPIVTPSQRCGGGLPGVKTLFLFPNQTGFPNKHSRFNVYCFRE

SEQ ID NO: 121 - protein, 355 aa, Artificial Sequence; identical to SEQ ID NO: 120
  Synthetic polypeptide

SEQ ID NO: 122 - protein, 31 aa, Artificial Sequence
  Synthetic polypeptide
MSRSNRQKEYKCGDLVFAKMKGYPHWPARSS

SEQ ID NO: 123 - protein, 31 aa, Artificial Sequence; identical to SEQ ID NO: 122
  Synthetic polypeptide

SEQ ID NO: 124 - protein, 32 aa, Artificial Sequence
  Synthetic polypeptide
MLLWVILLVLAPVSGQFAVMGFFWALESSSTK

SEQ ID NO: 125 - protein, 32 aa, Artificial Sequence; identical to SEQ ID NO: 124
  Synthetic polypeptide

SEQ ID NO: 126 - protein, 32 aa, Artificial Sequence; identical to SEQ ID NO: 124
  Synthetic polypeptide

SEQ ID NO: 127 - protein, 32 aa, Artificial Sequence; identical to SEQ ID NO: 124
  Synthetic polypeptide

SEQ ID NO: 128 - protein, 32 aa, Artificial Sequence; identical to SEQ ID NO: 124
  Synthetic polypeptide

SEQ ID NO: 129 - protein, 21 aa, Artificial Sequence
  Synthetic polypeptide
MLGITVLAALLACARRGGGHL

SEQ ID NO: 130 - protein, 21 aa, Artificial Sequence
  Synthetic polypeptide
MLGITVLAALLACARRGGGHL

SEQ ID NO: 131 - protein, 67 aa, Artificial Sequence
  Synthetic polypeptide
MIRTLLLSTLVAGALSCGDPTYPPYVTRVVGGEEARPNSWPWQVLGAPLSCVPEVSASLPLTLVPAP

SEQ ID NO: 132 - protein, 311 aa, Artificial Sequence
  Synthetic polypeptide
MIRTLLLSTLVAGALSCGDPTYPPYVTRVVGGEEARPNSWPWQVSLQYSSNGKWYHTCGGSLIANSWVLTAAHCISSSRTYRVGLGRHNLYVAESGSLAVSVSKIVVHKDWNSNQISKGNDIALLKLANPVSLTDKIQLACLPPAGTILPNNYPCYVTGWGRLQTNGAVPDVLQQGRLLVVDYATCSSSAWWGSSVKTSMICAGGDGVISSCNGDSGGPLNCQASDGRWQVHGIVSFGSRLGCNYYHKPSVFTRVSNYIDWINSLLRRLRQGNHLNLGGGGCSNPSSHHCTPAWATERDSISKEKKTHKKE

SEQ ID NO: 133 - protein, 67 aa, Artificial Sequence
  Synthetic polypeptide
MIRTLLLSTLVAGALSCGVSTYAPDMSRMLGGEEARPNSWPWQVLGAPLSCVPEVSASLPLTLVPAP

SEQ ID NO: 134 - protein, 51 aa, Artificial Sequence
  Synthetic polypeptide
CGVSTYAPDMSRMLGGEEARPNSWPWQVLGAPLSCVPEVSASLPLTLVPAP

SEQ ID NO: 135 - protein, 292 aa, Artificial Sequence
  Synthetic polypeptide
MIRTLLLSTLVAGALSCGVSTYAPDMSRMLGGEEARPNSWPWQVSLQYSSNGQWYHTCGGSLIANSWVLTAAHCISSSGIYRVMLGQHNLYVAESGSLAVSVSKIVVHKDWNSDQVSKGNDIALLKLANPVSLTDKIQLACLPPAGTILPNNYPCYVTGWGRLQTNGALPDDLKQGQLLVVDYATCSSSGWWGSTVKTNMICAGGDGVICTCNGDSGGPLNCQASDGRWEVHGIGSLTSVLGCNYYYKPSIFTRVSNYNDWINSPWWCMPVVSAAWEAEVEGSLWPKRWSLQ

SEQ ID NO: 136 - protein, 295 aa, Artificial Sequence
  Synthetic polypeptide
MLLLFLLFEGLCCPGENTADPFEIQILAGCRMNAPQIFLNMAYQGSDFLSFQGISWEPSPGAGIRAQNICKVLNRYLDIKEILQSLLGHTCPRFLAGLMEAGESELKRKVKPEAWLSCGPSPGPGRLQLVCHVSGFYPKPVWVMWMRGEQEQRGTQRGDVLPNADETWYLRATLDVAAGEAAGLSCRVKHSSLGGHDLIIHWGGYSIFLILICLTVIVTLVILVVVDSRLKKQSSNKNILSPHTPSPVFLMGANTQDTKNSRHQFCLAQVSWIKNRVLKKWKTRLNQLWASFISM

SEQ ID NO: 137 - protein, 394 aa, Artificial Sequence
  Synthetic polypeptide
MLLLFLLFEGLCCPGENTAAPQALQSYHLAAEEQLSFRMLQTSSFANHSWAHSEGSGWLGDLQTHGWDTVLGTIRFLKPWSHGNFSKQELKNLQSLFQLYFHSFIQIVQASAGQFQLEYPFEIQILAGCRMNAPQIFLNMAYQGSDFLSFQGISWEPSPGAGIRAQNICKVLNRYLDIKEILQSLLGHTCPRFLAGLMEAGESELKRKVKPEAWLSCGPSPGPGRLQLVCHVSGFYPKPVWVMWMRGEQEQRGTQRGDVLPNADETWYLRATLDVAAGEAAGLSCRVKHSSLGGHDLIIHWGGYSIFLILICLTVIVTLVILVVVDSRLKKQSSNKNILSPHTPSPVFLMGANTQDTKNSRHQFCLAQVSWIKNRVLKKWKTRLNQLWASFISM

SEQ ID NO: 138 - protein, 205 aa, Artificial Sequence
  Synthetic polypeptide
MLLLFLLFEGLCCPGENTAVKPEAWLSCGPSPGPGRLQLVCHVSGFYPKPVWVMWMRGEQEQRGTQRGDVLPNADETWYLRATLDVAAGEAAGLSCRVKHSSLGGHDLIIHWGGYSIFLILICLTVIVTLVILVVVDSRLKKQSSNKNILSPHTPSPVFLMGANTQDTKNSRHQFCLAQVSWIKNRVLKKWKTRLNQLWASFISM

SEQ ID NO: 139 - protein, 304 aa, Artificial Sequence
  Synthetic polypeptide
MLLLFLLFEGLCCPGENTAAPQALQSYHLAAEEQLSFRMLQTSSFANHSWAHSEGSGWLGDLQTHGWDTVLGTIRFLKPWSHGNFSKQELKNLQSLFQLYFHSFIQIVQASAGQFQLELKPEAWLSCGPSPGPGRLQLVCHVSGFYPKPVWVMWMRGEQEQRGTQRGDVLPNADETWYLRATLDVAAGEAAGLSCRVKHSSLGGHDLIIHWGGYSIFLILICLTVIVTLVILVVVDSRLKKQSSNKNILSPHTPSPVFLMGANTQDTKNSRHQFCLAQVSWIKNRVLKKWKTRLNQLWASFISM

SEQ ID NO: 140 - protein, 193 aa, Artificial Sequence
  Synthetic polypeptide
MLLLFLLFEGLCCPGENTAVKPEAWLSCGPSPGPGRLQLVCHVSGFYPKPVWVMWMRGEQEQRGTQRGDVLPNADETWYLRATLDVAAGEAAGLSCRVKHSSLGGHDLIIHWGGYSIFLILICLTVIVTLVILVVVDSRLKKQSPVFLMGANTQDTKNSRHQFCLAQVSWIKNRVLKKWKTRLNQLWASFISM

SEQ ID NO: 141 - protein, 327 aa, Artificial Sequence
  Synthetic polypeptide
MLLLFLLFEGLCCPGENTAAPQALQSYHLAAEEQLSFRMLQTSSFANHSWAHSEGSGWLGDLQTHGWDTVLGTIRFLKPWSHGNFSKQELKNLQSLFQLYFHSFIQIVQASAGQFQLEYPFEIQILAGCRMNAPQIFLNMAYQGSDFLSFQGISWEPSPGAGIRAQNICKVLNRYLDIKEILQSLLGHTCPRFLAGLMEAGESELKRKVKPEAWLSCGPSPGPGRLQLVCHVSGFYPKPVWVMWMRGGYSIFLILICLTVIVTLVILVVVDSRLKKQSPVFLMGANTQDTKNSRHQFCLAQVSWIKNRVLKKWKTRLNQLWASFISM

SEQ ID NO: 142 - protein, 150 aa, Artificial Sequence
  Synthetic polypeptide
MLLLFLLFEGLCCPGENTAVKPEAWLSCGPSPGPGRLQLVCHVSGFYPKPVWVMWMRGGYSIFLILICLTVIVTLVILVVVDSRLKKQSSNKNILSPHTPSPVFLMGANTQDTKNSRHQFCLAQVSWIKNRVLKKWKTRLNQLWASFISM

SEQ ID NO: 143 - protein, 237 aa, Artificial Sequence
  Synthetic polypeptide
MLLLFLLFEGLCCPGENTAAPQALQSYHLAAEEQLSFRMLQTSSFANHSWAHSEGSGWLGDLQTHGWDTVLGTIRFLKPWSHGNFSKQELKNLQSLFQLYFHSFIQIVQASAGQFQLELKPEAWLSCGPSPGPGRLQLVCHVSGFYPKPVWVMWMRGGYSIFLILICLTVIVTLVILVVVDSRLKKQSPVFLMGANTQDTKNSRHQFCLAQVSWIKNRVLKKWKTRLNQLWASFISM

SEQ ID NO: 144 - protein, 292 aa, Artificial Sequence
  Synthetic polypeptide
MLLLFLLFEGLCCPGENTAAPQALQSYHLAAEEQLSFRMLQTSSFANHSWAHSEGSGWLGDLQTHGWDTVLGTIRFLKPWSHGNFSKQELKNLQSLFQLYFHSFIQIVQASAGQFQLELKPEAWLSCGPSPGPGRLQLVCHVSGFYPKPVWVMWMRGEQEQRGTQRGDVLPNADETWYLRATLDVAAGEAAGLSCRVKHSSLGGHDLIIHWGGYSIFLILICLTVIVTLVILVVVDSRLKKQSPVFLMGANTQDTKNSRHQFCLAQVSWIKNRVLKKWKTRLNQLWASFISM

SEQ ID NO: 145 - protein, 138 aa, Artificial Sequence
  Synthetic polypeptide
MLLLFLLFEGLCCPGENTAVKPEAWLSCGPSPGPGRLQLVCHVSGFYPKPVWVMWMRGGYSIFLILICLTVIVTLVILVVVDSRLKKQSPVFLMGANTQDTKNSRHQFCLAQVSWIKNRVLKKWKTRLNQLWASFISM

SEQ ID NO: 146 - protein, 382 aa, Artificial Sequence
  Synthetic polypeptide
MLLLFLLFEGLCCPGENTAAPQALQSYHLAAEEQLSFRMLQTSSFANHSWAHSEGSGWLGDLQTHGWDTVLGTIRFLKPWSHGNFSKQELKNLQSLFQLYFHSFIQIVQASAGQFQLEYPFEIQILAGCRMNAPQIFLNMAYQGSDFLSFQGISWEPSPGAGIRAQNICKVLNRYLDIKEILQSLLGHTCPRFLAGLMEAGESELKRKVKPEAWLSCGPSPGPGRLQLVCHVSGFYPKPVWVMWMRGEQEQRGTQRGDVLPNADETWYLRATLDVAAGEAAGLSCRVKHSSLGGHDLIIHWGGYSIFLILICLTVIVTLVILVVVDSRLKKQSPVFLMGANTQDTKNSRHQFCLAQVSWIKNRVLKKWKTRLNQLWASFISM

SEQ ID NO: 147 - protein, 74 aa, Artificial Sequence
  Synthetic polypeptide
MEKLLCFLVLTSLSHAFGQTDMSRKAFVFPKESDTSYVSLKAPLTKPLKAFTVCLHFYTELSSTRGTNYSLPKD

SEQ ID NO: 148 - protein, 74 aa, Artificial Sequence; identical to SEQ ID NO: 147
  Synthetic polypeptide

SEQ ID NO: 149 - protein, 90 aa, Artificial Sequence
  Synthetic polypeptide
MEKLLCFLVLTSLSHAFGQTDMSRKAFVFPKESDTSYVSLKAPLTKPLKAFTVCLHFYTELSSTRPTTVFPRIELWTLGVRHLLAAGFPS

SEQ ID NO: 150 - protein, 90 aa, Artificial Sequence; identical to SEQ ID NO: 149
  Synthetic polypeptide

SEQ ID NO: 151 - protein, 90 aa, Artificial Sequence; identical to SEQ ID NO: 149
  Synthetic polypeptide

SEQ ID NO: 152 - protein, 90 aa, Artificial Sequence; identical to SEQ ID NO: 149
  Synthetic polypeptide

SEQ ID NO: 153 - protein, 90 aa, Artificial Sequence; identical to SEQ ID NO: 149
  Synthetic polypeptide

SEQ ID NO: 154 - protein, 257 aa, Artificial Sequence
  Synthetic polypeptide
MTSVAKVYYSQTTQTESRPLMGPGIRRRRVLTKDGRSNVRMEHIADKRFLYLKDLWTTFIDMQWRYKLLLFSATFAGTWFLFGVVWYLVAVAHGDLLELDPPANHTPCVVQVHTLTGAFLFSLESQTTIGYGFRYISEECPLAIVLLIAQLVLTTILEIFITGTFLAKIARPKKRAETIRFSQHAVVASHNGKPCLMIRVANMRKSLLIGCQVTGKLLQTHQTKEGENIRLNQGMERGGGTNRAVNHSTQNSKTGGN

SEQ ID NO: 155 - protein, 2 aa, Artificial Sequence
  Synthetic polypeptide
SS

SEQ ID NO: 156 - protein, 957 aa, Artificial Sequence
  Synthetic polypeptide
MGRGAGREYSPAATTAENGGGKKKQKEKELDELKKEVAMDDHKLSLDELGRKYQVDLSKGLTNQRAQDVLARDGPNALTPPPTTPEWVKFCRQLFGGFSILLWIGAILCFLAYGIQAAMEDEPSNDNLYLGVVLAAVVIVTGCFSYYQEAKSSKIMDSFKNMVPQQALVIREGEKMQINAEEVVVGDLVEVKGGDRVPADLRIISSHGCKVDNSSLTGESEPQTRSPEFTHENPLETRNICFFSTNCVEGTARGIVIATGDRTVMGRIATLASGLEVGRTPIAMEIEHFIQLITGVAVFLGVSFFVLSLILGYSWLEAVIFLIGIIVANVPEGLLATVTVCLTLTAKRMARKNCLVKNLEAVETLGSTSTICSDKTGTLTQNRMTVAHMWFDNQIHEADTTEDQSGATFDKRSPTWTALSRIAGLCNRAVFKAGQENISVSKRDTAGDASESALLKCIELSCGSVRKMRDRNPKVAEIPFNSTNKYQLSIHEREDSPQSHVLVMKGAPERILDRCSTILVQGKEIPLDKEMQDAFQNAYMELGGLGERVLGFCQLNLPSGKFPRGFKFDTDELNFPTEKLCFVGLMSMIDPPRAAVPDAVGKCRSAGIKVIMVTGDHPITAKAIAKGVGIISEGNETVEDIAARLNIPMSQVNPREAKACVVHGSDLKDMTSEQLDEILKNHTEIVFARTSPQQKLIIVEGCQRQGAIVAVTGDGVNDSPALKKADIGIAMGISGSDVSKQAADMILLDDNFASIVTGVEEGRLIFDNLKKSIAYTLTSNIPEITPFLLFIIANIPLPLGTVTILCIDLGTDMVPAISLAYEAAESDIMKRQPRNSQTDKLVNERLISMAYGQIGMIQALGGFFTYFVILAENGFLPSRLLGIRLDWDDRTMNDLEDSYGQEWTYEQRKVVEFTCHTAFFASIVVVQWADLIICKTRRNSVFQQGMKQKPRAHIMTW

SEQ ID NO: 157 - protein, 957 aa, Artificial Sequence; identical to SEQ ID NO: 156
  Synthetic polypeptide

SEQ ID NO: 158 - protein, 1019 aa, Artificial Sequence
  Synthetic polypeptide
MGRGAGREYSPAATTAENGGGKKKQKEKELDELKKEVAMDDHKLSLDELGRKYQVDLSKGLTNQRAQDVLARDGPNALTPPPTTPEWVKFCRQLFGGFSILLWIGAILCFLAYGIQAAMEDEPSNDNLYLGVVLAAVVIVTGCFSYYQEAKSSKIMDSFKNMVPQQALVIREGEKMQINAEEVVVGDLVEVKGGDRVPADLRIISSHGCKVDNSSLTGESEPQTRSPEFTHENPLETRNICFFSTNCVEGTARGIVIATGDRTVMGRIATLASGLEVGRTPIAMEIEHFIQLITGVAVFLGVSFFVLSLILGYSWLEAVIFLIGIIVANVPEGLLATVTVCLTLTAKRMARKNCLVKNLEAVETLGSTSTICSDKTGTLTQNRMTVAHMWFDNQIHEADTTEDQSGATFDKRSPTWTALSRIAGLCNRAVFKAGQENISVSKRDTAGDASESALLKCIELSCGSVRKMRDRNPKVAEIPFNSTNKYQLSIHEREDSPQSHVLVMKGAPERILDRCSTILVQGKEIPLDKEMQDAFQNAYMELGGLGERVLGFCQLNLPSGKFPRGFKFDTDELNFPTEKLCFVGLMSMIDPPRAAVPDAVGKCRSAGIKVIMVTGDHPITAKAIAKGVGIISEGNETVEDIAARLNIPMSQVNPREAKACVVHGSDLKDMTSEQLDEILKNHTEIVFARTSPQQKLIIVEGCQRQGAIVAVTGDGVNDSPALKKADIGIAMGISGSDVSKQAADMILLDDNFASIVTGVEEGRLIFDNLKKSIAYTLTSNIPEITPFLLFIIANIPLPLGTVTILCIDLGTDMVPAISLAYEAAESDIMKRQPRNSQTDKLVNERLISMAYGQIGMIQALGGFFTYFVILAENGFLPSRLLGIRLDWDDRTMNDLEDSYGQEWTYEQRKVVEFTCHTAFFASIVVVQWADLIICKTRRNSVFQQGMKNKILIFGLLEETALAAFLSYCPGMGVALRMYPLKVTWWFCAFPYSLLIFIYDEVRKLILRRYPGEWTAAPLD

SEQ ID NO: 159 - protein, 1008 aa, Artificial Sequence
  Synthetic polypeptide
MGRGAGREYSPAATTAENGGGKKKQKEKELDELKKEVAMDDHKLSLDELGRKYQVDLSKGLTNQRAQDVLARDGPNALTPPPTTPEWVKFCRQLFGGFSILLWIGAILCFLAYGIQAAMEDEPSNDNLYLGVVLAAVVIVTGCFSYYQEAKSSKIMDSFKNMVPQQALVIREGEKMQINAEEVVVGDLVEVKGGDRVPADLRIISSHGCKVDNSSLTGESEPQTRSPEFTHENPLETRNICFFSTNCVEGTARGIVIATGDRTVMGRIATLASGLEVGRTPIAMEIEHFIQLITGVAVFLGVSFFVLSLILGYSWLEAVIFLIGIIVANVPEGLLATVTVCLTLTAKRMARKNCLVKNLEAVETLGSTSTICSDKTGTLTQNRMTVAHMWFDNQIHEADTTEDQSGATFDKRSPTWTALSRIAGLCNRAVFKAGQENISVSKRDTAGDASESALLKCIELSCGSVRKMRDRNPKVAEIPFNSTNKYQLSIHEREDSPQSHVLVMKGAPERILDRCSTILVQGKEIPLDKEMQDAFQNAYMELGGLGERVLGFCQLNLPSGKFPRGFKFDTDELNFPTEKLCFVGLMSMIDPPRAAVPDAVGKCRSAGIKVIMVTGDHPITAKAIAKGVGIISEGNETVEDIAARLNIPMSQVNPREAKACVVHGSDLKDMTSEQLDEILKNHTEIVFARTSPQQKLIIVEGCQRQGAIVAVTGDGVNDSPALKKADIGIAMGISGSDVSKQAADMILLDDNFASIVTGVEEGRLIFDNLKKSIAYTLTSNIPEITPFLLFIIANIPLPLGTVTILCIDLGTDMVPAISLAYEAAESDIMKRQPRNSQTDKLVNERLISMAYGQIGMIQALGGFFTYFVILAENGFLPSRLLGIRLDWDDRTMNDLEDSYGQEWTYEQRKVVEFTCHTAFFASIVVVQWADLIICKTRRNSVFQQGMKNKILIFGLLEETALAAFLSYCPGMGVALRMYPLNLLIFIYDEVRKLILRRYPGEWTAAPLD

SEQ ID NO: 160 - protein, 2 aa, Artificial Sequence
  Synthetic polypeptide
SS

SEQ ID NO: 161 - protein, 916 aa, Artificial Sequence
  Synthetic polypeptide
MLTKFETKSARVKGLSFHPKRPWILTSLHNGVIQLWDYRMCTLIDKFDEHDGPVRGIDFHKQQPLFVSGGDDYKIKVWNYKLRRCLFTLLGHLDYIRTTFFHHEYPWILSASDDQTIRVWNWQSRTCVCVLTGHNHYVMCAQFHPTEDLVVSASLDQTVRVWDISGLRKKNLSPGAVESDVRGITGVDLFGTTDAVVKHVLEGHDRGVNWAAFHPTMPLIVSGADDRQVKIWRMNESKAWEVDTCRGHYNNVSCAVFHPRQELILSNSEDKSIRVWDMSKRTGVQTFRRDHDRFWVLAAHPNLNLFAAGHDGGMIVFKLERERPAYAVHGNMLHYVKDRFLRQLDFNSSKDVAVMQLRSGSKFPVFNMSYNPAENAVLLCTRASNLENSTYDLYTIPKDADSQNPDAPEGKRSSGLTAVWVARNRFAVLDRMHSLLIKNLKNEITKKVQVPNCDEIFYAGTGNLLLRDADSITLFDVQQKRTLASVKISKVKYVIWSADMSHVALLAKHEHSCPLPLTAIVICNRKLDALCNIHENIRVKSGAWDESGVFIYTTSNHIKYAVTTGDHGIIRTLDLPIYVTRVKGNNVYCLDRECRPRVLTIDPTEFKFKLALINRKYDEVLHMVRNAKLVGQSIIAYLQKKGYPEVALHFVKDEKTRFSLALECGNIEIALEAAKALDDKNCWEKLGEVALLQGNHQIVEMCYQRTKNFDKLSFLYLITGNLEKLRKMMKIAEIRKDMSGHYQNALYLGDVSERVRILKNCGQKSLAYLTAATHGLDEEAESLKETFDPEKETIPDIDPNAKLLQPPAPIMPLDTNWPLLTVSKGFFEGTIASKGKGGALAADIDIDTVGTEGWGEDAELQLDEDGFVEATEGLGDDALGKGQEEGGGGCIQLRSYHFIPAWVTEQDSVSKKKKRK

SEQ ID NO: 162 - protein, 907 aa, Artificial Sequence
  Synthetic polypeptide
MLTKFETKSARVKGLSFHPKRPWILTSLHNGVIQLWDYRMCTLIDKFDEHDGPVRGIDFHKQQPLFVSGGDDYKIKVWNYKLRRCLFTLLGHLDYIRTTFFHHEYPWILSASDDQTIRVWNWQSRTCVCVLTGHNHYVMCAQFHPTEDLVVSASLDQTVRVWDISGLRKKNLSPGAVESDVRGITGVDLFGTTDAVVKHVLEGHDRGVNWAAFHPTMPLIVSGADDRQVKIWRMNESKAWEVDTCRGHYNNVSCAVFHPRQELILSNSEDKSIRVWDMSKRTGVQTFRRDHDRFWVLAAHPNLNLFAAGHDGGMIVFKLERERPAYAVHGNMLHYVKDRFLRQLDFNSSKDVAVMQLRSGSKFPVFNMSYNPAENAVLLCTRASNLENSTYDLYTIPKDADSQNPDAPEGKRSSGLTAVWVARNRFAVLDRMHSLLIKNLKNEITKKVQVPNCDEIFYAGTGNLLLRDADSITLFDVQQKRTLASVKISKVKYVIWSADMSHVALLAKHAIVICNRKLDALCNIHENIRVKSGAWDESGVFIYTTSNHIKYAVTTGDHGIIRTLDLPIYVTRVKGNNVYCLDRECRPRVLTIDPTEFKFKLALINRKYDEVLHMVRNAKLVGQSIIAYLQKKGYPEVALHFVKDEKTRFSLALECGNIEIALEAAKALDDKNCWEKLGEVALLQGNHQIVEMCYQRTKNFDKLSFLYLITGNLEKLRKMMKIAEIRKDMSGHYQNALYLGDVSERVRILKNCGQKSLAYLTAATHGLDEEAESLKETFDPEKETIPDIDPNAKLLQPPAPIMPLDTNWPLLTVSKGFFEGTIASKGKGGALAADIDIDTVGTEGWGEDAELQLDEDGFVEATEGLGDDALGKGQEEGGGGCIQLRSYHFIPAWVTEQDSVSKKKKRK

SEQ ID NO: 163 - protein, 34 aa, Artificial Sequence
  Synthetic polypeptide
MNQLSFLLFLIATTRGWSTGLWICCFPCLGLASY

SEQ ID NO: 164 - protein, 22 aa, Artificial Sequence
  Synthetic polypeptide
MLPKRSRPSTVAHTSNPSTLEG

SEQ ID NO: 165 - protein, 22 aa, Artificial Sequence
  Synthetic polypeptide
MLPKRSRPSTVAHTSNPSTLEG

SEQ ID NO: 166 - protein, 22 aa, Artificial Sequence
  Synthetic polypeptide
MLPKRSRPSTVAHTSNPSTLEG

SEQ ID NO: 167 - protein, 22 aa, Artificial Sequence
  Synthetic polypeptide
MLPKRSRPSTVAHTSNPSTLEG

SEQ ID NO: 168 - protein, 22 aa, Artificial Sequence
  Synthetic polypeptide
MLPKRSRPSTVAHTSNPSTLEG

SEQ ID NO: 169 - protein, 22 aa, Artificial Sequence
  Synthetic polypeptide
MLPKRSRPSTVAHTSNPSTLEG

SEQ ID NO: 170 - protein, 22 aa, Artificial Sequence
  Synthetic polypeptide
MLPKRSRPSTVAHTSNPSTLEG

SEQ ID NO: 171 - protein, 22 aa, Artificial Sequence
  Synthetic polypeptide
MLPKRSRPSTVAHTSNPSTLEG

SEQ ID NO: 172 - protein, 22 aa, Artificial Sequence
  Synthetic polypeptide
MLPKRSRPSTVAHTSNPSTLEG

SEQ ID NO: 173 - protein, 22 aa, Artificial Sequence
  Synthetic polypeptide
MLPKRSRPSTVAHTSNPSTLEG

SEQ ID NO: 174 - protein, 22 aa, Artificial Sequence
  Synthetic polypeptide
MLPKRSRPSTVAHTSNPSTLEG

SEQ ID NO: 175 - protein, 22 aa, Artificial Sequence
  Synthetic polypeptide
MLPKRSRPSTVAHTSNPSTLEG

SEQ ID NO: 176 - protein, 22 aa, Artificial Sequence
  Synthetic polypeptide
MLPKRSRPSTVAHTSNPSTLEG

SEQ ID NO: 177 - protein, 22 aa, Artificial Sequence
  Synthetic polypeptide
MLPKRSRPSTVAHTSNPSTLEG

SEQ ID NO: 178 - protein, 500 aa, Artificial Sequence
  Synthetic polypeptide
MAKPRLLVLYFALIVVPAWVSSIVLTGTSEPPDAQTVAPAEDETLQNEADNQENVLSQLLGDYDKVKAMSEGSDCQCKCVVRPLGRDACQRINAGASRKEDFYTVETITSGSSCKCACVAPPSALNPCEGDFRLQKLREADSQDLKLSTIIDMLEGAFYGLDLLKLHSVTTKLVGRVDKLEEEVSKNLTKENEQIKEDMEEIRTEMNKRGKENCSENILDSMPDIRSALQRDAAAAYAHPEYEERFLQEETVSQQINSIELLQTRPLALPEVVKSQRPLQRQVHLRGRPASQPTVIRGITYYKAKVSEEENDIEEQQDEFFSGDNGVDLLIEDQLLRHNGLMTSVTRRPAATRQGHSTAVTSDLNARTAPWSSALPQPSTSDPSIANHASVGPTLQTTSVSPDPTRESVLQPSPQVPATTVAHTATQQPAAPAPPAVSPREALMEAMHTVPVPPTTVRTDSLGKDAPAGWGTTPASPTLSPEEEDDIRNVIEVKKLQKKV

SEQ ID NO: 179 - protein, 501 aa, Artificial Sequence
  Synthetic polypeptide
MAKPRLLVLYFALIVVPAWVSSIVLTGTSEPPDAQTVAPAEDETLQNEADNQENVLSQLLGDYDKVKAMSEGSDCQCKCVVRPLGRDACQRINAGASRKEDFYTVETITSGSSCKCACVAPPSALNPCEGDFRLQKLREADSQDLKLSTIIDMLEGAFYGLDLLKLHSVTTKLVGRVDKLEEEVSKNLTKENEQIKEDMEEIRTEMNKRGKENCSENILDSMPDIRSALQRDAAAAYAHPEQYEERFLQEETVSQQINSIELLQTRPLALPEVVKSQRPLQRQVHLRGRPASQPTVIRGITYYKAKVSEEENDIEEQQDEFFSGDNGVDLLIEDQLLRHNGLMTSVTRRPAATRQGHSTAVTSDLNARTAPWSSALPQPSTSDPSIANHASVGPTLQTTSVSPDPTRESVLQPSPQVPATTVAHTATQQPAAPAPPAVSPREALMEAMHTVPVPPTTVRTDSLGKDAPAGWGTTPASPTLSPEEEDDIRNVIEVKKLQKKV

SEQ ID NO: 180 - protein, 129 aa, Artificial Sequence
  Synthetic polypeptide
MCKGLAALPHSCLERAKEIKIKLGILLQKPDSVGDLVIPYNEKPEKPAKTQKTSLDEALQWRDSLDKLLQNNYGLASFKSFLKSEFSEENLEFWIACEDYKKIKSPAKMAEKAKQIYEEFIQTEAPKEE

SEQ ID NO: 181 - protein, 129 aa, Artificial Sequence; identical to SEQ ID NO: 180
  Synthetic polypeptide

SEQ ID NO: 182 - protein, 149 aa, Artificial Sequence
  Synthetic polypeptide
MCARNISQDILILQMHSAHWHINGKYEEKSNLMFWAKEIKIKLGILLQKPDSVGDLVIPYNEKPEKPAKTQKTSLDEALQWRDSLDKLLQNNYGLASFKSFLKSEFSEENLEFWIACEDYKKIKSPAKMAEKAKQIYEEFIQTEAPKEE

SEQ ID NO: 183 - protein, 21 aa, Artificial Sequence
  Synthetic polypeptide
MAEKAKQIYEEFIQTEAPKEE

SEQ ID NO: 184 - protein, 66 aa, Artificial Sequence
  Synthetic polypeptide
MCKGLAALPHSCLERDLDEAGNHHSQQTIARTKNQTAHVLTHRWELNNENTWTQEEEHHTPGTVVG

SEQ ID NO: 185 - protein, 66 aa, Artificial Sequence; identical to SEQ ID NO: 184
  Synthetic polypeptide

SEQ ID NO: 186 - protein, 66 aa, Artificial Sequence; identical to SEQ ID NO: 184
  Synthetic polypeptide

SEQ ID NO: 187 - protein, 264 aa, Artificial Sequence
  Synthetic polypeptide
MTSSYGHVLERQPALGGRLDSPGNLDTLQAKKNFSVSHLLDLEEAGDMVAAQADENVGEAGRSLLESPGLTSGSDTPQQDNDQLNSEEKKKRKQRRNRTTFNSSQLQALERVFERTHYPDAFVREDLARRVNLTEARVQVWFQNRRAKFRRNERAMLANKNASLLKSYSGDVTAVEQPIVPRPAPRPTDYLSWGTASPYSAMATYSATCANNSPAQGINMANSIANLRLKAKEYSLQRNQPCFCNLPGGLDQLHYHAVPQFTHL

SEQ ID NO: 188 - protein, 418 aa, Artificial Sequence
  Synthetic polypeptide
MAKRVAIVGAGVSGLASIKCCLEEGLEPTCFERSDDLGGLWRFTEHVEEGRASLYKSVVSNSCKEMSCYSDFPFPEDYPNYVPNSQFLEYLKMYANHFDLLKHIQFKTKVCSVTKCSDSAVSGQWEVVTMHEEKQESAIFDAVMVCTGFLTNPYLPLDSFPGINAFKGQYFHSRQYKHPDIFKDKRVLVIGMGNSGTDIAVEASHLAEKVFLSTTGGGWVISRIFDSGYPWDMVFMTRFQNMLRNSLPTPIVTWLMERKINNWLNHANYGLIPEDRTQLKEFVLNDELPGRIITGKVFIRPSIKEVKENSVIFNNTSKEEPIDIIVFATGYTFAFPFLDESVVKVEDGQASLYKYIFPAHLQKPTLAIIGLIKPLGSMIPTGETQARWAVRVLKGVNKLPPPSVMIEEINARKENKPS

SEQ ID NO: 189 - protein, 418 aa, Artificial Sequence; identical to SEQ ID NO: 188
  Synthetic polypeptide

SEQ ID NO: 190 - protein, 355 aa, Artificial Sequence
  Synthetic polypeptide
MAKRVAIVGAGVSGLASIKCCLEEGLEPTCFERSDDLGGLWRFTTKVCSVTKCSDSAVSGQWEVVTMHEEKQESAIFDAVMVCTGFLTNPYLPLDSFPGINAFKGQYFHSRQYKHPDIFKDKRVLVIGMGNSGTDIAVEASHLAEKVFLSTTGGGWVISRIFDSGYPWDMVFMTRFQNMLRNSLPTPIVTWLMERKINNWLNHANYGLIPEDRTQLKEFVLNDELPGRIITGKVFIRPSIKEVKENSVIFNNTSKEEPIDIIVFATGYTFAFPFLDESVVKVEDGQASLYKYIFPAHLQKPTLAIIGLIKPLGSMIPTGETQARWAVRVLKGVNKLPPPSVMIEEINARKENKPS

SEQ ID NO: 191 - protein, 43 aa, Artificial Sequence
  Synthetic polypeptide
MVSHRYPRIQSIKVQFTGSLAKGTCLVSDETMDFDLWMNAEMS

SEQ ID NO: 192 - protein, 93 aa, Artificial Sequence
  Synthetic polypeptide
MERVQPLEENVGNAARPRFERNKLLLVASVIQGLGLLLCFTYICLHFSALQVSHRYPRIQSIKVQFTGSLAKGTCLVSDETMDFDLWMNAEMS

SEQ ID NO: 193 - protein, 237 aa, Artificial Sequence
  Synthetic polypeptide
MASSFLPAGAITGDSGGELSSGDDSGEVEFPHSPEIEETSCLAELFEKAAAHLQGLIQVASREQLLYLYARYKQVKVGNCNTPKPSFFDFEGKQKWEAWKALGDSSPSQAMQEYIAVVKKLDPGWNPQIPEKKGKEANTGFGGPVISSLYHEETIREEDKNIFDYCRENNIDHITKAIKSKNVDVNVKDEEGRALLHWACDRGHKELVTVLLQHRADINCQDNEGQTALHYAIIMKA

SEQ ID NO: 194 - protein, 235 aa, Artificial Sequence
  Synthetic polypeptide
MASSFLPAGAITGDSGGELSSGDDSGEVEFPHSPEIEETSCLAELFEKAAAHLQGLIQVASREQLLYLYARYKQVKVGNCNTPKPSFFDFEGKQKWEAWKALGDSSPSQAMQEYIAVVKKLDPGWNPQIPEKKGKEANTGFGGPVISSLYHEETIREEDKNIFDYCRENNIDHITKAIKSKNVDVNVKDEEGRALLHWACDRGHKELVTVLLQHRADINCQDNEGQTALHYATKS

SEQ ID NO: 195 - protein, 255 aa, Artificial Sequence
  Synthetic polypeptide
MASSFLPAGAITGDSGGELSSGDDSGEVEFPHSPEIEETSCLAELFEKAAAHLQGLIQVASREQLLYLYARYKQVKVGNCNTPKPSFFDFEGKQKWEAWKALGDSSPSQAMQEYIAVVKKLDPGWNPQIPEKKGKEANTGFGGPVISSLYHEETIREEDKNIFDYCRENNIDHITKAIKSKNVDVNVKDEEGRALLHWACDRGHKELVTVLLQHRADINCQVPAQPQWARTPSGLLGCLIPCLGSWTALDQTSLG

SEQ ID NO: 196 - protein, 15 aa, Artificial Sequence
  Synthetic polypeptide
MSLQSAQYLRIAGRS

SEQ ID NO: 197 - protein, 15 aa, Artificial Sequence
  Synthetic polypeptide
MSLQSAQYLRIAGRS

SEQ ID NO: 198 - protein, 15 aa, Artificial Sequence
  Synthetic polypeptide
MSLQSAQYLRIAGRS

SEQ ID NO: 199 - protein, 15 aa, Artificial Sequence
  Synthetic polypeptide
MSLQSAQYLRIAGRS

SEQ ID NO: 200 - protein, 15 aa, Artificial Sequence
  Synthetic polypeptide
MSLQSAQYLRIAGRS

SEQ ID NO: 201 - protein, 452 aa, Artificial Sequence
  Synthetic polypeptide
MRLLAKIICLMLWAICVAEDCNELPPRRNTEILTGSWSDQTYPEGTQAIYKCRPGYRSLGNVIMVCRKGEWVALNPLRKCQKRPCGHPGDTPFGTFTLTGGNVFEYGVKAVYTCNEGYQLLGEINYRECDTDGWTNDIPICEVVKCLPVTAPENGKIVSSAMEPDREYHFGQAVRFVCNSGYKIEGDEEMHCSDDGFWSKEKPKCVEISCKSPDVINGSPISQKIIYKENERFQYKCNMGYEYSERGDAVCTESGWRPLPSCEEKSCDNPYIPNGDYSPLRIKHRTGDEITYQCRNGFYPATRGNTAKCTSTGWIPAPRCTLKPCDYPDIKHGGLYHENMRRPYFPVAVGKYYSYYCDEHFETPSGSYWDHIHCTQDGWSPAVPCLRKCYFPYLENGYNQNHGRKFVQGKSIDVACHPGYALPKAQTTVTCMENGWSPTPRCIRVISPLGSA

SEQ ID NO: 202 - protein, 452 aa, Artificial Sequence; identical to SEQ ID NO: 201
  Synthetic polypeptide

SEQ ID NO: 203 - protein, 388 aa, Artificial Sequence
  Synthetic polypeptide
MRLLAKIICLMLWAICVAEDCNELPPRRNTEILTGSWSDQTYPEGTQAIYKCRPGYRSLGNVIMVCRKGEWVALNPLRKCQKRPCGHPGDTPFGTFTLTGGNVFEYGVKAVYTCNEGYQLLGEINYRECDTDGWTNDIPICEEISCKSPDVINGSPISQKIIYKENERFQYKCNMGYEYSERGDAVCTESGWRPLPSCEEKSCDNPYIPNGDYSPLRIKHRTGDEITYQCRNGFYPATRGNTAKCTSTGWIPAPRCTLKPCDYPDIKHGGLYHENMRRPYFPVAVGKYYSYYCDEHFETPSGSYWDHIHCTQDGWSPAVPCLRKCYFPYLENGYNQNHGRKFVQGKSIDVACHPGYALPKAQTTVTCMENGWSPTPRCIRVISPLGSA

SEQ ID NO: 204 - protein, 453 aa, Artificial Sequence
  Synthetic polypeptide
MRLLAKIICLMLWAICVAEDCNELPPRRNTEILTGSWSDQTYPEGTQAIYKCRPGYRSLGNVIMVCRKGEWVALNPLRKCQKRPCGHPGDTPFGTFTLTGGNVFEYGVKAVYTCNEGYQLLGEINYRECDTDGWTNDIPICEVVKCLPVTAPENGKIVSSAMEPDREYHFGQAVRFVCNSGYKIEGDEEMHCSDDGFWSKEKPKCVEISCKSPDVINGSPISQKIIYKENERFQYKCNMGYEYSERGDAVCTESGWRPLPSCEEKSCDNPYIPNGDYSPLRIKHRTGDEITYQCRNGFYPATRGNTAKCTSTGWIPAPRCTLKPCDYPDIKHGGLYHENMRRPYFPVAVGKYYSYYCDEHFETPSGSYWDHIHCTQDGWSPAVPCLRKCYFPYLENGYNQNHGRKFVQGKSIDVACHPGYALPKAQTTVTCMENGWSPTPRCIRVISPLGSAY

SEQ ID NO: 205 - protein, 453 aa, Artificial Sequence; identical to SEQ ID NO: 204
  Synthetic polypeptide

SEQ ID NO: 206 - protein, 389 aa, Artificial Sequence
  Synthetic polypeptide
MRLLAKIICLMLWAICVAEDCNELPPRRNTEILTGSWSDQTYPEGTQAIYKCRPGYRSLGNVIMVCRKGEWVALNPLRKCQKRPCGHPGDTPFGTFTLTGGNVFEYGVKAVYTCNEGYQLLGEINYRECDTDGWTNDIPICEEISCKSPDVINGSPISQKIIYKENERFQYKCNMGYEYSERGDAVCTESGWRPLPSCEEKSCDNPYIPNGDYSPLRIKHRTGDEITYQCRNGFYPATRGNTAKCTSTGWIPAPRCTLKPCDYPDIKHGGLYHENMRRPYFPVAVGKYYSYYCDEHFETPSGSYWDHIHCTQDGWSPAVPCLRKCYFPYLENGYNQNHGRKFVQGKSIDVACHPGYALPKAQTTVTCMENGWSPTPRCIRVISPLGSAY

SEQ ID NO: 207 - protein, 151 aa, Artificial Sequence
  Synthetic polypeptide
MLLLINVILTLWVSCANGQVKPCDFPDIKHGGLFHENMRRPYFPVAVGKYYSYYCDEHFETPSGSYWDYIHCTQNGWSPAVPCLRKCYFPYLENGYNQNYGRKFVQGNSTEVACHPGYGLPKAQTTVTCTEKGWSPTPRCIRVISPLGSAY

SEQ ID NO: 208 - protein, 151 aa, Artificial Sequence; identical to SEQ ID NO: 207
  Synthetic polypeptide

SEQ ID NO: 209 - protein, 151 aa, Artificial Sequence; identical to SEQ ID NO: 207
  Synthetic polypeptide

SEQ ID NO: 210 - protein, 151 aa, Artificial Sequence; identical to SEQ ID NO: 207
  Synthetic polypeptide

SEQ ID NO: 211 - protein, 10 aa, Artificial Sequence
  Synthetic polypeptide
MISITEWQNA

SEQ ID NO: 212 - protein, 164 aa, Artificial Sequence
  Synthetic polypeptide
MKTLLLLLLVLLELGEAQGSLHRVPLRRHPSLKKKLRARSQLSEFWKSHNLDMIQFTESCSMDQSAKEPLINYLDMEYFGTISIGSPPQNFTVIFDTGSSNLWVPSVYCTSPACKTHSRFQPSQSSTYSQPGQSFSIQYGTGSLSGIIGADQVSVPDRNVKSKQ

SEQ ID NO: 213 - protein, 164 aa, Artificial Sequence; identical to SEQ ID NO: 212
  Synthetic polypeptide

SEQ ID NO: 214 - protein, 164 aa, Artificial Sequence; identical to SEQ ID NO: 212
  Synthetic polypeptide

SEQ ID NO: 215 - protein, 89 aa, Artificial Sequence
  Synthetic polypeptide
MEYFGTISIGSPPQNFTVIFDTGSSNLWVPSVYCTSPACKTHSRFQPSQSSTYSQPGQSFSIQYGTGSLSGIIGADQVSVPDRNVKSKQ

SEQ ID NO: 216 - protein, 160 aa, Artificial Sequence
  Synthetic polypeptide
MAPPVRLERPFPSRRFPGLLLAALVLLLSSFSDQCNVPEWLPFARPTNLTDDFEFPIGTYLNYECRPGYSGRPFSIICLKNSVWTSAKDKCKRKSCRNPPDPVNGMAHVIKDIQFRSQIKYSCPKGYRLIGSSSATCIISGNTVIWDNKTPVCDSDDIRE

SEQ ID NO: 217 - protein, 104 aa, Artificial Sequence
  Synthetic polypeptide
IGTYLNYECRPGYSGRPFSIICLKNSVWTSAKDKCKRKSCRNPPDPVNGMAHVIKDIQFRSQIKYSCPKGYRLIGSSSATCIISGNTVIWDNKTPVCDSDDIRE

SEQ ID NO: 218 - protein, 427 aa, Artificial Sequence
  Synthetic polypeptide
MEPSTAARAWALFWLLLPLLGAVCASGPRTLVLLDNLNVRETHSLFFRSLKDRGFELTFKTADDPSLSLIKYGEFLYDNLIIFSPSVEDFGGNINVETISAFIDGGGSVLVAASSDIGDPLRELGSECGIEFDEEKTAVIDHHNYDISDLGQHTLIVADTENLLKAPTIVGKSSLNPILFRGVGMVADPDNPLVLDILTGSSTSYSFFPDKPITQYPHAVGKNTLLIAGLQARNNARVIFSGSLDFFSDSFFNSAVQKAAPGSQRYSQTGNYELAVALSRWVFKEEGVLRVGPVSHHRVGETAPPNAYTVTDLVEYSIVIQQLSNGKWVPFDGDDIQLEFVRIDPFVRTFLKKKGGKYSVQFKLPDVYGVFQFKVDYNRLGYTHLYSSTQARWLMPVIPALWEAEAGGSRGQEIETILANTVKPCLY

SEQ ID NO: 219 - protein, 444 aa, Artificial Sequence
  Synthetic polypeptide
MGYFRCARAGSFGRRRKMEPSTAARAWALFWLLLPLLGAVCASGPRTLVLLDNLNVRETHSLFFRSLKDRGFELTFKTADDPSLSLIKYGEFLYDNLIIFSPSVEDFGGNINVETISAFIDGGGSVLVAASSDIGDPLRELGSECGIEFDEEKTAVIDHHNYDISDLGQHTLIVADTENLLKAPTIVGKSSLNPILFRGVGMVADPDNPLVLDILTGSSTSYSFFPDKPITQYPHAVGKNTLLIAGLQARNNARVIFSGSLDFFSDSFFNSAVQKAAPGSQRYSQTGNYELAVALSRWVFKEEGVLRVGPVSHHRVGETAPPNAYTVTDLVEYSIVIQQLSNGKWVPFDGDDIQLEFVRIDPFVRTFLKKKGGKYSVQFKLPDVYGVFQFKVDYNRLGYTHLYSSTQARWLMPVIPALWEAEAGGSRGQEIETILANTVKPCLY

SEQ ID NO: 220 - protein, 407 aa, Artificial Sequence
  Synthetic polypeptide
MGYFRCARAGSFGRRRKMEPSTAARAWALFWLLLPLLGAVCASGPRTLVLLDNLNVRETHSLFFRSLKDFGGNINVETISAFIDGGGSVLVAASSDIGDPLRELGSECGIEFDEEKTAVIDHHNYDISDLGQHTLIVADTENLLKAPTIVGKSSLNPILFRGVGMVADPDNPLVLDILTGSSTSYSFFPDKPITQYPHAVGKNTLLIAGLQARNNARVIFSGSLDFFSDSFFNSAVQKAAPGSQRYSQTGNYELAVALSRWVFKEEGVLRVGPVSHHRVGETAPPNAYTVTDLVEYSIVIQQLSNGKWVPFDGDDIQLEFVRIDPFVRTFLKKKGGKYSVQFKLPDVYGVFQFKVDYNRLGYTHLYSSTQARWLMPVIPALWEAEAGGSRGQEIETILANTVKPCLY

SEQ ID NO: 221 - protein, 375 aa, Artificial Sequence
  Synthetic polypeptide
MEPSTAARAWALFWLLLPLLGAVCASGPRTLVLLDNLNVRETHSLFFRSLKDRGFELTFKTADDPSLSLIKYGEFLYDNLIIFSPSVEDFGGNINVETISAFIDGGGSVLVAASSDIGDPLRELGSECGIEFDEEKTAVIDHHNYDISDLGQHTLIVADTENLLKAPTIVGKSSLNPILFRGVGMVADPDNPLVLDILTGSSTSYSFFPDKPITQYPHAVGKNTLLIAGLQARNNARVIFSGSLDFFSDSFFNSAVQKAAPGSQRYSQTGNYELAVALSRWVFKEEGVLRVGPVSHHRVGETAPPNAYTVTDLVEYSIVIQQLSNGKWVPFDGDDIQLEFVRIDPFVRTFLKKKGGSRGQEIETILANTVKPCLY

SEQ ID NO: 222 - protein, 392 aa, Artificial Sequence
  Synthetic polypeptide
MGYFRCARAGSFGRRRKMEPSTAARAWALFWLLLPLLGAVCASGPRTLVLLDNLNVRETHSLFFRSLKDRGFELTFKTADDPSLSLIKYGEFLYDNLIIFSPSVEDFGGNINVETISAFIDGGGSVLVAASSDIGDPLRELGSECGIEFDEEKTAVIDHHNYDISDLGQHTLIVADTENLLKAPTIVGKSSLNPILFRGVGMVADPDNPLVLDILTGSSTSYSFFPDKPITQYPHAVGKNTLLIAGLQARNNARVIFSGSLDFFSDSFFNSAVQKAAPGSQRYSQTGNYELAVALSRWVFKEEGVLRVGPVSHHRVGETAPPNAYTVTDLVEYSIVIQQLSNGKWVPFDGDDIQLEFVRIDPFVRTFLKKKGGSRGQEIETILANTVKPCLY

SEQ ID NO: 223 - protein, 355 aa, Artificial Sequence
  Synthetic polypeptide
MGYFRCARAGSFGRRRKMEPSTAARAWALFWLLLPLLGAVCASGPRTLVLLDNLNVRETHSLFFRSLKDFGGNINVETISAFIDGGGSVLVAASSDIGDPLRELGSECGIEFDEEKTAVIDHHNYDISDLGQHTLIVADTENLLKAPTIVGKSSLNPILFRGVGMVADPDNPLVLDILTGSSTSYSFFPDKPITQYPHAVGKNTLLIAGLQARNNARVIFSGSLDFFSDSFFNSAVQKAAPGSQRYSQTGNYELAVALSRWVFKEEGVLRVGPVSHHRVGETAPPNAYTVTDLVEYSIVIQQLSNGKWVPFDGDDIQLEFVRIDPFVRTFLKKKGGSRGQEIETILANTVKPCLY

SEQ ID NO: 224 - protein, 252 aa, Artificial Sequence
  Synthetic polypeptide
MISPDPRPSPGLARWAESYEAKCERRQEIRESRRCRPNVTTCRQVGKTLRIQQREQLQRARLQQFFRRRNLELEEKGKAQHPQAREQGPSRRPGQVTGTSSEVFPAQHPPPSGICRDLSDHLSSQAGGLPPQDTPIKKPPKHHRGTQTKAEGPTIKNDASQQTNYGVAVLDKEIIQLSDYLKEALQRELVLKQKMVILQDLLSTLIQASDSSWKGQLNEDKLKGKLRSLENQLYTCTQLRIWHTEAQCVFVE

SEQ ID NO: 225 - protein, 252 aa, Artificial Sequence; identical to SEQ ID NO: 224
  Synthetic polypeptide

SEQ ID NO: 226 - protein, 252 aa, Artificial Sequence; identical to SEQ ID NO: 224
  Synthetic polypeptide

SEQ ID NO: 227 - protein, 272 aa, Artificial Sequence
  Synthetic polypeptide
MISPDPRPSPGLARWAESYEAKCERRQEIRESRRCRPNVTTCRQVGKTLRIQQREQLQRARLQQFFRRRNLELEEKGKAQHPQAREQGPSRRPGQVTVLKEPLSCARRISSPREQVTGTSSEVFPAQHPPPSGICRDLSDHLSSQAGGLPPQDTPIKKPPKHHRGTQTKAEGPTIKNDASQQTNYGVAVLDKEIIQLSDYLKEALQRELVLKQKMVILQDLLSTLIQASDSSWKGQLNEDKLKGKLRSLENQLYTCTQLRIWHTEAQCVFVE

SEQ ID NO: 228 - protein, 272 aa, Artificial Sequence; identical to SEQ ID NO: 227
  Synthetic polypeptide

SEQ ID NO: 229 - protein, 272 aa, Artificial Sequence; identical to SEQ ID NO: 227
  Synthetic polypeptide

SEQ ID NO: 230 - protein, 49 aa, Artificial Sequence
  Synthetic polypeptide
MLFNSVLRQPQLGVLRNGWALMPSCLDCKKSPRWPPSLSVFGLFSTLLL

SEQ ID NO: 231 - protein, 49 aa, Artificial Sequence; identical to SEQ ID NO: 230
  Synthetic polypeptide

SEQ ID NO: 232 - protein, 63 aa, Artificial Sequence
  Synthetic polypeptide
MVGPAPRRRLRPLAALALVLALAPGLPTARAGQTPRPAERGPPVRLFTEEELARYGGEEGLSN

SEQ ID NO: 233 - protein, 639 aa, Artificial Sequence
  Synthetic polypeptide
MAQLRPAVPPGRPRRGSLPAGASWQNTDLFEMIEKMQGSRMDEQRCSFPPPLKTEEDYIPYPSVHEVLGREGPFPLILLPQFGGYWIEGTNHEITSIPETEPLQSPTTKVKLECNPTARIYRKHFLGKEHFNYYSLDAALGHLVFSLKYDVIGDQEHLRLLLRTKCRTYHDVIPISCLTEFPNVVQMAKLVCEDVNVDRFYPVLYPKASRLIVTFDEHVISNNFKFGVIYQKLGQTSEEELFSTNEESPAFVEFLEFLGQKVKLQDFKGFRGGLDVTHGQTGTESVYCNFRNKEIMFHVSTKLPYTEGDAQQLQRKRHIGNDIVAVVFQDENTPFVPDMIASNFLHAYVVVQAEGGGPDGPLYKVSVTARDDVPFFGPPLPDPAVFRKGPEFQEFLLTKLINAEYACYKAEKFAKLEERTRAALLETLYEELHIHSQSMMGLGGDEDKMENGSGGGGFFESFKRVIRSRSQSMDAMGLSNKKPNTVSTSHSGSFAPNNPDLAKAAGISLIVPGKSPTRKKSGPFGSRRSSAIGIENIQEVQEKRESPPAGQKTPDSGHVSQEPKSENSSTQSSPEMPTTKNRAETAAQRAEALKDFSRSSSSASSFASVVEETEGVDGEDTGLPALPPRYQAPEGRAHA

SEQ ID NO: 234 - protein, 672 aa, Artificial Sequence
  Synthetic polypeptide
MSGRKRSFTFGAYGGVDKSFTSRRSVWRSDGQNQHFPQALDLSRVNLVPSYTPSLYPKNTDLFEMIEKMQGSRMDEQRCSFPPPLKTEEDYIPYPSVHEVLGREGPFPLILLPQFGGYWIEGTNHEITSIPETEPLQSPTTKVKLECNPTARIYRKHFLGKEHFNYYSLDAALGHLVFSLKYDVIGDQEHLRLLLRTKCRTYHDVIPISCLTEFPNVVQMAKLVCEDVNVDRFYPVLYPKASRLIVTFDEHVISNNFKFGVIYQKLGQTSEEELFSTNEESPAFVEFLEFLGQKVKLQDFKGFRGGLDVTHGQTGTESVYCNFRNKEIMFHVSTKLPYTEGDAQQLQRKRHIGNDIVAVVFQDENTPFVPDMIASNFLHAYVVVQAEGGGPDGPLYKVSVTARDDVPFFGPPLPDPAVFRKGPEFQEFLLTKLINAEYACYKAEKFAKLEERTRAALLETLYEELHIHSQSMMGLGGDEDKMENGSGGGGFFESFKRVIRSRSQSMDAMGLSNKKPNTVSTSHSGSFAPNNPDLAKAAGISLIVPGKSPTRKKSGPFGSRRSSAIGIENIQEVQEKRESPPAGQKTPDSGHVSQEPKSENSSTQSSPEMPTTKNRAETAAQRAEALKDFSRSSSSASSFASVVEETEGVDGEDTGLPALPPRYQAPEGRAHA

SEQ ID NO: 235 - protein, 693 aa, Artificial Sequence
  Synthetic polypeptide
MIEKMQGSRMDEQRCSFPPPLKTEEDYIPYPSVHEVLGREGPFPLILLPQFGGYWIEGTNHEITSIPETEPLQSPTTKVKLECNPTARIYRKHFLGKEHFNYYSLDAALGHLVFSLKYDVIGDQEHLRLLLRTKCRTYHDVIPISCLTEFPNVVQMAKLVCEDVNVDRFYPVLYPKASRLIVTFDEHVISNNFKFGVIYQKLGQTSEEELFSTNEESPAFVEFLEFLGQKVKLQDFKGFRGGLDVTHGQTGTESVYCNFRNKEIMFHVSTKLPYTEGDAQQLQRKRHIGNDIVAVVFQDENTPFVPDMIASNFLHAYVVVQAEGGGPDGPLYKVSVTARDDVPFFGPPLPDPAVFRKGPEFQEFLLTKLINAEYACYKAEKFAKLEERTRAALLETLYEELHIHSQSMMGLGGDEDKMENGSGGGGFFESFKRVIRSRSQSMDAMGLSNKKPNTVSTSHSGSFAPNNPDLAKAAGISLLIPGKSASRFGRRGSAIGIGTVEEVVVRGAAGSGGCLHALFSARSQDGGHIGDVAPLPPGQAPGRAGWSGGSSDGTQHLLWGLSLIVPGKSPTRKKSGPFGSRRSSAIGIENIQEVQEKRESPPAGQKTPDSGHVSQEPKSENSSTQSSPEMPTTKNRAETAAQRAEALKDFSRSSSSASSFASVVEETEGVDGEDTGLPALPPRYQAPEGRAHA

SEQ ID NO: 236 - protein, 608 aa, Artificial Sequence
  Synthetic polypeptide
MIEKMQGSRMDEQRCSFPPPLKTEEDYIPYPSVHEVLGREGPFPLILLPQFGGYWIEGTNHEITSIPETEPLQSPTTKVKLECNPTARIYRKHFLGKEHFNYYSLDAALGHLVFSLKYDVIGDQEHLRLLLRTKCRTYHDVIPISCLTEFPNVVQMAKLVCEDVNVDRFYPVLYPKASRLIVTFDEHVISNNFKFGVIYQKLGQTSEEELFSTNEESPAFVEFLEFLGQKVKLQDFKGFRGGLDVTHGQTGTESVYCNFRNKEIMFHVSTKLPYTEGDAQQLQRKRHIGNDIVAVVFQDENTPFVPDMIASNFLHAYVVVQAEGGGPDGPLYKVSVTARDDVPFFGPPLPDPAVFRKGPEFQEFLLTKLINAEYACYKAEKFAKLEERTRAALLETLYEELHIHSQSMMGLGGDEDKMENGSGGGGFFESFKRVIRSRSQSMDAMGLSNKKPNTVSTSHSGSFAPNNPDLAKAAGISLIVPGKSPTRKKSGPFGSRRSSAIGIENIQEVQEKRESPPAGQKTPDSGHVSQEPKSENSSTQSSPEMPTTKNRAETAAQRAEALKDFSRSSSSASSFASVVEETEGVDGEDTGLPALPPRYQAPEGRAHA

SEQ ID NO: 237 - protein, 608 aa, Artificial Sequence; identical to SEQ ID NO: 236
  Synthetic polypeptide

SEQ ID NO: 238 - protein, 634 aa, Artificial Sequence
  Synthetic polypeptide
MIEKMQGSRMDEQRCSFPPPLKTEEDYIPYPSVHEVLGREGPFPLILLPQFGGYWIEGTNHEITSIPETEPLQSPTTKVKLECNPTARIYRKHFLGKEHFNYYSLDAALGHLVFSLKYDVIGDQEHLRLLLRTKCRTYHDVIPISCLTEFPNVVQMAKLVCEDVNVDRFYPVLYPKASRLIVTFDEHVISNNFKFGVIYQKLGQTSEEELFSTNEESPAFVEFLEFLGQKVKLQDFKGFRGGLDVTHGQTGTESVYCNFRNKEIMFHVSTKLPYTEGDAQQLQRKRHIGNDIVAVVFQDENTPFVPDMIASNFLHAYVVVQAEGGGPDGPLYKVSVTARDDVPFFGPPLPDPAVFRKGPEFQEFLLTKLINAEYACYKAEKFAKLEERTRAALLETLYEELHIHSQSMMGLGGDEDKMENGSGGGGFFESFKRVIRSRSQSMDAMGLSNKKPNTVSTSHSGSFAPNNPDLAKAAGISLLIPGKSASRFGRRGSAIGIGTVEESLIVPGKSPTRKKSGPFGSRRSSAIGIENIQEVQEKRESPPAGQKTPDSGHVSQEPKSENSSTQSSPEMPTTKNRAETAAQRAEALKDFSRSSSSASSFASVVEETEGVDGEDTGLPALPPRYQAPEGRAHA

SEQ ID NO: 239 - protein, 184 aa, Artificial Sequence
  Synthetic polypeptide
MASSNTVLMRLVASAYSIAQKAGMIVRRVIAEGDLGIVEKTCATDLQTKADRLAQMSICSSLARKFPKLTIIGEEDLPSEEVDQELIEDSQWEEILKQPCPSQYSAIKEEDLVVWVDPLDGTKEYTEGLLDNVTVLIGIAYEGKAIAGVINQPYYNYEVLIPSALPNKHTTCLRVCFPGNPTCD

SEQ ID NO: 240 - protein, 184 aa, Artificial Sequence; identical to SEQ ID NO: 239
  Synthetic polypeptide

SEQ ID NO: 241 - protein, 184 aa, Artificial Sequence; identical to SEQ ID NO: 239
  Synthetic polypeptide

SEQ ID NO: 242 - protein, 129 aa, Artificial Sequence
  Synthetic polypeptide
MSICSSLARKFPKLTIIGEEDLPSEEVDQELIEDSQWEEILKQPCPSQYSAIKEEDLVVWVDPLDGTKEYTEGLLDNVTVLIGIAYEGKAIAGVINQPYYNYEVLIPSALPNKHTTCLRVCFPGNPTCD

SEQ ID NO: 243 - protein, 129 aa, Artificial Sequence; identical to SEQ ID NO: 242
  Synthetic polypeptide

SEQ ID NO: 244 - protein, 148 aa, Artificial Sequence
  Synthetic polypeptide
MASSNTVLMRLVASAYSIAQKAGMIVRRVIAEGDLGIVEKTCATDLQTKADRLAQMSICSSLARKFPKLTIIGEELVVWVDPLDGTKEYTEGLLDNVTVLIGIAYEGKAIAGVINQPYYNYEVLIPSALPNKHTTCLRVCFPGNPTCD

SEQ ID NO: 245 - protein, 148 aa, Artificial Sequence; identical to SEQ ID NO: 244
  Synthetic polypeptide

SEQ ID NO: 246 - protein, 148 aa, Artificial Sequence; identical to SEQ ID NO: 244
  Synthetic polypeptide

SEQ ID NO: 247 - protein, 910 aa, Artificial Sequence
  Synthetic polypeptide
MGWRAAGALLLALLLHGRLLAVTHGLRAYDGLSLPEDIETVTASQMRWTHSYLSDDEDMLADSISGDDLGSGDLGSGDFQMVYFRALVNFTRSIEYSPQLEDAGSREFREVSEAVVDTLESEYLKIPGDQVVSVVFIKELDGWVFVELDVGSEGNADGAQIQEMLLRVISSGSVASYVTSPQGFQFRRLGTVPQFPRACTEAEFACHSYNECVALEYRCDRRPDCRDMSDELNCEEPVLGISPTFSLLVETTSLPPRPETTIMRQPPVTHAPQPLLPGSVRPLPCGPQEAACRNGHCIPRDYLCDGQEDCEDGSDELDCGPPPPCEPNEFPCGNGHCALKLWRCDGDFDCEDRTDEANCPTKRPEEVCGPTQFRCVSTNMCIPASFHCDEESDCPDRSDEFGCMPPQVVTPPRESIQASRGQTVTFTCVAIGVPTPIINWRLNWGHIPSHPRVTVTSEGGRGTLIIRDVKESDQGAYTCEAMNARGMVFGIPDGVLELVPQRGPCPDGHFYLEHSAACLPCFCFGITSVCQSTRRFRDQIRLRFDQPDDFKGVNVTMPAQPGTPPLSSTQLQIDPSLHEFQLVDLSRRFLVHDSFWALPEQFLGNKVDSYGGSLRYNVRYELARGMLEPVQRPDVVLMGAGYRLLSRGHTPTQPGALNQRQVQFSEEHWVHESGRPVQRAELLQVLQSLEAVLIQTVYNTKMASVGLSDIAMDTTVTHATSHGRAHSVEECRCPIGYSGLSCESCDAHFTRVPGGPYLGTCSGCNCNGHASSCDPVYGHCLNCQHNTEGPQCNKCKAGFFGDAMKATATSCRPCPCPYIDASRRFSDTCFLDTDGQATCDACAPGYTGRRCESCAPGYEGNPIQPGGKCRPVNQEIVRCDERGSMGTSGEACRCKATRLKLRLKKKKKKR

SEQ ID NO: 248 - protein, 289 aa, Artificial Sequence
  Synthetic polypeptide
MMLRLLSSLLLVAVASGYGPPSSRPSSRVVNGEDAVPYSWPWQVSLQYEKSGSFYHTCGGSLIAPDWVVTAGHCISSSRTYQVVLGEYDRAVKEGPEQVIPINSGDLFVHPLWNRSCVACGNDIALIKLSRSAQLGDAVQLASLPPAGDILPNETPCYITGWGRLYTNGPLPDKLQEALLPVVDYEHCSRWNWWGSSVKKTMVCAGGDIRSGCNGDSGGPLNCPTEDGGWQVHGVTSFVSAFGCNTRRKPTVFTRVSAFIDWIEEGLCRMETTLACLPGSQVRLCADFW

SEQ ID NO: 249 - protein, 192 aa, Artificial Sequence
  Synthetic polypeptide
QVIPINSGDLFVHPLWNRSCVACGNDIALIKLSRSAQLGDAVQLASLPPAGDILPNETPCYITGWGRLYTNGPLPDKLQEALLPVVDYEHCSRWNWWGSSVKKTMVCAGGDIRSGCNGDSGGPLNCPTEDGGWQVHGVTSFVSAFGCNTRRKPTVFTRVSAFIDWIEEGLCRMETTLACLPGSQVRLCADFW

SEQ ID NO: 250 - protein, 28 aa, Artificial Sequence
  Synthetic polypeptide
MEAVVFVFSLLDCCALIFLSVYFASCSG

SEQ ID NO: 251 - protein, 28 aa, Artificial Sequence
  Synthetic polypeptide
MEAVVFVFSLLDCCALIFLSVYFASCSG

SEQ ID NO: 252 - protein, 28 aa, Artificial Sequence
  Synthetic polypeptide
MEAVVFVFSLLDCCALIFLSVYFASCSG

SEQ ID NO: 253 - protein, 28 aa, Artificial Sequence
  Synthetic polypeptide
MEAVVFVFSLLDCCALIFLSVYFASCSG

SEQ ID NO: 254 - protein, 279 aa, Artificial Sequence
  Synthetic polypeptide
METFIPIDLTTENQEMDKEETKTKPRLLRYEEKKYEDVKPLETQPAEIAEKETLEYKTVRTFSESLKSEKTEDYLRESIIQQHMVSPEPASLKEKGKSRRKKDQTHACPNVRKARPVSYDRTEPKDDDVIRNIIRLREKLGWQTILPQHSLKYGSSKIAIQKITLKKPLEDDGEFVYCLPRKSPKSLYNPYDLQVVSAHTAKHCKEFWVITASFISKVINIVGSVKEVELIPTLEWLSERRHYYLLRQFKIFSDFRKSGTPNGGTGRSHGRRTWIVKIS

SEQ ID NO: 255 - protein, 279 aa, Artificial Sequence; identical to SEQ ID NO: 254
  Synthetic polypeptide

SEQ ID NO: 256 - protein, 279 aa, Artificial Sequence; identical to SEQ ID NO: 254
  Synthetic polypeptide

SEQ ID NO: 257 - protein, 256 aa, Artificial Sequence
  Synthetic polypeptide
METFIPIDLTTENQEMDKEETKTKPRLLRYEEKKYEDVKPLETQPAEIAEKETLEYKTVRTFSESLKSEKTEDYLRESIIQQHMVSPEPASLKEKGKSRRKKDQTHACPNVRKARPVSYDRTEPKDDDVIRNIIRLREKLGWQTILPQHSLKYGSSKIAIQKITLKKPLEDDGEFVYCLPRKSPKSLYNPYDLQVINIVGSVKEVELIPTLEWLSERRHYYLLRQFKIFSDFRKSGTPNGGTGRSHGRRTWIVKIS

SEQ ID NO: 258 - protein, 67 aa, Artificial Sequence
  Synthetic polypeptide
MWLEILLTSVLGFAIYWFISRDKEETLPLEDGWWGPGTRSAAREDDSIRPFKVETSDEEIHKKFADS

SEQ ID NO: 259 - protein, 67 aa, Artificial Sequence; identical to SEQ ID NO: 258
  Synthetic polypeptide

SEQ ID NO: 260 - protein, 67 aa, Artificial Sequence; identical to SEQ ID NO: 258
  Synthetic polypeptide

SEQ ID NO: 261 - protein, 67 aa, Artificial Sequence; identical to SEQ ID NO: 258
  Synthetic polypeptide

SEQ ID NO: 262 - protein, 879 aa, Artificial Sequence
  Synthetic polypeptide
MAVYCYALNSLVIMNSANEMKSGGGPGPSGSETPPPPRRAVLSPGSVFSPGRGASFLFPPAESLSPEEPRSPGGWRSGRRRLNSSSGSGSGSSGSSVSSPSWAGRLRGDRQQVVAAGTLSPPGPEEAKRKLRILQRELQNVQVNQKVGMFEAHIQAQSSAIQAPRSPRLGRARSPSPCPFRSSSQPPGRVLVQGARSEERRTKSWGEQCPETSGTDSGRKGGPSLCSSQVKKGMPPLPGRAAPTGSEAQGPSAFVRMEKGIPASPRCGSPTAMEIDKRGSPTPGTRSCLAPSLGLFGASLTMATEVAARVTSTGPHRPQDLALTEPSGRARELEDLQPPEALVERQGQFLGSETSPAPERGGPRDGEPPGKMGKGYLPCGMPGSGEPEVGKRPEETTVSVQSAESSDSLSWSRLPRALASVGPEEARSGAPVGGGRWQLSDRVEGGSPTLGLLGGSPSAQPGTGNVEAGIPSGRMLEPLPCWDAAKDLKEPQCPPGDRVGVQPGNSRVWQGTMEKAGLAWTRGTGVQSEGTWESQRQDSDALPSPELLPQDPDKPFLRKACSPSNIPAVIITDMGTQEDGALEETQGSPRGNLPLRKLSSSSASSTGFSSSYEDSEEDISSDPERTLDPNSAFLHTLDQQKPRVSKSWRKIKNMVHWSPFVMSFKKKYPWIQLAGHAGSFKAAANGRILKKHCESEQRCLDRLMVDVLRPFVPAYHGDVVKDGERYNQMDDLLADFDSPCVMDCKMGIRTYLEEELTKARKKPSLRKDMYQKMIEVDPEAPTEEEKAQRAVTKPRYMQWRETISSTATLGFRIEGIKKEDGTVNRDFKKTKTREQVTEAFREFTKGNHNILIAYRDRLKAIRTTLEVSPFFKCHEAIKL

SEQ ID NO: 263 - protein, 879 aa, Artificial Sequence; identical to SEQ ID NO: 262
  Synthetic polypeptide

SEQ ID NO: 264 - protein, 560 aa, Artificial Sequence
  Synthetic polypeptide
MPGHPESRKTRRILTMLPRLVLNSFPQVILLPNPPKVLRLQGLLAFSDVVIEFSPEEWACLDPAQRNLYRDVMFENYRNLVSLAILSYSIQDLLPEQDMKDLCQKVTLTRHRSWGLDNLHLVKDWRTVNEGKGQKEYCNRLTQCSSTKSKIFQCIECGRNFSWRSILTEHKRIHTGEKPYKCEECGKVFNRCSNLTKHKRIHTGEKPYKCDECGKVFNWWSQLTNHKKIHTGEKPYKCDECDKVFNWWSQLTSHKKIHSGEKPYPCEECGKAFTQFSNLTQHKRIHTGEKPYKCKECCKAFNKFSNLTQHKRIHTGEKPYKCEECGNVFNECSHLTRHRRIHTGEKPYKCEECGKAFTQFASLTRHKRIHTGEKPYQCEECGKTFNRCSHLSSHKRIHTGEKPYKCEECGRTFTQFSNLTQHKRIHTGEKPYKCKECGKAFNKFSSLTQHRRIHTGVKPYKCEECGKVFKQCSHLTSHKRIHTGEKPYKCKECGKAFYQSSILSKHKRIHTEEKPYKCEECGKAFNQFSSLTRHKRIHTGEKRYKCKECGKGFYQSSIHS

SEQ ID NO: 265 - protein, 505 aa, Artificial Sequence
  Synthetic polypeptide
MGTISLCIGVCAFEGANTSTSFYKLVYTAILSYSIQDLLPEQDMKDLCQKVTLTRHRSWGLDNLHLVKDWRTVNEGKGQKEYCNRLTQCSSTKSKIFQCIECGRNFSWRSILTEHKRIHTGEKPYKCEECGKVFNRCSNLTKHKRIHTGEKPYKCDECGKVFNWWSQLTNHKKIHTGEKPYKCDECDKVFNWWSQLTSHKKIHSGEKPYPCEECGKAFTQFSNLTQHKRIHTGEKPYKCKECCKAFNKFSNLTQHKRIHTGEKPYKCEECGNVFNECSHLTRHRRIHTGEKPYKCEECGKAFTQFASLTRHKRIHTGEKPYQCEECGKTFNRCSHLSSHKRIHTGEKPYKCEECGRTFTQFSNLTQHKRIHTGEKPYKCKECGKAFNKFSSLTQHRRIHTGVKPYKCEECGKVFKQCSHLTSHKRIHTGEKPYKCKECGKAFYQSSILSKHKRIHTEEKPYKCEECGKAFNQFSSLTRHKRIHTGEKRYKCKECGKGFYQSSIHS

SEQ ID NO: 266 - protein, 54 aa, Artificial Sequence
  Synthetic polypeptide
MRRRSRMLLCFAFLWVLGIAYYMYSGGGSALAGGAGGGAGRKLQTLCSVLQCWS

SEQ ID NO: 267 - protein, 477 aa, Artificial Sequence
  Synthetic polypeptide
MALRRLGAALLLLPLLAAVEETLMDSTTATAELGWMVHPPSGWEEVSGYDENMNTIRTYQVCNVFESSQNNWLRTKFIRRRGAHRIHVEMKFSVRDCSSIPSVPGSCKETFNLYYYEADFDSATKTFPNWMENPWVKVDTIAADESFSQVDLGGRVMKINTEVRSFGPVSRSGFYLAFQDYGGCMSLIAVRVFYRKCPRIIQNGAIFQETLSGAESTSLVAARGSCIANAEEVDVPIKLYCNGDGEWLVPIGRCMCKAGFEAVENGTVCRGCPSGTFKANQGDEACTHCPINSRTTSEGATNCVCRNGYYRADLDPLDMPCTTIPSAPQAVISSVNETSLMLEWTPPRDSGGREDLVYNIICKSCGSGRGACTRCGDNVQYAPRQLGLTEPRIYISDLLAHTQYTFEIQAVNGVTDQSPFSPQFASVNITTNQAAPSAVSIMHQVSRTVDSITLSWSQPDQPNGVILDYELQYYEKV

SEQ ID NO: 268 - protein, 477 aa, Artificial Sequence; identical to SEQ ID NO: 267
  Synthetic polypeptide

SEQ ID NO: 269 - protein, 477 aa, Artificial Sequence; identical to SEQ ID NO: 267
  Synthetic polypeptide

SEQ ID NO: 270 - protein, 477 aa, Artificial Sequence; identical to SEQ ID NO: 267
  Synthetic polypeptide

SEQ ID NO: 271 - protein, 471 aa, Artificial Sequence
  Synthetic polypeptide
MWVPVLALPVCTYAETLMDSTTATAELGWMVHPPSGWEEVSGYDENMNTIRTYQVCNVFESSQNNWLRTKFIRRRGAHRIHVEMKFSVRDCSSIPSVPGSCKETFNLYYYEADFDSATKTFPNWMENPWVKVDTIAADESFSQVDLGGRVMKINTEVRSFGPVSRSGFYLAFQDYGGCMSLIAVRVFYRKCPRIIQNGAIFQETLSGAESTSLVAARGSCIANAEEVDVPIKLYCNGDGEWLVPIGRCMCKAGFEAVENGTVCRGCPSGTFKANQGDEACTHCPINSRTTSEGATNCVCRNGYYRADLDPLDMPCTTIPSAPQAVISSVNETSLMLEWTPPRDSGGREDLVYNIICKSCGSGRGACTRCGDNVQYAPRQLGLTEPRIYISDLLAHTQYTFEIQAVNGVTDQSPFSPQFASVNITTNQAAPSAVSIMHQVSRTVDSITLSWSQPDQPNGVILDYELQYYEKV

SEQ ID NO: 272 - protein, 211 aa, Artificial Sequence
  Synthetic polypeptide
MAPAAASPPEVIRAAQKDEYYRGGLRSAAGGALHSLAGARKWLEWRKEVELLSDVAYFGLTTLAGYQTLGEEYVSIIQVDPSRIHVPSSLRRGVLVTLHAVLPYLLDKALLPLEQELQADPDSGRPLQGSLGPGGRGCSGARRWMRHHTATLTEQQRRALLRAVFVLRQGLACLQRLHVAWFYIHGVFYHLAKRLTGITYPLAPLPILTPS

SEQ ID NO: 273 - protein, 211 aa, Artificial Sequence; identical to SEQ ID NO: 272
  Synthetic polypeptide

SEQ ID NO: 274 - protein, 211 aa, Artificial Sequence; identical to SEQ ID NO: 272
  Synthetic polypeptide

SEQ ID NO: 275 - protein, 1275 aa, Artificial Sequence
  Synthetic polypeptide
MEWVLAEALLSQSRDPRALLGALCQGEASAERVETLRFLLQRLEDEEARGSGGAGALPEAAREVAAGYLVPLLRSLRGRPAGGPDPSLQPRHRRRVLRAAGAALRSCVRLAGRPQLAAALAEEALRDLLAGWRAPGAEAAVEVLAAVGPCLRPREDGPLLERVAGTAVALALGGGGDGDEAGPAEDAAALVAGRLLPVLVQCGGAALRAVWGGLAAPGASLGSGRVEEKLLVLSALAEKLLPEPGGDRARGAREAGPDARRCWRFWRTVQAGLGQADALTRKRARYLLQRAVEVSAELGADCTCGPQEGNGPSLFWWSERKKDELLKFWENYILIMETLEGNQIHVIKPVLPKLNNLFEYAVSEENGCWLFHPSWHMCIYKRMFESENKILSKEGVIHFLELYETKILPFSPEFSEFIIGPLMDALSESSLYSRSPGQPIGSCSPLGLKLQKFLVTYISLLPEEIKSSFLLKFIRKMTSRHWCAVPILFLSKALANVPRHKALGIDGLLALRDVIHCTMITHQILLRGAAQCYLLQTAMNLLDVEKVSLSDVSTFLMSLRQEESLGRGTSLWTELCDWLRVNESYFKPSPTCSSIGLHKTSLNAYVKSIVQEYVKSSAWETGENCFMPDWFEAKLVSLMVLLAVDVEGMKTQYSGKQRTENVLRIFLDPLLDVLMKFSTNAYMPLLKTDRCLQLLLKLLNTCRLKGSSAQDDEVSTVLQNFFMSTTESISEFILRRLTMNELNSVSDLDRCHLYLMVLTELINLHLKVGWKRGNPIWRVISLLKNASIQHLQEMDSGQEPTVGSQIQRVVSMAALAMVCEAIDQKPELQLDSLHAGPLESFLSSLQLNQTLQKPHAEEQSSYAHPLECSSVLEESSSSQGWGKIVAQYIHDQWVCLSFLLKKYHTLIPTTGSEILEPFLPAVQMPIRTLQSALEALTVLSSDQVLPVFHCLKVLVPKLLTSSESLCIESFDMAWKIISSLSNTQLIFWANLKAFVQFVFDNKVLTIAAKIKGQAYFKIKEIMYKIIEMSAIKTGVFNTLISYCCQSWIVSASNVSQGSLSSAKNYSELILEACIFGTVFRRDQRLVQDVQTFIENLGHDCAANIVMENTKREDHYVRICAVKFLCLLDGSNMSHKLFIEDLAIKLLDKDELVSKSKKRYYVNSLQHRVKNRVWQTLLVLFPRLDQNFLNGIIDRIFQAGFTNNQASIKYFIEWIIILILHKFPQFLPKFWDCFSYGEENLKTSICTFLAVLSHLDIITQNIPEKCVSARWQCVTV

SEQ ID NO: 276 - protein, 126 aa, Artificial Sequence
  Synthetic polypeptide
MYSGNRSGGHGYWDGGGAAGAEGPAPAGTLSPAPLFSPGTYERLALLLGSIGLLGVGNNLLVLVLYYKFQRLRTPTHLLLVNISLSDLLVSLFGVTFTFVSCLRNGWVWDTVGCVWDGFSGSLFAQ

SEQ ID NO: 277 - protein, 126 aa, Artificial Sequence; identical to SEQ ID NO: 276
  Synthetic polypeptide

SEQ ID NO: 278 - protein, 137 aa, Artificial Sequence
  Synthetic polypeptide
MRTLLTILTVGSLAAHAPEDPSDLLQHVKFQSSNFENILTWDSGPEGTPDTVYSIEYKTYGERDWVAKKGCQRITRKSCNLTVETGNLTELYYARVTAVSAGGRSATKMTDRFSSLQHRRRPTAFITFSKESVNQQR

SEQ ID NO: 279 - protein, 122 aa, Artificial Sequence
  Synthetic polypeptide
MGANQLVVLNVYDMYWMNEYTSSIGIGVFHSGIEVYGREFAYGGHPYPFSGIFEISPGNASELGETFKFKEAVVLGSTDFLEDDIEKIVEELGKEYKGNAYHLMHKNCNHFSSALSEMLQAL

SEQ ID NO: 280 - protein, 89 aa, Artificial Sequence
  Synthetic polypeptide
MGANQLVVLNVYDMYWMNEYTSSIGIGVFHSGIEVYGRAVVLGSTDFLEDDIEKIVEELGKEYKGNAYHLMHKNCNHFSSALSEMLQAL

SEQ ID NO: 281 - protein, 1 aa, Artificial Sequence
  Synthetic peptide
R

SEQ ID NO: 282 - protein, 1 aa, Artificial Sequence
  Synthetic peptide
R

SEQ ID NO: 283 - protein, 137 aa, Artificial Sequence
  Synthetic polypeptide
MADEKDREEIIVAEFHKKIKEAFEVFDHESNNTVDVREIGTIIRSLGCCPTEGELHDLIAEVEEEEPTGYIRFEKFLPVMTEILLERKYRPIPEDVLLRAFEVLDSAKRGFLTKDELIKYMTEEDPEFQQNSRHQPV

SEQ ID NO: 284 - protein, 137 aa, Artificial Sequence; identical to SEQ ID NO: 283
  Synthetic polypeptide

SEQ ID NO: 285 - protein, 273 aa, Artificial Sequence
  Synthetic polypeptide
MLGPGQVRLRPRVWRDKAGGRVADGASGLPPARGSWRETGTGRALGASSPPRPAQGSSSPGIQSGPSSRPGSPRGAEQAGTPRPRLSLGISQATGSAARWRTRRTGKGLGYNSDEIRPRTLLIEHLMEGGRRDHHTMTVLWGTQEIIVAEFHKKIKEAFEVFDHESNNTVDVREIGTIIRSLGCCPTEGELHDLIAEVEEEEPTGYIRFEKFLPVMTEILLERKYRPIPEDVLLRAFEVLDSAKRGFLTKDELIKYMTEEDPEFQQNSRHQPV

SEQ ID NO: 286 - protein, 35 aa, Artificial Sequence
  Synthetic polypeptide
GRDTAAEVIVRHLPGDRLRSKMADEKDREGPGIQQ

SEQ ID NO: 287 - protein, 11 aa, Artificial Sequence
  Synthetic polypeptide
QKMSFFELLRF

SEQ ID NO: 288 - protein, 197 aa, Artificial Sequence
  Synthetic polypeptide
MDNSAQKNERTGKHPRRASEVQKGFTAAYPTQSSIPFKSQASVIPESEKKGFNSQAKRFPHKKNDIPGPGFYNVIHQSPVSNSVSLSKKGTCMFPSMCARLDTIISKYPAANAYTIPSDFISKRDFSNSCSSMFQLPSFMKALKFETPAPNYYNASVSCCKQRNNVCTRAGFMSKTQRGSFAFADKGPPPGCGGTYL

SEQ ID NO: 289 - protein, 197 aa, Artificial Sequence; identical to SEQ ID NO: 288
  Synthetic polypeptide

SEQ ID NO: 290 - protein, 150 aa, Artificial Sequence
  Synthetic polypeptide
MNALANIPDVPVKYRKNDIPGPGFYNVIHQSPVSNSVSLSKKGTCMFPSMCARLDTIISKYPAANAYTIPSDFISKRDFSNSCSSMFQLPSFMKALKFETPAPNYYNASVSCCKQRNNVCTRAGFMSKTQRGSFAFADKGPPPGCGGTYL

SEQ ID NO: 291 - protein, 150 aa, Artificial Sequence; identical to SEQ ID NO: 290
  Synthetic polypeptide

SEQ ID NO: 292 - protein, 100 aa, Artificial Sequence
  Synthetic polypeptide
CARLDTIISKYPAANAYTIPSDFISKRDFSNSCSSMFQLPSFMKALKFETPAPNYYNASVSCCKQRNNVCTRAGFMSKTQRGSFAFADKGPPPGCGGTYL

SEQ ID NO: 293 - protein, 186 aa, Artificial Sequence
  Synthetic polypeptide
MEPPGDWGPPPWRSTPKTDVLRLVLYLTFLGAPCYAPALPSCKEDEYPVGSECCPKCSPGYRVKEACGELTGTVCEPCPPGTYIAHLNGLSKCLQCQMCDPAMGLRASRNCSRTENAVCGCSPGHFCIVQDGDHCAACRAYATSSPGQRVQKGGTESQDTLCQNCPPGTFSPNGTLEECQHQTKEE

SEQ ID NO: 294 - protein, 186 aa, Artificial Sequence; identical to SEQ ID NO: 293
  Synthetic polypeptide

SEQ ID NO: 295 - protein, 186 aa, Artificial Sequence; identical to SEQ ID NO: 293
  Synthetic polypeptide

SEQ ID NO: 296 - protein, 186 aa, Artificial Sequence; identical to SEQ ID NO: 293
  Synthetic polypeptide

SEQ ID NO: 297 - protein, 186 aa, Artificial Sequence; identical to SEQ ID NO: 293
  Synthetic polypeptide

SEQ ID NO: 298 - protein, 186 aa, Artificial Sequence; identical to SEQ ID NO: 293
  Synthetic polypeptide

SEQ ID NO: 299 - protein, 155 aa, Artificial Sequence
  Synthetic polypeptide
MDALKSAGRALIRSPSLAKQSWGGGGRHRKLPENWTDTRETLLEGMLFSLKYLGMTLVEQPKGEELSAAAIKRIVATAKASGKKLQKVTLKVSPRGIILTDNLTNQLIENVSIYRISYCTADKMHDKVFAYIAQSQHNQSLECHAFLCTKRKMRS

SEQ ID NO: 300 - protein, 264 aa, Artificial Sequence
  Synthetic polypeptide
MDALKSAGRALIRSPSLAKQSWGGGGRHRKLPENWTDTRETLLEGMLFSLKYLGMTLVEQPKGEELSAAAIKRIVATAKASGKKLQKVTLKVSPRGIILTDNLTNQLIENVSIYRISYCTADKMHDKVFAYIAQSQHNQSLECHAFLCTKRKMAQAVTLTVAQAFKVAFEFWQVSKEEKEKRDKASQEGGDVLGARQDCTPSLKSLVATGNLLDLEETAKAPLSTVSANTTNMDEVPRPQALSGSSVVWELDDGLDEAFSRDPD

SEQ ID NO: 301 - protein, 343 aa, Artificial Sequence
  Synthetic polypeptide
MAIAYLGSSCPSQPPSSLALSLSPTPSDFEQESGIETAMRFSPDVALAVSTTPAVLPTTNIQPVGTPFEELPSERPTLEPATSPLVVTEVPEEPSQRATTVSTTMATTAATSTGDPTVATVPATVATATPSTPAAPPFTATTAVIRTTGVRRLLPLPLTTVATARATTPEAPSPPTTAAVLDTEAPTPRLVSTATSRPRALPRPATTQEPDIPERSTLPLGTTAPGPTEVAQTPTPETFLTTIRDEPEVPVSGGPSGDFELPEEETTQPDTANEVVAVGGAAAKASSPPGTLPKGARPGPGLLDNAIDSGSSAAQLPQKSILERKEVLVAWRSRKSMVLKSSR

SEQ ID NO: 302 - protein, 401 aa, Artificial Sequence
  Synthetic polypeptide
MKPGPPHRAGAAHGAGAGAGAAAGPGARGLLLPPLLLLLLAGRAAGAQRWRSENFERPVDLEGSGDDDSFPDDELDDLYSGSGSGYFEQESGIETAMRFSPDVALAVSTTPAVLPTTNIQPVGTPFEELPSERPTLEPATSPLVVTEVPEEPSQRATTVSTTMATTAATSTGDPTVATVPATVATATPSTPAAPPFTATTAVIRTTGVRRLLPLPLTTVATARATTPEAPSPPTTAAVLDTEAPTPRLVSTATSRPRALPRPATTQEPDIPERSTLPLGTTAPGPTEVAQTPTPETFLTTIRDEPEVPVSGGPSGDFELPEEETTQPDTANEVVAVGGAAAKASSPPGTLPKGARPGPGLLDNAIDSGSSAAQLPQKSILERKEVLVAWRSRKSMVLKSSR

SEQ ID NO: 303 - protein, 400 aa, Artificial Sequence
  Synthetic polypeptide
MGGRRGPNRTSYCRNPLCEPGSSGGSSGSHTSSASVTSVRSRTRSSSGTGLSSPPLATQTVVPLQHCKIPELPVQASILFELQLFFCQLIALFVHYINIYKTVWWYPPSHPPSHTSLNFHLIDFNLLMVTTIVLGRRFIGSIVKEASQRGKVSLFRSILLFLTRFTVLTATGWSLCRSLIHLFRTYSFLNLLFLCYPFGMYIPFLQLNCDLRKTSLFNHMASMGPREAVSGLAKSRDYLLTLRETWKQHTRQLYGPDAMPTHACCLSPSLIRSEVEFLKMDFNWRMKEVLVSSMLSAYYVAFVPVWFVKNTHYYDKRWSCELFLLVSISTSVILMQHLLPASYCDLLHKAAAHLGCWQKVDPALCSNVLQHPLEAPQGQDHLGSTSESWVQDKAWQRGGP

SEQ ID NO: 304 - protein, 201 aa, Artificial Sequence
  Synthetic polypeptide
MYIPFLQLNCDLRKTSLFNHMASMGPREAVSGLAKSRDYLLTLRETWKQHTRQLYGPDAMPTHACCLSPSLIRSEVEFLKMDFNWRMKEVLVSSMLSAYYVAFVPVWFVKNTHYYDKRWSCELFLLVSISTSVILMQHLLPASYCDLLHKAAAHLGCWQKVDPALCSNVLQHPLEAPQGQDHLGSTSESWVQDKAWQRGGP

SEQ ID NO: 305 - protein, 285 aa, Artificial Sequence
  Synthetic polypeptide
MKNFHLIDFNLLMVTTIVLGRRFIGSIVKEASQRGKVSLFRSILLFLTRFTVLTATGWSLCRSLIHLFRTYSFLNLLFLCYPFGMYIPFLQLNCDLRKTSLFNHMASMGPREAVSGLAKSRDYLLTLRETWKQHTRQLYGPDAMPTHACCLSPSLIRSEVEFLKMDFNWRMKEVLVSSMLSAYYVAFVPVWFVKNTHYYDKRWSCELFLLVSISTSVILMQHLLPASYCDLLHKAAAHLGCWQKVDPALCSNVLQHPLEAPQGQDHLGSTSESWVQDKAWQRGGP

SEQ ID NO: 306 - protein, 4 aa, Artificial Sequence
  Synthetic polypeptide
MDTY

SEQ ID NO: 307 - protein, 4 aa, Artificial Sequence
  Synthetic polypeptide
MDTY

SEQ ID NO: 308 - protein, 308 aa, Artificial Sequence
  Synthetic polypeptide
MKPILLQGHERSITQIKYNREGDLLFTVAKDPIVNVWYSVNGERLGTYMGHTGAVWCVDADWDTKHVLTGSADNSCRLWDCETGKQLALLKTNSAVRTCGFDFGGNIIMFSTDKQMGYQCFVSFFDLRDPSQIDNNEPYMKIPCNDSKITSAVWGPLGECIIAGHESGELNQYSAKSGEVLVNVKEHSRQINDIQLSRDMTMFVTASKDNTAKLFDSTTLEHQKTFRTERPVNSAALSPNYDHVVLGGGQEAMDVTTTSTRIGKFEARFFHLAFEEEFGRVKGHFGPINSVAFHPDGKRQADHLRSGV

SEQ ID NO: 309 - protein, 302 aa, Artificial Sequence
  Synthetic polypeptide
MKPILLQGHERSITQIKYNREGDLLFTVAKDPIVNVWYSVNGERLGTYMGHTGAVWCVDADWDTKHVLTGSADNSCRLWDCETGKQLALLKTNSAVRTCGFDFGGNIIMFSTDKQMGYQCFVSFFDLRDPSQIDNNEPYMKIPCNDSKITSAVWGPLGECIIAGHESGELNQYSAKSGEVLVNVKEHSRQINDIQLSRDMTMFVTASKDNTAKLFDSTTLEHQKTFRTERPVNSAALSPNYDHVVLGGGQEAMDVTTTSTRIGKFEARFFHLAFEEEFGRVKGHFGPINSVAFHPDGKRRIT

SEQ ID NO: 310 - protein, 12 aa, Artificial Sequence
  Synthetic polypeptide
EPLYHRNKDSFQ

SEQ ID NO: 311 - protein, 12 aa, Artificial Sequence
  Synthetic polypeptide
LCLGQLLMIRNL

SEQ ID NO: 312 - protein, 414 aa, Artificial Sequence
  Synthetic polypeptide
MADKEAFDDAVEERVINEEYKIWKKNTPFLYDLVMTHALEWPSLTAQWLPDVTRPEGKDFSIHRLVLGTHTSDEQNHLVIASVQLPNDDAQFDASHYDSEKGEFGGFGSVSGKIEIEIKINHEGEVNRARYMPQNPCIIATKTPSSDVLVFDYTKHPSKPDPSGECNPDLRLRGHQKEGYGLSWNPNLSGHLLSASDDHTICLWDISAVPKEGKVVDAKTIFTGHTAVVEDVSWHLLHESLFGSVADDQKLMIWDTRSNNTSKPSHSVDAHTAEVNCLSFNPYSEFILATGSADKTVALWDLRNLKLKLHSFESHKDEIFQVQWSPHNETILASSGTDRRLNVWDLSKIGEEQSPEDAEDGPPELLFIHGGHTAKISDFSWNPNEPWVICSVSEDNIMQVWQMVVSGYFHPRVE

SEQ ID NO: 313 - protein, 415 aa, Artificial Sequence
  Synthetic polypeptide
MADKEAAFDDAVEERVINEEYKIWKKNTPFLYDLVMTHALEWPSLTAQWLPDVTRPEGKDFSIHRLVLGTHTSDEQNHLVIASVQLPNDDAQFDASHYDSEKGEFGGFGSVSGKIEIEIKINHEGEVNRARYMPQNPCIIATKTPSSDVLVFDYTKHPSKPDPSGECNPDLRLRGHQKEGYGLSWNPNLSGHLLSASDDHTICLWDISAVPKEGKVVDAKTIFTGHTAVVEDVSWHLLHESLFGSVADDQKLMIWDTRSNNTSKPSHSVDAHTAEVNCLSFNPYSEFILATGSADKTVALWDLRNLKLKLHSFESHKDEIFQVQWSPHNETILASSGTDRRLNVWDLSKIGEEQSPEDAEDGPPELLFIHGGHTAKISDFSWNPNEPWVICSVSEDNIMQVWQMVVSGYFHPRVE

SEQ ID NO: 314 - protein, 415 aa, Artificial Sequence; identical to SEQ ID NO: 313
  Synthetic polypeptide

SEQ ID NO: 315 - protein, 163 aa, Artificial Sequence
  Synthetic polypeptide
MIWDTRSNNTSKPSHSVDAHTAEVNCLSFNPYSEFILATGSADKTVALWDLRNLKLKLHSFESHKDEIFQVQWSPHNETILASSGTDRRLNVWDLSKIGEEQSPEDAEDGPPELLFIHGGHTAKISDFSWNPNEPWVICSVSEDNIMQVWQMVVSGYFHPRVE

SEQ ID NO: 316 - protein, 380 aa, Artificial Sequence
  Synthetic polypeptide
MTHALEWPSLTAQWLPDVTRPEGKDFSIHRLVLGTHTSDEQNHLVIASVQLPNDDAQFDASHYDSEKGEFGGFGSVSGKIEIEIKINHEGEVNRARYMPQNPCIIATKTPSSDVLVFDYTKHPSKPDPSGECNPDLRLRGHQKEGYGLSWNPNLSGHLLSASDDHTICLWDISAVPKEGKVVDAKTIFTGHTAVVEDVSWHLLHESLFGSVADDQKLMIWDTRSNNTSKPSHSVDAHTAEVNCLSFNPYSEFILATGSADKTVALWDLRNLKLKLHSFESHKDEIFQVQWSPHNETILASSGTDRRLNVWDLSKIGEEQSPEDAEDGPPELLFIHGGHTAKISDFSWNPNEPWVICSVSEDNIMQVWQMVVSGYFHPRVE

SEQ ID NO: 317 - protein, 170 aa, Artificial Sequence
  Synthetic polypeptide
VADDQKLMIWDTRSNNTSKPSHSVDAHTAEVNCLSFNPYSEFILATGSADKTVALWDLRNLKLKLHSFESHKDEIFQVQWSPHNETILASSGTDRRLNVWDLSKIGEEQSPEDAEDGPPELLFIHGGHTAKISDFSWNPNEPWVICSVSEDNIMQVWQMVVSGYFHPRVE

SEQ ID NO: 318 - protein, 153 aa, Artificial Sequence
  Synthetic polypeptide
SKPSHSVDAHTAEVNCLSFNPYSEFILATGSADKTVALWDLRNLKLKLHSFESHKDEIFQVQWSPHNETILASSGTDRRLNVWDLSKIGEEQSPEDAEDGPPELLFIHGGHTAKISDFSWNPNEPWVICSVSEDNIMQVWQMVVSGYFHPRVE

SEQ ID NO: 319 - protein, 218 aa, Artificial Sequence
  Synthetic polypeptide
MGDAPSPEEKLHLITRNLQEVLGEEKLKEILKERELKIYWGTATTGKPHVAYFVPMSKIADFLKAGCEVTILFADLHAYLDNMKAPWELLELRVSYYENVIKAMLESIGVPLEKLKFIKGTDYQLSKEYTLDVYRLSSVVTQHDSKKAGAEVVKQVEHPLLSGLLYPGLQPPALASQSAEIAASAWLPPHLGSEERLCLAAHRLGCEEPLCPAAQSWK

SEQ ID NO: 320 - protein, 248 aa, Artificial Sequence
  Synthetic polypeptide
MGDAPSPEEKLHLITRNLQEVLGEEKLKEILKERELKIYWGTATTGKPHVAYFVPMSKIADFLKAGCEVTILFADLHAYLDNMKAPWELLELRVSYYENVIKAMLESIGVPLEKLKFIKGTDYQLSKEYTLDVYRLSSVVTQHDSKKAGAEVVKQVEHPLLSGLLYPGLQAGVQWRDLSSLQPPPPSRLPWPPKVPRLQPLPGCHPIWEVRSVSAWPPIVWDVRSPSARPPSLGSEERIFPAAITSGK

SEQ ID NO: 321 - protein, 190 aa, Artificial Sequence
  Synthetic polypeptide
MASVAAARAVPVGSGLRGLQRTLPLVVILGATGTGKSTLALQLGQRLGGEIVSADSMQPQEMGTEKVIDRKVELEKEDGLVLHKRLSQVDPEMAAKLHPHDKRKVARSLQVFEETGISHSEFLHRQHTEEGGGPLGGPLKFSNPCILWLHADQADERLDKRVDDMLAAGLLEELRDFHRRYNQKNVSENR

SEQ ID NO: 322 - protein, 272 aa, Artificial Sequence
  Synthetic polypeptide
MASVAAARAVPVGSGLRGLQRTLPLVVILGATGTGKSTLALQLGQRLGGEIVSADSMQVYEGLDIITNKVSAQEQRICRHHMISFVDPLVTNYTVVDFRNRATALIEDIFARDKIPIVVGGTNYYIESLLWKVLVNTKPQEMGTEKVIDRKVELEKEDGLVLHKRLSQVDPEMAAKLHPHDKRKVARSLQVFEETGISHSEFLHRQHTEEGGGPLGGPLKFSNPCILWLHADQAVLDERLDKRVDDMLAAGLLEELRDFHRRYNQKNVSENR

SEQ ID NO: 323 - protein, 272 aa, Artificial Sequence; identical to SEQ ID NO: 322
  Synthetic polypeptide

SEQ ID NO: 324 - protein, 272 aa, Artificial Sequence; identical to SEQ ID NO: 322
  Synthetic polypeptide

SEQ ID NO: 325 - protein, 20 aa, Artificial Sequence
  Synthetic polypeptide
MFRKIDEMAQLGPSPKPLLA

SEQ ID NO: 326 - protein, 20 aa, Artificial Sequence
  Synthetic polypeptide
MFRKIDEMAQLGPSPKPLLA

SEQ ID NO: 327 - protein, 26 aa, Artificial Sequence
  Synthetic polypeptide
MLAAGLLEELRDFHRRYNQKNVSENR

SEQ ID NO: 328 - protein, 145 aa, Artificial Sequence
  Synthetic polypeptide
MASVAAARAVPVGSGLRGLQRTLPLVVILGATGTGKSTLALQLGQRLGGEIVSADSMQVYEGLDIITNKVSAQEQRICRHHMISFVDPLVTNYTVVDFRNRATALIEDIFARDKIPIVVGGTNYYIESLLWKVLVNTKLAKCLAH

SEQ ID NO: 329 - protein, 145 aa, Artificial Sequence; identical to SEQ ID NO: 328
  Synthetic polypeptide

SEQ ID NO: 330 - protein, 145 aa, Artificial Sequence; identical to SEQ ID NO: 328
  Synthetic polypeptide

SEQ ID NO: 331 - protein, 145 aa, Artificial Sequence; identical to SEQ ID NO: 328
  Synthetic polypeptide

SEQ ID NO: 332 - protein, 145 aa, Artificial Sequence; identical to SEQ ID NO: 328
  Synthetic polypeptide

SEQ ID NO: 333 - protein, 22 aa, Artificial Sequence
  Synthetic polypeptide
WRLHEQFPWAVGSGACNGPYLL

SEQ ID NO: 334 - protein, 81 aa, Artificial Sequence
  Synthetic polypeptide
IITNKVSAQEQRICRHHMISFVDPLVTNYTVVDFRNRATALIEDIFARDKIPIVVGGTNYYIESLLWKVLVNTKLAKCLAH

SEQ ID NO: 335 - protein, 87 aa, Artificial Sequence
  Synthetic polypeptide
MAAATASPRSLLVLLQVVVLALAQIRGPPGERGPPGPPGPPGVPGSDGIDGDNGPPGKAGPPGPKGEPGKAGPDGPDGKPGIDGYYG

SEQ ID NO: 336 - protein, 39 aa, Artificial Sequence
  Synthetic polypeptide
VSLPRAAGGCGRAERSTGRAGPPGSPGTAGSAWIRRHRR

SEQ ID NO: 337 - protein, 335 aa, Artificial Sequence
  Synthetic polypeptide
MKYILVTGGVISGIGKGIIASSVGTILKSCGLHVTSIKIDPYINIDAGTFSPYEHGEVFVLDDGGEVDLDLGNYERFLDIRLTKDNNLTTGKIYQYVINKERKGDYLGKTVQVVPHITDAIQEWVMRQALIPVDEDGLEPQVCVIELGGTVGDIESMPFIEAFRQFQFKVKRENFCNIHVSLVPQPSSTGEQKTKPTQNSVRELRGLGLSPDLVVCRCSNPLDTSVKEKISMFCHVEPEQVICVHDVSSIYRVPLLLEEQGVVDYFLRRLDLPIERQPRKMLMKWKEMADRYDRLLETCSIALVGKYTKFSDSYASVIKALEHSALAINHKLEIK

SEQ ID NO: 338 - protein, 335 aa, Artificial Sequence; identical to SEQ ID NO: 337
  Synthetic polypeptide

SEQ ID NO: 339 - protein, 104 aa, Artificial Sequence [sequence omitted]

SEQ ID NO: 340 - protein, 536 aa, Artificial Sequence
  Synthetic polypeptide
MEPSSKKLTGRLMLAVGGAVLGSLQFGYNTGVINAPQKVIEEFYNQTWVHRYGESILPTTLTTLWSLSVAIFSVGGMIGSFSVGLFVNRFGRRNSMLMMNLLAFVSAVLMGFSKLGKSFEMLILGRFIIGVYCGLTTGFVPMYVGEVSPTALRGALGTLHQLGIVVGILIAQVFGLDSIMGNKDLWPLLLSIIFIPALLQCIVLPFCPESPRFLLINRNEENRAKSVLKKLRGTADVTHDLQEMKEESRQMMREKKVTILELFRSPAYRQPILIAVVLQLSQQLSGINAVFYYSTSIFEKAGVQQPVYATIGSGIVNTAFTVVSLFVVERAGRRTLHLIGLAGMAGCAILMTIALALLEQLPWMSYLSIVAIFGFVAFFEVGPGPIPWFIVAELFSQGPRPAAIAVAGFSNWTSNFIVGMCFQYVEQLCGPYVFIIFTVLLVLFFIFTYFKVPETKGRTFDEIASGFRQGGASQSDKTPEELFHPLGADSQVYALLDPEGGLLPPEDTVELNSIELEVKTAIQPLWAPYASESTGQ

SEQ ID NO: 341 - protein, 195 aa, Artificial Sequence
  Synthetic polypeptide
MATASPAADGGRGRPWEGGLVSWPPAPPLTLPWTWMGPSWGQHPGHWGFPALTEPSASPAAGLGIFEVRRVLDASGCSMLAPLQTGAARFSSYLLSRARKVLGSHLFSPCGVPEFCSISTRKLAAHGFGASMAAMVSFPPQRYHYFLVLDFEATCDKPQIHPQGQKRKKFKWKQERLRFGMRMNCQKRQQKDRNK

SEQ ID NO: 342 - protein, 193 aa, Artificial Sequence
  Synthetic polypeptide
MATASPAADGGRGRPWEGGLVSWPPAPPLTLPWTWMGPSWGQHPGHWGFPALTEPSASPAAGLGIFEVRRDASGCSMLAPLQTGAARFSSYLLSRARKVLGSHLFSPCGVPEFCSISTRKLAAHGFGASMAAMVSFPPQRYHYFLVLDFEATCDKPQIHPQGQKRKKFKWKQERLRFGMRMNCQKRQQKDRNK

SEQ ID NO: 343 - protein, 440 aa, Artificial Sequence
  Synthetic polypeptide
MVQYELWAALPGASGVALACCFVAAAVALRWSGRRTARGAVVRARQRQRAGLENMDRAAQRFRLQNPDLDSEALLALPLPQLVQKLHSRELAPEAVLFTYVGKAWEVNKGTNCVTSYLADCETQLSQAPRQGLLYGVPVSLKECFTYKGQDSTLGLSLNEGVPAECDSVVVHVLKLQGAVPFVHTNVPQSMFSYDCSNPLFGQTVNPWKSSKSPGGSSGGEGALIGSGGSPLGLGTDIGGSIRFPSSFCGICGLKPTGNRLSKSGLKGCVYGQEAVRLSVGPMARDVESLALCLRALLCEDMFRLDPTVPPLPFREEVYTSSQPLRVGYYETDNYTMPSPAMRRAVLETKQSLEAAGHTLVPFLPSNIPHALETLSTGGLFSDGGHTFLQNFKGDFVDPCLGDLVSILKLPQWLKGLLAFLVKPLLPRLSAFLSNMKSRQ

SEQ ID NO: 344 - protein, 313 aa, Artificial Sequence
  Synthetic polypeptide
MERARGPRAEADAPEEEEEAGAAMAAVVVAAAGGAGPAVLQVAGLYRGLCAVRSRALGLGLVSPAQLRVFPVRPGSGRPEGGADSSGVGAEAELQANPFYDRYRDKIQLLRRSDPAAFESRLEKRSEFRKQPVGHSRQGDFIKCVEQKTDALGKQSVNRGFTKDKTLSSIFNIEMVKEKTAEEIKQIWQQYFAAKDTVYAVIPAEKFDLIWNRAQSCPTFLCALPRREGYEFFVGQWTGTELHFTALINIQTRGEAAASQLILYHYPELKEEKGIVLMTAEMDSTFLNVAEAQCIANQVQLFYATDRKETYGL

SEQ ID NO: 345 - protein, 290 aa, Artificial Sequence
  Synthetic polypeptide
MAAVVVAAAGGAGPAVLQVAGLYRGLCAVRSRALGLGLVSPAQLRVFPVRPGSGRPEGGADSSGVGAEAELQANPFYDRYRDKIQLLRRSDPAAFESRLEKRSEFRKQPVGHSRQGDFIKCVEQKTDALGKQSVNRGFTKDKTLSSIFNIEMVKEKTAEEIKQIWQQYFAAKDTVYAVIPAEKFDLIWNRAQSCPTFLCALPRREGYEFFVGQWTGTELHFTALINIQTRGEAAASQLILYHYPELKEEKGIVLMTAEMDSTFLNVAEAQCIANQVQLFYATDRKETYGL

SEQ ID NO: 346 - protein, 222 aa, Artificial Sequence
  Synthetic polypeptide
MAAVVVAAAGGAGPAVLQVAGLYRGLCAVRSRALGLGLVSPAQLRVFPVRPGSGRPEGGADSSGVGAEAELQANPFYDRYRDKIQLLRRSDPAAFESRLEKRSEFRKQPVGHSRQGDFIKCVEQKTDALGKQSVNRGFTKDKTLSSIFNIEMVKEKTAEEIKQIWQQYFAAKDTVYAVIPAEKFDLIWNRAQSCPTNVAEAQCIANQVQLFYATDRKETYGL

SEQ ID NO: 347 - protein, 94 aa, Artificial Sequence
  Synthetic polypeptide
FLCALPRREGYEFFVGQWTGTELHFTALINIQTRGEAAASQLILYHYPELKEEKGIVLMTAEMDSTFLNVAEAQCIANQVQLFYATDRKETYGL

SEQ ID NO: 348 - protein, 136 aa, Artificial Sequence
  Synthetic polypeptide
MIRSDPAAFESRLEKRSEFRKQPVGHSRQGDFIKCVEQKTDALGKQSVNRGFTKDKTLSSIFNIEMVKEKTAEEIKQIWQQYFAAKDTVYAVIPAEKFDLIWNRAQSCPTNVAEAQCIANQVQLFYATDRKETYGL

SEQ ID NO: 349 - protein, 139 aa, Artificial Sequence
  Synthetic polypeptide
MVKEKTAEEIKQIWQQYFAAKDTVYAVIPAEKFDLIWNRAQSCPTFLCALPRREGYEFFVGQWTGTELHFTALINIQTRGEAAASQLILYHYPELKEEKGIVLMTAEMDSTFLNVAEAQCIANQVQLFYATDRKETYGL

SEQ ID NO: 350 - protein, 245 aa, Artificial Sequence
  Synthetic polypeptide
MERARGPRAEADAPEEEEEAGAAMAAVVVAAAGGAGPAVLQVAGLYRGLCAVRSRALGLGLVSPAQLRVFPVRPGSGRPEGGADSSGVGAEAELQANPFYDRYRDKIQLLRRSDPAAFESRLEKRSEFRKQPVGHSRQGDFIKCVEQKTDALGKQSVNRGFTKDKTLSSIFNIEMVKEKTAEEIKQIWQQYFAAKDTVYAVIPAEKFDLIWNRAQSCPTNVAEAQCIANQVQLFYATDRKETYGL

SEQ ID NO: 351 - protein, 5 aa, Artificial Sequence
  Synthetic polypeptide
WGNSL

SEQ ID NO: 352 - protein, 202 aa, Artificial Sequence
  Synthetic polypeptide
MSDPAAFESRLEKRSEFRKQPVGHSRQGDFIKCVEQKTDALGKQSVNRGFTKDKTLSSIFNIEMVKEKTAEEIKQIWQQYFAAKDTVYAVIPAEKFDLIWNRAQSCPTFLCALPRREGYEFFVGQWTGTELHFTALINIQTRGEAAASQLILYHYPELKEEKGIVLMTAEMDSTFLNVAEAQCIANQVQLFYATDRKETYGL

SEQ ID NO: 353 - protein, 407 aa, Artificial Sequence
  Synthetic polypeptide
MEPSWLQELMAHPFLLLILLCMSLLLFQVIRLYQRRRWMIRALHLFPAPPAHWFYGHKEFYPVKEFEVYHKLMEKYPCAVPLWVGPFTMFFSVHDPDYAKILLKRQDPKSAVSHKILESWVGRGLVTLDGSKWKKHRQIVKPGFNISILKIFITMMSESVRMMLNKWEEHIAQNSRLELFQHVSLMTLDSIMKCAFSHQGSIQLDSTLDSYLKAVFNLSKISNQRMNNFLHHNDLVFKFSSQGQIFSKFNQELHQFTEKVIQDRKESLKDKLKQDTTQKRRWDFLDILLSAKSENTKDFSEADLQAEVKTFMFAGHDTTSSAISWILYCLAKYPEHQQRCRDEIRELLGDGSSITWEHLSQMPYTTMCIKECLRLYAPVVNISRLLDKPITFPDGRSLPAGKQRAKS

SEQ ID NO: 354 - protein, 504 aa, Artificial Sequence
  Synthetic polypeptide
MPKVKALQCALALEISSVTCPGVVLKDKEDIYLSICVFGQYKKTQCVPATFPLVFNARMVFEKVFPDAVDPGDVVTQLEYDTAVFELIQLVPPVGETLSTYDENTRDFMFPGPNQMSGHHDSNRQVTMRRISGLRGNAPRLEFSTTSVITECLISSRKCHTQDKFIYHLAPVEKSHGRLQNRTSRSQKKKSKSPERSKYCINAKNYEQPTISSKSHSPSPYTKRRMCELSEDTRRRLAHLNLGPYEFKKETDKPPFVIRHVDPPSPRADTLLGSSGRDCERDGWSRVHNDHSHLGCCRPKDYKVIRTPHGRDFDDSLEKCEEYLSPRSCSKPRHSARTLLVHSAPSTMPKHSPSPVLNRASLRERFHSDWCSPSNCDEIHDRVKNVLKSHQAHQRHLYDERDLEKDDELELKRSLLCRDSAYDSDPEYSTVHRSKVLEPTQMPINDRLDTEMWYVYTMEYYATIEKDEFLSFAGTWMKLETIILSKLTQEQKTKHCMFSLISGS

SEQ ID NO: 355 - protein, 488 aa, Artificial Sequence
  Synthetic polypeptide
MPKVKALQCALALEISSVTCPGVVLKDKEDIYLSICVFGQYKKTQCVPATFPLVFNARMVFEKVFPDAVDPGDVVTQLEYDTAVFELIQLVPPVGETLSTYDENTRDFMFPGPNQMSGHHDSNRQVTMRRISGLRGNAPRLEFSTTSVITECLISSRKCHTQDKFIYHLAPVEKSHGRLQNRTSRSQKKKSKSPERSKYCINAKNYEQPTISSKSHSPSPYTKRRMCELSEDTRRRLAHLNLGPYEFKKETDKPPFVIRHVDPPSPRADTLLGSSGRDCERDGWSRVHNDHSHLGCCRPKDYKVIRTPHGRDFDDSLEKCEEYLSPRSCSKPRHSARTLLVHSAPSTMPKHSPSPVLNRASLRERFHSDWCSPSNCDEIHDRDERDLEKDDELELKRSLLCRDSAYDSDPEYSTVHRSKVLEPTQMPINDRLDTEMWYVYTMEYYATIEKDEFLSFAGTWMKLETIILSKLTQEQKTKHCMFSLISGS

SEQ ID NO: 356 - protein, 432 aa, Artificial Sequence
  Synthetic polypeptide
MVFEKVFPDAVDPGDVVTQLELGETLSTYDENTRDFMFPGPNQMSGHHDSNRQVTMRRISGLRGNAPRLEFSTTSVITECLISSRKCHTQDKFIYHLAPVEKSHGRLQNRTSRSQKKKSKSPERSKYCINAKNYEQPTISSKSHSPSPYTKRRMCELSEDTRRRLAHLNLGPYEFKKETDKPPFVIRHVDPPSPRADTLLGSSGRDCERDGWSRVHNDHSHLGCCRPKDYKVIRTPHGRDFDDSLEKCEEYLSPRSCSKPRHSARTLLVHSAPSTMPKHSPSPVLNRASLRERFHSDWCSPSNCDEIHDRVKNVLKSHQAHQRHLYDERDLEKDDELELKRSLLCRDSAYDSDPEYSTVHRSKVLEPTQMPINDRLDTEMWYVYTMEYYATIEKDEFLSFAGTWMKLETIILSKLTQEQKTKHCMFSLISGS

SEQ ID NO: 357 - protein, 351 aa, Artificial Sequence
  Synthetic polypeptide
MVPHAILARGRDVCRRNGLLILSVLSVIVGCLLGFFLRTRRLSPQEISYFQFPGELLMRMLKMMILPLVVSSLMSGLASLDAKTSSRLGVLTVAYYLWTTFMAVIVGIFMVSIIHPGSAAQKETTEQSGKPIMSSADALLDLIRNMFPANLVEATFKQYRTKTTPVVKSPKVAPEEAPPRRILIYGVQEENGSHVQNFALDLTPPPEVVYKSEPGTSDGMNVLGIVFFSATMGIMLGRMGDSGAPLVSFCQCLNESVMKIVAVAVWYFPFGIVFLIAGKILEMDDPRAVGKKLGFYSVTVVCGLVLHGLFILPLLYFFITKKNPIVFIRGILQALLIALATSSRKNQVRAL

SEQ ID NO: 358 - protein, 246 aa, Artificial Sequence
  Synthetic polypeptide
MVPHAILARGRDVCRRNGLLILSVLSVIVGCLLGFFLRTRRLSPQEISYFQFPGELLMRMLKMMILPLVVSSLMSGLASLDAKTSSRLGVLTVAYYLWTTFMAVIVGIFMVSIIHPGSAAQKETTEQSGKPIMSSADALLDLIRNMFPANLVEATFKQYRTKTTPVVKSPKVAPEEAPPRRILIYGVQEENGSHVQNFALDLTPPPEVVYKSEPGTSDGMNVLGIVFFSATMDGSQIIQASDPTKP

SEQ ID NO: 359 - protein, 110 aa, Artificial Sequence
  Synthetic polypeptide
MRKIDLCLSSEGSEVILATSSDEKHPPENIIDGNPETFWTTTGMFPQEFIICFHKHVRIERLVIQSYFVQTLKIEKSTSKEPVDFEQWIEKDLVHTEGQLQNEEIVATKI

SEQ ID NO: 360 - protein, 110 aa, Artificial Sequence; identical to SEQ ID NO: 359
  Synthetic polypeptide

SEQ ID NO: 361 - protein, 110 aa, Artificial Sequence; identical to SEQ ID NO: 359
  Synthetic polypeptide

SEQ ID NO: 362 - protein, 8 aa, Artificial Sequence
  Synthetic polypeptide
LPPEADPG

SEQ ID NO: 363 - protein, 466 aa, Artificial Sequence
  Synthetic polypeptide
MEPAVSLAVCALLFLLWVRLKGLEFVLIHQRWVFVCLFLLPLSLIFDIYYYVRAWVVFKLSSAPRLHEQRVRDIQKQVREWKEQGSKTFMCTGRPGWLTVSLRVGKYKKTHKNIMINLMDILEVDTKKQIVRVEPLVTMGQVTALLTSIGWTLPVLPELDDLTVGGLIMGTGIESSSHKYGLFQHICTAYELVLADGSFVRCTPSENSDLFYAVPWSCGTLGFLVAAEIRIIPAKKYVKLRFEPVRGLEAICAKFTHESQRQENHFVEGLLYSLDEAVIMTGVMTDEAEPSKLNSIGNYYKPWFFKHVENYLKTNREGLEYIPLRHYYHRHTRSIFWELQDIIPFGNNPIFRYLFGWMVPPKISLLKLTQGETLRKLYEQHHVVQDMLVPMKCLQQALHTFQNDIHVYPIWLCPFILPSQPGLVHPKGNEAELYIDIGAYGEPRVKHFEARLLSSELSTGHIEGAG

SEQ ID NO: 364 - protein, 250 aa, Artificial Sequence
  Synthetic polypeptide
MGTGIESSSHKYGLFQHICTAYELVLADGSFVRCTPSENSDLFYAVPWSCGTLGFLVAAEIRIIPAKKYVKLRFEPVRGLEAICAKFTHESQRQENHFVEGLLYSLDEAVIMTGVMTDEAEPSKDIIPFGNNPIFRYLFGWMVPPKISLLKLTQGETLRKLYEQHHVVQDMLVPMKCLQQALHTFQNDIHVYPIWLCPFILPSQPGLVHPKGNEAELYIDIGAYGEPRVKHFEARLLSSELSTGHIEGAG

SEQ ID NO: 365 - protein, 425 aa, Artificial Sequence
  Synthetic polypeptide
MGAGEQNRQSAHCVQGICGYLEGDEEGEEGEVRSTQVREWKEQGSKTFMCTGRPGWLTVSLRVGKYKKTHKNIMINLMDILEVDTKKQIVRVEPLVTMGQVTALLTSIGWTLPVLPELDDLTVGGLIMGTGIESSSHKYGLFQHICTAYELVLADGSFVRCTPSENSDLFYAVPWSCGTLGFLVAAEIRIIPAKKYVKLRFEPVRGLEAICAKFTHESQRQENHFVEGLLYSLDEAVIMTGVMTDEAEPSKLNSIGNYYKPWFFKHVENYLKTNREGLEYIPLRHYYHRHTRSIFWELQDIIPFGNNPIFRYLFGWMVPPKISLLKLTQGETLRKLYEQHHVVQDMLVPMKCLQQALHTFQNDIHVYPIWLCPFILPSQPGLVHPKGNEAELYIDIGAYGEPRVKHFEARLLSSELSTGHIEGAG

SEQ ID NO: 366 - protein, 357 aa, Artificial Sequence
  Synthetic polypeptide
MEPAVSLAVCALLFLLWVRLKGLEFVLIHQRWVFVCLFLLPLSLIFDIYYYVRAWVVFKLSSAPRLHEQRVRDIQKQVREWKEQGSKTFMCTGRPGWLTVSLRVGKYKKTHKNIMINLMDILEVDTKKQIVRVEPLVTMGQVTALLTSIGWTLPVLPELDDLTVGGLIMGTGIESSSHKYGLFQHICTAYELVLADGSFVRCTPSENSDLFYAVPWSCGTLGFLVAAEIRIIPAKKYVKLRFEPVRGLEAICAKFTHESQRQENHFVEGLLYSLDEAVIMTGVMTDEAEPSKLNSIGNYYKPWFFKHVENYLKTNREGLEYIPLRHYYHRHTRSIFWELQGAAQWNGKNVGFGVRQA

SEQ ID NO: 367 - protein, 316 aa, Artificial Sequence
  Synthetic polypeptide
MGAGEQNRQSAHCVQGICGYLEGDEEGEEGEVRSTQVREWKEQGSKTFMCTGRPGWLTVSLRVGKYKKTHKNIMINLMDILEVDTKKQIVRVEPLVTMGQVTALLTSIGWTLPVLPELDDLTVGGLIMGTGIESSSHKYGLFQHICTAYELVLADGSFVRCTPSENSDLFYAVPWSCGTLGFLVAAEIRIIPAKKYVKLRFEPVRGLEAICAKFTHESQRQENHFVEGLLYSLDEAVIMTGVMTDEAEPSKLNSIGNYYKPWFFKHVENYLKTNREGLEYIPLRHYYHRHTRSIFWELQGAAQWNGKNVGFGVRQA

SEQ ID NO: 368 - protein, 209 aa, Artificial Sequence
  Synthetic polypeptide
MEPAVSLAVCALLFLLWVRLKGLEFVLIHQRWVFVCLFLLPLSLIFDIYYYVRAWVVFKLSSAPRLHEQRVRDIQKQVREWKEQGSKTFMCTGRPGWLTVSLRVGKYKKTHKNIMINLMDILEVDTKKQIVRVEPLVTMGQVTALLTSIGWTLPVLPELDDLTVGGSPVEWKECGIWSQTSLSPVPRLELISCVTLGESLNPSEPGSLH

SEQ ID NO: 369 - protein, 168 aa, Artificial Sequence
  Synthetic polypeptide
MGAGEQNRQSAHCVQGICGYLEGDEEGEEGEVRSTQVREWKEQGSKTFMCTGRPGWLTVSLRVGKYKKTHKNIMINLMDILEVDTKKQIVRVEPLVTMGQVTALLTSIGWTLPVLPELDDLTVGGSPVEWKECGIWSQTSLSPVPRLELISCVTLGESLNPSEPGSLH

SEQ ID NO: 370 - protein, 82 aa, Artificial Sequence
  Synthetic polypeptide
MEPAVSLAVCALLFLLWVRLKGLEFVLIHQRWVFVCLFLLPLSLIFDIYYYVRAWVVFKLSSAPRLHEQRVRDIQKQVLGKW

SEQ ID NO: 371 - protein, 186 aa, Artificial Sequence
  Synthetic polypeptide
MSGGEQKPERYYVGVDVGTGSVRAALVDQSGVLLAFADQPIKNWEPQFNHHEQSSEDIWAACCVVTKKVVQGIDLNQIRGLGFDATCSLVVLDKQFHPLPVNQEGDSHRNVIMWLDHRAVSQVNRINETKHSVLQYVGGVMSVEMQAPKLLWLKELLGRLRQENLLNPGCRGCSELRSHHYTPAWR

SEQ ID NO: 372 - protein, 186 aa, Artificial Sequence; identical to SEQ ID NO: 371
  Synthetic polypeptide

SEQ ID NO: 373 - protein, 186 aa, Artificial Sequence; identical to SEQ ID NO: 371
  Synthetic polypeptide

SEQ ID NO: 374 - protein, 186 aa, Artificial Sequence; identical to SEQ ID NO: 371
  Synthetic polypeptide

SEQ ID NO: 375 - protein, 402 aa, Artificial Sequence
  Synthetic polypeptide
MLAAMGSLAAALWAVVHPRTLLLGTVAFLLAADFLKRRRPKNYPPGPWRLPFLGNFFLVDFEQSHLEVQLFVKKYGNLFSLELGDISAVLITGLPLIKEALIHMDQNFGNRPVTPMREHIFKKNGLIMSSGQAWKEQRRFTLTALRNFGLGKKSLEERIQEEAQHLTEAIKEENGQPFDPHFKINNAVSNIICSITFGERFEYQDSWFQQLLKLLDEVTYLEASKTCQLYNVFPWIMKFLPGPHQTLFSNWKKLKLFVSHMIDKHRKDWNPAETRDFIDAYLKEMSKHTGNPTSSFHEENLICSTLDLFFAGTETTSTTLRWALLYMALYPEIQEKVQAEIDRVIGQGQQPSTAARESMPYTNAVIHEVQRMGNIIPLNVPREVTVDTTLAGYHLPKNISPD

SEQ ID NO: 376 - protein, 215 aa, Artificial Sequence
  Synthetic polypeptide
MSGPDVETPSAIQICRIMRPDDANVAGNVHGGTILKMIEEAGAIISTRHCNSQNGERCVAALARVERTDFLSPMCIGEVAHVSAEITYTSKHSVEVQVNVMSENILTGAKKLTNKATLWYVPLSLKNVDKVLEVPPVVYSRQEQEEEGRKRYEAQKLERMETKWRNGDIVQPVLNPEPNTVSYSQSSLIHLVGPSDCTLHGFVHGGPGMESALSS

SEQ ID NO: 377 - protein, 215 aa, Artificial Sequence; identical to SEQ ID NO: 376
  Synthetic polypeptide

SEQ ID NO: 378 - protein, 215 aa, Artificial Sequence; identical to SEQ ID NO: 376
  Synthetic polypeptide

SEQ ID NO: 379 - protein, 206 aa, Artificial Sequence
  Synthetic polypeptide
MAFQLSRIMRPDDANVAGNVHGGTILKMIEEAGAIISTRHCNSQNGERCVAALARVERTDFLSPMCIGEVAHVSAEITYTSKHSVEVQVNVMSENILTGAKKLTNKATLWYVPLSLKNVDKVLEVPPVVYSRQEQEEEGRKRYEAQKLERMETKWRNGDIVQPVLNPEPNTVSYSQSSLIHLVGPSDCTLHGFVHGGPGMESALSS

SEQ ID NO: 380 - protein, 227 aa, Artificial Sequence
  Synthetic polypeptide
MLLLRRSLSLNVLRKEVDRACFGEKAKQIMRPDDANVAGNVHGGTILKMIEEAGAIISTRHCNSQNGERCVAALARVERTDFLSPMCIGEVAHVSAEITYTSKHSVEVQVNVMSENILTGAKKLTNKATLWYVPLSLKNVDKVLEVPPVVYSRQEQEEEGRKRYEAQKLERMETKWRNGDIVQPVLNPEPNTVSYSQSSLIHLVGPSDCTLHGFVHGGPGMESALSS

SEQ ID NO: 381 - protein, 227 aa, Artificial Sequence; identical to SEQ ID NO: 380
  Synthetic polypeptide

SEQ ID NO: 382 - protein, 257 aa, Artificial Sequence
  Synthetic polypeptide
MKLLARALRLCEFGRQASSRRLVAGQGCVGPRRGCCAPVQVVGPRADLPPCGACITGRIMRPDDANVAGNVHGGTILKMIEEAGAIISTRHCNSQNGERCVAALARVERTDFLSPMCIGEVAHVSAEITYTSKHSVEVQVNVMSENILTGAKKLTNKATLWYVPLSLKNVDKVLEVPPVVYSRQEQEEEGRKRYEAQKLERMETKWRNGDIVQPVLNPEPNTVSYSQSSLIHLVGPSDCTLHGFVHGGPGMESALSS

SEQ ID NO: 383 - protein, 142 aa, Artificial Sequence
  Synthetic polypeptide
MCIGEVAHVSAEITYTSKHSVEVQVNVMSENILTGAKKLTNKATLWYVPLSLKNVDKVLEVPPVVYSRQEQEEEGRKRYEAQKLERMETKWRNGDIVQPVLNPEPNTVSYSQSSLIHLVGPSDCTLHGFVHGGPGMESALSS

SEQ ID NO: 384 - protein, 247 aa, Artificial Sequence
  Synthetic polypeptide
MARPGLIHSAPGLPDTCALLQPPAASAAAAPSMSGPDVETPSAIQICRIMRPDDANVAGNVHGGTILKMIEEAGAIISTRHCNSQNGERCVAALARVERTDFLSPMCIGEVAHVSAEITYTSKHSVEVQVNVMSENILTGAKKLTNKATLWYVPLSLKNVDKVLEVPPVVYSRQEQEEEGRKRYEAQKLERMETKWRNGDIVQPVLNPEPNTVSYSQSSLIHLVGPSDCTLHGFVHGGPGMESALSS

SEQ ID NO: 385 - protein, 198 aa, Artificial Sequence
  Synthetic polypeptide
MRPDDANVAGNVHGGTILKMIEEAGAIISTRHCNSQNGERCVAALARVERTDFLSPMCIGEVAHVSAEITYTSKHSVEVQVNVMSENILTGAKKLTNKATLWYVPLSLKNVDKVLEVPPVVYSRQEQEEEGRKRYEAQKLERMETKWRNGDIVQPVLNPEPNTVSYSQSSLIHLVGPSDCTLHGFVHGGPGMESALSS

SEQ ID NO: 386 - protein, 149 aa, Artificial Sequence
  Synthetic polypeptide
MPFAPVAQARVQWHDFRSLQHLLPAFKRFSCLSLGSSWDYSVKRSLKLDGLLEENSFDPSKITRKKSVITYSPTTGTCQMSLFASPTSSEEQKHRNGLSNEKRKKLNHPSLTESKESTTKDNDEMIKQHFLQKWKNLSLNSYEATGDPK

SEQ ID NO: 387 - protein, 110 aa, Artificial Sequence
  Synthetic polypeptide
MPVKRSLKLDGLLEENSFDPSKITRKKSVITYSPTTGTCQMSLFASPTSSEEQKHRNGLSNEKRKKLNHPSLTESKESTTKDNDEMIKQHFLQKWKNLSLNSYEATGDPK

SEQ ID NO: 388 - protein, 110 aa, Artificial Sequence; identical to SEQ ID NO: 387
  Synthetic polypeptide

SEQ ID NO: 389 - protein, 110 aa, Artificial Sequence; identical to SEQ ID NO: 387
  Synthetic polypeptide

SEQ ID NO: 390 - protein, 106 aa, Artificial Sequence
  Synthetic polypeptide
MPFAPVAQARVQWHDFRSLQHLLPAFKRFSCLSLGSSWDYSVKRSLKLDGLLEENSFDPSKITRKKSVITYSPTTGTCQMSLFASPTSSEEQKHRNGLSNGLCWKP

SEQ ID NO: 391 - protein, 67 aa, Artificial Sequence
  Synthetic polypeptide
MPVKRSLKLDGLLEENSFDPSKITRKKSVITYSPTTGTCQMSLFASPTSSEEQKHRNGLSNGLCWKP

SEQ ID NO: 392 - protein, 67 aa, Artificial Sequence; identical to SEQ ID NO: 391
  Synthetic polypeptide

SEQ ID NO: 393 - protein, 67 aa, Artificial Sequence; identical to SEQ ID NO: 391
  Synthetic polypeptide

SEQ ID NO: 394 - protein, 464 aa, Artificial Sequence
  Synthetic polypeptide
MHYDGHVRFDLPPQGSVLARNVSTRSCPPRTSPAVDLEEEEEESSVDGKGDRKSTGLKLSKKKARRRHTDDPSKECFTLKFDLNVDIETEIVPAMKKKSLGEVLLPVFERKGIALGKVDIYLDQSNTPLSLTFEAYRFGGHYLRVKAPAKPGDEGKVEQGMKDSKSLSLPILRPAGTGPPALERVDAQSRRESLDILAPGRRRKNMSEFLGEASIPGQEPPTPSSCSLPSGSSGSTNTGDSWKNRAASRFSGFFSSGPSTSAFGREVDKMEQLEGKLHTYSLFGLPRLPRGLRFDHDSWEEEYDEDEDEDNACLRLEDSWRELIDGHEKLTRRQCHQQEAVWELLHTEASYIRKLRVIINLFLCCLLNLQESGLLCEVEAERLFSNIPEIAQLHRRLWASVMAPVLEKARRTRALLQPGDFLKGFKMETGIISLLPPWGGRPSAVRKRLRSAWRGPARRERAVT

SEQ ID NO: 395 - protein, 464 aa, Artificial Sequence; identical to SEQ ID NO: 394
  Synthetic polypeptide

SEQ ID NO: 396 - protein, 464 aa, Artificial Sequence; identical to SEQ ID NO: 394
  Synthetic polypeptide

SEQ ID NO: 397 - protein, 464 aa, Artificial Sequence; identical to SEQ ID NO: 394
  Synthetic polypeptide

SEQ ID NO: 398 - protein, 464 aa, Artificial Sequence; identical to SEQ ID NO: 394
  Synthetic polypeptide

SEQ ID NO: 399 - protein, 464 aa, Artificial Sequence; identical to SEQ ID NO: 394
  Synthetic polypeptide

SEQ ID NO: 400 - protein, 541 aa, Artificial Sequence
  Synthetic polypeptide
MNSVLTKHGSPPRSWLSLCSGTDDQSPAEKKGLRCQNPACMDKGRAAKVCHHADCQQLHRRGPLNLCEACDSKFHSTMHYDGHVRFDLPPQGSVLARNVSTRSCPPRTSPAVDLEEEEEESSVDGKGDRKSTGLKLSKKKARRRHTDDPSKECFTLKFDLNVDIETEIVPAMKKKSLGEVLLPVFERKGIALGKVDIYLDQSNTPLSLTFEAYRFGGHYLRVKAPAKPGDEGKVEQGMKDSKSLSLPILRPAGTGPPALERVDAQSRRESLDILAPGRRRKNMSEFLGEASIPGQEPPTPSSCSLPSGSSGSTNTGDSWKNRAASRFSGFFSSGPSTSAFGREVDKMEQLEGKLHTYSLFGLPRLPRGLRFDHDSWEEEYDEDEDEDNACLRLEDSWRELIDGHEKLTRRQCHQQEAVWELLHTEASYIRKLRVIINLFLCCLLNLQESGLLCEVEAERLFSNIPEIAQLHRRLWASVMAPVLEKARRTRALLQPGDFLKGFKMETGIISLLPPWGGRPSAVRKRLRSAWRGPARRERAVT

SEQ ID NO: 401 - protein, 541 aa, Artificial Sequence; identical to SEQ ID NO: 400
  Synthetic polypeptide

SEQ ID NO: 402 - protein, 501 aa, Artificial Sequence
  Synthetic polypeptide
MDKGRAAKVCHHADCQQLHRRGPLNLCEACDSKFHSTMHYDGHVRFDLPPQGSVLARNVSTRSCPPRTSPAVDLEEEEEESSVDGKGDRKSTGLKLSKKKARRRHTDDPSKECFTLKFDLNVDIETEIVPAMKKKSLGEVLLPVFERKGIALGKVDIYLDQSNTPLSLTFEAYRFGGHYLRVKAPAKPGDEGKVEQGMKDSKSLSLPILRPAGTGPPALERVDAQSRRESLDILAPGRRRKNMSEFLGEASIPGQEPPTPSSCSLPSGSSGSTNTGDSWKNRAASRFSGFFSSGPSTSAFGREVDKMEQLEGKLHTYSLFGLPRLPRGLRFDHDSWEEEYDEDEDEDNACLRLEDSWRELIDGHEKLTRRQCHQQEAVWELLHTEASYIRKLRVIINLFLCCLLNLQESGLLCEVEAERLFSNIPEIAQLHRRLWASVMAPVLEKARRTRALLQPGDFLKGFKMETGIISLLPPWGGRPSAVRKRLRSAWRGPARRERAVT

SEQ ID NO: 403 - protein, 520 aa, Artificial Sequence
  Synthetic polypeptide
MDDQSPAEKKGLRCQNPACMDKGRAAKVCHHADCQQLHRRGPLNLCEACDSKFHSTMHYDGHVRFDLPPQGSVLARNVSTRSCPPRTSPAVDLEEEEEESSVDGKGDRKSTGLKLSKKKARRRHTDDPSKECFTLKFDLNVDIETEIVPAMKKKSLGEVLLPVFERKGIALGKVDIYLDQSNTPLSLTFEAYRFGGHYLRVKAPAKPGDEGKVEQGMKDSKSLSLPILRPAGTGPPALERVDAQSRRESLDILAPGRRRKNMSEFLGEASIPGQEPPTPSSCSLPSGSSGSTNTGDSWKNRAASRFSGFFSSGPSTSAFGREVDKMEQLEGKLHTYSLFGLPRLPRGLRFDHDSWEEEYDEDEDEDNACLRLEDSWRELIDGHEKLTRRQCHQQEAVWELLHTEASYIRKLRVIINLFLCCLLNLQESGLLCEVEAERLFSNIPEIAQLHRRLWASVMAPVLEKARRTRALLQPGDFLKGFKMETGIISLLPPWGGRPSAVRKRLRSAWRGPARRERAVT

SEQ ID NO: 404 - protein, 533 aa, Artificial Sequence
  Synthetic polypeptide
MGTGPGVSGRLAASRPGPGLPLRDSEPSWAGGRARDGDSQVCHHADCQQLHRRGPLNLCEACDSKFHSTMHYDGHVRFDLPPQGSVLARNVSTRSCPPRTSPAVDLEEEEEESSVDGKGDRKSTGLKLSKKKARRRHTDDPSKECFTLKFDLNVDIETEIVPAMKKKSLGEVLLPVFERKGIALGKVDIYLDQSNTPLSLTFEAYRFGGHYLRVKAPAKPGDEGKVEQGMKDSKSLSLPILRPAGTGPPALERVDAQSRRESLDILAPGRRRKNMSEFLGEASIPGQEPPTPSSCSLPSGSSGSTNTGDSWKNRAASRFSGFFSSGPSTSAFGREVDKMEQLEGKLHTYSLFGLPRLPRGLRFDHDSWEEEYDEDEDEDNACLRLEDSWRELIDGHEKLTRRQCHQQEAVWELLHTEASYIRKLRVIINLFLCCLLNLQESGLLCEVEAERLFSNIPEIAQLHRRLWASVMAPVLEKARRTRALLQPGDFLKGFKMETGIISLLPPWGGRPSAVRKRLRSAWRGPARRERAVT

SEQ ID NO: 405 - protein, 543 aa, Artificial Sequence
  Synthetic polypeptide
MSLGERGSPQTFGGSSVSKGSDAGHDQSPAEKKGLRCQNPACMDKGRAAKVCHHADCQQLHRRGPLNLCEACDSKFHSTMHYDGHVRFDLPPQGSVLARNVSTRSCPPRTSPAVDLEEEEEESSVDGKGDRKSTGLKLSKKKARRRHTDDPSKECFTLKFDLNVDIETEIVPAMKKKSLGEVLLPVFERKGIALGKVDIYLDQSNTPLSLTFEAYRFGGHYLRVKAPAKPGDEGKVEQGMKDSKSLSLPILRPAGTGPPALERVDAQSRRESLDILAPGRRRKNMSEFLGEASIPGQEPPTPSSCSLPSGSSGSTNTGDSWKNRAASRFSGFFSSGPSTSAFGREVDKMEQLEGKLHTYSLFGLPRLPRGLRFDHDSWEEEYDEDEDEDNACLRLEDSWRELIDGHEKLTRRQCHQQEAVWELLHTEASYIRKLRVIINLFLCCLLNLQESGLLCEVEAERLFSNIPEIAQLHRRLWASVMAPVLEKARRTRALLQPGDFLKGFKMETGIISLLPPWGGRPSAVRKRLRSAWRGPARRERAVT

SEQ ID NO: 406 - protein, 54 aa, Artificial Sequence
  Synthetic polypeptide
MFGACYKQPLKPSGSEPPAEECRMTPRHAGCDVTEMQRILSQPTFTEHLLRAVY

SEQ ID NO: 407 - protein, 54 aa, Artificial Sequence; identical to SEQ ID NO: 406
  Synthetic polypeptide

SEQ ID NO: 408 - protein, 54 aa, Artificial Sequence; identical to SEQ ID NO: 406
  Synthetic polypeptide

SEQ ID NO: 409 - protein, 54 aa, Artificial Sequence; identical to SEQ ID NO: 406
  Synthetic polypeptide

SEQ ID NO: 410 - protein, 234 aa, Artificial Sequence
  Synthetic polypeptide
MDMMLLVQGACCSNQWLAAVLLSLCCLLPSCLPAGQSVDFPWAAVDNMMVRKGDTAVLRCYLEDGASKGAWLNRSSIIFAGGDKWSVDPRVSISTLNKRDYSLQIQNVDVTDDGPYTCSVQTQHTPRTMQVHLTVQVPPKIYDISNDMTVNEGTNVTLTCLATGKPEPSISWRHISPSAKPFENGQYLDIYGITRDQAGEYECSAENDVSFPDVRKVKVVVNYQGKDLNISISY

SEQ ID NO: 411 - protein, 106 aa, Artificial Sequence
  Synthetic polypeptide
MQVHLTVQVPPKIYDISNDMTVNEGTNVTLTCLATGKPEPSISWRHISPSAKPFENGQYLDIYGITRDQAGEYECSAENDVSFPDVRKVKVVVNYQGKDLNISISY

SEQ ID NO: 412 - protein, 603 aa, Artificial Sequence
  Synthetic polypeptide
MADYSTVPPPSSGSAGGGGGGGGGGGVNDAFKDALQRARQIAAKIGGDAGTSLNSNDYGYGGQKRPLEDGDQPDAKKVAPQNDSFGTQLPPMHQQQRSVMTEEYKVPDGMVGFIIGRGGEQISRIQQESGCKIQIAPDSGGLPERSCMLTGTPESVQSAKRLLDQIVEKGRPAPGFHHGDGPGNAVQEIMIPASKAGLVIGKGGETIKQLQERAGVKMVMIQDGPQNTGADKPLRITGDPYKVQQAKEMVLELIRDQGGFREVRNEYGSRIGGNEGIDVPIPRFAVGIVIGRNGEMIKKIQNDAGVRIQFKPDDGTTPERIAQITGPPDRCQHAAEIITDLLRSVQAGNPGGPGPGGRGRGRGQGNWNMGPPGGLQEFNFIVPTGKTGLIIGKGGETIKSISQQSGARIELQRNPPPNADPNMKLFTIRGTPQQIDYARQLIEEKIGGPVNPLGPPVPHGPHGVPGPHGPPGPPGPGTPMGPYNPAPYNPGPPGPAPHGPPAPYAPQGWGNAYPHWQQQAPPDPAKAGTDPNSAAWAAYYAHYYQQQAQPPPAAPAGAPTTTQTNGQGDQQNPAPAGQVDYTKAWEEYYKKMGDRARPCLKTK

SEQ ID NO: 413 - protein, 604 aa, Artificial Sequence
  Synthetic polypeptide
MADYSTVPPPSSGSAGGGGGGGGGGGVNDAFKDALQRARQIAAKIGGDAGTSLNSNDYGYGGQKRPLEDGDQPDAKKVAPQNDSFGTQLPPMHQQQSRSVMTEEYKVPDGMVGFIIGRGGEQISRIQQESGCKIQIAPDSGGLPERSCMLTGTPESVQSAKRLLDQIVEKGRPAPGFHHGDGPGNAVQEIMIPASKAGLVIGKGGETIKQLQERAGVKMVMIQDGPQNTGADKPLRITGDPYKVQQAKEMVLELIRDQGGFREVRNEYGSRIGGNEGIDVPIPRFAVGIVIGRNGEMIKKIQNDAGVRIQFKPDDGTTPERIAQITGPPDRCQHAAEIITDLLRSVQAGNPGGPGPGGRGRGRGQGNWNMGPPGGLQEFNFIVPTGKTGLIIGKGGETIKSISQQSGARIELQRNPPPNADPNMKLFTIRGTPQQIDYARQLIEEKIGGPVNPLGPPVPHGPHGVPGPHGPPGPPGPGTPMGPYNPAPYNPGPPGPAPHGPPAPYAPQGWGNAYPHWQQQAPPDPAKAGTDPNSAAWAAYYAHYYQQQAQPPPAAPAGAPTTTQTNGQGDQQNPAPAGQVDYTKAWEEYYKKMGDRARPCLKTK

SEQ ID NO: 414 - protein, 604 aa, Artificial Sequence; identical to SEQ ID NO: 413
  Synthetic polypeptide

SEQ ID NO: 415 - protein, 625 aa, Artificial Sequence
  Synthetic polypeptide
MADYSTVPPPSSGSAGGGGGGGGGGGVNDAFKDALQRARQIAAKIGGDAGTSLNSNDYGYGGQKRPLEDGDGSWTSPSSTTHWEGMPSPFKDQPDAKKVAPQNDSFGTQLPPMHQQQSRSVMTEEYKVPDGMVGFIIGRGGEQISRIQQESGCKIQIAPDSGGLPERSCMLTGTPESVQSAKRLLDQIVEKGRPAPGFHHGDGPGNAVQEIMIPASKAGLVIGKGGETIKQLQERAGVKMVMIQDGPQNTGADKPLRITGDPYKVQQAKEMVLELIRDQGGFREVRNEYGSRIGGNEGIDVPIPRFAVGIVIGRNGEMIKKIQNDAGVRIQFKPDDGTTPERIAQITGPPDRCQHAAEIITDLLRSVQAGNPGGPGPGGRGRGRGQGNWNMGPPGGLQEFNFIVPTGKTGLIIGKGGETIKSISQQSGARIELQRNPPPNADPNMKLFTIRGTPQQIDYARQLIEEKIGGPVNPLGPPVPHGPHGVPGPHGPPGPPGPGTPMGPYNPAPYNPGPPGPAPHGPPAPYAPQGWGNAYPHWQQQAPPDPAKAGTDPNSAAWAAYYAHYYQQQAQPPPAAPAGAPTTTQTNGQGDQQNPAPAGQVDYTKAWEEYYKKMGDRARPCLKTK

SEQ ID NO: 416 - protein, 163 aa, Artificial Sequence
  Synthetic polypeptide
MVSSGCRMRSLWFIIVISFLPNTEGFSRAALPFGLVRRELSCEGYSIDLRCPGSDVIMIESANYGRTDDKICDADPFQMENTDCYLPDAFKIMTQRDISEGLCQLQSSRPEEFAGLLLRLHWSSPSHSPQPCICHGFNDSSKSTPNKPLRDLCLKSVLPLLSN

SEQ ID NO: 417 - protein, 163 aa, Artificial Sequence; identical to SEQ ID NO: 416
  Synthetic polypeptide

SEQ ID NO: 418 - protein, 163 aa, Artificial Sequence; identical to SEQ ID NO: 416
  Synthetic polypeptide

SEQ ID NO: 419 - protein, 163 aa, Artificial Sequence; identical to SEQ ID NO: 416
  Synthetic polypeptide

SEQ ID NO: 420 - protein, 163 aa, Artificial Sequence; identical to SEQ ID NO: 416
  Synthetic polypeptide

SEQ ID NO: 421 - protein, 163 aa, Artificial Sequence; identical to SEQ ID NO: 416
  Synthetic polypeptide

SEQ ID NO: 422 - protein, 163 aa, Artificial Sequence; identical to SEQ ID NO: 416
  Synthetic polypeptide

SEQ ID NO: 423 - protein, 163 aa, Artificial Sequence; identical to SEQ ID NO: 416
  Synthetic polypeptide

SEQ ID NO: 424 - protein, 163 aa, Artificial Sequence; identical to SEQ ID NO: 416
  Synthetic polypeptide

SEQ ID NO: 425 - protein, 163 aa, Artificial Sequence; identical to SEQ ID NO: 416
  Synthetic polypeptide

SEQ ID NO: 426 - protein, 163 aa, Artificial Sequence; identical to SEQ ID NO: 416
  Synthetic polypeptide

SEQ ID NO: 427 - protein, 163 aa, Artificial Sequence; identical to SEQ ID NO: 416
  Synthetic polypeptide

SEQ ID NO: 428 - protein, 163 aa, Artificial Sequence; identical to SEQ ID NO: 416
  Synthetic polypeptide

SEQ ID NO: 429 - protein, 163 aa, Artificial Sequence; identical to SEQ ID NO: 416
  Synthetic polypeptide

SEQ ID NO: 430 - protein, 350 aa, Artificial Sequence
  Synthetic polypeptide
MNECHYDKHMDFFYNRSNTDTVDDWTGTKLVIVLCVGTFFCLFIFFSNSLVIAAVIKNRKFHFPFYYLLANLAAADFFAGIAYVFLMFNTGPVSKTLTVNRWFLRQGLLDSSLTASLTNLLVIAVERHMSIMRMRVHSNLTKKRVTLLILLVWAIAIFMGAVPTLGWNCLCNISACSSLAPIYSRSYLVFWTVSNLMAFLIMVVVYLRIYVYVKRKTNVLSPHTSGSISRRRTPMKLMKTVMTVLGAFVVCWTPGLVVLLLDGLNCRQCGVQHVKRWFLLLALLNSVVNPIIYSYKDEDMYGTMKKMICCFSQENPERRPSRIPSTVLSRSDTGSQYIEDSISQDRSTAL

SEQ ID NO: 431 - protein, 350 aa, Artificial Sequence; identical to SEQ ID NO: 430
  Synthetic polypeptide

SEQ ID NO: 432 - protein, 1933 aa, Artificial Sequence
  Synthetic polypeptide
MAGRSHPGPLRPLLPLLVVAACVLPGAGGTCPERALERREEEANVVLTGTVEEILNVDPVQHTYSCKVRVWRYLKGKDLVARESLLDGGNKVVISGFGDPLICDNQVSTGDTRIFFVNPAPPYLWPAHKNELMLNSSLMRITLRNLEEVEFCVEDKPGTHFTPVPPTPPDACRGMLCGFGAVCEPNAEGPGRASCVCKKSPCPSVVAPVCGSDASTYSNECELQRAQCSQQRRIRLLSRGPCGSRDPCSNVTCSFGSTCARSADGLTASCLCPATCRGAPEGTVCGSDGADYPGECQLLRRACARQENVFKKFDGPCDPCQGALPDPSRSCRVNPRTRRPEMLLRPESCPARQAPVCGDDGVTYENDCVMGRSGAARGLLLQKVRSGQCQGRDQCPEPCRFNAVCLSRRGRPRCSCDRVTCDGAYRPVCAQDGRTYDSDCWRQQAECRQQRAIPSKHQGPCDQAPSPCLGVQCAFGATCAVKNGQAACECLQACSSLYDPVCGSDGVTYGSACELEATACTLGREIQVARKGPCDRCGQCRFGALCEAETGRCVCPSECVALAQPVCGSDGHTYPSECMLHVHACTHQISLHVASAGPCETCGDAVCAFGAVCSAGQCVCPRCEHPPPGPVCGSDGVTYGSACELREAACLQQTQIEEARAGPCEQAECGSGGSGSGEDGDCEQELCRQRGGIWDEDSEDGPCVCDFSCQSVPGSPVCGSDGVTYSTECELKKARCESQRGLYVAAQGACRGPTFAPLPPVAPLHCAQTPYGCCQDNITAARGVGLAGCPSACQCNPHGSYGGTCDPATGQCSCRPGVGGLRCDRCEPGFWNFRGIVTDGRSGCTPCSCDPQGAVRDDCEQMTGLCSCKPGVAGPKCGQCPDGRALGPAGCEADASAPATCAEMRCEFGARCVEESGSAHCVCPMLTCPEANATKVCGSDGVTYGNECQLKTIACRQGLQISIQSLGPCQEAVAPSTHPTSASVTVTTPGLLLSQALPAPPGALPLAPSSTAHSQTTPPPSSRPRTTASVPRTTVWPVLTVPPTAPSPAPSLVASAFGESGSTDGSSDEELSGDQEASGGGSGGLEPLEGSSVATPGPPVERASCYNSALGCCSDGKTPSLDAEGSNCPATKVFQGVLELEGVEGQELFYTPEMADPKSELFGETARSIESTLDDLFRNSDVKKDFRSVRLRDLGPGKSVRAIVDVHFDPTTAFRAPDVARALLRQIQVSRRRSLGVRRPLQEHVRFMDFDWFPAFITGATSGAIAAGATARATTASRLPSSAVTPRAPHPSHTSQPVAKTTAAPTTRRPPTTAPSRVPGRRPPAPQQPPKPCDSQPCFHGGTCQDWALGGGFTCSCPAGRGGAVCEKVLGAPVPAFEGRSFLAFPTLRAYHTLRLALEFRALEPQGLLLYNGNARGKDFLALALLDGRVQLRFDTGSGPAVLTSAVPVEPGQWHRLELSRHWRRGTLSVDGETPVLGESPSGTDGLNLDTDLFVGGVPEDQAAVALERTFVGAGLRGCIRLLDVNNQRLELGIGPGAATRGSGVGECGDHPCLPNPCHGGAPCQNLEAGRFHCQCPPGRVGPTCADEKSPCQPNPCHGAAPCRVLPEGGAQCECPLGREGTFCQTASGQDGSGPFLADFNGFSHLELRGLHTFARDLGEKMALEVVFLARGPSGLLLYNGQKTDGKGDFVSLALRDRRLEFRYDLGKGAAVIRSREPVTLGAWTRVSLERNGRKGALRVGDGPRVLGESPVPHTVLNLKEPLYVGGAPDFSKLARAAAVSSGFDGAIQLVSLGGRQLLTPEHVLRQVDVTSFAGHPCTRASGHPCLNGASCVPREAAYVCLCPGGFSGPHCEKGLVEKSAGDVDTLAFDGRTFVEYLNAVTESQAWWYTPVAPATPEAEAGGSLESRRLRQQQAVIAPLHSSLGDRARTCLK

SEQ ID NO: 433 - protein, 171 aa, Artificial Sequence
  Synthetic polypeptide
PLRPGQGGSGHQEQGASHPGSLDQGLTGAKRPQGCPACGRRPPCVGGVPEIPQGSAHRPQPEGAALRRGRSRLQQAGPCCCRVLWLRRCHPAGLPRRPPAADPGARAAAGGRHVLCRSPLHPGLRPPLPQWGLLRPEGGCLCVPVSRGILRTALREGAGGEVSGGRGYLGL

SEQ ID NO: 434 - protein, 316 aa, Artificial Sequence
  Synthetic polypeptide
MPLLPAALTSSMLYFQMVIMAGTVMLAYYFEYTDTFTVNVQGFFCHDSAYRKPYPGPEDSSAVPPVLLYSLAAGVPVLVIIVGETAVFCLQLATRDFENQEKTILTGDCCYINPLVRRTVRFLGIYTFGLFATDIFVNAGQVVTGNLAPHFLALCKPNYTALGCQQYTQFISGEEACTGNPDLIMRARKTFPSKEAALSVYAAMYLTMYITNTIKAKGTRLAKPVLCLGLMCLAFLTGLNRVAEYRNHWSDVIAGFLVGISIAVFLVVCVVNNFKGRQAENEHIHMDNLAQMPMISIPRVESPLEKVTSVQEFQNS

SEQ ID NO: 435 - protein, 311 aa, Artificial Sequence
  Synthetic polypeptide
MPLLPAALTSSMLYFQMVIMAGTVMLAYYFEYTDTFTVNVQGFFCHDSAYRKPYPGPEDSSAVPPVLLYSLAAGVPVLVIIVGETAVFCLQLATRDFENQEKTILTGDCCYINPLVRRTVRFLGIYTFGLFATDIFVNAGQVVTGNLAPHFLALCKPNYTALGCQQYTQFISGEEACTGNPDLIMRARKTFPSKEAALSVYAAMYLTMYITNTIKAKGTRLAKPVLCLGLMCLAFLTGLNRVAEYRNHWSDVIAGFLVGISIAVFLVVCVVNNFKGRQAENEHIHMDNLAQMPMISIPRVESPLEKEFQNS

SEQ ID NO: 436 - protein, 311 aa, Artificial Sequence; identical to SEQ ID NO: 435
  Synthetic polypeptide

SEQ ID NO: 437 - protein, 77 aa, Artificial Sequence
  Synthetic polypeptide
MAASGRGLCKAVAASPFPAWRRDNTEARGGLKPEYDAVVIGAGRHLGFRCWLCCVAWGKCLPSLGLDLPMENDRKTR

SEQ ID NO: 438 - protein, 344 aa, Artificial Sequence
  Synthetic polypeptide
MAALRDAEIQKDVQTYYGQVLKRSADLQTNGCVTTARPVPKHIREALQNVHEEVALRYYGCGLVIPEHLENCWILDLGSGSGRDCYVLSQLVGEKGHVTGIDMTKGQVEVAEKYLDYHMEKYGFQASNVTFIHGYIEKLGEAGIKNESHDIVVSNCVINLVPDKQQVLQEAYRVLKHGGELYFSDVYTSLELPEEIRTHKVLWGECLGGALYWKELAVLAQKIGFCPPRLVTANLITIQNKELERVIGDCRFVSATFRLFKHSKTGPTKRCQVIYNGGITGHEKELMFDANFTFKEGEIVEVDEETAAILKNSRFAQDFLIRPIGEKLPTSGGCSALELKVFGL

SEQ ID NO: 439 - protein, 43 aa, Artificial Sequence
  Synthetic polypeptide
MSSDFEGYEQDFAVLTAEITSKIARVPRLPPAHLIFYARLSTM

SEQ ID NO: 440 - protein, 43 aa, Artificial Sequence; identical to SEQ ID NO: 439
  Synthetic polypeptide

SEQ ID NO: 441 - protein, 129 aa, Artificial Sequence
  Synthetic polypeptide
MPPFLLLEAVCVFLFSRVPPSLPLQEVHVSKETIGKISAASKMMWCSAAVDIMFLLDGSNSVGKGSFERSKHFAITVCDGLDISPERVRVGAFQFSSTPHLEFPLDSFSTQQEVKARIKRMVFKSHFFN

SEQ ID NO: 442 - protein, 129 aa, Artificial Sequence; identical to SEQ ID NO: 441
  Synthetic polypeptide

SEQ ID NO: 443 - protein, 159 aa, Artificial Sequence
  Synthetic polypeptide
MLPLWTLSLLLGAVAGKEVCYERLGCFSDDSPWSGITERPLHILPWSPKDVNTRFLLYTNENPNNFQEVAADSSSISGSNFKTNRKTRFIIHGFIDKGEENWLANVCKNLFKVESVNCICVDWKGGSRTGYTQASQNIRIVGAEVAYFVEFLQYTPSTY

SEQ ID NO: 444 - protein, 41 aa, Artificial Sequence
  Synthetic polypeptide
MLPPWTLGLLLLATVRGKESATDNLAAFLMKNHGQEPFSDL

SEQ ID NO: 445 - protein, 161 aa, Artificial Sequence
  Synthetic polypeptide
MLPPWTLGLLLLATVRGRKVCYGQLGCFSDEKPWAGTLQRPVKLLPWSPEDIDTRFLLYTNENPNNFQLITGTEPDTIEASNFQLDRKTRFIIHGFLDKAEDSWPSDMCKKMFEVEKVNCICVDWRHGSRAMYTQAVQNIRVVGAETAFLIQALSAVLQGS

SEQ ID NO: 446 - protein, 314 aa, Artificial Sequence
  Synthetic polypeptide
MSLEQEEETQPGRLLGRRDAVPAFIEPNVRFWITERQSFIRRFLQWTELLDPTNVFISVESIENSRQLLCTNEDVSSPASADQRIQEAWKRSLATVHPDSSNLIPKLFRPAAFLPFMAPTVFLSMTPLKGIKSVILPQVFLCAYMAAFNSINGNRSYTCKPLERSLLMAGAVASSTFLGVIPQFVQMKYGLTGPWIKRLLPVIFLVQASGMNVYMSRSLESIKGIAVMDKEGNVLGHSRIAGTKAVRETLASRIVLFGTSALIPEVFTYFFKRTQYFRKNPGSLWILKLSCTVLAMGLMVPFSFSIFPQIGQVT

SEQ ID NO: 447 - protein, 305 aa, Artificial Sequence
  Synthetic polypeptide
MSLEQEEETQPGRLLGRRDAVPAFIEPNVRFWITERQSFIRRFLQWTELLDPTNVFISVESIENSRQLLCTNEDVSSPASADQRATVHPDSSNLIPKLFRPAAFLPFMAPTVFLSMTPLKGIKSVILPQVFLCAYMAAFNSINGNRSYTCKPLERSLLMAGAVASSTFLGVIPQFVQMKYGLTGPWIKRLLPVIFLVQASGMNVYMSRSLESIKGIAVMDKEGNVLGHSRIAGTKAVRETLASRIVLFGTSALIPEVFTYFFKRTQYFRKNPGSLWILKLSCTVLAMGLMVPFSFSIFPQIGQVT

SEQ ID NO: 448 - protein, 204 aa, Artificial Sequence
  Synthetic polypeptide
MPYVDRQNRICGFLDIEENENSGKFLRRYFILDTREDSFVWYMDNPQNLPSGSSRVGAIKLTYISKVSDATKLRPKAEFCFVMNAGMRKYFLQANDQQDLVEWVNVLNKAIKITVPKQSDSQPNSDNLSRHGECGKKQVSYRTDIVGGVPIITPTQAKIGKLDLIKIKNTCSMKDLLKRMKRKATNWEKIFANHMSNKGLLSRT

SEQ ID NO: 449 - protein, 204 aa, Artificial Sequence; identical to SEQ ID NO: 448
  Synthetic polypeptide

SEQ ID NO: 450 - protein, 204 aa, Artificial Sequence; identical to SEQ ID NO: 448
  Synthetic polypeptide

SEQ ID NO: 451 - protein, 204 aa, Artificial Sequence; identical to SEQ ID NO: 448
  Synthetic polypeptide

SEQ ID NO: 452 - protein, 204 aa, Artificial Sequence; identical to SEQ ID NO: 448
  Synthetic polypeptide

SEQ ID NO: 453 - protein, 204 aa, Artificial Sequence; identical to SEQ ID NO: 448
  Synthetic polypeptide

SEQ ID NO: 454 - protein, 247 aa, Artificial Sequence
  Synthetic polypeptide
MAPWGKRLAGVRGVLLDISGVLYDSGAGGGTAIAGSVEAVARLKRSRLKVRFCTNESQKSRAELVGQLQRLGFDISEQEVTAPAPAACQILKEQGLRPYLLIHDGVRSEFDQIDTSNPNCVVIADAGESFSYQNMNNAFQVLMELEKPVLISLGKGRYYKETSGLMLDVGPYMKALEYACGIKAEVVGKPSPEFFKSALQAIGVEAHQAVMIGDDIVGDVGGAQRCGMRALQVRTGKFRSCRKKKQI

SEQ ID NO: 455 - protein, 234 aa, Artificial Sequence
  Synthetic polypeptide
MKVLLLKDAKEDDCGQDPYIRELGLYGLEATLIPVLSFEFLSLPSFSEKLSHPEDYGGLIFTSPRAVEAAELCLEQNNKTEVWERSLKEKWNAKSVYVVGNATASLVSKIGLDTEGETCGNAEKLAEYICSRESSALPLLFPCGNLKREILPKALKDKGIAMESITVYQTVAHPGIQGNLNSYYSQQGVPASITFFSPSGLTYSLKHIQELSGDNIDQIKIEELELQWASWALR

SEQ ID NO: 456 - protein, 234 aa, Artificial Sequence; identical to SEQ ID NO: 455
  Synthetic polypeptide

SEQ ID NO: 457 - protein, 67 aa, Artificial Sequence
  Synthetic polypeptide
MAARPLPVSPARALLLALAGALLAPCEARGVSLWNQGRADEVVSASVGSGDLWIPVKSFDSKKMCIN

SEQ ID NO: 458 - protein, 67 aa, Artificial Sequence; identical to SEQ ID NO: 457
  Synthetic polypeptide

SEQ ID NO: 459 - protein, 67 aa, Artificial Sequence; identical to SEQ ID NO: 457
  Synthetic polypeptide

SEQ ID NO: 460 - protein, 17 aa, Artificial Sequence
  Synthetic polypeptide
MTRWVPTKREEKYGVAP

SEQ ID NO: 461 - protein, 534 aa, Artificial Sequence
  Synthetic polypeptide
MQAGARFQRRRRQLQQQQPRRRQPLLWPMDAEPPPPPPWVWMVPGSAGLLRLSAGVVVPPVLLASAPPPAAPLLPGLPGWPAPSEPVLPLLPLPSAPDSAAAAAAHPFPALHGQWLFGGHSPSLGLPPSSTVELVPVFPHLCPSALATPIGKSWIDKRIPNCKIFFNNSFALDSTWIHPEESRFFHGHEKPRLLANQVAVSLSRPAPASRPLPTVVLAPQPIPGGCHNSLKVTSSPAIAIATAAAAAMVSVDPENLRGPSPSSVQPRHFLTLAPIKIPLRTSPVSDTRTERGRVARPPALMLRAQKSRDGDKEDKEPPPMLGGGEDSTARGNRPVASTPVPGSPWCVVWTGDDRVFFFNPTMHLSVWEKPMDLKDRGDLNRIIEDPPHKRKLEAPATDNSDGSSSEDNREDQDVKTKRNRTEGCGSPKPEEAKREDKGTRTPPPQILLPLEERVTHFRDMLLERGAIYEENLRQIPTEECPAMHLTRAPQTIKVINGKGHLRPCHSQEESKEIWQRNVMRSLAEMENWVKPKEI

SEQ ID NO: 462 - protein, 232 aa, Artificial Sequence
  Synthetic polypeptide
MQAGARFQRRRRQLQQQQPRRRQPLLWPMDAEPPPPPPWVWMVPGSAGLLRLSAGVVVPPVLLASAPPPAAPLLPGLPGWPAPSEPVLPLLPLPSAPDSAAAAAAHPFPALHGQWLFGGHSPSLGLPPSSTVELVPVFPHLCPSALATPIGKSWIDKRIPNCKIFFNNSFALDSTWIHPEESRFFHGHEKPRLLANQVAVSLSRPAPASRPLPTVVLAPQPIPGVSRRLWRK

SEQ ID NO: 463 - protein, 174 aa, Artificial Sequence
  Synthetic polypeptide
MSTWKARLTKRLKSPSRSMHPFPCSALLACFGNTRESASFNQSGVADTHSTVRVQPVAKAGRQPRHPSAEGAPEKRQDSSTHAERNGSANRNSSHRTAAQPAETPEDVPGSLDDGADCEAVVFHASIPRPSIIDTPKEEEFREEPKCLELEQKMTSGPDILPGPRWMHGCLLNE

SEQ ID NO: 464 - protein, 174 aa, Artificial Sequence; identical to SEQ ID NO: 463
  Synthetic polypeptide

SEQ ID NO: 465 - protein, 495 aa, Artificial Sequence
  Synthetic polypeptide
MAEDSESAASQQSLELDDQDTCGIDGDNEEETEHAKGSPGGYLGAKKKKKKQKRKKEKPNSGGTKSDSASDSQEIKIQQPSKNPSVPMQKLQDIQRAMELLSACQGPARNIDEAAKHRYQFWDTQPVPKLDEVITSHGAIEPDKDNVRQEPYSLPQGFMWDTLDLSDAEVLKELYTLLNENYVEDDDNMFRFDYSPEFLLWALRPPGWLLQWHCGVRVSSNKKLVGFISAIPANIRIYDSVKKMVEINFLCVHKKLRSKRVAPVLIREITRRVNLEGIFQAVYTAGVVLPKPIATCRYWHRSLNPRKLVEVKFSHLSRNMTLQRTMKLYRLPDVTKTSGLRPMEPKDIKSVRELINTYLKQFHLAPVMDEEEVAHWFLPREHIIDTFVVESPNGKLTDFLSFYTLPSTVMHHPAHKSLKAAYSFYNIHTETPLLDLMSDALILAKSKGFDVFNALDLMENKTFLEKLKFGIGDGNLQYYLYNWRCPGTDSEKKVC

SEQ ID NO: 466 - protein, 482 aa, Artificial Sequence
  Synthetic polypeptide
MRRRRSTPKEVLEGIWEPKRKRRNRREKRRNQIPEAPSQTRHLIPRRLKFSSLRNTTPSGSRFQREQPWNPSVPMQKLQDIQRAMELLSACQGPARNIDEAAKHRYQFWDTQPVPKLDEVITSHGAIEPDKDNVRQEPYSLPQGFMWDTLDLSDAEVLKELYTLLNENYVEDDDNMFRFDYSPEFLLWALRPPGWLLQWHCGVRVSSNKKLVGFISAIPANIRIYDSVKKMVEINFLCVHKKLRSKRVAPVLIREITRRVNLEGIFQAVYTAGVVLPKPIATCRYWHRSLNPRKLVEVKFSHLSRNMTLQRTMKLYRLPDVTKTSGLRPMEPKDIKSVRELINTYLKQFHLAPVMDEEEVAHWFLPREHIIDTFVVESPNGKLTDFLSFYTLPSTVMHHPAHKSLKAAYSFYNIHTETPLLDLMSDALILAKSKGFDVFNALDLMENKTFLEKLKFGIGDGNLQYYLYNWRCPGTDSEKKVC

SEQ ID NO: 467 - protein, 307 aa, Artificial Sequence
  Synthetic polypeptide
MFRFDYSPEFLLWALRPPGWLLQWHCGVRVSSNKKLVGFISAIPANIRIYDSVKKMVEINFLCVHKKLRSKRVAPVLIREITRRVNLEGIFQAVYTAGVVLPKPIATCRYWHRSLNPRKLVEVKFSHLSRNMTLQRTMKLYRLPDVTKTSGLRPMEPKDIKSVRELINTYLKQFHLAPVMDEEEVAHWFLPREHIIDTFVVESPNGKLTDFLSFYTLPSTVMHHPAHKSLKAAYSFYNIHTETPLLDLMSDALILAKSKGFDVFNALDLMENKTFLEKLKFGIGDGNLQYYLYNWRCPGTDSEKKVC

SEQ ID NO: 468 - protein, 482 aa, Artificial Sequence
  Synthetic polypeptide
MASPWRGAHEVLEGIWEPKRKRRNRREKRRNQIPEAPSQTRHLIPRRLKFSSLRNTTPSGSRFQREQPWNPSVPMQKLQDIQRAMELLSACQGPARNIDEAAKHRYQFWDTQPVPKLDEVITSHGAIEPDKDNVRQEPYSLPQGFMWDTLDLSDAEVLKELYTLLNENYVEDDDNMFRFDYSPEFLLWALRPPGWLLQWHCGVRVSSNKKLVGFISAIPANIRIYDSVKKMVEINFLCVHKKLRSKRVAPVLIREITRRVNLEGIFQAVYTAGVVLPKPIATCRYWHRSLNPRKLVEVKFSHLSRNMTLQRTMKLYRLPDVTKTSGLRPMEPKDIKSVRELINTYLKQFHLAPVMDEEEVAHWFLPREHIIDTFVVESPNGKLTDFLSFYTLPSTVMHHPAHKSLKAAYSFYNIHTETPLLDLMSDALILAKSKGFDVFNALDLMENKTFLEKLKFGIGDGNLQYYLYNWRCPGTDSEKKVC

SEQ ID NO: 469 - protein, 1405 aa, Artificial Sequence
  Synthetic polypeptide
MMNMSLPFLWSLLTLLIFAEVNGEAGELELQRQKRSINLQQPRMATERGNLVFLTGSAQNIEFRTGSLGKIKLNDEDLSECLHQIQKNKEDIIELKGSAIGLPQNISSQIYQLNSKLVDLERKFQGLQQTVDKKVCSSNPCQNGGTCLNLHDSFFCICPPQWKGPLCSADVNECEIYSGTPLSCQNGGTCVNTMGSYSCHCPPETYGPQCASKYDDCEGGSVARCVHGICEDLMREQAGEPKYSCVCDAGWMFSPNSPACTLDRDECSFQPGPCSTLVQCFNTQGSFYCGACPTGWQGNGYICEDINECEINNGGCSVAPPVECVNTPGSSHCQACPPGYQGDGRVCTLTDICSVSNGGCHPDASCSSTLGSLPLCTCLPGYTGNGYGPNGCVQLSNICLSHPCLNGQCIDTVSGYFCKCDSGWTGVNCTENINECLSNPCLNGGTCVDGVDSFSCECTRLWTGALCQVPQQVCGESLSGINGSFSYRSPDVGYVHDVNCFWVIKTEMGKVLRITFTFFRLESMDNCPHEFLQVYDGDSSSAFQLGRFCGSSLPHELLSSDNALYFHLYSEHLRNGRGFTVRWETQQPECGGILTGPYGSIKSPGYPGNYPPGRDCVWIVVTSPDLLVTFTFGTLSLEHHDDCNKDYLEIRDGPLYQDPLLGKFCTTFSVPPLQTTGPFARIHFHSDSQISDQGFHITYLTSPSDLRCGGNYTDPEGELFLPELSGPFTHTRQCVYMMKQPQGEQIQINFTHVELQCQSDSSQNYIEVRDGETLLGKVCGNGTISHIKSITNSVWIRFKIDASVEKASFRAVYQVACGDELTGEGVIRSPFFPNVYPGERTCRWTIHQPQSQVILLNFTVFEIGSSAHCETDYVEIGSSSILGSPENKKYCGTDIPSFITSVYNFLYVTFVKSSSTENHGFMAKFSAEDLACGEILTESTGTIQSPGHPNVYPHGINCTWHILVQPNHLIHLMFETFHLEFHYNCTNDYLEVYDTDSETSLGRYCGKSIPPSLTSSGNSLMLVFVTDSDLAYEGFLINYEAISAATACLQDYTDDLGTFTSPNFPNNYPNNWECIYRITVRTGQLIAVHFTNFSLEEAIGNYYTDFLEIRDGGYEKSPLLGIFYGSNLPPTIISHSNKLWLKFKSDQIDTRSGFSAYWDGSSTGCGGNLTTSSGTFISPNYPMPYYHSSECYWWLKSSHGSAFELEFKDFHLEHHPNCTLDYLAVYDGPSSNSHLLTQLCGDEKPPLIRSSGDSMFIKLRTDEGQQGRGFKAEYRQTCENVVIVNQTYGILESIGYPNPYSENQHCNWTIRATTGNTVNYTFLAFDLEHHINCSTDYLELYDGPRQMGRYCGVDLPPPGSTTSSKLQVLLLTDGVGRREKGFQMQWFVYESRPSGYRWSYKWNPK

SEQ ID NO: 470 - protein, 114 aa, Artificial Sequence
  Synthetic polypeptide
MRPGGALLALLASLLLLLLLRLLWCPADAPGRARILVEESREATHGTPAALRTLRSPATAVPRATNSTYLNEKSLQLTEKCKNLQYGIESFSNKTKGPSPKAQGGLRHQRASAR

SEQ ID NO: 471 - protein, 471 aa, Artificial Sequence
  Synthetic polypeptide
PRDHSLNASQGHFMFILKKSSSLWQVAKLQSPTFSQTGPGCILSFWFYNYGLSVGAAELQLHMENSHDSTVIWRVLYNQGKQWLEATIQLGRLSQPFHLSLDKVSLGIYDGVSAIDDIRFENCTLPLPAESCEGLDHFWCRHTRACIEKLRLCDLVDDCGDRTDEVNCAPELQCNFETGICNWEQDAKDDFDWTRSQGPTPTLNTGPMKDNTLGTAKGHYLYIESSEPQAFQDSAALLSPILNATDTKGCTFRFYYHMFGKRIYRLAIYQRIWSDSRGQLLWQIFGNQGNRWIRKHLNISSRQPFQILVEASVGDGFTGDIAIDDLSFMDCTLYPGNLPADLPTPPETSVPVTLPPHNCTDNEFICRSDGHCIEKMQKCDFKYDCPDKSDEASCVMEVCSFEKRSLCKWYQPIPVHLLQDSNTFRWGLGNGISIHHGEENHRPSVDHTQKSRRNGYIPRHIHSPKTKPGRS

SEQ ID NO: 472 - protein, 458 aa, Artificial Sequence
  Synthetic polypeptide
MFILKKSSSLWQVAKLQSPTFSQTGPGCILSFWFYNYGLSVGAAELQLHMENSHDSTVIWRVLYNQGKQWLEATIQLGRLSQPFHLSLDKVSLGIYDGVSAIDDIRFENCTLPLPAESCEGLDHFWCRHTRACIEKLRLCDLVDDCGDRTDEVNCAPELQCNFETGICNWEQDAKDDFDWTRSQGPTPTLNTGPMKDNTLGTAKGHYLYIESSEPQAFQDSAALLSPILNATDTKGCTFRFYYHMFGKRIYRLAIYQRIWSDSRGQLLWQIFGNQGNRWIRKHLNISSRQPFQILVEASVGDGFTGDIAIDDLSFMDCTLYPGNLPADLPTPPETSVPVTLPPHNCTDNEFICRSDGHCIEKMQKCDFKYDCPDKSDEASCVMEVCSFEKRSLCKWYQPIPVHLLQDSNTFRWGLGNGISIHHGEENHRPSVDHTQKSRRNGYIPRHIHSPKTKPGRS

SEQ ID NO: 473 - protein, 361 aa, Artificial Sequence
  Synthetic polypeptide
MTAPCSQPAQLPGRRQLGLVPFPPPPPRTPLLWLLLLLLAAVAPARGWESGDLELFDLVEEVQLNFYQFLGVQQDASSADIRKAYRKLSLTLHPDKNKDENAETQFRQLVAIYEVLKDDERRQRYDDILINGLPDWRQPVFYYRRVRKMSNAELALLLFIILTVGHYAVVWSIYLEKQLDELLSRKKREKKKKTGSKSVDVSKLGASEKNERLLMKPQWHDLLPCKLGIWFCLTLKALPHLIQDAGQFYAKYKETRLKEKEDALTRTELETLQKQKKVKKPKPEFPVYTPLETTYIQSYDHGTSIEEIEEQMDDWLENRNRTQKKQEIVTDTPTFTNHHPSESAATNMNARPSTNRKIMTC

SEQ ID NO: 474 - protein, 121 aa, Artificial Sequence
  Synthetic polypeptide
MARLLWLLRGLTLGTAPRRAVRGQAGGGGPGTGPGLGEAGSLATCELPLAKSEWQKKLTPEQFYVTREKGTEPPFSGIYLNNKEAGMYHCVCCDSPLFRSFLKSLPEADASTMLLIKPAEL

SEQ ID NO: 475 - protein, 18 aa, Artificial Sequence
  Synthetic polypeptide
GLLQRVSCLLPRVSGKRN

SEQ ID NO: 476 - protein, 742 aa, Artificial Sequence
  Synthetic polypeptide
MDADDSRAPKGSLRKFLEHLSGAGKAIGVLTSGGDAQGMNAAVRAVVRMGIYVGAKVYFIYEGYQGMVDGGSNIAEADWESVSSILQVGGTIIGSARCQAFRTREGRLKAACNLLQRGITNLCVIGGDGSLTGANLFRKEWSGLLEELARNGQIDKEAVQKYAYLNVVGMVGSIDNDFCGTDMTIGTDSALHRIIEVVDAIMTTAQSHQRTFVLEVMGRHCGYLALVSALACGADWVFLPESPPEEGWEEQMCVKLSENRARKKRLNIIIVAEGAIDTQNKPITSEKIKELVVTQLGYDTRVTILGHVQRGGTPSAFDRILASRMGVEAVIALLEATPDTPACVVSLNGNHAVRLPLMECVQMTQDVQKAMDERRFQDAVRLRGRSFAGNLNTYKRLAIKLPDDQIPKTNCNVAVINVGAPAAGMNAAVRSAVRVGIADGHRMLAIYDGFDGFAKGQIKEIGWTDVGGWTGQGGSILGTKRVLPGKYLEEIATQMRTHSINALLIIGGFEAYLGLLELSAAREKHEEFCVPMVMVPATVSNNVPGSDFSIGADTALNTITDTCDRIKQSASGTKRRVFIIETMGGYCGYLANMGGLAAGADAAYIFEEPFDIRDLQSNVEHLTEKMKTTIQRGLVLRNESCSENYTTDFIYQLYSEEGKGVFDCRKNVLGHMQQGGAPSPFDRNFGTKISARAMEWITAKLKEARGRGKKFTTDDSICVLGISKRNVIFQPVAELKKQTDFE

SEQ ID NO: 477 - protein, 734 aa, Artificial Sequence
  Synthetic polypeptide
MCGYERCRPCRGAHGYLRGGQGVLHLRGLPGHGGRRLKHRRGRLGECLQHPASGAVRGDWREKPGCWSHRFPCPGRHALVGGTIIGSARCQAFRTREGRLKAACNLLQRGITNLCVIGGDGSLTGANLFRKEWSGLLEELARNGQIDKEAVQKYAYLNVVGMVGSIDNDFCGTDMTIGTDSALHRIIEVVDAIMTTAQSHQRTFVLEVMGRHCGYLALVSALACGADWVFLPESPPEEGWEEQMCVKLSENRARKKRLNIIIVAEGAIDTQNKPITSEKIKELVVTQLGYDTRVTILGHVQRGGTPSAFDRILASRMGVEAVIALLEATPDTPACVVSLNGNHAVRLPLMECVQMTQDVQKAMDERRFQDAVRLRGRSFAGNLNTYKRLAIKLPDDQIPKTNCNVAVINVGAPAAGMNAAVRSAVRVGIADGHRMLAIYDGFDGFAKGQIKEIGWTDVGGWTGQGGSILGTKRVLPGKYLEEIATQMRTHSINALLIIGGFEAYLGLLELSAAREKHEEFCVPMVMVPATVSNNVPGSDFSIGADTALNTITDTCDRIKQSASGTKRRVFIIETMGGYCGYLANMGGLAAGADAAYIFEEPFDIRDLQSNVEHLTEKMKTTIQRGLVLRNESCSENYTTDFIYQLYSEEGKGVFDCRKNVLGHMQQGGAPSPFDRNFGTKISARAMEWITAKLKEARGRGKKFTTDDSICVLGISKRNVIFQPVAELKKQTDFE

SEQ ID NO: 478 - protein, 160 aa, Artificial Sequence
  Synthetic polypeptide
MGGYCGYLANMGGLAAGADAAYIFEEPFDIRDLQSNVEHLTEKMKTTIQRGLVLRNESCSENYTTDFIYQLYSEEGKGVFDCRKNVLGHMQQGGAPSPFDRNFGTKISARAMEWITAKLKEARGRGKKFTTDDSICVLGISKRNVIFQPVAELKKQTDFE

SEQ ID NO: 479 - protein, 74 aa, Artificial Sequence
  Synthetic polypeptide
TSFTSCIQKRAKACLTAGRTCWVTCSRVGHPLHLIETLEPKSLPELWSGSLQNSRRPGAEEKNLPPMIPFVCWE

SEQ ID NO: 480 - protein, 825 aa, Artificial Sequence
  Synthetic polypeptide
MNLQPIFWIGLISSVCCVFAQTDENRCLKANAKSCGECIQAGPNCGWCTNSTFLQEGMPTSARCDDLEALKKKGCPPDDIENPRGSKDIKKNKNVTNRSKGTAEKLKPEDITQIQPQQLVLRLRSGEPQTFTLKFKRAEDYPIDLYYLMDLSYSMKDDLENVKSLGTDLMNEMRRITSDFRIGFGSFVEKTVMPYISTTPAKLRNPCTSEQNCTSPFSYKNVLSLTNKGEVFNELVGKQRISGNLDSPEGGFDAIMQVAVCGSLIGWRNVTRLLVFSTDAGFHFAGDGKLGGIVLPNDGQCHLENNMYTMSHYYDYPSIAHLVQKLSENNIQTIFAVTEEFQPVYKELKNLIPKSAVGTLSANSSNVIQLIIDAYNSLSSEVILENGKLSEGVTISYKSYCKNGVNGTGENGRKCSNISIGDEVQFEISITSNKCPKKDSDSFKIRPLGFTEEVEVILQYICECECQSEGIPESPKCHEGNGTFECGACRCNEGRVGRHCECSTDEVNSEDMDAYCRKENSSEICSNNGECVCGQCVCRKRDNTNEIYSGKFCECDNFNCDRSNGLICGGNGVCKCRVCECNPNYTGSACDCSLDTSTCEASNGQICNGRGICECGVCKCTDPKFQGQTCEMCQTCLGVCAEHKECVQCRAFNKGEKKDTCTQECSYFNITKVESRDKLPQPVQPDPVSHCKEKDVDDCWFYFTYSVNGNNEVMVHVVENPECPTGPDIIPIVAGVVAGIVLIGLALLLIWKLLMIIHDRREFAKFEKEKMNAKWDTIYSPTFSSYCMFQRVNLQRVNQWACLLSGFQVNSASGTMAGDQREEIQ

SEQ ID NO: 481 - protein, 825 aa, Artificial Sequence; identical to SEQ ID NO: 480
  Synthetic polypeptide

SEQ ID NO: 482 - protein, 825 aa, Artificial Sequence; identical to SEQ ID NO: 480
  Synthetic polypeptide

SEQ ID NO: 483 - protein, 825 aa, Artificial Sequence; identical to SEQ ID NO: 480
  Synthetic polypeptide

SEQ ID NO: 484 - protein, 26 aa, Artificial Sequence
  Synthetic polypeptide
CSWCGCWNCSYWPCITADMEAFNDNS

SEQ ID NO: 485 - protein, 1165 aa, Artificial Sequence
  Synthetic polypeptide
MTKRKKTINLNIQDAQKRTALHWACVNGHEEVVTFLVDRKCQLDVLDGEHRTPLMKALQCHQEACANILIDSGADINLVDVYGNTALHYAVYSEILSVVAKLLSHGAVIEVHNKASLTPLLLSITKRSEQIVEFLLIKNANANAVNKYKCTALMLAVCHGSSEIVGMLLQQNVDVFAADICGVTAEHYAVTCGFHHIHEQIMEYIRKLSKNHQNTNPEGTSAGTPDEAAPLAERTPDTAESLVEKTPDEAAPLVERTPDTAESLVEKTPDEAASLVEGTSDKIQCLEKATSGKFEQSAEETPREITSPAKETSEKFTWPAKGRPRKIAWEKKEDTPREIMSPAKETSEKFTWAAKGRPRKIAWEKKETPVKTGCVARVTSNKTKVLEKGRSKMIACPTKESSTKASANDQRFPSESKQEEDEEYSCDSRSLFESSAKIQVCIPESIYQKVMEINREVEEPPKKPSAFKPAIEMQNSVPNKAFELKNEQTLRADPMFPPESKQKDYEENSWDSESLCETVSQKDVCLPKATHQKEIDKINGKLEESPNKDGLLKATCGMKVSIPTKALELKDMQTFKAEPPGKPSAFEPATEMQKSVPNKALELKNEQTLRADEILPSESKQKDYEENSWDTESLCETVSQKDVCLPKAAHQKEIDKINGKLEGSPVKDGLLKANCGMKVSIPTKALELMDMQTFKAEPPEKPSAFEPAIEMQKSVPNKALELKNEQTLRADEILPSESKQKDYEESSWDSESLCETVSQKDVCLPKATHQKEIDKINGKLEESPDNDGFLKAPCRMKVSIPTKALELMDMQTFKAEPPEKPSAFEPAIEMQKSVPNKALELKNEQTLRADQMFPSESKQKKVEENSWDSESLRETVSQKDVCVPKATHQKEMDKISGKLEDHSAIKLELRIKNLTQNHLTTWKLNNLLQNDYWVHNEIKAEINMFFETDENKGTTYQNLWDTFKAVCRGKFIALNAHKRKQERSKIDTLTSQLKELEKQEQTHSKASRRQEITKIRAELKEIETQKILQKINESRSWFFEKINKYDRLLARLIKKKSEKNQIDTIKNDKGDITTDPTEIQTTIREYYKHLYANKLENLEKMDKFLDSYTLPRLNQEGESPNRPITGSVIEAIINSLPTKKSPGLDRFPAKFYQRYKEELIPFLLK

SEQ ID NO: 486 - protein, 1165 aa, Artificial Sequence; identical to SEQ ID NO: 485
  Synthetic polypeptide

SEQ ID NO: 487 - protein, 1284 aa, Artificial Sequence
  Synthetic polypeptide
MTKRKKTINLNIQDAQKRTALHWACVNGHEEVVTFLVDRKCQLDVLDGEHRTPLMKALQCHQEACANILIDSGADINLVDVYGNTALHYAVYSEILSVVAKLLSHGAVIEVHNKASLTPLLLSITKRSEQIVEFLLIKNANANAVNKYKCTALMLAVCHGSSEIVGMLLQQNVDVFAADICGVTAEHYAVTCGFHHIHEQIMEYIRKLSKNHQNTNPEGTSAGTPDEAAPLAERTPDTAESLVEKTPDEAAPLVERTPDTAESLVEKTPDEAASLVEGTSDKIQCLEKATSGKFEQSAEETPREITSPAKETSEKFTWPAKGRPRKIAWEKKEDTPREIMSPAKETSEKFTWAAKGRPRKIAWEKKETPVKTGCVARVTSNKTKVLEKGRSKMIACPTKESSTKASANDQRFPSESKQEEDEEYSCDSRSLFESSAKIQVCIPESIYQKVMEINREVEEPPKKPSAFKPAIEMQNSVPNKAFELKNEQTLRADPMFPPESKQKDYEENSWDSESLCETVSQKDVCLPKATHQKEIDKINGKLEESPNKDGLLKATCGMKVSIPTKALELKDMQTFKAEPPGKPSAFEPATEMQKSVPNKALELKNEQTLRADEILPSESKQKDYEENSWDTESLCETVSQKDVCLPKAAHQKEIDKINGKLEGSPVKDGLLKANCGMKVSIPTKALELMDMQTFKAEPPEKPSAFEPAIEMQKSVPNKALELKNEQTLRADEILPSESKQKDYEESSWDSESLCETVSQKDVCLPKAAHQKEIDKINGKLEGSPVKDGLLKANCGMKVSIPTKALELMDMQTFKAEPPEKPSAFEPAIEMQKSVPNKALELKNEQTLRADEILPSESKQKDYEESSWDSESLCETVSQKDVCLPKATHQKEIDKINGKLEESPDNDGFLKAPCRMKVSIPTKALELMDMQTFKAEPPEKPSAFEPAIEMQKSVPNKALELKNEQTLRADQMFPSESKQKKVEENSWDSESLRETVSQKDVCVPKATHQKEMDKISGKLEDHSAIKLELRIKNLTQNHLTTWKLNNLLQNDYWVHNEIKAEINMFFETDENKGTTYQNLWDTFKAVCRGKFIALNAHKRKQERSKIDTLTSQLKELEKQEQTHSKASRRQEITKIRAELKEIETQKILQKINESRSWFFEKINKYDRLLARLIKKKSEKNQIDTIKNDKGDITTDPTEIQTTIREYYKHLYANKLENLEKMDKFLDSYTLPRLNQEGESPNRPITGSVIEAIINSLPTKKSPGLDRFPAKFYQRYKEELIPFLLK

SEQ ID NO: 488 - protein, 931 aa, Artificial Sequence
  Synthetic polypeptide
MTKRKKTINLNIQDAQKRTALHWACVNGHEEVVTFLVDRKCQLDVLDGEHRTPLMKALQCHQEACANILIDSGADINLVDVYGNTALHYAVYSEILSVVAKLLSHGAVIEVHNKASLTPLLLSITKRSEQIVEFLLIKNANANAVNKYKCTALMLAVCHGSSEIVGMLLQQNVDVFAADICGVTAEHYAVTCGFHHIHEQIMEYIRKLSKNHQNTNPEGTSAGTPDEAAPLAERTPDTAESLVEKTPDEAAPLVERTPDTAESLVEKTPDEAASLVEGTSDKIQCLEKATSGKFEQSAEETPREITSPAKETSEKFTWPAKGRPRKIAWEKKEDTPREIMSPAKETSEKFTWAAKGRPRKIAWEKKETPVKTGCVARVTSNKTKVLEKGRSKMIACPTKESSTKASANDQRFPSESKQEEDEEYSCDSRSLFESSAKIQVCIPESIYQKVMEINREVEEPPKKPSAFKPAIEMQNSVPNKAFELKNEQTLRADPMFPPESKQKDYEENSWDSESLCETVSQKDVCLPKATHQKEIDKINGKLEESPNKDGLLKATCGMKVSIPTKALELKDMQTFKAEPPGKPSAFEPATEMQKSVPNKALELKNEQTLRADEILPSESKQKDYEENSWDTESLCETVSQKDVCLPKAAHQKEIDKINGKLEGSPVKDGLLKANCGMKVSIPTKALELMDMQTFKAEPPEKPSAFEPAIEMQKSVPNKALELKNEQTLRADEILPSESKQKDYEESSWDSESLCETVSQKDVCLPKATHQKEIDKINGKLEESPDNDGFLKAPCRMKVSIPTKALELMDMQTFKAEPPEKPSAFEPAIEMQKSVPNKALELKNEQTLRADQMFPSESKQKKVEENSWDSESLRETVSQKDVCVPKATHQKEMDKISGKLEGTWMKLETIILSKLSQGQKTKHHMFSPIGGN

SEQ ID NO: 489 - protein, 931 aa, Artificial Sequence; identical to SEQ ID NO: 488
  Synthetic polypeptide

SEQ ID NO: 490 - protein, 1050 aa, Artificial Sequence
  Synthetic polypeptide
MTKRKKTINLNIQDAQKRTALHWACVNGHEEVVTFLVDRKCQLDVLDGEHRTPLMKALQCHQEACANILIDSGADINLVDVYGNTALHYAVYSEILSVVAKLLSHGAVIEVHNKASLTPLLLSITKRSEQIVEFLLIKNANANAVNKYKCTALMLAVCHGSSEIVGMLLQQNVDVFAADICGVTAEHYAVTCGFHHIHEQIMEYIRKLSKNHQNTNPEGTSAGTPDEAAPLAERTPDTAESLVEKTPDEAAPLVERTPDTAESLVEKTPDEAASLVEGTSDKIQCLEKATSGKFEQSAEETPREITSPAKETSEKFTWPAKGRPRKIAWEKKEDTPREIMSPAKETSEKFTWAAKGRPRKIAWEKKETPVKTGCVARVTSNKTKVLEKGRSKMIACPTKESSTKASANDQRFPSESKQEEDEEYSCDSRSLFESSAKIQVCIPESIYQKVMEINREVEEPPKKPSAFKPAIEMQNSVPNKAFELKNEQTLRADPMFPPESKQKDYEENSWDSESLCETVSQKDVCLPKATHQKEIDKINGKLEESPNKDGLLKATCGMKVSIPTKALELKDMQTFKAEPPGKPSAFEPATEMQKSVPNKALELKNEQTLRADEILPSESKQKDYEENSWDTESLCETVSQKDVCLPKAAHQKEIDKINGKLEGSPVKDGLLKANCGMKVSIPTKALELMDMQTFKAEPPEKPSAFEPAIEMQKSVPNKALELKNEQTLRADEILPSESKQKDYEESSWDSESLCETVSQKDVCLPKAAHQKEIDKINGKLEGSPVKDGLLKANCGMKVSIPTKALELMDMQTFKAEPPEKPSAFEPAIEMQKSVPNKALELKNEQTLRADEILPSESKQKDYEESSWDSESLCETVSQKDVCLPKATHQKEIDKINGKLEESPDNDGFLKAPCRMKVSIPTKALELMDMQTFKAEPPEKPSAFEPAIEMQKSVPNKALELKNEQTLRADQMFPSESKQKKVEENSWDSESLRETVSQKDVCVPKATHQKEMDKISGKLEGTWMKLETIILSKLSQGQKTKHHMFSPIGGN

SEQ ID NO: 491 - protein, 906 aa, Artificial Sequence
  Synthetic polypeptide
MTKRKKTINLNIQDAQKRTALHWACVNGHEEVVTFLVDRKCQLDVLDGEHRTPLMKALQCHQEACANILIDSGADINLVDVYGNTALHYAVYSEILSVVAKLLSHGAVIEVHNKASLTPLLLSITKRSEQIVEFLLIKNANANAVNKYKCTALMLAVCHGSSEIVGMLLQQNVDVFAADICGVTAEHYAVTCGFHHIHEQIMEYIRKLSKNHQNTNPEGTSAGTPDEAAPLAERTPDTAESLVEKTPDEAAPLVERTPDTAESLVEKTPDEAASLVEGTSDKIQCLEKATSGKFEQSAEETPREITSPAKETSEKFTWPAKGRPRKIAWEKKEDTPREIMSPAKETSEKFTWAAKGRPRKIAWEKKETPVKTGCVARVTSNKTKVLEKGRSKMIACPTKESSTKASANDQRFPSESKQEEDEEYSCDSRSLFESSAKIQVCIPESIYQKVMEINREVEEPPKKPSAFKPAIEMQNSVPNKAFELKNEQTLRADPMFPPESKQKDYEENSWDSESLCETVSQKDVCLPKATHQKEIDKINGKLEESPNKDGLLKATCGMKVSIPTKALELKDMQTFKAEPPGKPSAFEPATEMQKSVPNKALELKNEQTLRADEILPSESKQKDYEENSWDTESLCETVSQKDVCLPKAAHQKEIDKINGKLEGSPVKDGLLKANCGMKVSIPTKALELMDMQTFKAEPPEKPSAFEPAIEMQKSVPNKALELKNEQTLRADEILPSESKQKDYEESSWDSESLCETVSQKDVCLPKATHQKEIDKINGKLEESPDNDGFLKAPCRMKVSIPTKALELMDMQTFKAEPPEKPSAFEPAIEMQKSVPNKALELKNEQTLRADQMFPSESKQKKVEENSWDSESLRETVSQKDVCVPKATHQKEMDKISGKLEELEKLL

SEQ ID NO: 492 - protein, 906 aa, Artificial Sequence; identical to SEQ ID NO: 491
  Synthetic polypeptide

SEQ ID NO: 493 - protein, 1025 aa, Artificial Sequence
  Synthetic polypeptide
MTKRKKTINLNIQDAQKRTALHWACVNGHEEVVTFLVDRKCQLDVLDGEHRTPLMKALQCHQEACANILIDSGADINLVDVYGNTALHYAVYSEILSVVAKLLSHGAVIEVHNKASLTPLLLSITKRSEQIVEFLLIKNANANAVNKYKCTALMLAVCHGSSEIVGMLLQQNVDVFAADICGVTAEHYAVTCGFHHIHEQIMEYIRKLSKNHQNTNPEGTSAGTPDEAAPLAERTPDTAESLVEKTPDEAAPLVERTPDTAESLVEKTPDEAASLVEGTSDKIQCLEKATSGKFEQSAEETPREITSPAKETSEKFTWPAKGRPRKIAWEKKEDTPREIMSPAKETSEKFTWAAKGRPRKIAWEKKETPVKTGCVARVTSNKTKVLEKGRSKMIACPTKESSTKASANDQRFPSESKQEEDEEYSCDSRSLFESSAKIQVCIPESIYQKVMEINREVEEPPKKPSAFKPAIEMQNSVPNKAFELKNEQTLRADPMFPPESKQKDYEENSWDSESLCETVSQKDVCLPKATHQKEIDKINGKLEESPNKDGLLKATCGMKVSIPTKALELKDMQTFKAEPPGKPSAFEPATEMQKSVPNKALELKNEQTLRADEILPSESKQKDYEENSWDTESLCETVSQKDVCLPKAAHQKEIDKINGKLEGSPVKDGLLKANCGMKVSIPTKALELMDMQTFKAEPPEKPSAFEPAIEMQKSVPNKALELKNEQTLRADEILPSESKQKDYEESSWDSESLCETVSQKDVCLPKAAHQKEIDKINGKLEGSPVKDGLLKANCGMKVSIPTKALELMDMQTFKAEPPEKPSAFEPAIEMQKSVPNKALELKNEQTLRADEILPSESKQKDYEESSWDSESLCETVSQKDVCLPKATHQKEIDKINGKLEESPDNDGFLKAPCRMKVSIPTKALELMDMQTFKAEPPEKPSAFEPAIEMQKSVPNKALELKNEQTLRADQMFPSESKQKKVEENSWDSESLRETVSQKDVCVPKATHQKEMDKISGKLEELEKLL

SEQ ID NO: 494 - protein, 393 aa, Artificial Sequence
  Synthetic polypeptide
MAKATSGAAGLRLLLLLLLPLLGKVALGLYFSRDAYWEKLYVDQAAGTPLLYVHALRDAPEEVPSFRLGQHLYGTYRTRLHENNWICIQEDTGLLYLNRSLDHSSWEKLSVRNRGFPLLTVYLKVFLSPTSLREGECQWPGCARVYFSFFNTSFPACSSLKPRELCFPETRPSFRIRENRPPGTFHQFRLLPVQFLCPNISVAYRLLEGEGLPFRCAPDSLEVSTRWALDREQREKYELVAVCTVHAGAREEVVMVPFPVTVYDEDDSAPTFPAGVDTASAVVEFKRKEDTVVATLRVFDADVVPASGELVRRYTSTLLPGDTWAQQTFRVEHWPNETSVQANGSFVRATVHDYRHLSAAALLPASLRHLLQISPGIAFQINHLHLGSVSGGT

SEQ ID NO: 495 - protein, 393 aa, Artificial Sequence; identical to SEQ ID NO: 494
  Synthetic polypeptide

SEQ ID NO: 496 - protein, 147 aa, Artificial Sequence
  Synthetic polypeptide
MAWWKSWDLTETLKSELSGKFERLIVALMYPPYRYEAKELHDAMKGLGTKEGVIIEILASRTKNQLREIMKAYEEDYGSSLEEDIQADTSGYLERILVCLLQGSRDDVSSFVDPGLALQDAQVIQTPAPFPSTETGSPQEGPGNMGF

SEQ ID NO: 497 - protein, 190 aa, Artificial Sequence
  Synthetic polypeptide
MAWWKSWIEQEGVTVKSSSHFNPDPDAETLYQAMKGIGVGSQLLSHQAAAFAFPSSALTSVSPWGQQGHLCCNPAGTNEQAIIDVLTKRSNTQRQQIAKSFKAQFGKDLTETLKSELSGKFERLIVALMYPPYRYEAKELHDAMKGSRDDVSSFVDPGLALQDAQVIQTPAPFPSTETGSPQEGPGNMGF

SEQ ID NO: 498 - protein, 209 aa, Artificial Sequence
  Synthetic polypeptide
MAWWKSWIEQEGVTVKSSSHFNPDPDAETLYQAMKGIGTNEQAIIDVLTKRSNTQRQQIAKSFKAQFGKDLTETLKSELSGKFERLIVALMYPPYRYEAKELHDAMKGLGTKEGVIIEILASRTKNQLREIMKAYEEDYGSSLEEDIQADTSGYLERILVCLLQGSRDDVSSFVDPGLALQDAQVIQTPAPFPSTETGSPQEGPGNMGF

SEQ ID NO: 499 - protein, 47 aa, Artificial Sequence
  Synthetic polypeptide
MAWWKSWGPHRHSLHPTTTEYTFFLSVHRTYSQINHMLSHKASLNKF

SEQ ID NO: 500 - protein, 47 aa, Artificial Sequence; identical to SEQ ID NO: 499
  Synthetic polypeptide

SEQ ID NO: 501 - protein, 47 aa, Artificial Sequence; identical to SEQ ID NO: 499
  Synthetic polypeptide

SEQ ID NO: 502 - protein, 47 aa, Artificial Sequence; identical to SEQ ID NO: 499
  Synthetic polypeptide

SEQ ID NO: 503 - protein, 10 aa, Artificial Sequence
  Synthetic polypeptide
MAWWKSWKNE

SEQ ID NO: 504 - protein, 10 aa, Artificial Sequence
  Synthetic polypeptide
MAWWKSWKNE

SEQ ID NO: 505 - protein, 10 aa, Artificial Sequence
  Synthetic polypeptide
MAWWKSWKNE

SEQ ID NO: 506 - protein, 10 aa, Artificial Sequence
  Synthetic polypeptide
MAWWKSWKNE

SEQ ID NO: 507 - protein, 10 aa, Artificial Sequence
  Synthetic polypeptide
MAWWKAWENE

SEQ ID NO: 508 - protein, 10 aa, Artificial Sequence
  Synthetic polypeptide
MAWWKAWENE

SEQ ID NO: 509 - protein, 10 aa, Artificial Sequence
  Synthetic polypeptide
MAWWKAWENE

SEQ ID NO: 510 - protein, 10 aa, Artificial Sequence
  Synthetic polypeptide
MAWWKAWENE

SEQ ID NO: 511 - protein, 190 aa, Artificial Sequence
  Synthetic polypeptide
MAWWKAWIEQEGVTVKSSSHFNPDPDAETLYKAMKGIGVGSQLLSHQAAAFAFPSSALTSVSPWGQQGHLCCNPAGTNEQAIIDVLTKRSNTQRQQIAKSFKAQFGKDLTETLKSELSGKFERLIVALMYPPYRYEAKELHDAMKGSRDDVSSFVDPALALQDAQVIQTPAPFPSTETGSPQEGPGNMGF

SEQ ID NO: 512 - protein, 209 aa, Artificial Sequence
  Synthetic polypeptide
MAWWKAWIEQEGVTVKSSSHFNPDPDAETLYKAMKGIGTNEQAIIDVLTKRSNTQRQQIAKSFKAQFGKDLTETLKSELSGKFERLIVALMYPPYRYEAKELHDAMKGLGTKEGVIIEILASRTKNQLREIMKAYEEDYGSSLEEDIQADTSGYLERILVCLLQGSRDDVSSFVDPALALQDAQVIQTPAPFPSTETGSPQEGPGNMGF

SEQ ID NO: 513 - protein, 147 aa, Artificial Sequence
  Synthetic polypeptide
MAWWKAWDLTETLKSELSGKFERLIVALMYPPYRYEAKELHDAMKGLGTKEGVIIEILASRTKNQLREIMKAYEEDYGSSLEEDIQADTSGYLERILVCLLQGSRDDVSSFVDPALALQDAQVIQTPAPFPSTETGSPQEGPGNMGF

SEQ ID NO: 514 - protein, 10 aa, Artificial Sequence
  Synthetic polypeptide
MAWWKSWENE

SEQ ID NO: 515 - protein, 10 aa, Artificial Sequence
  Synthetic polypeptide
MAWWKSWENE

SEQ ID NO: 516 - protein, 10 aa, Artificial Sequence
  Synthetic polypeptide
MAWWKSWENE

SEQ ID NO: 517 - protein, 10 aa, Artificial Sequence
  Synthetic polypeptide
MAWWKSWENE

SEQ ID NO: 518 - protein, 190 aa, Artificial Sequence
  Synthetic polypeptide
MAWWKSWIEQEGVTVKSSSHFNPDPDAETLYKAMKGIGVGSQLLSHQAAAFAFPSSALTSVSPWGQQGHLCCNPAGTNEQAIIDVLTKRSNTQRQQIAKSFKAQFGKDLTETLKSELSGKFERLIVALMYPPYRYEAKELHDAMKGSRDDVSSFVDPGLALQDAQVIQTPAPFPSTETGSPQEGPGNMGF

SEQ ID NO: 519 - protein, 209 aa, Artificial Sequence
  Synthetic polypeptide
MAWWKSWIEQEGVTVKSSSHFNPDPDAETLYKAMKGIGTNEQAIIDVLTKRSNTQRQQIAKSFKAQFGKDLTETLKSELSGKFERLIVALMYPPYRYEAKELHDAMKGLGTKEGVIIEILASRTKNQLREIMKAYEEDYGSSLEEDIQADTSGYLERILVCLLQGSRDDVSSFVDPGLALQDAQVIQTPAPFPSTETGSPQEGPGNMGF

SEQ ID NO: 520 - protein, 147 aa, Artificial Sequence; identical to SEQ ID NO: 496
  Synthetic polypeptide

SEQ ID NO: 521 - protein, 232 aa, Artificial Sequence
  Synthetic polypeptide
MGFKPPHPEWIMSCSELSFCLSHPRVQDLPLDESNMVIPSDTDFLDTWEAMEDLVITGLVKNIGVSNFNHEQLERLLNKPGLRFKPLTNQIECHPYLTQKNLISFCQSRDVSVTAYRPLGGSCEGVDLIDNPVIKRIAKEHGKSPAQILIRFQIQRNVIVIPGSITPSHIKENIQALFLPAAIHVRRDLFLLAFCHDCEASPDTWNCKSIKPLFFCKLPSLEYVFISSVKMD

SEQ ID NO: 522 - protein, 336 aa, Artificial Sequence
  Synthetic polypeptide
MGDIPAVGLSSWKASPGKVTEAVKEAIDAGYRHFDCAYFYHNEREVGAGIRCKIKEGAVRREDLFIATKLWCTCHKKSLVETACRKSLKALKLNYLDLYLIHWPMGFKPPHPEWIMSCSELSFCLSHPRVQDLPLDESNMVIPSDTDFLDTWEAMEDLVITGLVKNIGVSNFNHEQLERLLNKPGLRFKPLTNQIECHPYLTQKNLISFCQSRDVSVTAYRPLGGSCEGVDLIDNPVIKRIAKEHGKSPAQILIRFQIQRNVIVIPGSITPSHIKENIQALFLPAAIHVRRDLFLLAFCHDCEASPDTWNCKSIKPLFFCKLPSLEYVFISSVKMD

SEQ ID NO: 523 - protein, 336 aa, Artificial Sequence; identical to SEQ ID NO: 522
  Synthetic polypeptide

SEQ ID NO: 524 - protein, 279 aa, Artificial Sequence
  Synthetic polypeptide
MGDIPAVGLSSWKASPGKVTEAVKEAIDAGYRHFDCAYFYHNEREVGAGIRCKIKEGAVRREDLFIATKLWCTCHKKSLVETACRKSLKALKLNYLDLYLIHWPMGFKPPHPEWIMSCSELSFCLSHPRVQDLPLDESNMVIPSDTDFLDTWEAMEDLVITGLVKNIGVSNFNHEQLERLLNKPGLRFKPLTNQILIRFQIQRNVIVIPGSITPSHIKENIQALFLPAAIHVRRDLFLLAFCHDCEASPDTWNCKSIKPLFFCKLPSLEYVFISSVKMD

SEQ ID NO: 525 - protein, 279 aa, Artificial Sequence; identical to SEQ ID NO: 524
  Synthetic polypeptide

SEQ ID NO: 526 - protein, 238 aa, Artificial Sequence
  Synthetic polypeptide
MGDIPAVGLSSWKASPGKVTEAVKEAIDAGYRHFDCAYFYHNEREVGAGIRCKIKEGAVRREDLFIATKLWCTCHKKSLVETACRKSLKALKLNYLDLYLIHWPMGFKPPHPEWIMSCSELSFCLSHPRVQDLPLDESNMVIPSDTDFLDTWEILIRFQIQRNVIVIPGSITPSHIKENIQALFLPAAIHVRRDLFLLAFCHDCEASPDTWNCKSIKPLFFCKLPSLEYVFISSVKMD

SEQ ID NO: 527 - protein, 287 aa, Artificial Sequence
  Synthetic polypeptide
MRLLALAAAALLARAPAPEVCAALNVTVSPGPVVDYLEGENATLLCHVSQKRRKDSLLAVRWFFAHSFDSQEALMVKMTKLRVVQYYGNFSRSAKRRRLRLLEEQRGALYRLSVLTLQPSDQGHYVCRVQEISRHRNKWTAWSNGSSATEMRVISLKASEESSFEKTKETWAFFEDLYVYAVLVCCVGILSILLFMLVIVWQSVFNKRKSRVRHYLVKCPQNSSGETVTSVTSLAPLQPKKGKRQKEKPDIPPAVPAKAPIAPTFHKPKLLKPQRKVTLPVVNIYPH

SEQ ID NO: 528 - protein, 293 aa, Artificial Sequence
  Synthetic polypeptide
MDSKYQCVKLNDGHFMPVLGFGTYAPAEVPKSKALEAVKLAIEAGFHHIDSAHVYNNEEQVGLAIRSKIADGSVKREDIFYTSKLWSNSHRPELVRPALERSLKNLQLDYVDLYLIHFPVSVKPGEEVIPKDENGKILFDTVDLCATWEAMEKCKDAGLAKSIGVSNFNHRLLEMILNKPGLKYKPVCNQVECHPYFNQRKLLDFCKSKDIVLVAYSALGSHREEPWVDPNSPVLLEDPVLCALAKKHKRTPALIALRYQLQRGVVVLAKSYNEQRIRQNVQEIHFISLQLPW

SEQ ID NO: 529 - protein, 293 aa, Artificial Sequence; identical to SEQ ID NO: 528
  Synthetic polypeptide

SEQ ID NO: 530 - protein, 267 aa, Artificial Sequence
  Synthetic polypeptide
MDSKYQCVKLNDGHFMPVLGFGTYAPAEVPKSKALEAVKLAIEAGFHHIDSAHVYNNEEQVGLAIRSKIADGSVKREDIFYTSKLWSNSHRPELVRPALERSLKNLQLDYVDLYLIHFPVSVKAMEKCKDAGLAKSIGVSNFNHRLLEMILNKPGLKYKPVCNQVECHPYFNQRKLLDFCKSKDIVLVAYSALGSHREEPWVDPNSPVLLEDPVLCALAKKHKRTPALIALRYQLQRGVVVLAKSYNEQRIRQNVQEIHFISLQLPW

SEQ ID NO: 531 - protein, 193 aa, Artificial Sequence
  Synthetic polypeptide
MDSKYQCVKLNDGHFMPVLGFGTYAPAEVPKSKALEAVKLAIEAGFHHIDSAHVYNNEEQVGLAIRSKIADGSVKREDIFYTSKLWSNSHRPELVRPALERSLKNLQLDYVDLYLIHFPVSVKPGEEVIPKDENGKILFDTVDLCATWEAMEKCKDAGLAKSIGVSNFNHRLLEMILNKPGLKYKPVCNQGHG

SEQ ID NO: 532 - protein, 193 aa, Artificial Sequence; identical to SEQ ID NO: 531
  Synthetic polypeptide

SEQ ID NO: 533 - protein, 193 aa, Artificial Sequence; identical to SEQ ID NO: 531
  Synthetic polypeptide

SEQ ID NO: 534 - protein, 167 aa, Artificial Sequence
  Synthetic polypeptide
MDSKYQCVKLNDGHFMPVLGFGTYAPAEVPKSKALEAVKLAIEAGFHHIDSAHVYNNEEQVGLAIRSKIADGSVKREDIFYTSKLWSNSHRPELVRPALERSLKNLQLDYVDLYLIHFPVSVKAMEKCKDAGLAKSIGVSNFNHRLLEMILNKPGLKYKPVCNQGHG

SEQ ID NO: 535 - protein, 771 aa, Artificial Sequence
  Synthetic polypeptide
MFRQFYLWTCLASGIILGSLFEICLGQYDDDCKLARGGPPATIVAIDEESRNGTILVDNMLIKGTAGGPDPTIELSLKDNVDYWVLMDPVKQMLFLNSTGRVLDRDPPMNIHSIVVQVQCINKKVGTIIYHEVRIVVRDRNDNSPTFKHESYYATVNELTPVGTTIFTGFSGDNGATDIDDGPNGQIEYVIQYNPDDPTSNDTFEIPLMLTGNIVLRKRLNYEDKTRYFVIIQANDRAQNLNERRTTTTTLTVDVLDGDDLGPMFLPCVLVPNTRDCRPLTYQAAIPELRTPEELNPIIVTPPIQAIDQDRNIQPPSDRPGILYSILVGTPEDYPRFFHMHPRTAELSLLEPVNRDFHQKFDLVIKAEQDNGHPLPAFAGLHIEILDENNQSPYFTMPSYQGYILESAPVGATISDSLNLTSPLRIVALDKDIEDVPPSGVPTKDPELHLFLNDYTSVFTVTQTGITRYLTLLQPVDREEQQTYTFSITAFDGVQESEPVIVNIQVMDANDNTPTFPEISYDVYVYTDMRPGDSVIQLTAVDADEGSNGEITYEILVGAQGDFIINKTTGLITIAPGVEMIVGRTYALTVQAADNAPPAERRNSICTVYIEVLPPNNQSPPRFPQLMYSLEISEAMRVGAVLLNLQATDREGDSITYAIENGDPQRVFNLSETTGILTLGKALDRESTDRYILIITASDGRPDGTSTATVNIVVTDVNDNAPVFDPYLPRNLSVVEEEANAFVGQVKAHRRKELAVSEIRLRTSTVELMLK

SEQ ID NO: 536 - protein, 771 aa, Artificial Sequence; identical to SEQ ID NO: 535
  Synthetic polypeptide

SEQ ID NO: 537 - protein, 769 aa, Artificial Sequence
  Synthetic polypeptide
MFRQFYLWTCLASGIILGSLFEICLGQYDDGWRYMYCKLARGGPPATIVAIDEESRNGTILVDNMLIKGTAGGPDPTIELSLKDNVDYWVLMDPVKQMLFLNSTGRVLDRDPPMNIHSIVVQVQCINKKVGTIIYHEVRIVVRDRNDNSPTFKHESYYATVNELTPVGTTIFTGFSGDNGATDIDDGPNGQIEYVIQYNPDDPTSNDTFEIPLMLTGNIVLRKRLNYEDKTRYFVIIQANDRAQNLNERRTTTTTLTVDVLDGDDLGPMFLPCVLVPNTRDCRPLTYQAAIPELRTPEELNPIIVTPPIQAIDQDRNIQPPSDRPGILYSILVGTPEDYPRFFHMHPRTAELSLLEPVNRDFHQKFDLVIKAEQDNGHPLPAFAGLHIEILDENNQSPYFTMPSYQGYILESAPVGATISDSLNLTSPLRIVALDKDIEDTKDPELHLFLNDYTSVFTVTQTGITRYLTLLQPVDREEQQTYTFSITAFDGVQESEPVIVNIQVMDANDNTPTFPEISYDVYVYTDMRPGDSVIQLTAVDADEGSNGEITYEILVGAQGDFIINKTTGLITIAPGVEMIVGRTYALTVQAADNAPPAERRNSICTVYIEVLPPNNQSPPRFPQLMYSLEISEAMRVGAVLLNLQATDREGDSITYAIENGDPQRVFNLSETTGILTLGKALDRESTDRYILIITASDGRPDGTSTATVNIVVTDVNDNAPVFDPYLPRNLSVVEEEANAFVGQVKAHRRKELAVSEIRLRTSTVELMLK

SEQ ID NO: 538 - protein, 764 aa, Artificial Sequence
  Synthetic polypeptide
MFRQFYLWTCLASGIILGSLFEICLGQYDDDCKLARGGPPATIVAIDEESRNGTILVDNMLIKGTAGGPDPTIELSLKDNVDYWVLMDPVKQMLFLNSTGRVLDRDPPMNIHSIVVQVQCINKKVGTIIYHEVRIVVRDRNDNSPTFKHESYYATVNELTPVGTTIFTGFSGDNGATDIDDGPNGQIEYVIQYNPDDPTSNDTFEIPLMLTGNIVLRKRLNYEDKTRYFVIIQANDRAQNLNERRTTTTTLTVDVLDGDDLGPMFLPCVLVPNTRDCRPLTYQAAIPELRTPEELNPIIVTPPIQAIDQDRNIQPPSDRPGILYSILVGTPEDYPRFFHMHPRTAELSLLEPVNRDFHQKFDLVIKAEQDNGHPLPAFAGLHIEILDENNQSPYFTMPSYQGYILESAPVGATISDSLNLTSPLRIVALDKDIEDTKDPELHLFLNDYTSVFTVTQTGITRYLTLLQPVDREEQQTYTFSITAFDGVQESEPVIVNIQVMDANDNTPTFPEISYDVYVYTDMRPGDSVIQLTAVDADEGSNGEITYEILVGAQGDFIINKTTGLITIAPGVEMIVGRTYALTVQAADNAPPAERRNSICTVYIEVLPPNNQSPPRFPQLMYSLEISEAMRVGAVLLNLQATDREGDSITYAIENGDPQRVFNLSETTGILTLGKALDRESTDRYILIITASDGRPDGTSTATVNIVVTDVNDNAPVFDPYLPRNLSVVEEEANAFVGQVKAHRRKELAVSEIRLRTSTVELMLK

SEQ ID NO: 539 - protein, 764 aa, Artificial Sequence; identical to SEQ ID NO: 538
  Synthetic polypeptide

SEQ ID NO: 540 - protein, 764 aa, Artificial Sequence; identical to SEQ ID NO: 538
  Synthetic polypeptide

SEQ ID NO: 541 - protein, 764 aa, Artificial Sequence; identical to SEQ ID NO: 538
  Synthetic polypeptide

SEQ ID NO: 542 - protein, 764 aa, Artificial Sequence; identical to SEQ ID NO: 538
  Synthetic polypeptide

SEQ ID NO: 543 - protein, 375 aa, Artificial Sequence
  Synthetic polypeptide
MPSYQGYILESAPVGATISDSLNLTSPLRIVALDKDIEDVPPSGVPTKDPELHLFLNDYTSVFTVTQTGITRYLTLLQPVDREEQQTYTFSITAFDGVQESEPVIVNIQVMDANDNTPTFPEISYDVYVYTDMRPGDSVIQLTAVDADEGSNGEITYEILVGAQGDFIINKTTGLITIAPGVEMIVGRTYALTVQAADNAPPAERRNSICTVYIEVLPPNNQSPPRFPQLMYSLEISEAMRVGAVLLNLQATDREGDSITYAIENGDPQRVFNLSETTGILTLGKALDRESTDRYILIITASDGRPDGTSTATVNIVVTDVNDNAPVFDPYLPRNLSVVEEEANAFVGQVKAHRRKELAVSEIRLRTSTVELMLK

SEQ ID NO: 544 - protein, 727 aa, Artificial Sequence
  Synthetic polypeptide
MFRQFYLWTCLASGIILGSLFEICLGQYDDDCKLARGGPPATIVAIDEESRNGTILVDNMLIKGTAGGPDPTIELSLKDNVDYWVLMDPVKQMLFLNSTGRVLDRDPPMNIHSIVVQVQCINKKVGTIIYHEVRIVVRDRNDNSPTFKHESYYATVNELTPVGTTIFTGFSGDNGATDIDDGPNGQIEYVIQYNPDDPDRAQNLNERRTTTTTLTVDVLDGDDLGPMFLPCVLVPNTRDCRPLTYQAAIPELRTPEELNPIIVTPPIQAIDQDRNIQPPSDRPGILYSILVGTPEDYPRFFHMHPRTAELSLLEPVNRDFHQKFDLVIKAEQDNGHPLPAFAGLHIEILDENNQSPYFTMPSYQGYILESAPVGATISDSLNLTSPLRIVALDKDIEDTKDPELHLFLNDYTSVFTVTQTGITRYLTLLQPVDREEQQTYTFSITAFDGVQESEPVIVNIQVMDANDNTPTFPEISYDVYVYTDMRPGDSVIQLTAVDADEGSNGEITYEILVGAQGDFIINKTTGLITIAPGVEMIVGRTYALTVQAADNAPPAERRNSICTVYIEVLPPNNQSPPRFPQLMYSLEISEAMRVGAVLLNLQATDREGDSITYAIENGDPQRVFNLSETTGILTLGKALDRESTDRYILIITASDGRPDGTSTATVNIVVTDVNDNAPVFDPYLPRNLSVVEEEANAFVGQVKAHRRKELAVSEIRLRTSTVELMLK

SEQ ID NO: 545 - protein, 742 aa, Artificial Sequence
  Synthetic polypeptide
MFRQFYLWTCLASGIILGSLFEICLGQYDDGTILVDNMLIKGTAGGPDPTIELSLKDNVDYWVLMDPVKQMLFLNSTGRVLDRDPPMNIHSIVVQVQCINKKVGTIIYHEVRIVVRDRNDNSPTFKHESYYATVNELTPVGTTIFTGFSGDNGATDIDDGPNGQIEYVIQYNPDDPTSNDTFEIPLMLTGNIVLRKRLNYEDKTRYFVIIQANDRAQNLNERRTTTTTLTVDVLDGDDLGPMFLPCVLVPNTRDCRPLTYQAAIPELRTPEELNPIIVTPPIQAIDQDRNIQPPSDRPGILYSILVGTPEDYPRFFHMHPRTAELSLLEPVNRDFHQKFDLVIKAEQDNGHPLPAFAGLHIEILDENNQSPYFTMPSYQGYILESAPVGATISDSLNLTSPLRIVALDKDIEDTKDPELHLFLNDYTSVFTVTQTGITRYLTLLQPVDREEQQTYTFSITAFDGVQESEPVIVNIQVMDANDNTPTFPEISYDVYVYTDMRPGDSVIQLTAVDADEGSNGEITYEILVGAQGDFIINKTTGLITIAPGVEMIVGRTYALTVQAADNAPPAERRNSICTVYIEVLPPNNQSPPRFPQLMYSLEISEAMRVGAVLLNLQATDREGDSITYAIENGDPQRVFNLSETTGILTLGKALDRESTDRYILIITASDGRPDGTSTATVNIVVTDVNDNAPVFDPYLPRNLSVVEEEANAFVGQVKAHRRKELAVSEIRLRTSTVELMLK

SEQ ID NO: 546 - protein, 742 aa, Artificial Sequence; identical to SEQ ID NO: 545
  Synthetic polypeptide

SEQ ID NO: 547 - protein, 693 aa, Artificial Sequence
  Synthetic polypeptide
MFRQFYLWTCLASGIILGSLFEICLGQYDDDCKLARGGPPATIVAIDEESRNGTILVDNMLIKGTAGGPDPTIELSLKDNVDYWVLMDPVKQMLFLNSTGRVLDRDPPMNIHSIVVQVQCINKKVGTIIYHEVRIVVRDRNDNSPTFKHESYYATVNELTPVGTTIFTGFSGDNGATDIDDGPNGQIEYVIQYNPDDPTSNDTFEIPLMLTGNIVLRKRLNYEDKTRYFVIIQANDRAQNLNERRTTTTTLTVDVLDGDDLGPMFLPCVLVPNTRDCRPLTYQAAIPELRTPEELNPIIVTPPIQAIDQDRNIQPPSDRPGILYSILVGTPEDYPRFFHMHPRTAELSLLEPVNRDFHQKFDLVIKAEQDNGHPLPAFAGLHIEILDENNQSPYFTMPSYQGYILESAPVGATISDSLNLTSPLRIVALDKDIEDTKDPELHLFLNDYTSVFTVTQTGITRYLTLLQPVDREEQQTYTFSITAFDGVQESEPVIVNIQVMDANDNTPTFPEISYDVYVYTDMRPGDSVIQLTAVDADEGSNGEITYEILVGAQGDFIINKTTGLITIAPGVEMIVGRTYALTVQAADNAPPAERSTGILTLGKALDRESTDRYILIITASDGRPDGTSTATVNIVVTDVNDNAPVFDPYLPRNLSVVEEEANAFVGQVKAHRRKELAVSEIRLRTSTVELMLK

SEQ ID NO: 548 - protein, 540 aa, Artificial Sequence
  Synthetic polypeptide
MFRQFYLWTCLASGIILGSLFEICLGQYDDDCKLARGGPPATIVAIDEESRNGTILVDNMLIKGTAGGPDPTIELSLKDNVDYWVLMDPVKQMLFLNSTGRVLDRDPPMNIHSIVVQVQCINKKVGTIIYHEVRIVVRDRNDNSPTFKHESYYATVNELTPVGTTIFTGFSGDNGATDIDDGPNGQIEYVIQYNPDDPTSNDTFEIPLMLTGNIVLRKRLNYEDKTRYFVIIQANDRAQNLNERRTTTTTLTVDVLDGDDLGPMFLPCVLVPNTRDCRPLTYQAAIPELRTPEELNPIIVTPPIQAIDQDRNIQPPSDRPGILYSILVGTPEDYPRFFHMHPRTAELSLLEPVNRDFHQKFDLVIKAEQDNGHPLPAFAGLHIEILDENNQSPYFTMPSYQGYILESAPVGATISDSLNLTSPLRIVALDKDIEDVPPSGVPTKDPELHLFLNDYTSVFTVTQTGITRYLTLLQPVDREEQQTYTFSITAFDGVQESEPVIVNIQVMDANDNTPTFPEISYDVYVYTDMRPGDSVIQVLI

SEQ ID NO: 549 - protein, 540 aa, Artificial Sequence; identical to SEQ ID NO: 548
  Synthetic polypeptide

SEQ ID NO: 550 - protein, 538 aa, Artificial Sequence
  Synthetic polypeptide
MFRQFYLWTCLASGIILGSLFEICLGQYDDGWRYMYCKLARGGPPATIVAIDEESRNGTILVDNMLIKGTAGGPDPTIELSLKDNVDYWVLMDPVKQMLFLNSTGRVLDRDPPMNIHSIVVQVQCINKKVGTIIYHEVRIVVRDRNDNSPTFKHESYYATVNELTPVGTTIFTGFSGDNGATDIDDGPNGQIEYVIQYNPDDPTSNDTFEIPLMLTGNIVLRKRLNYEDKTRYFVIIQANDRAQNLNERRTTTTTLTVDVLDGDDLGPMFLPCVLVPNTRDCRPLTYQAAIPELRTPEELNPIIVTPPIQAIDQDRNIQPPSDRPGILYSILVGTPEDYPRFFHMHPRTAELSLLEPVNRDFHQKFDLVIKAEQDNGHPLPAFAGLHIEILDENNQSPYFTMPSYQGYILESAPVGATISDSLNLTSPLRIVALDKDIEDTKDPELHLFLNDYTSVFTVTQTGITRYLTLLQPVDREEQQTYTFSITAFDGVQESEPVIVNIQVMDANDNTPTFPEISYDVYVYTDMRPGDSVIQVLI

SEQ ID NO: 551 - protein, 533 aa, Artificial Sequence
  Synthetic polypeptide
MFRQFYLWTCLASGIILGSLFEICLGQYDDDCKLARGGPPATIVAIDEESRNGTILVDNMLIKGTAGGPDPTIELSLKDNVDYWVLMDPVKQMLFLNSTGRVLDRDPPMNIHSIVVQVQCINKKVGTIIYHEVRIVVRDRNDNSPTFKHESYYATVNELTPVGTTIFTGFSGDNGATDIDDGPNGQIEYVIQYNPDDPTSNDTFEIPLMLTGNIVLRKRLNYEDKTRYFVIIQANDRAQNLNERRTTTTTLTVDVLDGDDLGPMFLPCVLVPNTRDCRPLTYQAAIPELRTPEELNPIIVTPPIQAIDQDRNIQPPSDRPGILYSILVGTPEDYPRFFHMHPRTAELSLLEPVNRDFHQKFDLVIKAEQDNGHPLPAFAGLHIEILDENNQSPYFTMPSYQGYILESAPVGATISDSLNLTSPLRIVALDKDIEDTKDPELHLFLNDYTSVFTVTQTGITRYLTLLQPVDREEQQTYTFSITAFDGVQESEPVIVNIQVMDANDNTPTFPEISYDVYVYTDMRPGDSVIQVLI

SEQ ID NO: 552 - protein, 533 aa, Artificial Sequence; identical to SEQ ID NO: 551
  Synthetic polypeptide

SEQ ID NO: 553 - protein, 533 aa, Artificial Sequence; identical to SEQ ID NO: 551
  Synthetic polypeptide

SEQ ID NO: 554 - protein, 533 aa, Artificial Sequence; identical to SEQ ID NO: 551
  Synthetic polypeptide

SEQ ID NO: 555 - protein, 533 aa, Artificial Sequence; identical to SEQ ID NO: 551
  Synthetic polypeptide

SEQ ID NO: 556 - protein, 533 aa, Artificial Sequence; identical to SEQ ID NO: 551
  Synthetic polypeptide

SEQ ID NO: 557 - protein, 533 aa, Artificial Sequence; identical to SEQ ID NO: 551
  Synthetic polypeptide

SEQ ID NO: 558 - protein, 533 aa, Artificial Sequence; identical to SEQ ID NO: 551
  Synthetic polypeptide

SEQ ID NO: 559 - protein, 144 aa, Artificial Sequence
  Synthetic polypeptide
MPSYQGYILESAPVGATISDSLNLTSPLRIVALDKDIEDVPPSGVPTKDPELHLFLNDYTSVFTVTQTGITRYLTLLQPVDREEQQTYTFSITAFDGVQESEPVIVNIQVMDANDNTPTFPEISYDVYVYTDMRPGDSVIQVLI

SEQ ID NO: 560 - protein, 496 aa, Artificial Sequence
  Synthetic polypeptide
MFRQFYLWTCLASGIILGSLFEICLGQYDDDCKLARGGPPATIVAIDEESRNGTILVDNMLIKGTAGGPDPTIELSLKDNVDYWVLMDPVKQMLFLNSTGRVLDRDPPMNIHSIVVQVQCINKKVGTIIYHEVRIVVRDRNDNSPTFKHESYYATVNELTPVGTTIFTGFSGDNGATDIDDGPNGQIEYVIQYNPDDPDRAQNLNERRTTTTTLTVDVLDGDDLGPMFLPCVLVPNTRDCRPLTYQAAIPELRTPEELNPIIVTPPIQAIDQDRNIQPPSDRPGILYSILVGTPEDYPRFFHMHPRTAELSLLEPVNRDFHQKFDLVIKAEQDNGHPLPAFAGLHIEILDENNQSPYFTMPSYQGYILESAPVGATISDSLNLTSPLRIVALDKDIEDTKDPELHLFLNDYTSVFTVTQTGITRYLTLLQPVDREEQQTYTFSITAFDGVQESEPVIVNIQVMDANDNTPTFPEISYDVYVYTDMRPGDSVIQVLI

SEQ ID NO: 561 - protein, 511 aa, Artificial Sequence
  Synthetic polypeptide
MFRQFYLWTCLASGIILGSLFEICLGQYDDGTILVDNMLIKGTAGGPDPTIELSLKDNVDYWVLMDPVKQMLFLNSTGRVLDRDPPMNIHSIVVQVQCINKKVGTIIYHEVRIVVRDRNDNSPTFKHESYYATVNELTPVGTTIFTGFSGDNGATDIDDGPNGQIEYVIQYNPDDPTSNDTFEIPLMLTGNIVLRKRLNYEDKTRYFVIIQANDRAQNLNERRTTTTTLTVDVLDGDDLGPMFLPCVLVPNTRDCRPLTYQAAIPELRTPEELNPIIVTPPIQAIDQDRNIQPPSDRPGILYSILVGTPEDYPRFFHMHPRTAELSLLEPVNRDFHQKFDLVIKAEQDNGHPLPAFAGLHIEILDENNQSPYFTMPSYQGYILESAPVGATISDSLNLTSPLRIVALDKDIEDTKDPELHLFLNDYTSVFTVTQTGITRYLTLLQPVDREEQQTYTFSITAFDGVQESEPVIVNIQVMDANDNTPTFPEISYDVYVYTDMRPGDSVIQVLI

SEQ ID NO: 562 - protein, 511 aa, Artificial Sequence; identical to SEQ ID NO: 561
  Synthetic polypeptide

SEQ ID NO: 563 - protein, 1085 aa, Artificial Sequence
  Synthetic polypeptide
MAPPAHKSILERSENVLMSPWKGKLIVQDRMLCDIALWSTYGAMIPTQLPQELDFKYVMKVSSLKKRLPEAAFRKQNYLEEKVCFQDLCFNLYEVELSNRQGENIDKLTECIKNKQLAIIKCLEDRGFFILLTSSALLSEPDFGGKQMGLHGLHLFRSPLSTGVKDLKVEDDISMKVIPILSTLNCALLETKKSLPEERIHPNTLVKRHFQELYKADRSPSLSVAPQDRMKDPTFLGKLPSGFDLIPPAEKCPSESLTQLNSYFSDPSAYILEVSTALDLLAEHPQSPCVSDGICDAGFSLVMTPDPEFLVSEAEVRKETETKKDSEEMLKAKKRVFPLSPASNLRVQPKRKASMPHMVQSKKVNLCRPFPKRTASRADNSSDSPTTLKLVKGQFPQKRKRGAEVLTAQFVQKTKLDRKNQEAPISKDVPVPTNAKRARKQEKSPVKTVPRAKPPVKKSPQKQRVNIVKGNENPRNRKQLQPVKGETASKLQSEISRGCQEDGISINSVQPENTTAAHNDLPENSIVNYDSQALNMLADLALSSATSSTPVSEARNLHCSSELPQNDVLLSKENSLRGTSDHEYHRGVKTQKGELLPNPSSDRKSNSGSDLTVSQDEESLVPCSQAPAKAQSALTEEMLESSDASQSSSVSVEHSYALLLTEHSKKHLQEREILSPLFPRNGTKSPEAATPVGKVMPFRHQPGLLLQQKPPDDPVVKPKDRPPSARVKKSSCSRIVLSCDDSVKITFKCETEYAFSLDSKYTNNPLEKTVVRALHGPWNTDLPDNVEEVKLLLHMWVALFYSNQNKIIRSSRKVVEHSNPAKYVSINSTLESCELREIEESLGLEKCSADSLLETNEISRAHAAEVSFRDPNCLLPFIKTPLTQGLELCVQNEQKKTFARECDPDTQEDQNFICSYNNEVTGEEAKQESLETSNLVLSGIGSTQTNGPSVPSEEEIVQPLDSTRVASYSGTVTQATFTRTYDGPGSQPVICQSSVYGTLENKVDILDAAVQTKTGTLQDLIQHGSPINNECHPSLERKDDNMGCAVINPEPITLTFEKNAHVPIQTEGVNTADEPTTFINKSSRS

SEQ ID NO: 564 - protein, 106 aa, Artificial Sequence
  Synthetic polypeptide
MAPRRARGCRTLGLPALLLLLLLRPPATRDARDRLAVLAGRSRISESFNHEVQTHEACVRLRTMENCPQCHHHRTSRQQAGSTAIYHGGQDGVGKCGEITLCGLGR

SEQ ID NO: 565 - protein, 106 aa, Artificial Sequence; identical to SEQ ID NO: 564
  Synthetic polypeptide

SEQ ID NO: 566 - protein, 106 aa, Artificial Sequence; identical to SEQ ID NO: 564
  Synthetic polypeptide

SEQ ID NO: 567 - protein, 106 aa, Artificial Sequence; identical to SEQ ID NO: 564
  Synthetic polypeptide

SEQ ID NO: 568 - protein, 106 aa, Artificial Sequence; identical to SEQ ID NO: 564
  Synthetic polypeptide

SEQ ID NO: 569 - protein, 106 aa, Artificial Sequence; identical to SEQ ID NO: 564
  Synthetic polypeptide

SEQ ID NO: 570 - protein, 106 aa, Artificial Sequence; identical to SEQ ID NO: 564
  Synthetic polypeptide

SEQ ID NO: 571 - protein, 106 aa, Artificial Sequence; identical to SEQ ID NO: 564
  Synthetic polypeptide

SEQ ID NO: 572 - protein, 66 aa, Artificial Sequence
  Synthetic polypeptide
MAAQGEPGYLAAQSDPGSNSERSTDSPVPGSEDDLVAGATLHSPEWSEERFRVDRKKLEAMLQGGF

SEQ ID NO: 573 - protein, 411 aa, Artificial Sequence
  Synthetic polypeptide
MQQKAFEESRYPWQESFENVAVCLPLRCPRCGDHTRFRSLSSLRAHLEFSHSYEERTLLTKCSLFPSLKDTDLVTSSELLKPGKLQSSGNVVKQKPSYVNLYSISHEHSKDRKPFEVVAERPVSYVQTYTAMDLHADSLDGTRSGPGLPTSDTKASFEAHVREKFNRMVEAVDRTIEKRIDKLTKELAQKTAELLEVRAAFVQLTQKKQEVQRRERALNRQVDVAVEMIAVLRQRLTESEEELLRKEEEVVTFNHFLEAAAEKEVQGKARLQDFIENLLQRVELAEKQLEYYQSQQASGFVRDLSGHVSWKGAGEARLVCQNDLELEIFGHINHHLSGLKDSHCLVFLQAPPVPWIILASFLWILGNPWTSSTATAGFSQIWVLFPFCGGTFHHNEKDVLGLQDFERLAHG

SEQ ID NO: 574 - protein, 165 aa, Artificial Sequence
  Synthetic polypeptide
MSALGQITITVSRCWNTERNQTDKNPCLHGAYLQLRETVKNKSTHLKKPLMKQAPPWKDHLTFQPLHPAERKTQVWRWQSGNSSDLETTSSASPWPTGSNRDVVLNTLAESCCGLSELITAPPYAGVSIQGFSQIWVLFPFCGGTFHHNEKDVLGLQDFERLAHG

SEQ ID NO: 575 - protein, 1647 aa, Artificial Sequence
  Synthetic polypeptide
MSRSRHARPSRLVRKEDVNKKKKNSQLRKTTKGANKNVASVKTLSPGKLKQLIQERDVKKKTEPKPPVPVRSLLTRAGAARMNLDRTEVLFQNPESLTCNGFTMALRSTSLSRRLSQPPLVVAKSKKVPLSKGLEKQHDCDYKILPALGVKHSENDSVPMQDTQVLPDIETLIGVQNPSLLKGKSQETTQFWSQRVEDSKINIPTHSGPAAEILPGPLEGTRCGEGLFSEETLNDTSGSPKMFAQDTVCAPFPQRATPKVTSQGNPSIQLEELGSRVESLKLSDSYLDPIKSEHDCYPTSSLNKVIPDLNLRNCLALGGSTSPTSVIKFLLAGSKQATLGAKPDHQEAFEATANQQEVSDTTSFLGQAFGAIPHQWELPGADPVHGEALGETPDLPEIPGAIPVQGEVFGTILDQQETLGMSGSVVPDLPVFLPVPPNPIATFNAPSKWPEPQSTVSYGLAVQGAIQILPLGSGHTPQSSSNSEKNSLPPVMAISNVENEKQVHISFLPANTQGFPLAPERGLFHASLGIAQLSQAGPSKSDRGSSQVSVTSTVHVVNTTVVTMPVPMVSTSSSSYTTLLPTLEKKKRKRCGVCEPCQQKTNCGECTYCKNRKNSHQICKKRKCEELKKKPSVVVPLEVIKENKRPQREKKPKVLKADFDNKPVNGPKSESMDYSRCGHGEEQKLELNPHTVENVTKNEDSMTGIEVEKWTQNKKSQLTDHVKGDFSANVPEAEKSKNSEVDKKRTKSPKLFVQTVRNGIKHVHCLPAETNVSFKKFNIEEFGKTLENNSYKFLKDTANHKNAMSSVATDMSCDHLKGRSNVLVFQQPGFNCSSIPHSSHSIINHHASIHNEGDQPKTPENIPSKEPKDGSPVQPSLLSLMKDRRLTLEQVVAIEALTQLSEAPSENSSPSKSEKDEESEQRTASLLNSCKAILYTVRKDLQDPNLQGEPPKLNHCPSLEKQSSCNTVVFNGQTTTLSNSHINSATNQASTKSHEYSKVTNSLSLFIPKSNSSKIDTNKSIAQGIITLDNCSNDLHQLPPRNNEVEYCNQLLDSSKKLDSDDLSCQDATHTQIEEDVATQLTQLASIIKINYIKPEDKKVESTPTSLVTCNVQQKYNQEKGTIQQKPPSSVHNNHGSSLTKQKNPTQKKTKSTPSRDRRKKKPTVVSYQENDRQKWEKLSYMYGTICDIWIASKFQNFGQFCPHDFPTVFGKISSSTKIWKPLAQTRSIMQPKTVFPPLTQIKLQRYPESAEEKVKVEPLDSLSLFHLKTESNGKAFTDKAYNSQVQLTVNANQKAHPLTQPSSPPNQCANVMAGDDQIRFQQVVKEQLMHQRLPTLPGISHETPLPESALTLRNVNVVCSGGITVVSTKSEEEVCSSSFGTSEFSTVDSAQKNFNDYAMNFFTNPTKNLVSITKDSELPTCSCLDRVIQKDKGPYYTHLGAGPSVAAVREIMENRYGQKGNAIRIEIVVYTGKEGKSSHGCPIAKWVLRRSSDEEKVLCLVRQRTGHHCPTAVMVVLIMVWDGIPLPMADRLYTELTENLKSYNGHPTDRRCTLNENRTCTCQGIDPETCGASFSFGCSWSMYFNGCKFGRSPSPRRFRIDPSSPLHTYYERITKGRNPERRYMKPERISPGHEAMVSKEISRTWC

SEQ ID NO: 576 - protein, 44 aa, Artificial Sequence
  Synthetic polypeptide
MSGFSTEERAAPFSLEYRVFLKNEKGQYISPFHDIPIYADKGHG

SEQ ID NO: 577 - protein, 44 aa, Artificial Sequence; identical to SEQ ID NO: 576
  Synthetic polypeptide

SEQ ID NO: 578 - protein, 44 aa, Artificial Sequence; identical to SEQ ID NO: 576
  Synthetic polypeptide

SEQ ID NO: 579 - protein, 177 aa, Artificial Sequence
  Synthetic polypeptide
MATDVQLADYPLMSPKAELKLEKKSGRKPRSPRDSGPQKELVIPGIVDFERIRRALRTPKPQTPGTYCFGRLSHHSFFSRHHPHPQHVTHIQDLTGKPVCVVRDFPAPLPESTVFSGCQMGIPTISVPIGDPQSNRNPQLSSEAWKKELKELASRVAFLTKEDELKKKEDTTSLNWN

SEQ ID NO: 580 - protein, 177 aa, Artificial Sequence; identical to SEQ ID NO: 579
  Synthetic polypeptide

SEQ ID NO: 581 - protein, 166 aa, Artificial Sequence
  Synthetic polypeptide
MYISPKAELKLEKKSGRKPRSPRDSGPQKELVIPGIVDFERIRRALRTPKPQTPGTYCFGRLSHHSFFSRHHPHPQHVTHIQDLTGKPVCVVRDFPAPLPESTVFSGCQMGIPTISVPIGDPQSNRNPQLSSAWKKELKELASRVAFLTKEDELKKKEDTTSLNWN

SEQ ID NO: 582 - protein, 175 aa, Artificial Sequence
  Synthetic polypeptide
MATDVQLADYPLMSPKAELKLEKKSGRKPRSPRDSGPQKELVIPGIVDFERIRRALRTPKPQTPGTYCFGRLSHHSFFSRHHPHPQHVTHIQDLTGKPVCVVRDFPAPLPESTVFSGCQMGIPTISVPIGDPQSNRNPQLSSEAWKKELKELASRVAFLTKEDELKKKEHSGQLS

SEQ ID NO: 583 - protein, 175 aa, Artificial Sequence; identical to SEQ ID NO: 582
  Synthetic polypeptide

SEQ ID NO: 584 - protein, 164 aa, Artificial Sequence
  Synthetic polypeptide
MYISPKAELKLEKKSGRKPRSPRDSGPQKELVIPGIVDFERIRRALRTPKPQTPGTYCFGRLSHHSFFSRHHPHPQHVTHIQDLTGKPVCVVRDFPAPLPESTVFSGCQMGIPTISVPIGDPQSNRNPQLSSAWKKELKELASRVAFLTKEDELKKKEHSGQLS

SEQ ID NO: 585 - protein, 183 aa, Artificial Sequence
  Synthetic polypeptide
MATDVQLADYPLMSPKAELKLEKKSGRKPRSPRDSGPQKELVIPGIVDFERIRRALRTPKPQTPGTYCFGRLSHHSFFSRHHPHPQHVTHIQDLTGKPVCVVRDFPAPLPESTVFSGCQMGIPTISVPIGDPQSNRNPQLSSEAWKKELKELASRVAFLTKEDELKKKESGQAEARLLIPAHN

SEQ ID NO: 586 - protein, 183 aa, Artificial Sequence; identical to SEQ ID NO: 585
  Synthetic polypeptide

SEQ ID NO: 587 - protein, 172 aa, Artificial Sequence
  Synthetic polypeptide
MYISPKAELKLEKKSGRKPRSPRDSGPQKELVIPGIVDFERIRRALRTPKPQTPGTYCFGRLSHHSFFSRHHPHPQHVTHIQDLTGKPVCVVRDFPAPLPESTVFSGCQMGIPTISVPIGDPQSNRNPQLSSAWKKELKELASRVAFLTKEDELKKKESGQAEARLLIPAHN

SEQ ID NO: 588 - protein, 147 aa, Artificial Sequence
  Synthetic polypeptide
MATDVQLADYPLMSPKAELKLEKKSGRKPRSPRDSGPQKELVIPGIVDFERIRRALRTPKPQTPGTYCFGRLSHHSFFSRHHPHPQHVTHIQDLTGKPVCVVRDFPAPLPESTVFSGCQMGIPTISVPIGDPQSNRNPQLSSGYYQS

SEQ ID NO: 589 - protein, 147 aa, Artificial Sequence; identical to SEQ ID NO: 588
  Synthetic polypeptide

SEQ ID NO: 590 - protein, 137 aa, Artificial Sequence
  Synthetic polypeptide
MYISPKAELKLEKKSGRKPRSPRDSGPQKELVIPGIVDFERIRRALRTPKPQTPGTYCFGRLSHHSFFSRHHPHPQHVTHIQDLTGKPVCVVRDFPAPLPESTVFSGCQMGIPTISVPIGDPQSNRNPQLSSGYYQS

SEQ ID NO: 591 - protein, 97 aa, Artificial Sequence
  Synthetic polypeptide
MATDVQLADYPLMSPKAELKLEKKSGRKPRSPRDSGPQKELVIPGIVDFERIRRALRTPKPQTPGTYCFGRLSHHSFFSRHHPHPQHVTHIQGYYQS

SEQ ID NO: 592 - protein, 97 aa, Artificial Sequence; identical to SEQ ID NO: 591
  Synthetic polypeptide

SEQ ID NO: 593 - protein, 87 aa, Artificial Sequence
  Synthetic polypeptide
MYISPKAELKLEKKSGRKPRSPRDSGPQKELVIPGIVDFERIRRALRTPKPQTPGTYCFGRLSHHSFFSRHHPHPQHVTHIQGYYQS

SEQ ID NO: 594 - protein, 97 aa, Artificial Sequence
  Synthetic polypeptide
MATDVQLADYPLMSPKAELKLEKKSGRKPRSPRDSGPQKELVIPGIVDFERIRRALRTPKPQTPGTYCFGRLSHHSFFSRHHPHPQHVTHIQGSPRG

SEQ ID NO: 595 - protein, 97 aa, Artificial Sequence; identical to SEQ ID NO: 594
  Synthetic polypeptide

SEQ ID NO: 596 - protein, 87 aa, Artificial Sequence
  Synthetic polypeptide
MYISPKAELKLEKKSGRKPRSPRDSGPQKELVIPGIVDFERIRRALRTPKPQTPGTYCFGRLSHHSFFSRHHPHPQHVTHIQGSPRG

SEQ ID NO: 597 - protein, 844 aa, Artificial Sequence
  Synthetic polypeptide
MGARSGARGALLLALLLCWDPRLSQAGTDSGSEVLPDSFPSAPAEPLPYFLQEPQDAYIVKNKPVELRCRAFPATQIYFKCNGEWVSQNDHVTQEGLDEATGLRVREVQIEVSRQQVEELFGLEDYWCQCVAWSSAGTTKSRRAYVRIAYLRKNFDQEPLGKEVPLDHEVLLQCRPPEGVPVAEVEWLKNEDVIDPTQDTNFLLTIDHNLIIRQARLSDTANYTCVAKNIVAKRRSTTATVIVYVNGGWSSWAEWSPCSNRCGRGWQKRTRTCTNPAPLNGGAFCEGQAFQKTACTTICPVDGAWTEWSKWSACSTECAHWRSRECMAPPPQNGGRDCSGTLLDSKNCTDGLCMQNKKTLSDPNSHLLEASGDAALYAGLVVAIFVVVAILMAVGVVVYRRNCRDFDTDITDSSAALTGGFHPVNFKTARPSNPQLLHPSVPPDLTASAGIYRGPVYALQDSTDKIPMTNSPLLDPLPSLKVKVYSSSTTGSGPGLADGADLLGVLPPGTYPSDFARDTHFLHLRSASLGSQQLLGLPRDPGSSVSGTFGCLGGRLSIPGTGVSLLVPNGAIPQGKFYEMYLLINKAESTLPLSEGTQTVLSPSVTCGPTGLLLCRPVILTMPHCAEVSARDWIFQLKTQAHQGHWEEVVTLDEETLNTPCYCQLEPRACHILLDQLGTYVFTGESYSRSAVKRLQLAVFAPALCTSLEYSLRVYCLEDTPVALKEVLELERTLGGYLVEEPKPLMFKDSYHNLRLSLHDLPHAHWRSKLLAKYQEIPFYHIWSGSQKALHCTFTLERHSLASTELTCKICVRQVEGEGQIFQLHTTLAETSLSTCTRGCMWIR

SEQ ID NO: 598 - protein, 833 aa, Artificial Sequence
  Synthetic polypeptide
MGARSGARGALLLALLLCWDPRLSQAGTDSGSEVLPDSFPSAPAEPLPYFLQEPQDAYIVKNKPVELRCRAFPATQIYFKCNGEWVSQNDHVTQEGLDEATGLRVREVQIEVSRQQVEELFGLEDYWCQCVAWSSAGTTKSRRAYVRIAYLRKNFDQEPLGKEVPLDHEVLLQCRPPEGVPVAEVEWLKNEDVIDPTQDTNFLLTIDHNLIIRQARLSDTANYTCVAKNIVAKRRSTTATVIVYVNGGWSSWAEWSPCSNRCGRGWQKRTRTCTNPAPLNGGAFCEGQAFQKTACTTICPVDGAWTEWSKWSACSTECAHWRSRECMAPPPQNGGRDCSGTLLDSKNCTDGLCMQMLEASGDAALYAGLVVAIFVVVAILMAVGVVVYRRNCRDFDTDITDSSAALTGGFHPVNFKTARPSNPQLLHPSVPPDLTASAGIYRGPVYALQDSTDKIPMTNSPLLDPLPSLKVKVYSSSTTGSGPGLADGADLLGVLPPGTYPSDFARDTHFLHLRSASLGSQQLLGLPRDPGSSVSGTFGCLGGRLSIPGTGVSLLVPNGAIPQGKFYEMYLLINKAESTLPLSEGTQTVLSPSVTCGPTGLLLCRPVILTMPHCAEVSARDWIFQLKTQAHQGHWEEVVTLDEETLNTPCYCQLEPRACHILLDQLGTYVFTGESYSRSAVKRLQLAVFAPALCTSLEYSLRVYCLEDTPVALKEVLELERTLGGYLVEEPKPLMFKDSYHNLRLSLHDLPHAHWRSKLLAKYQEIPFYHIWSGSQKALHCTFTLERHSLASTELTCKICVRQVEGEGQIFQLHTTLAETSLSTCTRGCMWIR

SEQ ID NO: 599 - protein, 1031 aa, Artificial Sequence
  Synthetic polypeptide
MELMFAEWEDGERFSFEDSDRFEEDSLCSFISEAESLCQNWRGWRKQSAGPNSPTGGGGGGGSGGTRMRDGLVIPLVELSAKQVAFHIPFEVVEKVYPPVPEQLQLRIAFWSFPENEEDIRLYSCLANGSADEFQRGDQLFRMRAVKDPLQIGFHLSATVVPPQMVPPKGAYNVAVMFDRCRVTSCSCTCGAGAKWCTHVVALCLFRIHNASAVCLRAPVSESLSRLQRDQLQKFAQYLISELPQQILPTAQRLLDELLSSQSTAINTVCGAPDPTAGPSASDQSTWYLDESTLTDNIKKTLHKFCGPSPVVFSDVNSMYLSSTEPPAAAEWACLLRPLRGREPEGVWNLLSIVREMFKRRDSNAAPLLEILTDQCLTYEQITGWWYSVRTSASHSSASGHTGRSNGQSEVAAHACASMCDEMVTLWRLAVLDPALSPQRRRELCTQLRQWQLKVIENVKRGQHKKTLERLFPGFRPAVEACYFNWEEAYPLPGVTYSGTDRKLALCWARALPSRPGASRSGGLEESRDRPRPLPTEPAVRPKEPGTKRKGLGEGVPSSQRGPRRLSAEGGDKALHKMGPGGGKAKALGGAGSGSKGSAGGGSKRRLSSEDSSLEPDLAEMSLDDSSLALGAEASTFGGFPESPPPCPLHGGSRGPSTFLPEPPDTYEEDGGVYFSEGPEPPTASVGPPGLLPGDVCTQDDLPSTDESGNGLPKTKEAAPAVGEEDDDYQAYYLNAQDGAGGEEEKAEGGAGEEHDLFAGLKPLEQESRMEVLFACAEALHAHGYSSEASRLTVELAQDLLANPPDLKVEPPPAKGKKNKVSTSRQTWVATNTLSKAAFLLTVLSERPEHHNLAFRVGMFALELQRPPASTKALEVKLAYQESEVAALLKKIPLGPSEMSTMRCRAEELREGTLCDYRPVLPLMLASFIFDVLCAPVVSPTGSRPPSRNWNSETPGDEELGFEAAVAALGMKTTVSEAEHPLLCEGTRREKGDLALALMITYKDDQAKLKKPGQQSETLSLKKKRRRRKKE

SEQ ID NO: 600 - protein, 1031 aa, Artificial Sequence; identical to SEQ ID NO: 599
  Synthetic polypeptide

SEQ ID NO: 601 - protein, 993 aa, Artificial Sequence
  Synthetic polypeptide
MELMFAEWEDGERFSFEDSDRFEEDSLCSFISEAESLCQNWRGWRKQSAGPNSPTGGGGGGGSGGTRMRDGLVIPLVELSAKQVAFHIPFEVVEKVYPPVPEQLQLRIAFWSFPENEEDIRLYSCLANGSADEFQRGDQLFRMRAVKDPLQIGFHLSATVVPPQMVPPKGAYNVAVMFDRCRVTSCSCTCGAGAKWCTHVVALCLFRIHNASAVCLRAPVSESLSRLQRDQLQKFAQYLISELPQQILPTAQRLLDELLSSQSTAINTVCGAPDPTAGPSASDQSTWYLDESTLTDNIKKTLHKFCGPSPVVFSDVNSMYLSSTEPPAAAEWACLLRPLRGREPEGVWNLLSIVREMFKRRDSNAAPLLEILTDQCLTYEQITGWWYSVRTSASHSSASGHTGRSNGQSEVAAHACASMCDEMVTLWRLAVLDPALSPQRRRELCTQLRQWQLKVIENVKRGQHKKTLERLFPGFRPAVEACYFNWEEAYPLPGVTYSGTDRKLALCWARALPSRPGASRSGGLEESRDRPRPLPTEPAVRPKEPGTKRKGLGEGVPSSQRGPRRLSAEGGDKALHKMGPGGGKAKALGGAGSGSKGSAGGGSKRRLSSEDSSLEPDLAEMSLDDSSLALGAEASTFGGFPESPPPCPLHASVGPPGLLPGDVCTQDDLPSTDESGNGLPKTKEAAPAVGEEDDDYQAYYLNAQDGAGGEEEKAEGGAGEEHDLFAGLKPLEQESRMEVLFACAEALHAHGYSSEASRLTVELAQDLLANPPDLKVEPPPAKGKKNKVSTSRQTWVATNTLSKAAFLLTVLSERPEHHNLAFRVGMFALELQRPPASTKALEVKLAYQESEVAALLKKIPLGPSEMSTMRCRAEELREGTLCDYRPVLPLMLASFIFDVLCAPGSRPPSRNWNSETPGDEELGFEAAVAALGMKTTVSEAEHPLLCEGTRREKGDLALALMITYKDDQAKLKKPGQQSETLSLKKKRRRRKKE

SEQ ID NO: 602 - protein, 1026 aa, Artificial Sequence
  Synthetic polypeptide
MELMFAEWEDGERFSFEDSDRFEEDSLCSFISEAESLCQNWRGWRKQSAGPNSPTGGGGGGGSGGTRMRDGLVIPLVELSAKQVAFHIPFEVVEKVYPPVPEQLQLRIAFWSFPENEEDIRLYSCLANGSADEFQRGDQLFRMRAVKDPLQIGFHLSATVVPPQMVPPKGAYNVAVMFDRCRVTSCSCTCGAGAKWCTHVVALCLFRIHNASAVCLRAPVSESLSRLQRDQLQKFAQYLISELPQQILPTAQRLLDELLSSQSTAINTVCGAPDPTAGPSASDQSTWYLDESTLTDNIKKTLHKFCGPSPVVFSDVNSMYLSSTEPPAAAEWACLLRPLRGREPEGVWNLLSIVREMFKRRDSNAAPLLEILTDQCLTYEQITGWWYSVRTSASHSSASGHTGRSNGQSEVAAHACASMCDEMVTLWRLAVLDPALSPQRRRELCTQLRQWQLKVIENVKRGQHKKTLERLFPGFRPAVEACYFNWEEAYPLPGVTYSGTDRKLALCWARALPSRPGASRSGGLEESRDRPRPLPTEPAVRPKEPGTKRKGLGEGVPSSQRGPRRLSAEGGDKALHKMGPGGGKAKALGGAGSGSKGSAGGGSKRRLSSEDSSLEPDLAEMSLDDSSLALGAEASTFGGFPESPPPCPLHGGSRGPSTFLPEPPDTYEEDGGVYFSEGPEPPTASVGPPGLLPGDVCTQDDLPSTDESGNGLPKTKEAAPAVGEEDDDYQAYYLNAQDGAGGEEEKAEGGAGEEHDLFAGLKPLEQESRMEVLFACAEALHAHGYSSEASRLTVELAQDLLANPPDLKVEPPPAKGKKNKVSTSRQTWVATNTLSKAAFLLTVLSERPEHHNLAFRVGMFALELQRPPASTKALEVKLAYQESEVAALLKKIPLGPSEMSTMRCRAEELREGTLCDYRPVLPLMLASFIFDVLCAPGSRPPSRNWNSETPGDEELGFEAAVAALGMKTTVSEAEHPLLCEGTRREKGDLALALMITYKDDQAKLKKPGQQSETLSLKKKRRRRKKE

SEQ ID NO: 603 - protein, 1026 aa, Artificial Sequence; identical to SEQ ID NO: 602
  Synthetic polypeptide

SEQ ID NO: 604 - protein, 1024 aa, Artificial Sequence
  Synthetic polypeptide
MELMFAEWEDGERFSFEDSDRFEEDSLCSFISEAESLCQNWRGWRKQSAGPNSPTGGGGGGGSGGTRMRDGLVIPLVELSAKQVAFHIPFEVVEKVYPPVPEQLQLRIAFWSFPENEEDIRLYSCLANGSADEFQRGDQLFRMRAVKDPLQIGFHLSATVVPPQMVPPKGAYNVAVMFDRCRVTSCSCTCGAGAKWCTHVVALCLFRIHNASAVCLRAPVSESLSRLQRDQLQKFAQYLISELPQQILPTAQRLLDELLSSQSTAINTVCGAPDPTAGPSASDQSTWYLDESTLTDNIKKTLHKFCGPSPVVFSDVNSMYLSSTEPPAAAEWACLLRPLRGREPEGVWNLLSIVREMFKRRDSNAAPLLEILTDQCLTYEQITGWWYSVRTSASHSSASGHTGRSNGQSEVAAHACASMCDEMVTLWRLAVLDPALSPQRRRELCTQLRQWQLKVIENVKRGQHKKTLERLFPGFRPAVEACYFNWEEAYPLPGVTYSGTDRKLALCWARALPSRPGASRSGGLEESRDRPRPLPTEPAVRPKEPGTKRKGLGEGVPSSQRGPRRLSAEGGDKALHKMGPGGGKAKALGGAGSGSKGSAGGGSKRRLSSEDSSLEPDLAEMSLDDSSLALGAEASTFGGFPESPPPCPLHGGSRGPSTFLPEPPDTYEEDGGVYFSEGPEPPTASVGPPGLLPGDVCTQDDLPSTDESGNGLPKTKEAAPAVGEEDDDYQAYYLNAQDGAGGEEEKAEGGAGEEHDLFAGLKPLEQESRMEVLFACAEALHAHGYSSEASRLTVELAQDLLANPPDLKGKKNKVSTSRQTWVATNTLSKAAFLLTVLSERPEHHNLAFRVGMFALELQRPPASTKALEVKLAYQESEVAALLKKIPLGPSEMSTMRCRAEELREGTLCDYRPVLPLMLASFIFDVLCAPVVSPTGSRPPSRNWNSETPGDEELGFEAAVAALGMKTTVSEAEHPLLCEGTRREKGDLALALMITYKDDQAKLKKPGQQSETLSLKKKRRRRKKE

SEQ ID NO: 605 - protein, 645 aa, Artificial Sequence
  Synthetic polypeptide
ITGWWYSVRTSASHSSASGHTGRSNGQSEVAAHACASMCDEMVTLWRLAVLDPALSPQRRRELCTQLRQWQLKVIENVKRGQHKKTLERLFPGFRPAVEACYFNWEEAYPLPGVTYSGTDRKLALCWARALPSRPGASRSGGLEESRDRPRPLPTEPAVRPKEPGTKRKGLGEGVPSSQRGPRRLSAEGGDKALHKMGPGGGKAKALGGAGSGSKGSAGGGSKRRLSSEDSSLEPDLAEMSLDDSSLALGAEASTFGGFPESPPPCPLHGGSRGPSTFLPEPPDTYEEDGGVYFSEGPEPPTASVGPPGLLPGDVCTQDDLPSTDESGNGLPKTKEAAPAVGEEDDDYQAYYLNAQDGAGGEEEKAEGGAGEEHDLFAGLKPLEQESRMEVLFACAEALHAHGYSSEASRLTVELAQDLLANPPDLKVEPPPAKGKKNKVSTSRQTWVATNTLSKAAFLLTVLSERPEHHNLAFRVGMFALELQRPPASTKALEVKLAYQESEVAALLKKIPLGPSEMSTMRCRAEELREGTLCDYRPVLPLMLASFIFDVLCAPGSRPPSRNWNSETPGDEELGFEAAVAALGMKTTVSEAEHPLLCEGTRREKGDLALALMITYKDDQAKLKKPGQQSETLSLKKKRRRRKKE

SEQ ID NO: 606 - skipped

SEQ ID NO: 607 - protein, 3 aa, Artificial Sequence
  Synthetic polypeptide
RTI

SEQ ID NO: 608 - protein, 37 aa, Artificial Sequence
  Synthetic polypeptide
WGRGREGRGRGWGGARPVCWAEATGTGESHGGTVCLC

SEQ ID NO: 609 - protein, 130 aa, Artificial Sequence
  Synthetic polypeptide
MNDTVTIRTRKFMTNRLLQRKQMVIDVLHPGKATVPKTEIREKLAKMYKTTPDVIFVFGFRTHFGGGKTTGFGMIYDSLDYAKKNEPKHRLARHGLYEKKKTSRKQRKERKNRMKKVRGTAKANVGAGKK

SEQ ID NO: 610 - protein, 130 aa, Artificial Sequence; identical to SEQ ID NO: 609
  Synthetic polypeptide

SEQ ID NO: 611 - protein, 130 aa, Artificial Sequence; identical to SEQ ID NO: 609
  Synthetic polypeptide

SEQ ID NO: 612 - protein, 130 aa, Artificial Sequence; identical to SEQ ID NO: 609
  Synthetic polypeptide

SEQ ID NO: 613 - protein, 166 aa, Artificial Sequence
  Synthetic polypeptide
MLALRCGSRWLGLLSVPRSVPLRLPAARACSKGSGDPSSSSSSGNPLVYLDVDANGKPLGRVVLELKADVVPKTAENFRALCTGEKGFGYKGSTFHRVIPSFMCQAGDFTNHNGTGGKSIYGSRFPDENFTLKHVGPATRCLDHGDGYFMAWCCFLDGELLQDTVI

SEQ ID NO: 614 - protein, 166 aa, Artificial Sequence; identical to SEQ ID NO: 613
  Synthetic polypeptide

SEQ ID NO: 615 - protein, 166 aa, Artificial Sequence; identical to SEQ ID NO: 613
  Synthetic polypeptide

SEQ ID NO: 616 - protein, 29 aa, Artificial Sequence
  Synthetic polypeptide
RPLPPPPGTRSCTWTWTPTGSRSAAWCWS

SEQ ID NO: 617 - protein, 15 aa, Artificial Sequence
  Synthetic polypeptide
MAVQRRLDVMEEALF

SEQ ID NO: 618 - protein, 57 aa, Artificial Sequence
  Synthetic polypeptide
MRPLLCALTGLALLRAAGSLAAAEPFSPPRGDSAQSTACDRHMAVQRRLDVMEEALF

SEQ ID NO: 619 - protein, 57 aa, Artificial Sequence; identical to SEQ ID NO: 618
  Synthetic polypeptide

SEQ ID NO: 620 - protein, 429 aa, Artificial Sequence
  Synthetic polypeptide
MSEGAAAASPPGAASAAAASAEEGTAAAAAAAAAGGGPDGGGEGAAEPPRELRCSDCIVWNRQQTWLCVVPLFIGFIGLGLSLMLLKWIVVGSVKEYVPTDLVDSKGMGQDPFFLSKPSSFPKAMETTTTTTSTTSPATPSAGGAASSRTPNRISTRLTTITRAPTRFPGHRVPIRASPRSTTARNTAAPATVPSTTAPFFSSSTLGSRPPVPGTPSTQAMPSWPTAAYATSSYLHDSTPSWTLSPFQDAASSSSSSSSSATTTTPETSTSPKFHTTTYSTERSEHFKPCRDKDLAYCLNDGECFVIETLTGSHKHCRCKEGYQGVRCDQFLPKTDSILSDPTDHLGIEFMESEEVYQRQVLSISCIIFGIVIVGMFCAAFYFKSKKQAKQIQEQLKVPQNGKSYSLKASSTMAKSENLVKSHVQLQNK

SEQ ID NO: 621 - protein, 429 aa, Artificial Sequence; identical to SEQ ID NO: 620
  Synthetic polypeptide

SEQ ID NO: 622 - protein, 208 aa, Artificial Sequence
  Synthetic polypeptide
MECGIPPTLVCVGRGGGLHTINIIIWYYFPSAWRTCFNISSSVGLLLTNSYKFYTTTYSTERSEHFKPCRDKDLAYCLNDGECFVIETLTGSHKHCRCKEGYQGVRCDQFLPKTDSILSDPTDHLGIEFMESEEVYQRQVLSISCIIFGIVIVGMFCAAFYFKSKKQAKQIQEQLKVPQNGKSYSLKASSTMAKSENLVKSHVQLQNK

SEQ ID NO: 623 - protein, 233 aa, Artificial Sequence
  Synthetic polypeptide
MECGIPPTLVCVGRGGGLHTVGVFHVLSQLISLCTIPEVFKEKPKINIIIWYYFPSAWRTCFNISSSVGLLLTNSYKFYTTTYSTERSEHFKPCRDKDLAYCLNDGECFVIETLTGSHKHCRCKEGYQGVRCDQFLPKTDSILSDPTDHLGIEFMESEEVYQRQVLSISCIIFGIVIVGMFCAAFYFKSKKQAKQIQEQLKVPQNGKSYSLKASSTMAKSENLVKSHVQLQNK

SEQ ID NO: 624 - protein, 259 aa, Artificial Sequence
  Synthetic polypeptide
MECGIPPTLVCVGRGGGLHTVGVFHVLSQLISLCTIPEVFKEKPKINIIIWYYFPSAWRTCFNISSSVGLLLTNSYKFCPRDRRHAIHGNMGKTRVVRRQKQEQDTTTYSTERSEHFKPCRDKDLAYCLNDGECFVIETLTGSHKHCRCKEGYQGVRCDQFLPKTDSILSDPTDHLGIEFMESEEVYQRQVLSISCIIFGIVIVGMFCAAFYFKSKKQAKQIQEQLKVPQNGKSYSLKASSTMAKSENLVKSHVQLQNK

SEQ ID NO: 625 - protein, 79 aa, Artificial Sequence
  Synthetic polypeptide
MESEEVYQRQVLSISCIIFGIVIVGMFCAAFYFKSKKQAKQIQEQLKVPQNGKSYSLKASSTMAKSENLVKSHVQLQNK

SEQ ID NO: 626 - protein, 79 aa, Artificial Sequence; identical to SEQ ID NO: 625
  Synthetic polypeptide

SEQ ID NO: 627 - protein, 358 aa, Artificial Sequence
  Synthetic polypeptide
MFSNANSRSKMWLLLTMASLISVLGTTHGLFGKLHPGSPEVTMNISQMITYWGYPNEEYEVVTEDGYILEVNRIPYGKKNSGNTGQRPVVFLQHGLLASATNWISNLPNNSLAFILADAGYDVWLGNSRGNTWARRNLYYSPDSVEFWAFSFDEMAKYDLPATIDFIVKKTGQKQLHYVGHSQGTTIGFIAFSTNPSLAKRIKTFYALAPVATVKYTKSLINKLRFVPQSLFKFIFGDKIFYPHNFFDQFLATEVCSREMLNLLCSNALFIICGFDSKNFNTSRLDVYLSHNPAGTSVQNMFHWTQAVKSGKFQAYDWGSPVQNRMHYDQPCYSEHGLEPMASASPMNAESQAVPQIY

SEQ ID NO: 628 - protein, 315 aa, Artificial Sequence
  Synthetic polypeptide
MWLLLTMASLISVLGTTHGLFGKLHPGSPEVTMNISQMITYWGYPNEEYEVVTEDGYILEVNRIPYGKKNSGNTDAGYDVWLGNSRGNTWARRNLYYSPDSVEFWAFSFDEMAKYDLPATIDFIVKKTGQKQLHYVGHSQGTTIGFIAFSTNPSLAKRIKTFYALAPVATVKYTKSLINKLRFVPQSLFKFIFGDKIFYPHNFFDQFLATEVCSREMLNLLCSNALFIICGFDSKNFNTSRLDVYLSHNPAGTSVQNMFHWTQAVKSGKFQAYDWGSPVQNRMHYDQPCYSEHGLEPMASASPMNAESQAVPQIY

SEQ ID NO: 629 - protein, 348 aa, Artificial Sequence
  Synthetic polypeptide
MWLLLTMASLISVLGTTHGLFGKLHPGSPEVTMNISQMITYWGYPNEEYEVVTEDGYILEVNRIPYGKKNSGNTGQRPVVFLQHGLLASATNWISNLPNNSLAFILADAGYDVWLGNSRGNTWARRNLYYSPDSVEFWAFSFDEMAKYDLPATIDFIVKKTGQKQLHYVGHSQGTTIGFIAFSTNPSLAKRIKTFYALAPVATVKYTKSLINKLRFVPQSLFKFIFGDKIFYPHNFFDQFLATEVCSREMLNLLCSNALFIICGFDSKNFNTSRLDVYLSHNPAGTSVQNMFHWTQAVKSGKFQAYDWGSPVQNRMHYDQPCYSEHGLEPMASASPMNAESQAVPQIY

SEQ ID NO: 630 - protein, 325 aa, Artificial Sequence
  Synthetic polypeptide
MFSNANSRSKMWLLLTMASLISVLGTTHGLFGKLHPGSPEVTMNISQMITYWGYPNEEYEVVTEDGYILEVNRIPYGKKNSGNTDAGYDVWLGNSRGNTWARRNLYYSPDSVEFWAFSFDEMAKYDLPATIDFIVKKTGQKQLHYVGHSQGTTIGFIAFSTNPSLAKRIKTFYALAPVATVKYTKSLINKLRFVPQSLFKFIFGDKIFYPHNFFDQFLATEVCSREMLNLLCSNALFIICGFDSKNFNTSRLDVYLSHNPAGTSVQNMFHWTQAVKSGKFQAYDWGSPVQNRMHYDQPCYSEHGLEPMASASPMNAESQAVPQIY

SEQ ID NO: 631 - protein, 342 aa, Artificial Sequence
  Synthetic polypeptide
MFSNANSRSKMWLLLTMASLISVLGTTHGLFGKLHPGSPEVTMNISQMITYWGYPNEEYEVVTEDGYILEVNRIPYGKKNSGNTGQRPVVFLQHGLLASATNWISNLPNNSLAFILADAGYDVWLGNSRGNTWARRNLYYSPDSVEFWAFSFDEMAKYDLPATIDFIVKKTGQKQLHYVGHSQGTTIGFIAFSTNPSLAKRIKTFYALAPVATVKYTKSLINKLRFVPQSLFKFIFGDKIFYPHNFFDQFLATEVCSREMLNLLCSNALFIICGFDSKNFNTSRLDVYLSHNPAGTSVQNMFHWTQAVKSGKFQAYDWGSPVQNRMHYDQSMVWSQWHQHHL

SEQ ID NO: 632 - protein, 299 aa, Artificial Sequence
  Synthetic polypeptide
MWLLLTMASLISVLGTTHGLFGKLHPGSPEVTMNISQMITYWGYPNEEYEVVTEDGYILEVNRIPYGKKNSGNTDAGYDVWLGNSRGNTWARRNLYYSPDSVEFWAFSFDEMAKYDLPATIDFIVKKTGQKQLHYVGHSQGTTIGFIAFSTNPSLAKRIKTFYALAPVATVKYTKSLINKLRFVPQSLFKFIFGDKIFYPHNFFDQFLATEVCSREMLNLLCSNALFIICGFDSKNFNTSRLDVYLSHNPAGTSVQNMFHWTQAVKSGKFQAYDWGSPVQNRMHYDQSMVWSQWHQHHL

SEQ ID NO: 633 - protein, 332 aa, Artificial Sequence
  Synthetic polypeptide
MWLLLTMASLISVLGTTHGLFGKLHPGSPEVTMNISQMITYWGYPNEEYEVVTEDGYILEVNRIPYGKKNSGNTGQRPVVFLQHGLLASATNWISNLPNNSLAFILADAGYDVWLGNSRGNTWARRNLYYSPDSVEFWAFSFDEMAKYDLPATIDFIVKKTGQKQLHYVGHSQGTTIGFIAFSTNPSLAKRIKTFYALAPVATVKYTKSLINKLRFVPQSLFKFIFGDKIFYPHNFFDQFLATEVCSREMLNLLCSNALFIICGFDSKNFNTSRLDVYLSHNPAGTSVQNMFHWTQAVKSGKFQAYDWGSPVQNRMHYDQSMVWSQWHQHHL

SEQ ID NO: 634 - protein, 309 aa, Artificial Sequence
  Synthetic polypeptide
MFSNANSRSKMWLLLTMASLISVLGTTHGLFGKLHPGSPEVTMNISQMITYWGYPNEEYEVVTEDGYILEVNRIPYGKKNSGNTDAGYDVWLGNSRGNTWARRNLYYSPDSVEFWAFSFDEMAKYDLPATIDFIVKKTGQKQLHYVGHSQGTTIGFIAFSTNPSLAKRIKTFYALAPVATVKYTKSLINKLRFVPQSLFKFIFGDKIFYPHNFFDQFLATEVCSREMLNLLCSNALFIICGFDSKNFNTSRLDVYLSHNPAGTSVQNMFHWTQAVKSGKFQAYDWGSPVQNRMHYDQSMVWSQWHQHHL

SEQ ID NO: 635 - protein, 65 aa, Artificial Sequence
  Synthetic polypeptide
MDPAVALVLCLSCLFLLSLWRQSSGRGRLPSGPTPLPIIGNILQLDVKDMSKSLTNAPTKYSETG

SEQ ID NO: 636 - protein, 65 aa, Artificial Sequence; identical to SEQ ID NO: 635
  Synthetic polypeptide

SEQ ID NO: 637 - protein, 323 aa, Artificial Sequence
  Synthetic polypeptide
MDSLVVLVLCLSCLLLLSLWRQSSGRGKLPPGPTPLPVIGNILQIGIKDISKSLTNLSKVYGPVFTLYFGLKPIVVLHGYEAVKEALIDLGEEFSGRGIFPLAERANRGFGIVFSNGKKWKEIRRFSLMTLRNFGMGKRSIEDRVQEEARCLVEELRKTKASPCDPTFILGCAPCNVICSIIFHKRFDYKDQQFLNLMEKLNENIKILSSPWIQICNNFSPIIDYFPGTHNKLLKNVAFMKSYILEKVKEHQESMDMNNPQDFIDCFLMKMEKEKHNQPSEFTIESLENTAVDLFGAGTETTSTTLRYALLLLLKHPEVTEKY

SEQ ID NO: 638 - protein, 488 aa, Artificial Sequence
  Synthetic polypeptide
MDPPRASHLSPRKKRPRQTGALMASSPQDIKFQDLVVFILEKKMGTTRRAFLMELARRKGFRVENELSDSVTHIVAENNSGSDVLEWLQAQKVQVSSQPELLDVSWLIECIRAGKPVEMTGKHQLVVRRDYSDSTNPGPPKTPPIAVQKISQYACQRRTTLNNCNQIFTDAFDILAENCEFRENEDSCVTFMRAASVLKSLPFTIISMKDTEGIPCLGSKVKGIIEEIIEDGESSEVKAVLNDERYQSFKLFTSVFGVGLKTSEKWFRMGFRTLSKVRSDKSLKFTRMQKAGFLYYEDLVSCVTRAEAEAVSVLVKEAVWAFLPDAFVTMTGGFRRGKKMGHDVDFLITSPGSTEDEEQLLQKVMNLWEKKGLLLYYDLVESTFEKLRLPSRKVDALDHFQKCFLIFKLPRQRVDSDQSSWQEGKTWKAIRVDLVLCPYERRAFALLGWTGSRFERDLRRYATHERKMILDNHALYDKTKNSFETENC

SEQ ID NO: 639 - protein, 489 aa, Artificial Sequence
  Synthetic polypeptide
MDPPRASHLSPRKKRPRQTGALMASSPQDIKFQDLVVFILEKKMGTTRRAFLMELARRKGFRVENELSDSVTHIVAENNSGSDVLEWLQAQKVQVSSQPELLDVSWLIECIRAGKPVEMTGKHQLVVRRDYSDSTNPGPPKTPPIAVQKISQYACQRRTTLNNCNQIFTDAFDILAENCEFRENEDSCVTFMRAASVLKSLPFTIISMKDTEGIPCLGSKVKGIIEEIIEDGESSEVKAVLNDERYQSFKLFTSVFGVGLKTSEKWFRMGFRTLSKVRSDKSLKFTRMQKAGFLYYEDLVSCVTRAEAEAVSVLVKEAVWAFLPDAFVTMTGGFRRGKKMGHDVDFLITSPGSTEDEEQLLQKVMNLWEKKGLLLYYDLVESTFEKLRLPSRKVDALDHFQKCFLIFKLPRQRVDSDQSSWQEGKTWKAIRVDLVLCPYERRAFALLGWTGSRQFERDLRRYATHERKMILDNHALYDKTKNSFETENC

SEQ ID NO: 640 - protein, 314 aa, Artificial Sequence
  Synthetic polypeptide
MAAAAAVEAAAPMGALWGLVHDFVVGQQEGPADQVAADVKSGNYTVLQVVEALGSSLENPEPRTRARAIQLLSQVLLHCHTLLLEKEVVHLILFYENRLKDHHLVIPSVLQGLKALSLCVALPPGLAVSVLKAIFQEVHVQSLPQVDRHTVYNIITNFMRTREEELKSLGADFTFGFIQVMDGEKDPRNLLVAFRIVHDLISRDYSLGPFVEELFEVTSCYFPIDFTPPPNDPHGIQREDLILSLRAVLASTPRFAEFLLPLLIEKVDSEVLSAKLDSLQTLNACCAVYGQKELKDFLPSLWASIRREGQDIMP

SEQ ID NO: 641 - protein, 314 aa, Artificial Sequence; identical to SEQ ID NO: 640
  Synthetic polypeptide

SEQ ID NO: 642 - protein, 314 aa, Artificial Sequence; identical to SEQ ID NO: 640
  Synthetic polypeptide

SEQ ID NO: 643 - protein, 271 aa, Artificial Sequence
  Synthetic polypeptide
MAAAAAVEAAAPMGALWGLVHDFVVGQQEGPADQVAADVKSGNYTVLQVVEALGSSLENPEPRTRARAIQLLSQVLLHCHTLLLEKEVVHLILFYENRLKDHHLVIPSVLQGLKALSLCVALPPGLAVSVLKAIFQEVHVQSLPQVDRHTVYNIITNFMRTREEGPFVEELFEVTSCYFPIDFTPPPNDPHGIQREDLILSLRAVLASTPRFAEFLLPLLIEKVDSEVLSAKLDSLQTLNACCAVYGQKELKDFLPSLWASIRREGQDIMP

SEQ ID NO: 644 - protein, 36 aa, Artificial Sequence
  Synthetic polypeptide
LQTLNACCAVYGQKELKDFLPSLWASIRREGQDIMP

SEQ ID NO: 645 - protein, 305 aa, Artificial Sequence
  Synthetic polypeptide
MAAAAAVEAAAPMGALWGLVHDFVVGQQEGPADQVAADVKSGNYTVLQVVEALGSSLENPEPRTRARAIQLLSQVLLHCHTLLLEKEVVHLILFYENRLKDHHLVIPSVLQGLKALSLCVALPPGLAVSVLKAIFQEVHVQSLPQVDRHTVYNIITNFMRTREEELKSLGADFTFGFIQVMDGEKDPRNLLVAFRIVHDLISRDYSLGPFVEELFEVTSCYFPIDFTPREDLILSLRAVLASTPRFAEFLLPLLIEKVDSEVLSAKLDSLQTLNACCAVYGQKELKDFLPSLWASIRREGQDIMP

SEQ ID NO: 646 - protein, 235 aa, Artificial Sequence
  Synthetic polypeptide
MARLADYFIVVGYDHEKPGSGEGLGKIIQRFPQKDWDDTPFPQGIELFCQPGGWQLSRERKQPTFFVVVLTDIDSDRHYCSCLTFYEAEINLQGTKKEEIEGEAKVSGLIQPAEVFAPKSLVLVSRLYYPEIFRACLGLIYTVYVDSLNVSLESLIANLCACLVPAAGGSQKLFSLGAGDRQLIQTPLHDSLPITGTSVALLFQQLGTVAHACNLSTLGGRGGQLTRSGDRDHPG

SEQ ID NO: 647 - protein, 963 aa, Artificial Sequence
  Synthetic polypeptide
MTELKAKGPRAPHVAGGPPSPEVGSPLLCRPAAGPFPGSQTSDTLPEVSAIPISLDGLLFPRPCQGQDPSDEKTQDQQSLSDVEGAYSRAEATRGAGGSSSSPPEKDSGLLDSVLDTLLAPSGPGQSQPSPPACEVTSSWCLFGPELPEDPPAAPATQRVLSPLMSRSGCKVGDSSGTAAAHKVLPRGLSPARQLLLPASESPHWSGAPVKPSPQAAAVEVEEEDGSESEESAGPLLKGKPRALGGAAAGGGAAAVPPGAAAGGVALVPKEDSRFSAPRVALVEQDAPMAPGRSPLATTVMDFIHVPILPLNHALLAARTRQLLEDESYDGGAGAASAFAPPRSSPCASSTPVAVGDFPDCAYPPDAEPKDDAYPLYSDFQPPALKIKEEEEGAEASARSPRSYLVAGANPAAFPDFPLGPPPPLPPRATPSRPGEAAVTAAPASASVSSASSSGSTLECILYKAEGAPPQQGPFAPPPCKAPGASGCLLPRDGLPSTSASAAAAGAAPALYPALGLNGLPQLGYQAAVLKEGLPQVYPPYLNYLRPDSEASQSPQYSFESLPQKICLICGDEASGCHYGVLTCGSCKVFFKRAMEGQHNYLCAGRNDCIVDKIRRKNCPACRLRKCCQAGMVLGGRKFKKFNKVRVVRALDAVALPQPVGVPNESQALSQRFTFSPGQDIQLIPPLINLLMSIEPDVIYAGHDNTKPDTSSSLLTSLNQLGERQLLSVVKWSKSLPGFRNLHIDDQITLIQYSWMSLMVFGLGWRSYKHVSGQMLYFAPDLILNEQRMKESSFYSLCLTMWQIPQEFVKLQVSQEEFLCMKVLLLLNTIPLEGLRSQTQFEEMRSSYIRELIKAIGLRQKGVVSSSQRFYQLTKLLDNLHDQHWKPEDSGAVPSEFDGKENLQRISYLAKPSNKYNGSMKVFSNLQGLLEFTSDTTFSRTATGCLITKHGIKPKIHPNRDAK

SEQ ID NO: 648 - protein, 369 aa, Artificial Sequence
  Synthetic polypeptide
MEGQHNYLCAGRNDCIVDKIRRKNCPACRLRKCCQAGMVLGGRKFKKFNKVRVVRALDAVALPQPVGVPNESQALSQRFTFSPGQDIQLIPPLINLLMSIEPDVIYAGHDNTKPDTSSSLLTSLNQLGERQLLSVVKWSKSLPGFRNLHIDDQITLIQYSWMSLMVFGLGWRSYKHVSGQMLYFAPDLILNEQRMKESSFYSLCLTMWQIPQEFVKLQVSQEEFLCMKVLLLLNTIPLEGLRSQTQFEEMRSSYIRELIKAIGLRQKGVVSSSQRFYQLTKLLDNLHDQHWKPEDSGAVPSEFDGKENLQRISYLAKPSNKYNGSMKVFSNLQGLLEFTSDTTFSRTATGCLITKHGIKPKIHPNRDAK

SEQ ID NO: 649 - protein, 861 aa, Artificial Sequence
  Synthetic polypeptide
MTELKAKGPRAPHVAGGPPSPEVGSPLLCRPAAGPFPGSQTSDTLPEVSAIPISLDGLLFPRPCQGQDPSDEKTQDQQSLSDVEGAYSRAEATRGAGGSSSSPPEKDSGLLDSVLDTLLAPSGPGQSQPSPPACEVTSSWCLFGPELPEDPPAAPATQRVLSPLMSRSGCKVGDSSGTAAAHKVLPRGLSPARQLLLPASESPHWSGAPVKPSPQAAAVEVEEEDGSESEESAGPLLKGKPRALGGAAAGGGAAAVPPGAAAGGVALVPKEDSRFSAPRVALVEQDAPMAPGRSPLATTVMDFIHVPILPLNHALLAARTRQLLEDESYDGGAGAASAFAPPRSSPCASSTPVAVGDFPDCAYPPDAEPKDDAYPLYSDFQPPALKIKEEEEGAEASARSPRSYLVAGANPAAFPDFPLGPPPPLPPRATPSRPGEAAVTAAPASASVSSASSSGSTLECILYKAEGAPPQQGPFAPPPCKAPGASGCLLPRDGLPSTSASAAAAGAAPALYPALGLNGLPQLGYQAAVLKEGLPQVYPPYLNYLRPDSEASQSPQYSFESLPQKICLICGDEASGCHYGVLTCGSCKVFFKRAMEGQHNYLCAGRNDCIVDKIRRKNCPACRLRKCCQAGMVLGGFRNLHIDDQITLIQYSWMSLMVFGLGWRSYKHVSGQMLYFAPDLILNEQRMKESSFYSLCLTMWQIPQEFVKLQVSQEEFLCMKVLLLLNTIPLEGLRSQTQFEEMRSSYIRELIKAIGLRQKGVVSSSQRFYQLTKLLDNLHDQHWKPEDSGAVPSEFDGKENLQRISYLAKPSNKYNGSMKVFSNLQGLLEFTSDTTFSRTATGCLITKHGIKPKIHPNRDAK

SEQ ID NO: 650 - protein, 159 aa, Artificial Sequence
  Synthetic polypeptide
MATGELGDLGGYYFRFLPQKTFQSLSSKEITSRLRQWSMLGRIKAQAFGFDQTFQSYRKDDFVMAFFKDPNVIPNLKLLSDSSGQWIILGTEVKKIEAINVPCTQLSMSFFHRLYDEDIVRDSGHIVKCLDSFCDPFLISDELRRLPGRLKSQLLGRLK

SEQ ID NO: 651 - protein, 159 aa, Artificial Sequence; identical to SEQ ID NO: 650
  Synthetic polypeptide

SEQ ID NO: 652 - protein, 21 aa, Artificial Sequence
  Synthetic polypeptide
HFFIGYMMKILYETVDILLNV

SEQ ID NO: 653 - protein, 250 aa, Artificial Sequence
  Synthetic polypeptide
MDPGQQPPPQPAPQGQGQPPSQPPQGQGPPSGPGQPAPAATQAAPQAPPAGHQIVHVRGDSETDLEALFNAVMNPKTANVPQTVPMRLRKLPDSFFKPPEPKSHSRQASTDAGTAGALTPQHVRAHSSPASLQLGAVSPGTLTPTGVVSGPAATPTAQHLRQSSFEIPDDVPLPAGWEMAKTSSGQRYFLNHIDQTTTWQDPRKAMLSQMNVTAPTSPPVQQNMMNSASGRVWWLITPLPALWEANAGRS

SEQ ID NO: 654 - protein, 250 aa, Artificial Sequence; identical to SEQ ID NO: 653
  Synthetic polypeptide

SEQ ID NO: 655 - protein, 250 aa, Artificial Sequence; identical to SEQ ID NO: 653
  Synthetic polypeptide

SEQ ID NO: 656 - protein, 250 aa, Artificial Sequence; identical to SEQ ID NO: 653
  Synthetic polypeptide

SEQ ID NO: 657 - protein, 250 aa, Artificial Sequence; identical to SEQ ID NO: 653
  Synthetic polypeptide

SEQ ID NO: 658 - protein, 72 aa, Artificial Sequence
  Synthetic polypeptide
MAKTSSGQRYFLNHIDQTTTWQDPRKAMLSQMNVTAPTSPPVQQNMMNSASGRVWWLITPLPALWEANAGRS

SEQ ID NO: 659 - protein, 193 aa, Artificial Sequence
  Synthetic polypeptide
MRIISRQIVLLFSGFWGLAMGAFPSSVQIGGLFIRNTDQEYTAFRLAIFLHNTSPNASEAPFNLVPHVDNIETANSFAVTNAFCSQYSRGVFAIFGLYDKRSVHTLTSFCSALHISLITPSFPTEGESQFVLQLRPSLRGALLSLLDHYEWNCFVFLYDTDRGGRSGRITQGQQFRTNLDIIARPCLYKQYKN

SEQ ID NO: 660 - protein, 193 aa, Artificial Sequence; identical to SEQ ID NO: 659
  Synthetic polypeptide

SEQ ID NO: 661 - protein, 193 aa, Artificial Sequence; identical to SEQ ID NO: 659
  Synthetic polypeptide

SEQ ID NO: 662 - protein, 193 aa, Artificial Sequence; identical to SEQ ID NO: 659
  Synthetic polypeptide

SEQ ID NO: 663 - protein, 193 aa, Artificial Sequence; identical to SEQ ID NO: 659
  Synthetic polypeptide

SEQ ID NO: 664 - protein, 193 aa, Artificial Sequence; identical to SEQ ID NO: 659
  Synthetic polypeptide

SEQ ID NO: 665 - protein, 193 aa, Artificial Sequence; identical to SEQ ID NO: 659
  Synthetic polypeptide

SEQ ID NO: 666 - protein, 105 aa, Artificial Sequence
  Synthetic polypeptide
MAAAGGARLLRAASAVLGGPAGRWLHHAGSRAGSSGLLRNRGPGGSAEASRSLSVSARARSSSEDKITVHFINRDGETLTTKGKVGDSLLDVVVENNLDIDGFGS

SEQ ID NO: 667 - protein, 396 aa, Artificial Sequence
  Synthetic polypeptide
MLLWVQQALLALLLPTLLAQGEARRSRNTTRPALLRLSDYLLTNYRKGVRPVRDWRKPTTVSIDVIVYAILNVDEKNQVLTTYIWYRQYWTDEFLQWNPEDFDNITKLSIPTDSIWVPDILINEFVDVGKSPNIPYVYIRHQGEVQNYKPLQVVTACSLDIYNFPFDVQNCSLTFTSWLHTIQDINISLWRLPEKVKSDRSVFMNQGEWELLGVLPYFREFSMESSNYYAEMKFYVVIRRRPLFYVVSLLLPSIFLMVMDIVGFYLPPNSGERVSFKITLLLGYSVFLIIVSDTLPATAIGTPLIGVYFVVCMALLVISLAETIFIVRLVHKQDLQQPVPAWLRHLVLERIAWLLCLREQSTSQRPPATSQATKTDDCSVGWAWSCTPVVLATSGG

SEQ ID NO: 668 - protein, 434 aa, Artificial Sequence
  Synthetic polypeptide
MLGKLAMLLWVQQALLALLLPTLLAQGEARRSRNTTRPALLRLSDYLLTNYRKGVRPVRDWRKPTTVSIDVIVYAILNVDEKNQVLTTYIWYRQYWTDEFLQWNPEDFDNITKLSIPTDSIWVPDILINEFVDVGKSPNIPYVYIRHQGEVQNYKPLQVVTACSLDIYNFPFDVQNCSLTFTSWLHTIQDINISLWRLPEKVKSDRSVFMNQGEWELLGVLPYFREFSMESSNYYAEMKFYVVIRRRPLFYVVSLLLPSIFLMVMDIVGFYLPPNSGERVSFKITLLLGYSVFLIIVSDTLPATAIGTPLIGKAPPGSRAQSGEKPAPSHLLHVSLASALGCTGVYFVVCMALLVISLAETIFIVRLVHKQDLQQPVPAWLRHLVLERIAWLLCLREQSTSQRPPATSQATKTDDCSVGWAWSCTPVVLATSGG

SEQ ID NO: 669 - protein, 402 aa, Artificial Sequence
  Synthetic polypeptide
MLGKLAMLLWVQQALLALLLPTLLAQGEARRSRNTTRPALLRLSDYLLTNYRKGVRPVRDWRKPTTVSIDVIVYAILNVDEKNQVLTTYIWYRQYWTDEFLQWNPEDFDNITKLSIPTDSIWVPDILINEFVDVGKSPNIPYVYIRHQGEVQNYKPLQVVTACSLDIYNFPFDVQNCSLTFTSWLHTIQDINISLWRLPEKVKSDRSVFMNQGEWELLGVLPYFREFSMESSNYYAEMKFYVVIRRRPLFYVVSLLLPSIFLMVMDIVGFYLPPNSGERVSFKITLLLGYSVFLIIVSDTLPATAIGTPLIGVYFVVCMALLVISLAETIFIVRLVHKQDLQQPVPAWLRHLVLERIAWLLCLREQSTSQRPPATSQATKTDDCSVGWAWSCTPVVLATSGG

SEQ ID NO: 670 - protein, 428 aa, Artificial Sequence
  Synthetic polypeptide
MLLWVQQALLALLLPTLLAQGEARRSRNTTRPALLRLSDYLLTNYRKGVRPVRDWRKPTTVSIDVIVYAILNVDEKNQVLTTYIWYRQYWTDEFLQWNPEDFDNITKLSIPTDSIWVPDILINEFVDVGKSPNIPYVYIRHQGEVQNYKPLQVVTACSLDIYNFPFDVQNCSLTFTSWLHTIQDINISLWRLPEKVKSDRSVFMNQGEWELLGVLPYFREFSMESSNYYAEMKFYVVIRRRPLFYVVSLLLPSIFLMVMDIVGFYLPPNSGERVSFKITLLLGYSVFLIIVSDTLPATAIGTPLIGKAPPGSRAQSGEKPAPSHLLHVSLASALGCTGVYFVVCMALLVISLAETIFIVRLVHKQDLQQPVPAWLRHLVLERIAWLLCLREQSTSQRPPATSQATKTDDCSVGWAWSCTPVVLATSGG

SEQ ID NO: 671 - protein, 140 aa, Artificial Sequence
  Synthetic polypeptide
MVMDIVGFYLPPNSGERVSFKITLLLGYSVFLIIVSDTLPATAIGTPLIGVYFVVCMALLVISLAETIFIVRLVHKQDLQQPVPAWLRHLVLERIAWLLCLREQSTSQRPPATSQATKTDDCSVGWAWSCTPVVLATSGG

SEQ ID NO: 672 - protein, 381 aa, Artificial Sequence
  Synthetic polypeptide
MHRSFLQARRSRNTTRPALLRLSDYLLTNYRKGVRPVRDWRKPTTVSIDVIVYAILNVDEKNQVLTTYIWYRQYWTDEFLQWNPEDFDNITKLSIPTDSIWVPDILINEFVDVGKSPNIPYVYIRHQGEVQNYKPLQVVTACSLDIYNFPFDVQNCSLTFTSWLHTIQDINISLWRLPEKVKSDRSVFMNQGEWELLGVLPYFREFSMESSNYYAEMKFYVVIRRRPLFYVVSLLLPSIFLMVMDIVGFYLPPNSGERVSFKITLLLGYSVFLIIVSDTLPATAIGTPLIGVYFVVCMALLVISLAETIFIVRLVHKQDLQQPVPAWLRHLVLERIAWLLCLREQSTSQRPPATSQATKTDDCSVGWAWSCTPVVLATSGG

SEQ ID NO: 673 - protein, 368 aa, Artificial Sequence
  Synthetic polypeptide
MVCTRKTKTLVSTCVILSGMTNIICLLYVGWVTNYIASVYVRGQEPAPDKKLEEDKGDTLKIIERLDHLENVIKQHIQEAPAKPEEAEAEPFTDSSLFAHWGQELSPEGRRVALKQFQYYGYNAYLSDRLPLDRPLPDLRPSGCRNLSFPDSLPEVSIVFIFVNEALSVLLRSIHSAMERTPPHLLKEIILVDDNSSNEELKEKLTEYVDKVNSQKPGFIKVVRHSKQEGLIRSRVSGWRAATAPVVALFDAHVEFNVGWAEPVLTRIKENRKRIISPSFDNIKYDNFEIEEYPLAAQGFDWELWCRYLNPPKAWWKLENSTAPIRSPALIGCFIVDRQYFQEIGLLDEGMEVYGGENVELGIRHYLQ

SEQ ID NO: 674 - protein, 66 aa, Artificial Sequence
  Synthetic polypeptide
MQPRVLLVVALLALLASARASEAEDASLLSFMQGYMKHATKTAKDALSSVQESQVAQQARFAVRLK

SEQ ID NO: 675 - protein, 84 aa, Artificial Sequence
  Synthetic polypeptide
MGTWGAPHRTLPCRNRGAMQPRVLLVVALLALLASARASEAEDASLLSFMQGYMKHATKTAKDALSSVQESQVAQQARFAVRLK

SEQ ID NO: 676 - protein, 106 aa, Artificial Sequence
  Synthetic polypeptide
MAQALPWLLLWMGAGVLPAHGTQHGIRLPLRSGLGGAPLGLRLPRETDEEPEEPGRRGSFVEMVDNLRGKSGQGYYVEMTVGSPPQTLVFQQTCRGHRGSVPLAPA

SEQ ID NO: 677 - protein, 106 aa, Artificial Sequence; identical to SEQ ID NO: 676
  Synthetic polypeptide

SEQ ID NO: 678 - protein, 106 aa, Artificial Sequence; identical to SEQ ID NO: 676
  Synthetic polypeptide

SEQ ID NO: 679 - protein, 106 aa, Artificial Sequence; identical to SEQ ID NO: 676
  Synthetic polypeptide

SEQ ID NO: 680 - protein, 106 aa, Artificial Sequence; identical to SEQ ID NO: 676
  Synthetic polypeptide

SEQ ID NO: 681 - protein, 782 aa, Artificial Sequence
  Synthetic polypeptide
MWLVTFLLLLDSLHKARPEDVGTSLYFVNDSLQQLPCTASGYPIPAIRWLKDGRPLPADSRWTKRITGLTISDLRTEDSGTYICEVTNTFGSAEATGILMVIDPLHVTLTPKKLKTGIGSTVILSCALTGSPEFTIRWYRNTELVLPDEAISIRGLSNETLLITSAQKSHSGAYQCFATRKAQTAQDFAIIALEDGTPRIVSSFSEKVVNPGEQFSLMCAAKGAPPPTVTWALDDEPIVRDGSHRTNQYTMSDGTTISHMNVTGPQIRDGGVYRCTARNLVGSAEYQARINVRGPPSIRAMRNITAVAGRDTLINCRVIGYPYYSIKWYKDALLLPDNHRQVVFENGTLKLTDVQKGMDEGEYLCSVLIQPQLSISQSVHVAVKVPPLIQPFEFPPASIGQLLYIPCVVSSGDMPIRITWRKDGQVIISGSGVTIESKEFMSSLQISSVSLKHNGNYTCIASNAAATVSRERQLIVRVPPRFVVQPNNQDGIYGKAGVLNCSVDGYPPPKVMWKHAKGSGNPQQYHPVPLTGRIQILPNSSLLIRHVLEEDIGYYLCQASNGVGTDISKSMFLTVKIPAMITSHPNTTIAIKGHAKELNCTARGERPIIIRWEKGDTVIDPDRVMRYAIATKDNGDEVVSTLKLKPADRGDSVFFSCHAINSYGEDRGLIQLTVQEPPDPPELEIREVKARSMNLRWTQRFDGNSIITGFDIEYKNKSDSWDFKQSTRNISPTINQANIVDLHPASVYSIRMYSFNKIGRSEPSKELTISTEEAAGRGGACL

SEQ ID NO: 682 - protein, 1052 aa, Artificial Sequence
  Synthetic polypeptide
MTGAGEPRREEPPPQPSAGLRSRESGAPSAGGWERAERGRGAAARPATGPPPRRIGPLYGMWLVTFLLLLDSLHKARPEDVGTSLYFVNDSLQQVTFSSSVGVVVPCPAAGSPSAALRWYLATGDDIYDVPHIRHVHANGTLQLYPFSPSAFNSFIHDNDYFCTAENAAGKIRSPNIRVKAVFREPYTVRVEDQRSMRGNVAVFKCLIPSSVQEYVSVVSWEKDTVSIIPEHRFFITYHGGLYISDVQKEDALSTYRCITKHKYSGETRQSNGARLSVTDPAESIPTILDGFHSQEVWAGHTVELPCTASGYPIPAIRWLKDGRPLPADSRWTKRITGLTISDLRTEDSGTYICEVTNTFGSAEATGILMVIDPLHVTLTPKKLKTGIGSTVILSCALTGSPEFTIRWYRNTELVLPDEAISIRGLSNETLLITSAQKSHSGAYQCFATRKAQTAQDFAIIALEDGTPRIVSSFSEKVVNPGEQFSLMCAAKGAPPPTVTWALDDEPIVRDGSHRTNQYTMSDGTTISHMNVTGPQIRDGGVYRCTARNLVGSAEYQARINVRGPPSIRAMRNITAVAGRDTLINCRVIGYPYYSIKWYKDALLLPDNHRQVVFENGTLKLTDVQKGMDEGEYLCSVLIQPQLSISQSVHVAVKVPPLIQPFEFPPASIGQLLYIPCVVSSGDMPIRITWRKDGQVIISGSGVTIESKEFMSSLQISSVSLKHNGNYTCIASNAAATVSRERQLIVRVPPRFVVQPNNQDGIYGKAGVLNCSVDGYPPPKVMWKHAKGSGNPQQYHPVPLTGRIQILPNSSLLIRHVLEEDIGYYLCQASNGVGTDISKSMFLTVKIPAMITSHPNTTIAIKGHAKELNCTARGERPIIIRWEKGDTVIDPDRVMRYAIATKDNGDEVVSTLKLKPADRGDSVFFSCHAINSYGEDRGLIQLTVQEPPDPPELEIREVKARSMNLRWTQRFDGNSIITGFDIEYKNKSDSWDFKQSTRNISPTINQANIVDLHPASVYSIRMYSFNKIGRSEPSKELTISTEEAAGRGGACL

SEQ ID NO: 683 - protein, 117 aa, Artificial Sequence
  Synthetic polypeptide
MELVLVFLCSLLAPMVLASAAEKEKEMDPFHYDYQTLRIGGLVFAVVLFSVGILLILRPQEMRKPRWRTSSPPMQQSPRKQRTEVQPSGGRVKVIQWTSKHRDNSPCSHYAINVGIT

SEQ ID NO: 684 - protein, 89 aa, Artificial Sequence
  Synthetic polypeptide
MELVLVFLCSLLAPMVLASAAEKEKEMDPFHYDYQTLRIGGLVFAVVLFSVGILLILSRRCKCSFNQKPRNRAPESRELKCSHQVEGSK

SEQ ID NO: 685 - protein, 120 aa, Artificial Sequence
  Synthetic polypeptide
MELVLVFLCSLLAPMVLASAEKEKEMDPFHYDYQTLRIGGLVFAVVLFSVGILLILSRRCKCSFNQKPRAPGDEEAQQQSPRKQRTEVQPSGGRVKVIQWTSKHRDNSPCSHYAINVGIT

SEQ ID NO: 686 - protein, 41 aa, Artificial Sequence
  Synthetic polypeptide
MEHSTFLSGLVLATLLSQVLKWKVPCPRNPFNTKQTGSNGH

SEQ ID NO: 687 - protein, 41 aa, Artificial Sequence; identical to SEQ ID NO: 686
  Synthetic polypeptide

SEQ ID NO: 688 - protein, 41 aa, Artificial Sequence; identical to SEQ ID NO: 686
  Synthetic polypeptide

SEQ ID NO: 689 - protein, 244 aa, Artificial Sequence
  Synthetic polypeptide
MAPAQRCPLCRQTFFCGRGHVYSRKHQRQLKEALERLLPQVEAARKAIRAAQVERYVPEHERCCWCLCCGCEVREHLSHGNLTVLYGGLLEHLASPEHKKATNKFWWENKAEVQMKEKFLVTPQDYARFKKSMVKGLDSYEEKEDKVIKEMAAQIREVEQSRQEVVRSVLEPQAVPDPEEGSSAPRSWKGMNSQVASSLQQPSNLDLPPAPELDWMETGPSLTFIGHQDEDRIIDTYDTDESQK

SEQ ID NO: 690 - protein, 107 aa, Artificial Sequence
  Synthetic polypeptide
MPPKDDKKKKDAGKSAKKDKDPVNKSGGKAKKKKWSKGKVRDKLNNLVLFDKATYDKLCKEVPNYKLITPAVVSERLKIRGSLARAALQELLRGLLEPRNLRPAWAT

SEQ ID NO: 691 - protein, 104 aa, Artificial Sequence
  Synthetic polypeptide
MPPKDDKKKKDAGKSAKKDKDPVNKSGGKAKKKKWSKGKVRDKLNNLVLFDKATYDKLCKEVPNYKLITPAVVSERLKIRGSLARAALQELLRRLLEPRRQRLQ

SEQ ID NO: 692 - protein, 142 aa, Artificial Sequence
  Synthetic polypeptide
MAATGTAAAAATGRLLLLLLALAANAGTGFAVAEPQIAMFCGKLNMHVNIQTGKWEPDPTGTKSCFETKEEVLQYCQEMYPELQITNVMEANQRVSIDNWCRRDKKQCKSRFVTPFKCLGAVAHACNPNTWGGRGRGGSQGQ

SEQ ID NO: 693 - protein, 157 aa, Artificial Sequence
  Synthetic polypeptide
MAATGTAAAAATGRLLLLLLVGLTAPALALAGYIEALAANAGTGFAVAEPQIAMFCGKLNMHVNIQTGKWEPDPTGTKSCFETKEEVLQYCQEMYPELQITNVMEANQRVSIDNWCRRDKKQCKSRFVTPFKCLGAVAHACNPNTWGGRGRGGSQGQ

SEQ ID NO: 694 - protein, 157 aa, Artificial Sequence; identical to SEQ ID NO: 693
  Synthetic polypeptide

SEQ ID NO: 695 - protein, 157 aa, Artificial Sequence; identical to SEQ ID NO: 693
  Synthetic polypeptide

SEQ ID NO: 696 - protein, 157 aa, Artificial Sequence; identical to SEQ ID NO: 693
  Synthetic polypeptide

SEQ ID NO: 697 - protein, 167 aa, Artificial Sequence
  Synthetic polypeptide
MLRAPGELPRQAARCSLCRLGPGRGRAFFKWRCLPASVDRGNPLWALAANAGTGFAVAEPQIAMFCGKLNMHVNIQTGKWEPDPTGTKSCFETKEEVLQYCQEMYPELQITNVMEANQRVSIDNWCRRDKKQCKSRFVTPFKCLGAVAHACNPNTWGGRGRGGSQGQ

SEQ ID NO: 698 - protein, 64 aa, Artificial Sequence
  Synthetic polypeptide
MYPELQITNVMEANQRVSIDNWCRRDKKQCKSRFVTPFKCLGAVAHACNPNTWGGRGRGGSQGQ

SEQ ID NO: 699 - protein, 564 aa, Artificial Sequence
  Synthetic polypeptide
MADQRMDISSTISDFMSPGPTDLLSSSLGTSGVDCNRKRKGSSTDYQESMDTDKDDPHGRLEYTEHQGRIKNAREAHSQIEKRRRDKMNSFIDELASLVPTCNAMSRKLDKLTVLRMAVQHMKTLRGATNPYTEANYKPTFLSDDELKHLILRAADGFLFVVGCDRGKILFVSESVFKILNYSQNDLIGQSLFDYLHPKDIAKVKEQLSSSDTAPRERLIDAKTGLPVKTDITPGPSRLCSGARRSFFCRMKCNRPSVKVEDKDFPSTCSKKKDRKSFCTIHSTGYLKSWPPTKMGLDEDNEPDNEGCNLSCLVAIGRLHSHVVPQPVNGEIRVKSMEYVSRHAIDGKFVFVDQRATAILAYLPQELLGTSCYEYFHQDDIGHLAECHRQVLQTREKITTNCYKFKIKDGSFITLRSRWFSFMNPWTKEVEYIVSTNTVVLANVLEGGDPTFPQLTASPHSMDSMLPSGEGGPKRTHPTVPGIPGGTRAGAGKIGRMIAEEIMEIHRIRGSSPSSCGSSPLNITSTPPPDASSPGGKKIPHCNSPLRNFYVSSFEVVSKKNTII

SEQ ID NO: 700 - protein, 564 aa, Artificial Sequence; identical to SEQ ID NO: 699
  Synthetic polypeptide

SEQ ID NO: 701 - protein, 522 aa, Artificial Sequence
  Synthetic polypeptide
MINIESMDTDKDDPHGRLEYTEHQGRIKNAREAHSQIEKRRRDKMNSFIDELASLVPTCNAMSRKLDKLTVLRMAVQHMKTLRGATNPYTEANYKPTFLSDDELKHLILRAADGFLFVVGCDRGKILFVSESVFKILNYSQNDLIGQSLFDYLHPKDIAKVKEQLSSSDTAPRERLIDAKTGLPVKTDITPGPSRLCSGARRSFFCRMKCNRPSVKVEDKDFPSTCSKKKADRKSFCTIHSTGYLKSWPPTKMGLDEDNEPDNEGCNLSCLVAIGRLHSHVVPQPVNGEIRVKSMEYVSRHAIDGKFVFVDQRATAILAYLPQELLGTSCYEYFHQDDIGHLAECHRQVLQTREKITTNCYKFKIKDGSFITLRSRWFSFMNPWTKEVEYIVSTNTVVLANVLEGGDPTFPQLTASPHSMDSMLPSGEGGPKRTHPTVPGIPGGTRAGAGKIGRMIAEEIMEIHRIRGSSPSSCGSSPLNITSTPPPDASSPGGKKIPHCNSPLRNFYVSSFEVVSKKNTII

SEQ ID NO: 702 - protein, 447 aa, Artificial Sequence
  Synthetic polypeptide
MADQRMDISSTISDFMSPGPTDLLSSSLGTSGVDCNRKRKGSSTDYQESMDTDKDDPHGRLEYTEHQGRIKNAREAHSQIEKRRRDKMNSFIDELASLVPTCNAMSRKLDKLTVLRMAVQHMKTLRGATNPYTEANYKPTFLSDDELKHLILRAADGFLFVVGCDRGKILFVSESVFKILNYSQNDLIGQSLFDYLHPKDIAKVKEQLSSSDTAPRERLIDAKTGLPVKTDITPGPSRLCSGARRSFFCRMKCNRPSVKVEDKDFPSTCSKKKVLQTREKITTNCYKFKIKDGSFITLRSRWFSFMNPWTKEVEYIVSTNTVVLANVLEGGDPTFPQLTASPHSMDSMLPSGEGGPKRTHPTVPGIPGGTRAGAGKIGRMIAEEIMEIHRIRGSSPSSCGSSPLNITSTPPPDASSPGGKKIPHCNSPLRNFYVSSFEVVSKKNTII

SEQ ID NO: 703 - protein, 565 aa, Artificial Sequence
  Synthetic polypeptide
MADQRMDISSTISDFMSPGPTDLLSSSLGTSGVDCNRKRKGSSTDYQESMDTDKDDPHGRLEYTEHQGRIKNAREAHSQIEKRRRDKMNSFIDELASLVPTCNAMSRKLDKLTVLRMAVQHMKTLRGATNPYTEANYKPTFLSDDELKHLILRAADGFLFVVGCDRGKILFVSESVFKILNYSQNDLIGQSLFDYLHPKDIAKVKEQLSSSDTAPRERLIDAKTGLPVKTDITPGPSRLCSGARRSFFCRMKCNRPSVKVEDKDFPSTCSKKKADRKSFCTIHSTGYLKSWPPTKMGLDEDNEPDNEGCNLSCLVAIGRLHSHVVPQPVNGEIRVKSMEYVSRHAIDGKFVFVDQRATAILAYLPQELLGTSCYEYFHQDDIGHLAECHRQVLQTREKITTNCYKFKIKDGSFITLRSRWFSFMNPWTKEVEYIVSTNTVVLANVLEGGDPTFPQLTASPHSMDSMLPSGEGGPKRTHPTVPGIPGGTRAGAGKIGRMIAEEIMEIHRIRGSSPSSCGSSPLNITSTPPPDASSPGGKKIPHCNSPLRNFYVSSFEVVSKKNTII

SEQ ID NO: 704 - protein, 521 aa, Artificial Sequence
  Synthetic polypeptide
MINIESMDTDKDDPHGRLEYTEHQGRIKNAREAHSQIEKRRRDKMNSFIDELASLVPTCNAMSRKLDKLTVLRMAVQHMKTLRGATNPYTEANYKPTFLSDDELKHLILRAADGFLFVVGCDRGKILFVSESVFKILNYSQNDLIGQSLFDYLHPKDIAKVKEQLSSSDTAPRERLIDAKTGLPVKTDITPGPSRLCSGARRSFFCRMKCNRPSVKVEDKDFPSTCSKKKDRKSFCTIHSTGYLKSWPPTKMGLDEDNEPDNEGCNLSCLVAIGRLHSHVVPQPVNGEIRVKSMEYVSRHAIDGKFVFVDQRATAILAYLPQELLGTSCYEYFHQDDIGHLAECHRQVLQTREKITTNCYKFKIKDGSFITLRSRWFSFMNPWTKEVEYIVSTNTVVLANVLEGGDPTFPQLTASPHSMDSMLPSGEGGPKRTHPTVPGIPGGTRAGAGKIGRMIAEEIMEIHRIRGSSPSSCGSSPLNITSTPPPDASSPGGKKIPHCNSPLRNFYVSSFEVVSKKNTII

SEQ ID NO: 705 - protein, 563 aa, Artificial Sequence
  Synthetic polypeptide
MSKEAVSLWALTVSLQPPVPLCVCREMTGSGRRKQQCVTLPFISRELCFYLLLFPPPRLEYTEHQGRIKNAREAHSQIEKRRRDKMNSFIDELASLVPTCNAMSRKLDKLTVLRMAVQHMKTLRGATNPYTEANYKPTFLSDDELKHLILRAADGFLFVVGCDRGKILFVSESVFKILNYSQNDLIGQSLFDYLHPKDIAKVKEQLSSSDTAPRERLIDAKTGLPVKTDITPGPSRLCSGARRSFFCRMKCNRPSVKVEDKDFPSTCSKKKADRKSFCTIHSTGYLKSWPPTKMGLDEDNEPDNEGCNLSCLVAIGRLHSHVVPQPVNGEIRVKSMEYVSRHAIDGKFVFVDQRATAILAYLPQELLGTSCYEYFHQDDIGHLAECHRQVLQTREKITTNCYKFKIKDGSFITLRSRWFSFMNPWTKEVEYIVSTNTVVLANVLEGGDPTFPQLTASPHSMDSMLPSGEGGPKRTHPTVPGIPGGTRAGAGKIGRMIAEEIMEIHRIRGSSPSSCGSSPLNITSTPPPDASSPGGKKIPHCNSPLRNFYVSSFEVVSKKNTII

SEQ ID NO: 706 - protein, 73 aa, Artificial Sequence
  Synthetic polypeptide
MSAARESHPHGVKRSASPDDDLGSSNWEAADLGNEERKQKFLRLMGAGKKEHTGRLVIGDHKSTSHFRTGSLQ

SEQ ID NO: 707 - protein, 73 aa, Artificial Sequence; identical to SEQ ID NO: 706
  Synthetic polypeptide

SEQ ID NO: 708 - protein, 45 aa, Artificial Sequence
  Synthetic polypeptide
MSAARESHPHGVKRSASPDDDKEHTGRLVIGDHKSTSHFRTGSLQ

SEQ ID NO: 709 - protein, 29 aa, Artificial Sequence
  Synthetic polypeptide
MGAGKKEHTGRLVIGDHKSTSHFRTGSLQ

SEQ ID NO: 710 - protein, 975 aa, Artificial Sequence
  Synthetic polypeptide
MPLAFCGSENHSAAYRVDQGVLNNGCFVDALNVVPHVFLLFITFPILFIGWGSQSSKVHIHHSTWLHFPGHNLRWILTFMLLFVLVCEIAEGILSDGVTESHHLHLYMPAGMAFMAAVTSVVYYHNIETSNFPKLLIALLVYWTLAFITKTIKFVKFLDHAIGFSQLRFCLTGLLVILYGMLLLVEVNVIRVRRYIFFKTPREVKPPEDLQDLGVRFLQPFVNLLSKGTYWWMNAFIKTAHKKPIDLRAIGKLPIAMRALTNYQRLCEAFDAQVRKDIQGTQGARAIWQALSHAFGRRLVLSSTFRILADLLGFAGPLCIFGIVDHLGKENDVFQPKTQFLGVYFVSSQEFLANAYVLAVLLFLALLLQRTFLQASYYVAIETGINLRGAIQTKIYNKIMHLSTSNLSMGEMTAGQICNLVAIDTNQLMWFFFLCPNLWAMPVQIIVGVILLYYILGVSALIGAAVIILLAPVQYFVATKLSQAQRSTLEYSNERLKQTNEMLRGIKLLKLYAWENIFRTRVETTRRKEMTSLRAFAIYTSISIFMNTAIPIAAVLITFVGHVSFFKEADFSPSVAFASLSLFHILVTPLFLLSSVVRSTVKALVSVQKLSEFLSSAEIREEQCAPHEPTPQGPASKYQAVPLRVVNRKRPAREDCRGLTGPLQSLVPSADGDADNCCVQIMGGYFTWTPDGIPTLSNITIRIPRGQLTMIVGQVGCGKSSLLLAALGEMQKVSGAVFWSSLPDSEIGEDPSPERETATDLDIRKRGPVAYASQKPWLLNATVEENIIFESPFNKQRYKMVIEACSLQPDIDILPHGDQTQIGERGINLSGGQRQRISVARALYQHANVVFLDDPFSALDIHLSDHLMQAGILELLRDDKRTVVLVTHKLQYLPHADWIIAMKDGTIQREGTLKDFQRSECQLFEHWKTLMNRQDQELEKETVTERKATEPPQGLSRAMSSRDGLLQDEEEEEEG

SEQ ID NO: 711 - protein, 976 aa, Artificial Sequence
  Synthetic polypeptide
MPLAFCGSENHSAAYRVDQGVLNNGCFVDALNVVPHVFLLFITFPILFIGWGSQSSKVHIHHSTWLHFPGHNLRWILTFMLLFVLVCEIAEGILSDGVTESHHLHLYMPAGMAFMAAVTSVVYYHNIETSNFPKLLIALLVYWTLAFITKTIKFVKFLDHAIGFSQLRFCLTGLLVILYGMLLLVEVNVIRVRRYIFFKTPREVKPPEDLQDLGVRFLQPFVNLLSKGTYWWMNAFIKTAHKKPIDLRAIGKLPIAMRALTNYQRLCEAFDAQVRKDIQGTQGARAIWQALSHAFGRRLVLSSTFRILADLLGFAGPLCIFGIVDHLGKENDVFQPKTQFLGVYFVSSQEFLANAYVLAVLLFLALLLQRTFLQASYYVAIETGINLRGAIQTKIYNKIMHLSTSNLSMGEMTAGQICNLVAIDTNQLMWFFFLCPNLWAMPVQIIVGVILLYYILGVSALIGAAVIILLAPVQYFVATKLSQAQRSTLEYSNERLKQTNEMLRGIKLLKLYAWENIFRTRVETTRRKEMTSLRAFAIYTSISIFMNTAIPIAAVLITFVGHVSFFKEADFSPSVAFASLSLFHILVTPLFLLSSVVRSTVKALVSVQKLSEFLSSAEIREEQCAPHEPTPQGPASKYQAVPLRVVNRKRPAREDCRGLTGPLQSLVPSADGDADNCCVQIMGGYFTWTPDGIPTLSNITIRIPRGQLTMIVGQVGCGKSSLLLAALGEMQKVSGAVFWSSSLPDSEIGEDPSPERETATDLDIRKRGPVAYASQKPWLLNATVEENIIFESPFNKQRYKMVIEACSLQPDIDILPHGDQTQIGERGINLSGGQRQRISVARALYQHANVVFLDDPFSALDIHLSDHLMQAGILELLRDDKRTVVLVTHKLQYLPHADWIIAMKDGTIQREGTLKDFQRSECQLFEHWKTLMNRQDQELEKETVTERKATEPPQGLSRAMSSRDGLLQDEEEEEEG

SEQ ID NO: 712 - protein, 980 aa, Artificial Sequence
  Synthetic polypeptide
MPLAFCGSENHSAAYRVDQGVLNNGCFVDALNVVPHVFLLFITFPILFIGWGSQSSKVHIHHSTWLHFPGHNLRWILTFMLLFVLVCEIAEGILSDGVTESHHLHLYMPAGMAFMAAVTSVVYYHNIETSNFPKLLIALLVYWTLAFITKTIKFVKFLDHAIGFSQLRFCLTGLLVILYGMLLLVEVNVIRVRRYIFFKTPREVKPPEDLQDLGVRFLQPFVNLLSKGTYWWMNAFIKTAHKKPIDLRAIGKLPIAMRALTNYQRLCEAFDAQVRKDIQGTQGARAIWQALSHAFGRRLVLSSTFRILADLLGFAGPLCIFGIVDHLGKENDVFQPKTQFLGVYFVSSQEFLANAYVLAVLLFLALLLQRTFLQASYYVAIETGINLRGAIQTKIYNKIMHLSTSNLSMGEMTAGQICNLVAIDTNQLMWFFFLCPNLWAMPVQIIVGVILLYYILGVSALIGAAVIILLAPVQYFVATKLSQAQRSTLEYSNERLKQTNEMLRGIKLLKLYAWENIFRTRVETTRRKEMTSLRAFAIYTSISIFMNTAIPIAAVLITFVGHVSFFKEADFSPSVAFASLSLFHILVTPLFLLSSVVRSTVKALVSVQKLSEFLSSAEIREEQCAPHEPTPQGPASKYQAVPLRVVNRKRPAREDCRGLTGPLQSLVPSADGDADNCCVQIMGGYFTWTPDGIPTLSNITIRIPRGQLTMIVGQVGCGKSSLLLAALGEMQKVSGAVFWSSLPDSEIGEDPSPERETATDLDIRKRGPVAYASQKPWLLNATVEENIIFESPFNKQRYKMVIEACSLQPDIDILPHGDQTQIGERGINLSGGQRQRISVARALYQHANVVFLDDPFSALDIHLSDHLMQAGILELLRDDKRTVVLVTHKLQYLPHADWIIAMKDGTIQREGTLKDFQRSECQLFEHWKTLMNRQDQELEKETVTERKATEPPQGLSRAMSSRDGLLQDEEEEEVSGDKMP

SEQ ID NO: 713 - protein, 981 aa, Artificial Sequence
  Synthetic polypeptide
MPLAFCGSENHSAAYRVDQGVLNNGCFVDALNVVPHVFLLFITFPILFIGWGSQSSKVHIHHSTWLHFPGHNLRWILTFMLLFVLVCEIAEGILSDGVTESHHLHLYMPAGMAFMAAVTSVVYYHNIETSNFPKLLIALLVYWTLAFITKTIKFVKFLDHAIGFSQLRFCLTGLLVILYGMLLLVEVNVIRVRRYIFFKTPREVKPPEDLQDLGVRFLQPFVNLLSKGTYWWMNAFIKTAHKKPIDLRAIGKLPIAMRALTNYQRLCEAFDAQVRKDIQGTQGARAIWQALSHAFGRRLVLSSTFRILADLLGFAGPLCIFGIVDHLGKENDVFQPKTQFLGVYFVSSQEFLANAYVLAVLLFLALLLQRTFLQASYYVAIETGINLRGAIQTKIYNKIMHLSTSNLSMGEMTAGQICNLVAIDTNQLMWFFFLCPNLWAMPVQIIVGVILLYYILGVSALIGAAVIILLAPVQYFVATKLSQAQRSTLEYSNERLKQTNEMLRGIKLLKLYAWENIFRTRVETTRRKEMTSLRAFAIYTSISIFMNTAIPIAAVLITFVGHVSFFKEADFSPSVAFASLSLFHILVTPLFLLSSVVRSTVKALVSVQKLSEFLSSAEIREEQCAPHEPTPQGPASKYQAVPLRVVNRKRPAREDCRGLTGPLQSLVPSADGDADNCCVQIMGGYFTWTPDGIPTLSNITIRIPRGQLTMIVGQVGCGKSSLLLAALGEMQKVSGAVFWSSSLPDSEIGEDPSPERETATDLDIRKRGPVAYASQKPWLLNATVEENIIFESPFNKQRYKMVIEACSLQPDIDILPHGDQTQIGERGINLSGGQRQRISVARALYQHANVVFLDDPFSALDIHLSDHLMQAGILELLRDDKRTVVLVTHKLQYLPHADWIIAMKDGTIQREGTLKDFQRSECQLFEHWKTLMNRQDQELEKETVTERKATEPPQGLSRAMSSRDGLLQDEEEEEVSGDKMP

SEQ ID NO: 714 - protein, 193 aa, Artificial Sequence
  Synthetic polypeptide
MAVSESQLKKMVSKYKYRDLTVRETVNVITLYKDLKPVLDSYVFNDGSSRELMNLTGTIPVPYRGNTYNIPICLWLLDTYPYNPPICFVKPTSSMTIKTGKHVDANGKIYLPYLHEWKHHTIYIYQVHQEREPRGKKDNRNGTSLHSTPTNTQVTWLSDTDLKMVVISAFKKIEDKMVNFIKKKLSGNLRTEK

SEQ ID NO: 715 - protein, 193 aa, Artificial Sequence; identical to SEQ ID NO: 714
  Synthetic polypeptide

SEQ ID NO: 716 - protein, 470 aa, Artificial Sequence
  Synthetic polypeptide
MPMDLILVVWFCVCTARTAEDMKPPVLSLIWRTRVLKSLLQQSLQGVVGFGMDPDLQMDIVTELDLVNTTLGVAQVSGMHNASKAFLFQDIEREIHAAPHVSEKLIQLFRNKSEFTILATVQQKPSTSGVILSIRELEHSYFELESSGLRDEIRYHYIHNGKPRTEALPYRMADGQWHKVALSVSASHLLLHVDCNRIYERVIDPPDTNLPPGINLWLGQRNQKHGLFKGIIQDGKIIFMPNGYITQCPNLNHTCPTCSDFLSLVQGIMDLQELLAKMTAKLNYAETRLSQLENCHCEKTCQVSGLLYRDQDSWVDGDHCRNCTCKSGAVECRRMSCPPLNCSPDSLPVHIAGQCCKVCRPKCIYGGKVLAEGQRILTKSCRECRGGVLVKITEMCPPLNCSEKDHILPENQCCRVCRGHNFCAEGPKCGENSECKNWNTKATCECKSGYISVQGDSAYCEGEGGSAPGI

SEQ ID NO: 717 - protein, 442 aa, Artificial Sequence
  Synthetic polypeptide
MPMDLILVVWFCVCTARTVVGFGMDPDLQMDIVTELDLVNTTLGVAQVSGMHNASKAFLFQDIEREIHAAPHVSEKLIQLFRNKSEFTILATVQQKPSTSGVILSIRELEHSYFELESSGLRDEIRYHYIHNGKPRTEALPYRMADGQWHKVALSVSASHLLLHVDCNRIYERVIDPPDTNLPPGINLWLGQRNQKHGLFKGIIQDGKIIFMPNGYITQCPNLNHTCPTCSDFLSLVQGIMDLQELLAKMTAKLNYAETRLSQLENCHCEKTCQVSGLLYRDQDSWVDGDHCRNCTCKSGAVECRRMSCPPLNCSPDSLPVHIAGQCCKVCRPKCIYGGKVLAEGQRILTKSCRECRGGVLVKITEMCPPLNCSEKDHILPENQCCRVCRGHNFCAEGPKCGENSECKNWNTKATCECKSGYISVQGDSAYCEGEGGSAPGI

SEQ ID NO: 718 - protein, 442 aa, Artificial Sequence; identical to SEQ ID NO: 717
  Synthetic polypeptide

SEQ ID NO: 719 - protein, 385 aa, Artificial Sequence
  Synthetic polypeptide
MPMDLILVVWFCVCTARTVVGFGMDPDLQMDIVTELDLVNTTLGVAQVSGMHNASKAFLFQDIEREIHAAPHVSEKLIQLFRNKSEFTILATVQQKPSTSGVILSIRELEHRIYERVIDPPDTNLPPGINLWLGQRNQKHGLFKGIIQDGKIIFMPNGYITQCPNLNHTCPTCSDFLSLVQGIMDLQELLAKMTAKLNYAETRLSQLENCHCEKTCQVSGLLYRDQDSWVDGDHCRNCTCKSGAVECRRMSCPPLNCSPDSLPVHIAGQCCKVCRPKCIYGGKVLAEGQRILTKSCRECRGGVLVKITEMCPPLNCSEKDHILPENQCCRVCRGHNFCAEGPKCGENSECKNWNTKATCECKSGYISVQGDSAYCEGEGGSAPGI

SEQ ID NO: 720 - protein, 359 aa, Artificial Sequence
  Synthetic polypeptide
MACTIQKAEALDGAHLMQILWYDEEESLYPAVWLRDNCPCSDCYLDSAKARKLLVEALDVNIGIKGLIFDRKKVYITWPDEHYSEFQADWLKKRCFSKQARAKLQRELFFPECQYWGSELQLPTLDFEDVLRYDEHAYKWLSTLKKVGIVRLTGASDKPGEVSKLGKRMGFLYLTFYGHTWQVQDKIDANNVAYTTGKLSFHTDYPALHHPPGVQLLHCIKQTVTGGDSEIVDGFNVCQKLKKNNPQAFQILSSTFVDFTDIGVDYCDFSVQSKHKIIELDDKGQVVRINFNNATRDTIFDVPVERVQPFYAALKEFVDLMNSKESKFTFKMNPAVWNTLLYNPLCLENSPSSFKVQPK

SEQ ID NO: 721 - protein, 359 aa, Artificial Sequence; identical to SEQ ID NO: 720
  Synthetic polypeptide

SEQ ID NO: 722 - protein, 359 aa, Artificial Sequence; identical to SEQ ID NO: 720
  Synthetic polypeptide

SEQ ID NO: 723 - protein, 359 aa, Artificial Sequence; identical to SEQ ID NO: 720
  Synthetic polypeptide

SEQ ID NO: 724 - protein, 301 aa, Artificial Sequence
  Synthetic polypeptide
MQGARAPRDQGRSPGRMSALGRSSVILLTYVLAATELTCLFMQFSIVPYLSRKLGLDSIAFGYLQTTFGVLQLLGGPVFGRFADQRGARAALTLSFLAALALYLLLAAASSPALPGVYLLFASRLPGALMHTLPAAQMVITDLSAPEERPAALGRLGLCFGVGVILGSLLGGTLVSAYGIQCPAILAALATLLGAVLSFTCIPASTKGAKTDAQAPLPGGPRASVFDLKAIASLLRLPDVPRIFLVKVASNCPTGLFMVMFSIISMDFFQLEAAQAGYLMSFFGLLQMAKVPALQGPWQMR

SEQ ID NO: 725 - protein, 301 aa, Artificial Sequence; identical to SEQ ID NO: 724
  Synthetic polypeptide

SEQ ID NO: 726 - protein, 301 aa, Artificial Sequence; identical to SEQ ID NO: 724
  Synthetic polypeptide

SEQ ID NO: 727 - protein, 203 aa, Artificial Sequence
  Synthetic polypeptide
MQGARAPRDQGRSPGRMSALGRSSVILLTYVLAATELTCLFMQFSIVPYLSRKLGLDSIAFGYLQTTFGVLQLLGGPVFGRIQCPAILAALATLLGAVLSFTCIPASTKGAKTDAQAPLPGGPRASVFDLKAIASLLRLPDVPRIFLVKVASNCPTGLFMVMFSIISMDFFQLEAAQAGYLMSFFGLLQMAKVPALQGPWQMR

SEQ ID NO: 728 - protein, 294 aa, Artificial Sequence
  Synthetic polypeptide
MQGARAPRDQGRSPGRMSALGRSSVILLTYVLAATELTCLFMQFSIVPYLSRKLGLDSIAFGYLQTTFGVLQLLGGPVFGRFADQRGARAALTLSFLAALALYLLLAAASSPALPGVYLLFASRLPGALMHTLPAAQMVITDLSAPEERPAALGRLGLCFGVGVILGSLLGGTLVSAYGIQCPAILAALATLLGAVLSFTCIPASTKGAKTDAQAPLPGGPRASVFDLKAIASLLRLPDVPRIFLVKVASNCPTGLFMVMFSIISMDFFQLEAAQAGYLMSFFGLLQMGPWQMR

SEQ ID NO: 729 - protein, 294 aa, Artificial Sequence; identical to SEQ ID NO: 728
  Synthetic polypeptide

SEQ ID NO: 730 - protein, 294 aa, Artificial Sequence; identical to SEQ ID NO: 728
  Synthetic polypeptide

SEQ ID NO: 731 - protein, 196 aa, Artificial Sequence
  Synthetic polypeptide
MQGARAPRDQGRSPGRMSALGRSSVILLTYVLAATELTCLFMQFSIVPYLSRKLGLDSIAFGYLQTTFGVLQLLGGPVFGRIQCPAILAALATLLGAVLSFTCIPASTKGAKTDAQAPLPGGPRASVFDLKAIASLLRLPDVPRIFLVKVASNCPTGLFMVMFSIISMDFFQLEAAQAGYLMSFFGLLQMGPWQMR

SEQ ID NO: 732 - protein, 491 aa, Artificial Sequence
  Synthetic polypeptide
MQGEESLRILVEPEGDSFPLMEISTCETEASEQWDYVLVAQRHTQRDPRQARQQQFLEELRRKGFHIKVIRDQKQVFFGIRADNSVFGLYRTFLLEPEGPAPHAELAAPTTIPVTTSLRIRIVNFVVMNNKTSAGETFEDLMKDGVFEARFPLHKGEGRLKKTWARWRHMFREQPVDEIRNYFGEKVALYFVWLGWYTYMLVPAALTGLLVFLSGFSLFEASQISKEICEAHDILMCPLGDHSRRYQRLSETCTFAKLTHLFDNDGTVVFAIFMALWATVFLEIWKRQRARVVLHWDLYVWDEEQEEMALQLINCPDYKLRPYQHSYLRSTVILVLTLLMICLMIGMAHVLVVYRVLASALFSSSAVPFLEEQVTTAVVVTGALVHYVTIIIMTKINRCVALKLCDFEMPRTFSERESRFTIRFFTLQFFTHFSSLIYIAFILGRCSGLCLKSQHFGRLRQADHLRSGVQDQTGQHEETPSLLARRGGVSL

SEQ ID NO: 733 - protein, 672 aa, Artificial Sequence
  Synthetic polypeptide
MWNLLHETDSAVATARRPRWLCAGALVLAGGFFLLGFLFGWFIKSSNEATNITPKHNMKAFLDELKAENIKKFLYNFTQIPHLAGTEQNFQLAKQIQSQWKEFGLDSVELAHYDVLLSYPNKTHPNYISIINEDGNEIFNTSLFEPPPPGYENVSDIVPPFSAFSPQGMPEGDLVYVNYARTEDFFKLERDMKINCSGKIVIARYGKVFRGNKVKNAQLAGAKGVILYSDPADYFAPGVKSYPDGWNLPGGGVQRGNILNLNGAGDPLTPGYPANEYAYRRGIAEAVGLPSIPVHPIGYYDAQKLLEKMGGSAPPDSSWRGSLKVPYNVGPGFTGNFSTQKVKMHIHSTNEVTRIYNVIGTLRGAVEPDRYVILGGHRDSWVFGGIDPQSGAAVVHEIVRSFGTLKKEGWRPRRTILFASWDAEEFGLLGSTEWAEENSRLLQERGVAYINADSSIEGNYTLRVDCTPLMYSLVHNLTKELKSPDEGFEGKSLYESWTKKSPSPEFSGMPRISKLGSGNDFEVFFQRLGIASGRARYTKNWETNKFSGYPLYHSVYETYELVEKFYDPMFKYHLTVAQVRGGMVFELANSIVLPFDCRDYAVVLRKYADKIYSISMKHPQEMKTYSVSFDSLFSAVKNFTEIASKFSERLQDFDKSKKKSQFWKRKAAWRKI

SEQ ID NO: 734 - protein, 672 aa, Artificial Sequence; identical to SEQ ID NO: 733
  Synthetic polypeptide

SEQ ID NO: 735 - protein, 364 aa, Artificial Sequence
  Synthetic polypeptide
MGGSAPPDSSWRGSLKVPYNVGPGFTGNFSTQKVKMHIHSTNEVTRIYNVIGTLRGAVEPDRYVILGGHRDSWVFGGIDPQSGAAVVHEIVRSFGTLKKEGWRPRRTILFASWDAEEFGLLGSTEWAEENSRLLQERGVAYINADSSIEGNYTLRVDCTPLMYSLVHNLTKELKSPDEGFEGKSLYESWTKKSPSPEFSGMPRISKLGSGNDFEVFFQRLGIASGRARYTKNWETNKFSGYPLYHSVYETYELVEKFYDPMFKYHLTVAQVRGGMVFELANSIVLPFDCRDYAVVLRKYADKIYSISMKHPQEMKTYSVSFDSLFSAVKNFTEIASKFSERLQDFDKSKKKSQFWKRKAAWRKI

SEQ ID NO: 736 - protein, 657 aa, Artificial Sequence
  Synthetic polypeptide
MTAGSSYPLFLAAYACTGCLAERLGWFIKSSNEATNITPKHNMKAFLDELKAENIKKFLYNFTQIPHLAGTEQNFQLAKQIQSQWKEFGLDSVELAHYDVLLSYPNKTHPNYISIINEDGNEIFNTSLFEPPPPGYENVSDIVPPFSAFSPQGMPEGDLVYVNYARTEDFFKLERDMKINCSGKIVIARYGKVFRGNKVKNAQLAGAKGVILYSDPADYFAPGVKSYPDGWNLPGGGVQRGNILNLNGAGDPLTPGYPANEYAYRRGIAEAVGLPSIPVHPIGYYDAQKLLEKMGGSAPPDSSWRGSLKVPYNVGPGFTGNFSTQKVKMHIHSTNEVTRIYNVIGTLRGAVEPDRYVILGGHRDSWVFGGIDPQSGAAVVHEIVRSFGTLKKEGWRPRRTILFASWDAEEFGLLGSTEWAEENSRLLQERGVAYINADSSIEGNYTLRVDCTPLMYSLVHNLTKELKSPDEGFEGKSLYESWTKKSPSPEFSGMPRISKLGSGNDFEVFFQRLGIASGRARYTKNWETNKFSGYPLYHSVYETYELVEKFYDPMFKYHLTVAQVRGGMVFELANSIVLPFDCRDYAVVLRKYADKIYSISMKHPQEMKTYSVSFDSLFSAVKNFTEIASKFSERLQDFDKSKKKSQFWKRKAAWRKI

SEQ ID NO: 737 - protein, 657 aa, Artificial Sequence; identical to SEQ ID NO: 736
  Synthetic polypeptide

SEQ ID NO: 738 - protein, 541 aa, Artificial Sequence
  Synthetic polypeptide
MWNLLHETDSAVATARRPRWLCAGALVLAGGFFLLGFLFGWFIKSSNEATNITPKHNMKAFLDELKAENIKKFLYNFTQIPHLAGTEQNFQLAKQIQSQWKEFGLDSVELAHYDVLLSYPNKTHPNYISIINEDGNEIFNTSLFEPPPPGYENVSDIVPPFSAFSPQGMPEGDLVYVNYARTEDFFKLERDMKINCSGKIVIARYGKVFRGNKVKNAQLAGAKGVILYSDPADYFAPGVKSYPDGWNLPGGGVQRGNILNLNGAGDPLTPGYPANEYAYRRGIAEAVGLPSIPVHPIGYYDAQKLLEKMGGSAPPDSSWRGSLKVPYNVGPGFTGNFSTQKVKMHIHSTNEVTRIYNVIGTLRGAVEPDRYVILGGHRDSWVFGGIDPQSGAAVVHEIVRSFGTLKKEGWRPRRTILFASWDAEEFGLLGSTEWAEENSRLLQERGVAYINADSSIEGNYTLRVDCTPLMYSLVHNLTKEPSPMIPPGTVKSEATSDWSRPPSTTQQPCRKVARLFKKKKKKRKKRTSSTQRSPTSKIEGR

SEQ ID NO: 739 - protein, 541 aa, Artificial Sequence; identical to SEQ ID NO: 738
  Synthetic polypeptide

SEQ ID NO: 740 - protein, 233 aa, Artificial Sequence
  Synthetic polypeptide
MGGSAPPDSSWRGSLKVPYNVGPGFTGNFSTQKVKMHIHSTNEVTRIYNVIGTLRGAVEPDRYVILGGHRDSWVFGGIDPQSGAAVVHEIVRSFGTLKKEGWRPRRTILFASWDAEEFGLLGSTEWAEENSRLLQERGVAYINADSSIEGNYTLRVDCTPLMYSLVHNLTKEPSPMIPPGTVKSEATSDWSRPPSTTQQPCRKVARLFKKKKKKRKKRTSSTQRSPTSKIEGR

SEQ ID NO: 741 - protein, 526 aa, Artificial Sequence
  Synthetic polypeptide
MTAGSSYPLFLAAYACTGCLAERLGWFIKSSNEATNITPKHNMKAFLDELKAENIKKFLYNFTQIPHLAGTEQNFQLAKQIQSQWKEFGLDSVELAHYDVLLSYPNKTHPNYISIINEDGNEIFNTSLFEPPPPGYENVSDIVPPFSAFSPQGMPEGDLVYVNYARTEDFFKLERDMKINCSGKIVIARYGKVFRGNKVKNAQLAGAKGVILYSDPADYFAPGVKSYPDGWNLPGGGVQRGNILNLNGAGDPLTPGYPANEYAYRRGIAEAVGLPSIPVHPIGYYDAQKLLEKMGGSAPPDSSWRGSLKVPYNVGPGFTGNFSTQKVKMHIHSTNEVTRIYNVIGTLRGAVEPDRYVILGGHRDSWVFGGIDPQSGAAVVHEIVRSFGTLKKEGWRPRRTILFASWDAEEFGLLGSTEWAEENSRLLQERGVAYINADSSIEGNYTLRVDCTPLMYSLVHNLTKEPSPMIPPGTVKSEATSDWSRPPSTTQQPCRKVARLFKKKKKKRKKRTSSTQRSPTSKIEGR

SEQ ID NO: 742 - protein, 526 aa, Artificial Sequence; identical to SEQ ID NO: 741
  Synthetic polypeptide

SEQ ID NO: 743 - protein, 40 aa, Artificial Sequence
  Synthetic polypeptide
MWNLLHETDSAVATARRPRWLCAGALVLAGGFFLLGFLFG

SEQ ID NO: 744 - protein, 40 aa, Artificial Sequence; identical to SEQ ID NO: 743
  Synthetic polypeptide

SEQ ID NO: 745 - protein, 40 aa, Artificial Sequence; identical to SEQ ID NO: 743
  Synthetic polypeptide

SEQ ID NO: 746 - protein, 40 aa, Artificial Sequence; identical to SEQ ID NO: 743
  Synthetic polypeptide

SEQ ID NO: 747 - protein, 40 aa, Artificial Sequence; identical to SEQ ID NO: 743
  Synthetic polypeptide

SEQ ID NO: 748 - protein, 90 aa, Artificial Sequence
  Synthetic polypeptide
MWNLLHETDSAVATARRPRWLCAGALVLAGGFFLLGFLFGLHPLHPVHFSDLSSSISSSVWCFLIPHSNPSLSVLCTGGILFPFACNHVF

SEQ ID NO: 749 - protein, 90 aa, Artificial Sequence; identical to SEQ ID NO: 748
  Synthetic polypeptide

SEQ ID NO: 750 - protein, 90 aa, Artificial Sequence; identical to SEQ ID NO: 748
  Synthetic polypeptide

SEQ ID NO: 751 - protein, 90 aa, Artificial Sequence; identical to SEQ ID NO: 748
  Synthetic polypeptide

SEQ ID NO: 752 - protein, 90 aa, Artificial Sequence; identical to SEQ ID NO: 748
  Synthetic polypeptide

SEQ ID NO: 753 - protein, 134 aa, Artificial Sequence
  Synthetic polypeptide
MAGQGLPLHVATLLTGLLECLGFAGVLFGWPSLVFVFKNEDYFKDLCGPDAGPIGNATGQADCKAQDERFSLIFTLGSFMNNFMTFPTGYIFDRFKTTVARLIAIFFYTTATLIIAFTSAGAVAHSCNPSTLGG

SEQ ID NO: 754 - protein, 134 aa, Artificial Sequence; identical to SEQ ID NO: 753
  Synthetic polypeptide

SEQ ID NO: 755 - protein, 134 aa, Artificial Sequence; identical to SEQ ID NO: 753
  Synthetic polypeptide

SEQ ID NO: 756 - protein, 134 aa, Artificial Sequence; identical to SEQ ID NO: 753
  Synthetic polypeptide

SEQ ID NO: 757 - protein, 134 aa, Artificial Sequence; identical to SEQ ID NO: 753
  Synthetic polypeptide

SEQ ID NO: 758 - protein, 134 aa, Artificial Sequence; identical to SEQ ID NO: 753
  Synthetic polypeptide

SEQ ID NO: 759 - protein, 134 aa, Artificial Sequence; identical to SEQ ID NO: 753
  Synthetic polypeptide

SEQ ID NO: 760 - protein, 147 aa, Artificial Sequence
  Synthetic polypeptide
MAGQGLPLHVATLLTGLLECLGFAGVLFGWPSLVFVFKNEDYFKDLCGPDAGPIGNATGQAGRLGCMGDLFSTPDCKAQDERFSLIFTLGSFMNNFMTFPTGYIFDRFKTTVARLIAIFFYTTATLIIAFTSAGAVAHSCNPSTLGG

SEQ ID NO: 761 - protein, 147 aa, Artificial Sequence; identical to SEQ ID NO: 760
  Synthetic polypeptide

SEQ ID NO: 762 - protein, 81 aa, Artificial Sequence
  Synthetic polypeptide
MGDLFSTPDCKAQDERFSLIFTLGSFMNNFMTFPTGYIFDRFKTTVARLIAIFFYTTATLIIAFTSAGAVAHSCNPSTLGG

SEQ ID NO: 763 - protein, 489 aa, Artificial Sequence
  Synthetic polypeptide
MAPTLQQAYRRRWWMACTAVLENLFFSAVLLGWGSLLIILKNEGFYSSTCPAESSTNTTQDEQRRWPGCDQQDEMLNLGFTIGSFVLSATTLPLGILMDRFGPRPVRLVGSACFTASCTLMALASRDVEALSPLIFLALSLNGFGGICLTFTSLTLPNMFGNLRSTLMALMIGSYASSAITFPGIKLIYDAGVAFVVIMFTWSGLACLIFLNCTLNWPIEAFPAPEEVNYTKKIKLSGLALDHKVTGDLFYTHVTTMGQRLSQKAPSLEDGSDAFMSPQDVRGTSENLPERSVPLRKSLCSPTFLWSLLTMGMTQLRIIFYMAAVNKMLEYLVTGGQEHETNEQQQKVAETVGFYSSVFGAMQLLCLLTCPLIGYIMDWRIKDCVDAPTQGTVLGDARDGVATKSIRPRYCKIQKLTNAISAFTLTNLLLVGFGITCLINNLHLQFVTFVLHTIVRGFFHSACGSLYAAVNLLTCLIVVSPAPRAVPGT

SEQ ID NO: 764 - protein, 489 aa, Artificial Sequence; identical to SEQ ID NO: 763
  Synthetic polypeptide

SEQ ID NO: 765 - protein, 6 aa, Artificial Sequence
  Synthetic polypeptide
HQHHPG

SEQ ID NO: 766 - protein, 77 aa, Artificial Sequence
  Synthetic polypeptide
TKSTPKIPKTVRNSLDHQNSSTGNSIYRFKAYPKRAPEGSTKHGKEQPVPATAKSCQNIKTIETRKKLHQLTSKITS

SEQ ID NO: 767 - protein, 108 aa, Artificial Sequence
  Synthetic polypeptide
MMLPLQGAQMLQMLEKSLRKSLPASLKVYGTVFHINHGNPFNLKAVVDKWPDFNTVVVCPQEQDMTDDLDHYTNTYQIYSKDPQNCQEFLGSPELINWKQHLQIQSLP

SEQ ID NO: 768 - protein, 108 aa, Artificial Sequence; identical to SEQ ID NO: 767
  Synthetic polypeptide

SEQ ID NO: 769 - protein, 108 aa, Artificial Sequence; identical to SEQ ID NO: 767
  Synthetic polypeptide

SEQ ID NO: 770 - protein, 85 aa, Artificial Sequence
  Synthetic polypeptide
MSCKKQRSRKHSVNEKCNMKIEHYFSPVSKEQQNNCSTSLMRMESRGDPRATTNTQAQRFHSPKKNPEDQTMPQNRTIYVTLKTI

SEQ ID NO: 771 - protein, 85 aa, Artificial Sequence; identical to SEQ ID NO: 770
  Synthetic polypeptide

SEQ ID NO: 772 - protein, 85 aa, Artificial Sequence; identical to SEQ ID NO: 770
  Synthetic polypeptide

SEQ ID NO: 773 - protein, 85 aa, Artificial Sequence; identical to SEQ ID NO: 770
  Synthetic polypeptide

SEQ ID NO: 774 - protein, 85 aa, Artificial Sequence; identical to SEQ ID NO: 770
  Synthetic polypeptide

SEQ ID NO: 775 - protein, 85 aa, Artificial Sequence; identical to SEQ ID NO: 770
  Synthetic polypeptide

SEQ ID NO: 776 - protein, 85 aa, Artificial Sequence; identical to SEQ ID NO: 770
  Synthetic polypeptide

SEQ ID NO: 777 - protein, 298 aa, Artificial Sequence
  Synthetic polypeptide
MDEFFSEIEETRLNIDKISEHVEEAKKLYSIILSAPIPEPKTKDDLEQLTTEIKKRANNVRNKLKSMEKHIEEDEVRSSADLRIRKSQHSVLSRKFVEVMTKYNEAQVDFRERSKGRIQRQLEITGKKTTDEELEEMLESGNPAIFTSGIIDSQISKQALSEIEGRHKDIVRLESSIKELHDMFMDIAMLVENQGEMLDNIELNVMHTVDHVEKARDETKKAVKYQSQARKDSQRLHNPGPGWTHDLDWADGGHHPLDDSDWWTHVLIRIIPRHTDIGTPKDFFFLLRLFNWDHANKR

SEQ ID NO: 778 - protein, 329 aa, Artificial Sequence
  Synthetic polypeptide
MKDRLEQLKAKQLTQDDDTDAVEIAIDNTAFMDEFFSEIEETRLNIDKISEHVEEAKKLYSIILSAPIPEPKTKDDLEQLTTEIKKRANNVRNKLKSMEKHIEEDEVRSSADLRIRKSQHSVLSRKFVEVMTKYNEAQVDFRERSKGRIQRQLEITGKKTTDEELEEMLESGNPAIFTSGIIDSQISKQALSEIEGRHKDIVRLESSIKELHDMFMDIAMLVENQGEMLDNIELNVMHTVDHVEKARDETKKAVKYQSQARKDSQRLHNPGPGWTHDLDWADGGHHPLDDSDWWTHVLIRIIPRHTDIGTPKDFFFLLRLFNWDHANKR

SEQ ID NO: 779 - protein, 329 aa, Artificial Sequence; identical to SEQ ID NO: 778
  Synthetic polypeptide

SEQ ID NO: 780 - protein, 116 aa, Artificial Sequence
  Synthetic polypeptide
MFMDIAMLVENQGEMLDNIELNVMHTVDHVEKARDETKKAVKYQSQARKDSQRLHNPGPGWTHDLDWADGGHHPLDDSDWWTHVLIRIIPRHTDIGTPKDFFFLLRLFNWDHANKR

SEQ ID NO: 781 - protein, 531 aa, Artificial Sequence
  Synthetic polypeptide
MCARMAGRTTAAPRGPYGPWLCLLVALALDVVRVDCGQAPLDPVYLPAALELLDAPEHFRVQQVGHYPPANSSLSSRSETFLLLQPWPRAQPLLRASYPPFATQQVVPPRVTEPHQRPVPWDVRAVSVEAAVTPAEPYARVLFHLKGQDWPPGSGSLPCARLHATHPAGTAHQACRFQPSLGACVVELELPSHWFSQASTTRAELAYTLEPAAEGPGGCGSGEENDPGEQALPVGGVELRPADPPQYQEVPLDEAVTLRVPDMPVRPGQLFSATLLLRHNFTASLLTLRIKVKKGLHVTAARPAQPTLWTAKLDRFKGSRHHTTLITCHRAGLTEPDSSPLELSEFLWVDFVVENSTGGGVAVTRPVTWQLEYPGQAPEAEKDKMVWEILVSERDIRALIPLAKAEELVNTAPLTGVPQHVPVRLVTVDGGGALVEVTEHVGCESANTQVLQVSEACDAVFVAGKESRGARGVRVDFWWRRLRASLRLTVWAPLLPLRIELTDTTLEQVRGWRVPGPAEGTLHFLIYVSTG

SEQ ID NO: 782 - protein, 532 aa, Artificial Sequence
  Synthetic polypeptide
MCARMAGRTTAAPRGPYGPWLCLLVALALDVVRVDCGQAPLDPVYLPAALELLDAPEHFRVQQVGHYPPANSSLSSRSETFLLLQPWPRAQPLLRASYPPFATQQVVPPRVTEPHQRPVPWDVRAVSVEAAVTPAEPYARVLFHLKGQDWPPGSGSLPCARLHATHPAGTAHQACRFQPSLGACVVELELPSHWFSQASTTRAELAYTLEPAAEGPGGCGSGEENDPGEQALPVGGVELRPADPPQYQEVPLDEAVTLRVPDMPVRPGQLFSATLLLRHNFTASLLTLRIKVKKGLHVTAARPAQPTLWTAKLDRFKGSRHHTTLITCHRAGLTEPDSSSPLELSEFLWVDFVVENSTGGGVAVTRPVTWQLEYPGQAPEAEKDKMVWEILVSERDIRALIPLAKAEELVNTAPLTGVPQHVPVRLVTVDGGGALVEVTEHVGCESANTQVLQVSEACDAVFVAGKESRGARGVRVDFWWRRLRASLRLTVWAPLLPLRIELTDTTLEQVRGWRVPGPAEGTLHFLIYVSTG

SEQ ID NO: 783 - protein, 17 aa, Artificial Sequence
  Synthetic polypeptide
SGHSPRHVAAGVPRPGP

SEQ ID NO: 784 - protein, 242 aa, Artificial Sequence
  Synthetic polypeptide
MKWLLLLGLVALSECIMYKVPLIRKKSLRRTLSERGLLKDFLKKHNLNPARKYFPQWKAPTLVDEQPLENYLDMEYFGTIGIGTPAQDFTVVFDTGSSNLWVPSVYCSSLACTNHNRFNPEDSSTYQSTSETVSITYGTGSMTGILGYDTVQVGGISDTNQIFGLSETEPGSFLYYAPFDGILGLAYPSISSSGATPVFDNIWNQGLVSQDLFSVYLSASTTPPLYDLGQVASPPSGSVSSW

SEQ ID NO: 785 - protein, 169 aa, Artificial Sequence
  Synthetic polypeptide
MEYFGTIGIGTPAQDFTVVFDTGSSNLWVPSVYCSSLACTNHNRFNPEDSSTYQSTSETVSITYGTGSMTGILGYDTVQVGGISDTNQIFGLSETEPGSFLYYAPFDGILGLAYPSISSSGATPVFDNIWNQGLVSQDLFSVYLSASTTPPLYDLGQVASPPSGSVSSW

SEQ ID NO: 786 - protein, 169 aa, Artificial Sequence; identical to SEQ ID NO: 785
  Synthetic polypeptide

SEQ ID NO: 787 - protein, 242 aa, Artificial Sequence; identical to SEQ ID NO: 784
  Synthetic polypeptide

SEQ ID NO: 788 - protein, 169 aa, Artificial Sequence; identical to SEQ ID NO: 785
  Synthetic polypeptide

SEQ ID NO: 789 - protein, 169 aa, Artificial Sequence; identical to SEQ ID NO: 785
  Synthetic polypeptide

SEQ ID NO: 790 - protein, 267 aa, Artificial Sequence
  Synthetic polypeptide
MKWLLLLGLVALSECIMYKVPLIRKKSLRRTLSERGLLKDFLKKHNLNPARKYFPQWKAPTLVDEQPLENYLDMEYFGTIGIGTPAQDFTVVFDTGSSNLWVPSVYCSSLACTNHNRFNPEDSSTYQSTSETVSITYGTGSMTGILGYDTVQVGGISDTNQIFGLSETEPGSFLYYAPFDGILGLAYPSISSSGATPVFDNIWNQGLVSQDLFSVYLSADDQSGSVVIFGGIDSSYYTGSLNWVPVTVEGYWQITVDRPGAPCSLEL

SEQ ID NO: 791 - protein, 194 aa, Artificial Sequence
  Synthetic polypeptide
MEYFGTIGIGTPAQDFTVVFDTGSSNLWVPSVYCSSLACTNHNRFNPEDSSTYQSTSETVSITYGTGSMTGILGYDTVQVGGISDTNQIFGLSETEPGSFLYYAPFDGILGLAYPSISSSGATPVFDNIWNQGLVSQDLFSVYLSADDQSGSVVIFGGIDSSYYTGSLNWVPVTVEGYWQITVDRPGAPCSLEL

SEQ ID NO: 792 - protein, 194 aa, Artificial Sequence; identical to SEQ ID NO: 791
  Synthetic polypeptide

SEQ ID NO: 793 - protein, 113 aa, Artificial Sequence
  Synthetic polypeptide
MVSGNNSDSAHCIGTGLRGKETTLVTPQDSPRKCPIKGSPEEATADGHTNGRTKKFMSSPLTFHSDDQSGSVVIFGGIDSSYYTGSLNWVPVTVEGYWQITVDRPGAPCSLEL

SEQ ID NO: 794 - protein, 242 aa, Artificial Sequence
  Synthetic polypeptide
MKWLLLLGLVALSECIMYKVPLIRKKSLRRTLSERGLLKDFLKKHNLNPARKYFPQWEAPTLVDEQPLENYLDMEYFGTIGIGTPAQDFTVVFDTGSSNLWVPSVYCSSLACTNHNRFNPEDSSTYQSTSETVSITYGTGSMTGILGYDTVQVGGISDTNQIFGLSETEPGSFLYYAPFDGILGLAYPSISSSGATPVFDNIWNQGLVSQDLFSVYLSASTTPPLYDLGQVASPPSGSVSSW

SEQ ID NO: 795 - protein, 242 aa, Artificial Sequence; identical to SEQ ID NO: 794
  Synthetic polypeptide

SEQ ID NO: 796 - protein, 113 aa, Artificial Sequence; identical to SEQ ID NO: 793
  Synthetic polypeptide

SEQ ID NO: 797 - protein, 267 aa, Artificial Sequence
  Synthetic polypeptide
MKWLLLLGLVALSECIMYKVPLIRKKSLRRTLSERGLLKDFLKKHNLNPARKYFPQWEAPTLVDEQPLENYLDMEYFGTIGIGTPAQDFTVVFDTGSSNLWVPSVYCSSLACTNHNRFNPEDSSTYQSTSETVSITYGTGSMTGILGYDTVQVGGISDTNQIFGLSETEPGSFLYYAPFDGILGLAYPSISSSGATPVFDNIWNQGLVSQDLFSVYLSADDQSGSVVIFGGIDSSYYTGSLNWVPVTVEGYWQITVDRPGAPCSLEL

SEQ ID NO: 798 - protein, 258 aa, Artificial Sequence
  Synthetic polypeptide
MKWLLLLGLVALSECIMYKVPLIRKKSLRRTLSERGLLKDFLKKHNLNPARKYFPQWEAPTLVDEQPLENYLDMEYFGTIGIGTPAQDFTVVFDTGSSNLWVPSVYCSSLACTNHNRFNPEDSSTYQSTSETVSITYGTGSMTGILGYDTVQVGGISDTNQIFGLSETEPGSFLYYAPFDGILGLAYPSISSSGATPVFDNIWNQGLVSQDLFSVYLSADDKSGSVVIFGGIDSSYYTGSLNWVPVTVEGYWQITVDS

SEQ ID NO: 799 - protein, 258 aa, Artificial Sequence; identical to SEQ ID NO: 798
  Synthetic polypeptide

SEQ ID NO: 800 - protein, 104 aa, Artificial Sequence
  Synthetic polypeptide
MVSGNNSDGAHCMGPGLRGKETTLVTPQDSPGKCPINGRSEEATADGHTNGRTKKFMSSPLTFHSDDKSGSVVIFGGIDSSYYTGSLNWVPVTVEGYWQITVDS

SEQ ID NO: 801 - protein, 267 aa, Artificial Sequence
  Synthetic polypeptide
MKWLLLLGLVALSECIMYKVPLIRKKSLRRTLSERGLLKDFLKKHNLNPARKYFPQWEAPTLVDEQPLENYLDMEYFGTIGIGTPAQDFTVVFDTGSSNLWVPSVYCSSLACTNHNRFNPEDSSTYQSTSETVSITYGTGSMTGILGYDTVQVGGISDTNQIFGLSETEPGSFLYYAPFDGILGLAYPSISSSGATPVFDNIWNQGLVSQDLFSVYLSADDKSGSVVIFGGIDSSYYTGSLNWVPVTVEGYWQITVDRPGAPCSLEL

SEQ ID NO: 802 - protein, 267 aa, Artificial Sequence; identical to SEQ ID NO: 801
  Synthetic polypeptide

SEQ ID NO: 803 - protein, 113 aa, Artificial Sequence
  Synthetic polypeptide
MVSGNNSDGAHCMGPGLRGKETTLVTPQDSPGKCPINGRSEEATADGHTNGRTKKFMSSPLTFHSDDKSGSVVIFGGIDSSYYTGSLNWVPVTVEGYWQITVDRPGAPCSLEL

SEQ ID NO: 804 - protein, 19 aa, Artificial Sequence
  Synthetic polypeptide
MAVSTVFSTSSLVTGYLDM

SEQ ID NO: 805 - protein, 19 aa, Artificial Sequence
  Synthetic polypeptide
MAVSTVFSTSSLVTGYLDM

SEQ ID NO: 806 - protein, 19 aa, Artificial Sequence
  Synthetic polypeptide
MAVSTVFSTSSLVTGYLDM

SEQ ID NO: 807 - protein, 19 aa, Artificial Sequence
  Synthetic polypeptide
MAVSTVFSTSSLVTGYLDM

SEQ ID NO: 808 - protein, 19 aa, Artificial Sequence
  Synthetic polypeptide
MAVSTVFSTSSLVTGYLDM

SEQ ID NO: 809 - protein, 19 aa, Artificial Sequence
  Synthetic polypeptide
MAVSTVFSTSSLVTGYLDM

SEQ ID NO: 810 - protein, 19 aa, Artificial Sequence
  Synthetic polypeptide
MAVSTVFSTSSLVTGYLDM

SEQ ID NO: 811 - protein, 19 aa, Artificial Sequence
  Synthetic polypeptide
MAVSTVFSTSSLVTGYLDM

SEQ ID NO: 812 - protein, 19 aa, Artificial Sequence
  Synthetic polypeptide
MAVSTVFSTSSLVTGYLDM

SEQ ID NO: 813 - protein, 19 aa, Artificial Sequence
  Synthetic polypeptide
MAVSTVFSTSSLVTGYLDM

SEQ ID NO: 814 - protein, 19 aa, Artificial Sequence
  Synthetic polypeptide
MAVSTVFSTSSLVTGYLDM

SEQ ID NO: 815 - protein, 369 aa, Artificial Sequence
  Synthetic polypeptide
MYRDPEAASPGAPSRDVLLVSAIITVSLSVTVVLCGLCHWCQRKLGKRYKNSLETVGTPDSGRGRSEKKAIKLPAGGKAVNTAPVPGQTPHDESDRRTEPRSSVSDLVNSLTSEMLMLSPGSEEDEAHEGCSRENLGRIQFSVGYNFQESTLTVKIMKAQELPAKDFSGTSDPFVKIYLLPDKKHKLETKVKRKNLNPHWNETFLFEGFPYEKVVQRILYLQVLDYDRFSRNDPIGEVSIPLNKVDLTQMQTFWKDLKPCSDGSGSRGELLLSLCYNPSANSIIVNIIKARNLKAMDIGGTSDPYVKVWLMYKDKRVEKKKTVTMKRNLNPIFNESFAFDIPTEKLRETTIIITVMDKDKLSRNDVIGK

SEQ ID NO: 816 - protein, 444 aa, Artificial Sequence
  Synthetic polypeptide
MYRDPEAASPGAPSRDVLLVSAIITVSLSVTVVLCGLCHWCQRKLGKRYKNSLETVGTPDSGRGRSEKKAINGTLLSGAKVAAAAGLAVEREGRLGEKPAPVPPPGEDALRSGGAAPSEPGSGGKAGRGRWRTVQSHLAAGKLNLSKLPAGGKAVNTAPVPGQTPHDESDRRTEPRSSVSDLVNSLTSEMLMLSPGSEEDEAHEGCSRENLGRIQFSVGYNFQESTLTVKIMKAQELPAKDFSGTSDPFVKIYLLPDKKHKLETKVKRKNLNPHWNETFLFEGFPYEKVVQRILYLQVLDYDRFSRNDPIGEVSIPLNKVDLTQMQTFWKDLKPCSDGSGSRGELLLSLCYNPSANSIIVNIIKARNLKAMDIGGTSDPYVKVWLMYKDKRVEKKKTVTMKRNLNPIFNESFAFDIPTEKLRETTIIITVMDKDKLSRNDVIGK

SEQ ID NO: 817 - protein, 652 aa, Artificial Sequence
  Synthetic polypeptide
MYRDPEAASPGAPSRDVLLVSAIITVSLSVTVVLCGLCHWCQRKLGKRYKNSLETVGTPDSGRGRSEKKAINDLDRDFWNNNESTVQQKWSSYPPKEFILNISPYAPYGDPRLSLNGTLLSGAKVAAAAGLAVEREGRLGEKPAPVPPPGEDALRSGGAAPSEPGSGGKAGRGRWRTVQSHLAAGKLNLSNFEDSTLSTATTLESIPSSTGEPKCQRPRTLMRQQSLQQPLSQHQRGRQPSQPTTSQSLGQLQAHMASAPGPNPRAYGRGQARQGTSAGSKYRAAGGRSRSNPGSWDHVVGQIRNRGLDMKSFLEGRMVVLSLVLGLSEQDDFANIPDLQNPGTQQNQNAQGDKRLPAGGKAVNTAPVPGQTPHDESDRRTEPRSSVSDLVNSLTSEMLMLSPGSEEDEAHEGCSRENLGRIQFSVGYNFQESTLTVKIMKAQELPAKDFSGTSDPFVKIYLLPDKKHKLETKVKRKNLNPHWNETFLFEGFPYEKVVQRILYLQVLDYDRFSRNDPIGEVSIPLNKVDLTQMQTFWKDLKPCSDGSGSRGELLLSLCYNPSANSIIVNIIKARNLKAMDIGGTSDPYVKVWLMYKDKRVEKKKTVTMKRNLNPIFNESFAFDIPTEKLRETTIIITVMDKDKLSRNDVIGK

SEQ ID NO: 818 - protein, 413 aa, Artificial Sequence
  Synthetic polypeptide
MYRDPEAASPGAPSRDVLLVSAIITVSLSVTVVLCGLCHWCQRKLGKRYKNSLETVGTPDSGRGRSEKKAINDLDRDFWNNNESTVQQKWSSYPPKEFILNISPYAPYGDPRLSLKLPAGGKAVNTAPVPGQTPHDESDRRTEPRSSVSDLVNSLTSEMLMLSPGSEEDEAHEGCSRENLGRIQFSVGYNFQESTLTVKIMKAQELPAKDFSGTSDPFVKIYLLPDKKHKLETKVKRKNLNPHWNETFLFEGFPYEKVVQRILYLQVLDYDRFSRNDPIGEVSIPLNKVDLTQMQTFWKDLKPCSDGSGSRGELLLSLCYNPSANSIIVNIIKARNLKAMDIGGTSDPYVKVWLMYKDKRVEKKKTVTMKRNLNPIFNESFAFDIPTEKLRETTIIITVMDKDKLSRNDVIGK

SEQ ID NO: 819 - protein, 577 aa, Artificial Sequence
  Synthetic polypeptide
MYRDPEAASPGAPSRDVLLVSAIITVSLSVTVVLCGLCHWCQRKLGKRYKNSLETVGTPDSGRGRSEKKAINDLDRDFWNNNESTVQQKWSSYPPKEFILNISPYAPYGDPRLSLNFEDSTLSTATTLESIPSSTGEPKCQRPRTLMRQQSLQQPLSQHQRGRQPSQPTTSQSLGQLQAHMASAPGPNPRAYGRGQARQGTSAGSKYRAAGGRSRSNPGSWDHVVGQIRNRGLDMKSFLEGRMVVLSLVLGLSEQDDFANIPDLQNPGTQQNQNAQGDKRLPAGGKAVNTAPVPGQTPHDESDRRTEPRSSVSDLVNSLTSEMLMLSPGSEEDEAHEGCSRENLGRIQFSVGYNFQESTLTVKIMKAQELPAKDFSGTSDPFVKIYLLPDKKHKLETKVKRKNLNPHWNETFLFEGFPYEKVVQRILYLQVLDYDRFSRNDPIGEVSIPLNKVDLTQMQTFWKDLKPCSDGSGSRGELLLSLCYNPSANSIIVNIIKARNLKAMDIGGTSDPYVKVWLMYKDKRVEKKKTVTMKRNLNPIFNESFAFDIPTEKLRETTIIITVMDKDKLSRNDVIGK

SEQ ID NO: 820 - protein, 488 aa, Artificial Sequence
  Synthetic polypeptide
MYRDPEAASPGAPSRDVLLVSAIITVSLSVTVVLCGLCHWCQRKLGKRYKNSLETVGTPDSGRGRSEKKAINDLDRDFWNNNESTVQQKWSSYPPKEFILNISPYAPYGDPRLSLNGTLLSGAKVAAAAGLAVEREGRLGEKPAPVPPPGEDALRSGGAAPSEPGSGGKAGRGRWRTVQSHLAAGKLNLSKLPAGGKAVNTAPVPGQTPHDESDRRTEPRSSVSDLVNSLTSEMLMLSPGSEEDEAHEGCSRENLGRIQFSVGYNFQESTLTVKIMKAQELPAKDFSGTSDPFVKIYLLPDKKHKLETKVKRKNLNPHWNETFLFEGFPYEKVVQRILYLQVLDYDRFSRNDPIGEVSIPLNKVDLTQMQTFWKDLKPCSDGSGSRGELLLSLCYNPSANSIIVNIIKARNLKAMDIGGTSDPYVKVWLMYKDKRVEKKKTVTMKRNLNPIFNESFAFDIPTEKLRETTIIITVMDKDKLSRNDVIGK

SEQ ID NO: 821 - protein, 571 aa, Artificial Sequence
  Synthetic polypeptide
MPGIVVFRRRWSVGSDDLVLPAIFLFLLHTTWFVILSVVLFGLVYNPHEACSLNLVDHGRGYLGILLSCMIAEMAIIWLSMRGGILYTEPRDSMQYVLYVRLAILVIEFIYAIVGIVWLTQYYTSCNDLTAKNVTLGMVVCNWVVILSVCITVLCVFDPTGRTFVKLRATKRRQRNLRTYNLRHRLEEGQATSWSRRLKVFLCCTRTKDSQSDAYSEIAYLFAEFFRDLDIVPSDIIAGLVLLRQRQRAKRNAVLDEANNDILAFLSGMPVTRNTKYLDLKNSQEMLRYKEVCYYMLFALAAYGWPMYLMRKPACGLCQLARSCSCCLCPARPRFAPGVTIEEDNCCGCNAIAIRRHFLDENMTAVDIVYTSCHDAVYETPFYVAVDHDKKKVVISIRGTLSPKDALTDLTGDAERLPVEGHHGTWLGHKGMVLSAEYIKKKLEQEMVLSQAFGRDLGRGTKHYGLIVVGHSLGAGTAAILSFLLRPQYPTLKCFAYSPPGGLLSEDAMEYSKEFVTAVVLGKDLVPRIGLSQLEGFRRQLLDVLQRSTKPKMRGWLGFQPLASPEIQQFH

SEQ ID NO: 822 - protein, 44 aa, Artificial Sequence
  Synthetic polypeptide
GLSGPPRSSWRPGEIPDPSDGFPYNVQRHSIPSNSAGELRSIHT

SEQ ID NO: 823 - protein, 43 aa, Artificial Sequence
  Synthetic polypeptide
MRAPIPEPKPGDLIEIFRPFYRHWAIYVGDGYVVHLAPPTSSQ

SEQ ID NO: 824 - protein, 43 aa, Artificial Sequence; identical to SEQ ID NO: 823
  Synthetic polypeptide

SEQ ID NO: 825 - protein, 79 aa, Artificial Sequence
  Synthetic polypeptide
MGLAGVCALRRSAGYILVGGAGGQSAAAAARRYSEGEWASGGVRSFSRAAAAMAPIKVGDAIPAVEALGQITSSTPPYL

SEQ ID NO: 826 - protein, 79 aa, Artificial Sequence; identical to SEQ ID NO: 825
  Synthetic polypeptide

SEQ ID NO: 827 - protein, 130 aa, Artificial Sequence
  Synthetic polypeptide
MGLAGVCALRRSAGYILVGGAGGQSAAAAARRYSEGEWASGGVRSFSRAAAAMAPIKVGDAIPAVEVFEGEPGNKVNLAELFKGKKGVLFGVPGAFTPGCSKTHLPGFVEQAEALKAKGVQITSSTPPYL

SEQ ID NO: 828 - protein, 189 aa, Artificial Sequence
  Synthetic polypeptide
MGLAGVCALRRSAGYILVGGAGGQSAAAAARRYSEGEWASGGVRSFSRAAAAMAPIKVGDAIPAVEVFEGEPGNKVNLAELFKGKKGVLFGVPGAFTPGCSKTHLPGFVEQAEALKAKGVQVVACLSVNDAFVTGEWGRAHKAEGKVRLLADPTGAFGKETDLLLDDSLVSIFGNRRLKRLLPPPLPIS

SEQ ID NO: 829 - protein, 145 aa, Artificial Sequence
  Synthetic polypeptide
MGLAGVCALRRSAGYILVGGAGGQSAAAAARRYSEGEWASGGVRSFSRAAAAMAPIKVGDAIPAVEVFEGEPGNKVNLAELFKGKKGVLFGVPGAFTPGCSKVRLLADPTGAFGKETDLLLDDSLVSIFGNRRLKRLLPPPLPIS

SEQ ID NO: 830 - protein, 100 aa, Artificial Sequence
  Synthetic polypeptide
MGLAGVCALRRSAGYILVGGAGGQSAAAAARRYSEGEWASGGVRSFSRAAAAMAPIKVRLLADPTGAFGKETDLLLDDSLVSIFGNRRLKRLLPPPLPIS

SEQ ID NO: 831 - protein, 1550 aa, Artificial Sequence
  Synthetic polypeptide
MERRLRALEQLARGEAGGCPGLDGLLDLLLALHHELSSGPLRRERSVAQFLSWASPFVSKVKELRLQRDDFEILKVIGRGAFGEVTVVRQRDTGQIFAMKMLHKWEMLKRAETACFREERDVLVKGDSRWVTTLHYAFQDEEYLYLVMDYYAGGDLLTLLSRFEDRLPPELAQFYLAEMVLAIHSLHQLGYVHRDVKPDNVLLDVNGHIRLADFGSCLRLNTNGMVDSSVAVGTPDYISPEILQAMEEGKGHYGPQCDWWSLGVCAYELLFGETPFYAESLVETYGKIMNHEDHLQFPPDVPDVPASAQDLIRQLLCRQEERLGRGGLDDFRNHPFFEGVDWERLASSTAPYIPELRGPMDTSNFDVDDDTLNHPGTLPPPSHGAFSGHHLPFVGFTYTSGSHSPESSSEAWAALERKLQCLEQEKVELSRKHQEALHAPTDHRELEQLRKEVQTLRDRLPEMLRDKASLSQTDGPPAGSPGQDSDLRQELDRLHRELAEGRAGLQAQEQELCRAQGQQEELLQRLQEAQEREAATASQTRALSSQLEEARAAQRELEAQVSSLSRQVTQLQGQWEQRLEESSQAKTIHTASETNGMGPPEGGPQEAQLRKEVAALREQLEQAHSHRPSGKEEALCQLQEENRRLSREQERLEAELAQEQESKQRLEGERRETESNWEAQLADILSWVNDEKVSRGYLQALATKMAEELESLRNVGTQTLPARPLDHQWKARRLQKMEASARLELQSALEAEIRAKQGLQERLTQVQEAQLQAERRLQEAEKQSQALQQELAMLREELRARGPVDTKPSNSLIPFLSFRSSEKDSAKDPGISGEATRHGGEPDLRPEGRRSLRMGAVFPRAPTANTASTEGLPAKPGSHTLRPRSFPSPTKCLRCTSLMLGLGRQGLGCDACGYFCHTTCAPQAPPCPVPPDLLRTALGVHPETGTGTAYEGFLSVPRPSGVRRGWQRVFAALSDSRLLLFDAPDLRLSPPSGALLQVLDLRDPQFSATPVLASDVIHAQSRDLPRIFRVTTSQLAVPPTTCTVLLLAESEGERERWLQVLGELQRLLLDARPRPRPVYTLKEAYDNGLPLLPHTLCAAILDQDRLALGTEEGLFVIHLRSNDIFQVGECRRVQQLTLSPSAGLLVVLCGRGPSVRLFALAELENIEVAGAKIPESRGCQVLAAGSILQARTPVLCVAVKRQVLCYQLGPGPGPWQRRIRELQAPATVQSLGLLGDRLCVGAAGGFALYPLLNEAAPLALGAGLVPEELPPSRGGLGEALGAVELSLSEFLLLFTTAGIYVDGAGRKSRGHELLWPAAPMGWGYAAPYLTVFSENSIDVFDVRRAEWVQTVPLKKVRPLNPEGSLFLYGTEKVRLTYLRNQLAEKDEFDIPDLTDNSRRQLFRTKSKRRFFFRVSEEQQKQQRREMLKDPFVRSKLISPPTNFNHLVHVGPANGRPGARDKSPAPEEKGRVARGSGPQRPHSFSEALRRPASMGSEGLGGDADPMKRKPWTSLSSESVSCPQGSLSPATSLMQVTHQDHLQRSLPGRLVR

SEQ ID NO: 832 - protein, 1030 aa, Artificial Sequence
  Synthetic polypeptide
MERRLRALEQLARGEAGGCPGLDGLLDLLLALHHELSSGPLRRERSVAQFLSWASPFVSKVKELRLQRDDFEILKVIGRGAFGEVTVVRQRDTGQIFAMKMLHKWEMLKRAETACFREERDVLVKGDSRWVTTLHYAFQDEEYLYLVMDYYAGGDLLTLLSRFEDRLPPELAQFYLAEMVLAIHSLHQLGYVHRDVKPDNVLLDVNGHIRLADFGSCLRLNTNGMVDSSVAVGTPDYISPEILQAMEEGKGHYGPQCDWWSLGVCAYELLFGETPFYAESLVETYGKIMNHEDHLQFPPDVPDVPASAQDLIRQLLCRQEERLGRGGLDDFRNHPFFEGVDWERLASSTAPYIPELRGPMDTSNFDVDDDTLNHPGTLPPPSHGAFSGHHLPFVGFTYTSGSHSPESSSEAWAALERKLQCLEQEKVELSRKHQEALHAPTDHRELEQLRKEVQTLRDRLPEMLRDKASLSQTDGPPAGSPGQDSDLRQELDRLHRELAEGRAGLQAQEQELCRAQGQQEELLQRLQEAQEREAATASQTRALSSQLEEARAAQRELEAQVSSLSRQVTQLQGQWEQRLEESSQAKTIHTASETNGMGPPEGGPQEAQLRKEVAALREQLEQAHSHRPSGKEEALCQLQEENRRLSREQERLEAELAQEQESKQRLEGERRETESNWEAQLADILSWVNDEKVSRGYLQALATKMAEELESLRNVGTQTLPARPLDHQWKARRLQKMEASARLELQSALEAEIRAKQGLQERLTQVQEAQLQAERRLQEAEKQSQALQQELAMLREELRARGPVDTKPSNSLIPFLSFRSSEKDSAKDPGISGEATRHGGEPDLRPEGRRSLRMGAVFPRAPTANTASTEGLPAKPGSHTLRPRSFPSPTKCLRCTSLMLGLGRQGLGCDACGYFCHTTCAPQAPPCPVPPDLLRTALGVHPETGTGTAYEGFLSVPRPSGVRRGWQRVFAALSDSRLLLFDAPDLRLSPPSGALLQVLDLRDPQFSATPVLASDVIHAQSRDLPRIFRF

SEQ ID NO: 833 - protein, 76 aa, Artificial Sequence
  Synthetic polypeptide
QVAYVRARELHTLEVTGLETVAQSKAHVASLEGLIPEDKVVLLAGSPLQNEATLGQCGVEALTTLEVVGRRLGVGK

SEQ ID NO: 834 - protein, 122 aa, Artificial Sequence
  Synthetic polypeptide
QVAYVRARELHTLEVTGLETVAQSKAHVASLEGLIPEDKVVLLAGSPLQNEATLGQCGVEALTTLEVVGRRLGDGEFIKDCLLSAAEIMCPEQKEAFADISLTRKTVAQRVKDMAENLQDKL

SEQ ID NO: 835 - protein, 840 aa, Artificial Sequence
  Synthetic polypeptide
MAERGGAGGGPGGAGGGSGQRGSGVAQSPQQPPPQQQQQQPPQQPTPPKLAQATSSSSSTSAAAASSSSSSTSTSMAVAVASGSAPPGGPGPGRTPAPVQMNLYATWEVDRSSSSCVPRLFSLTLKKLVMLKEMDKDLNSVVIAVKLQGSKRILRSNEIVLPASGLVETELQLTFSLQYPHFLKRDANKLQIMLQRRKRYKNRTILGYKTLAVGLINMAEVMQHPNEGALVLGLHSNVKDVSVPVAEIKIYSLSSQPIDHEGIKSKLSDRSPDIDNYSEEEEESFSSEQEGSDDPLHGQDLFYEDEDLRKVKKTRRKLTSTSAITRQPNIKQKFVALLKRFKVSDEVGFGLEHVSREQIREVEEDLDELYDSLEMYNPSDSGPEMEETESILSTPKPKLKPFFEGMSQSSSQTEIGSLNSKGSLGKDTTSPMELAALEKIKSTWIKNQDDSLTETDTLEITDQDMFGDASTSLVVPEKVKTPMKSSKTDLQGSASPSKVEGVHTPRQKRSTPLKERQLSKPLSERTNSSDSERSPDLGHSTQIPRKVVYDQLNQILVSDAALPENVILVNTTDWQGQYVAELLQDQRKPVVCTCSTVEVQAVLSALLTRIQRYCNCNSSMPRPVKVAAVGGQSYLSSILRFFVKSLANKTSDWLGYMRFLIIPLGSHPVAKYLGSVDSKYSSSFLDSGWRDLFSRSEPPVSEQLDVAGRVMQYVNGAATTHQLPVAEAMLTCRHKFPDEDSYQKFIPFIGVVKVGLVEDSPSTAGDGDDSPVVSLTVPSTSPPSSSGLSRDATATPPSSPSMSSALAIVGSPNSPYGDVIGLQPTPAQPLLLPAFPLLPP

SEQ ID NO: 836 - protein, 376 aa, Artificial Sequence
  Synthetic polypeptide
MFGDASTSLVVPEKVKTPMKSSKTDLQGSASPSKVEGVHTPRQKRSTPLKERQLSKPLSERTNSSDSERSPDLGHSTQIPRKVVYDQLNQILVSDAALPENVILVNTTDWQGQYVAELLQDQRKPVVCTCSTVEVQAVLSALLTRIQRYCNCNSSMPRPVKVAAVGGQSYLSSILRFFVKSLANKTSDWLGYMRFLIIPLGSHPVAKYLGSVDSKYSSSFLDSGWRDLFSRSEPPVSEQLDVAGRVMQYVNGAATTHQLPVAEAMLTCRHKFPDEDSYQKFIPFIGVVKVGLVEDSPSTAGDGDDSPVVSLTVPSTSPPSSSGLSRDATATPPSSPSMSSALAIVGSPNSPYGDVIGLQPTPAQPLLLPAFPLLPP

SEQ ID NO: 837 - protein, 23 aa, Artificial Sequence
  Synthetic polypeptide
GRDWPPAHPCTAPPPSRFSPSPS

SEQ ID NO: 838 - protein, 35 aa, Artificial Sequence
  Synthetic polypeptide
MFEEPEWAEAAPVAAGLGPVISRPPPAASSQNKLS

SEQ ID NO: 839 - protein, 35 aa, Artificial Sequence; identical to SEQ ID NO: 838
  Synthetic polypeptide

SEQ ID NO: 840 - protein, 35 aa, Artificial Sequence; identical to SEQ ID NO: 838
  Synthetic polypeptide

SEQ ID NO: 841 - protein, 35 aa, Artificial Sequence; identical to SEQ ID NO: 838
  Synthetic polypeptide

SEQ ID NO: 842 - protein, 125 aa, Artificial Sequence
  Synthetic polypeptide
MEPEEERIRYSQRLRGTMRRRYEDDGISDDEIEGKRTFDLEEKLHTNKYNANFVTFMEGKDFNVEYIQRGGLRDPLIFKNSDGLGIKMPDPDFTVNDVKMCVAKRPSPDAGALILDFPASRTVSE

SEQ ID NO: 843 - protein, 125 aa, Artificial Sequence; identical to SEQ ID NO: 842
  Synthetic polypeptide

SEQ ID NO: 844 - protein, 137 aa, Artificial Sequence
  Synthetic polypeptide
MDPLGDTLRRLREAFHAGRTRPAEFRAAQLQGLGRFLQENKQLLHDALAQDLHKSAFESEVSEVAISQGEVTLALRNRAWMKDERVPKNLATQLDSAFIRKEPFGLVLIIAPWNYPLNLTLVPLVGALAAGSASESG

SEQ ID NO: 845 - protein, 137 aa, Artificial Sequence; identical to SEQ ID NO: 844
  Synthetic polypeptide

SEQ ID NO: 846 - protein, 137 aa, Artificial Sequence; identical to SEQ ID NO: 844
  Synthetic polypeptide

SEQ ID NO: 847 - protein, 101 aa, Artificial Sequence
  Synthetic polypeptide
MDPLGDTLRRLREAFHAGRTRPAEFRAAQLQGLGRFLQENKQLLHDALAQDLHKATQLDSAFIRKEPFGLVLIIAPWNYPLNLTLVPLVGALAAGSASESG

SEQ ID NO: 848 - protein, 716 aa, Artificial Sequence
  Synthetic polypeptide
MGRKVTVATCALNQWALDFEGNLQRILKSIEIAKNRGARYRLGPELEICGYGCWDHYYESDTLLHSFQVLAALVESPVTQDIICDVGMPVMHRNVRYNCRVIFLNRKILLIRPKMALANEGNYRELRWFTPWSRSRHTEEYFLPRMIQDLTKQETVPFGDAVLVTWDTCIGSEICEELWTPHSPHIDMGLDGVEIITNASGSHQVLRKANTRVDLVTMVTSKNGGIYLLANQKGCDGDRLYYDGCAMIAMNGSVFAQGSQFSLDDVEVLTATLDLEDVRSYRAEISSRNLAASRASPYPRVKVDFALSCHEDLLAPISEPIEWKYHSPEEEISLGPACWLWDFLRRSQQAGFLLPLSGGVDSAATACLIYSMCCQVCEAVRSGNEEVLADVRTIVNQISYTPQDPRDLCGRILTTCYMASKNSSQETCTRARELAQQIGSHHISLNIDPAVKAVMGIFSLVTGKSPLFAAHGGSSRENLALQNVQARIRMVLAYLFAQLSLWSRGVHGGLLVLGSANVDESLLGYLTKYDCSSADINPIGGISKTDLRAFVQFCIQRFQLPALQSILLAPATAELEPLADGQVSQTDEEDMGMTYAELSVYGKLRKVAKMGPYSMFCKLLGMWRHICTPRQVADKVKRFFSKYSMNRHKMTTLTPAYHAENYSPEDNRFDLRPFLYNTSWPWQFRCIENQASEPKLSHHVLCNLHVHIQMAGSCLN

SEQ ID NO: 849 - protein, 456 aa, Artificial Sequence
  Synthetic polypeptide
MGISGQEVLTATLDLEDVRSYRAEISSRNLAASRASPYPRVKVDFALSCHEDLLAPISEPIEWKYHSPEEEISLGPACWLWDFLRRSQQAGFLLPLSGGVDSAATACLIYSMCCQVCEAVRSGNEEVLADVRTIVNQISYTPQDPRDLCGRILTTCYMASKNSSQETCTRARELAQQIGSHHISLNIDPAVKAVMGIFSLVTGKSPLFAAHGGSSRENLALQNVQARIRMVLAYLFAQLSLWSRGVHGGLLVLGSANVDESLLGYLTKYDCSSADINPIGGISKTDLRAFVQFCIQRFQLPALQSILLAPATAELEPLADGQVSQTDEEDMGMTYAELSVYGKLRKVAKMGPYSMFCKLLGMWRHICTPRQVADKVKRFFSKYSMNRHKMTTLTPAYHAENYSPEDNRFDLRPFLYNTSWPWQFRCIENQASEPKLSHHVLCNLHVHIQMAGSCLN

SEQ ID NO: 850 - protein, 345 aa, Artificial Sequence
  Synthetic polypeptide
MCCQVCEAVRSGNEEVLADVRTIVNQISYTPQDPRDLCGRILTTCYMASKNSSQETCTRARELAQQIGSHHISLNIDPAVKAVMGIFSLVTGKSPLFAAHGGSSRENLALQNVQARIRMVLAYLFAQLSLWSRGVHGGLLVLGSANVDESLLGYLTKYDCSSADINPIGGISKTDLRAFVQFCIQRFQLPALQSILLAPATAELEPLADGQVSQTDEEDMGMTYAELSVYGKLRKVAKMGPYSMFCKLLGMWRHICTPRQVADKVKRFFSKYSMNRHKMTTLTPAYHAENYSPEDNRFDLRPFLYNTSWPWQFRCIENQASEPKLSHHVLCNLHVHIQMAGSCLN

SEQ ID NO: 851 - protein, 40 aa, Artificial Sequence
  Synthetic polypeptide
RSSRSMGNSGRWPRWGPTACSANSSACGDTSAPRDRSLTK

SEQ ID NO: 852 - protein, 16 aa, Artificial Sequence
  Synthetic polypeptide
QDDHAHTRVPRRELQP

SEQ ID NO: 853 - protein, 623 aa, Artificial Sequence
  Synthetic polypeptide
MAEAGDAALSVAEWLRALHLEQYTGLFEQHGLVWATECQGLSDTRLMDMGMLLPGHRRRILAGLLRAHTSPAPAPRPTPRPVPMKRHIFRSPPVPATPPEPLPTTTEDEGLPAAPPIPPRRSCLPPTCFTTPSTAAPDPVLPPLPAKRHLAELSVPPVPPRTGPPRLLVSLPTKEEESLLPSLSSPPQPQSEEPLSTLPQGPPQPPSPPPCPPEIPPKPVRLFPEFDDSDYDEVPEEGPGAPARVMTKKEEPPPSRVPRAVRVASLLSEGEELSGDDQGDEEEDDHAYEGVPNGGWHTSSLSLSLPSTIAAPHPMDGPPGGSTPVTPVIKAGWLDKNPPQGSYIYQKRWVRLDTDHLRYFDSNKDAYSKRFISVACISHVAAIGDQKFEVITNNRTFAFRAESDVERKEWMQALQQAMAEQRARARLSSAYLLGVPGSEQPDRAGSLELRGFKNKLYVAVVGDKVQLYKNLEEYHLGIGITFIDMSVGNVKEVDRRSFDLTTPYRIFSFSADSELEKEQWLEAMQGAIAEALSTSEVAERIWAAAPNRFCADCGAPQPDWASINLCVVICKRCAGEHRGLGAGVSKVRSLKMDRKVWTETLIEHPIQDLTRRQGGGPRKWLWN

SEQ ID NO: 854 - protein, 623 aa, Artificial Sequence; identical to SEQ ID NO: 853
  Synthetic polypeptide

SEQ ID NO: 855 - protein, 623 aa, Artificial Sequence; identical to SEQ ID NO: 853
  Synthetic polypeptide

SEQ ID NO: 856 - protein, 383 aa, Artificial Sequence
  Synthetic polypeptide
MTLSGSRGQEEPPPSRVPRAVRVASLLSEGEELSGDDQGDEEEDDHAYEGVPNGGWHTSSLSLSLPSTIAAPHPMDGPPGGSTPVTPVIKAGWLDKNPPQGSYIYQKRWVRLDTDHLRYFDSNKDAYSKRFISVACISHVAAIGDQKFEVITNNRTFAFRAESDVERKEWMQALQQAMAEQRARARLSSAYLLGVPGSEQPDRAGSLELRGFKNKLYVAVVGDKVQLYKNLEEYHLGIGITFIDMSVGNVKEVDRRSFDLTTPYRIFSFSADSELEKEQWLEAMQGAIAEALSTSEVAERIWAAAPNRFCADCGAPQPDWASINLCVVICKRCAGEHRGLGAGVSKVRSLKMDRKVWTETLIEHPIQDLTRRQGGGPRKWLWN

SEQ ID NO: 857 - protein, 378 aa, Artificial Sequence
  Synthetic polypeptide
MTKKEEPPPSRVPRAVRVASLLSEGEELSGDDQGDEEEDDHAYEGVPNGGWHTSSLSLSLPSTIAAPHPMDGPPGGSTPVTPVIKAGWLDKNPPQGSYIYQKRWVRLDTDHLRYFDSNKDAYSKRFISVACISHVAAIGDQKFEVITNNRTFAFRAESDVERKEWMQALQQAMAEQRARARLSSAYLLGVPGSEQPDRAGSLELRGFKNKLYVAVVGDKVQLYKNLEEYHLGIGITFIDMSVGNVKEVDRRSFDLTTPYRIFSFSADSELEKEQWLEAMQGAIAEALSTSEVAERIWAAAPNRFCADCGAPQPDWASINLCVVICKRCAGEHRGLGAGVSKVRSLKMDRKVWTETLIEHPIQDLTRRQGGGPRKWLWN

SEQ ID NO: 858 - protein, 378 aa, Artificial Sequence; identical to SEQ ID NO: 857
  Synthetic polypeptide

SEQ ID NO: 859 - protein, 378 aa, Artificial Sequence; identical to SEQ ID NO: 857
  Synthetic polypeptide

SEQ ID NO: 860 - protein, 1863 aa, Artificial Sequence
  Synthetic polypeptide
MADGAPRPQLYRSVSFKLLERWSGGPGLREEDTDTPGLRRRASCRPTTAARGQPSRRVSKLASGPLAAPAQPRPLRSLSPSVRQLSRRFDAPRLDDGSAGTRDGGVLPAAAEEAAEGPARGAWPSVTEMRKLFGGPGSRRPSADSESPGTPSPDGAAWEPPARESRQPPTPPPRTCFPLAGLRSARPLTGPETEGRLRRPQQQQERAQRPADGLHSWHIFSQPQAGARASCSSSSIAASYPVSRSRAASSSEEEEEGPPQLPGAQSPAYHGGHSSGSDDDRDGEGGHRWGGRPGLRPGSSLLDQDCRPDSDGLNLSSMNSAGVSGSPEPPTSPRAPREEGLREWGSGSPPCVPGPQEGLRPMSDSVGGAFRVAKVSFPSYLASPAGSRGSSRYSSTETLKDDDLWSSRGSGGWGVYRSPSFGAGEGLLRSQARTRAKGPGGTSRALRDGGFEPEKSRQRKSLSNPDIASETLTLLSFLRSDLSELRVRKPGGSSGDRGSNPLDGRDSPSAGGPVGQLEPIPIPAPASPGTRPTLKDLTATLRRAKSFTCSEKPMARRLPRTSALKSSSSELLLTGPGAEEDPLPLIVQDQYVQEARQVFEKIQRMGAQQDDGSDAPPGSPDWAGDVTRGQRSQEELSGPESSLTDEGIGADPEPPVAAFCGLGTTGMWRPLSSSSAQTNHHGPGTEDSLGGWALVSPETPPTPGALRRRRKVPPSGSGGSELSNGEAGEAYRSLSDPIPQRHRAATSEEPTGFSVDSNLLGSLSPKTGLPATSAMDEGLTSGHSDWSVGSEESKGYQEVIQSIVQGPGTLGRVVDDRIAGKAPKKKSLSDPSRRGELAGPGFEGPGGEPIREVEPMLPPSSSEPILVEQRAEPEEPGATRSRAQSERALPEALPPPATAHRNFHLDPKLADILSPRLIRRGSKKRPARSSHQELRRDEGSQDQTGSLSRARPSSRHVRHASVPATFMPIVVPEPPTSVGPPVAVPEPIGFPTRAHPTLQAPSLEDVTKQYMLNLHSGEVPAPVPVDMPCLPLAAPPSAEAKPPEAARPADEPTPASKCCSKPQVDMRKHVAMTLLDTEQSYVESLRTLMQGYMQPLKQPENSVLCDPSLVDEIFDQIPELLEHHEQFLEQVRHCMQTWHAQQKVGALLVQSFSKDVLVNIYSAYIDNFLNAKDAVRVAKEARPAFLKFLEQSMRENKEKQALSDLMIKPVQRIPRYELLVKDLLKHTPEDHPDHPLLLEAQRNIKQVAERINKGVRSAEEAERHARVLQEIEAHIEGMEDLQAPLRRFLRQEMVIEVKAIGGKKDRSLFLFTDLIVCTTLKRKSGSLRRSSMSLYTAASVIDTASKYKMLWKLPLEDADIIKGASQATNRENIQKAISRLDEDLTTLGQMSKLSESLGFPHQSLDDALRDLSAAMHRDLSEKQALCYALSFPPTKLELCATRPEGTDSYIFEFPHPDARLGFEQAFDEAKRKLASSKSCLDPEFLKAIPIMKTRSGMQFSCAAPTLNSCPEPSPEVWVCNSDGYVGQVCLLSLRAEPDVEACIAVCSARILCIGAVPGLQPRCHREPPPSLRSPPETAPEPAGPELDVEAAADEEAATLAEPGPQPCLHISIAGSGLEMTPGLGEGDPRPELVPFDSDSDDESSPSPSGTLQSQASRSTISSSFGNEETPSSKEATAETTSSEEEQEPGFLPLSGSFGPGGPCGTSPMDGRALRRSSHGSFTRGSLEDLLSVDPEAYQSSVWLGTEDGCVHVYQSSDSIRDRRNSMKLQHAASVTCILYLNNQVFVSLANGELVVYQREAGHFWDPQNFKSVTLGTQGSPITKMVSVGGRLWCGCQNRVLVLSPDTLQLEASASPPVQGEASD

SEQ ID NO: 861 - protein, 33 aa, Artificial Sequence
  Synthetic polypeptide
MAAPLRIQSDWAQALRKDEGEAWLSCHPPVEAA

SEQ ID NO: 862 - protein, 30 aa, Artificial Sequence
  Synthetic polypeptide
MAAPLRIQSDWAQALRKDEGEAWLSCHPPA

SEQ ID NO: 863 - protein, 431 aa, Artificial Sequence
  Synthetic polypeptide
MVPEVRVLSSLLGLALLWFPLDSHARARPDMFCLFHGKRYSPGESWHPYLEPQGLMYCLRCTCSEGAHVSCYRLHCPPVHCPQPVTEPQQCCPKCVEPHTPSGLRAPPKSCQHNGTMYQHGEIFSAHELFPSRLPNQCVLCSCTEGQIYCGLTTCPEPGCPAPLPLPDSCCQACKDEASEQSDEEDSVQSLHGVRHPQDPCSSDAGRKRGPGTPAPTGLSAPLSFIPRHFRPKGAGSTTVKIVLKEKHKKACVHGGKTYSHGEVWHPAFRAFGPLPCILCTCEDGRQDCQRVTCPTEYPCRHPEKVAGKCCKICPEDKADPGHSEISSTRCPKAPGRVLVHTSVSPSPDNLRRFALEHEASDLVEIYLWKLVKDEETEAQRGEVPGPRPHSQRNGRRKWSCSAWRREDSGGQDCWLRGSEGLSQAEGAAVF

SEQ ID NO: 864 - protein, 414 aa, Artificial Sequence
  Synthetic polypeptide
MVPEVRVLSSLLGLALLWFPLDSHARARPDMFCLFHGKRYSPGESWHPYLEPQGLMYCLRCTCSEGAHVSCYRLHCPPVHCPQPVTEPQQCCPKCVEPHTPSGLRAPPKSCQHNGTMYQHGEIFSAHELFPSRLPNQCVLCSCTEGQIYCGLTTCPEPGCPAPLPLPDSCCQACKDEASEQSDEEDSVQSLHGVRHPQDPCSSDAGRKRGPGTPAPTGLSAPLSFIPRHFRPKGAGSTTVKIVLKEKHKKACVHGGKTYSHGEVWHPAFRAFGPLPCILCTCEDGRQDCQRVTCPTEYPCRHPEKVAGKCCKICPEDKADPGHSEISSTRCPKAPGRVLVHTSVSPSPDNLRRFALEHEASDLVEIYLWKLVKGGMDEESGAVQPGEEKTQGDRTAGFVALKGCPRQREQLCSE

SEQ ID NO: 865 - protein, 414 aa, Artificial Sequence; identical to SEQ ID NO: 864
  Synthetic polypeptide

SEQ ID NO: 866 - protein, 349 aa, Artificial Sequence
  Synthetic polypeptide
MVPEVRVLSSLLGLALLWFPLDSHARARPDMFCLFHGKRYSPGESWHPYLEPQGLMYCLRCTCSEGAHVSCYRLHCPPVHCPQPVTEPQQCCPKCVEPHTPSGLRAPPKSCQHNGTMYQHGEIFSAHELFPSRLPNQCVLCSCTEGQIYCGLTTCPEPGCPAPLPLPDSCCQACKDEASEQSDEEDSVQSLHGVRHPQDPCSSDAGRKRGPGTPAPTGLSAPLSFIPRHFRPKGAGSTTVKIVLKEKHKKEDKADPGHSEISSTRCPKAPGRVLVHTSVSPSPDNLRRFALEHEASDLVEIYLWKLVKGGMDEESGAVQPGEEKTQGDRTAGFVALKGCPRQREQLCSE

SEQ ID NO: 867 - protein, 33 aa, Artificial Sequence
  Synthetic polypeptide
MRARPQVCEALLFALALQTGVCYGIKWLLAKRE

SEQ ID NO: 868 - protein, 604 aa, Artificial Sequence
  Synthetic polypeptide
MFSCVKPYEDQNYSALRRDCRRRKVLFEDPLFPATDDSLYYKGTPGPAVRWKRPKGICEDPRLFVDGISSHDLHQGQVGNCWFVAACSSLASRESLWQKVIPDWKEQEWDPEKPNAYAGIFHFHFWRFGEWVDVVIDDRLPTVNNQLIYCHSNSRNEFWCALVEKAYAKLAGCYQALDGGNTADALVDFTGGVSEPIDLTEGDFANDETKRNQLFERMLKVHSRGGLISASIKAVTAADMEARLACGLVKGHAYAVTDVRKVRLGHGLLAFFKSEKLDMIRLRNPWGEREWNGPWSDTSEEWQKVSKSEREKMGVTVQDDGEFWMTFEDVCRYFTDIIKCRVINTSHLSIHKTWEEARLHGAWTLHEDPRQNRGGGCINHKDTFFQNPQYIFEVKKPEDEVLICIQQRPKRSTRREGKGENLAIGFDIYKVEENRQYRMHSLQHKAASSIYINSRSVFLRTDQPEGRYVIIPTTFEPGHTGEFLLRVFTDVPSNCRELRLDEPPHTCWSSLCGYPQLVTQVHVLGAAGLKDSPTGANSYVIIKCEGDKVRSAVQKGTSTPEYNVKGIFYRKKLSQPITVQVWNHRVLKDEFLGQDTGVLFPLFH

SEQ ID NO: 869 - protein, 604 aa, Artificial Sequence; identical to SEQ ID NO: 868
  Synthetic polypeptide

SEQ ID NO: 870 - protein, 644 aa, Artificial Sequence
  Synthetic polypeptide
MFSCVKPYEDQNYSALRRDCRRRKVLFEDPLFPATDDSLYYKGTPGPAVRWKRPKYSGHSLAPHRPGWGDARRMENVPRPGSSGCPSSSLRARDLGICEDPRLFVDGISSHDLHQGQVGNCWFVAACSSLASRESLWQKVIPDWKEQEWDPEKPNAYAGIFHFHFWRFGEWVDVVIDDRLPTVNNQLIYCHSNSRNEFWCALVEKAYAKLAGCYQALDGGNTADALVDFTGGVSEPIDLTEGDFANDETKRNQLFERMLKVHSRGGLISASIKAVTAADMEARLACGLVKGHAYAVTDVRKVRLGHGLLAFFKSEKLDMIRLRNPWGEREWNGPWSDTSEEWQKVSKSEREKMGVTVQDDGEFWMTFEDVCRYFTDIIKCRVINTSHLSIHKTWEEARLHGAWTLHEDPRQNRGGGCINHKDTFFQNPQYIFEVKKPEDEVLICIQQRPKRSTRREGKGENLAIGFDIYKVEENRQYRMHSLQHKAASSIYINSRSVFLRTDQPEGRYVIIPTTFEPGHTGEFLLRVFTDVPSNCRELRLDEPPHTCWSSLCGYPQLVTQVHVLGAAGLKDSPTGANSYVIIKCEGDKVRSAVQKGTSTPEYNVKGIFYRKKLSQPITVQVWNHRVLKDEFLGQDTGVLFPLFH

SEQ ID NO: 871 - protein, 488 aa, Artificial Sequence
  Synthetic polypeptide
MLLFLWIETSSEYFNFDWVTFLGTGYWFFWSIFILSLARILTAYSSLLLLLGFLLLWERIELYLHLCHKILILLVILLCVILMFIICKFWKERWLVAGLSMQIFAPYVHLVSITVMVILFWPVAFYVACLEREVRMRRYRMTHSEKKRLKQCNVITRLRGLQVPVGLPFLLILLGLYLMPLGIYSPCIQEKENLGPKPTIFGHRGAPMLGPENTMMSFEKAVEHGAHGLETDIHLSYDHVPFLMHDFDLKRTTNIGEVQPESACENPAFFNWDFLSTLNAGKWFVKPELRPFYNMKPLSEADKERARNQSIPTLADLLTLAEKERKFVIFDLHRPPPKHPLRHTFVRQVVSVILASKIEQHLIFWLPAHDRQYVRSVAPGFQHVGRLVSIETLAKNNISIINVDYKKLFPNGLRDYKAANIHINVYTVNEPWLFSLAWCSRINSVTTDNIGLLSQLDHPHFFMVSSETQKPVLLKAAPGDLAAQPGLR

SEQ ID NO: 872 - protein, 488 aa, Artificial Sequence; identical to SEQ ID NO: 871
  Synthetic polypeptide

SEQ ID NO: 873 - protein, 137 aa, Artificial Sequence
  Synthetic polypeptide
MIARRNPEPLRFLPDEARSLPPPKLTDPRLLYIGFLGYCSGLIDNLIRRRPIATAGLHRQLLYITAFFFAGYYLVKREDYLYAVRDREMFGYMKLHPEDFPEEDQPHPSSYPRAHHECRFSGPSQDLLNWNCISTRS

SEQ ID NO: 874 - protein, 137 aa, Artificial Sequence; identical to SEQ ID NO: 873
  Synthetic polypeptide

SEQ ID NO: 875 - protein, 137 aa, Artificial Sequence; identical to SEQ ID NO: 873
  Synthetic polypeptide

SEQ ID NO: 876 - protein, 114 aa, Artificial Sequence
  Synthetic polypeptide
MIARRNPEPLRFLPDEARSLPPPKLTDPRLLYIGFLGYCSGLIDNLIRRRPIATADYLYAVRDREMFGYMKLHPEDFPEEDQPHPSSYPRAHHECRFSGPSQDLLNWNCISTRS

SEQ ID NO: 877 - protein, 44 aa, Artificial Sequence
  Synthetic polypeptide
MRYVASYLLAALGGNSSPSAKDIKKILDSVGIEADDDRLNKEVE

SEQ ID NO: 878 - protein, 44 aa, Artificial Sequence; identical to SEQ ID NO: 877
  Synthetic polypeptide

SEQ ID NO: 879 - protein, 150 aa, Artificial Sequence
  Synthetic polypeptide
MSMEDYDFLFKIVLIGNAGVGKTCLVRRFTQGLFPPGQGATIGVDFMIKTVEINGEKVKLQIWDTAGQERFRSITQSYYRSANALILTYDITCEESFRCLPEWLREIEQYASNKVITVLVGSASVPTHKTTVDHAWHRVHLEGHRTGNTA

SEQ ID NO: 880 - protein, 150 aa, Artificial Sequence; identical to SEQ ID NO: 879
  Synthetic polypeptide

SEQ ID NO: 881 - protein, 150 aa, Artificial Sequence; identical to SEQ ID NO: 879
  Synthetic polypeptide

SEQ ID NO: 882 - protein, 150 aa, Artificial Sequence; identical to SEQ ID NO: 879
  Synthetic polypeptide

SEQ ID NO: 883 - protein, 150 aa, Artificial Sequence; identical to SEQ ID NO: 879
  Synthetic polypeptide

SEQ ID NO: 884 - protein, 150 aa, Artificial Sequence; identical to SEQ ID NO: 879
  Synthetic polypeptide

SEQ ID NO: 885 - protein, 114 aa, Artificial Sequence
  Synthetic polypeptide
YCRDIHTKYSSEWGAGALEDKSRLQIWDTAGQERFRSITQSYYRSANALILTYDITCEESFRCLPEWLREIEQYASNKVITVLVGSASVPTHKTTVDHAWHRVHLEGHRTGNTA

SEQ ID NO: 886 - protein, 122 aa, Artificial Sequence
  Synthetic polypeptide
MSMEDYDFLFKIVLIGNAGVGKTCLVRRFTQLQIWDTAGQERFRSITQSYYRSANALILTYDITCEESFRCLPEWLREIEQYASNKVITVLVGSASVPTHKTTVDHAWHRVHLEGHRTGNTA

SEQ ID NO: 887 - protein, 104 aa, Artificial Sequence
  Synthetic polypeptide
MIKTVEINGEKVKLQIWDTAGQERFRSITQSYYRSANALILTYDITCEESFRCLPEWLREIEQYASNKVITVLVGSASVPTHKTTVDHAWHRVHLEGHRTGNTA

SEQ ID NO: 888 - protein, 105 aa, Artificial Sequence
  Synthetic polypeptide
MSRMRPVCQPWPSPHAPTTVKREGSTVSNSIQPPPPEYQLGSRTWLEAETPGQKRQCSAFMEFTEESRSRSWTVLLPSRLTAASLPDSPASACQVPAIAGARRHA

SEQ ID NO: 889 - protein, 105 aa, Artificial Sequence; identical to SEQ ID NO: 888
  Synthetic polypeptide

SEQ ID NO: 890 - protein, 350 aa, Artificial Sequence
  Synthetic polypeptide
MLLAVLYCLLWSFQTSAGHFPRACVSSKNLMEKECCPPWSGDRSPCGQLSGRGSCQNILLSNAPLGPQFPFTGVDDRESWPSVFYNRTCQCSGNFMGFNCGNCKFGFWGPNCTERRLLVRRNIFDLSAPEKDKFFAYLTLAKHTISSDYVIPIGTYGQMKNGSTPMFNDINIYDLFVWMHYYVSMDALLGGSEIWRDIDFAHEAPAFLPWHRLFLLRWEQEIQKLTGDENFTIPYWDWRDAEKCDICTDEYMGGQHPTNPNLLSPASFFSSWQIVCSRLEEYNSHQSLCNGTPEGPLRRNPGNHDKSRTPRLPSSADVEFCLSLTQYESGSMDKAANFSFRNTLEELLRR

SEQ ID NO: 891 - protein, 377 aa, Artificial Sequence
  Synthetic polypeptide
MLLAVLYCLLWSFQTSAGHFPRACVSSKNLMEKECCPPWSGDRSPCGQLSGRGSCQNILLSNAPLGPQFPFTGVDDRESWPSVFYNRTCQCSGNFMGFNCGNCKFGFWGPNCTERRLLVRRNIFDLSAPEKDKFFAYLTLAKHTISSDYVIPIGTYGQMKNGSTPMFNDINIYDLFVWMHYYVSMDALLGGSEIWRDIDFAHEAPAFLPWHRLFLLRWEQEIQKLTGDENFTIPYWDWRDAEKCDICTDEYMGGQHPTNPNLLSPASFFSSWQIVCSRLEEYNSHQSLCNGTPEGPLRRNPGNHDKSRTPRLPSSADVEFCLSLTQYESGSMDKAANFSFRNTLEGFASPLTGIADASQSSMHNALHIYMNGTMSQM

SEQ ID NO: 892 - protein, 408 aa, Artificial Sequence
  Synthetic polypeptide
MLLAVLYCLLWSFQTSAGHFPRACVSSKNLMEKECCPPWSGDRSPCGQLSGRGSCQNILLSNAPLGPQFPFTGVDDRESWPSVFYNRTCQCSGNFMGFNCGNCKFGFWGPNCTERRLLVRRNIFDLSAPEKDKFFAYLTLAKHTISSDYVIPIGTYGQMKNGSTPMFNDINIYDLFVWMHYYVSMDALLGGSEIWRDIDFAHEAPAFLPWHRLFLLRWEQEIQKLTGDENFTIPYWDWRDAEKCDICTDEYMGGQHPTNPNLLSPASFFSSWQIVCSRLEEYNSHQSLCNGTPEGPLRRNPGNHDKSRTPRLPSSADVEFCLSLTQYESGSMDKAANFSFRNTLEGFASPLTGIADASQSSMHNALHIYMNGTMSQVQGSANDPIFLLHHAFVDRCDLPQEEMSASYT

SEQ ID NO: 893 - protein, 495 aa, Artificial Sequence
  Synthetic polypeptide
MLLAVLYCLLWSFQTSAGHFPRACVSSKNLMEKECCPPWSGDRSPCGQLSGRGSCQNILLSNAPLGPQFPFTGVDDRESWPSVFYNRTCQCSGNFMGFNCGNCKFGFWGPNCTERRLLVRRNIFDLSAPEKDKFFAYLTLAKHTISSDYVIPIGTYGQMKNGSTPMFNDINIYDLFVWMHYYVSMDALLGGSEIWRDIDFAHEAPAFLPWHRLFLLRWEQEIQKLTGDENFTIPYWDWRDAEKCDICTDEYMGGQHPTNPNLLSPASFFSSWQIVCSRLEEYNSHQSLCNGTPEGPLRRNPGNHDKSRTPRLPSSADVEFCLSLTQYESGSMDKAANFSFRNTLEGFASPLTGIADASQSSMHNALHIYMNGTMSQVQGSANDPIFLLHHAFVDSIFEQWLRRHRPLQEVYPEANAPIGHNRESYMVPFIPLYRNGDFFISSKDLGYDYSYLQDSVGQSSGVHSLTSQRCRKSFLHDAFLSSSEQHYSRNDLFTC

SEQ ID NO: 894 - protein, 953 aa, Artificial Sequence
  Synthetic polypeptide
MGVAGRNRPGAAWAVLLLLLLLPPLLLLAGAVPPGRGRAAGPQEDVDECAQGLDDCHADALCQNTPTSYKCSCKPGYQGEGRQCEDIDECGNELNGGCVHDCLNIPGNYRCTCFDGFMLAHDGHNCLDVDECLENNGGCQHTCVNVMGSYECCCKEGFFLSDNQHTCIHRSEEGLSCMNKDHGCSHICKEAPRGSVACECRPGFELAKNQRDCILTCNHGNGGCQHSCDDTADGPECSCHPQYKMHTDGRSCLEREDTVLEVTESNTTSVVDGDKRVKRRLLMETCAVNNGGCDRTCKDTSTGVHCSCPVGFTLQLDGKTCKDIDECQTRNGGCDHFCKNIVGSFDCGCKKGFKLLTDEKSCQDVDECSLDRTCDHSCINHPGTFACACNRGYTLYGFTHCGDTNECSINNGGCQQVCVNTVGSYECQCHPGYKLHWNKKDCVEVKGLLPTSVSPRVSLHCGKSGGGDGCFLRCHSGIHLSSGLQGAYSVTCGSSSPLRNKQQKSNDSAFGDVTTIRTSVTFKLNEGKCSLKNAELFPEGLRPALPEKHSSVKESFRYVNLTCSSGKQVPGAPGRPSTPKEMFITVEFELETNQKEVTASCDLSCIVKRTEKRLRKAIRTLRKAVHREQFHLQLSGMNLDVAKKPPRTSERQAESCGVGQGHAENQCVSCRAGTYYDGARERCILCPNGTFQNEEGQMTCEPCPRPGNSGALKTPEAWNMSECGGLCQPGEYSADGFAPCHLCALGTFQPEAGRTSCFPCGGGLATKHQGATSFQDCETRVQCSPGHFYNTTTHRCIRCPVGTYQPEFGKNNCVSCPGNTTTDFDGSTNITQCKNRRCGGELGDFTGYIESPNYPGNYPANTECTWTINPPPKRRILIVVPEIFLPIEDDCGDYLVMRKTSSSNSVTTYETCQTYERPIAFTSRSKKLWIQFKSNEGNSARGFQVPYVTYDEG

SEQ ID NO: 895 - protein, 924 aa, Artificial Sequence
  Synthetic polypeptide
MGVAGRNRPGAAWAVLLLLLLLPPLLLLAGAVPPGRGRAAGPQEDVDECAQGLDDCHADALCQNTPTSYKCSCKPGYQGEGRQCEDIDECGNELNGGCVHDCLNIPGNYRCTCFDGFMLAHDGHNCLDVDECLENNGGCQHTCVNVMGSYECCCKEGFFLSDNQHTCIHRSEEGLSCMNKDHGCSHICKEAPRGSVACECRPGFELAKNQRDCILTCNHGNGGCQHSCDDTADGPECSCHPQYKMHTDGRSCLEREDTVLEVTESNTTSVVDGDKRVKRRLLMETCAVNNGGCDRTCKDTSTGVHCSCPVGFTLQLDGKTCKDIDECQTRNGGCDHFCKNIVGSFDCGCKKGFKLLTDEKSCQDVDECSLDRTCDHSCINHPGTFACACNRGYTLYGFTHCGDTNECSINNGGCQQVCVNTVGSYECQCHPGYKLHWNKKDCVEVKGLLPTSVSPRVSLHCGKSGGGDGCFLRCHSGIHLSSDVTTIRTSVTFKLNEGKCSLKNAELFPEGLRPALPEKHSSVKESFRYVNLTCSSGKQVPGAPGRPSTPKEMFITVEFELETNQKEVTASCDLSCIVKRTEKRLRKAIRTLRKAVHREQFHLQLSGMNLDVAKKPPRTSERQAESCGVGQGHAENQCVSCRAGTYYDGARERCILCPNGTFQNEEGQMTCEPCPRPGNSGALKTPEAWNMSECGGLCQPGEYSADGFAPCHLCALGTFQPEAGRTSCFPCGGGLATKHQGATSFQDCETRVQCSPGHFYNTTTHRCIRCPVGTYQPEFGKNNCVSCPGNTTTDFDGSTNITQCKNRRCGGELGDFTGYIESPNYPGNYPANTECTWTINPPPKRRILIVVPEIFLPIEDDCGDYLVMRKTSSSNSVTTYETCQTYERPIAFTSRSKKLWIQFKSNEGNSARGFQVPYVTYDEG

SEQ ID NO: 896 - protein, 732 aa, Artificial Sequence
  Synthetic polypeptide
MGVAGRNRPGAAWAVLLLLLLLPPLLLLAGAVPPGRGRAAGPQEDVDECAQGLDDCHADALCQNTPTSYKCSCKPGYQGEGRQCEDIDECGNELNGGCVHDCLNIPGNYRCTCFDGFMLAHDGHNCLDVDECLENNGGCQHTCVNVMGSYECCCKEGFFLSDNQHTCIHRSEEGLSCMNKDHGCSHICKEAPRGSVACECRPGFELAKNQRDCILTCNHGNGGCQHSCDDTADGPECSCHPQYKMHTDGRSCLEREDTVLEVTESNTTSVVDGDKRVKRRLLMETCAVNNGGCDRTCKDTSTGVHCSCPVGFTLQLDGKTCKDIDECQTRNGGCDHFCKNIVGSFDCGCKKGFKLLTDEKSCQDVDECSLDRTCDHSCINHPGTFACACNRGYTLYGFTHCGDTNECSINNGGCQQVCVNTVGSYECQCHPGYKLHWNKKDCVASCDLSCIVKRTEKRLRKAIRTLRKAVHREQFHLQLSGMNLDVAKKPPRTSERQAESCGVGQGHAENQCVSCRAGTYYDGARERCILCPNGTFQNEEGQMTCEPCPRPGNSGALKTPEAWNMSECGGLCQPGEYSADGFAPCHLCALGTFQPEAGRTSCFPCGGGLATKHQGATSFQDCETRVQCSPGHFYNTTTHRCIRCPVGTYQPEFGKNNCVSCPGNTTTDFDGSTNITQCKTSSNSVTTYETCQTYERPIAFTSRSKKLWIQFKSNEGNSARGFQVPYVTYDEG

SEQ ID NO: 897 - protein, 896 aa, Artificial Sequence
  Synthetic polypeptide
MGVAGRNRPGAAWAVLLLLLLLPPLLLLAGAVPPGRGRAAGPQEDVDECAQGLDDCHADALCQNTPTSYKCSCKPGYQGEGRQCEDIDECGNELNGGCVHDCLNIPGNYRCTCFDGFMLAHDGHNCLDVDECLENNGGCQHTCVNVMGSYECCCKEGFFLSDNQHTCIHRSEEGLSCMNKDHGCSHICKEAPRGSVACECRPGFELAKNQRDCILTCNHGNGGCQHSCDDTADGPECSCHPQYKMHTDGRSCLEREDTVLEVTESNTTSVVDGDKRVKRRLLMETCAVNNGGCDRTCKDTSTGVHCSCPVGFTLQLDGKTCKDIDECQTRNGGCDHFCKNIVGSFDCGCKKGFKLLTDEKSCQDVDECSLDRTCDHSCINHPGTFACACNRGYTLYGFTHCGDTNECSINNGGCQQVCVNTVGSYECQCHPGYKLHWNKKDCVEVKGLLPTSVSPRVSLHCGKSGGGDGCFLRCHSGIHLSSGLQGAYSVTCGSSSPLRNKQQKSNDSAFGDVTTIRTSVTFKLNEGKCSLKNAELFPEGLRPALPEKHSSVKESFRYVNLTCSSGKQVPGAPGRPSTPKEMFITVEFELETNQKEVTASCDLSCIVKRTEKRLRKAIRTLRKAVHREQFHLQLSGMNLDVAKKPPRTSERQAESCGVGQGHAENQCGLCQPGEYSADGFAPCHLCALGTFQPEAGRTSCFPCGGGLATKHQGATSFQDCETRVQCSPGHFYNTTTHRCIRCPVGTYQPEFGKNNCVSCPGNTTTDFDGSTNITQCKNRRCGGELGDFTGYIESPNYPGNYPANTECTWTINPPPKRRILIVVPEIFLPIEDDCGDYLVMRKTSSSNSVTTYETCQTYERPIAFTSRSKKLWIQFKSNEGNSARGFQVPYVTYDEG

SEQ ID NO: 898 - protein, 7 aa, Artificial Sequence
  Synthetic polypeptide
GRFHWVH

SEQ ID NO: 899 - protein, 30 aa, Artificial Sequence
  Synthetic polypeptide
GTLNPQTTQAITQPTPSVRGPSTHPPSAAS

SEQ ID NO: 900 - protein, 684 aa, Artificial Sequence
  Synthetic polypeptide
MGVAGRNRPGAAWAVLLLLLLLPPLLLLAGAVPPGRGRAAGPQEDVDECAQGLDDCHADALCQNTPTSYKCSCKPGYQGEGRQCEDIDECGNELNGGCVHDCLNIPGNYRCTCFDGFMLAHDGHNCLDVDECLENNGGCQHTCVNVMGSYECCCKEGFFLSDNQHTCIHRSEEGLSCMNKDHGCSHICKEAPRGSVACECRPGFELAKNQRDCILTCNHGNGGCQHSCDDTADGPECSCHPQYKMHTDGRSCLEREDTVLEVTESNTTSVVDGDKRVKRRLLMETCAVNNGGCDRTCKDTSTGVHCSCPVGFTLQLDGKTCKDIDECQTRNGGCDHFCKNIVGSFDCGCKKGFKLLTDEKSCQDVDECSLDRTCDHSCINHPGTFACACNRGYTLYGFTHCGDTNECSINNGGCQQVCVNTVGSYECQCHPGYKLHWNKKDCVEVKGLLPTSVSPRVSLHCGKSGGGDGCFLRCHSGIHLSSGLQGAYSVTCGSSSPLRNKQQKSNDSAFGDVTTIRTSVTFKLNEGKCSLKNAELFPEGLRPALPEKHSSVKESFRYVNLTCSSGKQVPGAPGRPSTPKEMFITVEFELETNQKEVTASCDLSCIVKRTEKRLRKAIRTLRKAVHREQFHLQLSGMNLDVAKKPPRTSERQAESCGVGQGHAENQCVTWVNHGPRISNGKFQK

SEQ ID NO: 901 - protein, 684 aa, Artificial Sequence; identical to SEQ ID NO: 900
  Synthetic polypeptide

SEQ ID NO: 902 - protein, 655 aa, Artificial Sequence
  Synthetic polypeptide
MGVAGRNRPGAAWAVLLLLLLLPPLLLLAGAVPPGRGRAAGPQEDVDECAQGLDDCHADALCQNTPTSYKCSCKPGYQGEGRQCEDIDECGNELNGGCVHDCLNIPGNYRCTCFDGFMLAHDGHNCLDVDECLENNGGCQHTCVNVMGSYECCCKEGFFLSDNQHTCIHRSEEGLSCMNKDHGCSHICKEAPRGSVACECRPGFELAKNQRDCILTCNHGNGGCQHSCDDTADGPECSCHPQYKMHTDGRSCLEREDTVLEVTESNTTSVVDGDKRVKRRLLMETCAVNNGGCDRTCKDTSTGVHCSCPVGFTLQLDGKTCKDIDECQTRNGGCDHFCKNIVGSFDCGCKKGFKLLTDEKSCQDVDECSLDRTCDHSCINHPGTFACACNRGYTLYGFTHCGDTNECSINNGGCQQVCVNTVGSYECQCHPGYKLHWNKKDCVEVKGLLPTSVSPRVSLHCGKSGGGDGCFLRCHSGIHLSSDVTTIRTSVTFKLNEGKCSLKNAELFPEGLRPALPEKHSSVKESFRYVNLTCSSGKQVPGAPGRPSTPKEMFITVEFELETNQKEVTASCDLSCIVKRTEKRLRKAIRTLRKAVHREQFHLQLSGMNLDVAKKPPRTSERQAESCGVGQGHAENQCVTWVNHGPRISNGKFQK

SEQ ID NO: 903 - protein, 529 aa, Artificial Sequence
  Synthetic polypeptide
MGVAGRNRPGAAWAVLLLLLLLPPLLLLAGAVPPGRGRAAGPQEDVDECAQGLDDCHADALCQNTPTSYKCSCKPGYQGEGRQCEDIDECGNELNGGCVHDCLNIPGNYRCTCFDGFMLAHDGHNCLDVDECLENNGGCQHTCVNVMGSYECCCKEGFFLSDNQHTCIHRSEEGLSCMNKDHGCSHICKEAPRGSVACECRPGFELAKNQRDCILTCNHGNGGCQHSCDDTADGPECSCHPQYKMHTDGRSCLEREDTVLEVTESNTTSVVDGDKRVKRRLLMETCAVNNGGCDRTCKDTSTGVHCSCPVGFTLQLDGKTCKDIDECQTRNGGCDHFCKNIVGSFDCGCKKGFKLLTDEKSCQDVDECSLDRTCDHSCINHPGTFACACNRGYTLYGFTHCGDTNECSINNGGCQQVCVNTVGSYECQCHPGYKLHWNKKDCVASCDLSCIVKRTEKRLRKAIRTLRKAVHREQFHLQLSGMNLDVAKKPPRTSERQAESCGVGQGHAENQCVTWVNHGPRISNGKFQK

SEQ ID NO: 904 - protein, 700 aa, Artificial Sequence
  Synthetic polypeptide
MGVAGRNRPGAAWAVLLLLLLLPPLLLLAGAVPPGRGRAAGPQEDVDECAQGLDDCHADALCQNTPTSYKCSCKPGYQGEGRQCEDIDECGNELNGGCVHDCLNIPGNYRCTCFDGFMLAHDGHNCLDVDECLENNGGCQHTCVNVMGSYECCCKEGFFLSDNQHTCIHRSEEGLSCMNKDHGCSHICKEAPRGSVACECRPGFELAKNQRDCILTCNHGNGGCQHSCDDTADGPECSCHPQYKMHTDGRSCLEREDTVLEVTESNTTSVVDGDKRVKRRLLMETCAVNNGGCDRTCKDTSTGVHCSCPVGFTLQLDGKTCKDIDECQTRNGGCDHFCKNIVGSFDCGCKKGFKLLTDEKSCQDVDECSLDRTCDHSCINHPGTFACACNRGYTLYGFTHCGDTNECSINNGGCQQVCVNTVGSYECQCHPGYKLHWNKKDCVEVKGLLPTSVSPRVSLHCGKSGGGDGCFLRCHSGIHLSSGLQGAYSVTCGSSSPLRNKQQKSNDSAFGDVTTIRTSVTFKLNEGKCSLKNAELFPEGLRPALPEKHSSVKESFRYVNLTCSSGKQVPGAPGRPSTPKEMFITVEFELETNQKEVTASCDLSCIVKRTEKRLRKAIRTLRKAVHREQFHLQLSGMNLDVAKKPPRTSERQAESCGVGQGHAENQCGPELPGVRLTSFISLSSAPGIVSGLWWALKCWL

SEQ ID NO: 905 - protein, 700 aa, Artificial Sequence; identical to SEQ ID NO: 904
  Synthetic polypeptide

SEQ ID NO: 906 - protein, 671 aa, Artificial Sequence
  Synthetic polypeptide
MGVAGRNRPGAAWAVLLLLLLLPPLLLLAGAVPPGRGRAAGPQEDVDECAQGLDDCHADALCQNTPTSYKCSCKPGYQGEGRQCEDIDECGNELNGGCVHDCLNIPGNYRCTCFDGFMLAHDGHNCLDVDECLENNGGCQHTCVNVMGSYECCCKEGFFLSDNQHTCIHRSEEGLSCMNKDHGCSHICKEAPRGSVACECRPGFELAKNQRDCILTCNHGNGGCQHSCDDTADGPECSCHPQYKMHTDGRSCLEREDTVLEVTESNTTSVVDGDKRVKRRLLMETCAVNNGGCDRTCKDTSTGVHCSCPVGFTLQLDGKTCKDIDECQTRNGGCDHFCKNIVGSFDCGCKKGFKLLTDEKSCQDVDECSLDRTCDHSCINHPGTFACACNRGYTLYGFTHCGDTNECSINNGGCQQVCVNTVGSYECQCHPGYKLHWNKKDCVEVKGLLPTSVSPRVSLHCGKSGGGDGCFLRCHSGIHLSSDVTTIRTSVTFKLNEGKCSLKNAELFPEGLRPALPEKHSSVKESFRYVNLTCSSGKQVPGAPGRPSTPKEMFITVEFELETNQKEVTASCDLSCIVKRTEKRLRKAIRTLRKAVHREQFHLQLSGMNLDVAKKPPRTSERQAESCGVGQGHAENQCGPELPGVRLTSFISLSSAPGIVSGLWWALKCWL

SEQ ID NO: 907 - protein, 545 aa, Artificial Sequence
  Synthetic polypeptide
MGVAGRNRPGAAWAVLLLLLLLPPLLLLAGAVPPGRGRAAGPQEDVDECAQGLDDCHADALCQNTPTSYKCSCKPGYQGEGRQCEDIDECGNELNGGCVHDCLNIPGNYRCTCFDGFMLAHDGHNCLDVDECLENNGGCQHTCVNVMGSYECCCKEGFFLSDNQHTCIHRSEEGLSCMNKDHGCSHICKEAPRGSVACECRPGFELAKNQRDCILTCNHGNGGCQHSCDDTADGPECSCHPQYKMHTDGRSCLEREDTVLEVTESNTTSVVDGDKRVKRRLLMETCAVNNGGCDRTCKDTSTGVHCSCPVGFTLQLDGKTCKDIDECQTRNGGCDHFCKNIVGSFDCGCKKGFKLLTDEKSCQDVDECSLDRTCDHSCINHPGTFACACNRGYTLYGFTHCGDTNECSINNGGCQQVCVNTVGSYECQCHPGYKLHWNKKDCVASCDLSCIVKRTEKRLRKAIRTLRKAVHREQFHLQLSGMNLDVAKKPPRTSERQAESCGVGQGHAENQCGPELPGVRLTSFISLSSAPGIVSGLWWALKCWL

SEQ ID NO: 908 - protein, 1104 aa, Artificial Sequence
  Synthetic polypeptide
MPEPTKKEDWTLVETPPGEEQAKQNANSQLSILFIEKPQGGTVKVGEDITFIAKVKAEDLLRKPTIKWFKGKWMDLASKAGKHLQLKETFERHSRVYTFEMQIIKAKDNFAGNYRCEVTYKDKFDSCSFDLEVHESTGTTPNIDIRSAFKRSGEGQEDAGELDFSGLLKRREVKQQEEEPQVDVWELLKNAKPSEYEKIAFQYGITDLRGMLKRLKRMRREEKKSAAFAKILDPAYQVDKGGRVRFVVELADPKLEVKWYKNGQEIRPSTKYIFEHKGCQRILFINNCQMTDDSEYYVTAGDEKCSTELFVREPPIMVTKQLEDTTAYCGERVELECEVSEDDANVKWFKNGEEIIPGPKSRYRIRVEGKKHILIIEGATKADAAEYSVMTTGGQSSAKLSVDLKPLKILTPLTDQTVNLGKEICLKCEISENIPGKWTKNGLPVQESDRLKVVHKGRIHKLVIANALTEDEGDYVFAPDAYNVTLPAKVHVIDPPKIILDGLDADNTVTVIAGNKLRLEIPISGEPPPKAMWSRGDKAIMEGSGRIRTESYPDSSTLVIDIAERDDSGVYHINLKNEAGEAHASIKVKVVDFPDPPVAPTVTEVGDDWCIMNWEPPAYDGGSPILGYFIERKKKQSSRWMRLNFDLCKETTFEPKKMIEGVAYEVRIFAVNAIGISKPSMPSRPFVPLAVTSPPTLLTVDSVTDTTVTMRWRPPDHIGAAGLDGYVLEYCFEGTEDWIVANKDLIDKTKFTITGLPTDAKIFVRVKAVNAAGASEPKYYSQPILVKEIIEPPKIRIPRHLKQTYIRRVGEAVNLVIPFQGKPRPELTWKKDGAEIDKNQINIRNSETDTIIFIRKAERSHSGKYDLQVKVDKFVETASIDIQIIDRPGPPQIVKIEDVWGENVALTWTPPKDDGNAAITGYTIQKADKKSMEWFTVIEHYHRTSATITELVIGNEYYFRVFSENMCGLSEDATMTKESAVIARDGKIYKNPVYEDFDFSEAPMFTQPLVNTYAIAGYNATLNCSVRGNPKPKITWMKNKVAIVDDPRYRMFSNQGVCTLEIRKPSPYDGGTYCCKAVNDLGTVEIECKLEVKDDWSFTSHSES

SEQ ID NO: 909 - protein, 1148 aa, Artificial Sequence
  Synthetic polypeptide
MPEPTKKEENEVPAPAPPPEEPSKEKEAGTTPAKDWTLVETPPGEEQAKQNANSQLSILFIEKPQGGTVKVGEDITFIAKVKAEDLLRKPTIKWFKGKWMDLASKAGKHLQLKETFERHSRVYTFEMQIIKAKDNFAGNYRCEVTYKDKFDSCSFDLEVHESTGTTPNIDIRSAFKRSGEGQEDAGELDFSGLLKRREVKQQEEEPQVDVWELLKNAKPSEYEKIAFQYGITDLRGMLKRLKRMRREEKKSAAFAKILDPAYQVDKGGRVRFVVELADPKLEVKWYKNGQEIRPSTKYIFEHKGCQRILFINNCQMTDDSEYYVTAGDEKCSTELFVREPPIMVTKQLEDTTAYCGERVELECEVSEDDANVKWFKNGEEIIPGPKSRYRIRVEGKKHILIIEGATKADAAEYSVMTTGGQSSAKLSVDLKPLKILTPLTDQTVNLGKEICLKCEISENIPGKWTKNGLPVQESDRLKVVHKGRIHKLVIANALTEDEGDYVFAPDAYNVTLPAKVHVIDPPKIILDGLDADNTVTVIAGNKLRLEIPISGEPPPKAMWSRGDKAIMEGSGRIRTESYPDSSTLVIDIAERDDSGVYHINLKNEAGEAHASIKVKVVDFPDPPVAPTVTEVGDDWCIMNWEPPAYDGGSPILGYFIERKKKQSSRWMRLNFDLCKETTFEPKKMIEGVAYEVRIFAVNAIGISKPSMPSRPFVPLAVTSPPTLLTVDSVTDTTVTMRWRPPDHIGAAGLDGYVLEYCFEGSTSAKQSDENGEAAYDLPAEDWIVANKDLIDKTKFTITGLPTDAKIFVRVKAVNAAGASEPKYYSQPILVKEIIEPPKIRIPRHLKQTYIRRVGEAVNLVIPFQGKPRPELTWKKDGAEIDKNQINIRNSETDTIIFIRKAERSHSGKYDLQVKVDKFVETASIDIQIIDRPGPPQIVKIEDVWGENVALTWTPPKDDGNAAITGYTIQKADKKSMEWFTVIEHYHRTSATITELVIGNEYYFRVFSENMCGLSEDATMTKESAVIARDGKIYKNPVYEDFDFSEAPMFTQPLVNTYAIAGYNATLNCSVRGNPKPKITWMKNKVAIVDDPRYRMFSNQGVCTLEIRKPSPYDGGTYCCKAVNDLGTVEIECKLEVKDDWSFTSHSES

SEQ ID NO: 910 - protein, 1148 aa, Artificial Sequence; identical to SEQ ID NO: 909
  Synthetic polypeptide

SEQ ID NO: 911 - protein, 1148 aa, Artificial Sequence; identical to SEQ ID NO: 909
  Synthetic polypeptide

SEQ ID NO: 912 - protein, 1148 aa, Artificial Sequence; identical to SEQ ID NO: 909
  Synthetic polypeptide

SEQ ID NO: 913 - protein, 1117 aa, Artificial Sequence
  Synthetic polypeptide
MPEPTKKEDEEEVSPPSALPPDWTLVETPPGEEQAKQNANSQLSILFIEKPQGGTVKVGEDITFIAKVKAEDLLRKPTIKWFKGKWMDLASKAGKHLQLKETFERHSRVYTFEMQIIKAKDNFAGNYRCEVTYKDKFDSCSFDLEVHESTGTTPNIDIRSAFKRSGEGQEDAGELDFSGLLKRREVKQQEEEPQVDVWELLKNAKPSEYEKIAFQYGITDLRGMLKRLKRMRREEKKSAAFAKILDPAYQVDKGGRVRFVVELADPKLEVKWYKNGQEIRPSTKYIFEHKGCQRILFINNCQMTDDSEYYVTAGDEKCSTELFVREPPIMVTKQLEDTTAYCGERVELECEVSEDDANVKWFKNGEEIIPGPKSRYRIRVEGKKHILIIEGATKADAAEYSVMTTGGQSSAKLSVDLKPLKILTPLTDQTVNLGKEICLKCEISENIPGKWTKNGLPVQESDRLKVVHKGRIHKLVIANALTEDEGDYVFAPDAYNVTLPAKVHVIDPPKIILDGLDADNTVTVIAGNKLRLEIPISGEPPPKAMWSRGDKAIMEGSGRIRTESYPDSSTLVIDIAERDDSGVYHINLKNEAGEAHASIKVKVVDFPDPPVAPTVTEVGDDWCIMNWEPPAYDGGSPILGYFIERKKKQSSRWMRLNFDLCKETTFEPKKMIEGVAYEVRIFAVNAIGISKPSMPSRPFVPLAVTSPPTLLTVDSVTDTTVTMRWRPPDHIGAAGLDGYVLEYCFEGTEDWIVANKDLIDKTKFTITGLPTDAKIFVRVKAVNAAGASEPKYYSQPILVKEIIEPPKIRIPRHLKQTYIRRVGEAVNLVIPFQGKPRPELTWKKDGAEIDKNQINIRNSETDTIIFIRKAERSHSGKYDLQVKVDKFVETASIDIQIIDRPGPPQIVKIEDVWGENVALTWTPPKDDGNAAITGYTIQKADKKSMEWFTVIEHYHRTSATITELVIGNEYYFRVFSENMCGLSEDATMTKESAVIARDGKIYKNPVYEDFDFSEAPMFTQPLVNTYAIAGYNATLNCSVRGNPKPKITWMKNKVAIVDDPRYRMFSNQGVCTLEIRKPSPYDGGTYCCKAVNDLGTVEIECKLEVKDDWSFTSHSES

SEQ ID NO: 914 - protein, 1116 aa, Artificial Sequence
  Synthetic polypeptide
MPEPTKKEENEVPAPAPPPEDWTLVETPPGEEQAKQNANSQLSILFIEKPQGGTVKVGEDITFIAKVKAEDLLRKPTIKWFKGKWMDLASKAGKHLQLKETFERHSRVYTFEMQIIKAKDNFAGNYRCEVTYKDKFDSCSFDLEVHESTGTTPNIDIRSAFKRSGEGQEDAGELDFSGLLKRREVKQQEEEPQVDVWELLKNAKPSEYEKIAFQYGITDLRGMLKRLKRMRREEKKSAAFAKILDPAYQVDKGGRVRFVVELADPKLEVKWYKNGQEIRPSTKYIFEHKGCQRILFINNCQMTDDSEYYVTAGDEKCSTELFVREPPIMVTKQLEDTTAYCGERVELECEVSEDDANVKWFKNGEEIIPGPKSRYRIRVEGKKHILIIEGATKADAAEYSVMTTGGQSSAKLSVDLKPLKILTPLTDQTVNLGKEICLKCEISENIPGKWTKNGLPVQESDRLKVVHKGRIHKLVIANALTEDEGDYVFAPDAYNVTLPAKVHVIDPPKIILDGLDADNTVTVIAGNKLRLEIPISGEPPPKAMWSRGDKAIMEGSGRIRTESYPDSSTLVIDIAERDDSGVYHINLKNEAGEAHASIKVKVVDFPDPPVAPTVTEVGDDWCIMNWEPPAYDGGSPILGYFIERKKKQSSRWMRLNFDLCKETTFEPKKMIEGVAYEVRIFAVNAIGISKPSMPSRPFVPLAVTSPPTLLTVDSVTDTTVTMRWRPPDHIGAAGLDGYVLEYCFEGTEDWIVANKDLIDKTKFTITGLPTDAKIFVRVKAVNAAGASEPKYYSQPILVKEIIEPPKIRIPRHLKQTYIRRVGEAVNLVIPFQGKPRPELTWKKDGAEIDKNQINIRNSETDTIIFIRKAERSHSGKYDLQVKVDKFVETASIDIQIIDRPGPPQIVKIEDVWGENVALTWTPPKDDGNAAITGYTIQKADKKSMEWFTVIEHYHRTSATITELVIGNEYYFRVFSENMCGLSEDATMTKESAVIARDGKIYKNPVYEDFDFSEAPMFTQPLVNTYAIAGYNATLNCSVRGNPKPKITWMKNKVAIVDDPRYRMFSNQGVCTLEIRKPSPYDGGTYCCKAVNDLGTVEIECKLEVKDDWSFTSHSES

SEQ ID NO: 915 - protein, 1155 aa, Artificial Sequence
  Synthetic polypeptide
MPEPTKKEENEVPAPAPPPEEPSKEKEAGTTPAKDEEEVSPPSALPPGLGSRALERKDSDWTLVETPPGEEQAKQNANSQLSILFIEKPQGGTVKVGEDITFIAKVKAEDLLRKPTIKWFKGKWMDLASKAGKHLQLKETFERHSRVYTFEMQIIKAKDNFAGNYRCEVTYKDKFDSCSFDLEVHESTGTTPNIDIRSAFKRSGEGQEDAGELDFSGLLKRREVKQQEEEPQVDVWELLKNAKPSEYEKIAFQYGITDLRGMLKRLKRMRREEKKSAAFAKILDPAYQVDKGGRVRFVVELADPKLEVKWYKNGQEIRPSTKYIFEHKGCQRILFINNCQMTDDSEYYVTAGDEKCSTELFVREPPIMVTKQLEDTTAYCGERVELECEVSEDDANVKWFKNGEEIIPGPKSRYRIRVEGKKHILIIEGATKADAAEYSVMTTGGQSSAKLSVDLKPLKILTPLTDQTVNLGKEICLKCEISENIPGKWTKNGLPVQESDRLKVVHKGRIHKLVIANALTEDEGDYVFAPDAYNVTLPAKVHVIDPPKIILDGLDADNTVTVIAGNKLRLEIPISGEPPPKAMWSRGDKAIMEGSGRIRTESYPDSSTLVIDIAERDDSGVYHINLKNEAGEAHASIKVKVVDFPDPPVAPTVTEVGDDWCIMNWEPPAYDGGSPILGYFIERKKKQSSRWMRLNFDLCKETTFEPKKMIEGVAYEVRIFAVNAIGISKPSMPSRPFVPLAVTSPPTLLTVDSVTDTTVTMRWRPPDHIGAAGLDGYVLEYCFEGTEDWIVANKDLIDKTKFTITGLPTDAKIFVRVKAVNAAGASEPKYYSQPILVKEIIEPPKIRIPRHLKQTYIRRVGEAVNLVIPFQGKPRPELTWKKDGAEIDKNQINIRNSETDTIIFIRKAERSHSGKYDLQVKVDKFVETASIDIQIIDRPGPPQIVKIEDVWGENVALTWTPPKDDGNAAITGYTIQKADKKSMEWFTVIEHYHRTSATITELVIGNEYYFRVFSENMCGLSEDATMTKESAVIARDGKIYKNPVYEDFDFSEAPMFTQPLVNTYAIAGYNATLNCSVRGNPKPKITWMKNKVAIVDDPRYRMFSNQGVCTLEIRKPSPYDGGTYCCKAVNDLGTVEIECKLEVKDDWSFTSHSES

SEQ ID NO: 916 - protein, 1155 aa, Artificial Sequence; identical to SEQ ID NO: 915
  Synthetic polypeptide

SEQ ID NO: 917 - protein, 1161 aa, Artificial Sequence
  Synthetic polypeptide
MPEPTKKEENEVPAPAPPPEEPSKEKEAGTTPAKDEEEVSPPSALPPDWTLVETPPGEEQAKQNANSQLSILFIEKPQGGTVKVGEDITFIAKVKAEDLLRKPTIKWFKGKWMDLASKAGKHLQLKETFERHSRVYTFEMQIIKAKDNFAGNYRCEVTYKDKFDSCSFDLEVHESTGTTPNIDIRSAFKRSGEGQEDAGELDFSGLLKRREVKQQEEEPQVDVWELLKNAKPSEYEKIAFQYGITDLRGMLKRLKRMRREEKKSAAFAKILDPAYQVDKGGRVRFVVELADPKLEVKWYKNGQEIRPSTKYIFEHKGCQRILFINNCQMTDDSEYYVTAGDEKCSTELFVREPPIMVTKQLEDTTAYCGERVELECEVSEDDANVKWFKNGEEIIPGPKSRYRIRVEGKKHILIIEGATKADAAEYSVMTTGGQSSAKLSVDLKPLKILTPLTDQTVNLGKEICLKCEISENIPGKWTKNGLPVQESDRLKVVHKGRIHKLVIANALTEDEGDYVFAPDAYNVTLPAKVHVIDPPKIILDGLDADNTVTVIAGNKLRLEIPISGEPPPKAMWSRGDKAIMEGSGRIRTESYPDSSTLVIDIAERDDSGVYHINLKNEAGEAHASIKVKVVDFPDPPVAPTVTEVGDDWCIMNWEPPAYDGGSPILGYFIERKKKQSSRWMRLNFDLCKETTFEPKKMIEGVAYEVRIFAVNAIGISKPSMPSRPFVPLAVTSPPTLLTVDSVTDTTVTMRWRPPDHIGAAGLDGYVLEYCFEGSTSAKQSDENGEAAYDLPAEDWIVANKDLIDKTKFTITGLPTDAKIFVRVKAVNAAGASEPKYYSQPILVKEIIEPPKIRIPRHLKQTYIRRVGEAVNLVIPFQGKPRPELTWKKDGAEIDKNQINIRNSETDTIIFIRKAERSHSGKYDLQVKVDKFVETASIDIQIIDRPGPPQIVKIEDVWGENVALTWTPPKDDGNAAITGYTIQKADKKSMEWFTVIEHYHRTSATITELVIGNEYYFRVFSENMCGLSEDATMTKESAVIARDGKIYKNPVYEDFDFSEAPMFTQPLVNTYAIAGYNATLNCSVRGNPKPKITWMKNKVAIVDDPRYRMFSNQGVCTLEIRKPSPYDGGTYCCKAVNDLGTVEIECKLEVKDDWSFTSHSES

SEQ ID NO: 918 - protein, 1130 aa, Artificial Sequence
  Synthetic polypeptide
MPEPTKKEENEVPAPAPPPEEPSKEKEAGTTPAKDWTLVETPPGEEQAKQNANSQLSILFIEKPQGGTVKVGEDITFIAKVKAEDLLRKPTIKWFKGKWMDLASKAGKHLQLKETFERHSRVYTFEMQIIKAKDNFAGNYRCEVTYKDKFDSCSFDLEVHESTGTTPNIDIRSAFKRSGEGQEDAGELDFSGLLKRREVKQQEEEPQVDVWELLKNAKPSEYEKIAFQYGITDLRGMLKRLKRMRREEKKSAAFAKILDPAYQVDKGGRVRFVVELADPKLEVKWYKNGQEIRPSTKYIFEHKGCQRILFINNCQMTDDSEYYVTAGDEKCSTELFVREPPIMVTKQLEDTTAYCGERVELECEVSEDDANVKWFKNGEEIIPGPKSRYRIRVEGKKHILIIEGATKADAAEYSVMTTGGQSSAKLSVDLKPLKILTPLTDQTVNLGKEICLKCEISENIPGKWTKNGLPVQESDRLKVVHKGRIHKLVIANALTEDEGDYVFAPDAYNVTLPAKVHVIDPPKIILDGLDADNTVTVIAGNKLRLEIPISGEPPPKAMWSRGDKAIMEGSGRIRTESYPDSSTLVIDIAERDDSGVYHINLKNEAGEAHASIKVKVVDFPDPPVAPTVTEVGDDWCIMNWEPPAYDGGSPILGYFIERKKKQSSRWMRLNFDLCKETTFEPKKMIEGVAYEVRIFAVNAIGISKPSMPSRPFVPLAVTSPPTLLTVDSVTDTTVTMRWRPPDHIGAAGLDGYVLEYCFEGTEDWIVANKDLIDKTKFTITGLPTDAKIFVRVKAVNAAGASEPKYYSQPILVKEIIEPPKIRIPRHLKQTYIRRVGEAVNLVIPFQGKPRPELTWKKDGAEIDKNQINIRNSETDTIIFIRKAERSHSGKYDLQVKVDKFVETASIDIQIIDRPGPPQIVKIEDVWGENVALTWTPPKDDGNAAITGYTIQKADKKSMEWFTVIEHYHRTSATITELVIGNEYYFRVFSENMCGLSEDATMTKESAVIARDGKIYKNPVYEDFDFSEAPMFTQPLVNTYAIAGYNATLNCSVRGNPKPKITWMKNKVAIVDDPRYRMFSNQGVCTLEIRKPSPYDGGTYCCKAVNDLGTVEIECKLEVKDDWSFTSHSES

SEQ ID NO: 919 - protein, 1130 aa, Artificial Sequence; identical to SEQ ID NO: 918
  Synthetic polypeptide

SEQ ID NO: 920 - protein, 1111 aa, Artificial Sequence
  Synthetic polypeptide
MPEPTKKEENEVPAPAPPPEEPSKEKEAGTTPAKDWTLVETPPGEEQAKQNANSQLSILFIEKPQGGTVKVGEDITFIAKVKAEDLLRKPTIKWFKGKWMDLASKAGKHLQLKETFERHSRVYTFEMQIIKAKDNFAGNYRCEVTYKDKFDSCSFDLEVHESTGTTPNIDIRSAFKRREVKQQEEEPQVDVWELLKNAKPSEYEKIAFQYGITDLRGMLKRLKRMRREEKKSAAFAKILDPAYQVDKGGRVRFVVELADPKLEVKWYKNGQEIRPSTKYIFEHKGCQRILFINNCQMTDDSEYYVTAGDEKCSTELFVREPPIMVTKQLEDTTAYCGERVELECEVSEDDANVKWFKNGEEIIPGPKSRYRIRVEGKKHILIIEGATKADAAEYSVMTTGGQSSAKLSVDLKPLKILTPLTDQTVNLGKEICLKCEISENIPGKWTKNGLPVQESDRLKVVHKGRIHKLVIANALTEDEGDYVFAPDAYNVTLPAKVHVIDPPKIILDGLDADNTVTVIAGNKLRLEIPISGEPPPKAMWSRGDKAIMEGSGRIRTESYPDSSTLVIDIAERDDSGVYHINLKNEAGEAHASIKVKVVDFPDPPVAPTVTEVGDDWCIMNWEPPAYDGGSPILGYFIERKKKQSSRWMRLNFDLCKETTFEPKKMIEGVAYEVRIFAVNAIGISKPSMPSRPFVPLAVTSPPTLLTVDSVTDTTVTMRWRPPDHIGAAGLDGYVLEYCFEGTEDWIVANKDLIDKTKFTITGLPTDAKIFVRVKAVNAAGASEPKYYSQPILVKEIIEPPKIRIPRHLKQTYIRRVGEAVNLVIPFQGKPRPELTWKKDGAEIDKNQINIRNSETDTIIFIRKAERSHSGKYDLQVKVDKFVETASIDIQIIDRPGPPQIVKIEDVWGENVALTWTPPKDDGNAAITGYTIQKADKKSMEWFTVIEHYHRTSATITELVIGNEYYFRVFSENMCGLSEDATMTKESAVIARDGKIYKNPVYEDFDFSEAPMFTQPLVNTYAIAGYNATLNCSVRGNPKPKITWMKNKVAIVDDPRYRMFSNQGVCTLEIRKPSPYDGGTYCCKAVNDLGTVEIECKLEVKDDWSFTSHSES

SEQ ID NO: 921 - protein, 1118 aa, Artificial Sequence
  Synthetic polypeptide
MPEPTKKEEPSKEKEAGTTPAKDWTLVETPPGEEQAKQNANSQLSILFIEKPQGGTVKVGEDITFIAKVKAEDLLRKPTIKWFKGKWMDLASKAGKHLQLKETFERHSRVYTFEMQIIKAKDNFAGNYRCEVTYKDKFDSCSFDLEVHESTGTTPNIDIRSAFKRSGEGQEDAGELDFSGLLKRREVKQQEEEPQVDVWELLKNAKPSEYEKIAFQYGITDLRGMLKRLKRMRREEKKSAAFAKILDPAYQVDKGGRVRFVVELADPKLEVKWYKNGQEIRPSTKYIFEHKGCQRILFINNCQMTDDSEYYVTAGDEKCSTELFVREPPIMVTKQLEDTTAYCGERVELECEVSEDDANVKWFKNGEEIIPGPKSRYRIRVEGKKHILIIEGATKADAAEYSVMTTGGQSSAKLSVDLKPLKILTPLTDQTVNLGKEICLKCEISENIPGKWTKNGLPVQESDRLKVVHKGRIHKLVIANALTEDEGDYVFAPDAYNVTLPAKVHVIDPPKIILDGLDADNTVTVIAGNKLRLEIPISGEPPPKAMWSRGDKAIMEGSGRIRTESYPDSSTLVIDIAERDDSGVYHINLKNEAGEAHASIKVKVVDFPDPPVAPTVTEVGDDWCIMNWEPPAYDGGSPILGYFIERKKKQSSRWMRLNFDLCKETTFEPKKMIEGVAYEVRIFAVNAIGISKPSMPSRPFVPLAVTSPPTLLTVDSVTDTTVTMRWRPPDHIGAAGLDGYVLEYCFEGTEDWIVANKDLIDKTKFTITGLPTDAKIFVRVKAVNAAGASEPKYYSQPILVKEIIEPPKIRIPRHLKQTYIRRVGEAVNLVIPFQGKPRPELTWKKDGAEIDKNQINIRNSETDTIIFIRKAERSHSGKYDLQVKVDKFVETASIDIQIIDRPGPPQIVKIEDVWGENVALTWTPPKDDGNAAITGYTIQKADKKSMEWFTVIEHYHRTSATITELVIGNEYYFRVFSENMCGLSEDATMTKESAVIARDGKIYKNPVYEDFDFSEAPMFTQPLVNTYAIAGYNATLNCSVRGNPKPKITWMKNKVAIVDDPRYRMFSNQGVCTLEIRKPSPYDGGTYCCKAVNDLGTVEIECKLEVKDDWSFTSHSES

SEQ ID NO: 922 - protein, 1031 aa, Artificial Sequence
  Synthetic polypeptide
MDLASKAGKHLQLKETFERHSRVYTFEMQIIKAKDNFAGNYRCEVTYKDKFDSCSFDLEVHESTGTTPNIDIRSAFKRSGEGQEDAGELDFSGLLKRREVKQQEEEPQVDVWELLKNAKPSEYEKIAFQYGITDLRGMLKRLKRMRREEKKSAAFAKILDPAYQVDKGGRVRFVVELADPKLEVKWYKNGQEIRPSTKYIFEHKGCQRILFINNCQMTDDSEYYVTAGDEKCSTELFVREPPIMVTKQLEDTTAYCGERVELECEVSEDDANVKWFKNGEEIIPGPKSRYRIRVEGKKHILIIEGATKADAAEYSVMTTGGQSSAKLSVDLKPLKILTPLTDQTVNLGKEICLKCEISENIPGKWTKNGLPVQESDRLKVVHKGRIHKLVIANALTEDEGDYVFAPDAYNVTLPAKVHVIDPPKIILDGLDADNTVTVIAGNKLRLEIPISGEPPPKAMWSRGDKAIMEGSGRIRTESYPDSSTLVIDIAERDDSGVYHINLKNEAGEAHASIKVKVVDFPDPPVAPTVTEVGDDWCIMNWEPPAYDGGSPILGYFIERKKKQSSRWMRLNFDLCKETTFEPKKMIEGVAYEVRIFAVNAIGISKPSMPSRPFVPLAVTSPPTLLTVDSVTDTTVTMRWRPPDHIGAAGLDGYVLEYCFEGTEDWIVANKDLIDKTKFTITGLPTDAKIFVRVKAVNAAGASEPKYYSQPILVKEIIEPPKIRIPRHLKQTYIRRVGEAVNLVIPFQGKPRPELTWKKDGAEIDKNQINIRNSETDTIIFIRKAERSHSGKYDLQVKVDKFVETASIDIQIIDRPGPPQIVKIEDVWGENVALTWTPPKDDGNAAITGYTIQKADKKSMEWFTVIEHYHRTSATITELVIGNEYYFRVFSENMCGLSEDATMTKESAVIARDGKIYKNPVYEDFDFSEAPMFTQPLVNTYAIAGYNATLNCSVRGNPKPKITWMKNKVAIVDDPRYRMFSNQGVCTLEIRKPSPYDGGTYCCKAVNDLGTVEIECKLEVKDDWSFTSHSES

SEQ ID NO: 923 - protein, 91 aa, Artificial Sequence
  Synthetic polypeptide
MDVTDHYEDVRKIYDDFLKNSNMLDLIDVYQKCRALTSNCENYNTVSPSQLLDFLSGKQYAVGDETDLSIPTSPTSKYNRDNEKALPVLKR

SEQ ID NO: 924 - protein, 91 aa, Artificial Sequence; identical to SEQ ID NO: 923
  Synthetic polypeptide

SEQ ID NO: 925 - protein, 172 aa, Artificial Sequence
  Synthetic polypeptide
MAVFNQKSVSDMIKEFRKNWRALCNSERTTLCGADSMLLALQLSMAENNKQHSGEFTVSLSDVLLTWKYLLHEKLNLPVENMDVTDHYEDVRKIYDDFLKNSNMLDLIDVYQKCRALTSNCENYNTVSPSQLLDFLSGKQYAVGDETDLSIPTSPTSKYNRDNEKALPVLKR

SEQ ID NO: 926 - protein, 172 aa, Artificial Sequence; identical to SEQ ID NO: 925
  Synthetic polypeptide

SEQ ID NO: 927 - protein, 249 aa, Artificial Sequence
  Synthetic polypeptide
MAVFNQKSVSDMIKEFRKNWRALCNSERTTLCGADSMLLALQLSMAENNKQHSGEFTVSLSDVLLTWKYLLHEKLNLPVENMDVTDHYEDVRKIYDDFLKNSNMLDLIDVYQKCRALTSNCENYNTVSPGSTIQPPSERGSLLLSRPDLLAPGEDPPVSASLTLERQKGESLLAWSWSLNFRLPGIPITVQKKRRDLKKLAAVMRQSQLLDFLSGKQYAVGDETDLSIPTSPTSKYNRDNEKALPVLKR

SEQ ID NO: 928 - protein, 139 aa, Artificial Sequence
  Synthetic polypeptide
ADSMLLALQLSMAENNKQHSGEFTVSLSDVLLTWKYLLHEKLNLPVENMDVTDHYEDVRKIYDDFLKNSNMLDLIDVYQKCRALTSNCENYNTVSPSQLLDFLSGKQYAVGDETDLSIPTSPTSKYNRDNEKALPVLKR

SEQ ID NO: 929 - protein, 139 aa, Artificial Sequence; identical to SEQ ID NO: 928
  Synthetic polypeptide

SEQ ID NO: 930 - protein, 61 aa, Artificial Sequence
  Synthetic polypeptide
ADSMLLALQLSMAENNKQSQLLDFLSGKQYAVGDETDLSIPTSPTSKYNRDNEKALPVLKR

SEQ ID NO: 931 - protein, 405 aa, Artificial Sequence
  Synthetic polypeptide
MSTAVLENPGLGRKLSDFGQETSYIEDNCNQNGAISLIFSLKEEVGALAKVLRLFEENDVNLTHIESRPSRLKKDEYEFFTHLDKRSLPALTNIIKILRHDIGATVHELSRDKKKDTVPWFPRTIQELDRFANQILSYGAELDADHPGFKDPVYRARRKQFADIAYNYRHGQPIPRVEYMEEEKKTWGTVFKTLKSLYKTHACYEYNHIFPLLEKYCGFHEDNIPQLEDVSQFLQTCTGFRLRPVAGLLSSRDFLGGLAFRVFHCTQYIRHGSKPMYTPEPDICHELLGHVPLFSDRSFAQFSQEIGLASLGAPDEYIEKLATIYWFTVEFGLCKQGDSIKAYGAGLLSSFGELQYCLSEKPKLLPLELEKTAIQNYTVTEFQPLYYVAESFNDAKEKVSPWNNT

SEQ ID NO: 932 - protein, 400 aa, Artificial Sequence
  Synthetic polypeptide
MSALTPTLVFCHMHVETSYIEDNCNQNGAISLIFSLKEEVGALAKVLRLFEENDVNLTHIESRPSRLKKDEYEFFTHLDKRSLPALTNIIKILRHDIGATVHELSRDKKKDTVPWFPRTIQELDRFANQILSYGAELDADHPGFKDPVYRARRKQFADIAYNYRHGQPIPRVEYMEEEKKTWGTVFKTLKSLYKTHACYEYNHIFPLLEKYCGFHEDNIPQLEDVSQFLQTCTGFRLRPVAGLLSSRDFLGGLAFRVFHCTQYIRHGSKPMYTPEPDICHELLGHVPLFSDRSFAQFSQEIGLASLGAPDEYIEKLATIYWFTVEFGLCKQGDSIKAYGAGLLSSFGELQYCLSEKPKLLPLELEKTAIQNYTVTEFQPLYYVAESFNDAKEKVSPWNNT

SEQ ID NO: 933 - protein, 101 aa, Artificial Sequence
  Synthetic polypeptide
MFQNLQGTFEKEIGKIIPFTIAFKRAEAVEPDGCVQSWRCCLPCDLGQASRFIHTTVCSAIRWRSCKGERNFAERHILPAELEEQSNHAGMGPILPAMPRN

SEQ ID NO: 934 - protein, 103 aa, Artificial Sequence
  Synthetic polypeptide
MFQNLQGTFEKEIGKIIPFTIAFKRAEAVEPDGCVQSWRCCLPCDLGQASRFIHTTVCSAIRWRSCKGERNFAERHILPAELEEQSNHAGMGPILPAMPRPCT

SEQ ID NO: 935 - protein, 6 aa, Artificial Sequence
  Synthetic polypeptide
MLAFKR

SEQ ID NO: 936 - protein, 6 aa, Artificial Sequence
  Synthetic polypeptide
MLARNI

SEQ ID NO: 937 - protein, 8 aa, Artificial Sequence
  Synthetic polypeptide
MEAFPDCL

SEQ ID NO: 938 - protein, 904 aa, Artificial Sequence
  Synthetic polypeptide
MDLYSTPAAALDRFVARRLQPRKEFVEKARRALGALAAALRERGGRLGAAAPRVLKTVKGGSSGRGTALKGGCDSELVIFLDCFKSYVDQRARRAEILSEMRASLESWWQNPVPGLRLTFPEQSVPGALQFRLTSVDLEDWMDVSLVPAFNVLGQAGSGVKPKPQVYSTLLNSGCQGGEHAACFTELRRNFVNIRPAKLKNLILLVKHWYHQVCLQGLWKETLPPVYALELLTIFAWEQGCKKDAFSLAEGLRTVLGLIQQHQHLCVFWTVNYGFEDPAVGQFLQRQLKRPRPVILDPADPTWDLGNGAAWHWDLLAQEAASCYDHPCFLRGMGDPVQSWKGPGLPRAGCSGLGHPIQLDPNQKTPENSKSLNAVYPRAGSKPPSCPAPGPTGAASIVPSVPGMALDLSQIPTKELDRFIQDHLKPSPQFQEQVKKAIDIILRCLHENCVHKASRVSKGGSFGRGTDLRDGCDVELIIFLNCFTDYKDQGPRRAEILDEMRAQLESWWQDQVPSLSLQFPEQNVPEALQFQLVSTALKSWTDVSLLPAFDAVGQLSSGTKPNPQVYSRLLTSGCQEGEHKACFAELRRNFMNIRPVKLKNLILLVKHWYRQVAAQNKGKGPAPASLPPAYALELLTIFAWEQGCRQDCFNMAQGFRTVLGLVQQHQQLCVYWTVNYSTEDPAMRMHLLGQLRKPRPLVLDPADPTWNVGHGSWELLAQEAAALGMQACFLSRDGTSVQPWDVMPALLYQTPAGDLDKFISEFLQPNRQFLAQVNKAVDTICSFLKENCFRNSPIKVIKVVKGGSSAKGTALRGRSDADLVVFLSCFSQFTEQGNKRAEIISEIRAQLEACQQERQFEVKFEVSKWENPRVLSFSLTSQTMLDQSVDFDVLPAFDALGTLWANSG

SEQ ID NO: 939 - protein, 6 aa, Artificial Sequence
  Synthetic polypeptide
IPSVHF

SEQ ID NO: 940 - protein, 398 aa, Artificial Sequence
  Synthetic polypeptide
MGNGESQLSSVPAQKLGWFIQEYLKPYEECQTLIDEMVNTICDVLQEPEQFPLVQGVAIGGSYGRKTVLRGNSDGTLVLFFSDLKQFQDQKRSQRDILDKTGDKLKFCLFTKWLKNNFEIQKSLDGFTIQVFTKNQRISFEVLAAFNALSLNDNPSPWIYRELKRSLDKTNASPGEFAVCFTELQQKFFDNRPGKLKDLILLIKHWHQQCQKKIKDLPSLSPYALELLTVYAWEQGCRKDNFDIAEGVRTVLELIKCQEKLCIYWMVNYNFEDETIRNILLHQLQSARPVILDPVDPTNNVSGDKICWQWLKKEAQTWLTSPNLDNELPAPSWNVLPAPLFTTPGHLLDKFIKEFLQPNKCFLEQIDSAVNIIRTFLKENCFRQSTAKIQIVRKVYQP

SEQ ID NO: 941 - protein, 398 aa, Artificial Sequence; identical to SEQ ID NO: 940
  Synthetic polypeptide

SEQ ID NO: 942 - protein, 8 aa, Artificial Sequence
  Synthetic polypeptide
MLRCDLHM

SEQ ID NO: 943 - protein, 40 aa, Artificial Sequence
  Synthetic polypeptide
MGAAHSASEEVRELEGKTGFAATQEAKVGGSLEPRRWRLQ

SEQ ID NO: 944 - protein, 40 aa, Artificial Sequence; identical to SEQ ID NO: 943
  Synthetic polypeptide

SEQ ID NO: 945 - protein, 40 aa, Artificial Sequence; identical to SEQ ID NO: 943
  Synthetic polypeptide

SEQ ID NO: 946 - protein, 40 aa, Artificial Sequence; identical to SEQ ID NO: 943
  Synthetic polypeptide

SEQ ID NO: 947 - protein, 93 aa, Artificial Sequence
  Synthetic polypeptide
MRPRSGPTRNPRLRAFAGVPTRGRTRGQSRRCAAEASAGPERDARPGAPAAGTMGAAHSASEEVRELEGKTGFAATQEAKVGGSLEPRRWRLQ

SEQ ID NO: 948 - protein, 75 aa, Artificial Sequence
  Synthetic polypeptide
MAAPGSCALWSYCGRGWSRAMRGCQLLGLRSSWPGDLLSARLLSQEKRAAETHFGFETVSEEEKGGKARCDGSHL

SEQ ID NO: 949 - protein, 75 aa, Artificial Sequence; identical to SEQ ID NO: 948
  Synthetic polypeptide

SEQ ID NO: 950 - protein, 75 aa, Artificial Sequence; identical to SEQ ID NO: 948
  Synthetic polypeptide

SEQ ID NO: 951 - protein, 6 aa, Artificial Sequence
  Synthetic polypeptide
GFFAKE

SEQ ID NO: 952 - protein, 168 aa, Artificial Sequence
  Synthetic polypeptide
MAEGELKDMEQFFDDLSDSFSGTEPEVHKTSVVGLFLRHMILAYSKLSFSQVFKLYTALQQYFQNGEKKTVEDADMELTSRDEGERKMEKEELDVSVREEEVSCSGPLSQKQAEFFLSQQASLLKNDETKALTPASLQKELNNLLKFNPDFAEAQDSVSKTTLKPKNK

SEQ ID NO: 953 - protein, 168 aa, Artificial Sequence; identical to SEQ ID NO: 952
  Synthetic polypeptide

SEQ ID NO: 954 - protein, 168 aa, Artificial Sequence; identical to SEQ ID NO: 952
  Synthetic polypeptide

SEQ ID NO: 955 - protein, 267 aa, Artificial Sequence
  Synthetic polypeptide
MASVHESLYFNPMMTNGVVHANVFGIKDWVTPYKIAVLVLLNEMSRTGEGAVSLMERRRLNQLLLPLLQGPDITLSKLYKLIEESCPQLANSVQIRIKLMAEGELKDMEQFFDDLSDSFSGTEPEVHKTSVVGLFLRHMILAYSKLSFSQVFKLYTALQQYFQNGEKKTVEDADMELTSRDEGERKMEKEELDVSVREEEVSCSGPLSQKQAEFFLSQQASLLKNDETKALTPASLQKELNNLLKFNPDFAEAQDSVSKTTLKPKNK

SEQ ID NO: 956 - protein, 267 aa, Artificial Sequence; identical to SEQ ID NO: 955
  Synthetic polypeptide

SEQ ID NO: 957 - protein, 146 aa, Artificial Sequence
  Synthetic polypeptide
MLSPCLSSYFVGLFLRHMILAYSKLSFSQVFKLYTALQQYFQNGEKKTVEDADMELTSRDEGERKMEKEELDVSVREEEVSCSGPLSQKQAEFFLSQQASLLKNDETKALTPASLQKELNNLLKFNPDFAEAQDSVSKTTLKPKNK

SEQ ID NO: 958 - protein, 317 aa, Artificial Sequence
  Synthetic polypeptide
MTTYSDKGAKPERGRFLHFHSVTFWVGNAKQATSFYCSKMGFEPLAYRGLETGSREVVSHVIKQGKIVFVLSSALNPWNKEMGDHLVKHGDGVKDIAFEVEDCDYIVQKARERGAKIMREPWVEQDKFGKVKFAVLQTYGDTTHTLVEKMNYIGQFLPGYEAPAFMDPLLPKLPKCSLEMIDHIVGNQPDQEMVSASEWYLKNLQFHRFWSVDDTQVHTEYSSLRSIVVANYEESIKMPINEPAPGKKKSQIQEYVDYNGGAGVQHIALKTEDIITAEAEAGESLEPGGRGCSELRSCHCTPAWATETPSQKKRKKE

SEQ ID NO: 959 - protein, 278 aa, Artificial Sequence
  Synthetic polypeptide
MGFEPLAYRGLETGSREVVSHVIKQGKIVFVLSSALNPWNKEMGDHLVKHGDGVKDIAFEVEDCDYIVQKARERGAKIMREPWVEQDKFGKVKFAVLQTYGDTTHTLVEKMNYIGQFLPGYEAPAFMDPLLPKLPKCSLEMIDHIVGNQPDQEMVSASEWYLKNLQFHRFWSVDDTQVHTEYSSLRSIVVANYEESIKMPINEPAPGKKKSQIQEYVDYNGGAGVQHIALKTEDIITAEAEAGESLEPGGRGCSELRSCHCTPAWATETPSQKKRKKE

SEQ ID NO: 960 - protein, 297 aa, Artificial Sequence
  Synthetic polypeptide
MTTYSDKGAKPERGRFLHFHSVTFWVGNAKQATSFYCSKMGFEPLAYRGLETGSREVVSHVIKQGKIVFVLSSALNPWNKEMGDHLVKHGDGVKDIAFEVEDCDYIVQKARERGAKIMREPWVEQDKFGKVKFAVLQTYGDTTHTLVEKMNYIGQFLPGYEAPAFMDPLLPKLPKCSLEMIDHIVGNQPDQEMVSASEWYLKNLQFHRFWSVDDTQVHTEYSSLRSIVVANYEESIKMPINEPAPGKKKSQIQEYVDYNGGAGVQHIALKTEDIITALLRRLKQENRLNREAEVAVS

SEQ ID NO: 961 - protein, 258 aa, Artificial Sequence
  Synthetic polypeptide
MGFEPLAYRGLETGSREVVSHVIKQGKIVFVLSSALNPWNKEMGDHLVKHGDGVKDIAFEVEDCDYIVQKARERGAKIMREPWVEQDKFGKVKFAVLQTYGDTTHTLVEKMNYIGQFLPGYEAPAFMDPLLPKLPKCSLEMIDHIVGNQPDQEMVSASEWYLKNLQFHRFWSVDDTQVHTEYSSLRSIVVANYEESIKMPINEPAPGKKKSQIQEYVDYNGGAGVQHIALKTEDIITALLRRLKQENRLNREAEVAVS

SEQ ID NO: 962 - protein, 179 aa, Artificial Sequence
  Synthetic polypeptide
MTTYSDKGAKPERGRFLHFHSVTFWVGNAKQATSFYCSKMGFEPLAYRGLETGSREVVSHVIKQGKIVFVLSSALNPWNKEMGDHLVKHGDGVKDIAFEVEDCDYIVQKARERGAKIMREPWVEQDKFGKVKFAVLQTHFVRPRQVDHLSSGVRDQPGQRGKTLSLLNIQKLAGHDRRL

SEQ ID NO: 963 - protein, 140 aa, Artificial Sequence
  Synthetic polypeptide
MGFEPLAYRGLETGSREVVSHVIKQGKIVFVLSSALNPWNKEMGDHLVKHGDGVKDIAFEVEDCDYIVQKARERGAKIMREPWVEQDKFGKVKFAVLQTHFVRPRQVDHLSSGVRDQPGQRGKTLSLLNIQKLAGHDRRL

SEQ ID NO: 964 - protein, 2480 aa, Artificial Sequence
  Synthetic polypeptide
MSGSTQPVAQTWRATEPRYPPHSLSYPVQIARTHTDVGLLEYQHHSRDYASHLSPGSIIQPQRRRPSLLSEFQPGNERSQELHLRPESHSYLPELGKSEMEFIESKRPRLELLPDPLLRPSPLLATGQPAGSEDLTKDRSLTGKLEPVSPPSPPHTDPELELVPPRLSKEELIQNMDRVDREITMVEQQISKLKKKQQQLEEEAAKPPEPEKPVSPPPIESKHRSLVQIIYDENRKKAEAAHRILEGLGPQVELPLYNQPSDTRQYHENIKINQAMRKKLILYFKRRNHARKQWEQKFCQRYDQLMEAWEKKVERIENNPRRRAKESKVREYYEKQFPEIRKQRELQERMQSRVGQRGSGLSMSAARSEHEVSEIIDGLSEQENLEKQMRQLAVIPPMLYDADQQRIKFINMNGLMADPMKVYKDRQVMNMWSEQEKETFREKFMQHPKNFGLIASFLERKTVAECVLYYYLTKKNENYKSLVRRSYRRRGKSQQQQQQQQQQQQQQQQQPMPRSSQEEKDEKEKEKEAEKEEEKPEVENDKEDLLKEKTDDTSGEDNDEKEAVASKGRKTANSQGRRKGRITRSMANEANSEEAITPQQSAELASMELNESSRWTEEEMETAKKGLLEHGRNWSAIARMVGSKTVSQCKNFYFNYKKRQNLDEILQQHKLKMEKERNARRKKKKAPAAASEEAAFPPVVEDEEMEASGVSGNEEEMVEEAEALHASGNEVPRGECSGPATVNNSSDTESIPSPHTEAAKDTGQNGPKPPATLGADGPPPGPPTPPPEDIPAPTEPTPASEATGAPTPPPAPPSPSAPPPVVPKEEKEEETAAAPPVEEGEEQKPPAAEELAVDTGKAEEPVKSECTEEAEEGPAKGKDAEAAEATAEGALKAEKKEGGSGRATTAKSSGAPQDSDSSATCSADEVDEAEGGDKNRLLSPRPSLLTPTGDPRANASPQKPLDLKQLKQRAAAIPPIQVTKVHEPPREDAAPTKPAPPAPPPPQNLQPESDAPQQPGSSPRGKSRSPAPPADKEAFAAEAQKLPGDPPCWTSGLPFPVPPREVIKASPHAPDPSAFSYAPPGHPLPLGLHDTARPVLPRPPTISNPPPLISSAKHPSVLERQIGAISQGMSVQLHVPYSEHAKAPVGPVTMGLPLPMDPKKLAPFSGVKQEQLSPRGQAGPPESLGVPTAQEASVLRGTALGSVPGGSITKGIPSTRVPSDSAITYRGSITHGTPADVLYKGTITRIIGEDSPSRLDRGREDSLPKGHVIYEGKKGHVLSYEGGMSVTQCSKEDGRSSSGPPHETAAPKRTYDMMEGRVGRAISSASIEGLMGRAIPPERHSPHHLKEQHHIRGSITQGIPRSYVEAQEDYLRREAKLLKREGTPPPPPPSRDLTEAYKTQALGPLKLKPAHEGLVATVKEAGRSIHEIPREELRHTPELPLAPRPLKEGSITQGTPLKYDTGASTTGSKKHDVRSLIGSPGRTFPPVHPLDVMADARALERACYEESLKSRPGTASSSGGSIARGAPVIVPELGKPRQSPLTYEDHGAPFAGHLPRGSPVTTREPTPRLQEGSLSSSKASQDRKLTSTPREIAKSPHSTVPEHHPHPISPYEHLLRGVSGVDLYRSHIPLAFDPTSIPRGIPLDAAAAYYLPRHLAPNPTYPHLYPPYLIRGYPDTAALENRQTIINDYITSQQMHHNAATAMAQRADMLRGLSPRESSLALNYAAGPRGIIDLSQVPHLPVLVPPTPGTPATAMDRLAYLPTAPQPFSSRHSSSPLSPGGPTHLTKPTTTSSSERERDRDRERDRDREREKSILTSTTTVEHAPIWRPGTEQSSGSSGGGGGSSSRPASHSHAHQHSPISPRTQDALQQRPSVLHNTGMKGIITAVEPSTPTVLRSTSTSSPVRPAATFPPATHCPLGGTLDGVYPTLMEPVLLPKEAPRVARPERPRADTGHAFLAKPPARSGLEPASSPSKGSEPRPLVPPVSGHATIARTPAKNLAPHHASPDPPAPPASASDPHREKTQSKPFSIQELELRSLGYHGSSYSPEGVEPVSPVSSPSLTHDKGLPKHLEELDKSHLEGELRPKQPGPVKLGGEAAHLPHLRPLPESQPSSSPLLQTAPGVKGHQRVVTLAQHISEVITQDYTRHHPQQLSAPLPAPLYSFPGASCPVLDLRRPPSDLYLPPPDHGAPARGSPHSEGGKRSPEPNKTSVLGGGEDGIEPVSPPEGMTEPGHSRSAVYPLLYRDGEQTEPSRMGSKSPGNTSQPPAFFSKLTESNSAMVKSKKQEINKKLNTHNRNEPEYNISQPGTEIFNMPAITGTGLMTYRSQAVQEHASTNMGLEAIIRKALMGKYDQWEESPPLSANAFNPLNASASLPAAMPITAADGRSDHTLTSPGGGGKAKVSGRPSSRKAKSPAPGLASGDRPPSVSSVHSEGDCNRRTPLTNRVWEDRPSSAGNSTVDEILPVLFTNPFPVPGRMLDT

SEQ ID NO: 965 - protein, 2424 aa, Artificial Sequence
  Synthetic polypeptide
MSGSTQPVAQTWRATEPRYPPHSLSYPVQIARTHTDVGLLEYQHHSRDYASHLSPGSIIQPQRRRPSLLSEFQPGNERSQELHLRPESHSYLPELGKSEMEFIESKRPRLELLPDPLLRPSPLLATGQPAGSEDLTKDRSLTGKLEPVSPPSPPHTDPELELVPPRLSKEELIQNMDRVDREITMVEQQISKLKKKQQQLEEEAAKPPEPEKPVSPPPIESKHRSLVQIIYDENRKKAEAAHRILEGLGPQVELPLYNQPSDTRQYHENIKINQAMRKKLILYFKRRNHARKQWEQKFCQRYDQLMEAWEKKVERIENNPRRRAKESKVREYYEKQFPEIRKQRELQERMQRVGQRGSGLSMSAARSEHEVSEIIDGLSEQENLEKQMRQLAVIPPMLYDADQQRIKFINMNGLMADPMKVYKDRQVMNMWSEQEKETFREKFMQHPKNFGLIASFLERKTVAECVLYYYLTKKNENYKSLVRRSYRRRGKSQQQQQQQQQQQQQQQQQPMPRSSQEEKDEKEKEKEAEKEEEKPEVENDKEDLLKEKTDDTSGEDNDEKEAVASKGRKTANSQGRRKGRITRSMANEANSEEAITPQQSAELASMELNESSRWTEEEMETAKKGLLEHGRNWSAIARMVGSKTVSQCKNFYFNYKKRQNLDEILQQHKLKMEKERNARRKKKKAPAAASEEAAFPPVVEDEEMEASGVSGNEEEMVEEAEATVNNSSDTESIPSPHTEAAKDTGQNGPKPPATLGADGPPPGPPTPPPEDIPAPTEPTPASEATGAPTPPPAPPSPSAPPPVVPKEEKEEETAAAPPVEEGEEQKPPAAEELAVDTGKAEEPVKSECTEEAEEGPAKGKDAEAAEATAEGALKAEKKEGGSGRATTAKSSGAPQDSDSSATCSADEVDEAEGGDKNRLLSPRPSLLTPTGDPRANASPQKPLDLKQLKQRAAAIPPIQVTKVHEPPREDAAPTKPAPPAPPPPQNLQPESDAPQQPGSSPRGKSRSPAPPADKEAEKPVFFPAFAAEAQKLPGDPPCWTSGLPFPVPPREVIKASPHAPDPSAFSYAPPGHPLPLGLHDTARPVLPRPPTISNPPPLISSAKHPSVLERQIGAISQGMSVQLHVPYSEHAKAPVGPVTMGLPLPMDPKKLAPFSGVKQEQLSPRGQAGPPESLGVPTAQEASVLRGTALGSVPGGSITKGIPSTRVPSDSAITYRGSITHGTPADVLYKGTITRIIGEDSPSRLDRGREDSLPKGHVIYEGKKGHVLSYEGGMSVTQCSKEDGRSSSGPPHETAAPKRTYDMMEGRVGRAISSASIEGLMGRAIPPERHSPHHLKEQHHIRGSITQGIPRSYVEAQEDYLRREAKLLKREGTPPPPPPSRDLTEAYKTQALGPLKLKPAHEGLVATVKEAGRSIHEIPREELRHTPELPLAPRPLKEGSITQGTPLKYDTGASTTGSKKHDVRSLIGSPGRTFPPVHPLDVMADARALERACYEESLKSRPGTASSSGGSIARGAPVIVPELGKPRQSPLTYEDHGAPFAGHLPRGSPVTTREPTPRLQEGSLSSSKASQDRKLTSTPREIAKSPHSTVPEHHPHPISPYEHLLRGVSGVDLYRSHIPLAFDPTSIPRGIPLDAAAAYYLPRHLAPNPTYPHLYPPYLIRGYPDTAALENRQTIINDYITSQQMHHNAATAMAQRADMLRGLSPRESSLALNYAAGPRGIIDLSQVPHLPVLVPPTPGTPATAMDRLAYLPTAPQPFSSRHSSSPLSPGGPTHLTKPTTTSSSERERDRDRERDRDREREKSILTSTTTVEHAPIWRPGTEQSSGSSGGGGGSSSRPASHSHAHQHSPISPRTQDALQQRPSVLHNTGMKGIITAVEPSTPTVLRSTSTSSPVRPAATFPPATHCPLGGTLDGVYPTLMEPVLLPKEAPRVARPERPRADTGHAFLAKPPARSGLEPASSPSKGSEPRPLVPPVSGHATIARTPAKNLAPHHASPDPPAPPASASDPHREKTQSKPFSIQELELRSLGYHGSSYSPEGVEPVSPVSSPSLTHDKGLPKHLEELDKSHLEGELRPKQPGPVKLGGEAAHLPHLRPLPESQPSSSPLLQTAPGVKGHQRVVTLAQHISEVITQDYTRHHPQQLSAPLPAPLYSFPGASCPVLDLRRPPSDLYLPPPDHGAPARGSPHSEGGKRSPEPNKTSVLGGGEDGIEPVSPPEGMTEPGHSRSAVYPLLYRDGEQTEPSRMGSKSPGNTSQPPAFFSKLTESNSAMVKSKKQEINKKLNTHNRNEPEYNISQPGTEIFNMPAITGTGLMTYRSQAVQEHASTNMGLEAIIRKALMGGGGKAKVSGRPSSRKAKSPAPGLASGDRPPSVSSVHSEGDCNRRTPLTNRVWEDRPSSAGNSTVDEILPVLFTNPFPVPGRMLDT

SEQ ID NO: 966 - protein, 2487 aa, Artificial Sequence
  Synthetic polypeptide
MSGSTQPVAQTWRATEPRYPPHSLSYPVQIARTHTDVGLLEYQHHSRDYASHLSPGSIIQPQRRRPSLLSEFQPGNERSQELHLRPESHSYLPELGKSEMEFIESKRPRLELLPDPLLRPSPLLATGQPAGSEDLTKDRSLTGKLEPVSPPSPPHTDPELELVPPRLSKEELIQNMDRVDREITMVEQQISKLKKKQQQLEEEAAKPPEPEKPVSPPPIESKHRSLVQIIYDENRKKAEAAHRILEGLGPQVELPLYNQPSDTRQYHENIKINQAMRKKLILYFKRRNHARKQWEQKFCQRYDQLMEAWEKKVERIENNPRRRAKESKVREYYEKQFPEIRKQRELQERMQSRVGQRGSGLSMSAARSEHEVSEIIDGLSEQENLEKQMRQLAVIPPMLYDADQQRIKFINMNGLMADPMKVYKDRQVMNMWSEQEKETFREKFMQHPKNFGLIASFLERKTVAECVLYYYLTKKNENYKSLVRRSYRRRGKSQQQQQQQQQQQQQQQQQPMPRSSQEEKDEKEKEKEAEKEEEKPEVENDKEDLLKEKTDDTSGEDNDEKEAVASKGRKTANSQGRRKGRITRSMANEANSEEAITPQQSAELASMELNESSRWTEEEMETAKKGLLEHGRNWSAIARMVGSKTVSQCKNFYFNYKKRQNLDEILQQHKLKMEKERNARRKKKKAPAAASEEAAFPPVVEDEEMEASGVSGNEEEMVEEAEALHASGNEVPRGECSGPATVNNSSDTESIPSPHTEAAKDTGQNGPKPPATLGADGPPPGPPTPPPEDIPAPTEPTPASEATGAPTPPPAPPSPSAPPPVVPKEEKEEETAAAPPVEEGEEQKPPAAEELAVDTGKAEEPVKSECTEEAEEGPAKGKDAEAAEATAEGALKAEKKEGGSGRATTAKSSGAPQDSDSSATCSADEVDEAEGGDKNRLLSPRPSLLTPTGDPRANASPQKPLDLKQLKQRAAAIPPIVTKVHEPPREDAAPTKPAPPAPPPPQNLQPESDAPQQPGSSPRGKSRSPAPPADKEAEKPVFFPAFAAEAQKLPGDPPCWTSGLPFPVPPREVIKASPHAPDPSAFSYAPPGHPLPLGLHDTARPVLPRPPTISNPPPLISSAKHPSVLERQIGAISQGMSVQLHVPYSEHAKAPVGPVTMGLPLPMDPKKLAPFSGVKQEQLSPRGQAGPPESLGVPTAQEASVLRGTALGSVPGGSITKGIPSTRVPSDSAITYRGSITHGTPADVLYKGTITRIIGEDSPSRLDRGREDSLPKGHVIYEGKKGHVLSYEGGMSVTQCSKEDGRSSSGPPHETAAPKRTYDMMEGRVGRAISSASIEGLMGRAIPPERHSPHHLKEQHHIRGSITQGIPRSYVEAQEDYLRREAKLLKREGTPPPPPPSRDLTEAYKTQALGPLKLKPAHEGLVATVKEAGRSIHEIPREELRHTPELPLAPRPLKEGSITQGTPLKYDTGASTTGSKKHDVRSLIGSPGRTFPPVHPLDVMADARALERACYEESLKSRPGTASSSGGSIARGAPVIVPELGKPRQSPLTYEDHGAPFAGHLPRGSPVTTREPTPRLQEGSLSSSKASQDRKLTSTPREIAKSPHSTVPEHHPHPISPYEHLLRGVSGVDLYRSHIPLAFDPTSIPRGIPLDAAAAYYLPRHLAPNPTYPHLYPPYLIRGYPDTAALENRQTIINDYITSQQMHHNAATAMAQRADMLRGLSPRESSLALNYAAGPRGIIDLSQVPHLPVLVPPTPGTPATAMDRLAYLPTAPQPFSSRHSSSPLSPGGPTHLTKPTTTSSSERERDRDRERDRDREREKSILTSTTTVEHAPIWRPGTEQSSGSSGGGGGSSSRPASHSHAHQHSPISPRTQDALQQRPSVLHNTGMKGIITAVEPSTPTVLRSTSTSSPVRPAATFPPATHCPLGGTLDGVYPTLMEPVLLPKEAPRVARPERPRADTGHAFLAKPPARSGLEPASSPSKGSEPRPLVPPVSGHATIARTPAKNLAPHHASPDPPAPPASASDPHREKTQSKPFSIQELELRSLGYHGSSYSPEGVEPVSPVSSPSLTHDKGLPKHLEELDKSHLEGELRPKQPGPVKLGGEAAHLPHLRPLPESQPSSSPLLQTAPGVKGHQRVVTLAQHISEVITQDYTRHHPQQLSAPLPAPLYSFPGASCPVLDLRRPPSDLYLPPPDHGAPARGSPHSEGGKRSPEPNKTSVLGGGEDGIEPVSPPEGMTEPGHSRSAVYPLLYRDGEQTEPSRMGSKSPGNTSQPPAFFSKLTESNSAMVKSKKQEINKKLNTHNRNEPEYNISQPGTEIFNMPAITGTGLMTYRSQAVQEHASTNMGLEAIIRKALMGKYDQWEESPPLSANAFNPLNASASLPAAMPITAADGRSDHTLTSPGGGGKAKVSGRPSSRKAKSPAPGLASGDRPPSVSSVHSEGDCNRRTPLTNRVWEDRPSSAGNSTVDEILPVLFTNPFPVPGRMLDT

SEQ ID NO: 967 - protein, 2425 aa, Artificial Sequence
  Synthetic polypeptide
MSGSTQPVAQTWRATEPRYPPHSLSYPVQIARTHTDVGLLEYQHHSRDYASHLSPGSIIQPQRRRPSLLSEFQPGNERSQELHLRPESHSYLPELGKSEMEFIESKRPRLELLPDPLLRPSPLLATGQPAGSEDLTKDRSLTGKLEPVSPPSPPHTDPELELVPPRLSKEELIQNMDRVDREITMVEQQISKLKKKQQQLEEEAAKPPEPEKPVSPPPIESKHRSLVQIIYDENRKKAEAAHRILEGLGPQVELPLYNQPSDTRQYHENIKINQAMRKKLILYFKRRNHARKQWEQKFCQRYDQLMEAWEKKVERIENNPRRRAKESKVREYYEKQFPEIRKQRELQERMQSRVGQRGSGLSMSAARSEHEVSEIIDGLSEQENLEKQMRQLAVIPPMLYDADQQRIKFINMNGLMADPMKVYKDRQVMNMWSEQEKETFREKFMQHPKNFGLIASFLERKTVAECVLYYYLTKKNENYKSLVRRSYRRRGKSQQQQQQQQQQQQQQQQQPMPRSSQEEKDEKEKEKEAEKEEEKPEVENDKEDLLKEKTDDTSGEDNDEKEAVASKGRKTANSQGRRKGRITRSMANEANSEEAITPQQSAELASMELNESSRWTEEEMETAKKGLLEHGRNWSAIARMVGSKTVSQCKNFYFNYKKRQNLDEILQQHKLKMEKERNARRKKKKAPAAASEEAAFPPVVEDEEMEASGVSGNEEEMVEEAEATVNNSSDTESIPSPHTEAAKDTGQNGPKPPATLGADGPPPGPPTPPPEDIPAPTEPTPASEATGAPTPPPAPPSPSAPPPVVPKEEKEEETAAAPPVEEGEEQKPPAAEELAVDTGKAEEPVKSECTEEAEEGPAKGKDAEAAEATAEGALKAEKKEGGSGRATTAKSSGAPQDSDSSATCSADEVDEAEGGDKNRLLSPRPSLLTPTGDPRANASPQKPLDLKQLKQRAAAIPPIQVTKVHEPPREDAAPTKPAPPAPPPPQNLQPESDAPQQPGSSPRGKSRSPAPPADKEAEKPVFFPAFAAEAQKLPGDPPCWTSGLPFPVPPREVIKASPHAPDPSAFSYAPPGHPLPLGLHDTARPVLPRPPTISNPPPLISSAKHPSVLERQIGAISQGMSVQLHVPYSEHAKAPVGPVTMGLPLPMDPKKLAPFSGVKQEQLSPRGQAGPPESLGVPTAQEASVLRGTALGSVPGGSITKGIPSTRVPSDSAITYRGSITHGTPADVLYKGTITRIIGEDSPSRLDRGREDSLPKGHVIYEGKKGHVLSYEGGMSVTQCSKEDGRSSSGPPHETAAPKRTYDMMEGRVGRAISSASIEGLMGRAIPPERHSPHHLKEQHHIRGSITQGIPRSYVEAQEDYLRREAKLLKREGTPPPPPPSRDLTEAYKTQALGPLKLKPAHEGLVATVKEAGRSIHEIPREELRHTPELPLAPRPLKEGSITQGTPLKYDTGASTTGSKKHDVRSLIGSPGRTFPPVHPLDVMADARALERACYEESLKSRPGTASSSGGSIARGAPVIVPELGKPRQSPLTYEDHGAPFAGHLPRGSPVTTREPTPRLQEGSLSSSKASQDRKLTSTPREIAKSPHSTVPEHHPHPISPYEHLLRGVSGVDLYRSHIPLAFDPTSIPRGIPLDAAAAYYLPRHLAPNPTYPHLYPPYLIRGYPDTAALENRQTIINDYITSQQMHHNAATAMAQRADMLRGLSPRESSLALNYAAGPRGIIDLSQVPHLPVLVPPTPGTPATAMDRLAYLPTAPQPFSSRHSSSPLSPGGPTHLTKPTTTSSSERERDRDRERDRDREREKSILTSTTTVEHAPIWRPGTEQSSGSSGGGGGSSSRPASHSHAHQHSPISPRTQDALQQRPSVLHNTGMKGIITAVEPSTPTVLRSTSTSSPVRPAATFPPATHCPLGGTLDGVYPTLMEPVLLPKEAPRVARPERPRADTGHAFLAKPPARSGLEPASSPSKGSEPRPLVPPVSGHATIARTPAKNLAPHHASPDPPAPPASASDPHREKTQSKPFSIQELELRSLGYHGSSYSPEGVEPVSPVSSPSLTHDKGLPKHLEELDKSHLEGELRPKQPGPVKLGGEAAHLPHLRPLPESQPSSSPLLQTAPGVKGHQRVVTLAQHISEVITQDYTRHHPQQLSAPLPAPLYSFPGASCPVLDLRRPPSDLYLPPPDHGAPARGSPHSEGGKRSPEPNKTSVLGGGEDGIEPVSPPEGMTEPGHSRSAVYPLLYRDGEQTEPSRMGSKSPGNTSQPPAFFSKLTESNSAMVKSKKQEINKKLNTHNRNEPEYNISQPGTEIFNMPAITGTGLMTYRSQAVQEHASTNMGLEAIIRKALMGGGGKAKVSGRPSSRKAKSPAPGLASGDRPPSVSSVHSEGDCNRRTPLTNRVWEDRPSSAGNSTVDEILPVLFTNPFPVPGRMLDT

SEQ ID NO: 968 - protein, 2041 aa, Artificial Sequence
  Synthetic polypeptide
MWSEQEKETFREKFMQHPKNFGLIASFLERKTVAECVLYYYLTKKNENYKSLVRRSYRRRGKSQQQQQQQQQQQQQQQQQPMPRSSQEEKDEKEKEKEAEKEEEKPEVENDKEDLLKEKTDDTSGEDNDEKEAVASKGRKTANSQGRRKGRITRSMANEANSEEAITPQQSAELASMELNESSRWTEEEMETAKKGLLEHGRNWSAIARMVGSKTVSQCKNFYFNYKKRQNLDEILQQHKLKMEKERNARRKKKKAPAAASEEAAFPPVVEDEEMEASGVSGNEEEMVEEAEATVNNSSDTESIPSPHTEAAKDTGQNGPKPPATLGADGPPPGPPTPPPEDIPAPTEPTPASEATGAPTPPPAPPSPSAPPPVVPKEEKEEETAAAPPVEEGEEQKPPAAEELAVDTGKAEEPVKSECTEEAEEGPAKGKDAEAAEATAEGALKAEKKEGGSGRATTAKSSGAPQDSDSSATCSADEVDEAEGGDKNRLLSPRPSLLTPTGDPRANASPQKPLDLKQLKQRAAAIPPIQVTKVHEPPREDAAPTKPAPPAPPPPQNLQPESDAPQQPGSSPRGKSRSPAPPADKEAEKPVFFPAFAAEAQKLPGDPPCWTSGLPFPVPPREVIKASPHAPDPSAFSYAPPGHPLPLGLHDTARPVLPRPPTISNPPPLISSAKHPSVLERQIGAISQGMSVQLHVPYSEHAKAPVGPVTMGLPLPMDPKKLAPFSGVKQEQLSPRGQAGPPESLGVPTAQEASVLRGTALGSVPGGSITKGIPSTRVPSDSAITYRGSITHGTPADVLYKGTITRIIGEDSPSRLDRGREDSLPKGHVIYEGKKGHVLSYEGGMSVTQCSKEDGRSSSGPPHETAAPKRTYDMMEGRVGRAISSASIEGLMGRAIPPERHSPHHLKEQHHIRGSITQGIPRSYVEAQEDYLRREAKLLKREGTPPPPPPSRDLTEAYKTQALGPLKLKPAHEGLVATVKEAGRSIHEIPREELRHTPELPLAPRPLKEGSITQGTPLKYDTGASTTGSKKHDVRSLIGSPGRTFPPVHPLDVMADARALERACYEESLKSRPGTASSSGGSIARGAPVIVPELGKPRQSPLTYEDHGAPFAGHLPRGSPVTTREPTPRLQEGSLSSSKASQDRKLTSTPREIAKSPHSTVPEHHPHPISPYEHLLRGVSGVDLYRSHIPLAFDPTSIPRGIPLDAAAAYYLPRHLAPNPTYPHLYPPYLIRGYPDTAALENRQTIINDYITSQQMHHNAATAMAQRADMLRGLSPRESSLALNYAAGPRGIIDLSQVPHLPVLVPPTPGTPATAMDRLAYLPTAPQPFSSRHSSSPLSPGGPTHLTKPTTTSSSERERDRDRERDRDREREKSILTSTTTVEHAPIWRPGTEQSSGSSGGGGGSSSRPASHSHAHQHSPISPRTQDALQQRPSVLHNTGMKGIITAVEPSTPTVLRSTSTSSPVRPAATFPPATHCPLGGTLDGVYPTLMEPVLLPKEAPRVARPERPRADTGHAFLAKPPARSGLEPASSPSKGSEPRPLVPPVSGHATIARTPAKNLAPHHASPDPPAPPASASDPHREKTQSKPFSIQELELRSLGYHGSSYSPEGVEPVSPVSSPSLTHDKGLPKHLEELDKSHLEGELRPKQPGPVKLGGEAAHLPHLRPLPESQPSSSPLLQTAPGVKGHQRVVTLAQHISEVITQDYTRHHPQQLSAPLPAPLYSFPGASCPVLDLRRPPSDLYLPPPDHGAPARGSPHSEGGKRSPEPNKTSVLGGGEDGIEPVSPPEGMTEPGHSRSAVYPLLYRDGEQTEPSRMGSKSPGNTSQPPAFFSKLTESNSAMVKSKKQEINKKLNTHNRNEPEYNISQPGTEIFNMPAITGTGLMTYRSQAVQEHASTNMGLEAIIRKALMGKYDQWEESPPLSANAFNPLNASASLPAAMPITAADGRSDHTLTSPGGGGKAKVSGRPSSRKAKSPAPGLASGDRPPSVSSVHSEGDCNRRTPLTNRVWEDRPSSAGNSTVDEILPVLFTNPFPVPGRMLDT

SEQ ID NO: 969 - protein, 2470 aa, Artificial Sequence
  Synthetic polypeptide
MSGSTQPVAQTWRATEPRYPPHSLSYPVQIARTHTDVGLLEYQHHSRDYASHLSPGSIIQPQRRRPSLLSEFQPGNERSQELHLRPESHSYLPELGKSEMEFIESKRPRLELLPDPLLRPSPLLATGQPAGSEDLTKDRSLTGKLEPVSPPSPPHTDPELELVPPRLSKEELIQNMDRVDREITMVEQQISKLKKKQQQLEEEAAKPPEPEKPVSPPPIESKHRSLVQIIYDENRKKAEAAHRILEGLGPQVELPLYNQPSDTRQYHENIKINQAMRKKLILYFKRRNHARKQWEQKFCQRYDQLMEAWEKKVERIENNPRRRAKESKVREYYEKQFPEIRKQRELQERMQRVGQRGSGLSMSAARSEHEVSEIIDGLSEQENLEKQMRQLAVIPPMLYDADQQRIKFINMNGLMADPMKVYKDRQVMNMWSEQEKETFREKFMQHPKNFGLIASFLERKTVAECVLYYYLTKKNENYKSLVRRSYRRRGKSQQQQQQQQQQQQQQQQQPMPRSSQEEKDEKEKEKEAEKEEEKPEVENDKEDLLKEKTDDTSGEDNDEKEAVASKGRKTANSQGRRKGRITRSMANEANSEEAITPQQSAELASMELNESSRWTEEEMETAKKGLLEHGRNWSAIARMVGSKTVSQCKNFYFNYKKRQNLDEILQQHKLKMEKERNARRKKKKAPAAASEEAAFPPVVEDEEMEASGVSGNEEEMVEEAEATVNNSSDTESIPSPHTEAAKDTGQNGPKPPATLGADGPPPGPPTPPPEDIPAPTEPTPASEATGAPTPPPAPPSPSAPPPVVPKEEKEEETAAAPPVEEGEEQKPPAAEELAVDTGKAEEPVKSECTEEAEEGPAKGKDAEAAEATAEGALKAEKKEGGSGRATTAKSSGAPQDSDSSATCSADEVDEAEGGDKNRLLSPRPSLLTPTGDPRANASPQKPLDLKQLKQRAAAIPPIQVTKVHEPPREDAAPTKPAPPAPPPPQNLQPESDAPQQPGSSPRGKSRSPAPPADKEAEKPVFFPAFAAEAQKLPGDPPCWTSGLPFPVPPREVIKASPHAPDPSAFSYAPPGHPLPLGLHDTARPVLPRPPTISNPPPLISSAKHPSVLERQIGAISQGMSVQLHVPYSEHAKAPVGPVTMGLPLPMDPKKLAPFSGVKQEQLSPRGQAGPPESLGVPTAQEASVLRGTALGSVPGGSITKGIPSTRVPSDSAITYRGSITHGTPADVLYKGTITRIIGEDSPSRLDRGREDSLPKGHVIYEGKKGHVLSYEGGMSVTQCSKEDGRSSSGPPHETAAPKRTYDMMEGRVGRAISSASIEGLMGRAIPPERHSPHHLKEQHHIRGSITQGIPRSYVEAQEDYLRREAKLLKREGTPPPPPPSRDLTEAYKTQALGPLKLKPAHEGLVATVKEAGRSIHEIPREELRHTPELPLAPRPLKEGSITQGTPLKYDTGASTTGSKKHDVRSLIGSPGRTFPPVHPLDVMADARALERACYEESLKSRPGTASSSGGSIARGAPVIVPELGKPRQSPLTYEDHGAPFAGHLPRGSPVTTREPTPRLQEGSLSSSKASQDRKLTSTPREIAKSPHSTVPEHHPHPISPYEHLLRGVSGVDLYRSHIPLAFDPTSIPRGIPLDAAAAYYLPRHLAPNPTYPHLYPPYLIRGYPDTAALENRQTIINDYITSQQMHHNAATAMAQRADMLRGLSPRESSLALNYAAGPRGIIDLSQVPHLPVLVPPTPGTPATAMDRLAYLPTAPQPFSSRHSSSPLSPGGPTHLTKPTTTSSSERERDRDRERDRDREREKSILTSTTTVEHAPIWRPGTEQSSGSSGGGGGSSSRPASHSHAHQHSPISPRTQDALQQRPSVLHNTGMKGIITAVEPSTPTVLRSTSTSSPVRPAATFPPATHCPLGGTLDGVYPTLMEPVLLPKEAPRVARPERPRADTGHAFLAKPPARSGLEPASSPSKGSEPRPLVPPVSGHATIARTPAKNLAPHHASPDPPAPPASASDPHREKTQSKPFSIQELELRSLGYHGSSYSPEGVEPVSPVSSPSLTHDKGLPKHLEELDKSHLEGELRPKQPGPVKLGGEAAHLPHLRPLPESQPSSSPLLQTAPGVKGHQRVVTLAQHISEVITQDYTRHHPQQLSAPLPAPLYSFPGASCPVLDLRRPPSDLYLPPPDHGAPARGSPHSEGGKRSPEPNKTSVLGGGEDGIEPVSPPEGMTEPGHSRSAVYPLLYRDGEQTEPSRMGSKSPGNTSQPPAFFSKLTESNSAMVKSKKQEINKKLNTHNRNEPEYNISQPGTEIFNMPAITGTGLMTYRSQAVQEHASTNMGLEAIIRKALMGKYDQWEESPPLSANAFNPLNASASLPAAMPITAADGRSDHTLTSPGGGGKAKVSGRPSSRKAKSPAPGLASGDRPPSVSSVHSEGDCNRRTPLTNRVWEDRPSSAGNSTVDEILPVLFTNPFPVPGRMLDT

SEQ ID NO: 970 - protein, 29 aa, Artificial Sequence
  Synthetic polypeptide
PTTGMSLNTISASLGRRSSICPPSPEQAL

SEQ ID NO: 971 - skipped

SEQ ID NO: 972 - protein, 6 aa, Artificial Sequence
  Synthetic polypeptide
TWGWRP

SEQ ID NO: 973 - protein, 121 aa, Artificial Sequence
  Synthetic polypeptide
MEAAPSRFMFLLFLLTCELAAEVAAEVEKSSDGPGAAQEPTWLTDVPAAMEFIAATEVAVIGFFQDLEIPAVPILHSMVQKFPGVSFGISTDSEVLTHYNITGNTICLFRLETTSPDPPAA

SEQ ID NO: 974 - protein, 659 aa, Artificial Sequence
  Synthetic polypeptide
MDQNQHLNKTAEAQPSENKKTRYCNGLKMFLAALSLSFIAKTLGAIIMKSSIIHIERRFEISSSLVGFIDGSFEIGNLLVIVFVSYFGSKLHRPKLIGIGCFIMGIGGVLTALPHFFMGYYRYSKETNINSSENSTSTLSTCLINQILSLNRASPEIVGKGCLKESGSYMWIYVFMGNMLRGIGETPIVPLGLSYIDDFAKEGHSSLYLGILNAIAMIGPIIGFTLGSLFSKMYVDIGYVDLSTIRITPTDSRWVGAWWLNFLVSGLFSIISSIPFFFLPQTPNKPQKERKASLSLHVLETNDEKDQTANLTNQGKNITKNVTGFFQSFKSILTNPLYVMFVLLTLLQVSSYIGAFTYVFKYVEQQYGQPSSKANILLGVITIPIFASGMFLGGYIIKKFKLNTVGIAKFSCFTAVMSLSFYLLYFFILCENKSVAGLTMTYDGNNPVTSHRDVPLSYCNSDCNCDESQWEPVCGNNGITYISPCLAGCKSSSGNKKPIVFYNCSCLEVTGLQNRNYSAHLGECPRDDACTRKFYFFVAIQVLNLFFSALGGTSHVMLIVKIVQPELKSLALGFHSMVIRALGGILAPIYFGALIDTTCIKWSTNNCGTRGSCRTYNSTSFSSDSSSEMSILFTIAHSAKSDSPETFSCSGCLLFLAAL

SEQ ID NO: 975 - protein, 599 aa, Artificial Sequence
  Synthetic polypeptide
MGETEKRIETHRIRCLSKLKMFLLAITCAFVSKTLSGSYMNSMLTQIERQFNIPTSLVGFINGSFEIGNLLLIIFVSYFGTKLHRPIMIGIGCVVMGLGCFLKSLPHFLMNQYEYESTVSVSGNLSSNSFLCMENGTQILRPTQDPSECTKEVKSLMWVYVLVGNIVRGMGETPILPLGISYIEDFAKFENSPLYIGLVETGAIIGPLIGLLLASFCANVYVDTGFVNTDDLIITPTDTRWVGAWWFGFLICAGVNVLTAIPFFFLPNTLPKEGLETNADIIKNENEDKQKEEVKKEKYGITKDFLPFMKSLSCNPIYMLFILVSVIQFNAFVNMISFMPKYLEQQYGISSSDAIFLMGIYNLPPICIGYIIGGLIMKKFKITVKQAAHIGCWLSLLEYLLYFLSFLMTCENSSVVGINTSYEGIPQDLYVENDIFADCNVDCNCPSKIWDPVCGNNGLSYLSACLAGCETSIGTGINMVFQNCSCIQTSGNSSAVLGLCDKGPDCSLMLQYFLILSAMSSFIYSLAAIPGYMVLLRCMKSEEKSLGVGLHTFCTRVFAGIPAPIYFGALMDSTCLHWGTLKCGESGACRIYDSTTFRS

SEQ ID NO: 976 - protein, 599 aa, Artificial Sequence; identical to SEQ ID NO: 975
  Synthetic polypeptide

SEQ ID NO: 977 - protein, 467 aa, Artificial Sequence
  Synthetic polypeptide
MENGTQILRPTQDPSECTKEVKSLMWVYVLVGNIVRGMGETPILPLGISYIEDFAKFENSPLYIGLVETGAIIGPLIGLLLASFCANVYVDTGFVNTDDLIITPTDTRWVGAWWFGFLICAGVNVLTAIPFFFLPNTLPKEGLETNADIIKNENEDKQKEEVKKEKYGITKDFLPFMKSLSCNPIYMLFILVSVIQFNAFVNMISFMPKYLEQQYGISSSDAIFLMGIYNLPPICIGYIIGGLIMKKFKITVKQAAHIGCWLSLLEYLLYFLSFLMTCENSSVVGINTSYEGIPQDLYVENDIFADCNVDCNCPSKIWDPVCGNNGLSYLSACLAGCETSIGTGINMVFQNCSCIQTSGNSSAVLGLCDKGPDCSLMLQYFLILSAMSSFIYSLAAIPGYMVLLRCMKSEEKSLGVGLHTFCTRVFAGIPAPIYFGALMDSTCLHWGTLKCGESGACRIYDSTTFRS

SEQ ID NO: 978 - protein, 467 aa, Artificial Sequence; identical to SEQ ID NO: 977
  Synthetic polypeptide

SEQ ID NO: 979 - protein, 538 aa, Artificial Sequence
  Synthetic polypeptide
MGETEKRIETHRIRCLSKLKMFLLAITCAFVSKTLSGSYMNSMLTQIERQFNIPTSLVGFINGSFEIGNLLLIIFVSYFGTKLHRPIMIGIGCVVMGLGCFLKSLPHFLMNQYEYESTVSVSGNLSSNSFLCMENGTQILRPTQDPSECTKEVKSLMWVYVLVGNIVRGMGETPILPLGISYIEDFAKFENSPLYIGLVETGAIIGPLIGLLLASFCANVYVDTGFVNTDDLIITPTDTRWVGAWWFGFLICAGVNVLTAIPFFFLPNTLPKEGLETNADIIKNENEDKQKEEVKKEKYGITKDFLPFMKSLSCNPIYMLFILVSVIQFNAFVNMISFMPKYLEQQYGISSSDAIFLMGIYNLPPICIGYIIGGLIMKKFKITVKQAAHIGCWLSLLEYLLYFLSFLMTCENSSVVGINTSYEGIPQDLYVENDIFADCNVDCNCPSKIWDPVCGNNGLSYLSACLAGCETSIGTGINMVFQNCSCIQTSGNSSAVLGLCDKGPDCSLMLQYFLILSAMSSFIYSLAAIPGYMVLLRS

SEQ ID NO: 980 - protein, 538 aa, Artificial Sequence; identical to SEQ ID NO: 979
  Synthetic polypeptide

SEQ ID NO: 981 - protein, 406 aa, Artificial Sequence
  Synthetic polypeptide
MENGTQILRPTQDPSECTKEVKSLMWVYVLVGNIVRGMGETPILPLGISYIEDFAKFENSPLYIGLVETGAIIGPLIGLLLASFCANVYVDTGFVNTDDLIITPTDTRWVGAWWFGFLICAGVNVLTAIPFFFLPNTLPKEGLETNADIIKNENEDKQKEEVKKEKYGITKDFLPFMKSLSCNPIYMLFILVSVIQFNAFVNMISFMPKYLEQQYGISSSDAIFLMGIYNLPPICIGYIIGGLIMKKFKITVKQAAHIGCWLSLLEYLLYFLSFLMTCENSSVVGINTSYEGIPQDLYVENDIFADCNVDCNCPSKIWDPVCGNNGLSYLSACLAGCETSIGTGINMVFQNCSCIQTSGNSSAVLGLCDKGPDCSLMLQYFLILSAMSSFIYSLAAIPGYMVLLRS

SEQ ID NO: 982 - protein, 406 aa, Artificial Sequence; identical to SEQ ID NO: 981
  Synthetic polypeptide

SEQ ID NO: 983 - protein, 536 aa, Artificial Sequence
  Synthetic polypeptide
MFLTKNCKQEQERVESAKMFLLAITCAFVSKTLSGSYMNSMLTQIERQFNIPTSLVGFINGSFEIGNLLLIIFVSYFGTKLHRPIMIGIGCVVMGLGCFLKSLPHFLMNQYEYESTVSVSGNLSSNSFLCMENGTQILRPTQDPSECTKEVKSLMWVYVLVGNIVRGMGETPILPLGISYIEDFAKFENSPLYIGLVETGAIIGPLIGLLLASFCANVYVDTGFVNTDDLIITPTDTRWVGAWWFGFLICAGVNVLTAIPFFFLPNTLPKEGLETNADIIKNENEDKQKEEVKKEKYGITKDFLPFMKSLSCNPIYMLFILVSVIQFNAFVNMISFMPKYLEQQYGISSSDAIFLMGIYNLPPICIGYIIGGLIMKKFKITVKQAAHIGCWLSLLEYLLYFLSFLMTCENSSVVGINTSYEGIPQDLYVENDIFADCNVDCNCPSKIWDPVCGNNGLSYLSACLAGCETSIGTGINMVFQNCSCIQTSGNSSAVLGLCDKGPDCSLMLQYFLILSAMSSFIYSLAAIPGYMVLLRS

SEQ ID NO: 984 - protein, 35 aa, Artificial Sequence
  Synthetic polypeptide
KKRMLKKGNYGRQNMQKIKKKYLRKFKKLYKNKEK

SEQ ID NO: 985 - protein, 146 aa, Artificial Sequence
  Synthetic polypeptide
MLDTEKELLKEKIKEALIQQSQEQKEILEKCLEEERQRNKEALVSAAKLEKEAVKDAVLKVVEEERKNLEKAHAEERELWKTEHAKDQEKVSQEIQKAIQEQRKISQESPGGGTLPQQRVNQEEIIHWDLESWEIQFKEYIGNPQE

SEQ ID NO: 986 - protein, 370 aa, Artificial Sequence
  Synthetic polypeptide
MDDDDFGGFEAAETFDGGSGETQTTSPAIPWAAFPAVSGVHLSPSSPEIVLDRDHSSSIGCLSSDAIISSPENTHAANSIVSQTIPKAQIQQSTHTHLDISLFPLGLTDEKSNGTIALVDDSEDPGANVSNIQLQQKISSLEIKLKVSEEEKQRIKQDVESLMEKHNVLEKGFLKEKEQEAISFQDRYKELQEKHKQELEDMRKAGHEALSIIVDEYKHQRLLEMLDTEKELLKEKIKEALIQQSQEQKEILEKCLEEERQRNKEALVSAAKLEKEAVKDAVLKVVEEERKNLEKAHAEERELWKTEHAKDQEKVSQEIQKAIQEQRKISQESPGGGTLPQQRVNQEEIIHWDLESWEIQFKEYIGNPQE

SEQ ID NO: 987 - protein, 370 aa, Artificial Sequence; identical to SEQ ID NO: 986
  Synthetic polypeptide

SEQ ID NO: 988 - protein, 406 aa, Artificial Sequence
  Synthetic polypeptide
MDDDDFGGFEAAETFDGGSGETQTTSPAIPWAAFPAVSGVHLSPSSPEIVLDRDHSSSIGCLSSDAIISSPENTHAANSIVSQTIPKAQIQQSTHTHLDISLFPLGLTDEKSNGTIALVDDSEDPGANVSNIQLQQKISSLEIKLKVSEEEKQRIKQDVESLMEKHNVLEKGFLKEKEQEAISFQDRYKELQEKHKQELEDMRKAGHEALSIIVDEYKALLQSSVKQQVEAIEKQYISAIEKQAHKCEELLNAQHQRLLEMLDTEKELLKEKIKEALIQQSQEQKEILEKCLEEERQRNKEALVSAAKLEKEAVKDAVLKVVEEERKNLEKAHAEERELWKTEHAKDQEKVSQEIQKAIQEQRKISQESPGGGTLPQQRVNQEEIIHWDLESWEIQFKEYIGNPQE

SEQ ID NO: 989 - protein, 406 aa, Artificial Sequence; identical to SEQ ID NO: 988
  Synthetic polypeptide

SEQ ID NO: 990 - protein, 376 aa, Artificial Sequence
  Synthetic polypeptide
MPMWNKVSGVHLSPSSPEIVLDRDHSSSIGCLSSDAIISSPENTHAANSIVSQTIPKAQIQQSTHTHLDISLFPLGLTDEKSNGTIALVDDSEDPGANVSNIQLQQKISSLEIKLKVSEEEKQRIKQDVESLMEKHNVLEKGFLKEKEQEAISFQDRYKELQEKHKQELEDMRKAGHEALSIIVDEYKALLQSSVKQQVEAIEKQYISAIEKQAHKCEELLNAQHQRLLEMLDTEKELLKEKIKEALIQQSQEQKEILEKCLEEERQRNKEALVSAAKLEKEAVKDAVLKVVEEERKNLEKAHAEERELWKTEHAKDQEKVSQEIQKAIQEQRKISQESPGGGTLPQQRVNQEEIIHWDLESWEIQFKEYIGNPQE

SEQ ID NO: 991 - protein, 105 aa, Artificial Sequence
  Synthetic polypeptide
ALVSAAKLEKEAVKDAVLKVVEEERKNLEKAHAEERELWKTEHAKDQEKVSQEIQKAIQEQRKISQESPGGGTLPQQRVNQEEIIHWDLESWEIQFKEYIGNPQE

SEQ ID NO: 992 - protein, 394 aa, Artificial Sequence
  Synthetic polypeptide
MDDDDFGGFEAAETFDGGSGETQTTSPAIPWAAFPAVSGVHLSPSSPEIVLDRDHSSSIGCLSSDAIISSPENTHAANSIVSQTIPKAQIQQSTHTHLDISLFPLGLTDEKSNGTIALVDDSEDPGANVSNIQLQQKISSLEIKLKVSEEEKQRIKQDVESLMEKHNVLEKGFLKEKEQEAISFQDRYKELQEKHKQELEDMRKAGHEALSIIVDEYKHQRLLEMLDTEKELLKEKIKEALIQQSQEQKEILEKCLEEERQRNKEALVSAAKLEKEAVKDAVLKVVEEERKNLEKAHAEERELWKTEHAKDQEKVSQEIQKAIQEQRKISQETVKAAIIEEQKRSEKAVEEAVKRTRDELIEYIKEQKREKSGLGGGGCSAPRSHHCTPGWAPE

SEQ ID NO: 993 - protein, 394 aa, Artificial Sequence; identical to SEQ ID NO: 992
  Synthetic polypeptide

SEQ ID NO: 994 - protein, 430 aa, Artificial Sequence
  Synthetic polypeptide
MDDDDFGGFEAAETFDGGSGETQTTSPAIPWAAFPAVSGVHLSPSSPEIVLDRDHSSSIGCLSSDAIISSPENTHAANSIVSQTIPKAQIQQSTHTHLDISLFPLGLTDEKSNGTIALVDDSEDPGANVSNIQLQQKISSLEIKLKVSEEEKQRIKQDVESLMEKHNVLEKGFLKEKEQEAISFQDRYKELQEKHKQELEDMRKAGHEALSIIVDEYKALLQSSVKQQVEAIEKQYISAIEKQAHKCEELLNAQHQRLLEMLDTEKELLKEKIKEALIQQSQEQKEILEKCLEEERQRNKEALVSAAKLEKEAVKDAVLKVVEEERKNLEKAHAEERELWKTEHAKDQEKVSQEIQKAIQEQRKISQETVKAAIIEEQKRSEKAVEEAVKRTRDELIEYIKEQKREKSGLGGGGCSAPRSHHCTPGWAPE

SEQ ID NO: 995 - protein, 430 aa, Artificial Sequence; identical to SEQ ID NO: 994
  Synthetic polypeptide

SEQ ID NO: 996 - protein, 400 aa, Artificial Sequence
  Synthetic polypeptide
MPMWNKVSGVHLSPSSPEIVLDRDHSSSIGCLSSDAIISSPENTHAANSIVSQTIPKAQIQQSTHTHLDISLFPLGLTDEKSNGTIALVDDSEDPGANVSNIQLQQKISSLEIKLKVSEEEKQRIKQDVESLMEKHNVLEKGFLKEKEQEAISFQDRYKELQEKHKQELEDMRKAGHEALSIIVDEYKALLQSSVKQQVEAIEKQYISAIEKQAHKCEELLNAQHQRLLEMLDTEKELLKEKIKEALIQQSQEQKEILEKCLEEERQRNKEALVSAAKLEKEAVKDAVLKVVEEERKNLEKAHAEERELWKTEHAKDQEKVSQEIQKAIQEQRKISQETVKAAIIEEQKRSEKAVEEAVKRTRDELIEYIKEQKREKSGLGGGGCSAPRSHHCTPGWAPE

SEQ ID NO: 997 - protein, 129 aa, Artificial Sequence
  Synthetic polypeptide
ALVSAAKLEKEAVKDAVLKVVEEERKNLEKAHAEERELWKTEHAKDQEKVSQEIQKAIQEQRKISQETVKAAIIEEQKRSEKAVEEAVKRTRDELIEYIKEQKREKSGLGGGGCSAPRSHHCTPGWAPE

SEQ ID NO: 998 - protein, 35 aa, Artificial Sequence; identical to SEQ ID NO: 984
  Synthetic polypeptide

SEQ ID NO: 999 - protein, 186 aa, Artificial Sequence
  Synthetic polypeptide
MAAEEVLQTVDHYKTEIERLTKELTETTHEKIQAAEYGLVVLEEKLTLKQQYDELEAEYDSLKQELEQLKEAFGQSFSIHRKVAEDGETREETLLQESASKEAYYLGKILEMQNELKQSRAVVTNVQAENERLTAVVQDLKERMRTRHSSSPEDTATRCHLGRREQLSPDTEPASTLILDLQPPEL

SEQ ID NO: 1000 - protein, 186 aa, Artificial Sequence; identical to SEQ ID NO: 999
  Synthetic polypeptide

SEQ ID NO: 1001 - protein, 186 aa, Artificial Sequence; identical to SEQ ID NO: 999
  Synthetic polypeptide

SEQ ID NO: 1002 - protein, 45 aa, Artificial Sequence
  Synthetic polypeptide
RHLWGGTWHNSCPWKFQHSSYNFSWSKWSDWHWTHCRDHNFPRRK

SEQ ID NO: 1003 - protein, 207 aa, Artificial Sequence
  Synthetic polypeptide
MKKAEMGRFSISPDEDSSSYSSNSDFNYSYPTKQAALKSHYADVDPENQNFLLESNLGKKKYETEFHPGTTSFGMSVFNLSNAIVGSGILGLSYAMANTGIALFIILLTFVSIFSLYSVHLLLKTANEGGSLLYEQLGYKAFGLVGKLAASGSITMQNIGAMSSYLFIVKYELPLVIQALTNIEDKTGYSKVQNTSVPSILNKGYST

SEQ ID NO: 1004 - protein, 216 aa, Artificial Sequence
  Synthetic polypeptide
MKKAEMGRFSISPDEDSSSYSSNSDFNYSYPTKQAALKSHYADVDPENQNFLLESNLGKKKYETEFHPGTTSFGMSVFNLSNAIVGSGILGLSYAMANTGIALFIILLTFVSIFSLYSVHLLLKTANEGGSLLYEQLGYKAFGLVGKLAASGSITMQNIGAMSSYLFIVKYELPLVIQALTNIEDKTGLQCHLQDTSNMYVQVLQSPKHFGPKHFE

SEQ ID NO: 1005 - protein, 591 aa, Artificial Sequence
  Synthetic polypeptide
MMFWRKLPKALFIGLTLAIAVNLLLVFSSKGTLQNLFTGGLHRELPLHLNKRYGAVIKRLSHLEVELQDLKESMKLALRQQENVNSTLKRAKDEVRPLLKAMETKVNETKKHKTQMKLFPHSQLFRQWGEDLSEAQQKAAQDLFRKFGYNAYLSNQLPLNRTIPDTRDYRCLRKTYPSQLPSLSVILIFVNEALSIIQRAITSIINRTPSRLLKEIILVDDFSSNGELKVHLDEKIKLYNQKYPGLLKIIRHPERKGLAQARNTGWEAATADVVAILDAHIEVNVGWAEPILARIQEDRTVIVSPVFDNIRFDTFKLDKYELAVDGFNWELWCRYDALPQAWIDLHDVTAPVKSPSIMGILAANRHFLGEIGSLDGGMLIYGGENVELSLRVWQCGGKVEILPCSRIAHLERHHKPYALDLTAALKRNALRVAEIWMDEHKHMVYLAWNIPLQNSGIDFGDVSSRMALREKLKCKTFDWYLKNVYPLLKPLHTIVGYGRMKNLLDENVCLDQGPVPGNTPIMYYCHEFSSQNVYYHLTGELYVGQLIAEASASDRCLTDPGKAEKPTLEPCSKAAKNRLHIYWDFKPNLNL

SEQ ID NO: 1006 - protein, 4 aa, Artificial Sequence
  Synthetic polypeptide
FIHS

SEQ ID NO: 1007 - protein, 32 aa, Artificial Sequence
  Synthetic polypeptide
MKMSAWIRDPFQATPPSCITAMNSAHRMSTIT

SEQ ID NO: 1008 - protein, 50 aa, Artificial Sequence
  Synthetic polypeptide
MCVGEKRRAIIPSHLAYGKRGFPPSVPAACLGLPKCRDCSLCPAATPSGK

SEQ ID NO: 1009 - protein, 152 aa, Artificial Sequence
  Synthetic polypeptide
MTLRPSLLPLHLLLLLLLSAAVCRAEAGLETESPVRTLQVETLVEPPEPCAEPAAFGDTLHIHYTGSLVDGRIIDTSLTRDPLVIELGQKQVIPGLEQSLLDMCVGEKRRAIIPSHLAYGKRGFPPSVPAACLGLPKCRDCSLCPAATPSGK

SEQ ID NO: 1010 - protein, 152 aa, Artificial Sequence; identical to SEQ ID NO: 1009
  Synthetic polypeptide

SEQ ID NO: 1011 - protein, 152 aa, Artificial Sequence; identical to SEQ ID NO: 1009
  Synthetic polypeptide

SEQ ID NO: 1012 - protein, 402 aa, Artificial Sequence
  Synthetic polypeptide
MSIHFSSPVFTSRSAAFSGRGAQVRLSSARPGGLGSSSLYGLGASRPRVAVRSAYGGPVGAGIREVTINQSLLAPLRLDADPSLQRVRQEESEQIKTLNNKFASFIDKVRFLEQQNKLLETKWTLLQEQKSAKSSRLPDIFEAQIAGLRGQLEALQVDGGRLEAELRSMQDVVEDFKNKYEDEINHRTAAENEFVVLKKDVDAAYMSKVELEAKVDALNDEINFLRTLNETELTELQSQISDTSVVLSMDNSRSLDLDGIIAEVKAQYEEMAKCSRAEAEAWYQTKFETLQAQAGKHGDDLRNTRNEISEMNRAIQRLQAEIDNIKNQRAKLEAAIAEAEERGELALKDARAKQEELEAALQRGKQDMARQLREYQELMSVKLALDIEIATYRKLLEGEESR

SEQ ID NO: 1013 - protein, 490 aa, Artificial Sequence
  Synthetic polypeptide
MASTSTTIRSHSSSRRGFSANSARLPGVSRSGFSSVSVSRSRGSGGLGGACGGAGFGSRSLYGLGGSKRISIGGGSCAISGGYGSRAGGSYGFGGAGSGFGFGGGAGIGFGLGGGAGLAGGFGGPGFPVCPPGGIQEVTVNQSLLTPLNLQIDPTIQRVRAEEREQIKTLNNKFASFIDKVRFLEQQNKVLETKWTLLQEQGTKTVRQNLEPLFEQYINNLRRQLDSIVGERGRLDSELRGMQDLVEDFKNKYEDEINKRTAAENEFVTLKKDVDAAYMNKVELQAKADTLTDEINFLRALYDAELSQMQTHISDTSVVLSMDNNRNLDLDSIIAEVKAQYEEIAQRSRAEAESWYQTKYEELQVTAGRHGDDLRNTKQEIAEINRMIQRLRSEIDHVKKQCANLQAAIADAEQRGEMALKDAKNKLEGLEDALQKAKQDLARLLKEYQELMNVKLALDVEIATYRKLLEGEECRLNDKTRSCLKKKKKK

SEQ ID NO: 1014 - protein, 552 aa, Artificial Sequence
  Synthetic polypeptide
MSRQSSVSFRSGGSRSFSTASAITPSVSRTSFTSVSRSGGGGGGGFGRVSLAGACGVGGYGSRSLYNLGGSKRISISTSGGSFRNRFGAGAGGGYGFGGGAGSGFGFGGGAGGGFGLGGGAGFGGGFGGPGFPVCPPGGIQEVTVNQSLLTPLNLQIDPSIQRVRTEEREQIKTLNNKFASFIDKVRFLEQQNKVLDTKWTLLQEQGTKTVRQNLEPLFEQYINNLRRQLDSIVGERGRLDSELRNMQDLVEDFKNKYEDEINKRTTAENEFVMLKKDVDAAYMNKVELEAKVDALMDEINFMKMFFDAELSQMQTHVSDTSVVLSMDNNRNLDLDSIIAEVKAQYEEIANRSRTEAESWYQTKYEELQQTAGRHGDDLRNTKHEISEMNRMIQRLRAEIDNVKKQCANLQNAIADAEQRGELALKDARNKLAELEEALQKAKQDMARLLREYQELMNTKLALDVEIATYRKLLEGEECRLSGEGVGPVNISVVTSSVSSGYGSGSGYGGGLGGGLGGGLGGGLAGGSSGSYYSPARPPPRPPPRPPPRPPP

SEQ ID NO: 1015 - protein, 527 aa, Artificial Sequence
  Synthetic polypeptide
MSRQSSVSFRSGGSRSFSTASAITPSVSRTSFTSVSRSGGGGGGGFGRVSLAGACGVGGYGSRSLYNLGGSKRISISTSGGSFRNRFGAGAGGGYGFGGGAGSGFGFGGGAGGGFGLGGGAGFGGGFGGPGFPVCPPGGIQEVTVNQSLLTPLNLQIDPSIQRVRTEEREQIKTLNNKFASFIDKVRFLEQQNKVLDTKWTLLQEQGTKTVRQNLEPLFEQYINNLRRQLDSIVGERGRLDSELRNMQDLVEDFKNKYEDEINKRTTAENEFVMLKKDVDAAYMNKVELEAKVDALMDEINFMKMFFDAELSQMQTHVSDTSVVLSMDNNRNLDLDSIIAEVKAQYEEIANRSRTEAESWYQTKYEELQQTAGRHGDDLRNTKHEISEMNRMIQRLRAEIDNVKKQCANLQNAIADAEQRGELALKDARNKLAELEEALQKAKQDMARLLREYQELMNTKLALDVEIATYRKLLEGEECRLSGEGVGPVNISVVTSSVSSGYGSGSGYGGGLGGGLGGGLGGGLAGG

SEQ ID NO: 1016 - protein, 243 aa, Artificial Sequence
  Synthetic polypeptide
MSRQSSVSFRSGGSRSFSTASAITPSVSRTSFTSVSRSGGGGGGGFGRVSLAGACGVGGYGSRSLYNLGGSKRISISTSGGSFRNRFGAGAGGGYGFGGGAGSGFGFGGGAGGGFGLGGGAGFGGGFGGPGFPVCPPGGIQEVTVNQSLLTPLNLQIDPSIQRVRTEEREQIKTLNNKFASFIDKVRFLEQQNKVLDTKWTLLQEQGTKTVRQNLEPLFEQYINNLRRQLDSIGLHQVLTEKM

SEQ ID NO: 1017 - protein, 11 aa, Artificial Sequence
  Synthetic polypeptide
GPCCRSRAPRL

SEQ ID NO: 1018 - protein, 133 aa, Artificial Sequence
  Synthetic polypeptide
MSRQSSVSFRSGGSRGFGGPGFPVCPPGGIQEVTVNQSLLTPLNLQIDPSIQRVRTEEREQIKTLNNKFASFIDKVRFLEQQNKVLDTKWTLLQEQGTKTVRQNLEPLFEQYINNLRRQLDSIGLHQVLTEKM

SEQ ID NO: 1019 - protein, 127 aa, Artificial Sequence
  Synthetic polypeptide
MAQSINITELNLPQLEMLKNQLDQEVEFLSTSIAQLKVVQTKYVEAKDCLNVLNKSNEGKELLVPLTSSMYVPGKLHDVEHVLIDVGTGYYVEKNLLNSGGGGCSEPRSHHCTPAWVTRGKLRLKKE

SEQ ID NO: 1020 - protein, 127 aa, Artificial Sequence; identical to SEQ ID NO: 1019
  Synthetic polypeptide

SEQ ID NO: 1021 - protein, 82 aa, Artificial Sequence
  Synthetic polypeptide
MAQSINITELNLPQLEMLKNQLDQMYVPGKLHDVEHVLIDVGTGYYVEKNLLNSGGGGCSEPRSHHCTPAWVTRGKLRLKKE

SEQ ID NO: 1022 - skipped

SEQ ID NO: 1023 - protein, 302 aa, Artificial Sequence
  Synthetic polypeptide
MDTGVIEGGLNVTLTIRLLMHGKEVGSIIGKKGESVKKMREESGARINISEGNCPERIITLAGPTNAIFKAFAMIIDKLEEDISSSMTNSTAASRPPVTLRLVVPASQCGSLIGKGGCKIKEIRESTGAQVQVAGDMLPNSTERAITIAGIPQSIIECVKQICVVMLESPPKGVTIPYRPKPSSSPVIFAGGQAYTIQGQYAIPQPDLTKLHQLAMQQSHFPMTHGNTGFSGIESSSPEVKGYWAGLDASAQTTSHELTIPNDGQVRWLIPVIPALWEAKVGGSQGQEIETILANMVKPRLY

SEQ ID NO: 1024 - protein, 289 aa, Artificial Sequence
  Synthetic polypeptide
MDTGVIEGGLNVTLTIRLLMHGKEVGSIIGKKGESVKKMREESGARINISEGNCPERIITLAGPTNAIFKAFAMIIDKLEEDISSSMTNSTAASRPPVTLRLVVPASQCGSLIGKGGCKIKEIRESTGAQVQVAGDMLPNSTERAITIAGIPQSIIECVKQICVVMLESPPKGVTIPYRPKPSSSPVIFAGGQAYTIQGQYAIPQPDLTKLHQLAMQQSHFPMTHGNTGFSAGLDASAQTTSHELTIPNDGQVRWLIPVIPALWEAKVGGSQGQEIETILANMVKPRLY

SEQ ID NO: 1025 - protein, 289 aa, Artificial Sequence; identical to SEQ ID NO: 1024
  Synthetic polypeptide

SEQ ID NO: 1026 - protein, 306 aa, Artificial Sequence
  Synthetic polypeptide
MDTGVIEGGLNVTLTIRLLMHGKEVGSIIGKKGESVKKMREESGARINISEGNCPERIITLAGPTNAIFKAFAMIIDKLEEDISSSMTNSTAASRPPVTLRLVVPASQCGSLIGKGGCKIKEIRESTGAQVQVAGDMLPNSTERAITIAGIPQSIIECVKQICVVMLETLSQSPPKGVTIPYRPKPSSSPVIFAGGQAYTIQGQYAIPQPDLTKLHQLAMQQSHFPMTHGNTGFSGIESSSPEVKGYWAGLDASAQTTSHELTIPNDGQVRWLIPVIPALWEAKVGGSQGQEIETILANMVKPRLY

SEQ ID NO: 1027 - protein, 306 aa, Artificial Sequence; identical to SEQ ID NO: 1026
  Synthetic polypeptide

SEQ ID NO: 1028 - protein, 336 aa, Artificial Sequence
  Synthetic polypeptide
MDTGVIEGGLNVTLTIRLLMHGKEVGSIIGKKGESVKKMREESGARINISEGNCPERIITLAGPTNAIFKAFAMIIDKLEEDISSSMTNSTAASRPPVTLRLVVPASQCGSLIGKGGCKIKEIRESTGAQVQVAGDMLPNSTERAITIAGIPQSIIECVKQICVVMLETLSQSPPKGVTIPYRPKPSSSPVIFAGGQDRYSTGSDSASFPHTTPSMCLNPDLEGPPLEAYTIQGQYAIPQPDLTKLHQLAMQQSHFPMTHGNTGFSGIESSSPEVKGYWGLDASAQTTSHELTIPNDGQVRWLIPVIPALWEAKVGGSQGQEIETILANMVKPRLY

SEQ ID NO: 1029 - protein, 336 aa, Artificial Sequence; identical to SEQ ID NO: 1028
  Synthetic polypeptide

SEQ ID NO: 1030 - protein, 292 aa, Artificial Sequence
  Synthetic polypeptide
MDTGVIEGGLNVTLTIRLLMHGKEVGSIIGKKGESVKKMREESGARINISEGNCPERIITLAGPTNAIFKAFAMIIDKLEEDISSSMTNSTAASRPPVTLRLVVPASQCGSLIGKGGCKIKEIRESTGAQVQVAGDMLPNSTERAITIAGIPQSIIECVKQICVVMLETLSQSPPKGVTIPYRPKPSSSPVIFAGGQLTKLHQLAMQQSHFPMTHGNTGFSGIESSSPEVKGYWAGLDASAQTTSHELTIPNDGQVRWLIPVIPALWEAKVGGSQGQEIETILANMVKPRLY

SEQ ID NO: 1031 - protein, 337 aa, Artificial Sequence
  Synthetic polypeptide
MDTGVIEGGLNVTLTIRLLMHGKEVGSIIGKKGESVKKMREESGARINISEGNCPERIITLAGPTNAIFKAFAMIIDKLEEDISSSMTNSTAASRPPVTLRLVVPASQCGSLIGKGGCKIKEIRESTGAQVQVAGDMLPNSTERAITIAGIPQSIIECVKQICVVMLETLSQSPPKGVTIPYRPKPSSSPVIFAGGQDRYSTGSDSASFPHTTPSMCLNPDLEGPPLEAYTIQGQYAIPQPDLTKLHQLAMQQSHFPMTHGNTGFSGIESSSPEVKGYWAGLDASAQTTSHELTIPNDGQVRWLIPVIPALWEAKVGGSQGQEIETILANMVKPRLY

SEQ ID NO: 1032 - protein, 333 aa, Artificial Sequence
  Synthetic polypeptide
MDTGVIEGGLNVTLTIRLLMHGKEVGSIIGKKGESVKKMREESGARINISEGNCPERIITLAGPTNAIFKAFAMIIDKLEEDISSSMTNSTAASRPPVTLRLVVPASQCGSLIGKGGCKIKEIRESTGAQVQVAGDMLPNSTERAITIAGIPQSIIECVKQICVVMLESPPKGVTIPYRPKPSSSPVIFAGGQDRYSTGSDSASFPHTTPSMCLNPDLEGPPLEAYTIQGQYAIPQPDLTKLHQLAMQQSHFPMTHGNTGFSGIESSSPEVKGYWAGLDASAQTTSHELTIPNDGQVRWLIPVIPALWEAKVGGSQGQEIETILANMVKPRLY

SEQ ID NO: 1033 - protein, 332 aa, Artificial Sequence
  Synthetic polypeptide
MDTGVIEGGLNVTLTIRLLMHGKEVGSIIGKKGESVKKMREESGARINISEGNCPERIITLAGPTNAIFKAFAMIIDKLEEDISSSMTNSTAASRPPVTLRLVVPASQCGSLIGKGGCKIKEIRESTGAQVQVAGDMLPNSTERAITIAGIPQSIIECVKQICVVMLESPPKGVTIPYRPKPSSSPVIFAGGQDRYSTGSDSASFPHTTPSMCLNPDLEGPPLEAYTIQGQYAIPQPDLTKLHQLAMQQSHFPMTHGNTGFSGIESSSPEVKGYWGLDASAQTTSHELTIPNDGQVRWLIPVIPALWEAKVGGSQGQEIETILANMVKPRLY

SEQ ID NO: 1034 - protein, 293 aa, Artificial Sequence
  Synthetic polypeptide
MDTGVIEGGLNVTLTIRLLMHGKEVGSIIGKKGESVKKMREESGARINISEGNCPERIITLAGPTNAIFKAFAMIIDKLEEDISSSMTNSTAASRPPVTLRLVVPASQCGSLIGKGGCKIKEIRESTGAQVQVAGDMLPNSTERAITIAGIPQSIIECVKQICVVMLETLSQSPPKGVTIPYRPKPSSSPVIFAGGQAYTIQGQYAIPQPDLTKLHQLAMQQSHFPMTHGNTGFSAGLDASAQTTSHELTIPNDGQVRWLIPVIPALWEAKVGGSQGQEIETILANMVKPRLY

SEQ ID NO: 1035 - protein, 16 aa, Artificial Sequence
  Synthetic polypeptide
AWKGSWQYHRKERRIS

SEQ ID NO: 1036 - protein, 177 aa, Artificial Sequence
  Synthetic polypeptide
STGAQVQVAGDMLPNSTERAITIAGIPQSIIECVKQICVVMLESPPKGVTIPYRPKPSSSPVIFAGGQAYTIQGQYAIPQPDLTKLHQLAMQQSHFPMTHGNTGFSGIESSSPEVKGYWAGLDASAQTTSHELTIPNDGQVRWLIPVIPALWEAKVGGSQGQEIETILANMVKPRLY

SEQ ID NO: 1037 - protein, 8 aa, Artificial Sequence
  Synthetic polypeptide
CWSPPRRA

SEQ ID NO: 1038 - protein, 51 aa, Artificial Sequence
  Synthetic polypeptide
MLVEVAAAIAGYVFRDKVMSEFNNNFRQQMENYPKNNHTASILDRMQADHF

SEQ ID NO: 1039 - protein, 51 aa, Artificial Sequence; identical to SEQ ID NO: 1038
  Synthetic polypeptide

SEQ ID NO: 1040 - protein, 51 aa, Artificial Sequence; identical to SEQ ID NO: 1038
  Synthetic polypeptide

SEQ ID NO: 1041 - protein, 144 aa, Artificial Sequence
  Synthetic polypeptide
MAVEGGMKCVKFLLYVLLLAFCACAVGLIAVGVGAQLVLSQTIIQGATPGSLLPVVIIAVGVFLFLVAFVGCCGACKENYCLMITFAIFLSLIMLVEVAAAIAGYVFRDKVMSEFNNNFRQQMENYPKNNHTASILDRMQADHF

SEQ ID NO: 1042 - protein, 144 aa, Artificial Sequence; identical to SEQ ID NO: 1041
  Synthetic polypeptide

SEQ ID NO: 1043 - protein, 144 aa, Artificial Sequence; identical to SEQ ID NO: 1041
  Synthetic polypeptide

SEQ ID NO: 1044 - protein, 144 aa, Artificial Sequence; identical to SEQ ID NO: 1041
  Synthetic polypeptide

SEQ ID NO: 1045 - protein, 144 aa, Artificial Sequence; identical to SEQ ID NO: 1041
  Synthetic polypeptide

SEQ ID NO: 1046 - protein, 144 aa, Artificial Sequence; identical to SEQ ID NO: 1041
  Synthetic polypeptide

SEQ ID NO: 1047 - protein, 62 aa, Artificial Sequence
  Synthetic polypeptide
MITFAIFLSLIMLVEVAAAIAGYVFRDKVMSEFNNNFRQQMENYPKNNHTASILDRMQADHF

SEQ ID NO: 1048 - protein, 62 aa, Artificial Sequence; identical to SEQ ID NO: 1047
  Synthetic polypeptide

SEQ ID NO: 1049 - protein, 121 aa, Artificial Sequence
  Synthetic polypeptide
MAVEGGMKCVKFLLYVLLLAFCGATPGSLLPVVIIAVGVFLFLVAFVGCCGACKENYCLMITFAIFLSLIMLVEVAAAIAGYVFRDKVMSEFNNNFRQQMENYPKNNHTASILDRMQADHF

SEQ ID NO: 1050 - protein, 225 aa, Artificial Sequence
  Synthetic polypeptide
MSGEDEQQEQTIAEDLVVTKYKMGGDIANRVLRSLVEASSSGVSVLSLCEKGDAMIMEETGKIFKKEKEMKKGIAFPTSISVNNCVCHFSPLKSDQDYILKEGDLVKIDLGVHVDGFIANVAHTFVVDVAQGTQVTGRKADVIKAAHLCAEAALRLVKPGNQNTQVTEAWNKVAHSFNCTPIEGMLSHQLKQHVIDGEKTIIQNPTDQQKPGAVAHACNPSTLGG

SEQ ID NO: 1051 - protein, 225 aa, Artificial Sequence; identical to SEQ ID NO: 1050
  Synthetic polypeptide

SEQ ID NO: 1052 - protein, 578 aa, Artificial Sequence
  Synthetic polypeptide
MAQWEMLQNLDSPFQDQLHQLYSHSLLPVDIRQYLAVWIEDQNWQEAALGSDDSKATMLFFHFLDQLNYECGRCSQDPESLLLQHNLRKFCRDIQPFSQDPTQLAEMIFNLLLEEKRILIQAQRAQLEQGEPVLETPVESQQHEIESRILDLRAMMEKLVKSISQLKDQQDVFCFRYKIQAKGKTPSLDPHQTKEQKILQETLNELDKRRKEVLDASKALLGRLTTLIELLLPKLEEWKAQQQKACIRAPIDHGLEQLETWFTAGAKLLFHLRQLLKELKGLSCLVSYQDDPLTKGVDLRNAQVTELLQRLLHRAFVVETQPCMPQTPHRPLILKTGSKFTVRTRLLVRLQEGNESLTVEVSIDRNPPQLQGFRKFNILTSNQKTLTPEKGQSQGLIWDFGYLTLVEQRSGGSGKGSNKGPLGVTEELHIISFTVKYTYQGLKQELKTDTLPVVIISNMNQLSIAWASVLWFNLLSPNLQNQQFFSNPPKAPWSLLGPALSWQFSSYVGRGLNSDQLSMLRNKLFGQNCRTEDPLLSWADFTKRESPPGKLPFWTWLDKILELVHDHLKDLWNDGKKK

SEQ ID NO: 1053 - protein, 574 aa, Artificial Sequence
  Synthetic polypeptide
MAQWEMLQNLDSPFQDQLHQLYSHSLLPVDIRQYLAVWIEDQNWQEAALGSDDSKATMLFFHFLDQLNYECGRCSQDPESLLLQHNLRKFCRDIQDPTQLAEMIFNLLLEEKRILIQAQRAQLEQGEPVLETPVESQQHEIESRILDLRAMMEKLVKSISQLKDQQDVFCFRYKIQAKGKTPSLDPHQTKEQKILQETLNELDKRRKEVLDASKALLGRLTTLIELLLPKLEEWKAQQQKACIRAPIDHGLEQLETWFTAGAKLLFHLRQLLKELKGLSCLVSYQDDPLTKGVDLRNAQVTELLQRLLHRAFVVETQPCMPQTPHRPLILKTGSKFTVRTRLLVRLQEGNESLTVEVSIDRNPPQLQGFRKFNILTSNQKTLTPEKGQSQGLIWDFGYLTLVEQRSGGSGKGSNKGPLGVTEELHIISFTVKYTYQGLKQELKTDTLPVVIISNMNQLSIAWASVLWFNLLSPNLQNQQFFSNPPKAPWSLLGPALSWQFSSYVGRGLNSDQLSMLRNKLFGQNCRTEDPLLSWADFTKRESPPGKLPFWTWLDKILELVHDHLKDLWNDGKKK

SEQ ID NO: 1054 - protein, 389 aa, Artificial Sequence
  Synthetic polypeptide
MAQWEMLQNLDSPFQDQLHQLYSHSLLPVDIRQYLAVWIEDQNWQEAALGSDDSKATMLFFHFLDQLNYECGRCSQDPESLLLQHNLRKFCRDIQPFSQDPTQLAEMIFNLLLEEKRILIQAQRAQLEQGEPVLETPVESQQHEIESRILDLRAMMEKLVKSISQLKDQQDVFCFRYKIQAKGKTPSLDPHQTKEQKILQETLNELDKRRKEVLDASKALLGRLTTLIELLLPKLEEWKAQQQKACIRAPIDHGLEQLETWFTAGAKLLFHLRQLLKELKGLSCLVSYQDDPLTKGVDLRNAQVTELLQRLLHRAFVVETQPCMPQTPHRPLILKTGSKFTVRTRLLVRLQEGNESLTVEVSIDRYLEGSGQWLLSSMEGFQHFNSWLG

SEQ ID NO: 1055 - protein, 385 aa, Artificial Sequence
  Synthetic polypeptide
MAQWEMLQNLDSPFQDQLHQLYSHSLLPVDIRQYLAVWIEDQNWQEAALGSDDSKATMLFFHFLDQLNYECGRCSQDPESLLLQHNLRKFCRDIQDPTQLAEMIFNLLLEEKRILIQAQRAQLEQGEPVLETPVESQQHEIESRILDLRAMMEKLVKSISQLKDQQDVFCFRYKIQAKGKTPSLDPHQTKEQKILQETLNELDKRRKEVLDASKALLGRLTTLIELLLPKLEEWKAQQQKACIRAPIDHGLEQLETWFTAGAKLLFHLRQLLKELKGLSCLVSYQDDPLTKGVDLRNAQVTELLQRLLHRAFVVETQPCMPQTPHRPLILKTGSKFTVRTRLLVRLQEGNESLTVEVSIDRYLEGSGQWLLSSMEGFQHFNSWLG

SEQ ID NO: 1056 - protein, 385 aa, Artificial Sequence; identical to SEQ ID NO: 1055
  Synthetic polypeptide

SEQ ID NO: 1057 - protein, 362 aa, Artificial Sequence
  Synthetic polypeptide
MAQWEMLQNLDSPFQDQLHQLYSHSLLPVDIRQYLAVWIEDQNWQEAALGSDDSKATMLFFHFLDQLNYECGRCSQDPESLLLQHNLRKFCRDIQPFSQDPTQLAEMIFNLLLEEKRILIQAQRAQLEQGEPVLETPVESQQHEIESRILDLRAMMEKLVKSISQLKDQQDVFCFRYKIQAKGKTPSLDPHQTKEQKILQETLNELDKRRKEVLDASKALLGRLTTLIELLLPKLEEWKAQQQKACIRAPIDHGLEQLETWFTAGAKLLFHLRQLLKELKGLSCLVSYQDDPLTKGVDLRNAQVTELLQRLLHRAFVVETQPCMPQTPHRPLILKTGSKFTVRTRLPAVLGGIGVLGAGQGS

SEQ ID NO: 1058 - protein, 358 aa, Artificial Sequence
  Synthetic polypeptide
MAQWEMLQNLDSPFQDQLHQLYSHSLLPVDIRQYLAVWIEDQNWQEAALGSDDSKATMLFFHFLDQLNYECGRCSQDPESLLLQHNLRKFCRDIQDPTQLAEMIFNLLLEEKRILIQAQRAQLEQGEPVLETPVESQQHEIESRILDLRAMMEKLVKSISQLKDQQDVFCFRYKIQAKGKTPSLDPHQTKEQKILQETLNELDKRRKEVLDASKALLGRLTTLIELLLPKLEEWKAQQQKACIRAPIDHGLEQLETWFTAGAKLLFHLRQLLKELKGLSCLVSYQDDPLTKGVDLRNAQVTELLQRLLHRAFVVETQPCMPQTPHRPLILKTGSKFTVRTRLPAVLGGIGVLGAGQGS

SEQ ID NO: 1059 - protein, 358 aa, Artificial Sequence; identical to SEQ ID NO: 1058
  Synthetic polypeptide

SEQ ID NO: 1060 - protein, 192 aa, Artificial Sequence
  Synthetic polypeptide
MQPASAKWYDRRDYVFIEFCVEDSKDVNVNFEKSKLTFSCLGGSDNFKHLNEIDLFHCIDPNDSKHKRTDRSILCCLRKGESGQSWPRLTKERAKLNWLSVDFNNWKDWEDDSDEDMSNFDRFSEMMNNMGGDEDVDLPEVDGADDVPVIPATGELRWENRLNLGGGGCSEPRSHHCTPVWAAERGSISKRK

SEQ ID NO: 1061 - protein, 162 aa, Artificial Sequence
  Synthetic polypeptide
MQPASAKWYDRRDYVFIEFCVEDSKDVNVNFEKSKLTFSCLGGSDNFKHLNEIDLFHCIDPNDSKHKRTDRSILCCLRKGESGQSWPRLTKERAKMMNNMGGDEDVDLPEVDGADDVPVIPATGELRWENRLNLGGGGCSEPRSHHCTPVWAAERGSISKRK

SEQ ID NO: 1062 - protein, 159 aa, Artificial Sequence
  Synthetic polypeptide
MQPASAKWYDRRDYVFIEFCVEDSKDVNVNFEKSKLTFSCLGGSDNFKHLNEIDLFHCIDPNLNWLSVDFNNWKDWEDDSDEDMSNFDRFSEMMNNMGGDEDVDLPEVDGADDVPVIPATGELRWENRLNLGGGGCSEPRSHHCTPVWAAERGSISKRK

SEQ ID NO: 1063 - protein, 156 aa, Artificial Sequence
  Synthetic polypeptide
MQPASAKWYDRRDYVFIEFCVEDSKDVNVNFEKSKLTFSCLRKGESGQSWPRLTKERAKLNWLSVDFNNWKDWEDDSDEDMSNFDRFSEMMNNMGGDEDVDLPEVDGADDVPVIPATGELRWENRLNLGGGGCSEPRSHHCTPVWAAERGSISKRK

SEQ ID NO: 1064 - protein, 254 aa, Artificial Sequence
  Synthetic polypeptide
MWLGRRALCALVLLLACASLGLLYASTRDAPGLRLPLAPWAPPQSPRRPELPDLAPEPRYAHIPVRIKEQVVGLLAWNNCSCESSGGGLPLPFQKQVRAIDLTKAFDPAELRAASATREQEFQAFLSRSQSPADQLLIAPANSPLQYPLQGVEVQPLRSILVPGLSLQAASGQEVYQVNLTASLGTWDVAGEVTGVTLTGEGQADLTLVSPGLDQLNRQLQLVTYSSRSYQTNTADTECKFHKGKNLLFLSTKA

SEQ ID NO: 1065 - protein, 254 aa, Artificial Sequence; identical to SEQ ID NO: 1064
  Synthetic polypeptide

SEQ ID NO: 1066 - protein, 254 aa, Artificial Sequence; identical to SEQ ID NO: 1064
  Synthetic polypeptide

SEQ ID NO: 1067 - protein, 254 aa, Artificial Sequence; identical to SEQ ID NO: 1064
  Synthetic polypeptide

SEQ ID NO: 1068 - protein, 254 aa, Artificial Sequence; identical to SEQ ID NO: 1064
  Synthetic polypeptide

SEQ ID NO: 1069 - protein, 199 aa, Artificial Sequence
  Synthetic polypeptide
MWLGRRALCALVLLLACASLGLLYASTRDAPGLRLPLAPWAPPQSPRRPELPDLAPEPRYAHIPVRIKEQVVGSQSPADQLLIAPANSPLQYPLQGVEVQPLRSILVPGLSLQAASGQEVYQVNLTASLGTWDVAGEVTGVTLTGEGQADLTLVSPGLDQLNRQLQLVTYSSRSYQTNTADTECKFHKGKNLLFLSTKA

SEQ ID NO: 1070 - protein, 225 aa, Artificial Sequence
  Synthetic polypeptide
MWLGRRALCALVLLLACASLGLLYASTRDAPGLRLPLAPWAPPQSPRRPELPDLAPEPRYAHIPVRIKEQVVGLLAWNNCSCESSGGGLPLPFQKQVRAIDLTKAFDPAELRAASATREQEFQAFLSRSQSPADQLLIAPANSPLQYPLQGVEVQPLRSILVPGEPDCLPRHLGRGRGSDWSYSHWRGSGRSHPCQPRAGPTQQATTTGHLQQPKLPDQHSRHRM

SEQ ID NO: 1071 - protein, 10 aa, Artificial Sequence
  Synthetic polypeptide
GASPQLTSCS

SEQ ID NO: 1072 - protein, 10 aa, Artificial Sequence
  Synthetic polypeptide
GASPQLTSCS

SEQ ID NO: 1073 - protein, 247 aa, Artificial Sequence
  Synthetic polypeptide
MWLGRRALCALVLLLACASLGLLYASTRDAPGLRLPLAPWAPPQSPRRPELPDLAPEPRYAHIPVRIKEQVVGLLAWNNCSCESSGGGLPLPFQKQVRAIDLTKAFDPAELRAASATREQEFQAFLSRSQSPADQLLIAPANSPLQYPLQGVEVQPLRSILVPGLSLQAASGQEVYQVNLTASLGTWDVAGEVTGVTLTGEGQADLTLVSPGLDQLNRQLQLVTYSSRSYQTNTADTGIYLIGLSWG

SEQ ID NO: 1074 - protein, 247 aa, Artificial Sequence; identical to SEQ ID NO: 1073
  Synthetic polypeptide

SEQ ID NO: 1075 - protein, 247 aa, Artificial Sequence; identical to SEQ ID NO: 1073
  Synthetic polypeptide

SEQ ID NO: 1076 - protein, 247 aa, Artificial Sequence; identical to SEQ ID NO: 1073
  Synthetic polypeptide

SEQ ID NO: 1077 - protein, 247 aa, Artificial Sequence; identical to SEQ ID NO: 1073
  Synthetic polypeptide

SEQ ID NO: 1078 - protein, 192 aa, Artificial Sequence
  Synthetic polypeptide
MWLGRRALCALVLLLACASLGLLYASTRDAPGLRLPLAPWAPPQSPRRPELPDLAPEPRYAHIPVRIKEQVVGSQSPADQLLIAPANSPLQYPLQGVEVQPLRSILVPGLSLQAASGQEVYQVNLTASLGTWDVAGEVTGVTLTGEGQADLTLVSPGLDQLNRQLQLVTYSSRSYQTNTADTGIYLIGLSWG

SEQ ID NO: 1079 - protein, 235 aa, Artificial Sequence
  Synthetic polypeptide
MWLGRRALCALVLLLACASLGLLYASTRDAPGLRLPLAPWAPPQSPRRPELPDLAPEPRYAHIPVRIKEQVVGLLAWNNCSCESSGGGLPLPFQKQVRAIDLTKAFDPAELRAASATREQEFQAFLSRSQSPADQLLIAPANSPLQYPLQGVEVQPLRSILVPGEPDCLPRHLGRGRGSDWSYSHWRGSGRSHPCQPRAGPTQQATTTGHLQQPKLPDQHSRHRNLLNRAIMGIK

SEQ ID NO: 1080 - protein, 466 aa, Artificial Sequence
  Synthetic polypeptide
MLTRVKSAVANFMGGIMAGSSGSEHGGGSCGGSDLPLRFPYGRPEFLGLSQDEVECSADHIARPILILKETRRLPWATGYAEVINAGKSTHNEDQASCEVLTVKKKAGAVTSTPNRNSSKRRSSLPNGEGLQLKENSESEGVSCHYWSLFDGHAGSGAAVVASRLLQHHITEQLQDIVDILKNSAVLPPTCLGEEPENTPANSRTLTRAASLRGGVGAPGSPSTPPTRFFTEKKIPHECLVIGALESAFKEMDLQIERERSSYNISGGCTALIVICLLGKLYVANAGDSRAIIIRNGEIIPMSSEFTPETERQRLQYLAFMQPHLLGNEFTHLEFPRRVQRKELGKKMLYRDFNMTGWAYKTIEDEDLKFPLIYGEGKKARVMATIGVTRGLGDHDLKVHDSNIYIKPFLSSAPEVRIYDLSKYDHGSDDVLILATDGLWDVLSNEEVAEAITQFLPNCDPDDPHR

SEQ ID NO: 1081 - protein, 551 aa, Artificial Sequence
  Synthetic polypeptide
MGMARGSLTRVPGVMGEGTQGPELSLDPDPCSPQSTPGLMKGNKLEEQDPRPLQPIPGLMEGNKLEEQDSSPPQSTPGLMKGNKREEQGLGPEPAAPQQPTAEEEALIEFHRSYRELFEFFCNNTTIHGAIRLVCSQHNRMKTAFWAVLWLCTFGMMYWQFGLLFGEYFSYPVSLNINLNSDKLVFPAVTICTLNPYRYPEIKEELEELDRITEQTLFDLYKYSSFTTLVAGSRSRRDLRGTLPHPLQRLRVPPPPHGARRARSVASSLRDNNPQVDWKDWKIGFQLCNQNKSDCFYQTYSSGVDAVREWYRFHYINILSRLPETLPSLEEDTLGNFIFACRFNQVSCNQANYSHFHHPMYGNCYTFNDKNNSNLWMSSMPGINNGLSLMLRAEQNDFIPLLSTVTGARVMVHGQDEPAFMDDGGFNLRPGVETSISMRKETLDRLGGDYGDCTKNGSDVPVENLYPSKYTQQVCIHSCFQESMIKECGCAYIFYPRPQNVEYCDYRKHSSWGRARWLTPVIPALWEATAGGSRGQEMETILANTVKPRLY

SEQ ID NO: 1082 - protein, 492 aa, Artificial Sequence
  Synthetic polypeptide
MEGNKLEEQDSSPPQSTPGLMKGNKREEQGLGPEPAAPQQPTAEEEALIEFHRSYRELFEFFCNNTTIHGAIRLVCSQHNRMKTAFWAVLWLCTFGMMYWQFGLLFGEYFSYPVSLNINLNSDKLVFPAVTICTLNPYRYPEIKEELEELDRITEQTLFDLYKYSSFTTLVAGSRSRRDLRGTLPHPLQRLRVPPPPHGARRARSVASSLRDNNPQVDWKDWKIGFQLCNQNKSDCFYQTYSSGVDAVREWYRFHYINILSRLPETLPSLEEDTLGNFIFACRFNQVSCNQANYSHFHHPMYGNCYTFNDKNNSNLWMSSMPGINNGLSLMLRAEQNDFIPLLSTVTGARVMVHGQDEPAFMDDGGFNLRPGVETSISMRKETLDRLGGDYGDCTKNGSDVPVENLYPSKYTQQVCIHSCFQESMIKECGCAYIFYPRPQNVEYCDYRKHSSWGRARWLTPVIPALWEATAGGSRGQEMETILANTVKPRLY

SEQ ID NO: 1083 - protein, 492 aa, Artificial Sequence; identical to SEQ ID NO: 1082
  Synthetic polypeptide

SEQ ID NO: 1084 - protein, 492 aa, Artificial Sequence; identical to SEQ ID NO: 1082
  Synthetic polypeptide

SEQ ID NO: 1085 - protein, 192 aa, Artificial Sequence
  Synthetic polypeptide
MYGNCYTFNDKNNSNLWMSSMPGINNGLSLMLRAEQNDFIPLLSTVTGARVMVHGQDEPAFMDDGGFNLRPGVETSISMRKETLDRLGGDYGDCTKNGSDVPVENLYPSKYTQQVCIHSCFQESMIKECGCAYIFYPRPQNVEYCDYRKHSSWGRARWLTPVIPALWEATAGGSRGQEMETILANTVKPRLY

SEQ ID NO: 1086 - protein, 515 aa, Artificial Sequence
  Synthetic polypeptide
MSSIKGNKLEEQDPRPLQPIPGLMEGNKLEEQDSSPPQSTPGLMKGNKREEQGLGPEPAAPQQPTAEEEALIEFHRSYRELFEFFCNNTTIHGAIRLVCSQHNRMKTAFWAVLWLCTFGMMYWQFGLLFGEYFSYPVSLNINLNSDKLVFPAVTICTLNPYRYPEIKEELEELDRITEQTLFDLYKYSSFTTLVAGSRSRRDLRGTLPHPLQRLRVPPPPHGARRARSVASSLRDNNPQVDWKDWKIGFQLCNQNKSDCFYQTYSSGVDAVREWYRFHYINILSRLPETLPSLEEDTLGNFIFACRFNQVSCNQANYSHFHHPMYGNCYTFNDKNNSNLWMSSMPGINNGLSLMLRAEQNDFIPLLSTVTGARVMVHGQDEPAFMDDGGFNLRPGVETSISMRKETLDRLGGDYGDCTKNGSDVPVENLYPSKYTQQVCIHSCFQESMIKECGCAYIFYPRPQNVEYCDYRKHSSWGRARWLTPVIPALWEATAGGSRGQEMETILANTVKPRLY

SEQ ID NO: 1087 - protein, 949 aa, Artificial Sequence
  Synthetic polypeptide
MDEQALLGLNPNADSDFRQRALAYFEQLKISPDAWQVCAEALAQRTYSDDHVKFFCFQVLEHQVKYKYSELTTVQQQLIRETLISWLQAQMLNPQPEKTFIRNKAAQVFALLFVTEYLTKWPKFFFDILSVVDLNPRGVDLYLRILMAIDSELVDRDVVHTSEEARRNTLIKDTMREQCIPNLVESWYQILQNYQFTNSEVTCQCLEVVGAYVSWIDLSLIANDRFINMLLGHMSIEVLREEACDCLFEVVNKGMDPVDKMKLVESLCQVLQSAGFFSIDQEEDVDFLARFSKLVNGMGQSLIVSWSKLIKNGDIKNAQEALQAIETKVALMLQLLIHEDDDISSNIIGFCYDYLHILKQLTVLSDQQKANVEAIMLAVMKKLTYDEEYNFENEGEDEAMFVEYRKQLKLLLDRLAQVSPELLLASVRRVFSSTLQNWQTTRFMEVEVAIRLLYMLAEALPVSHGAHFSGDVSKASALQDMMRTLVTSGVSSYQHTSVTLEFFETVVRYEKFFTVEPQHIPCVLMAFLDHRGLRHSSAKVRSRTAYLFSRFVKSLNKQMNPFIEDILNRIQDLLELSPPENGHQSLLSSDDQLFIYETAGVLIVNSEYPAERKQALMRNLLTPLMEKFKILLEKLMLAQDEERQASLADCLNHAVGFASRTSKAFSNKQTVKQCGCSEVYLDCLQTFLPALSCPLQKDILRSGVRTFLHRMIICLEEEVLPFIPSASEHMLKDCEAKDLQEFIPLINQITAKFKIQVSPFLQQMFMPLLHAIFEVLLRPAEENDQSAALEKQMLRRSYFAFLQTVTGSGMSEVIANQGAENVERVLVTVIQGAVEYPDPIAQKTCFIILSKLVELWGGKDGPVGFADFVYKHIVPACFLAPLKQTFDLADAQTVLALSECAVTLKTIHLKRGPECVQYLQQEYLPSLQVAPEIIQEPNRLFQTAEGDHS

SEQ ID NO: 1088 - protein, 344 aa, Artificial Sequence
  Synthetic polypeptide
MHLQMREDMAKYRRMSGVRPQSFRDLETPPHWAAYDTGLELLGRQEAGLALPRLEEALQGSLAQMESCRADCEGPEEQQGAEEEEDGAASQGGLYEAIAGHWIQVLQCRQRCVGETATRPGRSFPVPDFLPNQLRRLHEAHAQVGNLSQAIENVLSVLLFYPEDEAAKRALNQYQAQLGEPRPGLGPREDIQRFILRSLGEKRQLYYAMEHLGTSFKDPDPWTPAALIPEALREKLREDQEKRPWDHEPVKPKPLTYWKDVLLLEGVTLTQDSRQLNGSERAVLDGLLTPAECGVLLQLAKVLGRLRQEKRLNPGGGGCGELISCHCTPAWATRAKLHLKKKKK

SEQ ID NO: 1089 - protein, 528 aa, Artificial Sequence
  Synthetic polypeptide
MLRLLRPLLLLLLLPPPGSPEPPGLTQLSPGAPPQAPDLLYADGLRAYAAGAWAPAVALLREALRSQAALGRVRLDCGASCAADPGAALPAVLLGAPEPDSGPGPTQGSWERQLLRAALRRADCLTQCAARRLGPGGAARRVGSALRDAFRRREPYNYLQRAYYQLKKLDLAAAAAHTFFVANPMHLQMREDMAKYRRMSGVRPQSFRDLETPPHWAAYDTGLELLGRQEAGLALPRLEEALQGSLAQMESCRADCEGPEEQQGAEEEEDGAASQGGLYEAIAGHWIQVLQCRQRCVGETATRPGRSFPVPDFLPNQLRRLHEAHAQVGNLSQAIENVLSVLLFYPEDEAAKRALNQYQAQLGEPRPGLGPREDIQRFILRSLGEKRQLYYAMEHLGTSFKDPDPWTPAALIPEALREKLREDQEKRPWDHEPVKPKPLTYWKDVLLLEGVTLTQDSRQLNGSERAVLDGLLTPAECGVLLQLAKVLGRLRQEKRLNPGGGGCGELISCHCTPAWATRAKLHLKKKKK

SEQ ID NO: 1090 - protein, 166 aa, Artificial Sequence
  Synthetic polypeptide
MLRLLRPLLLLLLLPPPGSPEPPGLTQLSPGAPPQAPDLLYADGLRAYAAGAWAPAVALLREALRSQAALGRVRLDCGASCAADPGAALPAVLLGAPEPDSGPGPTQGSWERQLLRAALRRADCLTQCAARRLGPGGAARFAWGARSGTPSAVGSPTTTCRGPITS

SEQ ID NO: 1091 - protein, 77 aa, Artificial Sequence
  Synthetic polypeptide
MADGVDHIDIYADVGEEFNQEAEYEREAENERGTGIVTETVTESVTESANIVIVRRLGIVMCLSRCVGHFPCLECWR

SEQ ID NO: 1092 - protein, 173 aa, Artificial Sequence
  Synthetic polypeptide
MFKRMAEFGPDSGGRVKGVTIVKPIVYGNVARYFGKKREEDGHTHQWTVYVKPYRNEDMSAYVKKIQFKLHESYGNPLRVVTKPPYEITETGWGEFEIIIKIFFIDPNERPVTLYHLLKLFQSDTNAMLGKKTVVSEFYDEMIFQDPTAMMQQLLTTSRQLTLGAYKHETESA

SEQ ID NO: 1093 - protein, 119 aa, Artificial Sequence
  Synthetic polypeptide
MFKRMAEFGPDSGGRVKGVTIVKPIVYGNVARYFGKKREEDGHTHQWTVYVKPYRNEVTLYHLLKLFQSDTNAMLGKKTVVSEFYDEMIFQDPTAMMQQLLTTSRQLTLGAYKHETESA

SEQ ID NO: 1094 - protein, 115 aa, Artificial Sequence
  Synthetic polypeptide
MSAYVKKIQFKLHESYGNPLRVVTKPPYEITETGWGEFEIIIKIFFIDPNERPVTLYHLLKLFQSDTNAMLGKKTVVSEFYDEMIFQDPTAMMQQLLTTSRQLTLGAYKHETESA

SEQ ID NO: 1095 - protein, 81 aa, Artificial Sequence
  Synthetic polypeptide
MNPVPQMEMQKSPVFCVAHAGSCRPELFLFGHLGSSPRVLESEKSRIGVLAYSVPGKGCLPGLQLNYFLLCLHKHAPILCR

SEQ ID NO: 1096 - protein, 88 aa, Artificial Sequence
  Synthetic polypeptide
MNPVPQMEMQKSPVFCVAHAGSCRPELFLFGHLGSSPRVLESEKSRIGVLAYSVPGKGCLPGLQLNYFLLCLHKSQVCLYQQHENGLI

SEQ ID NO: 1097 - protein, 101 aa, Artificial Sequence
  Synthetic polypeptide
MNPVPQMEMQKSPVFCVAHAGSCRPELFLFGHLGSSPRVLESEKSRIGVLAYSVPACPHPVPIRTPDPKLSSYTHGREKHLNIKKRRSCWTSETVKGEEFG

SEQ ID NO: 1098 - protein, 164 aa, Artificial Sequence
  Synthetic polypeptide
MDTSRLGVLLSLPVLLQLATGGSSPRSGVLLRGCPTHCHCEPDGRMLLRVDCSDLGLSELPSNLSVFTSYLDLSMNNISQLLPNPLPSLRFLEELRLAGNALTYIPKGAFTGLYSLKVLMLQNNQLRHVPTEALQNLRSLQSLPGAVAHTCKPSTLGSRGRRIA

SEQ ID NO: 1099 - protein, 164 aa, Artificial Sequence; identical to SEQ ID NO: 1098
  Synthetic polypeptide

SEQ ID NO: 1100 - protein, 164 aa, Artificial Sequence; identical to SEQ ID NO: 1098
  Synthetic polypeptide

SEQ ID NO: 1101 - protein, 157 aa, Artificial Sequence
  Synthetic polypeptide
MMAGMKIQLVCMLLLAFSSWSLCSDSEEEMKALEADFLTNMHTSKISKAHVPSWKMTLLNVCSLVNNLNSPAEETGEVHEEELVARRKLPTALDGFSLEAMLTIYQLHKICHSRAFQHWEARWLTPVIPALWEAETGGSRGQEMETIPANTVKPRLY

SEQ ID NO: 1102 - protein, 23 aa, Artificial Sequence
  Synthetic polypeptide
FLLHSSSPLTGYPWGSIVNEETM

SEQ ID NO: 1103 - protein, 88 aa, Artificial Sequence
  Synthetic polypeptide
MSLLGPKVLLFLAAFIITSDWIPLGVNSQRGDDVTQATPETFTEDPNLVNDPATDETVLAVLADIAPSTDDLVCLHLLSFHHGMTLIR

SEQ ID NO: 1104 - protein, 88 aa, Artificial Sequence; identical to SEQ ID NO: 1103
  Synthetic polypeptide

SEQ ID NO: 1105 - protein, 88 aa, Artificial Sequence; identical to SEQ ID NO: 1103
  Synthetic polypeptide

SEQ ID NO: 1106 - protein, 88 aa, Artificial Sequence; identical to SEQ ID NO: 1103
  Synthetic polypeptide

SEQ ID NO: 1107 - protein, 88 aa, Artificial Sequence; identical to SEQ ID NO: 1103
  Synthetic polypeptide

SEQ ID NO: 1108 - protein, 88 aa, Artificial Sequence; identical to SEQ ID NO: 1103
  Synthetic polypeptide

SEQ ID NO: 1109 - protein, 88 aa, Artificial Sequence; identical to SEQ ID NO: 1103
  Synthetic polypeptide

SEQ ID NO: 1110 - protein, 76 aa, Artificial Sequence
  Synthetic polypeptide
MSLLGPKVLLFLAAFIITSDDVTQATPETFTEDPNLVNDPATDETVLAVLADIAPSTDDLVCLHLLSFHHGMTLIR

SEQ ID NO: 1111 - protein, 23 aa, Artificial Sequence
  Synthetic polypeptide
FLLHSSSPLTGYPWGSIVNEETM

SEQ ID NO: 1112 - protein, 73 aa, Artificial Sequence
  Synthetic polypeptide
MSLLGPKVLLFLAAFIITSDWIPLGVNSQRGDDVTQATPETFTEDPNLVNDPATDETVCLHLLSFHHGMTLIR

SEQ ID NO: 1113 - protein, 73 aa, Artificial Sequence; identical to SEQ ID NO: 1112
  Synthetic polypeptide

SEQ ID NO: 1114 - protein, 73 aa, Artificial Sequence; identical to SEQ ID NO: 1112
  Synthetic polypeptide

SEQ ID NO: 1115 - protein, 73 aa, Artificial Sequence; identical to SEQ ID NO: 1112
  Synthetic polypeptide

SEQ ID NO: 1116 - protein, 73 aa, Artificial Sequence; identical to SEQ ID NO: 1112
  Synthetic polypeptide

SEQ ID NO: 1117 - protein, 73 aa, Artificial Sequence; identical to SEQ ID NO: 1112
  Synthetic polypeptide

SEQ ID NO: 1118 - protein, 73 aa, Artificial Sequence; identical to SEQ ID NO: 1112
  Synthetic polypeptide

SEQ ID NO: 1119 - protein, 73 aa, Artificial Sequence; identical to SEQ ID NO: 1112
  Synthetic polypeptide

SEQ ID NO: 1120 - protein, 61 aa, Artificial Sequence
  Synthetic polypeptide
MSLLGPKVLLFLAAFIITSDDVTQATPETFTEDPNLVNDPATDETVCLHLLSFHHGMTLIR

SEQ ID NO: 1121 - protein, 84 aa, Artificial Sequence
  Synthetic polypeptide
MAVAAVKWVMSKRTILKHLFPVQNGALYCVCHKSTYSPLPDDYNCNVELALTSDGRTIVCYHPSVDIPYEHTKHTGCFLAISHH

SEQ ID NO: 1122 - protein, 84 aa, Artificial Sequence; identical to SEQ ID NO: 1121
  Synthetic polypeptide

SEQ ID NO: 1123 - protein, 84 aa, Artificial Sequence; identical to SEQ ID NO: 1121
  Synthetic polypeptide

SEQ ID NO: 1124 - protein, 84 aa, Artificial Sequence; identical to SEQ ID NO: 1121
  Synthetic polypeptide

SEQ ID NO: 1125 - protein, 84 aa, Artificial Sequence; identical to SEQ ID NO: 1121
  Synthetic polypeptide

SEQ ID NO: 1126 - protein, 84 aa, Artificial Sequence; identical to SEQ ID NO: 1121
  Synthetic polypeptide

SEQ ID NO: 1127 - protein, 84 aa, Artificial Sequence
  Synthetic polypeptide
MGDVKENYLETFISSPKFGRTCADGALYCVCHKSTYSPLPDDYNCNVELALTSDGRTIVCYHPSVDIPYEHTKHTGCFLAISHH

SEQ ID NO: 1128 - protein, 19 aa, Artificial Sequence
  Synthetic polypeptide
QDITAMAPSPEWQSSRAAE

SEQ ID NO: 1129 - protein, 26 aa, Artificial Sequence
  Synthetic polypeptide
FTYQKFLCRNMIVPSVGHHLWSSLSF

SEQ ID NO: 1130 - protein, 175 aa, Artificial Sequence
  Synthetic polypeptide
MVSNFFHVIQVFEKSATLISKTEHIGFVIYSWRKSTTHLGSRRKFAISIYLSEVSLQKYDCPFSGTSFVVFSLFLICAMAGDVVYADIKTVRTSPLELAFPLQRSVSFNFSTVHKSCPAKDWKVHKGKCYWIAETKKSWNKSQNDCAINNSYLMVIQDITAMAPSPEWQSSRAAE

SEQ ID NO: 1131 - protein, 1115 aa, Artificial Sequence
  Synthetic polypeptide
MGRDQRAVAGPALRRWLLLGTVTVGFLAQSVLAGVKKFDVPCGGRDCSGGCQCYPEKGGRGQPGPVGPQGYNGPPGLQGFPGLQGRKGDKGERGAPGVTGPKGDVGARGVSGFPGADGIPGHPGQGGPRGRPGYDGCNGTQGDSGPQGPPGSEGFTGPPGPQGPKGQKGEPYALPKEERDRYRGEPGEPGLVGFQGPPGRPGHVGQMGPVGAPGRPGPPGPPGPKGQQGNRGLGFYGVKGEKGDVGQPGPNGIPSDTLHPIIAPTGVTFHPDQYKGEKGSEGEPGIRGISLKGEEGIMGFPGLRGYPGLSGEKGSPGQKGSRGLDGYQGPDGPRGPKGEAGDPGPPGLPAYSPHPSLAKGARGDPGFPGAQGEPGSQGEPGDPGLPGPPGLSIGDGDQRRGLPGEMGPKGFIGDPGIPALYGGPPGPDGKRGPPGPPGLPGPPGPDGFLFGLKGAKGRAGFPGLPGSPGARGPKGWKGDAGECRCTEGDEAIKGLPGLPGPKGFAGINGEPGRKGDRGDPGQHGLPGFPGLKGVPGNIGAPGPKGAKGDSRTITTKGERGQPGVPGVPGMKGDDGSPGRDGLDGFPGLPGPPGDGIKGPPGDPGYPGIPGTKGTPGEMGPPGLGLPGLKGQRGFPGDAGLPGPPGFLGPPGPAGTPGQIDCDTDVKRAVGGDRQEAIQPGCIGGPKGLPGLPGPPGPTGAKGLRGIPGFAGADGGPGPRGLPGDAGREGFPGPPGFIGPRGSKGAVGLPGPDGSPGPIGLPGPDGPPGERGLPGEVLGAQPGPRGDAGVPGQPGLKGLPGDRGPPGFRGSQGMPGMPGLKGQPGLPGPSGQPGLYGPPGLHGFPGAPGQEGPLGLPGIPGREGLPGDRGDPGDTGAPGPVGMKGLSGDRGDAGFTGEQGHPGSPGFKGIDGMPGTPGLKGDRGSPGMDGFQGMPGLKGRPGFPGSKGEAGFFGIPGLKGLAGEPGFKGSRGDPGPPGPPPVILPGMKDIKGEKGDEGPMGLKGYLGAKGIQGMPGIPGLSGIPGLPGRPGHIKGVKGDIGVPGIPGLPGFPGVAGPPGITGFPGFIGSRLLGRPRRKNRWNPGGGGCSEPRLRRCTPAWVTKQDSISKKRQEKRK

SEQ ID NO: 1132 - protein, 15 aa, Artificial Sequence
  Synthetic polypeptide
GICTPKAKKKKCPNH

SEQ ID NO: 1133 - protein, 16 aa, Artificial Sequence
  Synthetic polypeptide
MGTREAGLAHRVLCHR

SEQ ID NO: 1134 - protein, 357 aa, Artificial Sequence
  Synthetic polypeptide
MLRTTRGPGLGPPLLQAALGLGRAGWHWPAGRAASGGRGRAWLQPTGRETGVQVYNSLTGRKEPLIVAHAEAASWYSCGPTVYDHAHLGHACSYVRFDIIRRILTKVFGCSIVMVMGITDVDDKIIKRANEMNISPASLASLYEEDFKQDMAALKVLPPTVYLRVTENIPQIISFIEGIIARGNAYSTAKGNVYFDLKSRGDKYGKLVGVVPGPVGEPADSDKRHASDFALWKAAKPQEVFWASPWGPGRPGWHIECSAIASMVFGSQLDIHSGGIDLAFPHHENEIAQCEVFHQCEQWGNYFLHSGHLHAKGKEEKMSKSLKNYITIKDIIGGSHCIYGGNSKRTIGIGNGSWRCD

SEQ ID NO: 1135 - protein, 202 aa, Artificial Sequence
  Synthetic polypeptide
MAHITINQYLQQVYEAIDSRDGASCAELVSFKHPHVANPRLQMASPEEKCQQVLEPPYDEMFAAHLRCTYAVGNHDFIEAYKCQTVIVQSFLRAFQAHKEENWALPVMYAVALDLRVFANNAETKSPKETRRLGRQSNPARQNSDRHCLTPVPGAKKSAGPSHPICKVVRTGGGPGPPPWASSNEELVPLPTRWMSEAKQGT

SEQ ID NO: 1136 - protein, 202 aa, Artificial Sequence; identical to SEQ ID NO: 1135
  Synthetic polypeptide

SEQ ID NO: 1137 - protein, 202 aa, Artificial Sequence; identical to SEQ ID NO: 1135
  Synthetic polypeptide

SEQ ID NO: 1138 - protein, 200 aa, Artificial Sequence
  Synthetic polypeptide
MRLTDVVQQLVYEAIDSRDGASCAELVSFKHPHVANPRLQMASPEEKCQQVLEPPYDEMFAAHLRCTYAVGNHDFIEAYKCQTVIVQSFLRAFQAHKEENWALPVMYAVALDLRVFANNAETKSPKETRRLGRQSNPARQNSDRHCLTPVPGAKKSAGPSHPICKVVRTGGGPGPPPWASSNEELVPLPTRWMSEAKQGT

SEQ ID NO: 1139 - protein, 200 aa, Artificial Sequence; identical to SEQ ID NO: 1138
  Synthetic polypeptide

SEQ ID NO: 1140 - protein, 256 aa, Artificial Sequence
  Synthetic polypeptide
MAHITINQYLQQVYEAIDSRDGASCAELVSFKHPHVANPRLQMASPEEKCQQVLEPPYDEMFAAHLRCTYAVGNHDFIEAYKCQTVIVQYPLSFMAAVPHRTHAVDYLGLETRKHWASCSFLQLERNDSVLEQKLVSALSLGTSFLRAFQAHKEENWALPVMYAVALDLRVFANNAETKSPKETRRLGRQSNPARQNSDRHCLTPVPGAKKSAGPSHPICKVVRTGGGPGPPPWASSNEELVPLPTRWMSEAKQGT

SEQ ID NO: 1141 - protein, 352 aa, Artificial Sequence
  Synthetic polypeptide
MKVLGRSFFWVLFPVLPWAVQAVEHEEVAQRVIKLHRGRGVAAMQSRQWVRDSCRKLSGLLRQKNAVLNKLKTAIGAVEKDVGLSDEEKLFQVHTFEIFQKELNESENSVFQAVYGLQRALQGDYKDVVNMKESSRQRLEALREAAIKEETEYMELLAAEKHQVEALKNMQHQNQSLSMLDEILEDVRKAADRLEEEIEEHAFDDNKSVKGVNFEAVLRVEEEEANSKQNITKREVEDDLGLSMLIDSQNNQYILTKPRDSTIPRADHHFIKDIVTIGMLSLPCGWLCTAIGLPTMFGYIICGVLLGPSGLNSIKSIVQVETLGEFGVFFTLFLVGLEFSPEKLRKKQWNQS

SEQ ID NO: 1142 - protein, 352 aa, Artificial Sequence; identical to SEQ ID NO: 1141
  Synthetic polypeptide

SEQ ID NO: 1143 - protein, 539 aa, Artificial Sequence
  Synthetic polypeptide
MNLERLRKRVRQYLDQQQYQSALFWADKVASLSREEPQDIYWLAQCLYLTAQYHRAAHALRSRKLDKLYEACRYLAARCHYAAKEHQQALDVLDMEEPINKRLFEKYLKDESGFKDPSSDWEMSQSSIKSSICLLRGKIYDALDNRTLATYSYKEALKLDVYCFEAFDLLTSHHMLTAQEEKELLESLPLSKLCNEEQELLRFLFENKLKKYNKPSETVIPESVDGLQENLDVVVSLAERHYYNCDFKMCYKLTSVVMEKDPFHASCLPVHIGTLVELNKANELFYLSHKLVDLYPSNPVSWFAVGCYYLMVGHKNEHARRYLSKATTLEKTYGPAWIAYGHSFAVESEHDQAMAAYFTAAQLMKGCHLPMLYIGLEYGLTNNSKLAERFFSQALSIAPEDPFVMHEVGVVAFQNGEWKTAEKWFLDALEKIKAIGNEVTVDKWEPLLNNLGHVCRKLKKYAEALDYHRQALVLIPQNASTYSAIGYIHSLMGNFENAVDYFHTALGLRRDDTFSVTMLGHCIEMYIGDSEAYIAPNWK

SEQ ID NO: 1144 - protein, 539 aa, Artificial Sequence; identical to SEQ ID NO: 1143
  Synthetic polypeptide

SEQ ID NO: 1145 - protein, 394 aa, Artificial Sequence
  Synthetic polypeptide
MEEPINKRLFEKYLKDESGFKDPSSDWEMSQSSIKSSICLLRGKIYDALDNRTLATYSYKEALKLDVYCFEAFDLLTSHHMLTAQEEKELLESLPLSKLCNEEQELLRFLFENKLKKYNKPSETVIPESVDGLQENLDVVVSLAERHYYNCDFKMCYKLTSVVMEKDPFHASCLPVHIGTLVELNKANELFYLSHKLVDLYPSNPVSWFAVGCYYLMVGHKNEHARRYLSKATTLEKTYGPAWIAYGHSFAVESEHDQAMAAYFTAAQLMKGWKTAEKWFLDALEKIKAIGNEVTVDKWEPLLNNLGHVCRKLKKYAEALDYHRQALVLIPQNASTYSAIGYIHSLMGNFENAVDYFHTALGLRRDDTFSVTMLGHCIEMYIGDSEAYIAPNWK

SEQ ID NO: 1146 - protein, 394 aa, Artificial Sequence; identical to SEQ ID NO: 1145
  Synthetic polypeptide

SEQ ID NO: 1147 - protein, 445 aa, Artificial Sequence
  Synthetic polypeptide
MEEPINKRLFEKYLKDESGFKDPSSDWEMSQSSIKSSICLLRGKIYDALDNRTLATYSYKEALKLDVYCFEAFDLLTSHHMLTAQEEKELLESLPLSKLCNEEQELLRFLFENKLKKYNKPSETVIPESVDGLQENLDVVVSLAERHYYNCDFKMCYKLTSVVMEKDPFHASCLPVHIGTLVELNKANELFYLSHKLVDLYPSNPVSWFAVGCYYLMVGHKNEHARRYLSKATTLEKTYGPAWIAYGHSFAVESEHDQAMAAYFTAAQLMKGCHLPMLYIGLEYGLTNNSKLAERFFSQALSIAPEDPFVMHEVGVVAFQNGEWKTAEKWFLDALEKIKAIGNEVTVDKWEPLLNNLGHVCRKLKKYAEALDYHRQALVLIPQNASTYSAIGYIHSLMGNFENAVDYFHTALGLRRDDTFSVTMLGHCIEMYIGDSEAYIAPNWK

SEQ ID NO: 1148 - protein, 445 aa, Artificial Sequence; identical to SEQ ID NO: 1147
  Synthetic polypeptide

SEQ ID NO: 1149 - protein, 538 aa, Artificial Sequence
  Synthetic polypeptide
MNLERLRKRVRQYLDQQQYQSALFWADKVASLSREPQDIYWLAQCLYLTAQYHRAAHALRSRKLDKLYEACRYLAARCHYAAKEHQQALDVLDMEEPINKRLFEKYLKDESGFKDPSSDWEMSQSSIKSSICLLRGKIYDALDNRTLATYSYKEALKLDVYCFEAFDLLTSHHMLTAQEEKELLESLPLSKLCNEEQELLRFLFENKLKKYNKPSETVIPESVDGLQENLDVVVSLAERHYYNCDFKMCYKLTSVVMEKDPFHASCLPVHIGTLVELNKANELFYLSHKLVDLYPSNPVSWFAVGCYYLMVGHKNEHARRYLSKATTLEKTYGPAWIAYGHSFAVESEHDQAMAAYFTAAQLMKGCHLPMLYIGLEYGLTNNSKLAERFFSQALSIAPEDPFVMHEVGVVAFQNGEWKTAEKWFLDALEKIKAIGNEVTVDKWEPLLNNLGHVCRKLKKYAEALDYHRQALVLIPQNASTYSAIGYIHSLMGNFENAVDYFHTALGLRRDDTFSVTMLGHCIEMYIGDSEAYIAPNWK

SEQ ID NO: 1150 - protein, 323 aa, Artificial Sequence
  Synthetic polypeptide
MRSEKEGAGGLRAAVAARGPSGREKLSALEVQFHRDSQQQEAETPPTSSSGCGGGAGKPREEKRTALSKVVIRRLPPGLTKEQLEEQLRPLPAHDYFEFFAADLSLYPHLYSRAYINFRNPDDILLFRDRFDGYIFLDSKGLEYPAVVEFAPFQKIAKKKLRKKDAKTGSIEDDPEYKKFLETYCVEEEKTSANPETLLGEMEAKTRELIARRTTPLLEYIKNRKLEKQRIREEKREERRRRELEKKRLREEEKRRRREEERCKKKETDKQKKIAEKEVRIKLLRRWRQENHLNLGGGGCSEPGVRHGTSAWATERDSVSKEK

SEQ ID NO: 1151 - protein, 290 aa, Artificial Sequence
  Synthetic polypeptide
MRSEKEGAGGLRAAVAARGPSGREKLSALEVQFHRDSQQQEAETPPTSSSGCGGGAGKPREEKRTALSKVVIRRLPPGLTKEQLEEQLRPLPAHDYFEFFAADLSLYPHLYSRAYINFRNPDDILLFRDRFDGYIFLDSKDPEYKKFLETYCVEEEKTSANPETLLGEMEAKTRELIARRTTPLLEYIKNRKLEKQRIREEKREERRRRELEKKRLREEEKRRRREEERCKKKETDKQKKIAEKEVRIKLLRRWRQENHLNLGGGGCSEPGVRHGTSAWATERDSVSKEK

SEQ ID NO: 1152 - protein, 172 aa, Artificial Sequence
  Synthetic polypeptide
MEQPGPRAPDPSLCHHNLQPTDDPNWDSYATTMRTAFTPKTGAVPALIRQNGIRRLGYTYSLSDPILNQTQYSDEYTWKSHSKEDLIKTETSRGIKSHKSHLNEDIFLWTLPHCQQTGTLKNCLPWKIPASMKEVNKALSNQFISLTKRDFVDRSKEILDARRHLEKCVEGK

SEQ ID NO: 1153 - protein, 372 aa, Artificial Sequence
  Synthetic polypeptide
MQSRLLLLGAPGGHGGPASRRMRLLLRQVVQRRPGGDRQRPEVRLLHAGSGADTGDTVNIGDVSYKLKIPKNPELVPQNYISDSLAQSVVQHLRWIMQKDLLGQDVFLIGPPGPLRRSIAMQYLELTKREVEYIALSRDTTETDLKQRREIRAGTAFYIDQCAVRAATEGRTLILEGLEKAERNVLPVLNNLLENREMQLEDGRFLMSAERYDKLLRDHTKKELDSWKIVRVSENFRVIALGLPVPRYSGNPLDPPLRSRFQARDIYYLPFKDQLKLLYSIGANVSAEKVSQLLSFATTLCSQESSTLGLPDFPLDSLAAAVQILDSFPMMPIKHAIQWLYPYSILLGHEGKMAVEGVLKEVRSVSARPPIV

SEQ ID NO: 1154 - protein, 372 aa, Artificial Sequence; identical to SEQ ID NO: 1153
  Synthetic polypeptide

SEQ ID NO: 1155 - protein, 77 aa, Artificial Sequence
  Synthetic polypeptide
MNTRNRVVNSGLGASPASRPTRDPQDPSGRQGELSPVEDQREGLEAAPKGPSRESVVHAGQRRNFMSSASVCETVTG

SEQ ID NO: 1156 - protein, 77 aa, Artificial Sequence; identical to SEQ ID NO: 1155
  Synthetic polypeptide

SEQ ID NO: 1157 - protein, 77 aa, Artificial Sequence; identical to SEQ ID NO: 1155
  Synthetic polypeptide

SEQ ID NO: 1158 - protein, 77 aa, Artificial Sequence; identical to SEQ ID NO: 1155
  Synthetic polypeptide

SEQ ID NO: 1159 - protein, 150 aa, Artificial Sequence
  Synthetic polypeptide
MAARGVIAPVGESLRYAEYLQPSAKRPDADVDQQRLVRSLIAVGLGVAALAFAGRYAFRIWKPLEQVITETAKKISTPSFSSYYKGGFEQKMSRREAGLILGVSPSAGKAKIRTAHRRVMILNHPDKGLKKHCSFSSYLLRSLSPPSEED

SEQ ID NO: 1160 - protein, 251 aa, Artificial Sequence
  Synthetic polypeptide
MSDNKERKSQGFPKEDNQDTSSLADAVEKVAKQQQSQASEIEKNKKVLFNLKNELHELEKEIAAISAETKETERQIYQQDSAIENTKLHCDSLETQIKSLHSENVKLKFDIETAQEDFEEHMIKYNAYYAKIKAHKNSLGEVESKWSFMTELHEKRDFVKKLKTMKEELMQDLQNPGGNRITQVQEDITNLKDKIITVKESIIEKTCFLEEEKKTHEKLRKEIETLHHPSTGVILADHKISLETEISSIPL

SEQ ID NO: 1161 - protein, 251 aa, Artificial Sequence; identical to SEQ ID NO: 1160
  Synthetic polypeptide

SEQ ID NO: 1162 - protein, 270 aa, Artificial Sequence
  Synthetic polypeptide
MAASSSGEKEKERLGGGLGVAGGNSTRERLLSALEDLEVLSRELIEMLAISRNQKLLQAGEENQVLELLIHRDGEFQELMKLALNQGKIHHEMQVLEKEVEKRDSDIQQLQKQLKEAEQILATAVYQAKEKLKSIEKARKGAISSEEIIKYAHRISASNAVCAPLTWVPGDPRRPYPTDLEMRSGLLGQMNNPSTNGVNGHLPGDALAAGRLPDVLAPQYPWQSNDMSMNMLPPNHSSDFLLEPPGHNKENEDDVEIMSTDSSSSSNFAF

SEQ ID NO: 1163 - protein, 224 aa, Artificial Sequence
  Synthetic polypeptide
MLAISRNQKLLQAGEENQVLELLIHRDGEFQELMKLALNQGKIHHEMQVLEKEVEKRDSDIQQLQKQLKEAEQILATAVYQAKEKLKSIEKARKGAISSEEIIKYAHRISASNAVCAPLTWVPGDPRRPYPTDLEMRSGLLGQMNNPSTNGVNGHLPGDALAAGRLPDVLAPQYPWQSNDMSMNMLPPNHSSDFLLEPPGHNKENEDDVEIMSTDSSSSSNFAF

SEQ ID NO: 1164 - protein, 237 aa, Artificial Sequence
  Synthetic polypeptide
MSLYRSVVWFAKGLREYTKSGYESACKDFVPHDLEVQIPGRVFLVTGGNSGIGKATALEIAKRGGTVHLVCRDQAPAEDARGEIIRESGNQNIFLHIVDLSDPKQIWKFVENFKQEHKLHVLINNAGCMVNKRELTEDGLEKNFAANTLGVYILTTGLIPVLEKEHDPRVQKGLGSCSSVQGLGMRSVSWSIQVGLVESQGSSWEGRRRVRVRGEVTMEAEGGDVAVSQGVLPASRS

SEQ ID NO: 1165 - protein, 188 aa, Artificial Sequence
  Synthetic polypeptide
MNLHVKTLSLMTWRSRFLEESFWSLEETAALAKQLPLKSPSENIFLHIVDLSDPKQIWKFVENFKQEHKLHVLINNAGCMVNKRELTEDGLEKNFAANTLGVYILTTGLIPVLEKEHDPRVQKGLGSCSSVQGLGMRSVSWSIQVGLVESQGSSWEGRRRVRVRGEVTMEAEGGDVAVSQGVLPASRS

SEQ ID NO: 1166 - protein, 188 aa, Artificial Sequence; identical to SEQ ID NO: 1165
  Synthetic polypeptide

SEQ ID NO: 1167 - protein, 27 aa, Artificial Sequence
  Synthetic polypeptide
MAAGERSWCLCKLLSFEYVFISSVKMN

SEQ ID NO: 1168 - protein, 27 aa, Artificial Sequence
  Synthetic polypeptide
MAAGERSWCLCKLLSFEYVFISSVKMN

SEQ ID NO: 1169 - protein, 121 aa, Artificial Sequence
  Synthetic polypeptide
MTENSDKVPIALVGPDDVEFCSPPAYATLTVKPSSPARLLKVGAVVLISGAVLLLFGAIGAFYFWKGSDSHIYNVHYTMSINGKLQDGSMEIDAGNNLETFKMGSGAEEAIAVNDFQNGHG

SEQ ID NO: 1170 - protein, 121 aa, Artificial Sequence; identical to SEQ ID NO: 1169
  Synthetic polypeptide

SEQ ID NO: 1171 - protein, 43 aa, Artificial Sequence
  Synthetic polypeptide
MSINGKLQDGSMEIDAGNNLETFKMGSGAEEAIAVNDFQNGHG

SEQ ID NO: 1172 - protein, 491 aa, Artificial Sequence
  Synthetic polypeptide
MSPLWWGFLLSCLGCKILPGAQGQFPRVCMTVDSLVNKECCPRLGAESANVCGSQQGRGQCTEVRADTRPWSGPYILRNQDDRELWPRKFFHRTCKCTGNFAGYNCGDCKFGWTGPNCERKKPPVIRQNIHSLSPQEREQFLGALDLAKKRVHPDYVITTQHWLGLLGPNGTQPQFANCSVYDFFVWLHYYSVRDTLLGPGRPYRAIDFSHQGPAFVTWHRYHLLCLERDLQRLIGNESFALPYWNFATGRNECDVCTDQLFGAARPDDPTLISRNSRFSSWETVCDSLDDYNHLVTLCNGTYEGLLRRNQMGRNSMKLPTLKDIRDCLSLQKFDNPPFFQNSTFSFRNALEGFDKADGTLDSQVMSLHNLVHSFLNGTNALPHSAANDPIFVVLHSFTDAIFDEWMKRFNPPADAWPQELAPIGHNRMYNMVPFFPPVTNEELFLTSDQLGYSYAIDLPDRTVSLQENKLRAPRFCIMVSCIIISLYIIM

SEQ ID NO: 1173 - protein, 524 aa, Artificial Sequence
  Synthetic polypeptide
MSPLWWGFLLSCLGCKILPGAQGQFPRVCMTVDSLVNKECCPRLGAESANVCGSQQGRGQCTEVRADTRPWSGPYILRNQDDRELWPRKFFHRTCKCTGNFAGYNCGDCKFGWTGPNCERKKPPVIRQNIHSLSPQEREQFLGALDLAKKRVHPDYVITTQHWLGLLGPNGTQPQFANCSVYDFFVWLHYYSVRDTLLGPGRPYRAIDFSHQGPAFVTWHRYHLLCLERDLQRLIGNESFALPYWNFATGRNECDVCTDQLFGAARPDDPTLISRNSRFSSWETVCDSLDDYNHLVTLCNGTYEGLLRRNQMGRNSMKLPTLKDIRDCLSLQKFDNPPFFQNSTFSFRNALEGFDKADGTLDSQVMSLHNLVHSFLNGTNALPHSAANDPIFVVISNRLLYNATTNILEHVRKEKATKELPSLHVLVLHSFTDAIFDEWMKRFNPPADAWPQELAPIGHNRMYNMVPFFPPVTNEELFLTSDQLGYSYAIDLPDRTVSLQENKLRAPRFCIMVSCIIISLYIIM

SEQ ID NO: 1174 - protein, 1255 aa, Artificial Sequence
  Synthetic polypeptide
MLPVYQEVKPNPLQDANLCSRVFFWWLNPLFKIGHKRRLEEDDMYSVLPEDRSQHLGEELQGFWDKEVLRAENDAQKPSLTRAIIKCYWKSYLVLGIFTLIEESAKVIQPIFLGKIINYFENYDPMDSVALNTAYAYATVLTFCTLILAILHHLYFYHVQCAGMRLRVAMCHMIYRKALRLSNMAMGKTTTGQIVNLLSNDVNKFDQVTVFLHFLWAGPLQAIAVTALLWMEIGISCLAGMAVLIILLPLQSCFGKLFSSLRSKTATFTDARIRTMNEVITGIRIIKMYAWEKSFSNLITNLRKKEISKILRSSCLRGMNLASFFSASKIIVFVTFTTYVLLGSVITASRVFVAVTLYGAVRLTVTLFFPSAIERVSEAIVSIRRIQTFLLLDEISQRNRQLPSDGKKMVHVQDFTAFWDKASETPTLQGLSFTVRPGELLAVVGPVGAGKSSLLSAVLGELAPSHGLVSVHGRIAYVSQQPWVFSGTLRSNILFGKKYEKERYEKVIKACALKKDLQLLEDGDLTVIGDRGTTLSGGQKARVNLARAVYQDADIYLLDDPLSAVDAEVSRHLFELCICQILHEKITILVTHQLQYLKAASQILILKDGKMVQKGTYTEFLKSGIDFGSLLKKDNEESEQPPVPGTPTLRNRTFSESSVWSQQSSRPSLKDGALESQDVAYVLQDWWLSYWANKQSMLNVTVNGGGNVTEKLDLNWYLGIYSGLTVATVLFGIARSLLVFYVLVNSSQTLHNKMFESILKAPVLFFDRNPIGRILNRFSKDIGHLDDLLPLTFLDFIQTLLQVVGVVSVAVAVIPWIAIPLVPLGIIFIFLRRYFLETSRDVKRLESTTRSPVFSHLSSSLQGLWTIRAYKAEERCQELFDAHQDLHSEAWFLFLTTSRWFAVRLDAICAMFVIIVAFGSLILAKTLDAGQVGLALSYALTLMGMFQWCVRQSAEVENMMISVERVIEYTDLEKEAPWEYQKRPPPAWPHEGVIIFDNVNFMYSPGGPLVLKHLTALIKSQEKVGIVGRTGAGKSSLISALFRLSEPEGKIWIDKILTTEIGLHDLRKKMSIIPQEPVLFTGTMRKNLDPFNEHTDEELWNALQEVQLKETIEDLPGKMDTELAESGSNFSVGQRQLVCLARAILRKNQILIIDEATANVDPRTDELIQKKIREKFAHCTVLTIAHRLNTIIDSDKIMVLDSGRLKEYDEPYVLLQNKESLFYKMVQQLGKAEAAALTETAKQVEVMIGSLERLP

SEQ ID NO: 1175 - protein, 1302 aa, Artificial Sequence
  Synthetic polypeptide
MLPVYQEVKPNPLQDANLCSRVFFWWLNPLFKIGHKRRLEEDDMYSVLPEDRSQHLGEELQGFWDKEVLRAENDAQKPSLTRAIIKCYWKSYLVLGIFTLIEESAKVIQPIFLGKIINYFENYDPMDSVALNTAYAYATVLTFCTLILAILHHLYFYHVQCAGMRLRVAMCHMIYRKALRLSNMAMGKTTTGQIVNLLSNDVNKFDQVTVFLHFLWAGPLQAIAVTALLWMEIGISCLAGMAVLIILLPLQSCFGKLFSSLRSKTATFTDARIRTMNEVITGIRIIKMYAWEKSFSNLITNLRKKEISKILRSSCLRGMNLASFFSASKIIVFVTFTTYVLLGSVITASRVFVAVTLYGAVRLTVTLFFPSAIERVSEAIVSIRRIQTFLLLDEISQRNRQLPSDGKKMVHVQDFTAFWDKASETPTLQGLSFTVRPGELLAVVGPVGAGKSSLLSAVLGELAPSHGLVSVHGRIAYVSQQPWVFSGTLRSNILFGKKYEKERYEKVIKACALKKDLQLLEDGDLTVIGDRGTTLSGGQKARVNLARAVYQDADIYLLDDPLSAVDAEVSRHLFELCICQILHEKITILVTHQLQYLKAASQILILKDGKMVQKGTYTEFLKSGIDFGSLLKKDNEESEQPPVPGTPTLRNRTFSESSVWSQQSSRPSLKDGALESQDTENVPVTLSEENRSEGKVGFQAYKNYFRAGAHWIVFIFLILLNTAAQVAYVLQDWWLSYWANKQSMLNVTVNGGGNVTEKLDLNWYLGIYSGLTVATVLFGIARSLLVFYVLVNSSQTLHNKMFESILKAPVLFFDRNPIGRILNRFSKDIGHLDDLLPLTFLDFIQTLLQVVGVVSVAVAVIPWIAIPLVPLGIIFIFLRRYFLETSRDVKRLESTTRSPVFSHLSSSLQGLWTIRAYKAEERCQELFDAHQDLHSEAWFLFLTTSRWFAVRLDAICAMFVIIVAFGSLILAKTLDAGQVGLALSYALTLMGMFQWCVRQSAEVENMMISVERVIEYTDLEKEAPWEYQKRPPPAWPHEGVIIFDNVNFMYSPGGPLVLKHLTALIKSQEKVGIVGRTGAGKSSLISALFRLSEPEGKIWIDKILTTEIGLHDLRKKMSIIPQEPVLFTGTMRKNLDPFNEHTDEELWNALQEVQLKETIEDLPGKMDTELAESGSNFSVGQRQLVCLARAILRKNQILIIDEATANVDPRTDELIQKKIREKFAHCTVLTIAHRLNTIIDSDKIMVLDSGRLKEYDEPYVLLQNKESLFYKMVQQLGKAEAAALTETAKQVEVMIGSLERLP

SEQ ID NO: 1176 - protein, 1249 aa, Artificial Sequence
  Synthetic polypeptide
MLPVYQEVKPNPLQDANLCSRVFFWWLNPLFKIGHKRRLEEDDMYSVLPEDRSQHLGEELQGFWDKEVLRAENDAQKPSLTRAIIKCYWKSYLVLGIFTLIEESAKVIQPIFLGKIINYFENYDPMDSVALNTAYAYATVLTFCTLILAILHHLYFYHVQCAGMRLRVAMCHMIYRKALRLSNMAMGKTTTGQIVNLLSNDVNKFDQVTVFLHFLWAGPLQAIAVTALLWMEIGISCLAGMAVLIILLPLQSCFGKLFSSLRSKTATFTDARIRTMNEVITGIRIIKMYAWEKSFSNLITNLRKKEISKILRSSCLRGMNLASFFSASKIIVFVTFTTYVLLGSVITASRVFVAVTLYGAVRLTVTLFFPSAIERVSEAIVSIRRIQTFLLLDEISQRNRQLPSDGKKMVHVQDFTAFWDKASETPTLQGLSFTVRPGELLAVVGPVGAGKSSLLSAVLGELAPSHGLVSVHGRIAYVSQQPWVFSGTLRSNILFGKKYEKERYEKVIKACALKKDLQLLEDGDLTVIGDRGTTLSGGQKARVNLARAVYQDADIYLLDDPLSAVDAEVSRHLFELCICQILHEKITILVTHQLQYLKAASQILILKDGKMVQKGTYTEFLKSGIDFGSLLKKDNEESEQPPVPGTPTLRNRTFSESSVWSQQSSRPSLKDGALESQDVAYVLQDWWLSYWANKQSMLNVTVNGGGNVTEKLDLNWYLGIYSGLTVATVLFGIARSLLVFYVLVNSSQTLHNKMFESILKAPVLFFDRNPIGRILNRFSKDIGHLDDLLPLTFLDFIQTLLQVVGVVSVAVAVIPWIAIPLVPLGIIFIFLRRYFLETSRDVKRLESTTRSPVFSHLSSSLQGLWTIRAYKAEERCQELFDAHQDLHSEAWFLFLTTSRWFAVRLDAICAMFVIIVAFGSLILAKTLDAGQVGLALSYALTLMGMFQWCVRQSAEVENMMISVERVIEYTDLEKEAPWEYQKRPPPAWPHEGVIIFDNVNFMYSPGGPLVLKHLTALIKSQEKVGIVGRTGAGKSSLISALFRLSEPEGKIWIDKILTTEIGLHDLRKKMSIIPQEPVLFTGTMRKNLDPFNEHTDEELWNALQEVQLKETIEDLPGKMDTELAESGSNFSVGQRQLVCLARAILRKNQILIIDEATANVDPRTDELIQKKIREKFAHCTVLTIAHRLNTIIDSDKIMVLDSGRLKEYDEPYVLLQNKESLFYKMVQQLGKAEAAALTETAKQGGTRWK

SEQ ID NO: 1177 - protein, 1296 aa, Artificial Sequence
  Synthetic polypeptide
MLPVYQEVKPNPLQDANLCSRVFFWWLNPLFKIGHKRRLEEDDMYSVLPEDRSQHLGEELQGFWDKEVLRAENDAQKPSLTRAIIKCYWKSYLVLGIFTLIEESAKVIQPIFLGKIINYFENYDPMDSVALNTAYAYATVLTFCTLILAILHHLYFYHVQCAGMRLRVAMCHMIYRKALRLSNMAMGKTTTGQIVNLLSNDVNKFDQVTVFLHFLWAGPLQAIAVTALLWMEIGISCLAGMAVLIILLPLQSCFGKLFSSLRSKTATFTDARIRTMNEVITGIRIIKMYAWEKSFSNLITNLRKKEISKILRSSCLRGMNLASFFSASKIIVFVTFTTYVLLGSVITASRVFVAVTLYGAVRLTVTLFFPSAIERVSEAIVSIRRIQTFLLLDEISQRNRQLPSDGKKMVHVQDFTAFWDKASETPTLQGLSFTVRPGELLAVVGPVGAGKSSLLSAVLGELAPSHGLVSVHGRIAYVSQQPWVFSGTLRSNILFGKKYEKERYEKVIKACALKKDLQLLEDGDLTVIGDRGTTLSGGQKARVNLARAVYQDADIYLLDDPLSAVDAEVSRHLFELCICQILHEKITILVTHQLQYLKAASQILILKDGKMVQKGTYTEFLKSGIDFGSLLKKDNEESEQPPVPGTPTLRNRTFSESSVWSQQSSRPSLKDGALESQDTENVPVTLSEENRSEGKVGFQAYKNYFRAGAHWIVFIFLILLNTAAQVAYVLQDWWLSYWANKQSMLNVTVNGGGNVTEKLDLNWYLGIYSGLTVATVLFGIARSLLVFYVLVNSSQTLHNKMFESILKAPVLFFDRNPIGRILNRFSKDIGHLDDLLPLTFLDFIQTLLQVVGVVSVAVAVIPWIAIPLVPLGIIFIFLRRYFLETSRDVKRLESTTRSPVFSHLSSSLQGLWTIRAYKAEERCQELFDAHQDLHSEAWFLFLTTSRWFAVRLDAICAMFVIIVAFGSLILAKTLDAGQVGLALSYALTLMGMFQWCVRQSAEVENMMISVERVIEYTDLEKEAPWEYQKRPPPAWPHEGVIIFDNVNFMYSPGGPLVLKHLTALIKSQEKVGIVGRTGAGKSSLISALFRLSEPEGKIWIDKILTTEIGLHDLRKKMSIIPQEPVLFTGTMRKNLDPFNEHTDEELWNALQEVQLKETIEDLPGKMDTELAESGSNFSVGQRQLVCLARAILRKNQILIIDEATANVDPRTDELIQKKIREKFAHCTVLTIAHRLNTIIDSDKIMVLDSGRLKEYDEPYVLLQNKESLFYKMVQQLGKAEAAALTETAKQGGTRWK

SEQ ID NO: 1178 - protein, 869 aa, Artificial Sequence
  Synthetic polypeptide
MLPVYQEVKPNPLQDANLCSRVFFWWLNPLFKIGHKRRLEEDDMYSVLPEDRSQHLGEELQGFWDKEVLRAENDAQKPSLTRAIIKCYWKSYLVLGIFTLIEESAKVIQPIFLGKIINYFENYDPMDSVALNTAYAYATVLTFCTLILAILHHLYFYHVQCAGMRLRVAMCHMIYRKALRLSNMAMGKTTTGQIVNLLSNDVNKFDQVTVFLHFLWAGPLQAIAVTALLWMEIGISCLAGMAVLIILLPLQSCFGKLFSSLRSKTATFTDARIRTMNEVITGIRIIKMYAWEKSFSNLITNLRKKEISKILRSSCLRGMNLASFFSASKIIVFVTFTTYVLLGSVITASRVFVAVTLYGAVRLTVTLFFPSAIERVSEAIVSIRRIQTFLLLDEISQRNRQLPSDGKKMVHVQDFTAFWDKASETPTLQGLSFTVRPGELLAVVGPVGAGKSSLLSAVLGELAPSHGLVSVHGRIAYVSQQPWVFSGTLRSNILFGKKYEKERYEKVIKACALKKDLQLLEDGDLTVIGDRGTTLSGGQKARVNLARAVYQDADIYLLDDPLSAVDAEVSRHLFELCICQILHEKITILVTHQLQYLKAASQILILKDGKMVQKGTYTEFLKSGIDFGSLLKKDNEESEQPPVPGTPTLRNRTFSESSVWSQQSSRPSLKDGALESQDVAYVLQDWWLSYWANKQSMLNVTVNGGGNVTEKLDLNWYLGIYSGLTVATVLFGIARSLLVFYVLVNSSQTLHNKMFESILKAPVLFFDRNPIGRILNRFSKDIGHLDDLLPLTFLDFIQMGPSSCRKTSSGIPLILHYGKLYNYFIIYYHIIIEIKYTINVMGLNHPETTSIAIHGKIVLRETSPWCQKG

SEQ ID NO: 1179 - protein, 916 aa, Artificial Sequence
  Synthetic polypeptide
MLPVYQEVKPNPLQDANLCSRVFFWWLNPLFKIGHKRRLEEDDMYSVLPEDRSQHLGEELQGFWDKEVLRAENDAQKPSLTRAIIKCYWKSYLVLGIFTLIEESAKVIQPIFLGKIINYFENYDPMDSVALNTAYAYATVLTFCTLILAILHHLYFYHVQCAGMRLRVAMCHMIYRKALRLSNMAMGKTTTGQIVNLLSNDVNKFDQVTVFLHFLWAGPLQAIAVTALLWMEIGISCLAGMAVLIILLPLQSCFGKLFSSLRSKTATFTDARIRTMNEVITGIRIIKMYAWEKSFSNLITNLRKKEISKILRSSCLRGMNLASFFSASKIIVFVTFTTYVLLGSVITASRVFVAVTLYGAVRLTVTLFFPSAIERVSEAIVSIRRIQTFLLLDEISQRNRQLPSDGKKMVHVQDFTAFWDKASETPTLQGLSFTVRPGELLAVVGPVGAGKSSLLSAVLGELAPSHGLVSVHGRIAYVSQQPWVFSGTLRSNILFGKKYEKERYEKVIKACALKKDLQLLEDGDLTVIGDRGTTLSGGQKARVNLARAVYQDADIYLLDDPLSAVDAEVSRHLFELCICQILHEKITILVTHQLQYLKAASQILILKDGKMVQKGTYTEFLKSGIDFGSLLKKDNEESEQPPVPGTPTLRNRTFSESSVWSQQSSRPSLKDGALESQDTENVPVTLSEENRSEGKVGFQAYKNYFRAGAHWIVFIFLILLNTAAQVAYVLQDWWLSYWANKQSMLNVTVNGGGNVTEKLDLNWYLGIYSGLTVATVLFGIARSLLVFYVLVNSSQTLHNKMFESILKAPVLFFDRNPIGRILNRFSKDIGHLDDLLPLTFLDFIQMGPSSCRKTSSGIPLILHYGKLYNYFIIYYHIIIEIKYTINVMGLNHPETTSIAIHGKIVLRETSPWCQKG

SEQ ID NO: 1180 - protein, 916 aa, Artificial Sequence; identical to SEQ ID NO: 1179
  Synthetic polypeptide

SEQ ID NO: 1181 - protein, 841 aa, Artificial Sequence
  Synthetic polypeptide
MLPVYQEVKPNPLQDANLCSRVFFWWLNPLFKIGHKRRLEEDDMYSVLPEDRSQHLGEELQGFWDKEVLRAENDAQKPSLTRAIIKCYWKSYLVLGIFTLIEALRLSNMAMGKTTTGQIVNLLSNDVNKFDQVTVFLHFLWAGPLQAIAVTALLWMEIGISCLAGMAVLIILLPLQSCFGKLFSSLRSKTATFTDARIRTMNEVITGIRIIKMYAWEKSFSNLITNLRKKEISKILRSSCLRGMNLASFFSASKIIVFVTFTTYVLLGSVITASRVFVAVTLYGAVRLTVTLFFPSAIERVSEAIVSIRRIQTFLLLDEISQRNRQLPSDGKKMVHVQDFTAFWDKASETPTLQGLSFTVRPGELLAVVGPVGAGKSSLLSAVLGELAPSHGLVSVHGRIAYVSQQPWVFSGTLRSNILFGKKYEKERYEKVIKACALKKDLQLLEDGDLTVIGDRGTTLSGGQKARVNLARAVYQDADIYLLDDPLSAVDAEVSRHLFELCICQILHEKITILVTHQLQYLKAASQILILKDGKMVQKGTYTEFLKSGIDFGSLLKKDNEESEQPPVPGTPTLRNRTFSESSVWSQQSSRPSLKDGALESQDTENVPVTLSEENRSEGKVGFQAYKNYFRAGAHWIVFIFLILLNTAAQVAYVLQDWWLSYWANKQSMLNVTVNGGGNVTEKLDLNWYLGIYSGLTVATVLFGIARSLLVFYVLVNSSQTLHNKMFESILKAPVLFFDRNPIGRILNRFSKDIGHLDDLLPLTFLDFIQMGPSSCRKTSSGIPLILHYGKLYNYFIIYYHIIIEIKYTINVMGLNHPETTSIAIHGKIVLRETSPWCQKG

SEQ ID NO: 1182 - protein, 1455 aa, Artificial Sequence
  Synthetic polypeptide
MAPAKATNVVRLLLGSTALWLSQLGSGTVAASKSVTAHLAAKWPETPLLLEASEFMAEESNEKFWQFLETVQELAIYKQTESDYSYYNLILKKAGQFLDNLHINLLKFAFSIRAYSPAIQMFQQIAADEPPPDGCNAFVVIHKKHTCKINEIKKLLKKAASRTRPYLFKGDHKFPTNKENLPVVILYAEMGTRTFSAFHKVLSEKAQNEEILYVLRHYIQKPSSRKMYLSGYGVELAIKSTEYKALDDTQVKTVTNTTVEDETETNEVQGFLFGKLKEIYSDLRDNLTAFQKYLIESNKQMMPLKVWELQDLSFQAASQIMSAPVYDSIKLMKDISQNFPIKARSLTRIAVNQHMREEIKENQKDLQVRFKIQPGDARLFINGLRVDMDVYDAFSILDMLKLEGKMMNGLRNLGINGEDMSKFLKLNSHIWEYTYVLDIRHSSIMWINDLENDDLYITWPTSCQKLLKPVFPGSVPSIRRNFHNLVLFIDPAQEYTLDFIKLADVFYSHEVPLRIGFVFILNTDDEVDGANDAGVALWRAFNYIAEEFDISEAFISIVHMYQKVKKDQNILTVDNVKSVLQNTFPHANIWDILGIHSKYDEERKAGASFYKMTGLGPLPQALYNGEPFKHEEMNIKELKMAVLQRMMDASVYLQREVFLGTLNDRTNAIDFLMDRNNVVPRINTLILRTNQQYLNLISTSVTADVEDFSTFFFLDSQDKSAVIAKNMYYLTQDDESIISAVTLWIIADFDKPSGRKLLFNALKHMKTSVHSRLGIIYNPTSKINEENTAISRGILAAFLTQKNMFLRSFLGQLAKEEIATAIYSGDKIKTFLIEGMDKNAFEKKYNTVGVNIFRTHQLFCQDVLKLRPGEMGIVSNGRFLGPLDEDFYAEDFYLLEKITFSNLGEKIKGIVENMGINANNMSDFIMKVDALMSSVPKRASRYDVTFLRENHSVIKTNPQENDMFFNVIAIVDPLTREAQKMAQLLVVLGKIINMKIKLFMNCRGRLSEAPLESFYRFVLEPELMSGANDVSSLGPVAKFLDIPESPLLILNMITPEGWLVETVHSNCDLDNIHLKDTEKTVTAEYELEYLLLEGQCFDKVTEQPPRGLQFTLGTKNKPAVVDTIVMAHHGYFQLKANPGAWILRLHQGKSEDIYQIVGHEGTDSQADLEDIIVVLNSFKSKILKVKVKKETDKIKEDILTDEDEKTKGLWDSIKSFTVSLHKENKKEKDVLNIFSVASGHLYERFLRIMMLSVLRNTKTPVKFWLLKNYLSPTFKEVIPHMAKEYGFRYELVQYRWPRWLRQQTERQRIIWGYKILFLDVLFPLAVDKIIFVDADQIVRHDLKELRDFDLDGAPYGYTPFCDSRREMDGYRFWKTGYWASHLLRRKYHISALYVVDLKKFRRIGAGDRLRSQYQALSQDPNSLSNLDQEVRSVSARPPIIWDVGSASAPPPRHPV

SEQ ID NO: 1183 - protein, 282 aa, Artificial Sequence
  Synthetic polypeptide
MPEDQVGKLEATENTISAMAAAAAEQQQFYLLLGNLLSPDNVVRKQAEETYENIPGQSKITFLLQAIRNTTAAEEARQMAAVLLRRLLSSAFDEVYPALPSDVQTAIKSELLMIIQMETQSSMRKKVCDIAAELARNLIDEDGNNQWPEGLKFLFDSVSSQNVGLREAALHIFWNFPGIFGNQQQHYLDVIKRMLVQCMQDQEHPSIRTLSARATAAFILANEHNVALFKHFADLLPGFLQLSISSQKSEILKCAFPLSDVSVFKKLRISEHFGFGMFHLYV

SEQ ID NO: 1184 - protein, 264 aa, Artificial Sequence
  Synthetic polypeptide
MAAAAAEQQQFYLLLGNLLSPDNVVRKQAEETYENIPGQSKITFLLQAIRNTTAAEEARQMAAVLLRRLLSSAFDEVYPALPSDVQTAIKSELLMIIQMETQSSMRKKVCDIAAELARNLIDEDGNNQWPEGLKFLFDSVSSQNVGLREAALHIFWNFPGIFGNQQQHYLDVIKRMLVQCMQDQEHPSIRTLSARATAAFILANEHNVALFKHFADLLPGFLQLSISSQKSEILKCAFPLSDVSVFKKLRISEHFGFGMFHLYV

SEQ ID NO: 1185 - protein, 264 aa, Artificial Sequence; identical to SEQ ID NO: 1184
  Synthetic polypeptide

SEQ ID NO: 1186 - protein, 139 aa, Artificial Sequence
  Synthetic polypeptide
MAAAAAEQQQFYLLLGNLLSPDNVVRKQAEETYENIPGQSKITFLLQAIRNTTAAEEARQMAAVLLRRLLSSAFDEVYPALPSDVQTAIKNLLPGFLQLSISSQKSEILKCAFPLSDVSVFKKLRISEHFGFGMFHLYV

SEQ ID NO: 1187 - protein, 67 aa, Artificial Sequence
  Synthetic polypeptide
FSGHCCRGAWHQLPPRRRSHPRAAAPDAPPSRKPMRISQASQRSHSSYKPSEIQQLLKRLDKWPPFS

SEQ ID NO: 1188 - protein, 155 aa, Artificial Sequence
  Synthetic polypeptide
MTATEALLRVLLLLLAFGHSTYGAECFPACNPQNGFCEDDNVCRCQPGWQGPLCDQCVTSPGCLHGLCGEPGQCICTDGWDGELCDRDVRACSSAPCANNRTCVSLDDGLYECSCAPGYSGKDCQKKDGPCVINGSPCQHGGTCVDDEVRSSRPA

SEQ ID NO: 1189 - protein, 155 aa, Artificial Sequence; identical to SEQ ID NO: 1188
  Synthetic polypeptide

SEQ ID NO: 1190 - protein, 192 aa, Artificial Sequence
  Synthetic polypeptide
MLPCAAGARGRGAMVVLRAGKKTFLPPLCRAFACRGCQLAPERGAERRDTAPSGVSRFCPPRKSCHDWIGPPDKYSNLRPVHFYIPENESPLEQKLRKLRQETQEWNQQFWANQNLTFSKEKEEFIHSRLKTKGLGLRTESGAVAHSCNPSTLGGQGGRIMKSGVQDQSDRCGETPSLLEIQKLARYGGACL

SEQ ID NO: 1191 - protein, 192 aa, Artificial Sequence; identical to SEQ ID NO: 1190
  Synthetic polypeptide

SEQ ID NO: 1192 - protein, 179 aa, Artificial Sequence
  Synthetic polypeptide
MVVLRAGKKTFLPPLCRAFACRGCQLAPERGAERRDTAPSGVSRFCPPRKSCHDWIGPPDKYSNLRPVHFYIPENESPLEQKLRKLRQETQEWNQQFWANQNLTFSKEKEEFIHSRLKTKGLGLRTESGAVAHSCNPSTLGGQGGRIMKSGVQDQSDRCGETPSLLEIQKLARYGGACL

SEQ ID NO: 1193 - protein, 179 aa, Artificial Sequence; identical to SEQ ID NO: 1192
  Synthetic polypeptide

SEQ ID NO: 1194 - protein, 154 aa, Artificial Sequence
  Synthetic polypeptide
LAPERGAERRDTAPSGVSRFCPPRKSCHDWIGPPDKYSNLRPVHFYIPENESPLEQKLRKLRQETQEWNQQFWANQNLTFSKEKEEFIHSRLKTKGLGLRTESGAVAHSCNPSTLGGQGGRIMKSGVQDQSDRCGETPSLLEIQKLARYGGACL

SEQ ID NO: 1195 - protein, 130 aa, Artificial Sequence
  Synthetic polypeptide
ASTKGPSVFPLAPCSRSTSESTAALGCLVKDYFPEPVTVSWNSGALTSGVHTFPAVLQSSGLYSLSSVVTVPSSSLGTKTYTCNVDHKPSNTKVDKRVVPKSCSLWKKHRSQTVPVVLCFFFLGSGKINL

SEQ ID NO: 1196 - protein, 330 aa, Artificial Sequence [sequence omitted]

SEQ ID NO: 1197 - protein, 295 aa, Artificial Sequence
  Synthetic polypeptide
ASTKGPSVFPLAPSSKSTSGGTAALGCLVKDYFPEPVTVSWNSGALTSGVHTFPAVLQSSGLYSLSSVVTVPSSSLGTQTYICNVNHKPSNTKVDKKVEPKSCDKTHTCPPCPAPELLGGPSVFLFPPKPKDTLMISRTPEVTCVVVDVSHEDPEVKFNWYVDGVEYKCKVSNKALPAPIEKTISKAKGQPREPQVYTLPPSRDELTKNQVSLTCLVKGFYPSDIAVEWESNGQPENNYKTTPPVLDSDGSFFLYSKLTVDKSRWQQGNVFSCSVMHEALHNHYTQKSLSLSPGK

SEQ ID NO: 1198 - protein, 307 aa, Artificial Sequence
  Synthetic polypeptide
ASTKGPSVFPLAPSSKSTSGGTAALGCLVKDYFPEPVTVSWNSGALTSGVHTFPAVLQSSGLYSLSSVVTVPSSSLGTQTYICNVNHKPSNTKVDKKVEPKSCDKTHTCPPCPAPELLGGPSVFLFPPKPKDTLMISRTPEVTCVVVDVSHEDPEVKFNWYVDGVEVHNAKTKPREEQYNSTYRVVSVLTVLHQDWLNGKEYKCKVSNKALPAPIEKTISKAKGQPREPQVYTLPPSRDELTKNQVSLTCLVKGFYPSDIAVEWESNGQPENNYKTTPPVLDSDGSFFLYSKLTRDRERQREIERQR

SEQ ID NO: 1199 - protein, 307 aa, Artificial Sequence; identical to SEQ ID NO: 1198
  Synthetic polypeptide

SEQ ID NO: 1200 - protein, 272 aa, Artificial Sequence
  Synthetic polypeptide
ASTKGPSVFPLAPSSKSTSGGTAALGCLVKDYFPEPVTVSWNSGALTSGVHTFPAVLQSSGLYSLSSVVTVPSSSLGTQTYICNVNHKPSNTKVDKKVEPKSCDKTHTCPPCPAPELLGGPSVFLFPPKPKDTLMISRTPEVTCVVVDVSHEDPEVKFNWYVDGVEYKCKVSNKALPAPIEKTISKAKGQPREPQVYTLPPSRDELTKNQVSLTCLVKGFYPSDIAVEWESNGQPENNYKTTPPVLDSDGSFFLYSKLTRDRERQREIERQR

SEQ ID NO: 1201 - protein, 168 aa, Artificial Sequence
  Synthetic polypeptide
ASTKGPSVFPLAPSSKSTSGGTAALGCLVKDYFPEPVTVSWNSGALTSGVHTFPAVLQSSGLYSLSSVVTVPSSSLGTQTYICNVNHKPSNTKVDKKVEPKSCDKTHTCPPCPAPELLGGPSVFLFPPKPKDTLMISRTPEVTCVVDHLTSGVGDQPGQHGETPSLFY

SEQ ID NO: 1202 - protein, 168 aa, Artificial Sequence; identical to SEQ ID NO: 1201
  Synthetic polypeptide

SEQ ID NO: 1203 - protein, 168 aa, Artificial Sequence; identical to SEQ ID NO: 1201
  Synthetic polypeptide

SEQ ID NO: 1204 - protein, 36 aa, Artificial Sequence
  Synthetic polypeptide
LPPRAHRSSPWRPAPGAPLGAQRPWAAWSRTTSQNR

SEQ ID NO: 1205 - protein, 153 aa, Artificial Sequence
  Synthetic polypeptide
MKHLWFFLLLVAAPRWVLSQVQLQESGPGLVKPSETLSLTCTVSGGSISSYYWSWIRQPPGKGLEWIGYIYYSGSTNYNPSLKSRVTISVDTSKNQFSLKLSSVTAADTAVYYCARDTVRGGREEAMWRRNALEGGPVQARKKPHQEPTLPEH

SEQ ID NO: 1206 - protein, 44 aa, Artificial Sequence
  Synthetic polypeptide
MAKPCGVRLSGEARKQVEVFRQNLFQESFHFQVFSFLICKSWTQ

SEQ ID NO: 1207 - protein, 44 aa, Artificial Sequence; identical to SEQ ID NO: 1206
  Synthetic polypeptide

SEQ ID NO: 1208 - protein, 44 aa, Artificial Sequence; identical to SEQ ID NO: 1206
  Synthetic polypeptide

SEQ ID NO: 1209 - protein, 75 aa, Artificial Sequence
  Synthetic polypeptide
MAAPMNGQVCVVTGASRGIGRGIALQLCKAGATVYITGRHLDTLRVVAQEAWWHVPAVPAATPEAEAGGSLEPRS

SEQ ID NO: 1210 - protein, 75 aa, Artificial Sequence; identical to SEQ ID NO: 1209
  Synthetic polypeptide

SEQ ID NO: 1211 - protein, 75 aa, Artificial Sequence; identical to SEQ ID NO: 1209
  Synthetic polypeptide

SEQ ID NO: 1212 - protein, 952 aa, Artificial Sequence
  Synthetic polypeptide
MITTLPSLLPASLASISHRVTNLPSNSLSHNPGLSKPDFPGNSSPGLPSSSSPGRDLGAPAGSMGAASCEDEELEFKLVFGEEKEAPPLGAGGLGEELDSEDAPPCCRLALGEPPPYGAAPIGIPRPPPPRPGMHSPPPRPAPSPGTWESQPARSVRLGGPGGGAGGAGGGRVLECPSIRITSISPTPEPPAALEDNPDAWGDGSPRDYPPPEGFGGYREAGGQGGGAFFSPSPGSSSLSSWSFFSDASDEAALYAACDEVESELNEAASRFGLGSPLPSPRASPRPWTPEDPWSLYGPSPGGRGPEDSWLLLSAPGPTPASPRPASPCGKRRYSSSGTPSSASPALSRRGSLGEEGSEPPPPPPLPLARDPGSPGPFDYVGAPPAESIPQKTRRTSSEQAVALPRSEEPASCNGKLPLGAEESVAPPGGSRKEVAGMDYLAVPSPLAWSKARIGGHSPIFRTSALPPLDWPLPSQYEQLELRIEVQPRAHHRAHYETEGSRGAVKAAPGGHPVVKLLGYSEKPLTLQMFIGTADERNLRPHAFYQVHRITGKMVATASYEAVVSGTKVLEMTLLPENNMAANIDCAGILKLRNSDIELRKGETDIGRKNTRVRLVFRVHVPQGGGKVVSVQAASVPIECSQRSAQELPQVEAYSPSACSVRGGEELVLTGSNFLPDSKVVFIERGPDGKLQWEEEATVNRLQSNEVTLTLTVPEYSNKRVSRPVQVYFYVSNGRRKRSPTQSFRFLPVICKEEPLPDSSLRGFPSASATPFGTDMDFSPPRPPYPSYPHEDPACETPYLSEGFGYGMPPLYPQTGPPPSYRPGLRMFPETRGTTGCAQPPAVSFLPRPFPSDPYGGRGSSFSLGLPFSPPAPFRPPPLPASPPLEGPFPSQSDVHPLPAEGYNKVGPGYGPGEGAPEQEKSRGGYSSGFRDSVPIQGITLEEGGAAYFLLP

SEQ ID NO: 1213 - protein, 902 aa, Artificial Sequence
  Synthetic polypeptide
MLSGRDLGAPAGSMGAASCEDEELEFKLVFGEEKEAPPLGAGGLGEELDSEDAPPCCRLALGEPPPYGAAPIGIPRPPPPRPGMHSPPPRPAPSPGTWESQPARSVRLGGPGGGAGGAGGGRVLECPSIRITSISPTPEPPAALEDNPDAWGDGSPRDYPPPEGFGGYREAGGQGGGAFFSPSPGSSSLSSWSFFSDASDEAALYAACDEVESELNEAASRFGLGSPLPSPRASPRPWTPEDPWSLYGPSPGGRGPEDSWLLLSAPGPTPASPRPASPCGKRRYSSSGTPSSASPALSRRGSLGEEGSEPPPPPPLPLARDPGSPGPFDYVGAPPAESIPQKTRRTSSEQAVALPRSEEPASCNGKLPLGAEESVAPPGGSRKEVAGMDYLAVPSPLAWSKARIGGHSPIFRTSALPPLDWPLPSQYEQLELRIEVQPRAHHRAHYETEGSRGAVKAAPGGHPVVKLLGYSEKPLTLQMFIGTADERNLRPHAFYQVHRITGKMVATASYEAVVSGTKVLEMTLLPENNMAANIDCAGILKLRNSDIELRKGETDIGRKNTRVRLVFRVHVPQGGGKVVSVQAASVPIECSQRSAQELPQVEAYSPSACSVRGGEELVLTGSNFLPDSKVVFIERGPDGKLQWEEEATVNRLQSNEVTLTLTVPEYSNKRVSRPVQVYFYVSNGRRKRSPTQSFRFLPVICKEEPLPDSSLRGFPSASATPFGTDMDFSPPRPPYPSYPHEDPACETPYLSEGFGYGMPPLYPQTGPPPSYRPGLRMFPETRGTTGCAQPPAVSFLPRPFPSDPYGGRGSSFSLGLPFSPPAPFRPPPLPASPPLEGPFPSQSDVHPLPAEGYNKVGPGYGPGEGAPEQEKSRGGYSSGFRDSVPIQGITLEEGGAAYFLLP

SEQ ID NO: 1214 - protein, 902 aa, Artificial Sequence; identical to SEQ ID NO: 1213
  Synthetic polypeptide

SEQ ID NO: 1215 - protein, 921 aa, Artificial Sequence
  Synthetic polypeptide
MADGGADSAAQRLPEGPGRVAPGRDLGAPAGSMGAASCEDEELEFKLVFGEEKEAPPLGAGGLGEELDSEDAPPCCRLALGEPPPYGAAPIGIPRPPPPRPGMHSPPPRPAPSPGTWESQPARSVRLGGPGGGAGGAGGGRVLECPSIRITSISPTPEPPAALEDNPDAWGDGSPRDYPPPEGFGGYREAGGQGGGAFFSPSPGSSSLSSWSFFSDASDEAALYAACDEVESELNEAASRFGLGSPLPSPRASPRPWTPEDPWSLYGPSPGGRGPEDSWLLLSAPGPTPASPRPASPCGKRRYSSSGTPSSASPALSRRGSLGEEGSEPPPPPPLPLARDPGSPGPFDYVGAPPAESIPQKTRRTSSEQAVALPRSEEPASCNGKLPLGAEESVAPPGGSRKEVAGMDYLAVPSPLAWSKARIGGHSPIFRTSALPPLDWPLPSQYEQLELRIEVQPRAHHRAHYETEGSRGAVKAAPGGHPVVKLLGYSEKPLTLQMFIGTADERNLRPHAFYQVHRITGKMVATASYEAVVSGTKVLEMTLLPENNMAANIDCAGILKLRNSDIELRKGETDIGRKNTRVRLVFRVHVPQGGGKVVSVQAASVPIECSQRSAQELPQVEAYSPSACSVRGGEELVLTGSNFLPDSKVVFIERGPDGKLQWEEEATVNRLQSNEVTLTLTVPEYSNKRVSRPVQVYFYVSNGRRKRSPTQSFRFLPVICKEEPLPDSSLRGFPSASATPFGTDMDFSPPRPPYPSYPHEDPACETPYLSEGFGYGMPPLYPQTGPPPSYRPGLRMFPETRGTTGCAQPPAVSFLPRPFPSDPYGGRGSSFSLGLPFSPPAPFRPPPLPASPPLEGPFPSQSDVHPLPAEGYNKVGPGYGPGEGAPEQEKSRGGYSSGFRDSVPIQGITLEEGGAAYFLLP

SEQ ID NO: 1216 - protein, 921 aa, Artificial Sequence; identical to SEQ ID NO: 1215
  Synthetic polypeptide

SEQ ID NO: 1217 - protein, 889 aa, Artificial Sequence
  Synthetic polypeptide
MGAASCEDEELEFKLVFGEEKEAPPLGAGGLGEELDSEDAPPCCRLALGEPPPYGAAPIGIPRPPPPRPGMHSPPPRPAPSPGTWESQPARSVRLGGPGGGAGGAGGGRVLECPSIRITSISPTPEPPAALEDNPDAWGDGSPRDYPPPEGFGGYREAGGQGGGAFFSPSPGSSSLSSWSFFSDASDEAALYAACDEVESELNEAASRFGLGSPLPSPRASPRPWTPEDPWSLYGPSPGGRGPEDSWLLLSAPGPTPASPRPASPCGKRRYSSSGTPSSASPALSRRGSLGEEGSEPPPPPPLPLARDPGSPGPFDYVGAPPAESIPQKTRRTSSEQAVALPRSEEPASCNGKLPLGAEESVAPPGGSRKEVAGMDYLAVPSPLAWSKARIGGHSPIFRTSALPPLDWPLPSQYEQLELRIEVQPRAHHRAHYETEGSRGAVKAAPGGHPVVKLLGYSEKPLTLQMFIGTADERNLRPHAFYQVHRITGKMVATASYEAVVSGTKVLEMTLLPENNMAANIDCAGILKLRNSDIELRKGETDIGRKNTRVRLVFRVHVPQGGGKVVSVQAASVPIECSQRSAQELPQVEAYSPSACSVRGGEELVLTGSNFLPDSKVVFIERGPDGKLQWEEEATVNRLQSNEVTLTLTVPEYSNKRVSRPVQVYFYVSNGRRKRSPTQSFRFLPVICKEEPLPDSSLRGFPSASATPFGTDMDFSPPRPPYPSYPHEDPACETPYLSEGFGYGMPPLYPQTGPPPSYRPGLRMFPETRGTTGCAQPPAVSFLPRPFPSDPYGGRGSSFSLGLPFSPPAPFRPPPLPASPPLEGPFPSQSDVHPLPAEGYNKVGPGYGPGEGAPEQEKSRGGYSSGFRDSVPIQGITLEEGGAAYFLLP

SEQ ID NO: 1218 - protein, 889 aa, Artificial Sequence; identical to SEQ ID NO: 1217
  Synthetic polypeptide

SEQ ID NO: 1219 - protein, 819 aa, Artificial Sequence
  Synthetic polypeptide
MHSPPPRPAPSPGTWESQPARSVRLGGPGGGAGGAGGGRVLECPSIRITSISPTPEPPAALEDNPDAWGDGSPRDYPPPEGFGGYREAGGQGGGAFFSPSPGSSSLSSWSFFSDASDEAALYAACDEVESELNEAASRFGLGSPLPSPRASPRPWTPEDPWSLYGPSPGGRGPEDSWLLLSAPGPTPASPRPASPCGKRRYSSSGTPSSASPALSRRGSLGEEGSEPPPPPPLPLARDPGSPGPFDYVGAPPAESIPQKTRRTSSEQAVALPRSEEPASCNGKLPLGAEESVAPPGGSRKEVAGMDYLAVPSPLAWSKARIGGHSPIFRTSALPPLDWPLPSQYEQLELRIEVQPRAHHRAHYETEGSRGAVKAAPGGHPVVKLLGYSEKPLTLQMFIGTADERNLRPHAFYQVHRITGKMVATASYEAVVSGTKVLEMTLLPENNMAANIDCAGILKLRNSDIELRKGETDIGRKNTRVRLVFRVHVPQGGGKVVSVQAASVPIECSQRSAQELPQVEAYSPSACSVRGGEELVLTGSNFLPDSKVVFIERGPDGKLQWEEEATVNRLQSNEVTLTLTVPEYSNKRVSRPVQVYFYVSNGRRKRSPTQSFRFLPVICKEEPLPDSSLRGFPSASATPFGTDMDFSPPRPPYPSYPHEDPACETPYLSEGFGYGMPPLYPQTGPPPSYRPGLRMFPETRGTTGCAQPPAVSFLPRPFPSDPYGGRGSSFSLGLPFSPPAPFRPPPLPASPPLEGPFPSQSDVHPLPAEGYNKVGPGYGPGEGAPEQEKSRGGYSSGFRDSVPIQGITLEEGGAAYFLLP

SEQ ID NO: 1220 - protein, 819 aa, Artificial Sequence; identical to SEQ ID NO: 1219
  Synthetic polypeptide

SEQ ID NO: 1221 - protein, 819 aa, Artificial Sequence; identical to SEQ ID NO: 1219
  Synthetic polypeptide

SEQ ID NO: 1222 - protein, 877 aa, Artificial Sequence
  Synthetic polypeptide
MPASISSIFPGPTLLLSCGSEELDSEDAPPCCRLALGEPPPYGAAPIGIPRPPPPRPGMHSPPPRPAPSPGTWESQPARSVRLGGPGGGAGGAGGGRVLECPSIRITSISPTPEPPAALEDNPDAWGDGSPRDYPPPEGFGGYREAGGQGGGAFFSPSPGSSSLSSWSFFSDASDEAALYAACDEVESELNEAASRFGLGSPLPSPRASPRPWTPEDPWSLYGPSPGGRGPEDSWLLLSAPGPTPASPRPASPCGKRRYSSSGTPSSASPALSRRGSLGEEGSEPPPPPPLPLARDPGSPGPFDYVGAPPAESIPQKTRRTSSEQAVALPRSEEPASCNGKLPLGAEESVAPPGGSRKEVAGMDYLAVPSPLAWSKARIGGHSPIFRTSALPPLDWPLPSQYEQLELRIEVQPRAHHRAHYETEGSRGAVKAAPGGHPVVKLLGYSEKPLTLQMFIGTADERNLRPHAFYQVHRITGKMVATASYEAVVSGTKVLEMTLLPENNMAANIDCAGILKLRNSDIELRKGETDIGRKNTRVRLVFRVHVPQGGGKVVSVQAASVPIECSQRSAQELPQVEAYSPSACSVRGGEELVLTGSNFLPDSKVVFIERGPDGKLQWEEEATVNRLQSNEVTLTLTVPEYSNKRVSRPVQVYFYVSNGRRKRSPTQSFRFLPVICKEEPLPDSSLRGFPSASATPFGTDMDFSPPRPPYPSYPHEDPACETPYLSEGFGYGMPPLYPQTGPPPSYRPGLRMFPETRGTTGCAQPPAVSFLPRPFPSDPYGGRGSSFSLGLPFSPPAPFRPPPLPASPPLEGPFPSQSDVHPLPAEGYNKVGPGYGPGEGAPEQEKSRGGYSSGFRDSVPIQGITLEEGGAAYFLLP

SEQ ID NO: 1223 - protein, 877 aa, Artificial Sequence; identical to SEQ ID NO: 1222
  Synthetic polypeptide

SEQ ID NO: 1224 - protein, 424 aa, Artificial Sequence
  Synthetic polypeptide
MFIGTADERNLRPHAFYQVHRITGKMVATASYEAVVSGTKVLEMTLLPENNMAANIDCAGILKLRNSDIELRKGETDIGRKNTRVRLVFRVHVPQGGGKVVSVQAASVPIECSQRSAQELPQVEAYSPSACSVRGGEELVLTGSNFLPDSKVVFIERGPDGKLQWEEEATVNRLQSNEVTLTLTVPEYSNKRVSRPVQVYFYVSNGRRKRSPTQSFRFLPVICKEEPLPDSSLRGFPSASATPFGTDMDFSPPRPPYPSYPHEDPACETPYLSEGFGYGMPPLYPQTGPPPSYRPGLRMFPETRGTTGCAQPPAVSFLPRPFPSDPYGGRGSSFSLGLPFSPPAPFRPPPLPASPPLEGPFPSQSDVHPLPAEGYNKVGPGYGPGEGAPEQEKSRGGYSSGFRDSVPIQGITLEEGGAAYFLLP

SEQ ID NO: 1225 - protein, 424 aa, Artificial Sequence; identical to SEQ ID NO: 1224
  Synthetic polypeptide

SEQ ID NO: 1226 - protein, 177 aa, Artificial Sequence
  Synthetic polypeptide
MDFSPPRPPYPSYPHEDPACETPYLSEGFGYGMPPLYPQTGPPPSYRPGLRMFPETRGTTGCAQPPAVSFLPRPFPSDPYGGRGSSFSLGLPFSPPAPFRPPPLPASPPLEGPFPSQSDVHPLPAEGYNKVGPGYGPGEGAPEQEKSRGGYSSGFRDSVPIQGITLEEGGAAYFLLP

SEQ ID NO: 1227 - protein, 177 aa, Artificial Sequence; identical to SEQ ID NO: 1226
  Synthetic polypeptide

SEQ ID NO: 1228 - protein, 79 aa, Artificial Sequence
  Synthetic polypeptide
MLLSGGDPPAQEWFMVQTKSKPRVQRQRLQVQRIFRVKLNAFQSRPDTPYFWLQLEGPRENMGKAKYRRHHGEDPRLWS

SEQ ID NO: 1229 - protein, 123 aa, Artificial Sequence [sequence omitted]

SEQ ID NO: 1230 - protein, 123 aa, Artificial Sequence [sequence omitted]

SEQ ID NO: 1231 - protein, 123 aa, Artificial Sequence [sequence omitted]

SEQ ID NO: 1232 - protein, 123 aa, Artificial Sequence [sequence omitted]

SEQ ID NO: 1233 - protein, 12 aa, Artificial Sequence
  Synthetic polypeptide
MMRIEVKVKMML

SEQ ID NO: 1234 - protein, 200 aa, Artificial Sequence
  Synthetic polypeptide
MAAAVPQRAWTVEQLRSEQLPKKDIIKFLQEHGSDSFLAEHKLLGNIKNVAKTANKDHLVTAYNHLFETKRFKGTESISKVSEQVKNVKLNEDKPKETKSEETLDEGPPKYTKSVLKKGDKTNFPKKGDVVHCWYTGTLQDGTVFDTNIQTSAKKKKNAKPLSFKVGVGKVIRGLGMPVIPTTREAEAGESVKPGRQRLQ

SEQ ID NO: 1235 - protein, 200 aa, Artificial Sequence; identical to SEQ ID NO: 1234
  Synthetic polypeptide

SEQ ID NO: 1236 - protein, 266 aa, Artificial Sequence
  Synthetic polypeptide
MDAQDCQAAASPEPPGPPARSCVAAWWDMVDRNLRYFPHSCSMLGRKIAALYDSFTSKSLKEHVFLPLIDMLIYFNFFKAPFLVDLKKPELKIPHTVNFYLRVEPGVMLGIWHTVPSCRGEDAKGKDCCWYEAALRDGNPIIVYLHGSAEHRAASHRLKLVKVLSDGGFHVLSVDYRGFGDSTGKPTEEGLTTDAICVYEWTKARSGITPVCLWGHSLGTGVATNAAKVLEEKGCPVDAIVLEAPFTNMWVASINYPLLKVSAQMA

SEQ ID NO: 1237 - protein, 189 aa, Artificial Sequence
  Synthetic polypeptide
MDAQDCQAAASPEPPGPPARSCVAAWWDMVDRNLRHTVPSCRGEDAKGKDCCWYEAALRDGNPIIVYLHGSAEHRAASHRLKLVKVLSDGGFHVLSVDYRGFGDSTGKPTEEGLTTDAICVYEWTKARSGITPVCLWGHSLGTGVATNAAKVLEEKGCPVDAIVLEAPFTNMWVASINYPLLKVSAQMA

SEQ ID NO: 1238 - protein, 159 aa, Artificial Sequence
  Synthetic polypeptide
MLGIWHTVPSCRGEDAKGKDCCWYEAALRDGNPIIVYLHGSAEHRAASHRLKLVKVLSDGGFHVLSVDYRGFGDSTGKPTEEGLTTDAICVYEWTKARSGITPVCLWGHSLGTGVATNAAKVLEEKGCPVDAIVLEAPFTNMWVASINYPLLKVSAQMA

SEQ ID NO: 1239 - protein, 704 aa, Artificial Sequence
  Synthetic polypeptide
MEEMEEELKCPVCGSFYREPIILPCSHNLCQACARNILVQTPESESPQSHRAAGSGVSDYDYLDLDKMSLYSEADSGYGSYGGFASAPTTPCQKSPNGVRVFPPAMPPPATHLSPALAPVPRNSCITCPQCHRSLILDDRGLRGFPKNRVLEGVIDRYQQSKAAALKCQLCEKAPKEATVMCEQCDVFYCDPCRLRCHPPRGPLAKHRLVPPAQGRVSRRLSPRKVSTCTDHELENHSMYCVQCKMPVCYQCLEEGKHSSHEVKALGAMWKLHKSQLSQALNGLSDRAKEAKEFLVQLRNMVQQIQENSVEFEACLVAQCDALIDALNRRKAQLLARVNKEHEHKLKVVRDQISHCTVKLRQTTGLMEYCLEVIKENDPSGFLQISDALIRRVHLTEDQWGKGTLTPRMTTDFDLSLDNSPLLQSIHQLDFVQVKASSPVPATPILQLEECCTHNNSATLSWKQPPLSTVPADGYILELDDGNGGQFREVYVGKETMCTVDGLHFNSTYNARVKAFNKTGVSPYSKTLVLQTSEVAWFAFDPGSAHSDIILSNDNLTVTCSSYDDRVVLGKTGFSKGIHYWELTVDRYDNHPDPAFGVARMDVMKDVMLGKDDKAWAMYVDNNRSWFMHNNSHTNRTEGGITKGATIGVLLDLNRKNLTFFINDEQQGPIAFDNVEGLFFPAVSLNRNVQGCPETKASRIWRDN

SEQ ID NO: 1240 - protein, 785 aa, Artificial Sequence
  Synthetic polypeptide
MEEMEEELKCPVCGSFYREPIILPCSHNLCQACARNILVQTPESESPQSHRAAGSGVSDYDYLDLDKMSLYSEADSGYGSYGGFASAPTTPCQKSPNGVRVFPPAMPPPATHLSPALAPVPRNSCITCPQCHRSLILDDRGLRGFPKNRVLEGVIDRYQQSKAAALKCQLCEKAPKEATVMCEQCDVFYCDPCRLRCHPPRGPLAKHRLVPPAQGRVSRRLSPRKVSTCTDHELENHSMYCVQCKMPVCYQCLEEGKHSSHEVKALGAMWKLHKSQLSQALNGLSDRAKEAKEFLVQLRNMVQQIQENSVEFEACLVAQCDALIDALNRRKAQLLARVNKEHEHKLKVVRDQISHCTVKLRQTTGLMEYCLEVIKENDPSGFLQISDALIRRVHLTEDQWGKGTLTPRMTTDFDLSLDNSPLLQSIHQLDFVQVKVPATPILQLEECCTHNNSATLSWKQPPLSTVPADGYILELDDGNGGQFREVYVGKETMCTVDGLHFNSTYNARVKAFNKTGVSPYSKTLVLQTSEDTDSEEQTLPFPVPSERLPLRRMSPFSSTLNLQPSFPGRSYFDFRSSPHQLSLHSSLQSLNAPGCNFETQSAPYSQLVDIKKLLAVAWFAFDPGSAHSDIILSNDNLTVTCSSYDDRVVLGKTGFSKGIHYWELTVDRYDNHPDPAFGVARMDVMKDVMLGKDDKAWAMYVDNNRSWFMHNNSHTNRTEGGITKGATIGVLLDLNRKNLTFFINDEQQGPIAFDNVEGLFFPAVSLNRNVQGCPETKASRIWRDN

SEQ ID NO: 1241 - protein, 65 aa, Artificial Sequence
  Synthetic polypeptide
MAFTFAAFCYMLALLLTAALIFFAIWHIIAFDELKTDYKNPIDQCNTLNPHLKNLLHMDKHLLEE

SEQ ID NO: 1242 - protein, 65 aa, Artificial Sequence; identical to SEQ ID NO: 1241
  Synthetic polypeptide

SEQ ID NO: 1243 - protein, 65 aa, Artificial Sequence; identical to SEQ ID NO: 1241
  Synthetic polypeptide

SEQ ID NO: 1244 - protein, 65 aa, Artificial Sequence; identical to SEQ ID NO: 1241
  Synthetic polypeptide

SEQ ID NO: 1245 - protein, 65 aa, Artificial Sequence; identical to SEQ ID NO: 1241
  Synthetic polypeptide

SEQ ID NO: 1246 - protein, 835 aa, Artificial Sequence
  Synthetic polypeptide
MSSSHFASRHRKDISTEMIRTKIAHRKSLSQKENRHKEYERNRHFGLKDVNIPTLEGRILVELDETSQGLVPEKTNVKPRAMKTILGDQRKQMLQKYKEEKQLQKLKEQREKAKRGIFKVGRYRPDMPCFLLSNQNAVKAEPKKAIPSSVRITRSKAKDQMEQTKIDNESDVRAIRPGPRQTSEKKVSDKEKKVVQPVMPTSLRMTRSATQAAKQVPRTVSSTTARKPVTRAANENEPEGKVPSKGRPAKNVETKPDKGISCKVDSEENTLNSQTNATSGMNPDGVLSKMENLPEINTAKIKGKNSFAPKDFMFQPLDGLKTYQVTPMTPRSANAFLTPSYTWTPLKTEVDESQATKEILAQKCKTYSTKTIQQDSNKLPCPLGPLTVWHEEHVLNKNEATTKNLNGLPIKEVPSLERNEGRIAQPHHGVPYFRNILQSETEKLTSHCFEWDRKLELDIPDDAKDLIRTAVGQTRLLMKERFKQFEGLVDDCEYKRGIKETTCTDLDGFWDMVSFQIEDVIHKFNNLIKLEESGWQVNNNMNHNMNKNVFRKKVVSGIASKPKQDDAGRIAARNRLAAIKNAMRERIRQEECAETAVSVIPKEVDKIVFDAGFFRVESPVKLFSGLSVSSEGPSQRLGTPKSVNKAVSQSRNEMGIPQQTTSPENAGPQNTKSEHVKKTLFLSIPESRSSIEDAQCPGLPDLIEENHVVNKTDLKVDCLSSERMSLPLLAGGVADDINTNKKEGISDVVEGMELNSSITSQDVLMSSPEKNTASQNSILEEGETKISQSELFDNKSLTTECHLLDSPGLNCSNPFTQLERRHQEHARHISFGGVL

SEQ ID NO: 1247 - protein, 231 aa, Artificial Sequence
  Synthetic polypeptide
MRPWTGSWRWIMLILFAWGTLLFYIGGHLVRDNDHPDHSSRELSKILAKLERLKQQNEDLRRMAESLRIPEGPIDQGPAIGRVRVLEEQLVKAKEQIENYKKQTRNGLGKDHEILRRRIENGAKELWFFLQSELKKLKNLEGNELQRHADEFLLDLGHHERSIMTDLYYLSQTDGAGDWREKEAKDLTELVQRRITYLQGLPLPLFPRSPSDAEPKLDCTAAISAHCNLPA

SEQ ID NO: 1248 - protein, 231 aa, Artificial Sequence; identical to SEQ ID NO: 1247
  Synthetic polypeptide

SEQ ID NO: 1249 - protein, 231 aa, Artificial Sequence; identical to SEQ ID NO: 1247
  Synthetic polypeptide

SEQ ID NO: 1250 - protein, 231 aa, Artificial Sequence; identical to SEQ ID NO: 1247
  Synthetic polypeptide

SEQ ID NO: 1251 - protein, 68 aa, Artificial Sequence
  Synthetic polypeptide
MTDLYYLSQTDGAGDWREKEAKDLTELVQRRITYLQGLPLPLFPRSPSDAEPKLDCTAAISAHCNLPA

SEQ ID NO: 1252 - protein, 102 aa, Artificial Sequence
  Synthetic polypeptide
MAITVSLVNNKRKIVVLAQPTTVKRKRITPYKSIMTDLYYLSQTDGAGDWREKEAKDLTELVQRRITYLQGLPLPLFPRSPSDAEPKLDCTAAISAHCNLPA

SEQ ID NO: 1253 - protein, 15 aa, Artificial Sequence
  Synthetic polypeptide
MEDGVLKEGFLVKRF

SEQ ID NO: 1254 - protein, 15 aa, Artificial Sequence
  Synthetic polypeptide
MEDGVLKEGFLVKRF

SEQ ID NO: 1255 - protein, 1175 aa, Artificial Sequence
  Synthetic polypeptide
MRLLLLVPLLLAPAPGSSAPKVRRQSDTWGPWSQWSPCSRTCGGGVSFRERPCYSQRRDGGSSCVGPARSHRSCRTESCPDGARDFRAEQCAEFDGAEFQGRRYRWLPYYSAPNKCELNCIPKGENFYYKHREAVVDGTPCEPGKRDVCVDGSCRVVGCDHELDSSKQEDKCLRCGGDGTTCYPVAGTFDANDLSRGYNQILIVPMGATSILIDEAAASRNFLAVKNVRGEYYLNGHWTIEAARALPAASTILHYERGAEGDLAPERLHARGPTSEPLVIELISQEPNPGVHYEYHLPLRRPSPGFSWSHGSWSDCSAECGGGHQSRLVFCTIDHEAYPDHMCQRQPRPADRRSCNLHPCPETKRWKAGPWAPCSASCGGGSQSRSVYCISSDGAGIQEAVEEAECAGLPGKPPAIQACNLQRCAAWSPEPWGECSVSCGVGVRKRSVTCRGERGSLLHTAACSLEDRPPLTEPCVHEDCPLLSDQAWHVGTWGLCSKSCSSGTRRRQVICAIGPPSHCGSLQHSKPVDVEPCNTQPCHLPQEVPSMQDVHTPASNPWMPLGPQESPASDSRGQWWAAQEHPSARGDHRGERGDPRGDQGTHLSALGPAPSLQQPPYQQPLRSGSGPHDCRHSPHGCCPDGHTASLGPQWQGCPGAPCQQSRYGCCPDRVSVAEGPHHAGCTKSYGGDSTGGMPRSRAVASTVHNTHQPQAQQNEPSECRGSQFGCCYDNVATAAGPLGEGCVGQPSHAYPVRCLLPSAHGSCADWAARWYFVASVGQCNRFWYGGCHGNANNFASEQECMSSCQGSLHGPRRPQPGASGRSTHTDGGGSSPAGEQEPSQHRTGAAVQRKPWPSGGLWRQDQQPGPGEAPHTQAFGEWPWGQELGSRAPGLGGDAGSPAPPFHSSSYRISLAGVEPSLVQAALGQLVRLSCSDDTAPESQAAWQKDGQPISSDRHRLQFDGSLIIHPLQAEDAGTYSCGSTRPGRDSQKIQLRIIGGDMAVLSEAELSRFPQPRDPAQDFGQAGAAGPLGAIPSSHPQPANRLRLDQNQPRVVDASPGQRIRMTCRAEGFPPPAIEWQRDGQPVSSPRHQLQPDGSLVISRVAVEDGGFYTCVAFNGQDRDQRWVQLRVLGELTISGLPPTVTVPEGDTARLLCVVAGESVNIRWSRNYCLLLCL

SEQ ID NO: 1256 - protein, 1175 aa, Artificial Sequence; identical to SEQ ID NO: 1255
  Synthetic polypeptide

SEQ ID NO: 1257 - protein, 1148 aa, Artificial Sequence
  Synthetic polypeptide
MRLLLLVPLLLAPAPGSSAPKVRRQSDTWGPWSQWSPCSRTCGGGVSFRERPCYSQRRDGGSSCVGPARSHRSCRTESCPDGARDFRAEQCAEFDGAEFQGRRYRWLPYYSAPNKCELNCIPKGENFYYKHREAVVDGTPCEPGKRDVCVDGSCRVVGCDHELDSSKQEDKCLRCGGDGTTCYPVAGTFDANDLSRAVKNVRGEYYLNGHWTIEAARALPAASTILHYERGAEGDLAPERLHARGPTSEPLVIELISQEPNPGVHYEYHLPLRRPSPGFSWSHGSWSDCSAECGGGHQSRLVFCTIDHEAYPDHMCQRQPRPADRRSCNLHPCPETKRWKAGPWAPCSASCGGGSQSRSVYCISSDGAGIQEAVEEAECAGLPGKPPAIQACNLQRCAAWSPEPWGECSVSCGVGVRKRSVTCRGERGSLLHTAACSLEDRPPLTEPCVHEDCPLLSDQAWHVGTWGLCSKSCSSGTRRRQVICAIGPPSHCGSLQHSKPVDVEPCNTQPCHLPQEVPSMQDVHTPASNPWMPLGPQESPASDSRGQWWAAQEHPSARGDHRGERGDPRGDQGTHLSALGPAPSLQQPPYQQPLRSGSGPHDCRHSPHGCCPDGHTASLGPQWQGCPGAPCQQSRYGCCPDRVSVAEGPHHAGCTKSYGGDSTGGMPRSRAVASTVHNTHQPQAQQNEPSECRGSQFGCCYDNVATAAGPLGEGCVGQPSHAYPVRCLLPSAHGSCADWAARWYFVASVGQCNRFWYGGCHGNANNFASEQECMSSCQGSLHGPRRPQPGASGRSTHTDGGGSSPAGEQEPSQHRTGAAVQRKPWPSGGLWRQDQQPGPGEAPHTQAFGEWPWGQELGSRAPGLGGDAGSPAPPFHSSSYRISLAGVEPSLVQAALGQLVRLSCSDDTAPESQAAWQKDGQPISSDRHRLQFDGSLIIHPLQAEDAGTYSCGSTRPGRDSQKIQLRIIGGDMAVLSEAELSRFPQPRDPAQDFGQAGAAGPLGAIPSSHPQPANRLRLDQNQPRVVDASPGQRIRMTCRAEGFPPPAIEWQRDGQPVSSPRHQLQPDGSLVISRVAVEDGGFYTCVAFNGQDRDQRWVQLRVLGELTISGLPPTVTVPEGDTARLLCVVAGESVNIRWSRNYCLLLCL

SEQ ID NO: 1258 - protein, 1159 aa, Artificial Sequence
  Synthetic polypeptide
MRLLLLVPLLLAPAPGSSAPKVRRQSDTWGPWSQWSPCSRTCGGGVSFRERPCYSQRRDGGSSCVGPARSHRSCRTESCPDGARDFRAEQCAEFDGAEFQGRRYRWLPYYSAPNKCELNCIPKGENFYYKHREAVVDGTPCEPGKRDVCVDGSCRVVGCDHELDSSKQEDKCLRCGGDGTTCYPVAGTFDANDLSRGYNQILIVPMGATSILIDEAAASRNFLAVKNVRGEYYLNGHWTIEAARALPAASTILHYERGAEGDLAPERLHARGPTSEPLVIELISQEPNPGVHYEYHLPLRRPSPGFSWSHGSWSDCSAECGGGHQSRLVFCTIDHEAYPDHMCQRQPRPADRRSCNLHPCPETKRWKAGPWAPCSASCGGGSQSRSVYCISSDGAGIQEAVEEAECAGLPGKPPAIQACNLQRCAAWSPEPWGECSVSCGVGVRKRSVTCRGERGSLLHTAACSLEDRPPLTEPCVHEDCPLLSDQAWHVGTWGLCSKSCSSGTRRRQVICAIGPPSHCGSLQHSKPVDVEPCNTQPCHLPQEVPSMQDVHTPASNPWMPLGPQESPASDSRGQWWAAQEHPSARGDHRGERGDPRGDQGTHLSALGPAPSLQQPPYQQPLRSGSGPHDCRHSPHGCCPDGHTASLGPQWQGCPGAPCQQSRYGCCPDRVSVAEGPHHAGCTKSYGGDSTGGMPRSRAVASTVHNTHQPQAQQNEPSECRGSQFGCCYDNVATAAGPLGEGCVGQPSHDWAARWYFVASVGQCNRFWYGGCHGNANNFASEQECMSSCQGSLHGPRRPQPGASGRSTHTDGGGSSPAGEQEPSQHRTGAAVQRKPWPSGGLWRQDQQPGPGEAPHTQAFGEWPWGQELGSRAPGLGGDAGSPAPPFHSSSYRISLAGVEPSLVQAALGQLVRLSCSDDTAPESQAAWQKDGQPISSDRHRLQFDGSLIIHPLQAEDAGTYSCGSTRPGRDSQKIQLRIIGGDMAVLSEAELSRFPQPRDPAQDFGQAGAAGPLGAIPSSHPQPANRLRLDQNQPRVVDASPGQRIRMTCRAEGFPPPAIEWQRDGQPVSSPRHQLQPDGSLVISRVAVEDGGFYTCVAFNGQDRDQRWVQLRVLGELTISGLPPTVTVPEGDTARLLCVVAGESVNIRWSRNYCLLLCL

SEQ ID NO: 1259 - protein, 41 aa, Artificial Sequence
  Synthetic polypeptide
MMPGQIPDPSVTTGSLPGLGPLTGLPSSALTVEEEEEEKEK

SEQ ID NO: 1260 - protein, 41 aa, Artificial Sequence; identical to SEQ ID NO: 1259
  Synthetic polypeptide

SEQ ID NO: 1261 - protein, 41 aa, Artificial Sequence; identical to SEQ ID NO: 1259
  Synthetic polypeptide

SEQ ID NO: 1262 - protein, 41 aa, Artificial Sequence; identical to SEQ ID NO: 1259
  Synthetic polypeptide

SEQ ID NO: 1263 - protein, 52 aa, Artificial Sequence
  Synthetic polypeptide
MVAGWPATPPAMMPGQIPDPSVTTGSLPGLGPLTGLPSSALTVEEEEEEKEK

SEQ ID NO: 1264 - protein, 64 aa, Artificial Sequence
  Synthetic polypeptide
MMPGQIPDPSVTTGSLPGLGPLTGLPSSALTVEELKYADIRNLGAMIAPLHFLEVEEEEEEKEK

SEQ ID NO: 1265 - protein, 64 aa, Artificial Sequence; identical to SEQ ID NO: 1264
  Synthetic polypeptide

SEQ ID NO: 1266 - protein, 64 aa, Artificial Sequence; identical to SEQ ID NO: 1264
  Synthetic polypeptide

SEQ ID NO: 1267 - protein, 64 aa, Artificial Sequence; identical to SEQ ID NO: 1264
  Synthetic polypeptide

SEQ ID NO: 1268 - protein, 75 aa, Artificial Sequence
  Synthetic polypeptide
MVAGWPATPPAMMPGQIPDPSVTTGSLPGLGPLTGLPSSALTVEELKYADIRNLGAMIAPLHFLEVEEEEEEKEK

SEQ ID NO: 1269 - protein, 63 aa, Artificial Sequence
  Synthetic polypeptide
MPHSSDSSDSSFSRSPPPGKQDSSDDVRRVQRREKNRIAAQKSRQRQTQKADTLHLEFLQGNH

SEQ ID NO: 1270 - protein, 442 aa, Artificial Sequence
  Synthetic polypeptide
MDELVHDLASALEQTSEQNKLGELWEEMALSPRQQRRQLRKRRGRKRRSDFTHLAEHTCCYSEASESSLDEATKDCREVAPVTNFSDSDDTMVAKRHPALNAIVKSKQHSWHESDSFTENAPCRPLRRRRKVKRVTSEVAASLQQKLKVSDWSYERGCRFKSAKKQRLSRWKENTPWTSSGHGLCESAENRTFLSKTGRKERMECETDEQKQGSDENMSECETSSVCSSSDTGLFTNDEGRQGDDEQSDWFYEGECVPGFTVPNLLPKWAPDHCSEVERMDSGLDKFSDSTFLLPSRPAQRGYHTRLNRLPGAAARCLRKGRRRLVGKETSINTLGTERISHIISDPRQKDFWLPSAGKRERNQFNPLSPLYSLDVLADASHRRCSPAHCSARQANVHWGPPCSRDIKRKRKPVATASLSSPSAAALFTVVKVETNHMSIAG

SEQ ID NO: 1271 - protein, 447 aa, Artificial Sequence
  Synthetic polypeptide
MDELVHDLASALEQTSEQNKLGELWEEMALSPRQQRRQLRKRRGRKRRSDFTHLAEHTCCYSEASESSLDEATKDCREVAPVTNFSDSDDTMVAKRHPALNAIVKSKQHSWHESDSFTENAPCRPLRRRRKVKRVTSEVAASLQQKLKVSDWSYERGCRFKSAKKQRLSRWKENTPWTSSGHGLCESAENRTFLSKTGRKERMECETDEQKQGSDENMSECETSSVCSSSDTGLFTNDEGRQGDDEQSDWFYEGECVPGFTVPNLLPKWAPDHCSEVERMDSGLDKFSDSTFLLPSRPAQRGYHTRLNRLPGAAARCLRKGRRRLVGKETSINTLGTERISHIISDPRQKEKNKALASDFPHISACAHEFNPLSPLYSLDVLADASHRRCSPAHCSARQANVHWGPPCSRDIKRKRKPVATASLSSPSAAALFTVVKVETNHMSIAG

SEQ ID NO: 1272 - protein, 85 aa, Artificial Sequence
  Synthetic polypeptide
MFLPMLLTEGVHQHTALPDRQMYTGDHHVHVTSRGSGNQWPQHLCLAPVQQHYSQSSRWKQITCPLLDEWMNTICRIYTMEYYVA

SEQ ID NO: 1273 - protein, 85 aa, Artificial Sequence; identical to SEQ ID NO: 1272
  Synthetic polypeptide

SEQ ID NO: 1274 - protein, 198 aa, Artificial Sequence
  Synthetic polypeptide
MLALRLLNVVAPAYFLCISLVTFVLQLFLFLPSMREDPAAARLFSPALLHGALFLFLSANALGNYVLVIQNSPDDLGACQGASARKTPCPSPSTHFCRVCARVTLRHDHHCFFTGNCIGSRNMRNFVLFCLYTSLACLYSMVAGVAYISAVLSISFAHPLAFLTLLPTSISQFFSGCCVTSLNLILIWEMEMPPSDLY

SEQ ID NO: 1275 - protein, 461 aa, Artificial Sequence
  Synthetic polypeptide
MATEFIKSCCGGCFYGETEKHNFSVERDFKAAVPNSQNATISVPPLTSVSVKPQLGCTEDYLLSKLPSDGKEVPFVVPKFKLSYIQPRTQETPSHLEELEGSARASFGDRKVELSSSSQHGPSYDVYNPFYMYQHISPDLSRRFPPRSEVKRLYGSVCDLRTNKLPGSPGLSKSMFDLTNSSQRFIQRHDSLSSVPSSSSSRKNSQGSNRSLDTITLSGDERDFGRLNVKLFYNSSVEQIWITVLQCRDLSWPSSYGDTPTVSIKGILTLPKPVHFKSSAKEGSNAIEFMETFVFAIKLQNLQTVRLVFKIQTQTPRKKTIGECSMSLRTLSTQEMDYSLDITPPSKISVCHAELELGTCFQAVNSRIQLQILEARYLPSSSTPLTLSFFVKVGMFSSGELIYKKKTRLLKASNGRVKWGETMIFPLIQSEKEIVFLIKLYSRSSVRRKHFVGQISFERKV

SEQ ID NO: 1276 - protein, 461 aa, Artificial Sequence; identical to SEQ ID NO: 1275
  Synthetic polypeptide

SEQ ID NO: 1277 - protein, 461 aa, Artificial Sequence; identical to SEQ ID NO: 1275
  Synthetic polypeptide

SEQ ID NO: 1278 - protein, 397 aa, Artificial Sequence
  Synthetic polypeptide
MATEFIKSCCGGCFYGETEKHNFSVERDFKAAVPNSQNATISVPPLTSVSVKPQLGCTEDYLLSKLPSDGKEVPFVVPKFKLSYIQPRTQETPSHLEELEGSARASFGDRKVELSSSSQHGPSYDVYNPFYMYQHISPDLSRRFPPRSEVKRLYGSVCDLRTNKLPGSPGLSKSMFDLTNSSQRFIQRHDSLSSVPSSSSSRKNSQGSNRSLDTITLSGDERDFGRLNVKLFYNSSVEQIWITVLQCRDLSWPSSYGDTPTVSIKGILTLPKPVHFKSSAKEGSNVCHAELELGTCFQAVNSRIQLQILEARYLPSSSTPLTLSFFVKVGMFSSGELIYKKKTRLLKASNGRVKWGETMIFPLIQSEKEIVFLIKLYSRSSVRRKHFVGQISFERKV

SEQ ID NO: 1279 - protein, 213 aa, Artificial Sequence
  Synthetic polypeptide
RSLDTITLSGDERDFGRLNVKLFYNSSVEQIWITVLQAIEFMETFVFAIKLQNLQTVRLVFKIQTQTPRKKTIGECSMSLRTLSTQEMDYSLDITPPSKISVCHAELELGTCFQAVNSRIQLQILEARYLPSSSTPLTLSFFVKVGMFSSGELIYKKKTRLLKASNGRVKWGETMIFPLIQSEKEIVFLIKLYSRSSVRRKHFVGQISFERKV

SEQ ID NO: 1280 - protein, 198 aa, Artificial Sequence
  Synthetic polypeptide
MRSAAVLALLLCAGQVTALPVNSPMNKGDTEVMKCIVEVISDTLSKPSPMPVSQECFETLRGDERILSILRHQNLLKELQDLALQGAKERAHQQKKHSGFEDELSEVLENQSSQAELKEAVEEPSSKDVMEKREDSKEAEKSGNATETATSSAAANNMRWGKWGVSAGGPRVFFSVMKMFWNQIEVVIGQHCEGTNCH

SEQ ID NO: 1281 - protein, 50 aa, Artificial Sequence
  Synthetic polypeptide
MAGGAGAGADGGAGGGGGGGDGSGPSGSSSGGRSLREICFCSCMQQTWRS

SEQ ID NO: 1282 - protein, 73 aa, Artificial Sequence
  Synthetic polypeptide
MPLLRGRCPARRHYRRLALLGLQPAPRFAHSGPPRQRPLSAAVWWCAPGIPATWETEAEGSLEARSLRPAWTT

SEQ ID NO: 1283 - protein, 126 aa, Artificial Sequence
  Synthetic polypeptide
MMKRAAAAAVGGALAVGAVPVVLSAMGFTGAGIAASSIAAKMMSAAAIANGGGVSAGSLVATLQSVGAAGLSTSSNILLASVGSVLGACLGNSPSSSLPAEPEAKEDEARENVPQGQLRLQGHQMA

SEQ ID NO: 1284 - protein, 101 aa, Artificial Sequence
  Synthetic polypeptide
MGFTGAGIAASSIAAKMMSAAAIANGGGVSAGSLVATLQSVGAAGLSTSSNILLASVGSVLGACLGNSPSSSLPAEPEAKEDEARENVPQGQLRLQGHQMA

SEQ ID NO: 1285 - protein, 32 aa, Artificial Sequence
  Synthetic polypeptide
MFSPWKISMFLSVREDSVPTTASFRLILYPPA

SEQ ID NO: 1286 - protein, 32 aa, Artificial Sequence; identical to SEQ ID NO: 1285
  Synthetic polypeptide

SEQ ID NO: 1287 - protein, 32 aa, Artificial Sequence; identical to SEQ ID NO: 1285
  Synthetic polypeptide

SEQ ID NO: 1288 - protein, 854 aa, Artificial Sequence
  Synthetic polypeptide
QIGNLEDYYHFYHSKTFKRSTLSSRGPHTFLRMDPQVKWLQQQEVKRRVKRQVRSDPQALYFNDPIWSNMWYLHCGDKNSRCRSEMNVQAAWKRGYTGKNVVVTILDDGIERNHPDLAPNYDSYASYDVNGNDYDPSPRYDASNENKHGTRCAGEVAASANNSYCIVGIAYNAKIGGIRMLDGDVTDVVEAKSLGIRPNYIDIYSASWGPDDDGKTVDGPGRLAKQAFEYGIKKGRQGLGSIFVWASGNGGREGDYCSCDGYTNSIYTISVSSATENGYKPWYLEECASTLATTYSSGAFYERKIVTTDLRQRCTDGHTGTSVSAPMVAGIIALALEAKSIPLVQVLRTTALTSACAEHSDQRVVYLEHVVVRTSISHPRRGDLQIYLVSPSGTKSQLLAKRLLDLSNEGFTNWEFMTVHCWGEKAEGQWTLEIQDLPSQVRNPEKQGKLKEWSLILYGTAEHPYHTFSAHQSRSRMLELSAPELEPPKAALSPSQVEVPEDEEDYTAQSTPGSANILQTSVCHPECGDKGCDGPNADQCLNCVHFSLGSVKTSRKCVSVCPLGYFGDTAARRCRRCHKGCETCSSRAATQCLSCRRGFYHHQEMNTCVTLCPAGFYADESQKNCLKCHPSCKKCVDEPEKCTVCKEGFSLARGSCIPDCEPGTYFDSELIRCGECHHTCGTCVGPGREECIHCAKNFHFHDWKCVPACGEGFYPEEMPGLPHKVCRRCDENCLSCAGSSRNCSRCKTGFTQLGTSCITNHTCSNADETFCEMVKSNRLCERKLFIQFCCRTCLLAGGHLATSGDILGCHNWKDVLTSSGWRPGMLLSTLQCTAAPMTKNCPDQNVNSAEVEKF

SEQ ID NO: 1289 - protein, 1025 aa, Artificial Sequence
  Synthetic polypeptide
MPPRAPPAPGPRPPPRAAAATDTAAGAGGAGGAGGAGGPGFRPLAPRPWRWLLLLALPAACSPPPRPVYTNHWAVQVLGGPAEADRVAAAHGYLNLGQIGNLEDYYHFYHSKTFKRSTLSSRGPHTFLRMDPQVKWLQQQEVKRRVKRQVRSDPQALYFNDPIWSNMWYLHCGDKNSRCRSEMNVQAAWKRGYTGKNVVVTILDDGIERNHPDLAPNYDSYASYDVNGNDYDPSPRYDASNENKHGTRCAGEVAASANNSYCIVGIAYNAKIGGIRMLDGDVTDVVEAKSLGIRPNYIDIYSASWGPDDDGKTVDGPGRLAKQAFEYGIKKGRQGLGSIFVWASGNGGREGDYCSCDGYTNSIYTISVSSATENGYKPWYLEECASTLATTYSSGAFYERKIVTTDLRQRCTDGHTGTSVSAPMVAGIIALALEANSQLTWRDVQHLLVKTSRPAHLKASDWKVNGAGHKVSHFYGFGLVDAEALVVEAKKWTAVPSQHMCVAASDKRPRSIPLVQVLRTTALTSACAEHSDQRVVYLEHVVVRTSISHPRRGDLQIYLVSPSGTKSQLLAKRLLDLSNEGFTNWEFMTVHCWGEKAEGQWTLEIQDLPSQVRNPEKQGKLKEWSLILYGTAEHPYHTFSAHQSRSRMLELSAPELEPPKAALSPSQVEVPEDEEDYTAQSTPGSANILQTSVCHPECGDKGCDGPNADQCLNCVHFSLGSVKTSRKCVSVCPLGYFGDTAARRCRRCHKGCETCSSRAATQCLSCRRGFYHHQEMNTCVTLCPAGFYADESQKNCLKCHPSCKKCVDEPEKCTVCKEGFSLARGSCIPDCEPGTYFDSELIRCGECHHTCGTCVGPGREECIHCAKNFHFHDWKCVPACGEGFYPEEMPGLPHKVCRRCDENCLSCAGSSRNCSRCKTGFTQLGTSCITNHTCSNADETFCEMVKSNRLCERKLFIQFCCRTCLLAGGHLATSGDILGCHNWKDVLTSSGWRPGMLLSTLQCTAAPMTKNCPDQNVNSAEVEKF

SEQ ID NO: 1290 - protein, 1012 aa, Artificial Sequence
  Synthetic polypeptide
MPPRAPPAPGPRPPPRAAAATDTAAGAGGAGGAGGAGGPGFRPLAPRPWRWLLLLALPAACSPPPRPVYTNHWAVQVLGGPAEADRVAAAHGYLNLGQIGNLEDYYHFYHSKTFKRSTLSSRGPHTFLRMDPQVKWLQQQEVKRRVKRQVRSDPQALYFNDPIWSNMWYLHCGDKNSRCRSEMNVQAAWKRGYTGKNVVVTILDDGIERNHPDLAPNYDSYASYDVNGNDYDPSPRYDASNENKHGTRCAGEVAASANNSYCIVGIAYNAKIGGIRMLDGDVTDVVEAKSLGIRPNYIDIYSASWGPDDDGKTVDGPGRLAKQAFEYGIKKGRQGLGSIFVWASGNGGREGDYCSCDGYTNSIYTISVSSATENGYKPWYLEECASTLATTYSSGAFYERKIVTTDLRQRCTDGHTGTSVSAPMVAGIIALALEANSQLTWRDVQHLLVKTSRPAHLKASDWKVNGAGHKVSHFYGFGLVDAEALVVEAKKWTAVPSQHMCVAASDKRPRSIPLVQVLRTTALTSACAEHSDQRVVYLEHVVVRTSISHPRRGDLQIYLVSPSGTKSQLLAKRLLDLSNEGFTNWEFMTVHCWGEKAEGQWTLEIQDLPSQVRNPEKQGKLKEWSLILYGTAEHPYHTFSAHQSRSRMLELSAPELEPPKAALSPSQVEVPEDEEDYTGVCHPECGDKGCDGPNADQCLNCVHFSLGSVKTSRKCVSVCPLGYFGDTAARRCRRCHKGCETCSSRAATQCLSCRRGFYHHQEMNTCVTLCPAGFYADESQKNCLKCHPSCKKCVDEPEKCTVCKEGFSLARGSCIPDCEPGTYFDSELIRCGECHHTCGTCVGPGREECIHCAKNFHFHDWKCVPACGEGFYPEEMPGLPHKVCRRCDENCLSCAGSSRNCSRCKTGFTQLGTSCITNHTCSNADETFCEMVKSNRLCERKLFIQFCCRTCLLAGGHLATSGDILGCHNWKDVLTSSGWRPGMLLSTLQCTAAPMTKNCPDQNVNSAEVEKF

SEQ ID NO: 1291 - protein, 714 aa, Artificial Sequence
  Synthetic polypeptide
QIGNLEDYYHFYHSKTFKRSTLSSRGPHTFLRMDPQVKWLQQQEVKRRVKRQVRSDPQALYFNDPIWSNMWYLHCGDKNSRCRSEMNVQAAWKRGYTGKNVVVTILDDGIERNHPDLAPNYDSYASYDVNGNDYDPSPRYDASNENKHGTRCAGEVAASANNSYCIVGIAYNAKIGGIRMLDGDVTDVVEAKSLGIRPNYIDIYSASWGPDDDGKTVDGPGRLAKQAFEYGIKKGRQGLGSIFVWASGNGGREGDYCSCDGYTNSIYTISVSSATENGYKPWYLEECASTLATTYSSGAFYERKIVTTDLRQRCTDGHTGTSVSAPMVAGIIALALEAKSIPLVQVLRTTALTSACAEHSDQRVVYLEHVVVRTSISHPRRGDLQIYLVSPSGTKSQLLAKRLLDLSNEGFTNWEFMTVHCWGEKAEGQWTLEIQDLPSQVRNPEKQGKLKEWSLILYGTAEHPYHTFSAHQSRSRMLELSAPELEPPKAALSPSQVEVPEDEEDYTAQSTPGSANILQTSVCHPECGDKGCDGPNADQCLNCVHFSLGSVKTSRKCVSVCPLGYFGDTAARRCRRCHKGCETCSSRAATQCLSCRRGFYHHQEMNTCVTLCPAGFYADESQKNCLKCHPSCKKCVDEPEKCTVCKEGFSLARGSCIPDCEPGTYFDSELIRCGECHHTCGTCVGDIWQRLETFWVVTTGRMYSHPVGGGQECC

SEQ ID NO: 1292 - protein, 885 aa, Artificial Sequence
  Synthetic polypeptide
MPPRAPPAPGPRPPPRAAAATDTAAGAGGAGGAGGAGGPGFRPLAPRPWRWLLLLALPAACSPPPRPVYTNHWAVQVLGGPAEADRVAAAHGYLNLGQIGNLEDYYHFYHSKTFKRSTLSSRGPHTFLRMDPQVKWLQQQEVKRRVKRQVRSDPQALYFNDPIWSNMWYLHCGDKNSRCRSEMNVQAAWKRGYTGKNVVVTILDDGIERNHPDLAPNYDSYASYDVNGNDYDPSPRYDASNENKHGTRCAGEVAASANNSYCIVGIAYNAKIGGIRMLDGDVTDVVEAKSLGIRPNYIDIYSASWGPDDDGKTVDGPGRLAKQAFEYGIKKGRQGLGSIFVWASGNGGREGDYCSCDGYTNSIYTISVSSATENGYKPWYLEECASTLATTYSSGAFYERKIVTTDLRQRCTDGHTGTSVSAPMVAGIIALALEANSQLTWRDVQHLLVKTSRPAHLKASDWKVNGAGHKVSHFYGFGLVDAEALVVEAKKWTAVPSQHMCVAASDKRPRSIPLVQVLRTTALTSACAEHSDQRVVYLEHVVVRTSISHPRRGDLQIYLVSPSGTKSQLLAKRLLDLSNEGFTNWEFMTVHCWGEKAEGQWTLEIQDLPSQVRNPEKQGKLKEWSLILYGTAEHPYHTFSAHQSRSRMLELSAPELEPPKAALSPSQVEVPEDEEDYTAQSTPGSANILQTSVCHPECGDKGCDGPNADQCLNCVHFSLGSVKTSRKCVSVCPLGYFGDTAARRCRRCHKGCETCSSRAATQCLSCRRGFYHHQEMNTCVTLCPAGFYADESQKNCLKCHPSCKKCVDEPEKCTVCKEGFSLARGSCIPDCEPGTYFDSELIRCGECHHTCGTCVGDIWQRLETFWVVTTGRMYSHPVGGGQECC

SEQ ID NO: 1293 - protein, 872 aa, Artificial Sequence
  Synthetic polypeptide
MPPRAPPAPGPRPPPRAAAATDTAAGAGGAGGAGGAGGPGFRPLAPRPWRWLLLLALPAACSPPPRPVYTNHWAVQVLGGPAEADRVAAAHGYLNLGQIGNLEDYYHFYHSKTFKRSTLSSRGPHTFLRMDPQVKWLQQQEVKRRVKRQVRSDPQALYFNDPIWSNMWYLHCGDKNSRCRSEMNVQAAWKRGYTGKNVVVTILDDGIERNHPDLAPNYDSYASYDVNGNDYDPSPRYDASNENKHGTRCAGEVAASANNSYCIVGIAYNAKIGGIRMLDGDVTDVVEAKSLGIRPNYIDIYSASWGPDDDGKTVDGPGRLAKQAFEYGIKKGRQGLGSIFVWASGNGGREGDYCSCDGYTNSIYTISVSSATENGYKPWYLEECASTLATTYSSGAFYERKIVTTDLRQRCTDGHTGTSVSAPMVAGIIALALEANSQLTWRDVQHLLVKTSRPAHLKASDWKVNGAGHKVSHFYGFGLVDAEALVVEAKKWTAVPSQHMCVAASDKRPRSIPLVQVLRTTALTSACAEHSDQRVVYLEHVVVRTSISHPRRGDLQIYLVSPSGTKSQLLAKRLLDLSNEGFTNWEFMTVHCWGEKAEGQWTLEIQDLPSQVRNPEKQGKLKEWSLILYGTAEHPYHTFSAHQSRSRMLELSAPELEPPKAALSPSQVEVPEDEEDYTGVCHPECGDKGCDGPNADQCLNCVHFSLGSVKTSRKCVSVCPLGYFGDTAARRCRRCHKGCETCSSRAATQCLSCRRGFYHHQEMNTCVTLCPAGFYADESQKNCLKCHPSCKKCVDEPEKCTVCKEGFSLARGSCIPDCEPGTYFDSELIRCGECHHTCGTCVGDIWQRLETFWVVTTGRMYSHPVGGGQECC

SEQ ID NO: 1294 - protein, 102 aa, Artificial Sequence
  Synthetic polypeptide
MEEPAAPSEAHEAAGAQAGAEAAREGVSGPDLPVCEPSGESAAPDSALPHAARGWAPFPVAPVPAHLRRGGLRPAPASGGGAWPSPLPSRSSGIWTKQIICR

SEQ ID NO: 1295 - protein, 102 aa, Artificial Sequence; identical to SEQ ID NO: 1294
  Synthetic polypeptide

SEQ ID NO: 1296 - protein, 102 aa, Artificial Sequence; identical to SEQ ID NO: 1294
  Synthetic polypeptide

SEQ ID NO: 1297 - protein, 803 aa, Artificial Sequence
  Synthetic polypeptide
MHLEGRDGRRYPGAPAVELLQTSVPSGLAELVAGKRRLPRGAGGADPSHSCPRGAAGQSSWAPAGQEFASFLTKGRSHSSLPQMSSSRSKDSCFTENTPLLRNSLQEKGSRCIPVYHPEFITAEESWEDSSADWERRYLLSREVSGLSASASSEKGDLLDSPHIRLRLSKLRRCVQWLKVMGLFAFVVLCSILFSLYPDQGKLWQLLALSPLENYSVNLSSHVDSTLLQVDLAGALVASGPSRPGREEHIVVELTQADALGSRWRRPQQVTHNWTVYLNPRRSEHSVMSRTFEVLTRETVSISIRASLQQTQAVPLLMAHQYLRGSVETQVTIATAILAGVYALIIFERPSLTHVVEWIDFETLALLFGMMILVAIFSETGFFDYCAVKAYRLSRGRVWAMIIMLCLIAAVLSAFLDNVTTMLLFTPVTIRLCEVLNLDPRQVLIAEVIFTNIGGAATAIGDPPNVIIVSNQELRKMGLDFAGFTAHMFIGICLVLLVCFPLLRLLYWNRKLYNKEPSEIVELKHEIHVWRLTAQRISPASREETAVRRLLLGKVLALEHLLARRLHTFHRQISQEDKNWETNIQELQKKHRISDGILLAKCLTVLGFVIFMFFLNSFVPGIHLDLGWIAILGAIWLLILADIHDFEIILHRVEWATLLFFAALFVLMEALAHLHLIEYVGEQTALLIKMVPEEQRLIAAIVLVVWVSALASSLIDNIPFTATMIPVLLNLSHDPEVGLPAPPLMYALAFGACLGGNGTLIGASANVVCAGIAEQHGYGFSFMEFFRKRERETRDVLAQRKAL

SEQ ID NO: 1298 - protein, 827 aa, Artificial Sequence
  Synthetic polypeptide
MHLEGRDGRRYPGAPAVELLQTSVPSGLAELVAGKRRLPRGAGGADPSHSCPRGAAGQSSWAPAGQEFASFLTKGRSHSSLPQMSSSRSKDSCFTENTPLLRNSLQEKGSRCIPVYHPEFITAEESWEDSSADWERRYLLSREVSGLSASASSEKGDLLDSPHIRLRLSKLRRCVQWLKVMGLFAFVVLCSILFSLYPDQGKLWQLLALSPLENYSVNLSSHVDSTLLQVDLAGALVASGPSRPGREEHIVVELTQADALGSRWRRPQQVTHNWTVYLNPRRSEHSVMSRTFEVLTRETVSISIRASLQQTQAVPLLMAHQYLRGSVETQVTIATAILAGVYALIIFEIVHRTLAAMLGSLAALAALAVIGDRPSLTHVVEWIDFETLALLFGMMILVAIFSETGFFDYCAVKAYRLSRGRVWAMIIMLCLIAAVLSAFLDNVTTMLLFTPVTIRLCEVLNLDPRQVLIAEVIFTNIGGAATAIGDPPNVIIVSNQELRKMGLDFAGFTAHMFIGICLVLLVCFPLLRLLYWNRKLYNKEPSEIVELKHEIHVWRLTAQRISPASREETAVRRLLLGKVLALEHLLARRLHTFHRQISQEDKNWETNIQELQKKHRISDGILLAKCLTVLGFVIFMFFLNSFVPGIHLDLGWIAILGAIWLLILADIHDFEIILHRVEWATLLFFAALFVLMEALAHLHLIEYVGEQTALLIKMVPEEQRLIAAIVLVVWVSALASSLIDNIPFTATMIPVLLNLSHDPEVGLPAPPLMYALAFGACLGGNGTLIGASANVVCAGIAEQHGYGFSFMEFFRKRERETRDVLAQRKAL

SEQ ID NO: 1299 - protein, 181 aa, Artificial Sequence
  Synthetic polypeptide
MVSRMVSTMLSGLLFWLASGWTPAFAYSPRTPDRVSEADIQRLLHGVMEQLGIARPRVEYPAHQAMNLVGPQSIEGGAHEGLQHLGPFGNIPNIVAELTGDNIPKDFSEDQGYPDPPNPCPVGKTADDGCLENTPDTAEFSREFQLHQHLFDPEHDYPGLGKWKEKKYSVMCSSEIAVSPR

SEQ ID NO: 1300 - protein, 181 aa, Artificial Sequence; identical to SEQ ID NO: 1299
  Synthetic polypeptide

SEQ ID NO: 1301 - protein, 180 aa, Artificial Sequence
  Synthetic polypeptide
MVSRMVSTMLSGLLFWLASGWTPAFAYSPRTPDRVSEADIQRLLHGVMEQLGIARPRVEYPAHQAMNLVGPQSIEGGAHEGLQHLGPFGNIPNIVAELTGDNIPKDFSEDQGYPDPPNPCPVGKTDDGCLENTPDTAEFSREFQLHQHLFDPEHDYPGLGKWKEKKYSVMCSSEIAVSPR

SEQ ID NO: 1302 - protein, 180 aa, Artificial Sequence; identical to SEQ ID NO: 1301
  Synthetic polypeptide

SEQ ID NO: 1303 - protein, 171 aa, Artificial Sequence
  Synthetic polypeptide
SGLLFWLASGWTPAFAYSPRTPDRVSEADIQRLLHGVMEQLGIARPRVEYPAHQAMNLVGPQSIEGGAHEGLQHLGPFGNIPNIVAELTGDNIPKDFSEDQGYPDPPNPCPVGKTADDGCLENTPDTAEFSREFQLHQHLFDPEHDYPGLGKWKEKKYSVMCSSEIAVSPR

SEQ ID NO: 1304 - protein, 167 aa, Artificial Sequence
  Synthetic polypeptide
MVSRMVSTMLSGLLFWLASGWTPAFAYSPRTPDRVSEADIQRLLHGVMEQLGIARPRVEYPAHQAMNLVGPQSIEGGAHEGLQHLGPFGNIPNIVAELTGDNIPKDFSEDQGYPDPPNPCPVGKTADDGCLENTPDTAEFSREFQLHQHLFDPEHDYPGLGKWIPRG

SEQ ID NO: 1305 - protein, 167 aa, Artificial Sequence; identical to SEQ ID NO: 1304
  Synthetic polypeptide

SEQ ID NO: 1306 - protein, 166 aa, Artificial Sequence
  Synthetic polypeptide
MVSRMVSTMLSGLLFWLASGWTPAFAYSPRTPDRVSEADIQRLLHGVMEQLGIARPRVEYPAHQAMNLVGPQSIEGGAHEGLQHLGPFGNIPNIVAELTGDNIPKDFSEDQGYPDPPNPCPVGKTDDGCLENTPDTAEFSREFQLHQHLFDPEHDYPGLGKWIPRG

SEQ ID NO: 1307 - protein, 166 aa, Artificial Sequence; identical to SEQ ID NO: 1306
  Synthetic polypeptide

SEQ ID NO: 1308 - protein, 157 aa, Artificial Sequence
  Synthetic polypeptide
SGLLFWLASGWTPAFAYSPRTPDRVSEADIQRLLHGVMEQLGIARPRVEYPAHQAMNLVGPQSIEGGAHEGLQHLGPFGNIPNIVAELTGDNIPKDFSEDQGYPDPPNPCPVGKTADDGCLENTPDTAEFSREFQLHQHLFDPEHDYPGLGKWIPRG

SEQ ID NO: 1309 - protein, 1110 aa, Artificial Sequence
  Synthetic polypeptide
MENVDNSLDGSDVSEPAKPEAGLEVAQSILSKFSMKSLFGFTSKLESVNPEEEDAVLKAFHSLDVNPTSQQDDSSNGLDPQEAGSRVSPDLGNDEKIASVETESEGSQRKEAGTSLLAQELLPLSTLKGTKDDVICVRGTLVHTTSDSDSDDGGQEPEEGSSTNGPKSPSGVLSEPSQESKENPGGFRENTVTGEMNGAELCAEDPQRIPPEMSSKLEAGNGGLQTERRPSQDQVGEEGSQDLPAVTNQNSSVGITESASSKKEVSGEKSFQLPAFFSGLRVLKKGATAEGGETITEIKPKDGDLALLKLTQPVQKSLVQAGLQTVKSEKKATDPKATPTLLEQLSLLLNIDMPKTEPKGADPESPRREEMGCNADQESQSGPGVPQTQGGEVKPKSPETALEAFKALFIRPPRKGTTADTSELEALKRKMRHEKESLRAVFERSNSKPADGPSDSKSPDHSLTEQDDRTPGRLQAVWPPPKTKDTEEKVGLKYTEAEYQAAILHLKREHKEEIENLQAQFELRAFHIRGEHAMITARLEETIENLKHELEHRWRGGCEERKDVCISTDDDCPPKTFRNVCVQTDRETFLKPCESESKTTRSNQLVPKKLNISSLSQLSPPNDHKDIHAALQPMEGMASNQQKALPPPPASIPPPPPLPSGLGSLSPAPPMPPVSAGPPLPPPPPPPPPLPPPSSAGPPPPPPPPPLPNSPAPPNPGGPPPAPPPPGLAPPPPPGLFFGLGSSSSQCPRKPAIEPSCPMKPLYWTRIQISDRSQNATPTLWDSLEEPDIRDPSEFEYLFSKDTTQQKKKPLSETYEKKNKVKKIIKLLDGKRSQTVGILISSLHLEMKDIQQAIFNVDDSVVDLETLAALYENRAQEDELVKIRKYYETSKEEELKLLDKPEQFLHELAQIPNFAERAQCIIFRSVFSEGITSLHRKVEIITRASKDLLHVKSVKDILALILAFGNYMNGGNRTRGQADGYSLEILPKLKDVKSRDNGINLVDYVVKYYLRYYDQEAGTEKSVFPLPEPQDFFLASQVKFEDLIKDLRKLKRQLEASEKQMVVVCKESPKEYLQPFKDKLEEFFQKAGSSSSQSLNTRGLQDSVHEPLAL

SEQ ID NO: 1310 - protein, 1235 aa, Artificial Sequence
  Synthetic polypeptide
MEGTHCTLQLHKPITELCYISFCLPKGEVRGFSYKGTVTLDRSNKGFHNCYQVREESDIISLSQEPDEHPGDIFFKQTPTKDILTELYKLTTERERLLTNLLSSDHILGITMGNQEGKLQELSVSLAPEDDCFQSAGDWQGELPVGPLNKRSTHGNKKPRRSSGRRESFGALPQKRTKRKGRGGRESAPLMGKDKICSSHSLPLSRTRPNLWVLEEKGNLLPNGALACSLQRRESCPPDIPKTPDTDLGFGSFETAFKDTGLGREVLPPDCSSTEAGGDGIRRPPSGLEHQQTGLSESHQDPEKHPEAEKDEMEKPAKRTCKQKPVSKVVAKVQDLSSQVQRVVKTHSKGKETIAIRPAAHAEFVPKADLLTLPGAEAGAHGSRRQGKERQGDRSSQSPAGETASISSVSASAEGAVNKVPLKVIESEKLDEAPEGKRLGFPVHTSVPHTRPETRNKRRAGLPLGGHKSLFLDLPHKVGPDSSQPRGDKKKPSPPAPAALGKVFNNSASQSSTHKQTSPVPSPLSPRLPSPQQHHRILRLPALPGEREAALNDSPCRKSRVFSGCVSADTLEPPSSAKVTETKGASPAFLRAGQPRLVPGETLEKSLGPGKTTAEPQHQSPPEYQAAILHLKREHKEEIENLQAQFELRAFHIRGEHAMITARLEETIENLKHELEHRWRGGCEERKDVCISTDDDCPPKTFRNVCVQTDRETFLKPCESESKTTRSNQLVPKKLNISSLSQLSPPNDHKDIHAALQPMEGMASNQQKALPPPPASIPPPPPLPSGLGSLSPAPPMPPVSAGPPLPPPPPPPPPLPPPSSAGPPPPPPPPPLPNSPAPPNPGGPPPAPPPPGLAPPPPPGLFFGLGSSSSQCPRKPAIEPSCPMKPLYWTRIQISDRSQNATPTLWDSLEEPDIRDPSEFEYLFSKDTTQQKKKPLSETYEKKNKVKKIIKLLDGKRSQTVGILISSLHLEMKDIQQAIFNVDDSVVDLETLAALYENRAQEDELVKIRKYYETSKEEELKLLDKPEQFLHELAQIPNFAERAQCIIFRSVFSEGITSLHRKVEIITRASKDLLHVKSVKDILALILAFGNYMNGGNRTRGQADGYSLEILPKLKDVKSRDNGINLVDYVVKYYLRYYDQEAGTEKSVFPLPEPQDFFLASQVKFEDLIKDLRKLKRQLEASEKQMVVVCKESPKEYLQPFKDKLEEFFQKAGSSSSQSLNTRGLQDSVHEPLAL

SEQ ID NO: 1311 - protein, 1333 aa, Artificial Sequence
  Synthetic polypeptide
MEGTHCTLQLHKPITELCYISFCLPKGEVRGFSYKGTVTLDRSNKGFHNCYQVREESDIISLSQEPDEHPGDIFFKQTPTKDILTELYKLTTERERLLTNLLSSDHILGITMGNQEGKLQELSVSLAPEDDCFQSAGDWQGELPVGPLNKRSTHGNKKPRRSSGRRESFGALPQKRTKRKGRGGRESAPLMGKDKICSSHSLPLSRTRPNLWVLEEKGNLLPNGALACSLQRRESCPPDIPKTPDTDLGFGSFETAFKDTGLGREVLPPDCSSTEAGGDGIRRPPSGLEHQQTGLSESHQDPEKHPEAEKDEMEKPAKRTCKQKPVSKVVAKVQDLSSQVQRVVKTHSKGKETIAIRPAAHAEFVPKADLLTLPGAEAGAHGSRRQGKERQGDRSSQSPAGETASISSVSASAEGAVNKVPLKVIESEKLDEAPEGKRLGFPVHTSVPHTRPETRNKRRAGLPLGGHKSLFLDLPHKVGPDSSQPRGDKKKPSPPAPAALGKVFNNSASQSSTHKQTSPVPSPLSPRLPSPQQHHRILRLPALPGEREAALNDSPCRKSRVFSGCVSADTLEPPSSAKVTETKGASPAFLRAGQPRLVPGETLEKSLGPGKTTAEPQHQSPPGISSEGFPWDGFNEQTPKDLPNRDGGAWVLGYRAGPACPFLLHEEREKSNRSELYLDLHPDHSLTEQDDRTPGRLQAVWPPPKTKDTEEKVGLKYTEAEYQAAILHLKREHKEEIENLQAQFELRAFHIRGEHAMITARLEETIENLKHELEHRWRGGCEERKDVCISTDDDCPPKTFRNVCVQTDRETFLKPCESESKTTRSNQLVPKKLNISSLSQLSPPNDHKDIHAALQPMEGMASNQQKALPPPPASIPPPPPLPSGLGSLSPAPPMPPVSAGPPLPPPPPPPPPLPPPSSAGPPPPPPPPPLPNSPAPPNPGGPPPAPPPPGLAPPPPPGLFFGLGSSSSQCPRKPAIEPSCPMKPLYWTRIQISDRSQNATPTLWDSLEEPDIRDPSEFEYLFSKDTTQQKKKPLSETYEKKNKVKKIIKLLDGKRSQTVGILISSLHLEMKDIQQAIFNVDDSVVDLETLAALYENRAQEDELVKIRKYYETSKEEELKLLDKPEQFLHELAQIPNFAERAQCIIFRSVFSEGITSLHRKVEIITRASKDLLHVKSVKDILALILAFGNYMNGGNRTRGQADGYSLEILPKLKDVKSRDNGINLVDYVVKYYLRYYDQEAGTEKSVFPLPEPQDFFLASQVKFEDLIKDLRKLKRQLEASEKQMVVVCKESPKEYLQPFKDKLEEFFQKAGSSSSQSLNTRGLQDSVHEPLAL

SEQ ID NO: 1312 - protein, 12 aa, Artificial Sequence
  Synthetic polypeptide
TTGFLSGLPSQV

SEQ ID NO: 1313 - protein, 58 aa, Artificial Sequence
  Synthetic polypeptide
MAEETGQSKLAAAKKKFKEYWQRNRPGVPAAAKRNTKANGSSPETAASGGCHSSEAYM

SEQ ID NO: 1314 - protein, 58 aa, Artificial Sequence; identical to SEQ ID NO: 1313
  Synthetic polypeptide

SEQ ID NO: 1315 - protein, 147 aa, Artificial Sequence
  Synthetic polypeptide
MKMFESADSTATRSGQDLWAEICSCLPNPEQEDGANNAFSDSFVDSCPEGEGQREVADFAVQPAVKPWAPLQDSEVYLASLEKKLRRIKGLNQEVTSKDMLRTLAQAKKECWDRFLQEKLASEFFVDGLDSDERFELHWSTDRQSFF

SEQ ID NO: 1316 - protein, 147 aa, Artificial Sequence; identical to SEQ ID NO: 1315
  Synthetic polypeptide

SEQ ID NO: 1317 - protein, 147 aa, Artificial Sequence; identical to SEQ ID NO: 1315
  Synthetic polypeptide

SEQ ID NO: 1318 - protein, 147 aa, Artificial Sequence; identical to SEQ ID NO: 1315
  Synthetic polypeptide

SEQ ID NO: 1319 - protein, 147 aa, Artificial Sequence; identical to SEQ ID NO: 1315
  Synthetic polypeptide

SEQ ID NO: 1320 - protein, 147 aa, Artificial Sequence; identical to SEQ ID NO: 1315
  Synthetic polypeptide

SEQ ID NO: 1321 - protein, 147 aa, Artificial Sequence; identical to SEQ ID NO: 1315
  Synthetic polypeptide

SEQ ID NO: 1322 - protein, 147 aa, Artificial Sequence; identical to SEQ ID NO: 1315
  Synthetic polypeptide

SEQ ID NO: 1323 - protein, 147 aa, Artificial Sequence; identical to SEQ ID NO: 1315
  Synthetic polypeptide

SEQ ID NO: 1324 - protein, 147 aa, Artificial Sequence; identical to SEQ ID NO: 1315
  Synthetic polypeptide

SEQ ID NO: 1325 - protein, 156 aa, Artificial Sequence
  Synthetic polypeptide
MRGSGLRFQMKMFESADSTATRSGQDLWAEICSCLPNPEQEDGANNAFSDSFVDSCPEGEGQREVADFAVQPAVKPWAPLQDSEVYLASLEKKLRRIKGLNQEVTSKDMLRTLAQAKKECWDRFLQEKLASEFFVDGLDSDERFELHWSTDRQSFF

SEQ ID NO: 1326 - protein, 48 aa, Artificial Sequence
  Synthetic polypeptide
MLRTLAQAKKECWDRFLQEKLASEFFVDGLDSDERFELHWSTDRQSFF

SEQ ID NO: 1327 - protein, 1771 aa, Artificial Sequence
  Synthetic polypeptide
MDPTGSQLDSDFSQQDTPCLIIEDSQPESQVLEDDSGSHFSMLSRHLPNLQTHKENPVLDVVSNPEQTAGEERGDGNSGFNEHLKENKVADPVDSSNLDTCGSISQVIEQLPQPNRTSSVLGMSVESAPAVEEEKGEELEQKEKEKEEDTSGNTTHSLGAEDTASSQLGFGVLELSQSQDVEENTVPYEVDKEQLQSVTTNSGYTRLSDVDANTAIKHEEQSNEDIPIAEQSSKDIPVTAQPSKDVHVVKEQNPPPARSEDMPFSPKASVAAMEAKEQLSAQELMESGLQIQKSPEPEVLSTQEDLFDQSNKTVSSDGCSTPSREEGGCSLASTPATTLHLLQLSGQRSLVQDSLSTNSSDLVAPSPDAFRSTPFIVPSSPTEQEGRQDKPMDTSVLSEEGGEPFQKKLQSGEPVELENPPLLPESTVSPQASTPISQSTPVFPPGSLPIPSQPQFSHDIFIPSPSLEEQSNDGKKDGDMHSSSLTVECSKTSEIEPKNSPEDLGLSLTGDSCKLMLSTSEYSQSPKMESLSSHRIDEDGENTQIEDTEPMSPVLNSKFVPAENDSILMNPAQDGEVQLSQNDDKTKGDDTDTRDDISILATGCKGREETVAEDVCIDLTCDSGSQAVPSPATRSEALSSVLDQEEAMEIKEHHPEEGSSGSEVEEIPETPCESQGEELKEENMESVPLHLSLTETQSQGLCLQKEMPKKECSEAMEVETSVISIDSPQKLAILDQELEHKEQEAWEEATSEDSSVVIVDVKEPSPRVDVSCEPLEGVEKCSDSQSWEDIAPEIEPCAENRLDTKEEKSVEYEGDLKSGTAETEPVEQDSSQPSLPLVRADDPLRLDQELQQPQTQEKTSNSLTEDSKMANAKQLSSDAEAQKLGKPSAHASQSFCESSSETPFHFTLPKEGDIIPPLTGATPPLIGHLKLEPKRHSTPIGISNYPESTIATSDVMSESMVETHDPILGSGKGDSGAAPDVDDKLCLRMKLVSPETEASEESLQFNLEKPATGERKNGSTAVAESVASPQKTMSVLSCICEARQENEARSEDPPTTPIRGNLLHFPSSQGEEEKEKLEGDHTIRQSQQPMKPISPVKDPVSPASQKMVIQGPSSPQGEAMVTDVLEDQKEGRSTNKENPSKALIERPSQNNIGIQTMECSLRVPETVSAATQTIKNVCEQGTSTVDQNFGKQDATVQTERGSGEKPVSAPGDDTESLHSQGEEEFDMPQPPHGHVLHRHMRTIREVRTLVTRVITDVYYVDGTEVERKVTEETEEPIVECQECETEVSPSQTGGSSGDLGDISSFSSKASSLHRTSSGTSLSAMHSSGSSGKGAGPLRGKTSGTEPADFALPSSRGGPGKLSPRKGVSQTGTPVCEEDGDAGLGIRQGGKAPVTPRGRGRRGRPPSRTTGTRETAVPGPLGIEDISPNLSPDDKSFSRVVPRVPDSTRRTDVGAGALRRSDSPEIPFQAAAGPSDGLDASSPGNSFVGLRVVAKWSSNGYFYSGKITRDVGAGKYKLLFDDGYECDVLGKDILLCDPIPLDTEVTALSEDEYFSAGVVKGHRKESGELYYSIEKEGQRKWYKRMAVILSLEQGNRLREQYGLGPYEAVTPLTKAADISLDNLVEGKRKRRSNVSSPATPTASSSSSTTPTRKITESPRASMGVLSGKRKLITSEEERSPAKRGRKSATVKPGAVGAGEFVSPCESGDNTGEPSALEEQRGPLPLNKTLFLGYAFLLTMATTSDKLASRSKLPDGPTGSSEEEEDDKKTSSN

SEQ ID NO: 1328 - protein, 1726 aa, Artificial Sequence
  Synthetic polypeptide
MPGEQMDPTGSQLDSDFSQQDTPCLIIEDSQPESQVLEDDSGSHFSMLSRHLPNLQTHKENPVLDVVSNPEQTAGEERGDGNSGFNEHLKENKVADPVDSSNLDTCGSISQVIEQLPQPNRTSSVLGMSVESAPAVEEEKGEELEQKEKEKEEDTSGNTTHSLGAEDTASSQLGFGVLELSQSQDVEENTVPYEVDKEQLQSVTTNSGYTRLSDVDANTAIKHEEQSNEDIPIAEQSSKDIPVTAQPSKDVHVVKEQNPPPARSEDMPFSPKASVAAMEAKEQLSAQELMESGLQIQKSPEPEVLSTQEDLFDQSNKTVSSDGCSTPSREEGGCSLASTPATTLHLLQLSGQRSLVQDSLSTNSSDLVAPSPDAFRSTPFIVPSSPTEQEGRQDKPMDTSVLSEEGGEPFQKKLQSGEPVELENPPLLPESTVSPQASTPISQSTPVFPPGSLPIPSQPQFSHDIFIPSPSLEEQSNDGKKDGDMHSSSLTVECSKTSEIEPKNSPEDLGLSLTGDSCKLMLSTSEYSQSPKMESLSSHRIDEDGENTQIEDTEPMSPVLNSKFVPAENDSILMNPAQDGEVQLSQNDDKTKGDDTDTRDDISILATGCKGREETVAEDVCIDLTCDSGSQAVPSPATRSEALSSVLDQEEAMEIKEHHPEEGSSGSEVEEIPETPCESQGEELKEENMESVPLHLSLTETQSQGLCLQKEMPKKECSEAMEVETSVISIDSPQKLAILDQELEHKEQEAWEEATSEDSSVVIVDVKEPSPRVDVSCEPLEGVEKCSDSQSWEDIAPEIEPCAENRLDTKEEKSVEYEGDLKSGTAETEPVEQDSSQPSLPLVRADDPLRLDQELQQPQTQEKTSNSLTEDSKMANAKQLSSDAEAQKLGKPSAHASQSFCESSSETPFHFTLPKEGDIIPPLTGATPPLIGHLKLEPKRHSTPIGISNYPESTIATSDVMSESMVETHDPILGSGKGDSGAAPDVDDKLCLRMKLVSPETEASEESLQFNLEKPATGERKNGSTAVAESVASPQKTMSVLSCICEARQENEARSEDPPTTPIRGNLLHFPSSQGEEEKEKLEGDHTIRQSQQPMKPISPVKDPVSPASQKMVIQGPSSPQGEAMVTDVLEDQKEGRSTNKENPSKALIERPSQNNIGIQTMECSLRVPETVSAATQTIKNVCEQGTSTVDQNFGKQDATVQTERGSGEKPVSAPGDDTESLHSQGEEEFDMPQPPHGHVLHRHMRTIREVRTLVTRVITDVYYVDGTEVERKVTEETEEPIVECQECETEVSPSQTGGSSGDLGDISSFSSKASSLHRTSSGTSLSAMHSSGSSGKGAGPLRGKTSGTEPADFALPSSRGGPGKLRETAVPGPLGIEDISPNLSPDDKSFSRVVPRVPDSTRRTDVGAGALRRSDSPEIPFQAAAGPSDGLDASSPGNSFVGLRVVAKWSSNGYFYSGKITRDVGAGKYKLLFDDGYECDVLGKDILLCDPIPLDTEVTALSEDEYFSAGVVKGHRKESGELYYSIEKEGQRKWYKRMAVILSLEQGNRLREQYGLGPYEAVTPLTKAADISLDNLVEGKRKRRSNVSSPATPTASSSSSTTPTRKITESPRASMGVLSGKRKLITSEEERSPAKRGRKSATVKPGAVGAGEFVSPCESGDNTGEPSALEEQRGPLPLNKTLFLGYAFLLTMATTSDKLASRSKLPDGPTGSSEEEEDDKKTSSN

SEQ ID NO: 1329 - protein, 1776 aa, Artificial Sequence
  Synthetic polypeptide
MPGEQMDPTGSQLDSDFSQQDTPCLIIEDSQPESQVLEDDSGSHFSMLSRHLPNLQTHKENPVLDVVSNPEQTAGEERGDGNSGFNEHLKENKVADPVDSSNLDTCGSISQVIEQLPQPNRTSSVLGMSVESAPAVEEEKGEELEQKEKEKEEDTSGNTTHSLGAEDTASSQLGFGVLELSQSQDVEENTVPYEVDKEQLQSVTTNSGYTRLSDVDANTAIKHEEQSNEDIPIAEQSSKDIPVTAQPSKDVHVVKEQNPPPARSEDMPFSPKASVAAMEAKEQLSAQELMESGLQIQKSPEPEVLSTQEDLFDQSNKTVSSDGCSTPSREEGGCSLASTPATTLHLLQLSGQRSLVQDSLSTNSSDLVAPSPDAFRSTPFIVPSSPTEQEGRQDKPMDTSVLSEEGGEPFQKKLQSGEPVELENPPLLPESTVSPQASTPISQSTPVFPPGSLPIPSQPQFSHDIFIPSPSLEEQSNDGKKDGDMHSSSLTVECSKTSEIEPKNSPEDLGLSLTGDSCKLMLSTSEYSQSPKMESLSSHRIDEDGENTQIEDTEPMSPVLNSKFVPAENDSILMNPAQDGEVQLSQNDDKTKGDDTDTRDDISILATGCKGREETVAEDVCIDLTCDSGSQAVPSPATRSEALSSVLDQEEAMEIKEHHPEEGSSGSEVEEIPETPCESQGEELKEENMESVPLHLSLTETQSQGLCLQKEMPKKECSEAMEVETSVISIDSPQKLAILDQELEHKEQEAWEEATSEDSSVVIVDVKEPSPRVDVSCEPLEGVEKCSDSQSWEDIAPEIEPCAENRLDTKEEKSVEYEGDLKSGTAETEPVEQDSSQPSLPLVRADDPLRLDQELQQPQTQEKTSNSLTEDSKMANAKQLSSDAEAQKLGKPSAHASQSFCESSSETPFHFTLPKEGDIIPPLTGATPPLIGHLKLEPKRHSTPIGISNYPESTIATSDVMSESMVETHDPILGSGKGDSGAAPDVDDKLCLRMKLVSPETEASEESLQFNLEKPATGERKNGSTAVAESVASPQKTMSVLSCICEARQENEARSEDPPTTPIRGNLLHFPSSQGEEEKEKLEGDHTIRQSQQPMKPISPVKDPVSPASQKMVIQGPSSPQGEAMVTDVLEDQKEGRSTNKENPSKALIERPSQNNIGIQTMECSLRVPETVSAATQTIKNVCEQGTSTVDQNFGKQDATVQTERGSGEKPVSAPGDDTESLHSQGEEEFDMPQPPHGHVLHRHMRTIREVRTLVTRVITDVYYVDGTEVERKVTEETEEPIVECQECETEVSPSQTGGSSGDLGDISSFSSKASSLHRTSSGTSLSAMHSSGSSGKGAGPLRGKTSGTEPADFALPSSRGGPGKLSPRKGVSQTGTPVCEEDGDAGLGIRQGGKAPVTPRGRGRRGRPPSRTTGTRETAVPGPLGIEDISPNLSPDDKSFSRVVPRVPDSTRRTDVGAGALRRSDSPEIPFQAAAGPSDGLDASSPGNSFVGLRVVAKWSSNGYFYSGKITRDVGAGKYKLLFDDGYECDVLGKDILLCDPIPLDTEVTALSEDEYFSAGVVKGHRKESGELYYSIEKEGQRKWYKRMAVILSLEQGNRLREQYGLGPYEAVTPLTKAADISLDNLVEGKRKRRSNVSSPATPTASSSSSTTPTRKITESPRASMGVLSGKRKLITSEEERSPAKRGRKSATVKPGAVGAGEFVSPCESGDNTGEPSALEEQRGPLPLNKTLFLGYAFLLTMATTSDKLASRSKLPDGPTGSSEEEEDDKKTSSN

SEQ ID NO: 1330 - protein, 1774 aa, Artificial Sequence
  Synthetic polypeptide
MPGEQMDPTGSQLDSDFSQQDTPCLIIEDSQPESQVLEDDSGSHFSMLSRHLPNLQTHKENPVLDVVSNPEQTAGEERGDGNSGFNEHLKENKVADPVDSSNLDTCGSISQVIEQLPQPNRTSSVLGMSVESAPAVEEEKGEELEQKEKEKEEDTSGNTTHSLGAEDTASSQLGFGVLELSQSQDVEENTVPYEVDKEQLQSVTTNSGYTRLSDVDANTAIKHEEQSNEDIPIAEQSSKDIPVTAQPSKDVHVVKEQNPPPARSEDMPFSPKASVAAMEAKEQLSAQELMESGLQIQKSPEPEVLSTQEDLFDQSNKTVSSDGCSTPSREEGGCSLASTPATTLHLLQLSGQRSLVQDSLSTNSSDLVAPSPDAFRSTPFIVPSSPTEQEGRQDKPMDTSVLSEEGGEPFQKKLQSGEPVELENPPLLPESTVSPQASTPISQSTPVFPPGSLPIPSQPQFSHDIFIPSPSLEEQSNDGKKDGDMHSSSLTVECSKTSEIEPKNSPEDLGLSLTGDSCKLMLSTSEYSQSPKMESLSSHRIDEDGENTQIEDTEPMSPVLNSKFVPAENDSILMNPAQDGEVQLSQNDDKTKGDDTDTRDDISILATGCKGREETVAEDVCIDLTCDSGSQAVPSPATRSEALSSVLDQEEAMEIKEHHPEEGSSGSEVEEIPETPCESQGEELKEENMESVPLHLSLTETQSQGLCLQKEMPKKECSEAMEVETSVISIDSPQKLAILDQELEHKEQEAWEEATSEDSSVVIVDVKEPSPRVDVSCEPLEGVEKCSDSQSWEDIAPEIEPCAENRLDTKEEKSVEYEGDLKSGTAETEPVEQDSSQPSLPLVRADDPLRLDQELQQPQTQEKTSNSLTEDSKMANAKQLSSDAEAQKLGKPSAHASQSFCESSSETPFHFTLPKEGDIIPPLTGATPPLIGHLKLEPKRHSTPIGISNYPESTIATSDVMSESMVETHDPILGSGKGDSGAAPDVDDKLCLRMKLVSPETEASEESLQFNLEKPATGERKNGSTAVAESVASPQKTMSVLSCICEARQENEARSEDPPTTPIRGNLLHFPSSQGEEEKEKLEGDHTIRQSQQPMKPISPVKDPVSPASQKMVIQGPSSPQGEAMVTDVLEDQKEGRSTNKENPSKALIERPSQNNIGIQTMECSLRVPETVSAATQTIKNVCEQGTSTVDQNFGKQDATVQTERGSGEKPVSAPGDDTESLHSQGEEEFDMPQPPHGHVLHRHMRTIREVRTLVTRVITDVYYVDGTEVERKVTEETEEPIVECQECETEVSPSQTGGSSGDLGDISSFSSKASSLHRTSSGTSLSAMHSSGSSGKGAGPLRGKTSGTEPADFALPSSRGGPGKLSPRKGVSQTGTPVCEEDGDAGLGIRQGGKAPVTPRGRGRRGRPPSRTTGTRETAVPGPLGIEDISPNLSPDDKSFSRVVPRVPDSTRRTDVGAGALRRSDSPEIPFQAAAGPSDGLDASSPGNSFVGLRVVAKWSSNGYFYSGKITRDVGAGKYKLLFDDGYECDVLGKDILLCDPIPLDTEVTALSEDEYFSAGVVKGHRKESGELYYSIEKEGQRKWYKRMAVILSLEQGNRLREQYGLGPYEAVTPLTKAADISLDNLVEGKRKRRSNVSSPATPTASSSSSTTPTRKITESPRASMGVLSGKRKLITSEEERSPAKRGRKSATVKPVGAGEFVSPCESGDNTGEPSALEEQRGPLPLNKTLFLGYAFLLTMATTSDKLASRSKLPDGPTGSSEEEEDDKKTSSN

SEQ ID NO: 1331 - protein, 73 aa, Artificial Sequence
  Synthetic polypeptide
TPVNPLPWKSREGLCLSTRPCFWATHFSLPWPQPVTSWPAAPNCQMVLQEAVKKRRMTRKQAQIRYLVKRSNF

SEQ ID NO: 1332 - protein, 368 aa, Artificial Sequence
  Synthetic polypeptide
MQQEGGPVRSAPCRTGTLEGSRQGSPGHRKRASPKGSLSSAQPHSWMLTPSPLNSHCAHREPISSSPQPVANGPKQKKKSNWRSTTRLRIIRLRDRLEPRPLAILEDYADPFDVQETGEGSAGASGAPEKVPENDGYMEPYEAQKMMAEIRGSKETATQPLPLYDTPYEPEEDGATAEGEGAPWPRESRLPEDDERPPEEYDQPWEWKKERISKAFAVDIKVIKDLPWPPPVGQLDSSPSLPDGDRDISGPASPLPEPSLEDSSAQFEGPEKSCLSPGREEKGRLPPRLSAGNPKSAKPLSMEPSSPLGEWTDPALPLENQVWYHGAISRTDAENLLRLCKEASYLVRNSETSKNDFSLSLNCHTLGV

SEQ ID NO: 1333 - protein, 378 aa, Artificial Sequence
  Synthetic polypeptide
MVAQSLSDAHHALTIMLSERLWLGLELLNFTRRKISSDPPPYNFLEAREAALGHRWRMQQEGGPVRSAPCRTGTLEGSRQGSPGHRKRASPKGSLSSAQPHSWMLTPSPLNSHCAHREPISSSPQPVANGPKQKKKSNWRSTTRLRIIRLRDRLEPRPLAILEDYADPFDVQETGEGSAGASGAPEKVPENDGYMEPYEAQKMMAEIRGSKETATQPLPLYDTPYEPEEDGATAEGEGAPWPRESRLPEDDERPPEEYDQPWEWKKERISKAFAAQFEGPEKSCLSPGREEKGRLPPRLSAGNPKSAKPLSMEPSSPLGEWTDPALPLENQVWYHGAISRTDAENLLRLCKEASYLVRNSETSKNDFSLSLNCHTLGV

SEQ ID NO: 1334 - protein, 184 aa, Artificial Sequence
  Synthetic polypeptide
MEPYEAQKMMAEIRGSKETATQPLPLYDTPYEPEEDGATAEGEGAPWPRESRLPEDDERPPEEYDQPWEWKKERISKAFAAQFEGPEKSCLSPGREEKGRLPPRLSAGNPKSAKPLSMEPSSPLGEWTDPALPLENQVWYHGAISRTDAENLLRLCKEASYLVRNSETSKNDFSLSLNCHTLGV

SEQ ID NO: 1335 - protein, 105 aa, Artificial Sequence
  Synthetic polypeptide
PPGPGSPACQRMMRGPLRSMTSPGSGRRSGFPKPLQGTPTMGGPGQRGTQQRCPPSSLSSLAGITGPSAEPTPRTCSGCAKRPATWCATVRPARMTSPSPSTVIL

SEQ ID NO: 1336 - protein, 29 aa, Artificial Sequence
  Synthetic polypeptide
MAKAQQELQEPQRRSLKMMATWSPMRLKR

SEQ ID NO: 1337 - protein, 158 aa, Artificial Sequence
  Synthetic polypeptide
MSDGDYDYLIKFLALGDSGVGKTSVLYQYTDGKFNSKFITTVGIDFREKRVVYRASGPDGATGRGQRIHLQLWDTAGQERFRSLTTAFFRDAMGFLLLFDLTNEQSFLNVRNWISQLQMHAYCENPDIVLCGNKSDLEDQRVVKEEEAIALAEKYGSL

SEQ ID NO: 1338 - protein, 158 aa, Artificial Sequence; identical to SEQ ID NO: 1337
  Synthetic polypeptide

SEQ ID NO: 1339 - protein, 158 aa, Artificial Sequence; identical to SEQ ID NO: 1337
  Synthetic polypeptide

SEQ ID NO: 1340 - protein, 158 aa, Artificial Sequence; identical to SEQ ID NO: 1337
  Synthetic polypeptide

SEQ ID NO: 1341 - protein, 158 aa, Artificial Sequence; identical to SEQ ID NO: 1337
  Synthetic polypeptide

SEQ ID NO: 1342 - protein, 41 aa, Artificial Sequence
  Synthetic polypeptide
MDTSPLCFSILLVLCIFIQSSALGQSLKPESQLLSIHQCTT

SEQ ID NO: 1343 - protein, 41 aa, Artificial Sequence; identical to SEQ ID NO: 1342
  Synthetic polypeptide

SEQ ID NO: 1344 - protein, 41 aa, Artificial Sequence; identical to SEQ ID NO: 1342
  Synthetic polypeptide

SEQ ID NO: 1345 - protein, 41 aa, Artificial Sequence; identical to SEQ ID NO: 1342
  Synthetic polypeptide

SEQ ID NO: 1346 - protein, 46 aa, Artificial Sequence
  Synthetic polypeptide
MDTSPLCFSILLVLCIFIQSSALGQSLKPELVKQEEHWTTHQDLGC

SEQ ID NO: 1347 - protein, 46 aa, Artificial Sequence; identical to SEQ ID NO: 1346
  Synthetic polypeptide

SEQ ID NO: 1348 - protein, 46 aa, Artificial Sequence; identical to SEQ ID NO: 1346
  Synthetic polypeptide

SEQ ID NO: 1349 - protein, 46 aa, Artificial Sequence; identical to SEQ ID NO: 1346
  Synthetic polypeptide

SEQ ID NO: 1350 - protein, 218 aa, Artificial Sequence
  Synthetic polypeptide
MVLLRVLILLLSWAAGMGGQYGNPLNKYIRHYEGLSYNVDSLHQKHQRAKRAVSHEDQFLRLDFHAHGRHFNLRMKRDTSLFSDEFKVETSNKVLDYDTSHIYTGHIYGEEGSFSHGSVIDGRFEGFIQTRGGTFYVEPAERYIKDRTLPFHSVIYHEDDINYPHKYGPQGGCADHSVFERMRKYQMTGVEEVTQTLLLAPASSMSCACSPFTFCPCL

SEQ ID NO: 1351 - protein, 292 aa, Artificial Sequence
  Synthetic polypeptide
MFQASMRSPNMEPFKQQKVEDFYDIGEELGSGQFAIVKKCREKSTGLEYAAKFIKKRQSRASRRGVSREEIEREVSILRQVLHHNVITLHDVYENRTDVVLILELVSGGELFDFLAQKESLSEEEATSFIKQILDGVNYLHTKKIAHFDLKPENIMLLDKNIPIPHIKLIDFGLAHEIEDGVEFKNIFGTPEFVAPEIVNYEPLGLEADMWSIGVITYILLSGASPFLGDTKQETLANITAVSYDFDEEFFSQTSELAKDFIRKLLVKETRKRLTIQEALRHPWITGRHQTS

SEQ ID NO: 1352 - protein, 292 aa, Artificial Sequence; identical to SEQ ID NO: 1351
  Synthetic polypeptide

SEQ ID NO: 1353 - protein, 292 aa, Artificial Sequence; identical to SEQ ID NO: 1351
  Synthetic polypeptide

SEQ ID NO: 1354 - protein, 244 aa, Artificial Sequence
  Synthetic polypeptide
MTKVKVGKEDSSSAEFLEKRRAALERYLQRIVNHPTMLQDPDVREFLEKEELPRAVGTQTLSGAGLLKMFNKATDAVSKMTIKMNESDIWFEEKLQEVECEEQRLRKLHAVVETLVNHRKELALNTAQFAKSLAMLGSSEDNTALSRALSQLAEVEEKIEQLHQEQANNDFFLLAELLSDYIRLLAIVRAAFDQRMKTWQRWQDAQATLQKKREAEARLLWANKPDKLQQAKDEILETCQIRIS

SEQ ID NO: 1355 - protein, 462 aa, Artificial Sequence
  Synthetic polypeptide
MASGGGGCSASERLPPPFPGLEPESEGAAGGSEPEAGDSDTEGEDIFTGAAVVSKHQSPKITTSLLPINNGSKENGIHEEQDQEPQDLFADATVELSLDSTQNNQKKVLAKTLISLPPQEATNSSKPQPTYEELEEEEQEDQFDLTVGITDPEKIGDGMNAYVAYKVTTQTSLPLFRSKQFAVKRRFSDFLGLYEKLSEKHSQNGFIVPPPPEKSLIGMTKVKVGKEDSSSAEFLEKRRAALERYLQRIVNHPTMLQDPDVREFLEKEELPRAVGTQTLSGAGLLKMFNKATDAVSKMTIKMNESDIWFEEKLQEVECEEQRLRKLHAVVETLVNHRKELALNTAQFAKSLAMLGSSEDNTALSRALSQLAEVEEKIEQLHQEQANNDFFLLAELLSDYIRLLAIVRAAFDQRMKTWQRWQDAQATLQKKREAEARLLWANKPDKLQQAKDEILETCQIRIS

SEQ ID NO: 1356 - protein, 462 aa, Artificial Sequence; identical to SEQ ID NO: 1355
  Synthetic polypeptide

SEQ ID NO: 1357 - protein, 397 aa, Artificial Sequence
  Synthetic polypeptide
MASGGGGCSASERLPPPFPGLEPESEGAAGGSEPEAGDSDTEGEDIFTGAAVVSKHQSPKITTSLLPINNGSKENGIHEEQDQEPQDLFAGDGMNAYVAYKVTTQTSLPLFRSKQFAVKRRFSDFLGLYEKLSEKHSQNGFIVPPPPEKSLIGMTKVKVGKEDSSSAEFLEKRRAALERYLQRIVNHPTMLQDPDVREFLEKEELPRAVGTQTLSGAGLLKMFNKATDAVSKMTIKMNESDIWFEEKLQEVECEEQRLRKLHAVVETLVNHRKELALNTAQFAKSLAMLGSSEDNTALSRALSQLAEVEEKIEQLHQEQANNDFFLLAELLSDYIRLLAIVRAAFDQRMKTWQRWQDAQATLQKKREAEARLLWANKPDKLQQAKDEILETCQIRIS

SEQ ID NO: 1358 - protein, 104 aa, Artificial Sequence
  Synthetic polypeptide
MLEVHIPSVGPEAEGPRQSPEKSHMVFRVEVLCSGRRHTVPRRYSEFHALHKRIKKLYKVPDFPSKRLPNWRTRGLEQRRQGLEAYIQVQTPPSGLLKGLKEVT

SEQ ID NO: 1359 - protein, 104 aa, Artificial Sequence; identical to SEQ ID NO: 1358
  Synthetic polypeptide

SEQ ID NO: 1360 - protein, 89 aa, Artificial Sequence
  Synthetic polypeptide
MLEVHIPSVGPEAEGPRQSPEKSHMVFRVEVLCSGRRHTVPRRYSEFHALHKRIKKLYKVPDFPSKRLPNWRTRGLEQRRQGLEAYIQD

SEQ ID NO: 1361 - protein, 89 aa, Artificial Sequence; identical to SEQ ID NO: 1360
  Synthetic polypeptide

SEQ ID NO: 1362 - protein, 280 aa, Artificial Sequence
  Synthetic polypeptide
MLSGIEAAAGEYEDSELRCRVAVEELSPGGQPRRRQALRTAELSLGRNERRELMLRLQAPGPAGRPRCFPLRAARLFTRFAEAGRSTLRLPAHDTPGAGAVQLLLSDCPPDRLRRFLRTLRLKLAAAPGPGPASARAQLLGPRPRDFVTISPVQPEERRLRAATRVPDTTLVKRPVEPQAGAEPSTEAPRWPLPVKRLSLPSTKPQLSEEQAAVLRAVLKGQSIFFTGSAGTGKSYLLKRILGSLPPTGTVATASTGVAACHIGGTTLHAFAGGQGGRIA

SEQ ID NO: 1363 - protein, 280 aa, Artificial Sequence; identical to SEQ ID NO: 1362
  Synthetic polypeptide

SEQ ID NO: 1364 - protein, 280 aa, Artificial Sequence; identical to SEQ ID NO: 1362
  Synthetic polypeptide

SEQ ID NO: 1365 - protein, 542 aa, Artificial Sequence [sequence omitted]

SEQ ID NO: 1366 - protein, 317 aa, Artificial Sequence
  Synthetic polypeptide
MFRSKRSGLVRRLWRSRVVPDREEGGSGGGGGGDEDGSLGSRAEPAPRAREGGGCGRSEVRPVAPRRPRDAVGQRGAQGAGRRRRAGGPPRPMSEPGAGAGSSLLDVAEPGGPGWLPESDCETVTCCLFSERDAAGAPRDASDPLAGAALEPAGGGRSREARSRLLLLEQELKTVTYSLLKRLKERSLDTLLEAVESRGGVPGGCVLVPRADLRLGGQPAPPQLLLGRLFRWPDLQHAVELKPLCGCHSFAAAADGPTVCCNPYHFSRLCGPAKERKQPKCPLADKWINEIWYVRRMEYHSPMKKNEVQHQNVLQHG

SEQ ID NO: 1367 - protein, 317 aa, Artificial Sequence; identical to SEQ ID NO: 1366
  Synthetic polypeptide

SEQ ID NO: 1368 - protein, 317 aa, Artificial Sequence; identical to SEQ ID NO: 1366
  Synthetic polypeptide

SEQ ID NO: 1369 - protein, 700 aa, Artificial Sequence
  Synthetic polypeptide
MSAEEDARWLRWVTQQFKTIAGEDGEISLQEFKAALHVKESFFAERFFALFDSDRSGTITLQELQEALTLLIHGSPMDKLKFLFQVYDIDGSGSIDPDELRTVLQSCLRESAISLPDEKLDQLTLALFESADADGNGAITFEELRDELQRFPGVMENLTISAAHWLTAPAPRPRPRRPRQLTRAYWHNHRSQLFCLATYAGLHVLLFGLAASAHRDLGASVMVAKGCGQCLNFDCSFIAVLMLRRCLTWLRATWLAQVLPLDQNIQFHQLMGYVVVGLSLVHTVAHTVNFVLQAQAEASPFQFWELLLTTRPGIGWVHGSASPTGVALLLLLLLMFICSSSCIRRSGHFEVFYWTHLSYLLVWLLLIFHGPNFWKWLLVPGILFFLEKAIGLAVSRMAAVCIMEVNLLPSKVTHLLIKRPPFFHYRPGDYLYLNIPTIARYEWHPFTISSAPEQKDTIWLHIRSQGQWTNRLYESFKASDPLGRGSKRLSRSVTMRKSQRSSKGSEILLEKHKFCNIKCYIDGPYGTPTRRIFASEHAVLIGAGIGITPFASILQSIMYRHQKRKHTCPSCQHSWIEGVQDNMKLHKVDFIWINRDQRSFEWFVSLLTKLEMDQAEEAQYGRFLELHMYMTSALGKNDMKAIGLQMALDLLANKEKKDSITGLQTRTQPGRPDWSKDTVQLRTSKPLLLHRLTLGAPFST

SEQ ID NO: 1370 - protein, 728 aa, Artificial Sequence
  Synthetic polypeptide
MSAEEDARWLRWVTQQFKTIAGEDGEISLQEFKAALHVKESFFAERFFALFDSDRSGTITLQELQEALTLLIHGSPMDKLKFLFQVYDIDVCARQGASAGTEWGAGAGPHWASSPLGTGSGSIDPDELRTVLQSCLRESAISLPDEKLDQLTLALFESADADGNGAITFEELRDELQRFPGVMENLTISAAHWLTAPAPRPRPRRPRQLTRAYWHNHRSQLFCLATYAGLHVLLFGLAASAHRDLGASVMVAKGCGQCLNFDCSFIAVLMLRRCLTWLRATWLAQVLPLDQNIQFHQLMGYVVVGLSLVHTVAHTVNFVLQAQAEASPFQFWELLLTTRPGIGWVHGSASPTGVALLLLLLLMFICSSSCIRRSGHFEVFYWTHLSYLLVWLLLIFHGPNFWKWLLVPGILFFLEKAIGLAVSRMAAVCIMEVNLLPSKVTHLLIKRPPFFHYRPGDYLYLNIPTIARYEWHPFTISSAPEQKDTIWLHIRSQGQWTNRLYESFKASDPLGRGSKRLSRSVTMRKSQRSSKGSEILLEKHKFCNIKCYIDGPYGTPTRRIFASEHAVLIGAGIGITPFASILQSIMYRHQKRKHTCPSCQHSWIEGVQDNMKLHKVDFIWINRDQRSFEWFVSLLTKLEMDQAEEAQYGRFLELHMYMTSALGKNDMKAIGLQMALDLLANKEKKDSITGLQTRTQPGRPDWSKDTVQLRTSKPLLLHRLTLGAPFST

SEQ ID NO: 1371 - protein, 711 aa, Artificial Sequence
  Synthetic polypeptide
MAFVCAGLSDTMSAEEDARWLRWVTQQFKTIAGEDGEISLQEFKAALHVKESFFAERFFALFDSDRSGTITLQELQEALTLLIHGSPMDKLKFLFQVYDIDGSGSIDPDELRTVLQSCLRESAISLPDEKLDQLTLALFESADADGNGAITFEELRDELQRFPGVMENLTISAAHWLTAPAPRPRPRRPRQLTRAYWHNHRSQLFCLATYAGLHVLLFGLAASAHRDLGASVMVAKGCGQCLNFDCSFIAVLMLRRCLTWLRATWLAQVLPLDQNIQFHQLMGYVVVGLSLVHTVAHTVNFVLQAQAEASPFQFWELLLTTRPGIGWVHGSASPTGVALLLLLLLMFICSSSCIRRSGHFEVFYWTHLSYLLVWLLLIFHGPNFWKWLLVPGILFFLEKAIGLAVSRMAAVCIMEVNLLPSKVTHLLIKRPPFFHYRPGDYLYLNIPTIARYEWHPFTISSAPEQKDTIWLHIRSQGQWTNRLYESFKASDPLGRGSKRLSRSVTMRKSQRSSKGSEILLEKHKFCNIKCYIDGPYGTPTRRIFASEHAVLIGAGIGITPFASILQSIMYRHQKRKHTCPSCQHSWIEGVQDNMKLHKVDFIWINRDQRSFEWFVSLLTKLEMDQAEEAQYGRFLELHMYMTSALGKNDMKAIGLQMALDLLANKEKKDSITGLQTRTQPGRPDWSKDTVQLRTSKPLLLHRLTLGAPFST

SEQ ID NO: 1372 - protein, 746 aa, Artificial Sequence
  Synthetic polypeptide
MNTSGDPAQTGPEGCRGTMSAEEDARWLRWVTQQFKTIAGEDGEISLQEFKAALHVKESFFAERFFALFDSDRSGTITLQELQEALTLLIHGSPMDKLKFLFQVYDIDVCARQGASAGTEWGAGAGPHWASSPLGTGSGSIDPDELRTVLQSCLRESAISLPDEKLDQLTLALFESADADGNGAITFEELRDELQRFPGVMENLTISAAHWLTAPAPRPRPRRPRQLTRAYWHNHRSQLFCLATYAGLHVLLFGLAASAHRDLGASVMVAKGCGQCLNFDCSFIAVLMLRRCLTWLRATWLAQVLPLDQNIQFHQLMGYVVVGLSLVHTVAHTVNFVLQAQAEASPFQFWELLLTTRPGIGWVHGSASPTGVALLLLLLLMFICSSSCIRRSGHFEVFYWTHLSYLLVWLLLIFHGPNFWKWLLVPGILFFLEKAIGLAVSRMAAVCIMEVNLLPSKVTHLLIKRPPFFHYRPGDYLYLNIPTIARYEWHPFTISSAPEQKDTIWLHIRSQGQWTNRLYESFKASDPLGRGSKRLSRSVTMRKSQRSSKGSEILLEKHKFCNIKCYIDGPYGTPTRRIFASEHAVLIGAGIGITPFASILQSIMYRHQKRKHTCPSCQHSWIEGVQDNMKLHKVDFIWINRDQRSFEWFVSLLTKLEMDQAEEAQYGRFLELHMYMTSALGKNDMKAIGLQMALDLLANKEKKDSITGLQTRTQPGRPDWSKDTVQLRTSKPLLLHRLTLGAPFST

SEQ ID NO: 1373 - protein, 718 aa, Artificial Sequence
  Synthetic polypeptide
MNTSGDPAQTGPEGCRGTMSAEEDARWLRWVTQQFKTIAGEDGEISLQEFKAALHVKESFFAERFFALFDSDRSGTITLQELQEALTLLIHGSPMDKLKFLFQVYDIDGSGSIDPDELRTVLQSCLRESAISLPDEKLDQLTLALFESADADGNGAITFEELRDELQRFPGVMENLTISAAHWLTAPAPRPRPRRPRQLTRAYWHNHRSQLFCLATYAGLHVLLFGLAASAHRDLGASVMVAKGCGQCLNFDCSFIAVLMLRRCLTWLRATWLAQVLPLDQNIQFHQLMGYVVVGLSLVHTVAHTVNFVLQAQAEASPFQFWELLLTTRPGIGWVHGSASPTGVALLLLLLLMFICSSSCIRRSGHFEVFYWTHLSYLLVWLLLIFHGPNFWKWLLVPGILFFLEKAIGLAVSRMAAVCIMEVNLLPSKVTHLLIKRPPFFHYRPGDYLYLNIPTIARYEWHPFTISSAPEQKDTIWLHIRSQGQWTNRLYESFKASDPLGRGSKRLSRSVTMRKSQRSSKGSEILLEKHKFCNIKCYIDGPYGTPTRRIFASEHAVLIGAGIGITPFASILQSIMYRHQKRKHTCPSCQHSWIEGVQDNMKLHKVDFIWINRDQRSFEWFVSLLTKLEMDQAEEAQYGRFLELHMYMTSALGKNDMKAIGLQMALDLLANKEKKDSITGLQTRTQPGRPDWSKDTVQLRTSKPLLLHRLTLGAPFST

SEQ ID NO: 1374 - protein, 47 aa, Artificial Sequence
  Synthetic polypeptide
RGRVGGRGGGGGDSGRRGPGPVPQPRLGQRERGGAEPRAQNCPAPVA

SEQ ID NO: 1375 - protein, 405 aa, Artificial Sequence
  Synthetic polypeptide
MALARGSRQLGALVWGACLCVLVHGQQAQPGQGSDPARWRQLIQWENNGQVYSLLNSGSEYVPAGPQRSESSSRVLLAGAPQAQQRRSHGSPRRRQAPSLPLPGRVGSDTVRGQARHPFGFGQVPDNWREVAVGDSTGMARARTSVSQQRHGGSASSVSASAFASTYRQQPSYPQQFPYPQAPFVSQYENYDPASRTYDQGFVYYRPAGGGVGAGAAAVASAGVIYPYQPRARYEEYGGGEELPEYPPQGFYPAPERPYVPPPPPPPDGLDRRYSHSLYSEGTPGFEQAYPDPGPEAAQAHGGDPRLGWYPPYANPPPEAYGPPRALEPPYLPVRSSDTPPPGGERNGAQQGRLSVGSVYRPNQNGRGLCSCCFPCRGHPFPLSDSLNPAPSPRSCSCPSFSRKS

SEQ ID NO: 1376 - protein, 405 aa, Artificial Sequence; identical to SEQ ID NO: 1375
  Synthetic polypeptide

SEQ ID NO: 1377 - protein, 445 aa, Artificial Sequence
  Synthetic polypeptide
MALARGSRQLGALVWGACLCVLVHGQQAQPGQGSDPARWRQLIQWENNGQVYSLLNSGSEYVPAGPQRSESSSRVLLAGAPQAQQRRSHGSPRRRQAPSLPLPGRVGSDTVRGQARHPFGFGQVPDNWREVAVGDSTGMARARTSVSQQRHGGSASSVSASAFASTYRQQPSYPQQFPYPQAPFVSQYENYDPASRTYDQGFVYYRPAGGGVGAGAAAVASAGVIYPYQPRARYEEYGGGEELPEYPPQGFYPAPERPYVPPPPPPPDGLDRRYSHSLYSEGTPGFEQAYPDPGPEAAQAHGGDPRLGWYPPYANPPPEAYGPPRALEPPYLPVRSSDTPPPGGERNGAQQGRLSVGSVYRPNQNGRVTPAQTPACPGRKVEGQEQDGQAPGSGTSWGTRDHKDGGSLQTSPGRLTPGLAGERARASLRSLFMLFSLPWTPFPAL

SEQ ID NO: 1378 - protein, 454 aa, Artificial Sequence
  Synthetic polypeptide
MSSQPAGNQTSPGATEDYSYGSWYIDEPQGGEELQPEGEVPSCHTSIPPGLYHACLASLSILVLLLLAMLVRRRQLWPDCVRGRPGLPSPVDFLAGDRPRAVPAAVFMVLLSSLCLLLPDEDALPFLTLASAPSQDGKTEAPRGAWKILGLFYYAALYYPLAACATAGHTAAHLLGSTLSWAHLGVQVWQRAECPQVPKIYKYYSLLASLPLLLGLGFLSLWYPVQLVRSFSRRTGAGSKGLQSSYSEEYLRNLLCRKKLGSSYHTSKHGFLSWARVCLRHCIYTPQPGFHLPLKLVLSATLTGTAIYQVALLLLVGVVPTIQKVRAGVTTDVSYLLAGFGIVLSEDKQEVVELVKHHLWALEVCYISALVLSCLLTFLVLMRSLVTHRTNLRALHRGAALDLSPLHRSPHPSRQAIFCWMSFSAYQTAFICLVPAIREDEAGESLEPRRWRLQ

SEQ ID NO: 1379 - protein, 454 aa, Artificial Sequence; identical to SEQ ID NO: 1378
  Synthetic polypeptide

SEQ ID NO: 1380 - protein, 454 aa, Artificial Sequence; identical to SEQ ID NO: 1378
  Synthetic polypeptide

SEQ ID NO: 1381 - protein, 445 aa, Artificial Sequence
  Synthetic polypeptide
MSSQPAGNQTSPGATEDYSYGSWYIDEPQGGEELQPEGEVPSCHTSIPPGLYHACLASLSILVLLLLAMLVRRRQLWPDCVRGRPGLPRPRAVPAAVFMVLLSSLCLLLPDEDALPFLTLASAPSQDGKTEAPRGAWKILGLFYYAALYYPLAACATAGHTAAHLLGSTLSWAHLGVQVWQRAECPQVPKIYKYYSLLASLPLLLGLGFLSLWYPVQLVRSFSRRTGAGSKGLQSSYSEEYLRNLLCRKKLGSSYHTSKHGFLSWARVCLRHCIYTPQPGFHLPLKLVLSATLTGTAIYQVALLLLVGVVPTIQKVRAGVTTDVSYLLAGFGIVLSEDKQEVVELVKHHLWALEVCYISALVLSCLLTFLVLMRSLVTHRTNLRALHRGAALDLSPLHRSPHPSRQAIFCWMSFSAYQTAFICLVPAIREDEAGESLEPRRWRLQ

SEQ ID NO: 1382 - protein, 446 aa, Artificial Sequence
  Synthetic polypeptide
MSSQPAGNQTSPGATEDYSYGSWYIDEPQGGEELQPEGEVPSCHTSIPPGLYHACLASLSILVLLLLAMLVRRRQLWPDCVRGRPGLPSPVDFLAGDRPRAVPAAVFMVLLSSLCLLLPDEDALPFLTLASAPSQGAWKILGLFYYAALYYPLAACATAGHTAAHLLGSTLSWAHLGVQVWQRAECPQVPKIYKYYSLLASLPLLLGLGFLSLWYPVQLVRSFSRRTGAGSKGLQSSYSEEYLRNLLCRKKLGSSYHTSKHGFLSWARVCLRHCIYTPQPGFHLPLKLVLSATLTGTAIYQVALLLLVGVVPTIQKVRAGVTTDVSYLLAGFGIVLSEDKQEVVELVKHHLWALEVCYISALVLSCLLTFLVLMRSLVTHRTNLRALHRGAALDLSPLHRSPHPSRQAIFCWMSFSAYQTAFICLVPAIREDEAGESLEPRRWRLQ

SEQ ID NO: 1383 - protein, 491 aa, Artificial Sequence
  Synthetic polypeptide
MQIRLLRAELVVPLWQFIRQWPPGSDGWGQMEEKGQRMSSQPAGNQTSPGATEDYSYGSWYIDEPQGGEELQPEGEVPSCHTSIPPGLYHACLASLSILVLLLLAMLVRRRQLWPDCVRGRPGLPSPVDFLAGDRPRAVPAAVFMVLLSSLCLLLPDEDALPFLTLASAPSQDGKTEAPRGAWKILGLFYYAALYYPLAACATAGHTAAHLLGSTLSWAHLGVQVWQRAECPQVPKIYKYYSLLASLPLLLGLGFLSLWYPVQLVRSFSRRTGAGSKGLQSSYSEEYLRNLLCRKKLGSSYHTSKHGFLSWARVCLRHCIYTPQPGFHLPLKLVLSATLTGTAIYQVALLLLVGVVPTIQKVRAGVTTDVSYLLAGFGIVLSEDKQEVVELVKHHLWALEVCYISALVLSCLLTFLVLMRSLVTHRTNLRALHRGAALDLSPLHRSPHPSRQAIFCWMSFSAYQTAFICLVPAIREDEAGESLEPRRWRLQ

SEQ ID NO: 1384 - protein, 493 aa, Artificial Sequence
  Synthetic polypeptide
MGGKGGGDTRGPVLFPCQLAQALSPRRAFPRELKEKGQRMSSQPAGNQTSPGATEDYSYGSWYIDEPQGGEELQPEGEVPSCHTSIPPGLYHACLASLSILVLLLLAMLVRRRQLWPDCVRGRPGLPSPVDFLAGDRPRAVPAAVFMVLLSSLCLLLPDEDALPFLTLASAPSQDGKTEAPRGAWKILGLFYYAALYYPLAACATAGHTAAHLLGSTLSWAHLGVQVWQRAECPQVPKIYKYYSLLASLPLLLGLGFLSLWYPVQLVRSFSRRTGAGSKGLQSSYSEEYLRNLLCRKKLGSSYHTSKHGFLSWARVCLRHCIYTPQPGFHLPLKLVLSATLTGTAIYQVALLLLVGVVPTIQKVRAGVTTDVSYLLAGFGIVLSEDKQEVVELVKHHLWALEVCYISALVLSCLLTFLVLMRSLVTHRTNLRALHRGAALDLSPLHRSPHPSRQAIFCWMSFSAYQTAFICLVPAIREDEAGESLEPRRWRLQ

SEQ ID NO: 1385 - protein, 469 aa, Artificial Sequence
  Synthetic polypeptide
MDSQGDWAAQEKGQRMSSQPAGNQTSPGATEDYSYGSWYIDEPQGGEELQPEGEVPSCHTSIPPGLYHACLASLSILVLLLLAMLVRRRQLWPDCVRGRPGLPSPVDFLAGDRPRAVPAAVFMVLLSSLCLLLPDEDALPFLTLASAPSQDGKTEAPRGAWKILGLFYYAALYYPLAACATAGHTAAHLLGSTLSWAHLGVQVWQRAECPQVPKIYKYYSLLASLPLLLGLGFLSLWYPVQLVRSFSRRTGAGSKGLQSSYSEEYLRNLLCRKKLGSSYHTSKHGFLSWARVCLRHCIYTPQPGFHLPLKLVLSATLTGTAIYQVALLLLVGVVPTIQKVRAGVTTDVSYLLAGFGIVLSEDKQEVVELVKHHLWALEVCYISALVLSCLLTFLVLMRSLVTHRTNLRALHRGAALDLSPLHRSPHPSRQAIFCWMSFSAYQTAFICLVPAIREDEAGESLEPRRWRLQ

SEQ ID NO: 1386 - protein, 483 aa, Artificial Sequence
  Synthetic polypeptide
MSSQPAGNQTSPGATEDYSYGSWYIDEPQGGEELQPEGEVPSCHTSIPPGLYHACLASLSILVLLLLAMLVRRRQLWPDCVRGRPGLPSPVDFLAGDRPRAVPAAVFMVLLSSLCLLLPDEDALPFLTLASAPSQDGKTEAPRGAWKILGLFYYAALYYPLAACATAGHTAAHLLGSTLSWAHLGVQVWQRAECPQVPKIYKYYSLLASLPLLLGLGFLSLWYPVQLVRSFSRRTGAGSKGLQSSYSEEYLRNLLCRKKLGSRMAAVEDWLLLPRILVIKRDNYQLGTAGRPWPGLGHLGSCWPFSWAPWEGGGLPGLSGAVHHTPSFEDYRIPSPAEAGAFSYTDRDGHLPGGPAAAGGRGTHYPEGEGRGHHGCLLPAGRLWNRALRGQAGGGGAGEAPSVGSGSVLHLSLGLVLLTHLPGPDALTGDTQDQPSSSAPRSCPGLESLASESPSLPPSHILLDELQCLPDSLYLPCSSYSGG

SEQ ID NO: 1387 - protein, 335 aa, Artificial Sequence
  Synthetic polypeptide
MAPEATKNFLPLLDAVSRDFVSVLHRRIKKAGSGNYSGDISDDLFRFAFESITNVIFGERQGMLEEVVNPEAQRFIDAIYQMFHTSVPMLNLPPDLFRLFRTKTWKDHVAAWDVIFSKADIYTQNFYWELRQKGSVHHDYRGILYRLLGDSKMSFEDIKANVTEMLAGGVDTTSMTLQWHLYEMARNLKVQDMLRAEVLAARHQAQGDMATMLQLVPLLKASIKETLRLHPISVTLQRYLVNDLVLRDYMIPAKTLVQVAIYALGREPTFFFDPENFDPTRWLSKDKNITYFRNLGFGWGVRQCLGRRIAELEMTIFLINRQNLWRYGEIIRRIL

SEQ ID NO: 1388 - protein, 335 aa, Artificial Sequence; identical to SEQ ID NO: 1387
  Synthetic polypeptide

SEQ ID NO: 1389 - protein, 493 aa, Artificial Sequence
  Synthetic polypeptide
MLAKGLPPRSVLVKGCQTFLSAPREGLGRLRVPTGEGAGISTRSPRPFNEIPSPGDNGWLNLYHFWRETGTHKVHLHHVQNFQKYGPIYREKLGNVESVYVIDPEDVALLFKSEGPNPERFLIPPWVAYHQYYQRPIGVLLKKSAAWKKDRVALNQEVMAPEATKNFLPLLDAVSRDFVSVLHRRIKKAGSGNYSGDISDDLFRFAFESITNVIFGERQGMLEEVVNPEAQRFIDAIYQMFHTSVPMLNLPPDLFRLFRTKTWKDHVAAWDVIFSKADIYTQNFYWELRQKGSVHHDYRGILYRLLGDSKMSFEDIKANVTEMLAGGVDTTSMTLQWHLYEMARNLKVQDMLRAEVLAARHQAQGDMATMLQLVPLLKASIKETLRLHPISVTLQRYLVNDLVLRDYMIPAKTLVQVAIYALGREPTFFFDPENFDPTRWLSKDKNITYFRNLGFGWGVRQCLGRRIAELEMTIFLINRQNLWRYGEIIRRIL

SEQ ID NO: 1390 - protein, 62 aa, Artificial Sequence
  Synthetic polypeptide
MPAVSGPGPLFCLLLLLLDPHSPETGCPPLRRFEYKLSFKGPRLALPGAGIPFWSHHGDGVL

SEQ ID NO: 1391 - protein, 62 aa, Artificial Sequence; identical to SEQ ID NO: 1390
  Synthetic polypeptide

SEQ ID NO: 1392 - protein, 330 aa, Artificial Sequence
  Synthetic polypeptide
MKTKYIFCNITERKDAEGWETVQRGRPIRSRSTAVMPKVSLATEATRSKDDSDKENVCLLPDESIQKGQFVGDGTSNTIESHPKDSLHSCDHPLAEKTQFTVSTLDDVKNSGSIRDNYVRTSEISAVHIDTECVSVMLQAGTPPLQVNEEKFPAEKARIENEMDPSDISNSMAEVLAKKEELADRLEKANEEAIASAIAEEEQLTREIEAEENNDINIETDNDSDFSASMGSGSVSFCGMSMDWNDVLADYEARESWRQNTSWGDIVEEEPARPPGHGIHMHEKLSSPSRKRTIAESKKKHEEKQMKAQQLREKLREEKTLKLQKLLERG

SEQ ID NO: 1393 - protein, 576 aa, Artificial Sequence
  Synthetic polypeptide
MMASFQRSNSHDKVRRIVAEEGRTARNLIAWSVPLESKDDDGKPKCQTGGKSKRTIQGTHKTTKQSTAVDCKITSSTTGDKHFDKSPTKTRHPRKIDLRARYWAFLFDNLRRAVDEIYVTCESDQSVVECKEVLMMLDNYVRDFKALIDWIQLQEKLEKTDAQSRPTSLAWEVKKMSPGRHVIPSPSTDRINVTSNARRSLNFGGSTGTVPAPRLAPTGVSWADKVKAHHTGSTASSEITPAQSCPPMTVQKASRKNERKDAEGWETVQRGRPIRSRSTAVMPKVSLATEATRSKDDSDKENVCLLPDESIQKGQFVGDGTSNTIESHPKDSLHSCDHPLAEKTQFTVSTLDDVKNSGSIRDNYVRTSEISAVHIDTECVSVMLQAGTPPLQVNEEKFPAEKARIENEMDPSDISNSMAEVLAKKEELADRLEKANEEAIASAIAEEEQLTREIEAEENNDINIETDNDSDFSASMGSGSVSFCGMSMDWNDVLADYEARESWRQNTSWGDIVEEEPARPPGHGIHMHEKLSSPSRKRTIAESKKKHEEKQMKAQQLREKLREEKTLKLQKLLERG

SEQ ID NO: 1394 - protein, 576 aa, Artificial Sequence; identical to SEQ ID NO: 1393
  Synthetic polypeptide

SEQ ID NO: 1395 - protein, 582 aa, Artificial Sequence
  Synthetic polypeptide
MMASFQRSNSHDKVRRIVAEEGRTARNLIAWSVPLESKDDDGKPKCQTGGKSKRTIQGTHKTTKQSTAVDCKITSSTTGDKHFDKSPTKTRHPRKIDLRARYWAFLFDNLRRAVDEIYVTCESDQSVVECKEVLMMLDNYVRDFKALIDWIQLQEKLEKTDAQSRPTSLAWEVKKMSPGRHVIPSPSTDRINVTSNARRSLNFGGSTGTVPAPRLAPTGVSWADKVKAHHTGSTASSEITPAQSCPPMTVQKASRKNERKDAEGWETVQRGRPIRSRSTAVMPKVSLATEATRSKDDSDKENVCLLPDESIQKGQFVGDGTSNTIESHPKDSLHSCDHPLAEKTQFTVSTLDDVKNSGSIRDNYVRTSEISAVHIDTECVSVMLQAGTPPLQVNEEKFPAEKARIENEMDPSDISNVSAANLSMAEVLAKKEELADRLEKANEEAIASAIAEEEQLTREIEAEENNDINIETDNDSDFSASMGSGSVSFCGMSMDWNDVLADYEARESWRQNTSWGDIVEEEPARPPGHGIHMHEKLSSPSRKRTIAESKKKHEEKQMKAQQLREKLREEKTLKLQKLLERG

SEQ ID NO: 1396 - protein, 582 aa, Artificial Sequence; identical to SEQ ID NO: 1395
  Synthetic polypeptide

SEQ ID NO: 1397 - protein, 1644 aa, Artificial Sequence
  Synthetic polypeptide
MPGGPSPRSPAPLLRPLLLLLCALAPGAPGPAPGRATEGRAALDIVHPVRVDAGGSFLSYELWPRALRKRDVSVRRDAPAFYELQYRGRELRFNLTANQHLLAPGFVSETRRRGGLGRAHIRAHTPACHLLGEVQDPELEGGLAAISACDGLKGVFQLSNEDYFIEPLDSAPARPGHAQPHVVYKRQAPERLAQRGDSSAPSTCGVQVYPELESRRERWEQRQQWRRPRLRRLHQRSVSKEKWVETLVVADAKMVEYHGQPQVESYVLTIMNMVAGLFHDPSIGNPIHITIVRLVLLEDEEEDLKITHHADNTLKSFCKWQKSINMKGDAHPLHHDTAILLTRKDLCAAMNRPCETLGLSHVAGMCQPHRSCSINEDTGLPLAFTVAHELGHSFGIQHDGSGNDCEPVGKRPFIMSPQLLYDAAPLTWSRCSRQYITRFLDRGWGLCLDDPPAKDIIDFPSVPPGVLYDVSHQCRLQYGAYSAFCEDMDNVCHTLWCSVGTTCHSKLDAAVDGTRCGENKWCLSGECVPVGFRPEAVDGGWSGWSAWSICSRSCGMGVQSAERQCTQPTPKYKGRYCVGERKRFRLCNLQACPAGRPSFRHVQCSHFDAMLYKGQLHTWVPVVNDVNPCELHCRPANEYFAEKLRDAVVDGTPCYQVRASRDLCINGICKNVGCDFEIDSGAMEDRCGVCHGNGSTCHTVSGTFEEAEGLGYVDVGLIPAGAREIRIQEVAEAANFLALRSEDPEKYFLNGGWTIQWNGDYQVAGTTFTYARRGNWENLTSPGPTKEPVWIQLLFQESNPGVHYEYTIHREAGGHDEVPPPVFSWHYGPWTKCTVTCGRGVQRQNVYCLERQAGPVDEEHCDPLGRPDDQQRKCSEQPCPARWWAGEWQLCSSSCGPGGLSRRAVLCIRSVGLDEQSALEPPACEHLPRPPTETPCNRHVPCPATWAVGNWSQCSVTCGEGTQRRNVLCTNDTGVPCDEAQQPASEVTCSLPLCRWPLGTLGPEGSGSGSSSHELFNEADFIPHHLAPRPSPASSPKPGTMGNAIEEEAPELDLPGPVFVDDFYYDYNFINFHEDLSYGPSEEPDLDLAGTGDRTPPPHSHPAAPSTGSPVPATEPPAAKEEGVLGPWSPSPWPSQAGRSPPPPSEQTPGNPLINFLPEEDTPIGAPDLGLPSLSWPRVSTDGLQTPATPESQNDFPVGKDSQSQLPPPWRDRTNEVFKDDEEPKGRGAPHLPPRPSSTLPPLSPVGSTHSSPSPDVAELWTGGTVAWEPALEGGLGPVDSELWPTVGVASLLPPPIAPLPEMKVRDSSLEPGTPSFPTPGPGSWDLQTVAVWGTFLPTTLTGLGHMPEPALNPGPKGQPESLSPEVPLSSRLLSTPAWDSPANSHRVPETQPLAPSLAEAGPPADPLVVRNAGWQAGNWSECSTTCGLGAVWRPVRCSSGRDEDCAPAGRPQPARRCHLRPCATWHSGNWSKCSRSCGGGSSVRDVQCVDTRDLRPLRPFHCQPGPAKPPAHRPCGAQPCLSWYTSSWRECSEACGGGEQQRLVTCPEPGLCEEALRPNTTRPCNTHPCTQWVVGPWGQCSGPCGGGVQRRLVKCVNTQTGLPEEDSDQCGHEAWPESSRPCGTEDCEPVEPPRLSLPTVRPG

SEQ ID NO: 1398 - protein, 694 aa, Artificial Sequence
  Synthetic polypeptide
MATPAAVNPPEMASDIPGSVTLPVAPMAATGQVRMAGAMPARGGKRRSGMDFDDEDGEGPSKFSRENHSEIERRRRNKMTQYITELSDMVPTCSALARKPDKLTILRMAVSHMKSMRGTGNKSTDGAYKPSFLTEQELKHLILEAADGFLFVVAAETGRVIYVSDSVTPVLNQPQSEWFGSTLYEQVHPDDVEKLREQLCTSENSMTGRILDLKTGTVKKEGQQSSMRMCMGSRRSFICRMRCGNAPLDHLPLNRITTMRKRFRNGLGPVKEGEAQYAVVHCTGYIKAWPPAGMTIPEEDADVGQGSKYCLVAIGRLQVTSSPVCMDMNGMSVPTEFLSRHNSDGIITFVDPRCISVIGYQPQDLLGKDILEFCHPEDQSHLRESFQQVVKLKGQVLSVMYRFRTKNREWMLIRTSSFTFQNPYSDEIEYIICTNTNVKQLQQQQAELEVHQRDGLSSYDLSQVPVPNLPAGVHEAGKSVEKADAIFSQERDPRFAEMFAGISASEKKMMSSASAAGTQQIYSQGSPFPSGHSGKAFSSSVVHVPGVNDIQSSSSTGQNMSQISRQLNQSQVAWTGSRPPFPGQQIPSQSSKTQSSPFGIGTSHTYPADPSSYSPLSSPATSSPSGNAYSSLANRTPGFAESGQSSGQFQGRPSEVWSQWQSQHHGQQSGEQHSHQQPGQTEVFQDVSELLLHQ

SEQ ID NO: 1399 - protein, 683 aa, Artificial Sequence
  Synthetic polypeptide
MASDIPGSVTLPVAPMAATGQVRMAGAMPARGGKRRSGMDFDDEDGEGPSKFSRENHSEIERRRRNKMTQYITELSDMVPTCSALARKPDKLTILRMAVSHMKSMRGTGNKSTDGAYKPSFLTEQELKHLILEAADGFLFVVAAETGRVIYVSDSVTPVLNQPQSEWFGSTLYEQVHPDDVEKLREQLCTSENSMTGRILDLKTGTVKKEGQQSSMRMCMGSRRSFICRMRCGNAPLDHLPLNRITTMRKRFRNGLGPVKEGEAQYAVVHCTGYIKAWPPAGMTIPEEDADVGQGSKYCLVAIGRLQVTSSPVCMDMNGMSVPTEFLSRHNSDGIITFVDPRCISVIGYQPQDLLGKDILEFCHPEDQSHLRESFQQVVKLKGQVLSVMYRFRTKNREWMLIRTSSFTFQNPYSDEIEYIICTNTNVKQLQQQQAELEVHQRDGLSSYDLSQVPVPNLPAGVHEAGKSVEKADAIFSQERDPRFAEMFAGISASEKKMMSSASAAGTQQIYSQGSPFPSGHSGKAFSSSVVHVPGVNDIQSSSSTGQNMSQISRQLNQSQVAWTGSRPPFPGQQIPSQSSKTQSSPFGIGTSHTYPADPSSYSPLSSPATSSPSGNAYSSLANRTPGFAESGQSSGQFQGRPSEVWSQWQSQHHGQQSGEQHSHQQPGQTEVFQDVSELLLHQ

SEQ ID NO: 1400 - protein, 683 aa, Artificial Sequence; identical to SEQ ID NO: 1399
  Synthetic polypeptide

SEQ ID NO: 1401 - protein, 218 aa, Artificial Sequence
  Synthetic polypeptide
MAQNVYGPGVRIGNWNEDVYLEEELMKDFLEKRDKGKLLIQRSRRLKQNLLRPMQLSVTEDGYIHYGDKVMLVNPDDPDTEADVFLRGDLSLCMTPDEIQSHLKDELEVPCGLSAVQAKTPIGRNTFIILSVHRDATGQVLRYGQDFCLGITGGFDNKMLYLSSDHRTLLKSSKRSWLQEVYLTDEVSHVNCWQAAFPDPQLRLEYEGFPVPYPLFSL

SEQ ID NO: 1402 - protein, 280 aa, Artificial Sequence
  Synthetic polypeptide
MWPQPRLPPHPAMSEKTQQGKLAAAKKKLKAYWQRKSPGIPAGANRKKKVNGSSPDTATSGGYHSPGDSATGIYGEGRASSTTLQDLESQYQELAVALDSSSAIISQLTENINSLVRTSKEEKKHEIHLVQKLGRSLFKLKNQTAEPLAPQPPAGPSKVEQLQDETNHLRKELESVGRQLQAEVENNQMLSLLNRRQEERLREQEERLREQEERLCEQEERLCEQEERLREQEERLCEQEKLPGQERLLEEVEKLLEQERRQEEQERLLERERLLDEVEE

SEQ ID NO: 1403 - protein, 280 aa, Artificial Sequence; identical to SEQ ID NO: 1402
  Synthetic polypeptide

SEQ ID NO: 1404 - protein, 280 aa, Artificial Sequence; identical to SEQ ID NO: 1402
  Synthetic polypeptide

SEQ ID NO: 1405 - protein, 280 aa, Artificial Sequence; identical to SEQ ID NO: 1402
  Synthetic polypeptide

SEQ ID NO: 1406 - protein, 845 aa, Artificial Sequence
  Synthetic polypeptide
MASWTSPWWVLIGMVFMHSPLPQTTAEKSPGAYFLPEFALSPQGSFLEDTTGEQFLTYRYDDQTSRNTRSDEDKDGNWDAWGDWSDCSRTCGGGASYSLRRCLTGRNCEGQNIRYKTCSNHDCPPDAEDFRAQQCSAYNDVQYQGHYYEWLPRYNDPAAPCALKCHAQGQNLVVELAPKVLDGTRCNTDSLDMCISGICQAVGCDRQLGSNAKEDNCGVCAGDGSTCRLVRGQSKSHVSPEKREENVIAVPLGSRSVRITVKGPAHLFIESKTLQGSKGEHSFNSPGVFLVENTTVEFQRGSERQTFKIPGPLMADFIFKTRYTAAKDSVVQFFFYQPISHQWRQTDFFPCTVTCGGGYQLNSAECVDIRLKRVVPDHYCHYYPENVKPKPKLKECSMDPCPSSDGFKEIMPYDHFQPLPRWEHNPWTACSVSCGGGIQRRSFVCVEESMHGEILQVEEWKCMYAPKPKVMQTCNLFDCPKWIAMEWSQCTVTCGRGLRYRVVLCINHRGEHVGGCNPQLKLHIKEECVIPIPCYKPKEKSPVEAKLPWLKQAQELEETRIATEEPTFIPEPWSACSTTCGPGVQVREVKCRVLLTFTQTETELPEEECEGPKLPTERPCLLEACDESPASRELDIPLPEDSETTYDWEYAGFTPCTATCVGGHQEAIAVCLHIQTQQTVNDSLCDMVHRPPAMSQACNTEPCPPRWHVGSWGPCSATCGVGIQTRDVYCLHPGETPAPPEECRDEKPHALQACNQFDCPPGWHIEEWQQCSRTCGGGTQNRRVTCRQLLTDGSFLNLSDELCQGPKASSHKSCARTDCPPHLAVGDWSKEHSMQEDNGAGSTQF

SEQ ID NO: 1407 - protein, 845 aa, Artificial Sequence; identical to SEQ ID NO: 1406
  Synthetic polypeptide

SEQ ID NO: 1408 - protein, 394 aa, Artificial Sequence
  Synthetic polypeptide
MENDPSRRRESISLTPVAKGLENMGADFLESLEEGQLPRSDLSPAEIRSSWSEAAPKPFSRWRNLQPALRARSFCREHMQLFRWIGTGLLCTGLSAFLLVACLLDFQRALALFVLTCVVLTFLGHRLLKRLLGPKLRRFLKPQGHPRLLLWFKRGLALAAFLGLVLWLSLDTSQRPEQLVSFAGICVFVALLFACSKHHCAVSWRAVSWGLGLQFVLGLLVIRTEPGFIAFEWLGEQIRIFLSYTKAGSSFVFGEALVKDVFAFQVLPIIVFFSCVISVLYHVGLMQWVILKIAWLMQVTMGTTATETLSVAGNIFVSQTEAPLLIRPYLADMTLSEVHVVMTGGYATIAGSLLGAYISFGHFGRPRRVDHLRSGVQDQPGQHGETLSLQKYKN

SEQ ID NO: 1409 - protein, 394 aa, Artificial Sequence; identical to SEQ ID NO: 1408
  Synthetic polypeptide

SEQ ID NO: 1410 - protein, 394 aa, Artificial Sequence; identical to SEQ ID NO: 1408
  Synthetic polypeptide

SEQ ID NO: 1411 - protein, 394 aa, Artificial Sequence; identical to SEQ ID NO: 1408
  Synthetic polypeptide

SEQ ID NO: 1412 - protein, 394 aa, Artificial Sequence; identical to SEQ ID NO: 1408
  Synthetic polypeptide

SEQ ID NO: 1413 - protein, 316 aa, Artificial Sequence
  Synthetic polypeptide
MQLFRWIGTGLLCTGLSAFLLVACLLDFQRALALFVLTCVVLTFLGHRLLKRLLGPKLRRFLKPQGHPRLLLWFKRGLALAAFLGLVLWLSLDTSQRPEQLVSFAGICVFVALLFACSKHHCAVSWRAVSWGLGLQFVLGLLVIRTEPGFIAFEWLGEQIRIFLSYTKAGSSFVFGEALVKDVFAFQVLPIIVFFSCVISVLYHVGLMQWVILKIAWLMQVTMGTTATETLSVAGNIFVSQTEAPLLIRPYLADMTLSEVHVVMTGGYATIAGSLLGAYISFGHFGRPRRVDHLRSGVQDQPGQHGETLSLQKYKN

SEQ ID NO: 1414 - protein, 557 aa, Artificial Sequence
  Synthetic polypeptide
MENDPSRRRESISLTPVAKGLENMGADFLESLEEGQLPRSDLSPAEIRSSWSEAAPKPFSRWRNLQPALRARSFCREHMQLFRWIGTGLLCTGLSAFLLVACLLDFQRALALFVLTCVVLTFLGHRLLKRLLGPKLRRFLKPQGHPRLLLWFKRGLALAAFLGLVLWLSLDTSQRPEQLVSFAGICVFVALLFACSKHHCAVSWRAVSWGLGLQFVLGLLVIRTEPGFIAFEWLGEQIRIFLSYTKAGSSFVFGEALVKDVFAFQVLPIIVFFSCVISVLYHVGLMQWVILKIAWLMQVTMGTTATETLSVAGNIFVSQTEAPLLIRPYLADMTLSEVHVVMTGGYATIAGSLLGAYISFGIDATSLIAASVMAAPCALALSKLVYPEVEESKFRREEGVKLTYGDAQNLIEAASTGAAISVKVVANIAANLIAFLAVLDFINAALSWLGDMVDIQGLSFQLICSYILRPVAFLMGVAWEDCPVVAELLGIKLFLNEFVAYQDLSKYKQRRLAGAEEWVGDRKQWISLECRWEGEQAWTMKTKATPERWSSFKLKGA

SEQ ID NO: 1415 - protein, 557 aa, Artificial Sequence; identical to SEQ ID NO: 1414
  Synthetic polypeptide

SEQ ID NO: 1416 - protein, 557 aa, Artificial Sequence; identical to SEQ ID NO: 1414
  Synthetic polypeptide

SEQ ID NO: 1417 - protein, 557 aa, Artificial Sequence; identical to SEQ ID NO: 1414
  Synthetic polypeptide

SEQ ID NO: 1418 - protein, 471 aa, Artificial Sequence
  Synthetic polypeptide
MENDPSRRRESISLTPVAKGLENMGADFLESLEEGQLPRSDLSPAEIRSSWSEAAPKPFSRWRNLQPALRARSFCREHMQLFRWIGTGLLCTGLSAFLLVACLLDFQRALALFVLTCVVLTFLGHRLLKRLLGPKLRRFLKPQGHPRLLLWFKRGLALAAFLGLVLWLSLDTSQRPEQLVSFAGICVFVALLFACSKHHCAVSWRAVSWGLGLQFVLGLLVIRTEPGFIAFEWLGEQIRIFLSYTKAGSSFVFGEALVKDVFAFQVLPIIVFFSCVISVLYHVGLMQWVILKIAWLMQVTMGTTATETLSVAGNIFVSQTEAPLLIRPYLADMTLSEVHVVMTGGYATIAGSLLGAYISFGVRAEVLTTFALCGFANFSSIGIMLGGLTSMVPQRKSDFSQIVLRALFTGACVSLVNACMAGILYMPRGAEVDCMSLLNTTLSSSSFEIYQCCREAFQSWNADGKVSKLGP

SEQ ID NO: 1419 - protein, 637 aa, Artificial Sequence
  Synthetic polypeptide
MENDPSRRRESISLTPVAKGLENMGADFLESLEEGQLPRSDLSPAEIRSSWSEAAPKPFSRWRNLQPALRARSFCREHMQLFRWIGTGLLCTGLSAFLLVACLLDFQRALALFVLTCVVLTFLGHRLLKRLLGPKLRRFLKPQGHPRLLLWFKRGLALAAFLGLVLWLSLDTSQRPEQLVSFAGICVFVALLFACSKHHCAVSWRAVSWGLGLQFVLGLLVIRTEPGFIAFEWLGEQIRIFLSYTKAGSSFVFGEALVKDVFAFQVLPIIVFFSCVISVLYHVGLMQWVILKIAWLMQVTMGTTATETLSVAGNIFVSQTEAPLLIRPYLADMTLSEVHVVMTGGYATIAGSLLGAYISFGIDATSLIAASVMAAPCALALSKLVYPEVEESKFRREEGVKLTYGDAQNLIEAASTGAAISVKVVANIAANLIAFLAVLDFINAALSWLGDMVDIQGLSFQLICSYILRPVAFLMGVAWEDCPVVAELLGIKLFLNEFVAYQDLSKYKQRRLAGAEEWVGDRKQWISVRAEVLTTFALCGFANFSSIGIMLGGLTSMVPQRKSDFSQIVLRALFTGACVSLVNACMAGILYMPRGAEVDCMSLLNTTLSSSSFEIYQCCREAFQSWNADGKVSKLGP

SEQ ID NO: 1420 - protein, 637 aa, Artificial Sequence; identical to SEQ ID NO: 1419
  Synthetic polypeptide

SEQ ID NO: 1421 - protein, 637 aa, Artificial Sequence; identical to SEQ ID NO: 1419
  Synthetic polypeptide

SEQ ID NO: 1422 - protein, 71 aa, Artificial Sequence
  Synthetic polypeptide
MQAVRNAGSRFLRSWTWPQTAGRVVARTPAGTICTGARQLQDAAAKQKVEQNAAPSHTKFSTLGGQGGRIT

SEQ ID NO: 1423 - protein, 71 aa, Artificial Sequence; identical to SEQ ID NO: 1422
  Synthetic polypeptide

SEQ ID NO: 1424 - protein, 71 aa, Artificial Sequence; identical to SEQ ID NO: 1422
  Synthetic polypeptide

SEQ ID NO: 1425 - protein, 36 aa, Artificial Sequence
  Synthetic polypeptide
MPRPRLLAALCGALLCAPSLLVALDPAQIFPPLGNF

SEQ ID NO: 1426 - protein, 36 aa, Artificial Sequence; identical to SEQ ID NO: 1425
  Synthetic polypeptide

SEQ ID NO: 1427 - protein, 36 aa, Artificial Sequence; identical to SEQ ID NO: 1425
  Synthetic polypeptide

SEQ ID NO: 1428 - protein, 36 aa, Artificial Sequence; identical to SEQ ID NO: 1425
  Synthetic polypeptide

SEQ ID NO: 1429 - protein, 36 aa, Artificial Sequence; identical to SEQ ID NO: 1425
  Synthetic polypeptide

SEQ ID NO: 1430 - protein, 36 aa, Artificial Sequence; identical to SEQ ID NO: 1425
  Synthetic polypeptide

SEQ ID NO: 1431 - protein, 122 aa, Artificial Sequence
  Synthetic polypeptide
MGPLPVCLPIMLLLLLPSLLLLLLLPGPGSGEASRILRVHRRGILELAGTVGCVGPRTPIAYMKYGCFCGLGGHGQPRDAIDWCCHGHDCCYTRAEEAGCSPKTERYSWQCVNQSVLCGGCF

SEQ ID NO: 1432 - protein, 122 aa, Artificial Sequence; identical to SEQ ID NO: 1431
  Synthetic polypeptide

SEQ ID NO: 1433 - protein, 146 aa, Artificial Sequence
  Synthetic polypeptide
MELKQSLSTHLEAEKPLRRYGAVEETAWKTERLGRNQLDIISMAETTMMPEEIELEMAKIQRLREVLVRRESELRFMMDDIQLCKDIMDLKQELQNLVAIPEKEKTKLQKQREDELIQKIHKLVQKRDFLVDDAEVERLRSGGVLL

SEQ ID NO: 1434 - protein, 146 aa, Artificial Sequence; identical to SEQ ID NO: 1433
  Synthetic polypeptide

SEQ ID NO: 1435 - protein, 129 aa, Artificial Sequence
  Synthetic polypeptide
MWGDLTETGCMGRRSAKKDQLDIISMAETTMMPEEIELEMAKIQRLREVLVRRESELRFMMDDIQLCKDIMDLKQELQNLVAIPEKEKTKLQKQREDELIQKIHKLVQKRDFLVDDAEVERLRSGGVLL

SEQ ID NO: 1436 - protein, 12 aa, Artificial Sequence
  Synthetic polypeptide
ISWTSSPWRRQP

SEQ ID NO: 1437 - protein, 98 aa, Artificial Sequence
  Synthetic polypeptide
MPEEIELEMAKIQRLREVLVRRESELRFMMDDIQLCKDIMDLKQELQNLVAIPEKEKTKLQKQREDELIQKIHKLVQKRDFLVDDAEVERLRSGGVLL

SEQ ID NO: 1438 - protein, 2 aa, Artificial Sequence
  Synthetic polypeptide
DG

SEQ ID NO: 1439 - protein, 1741 aa, Artificial Sequence
  Synthetic polypeptide
MAQKGQLSDDEKFLFVDKNFINSPVAQADWAAKRLVWVPSEKQGFEAASIKEEKGDEVVVELVENGKKVTVGKDDIQKMNPPKFSKVEDMAELTCLNEASVLHNLRERYFSGLIYTYSGLFCVVVNPYKHLPIYSEKIVDMYKGKKRHEMPPHIYAIADTAYRSMLQDREDQSILCTGESGAGKTENTKKVIQYLAVVASSHKGKKDTSITQGPSFAYGELEKQLLQANPILEAFGNAKTVKNDNSSRFGKFIRINFDVTGYIVGANIETYLLEKSRAIRQARDERTFHIFYYMIAGAKEKMRSDLLLEGFNNYTFLSNGFVPIPAAQDDEMFQETVEAMAIMGFSEEEQLSILKVVSSVLQLGNIVFKKERNTDQASMPDNTAAQKVCHLMGINVTDFTRSILTPRIKVGRDVVQKAQTKEQADFAVEALAKATYERLFRWILTRVNKALDKTHRQGASFLGILDIAGFEIFEVNSFEQLCINYTNEKLQQLFNHTMFILEQEEYQREGIEWNFIDFGLDLQPCIELIERPNNPPGVLALLDEECWFPKATDKSFVEKLCTEQGSHPKFQKPKQLKDKTEFSIIHYAGKVDYNASAWLTKNMDPLNDNVTSLLNASSDKFVADLWKDVDRIVGLDQMAKMTESSLPSASKTKKGMFRTVGQLYKEQLGKLMTTLRNTTPNFVRCIIPNHEKRSGKLDAFLVLEQLRCNGVLEGIRICRQGFPNRIVFQEFRQRYEILAANAIPKGFMDGKQACILMIKALELDPNLYRIGQSKIFFRTGVLAHLEEERDLKITDVIMAFQAMCRGYLARKAFAKRQQQLTAMKVIQRNCAAYLKLRNWQWWRLFTKVKPLLQVTRQEEEMQAKEDELQKTKERQQKAENELKELEQKHSQLTEEKNLLQEQLQAETELYAEAEEMRVRLAAKKQELEEILHEMEARLEEEEDRGQQLQAERKKMAQQMLDLEEQLEEEEAARQKLQLEKVTAEAKIKKLEDEILVMDDQNNKLSKERKLLEERISDLTTNLAEEEEKAKNLTKLKNKHESMISELEVRLKKEEKSRQELEKLKRKLEGDASDFHEQIADLQAQIAELKMQLAKKEEELQAALARLDDEIAQKNNALKKIRELEGHISDLQEDLDSERAARNKAEKQKRDLGEELEALKTELEDTLDSTATQQELRAKREQEVTVLKKALDEETRSHEAQVQEMRQKHAQAVEELTEQLEQFKRAKANLDKNKQTLEKENADLAGELRVLGQAKQEVEHKKKKLEAQVQELQSKCSDGERARAELNDKVHKLQNEVESVTGMLNEAEGKAIKLAKDVASLSSQLQDTQELLQEETRQKLNVSTKLRQLEEERNSLQDQLDEEMEAKQNLERHISTLNIQLSDSKKKLQDFASTVEALEEGKKRFQKEIENLTQQYEEKAAAYDKLEKTKNRLQQELDDLVVDLDNQRQLVSNLEKKQRKFDQLLAEEKNISSKYADERDRAEAEAREKETKALSLARALEEALEAKEELERTNKMLKAEMEDLVSSKDDVGKNVHELEKSKRALETQMEEMKTQLEELEDELQATEDAKLRLEVNMQALKGQFERDLQARDEQNEEKRRQLQRQLHEYETELEDERKQRALAAAAKKKLEGDLKDLELQADSAIKGREEAIKQLRKLQAQMKDFQRELEDARASRDEIFATAKENEKKAKSLEADLMQLQEDLAAAERARKQADLEKEELAEELASSLSGRTLQPRTSRLQ

SEQ ID NO: 1440 - protein, 1741 aa, Artificial Sequence; identical to SEQ ID NO: 1439
  Synthetic polypeptide

SEQ ID NO: 1441 - protein, 1734 aa, Artificial Sequence
  Synthetic polypeptide
MAQKGQLSDDEKFLFVDKNFINSPVAQADWAAKRLVWVPSEKQGFEAASIKEEKGDEVVVELVENGKKVTVGKDDIQKMNPPKFSKVEDMAELTCLNEASVLHNLRERYFSGLIYTYSGLFCVVVNPYKHLPIYSEKIVDMYKGKKRHEMPPHIYAIADTAYRSMLQDREDQSILCTGESGAGKTENTKKVIQYLAVVASSHKGKKDTSITGELEKQLLQANPILEAFGNAKTVKNDNSSRFGKFIRINFDVTGYIVGANIETYLLEKSRAIRQARDERTFHIFYYMIAGAKEKMRSDLLLEGFNNYTFLSNGFVPIPAAQDDEMFQETVEAMAIMGFSEEEQLSILKVVSSVLQLGNIVFKKERNTDQASMPDNTAAQKVCHLMGINVTDFTRSILTPRIKVGRDVVQKAQTKEQADFAVEALAKATYERLFRWILTRVNKALDKTHRQGASFLGILDIAGFEIFEVNSFEQLCINYTNEKLQQLFNHTMFILEQEEYQREGIEWNFIDFGLDLQPCIELIERPNNPPGVLALLDEECWFPKATDKSFVEKLCTEQGSHPKFQKPKQLKDKTEFSIIHYAGKVDYNASAWLTKNMDPLNDNVTSLLNASSDKFVADLWKDVDRIVGLDQMAKMTESSLPSASKTKKGMFRTVGQLYKEQLGKLMTTLRNTTPNFVRCIIPNHEKRSGKLDAFLVLEQLRCNGVLEGIRICRQGFPNRIVFQEFRQRYEILAANAIPKGFMDGKQACILMIKALELDPNLYRIGQSKIFFRTGVLAHLEEERDLKITDVIMAFQAMCRGYLARKAFAKRQQQLTAMKVIQRNCAAYLKLRNWQWWRLFTKVKPLLQVTRQEEEMQAKEDELQKTKERQQKAENELKELEQKHSQLTEEKNLLQEQLQAETELYAEAEEMRVRLAAKKQELEEILHEMEARLEEEEDRGQQLQAERKKMAQQMLDLEEQLEEEEAARQKLQLEKVTAEAKIKKLEDEILVMDDQNNKLSKERKLLEERISDLTTNLAEEEEKAKNLTKLKNKHESMISELEVRLKKEEKSRQELEKLKRKLEGDASDFHEQIADLQAQIAELKMQLAKKEEELQAALARLDDEIAQKNNALKKIRELEGHISDLQEDLDSERAARNKAEKQKRDLGEELEALKTELEDTLDSTATQQELRAKREQEVTVLKKALDEETRSHEAQVQEMRQKHAQAVEELTEQLEQFKRAKANLDKNKQTLEKENADLAGELRVLGQAKQEVEHKKKKLEAQVQELQSKCSDGERARAELNDKVHKLQNEVESVTGMLNEAEGKAIKLAKDVASLSSQLQDTQELLQEETRQKLNVSTKLRQLEEERNSLQDQLDEEMEAKQNLERHISTLNIQLSDSKKKLQDFASTVEALEEGKKRFQKEIENLTQQYEEKAAAYDKLEKTKNRLQQELDDLVVDLDNQRQLVSNLEKKQRKFDQLLAEEKNISSKYADERDRAEAEAREKETKALSLARALEEALEAKEELERTNKMLKAEMEDLVSSKDDVGKNVHELEKSKRALETQMEEMKTQLEELEDELQATEDAKLRLEVNMQALKGQFERDLQARDEQNEEKRRQLQRQLHEYETELEDERKQRALAAAAKKKLEGDLKDLELQADSAIKGREEAIKQLRKLQAQMKDFQRELEDARASRDEIFATAKENEKKAKSLEADLMQLQEDLAAAERARKQADLEKEELAEELASSLSGRTLQPRTSRLQ

SEQ ID NO: 1442 - protein, 1734 aa, Artificial Sequence; identical to SEQ ID NO: 1441
  Synthetic polypeptide

SEQ ID NO: 1443 - protein, 700 aa, Artificial Sequence
  Synthetic polypeptide
MAQKGQLSDDEKFLFVDKNFINSPVAQADWAAKRLVWVPSEKQGFEAASIKEEKGDEVVVELVENGKKVTVGKDDIQKMNPPKFSKVEDMAELTCLNEASVLHNLRERYFSGLIYTYSGLFCVVVNPYKHLPIYSEKIVDMYKGKKRHEMPPHIYAIADTAYRSMLQDREDQSILCTGESGAGKTENTKKVIQYLAVVASSHKGKKDTSITQGPSFAYGELEKQLLQANPILEAFGNAKTVKNDNSSRFGKFIRINFDVTGYIVGANIETYLLEKSRAIRQARDERTFHIFYYMIAGAKEKMRSDLLLEGFNNYTFLSNGFVPIPAAQDDEMFQETVEAMAIMGFSEEEQLSILKVVSSVLQLGNIVFKKERNTDQASMPDNTAAQKVCHLMGINVTDFTRSILTPRIKVGRDVVQKAQTKEQADFAVEALAKATYERLFRWILTRVNKALDKTHRQGASFLGILDIAGFEIFEVNSFEQLCINYTNEKLQQLFNHTMFILEQEEYQREGIEWNFIDFGLDLQPCIELIERPNNPPGVLALLDEECWFPKATDKSFVEKLCTEQGSHPKFQKPKQLKDKTEFSIIHYAGKVDYNASAWLTKNMDPLNDNVTSLLNASSDKFVADLWKDVDRIVGLDQMAKMTESSLPSASKTKKGMFRTVGQLYKEQLGKLMTTLRNTTPNFVRCIIPNHEKRPRTSRLQ

SEQ ID NO: 1444 - protein, 700 aa, Artificial Sequence; identical to SEQ ID NO: 1443
  Synthetic polypeptide

SEQ ID NO: 1445 - protein, 693 aa, Artificial Sequence
  Synthetic polypeptide
MAQKGQLSDDEKFLFVDKNFINSPVAQADWAAKRLVWVPSEKQGFEAASIKEEKGDEVVVELVENGKKVTVGKDDIQKMNPPKFSKVEDMAELTCLNEASVLHNLRERYFSGLIYTYSGLFCVVVNPYKHLPIYSEKIVDMYKGKKRHEMPPHIYAIADTAYRSMLQDREDQSILCTGESGAGKTENTKKVIQYLAVVASSHKGKKDTSITGELEKQLLQANPILEAFGNAKTVKNDNSSRFGKFIRINFDVTGYIVGANIETYLLEKSRAIRQARDERTFHIFYYMIAGAKEKMRSDLLLEGFNNYTFLSNGFVPIPAAQDDEMFQETVEAMAIMGFSEEEQLSILKVVSSVLQLGNIVFKKERNTDQASMPDNTAAQKVCHLMGINVTDFTRSILTPRIKVGRDVVQKAQTKEQADFAVEALAKATYERLFRWILTRVNKALDKTHRQGASFLGILDIAGFEIFEVNSFEQLCINYTNEKLQQLFNHTMFILEQEEYQREGIEWNFIDFGLDLQPCIELIERPNNPPGVLALLDEECWFPKATDKSFVEKLCTEQGSHPKFQKPKQLKDKTEFSIIHYAGKVDYNASAWLTKNMDPLNDNVTSLLNASSDKFVADLWKDVDRIVGLDQMAKMTESSLPSASKTKKGMFRTVGQLYKEQLGKLMTTLRNTTPNFVRCIIPNHEKRPRTSRLQ

SEQ ID NO: 1446 - protein, 693 aa, Artificial Sequence; identical to SEQ ID NO: 1445
  Synthetic polypeptide

SEQ ID NO: 1447 - protein, 695 aa, Artificial Sequence
  Synthetic polypeptide
MAQKGQLSDDEKFLFVDKNFINSPVAQADWAAKRLVWVPSEKQGFEAASIKEEKGDEVVVELVENGKKVTVGKDDIQKMNPPKFSKVEDMAELTCLNEASVLHNLRERYFSGLIYTYSGLFCVVVNPYKHLPIYSEKIVDMYKGKKRHEMPPHIYAIADTAYRSMLQDREDQSILCTGESGAGKTENTKKVIQYLAVVASSHKGKKDTSITQGPSFAYGELEKQLLQANPILEAFGNAKTVKNDNSSRFGKFIRINFDVTGYIVGANIETYLLEKSRAIRQARDERTFHIFYYMIAGAKEKMRSDLLLEGFNNYTFLSNGFVPIPAAQDDEMFQETVEAMAIMGFSEEEQLSILKVVSSVLQLGNIVFKKERNTDQASMPDNTAAQKVCHLMGINVTDFTRSILTPRIKVGRDVVQKAQTKEQADFAVEALAKATYERLFRWILTRVNKALDKTHRQGASFLGILDIAGFEIFEVNSFEQLCINYTNEKLQQLFNHTMFILEQEEYQREGIEWNFIDFGLDLQPCIELIERPNNPPGVLALLDEECWFPKATDKSFVEKLCTEQGSHPKFQKPKQLKDKTEFSIIHYAGKVDYNASAWLTKNMDPLNDNVTSLLNASSDKFVADLWKDVDRIVGLDQMAKMTESSLPSASKTKKGMFRTVGQLYKEQLGKLMTTLRNTTPNFVRCIIPNHEKRAW

SEQ ID NO: 1448 - protein, 695 aa, Artificial Sequence; identical to SEQ ID NO: 1447
  Synthetic polypeptide

SEQ ID NO: 1449 - protein, 688 aa, Artificial Sequence
  Synthetic polypeptide
MAQKGQLSDDEKFLFVDKNFINSPVAQADWAAKRLVWVPSEKQGFEAASIKEEKGDEVVVELVENGKKVTVGKDDIQKMNPPKFSKVEDMAELTCLNEASVLHNLRERYFSGLIYTYSGLFCVVVNPYKHLPIYSEKIVDMYKGKKRHEMPPHIYAIADTAYRSMLQDREDQSILCTGESGAGKTENTKKVIQYLAVVASSHKGKKDTSITGELEKQLLQANPILEAFGNAKTVKNDNSSRFGKFIRINFDVTGYIVGANIETYLLEKSRAIRQARDERTFHIFYYMIAGAKEKMRSDLLLEGFNNYTFLSNGFVPIPAAQDDEMFQETVEAMAIMGFSEEEQLSILKVVSSVLQLGNIVFKKERNTDQASMPDNTAAQKVCHLMGINVTDFTRSILTPRIKVGRDVVQKAQTKEQADFAVEALAKATYERLFRWILTRVNKALDKTHRQGASFLGILDIAGFEIFEVNSFEQLCINYTNEKLQQLFNHTMFILEQEEYQREGIEWNFIDFGLDLQPCIELIERPNNPPGVLALLDEECWFPKATDKSFVEKLCTEQGSHPKFQKPKQLKDKTEFSIIHYAGKVDYNASAWLTKNMDPLNDNVTSLLNASSDKFVADLWKDVDRIVGLDQMAKMTESSLPSASKTKKGMFRTVGQLYKEQLGKLMTTLRNTTPNFVRCIIPNHEKRAW

SEQ ID NO: 1450 - protein, 688 aa, Artificial Sequence; identical to SEQ ID NO: 1449
  Synthetic polypeptide

SEQ ID NO: 1451 - protein, 586 aa, Artificial Sequence
  Synthetic polypeptide
MALRGFCSADGSDPLWDWNVTWNTSNPDFTKCFQNTVLVWVPCFYLWACFPFYFLYLSRHDRGYIQMTPLNKTKTALGFLLWIVCWADLFYSFWERSRGIFLAPVFLVSPTLLGITMLLATFLIQLERRKGVQSSGIMLTFWLVALVCALAILRSKIMTALKEDAQVDLFRDITFYVYFSLLLIQLVLSCFSDRSPLFSETIHDPNPCPESSASFLSRITFWWITGLIVRGYRQPLEGSDLWSLNKEDTSEQVVPVLVKNWKKECAKTRKQPVKVVYSSKDPAQPKESSKVDANEEVEALIVKSPQKEWNPSLFKVLYKTFGPYFLMSFFFKAIHDLMMFSGPQILKLLIKFVNDTKAPDWQGYFYTVLLFVTACLQTLVLHQYFHICFVSGMRIKTAVIGAVYRKALVITNSARKSSTVGEIVNLMSVDAQRFMDLATYINMIWSAPLQVILALYLLWLNLGPSVLAGVAVMVLMVPVNAVMAMKTKTYQVAHMKSKDNRIKLMNEILNGIKVLKLYAWELAFKDKVLAIRQEELKVLKKSAYLSAVGTFTWVCTPFLDVSSRWAFLSFLLTAVSSVYKTVHSRC

SEQ ID NO: 1452 - protein, 586 aa, Artificial Sequence; identical to SEQ ID NO: 1451
  Synthetic polypeptide

SEQ ID NO: 1453 - protein, 586 aa, Artificial Sequence; identical to SEQ ID NO: 1451
  Synthetic polypeptide

SEQ ID NO: 1454 - protein, 586 aa, Artificial Sequence; identical to SEQ ID NO: 1451
  Synthetic polypeptide

SEQ ID NO: 1455 - protein, 586 aa, Artificial Sequence; identical to SEQ ID NO: 1451
  Synthetic polypeptide

SEQ ID NO: 1456 - protein, 586 aa, Artificial Sequence; identical to SEQ ID NO: 1451
  Synthetic polypeptide

SEQ ID NO: 1457 - protein, 69 aa, Artificial Sequence
  Synthetic polypeptide
GPSVSGQPNSLGHHHAACYLFNSAGEEEGSSVFRDHAHFLAGSPSVCPSHPEIQNYDSLKRGCPGGPVS

SEQ ID NO: 1458 - protein, 1327 aa, Artificial Sequence
  Synthetic polypeptide
MALRGFCSADGSDPLWDWNVTWNTSNPDFTKCFQNTVLVWVPCFYLWACFPFYFLYLSRHDRGYIQMTPLNKTKTALGFLLWIVCWADLFYSFWERSRGIFLAPVFLVSPTLLGITMLLATFLIQLERRKGVQSSGIMLTFWLVALVCALAILRSKIMTALKEDAQVDLFRDITFYVYFSLLLIQLVLSCFSDRSPLFSETIHDPNPCPESSASFLSRITFWWITGLIVRGYRQPLEGSDLWSLNKEDTSEQVVPVLVKNWKKECAKTRKQPVKVVYSSKDPAQPKESSKVDANEEVEALIVKSPQKEWNPSLFKVLYKTFGPYFLMSFFFKAIHDLMMFSGPQILKLLIKFVNDTKAPDWQGYFYTVLLFVTACLQTLVLHQYFHICFVSGMRIKTAVIGAVYRKALVITNSARKSSTVGEIVNLMSVDAQRFMDLATYINMIWSAPLQVILALYLLWLNLGPSVLAGVAVMVLMVPVNAVMAMKTKTYQVAHMKSKDNRIKLMNEILNGIKVLKLYAWELAFKDKVLAIRQEELKVLKKSAYLSAVGTFTWVCTPFLVALCTFAVYVTIDENNILDAQTAFVSLALFNILRFPLNILPMVISSIVQASVSLKRLRIFLSHEELEPDSIERRPVKDGGGTNSITVRNATFTWARSDPPTLNGITFSIPEGALVAVVGQVGCGKSSLLSALLAEMDKVEGHVAIKGSVAYVPQQAWIQNDSLRENILFGCQLEEPYYRSVIQACALLPDLEILPSGDRTEIGEKGVNLSGGQKQRVSLARAVYSNADIYLFDDPLSAVDAHVGKHIFENVIGPKGMLKNKTRILVTHSMSYLPQVDVIIVMSGGKISEMGSYQELLARDGAFAEFLRTYASTEQEQDAEENGVTGVSGPGKEAKQMENGMLVTDSAGKQLQRQLSSSSSYSGDISRHHNSTAELQKAEAKKEETWKLMEADKAQTGQVKLSVYWDYMKAIGLFISFLSIFLFMCNHVSALASNYWLSLWTDDPIVNGTQEHTKVRLSVYGALGISQGIAVFGYSMAVSIGGILASRCLHVDLLHSILRSPMSFFERTPSGNLVNRFSKELDTVDSMIPEVIKMFMGSLFNVIGACIVILLATPIAAIIIPPLGLIYFFVQRFYVASSRQLKRLESVSRSPVYSHFNETLLGVSVIRAFEEQERFIHQSDLKVDENQKAYYPSIVANRWLAVRLECVGNCIVLFAALFAVISRHSLSAGLVGLSVSYSLQVTTYLNWLVRMSSEMETNIVAVERLKEYSETEKEAPWQIQETAPPSSWPQVGRVEFRNYCLRYREDLDFVLRHINVTINGGEKVSSNL

SEQ ID NO: 1459 - protein, 1327 aa, Artificial Sequence; identical to SEQ ID NO: 1458
  Synthetic polypeptide

SEQ ID NO: 1460 - protein, 1271 aa, Artificial Sequence
  Synthetic polypeptide
MALRGFCSADGSDPLWDWNVTWNTSNPDFTKCFQNTVLVWVPCFYLWACFPFYFLYLSRHDRGYIQMTPLNKTKTALGFLLWIVCWADLFYSFWERSRGIFLAPVFLVSPTLLGITMLLATFLIQLERRKGVQSSGIMLTFWLVALVCALAILRSKIMTALKEDAQVDLFRDITFYVYFSLLLIQLVLSCFSDRSPLFSETIHDPNPCPESSASFLSRITFWWITGLIVRGYRQPLEGSDLWSLNKEDTSEQVVPVLVKNWKKECAKTRKQPVKVVYSSKDPAQPKESSKVDANEEVEALIVKSPQKEWNPSLFKVLYKTFGPYFLMSFFFKAIHDLMMFSGPQILKLLIKFVNDTKAPDWQGYFYTVLLFVTACLQTLVLHQYFHICFVSGMRIKTAVIGAVYRKALVITNSARKSSTVGEIVNLMSVDAQRFMDLATYINMIWSAPLQVILALYLLWLNLGPSVLAGVAVMVLMVPVNAVMAMKTKTYQVAHMKSKDNRIKLMNEILNGIKVLKLYAWELAFKDKVLAIRQEELKVLKKSAYLSAVGTFTWVCTPFLVALCTFAVYVTIDENNILDAQTAFVSLALFNILRFPLNILPMVISSIVQASVSLKRLRIFLSHEELEPDSIERRPVKDGGGTNSITVRNATFTWARSDPPTLNGITFSIPEGALVAVVGQVGCGKSSLLSALLAEMDKVEGHVAIKGSVAYVPQQAWIQNDSLRENILFGCQLEEPYYRSVIQACALLPDLEILPSGDRTEIGEKTRILVTHSMSYLPQVDVIIVMSGGKISEMGSYQELLARDGAFAEFLRTYASTEQEQDAEENGVTGVSGPGKEAKQMENGMLVTDSAGKQLQRQLSSSSSYSGDISRHHNSTAELQKAEAKKEETWKLMEADKAQTGQVKLSVYWDYMKAIGLFISFLSIFLFMCNHVSALASNYWLSLWTDDPIVNGTQEHTKVRLSVYGALGISQGIAVFGYSMAVSIGGILASRCLHVDLLHSILRSPMSFFERTPSGNLVNRFSKELDTVDSMIPEVIKMFMGSLFNVIGACIVILLATPIAAIIIPPLGLIYFFVQRFYVASSRQLKRLESVSRSPVYSHFNETLLGVSVIRAFEEQERFIHQSDLKVDENQKAYYPSIVANRWLAVRLECVGNCIVLFAALFAVISRHSLSAGLVGLSVSYSLQVTTYLNWLVRMSSEMETNIVAVERLKEYSETEKEAPWQIQETAPPSSWPQVGRVEFRNYCLRYREDLDFVLRHINVTINGGEKVSSNL

SEQ ID NO: 1461 - protein, 1212 aa, Artificial Sequence
  Synthetic polypeptide
MALRGFCSADGSDPLWDWNVTWNTSNPDFTKCFQNTVLVWVPCFYLWACFPFYFLYLSRHDRGYIQMTPLNKTKTALGFLLWIVCWADLFYSFWERSRGIFLAPVFLVSPTLLGITMLLATFLIQLERRKGVQSSGIMLTFWLVALVCALAILRSKIMTALKEDAQVDLFRDITFYVYFSLLLIQLVLSCFSDRSPLFSETIHDPNPCPESSASFLSRITFWWITGLIVRGYRQPLEGSDLWSLNKEDTSEQVVPVLVKNWKKECAKTRKQPVKVVYSSKDPAQPKESSKVDANEEVEALIVKSPQKEWNPSLFKVLYKTFGPYFLMSFFFKAIHDLMMFSGPQILKLLIKFVNDTKAPDWQGYFYTVLLFVTACLQTLVLHQYFHICFVSGMRIKTAVIGAVYRKALVITNSARKSSTVGEIVNLMSVDAQRFMDLATYINMIWSAPLQVILALYLLWLNLGPSVLAGVAVMVLMVPVNAVMAMKTKTYQVAHMKSKDNRIKLMNEILNGIKVLKLYAWELAFKDKVLAIRQEELKVLKKSAYLSAVGTFTWVCTPFLVALCTFAVYVTIDENNILDAQTAFVSLALFNILRFPLNILPMVISSIVQASVSLKRLRIFLSHEELEPDSIERRPVKDGGGTNSITVRNATFTWARSDPPTLNGITFSIPEGALVAVVGQVGCGKSSLLSALLAEMDKVEGHVAIKTRILVTHSMSYLPQVDVIIVMSGGKISEMGSYQELLARDGAFAEFLRTYASTEQEQDAEENGVTGVSGPGKEAKQMENGMLVTDSAGKQLQRQLSSSSSYSGDISRHHNSTAELQKAEAKKEETWKLMEADKAQTGQVKLSVYWDYMKAIGLFISFLSIFLFMCNHVSALASNYWLSLWTDDPIVNGTQEHTKVRLSVYGALGISQGIAVFGYSMAVSIGGILASRCLHVDLLHSILRSPMSFFERTPSGNLVNRFSKELDTVDSMIPEVIKMFMGSLFNVIGACIVILLATPIAAIIIPPLGLIYFFVQRFYVASSRQLKRLESVSRSPVYSHFNETLLGVSVIRAFEEQERFIHQSDLKVDENQKAYYPSIVANRWLAVRLECVGNCIVLFAALFAVISRHSLSAGLVGLSVSYSLQVTTYLNWLVRMSSEMETNIVAVERLKEYSETEKEAPWQIQETAPPSSWPQVGRVEFRNYCLRYREDLDFVLRHINVTINGGEKVSSNL

SEQ ID NO: 1462 - protein, 1268 aa, Artificial Sequence
  Synthetic polypeptide
MALRGFCSADGSDPLWDWNVTWNTSNPDFTKCFQNTVLVWVPCFYLWACFPFYFLYLSRHDRGYIQMTPLNKTKTALGFLLWIVCWADLFYSFWERSRGIFLAPVFLVSPTLLGITMLLATFLIQLERRKGVQSSGIMLTFWLVALVCALAILRSKIMTALKEDAQVDLFRDITFYVYFSLLLIQLVLSCFSDRSPLFSETIHDPNPCPESSASFLSRITFWWITGLIVRGYRQPLEGSDLWSLNKEDTSEQVVPVLVKNWKKECAKTRKQPVKVVYSSKDPAQPKESSKVDANEEVEALIVKSPQKEWNPSLFKVLYKTFGPYFLMSFFFKAIHDLMMFSGPQILKLLIKFVNDTKAPDWQGYFYTVLLFVTACLQTLVLHQYFHICFVSGMRIKTAVIGAVYRKALVITNSARKSSTVGEIVNLMSVDAQRFMDLATYINMIWSAPLQVILALYLLWLNLGPSVLAGVAVMVLMVPVNAVMAMKTKTYQVAHMKSKDNRIKLMNEILNGIKVLKLYAWELAFKDKVLAIRQEELKVLKKSAYLSAVGTFTWVCTPFLVALCTFAVYVTIDENNILDAQTAFVSLALFNILRFPLNILPMVISSIVQASVSLKRLRIFLSHEELEPDSIERRPVKDGGGTNSITVRNATFTWARSDPPTLNGITFSIPEGALVAVVGQVGCGKSSLLSALLAEMDKVEGHVAIKGVNLSGGQKQRVSLARAVYSNADIYLFDDPLSAVDAHVGKHIFENVIGPKGMLKNKTRILVTHSMSYLPQVDVIIVMSGGKISEMGSYQELLARDGAFAEFLRTYASTEQEQDAEENGVTGVSGPGKEAKQMENGMLVTDSAGKQLQRQLSSSSSYSGDISRHHNSTAELQKAEAKKEETWKLMEADKAQTGQVKLSVYWDYMKAIGLFISFLSIFLFMCNHVSALASNYWLSLWTDDPIVNGTQEHTKVRLSVYGALGISQGIAVFGYSMAVSIGGILASRCLHVDLLHSILRSPMSFFERTPSGNLVNRFSKELDTVDSMIPEVIKMFMGSLFNVIGACIVILLATPIAAIIIPPLGLIYFFVQRFYVASSRQLKRLESVSRSPVYSHFNETLLGVSVIRAFEEQERFIHQSDLKVDENQKAYYPSIVANRWLAVRLECVGNCIVLFAALFAVISRHSLSAGLVGLSVSYSLQVTTYLNWLVRMSSEMETNIVAVERLKEYSETEKEAPWQIQETAPPSSWPQVGRVEFRNYCLRYREDLDFVLRHINVTINGGEKVSSNL

SEQ ID NO: 1463 - protein, 1337 aa, Artificial Sequence
  Synthetic polypeptide
MALRGFCSADGSDPLWDWNVTWNTSNPDFTKCFQNTVLVWVPCFYLWACFPFYFLYLSRHDRGYIQMTPLNKTKTALGFLLWIVCWADLFYSFWERSRGIFLAPVFLVSPTLLGITMLLATFLIQLERRKGVQSSGIMLTFWLVALVCALAILRSKIMTALKEDAQVDLFRDITFYVYFSLLLIQLVLSCFSDRSPLFSETIHDPNPCPESSASFLSRITFWWITGLIVRGYRQPLEGSDLWSLNKEDTSEQVVPVLVKNWKKECAKTRKQPVKVVYSSKDPAQPKESSKVDANEEVEALIVKSPQKEWNPSLFKVLYKTFGPYFLMSFFFKAIHDLMMFSGPQILKLLIKFVNDTKAPDWQGYFYTVLLFVTACLQTLVLHQYFHICFVSGMRIKTAVIGAVYRKALVITNSARKSSTVGEIVNLMSVDAQRFMDLATYINMIWSAPLQVILALYLLWLNLGPSVLAGVAVMVLMVPVNAVMAMKTKTYQVAHMKSKDNRIKLMNEILNGIKVLKLYAWELAFKDKVLAIRQEELKVLKKSAYLSAVGTFTWVCTPFLVALCTFAVYVTIDENNILDAQTAFVSLALFNILRFPLNILPMVISSIVQASVSLKRLRIFLSHEELEPDSIERRPVKDGGGTNSITVRNATFTWARSDPPTLNGITFSIPEGALVAVVGQVGCGKSSLLSALLAEMDKVEGHVAIKGSVAYVPQQAWIQNDSLRENILFGCQLEEPYYRSVIQACALLPDLEILPSGDRTEIGEKGVNLSGGQKQRVSLARAVYSNADIYLFDDPLSAVDAHVGKHIFENVIGPKGMLKNKTRILVTHSMSYLPQVDVIIVMSGGKISEMGSYQELLARDGAFAEFLRTYASTEQEQDAEENGSTVMDEEEAGVTGVSGPGKEAKQMENGMLVTDSAGKQLQRQLSSSSSYSGDISRHHNSTAELQKAEAKKEETWKLMEADKAQTGQVKLSVYWDYMKAIGLFISFLSIFLFMCNHVSALASNYWLSLWTDDPIVNGTQEHTKVRLSVYGALGISQGIAVFGYSMAVSIGGILASRCLHVDLLHSILRSPMSFFERTPSGNLVNRFSKELDTVDSMIPEVIKMFMGSLFNVIGACIVILLATPIAAIIIPPLGLIYFFVQRFYVASSRQLKRLESVSRSPVYSHFNETLLGVSVIRAFEEQERFIHQSDLKVDENQKAYYPSIVANRWLAVRLECVGNCIVLFAALFAVISRHSLSAGLVGLSVSYSLQVTTYLNWLVRMSSEMETNIVAVERLKEYSETEKEAPWQIQETAPPSSWPQVGRVEFRNYCLRYREDLDFVLRHINVTINGGEKVSSNL

SEQ ID NO: 1464 - protein, 69 aa, Artificial Sequence; identical to SEQ ID NO: 1457
  Synthetic polypeptide

SEQ ID NO: 1465 - protein, 1296 aa, Artificial Sequence
  Synthetic polypeptide
MAAPAEPCAGQGVWNQTEPEPAATSLLSLCFLRTAGVWVPPMYLWVLGPIYLLFIHHHGRGYLRMSPLFKAKMVLGFALIVLCTSSVAVALWKIQQGTPEAPEFLIHPTVWLTTMSFAVFLIHTERKKGVQSSGVLFGYWLLCFVLPATNAAQQASGAGFQSDPVRHLSTYLCLSLVVAQFVLSCLADQPPFFPEDPQQSNPCPETGAAFPSKATFWWVSGLVWRGYRRPLRPKDLWSLGRENSSEELVSRLEKEWMRNRSAARRHNKAIAFKRKGGSGMKAPETEPFLRQEGSQWRPLLKAIWQVFHSTFLLGTLSLIISDVFRFTVPKLLSLFLEFIGDPKPPAWKGYLLAVLMFLSACLQTLFEQQNMYRLKVLQMRLRSAITGLVYRKVLALSSGSRKASAVGDVVNLVSVDVQRLTESVLYLNGLWLPLVWIVVCFVYLWQLLGPSALTAIAVFLSLLPLNFFISKKRNHHQEEQMRQKDSRARLTSSILRNSKTIKFHGWEGAFLDRVLGIRGQELGALRTSGLLFSVSLVSFQVSTFLVALVVFAVHTLVAENAMNAEKAFVTLTVLNILNKAQAFLPFSIHSLVQARVSFDRLVTFLCLEEVDPGVVDSSSSGSAAGKDCITIHSATFAWSQESPPCLHRINLTVPQGCLLAVVGPVGAGKSSLLSALLGELSKVEGFVSIEGAVAYVPQEAWVQNTSVVENVCFGQELDPPWLERVLEACALQPDVDSFPEGIHTSIGEQGMNLSGGQKQRLSLARAVYRKAAVYLLDDPLAALDAHVGQHVFNQVIGPGGLLQGTTRILVTHALHILPQADWIIVLANGAIAEMGSYQELLQRKGALMCLLDQARQPGDRGEGETEPGTSTKDPRGTSAGRRPELRRERSIKSVPEKDRTTSEAQTEVPLDDPDRAGWPAGKDSIQYGRVKATVHLAYLRAVGTPLCLYALFLFLCQQVASFCRGYWLSLWADDPAVGGQQTQAALRGGIFGLLGCLQAIGLFASMAAVLLGGARASRLLFQRLLWDVVRSPISFFERTPIGHLLNRFSKETDTVDVDIPDKLRSLLMYAFGLLEVSLVVAVATPLATVAILPLFLLYAGFQSLYVVSSCQLRRLESASYSSVCSHMAETFQGSTVVRAFRTQAPFVAQNNARVDESQRISFPRLVADRWLAANVELLGNGLVFAAATCAVLSKAHLSAGLVGFSVSAALQVTQTLQWVVRNWTDLENSIVSVERMQDYAWTPKEAPWRLPTCAAQPPWPQGGQIEFRDFGLRYRPELPLAVQGVSFKIHAGEKTG

SEQ ID NO: 1466 - protein, 1175 aa, Artificial Sequence
  Synthetic polypeptide
MLVGQGAGPLGPAVVTAAVVLLLSGVGPAHGSEDIVVGCGGFVKSDVEINYSLIEIKLYTKHGTLKYQTDCAPNNGYFMIPLYDKGDFILKIEPPLGWSFEPTTVELHVDGVSDICTKGGDINFVFTGFSVNGKVLSKGQPLGPAGVQVSLRNTGTEAKIQSTVTQPGGKFAFFKVLPGDYEILATHPTWALKEASTTVRVTNSNANAASPLIVAGYNVSGSVRSDGEPMKGVKFLLFSSLVTKEDVLGCNVSPVPGFQPQDESLVYLCYTVSREDGSFSFYSLPSGGYTVIPFYRGERITFDVAPSRLDFTVEHDSLKIEPVFHVMGFSVTGRVLNGPEGDGVPEAVVTLNNQIKVKTKADGSFRLENITTGTYTIHAQKEHLYFETVTIKIAPNTPQLADIVATGFSVCGQISIIRFPDTVKQMNKYKVVLSSQDKDKSLVTVETDAHGSFCFKANPGTYKVQVMVPEAETRAGLTLKPQTFPLTVTDRPVMDVAFVQFLASVSGKVSCLDTCGDLLVTLQSLSRQGEKRSLQLSGKVNAMTFTFDNVLPGKYKISIMHEDWCWKNKSLEVEVLEDDVSAVEFRQTGYMLRCSLSHAITLEFYQDGNGRENVGIYNLSKGVNRFCLSKPGVYKVTPRSCHRFEQAFYTYDTSSPSILTLTAIRHHVLGTITTDKMMDVTVTIKSSIDSEPALVLGPLKSVQELRREQQLAEIEARRQEREKNGNEEGEERMTKPPVQEMVDELQGPFSYDFSYWARSGEKITVTPSSKELLFYPPSMEAVVSGESCPGKLIEIHGKAGLFLEGQIHPELEGVEIVISEKGASSPLITVFTDDKGAYSVGPLHSDLEYTVTSQKEGYVLTAVEGTIGDFKAYALAGVSFEIKAEDDQPLPGVLLSLSGGLFRSNLLTQDNGILTFSNLSPGQYYFKPMMKEFRFEPSSQMIEVQEGQNLKITITGYRTAYSCYGTVSSLNGEPEQGVAMEAVGQNDCSIYGEDTVTDEEGKFRLRGLLPGCVYHVQLKAEGNDHIERALPHHRVIEVGNNDIDDVNIIVFRQINQFDLSGNVITSSEYLPTLWVKLYKSENLDNPIQTVSLGQSLFFHFPPLLRDGENYVVLLDSTLPRSQYDYILPQVSFTAVGYHKHITLIFNPTEIGRTQEHANDSTGMQDNHLEPDLFDK

SEQ ID NO: 1467 - protein, 1175 aa, Artificial Sequence; identical to SEQ ID NO: 1466
  Synthetic polypeptide

SEQ ID NO: 1468 - protein, 1008 aa, Artificial Sequence
  Synthetic polypeptide
MARFAFFKVLPGDYEILATHPTWALKEASTTVRVTNSNANAASPLIVAGYNVSGSVRSDGEPMKGVKFLLFSSLVTKEDVLGCNVSPVPGFQPQDESLVYLCYTVSREDGSFSFYSLPSGGYTVIPFYRGERITFDVAPSRLDFTVEHDSLKIEPVFHVMGFSVTGRVLNGPEGDGVPEAVVTLNNQIKVKTKADGSFRLENITTGTYTIHAQKEHLYFETVTIKIAPNTPQLADIVATGFSVCGQISIIRFPDTVKQMNKYKVVLSSQDKDKSLVTVETDAHGSFCFKANPGTYKVQVMVPEAETRAGLTLKPQTFPLTVTDRPVMDVAFVQFLASVSGKVSCLDTCGDLLVTLQSLSRQGEKRSLQLSGKVNAMTFTFDNVLPGKYKISIMHEDWCWKNKSLEVEVLEDDVSAVEFRQTGYMLRCSLSHAITLEFYQDGNGRENVGIYNLSKGVNRFCLSKPGVYKVTPRSCHRFEQAFYTYDTSSPSILTLTAIRHHVLGTITTDKMMDVTVTIKSSIDSEPALVLGPLKSVQELRREQQLAEIEARRQEREKNGNEEGEERMTKPPVQEMVDELQGPFSYDFSYWARSGEKITVTPSSKELLFYPPSMEAVVSGESCPGKLIEIHGKAGLFLEGQIHPELEGVEIVISEKGASSPLITVFTDDKGAYSVGPLHSDLEYTVTSQKEGYVLTAVEGTIGDFKAYALAGVSFEIKAEDDQPLPGVLLSLSGGLFRSNLLTQDNGILTFSNLSPGQYYFKPMMKEFRFEPSSQMIEVQEGQNLKITITGYRTAYSCYGTVSSLNGEPEQGVAMEAVGQNDCSIYGEDTVTDEEGKFRLRGLLPGCVYHVQLKAEGNDHIERALPHHRVIEVGNNDIDDVNIIVFRQINQFDLSGNVITSSEYLPTLWVKLYKSENLDNPIQTVSLGQSLFFHFPPLLRDGENYVVLLDSTLPRSQYDYILPQVSFTAVGYHKHITLIFNPTEIGRTQEHANDSTGMQDNHLEPDLFDK

SEQ ID NO: 1469 - protein, 17 aa, Artificial Sequence
  Synthetic polypeptide
MFQVPDSEGGRAGSRVQ

SEQ ID NO: 1470 - protein, 17 aa, Artificial Sequence
  Synthetic polypeptide
MFQVPDSEGGRAGSRVQ

SEQ ID NO: 1471 - protein, 17 aa, Artificial Sequence
  Synthetic polypeptide
MFQVPDSEGGRAGSRVQ

SEQ ID NO: 1472 - protein, 17 aa, Artificial Sequence
  Synthetic polypeptide
MFQVPDSEGGRAGSRVQ

SEQ ID NO: 1473 - protein, 17 aa, Artificial Sequence
  Synthetic polypeptide
MFQVPDSEGGRAGSRVQ

SEQ ID NO: 1474 - protein, 17 aa, Artificial Sequence
  Synthetic polypeptide
MFQVPDSEGGRAGSRVQ

SEQ ID NO: 1475 - protein, 67 aa, Artificial Sequence
  Synthetic polypeptide
MFQVPDSEGGRAGSRAMKPPGGESSNLFGSPEEATPSSRPNRMASNIFGPTEEPQNIPKRTNPPGRV

SEQ ID NO: 1476 - protein, 67 aa, Artificial Sequence; identical to SEQ ID NO: 1475
  Synthetic polypeptide

SEQ ID NO: 1477 - protein, 67 aa, Artificial Sequence; identical to SEQ ID NO: 1475
  Synthetic polypeptide

SEQ ID NO: 1478 - protein, 95 aa, Artificial Sequence
  Synthetic polypeptide
MFQVPDSEGGRAGSRKWQLLTGSLASTSPSLLSGQGPWAPLQRAMKPPGGESSNLFGSPEEATPSSRPNRMASNIFGPTEEPQNIPKRTNPPGRV

SEQ ID NO: 1479 - protein, 95 aa, Artificial Sequence; identical to SEQ ID NO: 1478
  Synthetic polypeptide

SEQ ID NO: 1480 - protein, 51 aa, Artificial Sequence
  Synthetic polypeptide
MKPPGGESSNLFGSPEEATPSSRPNRMASNIFGPTEEPQNIPKRTNPPGRV

SEQ ID NO: 1481 - protein, 51 aa, Artificial Sequence; identical to SEQ ID NO: 1480
  Synthetic polypeptide

SEQ ID NO: 1482 - protein, 51 aa, Artificial Sequence; identical to SEQ ID NO: 1480
  Synthetic polypeptide

SEQ ID NO: 1483 - protein, 55 aa, Artificial Sequence
  Synthetic polypeptide
MMRAMKPPGGESSNLFGSPEEATPSSRPNRMASNIFGPTEEPQNIPKRTNPPGRV

SEQ ID NO: 1484 - protein, 32 aa, Artificial Sequence
  Synthetic polypeptide
PSSRPNRMASNIFGPTEEPQNIPKRTNPPGRV

SEQ ID NO: 1485 - protein, 434 aa, Artificial Sequence
  Synthetic polypeptide
MWNFRELSENSQQAANVLSGACGLQRGDRVAVVLPRVPEWWLVILGCIRAGLIFMPGTIQMKSTDILYRLQMSKAKAIVAGDEVIQEVDTVASECPSLRIKLLVSEKSCDGWLNFKKLLNEASTTHHCVETGSQEASAIYFTSGTSGLPKMAEHSYSSLGLKAKMDAGWTGLQASDIMWTISDTGWILNILCSLMEPWALGACTFVHLLPKFDPLVILKTLSSYPIKSMMGAPIVYRMLLQQDLSSYKFPHLQNCVTVGESLLPETLENWRAQTGLDIRESYGQTETGLTCMVSKTMKIKPGYMGTAASCYDVQIIDDKGNVLPPGTEGDIGIRVKPIRPIGIFSGYVDNPDKTAANIRGDFWLLGDRGIKDEDGYFQFMGRANDIINSSGYRIGPSEVENALMEHPAVVETAVISSPDPVRGEQHGENWRSLC

SEQ ID NO: 1486 - protein, 285 aa, Artificial Sequence
  Synthetic polypeptide
MRHPPLITVWRLEAKMDAGWTGLQASDIMWTISDTGWILNILCSLMEPWALGACTFVHLLPKFDPLVILKTLSSYPIKSMMGAPIVYRMLLQQDLSSYKFPHLQNCVTVGESLLPETLENWRAQTGLDIRESYGQTETGLTCMVSKTMKIKPGYMGTAASCYDVQIIDDKGNVLPPGTEGDIGIRVKPIRPIGIFSGYVDNPDKTAANIRGDFWLLGDRGIKDEDGYFQFMGRANDIINSSGYRIGPSEVENALMEHPAVVETAVISSPDPVRGEQHGENWRSLC

SEQ ID NO: 1487 - protein, 513 aa, Artificial Sequence
  Synthetic polypeptide
MHWLRKVQGLCTLWGTQMSSRTLYINSRQLVSLQWGHQEVPAKFNFASDVLDHWADMEKAGKRLPSPALWWVNGKGKELMWNFRELSENSQQAANVLSGACGLQRGDRVAVVLPRVPEWWLVILGCIRAGLIFMPGTIQMKSTDILYRLQMSKAKAIVAGDEVIQEVDTVASECPSLRIKLLVSEKSCDGWLNFKKLLNEASTTHHCVETGSQEASAIYFTSGTSGLPKMAEHSYSSLGLKAKMDAGWTGLQASDIMWTISDTGWILNILCSLMEPWALGACTFVHLLPKFDPLVILKTLSSYPIKSMMGAPIVYRMLLQQDLSSYKFPHLQNCVTVGESLLPETLENWRAQTGLDIRESYGQTETGLTCMVSKTMKIKPGYMGTAASCYDVQIIDDKGNVLPPGTEGDIGIRVKPIRPIGIFSGYVDNPDKTAANIRGDFWLLGDRGIKDEDGYFQFMGRANDIINSSGYRIGPSEVENALMEHPAVVETAVISSPDPVRGEQHGENWRSLC

SEQ ID NO: 1488 - protein, 513 aa, Artificial Sequence; identical to SEQ ID NO: 1487
  Synthetic polypeptide

SEQ ID NO: 1489 - protein, 513 aa, Artificial Sequence; identical to SEQ ID NO: 1487
  Synthetic polypeptide

SEQ ID NO: 1490 - protein, 513 aa, Artificial Sequence; identical to SEQ ID NO: 1487
  Synthetic polypeptide

SEQ ID NO: 1491 - protein, 404 aa, Artificial Sequence
  Synthetic polypeptide
MKLLTRAGSFSRFYSLKVAPKVKATAAPAGAPPQPQDLEFTKLPNGLVIASLENYSPVSRIGLFIKAGSRYEDFSNLGTTHLLRLTSSLTTKGASSFKITRGIEAVGGKLSVTATRENMAYTVECLRGDVDILMEFLLNVTTAPEFRRWEVADLQPQLKIDKAVAFQNPQTHVIENLHAAAYRNALANPLYCPDYRIGKVTSEELHYFVQNHFTSARMALIGLGVSHPVLKQVAEQFLNMRGGLGLSGAKANYRGGEIREQNGDSLVHAAFVAESAVAGSAEANAFSVLQHVLGAGPHVKRGSNTTSHLHQAVAKATQQPFDVSAFNASYSDSGLFGIYTISQATAAGDVIKAAYNQVKTIAQGNLSNTDVQAAKHSGSLIPALWEAKAGGSFETRSLRPAWAT

SEQ ID NO: 1492 - protein, 404 aa, Artificial Sequence; identical to SEQ ID NO: 1491
  Synthetic polypeptide

SEQ ID NO: 1493 - protein, 4 aa, Artificial Sequence
  Synthetic polypeptide
TTAP

SEQ ID NO: 1494 - protein, 2583 aa, Artificial Sequence
  Synthetic polypeptide
MYNGIGLPTPRGSGTNGYVQRNLSLVRGRRGERPDYKGEEELRRLEAALVKRPNPDILDHERKRRVELRCLELEEMMEEQGYEEQQIQEKVATFRLMLLEKDVNPGGKEETPGQRPAVTETHQLAELNEKKNERLRAAFGISDSYVDGSSFDPQRRAREAKQPAPEPPKPYSLVRESSSSRSPTPKQKKKKKKKDRGRRSESSSPRRERKKSSKKKKHRSESESKKRKHRSPTPKSKRKSKDKKRKRSRSTTPAPKSRRAHRSTSADSASSSDTSRSRSRSAAAKTHTTALAGRSPSPASGRRGEGDAPFSEPGTTSTQRPSSPETATKQPSSPYEDKDKDKKEKSATRPSPSPERSSTGPEPPAPTPLLAERHGGSPQPLATTPLSQEPVNPPSEASPTRDRSPPKSPEKLPQSSSSESSPPSPQPTKVSRHASSSPESPKPAPAPGSHREISSSPTSKNRSHGRAKRDKSHSHTPSRRMGRSRSPATAKRGRSRSRTPTKRGHSRSRSPQWRRSRSAQRWGRSRSPQRRGRSRSPQRPGWSRSRNTQRRGRSRSARRGRSHSRSPATRGRSRSRTPARRGRSRSRTPARRRSRSRTPTRRRSRSRTPARRGRSRSRTPARRRSRTRSPVRRRSRSRSPARRSGRSRSRTPARRGRSRSRTPARRGRSRSRTPARRSGRSRSRTPARRGRSRSRTPRRGRSRSRSLVRRGRSHSRTPQRRGRSGSSSERKNKSRTSQRRSRSNSSPEMKKSRISSRRSRSLSSPRSKAKSRLSLRRSLSGSSPCPKQKSQTPPRRSRSGSSQPKAKSRTPPRRSRSSSSPPPKQKSKTPSRQSHSSSSPHPKVKSGTPPRQGSITSPQANEQSVTPQRRSCFESSPDPELKSRTPSRHSCSGSSPPRVKSSTPPRQSPSRSSSPQPKVKAIISPRQRSHSGSSSPSPSRVTSRTTPRRSRSVSPCSNVESRLLPRYSHSGSSSPDTKVKPETPPRQSHSGSISPYPKVKAQTPPGPSLSGSKSPCPQEKSKDSLVQSCPGSLSLCAGVKSSTPPGESYFGVSSLQLKGQSQTSPDHRSDTSSPEVRQSHSESPSLQSKSQTSPKGGRSRSSSPVTELASRSPIRQDRGEFSASPMLKSGMSPEQSRFQSDSSSYPTVDSNSLLGQSRLETAESKEKMALPPQEDATASPPRQKDKFSPFPVQDRPESSLVFKDTLRTPPRERSGAGSSPETKEQNSALPTSSQDEELMEVVEKSEEPAGQILSHLSSELKEMSTSNFESSPEVEERPAVSLTLDQSQSQASLEAVEVPSMASSWGGPHFSPEHKELSNSPLRENSFGSPLEFRNSGPLGTEMNTGFSSEVKEDLNGPFLNQLETDPSLDMKEQSTRSSGHSSSELSPDAVEKAGMSSNQSISSPVLDAVPRTPSRERSSSASSPEMKDGLPRTPSRRSRSGSSPGLRDGSGTPSRHSLSGSSPGMKDIPRTPSRGRSECDSSPEPKALPQTPRPRSRSPSSPELNNKCLTPQRERSGSESSVDQKTVARTPLGQRSRSGSSQELDVKPSASPQERSESDSSPDSKAKTRTPLRQRSRSGSSPEVDSKSRLSPRRSRSGSSPEVKDKPRAAPRAQSGSDSSPEPKAPAPRALPRRSRSGSSSKGRGPSPEGSSSTESSPEHPPKSRTARRGSRSSPEPKTKSRTPPRRRSSRSSPELTRKARLSRRSRSASSSPETRSRTPPRHRRSPSVSSPEPAEKSRSSRRRRSASSPRTKTTSRRGRSPSPKPRGLQRSRSRSRREKTRTTRRRDRSGSSQSTSRRRQRSRSRSRVTRRRRGGSGYHSRSPARQESSRTSSRRRRGRSRTPPTSRKRSRSRTSPAPWKRSRSRASPATHRRSRSRTPLISRRRSRSRTSPVSRRRSRSRTSVTRRRSRSRASPVSRRRSRSRTPPVTRRRSRSRTPTTRRRSRSRTPPVTRRRSRSRTPPVTRRRSRSRTSPITRRRSRSRTSPVTRRRSRSRTSPVTRRRSRSRTSPVTRRRSRSRTPPAIRRRSRSRTPLLPRKRSRSRSPLAIRRRSRSRTPRTARGKRSLTRSPPAIRRRSASGSSSDRSRSATPPATRNHSGSRTPPVALNSSRMSCFSRPSMSPTPLDRCRSPGMLEPLGSSRTPMSVLQQAGGSMMDGPGPRIPDHQRTSVPENHAQSRIALALTAISLGTARPPPSMSAAGLAARMSQVPAPVPLMSLRTAPAANLASRIPAASAAAMNLASARTPAIPTAVNLADSRTPAAAAAMNLASPRTAVAPSAVNLADPRTPTAPAVNLAGARTPAALAALSLTGSGTPPTAANYPSSSRTPQAPASANLVGPRSAHATAPVNIAGSRTAAALAPASLTSARMAPALSGANLTSPRVPLSAYERVSGRTSPPLLDRARSRTPPSAPSQSRMTSERAPSPSSRMGQAPSQSLLPPAQDQPRSPVPSAFSDQSRCLIAQTTPVAGSQSLSSGAVATTTSSAGDHNGMLSVPAPGVPHSDVGEPPASTGAQQPSALAALQPAKERRSSSSSSSSSSSSSSSSSSSSSSSSSGSSSSDSEGSSLPVQPEVALKSRRDGS

SEQ ID NO: 1495 - protein, 2846 aa, Artificial Sequence
  Synthetic polypeptide
MYNGIGLPTPRGSGTNGYVQRNLSLVRGRRGERPDYKGEEELRRLEAALVKRPNPDILDHERKRRVELRCLELEEMMEEQGYEEQQIQEKVATFRLMLLEKDVNPGGKEETPGQRPAVTETHQLAELNEKKNERLRAAFGISDSYVDGSSFDPQRRAREAKQPAPEPPKPYSLVRESSSSRSPTPKQKKKKKKKDRGRRSESSSPRRERKKSSKKKKHRSESESKKRKHRSPTPKSKRKSKDKKRKRSRSTTPAPKSRRAHRSTSADSASSSDTSRSRSRSAAAKTHTTALAGRSPSPASGRRGEGDAPFSEPGTTSTQRPSSPETATKQPSSPYEDKDKDKKEKSATRPSPSPERSSTGPEPPAPTPLLAERHGGSPQPLATTPLSQEPVNPPSEASPTRDRSPPKSPEKLPQSSSSESSPPSPQPTKVSRHASSSPESPKPAPAPGSHREISSSPTSKNRSHGRAKRDKSHSHTPSRRMGRSRSPATAKRGRSRSRTPTKRGHSRSRSPQWRRSRSAQRWGRSRSPQRRGRSRSPQRPGWSRSRNTQRRGRSRSARRGRSHSRSPATRGRSRSRTPARRGRSRSRTPARRRSRSRTPTRRRSRSRTPARRGRSRSRTPARRRSRTRSPVRRRSRSRSPARRSGRSRSRTPARRGRSRSRTPARRGRSRSRTPARRSGRSRSRTPARRGRSRSRTPRRGRSRSRSLVRRGRSHSRTPQRRGRSGSSSERKNKSRTSQRRSRSNSSPEMKKSRISSRRSRSLSSPRSKAKSRLSLRRSLSGSSPCPKQKSQTPPRRSRSGSSQPKAKSRTPPRRSRSSSSPPPKQKSKTPSRQSHSSSSPHPKVKSGTPPRQGSITSPQANEQSVTPQRRSCFESSPDPELKSRTPSRHSCSGSSPPRVKSSTPPRQSPSRSSSPQPKVKAIISPRQRSHSGSSSPSPSRVTSRTTPRRSRSVSPCSNVESRLLPRYSHSGSSSPDTKVKPETPPRQSHSGSISPYPKVKAQTPPGPSLSGSKSPCPQEKSKDSLVQSCPGSLSLCAGVKSSTPPGESYFGVSSLQLKGQSQTSPDHRSDTSSPEVRQSHSESPSLQSKSQTSPKGGRSRSSSPVTELASRSPIRQDRGEFSASPMLKSGMSPEQSRFQSDSSSYPTVDSNSLLGQSRLETAESKEKMALPPQEDATASPPRQKDKFSPFPVQDRPESSLVFKDTLRTPPRERSGAGSSPETKEQNSALPTSSQDEELMEVVEKSEEPAGQILSHLSSELKEMSTSNFESSPEVEERPAVSLTLDQSQSQASLEAVEVPSMASSWGGPHFSPEHKELSNSPLRENSFGSPLEFRNSGPLGTEMNTGFSSEVKEDLNGPFLNQLETDPSLDMKEQSTRSSGHSSSELSPDAVEKAGMSSNQSISSPVLDAVPRTPSRERSSSASSPEMKDGLPRTPSRRSRSGSSPGLRDGSGTPSRHSLSGSSPGMKDIPRTPSRGRSECDSSPEPKALPQTPRPRSRSPSSPELNNKCLTPQRERSGSESSVDQKTVARTPLGQRSRSGSSQELDVKPSASPQERSESDSSPDSKAKTRTPLRQRSRSGSSPEVDSKSRLSPRRSRSGSSPEVKDKPRAAPRAQSGSDSSPEPKAPAPRALPRRSRSGSSSKGRGPSPEGSSSTESSPEHPPKSRTARRGSRSSPEPKTKSRTPPRRRSSRSSPELTRKARLSRRSRSASSSPETRSRTPPRHRRSPSVSSPEPAEKSRSSRRRRSASSPRTKTTSRRGRSPSPKPRGLQRSRSRSRREKTRTTRRRDRSGSSQSTSRRRQRSRSRSRVTRRRRGGSGYHSRSPARQESSRTSSRRRRGRSRTPPTSRKRSRSRTSPAPWKRSRSRASPATHRRSRSRTPLISRRRSRSRTSPVSRRRSRSRTSVTRRRSRSRASPVSRRRSRSRTPPVTRRRSRSRTPTTRRRSRSRTPPVTRRRSRSRTPPVTRRRSRSRTSPITRRRSRSRTSPVTRRRSRSRTSPVTRRRSRSRTSPVTRRRSRSRTPPAIRRRSRSRTPLLPRKRSRSRSPLAIRRRSRSRTPRTARGKRSLTRSPPAIRRRSASGSSSDRSRSATPPATRNHSGSRTPPVALNSSRMSCFSRPSMSPTPLDRCRSPGMLEPLGSSRTPMSVLQQAGGSMMDGPGPRIPDHQRTSVPENHAQSRIALALTAISLGTARPPPSMSAAGLAARMSQVPAPVPLMSLRTAPAANLASRIPAASAAAMNLASARTPAIPTAVNLADSRTPAAAAAMNLASPRTAVAPSAVNLADPRTPTAPAVNLAGARTPAALAALSLTGSGTPPTAANYPSSSRTPQAPASANLVGPRSAHATAPVNIAGSRTAAALAPASLTSARMAPALSGANLTSPRVPLSAYERVSGRTSPPLLDRARSRTPPSAPSQSRMTSERAPSPSSRMGQAPSQSLLPPAQDQPRSPVPSAFSDQSRCLIAQTTPVAGSQSLSSGAVATTTSSAGDHNGMLSVPAPGVPHSDVGEPPASTGAQQPSALAALQPAKERRSSSSSSSSSSSSSSSSSSSSSSSSSGSSSSDSEGSSLPVQPEVALKRVPSPTPAPKEAVREGRPPEPTPAKRKRRSSSSSSSSSSSSSSSSSSSSSSSSSSSSSSSSSSSSSSSSSSPSPAKPGPQALPKPASPKKPPPGERSQRDLSKTHIWLLPSTPQILRDALWPAGQSPTSAGVACEALHQRALPALCSPPARPHTCPVLQPHPAPCSLRRAHAFGHAVPSAWNFLVRLVNSSFCKTPLKTAPSRRLPCPFPALPHVPLPWVPRATHIQPCFPHTGPCVPFFTTELLQGQGLSLSLHPPLHPVPAHWALGG

SEQ ID NO: 1496 - protein, 2753 aa, Artificial Sequence
  Synthetic polypeptide
MYNGIGLPTPRGSGTNGYVQRNLSLVRGRRGERPDYKGEEELRRLEAALVKRPNPDILDHERKRRVELRCLELEEMMEEQGYEEQQIQEKVATFRLMLLEKDVNPGGKEETPGQRPAVTETHQLAELNEKKNERLRAAFGISDSYVDGSSFDPQRRAREAKQPAPEPPKPYSLVRESSSSRSPTPKQKKKKKKKDRGRRSESSSPRRERKKSSKKKKHRSESESKKRKHRSPTPKSKRKSKDKKRKRSRSTTPAPKSRRAHRSTSADSASSSDTSRSRSRSAAAKTHTTALAGRSPSPASGRRGEGDAPFSEPGTTSTQRPSSPETATKQPSSPYEDKDKDKKEKSATRPSPSPERSSTGPEPPAPTPLLAERHGGSPQPLATTPLSQEPVNPPSEASPTRDRSPPKSPEKLPQSSSSESSPPSPQPTKVSRHASSSPESPKPAPAPGSHREISSSPTSKNRSHGRAKRDKSHSHTPSRRMGRSRSPATAKRGRSRSRTPTKRGHSRSRSPQWRRSRSAQRWGRSRSPQRRGRSRSPQRPGWSRSRNTQRRGRSRSARRGRSHSRSPATRGRSRSRTPARRGRSRSRTPARRRSRSRTPTRRRSRSRTPARRGRSRSRTPARRRSRTRSPVRRRSRSRSPARRSGRSRSRTPARRGRSRSRTPARRGRSRSRTPARRSGRSRSRTPARRGRSRSRTPRRGRSRSRSLVRRGRSHSRTPQRRGRSGSSSERKNKSRTSQRRSRSNSSPEMKKSRISSRRSRSLSSPRSKAKSRLSLRRSLSGSSPCPKQKSQTPPRRSRSGSSQPKAKSRTPPRRSRSSSSPPPKQKSKTPSRQSHSSSSPHPKVKSGTPPRQGSITSPQANEQSVTPQRRSCFESSPDPELKSRTPSRHSCSGSSPPRVKSSTPPRQSPSRSSSPQPKVKAIISPRQRSHSGSSSPSPSRVTSRTTPRRSRSVSPCSNVESRLLPRYSHSGSSSPDTKVKPETPPRQSHSGSISPYPKVKAQTPPGPSLSGSKSPCPQEKSKDSLVQSCPGSLSLCAGVKSSTPPGESYFGVSSLQLKGQSQTSPDHRSDTSSPEVRQSHSESPSLQSKSQTSPKGGRSRSSSPVTELASRSPIRQDRGEFSASPMLKSGMSPEQSRFQSDSSSYPTVDSNSLLGQSRLETAESKEKMALPPQEDATASPPRQKDKFSPFPVQDRPESSLVFKDTLRTPPRERSGAGSSPETKEQNSALPTSSQDEELMEVVEKSEEPAGQILSHLSSELKEMSTSNFESSPEVEERPAVSLTLDQSQSQASLEAVEVPSMASSWGGPHFSPEHKELSNSPLRENSFGSPLEFRNSGPLGTEMNTGFSSEVKEDLNGPFLNQLETDPSLDMKEQSTRSSGHSSSELSPDAVEKAGMSSNQSISSPVLDAVPRTPSRERSSSASSPEMKDGLPRTPSRRSRSGSSPGLRDGSGTPSRHSLSGSSPGMKDIPRTPSRGRSECDSSPEPKALPQTPRPRSRSPSSPELNNKCLTPQRERSGSESSVDQKTVARTPLGQRSRSGSSQELDVKPSASPQERSESDSSPDSKAKTRTPLRQRSRSGSSPEVDSKSRLSPRRSRSGSSPEVKDKPRAAPRAQSGSDSSPEPKAPAPRALPRRSRSGSSSKGRGPSPEGSSSTESSPEHPPKSRTARRGSRSSPEPKTKSRTPPRRRSSRSSPELTRKARLSRRSRSASSSPETRSRTPPRHRRSPSVSSPEPAEKSRSSRRRRSASSPRTKTTSRRGRSPSPKPRGLQRSRSRSRREKTRTTRRRDRSGSSQSTSRRRQRSRSRSRVTRRRRGGSGYHSRSPARQESSRTSSRRRRGRSRTPPTSRKRSRSRTSPAPWKRSRSRASPATHRRSRSRTPLISRRRSRSRTSPVSRRRSRSRTSVTRRRSRSRASPVSRRRSRSRTPPVTRRRSRSRTPTTRRRSRSRTPPVTRRRSRSRTPPVTRRRSRSRTSPITRRRSRSRTSPVTRRRSRSRTSPVTRRRSRSRTSPVTRRRSRSRTPPAIRRRSRSRTPLLPRKRSRSRSPLAIRRRSRSRTPRTARGKRSLTRSPPAIRRRSASGSSSDRSRSATPPATRNHSGSRTPPVALNSSRMSCFSRPSMSPTPLDRCRSPGMLEPLGSSRTPMSVLQQAGGSMMDGPGPRIPDHQRTSVPENHAQSRIALALTAISLGTARPPPSMSAAGLAARMSQVPAPVPLMSLRTAPAANLASRIPAASAAAMNLASARTPAIPTAVNLADSRTPAAAAAMNLASPRTAVAPSAVNLADPRTPTAPAVNLAGARTPAALAALSLTGSGTPPTAANYPSSSRTPQAPASANLVGPRSAHATAPVNIAGSRTAAALAPASLTSARMAPALSGANLTSPRVPLSAYERVSGRTSPPLLDRARSRTPPSAPSQSRMTSERAPSPSSRMGQAPSQSLLPPAQDQPRSPVPSAFSDQSRCLIAQTTPVAGSQSLSSGAVATTTSSAGDHNGMLSVPAPGVPHSDVGEPPASTGAQQPSALAALQPAKERRSSSSSSSSSSSSSSSSSSSSSSSSSGSSSSDSEGSSLPVQPEVALKRVPSPTPAPKEAVREGRPPEPTPAKRKRRSSSSSSSSSSSSSSSSSSSSSSSSSSSSSSSSSSSSSSSSSSPSPAKPGPQALPKPASPKKPPPGERSALQSKESPCLWTCCSFCLEFPCPPGELLVLQDSAQNSTFEKTALPLPCLAPCPPPLGPQSHAHPALLPTHGAVRAFLHH

SEQ ID NO: 1497 - protein, 86 aa, Artificial Sequence
  Synthetic polypeptide
MDVFLMIRRHKTTIFTDAKESSTVFELKRIVEGILKRPPDEQRLYKDDQLLDDGKTLGECGFTSQTARPQAPATVGLAFRAEVCCD

SEQ ID NO: 1498 - protein, 86 aa, Artificial Sequence; identical to SEQ ID NO: 1497
  Synthetic polypeptide

SEQ ID NO: 1499 - protein, 81 aa, Artificial Sequence
  Synthetic polypeptide
MIRRHKTTIFTDAKESSTVFELKRIVEGILKRPPDEQRLYKDDQLLDDGKTLGECGFTSQTARPQAPATVGLAFRAEVCCD

SEQ ID NO: 1500 - protein, 108 aa, Artificial Sequence
  Synthetic polypeptide
DVFLMIRRHKTTIFTDAKESSTVFELKRIVEGILKRPPDEQRLYKLLVRSLWDLPHVGPLPRSCFSPQDDQLLDDGKTLGECGFTSQTARPQAPATVGLAFRAEVCCD

SEQ ID NO: 1501 - protein, 90 aa, Artificial Sequence
  Synthetic polypeptide
MDVFLMIRRHKTTIFTDAKESSTVFELKRIVEGILKRPPDEQRLYKDDQLLDDGKTLGECGFTSQTARPQAPATVGLAFRAVVPLEVCCD

SEQ ID NO: 1502 - protein, 90 aa, Artificial Sequence; identical to SEQ ID NO: 1501
  Synthetic polypeptide

SEQ ID NO: 1503 - protein, 85 aa, Artificial Sequence
  Synthetic polypeptide
MIRRHKTTIFTDAKESSTVFELKRIVEGILKRPPDEQRLYKDDQLLDDGKTLGECGFTSQTARPQAPATVGLAFRAVVPLEVCCD

SEQ ID NO: 1504 - protein, 112 aa, Artificial Sequence
  Synthetic polypeptide
DVFLMIRRHKTTIFTDAKESSTVFELKRIVEGILKRPPDEQRLYKLLVRSLWDLPHVGPLPRSCFSPQDDQLLDDGKTLGECGFTSQTARPQAPATVGLAFRAVVPLEVCCD

SEQ ID NO: 1505 - protein, 258 aa, Artificial Sequence
  Synthetic polypeptide
MRGVSCLQVLLLLVLGAAGTQGRKSAACGQPRMSSRIVGGRDGRDGEWPWQASIQHRGAHVCGGSLIAPQWVLTAAHCFPRRALPAEYRVRLGALRLGSTSPRTLSVPVRRVLLPPDYSEDGARGDLALLQLRRPVPLSARVQPVCLPVPGARPPPGTPCRVTGWGSLRPGVPLPEWRPLQGVRVPLLDSRTCDGLYHVGADVPQAERIVLPGSLCAGYPQGHKDACQSDSQHDRDLTPGRSSIAGFEDTGTTAMSGL

SEQ ID NO: 1506 - protein, 258 aa, Artificial Sequence; identical to SEQ ID NO: 1505
  Synthetic polypeptide

SEQ ID NO: 1507 - protein, 247 aa, Artificial Sequence
  Synthetic polypeptide
MRGVSCLQVLLLLVLACGQPRMSSRIVGGRDGRDGEWPWQASIQHRGAHVCGGSLIAPQWVLTAAHCFPRRALPAEYRVRLGALRLGSTSPRTLSVPVRRVLLPPDYSEDGARGDLALLQLRRPVPLSARVQPVCLPVPGARPPPGTPCRVTGWGSLRPGVPLPEWRPLQGVRVPLLDSRTCDGLYHVGADVPQAERIVLPGSLCAGYPQGHKDACQSDSQHDRDLTPGRSSIAGFEDTGTTAMSGL

SEQ ID NO: 1508 - protein, 86 aa, Artificial Sequence
  Synthetic polypeptide
MGARGALLLALLLARAGLRKPESQEAAPLSGPCGRRVITSRIVGGEDAELGRWPWQGSLRLWDSHVCGVSLLSHRWALTAAHCFET

SEQ ID NO: 1509 - protein, 86 aa, Artificial Sequence; identical to SEQ ID NO: 1508
  Synthetic polypeptide

SEQ ID NO: 1510 - protein, 86 aa, Artificial Sequence; identical to SEQ ID NO: 1508
  Synthetic polypeptide

SEQ ID NO: 1511 - protein, 61 aa, Artificial Sequence
  Synthetic polypeptide
CWRCCWLGLDSGSRSRRRRRRYQDHAADGSSRRASWVERTPNSGVGRGRGACACGIPTYAE

SEQ ID NO: 1512 - protein, 12 aa, Artificial Sequence
  Synthetic polypeptide
GACACGIPTYAE

SEQ ID NO: 1513 - protein, 61 aa, Artificial Sequence; identical to SEQ ID NO: 1511
  Synthetic polypeptide

SEQ ID NO: 1514 - protein, 12 aa, Artificial Sequence
  Synthetic polypeptide
GACACGIPTYAE

SEQ ID NO: 1515 - protein, 186 aa, Artificial Sequence
  Synthetic polypeptide
MGARGALLLALLLARAGLRKPESQEAAPLSGPCGRRVITSRIVGGEDAELGRWPWQGSLRLWDSHVCGVSLLSHRWALTAAHCFETDLSDPSGWMVQFGQLTSMPSFWSLQAYYTRYFVSNIYLSPRYLGNSPYDIALVKLSAPVTYTKHIQPICLQASTFEFENRTDCWVTGWGYIKEDEDKRTQ

SEQ ID NO: 1516 - protein, 188 aa, Artificial Sequence
  Synthetic polypeptide
MGARGALLLALLLARAGLRKPESQEAAPLSGPCGRRVITSRIVGGEDAELGRWPWQGSLRLWDSHVCGVSLLSHRWALTAAHCFETYSDLSDPSGWMVQFGQLTSMPSFWSLQAYYTRYFVSNIYLSPRYLGNSPYDIALVKLSAPVTYTKHIQPICLQASTFEFENRTDCWVTGWGYIKEDEDKRTQ

SEQ ID NO: 1517 - protein, 188 aa, Artificial Sequence; identical to SEQ ID NO: 1516
  Synthetic polypeptide

SEQ ID NO: 1518 - protein, 361 aa, Artificial Sequence
  Synthetic polypeptide
MPPPRLLFFLLFLTPMEVRPEEPLVVKVEEGDNAVLQCLKGTSDGPTQQLTWSRESPLKPFLKLSLGLPGLGIHMRPLAIWLFIFNVSQQMGGFYLCQPGPPSEKAWQPGWTVNVEGSGELFRWNVSDLGGLGCGLKNRSSEGPSSPSGKLMSPKLYVWAKDRPEIWEGEPPCLPPRDSLNQSLSQDLTMAPGSTLWLSCGVPPDSVSRGPLSWTHVHPKGPKSLLSLELKDDRPARDMWVMETGLLLPRATAQDAGKYYCHRGNLTMSFHLEITARPVLWHWLLRTGGWKVSAVTLAYLIFCLCSLVGILHLQRALVLRRKRKRMTDPTRRGSLLRLYCFKYCPTSKPSSKATSSVKNSL

SEQ ID NO: 1519 - protein, 361 aa, Artificial Sequence; identical to SEQ ID NO: 1518
  Synthetic polypeptide

SEQ ID NO: 1520 - protein, 361 aa, Artificial Sequence; identical to SEQ ID NO: 1518
  Synthetic polypeptide

SEQ ID NO: 1521 - protein, 743 aa, Artificial Sequence
  Synthetic polypeptide
MKVIVIHRKMFQRAQELRRRAEDYHKCKIPPSARKALCNWVRMAAAEHRHSSGLPYWPYLTAETLKNRMGHQPPPPTQQHSITDNSLSLKTPPECVLTPLPPSADDNLKTPPECVLTPLPPSADDNLKTPPECLLTPLPPSADDNLKTPPECLLTPLPPSADDNLKTPPECLLTPLPPSAPPSAPPSADDNLKTRAECLLHPLPPSADDNLKTPSERQLTPLPPSAPPSADDNIKTPAERLRGPLPPSADDNLKTPSERQLTPLPPSAPPSADDNIKTPAFHPQRMIISRHLPSVSSLPFHPQLHSQQMIISRYLLSVCGFRFHHQPMIISRHLPSVSSLPFHPQLHPQQMIISRHLPSVCGGRFHPQRMIISRHLPSVSSLPFHPQLHPQQMIISRHLPSVCGGRFHPQRMIISRHLPSVSSLPFHPQLHPQQMIISRHLPSVCGGRFHPQRMIISRHLPSVSSLPFHPQLHPQQMIISRHLPSVCGERLRGPLPPSADDNLKTPSERQLTPLPPSAPPSADDNIKTPAERLRGPLPPSADDNLKTPSERQLTPLPPSAPPSADDNIKTPAERLRGPLPPSADDNLKTPSERQLTPLPPSAPPSADDNIKTPAERLRGPLPPSADDNLKTPPLATQEAEAEKPRKPKRQRAAEMEPPPEPKRRRVGDVEPSRKPKRRRAADVEPSSPEPKRRRVGDVEPSRKPKRRRAADVEPSSPEPKRRRVGDVEPSRKPKRRRAADMEP

SEQ ID NO: 1522 - protein, 67 aa, Artificial Sequence
  Synthetic polypeptide
MSANTFGNAGFSVLLPGARLEGRCGPTNARVRCHLAATQEAETRESLEPGKQSELRSHHSTPAWVRE

SEQ ID NO: 1523 - protein, 67 aa, Artificial Sequence; identical to SEQ ID NO: 1522
  Synthetic polypeptide

SEQ ID NO: 1524 - protein, 348 aa, Artificial Sequence
  Synthetic polypeptide
MKEGRGSFSVERGPRKERETAQSGMWKGNSPAGSQGAAMEGTGGELGGQGNWGPEDAPGLLARASLIMLPWPLPLASSALTLLFGALTSLFLWYCYRLGSQDMQALGAGSRAGGVRGGPVGCSEAGGPSPGGPGDPGEGPRTEGLVSRRLRAYARRYSWAGMGRVRRAAQGGPGPGRGPGVLGIQRPGLLFLPDLPSAPFVPRDAQRHDVELLESSFPAILRDFGAVSWDFSGTTPPPRGWSPPLAPGCYQLLLYQAGRCQPSNCRRCPGAYRALRGLRSFMSANTFGNAGFSVLLPGARLEGRCGPTNARVRCHLAATQEAETRESLEPGKQSELRSHHSTPAWVRE

SEQ ID NO: 1525 - protein, 348 aa, Artificial Sequence; identical to SEQ ID NO: 1524
  Synthetic polypeptide

SEQ ID NO: 1526 - protein, 348 aa, Artificial Sequence; identical to SEQ ID NO: 1524
  Synthetic polypeptide

SEQ ID NO: 1527 - protein, 49 aa, Artificial Sequence
  Synthetic polypeptide
MSANTFGNAGFSVLLPGARLEGRCGPTNARVRCHLDNQMQREDLDWTLV

SEQ ID NO: 1528 - protein, 49 aa, Artificial Sequence; identical to SEQ ID NO: 1527
  Synthetic polypeptide

SEQ ID NO: 1529 - protein, 330 aa, Artificial Sequence
  Synthetic polypeptide
MKEGRGSFSVERGPRKERETAQSGMWKGNSPAGSQGAAMEGTGGELGGQGNWGPEDAPGLLARASLIMLPWPLPLASSALTLLFGALTSLFLWYCYRLGSQDMQALGAGSRAGGVRGGPVGCSEAGGPSPGGPGDPGEGPRTEGLVSRRLRAYARRYSWAGMGRVRRAAQGGPGPGRGPGVLGIQRPGLLFLPDLPSAPFVPRDAQRHDVELLESSFPAILRDFGAVSWDFSGTTPPPRGWSPPLAPGCYQLLLYQAGRCQPSNCRRCPGAYRALRGLRSFMSANTFGNAGFSVLLPGARLEGRCGPTNARVRCHLDNQMQREDLDWTLV

SEQ ID NO: 1530 - protein, 330 aa, Artificial Sequence; identical to SEQ ID NO: 1529
  Synthetic polypeptide

SEQ ID NO: 1531 - protein, 330 aa, Artificial Sequence; identical to SEQ ID NO: 1529
  Synthetic polypeptide

SEQ ID NO: 1532 - protein, 87 aa, Artificial Sequence
  Synthetic polypeptide
MSANTFGNAGFSVLLPGARLEGRCGPTNARVRCHLGLKIPPGCELVVGGEPQCWAEGHCLLVDDSFLHTVAHNDNQMQREDLDWTLV

SEQ ID NO: 1533 - protein, 87 aa, Artificial Sequence; identical to SEQ ID NO: 1532
  Synthetic polypeptide

SEQ ID NO: 1534 - protein, 368 aa, Artificial Sequence
  Synthetic polypeptide
MKEGRGSFSVERGPRKERETAQSGMWKGNSPAGSQGAAMEGTGGELGGQGNWGPEDAPGLLARASLIMLPWPLPLASSALTLLFGALTSLFLWYCYRLGSQDMQALGAGSRAGGVRGGPVGCSEAGGPSPGGPGDPGEGPRTEGLVSRRLRAYARRYSWAGMGRVRRAAQGGPGPGRGPGVLGIQRPGLLFLPDLPSAPFVPRDAQRHDVELLESSFPAILRDFGAVSWDFSGTTPPPRGWSPPLAPGCYQLLLYQAGRCQPSNCRRCPGAYRALRGLRSFMSANTFGNAGFSVLLPGARLEGRCGPTNARVRCHLGLKIPPGCELVVGGEPQCWAEGHCLLVDDSFLHTVAHNDNQMQREDLDWTLV

SEQ ID NO: 1535 - protein, 368 aa, Artificial Sequence; identical to SEQ ID NO: 1534
  Synthetic polypeptide

SEQ ID NO: 1536 - protein, 368 aa, Artificial Sequence; identical to SEQ ID NO: 1534
  Synthetic polypeptide

SEQ ID NO: 1537 - protein, 949 aa, Artificial Sequence
  Synthetic polypeptide
MSGPGNKRAAGDGGSGPPEKKLSREEKTTTTLIEPIRLGGISSTEEMDLKVLQFKNKKLAERLEQRQACEDELRERIEKLEKRQATDDATLLIVNRYWAQLDETVEALLRCHESQGELSSAPEAPGTQEGPTCDGTPLPEPGTSELRDPLLMQLRPPLSEPALAFVVALGASSSEEVELELQGRMEFSKAAVSRVVEASDRLQRRVEELCQRVYSRGDSEPLSEAAQAHTRELGRENRRLQDLATQLQEKHHRISLEYSELQDKVTSAETKVLEMETTVEDLQWDIEKLRKREQKLNKHLAEALEQLNSGYYVSGSSSGFQGGQITLSMQKFEMLNAELEENQELANSRMAELEKLQAELQGAVRTNERLKVALRSLPEEVVRETGEYRMLQAQFSLLYNESLQVKTQLDEARGLLLATKNSHLRHIEHMESDELGLQKKLRTEVIQLEDTLAQVRKEYEMLRIEFEQNLAANEQAGPINREMRHLISSLQNHNHQLKGDAQRYKRKLREVQAEIGKLRAQASGSAHSTPNLGHPEDSGVSAPAPGKEEGGPGPVSTPDNRKEMAPVPGTTTTTTSVKKEELVPSEEDFQGITPGAQGPSSRGREPEARPKRELQEREGPSLGPPPVASALSRADREKAKVEETKRKESELLKGLRAELKKAQESQKEMKLLLDMYKSAPKEQRDKVQLMAAERKAKAEVDELRSRIRELEERDRRESKKIADEDALRRIRQAEEQIEHLQRKLGATKQEEEALLSEMDVTGQAFEDMQEQNGRLLQQLREKDDANFKLMSERIKANQIHKLLREEKDELGEQVLGLKSQVDAQLLTVQKLEEKERALQGSLGGVEKELTLRSQALELNKRKAVEAAQLAEDLKVQLEHVQTRLREIQPCLAESRAAREKESFNLKRAQEDISRLRRKLEKQRKVEVYADADEILQEEIKEYKGYGRMR

SEQ ID NO: 1538 - protein, 641 aa, Artificial Sequence
  Synthetic polypeptide
MSGPGNKRAAGDGGSGPPEKKLSREEKTTTTLIEPIRLGGISSTEEMDLKVLQFKNKKLAERLEQRQACEDELRERIEKLEKRQAQFSLLYNESLQVKTQLDEARGLLLATKNSHLRHIEHMESDELGLQKKLRTEVIQLEDTLAQVRKEYEMLRIEFEQNLAANEQAGPINREMRHLISSLQNHNHQLKGDAQRYKRKLREVQAEIGKLRAQASGSAHSTPNLGHPEDSGVSAPAPGKEEGGPGPVSTPDNRKEMAPVPGTTTTTTSVKKEELVPSEEDFQGITPGAQGPSSRGREPEARPKRELQEREGPSLGPPPVASALSRADREKAKVEETKRKESELLKGLRAELKKAQESQKEMKLLLDMYKSAPKEQRDKVQLMAAERKAKAEVDELRSRIRELEERDRRESKKIADEDALRRIRQAEEQIEHLQRKLGATKQEEEALLSEMDVTGQAFEDMQEQNGRLLQQLREKDDANFKLMSERIKANQIHKLLREEKDELGEQVLGLKSQVDAQLLTVQKLEEKERALQGSLGGVEKELTLRSQALELNKRKAVEAAQLAEDLKVQLEHVQTRLREIQPCLAESRAAREKESFNLKRAQEDISRLRRKLEKQRKVEVYADADEILQEEIKEYKGYGRMR

SEQ ID NO: 1539 - protein, 909 aa, Artificial Sequence
  Synthetic polypeptide
MSGPGNKRAAGDGGSGPPEKKLSREEKTTTTLIEPIRLGGISSTEEMDLKVLQFKNKKLAERLEQRQACEDELRERIEKLEKRQATDDATLLIVNRYWAQLDETVEALLRCHESQGELSSAPEAPGTQEGPTCDGTPLPEPGTSELRDPLLMQLRPPLSEPALAFVVALGASSSEEVELELQGRMEFSKAAVSRVVEASDRLQRRVEELCQRVYSRGDSEPLSEAAQAHTRELGRENRRLQDLATQLQEKHHRISLEYSELQDKVTSAETKVLEMETTVEDLQWDIEKLRKREQKLNKHLAEALEQLNSGYYVSGSSSGFQGGQITLSMQKVALRSLPEEVVRETGEYRMLQAQFSLLYNESLQVKTQLDEARGLLLATKNSHLRHIEHMESDELGLQKKLRTEVIQLEDTLAQVRKEYEMLRIEFEQNLAANEQAGPINREMRHLISSLQNHNHQLKGDAQRYKRKLREVQAEIGKLRAQASGSAHSTPNLGHPEDSGVSAPAPGKEEGGPGPVSTPDNRKEMAPVPGTTTTTTSVKKEELVPSEEDFQGITPGAQGPSSRGREPEARPKRELQEREGPSLGPPPVASALSRADREKAKVEETKRKESELLKGLRAELKKAQESQKEMKLLLDMYKSAPKEQRDKVQLMAAERKAKAEVDELRSRIRELEERDRRESKKIADEDALRRIRQAEEQIEHLQRKLGATKQEEEALLSEMDVTGQAFEDMQEQNGRLLQQLREKDDANFKLMSERIKANQIHKLLREEKDELGEQVLGLKSQVDAQLLTVQKLEEKERALQGSLGGVEKELTLRSQALELNKRKAVEAAQLAEDLKVQLEHVQTRLREIQPCLAESRAAREKESFNLKRAQEDISRLRRKLEKQRKVEVYADADEILQEEIKEYKGYGRMR

SEQ ID NO: 1540 - protein, 849 aa, Artificial Sequence
  Synthetic polypeptide
MSGPGNKRAAGDGGSGPPEKKLSREEKTTTTLIEPIRLGGISSTEEMDLKVLQFKNKKLAERLEQRQACEDELRERIEKLEKRQATDDATLLIVNRYWAQLDETVEALLRCHESQGELSSAPEAPGTQEGPTCDGTPLPEPGTSELRDPLLMQLRPPLSEPALAFVVALGASSSEEVELELQGRMEFSKAAVSRVVEASDRLQRRVEELCQRVYSRGDSEPLSEAAQAHTRELGRENRRLQDLATQLQEKHHRISLEYSELQDKVTSAETKVLEMETTVEDLQWDIEKLRKREQKLNKHLAEALEQLNSGYYVSGSSSGFQGGQITLSMQKSDELGLQKKLRTEVIQLEDTLAQVRKEYEMLRIEFEQNLAANEQAGPINREMRHLISSLQNHNHQLKGDAQRYKRKLREVQAEIGKLRAQASGSAHSTPNLGHPEDSGVSAPAPGKEEGGPGPVSTPDNRKEMAPVPGTTTTTTSVKKEELVPSEEDFQGITPGAQGPSSRGREPEARPKRELQEREGPSLGPPPVASALSRADREKAKVEETKRKESELLKGLRAELKKAQESQKEMKLLLDMYKSAPKEQRDKVQLMAAERKAKAEVDELRSRIRELEERDRRESKKIADEDALRRIRQAEEQIEHLQRKLGATKQEEEALLSEMDVTGQAFEDMQEQNGRLLQQLREKDDANFKLMSERIKANQIHKLLREEKDELGEQVLGLKSQVDAQLLTVQKLEEKERALQGSLGGVEKELTLRSQALELNKRKAVEAAQLAEDLKVQLEHVQTRLREIQPCLAESRAAREKESFNLKRAQEDISRLRRKLEKQRKVEVYADADEILQEEIKEYKGYGRMR

SEQ ID NO: 1541 - protein, 69 aa, Artificial Sequence
  Synthetic polypeptide
MCFPKVLSDDMKKLKARMHQAIERFYDKMQNAESGRGQVMSSLAELEDDFKEGYLETVAAYYEEQHPAS

SEQ ID NO: 1542 - protein, 69 aa, Artificial Sequence; identical to SEQ ID NO: 1541
  Synthetic polypeptide

SEQ ID NO: 1543 - protein, 69 aa, Artificial Sequence; identical to SEQ ID NO: 1541
  Synthetic polypeptide

SEQ ID NO: 1544 - protein, 69 aa, Artificial Sequence; identical to SEQ ID NO: 1541
  Synthetic polypeptide

SEQ ID NO: 1545 - protein, 69 aa, Artificial Sequence; identical to SEQ ID NO: 1541
  Synthetic polypeptide

SEQ ID NO: 1546 - protein, 69 aa, Artificial Sequence; identical to SEQ ID NO: 1541
  Synthetic polypeptide

SEQ ID NO: 1547 - protein, 69 aa, Artificial Sequence; identical to SEQ ID NO: 1541
  Synthetic polypeptide

SEQ ID NO: 1548 - protein, 69 aa, Artificial Sequence; identical to SEQ ID NO: 1541
  Synthetic polypeptide

SEQ ID NO: 1549 - protein, 69 aa, Artificial Sequence; identical to SEQ ID NO: 1541
  Synthetic polypeptide

SEQ ID NO: 1550 - protein, 69 aa, Artificial Sequence; identical to SEQ ID NO: 1541
  Synthetic polypeptide

SEQ ID NO: 1551 - protein, 69 aa, Artificial Sequence; identical to SEQ ID NO: 1541
  Synthetic polypeptide

SEQ ID NO: 1552 - protein, 69 aa, Artificial Sequence; identical to SEQ ID NO: 1541
  Synthetic polypeptide

SEQ ID NO: 1553 - protein, 69 aa, Artificial Sequence; identical to SEQ ID NO: 1541
  Synthetic polypeptide

SEQ ID NO: 1554 - protein, 115 aa, Artificial Sequence
  Synthetic polypeptide
MCFPKVLSDDMKKLKARMVMLLPTSAQGLGAWVSACDTEDTVGHLGPWRDKDPALWCQLCLSSQHQAIERFYDKMQNAESGRGQVMSSLAELEDDFKEGYLETVAAYYEEQHPAS

SEQ ID NO: 1555 - protein, 115 aa, Artificial Sequence; identical to SEQ ID NO: 1554
  Synthetic polypeptide

SEQ ID NO: 1556 - protein, 115 aa, Artificial Sequence; identical to SEQ ID NO: 1554
  Synthetic polypeptide

SEQ ID NO: 1557 - protein, 115 aa, Artificial Sequence; identical to SEQ ID NO: 1554
  Synthetic polypeptide

SEQ ID NO: 1558 - protein, 115 aa, Artificial Sequence; identical to SEQ ID NO: 1554
  Synthetic polypeptide

SEQ ID NO: 1559 - protein, 59 aa, Artificial Sequence
  Synthetic polypeptide
MKKLKARMHQAIERFYDKMQNAESGRGQVMSSLAELEDDFKEGYLETVAAYYEEQHPAS

SEQ ID NO: 1560 - protein, 49 aa, Artificial Sequence
  Synthetic polypeptide
MCFPKVLSDDMKKLKARMVMSSLAELEDDFKEGYLETVAAYYEEQHPAS

SEQ ID NO: 1561 - protein, 49 aa, Artificial Sequence; identical to SEQ ID NO: 1560
  Synthetic polypeptide

SEQ ID NO: 1562 - protein, 49 aa, Artificial Sequence; identical to SEQ ID NO: 1560
  Synthetic polypeptide

SEQ ID NO: 1563 - protein, 40 aa, Artificial Sequence
  Synthetic polypeptide
MCFPKVLSDDMKKLKARMDDFKEGYLETVAAYYEEQHPAS

SEQ ID NO: 1564 - protein, 60 aa, Artificial Sequence
  Synthetic polypeptide
MCFPKVLSDDMKKLKARMHQAIERFYDKMQNAESGRGQDDFKEGYLETVAAYYEEQHPAS

SEQ ID NO: 1565 - protein, 60 aa, Artificial Sequence; identical to SEQ ID NO: 1564
  Synthetic polypeptide

SEQ ID NO: 1566 - protein, 93 aa, Artificial Sequence
  Synthetic polypeptide
MCFPKGLGAWVSACDTEDTVGHLGPWRDKDPALWCQLCLSSQHQAIERFYDKMQNAESGRGQVMSSLAELEDDFKEGYLETVAAYYEEQHPAS

SEQ ID NO: 1567 - protein, 106 aa, Artificial Sequence
  Synthetic polypeptide
MCFPKVLSDDMKKLKARMVMLLPTSAQGLGAWVSACDTEDTVGHLGPWRDKDPALWCQLCLSSQHQAIERFYDKMQNAESGRGQDDFKEGYLETVAAYYEEQHPAS

SEQ ID NO: 1568 - protein, 312 aa, Artificial Sequence
  Synthetic polypeptide
MNIQEQGFPLDLGASFTEDAPRPPVPGEEGELVSTDPRPASYSFCSGKGVGIKGETSTATPRRSDLDLGYEPEGSASPTPPYLKWAESLHSLLDDQDGISLFRTFLKQEGCADLLDFWFACTGFRKLEPCDSNEEKRLKLARAIYRKYILDNNGIVSRQTKPATKSFIKGCIMKQLIDPAMFDQAQTEIQATMEENTYPSFLKSDIYLEYTRTGSESPKVCSDQSSGSGTGKGISGYLPTLNEDEEWKCDQDMDEDDGRDAAPPGRLPQKLLLETAAPRVSSSRRYSEGREFRGRKWKAKNTPKKARKSKRK

SEQ ID NO: 1569 - protein, 312 aa, Artificial Sequence; identical to SEQ ID NO: 1568
  Synthetic polypeptide

SEQ ID NO: 1570 - protein, 16 aa, Artificial Sequence
  Synthetic polypeptide
MPGMAACACSPSYSGG

SEQ ID NO: 1571 - protein, 16 aa, Artificial Sequence
  Synthetic polypeptide
MPGMAACACSPSYSGG

SEQ ID NO: 1572 - protein, 16 aa, Artificial Sequence
  Synthetic polypeptide
MPGMAACACSPSYSGG

SEQ ID NO: 1573 - protein, 16 aa, Artificial Sequence
  Synthetic polypeptide
MPGMAACACSPSYSGG

SEQ ID NO: 1574 - protein, 11 aa, Artificial Sequence
  Synthetic polypeptide
DPRPRGQEVGV

SEQ ID NO: 1575 - protein, 822 aa, Artificial Sequence
  Synthetic polypeptide
MNRFRVSKFRHTEARPPRRESWISDIRAGTAPSCRNHIKSSCSLIAFNSDRPGVLGIVPLQGQGEDKRRVAHLGCHSDLVTDLDFSPFDDFLLATGSADRTVKLWRLPGPGQALPSAPGVVLGPEDLPVEVLQFHPTSDGILVSAAGTTVKVWDAAKQQPLTELAAHGDLVQSAVWSRDGALVGTACKDKQLRIFDPRTKPRASQSTQAHENSRDSRLAWMGTWEHLVSTGFNQMREREVKLWDTRFFSSALASLTLDTSLGCLVPLLDPDSGLLVLAGKGERQLYCYEVVPQQPALSPVTQCVLESVLRGAALVPRQALAVMSCEVLRVLQLSDTAIVPIGYHVPRKAVEFHEDLFPDTAGCVPATDPHSWWAGDNQQVQKVSLNPACRPHPSFTSCLVPPAEPLPDTAQPAVMETPVGDADASEGFSSPPSSLTSPSTPSSLGPSLSSTSGIGTSPSLRSLQSLLGPSSKFRHAQGTVLHRDSHITNLKGLNLTTPGESDGFCANKLRVAVPLLSSGGQVAVLELRKPGRLPDTALPTLQNGAAVTDLAWDPFDPHRLAVAGEDARIRLWRVPAEGLEEVLTTPETVLTGHTEKICSLRFHPLAANVLASSSYDLTVRIWDLQAGADRLKLQGHQDQIFSLAWSPDGQQLATVCKDGRVRVYRPRSGPEPLQEGPGPKGGRGARIVWVCDGRCLLVSGFDSQSERQLLLYEAEALAGGPLAVLGLDVAPSTLLPSYDPDTGLVLLTGKGDTRVFLYELLPESPFFLECNSFTSPDPHKAGYGGLESQHFGRLRQENCLSPGVQDQPGQHSKTPSLQNKQK

SEQ ID NO: 1576 - protein, 822 aa, Artificial Sequence; identical to SEQ ID NO: 1575
  Synthetic polypeptide

SEQ ID NO: 1577 - protein, 602 aa, Artificial Sequence
  Synthetic polypeptide
MGTWEHLVSTGFNQMREREVKLWDTRFFSSALASLTLDTSLGCLVPLLDPDSGLLVLAGKGERQLYCYEVVPQQPALSPVTQCVLESVLRGAALVPRQALAVMSCEVLRVLQLSDTAIVPIGYHVPRKAVEFHEDLFPDTAGCVPATDPHSWWAGDNQQVQKVSLNPACRPHPSFTSCLVPPAEPLPDTAQPAVMETPVGDADASEGFSSPPSSLTSPSTPSSLGPSLSSTSGIGTSPSLRSLQSLLGPSSKFRHAQGTVLHRDSHITNLKGLNLTTPGESDGFCANKLRVAVPLLSSGGQVAVLELRKPGRLPDTALPTLQNGAAVTDLAWDPFDPHRLAVAGEDARIRLWRVPAEGLEEVLTTPETVLTGHTEKICSLRFHPLAANVLASSSYDLTVRIWDLQAGADRLKLQGHQDQIFSLAWSPDGQQLATVCKDGRVRVYRPRSGPEPLQEGPGPKGGRGARIVWVCDGRCLLVSGFDSQSERQLLLYEAEALAGGPLAVLGLDVAPSTLLPSYDPDTGLVLLTGKGDTRVFLYELLPESPFFLECNSFTSPDPHKAGYGGLESQHFGRLRQENCLSPGVQDQPGQHSKTPSLQNKQK

SEQ ID NO: 1578 - protein, 804 aa, Artificial Sequence
  Synthetic polypeptide
MNRFRVSKFRHTEARPPRRESWISDIRAGTAPSCRNHIKSSCSLIAFNSDRPGVLGIVPLQGQGEDKRRVAHLGCHSGSADRTVKLWRLPGPGQALPSAPGVVLGPEDLPVEVLQFHPTSDGILVSAAGTTVKVWDAAKQQPLTELAAHGDLVQSAVWSRDGALVGTACKDKQLRIFDPRTKPRASQSTQAHENSRDSRLAWMGTWEHLVSTGFNQMREREVKLWDTRFFSSALASLTLDTSLGCLVPLLDPDSGLLVLAGKGERQLYCYEVVPQQPALSPVTQCVLESVLRGAALVPRQALAVMSCEVLRVLQLSDTAIVPIGYHVPRKAVEFHEDLFPDTAGCVPATDPHSWWAGDNQQVQKVSLNPACRPHPSFTSCLVPPAEPLPDTAQPAVMETPVGDADASEGFSSPPSSLTSPSTPSSLGPSLSSTSGIGTSPSLRSLQSLLGPSSKFRHAQGTVLHRDSHITNLKGLNLTTPGESDGFCANKLRVAVPLLSSGGQVAVLELRKPGRLPDTALPTLQNGAAVTDLAWDPFDPHRLAVAGEDARIRLWRVPAEGLEEVLTTPETVLTGHTEKICSLRFHPLAANVLASSSYDLTVRIWDLQAGADRLKLQGHQDQIFSLAWSPDGQQLATVCKDGRVRVYRPRSGPEPLQEGPGPKGGRGARIVWVCDGRCLLVSGFDSQSERQLLLYEAEALAGGPLAVLGLDVAPSTLLPSYDPDTGLVLLTGKGDTRVFLYELLPESPFFLECNSFTSPDPHKAGYGGLESQHFGRLRQENCLSPGVQDQPGQHSKTPSLQNKQK

SEQ ID NO: 1579 - protein, 737 aa, Artificial Sequence
  Synthetic polypeptide
MNRFRVSKFRHTEARPPRRESWISDIRAGTAPSCRNHIKSSCSLIAFNSDRPGVLGIVPLQGQGEDKRRVAHLGCHSELAAHGDLVQSAVWSRDGALVGTACKDKQLRIFDPRTKPRASQSTQAHENSRDSRLAWMGTWEHLVSTGFNQMREREVKLWDTRFFSSALASLTLDTSLGCLVPLLDPDSGLLVLAGKGERQLYCYEVVPQQPALSPVTQCVLESVLRGAALVPRQALAVMSCEVLRVLQLSDTAIVPIGYHVPRKAVEFHEDLFPDTAGCVPATDPHSWWAGDNQQVQKVSLNPACRPHPSFTSCLVPPAEPLPDTAQPAVMETPVGDADASEGFSSPPSSLTSPSTPSSLGPSLSSTSGIGTSPSLRSLQSLLGPSSKFRHAQGTVLHRDSHITNLKGLNLTTPGESDGFCANKLRVAVPLLSSGGQVAVLELRKPGRLPDTALPTLQNGAAVTDLAWDPFDPHRLAVAGEDARIRLWRVPAEGLEEVLTTPETVLTGHTEKICSLRFHPLAANVLASSSYDLTVRIWDLQAGADRLKLQGHQDQIFSLAWSPDGQQLATVCKDGRVRVYRPRSGPEPLQEGPGPKGGRGARIVWVCDGRCLLVSGFDSQSERQLLLYEAEALAGGPLAVLGLDVAPSTLLPSYDPDTGLVLLTGKGDTRVFLYELLPESPFFLECNSFTSPDPHKAGYGGLESQHFGRLRQENCLSPGVQDQPGQHSKTPSLQNKQK

SEQ ID NO: 1580 - protein, 4 aa, Artificial Sequence
  Synthetic polypeptide
MQPK

SEQ ID NO: 1581 - protein, 134 aa, Artificial Sequence
  Synthetic polypeptide
MKMLQAPESVLAEHYQDLRRKPFYPALIRYMSSGPVVAMVWEGYNVVRASRAMIGHTDSAEAAPGTIRGDFSVHISRNVIHASDSVEGAQREIQLWFQSSELEQWLTPVIPALWEAEAGRSPEVRSSRPAWPTW

SEQ ID NO: 1582 - protein, 134 aa, Artificial Sequence; identical to SEQ ID NO: 1581
  Synthetic polypeptide

SEQ ID NO: 1583 - protein, 204 aa, Artificial Sequence
  Synthetic polypeptide
MGGLFWRSALRGLRCGPRAPGPSLLVRHGSGGPSWTRERTLVAVKPDGVQRRLVGDVIQRFERRGFTLVGMKMLQAPESVLAEHYQDLRRKPFYPALIRYMSSGPVVAMVWEGYNVVRASRAMIGHTDSAEAAPGTIRGDFSVHISRNVIHASDSVEGAQREIQLWFQSSELEQWLTPVIPALWEAEAGRSPEVRSSRPAWPTW

SEQ ID NO: 1584 - protein, 204 aa, Artificial Sequence; identical to SEQ ID NO: 1583
  Synthetic polypeptide

SEQ ID NO: 1585 - protein, 212 aa, Artificial Sequence
  Synthetic polypeptide
MGGLFWRSALRGLRCGPRAPGPSLLVRHGSGLPPSALKRGPSWTRERTLVAVKPDGVQRRLVGDVIQRFERRGFTLVGMKMLQAPESVLAEHYQDLRRKPFYPALIRYMSSGPVVAMVWEGYNVVRASRAMIGHTDSAEAAPGTIRGDFSVHISRNVIHASDSVEGAQREIQLWFQSSELEQWLTPVIPALWEAEAGRSPEVRSSRPAWPTW

SEQ ID NO: 1586 - protein, 85 aa, Artificial Sequence
  Synthetic polypeptide
MGKLHSKPAAVCKRRESPEGDSFAVSAAWARKGIEEWIGRQRCPGGVSGPRQLRLAGTIGRSTRETIAIKDGREKMNQNGCFLKN

SEQ ID NO: 1587 - protein, 108 aa, Artificial Sequence
  Synthetic polypeptide
MGKLHSKPAAVCKRRESPEGDSFAVSAAWARKGIEEWIGRQRCPGGVSGPRQLRLAGTIGRSTRELVGDVLRDTLSEEEEDDFRLEATVWLGRLCTAQGFPAKQASNR

SEQ ID NO: 1588 - protein, 168 aa, Artificial Sequence
  Synthetic polypeptide
MGKLHSKPAAVCKRRESPEGDSFAVSAAWARKGIEEWIGRQRCPGGVSGPRQLRLAGTIGRSTRELVGDVLRDTLSEEEEDDFRLEVALPPEKTDGLGSGDEKKMERVSEPCPGSKKQLKFEELQCDVSMEEDSRQEWTFTLYDFDNNGKVTREDLLPNEPQTSRFLP

SEQ ID NO: 1589 - protein, 297 aa, Artificial Sequence
  Synthetic polypeptide
MGKLHSKPAAVCKRRESPEGDSFAVSAAWARKGIEEWIGRQRCPGGVSGPRQLRLAGTIGRSTRELVGDVLRDTLSEEEEDDFRLEVALPPEKTDGLGSGDEKKMERVSEPCPGSKKQLKFEELQCDVSMEEDSRQEWTFTLYDFDNNGKVTREDITSLLHTIYEVVDSSVNHSPTSSKMLRVKLTVAPDGSQSKRSVLVNQADLQSARPRAETKPTEDLRSWEKKQRAPLRFQGDSRLEQSGCYHHCVDENIERRNHYLDLAGIENYTSQFGPDVMAGIPVTILDHEDNTLEMWSG

SEQ ID NO: 1590 - protein, 32 aa, Artificial Sequence
  Synthetic polypeptide
MDVRFYPAAAGDPASLDFAQCLGYYGYSKFSS

SEQ ID NO: 1591 - protein, 32 aa, Artificial Sequence; identical to SEQ ID NO: 1590
  Synthetic polypeptide

SEQ ID NO: 1592 - protein, 1835 aa, Artificial Sequence
  Synthetic polypeptide
MDPVGLQLGNKNLWSCLVRLLTKDPEWLNAKMKFFLPNTDLDSRNETLDPEQRVILQLNKLHVQGSDTWQSFIHCVCMQLEVPLDLEVLLLSTFGYDDGFTSQLGAEGKSQPESQLHHGLKRPHQSCGSSPRRKQCKKQQLELAKKYLQLLRTSAQQRYRSQIPGSGQPHAFHQVYVPPILRRATASLDTPEGAIMGDVKVEDGADVSISDLFNTRVNKGPRVTVLLGKAGMGKTTLAHRLCQKWAEGHLNCFQALFLFEFRQLNLITRFLTPSELLFDLYLSPESDHDTVFQYLEKNADQVLLIFDGLDEALQPMGPDGPGPVLTLFSHLCNGTLLPGCRVMATSRPGKLPACLPAEAAMVHMLGFDGPRVEEYVNHFFSAQPSREGALVELQTNGRLRSLCAVPALCQVACLCLHHLLPDHAPGQSVALLPNMTQLYMQMVLALSPPGHLPTSSLLDLGEVALRGLETGKVIFYAKDIAPPLIAFGATHSLLTSFCVCTGPGHQQTGYAFTHLSLQEFLAALHLMASPKVNKDTLTQYVTLHSRWVQRTKARLGLSDHLPTFLAGLASCTCRPFLSHLAQGNEDCVGAKQAAVVQVLKKLATRKLTGPKVVELCHCVDETQEPELASLTAQSLPYQLPFHNFPLTCTDLATLTNILEHREAPIHLDFDGCPLEPHCPEALVGCGQIENLSFKSRKCGDAFAEALSRSLPTMGRLQMLGLAGSKITARGISHLVKALPLCPQLKEVSFRDNQLSDQVVLNIVEVLPHLPRLRKLDLSSNSICVSTLLCLARVAVTCPTVRMLQAREADLIFLLSPPTETTAELQRAPDLQESDGQRKGAQSRSLTLRLQKCQLQVHDAEALIALLQEGPHLEEVDLSGNQLEDEGCRLMAEAASQLHIARKLDLSNNGLSVAGVHCVLRAVSACWTLAELHISLQHKTVIFMFAQEPEEQKGPQERAAFLDSLMLQMPSELPLSSRRMRLTHCGLQEKHLEQLCKALGGSCHLGHLHLDFSGNALGDEGAARLAQLLPGLGALQSLNLSENGLSLDAVLGLVRCFSTLQWLFRLDISFESQHILLRGDKTSRDMWATGSLPDFPAAAKFLGFRQRCIPRSLCLSECPLEPPSLTRLCATLKDCPGPLELQLSCEFLSDQSLETLLDCLPQLPQLSLLQLSQTGLSPKSPFLLANTLSLCPRVKKVDLRSLHHATLHFRSNEEEEGVCCGRFTGCSLSQEHVESLCWLLSKCKDLSQVDLSANLLGDSGLRCLLECLPQVPISGLLDLSHNSISQESALYLLETLPSCPRVREASVNLGSEQSFRIHFSREDQAGKTLRLSECSFRPEHVSRLATGLSKSLQLTELTLTQCCLGQKQLAILLSLVGRPAGLFSLRVQEPWADRARVLSLLEVCAQASGSVTEISISETQQQLCVQLEFPRQEENPEAVALRLAHCDLGAHHSLLVGQLMETCARLQQLSLSQVNLCEDDDASSLLLQSLLLSLSELKTFRLTSSCVSTEGLAHLASGLGHCHHLEELDLSNNQFDEEGTKALMRALEGKWMLKRLDLSHLLLNSSTLALLTHRLSQMTCLQSLRLNRNSIGDVGCCHLSEALRAATSLEELDLSHNQIGDAGVQHLATILPGLPELRKIDLSGNSISSAGGVQLAESLVLCRRLEELMLGCNALGDPTALGLAQELPQHLRVLHLPFSHLGPGGALSLAQALDGSPHLEEISLAENNLAGGVLRFCMELPLLRQIDLVSCKIDNQTAKLLTSSFTSCPALEVILLSWNLLGDEAAAELAQVLPQMGRLKRVDLEKNQITALGAWLLAEGLAQGSSIQVIRLPICR

SEQ ID NO: 1593 - protein, 1806 aa, Artificial Sequence
  Synthetic polypeptide
MDPVGLQLGNKNLWSCLVRLLTKDPEWLNAKMKFFLPNTDLDSRNETLDPEQRVILQLNKLHVQGSDTWQSFIHCVCMQLEVPLDLEVLLLSTFGYDDGFTSQLGAEGKSQPESQLHHGLKRPHQSCGSSPRRKQCKKQQLELAKKYLQLLRTSAQQRYRSQIPGSGQPHAFHQVYVPPILRRATASLDTPEGAIMGDVKVEDGADVSISDLFNTRVNKGPRVTVLLGKAGMGKTTLAHRLCQKWAEGHLNCFQALFLFEFRQLNLITRFLTPSELLFDLYLSPESDHDTVFQYLEKNADQVLLIFDGLDEALQPMGPDGPGPVLTLFSHLCNGTLLPGCRVMATSRPGKLPACLPAEAAMVHMLGFDGPRVEEYVNHFFSAQPSREGALVELQTNGRLRSLCAVPALCQVACLCLHHLLPDHAPGQSVALLPNMTQLYMQMVLALSPPGHLPTSSLLDLGEVALRGLETGKVIFYAKDIAPPLIAFGATHSLLTSFCVCTGPGHQQTGYAFTHLSLQEFLAALHLMASPKVNKDTLTQYVTLHSRWVQRTKARLGLSDHLPTFLAGLASCTCRPFLSHLAQGNEDCVGAKQAAVVQVLKKLATRKLTGPKVVELCHCVDETQEPELASLTAQSLPYQLPFHNFPLTCTDLATLTNILEHREAPIHLDFDGCPLEPHCPEALVGCGQIENLSFKSRKCGDAFAEALSRSLPTMGRLQMLGLAGSKITARGISHLVKALPLCPQLKEVSFRDNQLSDQVVLNIVEVLPHLPRLRKLDLSSNSICVSTLLCLARVAVTCPTVRMLQAREADLIFLLSPPTETTAELQRAPDLQESDGQRKGAQSRSLTLRLQKCQLQVHDAEALIALLQEGPHLEEVDLSGNQLEDEGCRLMAEAASQLHIARKLDLSNNGLSVAGVHCVLRAVSACWTLAELHISLQHKTVIFMFAQEPEEQKGPQERAAFLDSLMLQMPSELPLSSRRMRLTHCGLQEKHLEQLCKALGGSCHLGHLHLDFSGNALGDEGAARLAQLLPGLGALQSLNLSENGLSLDAVLGLVRCFSTLQWLFRLDISFESQHILLRGDKTSRDMWATGSLPDFPAAAKFLGFRQRCIPRSLCLSECPLEPPSLTRLCATLKDCPGPLELQLSCEFLSDQSLETLLDCLPQLPQLSLLQLSQTGLSPKSPFLLANTLSLCPRVKKVDLRSLHHATLHFRSNEEEEGVCCGLSANLLGDSGLRCLLECLPQVPISGLLDLSHNSISQESALYLLETLPSCPRVREASVNLGSEQSFRIHFSREDQAGKTLRLSECSFRPEHVSRLATGLSKSLQLTELTLTQCCLGQKQLAILLSLVGRPAGLFSLRVQEPWADRARVLSLLEVCAQASGSVTEISISETQQQLCVQLEFPRQEENPEAVALRLAHCDLGAHHSLLVGQLMETCARLQQLSLSQVNLCEDDDASSLLLQSLLLSLSELKTFRLTSSCVSTEGLAHLASGLGHCHHLEELDLSNNQFDEEGTKALMRALEGKWMLKRLDLSHLLLNSSTLALLTHRLSQMTCLQSLRLNRNSIGDVGCCHLSEALRAATSLEELDLSHNQIGDAGVQHLATILPGLPELRKIDLSGNSISSAGGVQLAESLVLCRRLEELMLGCNALGDPTALGLAQELPQHLRVLHLPFSHLGPGGALSLAQALDGSPHLEEISLAENNLAGGVLRFCMELPLLRQIDLVSCKIDNQTAKLLTSSFTSCPALEVILLSWNLLGDEAAAELAQVLPQMGRLKRVDLEKNQITALGAWLLAEGLAQGSSIQVIRLPICR

SEQ ID NO: 1594 - protein, 1806 aa, Artificial Sequence; identical to SEQ ID NO: 1593
  Synthetic polypeptide

SEQ ID NO: 1595 - protein, 779 aa, Artificial Sequence
  Synthetic polypeptide
MGLPRGPLASLLLLQVCWLQCAASEPCRAVFREAEVTLEAGGAEQEPGQALGKVFMGCPGQEPALFSTDNDDFTVRNGETVQERRSLKERNPLKIFPSKRILRRHKRDWVVAPISVPENGKGPFPQRLNQLKSNKDRDTKIFYSITGPGADSPPEGVFAVEKETGWLLLNKPLDREEIAKYELFGHAVSENGASVEDPMNISIIVTDQNDHKPKFTQDTFRGSVLEGVLPGTSVMQVTATDEDDAIYTYNGVVAYSIHSQEPKDPHDLMFTIHRSTGTISVISSGLDREKVPEYTLTIQATDMDGDGSTTTAVAVVEILDANDNAPMFDPQKYEAHVPENAVGHEVQRLTVTDLDAPNSPAWRATYLIMGGDDGDHFTITTHPESNQGILTTRKGLDFEAKNQHTLYVEVTNEAPFVLKLPTSTATIVVHVEDVNEAPVFVPPSKVVEVQEGIPTGEPVCVYTAEDPDKENQKISYRILRDPAGWLAMDPDSGQVTAVGTLDREDEQFVRNNIYEVMVLAMDNGSPPTTGTGTLLLTLIDVNDHGPVPEPRQITICNQSPVRQVLNITDKDLSPHTSPFQAQLTDDSDIYWTAEVNEEGDTVVLSLKKFLKQDTYDVHLSLSDHGNKEQLTVIRATVCDCHGHVETCPGPWKGGFILPVLGAVLALLFLLLVLLLLVRKKRKIKEPLLLPEDDTRDNVFYYGEEGGGEEDQDYDITQLHRGLEARPEVVLRNDVAPTIIPTPMYRPRPANPDEIGNFIIESWDTCLLPLNIRTPGSLAF

SEQ ID NO: 1596 - protein, 779 aa, Artificial Sequence; identical to SEQ ID NO: 1595
  Synthetic polypeptide

SEQ ID NO: 1597 - protein, 724 aa, Artificial Sequence
  Synthetic polypeptide
MGCPGQEPALFSTDNDDFTVRNGETVQERRSLKERNPLKIFPSKRILRRHKRDWVVAPISVPENGKGPFPQRLNQLKSNKDRDTKIFYSITGPGADSPPEGVFAVEKETGWLLLNKPLDREEIAKYELFGHAVSENGASVEDPMNISIIVTDQNDHKPKFTQDTFRGSVLEGVLPGTSVMQVTATDEDDAIYTYNGVVAYSIHSQEPKDPHDLMFTIHRSTGTISVISSGLDREKVPEYTLTIQATDMDGDGSTTTAVAVVEILDANDNAPMFDPQKYEAHVPENAVGHEVQRLTVTDLDAPNSPAWRATYLIMGGDDGDHFTITTHPESNQGILTTRKGLDFEAKNQHTLYVEVTNEAPFVLKLPTSTATIVVHVEDVNEAPVFVPPSKVVEVQEGIPTGEPVCVYTAEDPDKENQKISYRILRDPAGWLAMDPDSGQVTAVGTLDREDEQFVRNNIYEVMVLAMDNGSPPTTGTGTLLLTLIDVNDHGPVPEPRQITICNQSPVRQVLNITDKDLSPHTSPFQAQLTDDSDIYWTAEVNEEGDTVVLSLKKFLKQDTYDVHLSLSDHGNKEQLTVIRATVCDCHGHVETCPGPWKGGFILPVLGAVLALLFLLLVLLLLVRKKRKIKEPLLLPEDDTRDNVFYYGEEGGGEEDQDYDITQLHRGLEARPEVVLRNDVAPTIIPTPMYRPRPANPDEIGNFIIESWDTCLLPLNIRTPGSLAF

SEQ ID NO: 1598 - protein, 36 aa, Artificial Sequence
  Synthetic polypeptide
MAMSKPALDPGREVSSSLCWGLSWLCCSSCWCCFCW

SEQ ID NO: 1599 - protein, 52 aa, Artificial Sequence
  Synthetic polypeptide
VVLRNDVAPTIIPTPMYRPRPANPDEIGNFIIESWDTCLLPLNIRTPGSLAF

SEQ ID NO: 1600 - protein, 523 aa, Artificial Sequence
  Synthetic polypeptide
MGPWSRSLSALLLLLQVSSWLCQEPEPCHPGFDAESYTFTVPRRHLERGRVLGRVNFEDCTGRQRTAYFSLDTRFKVGTDGVITVKRPLRFHNPQIHFLVYAWDSTYRKFSTKVTLNTVGHHHRPPPHQASVSGIQAELLTFPNSSPGLRRQKRDWVIPPISCPENEKGPFPKNLVQIKSNKDKEGKVFYSITGQGADTPPVGVFIIERETGWLKVTEPLDRERIATYTLFSHAVSSNGNAVEDPMEILITVTDQNDNKPEFTQEVFKGSVMEGALPGTSVMEVTATDADDDVNTYNAAIAYTILSQDPELPDKNMFTINRNTGVISVVTTGLDRESFPTYTLVVQAADLQGEGLSTTATAVITVTDTNDNPPIFNPTTYKGQVPENEANVVITTLKVTDADAPNTPAWEAVYTILNDDGGQFVVTTNPVNNDGILKTAKGLDFEAKQQYILHVAVTNVVPFEVSLTTSTATVTVDVLDVNEAPIFVPPEKRVEVSEDFGVGQEITSYTAQEPDTFMEQKITL

SEQ ID NO: 1601 - protein, 523 aa, Artificial Sequence; identical to SEQ ID NO: 1600
  Synthetic polypeptide

SEQ ID NO: 1602 - protein, 462 aa, Artificial Sequence
  Synthetic polypeptide
MGPWSRSLSALLLLLQVSSWLCQEPEPCHPGFDAESYTFTVPRRHLERGRVLGRVNFEDCTGRQRTAYFSLDTRFKVGTDGVITVKRPLRFHNPQIHFLVYAWDSTYRKFSTKVTLNTVGHHHRPPPHQASVSGIQAELLTFPNSSPGLRRQKRDWVIPPISCPENEKGPFPKNLVQIKSNKDKEGKVFYSITGQGADTPPVGVFIIERETGWLKVTEPLDRERIATYTLFSHAVSSNGNAVEDPMEILITVTDQNDNKPEFTQEVFKGSVMEGALPGTSVMEVTATDADDDVNTYNAAIAYTILSQDPELPDKNMFTINRNTGVISVVTTGLDRESFPTYTLVVQAADLQGEGLSTTATAVITVTDTNDNPPIFNPTTGLDFEAKQQYILHVAVTNVVPFEVSLTTSTATVTVDVLDVNEAPIFVPPEKRVEVSEDFGVGQEITSYTAQEPDTFMEQKITL

SEQ ID NO: 1603 - protein, 1 aa, Artificial Sequence
  Synthetic peptide
R

SEQ ID NO: 1604 - protein, 202 aa, Artificial Sequence
  Synthetic polypeptide
MAAGAGTAGPASGPGVVRDPAASQPRKRPGREGGEGARRSDTMAGGGGSSDGSGRAAGRRASRSSGRARRGRHEPGLGGPAERGAGEARLEEAVNRWVLKFYFHEALRAFRGSRYGDFRQIRDIMQALLVRPLGKEHTVSRLLRVMQCLSRIEEGENLDCSFDMEAELTPLESAINVLEMIKTEFTLTEAVVESSRKLVKEA

SEQ ID NO: 1605 - protein, 202 aa, Artificial Sequence; identical to SEQ ID NO: 1604
  Synthetic polypeptide

SEQ ID NO: 1606 - protein, 160 aa, Artificial Sequence
  Synthetic polypeptide
MAGGGGSSDGSGRAAGRRASRSSGRARRGRHEPGLGGPAERGAGEARLEEAVNRWVLKFYFHEALRAFRGSRYGDFRQIRDIMQALLVRPLGKEHTVSRLLRVMQCLSRIEEGENLDCSFDMEAELTPLESAINVLEMIKTEFTLTEAVVESSRKLVKEA

SEQ ID NO: 1607 - protein, 81 aa, Artificial Sequence
  Synthetic polypeptide
MSSLPALLVRPLGKEHTVSRLLRVMQCLSRIEEGENLDCSFDMEAELTPLESAINVLEMIKTEFTLTEAVVESSRKLVKEA

SEQ ID NO: 1608 - protein, 39 aa, Artificial Sequence
  Synthetic polypeptide
MEAELTPLESAINVLEMIKTEFTLTEAVVESSRKLVKEA

SEQ ID NO: 1609 - protein, 57 aa, Artificial Sequence
  Synthetic polypeptide
MQCLSRIEEGENLDCSFDMEAELTPLESAINVLEMIKTEFTLTEAVVESSRKLVKEA

SEQ ID NO: 1610 - protein, 1049 aa, Artificial Sequence
  Synthetic polypeptide
MKDEAGERDREVSSLNSKLLSLQLDIKNLHDVCKRQRKTLQDNQLCMEEAMNSSHDKKQAQALAFEESEVEFGSSKQCHLRQLQQLKKKLLVLQQELEFHTEELQTSYYSLRQYQSILEKQTSDLVLLHHHCKLKEDEVILYEEEMGNHNENTGEKLHLAQEQLALAGDKIASLERSLNLYRDKYQSSLSNIELLECQVKMLQGELGGIMGQEPENKGDHSKVRIYTSPCMIQEHQETQKRLSEVWQKVSQQDDLIQELRNKLACSNALVLEREKALIKLQADFASCTATHRYPPSSSEECEDIKKILKHLQEQKDSQCLHVEEYQNLVKDLRVELEAVSEQKRNIMKDMMKLELDLHGLREETSAHIERKDKDITILQCRLQELQLEFTETQKLTLKKDKFLQEKDEMLQELEKKLTQVQNSLLKKEKELEKQQCMATELEMTVKEAKQDKSKEAECKALQAEVQKLKNSLEEAKQQERLAGEAPAAQQAAQCKEEAALAGCHLEDTQRKLQKGLLLDKQKADTIQELQRELQMLQKESSMAEKEQTSNRKRVEELSLELSEALRKLENSDKEKRQLQKTVAEQDMKMNDMLDRIKHQHREQGSIKCKLEEDLQEATKLLEDKREQLKKSKEHEKLMEGELEALRQEFKKKDKTLKENSRKLEEENENLRAELQCCSTQLESSLNKYNTSQQVIQDLNKEIALQKESLMSLQAQLDKALQKEKHYLQTTITKEAYDALSRKSAACQDDLTQALEKLNHVTSETKSLQQSLTQTQEKKAQLEEEIIAYEERMKKLNTELRKLRGFHQESELEVHAFDKKLEEMSCQVLQWQKQHQNDLKMLAAKEEQLREFQEEMAALKENLLEDDKEPCCLPQWSVPKDTCRLYRGNDQIMTNLEQWAKQQKVANEKLGNQLREQVKYIAKLSGEKDHLHSVMVHLQQENKKLKKEIEEKKMKAENTRLCTKALGPSRTESTQREKVCGTLGWKGLPQDMGQRMDLTKYIGMPHCPEIGKLNLKLTWNLKGSQQPKQSQKRRTKLKNLLTSKLTTNLQ

SEQ ID NO: 1611 - protein, 1044 aa, Artificial Sequence
  Synthetic polypeptide
MKDEAGERDREVSSLNSKLLSLQLDIKNLHDVCKRQRKTLQDNQLCMEEAMNSSHDKKQAQALAFEESEVEFGSSKQCHLRQLQQLKKKLLVLQQELEFHTEELQTSYYSLRQYQSILEKQTSDLVLLHHHCKLKEDEVILYEEEMGNHNENTGEKLHLAQEQLALAGDKIASLERSLNLYRDKYQSSLSNIELLECQVKMLQGELGGIMGQEPENKGDHSKVRIYTSPCMIQEHQETQKRLSEVWQKVSQQDDLIQELRNKLACSNALVLEREKALIKLQADFASCTATHRYPPSSSEECEDIKKILKHLQEQKDSQCLHVEEYQNLVKDLRVELEAVSEQKRNIMKDMMKLELDLHGLREETSAHIERKDKDITILQCRLQELQLEFTETQKLTLKKDKFLQEKDEMLQELEKKLTQVQNSLLKKEKELEKQQCMATELEMTVKEAKQDKSKEAECKALQAEVQKLKNSLEEAKQQERLAAQQAAQCKEEAALAGCHLEDTQRKLQKGLLLDKQKADTIQELQRELQMLQKESSMAEKEQTSNRKRVEELSLELSEALRKLENSDKEKRQLQKTVAEQDMKMNDMLDRIKHQHREQGSIKCKLEEDLQEATKLLEDKREQLKKSKEHEKLMEGELEALRQEFKKKDKTLKENSRKLEEENENLRAELQCCSTQLESSLNKYNTSQQVIQDLNKEIALQKESLMSLQAQLDKALQKEKHYLQTTITKEAYDALSRKSAACQDDLTQALEKLNHVTSETKSLQQSLTQTQEKKAQLEEEIIAYEERMKKLNTELRKLRGFHQESELEVHAFDKKLEEMSCQVLQWQKQHQNDLKMLAAKEEQLREFQEEMAALKENLLEDDKEPCCLPQWSVPKDTCRLYRGNDQIMTNLEQWAKQQKVANEKLGNQLREQVKYIAKLSGEKDHLHSVMVHLQQENKKLKKEIEEKKMKAENTRLCTKALGPSRTESTQREKVCGTLGWKGLPQDMGQRMDLTKYIGMPHCPEIGKLNLKLTWNLKGSQQPKQSQKRRTKLKNLLTSKLTTNLQ

SEQ ID NO: 1612 - protein, 919 aa, Artificial Sequence
  Synthetic polypeptide
MGNHNENTGEKLHLAQEQLALAGDKIASLERSLNLYRDKYQSSLSNIELLECQVKMLQGELGGIMGQEPENKGDHSKVRIYTSPCMIQEHQETQKRLSEVWQKVSQQDDLIQELRNKLACSNALVLEREKALIKLQADFASCTATHRYPPSSSEECEDIKKILKHLQEQKDSQCLHVEEYQNLVKDLRVELEAVSEQKRNIMKDMMKLELDLHGLREETSAHIERKDKDITILQCRLQELQLEFTETQKLTLKKDKFLQEKDEMLQELEKKLTQVQNSLLKKEKELEKQQCMATELEMTVKEAKQDKSKEAECKALQAEVQKLKNSLEEAKQQERLAAQQAAQCKEEAALAGCHLEDTQRKLQKGLLLDKQKADTIQELQRELQMLQKESSMAEKEQTSNRKRVEELSLELSEALRKLENSDKEKRQLQKTVAEQDMKMNDMLDRIKHQHREQGSIKCKLEEDLQEATKLLEDKREQLKKSKEHEKLMEGELEALRQEFKKKDKTLKENSRKLEEENENLRAELQCCSTQLESSLNKYNTSQQVIQDLNKEIALQKESLMSLQAQLDKALQKEKHYLQTTITKEAYDALSRKSAACQDDLTQALEKLNHVTSETKSLQQSLTQTQEKKAQLEEEIIAYEERMKKLNTELRKLRGFHQESELEVHAFDKKLEEMSCQVLQWQKQHQNDLKMLAAKEEQLREFQEEMAALKENLLEDDKEPCCLPQWSVPKDTCRLYRGNDQIMTNLEQWAKQQKVANEKLGNQLREQVKYIAKLSGEKDREPTRASSPNTTRPSSPSHSHLHSVMVHLQQENKKLKKEIEEKKMKAENTRLCTKALGPSRTESTQREKVCGTLGWKGLPQDMGQRMDLTKYIGMPHCPEIGKLNLKLTWNLKGSQQPKQSQKRRTKLKNLLTSKLTTNLQ

SEQ ID NO: 1613 - protein, 188 aa, Artificial Sequence
  Synthetic polypeptide
MAFLWLLSCWALLGTTFGCGVPAIHPVLSGLSRIVNGEDAVPGSWPWQVSLQDKTGFHFCGGSLISEDWVVTAAHCGVRTSDVVVAGEFDQGSDEENIQVLKIAKVFKNPKFSILTVNNDITLLKLATPARFSQTVSAVCLPSADDDFPAGTLTRRSGEDHHLQAKERGLRRNNPANTLISAAMPLEL

SEQ ID NO: 1614 - protein, 101 aa, Artificial Sequence
  Synthetic polypeptide
EFDQGSDEENIQVLKIAKVFKNPKFSILTVNNDITLLKLATPARFSQTVSAVCLPSADDDFPAGTLTRRSGEDHHLQAKERGLRRNNPANTLISAAMPLEL

SEQ ID NO: 1615 - protein, 136 aa, Artificial Sequence
  Synthetic polypeptide
DKTGFHFCGGSLISEDWVVTAAHCGVRTSDVVVAGEFDQGSDEENIQVLKIAKVFKNPKFSILTVNNDITLLKLATPARFSQTVSAVCLPSADDDFPAGTLTRRSGEDHHLQAKERGLRRNNPANTLISAAMPLEL

SEQ ID NO: 1616 - protein, 104 aa, Artificial Sequence
  Synthetic polypeptide
VAGEFDQGSDEENIQVLKIAKVFKNPKFSILTVNNDITLLKLATPARFSQTVSAVCLPSADDDFPAGTLTRRSGEDHHLQAKERGLRRNNPANTLISAAMPLEL

SEQ ID NO: 1617 - protein, 114 aa, Artificial Sequence
  Synthetic polypeptide
MAALRYAGLDDTDSEDELPPGWEERTTKDGWVYYANHTEEKTQWEHPKTGKRKRVAGDLPYGWEQETDENGQVFFVEAEKKMLTYAAFSLCFGYLKGKGPLSCNHVTCFTLSIT

SEQ ID NO: 1618 - protein, 114 aa, Artificial Sequence; identical to SEQ ID NO: 1617
  Synthetic polypeptide

SEQ ID NO: 1619 - protein, 114 aa, Artificial Sequence; identical to SEQ ID NO: 1617
  Synthetic polypeptide

SEQ ID NO: 1620 - protein, 114 aa, Artificial Sequence; identical to SEQ ID NO: 1617
  Synthetic polypeptide

SEQ ID NO: 1621 - protein, 114 aa, Artificial Sequence; identical to SEQ ID NO: 1617
  Synthetic polypeptide

SEQ ID NO: 1622 - protein, 114 aa, Artificial Sequence; identical to SEQ ID NO: 1617
  Synthetic polypeptide

SEQ ID NO: 1623 - protein, 1095 aa, Artificial Sequence
  Synthetic polypeptide
MGEDSPVAMFSWYLDNTPTEQAEPLLDACRLRGFWPRSLTLLQSNTSTLLLNSSFLQSRGEVIRIRATALTRHAYGEDTYVISTVPPREVPACTIAPEEGTVLTSFAIFCNASTALGPLEFCFCLESGSCLHCGPEPALPSVYLPLGEENNDFVLTVVISATNRAGDTQQTQAMAKVALGDTCVEDVAFQAAVSEKIPTALQGEGGPEQLLQLAKAVSSMLNQEHESQGSGQSLSIDVRQKVREHVLGSLSAVTTGLEDVQRVQELAEVLREVTCRSKELTPSAQWEASLALQHASEALLTVSAKARPEDQRRQAATRDLFQAVGSVLEASLSNRPEEPAEASSSQIATVLRLLRVMEHVQTTLLLGKLPGGLPAMLATPSISVYTNRIQPWSWQGSSLRPDAADSATFMLPAASSLSSLEGGQEPVDIKIMSFPKSPFPARSHFDVSGTVGGLRVTSPSGQLIPVKNLSENIEILLPRHSQRHSQPTVLNLTSPEALWVNVTSGEATLGIQLHWRPDIALTLSLGYGYHPNKSSYDAQTHLVPMVAPDELPTWILSPQDLRFGEGVYYLTVVPESDLEPAPGRDLTVGITTFLSHCVFWDEVQETWDDSGCQVGPRTSPYQTHCLCNHLTFFGSTFLVMSNAINIHQTAELFATFEDNPVVVTTVGCLCVVYVLVVIWARRKDAQDQAKVKVTVLEDNDPFAQYHYLVTVYTGHRRGAATSSKVTVTLYGLDGEREPHHLADPDTPVFERGAVDAFLLSTLFPLGELRSLRLWHDNSGDRPSWYVSRVLVYDLVMDRKWYFLCNSWLSINVGDCVLDKVFPVATEQDRKQFSHLFFMKTSAGFQDGHIWYSIFSRCARSSFTRVQRVSCCFSLLLCTMLTSIMFWGVPKDPAEQKMDLGKIEFTWQEVMIGLESSILMFPINLLIVQIFQNTRPRVAKEQNTGKWDRGSPNLTPSPQPMEDGLLTPEAVTKDVSRIVSSLFKALKVPSPALGWDSVNLMDINSLLALVEDVIYPQNTSGQVFWEEAKKREDPVTLTLGSSEMKEKSQCPKPKAARSGPWKDSAYRQCLYLQLEHVEQELRLVGPRGFSQPHSHA

SEQ ID NO: 1624 - protein, 1780 aa, Artificial Sequence
  Synthetic polypeptide
MSAVGLVLLVLALRLRATTVKPEEGSFCSNSQVAFRDACYEFVPLGRTFRDAQSWCEGQGGHLVFIQDEGTQWFLQKHISQDREWWIGLTWNLARNGTTEGPGTWLDTSNVTYSNWHGGQAAAAPDTCGHIGRGPSSEWVTSDCAQTFAFMCEFRVGQSLACEGLNATVHCGLGQVIQVQDAVYGRQNPHFCTQDAGRPSDLEQGCSWANVKEEVAGQCQELQSCQVAADETYFGNLCPTQGSYLWVQYQCREALQLMVSSESFIFDNVTISLTWLLSPYIGNLSCIISTGDSHTFDPYNPPSVSSNVTHQFTSPGEFTVFAECTTSEWHVTAQRQVTVRDKMETLSVTACSGLSQSGAGPLCQAVFGDPLWIQVELDGGTGVTYTVLLGDITLAESTTQKGSLPYNLILDRETQKLMGPGRHRLEIQATGNTTTSTISRNITVHLVELLSGLQASWASDHLELGQDLLITISLAQGTPEELTFEVAGLNATFSHEQVSFGEPFGICRLAVPVEGTFLVTMLVRNAFSNLSLEIGNITITAPSGLQEPSGMNAEGKSKDKGDMEVYIQPGPYVDPFTTVTLGWPDNDKELRFQWSCGSCWALWSSCVERQLLRTDQRELVVPASCLPPPDSAVTLRLAVLRGQELENRAEQCLYVSAPWELRPRVSCERNCRPVNASKDILLRVTMGEDSPVAMFSWYLDNTPTEQAEPLLDACRLRGFWPRSLTLLQSNTSTLLLNSSFLQSRGEVIRIRATALTRHAYGEDTYVISTVPPREVPACTIAPEEGTVLTSFAIFCNASTALGPLEFCFCLESGSCLHCGPEPALPSVYLPLGEENNDFVLTVVISATNRAGDTQQTQAMAKVALGDTCVEDVAFQAAVSEKIPTALQGEGGPEQLLQLAKAVSSMLNQEHESQGSGQSLSIDVRQKVREHVLGSLSAVTTGLEDVQRVQELAEVLREVTCRSKELTPSAQWEASLALQHASEALLTVSAKARPEDQRRQAATRDLFQAVGSVLEASLSNRPEEPAEASSSQIATVLRLLRVMEHVQTTLLLGKLPGGLPAMLATPSISVYTNRIQPWSWQGSSLRPDAADSATFMLPAASSLSSLEGGQEPVDIKIMSFPKSPFPARSHFDVSGTVGGLRVTSPSGQLIPVKNLSENIEILLPRHSQRHSQPTVLNLTSPEALWVNVTSGEATLGIQLHWRPDIALTLSLGYGYHPNKSSYDAQTHLVPMVAPDELPTWILSPQDLRFGEGVYYLTVVPESDLEPAPGRDLTVGITTFLSHCVFWDEVQETWDDSGCQVGPRTSPYQTHCLCNHLTFFGSTFLVMSNAINIHQTAELFATFEDNPVVVTTVGCLCVVYVLVVIWARRKDAQDQAKVKVTVLEDNDPFAQYHYLVTVYTGHRRGAATSSKVTVTLYGLDGEREPHHLADPDTPVFERGAVDAFLLSTLFPLGELRSLRLWHDNSGDRPSWYVSRVLVYDLVMDRKWYFLCNSWLSINVGDCVLDKVFPVATEQDRKQFSHLFFMKTSAGFQDGHIWYSIFSRCARSSFTRVQRVSCCFSLLLCTMLTSIMFWGVPKDPAEQKMDLGKIEFTWQEVMIGLESSILMFPINLLIVQIFQNTRPRVAKEQNTGKWDRGSPNLTPSPQPMEDGLLTPEAVTKDVSRIVSSLFKALKVPSPALGWDSVNLMDINSLLALVEDVIYPQNTSGQVFWEEAKKREDPVTLTLGSSEMKEKSQCPKPKAARSGPWKDSAYRQCLYLQLEHVEQELRLVGPRGFSQPHSHA

SEQ ID NO: 1625 - protein, 1095 aa, Artificial Sequence; identical to SEQ ID NO: 1623
  Synthetic polypeptide

SEQ ID NO: 1626 - protein, 1780 aa, Artificial Sequence; identical to SEQ ID NO: 1624
  Synthetic polypeptide

SEQ ID NO: 1627 - protein, 1260 aa, Artificial Sequence
  Synthetic polypeptide
MSTTVNVDSLAEYEKSQIKRALELGTVMTVFSFRKSTPERRTVQVIMETRQVAWSKTADKIEGFLDIMEIKEIRPGKNSKDFERAKAVRQKEDCCFTILYGTQFVLSTLSLAADSKEDAVNWLSGLKILHQEAMNASTPTIIESWLRKQIYSVDQTRRNSISLRELKTILPLINFKVSSAKFLKDKFVEIGAHKDELSFEQFHLFYKKLMFEQQKSILDEFKKDSSVFILGNTDRPDASAVYLHDFQRFLIHEQQEHWAQDLNKVRERMTKFIDDTMRETAEPFLFVDEFLTYLFSRENSIWDEKYDAVDMQDMNNPLSHYWISSSHNTYLTGDQLRSESSPEAYIRCLRMGCRCIELDCWDGPDGKPVIYHGWTRTTKIKFDDVVQAIKDHAFVTSSFPVILSIEEHCSVEQQRHMAKAFKEVFGDLLLTKPTEASADQLPSPSQLREKIIIKHKKLGPRGDVDVNMEDKKDEHKQQGELYMWDSIDQKWTRHYCAIADAKLSFSDDIEQTMEEEVPQDIPPTELHFGEKWFHKKVEKRTSAEKLLQEYCMETGGKDGTFLVRESETFPNDYTLSFWRSGRVQHCRIRSTMEGGTLKYYLTDNLTFSSIYALIQHYRETHLRCAEFELRLTDPVPNPNPHESKPWYYDSLSRGEAEDMLMRIPRDGAFLIRKREGSDSYAITFRARGKVKHCRINRDGRHFVLGTSAYFESLVELVSYYEKHSLYRKMRLRYPVTPELLERYNMERDINSLYDVSRMYVDPSEINPSMPQRTVKALYDYKAKRSDELSFCRGALIHNVSKEPGGWWKGDYGTRIQQYFPSNYVEDISTADFEELEKQIIEDNPLGSLCRGILDLNTYNVVKAPQGKNQKSFVFILEPKQQGDPPVEFATDRVEELFEWFQSIREITWKIDTKENNMKYWEKNQSIAIELSDLVVYCKPTSKTKDNLENPDFREIRSFVETKADSIIRQKPVDLLKYNQKGLTRVYPKGQRVDSSNYDPFRLWLCGSQMVALNFQTADKYMQMNHALFSLNGRTGYVLQPESMRTEKYDPMPPESQRKILMTLTVKVLGARHLPKLGRSIACPFVEVEICGAEYDNNKFKTTVVNDNGLSPIWAPTQEKVTFEIYDPNLAFLRFVVYEEDMFSDPNFLAHATYPIKAVKSGFRSVPLKNGYSEDIELASLLVFCEMRPVLESEEELYSSCRQLRRRQEELNNQLFLYDTHQNLRNANRDALVKEFSVNENQLQLYQEKCNKRVDSADLAG

SEQ ID NO: 1628 - protein, 330 aa, Artificial Sequence
  Synthetic polypeptide
MQPRTPLVLCVLLSQVLLLTSAEDLDCTPGFQQKVFHINQPAEFIEDQSILNLTFSDCKGNDKLRYEVSSPYFKVNSDGGLVALRNITAVGKTLFVHARTPHAEDMAELVIVGGKDIQGSLQDIFKFARTSPVPRQKRSIVVSPILIPENQRQPFPRDVGKVVDSDRPERSKFRLTGKGVDQEPKGIFRINENTGSVSVTRTLDREVIAVYQLFVETTDVNGKTLEGPVPLEVIVIDQNDNRPIFREGPYIGHVMEGSPTGTTVMRMTAFDADDPATDNALLRYNIRQQTPDKPSPNMFYIDPEKGDIVTVVSPALLDRERTSPSLLFRL

SEQ ID NO: 1629 - protein, 377 aa, Artificial Sequence
  Synthetic polypeptide
MKTPPGASSRTKCSRELRSFCAFSCPRAKQPTCTAWFPQQEHPSENGPQMPGRDPPAASTMQVLLLTSAEDLDCTPGFQQKVFHINQPAEFIEDQSILNLTFSDCKGNDKLRYEVSSPYFKVNSDGGLVALRNITAVGKTLFVHARTPHAEDMAELVIVGGKDIQGSLQDIFKFARTSPVPRQKRSIVVSPILIPENQRQPFPRDVGKVVDSDRPERSKFRLTGKGVDQEPKGIFRINENTGSVSVTRTLDREVIAVYQLFVETTDVNGKTLEGPVPLEVIVIDQNDNRPIFREGPYIGHVMEGSPTGTTVMRMTAFDADDPATDNALLRYNIRQQTPDKPSPNMFYIDPEKGDIVTVVSPALLDRERTSPSLLFRL

SEQ ID NO: 1630 - protein, 291 aa, Artificial Sequence
  Synthetic polypeptide
MQPRTPLVLCVLLSQVLLLTSAEDLDCTPGFQQKVFHINQPAEFIEDQSILNLTFSDCKGNDKLRYEVSSPYFKVNSDGGLVALRNITAVGKTLFVHARTPHAEDMAELVIVGGKDIQGSLQVVDSDRPERSKFRLTGKGVDQEPKGIFRINENTGSVSVTRTLDREVIAVYQLFVETTDVNGKTLEGPVPLEVIVIDQNDNRPIFREGPYIGHVMEGSPTGTTVMRMTAFDADDPATDNALLRYNIRQQTPDKPSPNMFYIDPEKGDIVTVVSPALLDRERTSPSLLFRL

SEQ ID NO: 1631 - protein, 134 aa, Artificial Sequence
  Synthetic polypeptide
MALKSTSIGLCLSQAFEEQLSNSVTDNHLTVYTFKTTGKPQTRHRGMGKWRPRGCCRGNMQCRQEGNGCPDLAGDSVIRVPLTLLVHNLAGLTGLLHHCLSGTSSPSEPPSPHLQDRGDRAHLSRLLSGLDATA

SEQ ID NO: 1632 - protein, 495 aa, Artificial Sequence
  Synthetic polypeptide
MEQRRVTDFFARRRPGPPRIAPPKLACRTPSPARPALRAPASATSGSRKRARPPAAPGRDQARPPARRRLRLSVDEVSSPSTPEAPDIPACPSPGQKIKKSTPAAGQPPHLTSAQDQDTISELASCLQRARELGARVRALKASAQDAGESCTPEAEGRPEEPCGEKAPAYQRFHALAQPGLPGLVLPYKYQVLAEMFRSMDTIVGMLHNRSETPTFAKVQRGVQDMMRRRFEECNVGQIKTVYPASYRFRQERSVPTFKDGTRRSDYQLTIEPLLEQEADGAAPQLTASRLLQRRQIFSQKLVEHVKEHHKAFLASLSPAMVVPEDQLTRWHPRFNVDEVPDIEPAALPQPPATEKLTTAQEVLARARNLISPRMEKALSQLALRSAAPSSPGSPRPALPATPPATPPAASPSALKGVSQDLLERIRAKEAQKQLAQMTRCPEQEQRLQRLERLPELARVLRSVFVSERKPALSMEVACARMVGSCCTIMSPGPS

SEQ ID NO: 1633 - protein, 493 aa, Artificial Sequence
  Synthetic polypeptide
MEQRRVTDFFARRRPGPPRIAPPKLACRTPSPARPALRAPASATSGSRKRARPPAAPGRDQARPPARRRLRLSVDEVSSPSTPEAPDIPACPSPGQKIKKSTPAAGQPPHLTSAQDQDTISELASCLQRARELGARVRALKASAQDAGESCTPEAEGRPEEPCGEKAPAYQRFHALAQPGLPGLVLPYKYQVLAEMFRSMDTIVGMLHNRSETPTFAKVQRGVQDMMRRRFEECNVGQIKTVYPASYRFRQERSVPTFKDGTRRSDYQLTIEPLLEQEADGAAPQLTASRLLQRRQIFSQKLVEHVKEHHKAFLASLSPAMVVPEDQLTRWHPRFNVDEVPDIEPAALPQPPATEKLTTAQEVLARARNLISPRMEKALSQLALRSAAPSSPGSPRPALPATPPATPPAASPSALKGVSQDLLERIRAKEAQKQLAQMTRCPEQEQRLQRLERLPELARVLRSVFVSERKPALSMEVACARMVGSCCTIMSPG

SEQ ID NO: 1634 - protein, 187 aa, Artificial Sequence
  Synthetic polypeptide
MDMRPAAGPCPTFRGHCPPSTAASSRSCGAATRATTTPWIPAPAARPSCWTVRWQSSGHGTKRRRHGCPSTEGGTLGMPLRPPRVEGQGPQLGLRPRPCPARMWPSLLRTATRWGPGRASHLSQACPFAGPQGSWVRSSFHLQPRMIGDVLSEDENDKKQNAQSSDESFEPYPERNPIPSSTQNTPR

SEQ ID NO: 1635 - protein, 326 aa, Artificial Sequence
  Synthetic polypeptide
MGHCRLCHGKFSSRSLRSISERAPGASMERPSAEERVLVRDFQRLLGVAVRQDPTLSPFVCKSCHAQFYQCHSLLKSFLQRVNASPAGRRKPCAKVGAQPPTGAEEGACLVDLITSSPQCLHGLVGWVHGHAASCGALPHLQRTLSSEYCGVIQVVWGCDQGHDYTMDTSSSCKAFLLDSALAVKWPWDKETAPRLPQHRGWNPGDAPQTSQGRGTGTPVGAETKTLPSTDVAQPPSDSDAVGPRSGFPPQPSLPLCRAPGQLGEKQLPSSTSDDRVKDEFSDLSEGDVLSEDENDKKQNAQSSDESFEPYPERNPIPSSTQNTPR

SEQ ID NO: 1636 - protein, 309 aa, Artificial Sequence
  Synthetic polypeptide
MGHCRLCHGKFSSRSLRSISERAPGASMERPSAEERVLVRDFQRLLGVAVRQDPTLSPFVCKSCHAQFYQCHSLLKSFLQRVNASPAGRRKPCAKVGAQPPTGAEEGACLAPSACTAWWGGCMDMRPAAGPCPTFRGHCPPSTAASSRSCGAATRATTTPWIPAPAARPSCWTVRWQSSGHGTKRRRHGCPSTEGGTLGMPLRPPRVEGQGPQLGLRPRPCPARMWPSLLRTATRWGPGRASHLSQACPFAGPQGSWVRSSFHLQPRMIGDVLSEDENDKKQNAQSSDESFEPYPERNPIPSSTQNTPR

SEQ ID NO: 1637 - protein, 401 aa, Artificial Sequence
  Synthetic polypeptide
MKRDRLGRFLSPGSSRQCGASDGGGGVSRTRGRPSLSGGPRVDGATARRAWGPVGSCGDAGEDGADEAGAGRALAMGHCRLCHGKFSSRSLRSISERAPGASMERPSAEERVLVRDFQRLLGVAVRQDPTLSPFVCKSCHAQFYQCHSLLKSFLQRVNASPAGRRKPCAKVGAQPPTGAEEGACLVDLITSSPQCLHGLVGWVHGHAASCGALPHLQRTLSSEYCGVIQVVWGCDQGHDYTMDTSSSCKAFLLDSALAVKWPWDKETAPRLPQHRGWNPGDAPQTSQGRGTGTPVGAETKTLPSTDVAQPPSDSDAVGPRSGFPPQPSLPLCRAPGQLGEKQLPSSTSDDRVKDEFSDLSEGDVLSEDENDKKQNAQSSDESFEPYPERNPIPSSTQNTPR

SEQ ID NO: 1638 - protein, 111 aa, Artificial Sequence
  Synthetic polypeptide
MEPLSHRGLPRLSWIDTLYSNFSYGTDEYDGEGNEEQKGPPEGSETMPYIDESPTMSPQLSARSQGGGDGVSPTPPEGLAPGGAVAHTCNPSTLGGQGGRITRSGDRDHPG

SEQ ID NO: 1639 - protein, 65 aa, Artificial Sequence
  Synthetic polypeptide
MPYIDESPTMSPQLSARSQGGGDGVSPTPPEGLAPGGAVAHTCNPSTLGGQGGRITRSGDRDHPG

SEQ ID NO: 1640 - protein, 65 aa, Artificial Sequence; identical to SEQ ID NO: 1639
  Synthetic polypeptide

SEQ ID NO: 1641 - protein, 65 aa, Artificial Sequence; identical to SEQ ID NO: 1639
  Synthetic polypeptide

SEQ ID NO: 1642 - protein, 65 aa, Artificial Sequence; identical to SEQ ID NO: 1639
  Synthetic polypeptide

SEQ ID NO: 1643 - protein, 65 aa, Artificial Sequence; identical to SEQ ID NO: 1639
  Synthetic polypeptide

SEQ ID NO: 1644 - protein, 65 aa, Artificial Sequence; identical to SEQ ID NO: 1639
  Synthetic polypeptide

SEQ ID NO: 1645 - protein, 275 aa, Artificial Sequence
  Synthetic polypeptide
MALRRLLLLLLLSLESLDLLPSVHGARGRAANRTLSAGGAAVGGRRAGGALARGGRELNGTARAPGIPEAGSRRGQPAAAVAAAASAAVTYETCWGYYDVSGQYDKEFECNNSESGYLYCCGTCYYRFCCKKRHEKLDQRQCTNYQSPVWVQTPSTKVVSPGPENKYDPEKDKTNFTVYITCGVIAFVIVAGVFAKVSYDKAHRPPREMNIHRALADILRQQGPIPIAHCERETISAIDTSPKENTPVRSSSKNHYTPVRTAKQTPGPRTSLGKS

SEQ ID NO: 1646 - protein, 275 aa, Artificial Sequence; identical to SEQ ID NO: 1645
  Synthetic polypeptide

SEQ ID NO: 1647 - protein, 275 aa, Artificial Sequence; identical to SEQ ID NO: 1645
  Synthetic polypeptide

SEQ ID NO: 1648 - protein, 43 aa, Artificial Sequence
  Synthetic polypeptide
DQLHRLHHLRGDRLRHRGRRLRQGLLRQGPPPSTGDEHPQGSG

SEQ ID NO: 1649 - protein, 140 aa, Artificial Sequence
  Synthetic polypeptide
MVGLRWWNHIDEDGKSHWVFESRKESSQENKTVSEAESRIFWLGLIACSVLWVIFAFSALFSFTVKWLAVVIMGVVLQGANLYGYIRCKVRSRKHLTSMATSYFGKQFLRQFSTTTKDVKKQQLQPPIYGGKNLENRNHP

SEQ ID NO: 1650 - protein, 162 aa, Artificial Sequence
  Synthetic polypeptide
MVTIILLLSCDFWAVKNVTGRLMVGLRWWNHIDEDGKSHWVFESRKESSQENKTVSEAESRIFWLGLIACSVLWVIFAFSALFSFTVKWLAVVIMGVVLQGANLYGYIRCKVRSRKHLTSMATSYFGKQFLRQFSTTTKDVKKQQLQPPIYGGKNLENRNHP

SEQ ID NO: 1651 - protein, 226 aa, Artificial Sequence
  Synthetic polypeptide
MLQQDSNDDTEDVSLFDAEEETTNRPRKAKIRHPVASFFHLFFRVSAIIVCLLCELLSSSFITCMVTIILLLSCDFWAVKNVTGRLMVGLRWWNHIDEDGKSHWVFESRKESSQENKTVSEAESRIFWLGLIACSVLWVIFAFSALFSFTVKWLAVVIMGVVLQGANLYGYIRCKVRSRKHLTSMATSYFGKQFLRQFSTTTKDVKKQQLQPPIYGGKNLENRNHP

SEQ ID NO: 1652 - protein, 226 aa, Artificial Sequence; identical to SEQ ID NO: 1651
  Synthetic polypeptide

SEQ ID NO: 1653 - protein, 226 aa, Artificial Sequence; identical to SEQ ID NO: 1651
  Synthetic polypeptide

SEQ ID NO: 1654 - protein, 183 aa, Artificial Sequence
  Synthetic polypeptide
MLQQDSNDDTEDVSLFDAEEETTNRPRKAKIRHPVASFFHLFFRVSAIIVCLLCELLSSSFITCMVTIILLLSCDFWAVKNVTGRLMVGLRWWNHIDEDGKSHWVFESRKESSQENKTVSEAESRIFWLGLIACSVLWVIFAFSALFSFTVKWLFSTTTKDVKKQQLQPPIYGGKNLENRNHP

SEQ ID NO: 1655 - protein, 183 aa, Artificial Sequence; identical to SEQ ID NO: 1654
  Synthetic polypeptide

SEQ ID NO: 1656 - protein, 183 aa, Artificial Sequence; identical to SEQ ID NO: 1654
  Synthetic polypeptide

SEQ ID NO: 1657 - protein, 183 aa, Artificial Sequence; identical to SEQ ID NO: 1654
  Synthetic polypeptide

SEQ ID NO: 1658 - protein, 183 aa, Artificial Sequence; identical to SEQ ID NO: 1654
  Synthetic polypeptide

SEQ ID NO: 1659 - protein, 97 aa, Artificial Sequence
  Synthetic polypeptide
MVGLRWWNHIDEDGKSHWVFESRKESSQENKTVSEAESRIFWLGLIACSVLWVIFAFSALFSFTVKWLFSTTTKDVKKQQLQPPIYGGKNLENRNHP

SEQ ID NO: 1660 - protein, 73 aa, Artificial Sequence
  Synthetic polypeptide
ESSQENKTVSEAESRIFWLGLIACSVLWVIFAFSALFSFTVKWLFSTTTKDVKKQQLQPPIYGGKNLENRNHP

SEQ ID NO: 1661 - protein, 119 aa, Artificial Sequence
  Synthetic polypeptide
MVTIILLLSCDFWAVKNVTGRLMVGLRWWNHIDEDGKSHWVFESRKESSQENKTVSEAESRIFWLGLIACSVLWVIFAFSALFSFTVKWLFSTTTKDVKKQQLQPPIYGGKNLENRNHP

SEQ ID NO: 1662 - protein, 119 aa, Artificial Sequence; identical to SEQ ID NO: 1661
  Synthetic polypeptide

SEQ ID NO: 1663 - protein, 765 aa, Artificial Sequence
  Synthetic polypeptide
MSSSGYPPNQGAFSTEQSRYPPHSVQYTFPNTRHQQEFAVPDYRSSHLEVSQASQLLQQQQQQQLRRRPSLLSEFHPGSDRPQERRTSYEPFHPGPSPVDHDSLESKRPRLEQVSDSHFQRVSAAVLPLVHPLPEGLRASADAKKDPAFGGKHEAPSSPISGQPCGDDQNASPSKLSKEELIQSMDRVDREIAKVEQQILKLKKKQQQLEEEAAKPPEPEKPVSPPPVEQKHRSIVQIIYDENRKKAEEAHKIFEGLGPKVELPLYNQPSDTKVYHENIKTNQVMRKKLILFFKRRNHARKQREQKICQRYDQLMEAWEKKVDRIENNPRRKAKESKTREYYEKQFPEIRKQREQQERFQRVGQRGAGLSATIARSEHEISEIIDGLSEQENNEKQMRQLSVIPPMMFDAEQRRVKFINMNGLMEDPMKVYKDRQFMNVWTDHEKEIFKDKFIQHPKNFGLIASYLERKSVPDCVLYYYLTKKNENYKALVRRNYGKRRGRNQQIARPSQEEKVEEKEEDKAEKTEKKEEEKKDEEEKDEKEDSKENTKEKDKIDGTAEETEEREQATPRGRKTANSQGRRKGRITRSMTNEAAAASAAAAAATEEPPPPLPPPPEPISTEPVETSRWTEEEMEVAKKGLVEHGRNWAAIAKMVGTKSEAQCKNFYFNYKRRHNLDNLLQQHKQKTSRKPREERDVSQCESVASTVSAQEDEDIEASNEEENPEDSEGKKKILMFGYCLVKHYALETFLLFCGLEEENWKSAYVK

SEQ ID NO: 1664 - protein, 765 aa, Artificial Sequence; identical to SEQ ID NO: 1663
  Synthetic polypeptide

SEQ ID NO: 1665 - protein, 656 aa, Artificial Sequence
  Synthetic polypeptide
MSSSGYPPNQGAFSTEQSRYPPHSVQYTFPNTRHQQDPAFGGKHEAPSSPISGQPCGDDQNASPSKLSKEELIQSMDRVDREIAKVEQQILKLKKKQQQLEEEAAKPPEPEKPVSPPPVEQKHRSIVQIIYDENRKKAEEAHKIFEGLGPKVELPLYNQPSDTKVYHENIKTNQVMRKKLILFFKRRNHARKQREQKICQRYDQLMEAWEKKVDRIENNPRRKAKESKTREYYEKQFPEIRKQREQQERFQRVGQRGAGLSATIARSEHEISEIIDGLSEQENNEKQMRQLSVIPPMMFDAEQRRVKFINMNGLMEDPMKVYKDRQFMNVWTDHEKEIFKDKFIQHPKNFGLIASYLERKSVPDCVLYYYLTKKNENYKALVRRNYGKRRGRNQQIARPSQEEKVEEKEEDKAEKTEKKEEEKKDEEEKDEKEDSKENTKEKDKIDGTAEETEEREQATPRGRKTANSQGRRKGRITRSMTNEAAAASAAAAAATEEPPPPLPPPPEPISTEPVETSRWTEEEMEVAKKGLVEHGRNWAAIAKMVGTKSEAQCKNFYFNYKRRHNLDNLLQQHKQKTSRKPREERDVSQCESVASTVSAQEDEDIEASNEEENPEDSEGKKKILMFGYCLVKHYALETFLLFCGLEEENWKSAYVK

SEQ ID NO: 1666 - protein, 239 aa, Artificial Sequence
  Synthetic polypeptide
MNAIVALCHFCELHGPRTLFCTEVLHAPLPQGDGNEDSPGQGEQAEEEEGGIQMNSRMRAHSPAEGASVESSSPGPKKSDMCEGCRSLAAGHPGYISHDKETSIKYVSHQHPSHPQLFSIVRQACVRSLSCEVCPGREGPIFFGDEQHGFVFSHTFFIKDSLARGFQRWYSIITIMMDRIYLINSWPFLLGKVRGIIDELQGKALKKYKISWAWWCMPVIPATWEAEAGETLEPMRQRL

SEQ ID NO: 1667 - protein, 239 aa, Artificial Sequence; identical to SEQ ID NO: 1666
  Synthetic polypeptide

SEQ ID NO: 1668 - protein, 186 aa, Artificial Sequence
  Synthetic polypeptide
MNSRMRAHSPAEGASVESSSPGPKKSDMCEGCRSLAAGHPGYISHDKETSIKYVSHQHPSHPQLFSIVRQACVRSLSCEVCPGREGPIFFGDEQHGFVFSHTFFIKDSLARGFQRWYSIITIMMDRIYLINSWPFLLGKVRGIIDELQGKALKKYKISWAWWCMPVIPATWEAEAGETLEPMRQRL

SEQ ID NO: 1669 - protein, 246 aa, Artificial Sequence
  Synthetic polypeptide
MTWWPIGASLFASSEGSGLFIGLAGSGAAGGLAVAGFEWNATYVLLALAWVFVPIYISSEIVTLPEYIQKRYGGQRIRMYLSVLSLLLSVFTKISLDLYAGALFVHICLGWNFYLSTILTLGITALYTIAAFDQIGGYGQLEAAYAQAIPSRTIANTTCHLPRTDAMHMFRDPHTGDLPWTGMTFGLTIMATWYWCTDQVIVQRSLSARDLNHAKAGSILASYLKMLPMGLIIMPGMISRALFPGL

SEQ ID NO: 1670 - protein, 246 aa, Artificial Sequence; identical to SEQ ID NO: 1669
  Synthetic polypeptide

SEQ ID NO: 1671 - protein, 329 aa, Artificial Sequence
  Synthetic polypeptide
MAANSTSDLHTPGTQLSVADIIVITVYFALNVAVGIWSSCRASRNTVNGYFLAGRDMTWWPIGASLFASSEGSGLFIGLAGSGAAGGLAVAGFEWNATYVLLALAWVFVPIYISSEIVTLPEYIQKRYGGQRIRMYLSVLSLLLSVFTKISLDLYAGALFVHICLGWNFYLSTILTLGITALYTIAGGLAAVIYTDALQTLIMVVGAVILTIKAFDQIGGYGQLEAAYAQAIPSRTIANTTCHLPRTDAMHMFRDPHTGDLPWTGMTFGLTIMATWYWCTDQVIVQRSLSARDLNHAKAGSILASYLKMLPMGLIIMPGMISRALFPGL

SEQ ID NO: 1672 - protein, 329 aa, Artificial Sequence; identical to SEQ ID NO: 1671
  Synthetic polypeptide

SEQ ID NO: 1673 - protein, 329 aa, Artificial Sequence; identical to SEQ ID NO: 1671
  Synthetic polypeptide

SEQ ID NO: 1674 - protein, 302 aa, Artificial Sequence
  Synthetic polypeptide
MAANSTSDLHTPGTQLSVADIIVITVYFALNVAVGIWSSCRASRNTVNGYFLAGRDMTWWPIGASLFASSEGSGLFIGLAGSGAAGGLAVAGFEWNATYVLLALAWVFVPIYISSEIVTLPEYIQKRYGGQRIRMYLSVLSLLLSVFTKISLDLYAGALFVHICLGWNFYLSTILTLGITALYTIAAFDQIGGYGQLEAAYAQAIPSRTIANTTCHLPRTDAMHMFRDPHTGDLPWTGMTFGLTIMATWYWCTDQVIVQRSLSARDLNHAKAGSILASYLKMLPMGLIIMPGMISRALFPGL

SEQ ID NO: 1675 - protein, 21 aa, Artificial Sequence
  Synthetic polypeptide
MLRKVGEFHEETATSPPCAPP

SEQ ID NO: 1676 - protein, 262 aa, Artificial Sequence
  Synthetic polypeptide
MCPGLPRPMSRSSFQLFLQPFFICYKLNICSTRLSSSPMARSPGNVCVPPTGWSLECLQDWASFLRLAIPSMLMLCMEWWAYEVGSFLSGILGMVELGAQSIVYELAIIVYMVPAGFSVAASVRVGNALGAGDMEQARKSSTVSLLITVLFAVAFSVLLLSCKDHVGYIFTTDRDIINLVAQVVPIYAVSHLFEALACTSGGVLRGSGNQKVGAIVNTIGYYVVGLPIGIALMFATTLGVMAGETACCKLGPALSITAERTC

SEQ ID NO: 1677 - protein, 434 aa, Artificial Sequence
  Synthetic polypeptide
MEAPEEPAPVRGGPEATLEVRGSRCLRLSAFREELRALLVLAGPAFLVQLMVFLISFISSVFCGHLGKLELDAVTLAIATYGSQNLKHVGVILQRSALVLLLCCFPCWALFLNTQHILLLFRQDPDVSRLTQTYVTIFIPALPATFLYMLQVKYLLNQGIVLPQIVTGVAANLVNALANYLFLHQLHLGVIGSALANLISQYTLALLLFLYILGKKLHQATWGGWSLECLQDWASFLRLAIPSMLMLCMEWWAYEVGSFLSGILGMVELGAQSIVYELAIIVYMVPAGFSVAASVRVGNALGAGDMEQARKSSTVSLLITVLFAVAFSVLLLSCKDHVGYIFTTDRDIINLVAQVVPIYAVSHLFEALACTSGGVLRGSGNQKVGAIVNTIGYYVVGLPIGIALMFATTLGVMAGETACCKLGPALSITAERTC

SEQ ID NO: 1678 - protein, 457 aa, Artificial Sequence
  Synthetic polypeptide
MEAPEEPAPVRGGPEATLEVRGSRCLRLSAFREELRALLVLAGPAFLVQLMVFLISFISSVFCGHLGKLELDAVTLAIAVINVTGVSVGFGLSSACDTLISQTYGSQNLKHVGVILQRSALVLLLCCFPCWALFLNTQHILLLFRQDPDVSRLTQTYVTIFIPALPATFLYMLQVKYLLNQGIVLPQIVTGVAANLVNALANYLFLHQLHLGVIGSALANLISQYTLALLLFLYILGKKLHQATWGGWSLECLQDWASFLRLAIPSMLMLCMEWWAYEVGSFLSGILGMVELGAQSIVYELAIIVYMVPAGFSVAASVRVGNALGAGDMEQARKSSTVSLLITVLFAVAFSVLLLSCKDHVGYIFTTDRDIINLVAQVVPIYAVSHLFEALACTSGGVLRGSGNQKVGAIVNTIGYYVVGLPIGIALMFATTLGVMAGETACCKLGPALSITAERTC

SEQ ID NO: 1679 - protein, 457 aa, Artificial Sequence; identical to SEQ ID NO: 1678
  Synthetic polypeptide

SEQ ID NO: 1680 - protein, 457 aa, Artificial Sequence; identical to SEQ ID NO: 1678
  Synthetic polypeptide

SEQ ID NO: 1681 - protein, 429 aa, Artificial Sequence
  Synthetic polypeptide
MELEVRRVRQAFLSGRSRPLRFRLQQLEALRRMVQEREKDILTAIAADLCKSEFNVYSQEVITVLGEIDFMLENLPEWVTAKPVKKNVLTMLDEAYIQPQPLGVVLIIGAWNYPFVLTIQPLIGAIAAGNAVIIKPSELSENTAKILAKLLPQYLDQDLYIVINGGVEETTELLKQRFDHIFYTGNTAVGKIVMEAAAKHLTPVTLELGGKSPCYIDKDCDLDIVCRRITWGKYMNCGQTCIAPDYILCEASLQNQIVWKIKETVKEFYGENIKESPDYERIINLRHFKRILSLLEGQKIAFGGETDEATRYIAPTVLTDVDPKTKVMQEEIFGPILPIVPVKNVDEAINFINEREKPLALYVFSHNHKLIKRMIDETSSGGVTGNDVIMHFTLNSFPFGGVGSEQRLCLAAHRLGCEEPLCLATPSGK

SEQ ID NO: 1682 - protein, 429 aa, Artificial Sequence; identical to SEQ ID NO: 1681
  Synthetic polypeptide

SEQ ID NO: 1683 - protein, 429 aa, Artificial Sequence; identical to SEQ ID NO: 1681
  Synthetic polypeptide

SEQ ID NO: 1684 - protein, 429 aa, Artificial Sequence; identical to SEQ ID NO: 1681
  Synthetic polypeptide

SEQ ID NO: 1685 - protein, 429 aa, Artificial Sequence; identical to SEQ ID NO: 1681
  Synthetic polypeptide

SEQ ID NO: 1686 - protein, 102 aa, Artificial Sequence
  Synthetic polypeptide
MQEEIFGPILPIVPVKNVDEAINFINEREKPLALYVFSHNHKLIKRMIDETSSGGVTGNDVIMHFTLNSFPFGGVGSEQRLCLAAHRLGCEEPLCLATPSGK

SEQ ID NO: 1687 - protein, 427 aa, Artificial Sequence
  Synthetic polypeptide
MDSLQDTVALDHGGCCPALSRLVPRGFGTEMWTLFALSGPLFLFQVLTFMIYIVSTVFCGHLGKVELASVTLAVAFVNVCGVSVGVGLSSACDTLMSQSFGSPNKKHVGVILQRGALVLLLCCLPCWALFLNTQHILLLFRQDPDVSRLTQDYVMIFIPGLPVIFLYNLLAKYLQNQGWLKGQEEESPFQTPGLSILHPSHSHLSRASFHLFQKITWPQVLSGVVGNCVNGVANYALVSVLNLGVRGSAYANIISQFAQTVFLLLYIVLKKLHLETWAGWSSQCLQDWGPFFSLAVPSMLMICVEWWAYEIGSFLMGLLSVVDLSAQAVIYEVATVTYMIPLGLSIGVCVRVGMALGAADTVQAKRSAVSGVLSIVGISLVLGTLISILKNQLGHIFTNDEDVIALVSQVLPVYSVFHVFEAICALG

SEQ ID NO: 1688 - protein, 405 aa, Artificial Sequence
  Synthetic polypeptide
MDSLQDTVALDHGGCCPALSRLVPRGFGTEMWTLFALSGPLFLFQVLTFMIYIVSTVFCGHLGKVELASVTLAVAFVNVCGVSVGVGLSSACDTLMSQSFGSPNKKHVGVILQRGALVLLLCCLPCWALFLNTQHILLLFRQDPDVSRLTQDYVMIFIPGLPVIFLYNLLAKYLQNQKITWPQVLSGVVGNCVNGVANYALVSVLNLGVRGSAYANIISQFAQTVFLLLYIVLKKLHLETWAGWSSQCLQDWGPFFSLAVPSMLMICVEWWAYEIGSFLMGLLSVVDLSAQAVIYEVATVTYMRHSHRLAYAAHVTRIPLGLSIGVCVRVGMALGAADTVQAKRSAVSGVLSIVGISLVLGTLISILKNQLGHIFTNDEDVIALVSQVLPVYSVFHVFEAICALG

SEQ ID NO: 1689 - protein, 705 aa, Artificial Sequence
  Synthetic polypeptide
MDRAALRAAAMGEKKEGGGGGDAAAAEGGAGAAASRALQQCGQLQKLIDISIGSLRGLRTKCAVSNDLTQQEIRTLEAKLVRYICKQRQCKLSVAPGERTPELNSYPRFSDWLYTFNVRPEVVQEIPRDLTLDALLEMNEAKVKETLRRCGASGDECGRLQYALTCLRKVTGLGGEHKEDSSWSSLDARRESGSGPSTDTLSAASLPWPPGSSQLGRAGNSAQGPRSISVSALPASDSPTPSFSEGLSDTCIPLHASGRLTPRALHSFITPPTTPQLRRHTKLKPPRTPPPPSRKVFQLLPSFPTLTRSKSHESQLGNRIDDVSSMRFDLSHGSPQMVRRDIGLSVTHRFSTKSWLSQVCHVCQKSMIFGVKCKHCRLKCHNKCTKEAPACRISFLPLTRLRRTESVPSDINNPVDRAAEPHFGTLPKALTKKEHPPAMNHLDSSSNPSSTTSSTPSSPAPFPTSSNPSSATTPPNPSPGQRDSRFNFPAAYFIHHRQQFIFPDISAFAHAAPLPEAADGTRLDDQPKADVLEAHEAEAEEPEAGKSEAEDDEDEVDDLPSSRRPWRGPISRKASQTSVYLQEWDIPFEQVELGEPIGQGRWGRVHRGRWHGEVAIRLLEMDGHNQDHLKLFKKEVMNYRQTRHENVVLFMGACMNPPHLAIITSFCKGRTLHSFVRDPKTSLDINKTRQIAQEIIKVNHPAQGG

SEQ ID NO: 1690 - protein, 727 aa, Artificial Sequence
  Synthetic polypeptide
MDRAALRAAAMGEKKEGGGGGDAAAAEGGAGAAASRALQQCGQLQKLIDISIGSLRGLRTKCAVSNDLTQQEIRTLEAKLVRYICKQRQCKLSVAPGERTPELNSYPRFSDWLYTFNVRPEVVQEIPRDLTLDALLEMNEAKVKETLRRCGASGDECGRLQYALTCLRKVTGLGGEHKEDSSWSSLDARRESGSGPSTDTLSAASLPWPPGSSQLGRAGNSAQGPRSISVSALPASDSPTPSFSEGLSDTCIPLHASGRLTPRALHSFITPPTTPQLRRHTKLKPPRTPPPPSRKVFQLLPSFPTLTRSKSHESQLGNRIDDVSSMRFDLSHGSPQMVRRDIGLSVTHRFSTKSWLSQVCHVCQKSMIFGVKCKHCRLKCHNKCTKEAPACRISFLPLTRLRRTESVPSDINNPVDRAAEPHFGTLPKALTKKEHPPAMNHLDSSSNPSSTTSSTPSSPAPFPTSSNPSSATTPPNPSPGQRDSRFNFPAAYFIHHRQQFIFPVPSAGHCWKCLLIAESLKENAFNISAFAHAAPLPEAADGTRLDDQPKADVLEAHEAEAEEPEAGKSEAEDDEDEVDDLPSSRRPWRGPISRKASQTSVYLQEWDIPFEQVELGEPIGQGRWGRVHRGRWHGEVAIRLLEMDGHNQDHLKLFKKEVMNYRQTRHENVVLFMGACMNPPHLAIITSFCKGRTLHSFVRDPKTSLDINKTRQIAQEIIKVNHPAQGG

SEQ ID NO: 1691 - protein, 590 aa, Artificial Sequence
  Synthetic polypeptide
MNEAKVKETLRRCGASGDECGRLQYALTCLRKVTGLGGEHKEDSSWSSLDARRESGSGPSTDTLSAASLPWPPGSSQLGRAGNSAQGPRSISVSALPASDSPTPSFSEGLSDTCIPLHASGRLTPRALHSFITPPTTPQLRRHTKLKPPRTPPPPSRKVFQLLPSFPTLTRSKSHESQLGNRIDDVSSMRFDLSHGSPQMVRRDIGLSVTHRFSTKSWLSQVCHVCQKSMIFGVKCKHCRLKCHNKCTKEAPACRISFLPLTRLRRTESVPSDINNPVDRAAEPHFGTLPKALTKKEHPPAMNHLDSSSNPSSTTSSTPSSPAPFPTSSNPSSATTPPNPSPGQRDSRFNFPAAYFIHHRQQFIFPVPSAGHCWKCLLIAESLKENAFNISAFAHAAPLPEAADGTRLDDQPKADVLEAHEAEAEEPEAGKSEAEDDEDEVDDLPSSRRPWRGPISRKASQTSVYLQEWDIPFEQVELGEPIGQGRWGRVHRGRWHGEVAIRLLEMDGHNQDHLKLFKKEVMNYRQTRHENVVLFMGACMNPPHLAIITSFCKGRTLHSFVRDPKTSLDINKTRQIAQEIIKVNHPAQGG

SEQ ID NO: 1692 - protein, 590 aa, Artificial Sequence; identical to SEQ ID NO: 1691
  Synthetic polypeptide

SEQ ID NO: 1693 - protein, 440 aa, Artificial Sequence
  Synthetic polypeptide
HSFITPPTTPQLRRHTKLKPPRTPPPPSRKVFQLLPSFPTLTRSKSHESQLGNRIDDVSSMRFDLSHGSPQMVRRDIGLSVTHRFSTKSWLSQVCHVCQKSMIFGVKCKHCRLKCHNKCTKEAPACRISFLPLTRLRRTESVPSDINNPVDRAAEPHFGTLPKALTKKEHPPAMNHLDSSSNPSSTTSSTPSSPAPFPTSSNPSSATTPPNPSPGQRDSRFNFPAAYFIHHRQQFIFPDISAFAHAAPLPEAADGTRLDDQPKADVLEAHEAEAEEPEAGKSEAEDDEDEVDDLPSSRRPWRGPISRKASQTSVYLQEWDIPFEQVELGEPIGQGRWGRVHRGRWHGEVAIRLLEMDGHNQDHLKLFKKEVMNYRQTRHENVVLFMGACMNPPHLAIITSFCKGRTLHSFVRDPKTSLDINKTRQIAQEIIKVNHPAQGG

SEQ ID NO: 1694 - protein, 429 aa, Artificial Sequence
  Synthetic polypeptide
MACPWKFLFKTKFHQYAMNGEKDINNNVEKAPCATSSPVTQDDLQYHNLSKQQNESPQPLVETGKKSPESLVKLDATPLSSPRHVRIKNWGSGMTFQDTLHHKAKGILTCRSKSCLGSIMTPKSLTRGPRDKPTPPDELLPQAIEFVNQYYGSFKEAKIEEHLARVEAVTKEIETTGTYQLTGDELIFATKQAWRNAPRCIGRIQWSNLQVFDARSCSTAREMFEHICRHVRYSTNNGNIRSAITVFPQRSDGKHDFRVWNAQLIRYAGYQMPDGSIRGDPANVEFTQLCIDLGWKPKYGRFDVVPLVLQANGRDPELFEIPPDLVLEVAMEHPKYEWFRELELKWYALPAVANMLLEVGGLEFPGCPFNGWYMGTEIGVRDFCDVQRYNILEEVGRRMGLETHKLASLWKDQAVVEINIAVLHSFQQN

SEQ ID NO: 1695 - protein, 47 aa, Artificial Sequence
  Synthetic polypeptide
CVATAAQICTPFGRLLAAFLRLPSVSLLPSWCWYCVISMTWASCIEM

SEQ ID NO: 1696 - protein, 301 aa, Artificial Sequence
  Synthetic polypeptide
MGAVSCRQGQHTQQGEHTRVAVPHKQGGNIRGPWARGWKSLWTGLGTIRSDLEELWELRGHHYLHQESLKPAPVLVEKPLPEWPVPQFINLFLPEFPIRPIRGQQQLKILGLVAKGSFGTVLKVLDCTQKAVFAVKVVPKVKVLQRDTVRQCKEEVSIQRQINHPFVHSLGDSWQGKRHLFIMCSYCSTDLYSLWSAVGCFPEASIRLFAAELVLVLCYLHDLGIMHRDVKMENILLDERAGLCCCHLGSLQPPCLILLTQPVECLRLQARGAMPDWFSYFFGGDGVSLCWPDWSPAPNCE

SEQ ID NO: 1697 - protein, 174 aa, Artificial Sequence
  Synthetic polypeptide
MGAVSCRQGQHTQQGEHTRVAVPHKQGGNIRGPWARGWKSLWTGLGTIRSDLEELWELRGHHYLHQESLKPAPVLVEKPLPEWPVPQFINLFLPEFPIRPIRGQQQLKILGLVAKGSFGTVLKVLDCTQKAVFAVKVVPKVKVLQRDTVRQCKEEVSIQLDCAAAISAHCNLPA

SEQ ID NO: 1698 - protein, 174 aa, Artificial Sequence; identical to SEQ ID NO: 1697
  Synthetic polypeptide

SEQ ID NO: 1699 - protein, 174 aa, Artificial Sequence; identical to SEQ ID NO: 1697
  Synthetic polypeptide

SEQ ID NO: 1700 - protein, 174 aa, Artificial Sequence; identical to SEQ ID NO: 1697
  Synthetic polypeptide

SEQ ID NO: 1701 - protein, 174 aa, Artificial Sequence; identical to SEQ ID NO: 1697
  Synthetic polypeptide

SEQ ID NO: 1702 - protein, 173 aa, Artificial Sequence
  Synthetic polypeptide
MGAVSCRQGQHTQQGEHTRVAVPHKGGNIRGPWARGWKSLWTGLGTIRSDLEELWELRGHHYLHQESLKPAPVLVEKPLPEWPVPQFINLFLPEFPIRPIRGQQQLKILGLVAKGSFGTVLKVLDCTQKAVFAVKVVPKVKVLQRDTVRQCKEEVSIQLDCAAAISAHCNLPA

SEQ ID NO: 1703 - protein, 386 aa, Artificial Sequence
  Synthetic polypeptide
MWEKMETKTIVYDLDTSGGLMEQIQALLAPPKTDEAEKRSRKPEKEPRRSGRATNHDSCDSCKEGGDLLCCDHCPAAFHLQCCNPPLSEEMLPPGEWMCHRCTVRRKKREQKKELGHVNGLVDKSGKRTTSPSSDTDLLDRSASKTELKAIAHARILERRASRPGTPTSSASTETPTSEQNDVDEDIIDVDEEPVAAEPDYVQPQLRRPFELLIAAAMERNPTQFQLPNELTCTTALPGSSKRRRKEETTGKNVKKTQHELDHNGLVPLPVKVCFTCNRSCRVAPLIQCDYCPLLFHMDCLEPPLTAMPLGRWMCPNHIEHVVLNQKNMTLSNRCQVFDRFQDTVSQHVVKVDFLNRIHKKHPPNRRVLQSVKRRSLKISQDEPPP

SEQ ID NO: 1704 - protein, 386 aa, Artificial Sequence; identical to SEQ ID NO: 1703
  Synthetic polypeptide

SEQ ID NO: 1705 - protein, 386 aa, Artificial Sequence; identical to SEQ ID NO: 1703
  Synthetic polypeptide

SEQ ID NO: 1706 - protein, 386 aa, Artificial Sequence; identical to SEQ ID NO: 1703
  Synthetic polypeptide

SEQ ID NO: 1707 - protein, 346 aa, Artificial Sequence [sequence omitted]

SEQ ID NO: 1708 - protein, 346 aa, Artificial Sequence [sequence omitted]

SEQ ID NO: 1709 - protein, 346 aa, Artificial Sequence [sequence omitted]

SEQ ID NO: 1710 - protein, 346 aa, Artificial Sequence [sequence omitted]

SEQ ID NO: 1711 - protein, 195 aa, Artificial Sequence
  Synthetic polypeptide
MALVTVQRSPTPSTTSSPCASEADSGEEECRSQPRSISESFLTVKGAALFLPRGNGSSTPRISHRRNKHAGDLQQHLQAMFILLRPEDNIRLAVRLESTYQNRTRYMVVVSTNGRQDTEESIVLGMDFSSNDSSTCTMGLVLPLWSDTLIHLDGDGGFSVSTDNRVHIFKPVSVQAMWVDRDSRNKHCDVLLVEE

SEQ ID NO: 1712 - protein, 222 aa, Artificial Sequence
  Synthetic polypeptide
MALVTVQRSPTPSTTSSPCASSSHLEDSESAALLCCECEESEIFTDSNEADSGEEECRSQPRSISESFLTVKGAALFLPRGNGSSTPRISHRRNKHAGDLQQHLQAMFILLRPEDNIRLAVRLESTYQNRTRYMVVVSTNGRQDTEESIVLGMDFSSNDSSTCTMGLVLPLWSDTLIHLDGDGGFSVSTDNRVHIFKPVSVQAMWVDRDSRNKHCDVLLVEE

SEQ ID NO: 1713 - protein, 104 aa, Artificial Sequence
  Synthetic polypeptide
MGEHPSPGPAVAACAEAERIEELEPEAEERLPAAPEDHWKVLFDQFDPGNTGYISTGKFRSLLESHSSKLDPHKREVLLALADSHADGQIGYQDFVSLEAFLDL

SEQ ID NO: 1714 - protein, 104 aa, Artificial Sequence; identical to SEQ ID NO: 1713
  Synthetic polypeptide

SEQ ID NO: 1715 - protein, 96 aa, Artificial Sequence
  Synthetic polypeptide
MGEHPSPGPAVAACAEAERIEELEPEAEERLPAAPEDFDPGNTGYISTGKFRSLLESHSSKLDPHKREVLLALADSHADGQIGYQDFVSLEAFLDL

SEQ ID NO: 1716 - protein, 188 aa, Artificial Sequence
  Synthetic polypeptide
MDVVEVAGSWWAQEREDIIMKYEKGHRAGLPEDKGPKPFRSYNNNVDHLGIVHETELPPLTAREAKQIRREISRKSKWVDMLGDWEKYKSSRKLIDRAYKGMPMNIRGPMWSVLLNIEEMKLKNPGRYQIMKEKGKRSSEHIQRIDRDISGTLRKHMFFRDRYGTKQRELLHILLAYEDNNPEESPRN

SEQ ID NO: 1717 - protein, 188 aa, Artificial Sequence; identical to SEQ ID NO: 1716
  Synthetic polypeptide

SEQ ID NO: 1718 - protein, 188 aa, Artificial Sequence; identical to SEQ ID NO: 1716
  Synthetic polypeptide

SEQ ID NO: 1719 - protein, 188 aa, Artificial Sequence; identical to SEQ ID NO: 1716
  Synthetic polypeptide

SEQ ID NO: 1720 - protein, 188 aa, Artificial Sequence; identical to SEQ ID NO: 1716
  Synthetic polypeptide

SEQ ID NO: 1721 - protein, 108 aa, Artificial Sequence
  Synthetic polypeptide
MLGDWEKYKSSRKLIDRAYKGMPMNIRGPMWSVLLNIEEMKLKNPGRYQIMKEKGKRSSEHIQRIDRDISGTLRKHMFFRDRYGTKQRELLHILLAYEDNNPEESPRN

SEQ ID NO: 1722 - protein, 201 aa, Artificial Sequence
  Synthetic polypeptide
MDVVEVAGSWWAQEREDIIMKYEKGHRAGLPEDKGPKPFRSYNNNVDHLGIVHETELPPLTAREAKQIRREISRKSKWVDMLGDWEKYKSSRKLIDRAYKGMPMNIRGPMWSVLLNTEEMKLKNPGRYQIMKEKGKRSSEHIQRIDRDVSGTLRKHIFFRDRYGTKSAGNMTWHSHVGSPLGSGSQSSMDLNHTSPKCHRY

SEQ ID NO: 1723 - protein, 201 aa, Artificial Sequence; identical to SEQ ID NO: 1722
  Synthetic polypeptide

SEQ ID NO: 1724 - protein, 201 aa, Artificial Sequence; identical to SEQ ID NO: 1722
  Synthetic polypeptide

SEQ ID NO: 1725 - protein, 121 aa, Artificial Sequence
  Synthetic polypeptide
MLGDWEKYKSSRKLIDRAYKGMPMNIRGPMWSVLLNTEEMKLKNPGRYQIMKEKGKRSSEHIQRIDRDVSGTLRKHIFFRDRYGTKSAGNMTWHSHVGSPLGSGSQSSMDLNHTSPKCHRY

SEQ ID NO: 1726 - protein, 245 aa, Artificial Sequence
  Synthetic polypeptide
IIMKYEKGHRAGLPEDKGPKPFRSYNNNVDHLGIVQSCPSWESAPQEGPCPPFPVPSPGLSPELERDRASPFWGSAPRLGPLQAPCSSSALPGLPYSETELPPLTAREAKQIRREISRKSKWVDMLGDWEKYKSSRKLIDRAYKGMPMNIRGPMWSVLLNIEEMKLKNPGRYQIMKEKGKRSSEHIQRIDRDVSGTLRKHIFFRDRYGTKSAGNMTWHSHVGSPLGSGSQSSMDLNHTSPKCHRY

SEQ ID NO: 1727 - protein, 201 aa, Artificial Sequence
  Synthetic polypeptide
MDVVEVAGSWWAQEREDIIMKYEKGHRAGLPEDKGPKPFRSYNNNVDHLGIVHETELPPLTAREAKQIRREISRKSKWVDMLGDWEKYKSSRKLIDRAYKGMPMNIRGPMWSVLLNIEEMKLKNPGRYQIMKEKGKRSSEHIQRIDRDVSGTLRKHIFFRDRYGTKSAGNMTWHSHVGSPLGSGSQSSMDLNHTSPKCHRY

SEQ ID NO: 1728 - protein, 201 aa, Artificial Sequence; identical to SEQ ID NO: 1727
  Synthetic polypeptide

SEQ ID NO: 1729 - protein, 201 aa, Artificial Sequence; identical to SEQ ID NO: 1727
  Synthetic polypeptide

SEQ ID NO: 1730 - protein, 201 aa, Artificial Sequence; identical to SEQ ID NO: 1727
  Synthetic polypeptide

SEQ ID NO: 1731 - protein, 56 aa, Artificial Sequence
  Synthetic polypeptide
MGQLIAKLMSIFGNQEHTVIIVGLDNEGKTTILYRFVVYRPVTQASPESLLGMQNH

SEQ ID NO: 1732 - protein, 56 aa, Artificial Sequence; identical to SEQ ID NO: 1731
  Synthetic polypeptide

SEQ ID NO: 1733 - protein, 212 aa, Artificial Sequence
  Synthetic polypeptide
MFSVFEEITRIVVKEMDAGGDMIAVRSLVDADRFRCFHLVGEKRTFFGCRHYTTGLTLMDILDTDGDKWLDELDSGLQGQKAEFQILDNVDSTGELIVRLPKEITISGSFQGFHHQKIKISENRISQQYLATLENRKLKRELPFSFRSINTRENLYLVTETLETVKEETLKSDRQYKFWSQISQGHLSYKHKEVGGQEPWCLEQSSSSVNIC

SEQ ID NO: 1734 - protein, 212 aa, Artificial Sequence; identical to SEQ ID NO: 1733
  Synthetic polypeptide

SEQ ID NO: 1735 - protein, 212 aa, Artificial Sequence; identical to SEQ ID NO: 1733
  Synthetic polypeptide

SEQ ID NO: 1736 - protein, 212 aa, Artificial Sequence; identical to SEQ ID NO: 1733
  Synthetic polypeptide

SEQ ID NO: 1737 - protein, 212 aa, Artificial Sequence; identical to SEQ ID NO: 1733
  Synthetic polypeptide

SEQ ID NO: 1738 - protein, 212 aa, Artificial Sequence; identical to SEQ ID NO: 1733
  Synthetic polypeptide

SEQ ID NO: 1739 - protein, 212 aa, Artificial Sequence; identical to SEQ ID NO: 1733
  Synthetic polypeptide

SEQ ID NO: 1740 - protein, 212 aa, Artificial Sequence; identical to SEQ ID NO: 1733
  Synthetic polypeptide

SEQ ID NO: 1741 - protein, 3 aa, Artificial Sequence
  Synthetic polypeptide
GYP

SEQ ID NO: 1742 - protein, 399 aa, Artificial Sequence
  Synthetic polypeptide
MPQTRSQAQATISFPKRKLSRALNKAKNSSDAKLEPTNVQTVTCSPRVKALPLSPRKRLGDDNLCNTPHLPPCSPPKQGKKENGPPHSHTLKGRRLVFDNQLTIKSPSKRELAKVHQNKILSSVRKSQEITTNSEQRCPLKKESACVRLFKQEGTCYQQAKLVLNTAVPDRLPAREREMDVIRNFLREHICGKKAGSLYLSGAPGTGKTACLSRILQDLKKELKGFKTIMLNCMSLRTAQAVFPAIAQEICQEEVSRPAGKDMMRKLEKHMTAEKGPMIVLVLDEMDQLDSKGQDVLYTLFEWPWLSNSHLVLIGIANTLDLTDRILPRLQAREKCKPQLLNFPPYTRNQIVTILQDRLNQVSRDQVLDNAAVQFCARKVSAVSGDVRKALDVCRNFFY

SEQ ID NO: 1743 - protein, 693 aa, Artificial Sequence
  Synthetic polypeptide
MSQVMSSPLLAGGHAVSLAPCDEPRRTLHPAPSPSLPPQCSYYTTEGWGAQALMAPVPCMGPPGRLQQAPQVEAKATCFLPSPGEKALGTPEDLDSYIDFSLESLNQMILELDPTFQLLPPGTGGSQAELAQSTMSMRKKEESEALDIKYIEVTSARSRCHDGPQHCSSPSVTPPFGSLRSGGLLLSRDVPRETRSSSESLIFSGNQGRGHQRPLPPSEGLSPRPPNSPSISIPCMGSKASSPHGLGSPLVASPRLEKRLGGLAPQRGSRISVLSASPVSDVSYMFGSSQSLLHSSNSSHQSSSRSLESPANSSSSLHSLGSVSLCTRPSDFQAPRNPTLTMGQPRTPHSPPLAKEHASSCPPSITNSMVDIPIVLINGCPEPGSSPPQRTPGHQNSVQPGAASPSNPCPATRSNSQTLSDAPFTTCPEGPARDMQPTMKFVMDTSKYWFKPNITREQAIELLRKEEPGAFVIRDSSSYRGSFGLALKVQEVPASAQSRPGEDSNDLIRHFLIESSAKGVHLKGADEEPYFGSLSAFVCQHSIMALALPCKLTIPQRELGGADGASDSTDSPASCQKKSAGCHTLYLSSVSVETLTGALAVQKAISTTFERDILPTPTVVHFKVTEQGITLTDVQRKVFFRRHYPLTTLRFCGMDPEQRKWQKYCKPSCSHHHPDPPGLSFLNHRRRPIDKIS

SEQ ID NO: 1744 - protein, 19 aa, Artificial Sequence
  Synthetic polypeptide
GVFPAPLPTHHPPLLWYGP

SEQ ID NO: 1745 - protein, 520 aa, Artificial Sequence
  Synthetic polypeptide
MSQVMSSPLLAGGHAVSLAPCDEPRRTLHPAPSPSLPPQCSYYTTEGWGAQALMAPVPCMGPPGRLQQAPQVEAKATCFLPSPGEKALGTPEDLDSYIDFSLESLNQMILELDPTFQLLPPGTGGSQAELAQSTMSMRKKEESEALDIKYIEVTSARSRCHDGPQHCSSPSVTPPFGSLRSGGLLLSRDVPRETRSSSESLIFSGNQGRGHQRPLPPSEGLSPRPPNSPSISIPCMGSKASSPHGLGSPLVASPRLEKRLGGLAPQRGSRISVLSASPVSDVSYMFGSSQSLLHSSNSSHQSSSRSLESPANSSSSLHSLGSVSLCTRPSDFQAPRNPTLTMGQPRTPHSPPLAKEHASSCPPSITNSMVDIPIVLINGCPEPGSSPPQRTPGHQNSVQPGAASPSNPCPATRSNSQTLSDAPFTTCPEGPARDMQPTMKFVMDTSKYWFKPNITREQAIELLRKEEPGAFVIRDSSSYRGSFGLALKVQEVPASAQSRPGTVAHASNPSTLGGRGRRIT

SEQ ID NO: 1746 - protein, 209 aa, Artificial Sequence
  Synthetic polypeptide
MTTCSRQFTSSSSMKGSCGIGGGIGGGSSRISSVLAGGSCRAPSTYGGGLSVSSSRFSSGGACGLGGGYGGGFSSSSSSFGSGFGGGYGGGLGAGLGGGFGGGFAGGDGLLVGSEKVTMQNLNDRLASYLDKVRALEEANADLEVKIRDWYQRQRPAEIKDYSPYFKTIEDLRNKILTATVDNANVLLQIDNARLAADDFRTNQVSEPL

SEQ ID NO: 1747 - protein, 193 aa, Artificial Sequence
  Synthetic polypeptide
MTTCSRQFTSSSSMKGSCGIGGGIGGGSSRISSVLAGGSCRAPSTYGGGLSVSSRFSSGGACGLGGGYGGGFSSSSSFGSGFGGGYGGGLGAGFGGGLGAGFGGGFAGGDGLLVGSEKVTMQNLNDRLASYLDKVRALEEANADLEVKIRHWYPRPCHTFIMCSPFPTNRAHLSCELHVHFCRSILSHNCPSR

SEQ ID NO: 1748 - protein, 160 aa, Artificial Sequence
  Synthetic polypeptide
MTTSIRQFTSSSSIKGSSGLGGGSSRTSCRLSGGLGAGSCRLGSAGGLGSTLGGSSYSSCYSFGSGGGYGSSFGGVDGLLAGGEKATMQNLNDRLASYLDKVRALEEANTELEVKIRHWYPRPCHTFIMCSPFPTNRAHLSCELHVHFCRSILSHNCPSR

SEQ ID NO: 1749 - protein, 145 aa, Artificial Sequence
  Synthetic polypeptide
GSSGLGGGSSRTSCRLSGGLGAGSCRLGSAGGLGSTLGGSSYSSCYSFGSGGGYGSSFGGVDGLLAGGEKATMQNLNDRLASYLDKVRALEEANTELEVKIRHWYPRPCHTFIMCSPFPTNRAHLSCELHVHFCRSILSHNCPSR

SEQ ID NO: 1750 - protein, 634 aa, Artificial Sequence
  Synthetic polypeptide
MEVMNLMEQPIKVTEWQQTYTYDSGIHSGANTCVPSVSSKGIMEEDEACGRQYTLKKTTTYTQGVPPSQGDLEYQMSTTARAKRVREAMCPGVSGEDSSLLLATQVEGQATNLQRLAEPSQLLKSAIVHLINYQDDAELATRALPELTKLLNDEDPVVVTKAAMIVNQLSKKEASRRALMGSPQLVAAVVRTMQNTSDLDTARCTTSILHNLSHHREGLLAIFKSGGIPALVRMLSSPVESVLFYAITTLHNLLLYQEGAKMAVRLADGLQKMVPLLNKNNPKFLAITTDCLQLLAYGNQESKLIILANGGPQALVQIMRNYSYEKLLWTTSRVLKVLSVCPSNKPAIVEAGGMQALGKHLTSNSPRLVQNCLWTLRNLSDVATKQEGLESVLKILVNQLSVDDVNVLTCATGTLSNLTCNNSKNKTLVTQNSGVEALIHAILRAGDKDDITEPAVCALRHLTSRHPEAEMAQNSVRLNYGIPAIVKLLNQPNQWPLVKATIGLIRNLALCPANHAPLQEAAVIPRLVQLLVKAHQDAQRHVAAGTQQPYTDGVRMEEIVEGCTGALHILARDPMNRMEIFRLNTIPLFVLHRQPGKRNVSPATTKNEIWPTTWMSLEVDSSLEPPERNAALPT

SEQ ID NO: 1751 - protein, 634 aa, Artificial Sequence; identical to SEQ ID NO: 1750
  Synthetic polypeptide

SEQ ID NO: 1752 - protein, 634 aa, Artificial Sequence; identical to SEQ ID NO: 1750
  Synthetic polypeptide

SEQ ID NO: 1753 - protein, 148 aa, Artificial Sequence
  Synthetic polypeptide
MPREIITLQLGQCGNQIGFEFWKQLCAEHGISPEGIVEEFATEGTDRKDVFFYQADDEHYIPRAVLLDLEPRVIHSILNSPYAKLYNPENIYLSEHGGGAGNNWASGFSQGEKIHEDIFDIIDREADGSDSLELQNSSRVIKVKDSLL

SEQ ID NO: 1754 - protein, 754 aa, Artificial Sequence
  Synthetic polypeptide
MPLPGGLWWLLCCRRGFTLLHRDYGDGELSGDGDEDEDEETFELRTPSPAGGGRGPLEVTLTQPVRSGPVSNRLQSWEETWSLIPEKGLPEDDPDIVVKGWLYREPRGGGARPWLPPRRAWFVLTRDSLDQFSSSGKGARRLGSLVLTSLCSVTGPERRRKETGLWSVTVSGRKHSVRLCSPRQAEAERWGVALREVIASKAPLETPTQLLLRDIQESCGDPEAVALIYLRNPILRHTSGALYAPLLPLPYGVSAPGPGYAPLREEAVRLFLALQALEGARRPGPLMQGVLQTCRDLPALRDELFLQLAKQTSGPAGPPGLPATQDPAALRYWQLLTCMSCTFRPGGAVRGHLLGHLERTEQALPDSELAEYARFIRKALGRTRGRELVPSLAEISALSQRQELLCTVHCPGAGACAVAIDSHTTAGEVARELVGRLGLARSRNAFALYEQRGAQERALAGGTLVADVLTRFENLAAEEAGLEDSPDSGWRLCLRLHGPLHPEGLSPDGHELPFLFEQAHALLLRGRPPPPDDTLRALAALRLQSLQRDFSPRVPLPRLDRLLPPPAPPREDPPRPTPRPPPSAALLAGALWSPGLAKRRAERARRGGAGRTAGSIAREGGGGAGTAAAVLGGWKRLRGMGRAEAMAAYLALAAQCPGFGAARYDVLELSTEPGRGAPQKLCLGLGAKAMSLSRPGETEPIHSVSYGHVAACQLMGPHTLALRVGESQLLLQSPQAEVAVSRGTSAWQQSKTPS

SEQ ID NO: 1755 - protein, 577 aa, Artificial Sequence
  Synthetic polypeptide
MPLPGGLWWLLCCRRGFTLLHRDYGDGELSGDGDEDEDEETFELRTPSPAGGGRGPLEVTLTQPVRSGPVSNRLQSWEETWSLIPEKGLPEDDPDIVVKGWLYREPRGGGARPWLPPRRAWFVLTRDSLDQFSSSGKGARRLGSLVLTSLCSVTGPERRRKETGLWSVTVSGRKHSVRLCSPRQAEAERWGVALREVIASKAPLETPTQLLLRDIQESCGDPEAVALIYLRNPILRHTSGALYAPLLPLPYGVSAPGPGYAPLREEAVRLFLALQALEGARRPGPLMQGVLQTCRDLPALRDELFLQLAKQTSGPAGPPGLPATQDPAALRYWQLLTCMSCTFRPGGAVRGHLLGHLERTEQALPDSELAEYARFIRKALGRTRGRELVPSLAEISALSQRQELLCTVHCPGAGACAVAIDSHTTAGEVARELVGRLGLARSRNAFALYEQRGAQERALAGGTLVADVLTSLAAEEAGLEDSPDSGWRLCLRLHGPLHPEGLSPDGHELPFLFEQPDSASLSAGAWSGYGHVAACQLMGPHTLALRVGESQLLLQSPQAEVAVSRGTSAWQQSKTPS

SEQ ID NO: 1756 - protein, 751 aa, Artificial Sequence
  Synthetic polypeptide
MPLPGGLWWLLCCRRGFTLLHRDYGDGELSGDGDEDEDEETFELRTPSPAGGGRGPLEVTLTQPVRSGPVSNRLQSWEETWSLIPEKGLPEDDPDIVVKGWLYREPRGGGARPWLPPRRAWFVLTRDSLDQFSSSGKGARRLGSLVLTSLCSVTGPERRRKETGLWSVTVSGRKHSVRLCSPRQAEAERWGVALREVIASKAPLETPTQLLLRDIQESCGDPEAVALIYLRNPILRHTSGALYAPLLPLPYGVSAPGPGYAPLREEAVRLFLALQALEGARRPGPLMQGVLQTCRDLPALRDELFLQLAKQTSGPAGPPGLPATQDPAALRYWQLLTCMSCTFRPGGAVRGHLLGHLERTEQALPDSELAEYARFIRKALGRTRGRELVPSLAEISALSQRQELLCTVHCPGAGACAVAIDSHTTAGEVARELVGRLGLARSRNAFALYEQRGAQERALAGGTLVADVLTSLAAEEAGLEDSPDSGWRLCLRLHGPLHPEGLSPDGHELPFLFEQAHALLLRGRPPPPDDTLRALAALRLQSLQRDFSPRVPLPRLDRLLPPPAPPREDPPRPTPRPPPSAALLAGALWSPGLAKRRAERARRGGAGRTAGSIAREGGGGAGTAAAVLGGWKRLRGMGRAEAMAAYLALAAQCPGFGAARYDVLELSTEPGRGAPQKLCLGLGAKAMSLSRPGETEPIHSVSYGHVAACQLMGPHTLALRVGESQLLLQSPQAEVAVSRGTSAWQQSKTPS

SEQ ID NO: 1757 - protein, 258 aa, Artificial Sequence
  Synthetic polypeptide
MGTEKESPEPDCQKQFQAAVSVIQNLPKNGSYRPSYEEMLRFYSYYKQATMGPCLVPRPGFWDPIGRYKWDAWNSLGKMSREEAMSAYITEMKLVAQKVIDTVPLGEVAEDMFGYFEPLYQVIPDMPRPPETFLRRVTGWKEQVVNGDVGAVSEPPCLPKEPAPPSPASLWAVTLPTPPQSPIHPGTWTPRFSVIPWSSWSLSWFGQSSGQHLEESVIPGTAPCPPQRKLHSLRKSSIFSGLPRLEISEDNEFCPLPF

SEQ ID NO: 1758 - protein, 258 aa, Artificial Sequence; identical to SEQ ID NO: 1757
  Synthetic polypeptide

SEQ ID NO: 1759 - protein, 258 aa, Artificial Sequence; identical to SEQ ID NO: 1757
  Synthetic polypeptide

SEQ ID NO: 1760 - protein, 238 aa, Artificial Sequence
  Synthetic polypeptide
MGTEKESPEPDCQKQFQAAVSVIQNLPKNGSYRPSYEEMLRFYSYYKQATMGPCLVPRPGFWDPIGRYKWDAWNSLGKMSREEAMSAYITEMKLVAQKVIDTVPLGEVAEDMFGYFEPLYQVIPDMPRPPETFLRRVTGWKEQVVNGDVGAVSEPPCLPKEPAPPSPESHSPRDLDSEVFCDSLEQLEPELVWTEQRAASGGKRDPRNSPVPPTKKAAQPQEVIHILWTPPFGNLRRQ

SEQ ID NO: 1761 - protein, 238 aa, Artificial Sequence; identical to SEQ ID NO: 1760
  Synthetic polypeptide

SEQ ID NO: 1762 - protein, 238 aa, Artificial Sequence; identical to SEQ ID NO: 1760
  Synthetic polypeptide

SEQ ID NO: 1763 - protein, 242 aa, Artificial Sequence
  Synthetic polypeptide
MGTEKESPEPDCQKQFQAAVSVIQNLPKNGSYRPSYEEMLRFYSYYKQATMGPCLVPRPGFWDPIGRYKWDAWNSLGKMSREEAMSAYITEMKLVAQKVIDTVPLGEVAEDMFGYFEPLYQVIPDMPRPPETFLRRVTGWKEQVVNGDVGAVSEPPCLPKEPAPPSPESHSPRDLDSEVFCDSLEQLEPELSSGQHLEESVIPGTAPCPPQRKLHSLRKSSIFSGLPRLEISEDNEFCPLPF

SEQ ID NO: 1764 - protein, 393 aa, Artificial Sequence
  Synthetic polypeptide
MVDIIAKVTRRQSRALPAQVDDPPEPVYANIERQPRATSPGAAAAPLPSPVWETHTDAGTGRPYYYNPDTGVTTWESPFEAAEGAASPATSPASVDSHVSLETEWGQYWDEESRRVFFYNPLTGETAWEDEAENEPEEELEMQPGLSPGSPGDPRPPTPETDYPESLTSYPEEDYSPVGSFGEPGPTSPLTTPPGWSCHVSQDKQMLYTNHFTQEQWVRLEDPHGKPYFYNPEDSSVRWELPQVPVPAPRSIHKSSQDGDTPAQASPPEEKTKTLDKAGVLHRTKTADKGKRLRKKHWSASWTVLEGGVLTFFKDSKTSAAGGLRQPSKFSTPEYTVELRGATLSWAPKDKSSRKNVLELRSRDGSEYLIQHDSEAIISTWHKAIAQGIQELR

SEQ ID NO: 1765 - protein, 274 aa, Artificial Sequence
  Synthetic polypeptide
MQPGLSPGSPGDPRPPTPETDYPESLTSYPEEDYSPVGSFGEPGPTSPLTTPPGWSCHVSQDKQMLYTNHFTQEQWVRLEDPHGKPYFYNPEDSSVRWELPQVPVPAPRSIHKSSQDGDTPAQASPPEEKVPAELDEVGSWEEVSPATAAVRTKTLDKAGVLHRTKTADKGKRLRKKHWSASWTVLEGGVLTFFKDSKTSAAGGLRQPSKFSTPEYTVELRGATLSWAPKDKSSRKNVLELRSRDGSEYLIQHDSEAIISTWHKAIAQGIQELR

SEQ ID NO: 1766 - protein, 274 aa, Artificial Sequence; identical to SEQ ID NO: 1765
  Synthetic polypeptide

SEQ ID NO: 1767 - protein, 247 aa, Artificial Sequence
  Synthetic polypeptide
MQPGLSPGSPGDPRPPTPETDYPESLTSYPEEDYSPVGSFGEPGPTSPLTTPPGWSCHVSQDKQMLYTNHFTQEQVPVPAPRSIHKSSQDGDTPAQASPPEEKVPAELDEVGSWEEVSPATAAVRTKTLDKAGVLHRTKTADKGKRLRKKHWSASWTVLEGGVLTFFKDSKTSAAGGLRQPSKFSTPEYTVELRGATLSWAPKDKSSRKNVLELRSRDGSEYLIQHDSEAIISTWHKAIAQGIQELR

SEQ ID NO: 1768 - protein, 615 aa, Artificial Sequence
  Synthetic polypeptide
MAADVVGDVYVLVEHPFEYTGKDGRRVAIRPNERYRLLRRSTEHWWHVRREPGGRPFYLPAQYVRELPALGNPAAAAPPGPHPSPAAPEPLAYDYRFVSAAATAGPDGAPEESGGRASSLCGPAQRGAATQRSSLAPGLPACLYLRPAAPVRPAQSLNDLACAAVSPPAGLLGSSGSFKACSVAGSWVCPRPLARSDSENVYEVIQDLHVPPPEESAEQVDDPPEPVYANIERQPRATSPGAAAAPLPSPVWETHTDAGTGRPYYYNPDTGVTTWESPFEAAEGAASPATSPASVDSHVSLETEWGQYWDEESRRVFFYNPLTGETAWEDEAENEPEEELEMQPGLSPGSPGDPRPPTPETDYPESLTSYPEEDYSPVGSFGEPGPTSPLTTPPGWSCHVSQDKQMLYTNHFTQEQWVRLEDPHGKPYFYNPEDSSVRWELPQVPVPAPRSIHKSSQDGDTPAQASPPEEKVPAELDEVGSWEEVSPATAAVRTKTLDKAGVLHRTKTADKGKRLRKKHWSASWTVLEGGVLTFFKDSKTSAAGGLRQPSKFSTPEYTVELRGATLSWAPKDKSSRKNVLELRSRDGSEYLIQHDSEAIISTWHKAIAQGIQELR

SEQ ID NO: 1769 - protein, 588 aa, Artificial Sequence
  Synthetic polypeptide
MAADVVGDVYVLVEHPFEYTGKDGRRVAIRPNERYRLLRRSTEHWWHVRREPGGRPFYLPAQYVRELPALGNPAAAAPPGPHPSPAAPEPLAYDYRFVSAAATAGPDGAPEESGGRASSLCGPAQRGAATQRSSLAPGLPACLYLRPAAPVRPAQSLNDLACAAVSPPAGLLGSSGSFKACSVAGSWVCPRPLARSDSENVYEVIQDLHVPPPEESAEQVDDPPEPVYANIERQPRATSPGAAAAPLPSPVWETHTDAGTGRPYYYNPDTGVTTWESPFEAAEGAASPATSPASVDSHVSLETEWGQYWDEESRRVFFYNPLTGETAWEDEAENEPEEELEMQPGLSPGSPGDPRPPTPETDYPESLTSYPEEDYSPVGSFGEPGPTSPLTTPPGWSCHVSQDKQMLYTNHFTQEQVPVPAPRSIHKSSQDGDTPAQASPPEEKVPAELDEVGSWEEVSPATAAVRTKTLDKAGVLHRTKTADKGKRLRKKHWSASWTVLEGGVLTFFKDSKTSAAGGLRQPSKFSTPEYTVELRGATLSWAPKDKSSRKNVLELRSRDGSEYLIQHDSEAIISTWHKAIAQGIQELR

SEQ ID NO: 1770 - protein, 593 aa, Artificial Sequence
  Synthetic polypeptide
MAADVVGDVYVLVEHPFEYTGKDGRRVAIRPNERYRLLRRSTEHWWHVRREPGGRPFYLPAQYVRELPALGNPAAAAPPGPHPSPAAPEPLAYDYRFVSAAATAGPDGAPEESGGRASSLCGPAQRGAATQRSSLAPGLPACLYLRPAAPVRPAQSLNDLACAAVSPPAGLLGSSGSFKACSVAGSWVCPRPLARSDSENVYEVIQDLHVPPPEESAEQVDDPPEPVYANIERQPRATSPGAAAAPLPSPVWETHTDAGTGRPYYYNPDTGVTTWESPFEAAEGAASPATSPASVDSHVSLETEWGQYWDEESRRVFFYNPLTGETAWEDEAENEPEEELEMQPGLSPGSPGDPRPPTPETDYPESLTSYPEEDYSPVGSFGEPGPTSPLTTPPGWSCHVSQDKQMLYTNHFTQEQWVRLEDPHGKPYFYNPEDSSVRWELPQVPVPAPRSIHKSSQDGDTPAQASPPEEKTKTLDKAGVLHRTKTADKGKRLRKKHWSASWTVLEGGVLTFFKDSKTSAAGGLRQPSKFSTPEYTVELRGATLSWAPKDKSSRKNVLELRSRDGSEYLIQHDSEAIISTWHKAIAQGIQELR

SEQ ID NO: 1771 - protein, 709 aa, Artificial Sequence
  Synthetic polypeptide
METKVHLFCQAEENIDLLDDGSNSFATDLSSGTINHKKYIKFSKTIEKEISPEIRSLSPEYKKIFETSIIFCGEEKSSDFSGEKKVGRKSLQVQQHSKRTEIIPPFLKLSKEKVTRKENSLCKLPNQYSVHKTSSPLCTSSAITREKEMLSNLYMTLYDEVTHGYLHSKELSALHKACKIFSKIRSGKIYVNDLPVILCILRISISDLEMRQALKTVDIDAFQDALKIFCRIKGGRVSTDDVFAVLDSMGIPINREILEEVTKHTYIDSNHMVDIGDIIFTLNELQEQYEDVSITEGSPLNEITSDRKLSSVAGCYLKYKKKNSLSSKLPEPSISKKLNKKSNQYYSKIMENDDLESKRPKNTWQIRKFLGGVGSSNVGVQEPYSKNGINFKKHSEKGEIHDSKSKPQSLKSSTSLSKSLDKSDISSIPKLQKPAVRKHSSLQKQVSSTEKTAISTLENFCEAISKLQENYIAAEELQSILPSTGINLLDEEFQKIVTDTSRNENGMVELDDFVNALAKERSFPECNALPGVIKAIDKIKDKNVDYEDLNTCLQNFGIYLSKPEFKKITELTEAGETKKVNFKEFIDTMMSNTECFSEKLVLPDAIETLDDLRKETMSVSDLWNTLSSLNSNLKKDEFLAALELVTVDAGLYCCHLGSLQPPCLILLPQPAKCLQLQARAATPDWFSYFFGGDGVSLCWPGWSPAPSRE

SEQ ID NO: 1772 - protein, 613 aa, Artificial Sequence
  Synthetic polypeptide
METKVHLFCQAEENIDLLDDGSNSFATDLSSGTINHKKYIKFSKTIEKEISPEIRSLSPEYKKIFETSIIFCGEEKSSDFSGEKKVGRKSLQVQQHSKRTEIIPPFLKLSKEKVTRKENSLCKLPNQYSVHKTSSPLCTSSAITREKEMLSNLYMTLYDEVTHGYLHSKELSGNHMVDIGDIIFTLNELQEQYEDVSITEGSPLNEITSDRKLSSVAGCYLKYKKKNSLSSKLPEPSISKKLNKKSNQYYSKIMENDDLESKRPKNTWQIRKFLGGVGSSNVGVQEPYSKNGINFKKHSEKGEIHDSKSKPQSLKSSTSLSKSLDKSDISSIPKLQKPAVRKHSSLQKQVSSTEKTAISTLENFCEAISKLQENYIAAEELQSILPSTGINLLDEEFQKIVTDTSRNENGMVELDDFVNALAKERSFPECNALPGVIKAIDKIKDKNVDYEDLNTCLQNFGIYLSKPEFKKITELTEAGETKKVNFKEFIDTMMSNTECFSEKLVLPDAIETLDDLRKETMSVSDLWNTLSSLNSNLKKDEFLAALELVTVDAGLYCCHLGSLQPPCLILLPQPAKCLQLQARAATPDWFSYFFGGDGVSLCWPGWSPAPSRE

SEQ ID NO: 1773 - protein, 235 aa, Artificial Sequence
  Synthetic polypeptide
EELQSILPSTGINLLDEEFQKIVTDTSRNENGMVELDDFVNALAKERSFPECNALPGVIKAIDKIKDKNVDYEDLNTCLQNFGIYLSKPEFKKITELTEAGETKKVNFKEFIDTMMSNTECFSEKLVLPDAIETLDDLRKETMSVSDLWNTLSSLNSNLKKDEFLAALELVTVDAGLYCCHLGSLQPPCLILLPQPAKCLQLQARAATPDWFSYFFGGDGVSLCWPGWSPAPSRE

SEQ ID NO: 1774 - protein, 662 aa, Artificial Sequence
  Synthetic polypeptide
METKVHLFCQAEENIDLLDDGSNSFATDLSSGTINHKKYIKFSKTIEKEISPEIRSLSPEYKKIFETSIIFCGEEKSSDFSGEKKVGRKSLQVQQHSKRTEIIPPFLKLSKEKVTRKENSLCKLPNQYSVHKTSSPLCTSSAITREKEMLSNLYMTLYDEVTHGYLHSKELSALHKACKIFSKIRSGKIYVNDLPVILCILRISISDLEMRQALKTVDIDAFQDALKIFCRIKGGRVSTDDVFAVLDSMGIPINREILEEVTKHTYIDSNHMVDIGDIIFTLNELQEQYEDVSITEGSPLNEITSDRKLSSVAGCYLKYKKKNSLSSKLPEPSISKKLNKKSNQYYSKIMENDDLESKRPKNTWQIRKFLGGVGSSNVGVQEPYSKNGINFKKHSEKGEIHDSKSKPQSLKSSTSLSKSLDKSDISSIPKLQKPAVRKHSSLQKQVSSTEKTAISTLENFCEAISKLQENYIAAEELQSILPSTGINLLDEEFQKIVTDTSRNENGMVELDDFVNALAKERSFPECNALPGVIKAIDKIKDKNVDYEDLNTCLQNFGIYLSKPEFKKITELTEAGETKKVNFKEFIDTMMSNTECFSEKLVLPDAIETLDDLRKETMSVSDLWNTLSSLNSNLKKDEFLAALELVTVDACQVPAIAGARRHA

SEQ ID NO: 1775 - protein, 566 aa, Artificial Sequence
  Synthetic polypeptide
METKVHLFCQAEENIDLLDDGSNSFATDLSSGTINHKKYIKFSKTIEKEISPEIRSLSPEYKKIFETSIIFCGEEKSSDFSGEKKVGRKSLQVQQHSKRTEIIPPFLKLSKEKVTRKENSLCKLPNQYSVHKTSSPLCTSSAITREKEMLSNLYMTLYDEVTHGYLHSKELSGNHMVDIGDIIFTLNELQEQYEDVSITEGSPLNEITSDRKLSSVAGCYLKYKKKNSLSSKLPEPSISKKLNKKSNQYYSKIMENDDLESKRPKNTWQIRKFLGGVGSSNVGVQEPYSKNGINFKKHSEKGEIHDSKSKPQSLKSSTSLSKSLDKSDISSIPKLQKPAVRKHSSLQKQVSSTEKTAISTLENFCEAISKLQENYIAAEELQSILPSTGINLLDEEFQKIVTDTSRNENGMVELDDFVNALAKERSFPECNALPGVIKAIDKIKDKNVDYEDLNTCLQNFGIYLSKPEFKKITELTEAGETKKVNFKEFIDTMMSNTECFSEKLVLPDAIETLDDLRKETMSVSDLWNTLSSLNSNLKKDEFLAALELVTVDACQVPAIAGARRHA

SEQ ID NO: 1776 - protein, 188 aa, Artificial Sequence
  Synthetic polypeptide
EELQSILPSTGINLLDEEFQKIVTDTSRNENGMVELDDFVNALAKERSFPECNALPGVIKAIDKIKDKNVDYEDLNTCLQNFGIYLSKPEFKKITELTEAGETKKVNFKEFIDTMMSNTECFSEKLVLPDAIETLDDLRKETMSVSDLWNTLSSLNSNLKKDEFLAALELVTVDACQVPAIAGARRHA

SEQ ID NO: 1777 - protein, 1030 aa, Artificial Sequence
  Synthetic polypeptide
MFSFVDLRLLLLLAATALLTHGQEEGQVEGQDEDIPPITCVQNGLRYHDRDVWKPEPCRICVCDNGKVLCDDVICDETKNCPGAEVPEGECCPVCPDGSESPTDQETTGVEGPKGDTGPRGPRGPAGPPGRDGIPGQPGLPGPPGPPGPPGPPGLGGNFAPQLSYGYDEKSTGGISVPGPMGPSGPRGLPGPPGAPGPQGFQGPPGEPGEPGASGPMGPRGPPGPPGKNGDDGEAGKPGRPGERGPPGPQGARGLPGTAGLPGMKGHRGFSGLDGAKGDAGPAGPKGEPGSPGENGAPGQMGPRGLPGERGRPGAPGPAGARGNDGATGAAGPPGPTGPAGPPGFPGAVGAKGEAGPQGPRGSEGPQGVRGEPGPPGPAGAAGPAGNPGADGQPGAKGANGAPGIAGAPGFPGARGPSGPQGPGGPPGPKGNSGEPGAPGSKGDTGAKGEPGPVGVQGPPGPAGEEGKRGARGEPGPTGLPGPPGERGGPGSRGFPGADGVAGPKGPAGERGSPGPAGPKGSPGEAGRPGEAGLPGAKGLTGSPGSPGPDGKTGPPGPAGQDGRPGPPGPPGARGQAGVMGFPGPKGAAGEPGKAGERGVPGPPGAVGPAGKDGEAGAQGPPGPAGPAGERGEQGPAGSPGFQGLPGPAGPPGEAGKPGEQGVPGDLGAPGPSGARGERGFPGERGVQGPPGPAGPRGANGAPGNDGAKGDAGAPGAPGSQGAPGLQGMPGERGAAGLPGPKGDRGDAGPKGADGSPGKDGVRGLTGPIGPPGPAGAPGDKGESGPSGPAGPTGARGAPGDRGEPGPPGPAGFAGPPGADGQPGAKGEPGDAGAKGDAGPPGPAGPAGPPGPIGNVGAPGAKGARGSAGPPGATGFPGAAGRVGPPGPSGNAGPPGPPGPAGKEGGKGPRGETGPAGRPGEVGPPGPPGPAGEKGSPGADGPAGAPGTPGPQGIAGQRGVVGLPGQRGERGFPGLPGPSGEPGKQGPSGASGERGPPGPMGPPGLAGPPGESGRTGAHTCNPSTLGGRGG

SEQ ID NO: 1778 - protein, 394 aa, Artificial Sequence
  Synthetic polypeptide
MAGASVKVAVRVRPFNARETSQDAKCVVSMQGNTTSIINPKQSKDAPKSFTFDYSYWSHTSTEDPQFASQQQVYRDIGEEMLLHAFEGYNVCIFAYGQTGAGKSYTMMGRQEPGQQGIVPQLCEDLFSRVSENQSAQLSYSVEVSYMEIYCERVRDLLNPKSRGSLRVREHPILGPYVQDLSKLAVTSYADIADLMDCGNKARTVAATNMNETSSRSHAVFTIVFTQRCHDQLTGLDSEKVSKISLVDLAGSERADSSGARGMRLKEGANINKSLTTLGKVISALADMQSKKRKSDFIPYRDSVLTWLLKENLGGNSRTAMIAALSPADINYEETLSTLRYADRTKQIRCNAIINEDPNARLIRELQEEVARLRELLMAQGLSASALEGQTVNC

SEQ ID NO: 1779 - protein, 385 aa, Artificial Sequence
  Synthetic polypeptide
MGAKESRIGFLSYEEALRRVTDVELKRLKDAFKRTCGLSYYMGQHCFIREVLGDGVPPKVAEVIYCSFGGTSKGLHFNNLIVGLVLLTRGKDEEKAKYIFSLFSSESGNYVIREEMERMLHVVDGKVPDTLRKCFSEGEKVNYEKFRNWLFLNKDAFTFSRWLLSGGVYVTLTDDSDTPTFYQTLAGVTHLEESDIIDLEKRYWLLKAQSRTGRFDLETFGPLVSPPIRPSLSEGLFNAFDENRDNHIDFKEISCGLSACCRGPLAERQKFCFKVFDVDRDGVLSRVELRDMVVALLEVWKDNRTDDIPELHMDLSDIVEGILNAHDTTKMGHLTLEDYQIWSVKNVLANEFLNLLFQVCHIVLGLRPATPEEEGQIIRKSVFKY

SEQ ID NO: 1780 - protein, 385 aa, Artificial Sequence; identical to SEQ ID NO: 1779
  Synthetic polypeptide

SEQ ID NO: 1781 - protein, 55 aa, Artificial Sequence
  Synthetic polypeptide
MGHLTLEDYQIWSVKNVLANEFLNLLFQVCHIVLGLRPATPEEEGQIIRKSVFKY

SEQ ID NO: 1782 - protein, 382 aa, Artificial Sequence
  Synthetic polypeptide
MRYVRRCVPLPGAPARVTDVELKRLKDAFKRTCGLSYYMGQHCFIREVLGDGVPPKVAEVIYCSFGGTSKGLHFNNLIVGLVLLTRGKDEEKAKYIFSLFSSESGNYVIREEMERMLHVVDGKVPDTLRKCFSEGEKVNYEKFRNWLFLNKDAFTFSRWLLSGGVYVTLTDDSDTPTFYQTLAGVTHLEESDIIDLEKRYWLLKAQSRTGRFDLETFGPLVSPPIRPSLSEGLFNAFDENRDNHIDFKEISCGLSACCRGPLAERQKFCFKVFDVDRDGVLSRVELRDMVVALLEVWKDNRTDDIPELHMDLSDIVEGILNAHDTTKMGHLTLEDYQIWSVKNVLANEFLNLLFQVCHIVLGLRPATPEEEGQIIRKSVFKY

SEQ ID NO: 1783 - protein, 89 aa, Artificial Sequence
  Synthetic polypeptide
MGAKESRIGFLSYEEALRRVTDVELKRLKDAFKRTCGLSYYMGQHCFIREVLGDGVPPKVAEVCHIVLGLRPATPEEEGQIIRKSVFKY

SEQ ID NO: 1784 - protein, 366 aa, Artificial Sequence
  Synthetic polypeptide
MREPALAASAMAYHPFHAPRPADFPMSAFLAAAQPSFFPALALPPGALAKPLPDPGLAGAAAAAAAAAAAAEAGLHVSALGPHPPAAHLRSLKSLEPEDEVEDDPKVTLEAKELWDQFHKLGTEMVITKSGRRMFPPFKVRVSGLDKKAKYILLMDIVAADDCRYKFHNSRWMVAGKADPEMPKRMYIHPDSPATGEQWMAKPVAFHKLKLTNNISDKHGFTILNSMHKYQPRFHIVRANDILKLPYSTFRTYVFPETDFIAVTAYQNDKITQLKIDNNPFAKGFRDTGNGRREKRKQLTLPSLRLYEEHCKPERDGAESDASSCDPPPAREPPTSPGAAPSPLRLHRARGDLQLPFARLQQLLRL

SEQ ID NO: 1785 - protein, 11 aa, Artificial Sequence
  Synthetic polypeptide
CPEVGQIFFSI

SEQ ID NO: 1786 - protein, 527 aa, Artificial Sequence
  Synthetic polypeptide
MSASFVPNGASLEDCHCNLFCLADLTGIKWKKYVWQGPTSAPILFPVTEEDPILSSFSRCLKADVLGVWRRDQRPGRRELWIFWWGEDPSFADLIHHDLSEEEDGVWENGLSYECRTLLFKAVHNLLERCLMNRNFVRIGKWFVKPYEKDEKPINKSEHLSCSFTFFLHGDSNVCTSVEINQHQPVYLLSEEHITLAQQSNSPFQVILCPFGLNGTLTGQAFKMSDSATKKLIGEWKQFYPISCCLKEMSEEKQEDMDWEDDSLAAVEVLVAGVRMIYPACFVLVPQSDIPTPSPVGSTHCSSSCLGVHQVPASTRDPAMSSVTLTPPTSPEEVQTVDPQSVQKWVKFSSVSDGFNSDSTSHHGGKIPRKLANHVVDRVWQECNMNRAQNKRKYSASSGGLCEEATAAKVASWDFVEATQRTNCSCLRELNFLDSFAFWSWLIGGTNRRLEGERREEARVFPQSLFEPTPAAAPLCPINTAPSSWSQLLLSRSCYGSSTILSFWDMVRLHHLIVLSVLEVIEAPCYY

SEQ ID NO: 1787 - protein, 117 aa, Artificial Sequence
  Synthetic polypeptide
MALDGPEQVWRVHPEGKFVVDVDKNIDINDVTPNCRVALRNDSYTLHKILPNKVDPLVSLMMVEKVPDSTYEMIGGLDKQIKEIKEVIELPVKHPELFEALGIAQPKQGTQHSVNVH

SEQ ID NO: 1788 - protein, 194 aa, Artificial Sequence
  Synthetic polypeptide
MALDGPEQMELEEGKAGSGLRQYYLSKIEELQLIVNDKSQNLRRLQAQRNELNAKVRLLREELQLLQEQGSYVGEVVRAMDKKKVLVKVHPEGKFVVDVDKNIDINDVTPNCRVALRNDSYTLHKILPNKVDPLVSLMMVEKVPDSTYEMIGGLDKQIKEIKEVIELPVKHPELFEALGIAQPKQGTQHSVNVH

SEQ ID NO: 1789 - protein, 186 aa, Artificial Sequence
  Synthetic polypeptide
MELEEGKAGSGLRQYYLSKIEELQLIVNDKSQNLRRLQAQRNELNAKVRLLREELQLLQEQGSYVGEVVRAMDKKKVLVKVHPEGKFVVDVDKNIDINDVTPNCRVALRNDSYTLHKILPNKVDPLVSLMMVEKVPDSTYEMIGGLDKQIKEIKEVIELPVKHPELFEALGIAQPKQGTQHSVNVH

SEQ ID NO: 1790 - protein, 186 aa, Artificial Sequence; identical to SEQ ID NO: 1789
  Synthetic polypeptide

SEQ ID NO: 1791 - protein, 186 aa, Artificial Sequence; identical to SEQ ID NO: 1789
  Synthetic polypeptide

SEQ ID NO: 1792 - protein, 186 aa, Artificial Sequence; identical to SEQ ID NO: 1789
  Synthetic polypeptide

SEQ ID NO: 1793 - protein, 186 aa, Artificial Sequence; identical to SEQ ID NO: 1789
  Synthetic polypeptide

SEQ ID NO: 1794 - protein, 186 aa, Artificial Sequence; identical to SEQ ID NO: 1789
  Synthetic polypeptide

SEQ ID NO: 1795 - protein, 175 aa, Artificial Sequence
  Synthetic polypeptide
MALDGPEQMELEEGKAGSGLRQYYLSKIEELQLIVNDKSQNLRRLQAQRNELNAKVRLLREELQLLQEQGSYVGEVVRAMDKKKVLVKVTPNCRVALRNDSYTLHKILPNKVDPLVSLMMVEKVPDSTYEMIGGLDKQIKEIKEVIELPVKHPELFEALGIAQPKQGTQHSVNVH

SEQ ID NO: 1796 - protein, 175 aa, Artificial Sequence; identical to SEQ ID NO: 1795
  Synthetic polypeptide

SEQ ID NO: 1797 - protein, 4 aa, Artificial Sequence
  Synthetic polypeptide
QLMR

SEQ ID NO: 1798 - protein, 443 aa, Artificial Sequence
  Synthetic polypeptide
MRSRVAVRACHKVCRCLLSGFGGRVDAGQPELLTERSSPKGGHVKSHAELEGNGEHPEAPGSGEGSEALLEICQRRHFLSGSKQQLSRDSLLSGCHPGFGPLGVELRKNLAAEWWTSVVVFREQVFPVDALHHKPGPLLPGDSAFRLVSAETLREILQDKELSKEQLVAFLENVLKTSGKLRENLLHGALEHYVNCLDLVNKRLPYGLAQIGVCFHPVFDTKQIRNGVKSIGEKTEASLVWFTPPRTSNQWLDFWLRHRLQWWRKFAMSPSNFSSSDCQDEEGRKGNKLYYNFPWGKELIETLWNLGDHELLHMYPGNVSKLHGRDGRKNVVPCVLSVNGDLDRGMLAYLYDSFQLTENSFTRKKNLHRKVLKLHPCLAPIKVALDVGRGPTLELRQLFRRLRHKNHLNLGGGGCSEPRSQHCTPAWVTEQDPASEKKKKKKK

SEQ ID NO: 1799 - protein, 196 aa, Artificial Sequence
  Synthetic polypeptide
SNQWLDFWLRHRLQWWRKFAMSPSNFSSSDCQDEEGRKGNKLYYNFPWGKELIETLWNLGDHELLHMYPGNVSKLHGRDGRKNVVPCVLSVNGDLDRGMLAYLYDSFQLTENSFTRKKNLHRKVLKLHPCLAPIKVALDVGRGPTLELRQLFRRLRHKNHLNLGGGGCSEPRSQHCTPAWVTEQDPASEKKKKKKK

SEQ ID NO: 1800 - protein, 223 aa, Artificial Sequence
  Synthetic polypeptide
MTIRHQGQQYRPRMAFLQKIEALVKDMQNPETGVRMQNQRVLVTSVPHAMTGSDVLQWIVQRLWISSLEAQNLGNFIVRYGYIYPLQDPKNLILKPDGSLYRFQTPYFWPTQQWPAEDTDYAIYLAKRNIKKKGILEEYEKENYNFLNQKMNYKWDFVIMQAKEQYRAGKERNKADRYALDCQEKAYWLVHRCPPGMDNVLDYGLDRVTNPNEVKVNQLSIYL

SEQ ID NO: 1801 - protein, 223 aa, Artificial Sequence; identical to SEQ ID NO: 1800
  Synthetic polypeptide

SEQ ID NO: 1802 - protein, 522 aa, Artificial Sequence
  Synthetic polypeptide
MSTNENANTPAARLHRFKNKGKDSTEMRRRRIEVNVELRKAKKDDQMLKRRNVSSFPDDATSPLQENRNNQGTVNWSVDDIVKGINSSNVENQLQATQAARKLLSREKQPPIDNIIRAGLIPKFVSFLGRTDCSPIQFESAWALTNIASGTSEQTKAVVDGGAIPAFISLLASPHAHISEQAVWALGNIAGDGSVFRDLVIKYGAVDPLLALLAVPDMSSLACGYLRNLTWTLSNLCRNKNPAPPIDAVEQILPTLVRLLHHDDPEVLADTCWAISYLTDGPNERIGMVVKTGVVPQLVKLLGASELPIVTPALRAIGNIVTGTDEQTQVVIDAGALAVFPSLLTNPKTNIQKEATWTMSNITAGRQDQIQQVVNHGLVPFLVSVLSKADFKTQKEAVWAVTNYTSGGTVEQIVYLVHCGIIEPLMNLLTAKDTKIILVILDAISNIFQARWLMPVITALWKSEVGGSPEVKSSRPAWPTWRNPVSAKNARISHVWWWAPIIPATQKAEAGESLEPGKRKLQ

SEQ ID NO: 1803 - protein, 522 aa, Artificial Sequence; identical to SEQ ID NO: 1802
  Synthetic polypeptide

SEQ ID NO: 1804 - protein, 371 aa, Artificial Sequence
  Synthetic polypeptide
MPGLRRDRLLTLLLLGALLSADLYFHLWPQVQRQLRPRERPRGCPCTGRASSLARDSAAAASDPGTIVHNFSRTEPRTEPAGGSHSGSSSKLQALFAHPLYNVPEEPPLLGAEDSLLASQEALRYYRRKVARWNRRHKMYREQMNLTSLDPPLQLRLEASWVQFHLGINRHGLYSRSSPVVSKLLQDMRHFPTISADYSQDEKALLGACDCTQIVKPSGVHLKLVLRFSDFGKAMFKPMRQQRDEETPVDFFYFIDFQRHNAEIAAFHLDRILDFRRVPPTVGRIVNVTKEILEVTKNEILQSVFFVSPASNVCFFAKCPYMCKTEYAVCGNPHLLEGSLSAFLPSLNLAPRLSVPNPWIRSYTLAGKEET

SEQ ID NO: 1805 - protein, 1617 aa, Artificial Sequence
  Synthetic polypeptide
MSKRRMSVGQQTWALLCKNCLKKWRMKRQTLLEWLFSFLLVLFLYLFFSNLHQVHDTPQMSSMDLGRVDSFNDTNYVIAFAPESKTTQEIMNKVASAPFLKGRTIMGWPDEKSMDELDLNYSIDAVRVIFTDTFSYHLKFSWGHRIPMMKEHRDHSAHCQAVNEKMKCEGSEFWEKGFVAFQAAINAAIIEIATNHSVMEQLMSVTGVHMKILPFVAQGGVATDFFIFFCIISFSTFIYYVSVNVTQERQYITSLMTMMGLRESAFWLSWGLMYAGFILIMATLMALIVKSAQIVVLTGFVMVFTLFLLYGLSLITLAFLMSVLIKKPFLTGLVVFLLIVFWGILGFPALYTRLPAFLEWTLCLLSPFAFTVGMAQLIHLDYDVNSNAHLDSSQNPYLIIATLFMLVFDTLLYLVLTLYFDKILPAEYGHRCSPLFFLKSCFWFQHGRANHVVLENETDSDPTPNDCFEPVSPEFCGKEAIRIKNLKKEYAGKCERVEALKGVVFDIYEGQITALLGHSGAGKTTLLNILSGLSVPTSGSVTVYNHTLSRMADIENISKFTGFCPQSNVQFGFLTVKENLRLFAKIKGILPHEVEKEVQRVVQELEMENIQDILAQNLSGGQNRKLTFGIAILGDPQVLLLDEPTAGLDPLSRHRIWNLLKEGKSDRVILFSTQFIDEADILADRKVFISNGKLKCAGSSLFLKKKWGIGYHLSLHLNERCDPESITSLVKQHISDAKLTAQSEEKLVYILPLERTNKFPELYRDLDRCSNQGIEDYGVSITTLNEVFLKLEGKSTIDESDIGIWGQLQTDGAKDIGSLVELEQVLSSFHETRKTISGVALWRQQVCAIAKVRFLKLKKERKSLWTILLLFGISFIPQLLEHLFYESYQKSYPWELSPNTYFLSPGQQPQDPLTHLLVINKTGSTIDNFLHSLRRQNIAIEVDAFGTRNGTDDPSYNGAIIVSGDEKDHRFSIACNTKRLNCFPVLLDVISNGLLGIFNSSEHIQTDRSTFFEEHMDYEYGYRSNTFFWIPMAASFTPYIAMSSIGDYKKKAHSQLRISGLYPSAYWFGQALVDVSLYFLILLLMQIMDYIFSPEEIIFIIQNLLIQILCSIGYVSSLVFLTYVISFIFRNGRKNSGIWSFFFLIVVIFSIVATDLNEYGFLGLFFGTMLIPPFTLIGSLFIFSEISPDSMDYLGASESEIVYLALLIPYLHFLIFLFILRCLEMNCRKKLMRKDPVFRISPRSNAIFPNPEEPEGEEEDIQMERMRTVNAMAVRDFDETPVIIASCLRKEYAGKKKNCFSKRKKKIATRNVSFCVKKGEVIGLLGHNGAGKSTTIKMITGDTKPTAGQVILKGSGGGEPLGFLGYCPQENALWPNLTVRQHLEVYAAVKGLRKGDAMIAITRLVDALKLQDQLKAPVKTLSEGIKRKLCFVLSILGNPSVVLLDEPSTGMDPEGQQQMWQVIRATFRNTERGALLTTHYMAEAEAVCDRVAIMVSGRLRCIGSIQHLKSKFGKDYLLEMKLKNLAQMEPLHAEILRLFPQAAQQERFSSLMVYKLPVEDVRPLSQAFFKLEIVKQSFDLEEYSLSQSTLEQVFLELSKEQELGDLEEDFDPSHCLQ

SEQ ID NO: 1806 - protein, 1579 aa, Artificial Sequence
  Synthetic polypeptide
MSKRRMSVGQQTWALLCKNCLKKWRMKRQTLLEWLFSFLLVLFLYLFFSNLHQVHDTPQMSSMDLGRVDSFNDTNYVIAFAPESKTTQEIMNKVASAPFLKGRTIMGWPDEKSMDELDLNYSIDAVRVIFTDTFSYHLKFSWGHRIPMMKEHRDHSAHCQAVNEKMKCEGSEFWEKGFVAFQAAINAAIIEIATNHSVMEQLMSVTGVHMKILPFVAQGGVATDFFIFFCIISFSTFIYYVSVNVTQERQYITSLMTMMGLRESAFWLSWGLMYAGFILIMATLMALIVKSAQIVVLTGFVMVFTLFLLYGLSLITLAFLMSVLIKKPFLTGLVVFLLIVFWGILGFPALYTRLPAFLEWTLCLLSPFAFTVGMAQLIHLDYDVNSNAHLDSSQNPYLIIATLFMLVFDTLLYLVLTLYFDKILPAEYGHRCSPLFFLKSCFWFQHGRANHVVLENETDSDPTPNDCFEPVSPEFCGKEAIRIKNLKKEYAGKCERVEALKGVVFDIYEGQITALLGHSGAGKTTLLNILSGLSVPTSGSVTVYNHTLSRMADIENISKFTGFCPQSNVQFGFLTVKENLRLFAKIKGILPHEVEKEVQRVVQELEMENIQDILAQNLSGGQNRKLTFGIAILGDPQVLLLDEPTAGLDPLSRHRIWNLLKEGKSDRVILFSTQFIDEADILADRKVFISNGKLKCAGSSLFLKKKWGIGYHLSLHLNERCDPESITSLVKQHISDAKLTAQSEEKLVYILPLERTNKFPELYRDLDRCSNQGIEDYGVSITTLNEVFLKLEGKSTIDESDIGIWGQLQTDGAKDIGSLVELEQVLSSFHETRKTISGVALWRQQVCAIAKVRFLKLKKERKSLWTILLLFGISFIPQLLEHLFYESYQKSYPWELSPNTYFLSPGQQPQDPLTHLLVINKTGSTIDNFLHSLRRQNIAIEVDAFGTRNGTDDPSYNGAIIVSGDEKDHRFSIACNTKRLNCFPVLLDVISNGLLGIFNSSEHIQTDRSTFFEEHMDYEYGYRSNTFFWIPMAASFTPYIAMSSIGDYKKKAHSQLRISGLYPSAYWFGQALVDVSLYFLILLLMQIMDYIFSPEEIIFIIQNLLIQVVIFSIVATDLNEYGFLGLFFGTMLIPPFTLIGSLFIFSEISPDSMDYLGASESEIVYLALLIPYLHFLIFLFILRCLEMNCRKKLMRKDPVFRISPRSNAIFPNPEEPEGEEEDIQMERMRTVNAMAVRDFDETPVIIASCLRKEYAGKKKNCFSKRKKKIATRNVSFCVKKGEVIGLLGHNGAGKSTTIKMITGDTKPTAGQVILKGSGGGEPLGFLGYCPQENALWPNLTVRQHLEVYAAVKGLRKGDAMIAITRLVDALKLQDQLKAPVKTLSEGIKRKLCFVLSILGNPSVVLLDEPSTGMDPEGQQQMWQVIRATFRNTERGALLTTHYMAEAEAVCDRVAIMVSGRLRCIGSIQHLKSKFGKDYLLEMKLKNLAQMEPLHAEILRLFPQAAQQERFSSLMVYKLPVEDVRPLSQAFFKLEIVKQSFDLEEYSLSQSTLEQVFLELSKEQELGDLEEDFDPSHCLQ

SEQ ID NO: 1807 - protein, 232 aa, Artificial Sequence
  Synthetic polypeptide
MLQGHSSVFQALLGTFFTWGMTAAGAALVFVFSSGQRRILDGSLGFAAGVMLAASYWSLLAPAVEMATSSGGFGAFAFFPVAVGFTLGAAFVYLADLLMPHLGAAEDPQTTLALNFGSTLMKKKSDPEGPALLFPESELSIRIDKSENGEAYQRKKAAATGLPEGPAVPVPSRGNLAQPGGSSWRRIALLILAITIHNVPEGLAVGVGFGAIEKTASATFESARKPTPKNLP

SEQ ID NO: 1808 - protein, 239 aa, Artificial Sequence
  Synthetic polypeptide
MLQGHSSVFQALLGTFFTWGMTAAGAALVFVFSSGQRRILDGSLGFAAGVMLAASYWSLLAPAVEMATSSGGFGAFAFFPVAVGFTLGAAFVYLADLLMPHLGAAEDPQTTLALNFGSTLMKKKSDPEGPALLFPESELSIRIGRAGLLSDKSENGEAYQRKKAAATGLPEGPAVPVPSRGNLAQPGGSSWRRIALLILAITIHNVPEGLAVGVGFGAIEKTASATFESARKPTPKNLP

SEQ ID NO: 1809 - protein, 148 aa, Artificial Sequence
  Synthetic polypeptide
MTVRPPQPCGTGAAEDPQTTLALNFGSTLMKKKSDPEGPALLFPESELSIRIGRAGLLSDKSENGEAYQRKKAAATGLPEGPAVPVPSRGNLAQPGGSSWRRIALLILAITIHNVPEGLAVGVGFGAIEKTASATFESARKPTPKNLP

SEQ ID NO: 1810 - protein, 56 aa, Artificial Sequence
  Synthetic polypeptide
AQPGGSSWRRIALLILAITIHNVPEGLAVGVGFGAIEKTASATFESARKPTPKNLP

SEQ ID NO: 1811 - protein, 523 aa, Artificial Sequence
  Synthetic polypeptide
MAGSSTGGGGVGETKVIYHLDEEETPYLVKIPVPAERITLGDFKSVLQRPAGAKYFFKSMDQDFGVVKEEISDDNARLPCFNGRVVSWLVSSDNPQPEMAPPVHEPRAELAPPAPPLPPLPPERTSGIGDSRPPSFHPNVSSSHENLEPETETESVVSLRRERPRRRDSSEHGAGGHRTGGPSRLERHLAGYESSSTLMTSELESTSLGDSDEEDTMSRFSSSTEQSSASRLLKRHRRRRKQRPPRLERTSSFSSVTDSTMSLNIITVTLNMEKYNFLGISIVGQSNERGDGGIYIGSIMKGGAVAADGRIEPGDMLLQVNDMNFENMSNDDAVRVLRDIVHKPGPIVLTVAKCWDPSPQAYFTLPRNEPIQPIDPAAWVSHSAALTGTFPAYPGSSSMSTITSGSSLPDGCEGRGLSVHTDMASVTKAMAAPESGLEVRDRMWLKITIPNAFLGSDVVDWLYHHVEGFPERREARKYASGLLKAGLIRHTVNKITFSEQCYYVFGDLSGGCESCPALAEDGG

SEQ ID NO: 1812 - protein, 517 aa, Artificial Sequence
  Synthetic polypeptide
MAGSSTGGGGVGETKVIYHLDEEETPYLVKIPVPAERITLGDFKSVLQRPAGAKYFFKSMDQDFGVVKEEISDDNARLPCFNGRVVSWLVSSDNPQPEMAPPVHEPRAELAPPAPPLPPLPPERTSGIGDSRPPSFHHENLEPETETESVVSLRRERPRRRDSSEHGAGGHRTGGPSRLERHLAGYESSSTLMTSELESTSLGDSDEEDTMSRFSSSTEQSSASRLLKRHRRRRKQRPPRLERTSSFSSVTDSTMSLNIITVTLNMEKYNFLGISIVGQSNERGDGGIYIGSIMKGGAVAADGRIEPGDMLLQVNDMNFENMSNDDAVRVLRDIVHKPGPIVLTVAKCWDPSPQAYFTLPRNEPIQPIDPAAWVSHSAALTGTFPAYPGSSSMSTITSGSSLPDGCEGRGLSVHTDMASVTKAMAAPESGLEVRDRMWLKITIPNAFLGSDVVDWLYHHVEGFPERREARKYASGLLKAGLIRHTVNKITFSEQCYYVFGDLSGGCESCPALAEDGG

SEQ ID NO: 1813 - skipped

SEQ ID NO: 1814 - protein, 145 aa, Artificial Sequence
  Synthetic polypeptide
MCGTGGTDSKTRRPPHRASFLKRLESKPLKMADDLDFETGDAGASATFPMQCSALRKNGFVVLKGRPCKIVEMSTSKTGKHGHAKVHLVGIDIFTGKKYEDICPSTHNMDVPNIKRNDFQLIGIQDGYLSLLQDSGEGRGGEGRG

SEQ ID NO: 1815 - protein, 115 aa, Artificial Sequence
  Synthetic polypeptide
MADDLDFETGDAGASATFPMQCSALRKNGFVVLKGRPCKIVEMSTSKTGKHGHAKVHLVGIDIFTGKKYEDICPSTHNMDVPNIKRNDFQLIGIQDGYLSLLQDSGEGRGGEGRG

SEQ ID NO: 1816 - protein, 115 aa, Artificial Sequence; identical to SEQ ID NO: 1815
  Synthetic polypeptide

SEQ ID NO: 1817 - protein, 115 aa, Artificial Sequence; identical to SEQ ID NO: 1815
  Synthetic polypeptide

SEQ ID NO: 1818 - protein, 115 aa, Artificial Sequence; identical to SEQ ID NO: 1815
  Synthetic polypeptide

SEQ ID NO: 1819 - protein, 115 aa, Artificial Sequence; identical to SEQ ID NO: 1815
  Synthetic polypeptide

SEQ ID NO: 1820 - protein, 115 aa, Artificial Sequence; identical to SEQ ID NO: 1815
  Synthetic polypeptide

SEQ ID NO: 1821 - protein, 115 aa, Artificial Sequence; identical to SEQ ID NO: 1815
  Synthetic polypeptide

SEQ ID NO: 1822 - protein, 115 aa, Artificial Sequence; identical to SEQ ID NO: 1815
  Synthetic polypeptide

SEQ ID NO: 1823 - protein, 141 aa, Artificial Sequence
  Synthetic polypeptide
MCGTGGTDSKTRRPPHRASFLKRLESKPLKMADDLDFETGDAGASATFPMQCSALRKNGFVVLKGRPCKIVEMSTSKTGKHGHAKVHLVGIDIFTGKKYEDICPSTHNMDVPNIKRNDFQLIGIQDGYLSLLQDSGEERGG

SEQ ID NO: 1824 - protein, 111 aa, Artificial Sequence
  Synthetic polypeptide
MADDLDFETGDAGASATFPMQCSALRKNGFVVLKGRPCKIVEMSTSKTGKHGHAKVHLVGIDIFTGKKYEDICPSTHNMDVPNIKRNDFQLIGIQDGYLSLLQDSGEERGG

SEQ ID NO: 1825 - protein, 111 aa, Artificial Sequence; identical to SEQ ID NO: 1824
  Synthetic polypeptide

SEQ ID NO: 1826 - protein, 111 aa, Artificial Sequence; identical to SEQ ID NO: 1824
  Synthetic polypeptide

SEQ ID NO: 1827 - protein, 111 aa, Artificial Sequence; identical to SEQ ID NO: 1824
  Synthetic polypeptide

SEQ ID NO: 1828 - protein, 111 aa, Artificial Sequence; identical to SEQ ID NO: 1824
  Synthetic polypeptide

SEQ ID NO: 1829 - protein, 111 aa, Artificial Sequence; identical to SEQ ID NO: 1824
  Synthetic polypeptide

SEQ ID NO: 1830 - protein, 111 aa, Artificial Sequence; identical to SEQ ID NO: 1824
  Synthetic polypeptide

SEQ ID NO: 1831 - protein, 111 aa, Artificial Sequence; identical to SEQ ID NO: 1824
  Synthetic polypeptide

SEQ ID NO: 1832 - protein, 138 aa, Artificial Sequence
  Synthetic polypeptide
MCGTGGTDSKTRRPPHRASFLKRLESKPLKMADDLDFETGDAGASATFPMQCSALRKNGFVVLKGRPCKIVEMSTSKTGKHGHAKVHLVGIDIFTGKKYEDICPSTHNMDVPNIKRNDFQLIGIQDGYLSLLQDSGEG

SEQ ID NO: 1833 - protein, 108 aa, Artificial Sequence
  Synthetic polypeptide
MADDLDFETGDAGASATFPMQCSALRKNGFVVLKGRPCKIVEMSTSKTGKHGHAKVHLVGIDIFTGKKYEDICPSTHNMDVPNIKRNDFQLIGIQDGYLSLLQDSGEG

SEQ ID NO: 1834 - protein, 108 aa, Artificial Sequence; identical to SEQ ID NO: 1833
  Synthetic polypeptide

SEQ ID NO: 1835 - protein, 108 aa, Artificial Sequence; identical to SEQ ID NO: 1833
  Synthetic polypeptide

SEQ ID NO: 1836 - protein, 108 aa, Artificial Sequence; identical to SEQ ID NO: 1833
  Synthetic polypeptide

SEQ ID NO: 1837 - protein, 108 aa, Artificial Sequence; identical to SEQ ID NO: 1833
  Synthetic polypeptide

SEQ ID NO: 1838 - protein, 108 aa, Artificial Sequence; identical to SEQ ID NO: 1833
  Synthetic polypeptide

SEQ ID NO: 1839 - protein, 108 aa, Artificial Sequence; identical to SEQ ID NO: 1833
  Synthetic polypeptide

SEQ ID NO: 1840 - protein, 108 aa, Artificial Sequence; identical to SEQ ID NO: 1833
  Synthetic polypeptide

SEQ ID NO: 1841 - protein, 167 aa, Artificial Sequence
  Synthetic polypeptide
MCGTGGTDSKTRRPPHRASFLKRLESKPLKMADDLDFETGDAGASATFPMQCSALRKNGFVVLKGRPCKIVEMSTSKTGKHGHAKVHLVGIDIFTGKKYEDICPSTHNMDVPNIKRNDFQLIGIQDGYLSLLQDSGEVREDLRLPEGDLGKEIEQKYDCGEEILRGG

SEQ ID NO: 1842 - protein, 137 aa, Artificial Sequence
  Synthetic polypeptide
MADDLDFETGDAGASATFPMQCSALRKNGFVVLKGRPCKIVEMSTSKTGKHGHAKVHLVGIDIFTGKKYEDICPSTHNMDVPNIKRNDFQLIGIQDGYLSLLQDSGEVREDLRLPEGDLGKEIEQKYDCGEEILRGG

SEQ ID NO: 1843 - protein, 137 aa, Artificial Sequence; identical to SEQ ID NO: 1842
  Synthetic polypeptide

SEQ ID NO: 1844 - protein, 137 aa, Artificial Sequence; identical to SEQ ID NO: 1842
  Synthetic polypeptide

SEQ ID NO: 1845 - protein, 137 aa, Artificial Sequence; identical to SEQ ID NO: 1842
  Synthetic polypeptide

SEQ ID NO: 1846 - protein, 137 aa, Artificial Sequence; identical to SEQ ID NO: 1842
  Synthetic polypeptide

SEQ ID NO: 1847 - protein, 137 aa, Artificial Sequence; identical to SEQ ID NO: 1842
  Synthetic polypeptide

SEQ ID NO: 1848 - protein, 137 aa, Artificial Sequence; identical to SEQ ID NO: 1842
  Synthetic polypeptide

SEQ ID NO: 1849 - protein, 137 aa, Artificial Sequence; identical to SEQ ID NO: 1842
  Synthetic polypeptide

SEQ ID NO: 1850 - protein, 243 aa, Artificial Sequence
  Synthetic polypeptide
MASRCWRWWGWSAWPRTRLPPAGSTPSFCHHFSTQEKTPQICVVGSGPAGFYTAQHLLKHPQAHVDIYEKQPVPFGLVRFGVAPDHPEVKNVINTFTQTAHSGRCAFWGNVEVGRDVTVPELREAYHAVVLSYGAEDHRALEIPGEELPGVCSARAFVGWYNGLPENQELEPDLSCDTAVILGQGNVALDVARILLTPPEHLEITSSERACSLSLFLTIDHPAPPSSLHGGEHMVEAHYILVE

SEQ ID NO: 1851 - protein, 243 aa, Artificial Sequence; identical to SEQ ID NO: 1850
  Synthetic polypeptide

SEQ ID NO: 1852 - protein, 191 aa, Artificial Sequence
  Synthetic polypeptide
MEDKDREHPQAHVDIYEKQPVPFGLVRFGVAPDHPEVKNVINTFTQTAHSGRCAFWGNVEVGRDVTVPELREAYHAVVLSYGAEDHRALEIPGEELPGVCSARAFVGWYNGLPENQELEPDLSCDTAVILGQGNVALDVARILLTPPEHLEITSSERACSLSLFLTIDHPAPPSSLHGGEHMVEAHYILVE

SEQ ID NO: 1853 - protein, 203 aa, Artificial Sequence
  Synthetic polypeptide
MASRCWRWWGWSAWPRTRLPPAGSTPSFCHHFSTQEKTPQICVVGSGPAGFYTAQHLLKQHPQAHVDIYEKQPVPFGLVRFGVAPDHPEVKSYGAEDHRALEIPGEELPGVCSARAFVGWYNGLPENQELEPDLSCDTAVILGQGNVALDVARILLTPPEHLEITSSERACSLSLFLTIDHPAPPSSLHGGEHMVEAHYILVE

SEQ ID NO: 1854 - protein, 199 aa, Artificial Sequence
  Synthetic polypeptide
MTTCKAGVVPLASQQHPQAHVDIYEKQPVPFGLVRFGVAPDHPEVKNVINTFTQTAHSGRCAFWGNVEVGRDVTVPELREAYHAVVLSYGAEDHRALEIPGEELPGVCSARAFVGWYNGLPENQELEPDLSCDTAVILGQGNVALDVARILLTPPEHLEITSSERACSLSLFLTIDHPAPPSSLHGGEHMVEAHYILVE

SEQ ID NO: 1855 - protein, 244 aa, Artificial Sequence
  Synthetic polypeptide
MASRCWRWWGWSAWPRTRLPPAGSTPSFCHHFSTQEKTPQICVVGSGPAGFYTAQHLLKQHPQAHVDIYEKQPVPFGLVRFGVAPDHPEVKNVINTFTQTAHSGRCAFWGNVEVGRDVTVPELREAYHAVVLSYGAEDHRALEIPGEELPGVCSARAFVGWYNGLPENQELEPDLSCDTAVILGQGNVALDVARILLTPPEHLEITSSERACSLSLFLTIDHPAPPSSLHGGEHMVEAHYILVE

SEQ ID NO: 1856 - protein, 286 aa, Artificial Sequence
  Synthetic polypeptide
MASRCWRWWGWSAWPRTRLPPAGSTPSFCHHFSTQEKTPQICVVGSGPAGFYTAQHLLKRVEALCSQPRVLNSPALSGEGEDLGASQPLSLDPTSCHPVPQQHPQAHVDIYEKQPVPFGLVRFGVAPDHPEVKNVINTFTQTAHSGRCAFWGNVEVGRDVTVPELREAYHAVVLSYGAEDHRALEIPGEELPGVCSARAFVGWYNGLPENQELEPDLSCDTAVILGQGNVALDVARILLTPPEHLEITSSERACSLSLFLTIDHPAPPSSLHGGEHMVEAHYILVE

SEQ ID NO: 1857 - protein, 235 aa, Artificial Sequence
  Synthetic polypeptide
MASRCWRWWGWSAWPRTRLPPAGSTPSFCHHFSTQEKTPQICVVGSGPAGFYTAQHLLKHPQAHVDIYEKQPVPFGLVRFGVAPDHPEVKTAHSGRCAFWGNVEVGRDVTVPELREAYHAVVLSYGAEDHRALEIPGEELPGVCSARAFVGWYNGLPENQELEPDLSCDTAVILGQGNVALDVARILLTPPEHLEITSSERACSLSLFLTIDHPAPPSSLHGGEHMVEAHYILVE

SEQ ID NO: 1858 - protein, 274 aa, Artificial Sequence
  Synthetic polypeptide
MASRCWRWWGWSAWPRTRLPPAGSTPTFGGSDEVRDPANAKALRNKRRRMQVRVKLGKFQLLLDIQEKTPQICVVGSGPAGFYTAQHLLKHPQAHVDIYEKQPVPFGLVRFGVAPDHPEVKNVINTFTQTAHSGRCAFWGNVEVGRDVTVPELREAYHAVVLSYGAEDHRALEIPGEELPGVCSARAFVGWYNGLPENQELEPDLSCDTAVILGQGNVALDVARILLTPPEHLEITSSERACSLSLFLTIDHPAPPSSLHGGEHMVEAHYILVE

SEQ ID NO: 1859 - protein, 192 aa, Artificial Sequence
  Synthetic polypeptide
MEDKDREQHPQAHVDIYEKQPVPFGLVRFGVAPDHPEVKNVINTFTQTAHSGRCAFWGNVEVGRDVTVPELREAYHAVVLSYGAEDHRALEIPGEELPGVCSARAFVGWYNGLPENQELEPDLSCDTAVILGQGNVALDVARILLTPPEHLEITSSERACSLSLFLTIDHPAPPSSLHGGEHMVEAHYILVE

SEQ ID NO: 1860 - protein, 751 aa, Artificial Sequence
  Synthetic polypeptide
MAGPRPSPWARLLLAALISVSLSGTLANRCKKAPVKSCTECVRVDKDCAYCTDEMFRDRRCNTQAELLAAGCQRESIVVMESSFQITEETQIDTTLRRSQMSPQGLRVRLRPGEERHFELEVFEPLESPVDLYILMDFSNSMSDDLDNLKKMGQNLARVLSQLTSDYTIGFGKFVDKVSVPQTDMRPEKLKEPWPNSDPPFSFKNVISLTEDVDEFRNKLQGERISGNLDAPEGGFDAILQTAVCTRDIGWRPDSTHLLVFSTESAFHYEADGANVLAGIMSRNDERCHLDTTGTYTQYRTQDYPSVPTLVRLLAKHNIIPIFAVTNYSYSYYEKLHTYFPVSSLGVLQEDSSNIVELLEEAFNRIRSNLDIRALDSPRGLRTEVTSKMFQKTRTGSFHIRRGEVGIYQVQLRALEHVDGTHVCQLPEDQKGNIHLKPSFSDGLKMDAGIICDVCTCELQKEVRSARCSFNGDFVCGQCVCSEGWSGQTCNCSTGSLSDIQPCLREGEDKPCSGRGECQCGHCVCYGEGRYEGQFCEYDNFQCPRTSGFLCNDRGRCSMGQCVCEPGWTGPSCDCPLSNATCIDSNGGICNGRGHCECGRCHCHQQSLYTDTICEINYSAIHPGLCEDLRSCVQCQAWGTGEKKGRTCEECNFKVKMVDELKRAEEVVVRCSFRDEDDDCTYSYTMEGDGAPGPNSTVLVHKKKDCPPGSFWWLIPLLLLLLPLLALLLLLCWKYCACCKDFSEALIKSCA

SEQ ID NO: 1861 - protein, 751 aa, Artificial Sequence; identical to SEQ ID NO: 1860
  Synthetic polypeptide

SEQ ID NO: 1862 - protein, 751 aa, Artificial Sequence; identical to SEQ ID NO: 1860
  Synthetic polypeptide

SEQ ID NO: 1863 - protein, 751 aa, Artificial Sequence; identical to SEQ ID NO: 1860
  Synthetic polypeptide

SEQ ID NO: 1864 - protein, 751 aa, Artificial Sequence; identical to SEQ ID NO: 1860
  Synthetic polypeptide

SEQ ID NO: 1865 - protein, 6 aa, Artificial Sequence
  Synthetic polypeptide
APGAGG

SEQ ID NO: 1866 - protein, 14 aa, Artificial Sequence
  Synthetic polypeptide
GRCWMPSASSARPS

SEQ ID NO: 1867 - protein, 107 aa, Artificial Sequence
  Synthetic polypeptide
PLTPLQWDEDQQLGDLKQLLSRLCGLLLEEGSHPGAPAKPVDLAPVDYRNLTFDPVSANRHFYLSRQDQQAQWLTLVIPALWEAEAGGSQGQEFETSLANKAKPRLY

SEQ ID NO: 1868 - protein, 389 aa, Artificial Sequence
  Synthetic polypeptide
MAAQLLEEKLTCAICLGLYQDPVTLPCGHNFCGACIRDWWDRCGKACPECREPFPDGAELRRNVALSGVLEVVRAGPARDPGPDPGPGPDPAARCPRHGRPLELFCRTEGRCVCSVCTVRECRLHERALLDAERLKREAQLRASLEVTQQQATQAEGQLLELRKQSSQIQNSACILASWVSGKFSSLLQALEIQHTTALRSIEVAKTQALAQARDEEQRLRVHLEAVARHGCRIRELLEQVDEQTFLQESQLLQPPGPLGPLTPLQWDEDQQLGDLKQLLSRLCGLLLEEGSHPGAPAKPVDLAPVEAPGPLAPVPSTVCPLRRKLWQNYRNLTFDPVSANRHFYLSRQDQQAQWLTLVIPALWEAEAGGSQGQEFETSLANKAKPRLY

SEQ ID NO: 1869 - protein, 345 aa, Artificial Sequence
  Synthetic polypeptide
MGLPRGSFFWLLLLLTAACSGLLFALYFSAVQRYPGPAAGARDTTSFEAFFQSKASNSWTGKGQACRHLLHLAIQRHPHFRGLFNLSIPVLLWGDLFTPALWDRLSQHKAPYGWRGLSHQVIASTLSLLNGSESAKLFAPPRDTPPKCIRCAVVGNGGILNGSRQGPNIDAHDYVFRLNGAVIKGFERDVGTKTSFYGFTVNTMKNSLVSYWNLGFTSVPQGQDLQYIFIPSDIRDYVMLRSAILGVPVPEGLDKGDRPHAYFGPEASASKFKLLHPDFISYLTERFLKSKLINTHFGDLYMPSTGALMLLTALHTCDQKVRACSPSTQEAEPGELLEPGRWRLQ

SEQ ID NO: 1870 - protein, 192 aa, Artificial Sequence
  Synthetic polypeptide
MSLLNGSESAKLFAPPRDTPPKCIRCAVVGNGGILNGSRQGPNIDAHDYVFRLNGAVIKGFERDVGTKTSFYGFTVNTMKNSLVSYWNLGFTSVPQGQDLQYIFIPSDIRDYVMLRSAILGVPVPEGLDKGDRFLKSKLINTHFGDLYMPSTGALMLLTALHTCDQKVRACSPSTQEAEPGELLEPGRWRLQ

SEQ ID NO: 1871 - protein, 565 aa, Artificial Sequence
  Synthetic polypeptide
MRSCLWRCRHLSQGVQWSLLLAVLVFFLFALPSFIKEPQTKPSRHQRTENIKERSLQSLAKPKSQAPTRARRTTIYAEPVPENNALNTQTQPKAHTTGDRGKEANQAPPEEQDKVPHTAQRAAWKSPEKEKTMVNTLSPRGQDAGMASGRTEAQSWKSQDTKTTQGNGGQTRKLTASRTVSEKHQGKAATTAKTLIPKSQHRMLAPTGAVSTRTRQKGVTTAVIPPKEKKPQATPPPAPFQSPTTQRNQRLKAANFKSEPRWDFEEKYSFEIGGLQTTCPDSVKIKASKSLWLQKLFLPNLTLFLDSRHFNQSEWDRLEHFAPPFGFMELNYSLVQKVVTRFPPVPQQQLLLASLPAGSLRCITCAVVGNGGILNNSHMGQEIDSHDYVFRLSGALIKGYEQDVGTRTSFYGFTAFSLTQSLLILGNRGFKNVPLGKDVRYLHFLEGTRDYEWLEALLMNQTVMSKNLFWFRHRPQEAFREALHMDRYLLLHPDFLRYMKNRFLRSKTLDGAHWRIYRPTTGALLLLTALQLCDQKVRTCLKNGTHQKNTEASLKTLPLAQYKMI

SEQ ID NO: 1872 - protein, 8 aa, Artificial Sequence
  Synthetic polypeptide
MKKSYSGE

SEQ ID NO: 1873 - protein, 8 aa, Artificial Sequence
  Synthetic polypeptide
MKKSYSGE

SEQ ID NO: 1874 - protein, 8 aa, Artificial Sequence
  Synthetic polypeptide
MKKSYSGE

SEQ ID NO: 1875 - protein, 38 aa, Artificial Sequence
  Synthetic polypeptide
MKKSYSGGTRTSSGRLRRLGDSSGPAPQLWSIMAATGH

SEQ ID NO: 1876 - protein, 6 aa, Artificial Sequence
  Synthetic polypeptide
AKSISY

SEQ ID NO: 1877 - protein, 57 aa, Artificial Sequence
  Synthetic polypeptide
FTLFLFRKIHFLLKTGMYWVRHRQSLTLSPRLECSGAILAHYNLHLLGSSDSSASAS

SEQ ID NO: 1878 - protein, 560 aa, Artificial Sequence
  Synthetic polypeptide
MAESIIIRVQSPDGVKRITATKRETAATFLKKVAKEFGFQNNGFSVYINRNKTGEITASSNKSLNLLKIKHGDLLFLFPSSLAGPSSEMETSVPPGFKVFGAPNVVEDEIDQYLSKQDGKIYRSRDPQLCRHGPLGKCVHCVPLEPFDEDYLNHLEPPVKHMSFHAYIRKLTGGADKGKFVALENISCKIKSGCEGHLPWPNGICTKCQPSAITLNRQKYRHVDNIMFENHTVADRFLDFWRKTGNQHFGYLYGRYTEHKDIPLGIRAEVAAIYEPPQIGTQNSLELLEDPKAEVVDEIAAKLGLRKVGWIFTDLVSEDTRKGTVRYSRNKDTYFLSSEECITAGDFQNKHPNMCRLSPDGHFGSKFVTAVATGGPDNQVHFEGYQVSNQCMALVRDECLLPCKDAPELGYAKESSSEQYVPDVFYKDVDKFGNEITQLARPLPVEYLIIDITTTFPKDPVYTFSISQNPFPIENRDVLGETQDFHSLATYLSQNTSSVFLDTISDFHLLLFLVTNEVMPLQDSISLLLEAVRTRNEELAQTWKRSEQWATIEQLCNLGL

SEQ ID NO: 1879 - protein, 560 aa, Artificial Sequence; identical to SEQ ID NO: 1878
  Synthetic polypeptide

SEQ ID NO: 1880 - protein, 25 aa, Artificial Sequence
  Synthetic polypeptide
MRSSPRHGRGLSSGPPSSSCAISAY

SEQ ID NO: 1881 - protein, 25 aa, Artificial Sequence
  Synthetic polypeptide
MRSSPRHGRGLSSGPPSSSCAISAY

SEQ ID NO: 1882 - protein, 128 aa, Artificial Sequence
  Synthetic polypeptide
GNEITQLARPLPVEYLIIDITTTFPKDPVYTFSISQNPFPIENRDVLGETQDFHSLATYLSQNTSSVFLDTISDFHLLLFLVTNEVMPLQDSISLLLEAVRTRNEELAQTWKRSEQWATIEQLCNLGL

SEQ ID NO: 1883 - protein, 106 aa, Artificial Sequence
  Synthetic polypeptide
TFPKDPVYTFSISQNPFPIENRDVLGETQDFHSLATYLSQNTSSVFLDTISDFHLLLFLVTNEVMPLQDSISLLLEAVRTRNEELAQTWKRSEQWATIEQLCNLGL

SEQ ID NO: 1884 - protein, 399 aa, Artificial Sequence
  Synthetic polypeptide
MSFHAYIRKLTGGADKGKFVALENISCKIKSGCEGHLPWPNGICTKCQPSAITLNRQKYRHVDNIMFENHTVADRFLDFWRKTGNQHFGYLYGRYTEHKDIPLGIRAEVAAIYEPPQIGTQNSLELLEDPKAEVVDEIAAKLGLRKVGWIFTDLVSEDTRKGTVRYSRNKDTYFLSSEECITAGDFQNKHPNMCRLSPDGHFGSKFVTAVATGGPDNQVHFEGYQVSNQCMALVRDECLLPCKDAPELGYAKESSSEQYVPDVFYKDVDKFGNEITQLARPLPVEYLIIDITTTFPKDPVYTFSISQNPFPIENRDVLGETQDFHSLATYLSQNTSSVFLDTISDFHLLLFLVTNEVMPLQDSISLLLEAVRTRNEELAQTWKRSEQWATIEQLCNLGL

SEQ ID NO: 1885 - protein, 399 aa, Artificial Sequence
  Synthetic polypeptide
MGRGVRVLLLLSLLHCAGGSEGRKTWRRRGQQPPPPPRTEAAPAAGQPVESFPLDFTAVEGNMDSFMAQVKSLAQSLYPCSAQQLNEDLRLHLLLNTSVTCNDGSPAGYYLKESRGSRRWLLFLEGGWYCFNRENCDSRYDTMRRLMSSRDWPRTRTGTGILSSQPEENPYWWNANMVFIPYCSSDVWSGASSKSEKNEYAFMGALIIQEVVRELLGRGLSGAKVLLLAGSSAGGTGVLLNVDRVAEQLEKLGYPAIQVRGLADSGWFLDNKQYRHTDCVDTITCAPTEAIRRGIRYWNGVVPERCRRQFQEGEEWNCFFGYKVYPTLRCPVFVVQWLFDEAQLTVDNVHLTGQPVQEGLRLYIQNLGRELRHTLKDVPASFAPACLSHEIIIRSYSGG

SEQ ID NO: 1886 - protein, 439 aa, Artificial Sequence
  Synthetic polypeptide
MGRGVRVLLLLSLLHCAGGSEGRKTWRRRGQQPPPPPRTEAAPAAGQPVESFPLDFTAVEGNMDSFMAQVKSLAQSLYPCSAQQLNEDLRLHLLLNTSVTCNDGSPAGYYLKESRGSRRWLLFLEGGWYCFNRENCDSRYDTMRRLMSSRDWPRTRTGTGILSSQPEENPYWWNANMVFIPYCSSDVWSGASSKSEKNEYAFMGALIIQEVVRELLGRGLSGAKVLLLAGSSAGGTGVLLNVDRVAEQLEKLGYPAIQVRGLADSGWFLDNKQYRHTDCVDTITCAPTEAIRRGIRYWNGVVPERCRRQFQEGEEWNCFFGYKVYPTLRCPVFVVQWLFDEAQLTVDNVHLTGQPVQEGLRLYIQNLGRELRHTLKDVPASFAPACLSHEIIIRSWAWWRVPVIQLLRRLRQENRLNLGDRGYGESRLQHCTPSWGQQE

SEQ ID NO: 1887 - protein, 444 aa, Artificial Sequence
  Synthetic polypeptide
MGRGVRVLLLLSLLHCAGGSEGRKTWRRRGQQPPPPPRTEAAPAAGQPVESFPLDFTAVEGNMDSFMAQVKSLAQSLYPCSAQQLNEDLRLHLLLNTSVTCNDGSPAGYYLKESRGSRRWLLFLEGGWYCFNRENCDSRYDTMRRLMSSRDWPRTRTGTGILSSQPEENPYWWNANMVFIPYCSSDVWSGASSKSEKNEYAFMGALIIQEVVRELLGRGLSGAKVLLLAGSSAGGTGVLLNVDRVAEQLEKLGYPAIQVRGLADSGWFLDNKQYRHTDCVDTITCAPTEAIRRGIRYWNGVVPERCRRQFQEGEEWNCFFGYKVYPTLRCPVFVVQWLFDEAQLTVDNVHLTGQPVQEGLRLYIQNLGRELRHTLKDVPASFAPACLSHEIIIRSKNTISWAWWRVPVIQLLRRLRQENRLNLGDRGYGESRLQHCTPSWGQQE

SEQ ID NO: 1888 - protein, 87 aa, Artificial Sequence
  Synthetic polypeptide
MYLQVETRTSSRLHLKRAPGIRSWSLLVGILSIGLAAAYYSGDSLGWKLFYVTGCLFVAVQNLEDWEDCLRPGVQDQPGQHSKILSL

SEQ ID NO: 1889 - protein, 87 aa, Artificial Sequence; identical to SEQ ID NO: 1888
  Synthetic polypeptide

SEQ ID NO: 1890 - protein, 87 aa, Artificial Sequence; identical to SEQ ID NO: 1888
  Synthetic polypeptide

SEQ ID NO: 1891 - protein, 87 aa, Artificial Sequence; identical to SEQ ID NO: 1888
  Synthetic polypeptide

SEQ ID NO: 1892 - protein, 87 aa, Artificial Sequence; identical to SEQ ID NO: 1888
  Synthetic polypeptide

SEQ ID NO: 1893 - protein, 87 aa, Artificial Sequence; identical to SEQ ID NO: 1888
  Synthetic polypeptide

SEQ ID NO: 1894 - protein, 87 aa, Artificial Sequence; identical to SEQ ID NO: 1888
  Synthetic polypeptide

SEQ ID NO: 1895 - protein, 87 aa, Artificial Sequence; identical to SEQ ID NO: 1888
  Synthetic polypeptide

SEQ ID NO: 1896 - protein, 87 aa, Artificial Sequence; identical to SEQ ID NO: 1888
  Synthetic polypeptide

SEQ ID NO: 1897 - protein, 87 aa, Artificial Sequence; identical to SEQ ID NO: 1888
  Synthetic polypeptide

SEQ ID NO: 1898 - protein, 87 aa, Artificial Sequence; identical to SEQ ID NO: 1888
  Synthetic polypeptide

SEQ ID NO: 1899 - protein, 87 aa, Artificial Sequence; identical to SEQ ID NO: 1888
  Synthetic polypeptide

SEQ ID NO: 1900 - protein, 73 aa, Artificial Sequence
  Synthetic polypeptide
MYLQVETRTSSRLHLKRAPGIRSWSLLVDSLGWKLFYVTGCLFVAVQNLEDWEDCLRPGVQDQPGQHSKILSL

SEQ ID NO: 1901 - protein, 73 aa, Artificial Sequence; identical to SEQ ID NO: 1900
  Synthetic polypeptide

SEQ ID NO: 1902 - protein, 73 aa, Artificial Sequence; identical to SEQ ID NO: 1900
  Synthetic polypeptide

SEQ ID NO: 1903 - protein, 68 aa, Artificial Sequence
  Synthetic polypeptide
MYLQVETRTSSRLHLKRAPGIRSWSLLESCRLAWLLPTTAEIAWAGSSSTSQAACLWLCRTWRTGRIA

SEQ ID NO: 1904 - protein, 9 aa, Artificial Sequence
  Synthetic polypeptide
HPGSRAGPS

SEQ ID NO: 1905 - protein, 542 aa, Artificial Sequence
  Synthetic polypeptide
MAAAAAALSGAGTPPAGGGAGGGGAGGGGSPPGGWAVARLEGREFEYLMKKRSVTIGRNSSQGSVDVSMGHSSFISRRHLEIFTPPGGGGHGGAAPELPPAQPRPDAGGDFYLRCLGKNGVFVDGVFQRRGAPPLQLPRVCTFRFPSTNIKITFTALSSEKREKQEASESPVKAVQPHISPLTINIPDTMAHLISPLPSPTGTISAANSCPSSPRGAGSSGYKVGRVMPSDLNLMADNSQPENEKEASGGDSPKDDSKPPYSYAQLIVQAITMAPDKQLTLNGIYTHITKNYPYYRTADKGWQNSIRHNLSLNRYFIKVPRSQEEPGKGSFWRIDPASESKLIEQAFRKRRPRGVPCFRTPLGPLSSRSAPASPNHAGVLSAHSSGAQTPESLSREGSPAPLEPEPGAAQPKLAVIQEARFAQSAPGSPLSSQPVLITVQRQLPQAIKPVTYTVATPVTTSTSQPPVVQTVHVVHQIPAVSVTSVAGLAPANTYTVSGQAVVTPAAVLAPPKAEAQENGDHREVKGGPGGKGGEGRPQGGQR

SEQ ID NO: 1906 - protein, 542 aa, Artificial Sequence; identical to SEQ ID NO: 1905
  Synthetic polypeptide

SEQ ID NO: 1907 - protein, 61 aa, Artificial Sequence
  Synthetic polypeptide
MSALGSPVRAYDFLLKFLLVGDSDVGKGEILASLQDGAAESPYGHPAGVMAGICNPNCWRG

SEQ ID NO: 1908 - protein, 61 aa, Artificial Sequence; identical to SEQ ID NO: 1907
  Synthetic polypeptide

SEQ ID NO: 1909 - protein, 172 aa, Artificial Sequence
  Synthetic polypeptide
MDLIISTLNMSKIGYFYTDCLVPMVGNNPYATTEGNSTELSINAEVYSLPSRKLVALQLRSIFIKYKSKPFCEKLLSWVKSSGCARVIVLSSSHSYQRNDLQLRSTPFRYLLTPSMQKSVQNKIKSLNWEEMEKSRCIPEIDDSEFCIRIPGGGITKTLYDESFCTAKQTAE

SEQ ID NO: 1910 - protein, 211 aa, Artificial Sequence
  Synthetic polypeptide
MQQSQVQALSCFTPKAVAIRTPLRNVWPAVSVGNVGQLAMDLIISTLNMSKIGYFYTDCLVPMVGNNPYATTEGNSTELSINAEVYSLPSRKLVALQLRSIFIKYKSKPFCEKLLSWVKSSGCARVIVLSSSHSYQRNDLQLRSTPFRYLLTPSMQKSVQNKIKSLNWEEMEKSRCIPEIDDSEFCIRIPGGGITKTLYDESFCTAKQTAE

SEQ ID NO: 1911 - protein, 203 aa, Artificial Sequence
  Synthetic polypeptide
MFVPCGESAPDLAGFTLLMPAVSVGNVGQLAMDLIISTLNMSKIGYFYTDCLVPMVGNNPYATTEGNSTELSINAEVYSLPSRKLVALQLRSIFIKYKSKPFCEKLLSWVKSSGCARVIVLSSSHSYQRNDLQLRSTPFRYLLTPSMQKSVQNKIKSLNWEEMEKSRCIPEIDDSEFCIRIPGGGITKTLYDESFCTAKQTAE

SEQ ID NO: 1912 - protein, 203 aa, Artificial Sequence; identical to SEQ ID NO: 1911
  Synthetic polypeptide

SEQ ID NO: 1913 - protein, 152 aa, Artificial Sequence
  Synthetic polypeptide
MPTTIEREFEELDTQRRWQPLYLEIRNESHDYPHRVAKFPENRNRNRYRDVSPYDHSRVKLQNAENDYINASLVDIEEAQRSYILTQGPLPNTCCHFWLMVWQQKTKAVVMLNRIVEKESVGGLTPIIPALWEAEAGGSLEPRNSKPASTTK

SEQ ID NO: 1914 - protein, 152 aa, Artificial Sequence; identical to SEQ ID NO: 1913
  Synthetic polypeptide

SEQ ID NO: 1915 - protein, 152 aa, Artificial Sequence; identical to SEQ ID NO: 1913
  Synthetic polypeptide

SEQ ID NO: 1916 - protein, 152 aa, Artificial Sequence; identical to SEQ ID NO: 1913
  Synthetic polypeptide

SEQ ID NO: 1917 - protein, 152 aa, Artificial Sequence; identical to SEQ ID NO: 1913
  Synthetic polypeptide

SEQ ID NO: 1918 - protein, 15 aa, Artificial Sequence
  Synthetic polypeptide
RRGTKELHLNTGSTS

SEQ ID NO: 1919 - protein, 123 aa, Artificial Sequence
  Synthetic polypeptide
MYGKDGKGTNWMDQGDMECRMQEIDDHSRVKLQNAENDYINASLVDIEEAQRSYILTQGPLPNTCCHFWLMVWQQKTKAVVMLNRIVEKESVGGLTPIIPALWEAEAGGSLEPRNSKPASTTK

SEQ ID NO: 1920 - protein, 53 aa, Artificial Sequence
  Synthetic polypeptide
MVWQQKTKAVVMLNRIVEKESVGGLTPIIPALWEAEAGGSLEPRNSKPASTTK

SEQ ID NO: 1921 - protein, 2888 aa, Artificial Sequence
  Synthetic polypeptide
MAAAARPRGRALGPVLPPTPLLLLVLRVLPACGATARDPGAAAGLSLHPTYFNLAEAARIWATATCGERGPGEGRPQPELYCKLVGGPTAPGSGHTIQGQFCDYCNSEDPRKAHPVTNAIDGSERWWQSPPLSSGTQYNRVNLTLDLGQLFHVAYILIKFANSPRPDLWVLERSVDFGSTYSPWQYFAHSKVDCLKEFGREANMAVTRDDDVLCVTEYSRIVPLENGEVVVSLINGRPGAKNFTFSHTLREFTKATNIRLRFLRTNTLLGHLISKAQRDPTVTRRYYYSIKDISIGGQCVCNGHAEVCNINNPEKLFRCECQHHTCGETCDRCCTGYNQRRWRPAAWEQSHECEACNCHGHASNCYYDPDVERQQASLNTQGIYAGGGVCINCQHNTAGVNCEQCAKGYYRPYGVPVDAPDGCIPCSCDPEHADGCEQGSGRCHCKPNFHGDNCEKCAIGYYNFPFCLRIPIFPVSTPSSEDPVAGDIKGCDCNLEGVLPEICDAHGRCLCRPGVEGPRCDTCRSGFYSFPICQACWCSALGSYQMPCSSVTGQCECRPGVTGQRCDRCLSGAYDFPHCQGSSSACDPAGTINSNLGYCQCKLHVEGPTCSRCKLLYWNLDKENPSGCSECKCHKAGTVSGTGECRQGDGDCHCKSHVGGDSCDTCEDGYFALEKSNYFGCQGCQCDIGGALSSMCSGPSGVCQCREHVVGKVCQRPENNYYFPDLHHMKYEIEDGSTPNGRDLRFGFDPLAFPEFSWRGYAQMTSVQNDVRITLNVGKSSGSLFRVILRYVNPGTEAVSGHITIYPSWGAAQSKEIIFLPSKEPAFVTVPGNGFADPFSITPGIWVACIKAEGVLLDYLVLLPRDYYEASVLQLPVTEPCAYAGPPQENCLLYQHLPVTRFPCTLACEARHFLLDGEPRPVAVRQPTPAHPVMVDLSGREVELHLRLRIPQVGHYVVVVEYSTEAAQLFVVDVNVKSSGSVLAGQVNIYSCNYSVLCRSAVIDHMSRIAMYELLADADIQLKGHMARFLLHQVCIIPIEEFSAEYVRPQVHCIASYGRFVNQSATCVSLAHETPPTALILDVLSGRPFPHLPQQSSPSVDVLPGVTLKAPQNQVTLRGRVPHLGRYVFVIHFYQAAHPTFPAQVSVDGGWPRAGSFHASFCPHVLGCRDQVIAEGQIEFDISEPEVAATVKVPEGKSLVLVRVLVVPAENYDYQILHKKSMDKSLEFITNCGKNSFYLDPQTASRFCKNSARSLVAFYHKGALPCECHPTGATGPHCSPEGGQCPCQPNVIGRQCTRCATGHYGFPRCKPCSCGRRLCEEMTGQCRCPPRTVRPQCEVCETHSFSFHPMAGCEGCNCSRRGTIEAAMPECDRDSGQCRCKPRITGRQCDRCASGFYRFPECVPCNCNRDGTEPGVCDPGTGACLCKENVEGTECNVCREGSFHLDPANLKGCTSCFCFGVNNQCHSSHKRRTKFVDMLGWHLETADRVDIPVSFNPGSNSMVADLQELPATIHSASWVAPTSYLGDKVSSYGGYLTYQAKSFGLPGDMVLLEKKPDVQLTGQHMSIIYEETNTPRPDRLHHGRVHVVEGNFRHASSRAPVSREELMTVLSRLADVRIQGLYFTETQRLTLSEVGLEEASDTGSGRIALAVEICACPPAYAGDSCQGCSPGYYRDHKGLYTGRCVPCNCNGHSNQCQDGSGICVNCQHNTAGEHCERCQEGYYGNAVHGSCRACPCPHTNSFATGCVVNGGDVRCSCKAGYTGTQCERCAPGYFGNPQKFGGSCQPCSCNSNGQLGSCHPLTGDCINQEPKDSSPAEECDDCDSCVMTLLNDLATMGEQLRLVKSQLQGLSASAGLLEQMRHMETQAKDLRNQLLNYRSAISNHGSKIEGLERELTDLNQEFETLQEKAQVNSRKAQTLNNNVNRATQSAKELDVKIKNVIRNVHILLKQISGTDGEGNNVPSGDFSREWAEAQRMMRELRNRNFGKHLREAEADKRESQLLLNRIRTWQKTHQGENNGLANSIRDSLNEYEAKLSDLRARLQEAAAQAKQANGLNQENERALGAIQRQVKEINSLQSDFTKYLTTADSSLLQTNIALQLMEKSQKEYEKLAASLNEARQELSDKVRELSRSAGKTSLVEEAEKHARSLQELAKQLEEIKRNASGDELVRCAVDAATAYENILNAIKAAEDAANRAASASESALQTVIKEDLPRKAKTLSSNSDKLLNEAKMTQKKLKQEVSPALNNLQQTLNIVTVQKEVIDTNLTTLRDGLHGIQRGDIDAMISSAKSMVRKANDITDEVLDGLNPIQTDVERIKDTYGRTQNEDFKKALTDADNSVNKLTNKLPDLWRKIESINQQLLPLGNISDNMDRIRELIQQARDAASKVAVPMRFNGKSGVEVRLPNDLEDLKGYTSLSLFLQRPNSRENGGTENMFVMYLGNKDASRDYIGMAVVDGQLTCVYNLGDREAELQVDQILTKSETKEAVMDRVKFQRIYQFARLNYTKGATSSKPETPGVYDMDGRNSNTLLNLDPENVVFYVGGYPPDFKLPSRLSFPPYKGCIELDDLNENVLSLYNFKKTFNLNTTEVEPCRRRKEESDKNYFEGTGYARVPTQPHAPIPTFGQTIQTTVDRGLLFFAENGDRFISLNIEDGKLMVRYKLNSELPKERGVGDAINNGRDHSIQIKIGKLQKRMWINVDVQNTIIDGEVFDFSTYYLGGIPIAIRERFNISTPAFRGCMKNLKKTSGVVRLNDTVGVTKKCSEDWKLVRSASFSRGGQLSFTDLGLPPTDHLQASFGFQTFQPSGILLDHQTWTRNLQVTLEDGYIELSTSDSGSPIFKSPQTYMDGLLHYVSVISDNSGRLRQEGCLRPRVRDQSWKHSETMSLRKLK

SEQ ID NO: 1922 - protein, 2832 aa, Artificial Sequence
  Synthetic polypeptide
MAAAARPRGRALGPVLPPTPLLLLVLRVLPACGATARDPGAAAGLSLHPTYFNLAEAARIWATATCGERGPGEGRPQPELYCKLVGGPTAPGSGHTIQGQFCDYCNSEDPRKAHPVTNAIDGSERWWQSPPLSSGTQYNRVNLTLDLGQLFHVAYILIKFANSPRPDLWVLERSVDFGSTYSPWQYFAHSKVDCLKEFGREANMAVTRDDDVLCVTEYSRIVPLENGEVVVSLINGRPGAKNFTFSHTLREFTKATNIRLRFLRTNTLLGHLISKAQRDPTVTRRYYYSIKDISIGGQCVCNGHAEVCNINNPEKLFRCECQHHTCGETCDRCCTGYNQRRWRPAAWEQSHECEACNCHGHASNCYYDPDVERQQASLNTQGIYAGGGVCINCQHNTAGVNCEQCAKGYYRPYGVPVDAPDGCIPCSCDPEHADGCEQGSGRCHCKPNFHGDNCEKCAIGYYNFPFCLRIPIFPVSTPSSEDPVAGDIKGCDCNLEGVLPEICDAHGRCLCRPGVEGPRCDTCRSGFYSFPICQACWCSALGSYQMPCSSVTGQCECRPGVTGQRCDRCLSGAYDFPHCQGSSSACDPAGTINSNLGYCQCKLHVEGPTCSRCKLLYWNLDKENPSGCSECKCHKAGTVSGTGECRQGDGDCHCKSHVGGDSCDTCEDGYFALEKSNYFGCQGCQCDIGGALSSMCSGPSGVCQCREHVVGKVCQRPENNYYFPDLHHMKYEIEDGSTPNGRDLRFGFDPLAFPEFSWRGYAQMTSVQNDVRITLNVGKSSGSLFRVILRYVNPGTEAVSGHITIYPSWGAAQSKEIIFLPSKEPAFVTVPGNGFADPFSITPGIWVACIKAEGVLLDYLVLLPRDYYEASVLQLPVTEPCAYAGPPQENCLLYQHLPVTRFPCTLACEARHFLLDGEPRPVAVRQPTPAHPVMVDLSGREVELHLRLRIPQVGHYVVVVEYSTEAAQLFVVDVNVKSSGSVLAGQVNIYSCNYSVLCRSAVIDHMSRIAMYELLADADIQLKGHMARFLLHQVCIIPIEEFSAEYVRPQVHCIASYGRFVNQSATCVSLAHETPPTALILDVLSGRPFPHLPQQSSPSVDVLPGVTLKAPQNQVTLRGRVPHLGRYVFVIHFYQAAHPTFPAQVSVDGGWPRAGSFHASFCPHVLGCRDQVIAEGQIEFDISEPEVAATVKVPEGKSLVLVRVLVVPAENYDYQILHKKSMDKSLEFITNCGKNSFYLDPQTASRFCKNSARSLVAFYHKGALPCECHPTGATGPHCSPEGGQCPCQPNVIGRQCTRCATGHYGFPRCKPCSCGRRLCEEMTGQCRCPPRTVRPQCEVCETHSFSFHPMAGCEGCNCSRRGTIEAAMPECDRDSGQCRCKPRITGRQCDRCASGFYRFPECVPCNCNRDGTEPGVCDPGTGACLCKENVEGTECNVCREGSFHLDPANLKGCTSCFCFGVNNQCHSSHKRRTKFVDMLGWHLETADRVDIPVSFNPGSNSMVADLQELPATIHSASWVAPTSYLGDKVSSYGGYLTYQAKSFGLPGDMVLLEKKPDVQLTGQHMSIIYEETNTPRPDRLHHGRVHVVEGNFRHASSRAPVSREELMTVLSRLADVRIQGLYFTETQRLTLSEVGLEEASDTGSGRIALAVEICACPPAYAGDSCQGCSPGYYRDHKGLYTGRCVPCNCNGHSNQCQDGSGICVNCQHNTAGEHCERCQEGYYGNAVHGSCRACPCPHTNSFATGCVVNGGDVRCSCKAGYTGTQCERCAPGYFGNPQKFGGSCQPCSCNSNGQLGSCHPLTGDCINQEPKDSSPAEECDDCDSCVMTLLNDLATMGEQLRLVKSQLQGLSASAGLLEQMRHMETQAKDLRNQLLNYRSAISNHGSKIEGLERELTDLNQEFETLQEKAQVNSRKAQTLNNNVNRATQSAKELDVKIKNVIRNVHMLNRIRTWQKTHQGENNGLANSIRDSLNEYEAKLSDLRARLQEAAAQAKQANGLNQENERALGAIQRQVKEINSLQSDFTKYLTTADSSLLQTNIALQLMEKSQKEYEKLAASLNEARQELSDKVRELSRSAGKTSLVEEAEKHARSLQELAKQLEEIKRNASGDELVRCAVDAATAYENILNAIKAAEDAANRAASASESALQTVIKEDLPRKAKTLSSNSDKLLNEAKMTQKKLKQEVSPALNNLQQTLNIVTVQKEVIDTNLTTLRDGLHGIQRGDIDAMISSAKSMVRKANDITDEVLDGLNPIQTDVERIKDTYGRTQNEDFKKALTDADNSVNKLTNKLPDLWRKIESINQQLLPLGNISDNMDRIRELIQQARDAASKVAVPMRFNGKSGVEVRLPNDLEDLKGYTSLSLFLQRPNSRENGGTENMFVMYLGNKDASRDYIGMAVVDGQLTCVYNLGDREAELQVDQILTKSETKEAVMDRVKFQRIYQFARLNYTKGATSSKPETPGVYDMDGRNSNTLLNLDPENVVFYVGGYPPDFKLPSRLSFPPYKGCIELDDLNENVLSLYNFKKTFNLNTTEVEPCRRRKEESDKNYFEGTGYARVPTQPHAPIPTFGQTIQTTVDRGLLFFAENGDRFISLNIEDGKLMVRYKLNSELPKERGVGDAINNGRDHSIQIKIGKLQKRMWINVDVQNTIIDGEVFDFSTYYLGGIPIAIRERFNISTPAFRGCMKNLKKTSGVVRLNDTVGVTKKCSEDWKLVRSASFSRGGQLSFTDLGLPPTDHLQASFGFQTFQPSGILLDHQTWTRNLQVTLEDGYIELSTSDSGSPIFKSPQTYMDGLLHYVSVISDNSGRLRQEGCLRPRVRDQSWKHSETMSLRKLK

SEQ ID NO: 1923 - protein, 1279 aa, Artificial Sequence
  Synthetic polypeptide
MPPAVRRSACSMGWLWIFGAALGQCLGYSSQQQRVPFLQPPGQSQLQASYVEFRPSQGCSPGYYRDHKGLYTGRCVPCNCNGHSNQCQDGSGICVNCQHNTAGEHCERCQEGYYGNAVHGSCRACPCPHTNSFATGCVVNGGDVRCSCKAGYTGTQCERCAPGYFGNPQKFGGSCQPCSCNSNGQLGSCHPLTGDCINQEPKDSSPAEECDDCDSCVMTLLNDLATMGEQLRLVKSQLQGLSASAGLLEQMRHMETQAKDLRNQLLNYRSAISNHGSKIEGLERELTDLNQEFETLQEKAQVNSRKAQTLNNNVNRATQSAKELDVKIKNVIRNVHILLKQISGTDGEGNNVPSGDFSREWAEAQRMMRELRNRNFGKHLREAEADKRESQLLLNRIRTWQKTHQGENNGLANSIRDSLNEYEAKLSDLRARLQEAAAQAKQANGLNQENERALGAIQRQVKEINSLQSDFTKYLTTADSSLLQTNIALQLMEKSQKEYEKLAASLNEARQELSDKVRELSRSAGKTSLVEEAEKHARSLQELAKQLEEIKRNASGDELVRCAVDAATAYENILNAIKAAEDAANRAASASESALQTVIKEDLPRKAKTLSSNSDKLLNEAKMTQKKLKQEVSPALNNLQQTLNIVTVQKEVIDTNLTTLRDGLHGIQRGDIDAMISSAKSMVRKANDITDEVLDGLNPIQTDVERIKDTYGRTQNEDFKKALTDADNSVNKLTNKLPDLWRKIESINQQLLPLGNISDNMDRIRELIQQARDAASKVAVPMRFNGKSGVEVRLPNDLEDLKGYTSLSLFLQRPNSRENGGTENMFVMYLGNKDASRDYIGMAVVDGQLTCVYNLGDREAELQVDQILTKSETKEAVMDRVKFQRIYQFARLNYTKGATSSKPETPGVYDMDGRNSNTLLNLDPENVVFYVGGYPPDFKLPSRLSFPPYKGCIELDDLNENVLSLYNFKKTFNLNTTEVEPCRRRKEESDKNYFEGTGYARVPTQPHAPIPTFGQTIQTTVDRGLLFFAENGDRFISLNIEDGKLMVRYKLNSELPKERGVGDAINNGRDHSIQIKIGKLQKRMWINVDVQNTIIDGEVFDFSTYYLGGIPIAIRERFNISTPAFRGCMKNLKKTSGVVRLNDTVGVTKKCSEDWKLVRSASFSRGGQLSFTDLGLPPTDHLQASFGFQTFQPSGILLDHQTWTRNLQVTLEDGYIELSTSDSGSPIFKSPQTYMDGLLHYVSVISDNSGRLRQEGCLRPRVRDQSWKHSETMSLRKLK

SEQ ID NO: 1924 - protein, 1223 aa, Artificial Sequence
  Synthetic polypeptide
MPPAVRRSACSMGWLWIFGAALGQCLGYSSQQQRVPFLQPPGQSQLQASYVEFRPSQGCSPGYYRDHKGLYTGRCVPCNCNGHSNQCQDGSGICVNCQHNTAGEHCERCQEGYYGNAVHGSCRACPCPHTNSFATGCVVNGGDVRCSCKAGYTGTQCERCAPGYFGNPQKFGGSCQPCSCNSNGQLGSCHPLTGDCINQEPKDSSPAEECDDCDSCVMTLLNDLATMGEQLRLVKSQLQGLSASAGLLEQMRHMETQAKDLRNQLLNYRSAISNHGSKIEGLERELTDLNQEFETLQEKAQVNSRKAQTLNNNVNRATQSAKELDVKIKNVIRNVHMLNRIRTWQKTHQGENNGLANSIRDSLNEYEAKLSDLRARLQEAAAQAKQANGLNQENERALGAIQRQVKEINSLQSDFTKYLTTADSSLLQTNIALQLMEKSQKEYEKLAASLNEARQELSDKVRELSRSAGKTSLVEEAEKHARSLQELAKQLEEIKRNASGDELVRCAVDAATAYENILNAIKAAEDAANRAASASESALQTVIKEDLPRKAKTLSSNSDKLLNEAKMTQKKLKQEVSPALNNLQQTLNIVTVQKEVIDTNLTTLRDGLHGIQRGDIDAMISSAKSMVRKANDITDEVLDGLNPIQTDVERIKDTYGRTQNEDFKKALTDADNSVNKLTNKLPDLWRKIESINQQLLPLGNISDNMDRIRELIQQARDAASKVAVPMRFNGKSGVEVRLPNDLEDLKGYTSLSLFLQRPNSRENGGTENMFVMYLGNKDASRDYIGMAVVDGQLTCVYNLGDREAELQVDQILTKSETKEAVMDRVKFQRIYQFARLNYTKGATSSKPETPGVYDMDGRNSNTLLNLDPENVVFYVGGYPPDFKLPSRLSFPPYKGCIELDDLNENVLSLYNFKKTFNLNTTEVEPCRRRKEESDKNYFEGTGYARVPTQPHAPIPTFGQTIQTTVDRGLLFFAENGDRFISLNIEDGKLMVRYKLNSELPKERGVGDAINNGRDHSIQIKIGKLQKRMWINVDVQNTIIDGEVFDFSTYYLGGIPIAIRERFNISTPAFRGCMKNLKKTSGVVRLNDTVGVTKKCSEDWKLVRSASFSRGGQLSFTDLGLPPTDHLQASFGFQTFQPSGILLDHQTWTRNLQVTLEDGYIELSTSDSGSPIFKSPQTYMDGLLHYVSVISDNSGRLRQEGCLRPRVRDQSWKHSETMSLRKLK

SEQ ID NO: 1925 - protein, 25 aa, Artificial Sequence
  Synthetic polypeptide
LCHWLCGEWGRRAVLLQSWVHRNTV

SEQ ID NO: 1926 - protein, 13 aa, Artificial Sequence
  Synthetic polypeptide
SLCDLPHSPEEDN

SEQ ID NO: 1927 - protein, 55 aa, Artificial Sequence
  Synthetic polypeptide
MAVNVYSTSITQETMSRHDIIAWVNDIVSLNYTKVEQLCSGYKISVTKVSSVSVC

SEQ ID NO: 1928 - protein, 55 aa, Artificial Sequence; identical to SEQ ID NO: 1927
  Synthetic polypeptide

SEQ ID NO: 1929 - protein, 55 aa, Artificial Sequence; identical to SEQ ID NO: 1927
  Synthetic polypeptide

SEQ ID NO: 1930 - protein, 55 aa, Artificial Sequence; identical to SEQ ID NO: 1927
  Synthetic polypeptide

SEQ ID NO: 1931 - protein, 55 aa, Artificial Sequence; identical to SEQ ID NO: 1927
  Synthetic polypeptide

SEQ ID NO: 1932 - protein, 86 aa, Artificial Sequence
  Synthetic polypeptide
MKQNRDQKCPVSQRNSSFQQPGRKPGCSSWGMAVNVYSTSITQETMSRHDIIAWVNDIVSLNYTKVEQLCSGYKISVTKVSSVSVC

SEQ ID NO: 1933 - protein, 98 aa, Artificial Sequence
  Synthetic polypeptide
MPGPTQTLSPNGENNNDIIQDNNGTIIPFRKHTVRGERSYSWGMAVNVYSTSITQETMSRHDIIAWVNDIVSLNYTKVEQLCSGYKISVTKVSSVSVC

SEQ ID NO: 1934 - protein, 98 aa, Artificial Sequence; identical to SEQ ID NO: 1933
  Synthetic polypeptide

SEQ ID NO: 1935 - protein, 56 aa, Artificial Sequence
  Synthetic polypeptide
MAGAAAESGRELWTFAGSRDPSAPRLAYGYGPGSLRELRAREFSRLADTKTIQRGK

SEQ ID NO: 1936 - protein, 9 aa, Artificial Sequence
  Synthetic polypeptide
MGRRNSLLN

SEQ ID NO: 1937 - protein, 54 aa, Artificial Sequence
  Synthetic polypeptide
MNGRSLIGGAGDARHGPVWKDPFGTKAGDAARRGIARLSLALADGSQEQSSQLD

SEQ ID NO: 1938 - protein, 54 aa, Artificial Sequence; identical to SEQ ID NO: 1937
  Synthetic polypeptide

SEQ ID NO: 1939 - protein, 54 aa, Artificial Sequence; identical to SEQ ID NO: 1937
  Synthetic polypeptide

SEQ ID NO: 1940 - protein, 54 aa, Artificial Sequence; identical to SEQ ID NO: 1937
  Synthetic polypeptide

SEQ ID NO: 1941 - protein, 577 aa, Artificial Sequence
  Synthetic polypeptide
MAEDWLDCPALGPGWKRREVFRKSGATCGRSDTYYQSPTGDRIRSKVELTRYLGPACDLTLFDFKQGILCYPAPKAHPVAVASKKRKKPSRPAKTRKRQVGPQSGEVRKEAPRDETKADTDTAPASFPAPGCCENCGISFSGDGTQRQRLKTLCKDCRAQRIAFNREQRMFKSRGCGVCRGCQTQEDCGHCPICLRPPRPGLRRQWKCVQRRCLRGKHARRKGGCDSKMAARRRPGAQPLPPPPPSQSPEPTEPHPRALAPSPPAEFIYYCVDEDELPYTNRRQNRKCGACAACLRRMDCGRCDFCCDKPKFGGSNQKRQKCRWRQCLQFAMKRLLPSVWSESEDGAGSPPPYRRRKRPSSARRHHLGPTLKPTLATRTAQPDHTQAPTKQEAGGGFVLPPPGTDLVFLREGASSPVQVPGPVAASTEALLQEAQCSGLSWVVALPQVKQEKADTQDEWTPGTAVLTSPVLVPGCPSKAVDPGLPSVKQEPPDPEEDKEENKDDSASKLAPEEEAGGAGTPVITEIFSLGGTRFRDTAVWLPRYYHLALDWKCNCGYHLCCSRAWWRRLCSPRYSGG

SEQ ID NO: 1942 - protein, 221 aa, Artificial Sequence
  Synthetic polypeptide
PIPWRLPARSERSLQGQPRLGNVRLDPRVVRSGRRPRGMRPRLTLTQPQLHSLLLGAVRTVESASQGMAPKGSGSKRCAKTVEHRELPSTGNRECLRAEGVEYAGAVRPKRIVAIAPSAFALPALVSGASGNVSSDVAYGTLLTACVAVIRDVSDALPWLWLPQLVNMPAAREAVTPRWLPGGAPEPSHCLHHPHHSPQSPQSRTPEPWPPRHLPSSSITV

SEQ ID NO: 1943 - protein, 40 aa, Artificial Sequence
  Synthetic polypeptide
MLRKFTLLTPSHCFPLRCKRGFLIFQMCRLKYLWMKLSDA

SEQ ID NO: 1944 - protein, 2017 aa, Artificial Sequence
  Synthetic polypeptide
MKDSEGPQRPPLCFLSTLLSQKVPEKSDAVLRCIISGQPKPEVTWYKNGQAIDGSGIISNYEFFENQYIHVLHLSCCTKNDAAVYQISAKNSFGMICCSASVEVECSSENPQLSPNLEDDRDRGWKHETGTHEEERANQIDEKEHPYKEEESISPGTPRSADSSPSKSNHSLSLQSLGNLDISVSSSENPLGVKGTRHTGEAYDPSNTEEIANGLLFLNSSHIYEKQDRCCHKTVHSMASKFTDGDLNNDGPHDEGLRSSQQNPKVQKYISFSLPLSEATAHIYPGDSAVANKQPSPQLSSEDSDSDYELCPEITLTYTEEFSDDDLEYLECSDVMTDYSNAVWQRNLLGTEHVFLLESDDEEMEFGEHCLGGCEHFLSGMGCGSRVSGDAGPMVATAGFCGHHSQPQEVGVRSSRVSKHGPSSPQTGMTLILGPHQDGTSSVTEQGRYKLPTAPEAAENDYPGIQGETRDSHQAREEFASDNLLNMDESVRETEMKLLSGESENSGMSQCWETAADKRVGGKDLWSKRGSRKSARVRQPGMKGNPKKPNANLRESTTEGTLHLCSAKESAEPPLTQSDKRETSHTTAAATGRSSHADARECAISTQAEQEAKTLQTSTDSVSKEGNTNCKGEGMQVNTLFETSQVPDWSDPPQVQVQETVRETISCSQMPAFSEPAGEESPFTGTTTISFSNLGGVHKENASLAQHSEVKPCTCGPQHEEKQDRDGNIPDNFREDLKYEQSISEANDETMSPGVFSRHLPKDARADFREPVAVSVASPEPTDTALTLENVCDEPRDREAVCAMECFEAGDQGTCFDTIDSLVGRPVDKYSPQEICSVDTELAEGQNKVSDLCSSNDKTLEVFFQTQVSETSVSTCKSSKDGNSVMSPLFTSTFTLNISHTASEGATGENLAKVENSTYPLASTVHAGQEQPSPSNSGGLDETQLLSSENNPLVQFKEGGDKSPSPSAADTTATPASYSSIVSFPWEKPTTLTANNECFQATRETEDTSTVTIATEVHPAKYLAVSIPEDKHAGGTEERFPRASHEKVSQFPSQVQLDHILSGATIKSTKELLCRAPSVPGVPHHVLQLPEGEGFCSNSPLQVDNLSGDKSQTVDRADFRSYEENFQERGSETKQGVQQQSLSQQGSLSAPDFQQSLPTTSAAQEERNLVPTAHSPASSREGAGQRSGWGTRVSVVAETAGEEDSQALSNVPSLSDILLEESKEYRPGNWEAGNKLKIITLEASASEIWPPRQLTNSESKASDGGLIIPDKVWAVPDSLKADAVVPELAPSEIAALAHSPEDAESALADSRESHKGEEPTISVHWRSLSSRGFSQPRLLESSVDPVDEKELSVTDSLSAASETGGKENVNNVSQDQEEKQLKMDHTAFFKKFLTCPKILESSVDPIDEISVIEYTRAGKPEPSETTPQGAREGGQSNDGNMGHEAEIQPAILQVPCLQGTILSENRISRSQEGSMKQEAEQIQPEEAKTAIWQVLQPSEGGERIPSGCSIGQIQESSDGSLGEAEQSKKDKAELISPTSPLSSCLPIMTHASLGVDTHNSTGQIHDVPENDIVEPRKRQYVFPVSQKRGTIENERGKPLPSSPDLTRFPCTSSPEGNVTDFLISHKMEEPKIEVLQIGETKPPSSSSSSAKTLAFISGERELEKAPKLLQDPCQKGTLGCAKKSREREKSLEARAGKSPGTLTAVTGSEEVKRKPEAPGSGHLAEGVKKKILSRVAALRLKLEEKENIRKNSAFLKKMPKLETSLSHTEEKQDPKKPSCKREGRAPVLLKKIQAEMFPEHSGNVKLSCQFAEIHEDSTICWTKDSKSIAQVQRSAGDNSTVSFAIVQASPKDQGLYYCCIKNSYGKVTAEFNLTAEVLKQLSSRQDTKGCEEIEFSQLIFKEDFLHDSYFGGRLRGQIATEELHFGEGVHRKAFRSTVMHGLMPVFKPGHACVLKVHNAIAYGTRNNDELIQRNYKLAAQECYVQNTARYYAKIYAAEAQPLEGFGEVPENSIWKSI

SEQ ID NO: 1945 - protein, 45 aa, Artificial Sequence
  Synthetic polypeptide
MVRAGAVGAHLPASGLDIFGDLKKMNKRQLSCHLGMCLKCSPQAS

SEQ ID NO: 1946 - protein, 45 aa, Artificial Sequence; identical to SEQ ID NO: 1945
  Synthetic polypeptide

SEQ ID NO: 1947 - protein, 45 aa, Artificial Sequence; identical to SEQ ID NO: 1945
  Synthetic polypeptide

SEQ ID NO: 1948 - protein, 34 aa, Artificial Sequence
  Synthetic polypeptide
MAPRARRRRPLFALLLLCALLARLQVILRTLEKH

SEQ ID NO: 1949 - protein, 34 aa, Artificial Sequence; identical to SEQ ID NO: 1948
  Synthetic polypeptide

SEQ ID NO: 1950 - protein, 163 aa, Artificial Sequence
  Synthetic polypeptide
MSISSALAMVFMGAKGNTAAQMSQALCFSKIGGEDGDIHRGFQSLLVAINRTDTEYVLRTANGLFGEKSYDFLTGFTDSCGKFYQATIKQLDFVNDTEKSTTRVNSWVADKTKAWKIIQTSLSHLEEPGIASSSCYCKACLPQPLLVHSIPKCNSPVTPHGMW

SEQ ID NO: 1951 - protein, 172 aa, Artificial Sequence
  Synthetic polypeptide
MAALTTLFKYIDENQDRYIKKLAKWVAIQSVSAWPEKRGEIRRMMEVAAADVKQLGGSVELVDIGKQKLPDGSEIPLPPILLGRLGSDPQKKTVCIYGHLDVQPAALEDGWDSEPFTLVERDGKLYGRGSTDDKGPVAGWINALEAYQKTGQESETSLGNKTRLCLYKKFKK

SEQ ID NO: 1952 - protein, 172 aa, Artificial Sequence; identical to SEQ ID NO: 1951
  Synthetic polypeptide

SEQ ID NO: 1953 - protein, 172 aa, Artificial Sequence; identical to SEQ ID NO: 1951
  Synthetic polypeptide

SEQ ID NO: 1954 - protein, 154 aa, Artificial Sequence
  Synthetic polypeptide
MPALRTRRGWWPGRPRGGPAPGVVAGTRGTEPAPRLLLVTGPCLVGLPSQLPDGSEIPLPPILLGRLGSDPQKKTVCIYGHLDVQPAALEDGWDSEPFTLVERDGKLYGRGSTDDKGPVAGWINALEAYQKTGQESETSLGNKTRLCLYKKFKK

SEQ ID NO: 1955 - protein, 160 aa, Artificial Sequence
  Synthetic polypeptide
MAALTTLFKYIDENQDRYIKKLAKWVAIQSVSAWPEKRGEIRRMMEVAAADVKQLGGSVELVDIGKQKLPDGSEIPLPPILLGRLGSDPQKKTVCIYGHLDVQPAALEDGWDSEPFTLVERDGKLYGRGSTDDKGPVAGWINALEAYQKTGQEDRLRPRV

SEQ ID NO: 1956 - protein, 160 aa, Artificial Sequence; identical to SEQ ID NO: 1955
  Synthetic polypeptide

SEQ ID NO: 1957 - protein, 160 aa, Artificial Sequence; identical to SEQ ID NO: 1955
  Synthetic polypeptide

SEQ ID NO: 1958 - protein, 142 aa, Artificial Sequence
  Synthetic polypeptide
MPALRTRRGWWPGRPRGGPAPGVVAGTRGTEPAPRLLLVTGPCLVGLPSQLPDGSEIPLPPILLGRLGSDPQKKTVCIYGHLDVQPAALEDGWDSEPFTLVERDGKLYGRGSTDDKGPVAGWINALEAYQKTGQEDRLRPRV

SEQ ID NO: 1959 - protein, 271 aa, Artificial Sequence
  Synthetic polypeptide
MAALTTLFKYIDENQDRYIKKLAKWVAIQSVSAWPEKRGEIRRMMEVAAADVKQLGGSVELVDIGKQKLPDGSEIPLPPILLGRLGSDPQKKTVCIYGHLDVQPAALEDGWDSEPFTLVERDGKLYGRGSTDDKGPVAGWINALEAYQKTGQEIPVNVRFCLEGMEESGSEGLDELIFARKDTFFKDVDYVCISDNYWLGKKKPCITYGLRGICYFFIEVECSNKDLHSGVYGGSVHEAMTDLILLMVSLPEKWECPSCCLIGCLADYITG

SEQ ID NO: 1960 - protein, 271 aa, Artificial Sequence; identical to SEQ ID NO: 1959
  Synthetic polypeptide

SEQ ID NO: 1961 - protein, 271 aa, Artificial Sequence; identical to SEQ ID NO: 1959
  Synthetic polypeptide

SEQ ID NO: 1962 - protein, 187 aa, Artificial Sequence
  Synthetic polypeptide
MAALTTLFKYIDENQDRYIKKLAKWVAIQSVSAWPEKRGEIRRMMEVAAADVKQLGGSVELVDIGKQKEIPVNVRFCLEGMEESGSEGLDELIFARKDTFFKDVDYVCISDNYWLGKKKPCITYGLRGICYFFIEVECSNKDLHSGVYGGSVHEAMTDLILLMVSLPEKWECPSCCLIGCLADYITG

SEQ ID NO: 1963 - protein, 98 aa, Artificial Sequence
  Synthetic polypeptide
DELIFARKDTFFKDVDYVCISDNYWLGKKKPCITYGLRGICYFFIEVECSNKDLHSGVYGGSVHEAMTDLILLMVSLPEKWECPSCCLIGCLADYITG

SEQ ID NO: 1964 - protein, 486 aa, Artificial Sequence
  Synthetic polypeptide
MDPKLGRMAASLLAVLLLLLERGMFSSPSPPPALLEKVFQYIDLHQDEFVQTLKEWVAIESDSVQPVPRFRQELFRMMAVAADTLQRLGARVASVDMGPQQLPDGQSLPIPPIILAELGSDPTKGTVCFYGHLDVQPADRGDGWLTDPYVLTEVDGKLYGRGATDNKGPVLAWINAVSAFRALEQDLPVNIKFIIEGMEEAGSVALEELVEKEKDRFFSGVDYIVISDNLWISQRKPAITYGTRGNSYFMVEVKCRDQDFHSGTFGGILHEPMADLVALLGSLVDSSGHILVPGIYDEVVPLTEEEINTYKAIHLDLEEYRNSSRVEKFLFDTKEEILMHLWRYPSLSIHGIEGAFDEPGTKTVIPGRVIGKFSIRLVPHMNVSAVEKQVTRHLEDVFSKRNSSNKMVVSMTLGLHPWIANIDDTQYLAAKRAIRTVFGTEPDMIRDGSTIPIAKMFQEIVHKSVVLIPLGAVDDGEHSQNEKINR

SEQ ID NO: 1965 - protein, 443 aa, Artificial Sequence
  Synthetic polypeptide
MDPKLGRMTLKEWVAIESDSVQPVPRFRQELFRMMAVAADTLQRLGARVASVDMGPQQLPDGQSLPIPPIILAELGSDPTKGTVCFYGHLDVQPADRGDGWLTDPYVLTEVDGKLYGRGATDNKGPVLAWINAVSAFRALEQDLPVNIKFIIEGMEEAGSVALEELVEKEKDRFFSGVDYIVISDNLWISQRKPAITYGTRGNSYFMVEVKCRDQDFHSGTFGGILHEPMADLVALLGSLVDSSGHILVPGIYDEVVPLTEEEINTYKAIHLDLEEYRNSSRVEKFLFDTKEEILMHLWRYPSLSIHGIEGAFDEPGTKTVIPGRVIGKFSIRLVPHMNVSAVEKQVTRHLEDVFSKRNSSNKMVVSMTLGLHPWIANIDDTQYLAAKRAIRTVFGTEPDMIRDGSTIPIAKMFQEIVHKSVVLIPLGAVDDGEHSQNEKINR

SEQ ID NO: 1966 - protein, 29 aa, Artificial Sequence
  Synthetic polypeptide
MATMVPSVLWPRACWTLLVCCLLTPGSLP

SEQ ID NO: 1967 - protein, 29 aa, Artificial Sequence
  Synthetic polypeptide
MATMVPSVLWPRACWTLLVCCLLTPGSLP

SEQ ID NO: 1968 - protein, 33 aa, Artificial Sequence
  Synthetic polypeptide
MATMVPSVLWPRACWTLLVCCLLTPGSPVPFTC

SEQ ID NO: 1969 - protein, 33 aa, Artificial Sequence; identical to SEQ ID NO: 1968
  Synthetic polypeptide

SEQ ID NO: 1970 - protein, 111 aa, Artificial Sequence
  Synthetic polypeptide
MLAVGPAMDRDYPQHEPPPAGSLLYSPPPLQSAMLHCPYWNTFSLPPYPAFSSDSRPFMSSASFLGSQPCPDTSYAPVATASSLPPKTCDFAQDLPPCRLSWQTGPADGTE

SEQ ID NO: 1971 - protein, 111 aa, Artificial Sequence; identical to SEQ ID NO: 1970
  Synthetic polypeptide

SEQ ID NO: 1972 - protein, 111 aa, Artificial Sequence; identical to SEQ ID NO: 1970
  Synthetic polypeptide

SEQ ID NO: 1973 - protein, 111 aa, Artificial Sequence; identical to SEQ ID NO: 1970
  Synthetic polypeptide

SEQ ID NO: 1974 - protein, 111 aa, Artificial Sequence; identical to SEQ ID NO: 1970
  Synthetic polypeptide

SEQ ID NO: 1975 - protein, 226 aa, Artificial Sequence
  Synthetic polypeptide
MERTAGKELALAPLQDWGEETEDGAVYSVSLRRQRSQRRSPAEGPGGSQAPSPIANTFLHYRTSKVRVLRAARLERLVGELVFGDREQDPSFMPAFLATYRTFVPTACLLGFLLPPMPPPPPPGVEIKKTAVQDLSFNKNLRAVVSVLGSWLQDHPQDFRDPPAHSDLGSVRTFLGWAAPGSAEAQKAEKLLEDFLEEAEREQEEEPPQVWTGVVAHAYSPSYLGC

SEQ ID NO: 1976 - protein, 226 aa, Artificial Sequence; identical to SEQ ID NO: 1975
  Synthetic polypeptide

SEQ ID NO: 1977 - protein, 190 aa, Artificial Sequence
  Synthetic polypeptide
MRRPGRKGTGGGQAPSPIANTFLHYRTSKVRVLRAARLERLVGELVFGDREQDPSFMPAFLATYRTFVPTACLLGFLLPPMPPPPPPGVEIKKTAVQDLSFNKNLRAVVSVLGSWLQDHPQDFRDPPAHSDLGSVRTFLGWAAPGSAEAQKAEKLLEDFLEEAEREQEEEPPQVWTGVVAHAYSPSYLGC

SEQ ID NO: 1978 - protein, 204 aa, Artificial Sequence
  Synthetic polypeptide
MLLPLLLLLPMCWAVEVKRPRGVSLTNHHFYDESKPFTCLDGSATIPFDQVNDDYCDCKDGSDEPGTAACPNGSFHCTNTGYKPLYIPSNRVNDGVCDCCDGTDEYNSGVICENTCKEKGRKERESLQQMAEVTREGFRLKKILIEDWKKAREEKQKKLIELQAGKKSLEDQVEVGVSQDHATALSSLGYRVRLSKKKNNNNKR

SEQ ID NO: 1979 - protein, 204 aa, Artificial Sequence; identical to SEQ ID NO: 1978
  Synthetic polypeptide

SEQ ID NO: 1980 - protein, 204 aa, Artificial Sequence; identical to SEQ ID NO: 1978
  Synthetic polypeptide

SEQ ID NO: 1981 - protein, 204 aa, Artificial Sequence; identical to SEQ ID NO: 1978
  Synthetic polypeptide

SEQ ID NO: 1982 - protein, 204 aa, Artificial Sequence; identical to SEQ ID NO: 1978
  Synthetic polypeptide

SEQ ID NO: 1983 - protein, 204 aa, Artificial Sequence; identical to SEQ ID NO: 1978
  Synthetic polypeptide

SEQ ID NO: 1984 - protein, 282 aa, Artificial Sequence
  Synthetic polypeptide
MVTQILGAMESQVGGGPAGPALPNGPLLGTNGATDDSKTNLIVNYLPQNMTQDEFKSLFGSIGDIESCKLVRDKITGQSLGYGFVNYSDPNDADKAINTLNGLKLQTKTIKVSYARPSSASIRDANLYVSGLPKTMSQKEMEQLFSQYGRIITSRILVDQVTGVSRGVGFIRFDKRIEAEEAIKGLNGQKPLGAAEPITVKFANNPSQKTGQALLTHLYQSSARRYAGPLHHQTQRFRLDNLLNMAYGVKRISLIRWCMPVVQATQEAEAGGSLEPRSWRLQ

SEQ ID NO: 1985 - protein, 282 aa, Artificial Sequence; identical to SEQ ID NO: 1984
  Synthetic polypeptide

SEQ ID NO: 1986 - protein, 19 aa, Artificial Sequence
  Synthetic polypeptide
MSADVSKESEDKSEVSDKQ

SEQ ID NO: 1987 - protein, 19 aa, Artificial Sequence
  Synthetic polypeptide
MSADVSKESEDKSEVSDKQ

SEQ ID NO: 1988 - protein, 19 aa, Artificial Sequence
  Synthetic polypeptide
MSADVSKESEDKSEVSDKQ

SEQ ID NO: 1989 - protein, 116 aa, Artificial Sequence
  Synthetic polypeptide
MQPTATMATAATTTTTTTATVALTTSWDNATGRPTAEPDPILDNYVLLVVVMSLFVGGTLVVLSGVLLLCKRCWDVHQRLNRAMEEAEKTTTTYLDNGTHPAQDWAQLDSDSSLFP

SEQ ID NO: 1990 - protein, 110 aa, Artificial Sequence [sequence omitted]

SEQ ID NO: 1991 - protein, 110 aa, Artificial Sequence [sequence omitted]

SEQ ID NO: 1992 - protein, 110 aa, Artificial Sequence [sequence omitted]

SEQ ID NO: 1993 - protein, 328 aa, Artificial Sequence
  Synthetic polypeptide
MIPLLLAALLCVPAGALTCYGDSGQPVDWFVVYKLPALRGSGEAAQRGLQYKYLDESSGGWRDGRALINSPEGAVGRSLQPLYRSNTSQLAFLLYNDQPPQPSKAQDSSMRGHTKGVLLLDHDGGFWLVHSVPNFPPPASSAAYSWPHSACTYGQTLLCVSFPFAQFSKMGKQLTYTYPWVYNYQLEGIFAQEFPDLENVVKGHHVSQEPWNSSITLTSQAGAVFQSFAKFSKFGDDLYSGWLAAALGTNLQVQFWHKTVGILPSNCSDIWQVLNVNQIAFPGPAGPSFNSTEDHSKCCMTLIVCLNRSVTQSTCLQNGKHNTCHQDC

SEQ ID NO: 1994 - protein, 273 aa, Artificial Sequence
  Synthetic polypeptide
MIPLLLAALLCVPAGALTCYGDSGQPVDWFVVYKLPALRGSGEAAQRGLQYKYLDESSGGWRDGRALINSPEGAVGRSLQPLYRSNTSQLAFLLYNDQPPQPSKAQDSSMRGHTKGKQLTYTYPWVYNYQLEGIFAQEFPDLENVVKGHHVSQEPWNSSITLTSQAGAVFQSFAKFSKFGDDLYSGWLAAALGTNLQVQFWHKTVGILPSNCSDIWQVLNVNQIAFPGPAGPSFNSTEDHSKCCMTLIVCLNRSVTQSTCLQNGKHNTCHQDC

SEQ ID NO: 1995 - protein, 214 aa, Artificial Sequence
  Synthetic polypeptide
MGERKGVNKYYPPDFNPEKHGSLNRYHNSHPLRERARKLSQGILIIRFEMPYNIWCDGCKNHIGMGVRYNAEKKKVGNYYTTPIYRFRMKCHLCVNYIEMQTDPANCDYVIVSGAQRKEERWDMADNEQVLTTEHEKKQKLETDAMFRLEHGEADRSTLKKALPTLSHIQEAQSAWKDDFALNSMLRRRFRRPAPPGQGFFPACHCMPSVQNKA

SEQ ID NO: 1996 - protein, 214 aa, Artificial Sequence; identical to SEQ ID NO: 1995
  Synthetic polypeptide

SEQ ID NO: 1997 - protein, 165 aa, Artificial Sequence
  Synthetic polypeptide
MPYNIWCDGCKNHIGMGVRYNAEKKKVGNYYTTPIYRFRMKCHLCVNYIEMQTDPANCDYVIVSGAQRKEERWDMADNEQVLTTEHEKKQKLETDAMFRLEHGEADRSTLKKALPTLSHIQEAQSAWKDDFALNSMLRRRFRRPAPPGQGFFPACHCMPSVQNKA

SEQ ID NO: 1998 - protein, 29 aa, Artificial Sequence
  Synthetic polypeptide
QPIPQQPPASGAGSEAVTGHPHHPIRNAI

SEQ ID NO: 1999 - protein, 77 aa, Artificial Sequence
  Synthetic polypeptide
KQKLETDAMFRLEHGEADRSTLKKALPTLSHIQEAQSAWKDDFALNSMLRRRFRRPAPPGQGFFPACHCMPSVQNKA

SEQ ID NO: 2000 - protein, 7 aa, Artificial Sequence
  Synthetic polypeptide
MGRPTQI

SEQ ID NO: 2001 - protein, 7 aa, Artificial Sequence
  Synthetic polypeptide
MGRPTQI

SEQ ID NO: 2002 - protein, 7 aa, Artificial Sequence
  Synthetic polypeptide
MGRPTQI

SEQ ID NO: 2003 - protein, 639 aa, Artificial Sequence
  Synthetic polypeptide
MASSVAPYEQLVRQVEALKAENSHLRQELRDNSSHLSKLETETSGMKEVLKHLQGKLEQEARVLVSSGQTEVLEQLKALQMDITSLYNLKFQPPTLGPEPAARTPEGSPVHGSGPSKDSFGELSRATIRLLEELDRERCFLLNEIEKEEKEKLWYYSQLQGLSKRLDELPHVETQFSMQMDLIRQQLEFEAQHIRSLMEERFGTSDEMVQRAQIRASRLEQIDKELLEAQDRVQQTEPQALLAVKSVPVDEDPETEVPTHPEDGTPQPGNSKVEVVFWLLSMLATRDQEDTARTLLAMSSSPESCVAMRRSGCLPLLLQILHGTEAAAGGRAGAPGAPGAKDARMRANAALHNIVFSQPDQGLARKEMRVLHVLEQIRAYCETCWDWLQARDGGPEGGGAGSAPIPIEPQICQATCAVMKLSFDEEYRRAMNELGGLQAVAELLQVDYEMHKMTRDPLNLALRRYAGMTLTNLTFGDVANKATLCARRGCMEAIVAQLASDSEELHQVVSSILRNLSWRADINSKKVLREAGSVTALVQCVLRATKESTLKSVLSALWNLSAHSTENKAAICQVDGALGFLVSTLTYKCQSNSLAIIESGGGILRNVSSLVATREDYRPGAVAHACNPSTLGGRGRQIT

SEQ ID NO: 2004 - protein, 639 aa, Artificial Sequence; identical to SEQ ID NO: 2003
  Synthetic polypeptide

SEQ ID NO: 2005 - protein, 639 aa, Artificial Sequence; identical to SEQ ID NO: 2003
  Synthetic polypeptide

SEQ ID NO: 2006 - protein, 365 aa, Artificial Sequence
  Synthetic polypeptide
MASSVAPYEQLVRQVEALKAENSHLRQELRDNSSHLSKLETETSGMKEVLKHLQGKLEQEARVLVSSGQTEVLEQLKALQMDITSLYNLKFQPPTLGPEPAARTPEGSPVHGSGPSKDSFGELSRATIRLLEELDRERCFLLNEIEKEEKEKLWYYSQLQGLSKRLDELPHVDYEMHKMTRDPLNLALRRYAGMTLTNLTFGDVANKATLCARRGCMEAIVAQLASDSEELHQVVSSILRNLSWRADINSKKVLREAGSVTALVQCVLRATKESTLKSVLSALWNLSAHSTENKAAICQVDGALGFLVSTLTYKCQSNSLAIIESGGGILRNVSSLVATREDYRPGAVAHACNPSTLGGRGRQIT

SEQ ID NO: 2007 - protein, 251 aa, Artificial Sequence
  Synthetic polypeptide
MKHYEVEILDAKTREKLCFLDKVEPHATIAEIKNLFTKTHPQWYPARQSLRLDPKGKSLKDEDVLQKLPVGTTATLYFRDLGAQISWVTVFLTEYAGPLFIYLLFYFRVPFIYGHKYDFTSSRHTVVHLACICHSFHYIKRLLETLFVHRFSHGTMPLRNIFKNCTYYWGFAAWMAYYINHPLYTPPTYGAQQVKLALAIFVICQLGNFSIHMALRDLRPAGSKTRKIPYPTKNPFTWLFLLVSCPNYTYE

SEQ ID NO: 2008 - protein, 96 aa, Artificial Sequence
  Synthetic polypeptide
MPLRNIFKNCTYYWGFAAWMAYYINHPLYTPPTYGAQQVKLALAIFVICQLGNFSIHMALRDLRPAGSKTRKIPYPTKNPFTWLFLLVSCPNYTYE

SEQ ID NO: 2009 - protein, 96 aa, Artificial Sequence; identical to SEQ ID NO: 2008
  Synthetic polypeptide

SEQ ID NO: 2010 - protein, 266 aa, Artificial Sequence
  Synthetic polypeptide
MILQETKAACGIPAIPHCSRVEILDAKTREKLCFLDKVEPHATIAEIKNLFTKTHPQWYPARQSLRLDPKGKSLKDEDVLQKLPVGTTATLYFRDLGAQISWVTVFLTEYAGPLFIYLLFYFRVPFIYGHKYDFTSSRHTVVHLACICHSFHYIKRLLETLFVHRFSHGTMPLRNIFKNCTYYWGFAAWMAYYINHPLYTPPTYGAQQVKLALAIFVICQLGNFSIHMALRDLRPAGSKTRKIPYPTKNPFTWLFLLVSCPNYTYE

SEQ ID NO: 2011 - protein, 93 aa, Artificial Sequence
  Synthetic polypeptide
RRSSCTASPMALCLCATSSRTAPTTGASPRGWPITSITLSTLPLICQLGNFSIHMALRDLRPAGSKTRKIPYPTKNPFTWLFLLVSCPNYTYE

SEQ ID NO: 2012 - protein, 72 aa, Artificial Sequence
  Synthetic polypeptide
MHNLYSITGYPDPPGTMEEEEEDDDYENSTPPYKDLPPKPDAQSSLWRGSHGKELRPPTNSHVSASSWKQIL

SEQ ID NO: 2013 - protein, 72 aa, Artificial Sequence; identical to SEQ ID NO: 2012
  Synthetic polypeptide

SEQ ID NO: 2014 - protein, 72 aa, Artificial Sequence; identical to SEQ ID NO: 2012
  Synthetic polypeptide

SEQ ID NO: 2015 - protein, 72 aa, Artificial Sequence; identical to SEQ ID NO: 2012
  Synthetic polypeptide

SEQ ID NO: 2016 - protein, 72 aa, Artificial Sequence; identical to SEQ ID NO: 2012
  Synthetic polypeptide

SEQ ID NO: 2017 - protein, 72 aa, Artificial Sequence; identical to SEQ ID NO: 2012
  Synthetic polypeptide

SEQ ID NO: 2018 - protein, 72 aa, Artificial Sequence; identical to SEQ ID NO: 2012
  Synthetic polypeptide

SEQ ID NO: 2019 - protein, 72 aa, Artificial Sequence; identical to SEQ ID NO: 2012
  Synthetic polypeptide

SEQ ID NO: 2020 - protein, 72 aa, Artificial Sequence; identical to SEQ ID NO: 2012
  Synthetic polypeptide

SEQ ID NO: 2021 - protein, 72 aa, Artificial Sequence; identical to SEQ ID NO: 2012
  Synthetic polypeptide

SEQ ID NO: 2022 - protein, 98 aa, Artificial Sequence
  Synthetic polypeptide
MHNLYSITGYPDPPGTMEEEEEDDDYENSTPPYKDLPPKPGTMEEEEEDDDYENSTPPYKDLPPKPDAQSSLWRGSHGKELRPPTNSHVSASSWKQIL

SEQ ID NO: 2023 - protein, 98 aa, Artificial Sequence; identical to SEQ ID NO: 2022
  Synthetic polypeptide

SEQ ID NO: 2024 - protein, 98 aa, Artificial Sequence; identical to SEQ ID NO: 2022
  Synthetic polypeptide

SEQ ID NO: 2025 - protein, 98 aa, Artificial Sequence; identical to SEQ ID NO: 2022
  Synthetic polypeptide

SEQ ID NO: 2026 - protein, 98 aa, Artificial Sequence; identical to SEQ ID NO: 2022
  Synthetic polypeptide

SEQ ID NO: 2027 - protein, 1282 aa, Artificial Sequence
  Synthetic polypeptide
MGPGARGRRRRRRPMSPPPPPPPVRALPLLLLLAGPGAAAPPCLDGSPCANGGRCTQLPSREAACLCPPGWVGERCQLEDPCHSGPCAGRGVCQSSVVAGTARFSCRCPRGFRGPDCSLPDPCLSSPCAHGARCSVGPDGRFLCSCPPGYQGRSCRSDVDECRVGEPCRHGGTCLNTPGSFRCQCPAGYTGPLCENPAVPCAPSPCRNGGTCRQSGDLTYDCACLPGFEGQNCEVNVDDCPGHRCLNGGTCVDGVNTYNCQCPPEWTGQFCTEDVDECQLQPNACHNGGTCFNTLGGHSCVCVNGWTGESCSQNIDDCATAVCFHGATCHDRVASFYCACPMGKTGLLCHLDDACVSNPCHEDAICDTNPVNGRAICTCPPGFTGGACDQDVDECSIGANPCEHLGRCVNTQGSFLCQCGRGYTGPRCETDVNECLSGPCRNQATCLDRIGQFTCICMAGFTGTYCEVDIDECQSSPCVNGGVCKDRVNGFSCTCPSGFSGSTCQLDVDECASTPCRNGAKCVDQPDGYECRCAEGFEGTLCDRNVDDCSPDPCHHGRCVDGIASFSCACAPGYTGTRCESQVDECRSQPCRHGGKCLDLVDKYLCRCPSGTTGVNCEVNIDDCASNPCTFGVCRDGINRYDCVCQPGFTGPLCNVEINECASSPCGEGGSCVDGENGFRCLCPPGSLPPLCLPPSHPCAHEPCSHGICYDAPGGFRCVCEPGWSGPRCSQSLARDACESQPCRAGGTCSSDGMGFHCTCPPGVQGRQCELLSPCTPNPCEHGGRCESAPGQLPVCSCPQGWQGPRCQQDVDECAGPAPCGPHGICTNLAGSFSCTCHGGYTGPSCDQDINDCDPNPCLNGGSCQDGVGSFSCSCLPGFAGPRCARDVDECLSNPCGPGTCTDHVASFTCTCPPGYGGFHCEQDLPDCSPSSCFNGGTCVDGVNSFSCLCRPGYTGAHCQHEADPCLSRPCLHGGVCSAAHPGFRCTCLESFTGPQCQTLVDWCSRQPCQNGGRCVQTGAYCLCPPGWSGRLCDIRSLPCREAAAQIGVRLEQLCQAGGQCVDEDSSHYCVCPEGRTGSHCEQEVDPCLAQPCQHGGTCRGYMGGYMCECLPGYNGDNCEDDVDECASQPCQHGGSCIDLVARYLCSCPPGTLGVLCEINEDDCGPGPPLDSGPRCLHNGTCVDLVGGFRCTCPPGYTGLRCEADINECRSGACHAAHTRDCLQDPGGGFRCLCHAGFSGPRCQTVLSPCESQPCQHGGQCRPSPGPGGGLTFTCHCAQPGD

SEQ ID NO: 2028 - protein, 1229 aa, Artificial Sequence
  Synthetic polypeptide
GPGARGRRRRRRPMSPPPPPPPVRALPLLLLLAGPGAAAPPCLDGSPCANGGRCTQLPSREAACLCPPGWVGERCQLEDPCHSGPCAGRGVCQSSVVAGTARFSCRCPRGFRGPDCSLPDPCLSSPCAHGARCSVGPDGRFLCSCPPGYQGRSCRSDVDECRVGEPCRHGGTCLNTPGSFRCQCPAGYTGPLCENPAVPCAPSPCRNGGTCRQSGDLTYDCACLPGFEGQNCEVNVDDCPGHRCLNGGTCVDGVNTYNCQCPPEWTGQFCTEDVDECQLQPNACHNGGTCFNTLGGHSCVCVNGWTGESCSQNIDDCATAVCFHGATCHDRVASFYCACPMGKTGLLCHLDDACVSNPCHEDAICDTNPVNGRAICTCPPGFTGGACDQDVDECSIGANPCEHLGRCVNTQGSFLCQCGRGYTGPRCETDVNECLSGPCRNQATCLDRIGQFTCICMAGFTGTYCEVDIDECQSSPCVNGGVCKDRVNGFSCTCPSGFSGSTCQLDVDECASTPCRNGAKCVDQPDGYECRCAEGFEGTLCDRNVDDCSPDPCHHGRCVDGIASFSCACAPGYTGTRCESQVDECRSQPCRHGGKCLDLVDKYLCRCPSGTTGVNCEVNIDDCASNPCTFGVCRDGINRYDCVCQPGFTGPLCNVEINECASSPCGEGGSCVDGENGFRCLCPPGSLPPLCLPPSHPCAHEPCSHGICYDAPGGFRCVCEPGWSGPRCSQSLARDACESQPCRAGGTCSSDGMGFHCTCPPGVQGRQCELLSPCTPNPCEHGGRCESAPGQLPVCSCPQGWQDPCLNGGSCQDGVGSFSCSCLPGFAGPRCARDVDECLSNPCGPGTCTDHVASFTCTCPPGYGGFHCEQDLPDCSPSSCFNGGTCVDGVNSFSCLCRPGYTGAHCQHEADPCLSRPCLHGGVCSAAHPGFRCTCLESFTGPQCQTLVDWCSRQPCQNGGRCVQTGAYCLCPPGWSGRLCDIRSLPCREAAAQIGVRLEQLCQAGGQCVDEDSSHYCVCPEGRTGSHCEQEVDPCLAQPCQHGGTCRGYMGGYMCECLPGYNGDNCEDDVDECASQPCQHGGSCIDLVARYLCSCPPGTLGVLCEINEDDCGPGPPLDSGPRCLHNGTCVDLVGGFRCTCPPGYTGLRCEADINECRSGACHAAHTRDCLQDPGGGFRCLCHAGFSGPRCQTVLSPCESQPCQHGGQCRPSPGPGGGLTFTCHCAQPGD

SEQ ID NO: 2029 - protein, 1294 aa, Artificial Sequence
  Synthetic polypeptide
MGPGARGRRRRRRPMSPPPPPPPVRALPLLLLLAGPGAAAPPCLDGSPCANGGRCTQLPSREAACLCPPGWVGERCQLEDPCHSGPCAGRGVCQSSVVAGTARFSCRCPRGFRGPDCSLPDPCLSSPCAHGARCSVGPDGRFLCSCPPGYQGRSCRSDVDECRVGEPCRHGGTCLNTPGSFRCQCPAGYTGPLCENPAVPCAPSPCRNGGTCRQSGDLTYDCACLPGFEGQNCEVNVDDCPGHRCLNGGTCVDGVNTYNCQCPPEWTGQFCTEDVDECQLQPNACHNGGTCFNTLGGHSCVCVNGWTGESCSQNIDDCATAVCFHGATCHDRVASFYCACPMGKTGLLCHLDDACVSNPCHEDAICDTNPVNGRAICTCPPGFTGGACDQDVDECSIGANPCEHLGRCVNTQGSFLCQCGRGYTGPRCETDVNECLSGPCRNQATCLDRIGQFTCICMAGFTGTYCEVDIDECQSSPCVNGGVCKDRVNGFSCTCPSGFSGSTCQLDVDECASTPCRNGAKCVDQPDGYECRCAEGFEGTLCDRNVDDCSPDPCHHGRCVDGIASFSCACAPGYTGTRCESQVDECRSQPCRHGGKCLDLVDKYLCRCPSGTTGVNCEVNIDDCASNPCTFGVCRDGINRYDCVCQPGFTGPLCNVEINECASSPCGEGGSCVDGENGFRCLCPPGSLPPLCLPPSHPCAHEPCSHGICYDAPGGFRCVCEPGWSGPRCSQSLARDACESQPCRAGGTCSSDGMGFHCTCPPGVQGRQCELLSPCTPNPCEHGGRCESAPGQLPVCSCPQGWQGPRCQQDVDECAGPAPCGPHGICTNLAGSFSCTCHGGYTGPSCDQDINDCDPNPCLNGGSCQDGVGSFSCSCLPGFAGPRCARDVDECLSNPCGPGTCTDHVASFTCTCPPGYGGFHCEQDLPDCSPSSCFNGGTCVDGVNSFSCLCRPGYTGAHCQHEADPCLSRPCLHGGVCSAAHPGFRCTCLESFTGPQCQTLVDWCSRQPCQNGGRCVQTGAYCLCPPGWSGRLCDIRSLPCREAAAQIGVRLEQLCQAGGQCVDEDSSHYCVCPEGRTGSHCEQEVDPCLAQPCQHGGTCRGYMGGYMCECLPGYNGDNCEDDVDECASQPCQHGGSCIDLVARYLCSCPPGTLGVLCEINEDDCGPGPPLDSGPRCLHNGTCVDLVGGFRCTCPPGYTGLRCEADINECRSGACHAAHTRDCLQDPGGGFRCLCHAGFSGPRCQTVLSPCESQPCQHGGQCRPSPGPGGGLTFTCHCAQPGVVAAACNPSYSGG

SEQ ID NO: 2030 - protein, 1241 aa, Artificial Sequence
  Synthetic polypeptide
GPGARGRRRRRRPMSPPPPPPPVRALPLLLLLAGPGAAAPPCLDGSPCANGGRCTQLPSREAACLCPPGWVGERCQLEDPCHSGPCAGRGVCQSSVVAGTARFSCRCPRGFRGPDCSLPDPCLSSPCAHGARCSVGPDGRFLCSCPPGYQGRSCRSDVDECRVGEPCRHGGTCLNTPGSFRCQCPAGYTGPLCENPAVPCAPSPCRNGGTCRQSGDLTYDCACLPGFEGQNCEVNVDDCPGHRCLNGGTCVDGVNTYNCQCPPEWTGQFCTEDVDECQLQPNACHNGGTCFNTLGGHSCVCVNGWTGESCSQNIDDCATAVCFHGATCHDRVASFYCACPMGKTGLLCHLDDACVSNPCHEDAICDTNPVNGRAICTCPPGFTGGACDQDVDECSIGANPCEHLGRCVNTQGSFLCQCGRGYTGPRCETDVNECLSGPCRNQATCLDRIGQFTCICMAGFTGTYCEVDIDECQSSPCVNGGVCKDRVNGFSCTCPSGFSGSTCQLDVDECASTPCRNGAKCVDQPDGYECRCAEGFEGTLCDRNVDDCSPDPCHHGRCVDGIASFSCACAPGYTGTRCESQVDECRSQPCRHGGKCLDLVDKYLCRCPSGTTGVNCEVNIDDCASNPCTFGVCRDGINRYDCVCQPGFTGPLCNVEINECASSPCGEGGSCVDGENGFRCLCPPGSLPPLCLPPSHPCAHEPCSHGICYDAPGGFRCVCEPGWSGPRCSQSLARDACESQPCRAGGTCSSDGMGFHCTCPPGVQGRQCELLSPCTPNPCEHGGRCESAPGQLPVCSCPQGWQDPCLNGGSCQDGVGSFSCSCLPGFAGPRCARDVDECLSNPCGPGTCTDHVASFTCTCPPGYGGFHCEQDLPDCSPSSCFNGGTCVDGVNSFSCLCRPGYTGAHCQHEADPCLSRPCLHGGVCSAAHPGFRCTCLESFTGPQCQTLVDWCSRQPCQNGGRCVQTGAYCLCPPGWSGRLCDIRSLPCREAAAQIGVRLEQLCQAGGQCVDEDSSHYCVCPEGRTGSHCEQEVDPCLAQPCQHGGTCRGYMGGYMCECLPGYNGDNCEDDVDECASQPCQHGGSCIDLVARYLCSCPPGTLGVLCEINEDDCGPGPPLDSGPRCLHNGTCVDLVGGFRCTCPPGYTGLRCEADINECRSGACHAAHTRDCLQDPGGGFRCLCHAGFSGPRCQTVLSPCESQPCQHGGQCRPSPGPGGGLTFTCHCAQPGVVAAACNPSYSGG

SEQ ID NO: 2031 - protein, 521 aa, Artificial Sequence
  Synthetic polypeptide
MPQLSLSWLGLGPVAASPWLLLLLVGGSWLLARVLAWTYTFYDNCRRLQCFPQPPKQNWFWGHQGLVTPTEEGMKTLTQLVTTYPQGFKLWLGPTFPLLILCHPDIIRPITSASAAVAPKDMIFYGFLKPWLGDGLLLSGGDKWSRHRRMLTPAFHFNILKPYMKIFNKSVNIMHDKWQRLASEGSARLDMFEHISLMTLDSLQKCVFSFESNCQEKPSEYIAAILELSAFVEKRNQQILLHTDFLYYLTPDGQRFRRACHLVHDFTDAVIQERRCTLPTQGIDDFLKNKAKSKTLDFIDVLLLSKDEDGKELSDEDIRAEADTFMFEGHDTTASGLSWVLYHLAKHPEYQEQCRQEVQELLKDREPIEIEWDDLAQLPFLTMCIKESLRLHPPVPVISRCCTQDFVLPDGRVIPKGIVCLINIIGIHYNPTVWPDPEVYDPFRFDQENIKERSPLAFIPFSAGPRNCIGQAFAMAEMKVVLALTLLHFRILPTHTEPRRKPELILRAEGGLWLRVEPLEA

SEQ ID NO: 2032 - protein, 521 aa, Artificial Sequence; identical to SEQ ID NO: 2031
  Synthetic polypeptide

SEQ ID NO: 2033 - protein, 196 aa, Artificial Sequence
  Synthetic polypeptide
MFEGHDTTASGLSWVLYHLAKHPEYQEQCRQEVQELLKDREPIEIEWDDLAQLPFLTMCIKESLRLHPPVPVISRCCTQDFVLPDGRVIPKGIVCLINIIGIHYNPTVWPDPEVYDPFRFDQENIKERSPLAFIPFSAGPRNCIGQAFAMAEMKVVLALTLLHFRILPTHTEPRRKPELILRAEGGLWLRVEPLEA

SEQ ID NO: 2034 - protein, 11 aa, Artificial Sequence
  Synthetic polypeptide
AGEGRGACGGV

SEQ ID NO: 2035 - protein, 249 aa, Artificial Sequence
  Synthetic polypeptide
MEAIKKKMQMLKLDKENAIDRAEQAEADKKAAEDKCKQVEEELTHLQKKLKGTEDELDKYSEDLKDAQEKLELTEKKASDAEGDVAALNRRIQLVEEELDRAQERLATALQKLEEAEKAADESERGMKVIENRAMKDEEKMEIQEMQLKEAKHIAEEADRKYEEVARKLVILEGELERAEERAEVSELKCGDLEEELKNVTNNLKSLEAASEKYSEKEDKYEEEIKLLSDKLKEAEAGGSLEPRKWRLQ

SEQ ID NO: 2036 - protein, 249 aa, Artificial Sequence; identical to SEQ ID NO: 2035
  Synthetic polypeptide

SEQ ID NO: 2037 - protein, 213 aa, Artificial Sequence
  Synthetic polypeptide
MAGLNSLEAVKRKIQALQQQADEAEDRAQGLQRELDGERERREKAEGDVAALNRRIQLVEEELDRAQERLATALQKLEEAEKAADESERGMKVIENRAMKDEEKMEIQEMQLKEAKHIAEEADRKYEEVARKLVILEGELERAEERAEVSELKCGDLEEELKNVTNNLKSLEAASEKYSEKEDKYEEEIKLLSDKLKEAEAGGSLEPRKWRLQ

SEQ ID NO: 2038 - protein, 24 aa, Artificial Sequence
  Synthetic polypeptide
KLLSDKLKEAEAGGSLEPRKWRLQ

SEQ ID NO: 2039 - protein, 278 aa, Artificial Sequence
  Synthetic polypeptide
MEVAEPSSPTEEEEEEEEHSAEPRPRTRSNPEGAEDRAVGAQASVGSRSEGEGEAASADDGSLNTSGAGPKSWQVPPPAPEVQIRTPRVNCPEKVIICLDLSEEMSLPKLESFNGSKTNALNVSQKMIEMFVRTKHKIDKSHEFALVVVNDDTAWLSGLTSDPRELCSCLYDLETASCSTFNLEGLFSLIQQKTELPVTENVQTIPPPYVVRTILVYSRPPCQPQFSLTEPMKKMFQCPYFFFDVVYIHNGTEEKEEEMSWKEAEAGESLEPGRQRLR

SEQ ID NO: 2040 - protein, 278 aa, Artificial Sequence; identical to SEQ ID NO: 2039
  Synthetic polypeptide

SEQ ID NO: 2041 - protein, 278 aa, Artificial Sequence; identical to SEQ ID NO: 2039
  Synthetic polypeptide

SEQ ID NO: 2042 - protein, 200 aa, Artificial Sequence
  Synthetic polypeptide
MMGASTLQEPALSPGRCPRQPLRSKFGHQGSTVQRKCSKTNALNVSQKMIEMFVRTKHKIDKSHEFALVVVNDDTAWLSGLTSDPRELCSCLYDLETASCSTFNLEGLFSLIQQKTELPVTENVQTIPPPYVVRTILVYSRPPCQPQFSLTEPMKKMFQCPYFFFDVVYIHNGTEEKEEEMSWKEAEAGESLEPGRQRLR

SEQ ID NO: 2043 - protein, 278 aa, Artificial Sequence
  Synthetic polypeptide
MEVAEPSSPTEEEEEEEEHSAEPRPRTRSNPEGAEDRAVGAQASVGSRSEGEGEAASADDGSLNTSGAGPKSWQVPPPAPEVQIRTPRVNCPEKVIICLDLSEEMSLPKLESFNGSKTNALNVSQKMIEMFVRTKHKIDKSHEFALVVVNDDTAWLSGLTSDPRELCSCLYDLETASCSTFNISGASPARQQKTELPVTENVQTIPPPYVVRTILVYSRPPCQPQFSLTEPMKKMFQCPYFFFDVVYIHNGTEEKEEEMSWKEAEAGESLEPGRQRLR

SEQ ID NO: 2044 - protein, 203 aa, Artificial Sequence
  Synthetic polypeptide
MEVAEPSSPTEEEEEEEEHSAEPRPRTRSNPEGAEDRAVGAQASVGSRSEGEGEAASADDGSLNTSGAGPKSWQVPPPAPEVQIRTPRVNCPEKVIICLDLSEEMSLPKLESFNGQQKTELPVTENVQTIPPPYVVRTILVYSRPPCQPQFSLTEPMKKMFQCPYFFFDVVYIHNGTEEKEEEMSWKEAEAGESLEPGRQRLR

SEQ ID NO: 2045 - protein, 48 aa, Artificial Sequence
  Synthetic polypeptide
PLQKMFQCPYFFFDVVYIHNGTEEKEEEMSWKEAEAGESLEPGRQRLR

SEQ ID NO: 2046 - protein, 174 aa, Artificial Sequence
  Synthetic polypeptide
MARSYGGRVLAAMTLLGIAAAVLAALGAQLLFQLQAGRAELRGLRAEGLGQELGAGPGLPEDAAGTLLPLAAALAALVLVLGFTCLLLAALCGHLGAELARGPGPRRSDWFLYDCRLLRHVALGLFCCGISVYLAGRTRWLTPVIPALWETEAGRSRGQEIETILANKVKPHLY

SEQ ID NO: 2047 - protein, 159 aa, Artificial Sequence
  Synthetic polypeptide
MPKKWLFLPFEDDLRRDLGRQFSVERLPAVVVLKPDGDVLTRDGADEIQRLGTACFANWQEAAEVLDRNFQLPEDLEDQEPRSLTECLRRHKSDWFLYDCRLLRHVALGLFCCGISVYLAGRTRWLTPVIPALWETEAGRSRGQEIETILANKVKPHLY

SEQ ID NO: 2048 - protein, 246 aa, Artificial Sequence
  Synthetic polypeptide
MAAPAPGLISVFSSSQELGAALAQLVAQRAACCLAGARARFALGLSGGSLVSMLARELPAAVAPAGPASLARWTLGFCDERLVPFDHAESTYGLYRTHLLSRLPIPESQVITINPELPVEEAAEDYAKKLRQAFQGDSIPVFDLLILGVGPDGHTCSLFPDHPLLQEREKIVAPISDSPKPPPQRVTLTLPVLNAARTVIFVATGEGKAAVLKLLRRLRQKNRLKPGGGGCREPRSYHCTPAWETE

SEQ ID NO: 2049 - protein, 133 aa, Artificial Sequence
  Synthetic polypeptide
MQIFVKTLTGKTITLEVEPSDTIENVKAKIQDKEGIPPDQQRLIFAGKQLEDGRTLSDYNIQKESTLHLVLRLRGGIIEPSLRQLAQKYNCDKMICRKCYARLHPRAVNCRKKKCGHTNNLRRGTQAGRGRAR

SEQ ID NO: 2050 - protein, 133 aa, Artificial Sequence; identical to SEQ ID NO: 2049
  Synthetic polypeptide

SEQ ID NO: 2051 - protein, 133 aa, Artificial Sequence; identical to SEQ ID NO: 2049
  Synthetic polypeptide

SEQ ID NO: 2052 - protein, 133 aa, Artificial Sequence; identical to SEQ ID NO: 2049
  Synthetic polypeptide

SEQ ID NO: 2053 - protein, 133 aa, Artificial Sequence; identical to SEQ ID NO: 2049
  Synthetic polypeptide

SEQ ID NO: 2054 - protein, 133 aa, Artificial Sequence; identical to SEQ ID NO: 2049
  Synthetic polypeptide

SEQ ID NO: 2055 - protein, 133 aa, Artificial Sequence; identical to SEQ ID NO: 2049
  Synthetic polypeptide

SEQ ID NO: 2056 - protein, 133 aa, Artificial Sequence; identical to SEQ ID NO: 2049
  Synthetic polypeptide

SEQ ID NO: 2057 - protein, 133 aa, Artificial Sequence; identical to SEQ ID NO: 2049
  Synthetic polypeptide

SEQ ID NO: 2058 - protein, 133 aa, Artificial Sequence; identical to SEQ ID NO: 2049
  Synthetic polypeptide

SEQ ID NO: 2059 - protein, 143 aa, Artificial Sequence
  Synthetic polypeptide
PSDTIENVKAKIQDKEGIPPDQQRLIFAGKQLEDGRTLSDYNIQKESTLHLVLRLRGGIIEPSLRQLAQKYNCDKMICRKYVCSDAWGAVGAAGVGVCPHPPLLSLCRCYARLHPRAVNCRKKKCGHTNNLRRGTQAGRGRAR

SEQ ID NO: 2060 - protein, 92 aa, Artificial Sequence
  Synthetic polypeptide
VKAKIQDKEGIPPDQQRLIFAGKQLEDGRTLSDYNIQKESTLHLVLRLRGGIIEPSLRQLAQKYNCDKMICRKSVVTPTTCGAGRRPGAGGR

SEQ ID NO: 2061 - protein, 147 aa, Artificial Sequence
  Synthetic polypeptide
MPAGRRGPAAQSARRPPPLLPLLLLLCVLGAPRAGSGAHTAVISPQDPTLLIGSSLLATCSVHGDPPGATAEGLYWTLNGRRLPPELSRVLNASTLALALANLNGSRQRSGDNLVCHARDGSILAGSCLYVGPWGTERDFASKKEKE

SEQ ID NO: 2062 - protein, 52 aa, Artificial Sequence
  Synthetic polypeptide
MTHSLVCPETVSRVSSVLNRNTRQFGKKHLFDQDEETCWNSDQDSTFSVKWC

SEQ ID NO: 2063 - protein, 52 aa, Artificial Sequence; identical to SEQ ID NO: 2062
  Synthetic polypeptide

SEQ ID NO: 2064 - protein, 52 aa, Artificial Sequence; identical to SEQ ID NO: 2062
  Synthetic polypeptide

SEQ ID NO: 2065 - protein, 52 aa, Artificial Sequence; identical to SEQ ID NO: 2062
  Synthetic polypeptide

SEQ ID NO: 2066 - protein, 27 aa, Artificial Sequence
  Synthetic polypeptide
GKKHLFDQDEETCWNSDQDSTFSVKWC

SEQ ID NO: 2067 - protein, 1232 aa, Artificial Sequence
  Synthetic polypeptide
MGAPFVWALGLLMLQMLLFVAGEQGTQDITDASERGLHMQKLGSGSVQAALAELVALPCLFTLQPRPSAARDAPRIKWTKVRTASGQRQDLPILVAKDNVVRVAKSWQGRVSLPSYPRRRANATLLLGPLRASDSGLYRCQVVRGIEDEQDLVPLEVTGVVFHYRSARDRYALTFAEAQEACRLSSAIIAAPRHLQAAFEDGFDNCDAGWLSDRTVRYPITQSRPGCYGDRSSLPGVRSYGRRNPQELYDVYCFARELGGEVFYVGPARRLTLAGARAQCRRQGAALASVGQLHLAWHEGLDQCDPGWLADGSVRYPIQTPRRRCGGPAPGVRTVYRFANRTGFPSPAERFDAYCFRAHHPTSQHGDLETPSSGDEGEILSAEGPPVRELEPTLEEEEVVTPDFQEPLVSSGEEETLILEEKQESQQTLSPTPGDPMLASWPTGEVWLSTVAPSPSDMGAGTAASSHTEVAPTDPMPRRRGRFKGLNGRYFQQQEPEPGLQGGMEASAQPPTSEAAVNQMEPPLAMAVTEMLGSGQSRSPWADLTNEVDMPGAGSAGGKSSPEPWLWPPTMVPPSISGHSRAPVLELEKAEGPSARPATPDLFWSPLEATVSAPSPAPWEAFPVATSPDLPMMAMLRGPKEWMLPHPTPISTEANRVEAHGEATATAPPSPAAETKVYSLPLSLTPTGQGGEAMPTTPESPRADFRETGETSPAQVNKAEHSSSSPWPSVNRNVAVGFVPTETATEPTGLRGIPGSESGVFDTAESPTSGLQATVDEVQDPWPSVYSKGLDASSPSAPLGSPGVFLVPKVTPNLEPWVATDEGPTVNPMDSTVTPAPSDASGIWEPGSQVFEEAESTTLSPQVALDTSIVTPLTTLEQGDKVGVPAMSTLGSSSSQPHPEPEDQVETQGTSGASVPPHQSSPLGKPAVPPGTPTAASVGESASVSSGEPTVPWDPSSTLLPVTLGIEDFELEVLAGSPGVESFWEEVASGEEPALPGTPMNAGAEEVHSDPCENNPCLHGGTCNANGTMYGCSCDQGFAGENCEIDIDDCLCSPCENGGTCIDEVNGFVCLCLPSYGGSFCEKDTEGCDRGWHKFQGHCYRYFAHRRAWEDAEKDCRRRSGHLTSVHSPEEHSFINSLLPSTPPPSPSSSPCSSSSLPLLLFSPPHSSPTLPPPPSNSSPPPSIHLSPPFSFPSSSLFSPSSLPFLCLLLPLIFLLLSLPHPPSHSSPSFFH

SEQ ID NO: 2068 - protein, 683 aa, Artificial Sequence
  Synthetic polypeptide
MPGAGSAGGKSSPEPWLWPPTMVPPSISGHSRAPVLELEKAEGPSARPATPDLFWSPLEATVSAPSPAPWEAFPVATSPDLPMMAMLRGPKEWMLPHPTPISTEANRVEAHGEATATAPPSPAAETKVYSLPLSLTPTGQGGEAMPTTPESPRADFRETGETSPAQVNKAEHSSSSPWPSVNRNVAVGFVPTETATEPTGLRGIPGSESGVFDTAESPTSGLQATVDEVQDPWPSVYSKGLDASSPSAPLGSPGVFLVPKVTPNLEPWVATDEGPTVNPMDSTVTPAPSDASGIWEPGSQVFEEAESTTLSPQVALDTSIVTPLTTLEQGDKVGVPAMSTLGSSSSQPHPEPEDQVETQGTSGASVPPHQSSPLGKPAVPPGTPTAASVGESASVSSGEPTVPWDPSSTLLPVTLGIEDFELEVLAGSPGVESFWEEVASGEEPALPGTPMNAGAEEVHSDPCENNPCLHGGTCNANGTMYGCSCDQGFAGENCEIDIDDCLCSPCENGGTCIDEVNGFVCLCLPSYGGSFCEKDTEGCDRGWHKFQGHCYRYFAHRRAWEDAEKDCRRRSGHLTSVHSPEEHSFINSLLPSTPPPSPSSSPCSSSSLPLLLFSPPHSSPTLPPPPSNSSPPPSIHLSPPFSFPSSSLFSPSSLPFLCLLLPLIFLLLSLPHPPSHSSPSFFH

SEQ ID NO: 2069 - protein, 37 aa, Artificial Sequence
  Synthetic polypeptide
RAVTAAGISSRATVTAILPTGGHGKMPRRTAAAAPAT

SEQ ID NO: 2070 - protein, 37 aa, Artificial Sequence; identical to SEQ ID NO: 2069
  Synthetic polypeptide

SEQ ID NO: 2071 - protein, 1169 aa, Artificial Sequence
  Synthetic polypeptide
MGAPFVWALGLLMLQMLLFVAGEQGTQDITDASERGLHMQKLGSGSVQAALAELVALPCLFTLQPRPSAARDAPRIKWTKVRTASGQRQDLPILVAKDNVVRVAKSWQGRVSLPSYPRRRANATLLLGPLRASDSGLYRCQVVRGIEDEQDLVPLEVTGVVFHYRSARDRYALTFAEAQEACRLSSAIIAAPRHLQAAFEDGFDNCDAGWLSDRTVRYPITQSRPGCYGDRSSLPGVRSYGRRNPQELYDVYCFARELGGEVFYVGPARRLTLAGARAQCRRQGAALASVGQLHLAWHEGLDQCDPGWLADGSVRYPIQTPRRRCGGPAPGVRTVYRFANRTGFPSPAERFDAYCFRAHHPTSQHGDLETPSSGDEGEILSAEGPPVRELEPTLEEEEVVTPDFQEPLVSSGEEETLILEEKQESQQTLSPTPGDPMLASWPTGEVWLSTVAPSPSDMGAGTAASSHTEVAPTDPMPRRRGRFKGLNGRYFQQQEPEPGLQGGMEASAQPPTSEAAVNQMEPPLAMAVTEMLGSGQSRSPWADLTNEVDMPGAGSAGGKSSPEPWLWPPTMVPPSISGHSRAPVLELEKAEGPSARPATPDLFWSPLEATVSAPSPAPWEAFPVATSPDLPMMAMLRGPKEWMLPHPTPISTEANRVEAHGEATATAPPSPAAETKVYSLPLSLTPTGQGGEAMPTTPESPRADFRETGETSPAQVNKAEHSSSSPWPSVNRNVAVGFVPTETATEPTGLRGIPGSESGVFDTAESPTSGLQATVDEVQDPWPSVYSKGLDASSPSAPLGSPGVFLVPKVTPNLEPWVATDEGPTVNPMDSTVTPAPSDASGIWEPGSQVFEEAESTTLSPQVALDTSIVTPLTTLEQGDKVGVPAMSTLGSSSSQPHPEPEDQVETQGTSGASVPPHQSSPLGKPAVPPGTPTAASVGESASVSSGEPTVPWDPSSTLLPVTLGIEDFELEVLAGSPGVESFWEEVASGEEPALPGTPMNAGAEEVHSDPCENNPCLHGGTCNANGTMYGCSCDQGFAGENCEIDIDDCLCSPCENGGTCIDEVNGFVCLCLPSYGGSFCEKDTEGCDRGWHKFQGHCYRYFAHRRAWEDAEKDCRRRSGHLTSVHSPEEHSFINSFGHENTWIGLNDRIVERDFQWTDNTGLPHYSQ

SEQ ID NO: 2072 - protein, 620 aa, Artificial Sequence
  Synthetic polypeptide
MPGAGSAGGKSSPEPWLWPPTMVPPSISGHSRAPVLELEKAEGPSARPATPDLFWSPLEATVSAPSPAPWEAFPVATSPDLPMMAMLRGPKEWMLPHPTPISTEANRVEAHGEATATAPPSPAAETKVYSLPLSLTPTGQGGEAMPTTPESPRADFRETGETSPAQVNKAEHSSSSPWPSVNRNVAVGFVPTETATEPTGLRGIPGSESGVFDTAESPTSGLQATVDEVQDPWPSVYSKGLDASSPSAPLGSPGVFLVPKVTPNLEPWVATDEGPTVNPMDSTVTPAPSDASGIWEPGSQVFEEAESTTLSPQVALDTSIVTPLTTLEQGDKVGVPAMSTLGSSSSQPHPEPEDQVETQGTSGASVPPHQSSPLGKPAVPPGTPTAASVGESASVSSGEPTVPWDPSSTLLPVTLGIEDFELEVLAGSPGVESFWEEVASGEEPALPGTPMNAGAEEVHSDPCENNPCLHGGTCNANGTMYGCSCDQGFAGENCEIDIDDCLCSPCENGGTCIDEVNGFVCLCLPSYGGSFCEKDTEGCDRGWHKFQGHCYRYFAHRRAWEDAEKDCRRRSGHLTSVHSPEEHSFINSFGHENTWIGLNDRIVERDFQWTDNTGLPHYSQ

SEQ ID NO: 2073 - protein, 186 aa, Artificial Sequence
  Synthetic polypeptide
MVCARAALGPGALWAAAWGVLLLTAPAGAQRGRKKVVHVLEGESGSVVVQTAPGQVVSHRGGTIVLPCRYHYEAAAHGHDGVRLKWTKVVDPLAFTDVFVALGPQHRAFGSYRGRAELQGDGPGDASLVLRNVTLQDYGRYECEVTNELEDDAGMVKLDLEGTLAMSGDILRCHIWRRQLLLAPSG

SEQ ID NO: 2074 - protein, 85 aa, Artificial Sequence
  Synthetic polypeptide
MALKMVKGSIDRMFDKNLQDLVRGIRNHKEDEAGRSGSCLLSWHFGRLRRADHLRSGIRDQPGQRGETPSLPKIQELAGHGGVPL

SEQ ID NO: 2075 - protein, 85 aa, Artificial Sequence; identical to SEQ ID NO: 2074
  Synthetic polypeptide

SEQ ID NO: 2076 - protein, 85 aa, Artificial Sequence; identical to SEQ ID NO: 2074
  Synthetic polypeptide

SEQ ID NO: 2077 - protein, 85 aa, Artificial Sequence; identical to SEQ ID NO: 2074
  Synthetic polypeptide

SEQ ID NO: 2078 - protein, 96 aa, Artificial Sequence
  Synthetic polypeptide
MPGTPGSLEMGLLTFRDVAIEFSPEEWQCLDTAQQNLYRNVMLENYRNLAFLGIALSKPDLITYLEQGKEPWNMKQHEMVDEPTGPRQKRRVTSSR

SEQ ID NO: 2079 - protein, 96 aa, Artificial Sequence; identical to SEQ ID NO: 2078
  Synthetic polypeptide

SEQ ID NO: 2080 - protein, 231 aa, Artificial Sequence
  Synthetic polypeptide
MTLESMMACCLSDEVKESKRINAEIEKQLRRDKRDARRELKLLLLGTGESGKSTFIKQMRIIHGAGYSEEDKRGFTKLVYQNIFTAMQAMIRAMETLKILYKYEQNKANALLIREVDVEKVTTFEHQYVSAIKTLWEDPGIQECYDRRREYQLSDSAKYYLTDVDRIATLGYLPTQQDVLRVRVPTTGIIEYPFDLENIIFRWAWLCAPVVPATQEAEAGGSLKPRRLRLK

SEQ ID NO: 2081 - protein, 9 aa, Artificial Sequence
  Synthetic polypeptide
SSPTLPSTT

SEQ ID NO: 2082 - protein, 640 aa, Artificial Sequence
  Synthetic polypeptide
MAPLVPGPPLEASPTTLDAAVRWGLQRPVRGHMAPGQAGGRGDASALGAQYSWARDGRSAVGSKLSWVGPAAPESKAAQGREMGRDVGKAVDCLDLSGPDGASCLQLSLRKSELFPAARRPGRPADPGLSPRCLRRPPLRPGPASTPLRGPGAARPPPLPPHSRGRSAVSFLAFLPPQRSPSAPREAAGSRGGLRASGGRCGGPAGAAAGSGGGGDAPGPAGRAMQRSRAGADEAALLLAGLALRELEPGCGSPGRGRRGPRPGPGDEAAPALGRRGKGSGGPEAGADGLSRGERGPRRAAVPELSAQPAGSPRASLAGSDGGGGGGSARSSGISLGYDQRHGSPRSGRSDPRPGPGPPSVGSARSSVSSLGSRGSAGAYADFLPPGACPAPARSPEPAGPAPFPLPALPLPPGREGGPSAAERRLEALTRELERALEARTARDYFGICIKCGLGIYGAQQACQAMGSLYHTDCFTCDSCGRRLRGKAFYNVGEKVYCQEDFLYSGFQQTADKCSVCGHLIMEMILQALGKSYHPGCFRCSVCNECLDGVPFTVDVENNIYCVRDYHTVFAPKCASCARPILPAQGCETTIRVVSMDRDYHVACYHCEARWFMPVIPALWEAEEGGSPEVRSSRPAWPTW

SEQ ID NO: 2083 - protein, 416 aa, Artificial Sequence
  Synthetic polypeptide
MQRSRAGADEAALLLAGLALRELEPGCGSPGRGRRGPRPGPGDEAAPALGRRGKGSGGPEAGADGLSRGERGPRRAAVPELSAQPAGSPRASLAGSDGGGGGGSARSSGISLGYDQRHGSPRSGRSDPRPGPGPPSVGSARSSVSSLGSRGSAGAYADFLPPGACPAPARSPEPAGPAPFPLPALPLPPGREGGPSAAERRLEALTRELERALEARTARDYFGICIKCGLGIYGAQQACQAMGSLYHTDCFTCDSCGRRLRGKAFYNVGEKVYCQEDFLYSGFQQTADKCSVCGHLIMEMILQALGKSYHPGCFRCSVCNECLDGVPFTVDVENNIYCVRDYHTVFAPKCASCARPILPAQGCETTIRVVSMDRDYHVACYHCEARWFMPVIPALWEAEEGGSPEVRSSRPAWPTW

SEQ ID NO: 2084 - protein, 115 aa, Artificial Sequence
  Synthetic polypeptide
SRCPLAGRAAQARPSGGWRRSPGSWSGRSRRARRGTTSAFASSVGLASTEPSRRARQWGVFITLTASPATRVGDDSVGRRSTTWVRKCTARRTSCTPGSSRRPTNAACVDISSWK

SEQ ID NO: 2085 - protein, 507 aa, Artificial Sequence
  Synthetic polypeptide
MGPGPPAAGAAPSPRPLSLVARLSYAVGHFLNDLCASMWFTYLLLYLHSVRAYSSRGAGLLLLLGQVADGLCTPLVGYEADRAASCCARYGPRKAWHLVGTVCVLLSFPFIFSPCLGCGAATPEWAALLYYGPFIVIFQFGWASTQISHLSLIPELVTNDHEKVELTALRYAFTVVANITVYGAAWLLLHLQGSSRVEPTQDISISDQLGGQDVPVFRNLSLLVVGVGAVFSLLFHLGTRERRRPHAEEPGEHTPLLAPATAQPLLLWKHWLREPAFYQVGILYMTTRLIVNLSQTYMAMYLTYSLHLPKKFIATIPLVMYLSGFLSSFLMKPINKCIGRNMTYFSGLLVILAFAAWVALAEGLGVAVYAAAVLLGAGCATILVTSLAMTADLIGPHTNSGAFVYGSMSFLDKVANGLAVMAIQSLHPCPSELCCRACVSFYHWAMVAVTGGVGVAAALCLCSLLLWPTRLRRSRGGEHRTPSEGEGISTAPPPCWNETQPQGGAKL

SEQ ID NO: 2086 - protein, 507 aa, Artificial Sequence; identical to SEQ ID NO: 2085
  Synthetic polypeptide

SEQ ID NO: 2087 - protein, 507 aa, Artificial Sequence; identical to SEQ ID NO: 2085
  Synthetic polypeptide

SEQ ID NO: 2088 - protein, 498 aa, Artificial Sequence
  Synthetic polypeptide
MGPGPPAAGAAPSPRPLSLVARLSYAVGHFLNDLCASMWFTYLLLYLHSVRAYSSRGAGLLLLLGQVADGLCTPLVGYEADRAASCCARYGTVCVLLSFPFIFSPCLGCGAATPEWAALLYYGPFIVIFQFGWASTQISHLSLIPELVTNDHEKVELTALRYAFTVVANITVYGAAWLLLHLQGSSRVEPTQDISISDQLGGQDVPVFRNLSLLVVGVGAVFSLLFHLGTRERRRPHAEEPGEHTPLLAPATAQPLLLWKHWLREPAFYQVGILYMTTRLIVNLSQTYMAMYLTYSLHLPKKFIATIPLVMYLSGFLSSFLMKPINKCIGRNMTYFSGLLVILAFAAWVALAEGLGVAVYAAAVLLGAGCATILVTSLAMTADLIGPHTNSGAFVYGSMSFLDKVANGLAVMAIQSLHPCPSELCCRACVSFYHWAMVAVTGGVGVAAALCLCSLLLWPTRLRRSRGGEHRTPSEGEGISTAPPPCWNETQPQGGAKL

SEQ ID NO: 2089 - protein, 186 aa, Artificial Sequence
  Synthetic polypeptide
LSGFLSSFLMKPINKCIGRNMTYFSGLLVILAFAAWVALAEGLGVAVYAAAVLLGAGCATILVTSLAMTADLIGPHTNSGAFVYGSMSFLDKVANGLAVMAIQSLHPCPSELCCRACVSFYHWAMVAVTGGVGVAAALCLCSLLLWPTRLRRSRGGEHRTPSEGEGISTAPPPCWNETQPQGGAKL

SEQ ID NO: 2090 - protein, 439 aa, Artificial Sequence
  Synthetic polypeptide
MGPGPPAAGAAPSPRPLSLVARLSYAVGHFLNDLCASMWFTYLLLYLHSVRAYSSRGAGLLLLLGQVADGLCTPLVGYEADRAASCCARYGPRKAWHLVGTVCVLLSFPFIFSPCLGCGAATPEWAALLYYGPFIVIFQFGWASTQISHLSLIPELVTNDHEKVELTALRYAFTVVANITVYGAAWLLLHLQGSSRVEPTQDISISDQLGGQDVPVFRNLSLLVVGVGAVFSLLFHLGTRERRRPHAEEPGEHTPLLAPATAQPLLLWKHWLREPAFYQVGILYMTTRLIVNLSQTYMAMYLTYSLHLPKKFIATIPLVMYLSGFLSSFLMKPINKCIGRNMTYFSGLLVILAFAAWVALAEGLGVAVYAAAVLLGAGCATILVTSLAMTADLIGPHTNSGAFVYGSMSFLDKVANGLAVMAIQSLHPCPPRRRTPNTQ

SEQ ID NO: 2091 - protein, 439 aa, Artificial Sequence; identical to SEQ ID NO: 2090
  Synthetic polypeptide

SEQ ID NO: 2092 - protein, 439 aa, Artificial Sequence; identical to SEQ ID NO: 2090
  Synthetic polypeptide

SEQ ID NO: 2093 - protein, 430 aa, Artificial Sequence
  Synthetic polypeptide
MGPGPPAAGAAPSPRPLSLVARLSYAVGHFLNDLCASMWFTYLLLYLHSVRAYSSRGAGLLLLLGQVADGLCTPLVGYEADRAASCCARYGTVCVLLSFPFIFSPCLGCGAATPEWAALLYYGPFIVIFQFGWASTQISHLSLIPELVTNDHEKVELTALRYAFTVVANITVYGAAWLLLHLQGSSRVEPTQDISISDQLGGQDVPVFRNLSLLVVGVGAVFSLLFHLGTRERRRPHAEEPGEHTPLLAPATAQPLLLWKHWLREPAFYQVGILYMTTRLIVNLSQTYMAMYLTYSLHLPKKFIATIPLVMYLSGFLSSFLMKPINKCIGRNMTYFSGLLVILAFAAWVALAEGLGVAVYAAAVLLGAGCATILVTSLAMTADLIGPHTNSGAFVYGSMSFLDKVANGLAVMAIQSLHPCPPRRRTPNTQ

SEQ ID NO: 2094 - protein, 118 aa, Artificial Sequence
  Synthetic polypeptide
LSGFLSSFLMKPINKCIGRNMTYFSGLLVILAFAAWVALAEGLGVAVYAAAVLLGAGCATILVTSLAMTADLIGPHTNSGAFVYGSMSFLDKVANGLAVMAIQSLHPCPPRRRTPNTQ

SEQ ID NO: 2095 - protein, 233 aa, Artificial Sequence
  Synthetic polypeptide
LSLIPELVTNDHEKVELTALRYAFTVVANITVYGAAWLLLHLQGSSRVEPTQDISISDQLGGQDVPVFRNLSLLVVGVGAVFSLLFHLGTRERRRPHAEEPGEHTPLLAPATAQPLLLWKHWLREPAFYQVGILYMTTRLIVNLSQTYMAMYLTYSLHLPKKFIATIPLVMYLSGFLSSFLMKPINKCIGRNNSGAFVYGSMSFLDKVANGLAVMAIQSLHPCPPRRRTPNTQ

SEQ ID NO: 2096 - protein, 467 aa, Artificial Sequence
  Synthetic polypeptide
MDDVLPLMPWETLLAQGSPQGSPDLPAGQRKQQPQGDRAQGLASESWKLLEVPIIHITPSSDGESPACTPTPRRRQQQRMPDPQSLSQDSTTPHSGRSTPSSSPSLRKRLQLLPPSRPPPEPEPGTMVEKGSDSSSEKGGVPGTPSTQSLGSRNFIRNSKKMQSWYSMLSPTYKQRNEDFRKLFSKLPEAERLIVDYSCALQREILLQGRLYLSENWICFYSNIFRWETTISIQLKEVTCLKKEKTAKLIPNAIQICTESEKHFFTSFGARDRCFLLIFRLWQNALLEKTLSPRELWHLVHQCYGSELGLTSEDEDYVSPLQLNGLGTPKEVGDVIALSDITSSGAADRSQEPSPVGSRRGHVTPNLSRASSDADHGAEEDKEEQVDSQPDASSSQTVTPVAEPPSTEPTQPDGPTTLGPLDLLPSEELLTDTSNSSSSTGEEAWQGEHKHRLKAACRGSHPGHTTS

SEQ ID NO: 2097 - protein, 380 aa, Artificial Sequence
  Synthetic polypeptide
MFDTTPHSGRSTPSSSPSLRKRLQLLPPSRPPPEPEPGTMVEKGSDSSSEKGGVPGTPSTQSLGSRNFIRNSKKMQSWYSMLSPTYKQRNEDFRKLFSKLPEAERLIVDYSCALQREILLQGRLYLSENWICFYSNIFRWETTISIQLKEVTCLKKEKTAKLIPNAIQICTESEKHFFTSFGARDRCFLLIFRLWQNALLEKTLSPRELWHLVHQCYGSELGLTSEDEDYVSPLQLNGLGTPKEVGDVIALSDITSSGAADRSQEPSPVGSRRGHVTPNLSRASSDADHGAEEDKEEQVDSQPDASSSQTVTPVAEPPSTEPTQPDGPTTLGPLDLLPSEELLTDTSNSSSSTGEEAWQGEHKHRLKAACRGSHPGHTTS

SEQ ID NO: 2098 - protein, 146 aa, Artificial Sequence
  Synthetic polypeptide
MHCLKRTPKEVGDVIALSDITSSGAADRSQEPSPVGSRRGHVTPNLSRASSDADHGAEEDKEEQVDSQPDASSSQTVTPVAEPPSTEPTQPDGPTTLGPLDLLPSEELLTDTSNSSSSTGEEAWQGEHKHRLKAACRGSHPGHTTS

SEQ ID NO: 2099 - protein, 373 aa, Artificial Sequence
  Synthetic polypeptide
MFDTTPHSGRSTPSSSPSLRKRLQLLPPSRPPPEPEPGTMVEKGSDSSSEKGGVPGTPSTQSLGSRNFIRNSKMLSPTYKQRNEDFRKLFSKLPEAERLIVDYSCALQREILLQGRLYLSENWICFYSNIFRWETTISIQLKEVTCLKKEKTAKLIPNAIQICTESEKHFFTSFGARDRCFLLIFRLWQNALLEKTLSPRELWHLVHQCYGSELGLTSEDEDYVSPLQLNGLGTPKEVGDVIALSDITSSGAADRSQEPSPVGSRRGHVTPNLSRASSDADHGAEEDKEEQVDSQPDASSSQTVTPVAEPPSTEPTQPDGPTTLGPLDLLPSEELLTDTSNSSSSTGEEAWQGEHKHRLKAACRGSHPGHTTS

SEQ ID NO: 2100 - protein, 787 aa, Artificial Sequence
  Synthetic polypeptide
MDDVLPLMPWETLLAQGSPQGSPDLPAGQRKQQPQGDRAQGLASESWKLLEVPIIHITPSSDGESPACTPTPRRRQQQRMPDPQSLSQDSTTPHSGRSTPSSSPSLRKRLQLLPPSRPPPEPEPGTMVEKGSDSSSEKGGVPGTPSTQSLGSRNFIRNSKKMQSWYSMLSPTYKQRNEDFRKLFSKLPEAERLIVDYSCALQREILLQGRLYLSENWICFYSNIFRWETTISIQLKEVTCLKKEKTAKLIPNAIQICTESEKHFFTSFGARDRCFLLIFRLWQNALLEKTLSPRELWHLVHQCYGSELGLTSEDEDYVSPLQLNGLGTPKEVGDVIALSDITSSGAADRSQEPSPVGSRRGHVTPNLSRASSDADHGAEEDKEEQVDSQPDASSSQTVTPVAEPPSTEPTQPDGPTTLGPLDLLPSEELLTDTSNSSSSTGEEADLAALLPDLSGRLLINSVFHVGAERLQQMLFSDSPFLQGFLQQCKFTDVTLSPWSGDSKCHQRRVLTYTIPISNPLGPKSASVVETQTLFRRGPQAGGCVVDSEVLTQGIPYQDYFYTAHRYCILGLARNKARLRVSSEIRYRKQPWSLVKSLIEKNSWSGIEDYFHHLERELAKAEKLSLEEGGKDARGLLSGLRRRKRPLSWRAHGDGPQHPDPDPCARAGIHTSGSLSSRFSEPSVDQGPGAGIPSALVLISIVLIILIALNVLLFYRLWSLERTAHTFESWHSLALAKGKFPQTATEWAEILALQKQFHSVEVHKWRQILRASVELLDEHCRGKHGSMD

SEQ ID NO: 2101 - protein, 704 aa, Artificial Sequence
  Synthetic polypeptide
MFDTTPHSGRSTPSSSPSLRKRLQLLPPSRPPPEPEPGTMVEKGSDSSSEKGGVPGTPSTQSLGSRNFIRNSKKMQSWYSMLSPTYKQRNEDFRKLFSKLPEAERLIVDYSCALQREILLQGRLYLSENWICFYSNIFRWETTISIQLKEVTCLKKEKTAKLIPNAIQICTESEKHFFTSFGARDRCFLLIFRLWQNALLEKTLSPRELWHLVHQCYGSELGLTSEDEDYVSPLQLNGLGTPKEVGDVIALSDITSSGAADRSQEPSPVGSRRGHVTPNLSRASSDADHGAEEDKEEQVDSQPDASSSQTVTPVAEPPSTEPTQPDGPTTLGPLDLLPSEELLTDTSNSSSSTGEEADLAALLPDLSGRLLINSVFHVGAERLQQMLFSDSPFLQGFLQQCKFTDVTLSPWSGDSKCHQRRVLTYTIPISNPLGPKSASVVETQTLFRRGPQAGGCVVDSEVLTQGIPYQDYFYTAHRYCILGLARNKARLRVSSEIRYRKQPWSLVKSLIEKNSWSGIEDYFHHLERELAKAEKLSLEEGGKDARGLLSGLRRRKRPLSWRAHGDGPQHPDPDPCARAGIHTSGSLSSRFSEPSVDQGPGAGIPSALVLISIVICVSLIILIALNVLLFYRLWSLERTAHTFESWHSLALAKGKFPQTATEWAEILALQKQFHSVEVHKWRQILRASVELLDEHCRGKHGSMD

SEQ ID NO: 2102 - protein, 466 aa, Artificial Sequence
  Synthetic polypeptide
MHCLKRTPKEVGDVIALSDITSSGAADRSQEPSPVGSRRGHVTPNLSRASSDADHGAEEDKEEQVDSQPDASSSQTVTPVAEPPSTEPTQPDGPTTLGPLDLLPSEELLTDTSNSSSSTGEEADLAALLPDLSGRLLINSVFHVGAERLQQMLFSDSPFLQGFLQQCKFTDVTLSPWSGDSKCHQRRVLTYTIPISNPLGPKSASVVETQTLFRRGPQAGGCVVDSEVLTQGIPYQDYFYTAHRYCILGLARNKARLRVSSEIRYRKQPWSLVKSLIEKNSWSGIEDYFHHLERELAKAEKLSLEEGGKDARGLLSGLRRRKRPLSWRAHGDGPQHPDPDPCARAGIHTSGSLSSRFSEPSVDQGPGAGIPSALVLISIVLIILIALNVLLFYRLWSLERTAHTFESWHSLALAKGKFPQTATEWAEILALQKQFHSVEVHKWRQILRASVELLDEHCRGKHGSMD

SEQ ID NO: 2103 - protein, 693 aa, Artificial Sequence
  Synthetic polypeptide
MFDTTPHSGRSTPSSSPSLRKRLQLLPPSRPPPEPEPGTMVEKGSDSSSEKGGVPGTPSTQSLGSRNFIRNSKMLSPTYKQRNEDFRKLFSKLPEAERLIVDYSCALQREILLQGRLYLSENWICFYSNIFRWETTISIQLKEVTCLKKEKTAKLIPNAIQICTESEKHFFTSFGARDRCFLLIFRLWQNALLEKTLSPRELWHLVHQCYGSELGLTSEDEDYVSPLQLNGLGTPKEVGDVIALSDITSSGAADRSQEPSPVGSRRGHVTPNLSRASSDADHGAEEDKEEQVDSQPDASSSQTVTPVAEPPSTEPTQPDGPTTLGPLDLLPSEELLTDTSNSSSSTGEEADLAALLPDLSGRLLINSVFHVGAERLQQMLFSDSPFLQGFLQQCKFTDVTLSPWSGDSKCHQRRVLTYTIPISNPLGPKSASVVETQTLFRRGPQAGGCVVDSEVLTQGIPYQDYFYTAHRYCILGLARNKARLRVSSEIRYRKQPWSLVKSLIEKNSWSGIEDYFHHLERELAKAEKLSLEEGGKDARGLLSGLRRRKRPLSWRAHGDGPQHPDPDPCARAGIHTSGSLSSRFSEPSVDQGPGAGIPSALVLISIVLIILIALNVLLFYRLWSLERTAHTFESWHSLALAKGKFPQTATEWAEILALQKQFHSVEVHKWRQILRASVELLDEHCRGKHGSMD

SEQ ID NO: 2104 - protein, 99 aa, Artificial Sequence
  Synthetic polypeptide
MAQKEGGRTVPCCSRPKVAALTAGTLLLLTAIGAASWAIVAVLLRSDQEPLYPGLCSCTTFPGTLSLQRLKSATSPHPPCRHSPPSVAFYFSLWPLPIL

SEQ ID NO: 2105 - protein, 99 aa, Artificial Sequence; identical to SEQ ID NO: 2104
  Synthetic polypeptide

SEQ ID NO: 2106 - protein, 99 aa, Artificial Sequence; identical to SEQ ID NO: 2104
  Synthetic polypeptide

SEQ ID NO: 2107 - protein, 37 aa, Artificial Sequence
  Synthetic polypeptide
MQKVTLGLLVFLAGFPVLDANDLEDKNSPFYYAPCAS

SEQ ID NO: 2108 - protein, 37 aa, Artificial Sequence; identical to SEQ ID NO: 2107
  Synthetic polypeptide

SEQ ID NO: 2109 - protein, 37 aa, Artificial Sequence; identical to SEQ ID NO: 2107
  Synthetic polypeptide

SEQ ID NO: 2110 - protein, 37 aa, Artificial Sequence; identical to SEQ ID NO: 2107
  Synthetic polypeptide

SEQ ID NO: 2111 - protein, 37 aa, Artificial Sequence; identical to SEQ ID NO: 2107
  Synthetic polypeptide

SEQ ID NO: 2112 - protein, 37 aa, Artificial Sequence; identical to SEQ ID NO: 2107
  Synthetic polypeptide

SEQ ID NO: 2113 - protein, 37 aa, Artificial Sequence; identical to SEQ ID NO: 2107
  Synthetic polypeptide

SEQ ID NO: 2114 - protein, 37 aa, Artificial Sequence; identical to SEQ ID NO: 2107
  Synthetic polypeptide

SEQ ID NO: 2115 - protein, 37 aa, Artificial Sequence; identical to SEQ ID NO: 2107
  Synthetic polypeptide

SEQ ID NO: 2116 - protein, 37 aa, Artificial Sequence; identical to SEQ ID NO: 2107
  Synthetic polypeptide

SEQ ID NO: 2117 - protein, 37 aa, Artificial Sequence; identical to SEQ ID NO: 2107
  Synthetic polypeptide

SEQ ID NO: 2118 - protein, 37 aa, Artificial Sequence; identical to SEQ ID NO: 2107
  Synthetic polypeptide

SEQ ID NO: 2119 - protein, 37 aa, Artificial Sequence; identical to SEQ ID NO: 2107
  Synthetic polypeptide

SEQ ID NO: 2120 - protein, 37 aa, Artificial Sequence; identical to SEQ ID NO: 2107
  Synthetic polypeptide

SEQ ID NO: 2121 - protein, 37 aa, Artificial Sequence; identical to SEQ ID NO: 2107
  Synthetic polypeptide

SEQ ID NO: 2122 - protein, 94 aa, Artificial Sequence
  Synthetic polypeptide
MGRGYSGALQARGGLEEPLERGLRGPSFTQSPLHGAAAAYLSAQRDASLPVPGQRSDMQKVTLGLLVFLAGFPVLDANDLEDKNSPFYYAPCAS

SEQ ID NO: 2123 - protein, 94 aa, Artificial Sequence; identical to SEQ ID NO: 2122
  Synthetic polypeptide

SEQ ID NO: 2124 - protein, 6 aa, Artificial Sequence
  Synthetic polypeptide
RRRKWT

SEQ ID NO: 2125 - protein, 94 aa, Artificial Sequence
  Synthetic polypeptide
MLGITSCSDQQAKEGEGLEGSSTGSSSGNHGGSGGGNGHKPGCEKPGNEARGSGESGIQNSETSPGMFNFDTFWKNFKSKLGFINWDAINKNMN

SEQ ID NO: 2126 - protein, 94 aa, Artificial Sequence; identical to SEQ ID NO: 2125
  Synthetic polypeptide

SEQ ID NO: 2127 - protein, 94 aa, Artificial Sequence; identical to SEQ ID NO: 2125
  Synthetic polypeptide

SEQ ID NO: 2128 - protein, 94 aa, Artificial Sequence; identical to SEQ ID NO: 2125
  Synthetic polypeptide

SEQ ID NO: 2129 - protein, 94 aa, Artificial Sequence; identical to SEQ ID NO: 2125
  Synthetic polypeptide

SEQ ID NO: 2130 - protein, 381 aa, Artificial Sequence
  Synthetic polypeptide
MKFQGPLACLLLALCLGSGEAGPLQSGEESTGTNIGEALGHGLGDALSEGVGKAIGKEAGGAAGSKVSEALGQGTREAVGTGVRQVPGFGVADALGNRVGEAAHALGNTGHEIGRQAEDVIRHGADAVRGSWQGVPGHNGAWETSGGHGIFGSQGGLGGQGQGNPGGLGTPWVHGYPGNSAGSFGMNPQGAPWGQGGNGGPPNFGTNTQGAVAQPGYGSVRASNQNEGCTNPPPSGSGGGSSNSGGGSGSQSGSSGSGSNGDNNNGSSSGGSSSGSSSGGSSGGSSGGSSGNSGGSRGDSGSESSWGSSTGSSSGNHGGSGGGNGHKPGCEKPGNEARGSGESGIQNSETSPGMFNFDTFWKNFKSKLGFINWDAINKNMN

SEQ ID NO: 2131 - protein, 381 aa, Artificial Sequence; identical to SEQ ID NO: 2130
  Synthetic polypeptide

SEQ ID NO: 2132 - protein, 77 aa, Artificial Sequence
  Synthetic polypeptide
MLGITSCSDQQAKEGEGLEGSSTGSSSGNHGGSGGGNGHKPGNSETSPGMFNFDTFWKNFKSKLGFINWDAINKNMN

SEQ ID NO: 2133 - protein, 77 aa, Artificial Sequence; identical to SEQ ID NO: 2132
  Synthetic polypeptide

SEQ ID NO: 2134 - protein, 106 aa, Artificial Sequence
  Synthetic polypeptide
MLGITSCSDQQAKEGEGLEGSSTGSSSGNHGGSGGGNGHKPGCEKPGNEARGSGESGIQGFRGQGVSSNMRNSETSPGMFNFDTFWKNFKSKLGFINWDAINKNMN

SEQ ID NO: 2135 - protein, 340 aa, Artificial Sequence
  Synthetic polypeptide
MKFQGPLACLLLALCLGSGEAGPLQSGEESTGTNIGEALGHGLGDALSEGVGKAIGKEAGGAAGSKVSEALGQGTREAVGTGVRQVPGFGVADALGNRVGEAAHALGNTGHEIGRQAEDVIRHGADAVRGSWQGVPGHNGAWETSGGHGIFGSQGGLGGQGQGNPGGLGTPWVHGYPGNSAGSFGMNPQGAPWGQGGNGGPPNFGTNTQGAVAQPGYGSVRASNQNEGCTNPPPSGSGGGSSNSGGSSTGSSSGNHGGSGGGNGHKPGCEKPGNEARGSGESGIQGQGSSWGSGGGDAVGGVNTVNSETSPGMFNFDTFWKNFKSKLGFINWDAINKNMN

SEQ ID NO: 2136 - protein, 370 aa, Artificial Sequence
  Synthetic polypeptide
MKFQGPLACLLLALCLGSGEAGPLQSGEESTGTNIGEALGHGLGDALSEGVGKAIGKEAGGAAGSKVSEALGQGTREAVGTGVRQVPGFGVADALGNRVGEAAHALGNTGHEIGRQAEDVIRHGADAVRGSWQGVPGHNGAWETSGGHGIFGSQGGLGGQGQGNPGGLGTPWVHGYPGNSAGSFGMNPQGAPWGQGGNGGPPNFGTNTQGAVAQPGYGSVRASNQNEGCTNPPPSGSGGGSSNSGGSSTGSSSGNHGGSGGGNGHKPGCEKPGNEARGSGESGIQGFRGQGVSSNMREISKEGNRLLGGSGDNYRGQGSSWGSGGGDAVGGVNTVNSETSPGMFNFDTFWKNFKSKLGFINWDAINKNMN

SEQ ID NO: 2137 - protein, 144 aa, Artificial Sequence
  Synthetic polypeptide
MLGITSCSDQQAKEGEGLEGSSTGSSSGNHGGSGGGNGHKPGCEKPGNEARGSGESGIQGFRGQGVSSNMREISKEGNRLLGGSGDNYRGQGSSWGSGGGDAVGGVNTVNSETSPGMFNFDTFWKNFKSKLGFINWDAINKNMN

SEQ ID NO: 2138 - protein, 57 aa, Artificial Sequence
  Synthetic polypeptide
SSTGSSSGNHGGSGGGNGHKPGNSETSPGMFNFDTFWKNFKSKLGFINWDAINKNMN

SEQ ID NO: 2139 - protein, 28 aa, Artificial Sequence
  Synthetic polypeptide
MFNFDTFWKNFKSKLGFINWDAINKNMN

SEQ ID NO: 2140 - protein, 28 aa, Artificial Sequence
  Synthetic polypeptide
MFNFDTFWKNFKSKLGFINWDAINKNMN

SEQ ID NO: 2141 - protein, 28 aa, Artificial Sequence
  Synthetic polypeptide
MFNFDTFWKNFKSKLGFINWDAINKNMN

SEQ ID NO: 2142 - protein, 28 aa, Artificial Sequence
  Synthetic polypeptide
MFNFDTFWKNFKSKLGFINWDAINKNMN

SEQ ID NO: 2143 - protein, 28 aa, Artificial Sequence
  Synthetic polypeptide
MFNFDTFWKNFKSKLGFINWDAINKNMN

SEQ ID NO: 2144 - protein, 431 aa, Artificial Sequence
  Synthetic polypeptide
MKFQGPLACLLLALCLGSGEAGPLQSGEESTGTNIGEALGHGLGDALSEGVGKAIGKEAGGAAGSKVSEALGQGTREAVGTGVRQVPGFGVADALGNRVGEAAHALGNTGHEIGRQAEDVIRHGADAVRGSWQGVPGHNGAWETSGGHGIFGSQGGLGGQGQGNPGGLGTPWVHGYPGNSAGSFGMNPQGAPWGQGGNGGPPNFGTNTQGAVAQPGYGSVRASNQNEGCTNPPPSGSGGGSSNSGGGSGSQSGSSGSGSNGDNNNGSSSGGSSSGSSSGGSSGGSSGGSSGNSGGSRGDSGSESSWGSSTGSSSGNHGGSGGGNGHKPGCEKPGNEARGSGESGIQGFRGQGVSSNMREISKEGNRLLGGSGDNYRGQGSSWGSGGGDAVGGVNTVNSETSPGMFNFDTFWKNFKSKLGFINWDAINKNMN

SEQ ID NO: 2145 - protein, 411 aa, Artificial Sequence
  Synthetic polypeptide
MKFQGPLACLLLALCLGSGEAGPLQSGEESTGTNIGEALGHGLGDALSEGVGKAIGKEAGGAAGSKVSEALGQGTREAVGTGVRQVPGFGVADALGNRVGEAAHALGNTGHEIGRQAEDVIRHGADAVRGSWQGVPGHNGAWETSGGHGIFGSQGGLGGQGQGNPGGLGTPWVHGYPGNSAGSFGMNPQGAPWGQGGNGGPPNFGTNTQGAVAQPGYGSVRASNQNEGCTNPPPSGSGGGSSNSGGGSGSQSGSSGSGSNGDNNNGSSSGGSSSGSSSGGSSGGSSGGSSGNSGGSRGDSGSESSWGSSTGSSSGNHGGSGGGNGHKPGCEKPGNEARGSGESGIQGFRGQGVSSNMREISKEGNRLLGGSGDNYRNSETSPGMFNFDTFWKNFKSKLGFINWDAINKNMN

SEQ ID NO: 2146 - protein, 126 aa, Artificial Sequence
  Synthetic polypeptide
MLGITSCSDQQAKEGEGLEGSSTGSSSGNHGGSGGGNGHKPGCEKPGNEARGSGESGIQGFRGQGVSSNMRGQGSSWGSGGGDAVGGVNTVNSETSPGMFNFDTFWKNFKSKLGFINWDAINKNMN

SEQ ID NO: 2147 - protein, 393 aa, Artificial Sequence
  Synthetic polypeptide
MKFQGPLACLLLALCLGSGEAGPLQSGEESTGTNIGEALGHGLGDALSEGVGKAIGKEAGGAAGSKVSEALGQGTREAVGTGVRQVPGFGVADALGNRVGEAAHALGNTGHEIGRQAEDVIRHGADAVRGSWQGVPGHNGAWETSGGHGIFGSQGGLGGQGQGNPGGLGTPWVHGYPGNSAGSFGMNPQGAPWGQGGNGGPPNFGTNTQGAVAQPGYGSVRASNQNEGCTNPPPSGSGGGSSNSGGGSGSQSGSSGSGSNGDNNNGSSSGGSSSGSSSGGSSGGSSGGSSGNSGGSRGDSGSESSWGSSTGSSSGNHGGSGGGNGHKPGCEKPGNEARGSGESGIQGFRGQGVSSNMRNSETSPGMFNFDTFWKNFKSKLGFINWDAINKNMN

SEQ ID NO: 2148 - protein, 364 aa, Artificial Sequence
  Synthetic polypeptide
MKFQGPLACLLLALCLGSGEAGPLQSGEESTGTNIGEALGHGLGDALSEGVGKAIGKEAGGAAGSKVSEALGQGTREAVGTGVRQVPGFGVADALGNRVGEAAHALGNTGHEIGRQAEDVIRHGADAVRGSWQGVPGHNGAWETSGGHGIFGSQGGLGGQGQGNPGGLGTPWVHGYPGNSAGSFGMNPQGAPWGQGGNGGPPNFGTNTQGAVAQPGYGSVRASNQNEGCTNPPPSGSGGGSSNSGGGSGSQSGSSGSGSNGDNNNGSSSGGSSSGSSSGGSSGGSSGGSSGNSGGSRGDSGSESSWGSSTGSSSGNHGGSGGGNGHKPGNSETSPGMFNFDTFWKNFKSKLGFINWDAINKNMN

SEQ ID NO: 2149 - protein, 114 aa, Artificial Sequence
  Synthetic polypeptide
MLGITSCSDQQAKEGEGLEGSSTGSSSGNHGGSGGGNGHKPGCEKPGNEARGSGESGIQGQGSSWGSGGGDAVGGVNTVNSETSPGMFNFDTFWKNFKSKLGFINWDAINKNMN

SEQ ID NO: 2150 - protein, 648 aa, Artificial Sequence
  Synthetic polypeptide
MARKLVMFRDVAIDFSQEEWECLDSAQRDLYRDVMLENYSNLVSLDLPSRCASKDLSPEKNTYETELSQWEMSDRLENCDLEESNSRDYLEAKGKMEKQQENQKEYFRQGMIIYDKMSIFNQHTYLSQHSRCHSTEKPYKCKECGKAFRRASHLTQHQSIHTGEKPYECKQCGKAFSRDSQLSLHQRLHTGEKPYACKECGKAFTQSSQLILHHRIHTGEKPYKCEECGKAFIRSSQLTRHQKVHTGEKPYECKECGKAFTQNSQLTLHQRLHTGEKLYECKECRKVFTQLSQLILHKRIHTGEKPYECKECGKAFICGSQLSQHQKIHNGEKPYECKECGRAFIRGSLLMQHQRIHTGEKPYKCEECGKAFIRGSQLTQHQRIHTNEKPYECKECGKMFSHGSQLTQHQRIHTGEKPYQCKECGKAFNRGSLLTRHQRIHTGEKPYECKECGKTFSRGSELTQHERIHTGEKPYECKECGKSFIRGSQLTQHQRIHTGEKPYECKECRMAFTQSSHLSQHQRLHTGEKPYVCNECGKAFARGLLLIQHQRIHTGEKPYQCKECGKAFIRGSQLTQHQRIHTGEKPYECKECGKAFSHGSQLTLHQRIHTGEKPYECRECRKAFTQSSHLSRHQRIHTAGAPLLSWGL

SEQ ID NO: 2151 - protein, 16 aa, Artificial Sequence
  Synthetic polypeptide
MNLPPDRPGLLSLSVR

SEQ ID NO: 2152 - protein, 16 aa, Artificial Sequence
  Synthetic polypeptide
MNLPPDRPGLLSLSVR

SEQ ID NO: 2153 - protein, 24 aa, Artificial Sequence
  Synthetic polypeptide
MATSQYFDFAQGGGPQYRPAMTSP

SEQ ID NO: 2154 - protein, 24 aa, Artificial Sequence
  Synthetic polypeptide
MATSQYFDFAQGGGPQYRPAMTSP

SEQ ID NO: 2155 - protein, 24 aa, Artificial Sequence
  Synthetic polypeptide
MATSQYFDFAQGGGPQYRPAMTSP

SEQ ID NO: 2156 - protein, 24 aa, Artificial Sequence
  Synthetic polypeptide
MATSQYFDFAQGGGPQYRPAMTSP

SEQ ID NO: 2157 - protein, 48 aa, Artificial Sequence
  Synthetic polypeptide
GDESVFRLRAGRRPAVQARHDQPVRKCNPLLTPPCRVLPGGMRTIRSR

SEQ ID NO: 2158 - protein, 308 aa, Artificial Sequence
  Synthetic polypeptide
MFIKGRAPRAPPRERRRATRGGLRQVVAPPRALGSTSRPHFRRASVCRRRCRKSGGLLAASRKMAAAAVNGAAGFSSSGPAATSGAVLQAATGMYEQLKGEWNRKSPNLSKCGEELGRLKLVLLELNFLPTTGTKLTKQQLILARDILEIGAQWSILRKDIPSFERYMAQLKCYYFDYKEQLPESAYMHQLLGLNLLFLLSQNRVAEFHTELERLPAKDIQTNVYIKHPVSLEQYLMEGSYNKVFLAKGNIPAESYTFFIDILLDTIRDEIAGCIEKAYEKILFTEATRILFFNTPKKMTDYAKKNGA

SEQ ID NO: 2159 - protein, 245 aa, Artificial Sequence
  Synthetic polypeptide
MAAAAVNGAAGFSSSGPAATSGAVLQAATGMYEQLKGEWNRKSPNLSKCGEELGRLKLVLLELNFLPTTGTKLTKQQLILARDILEIGAQWSILRKDIPSFERYMAQLKCYYFDYKEQLPESAYMHQLLGLNLLFLLSQNRVAEFHTELERLPAKDIQTNVYIKHPVSLEQYLMEGSYNKVFLAKGNIPAESYTFFIDILLDTIRDEIAGCIEKAYEKILFTEATRILFFNTPKKMTDYAKKNGA

SEQ ID NO: 2160 - protein, 47 aa, Artificial Sequence
  Synthetic polypeptide
ACRITQDGGRGGERGGRLLELRARGNLGRCSAGRDRHVRATQGRVEP

SEQ ID NO: 2161 - protein, 141 aa, Artificial Sequence
  Synthetic polypeptide
MAQLKCYYFDYKEQLPESAYMHQLLGLNLLFLLSQNRVAEFHTELERLPAKDIQTNVYIKHPVSLEQYLMEGSYNKVFLAKGNIPAESYTFFIDILLDTIRDEIAGCIEKAYEKILFTEATRILFFNTPKKMTDYAKKNGA

SEQ ID NO: 2162 - protein, 134 aa, Artificial Sequence
  Synthetic polypeptide
MGTTEATLRMENVDVKEEWQDEDLPRPLPEETGVELLGSPVEDTSSPPNTLNFNGAHRKRKTLVAPEINISLDQSEGSLLSDDFLDTPDDLDINVDDIETPDETDSLEFLGNGNELEWEERGFHQNLKGDQDPN

SEQ ID NO: 2163 - protein, 134 aa, Artificial Sequence; identical to SEQ ID NO: 2162
  Synthetic polypeptide

SEQ ID NO: 2164 - protein, 134 aa, Artificial Sequence; identical to SEQ ID NO: 2162
  Synthetic polypeptide

SEQ ID NO: 2165 - protein, 140 aa, Artificial Sequence
  Synthetic polypeptide
MAGRRSSQPGIALHNPGNHQVQNPQGRLETVRPLPEETGVELLGSPVEDTSSPPNTLNFNGAHRKRKTLVAPEINISLDQSEGSLLSDDFLDTPDDLDINVDDIETPDETDSLEFLGNGNELEWEERGFHQNLKGDQDPN

SEQ ID NO: 2166 - protein, 5007 aa, Artificial Sequence
  Synthetic polypeptide
MGDAEGEDEVQFLRTDDEVVLQCSATVLKEQLKLCLAAEGFGNRLCFLEPTSNAQNVPPDLAICCFVLEQSLSVRALQEMLANTVEAGVESSQGGGHRTLLYGHAILLRHAHSRMYLSCLTTSRSMTDKLAFDVGLQEDATGEACWWTMHPASKQRSEGEKVRVGDDIILVSVSSERYLHLSTASGELQVDASFMQTLWNMNPICSRCEEGFVTGGHVLRLFHGHMDECLTISPADSDDQRRLVYYEGGAVCTHARSLWRLEPLRISWSGSHLRWGQPLRVRHVTTGQYLALTEDQGLVVVDASKAHTKATSFCFRISKEKLDVAPKRDVEGMGPPEIKYGESLCFVQHVASGLWLTYAAPDPKALRLGVLKKKAMLHQEGHMDDALSLTRCQQEESQAARMIHSTNGLYNQFIKSLDSFSGKPRGSGPPAGTALPIEGVILSLQDLIIYFEPPSEDLQHEEKQSKLRSLRNRQSLFQEEGMLSMVLNCIDRLNVYTTAAHFAEFAGEEAAESWKEIVNLLYELLASLIRGNRSNCALFSTNLDWLVSKLDRLEASSGILEVLYCVLIESPEVLNIIQENHIKSIISLLDKHGRNHKVLDVLCSLCVCNGVAVRSNQDLITENLLPGRELLLQTNLINYVTSIRPNIFVGRAEGTTQYSKWYFEVMVDEVTPFLTAQATHLRVGWALTEGYTPYPGAGEGWGGNGVGDDLYSYGFDGLHLWTGHVARPVTSPGQHLLAPEDVISCCLDLSVPSISFRINGCPVQGVFESFNLDGLFFPVVSFSAGVKVRFLLGGRHGEFKFLPPPGYAPCHEAVLPRERLHLEPIKEYRREGPRGPHLVGPSRCLSHTDFVPCPVDTVQIVLPPHLERIREKLAENIHELWALTRIEQGWTYGPVRDDNKRLHPCLVDFHSLPEPERNYNLQMSGETLKTLLALGCHVGMADEKAEDNLKKTKLPKTYMMSNGYKPAPLDLSHVRLTPAQTTLVDRLAENGHNVWARDRVGQGWSYSAVQDIPARRNPRLVPYRLLDEATKRSNRDSLCQAVRTLLGYGYNIEPPDQEPSQVENQSRCDRVRIFRAEKSYTVQSGRWYFEFEAVTTGEMRVGWARPELRPDVELGADELAYVFNGHRGQRWHLGSEPFGRPWQPGDVVGCMIDLTENTIIFTLNGEVLMSDSGSETAFREIEIGDGFLPVCSLGPGQVGHLNLGQDVSSLRFFAICGLQEGFEPFAINMQRPVTTWFSKGLPQFEPVPLEHPHYEVSRVDGTVDTPPCLRLTHRTWGSQNSLVEMLFLRLSLPVQFHQHFRCTAGATPLAPPGLQPPAEDEARAAEPDPDYENLRRSAGGWSEAENGKEGTAKEGAPGGTPQAGGEAQPARAENEKDATTEKNKKRGFLFKAKKVAMMTQPPATPTLPRLPHDVVPADNRDDPEIILNTTTYYYSVRVFAGQEPSCVWAGWVTPDYHQHDMSFDLSKVRVVTVTMGDEQGNVHSSLKCSNCYMVWGGDFVSPGQQGRISHTDLVIGCLVDLATGLMTFTANGKESNTFFQVEPNTKLFPAVFVLPTHQNVIQFELGKQKNIMPLSAAMFQSERKNPAPQCPPRLEMQMLMPVSWSRMPNHFLQVETRRAGERLGWAVQCQEPLTMMALHIPEENRCMDILELSERLDLQRFHSHTLRLYRAVCALGNNRVAHALCSHVDQAQLLHALEDAHLPGPLRAGYYDLLISIHLESACRSRRSMLSEYIVPLTPETRAITLFPPGRSTENGHPRHGLPGVGVTTSLRPPHHFSPPCFVAALPAAGAAEAPARLSPAIPLEALRDKALRMLGEAVRDGGQHARDPVGGSVEFQFVPVLKLVSTLLVMGIFGDEDVKQILKMIEPEVFTEEEEEEDEEEEGEEEDEEEKEEDEEETAQEKEDEEKEEEEAAEGEKEEGLEEGLLQMKLPESVKLQMCHLLEYFCDQELQHRVESLAAFAERYVDKLQANQRSRYGLLIKAFSMTAAETARRTREFRSPPQEQINMLLQFKDGTDEEDCPLPEEIRQDLLDFHQDLLAHCGIQLDGEEEEPEEETTLGSRLMSLLEKVRLVKKKEEKPEEERSAEESKPRSLQELVSHMVVRWAQEDFVQSPELVRAMFSLLHRQYDGLGELLRALPRAYTISPSSVEDTMSLLECLGQIRSLLIVQMGPQEENLMIQSIGNIMNNKVFYQHPNLMRALGMHETVMEVMVNVLGGGESKEIRFPKMVTSCCRFLCYFCRISRQNQRSMFDHLSYLLENSGIGLGMQGSTPLDVAAASVIDNNELALALQEQDLEKVVSYLAGCGLQSCPMLVAKGYPDIGWNPCGGERYLDFLRFAVFVNGESVEENANVVVRLLIRKPECFGPALRGEGGSGLLAAIEEAIRISEDPARDGPGIRRDRRREHFGEEPPEENRVHLGHAIMSFYAALIDLLGRCAPEMHLIQAGKGEALRIRAILRSLVPLEDLVGIISLPLQIPTLGKDGALVQPKMSASFVPDHKASMVLFLDRVYGIENQDFLLHVLDVGFLPDMRAAASLDTATFSTTEMALALNRYLCLAVLPLITKCAPLFAGTEHRAIMVDSMLHTVYRLSRGRSLTKAQRDVIEDCLMSLCRYIRPSMLQHLLRRLVFDVPILNEFAKMPLKLLTNHYERCWKYYCLPTGWANFGVTSEEELHLTRKLFWGIFDSLAHKKYDPELYRMAMPCLCAIAGALPPDYVDASYSSKAEKKATVDAEGNFDPRPVETLNVIIPEKLDSFINKFAEYTHEKWAFDKIQNNWSYGENIDEELKTHPMLRPYKTFSEKDKEIYRWPIKESLKAMIAWEWTIEKAREGEEEKTEKKKTRKISQSAQTYDPREGYNPQPPDLSAVTLSRELQAMAEQLAENYHNTWGRKKKQELEAKGGGTHPLLVPYDTLTAKEKARDREKAQELLKFLQMNGYAVTRGLKDMELDSSSIEKRFAFGFLQQLLRWMDISQEFIAHLEAVVSSGRVEKSPHEQEIKFFAKILLPLINQYFTNHCLYFLSTPAKVLGSGGHASNKEKEMITSLFCKLAALVRHRVSLFGTDAPAVVNCLHILARSLDARTVMKSGPEIVKAGLRSFFESASEDIEKMVENLRLGKVSQARTQVKGVGQNLTYTTVALLPVLTTLFQHIAQHQFGDDVILDDVQVSCYRTLCSIYSLGTTKNTYVEKLRPALGECLARLAAAMPVAFLEPQLNEYNACSVYTTKSPRERAILGLPNSVEEMCPDIPVLERLMADIGGLAESGARYTEMPHVIEITLPMLCSYLPRWWERGPEAPPSALPAGAPPPCTAVTSDHLNSLLGNILRIIVNNLGIDEASWMKRLAVFAQPIVSRARPELLQSHFIPTIGRLRKRAGKVVSEEEQLRLEAKAEAQEGELLVRDEFSVLCRDLYALYPLLIRYVDNNRAQWLTEPNPSAEELFRMVGEIFIYWSKSHNFKREEQNFVVQNEINNMSFLTADNKSKMAKSGGSDQERTKKKRRGDRYSVQTSLIVATLKKMLPIGLNMCAPTDQDLITLAKTRYALKDTDEEVREFLHNNLHLQGKVEGSPSLRWQMALYRGVPGREEDADDPEKIVRRVQEVSAVLYYLDQTEHPYKSKKAVWHKLLSKQRRRAVVACFRMTPLYNLPTHRACNMFLESYKAAWILTEDHSFEDRMIDDLSKAGEQEEEEEEVEEKKPDPLHQLVLHFSRTALTEKSKLDEDYLYMAYADIMAKSCHLEEGGENGEAEEEVEVSFEEKQMEKQRLLYQQARLHTRGAAEMVLQMISACKGETGAMVSSTLKLGISILNGGNAEVQQKMLDYLKDKKEVGFFQSIQALMQTCSVLDLNAFERQNKAEGLGMVNEDGTVINRQNGEKVMADDEFTQDLFRFLQLLCEGHNNDFQNYLRTQTGNTTTINIIICTVDYLLRLQESISDFYWYYSGKDVIEEQGKRNFSKAMSVAKQVFNSLTEYIQGPCTGNQQSLAHSRLWDAVVGFLHVFAHMMMKLAQDSSQIELLKELLDLQKDMVVMLLSLLEGNVVNGMIARQMVDMLVESSSNVEMILKFFDMFLKLKDIVGSEAFQDYVTDPRGLISKKDFQKAMDSQKQFSGPEIQFLLSCSEADENEMINCEEFANRFQEPARDIGFNVAVLLTNLSEHVPHDPRLHNFLELAESILEYFRPYLGRIEIMGASRRIERIYFEISETNRAQWEMPQVKESKRQFIFDVVNEGGEAEKMELFVSFCEDTIFEMQIAAQISEPEGEPETDEDEGAGAAEAGAEGAEEGAAGLEGTAATAAAGATARVVAAAGRALRGLSYRSLRRRVRRLRRLTAREAATAVAALLWAAVTRAGAAGAGAAAGALGLLWGSLFGGGLVEGAKKVTVTELLAGMPDPTSDEVHGEQPAGPGGDADGEGASEGAGDAAEGAGDEEEAVHEAGPGGADGAVAVTDGGPFRPEGAGGLGDMGDTTPAEPPTPEGSPILKRKLGVDGVEEELPPEPEPEPEPELEPEKADAENGEKEEVPEPTPEPPKKQAPPSPPPKKEEAGGEFWGELEVQRVKFLNYLSRNFYTLRFLALFLAFAINFILLFYKVSDSPPGEDDMEGSAAGDVSGAGSGGSSGWGLGAGEEAEGDEDENMVYYFLEESTGYMEPALRCLSLLHTLVAFLCIIGYNCLKVPLVIFKREKELARKLEFDGLYITEQPEDDDVKGQWDRLVLNTPSFPSNYWDKFVKRKVLDKHGDIYGRERIAELLGMDLATLEITAHNERKPNPPPGLLTWLMSIDVKYQIWKFGVIFTDNSFLYLGWYMVMSLLGHYNNFFFAAHLLDIAMGVKTLRTILSSVTHNGKQLVMTVGLLAVVVYLYTVVAFNFFRKFYNKSEDEDEPDMKCDDMMTCYLFHMYVGVRAGGGIGDEIEDPAGDEYELYRVVFDITFFFFVIVILLAIIQGLIIDAFGELRDQQEQVKEDMETKCFICGIGSDYFDTTPHGFETHTLEEHNLANYMFFLMYLINKDETEHTGQAGCGG

SEQ ID NO: 2167 - protein, 5007 aa, Artificial Sequence
  Synthetic polypeptide
MGDAEGEDEVQFLRTDDEVVLQCSATVLKEQLKLCLAAEGFGNRLCFLEPTSNAQNVPPDLAICCFVLEQSLSVRALQEMLANTVEAGVESSQGGGHRTLLYGHAILLRHAHSRMYLSCLTTSRSMTDKLAFDVGLQEDATGEACWWTMHPASKQRSEGEKVRVGDDIILVSVSSERYLHLSTASGELQVDASFMQTLWNMNPICSRCEEGFVTGGHVLRLFHGHMDECLTISPADSDDQRRLVYYEGGAVCTHARSLWRLEPLRISWSGSHLRWGQPLRVRHVTTGQYLALTEDQGLVVVDASKAHTKATSFCFRISKEKLDVAPKRDVEGMGPPEIKYGESLCFVQHVASGLWLTYAAPDPKALRLGVLKKKAMLHQEGHMDDALSLTRCQQEESQAARMIHSTNGLYNQFIKSLDSFSGKPRGSGPPAGTALPIEGVILSLQDLIIYFEPPSEDLQHEEKQSKLRSLRNRQSLFQEEGMLSMVLNCIDRLNVYTTAAHFAEFAGEEAAESWKEIVNLLYELLASLIRGNRSNCALFSTNLDWLVSKLDRLEASSGILEVLYCVLIESPEVLNIIQENHIKSIISLLDKHGRNHKVLDVLCSLCVCNGVAVRSNQDLITENLLPGRELLLQTNLINYVTSIRPNIFVGRAEGTTQYSKWYFEVMVDEVTPFLTAQATHLRVGWALTEGYTPYPGAGEGWGGNGVGDDLYSYGFDGLHLWTGHVARPVTSPGQHLLAPEDVISCCLDLSVPSISFRINGCPVQGVFESFNLDGLFFPVVSFSAGVKVRFLLGGRHGEFKFLPPPGYAPCHEAVLPRERLHLEPIKEYRREGPRGPHLVGPSRCLSHTDFVPCPVDTVQIVLPPHLERIREKLAENIHELWALTRIEQGWTYGPVRDDNKRLHPCLVDFHSLPEPERNYNLQMSGETLKTLLALGCHVGMADEKAEDNLKKTKLPKTYMMSNGYKPAPLDLSHVRLTPAQTTLVDRLAENGHNVWARDRVGQGWSYSAVQDIPARRNPRLVPYRLLDEATKRSNRDSLCQAVRTLLGYGYNIEPPDQEPSQVENQSRCDRVRIFRAEKSYTVQSGRWYFEFEAVTTGEMRVGWARPELRPDVELGADELAYVFNGHRGQRWHLGSEPFGRPWQPGDVVGCMIDLTENTIIFTLNGEVLMSDSGSETAFREIEIGDGFLPVCSLGPGQVGHLNLGQDVSSLRFFAICGLQEGFEPFAINMQRPVTTWFSKGLPQFEPVPLEHPHYEVSRVDGTVDTPPCLRLTHRTWGSQNSLVEMLFLRLSLPVQFHQHFRCTAGATPLAPPGLQPPAEDEARAAEPDPDYENLRRSAGGWSEAENGKEGTAKEGAPGGTPQAGGEAQPARAENEKDATTEKNKKRGFLFKAKKVAMMTQPPATPTLPRLPHDVVPADNRDDPEIILNTTTYYYSVRVFAGQEPSCVWAGWVTPDYHQHDMSFDLSKVRVVTVTMGDEQGNVHSSLKCSNCYMVWGGDFVSPGQQGRISHTDLVIGCLVDLATGLMTFTANGKESNTFFQVEPNTKLFPAVFVLPTHQNVIQFELGKQKNIMPLSAAMFQSERKNPAPQCPPRLEMQMLMPVSWSRMPNHFLQVETRRAGERLGWAVQCQEPLTMMALHIPEENRCMDILELSERLDLQRFHSHTLRLYRAVCALGNNRVAHALCSHVDQAQLLHALEDAHLPGPLRAGYYDLLISIHLESACRSRRSMLSEYIVPLTPETRAITLFPPGRSTENGHPRHGLPGVGVTTSLRPPHHFSPPCFVAALPAAGAAEAPARLSPAIPLEALRDKALRMLGEAVRDGGQHARDPVGGSVEFQFVPVLKLVSTLLVMGIFGDEDVKQILKMIEPEVFTEEEEEEDEEEEGEEEDEEEKEEDEEETAQEKEDEEKEEEEAAEGEKEEGLEEGLLQMKLPESVKLQMCHLLEYFCDQELQHRVESLAAFAERYVDKLQANQRSRYGLLIKAFSMTAAETARRTREFRSPPQEQINMLLQFKDGTDEEDCPLPEEIRQDLLDFHQDLLAHCGIQLDGEEEEPEEETTLGSRLMSLLEKVRLVKKKEEKPEEERSAEESKPRSLQELVSHMVVRWAQEDFVQSPELVRAMFSLLHRQYDGLGELLRALPRAYTISPSSVEDTMSLLECLGQIRSLLIVQMGPQEENLMIQSIGNIMNNKVFYQHPNLMRALGMHETVMEVMVNVLGGGESKEIRFPKMVTSCCRFLCYFCRISRQNQRSMFDHLSYLLENSGIGLGMQGSTPLDVAAASVIDNNELALALQEQDLEKVVSYLAGCGLQSCPMLVAKGYPDIGWNPCGGERYLDFLRFAVFVNGESVEENANVVVRLLIRKPECFGPALRGEGGSGLLAAIEEAIRISEDPARDGPGIRRDRRREHFGEEPPEENRVHLGHAIMSFYAALIDLLGRCAPEMHLIQAGKGEALRIRAILRSLVPLEDLVGIISLPLQIPTLGKDGALVQPKMSASFVPDHKASMVLFLDRVYGIENQDFLLHVLDVGFLPDMRAAASLDTATFSTTEMALALNRYLCLAVLPLITKCAPLFAGTEHRAIMVDSMLHTVYRLSRGRSLTKAQRDVIEDCLMSLCRYIRPSMLQHLLRRLVFDVPILNEFAKMPLKLLTNHYERCWKYYCLPTGWANFGVTSEEELHLTRKLFWGIFDSLAHKKYDPELYRMAMPCLCAIAGALPPDYVDASYSSKAEKKATVDAEGNFDPRPVETLNVIIPEKLDSFINKFAEYTHEKWAFDKIQNNWSYGENIDEELKTHPMLRPYKTFSEKDKEIYRWPIKESLKAMIAWEWTIEKAREGEEEKTEKKKTRKISQSAQTYDPREGYNPQPPDLSAVTLSRELQAMAEQLAENYHNTWGRKKKQELEAKGGGTHPLLVPYDTLTAKEKARDREKAQELLKFLQMNGYAVTRGLKDMELDSSSIEKRFAFGFLQQLLRWMDISQEFIAHLEAVVSSGRVEKSPHEQEIKFFAKILLPLINQYFTNHCLYFLSTPAKVLGSGGHASNKEKEMITSLFCKLAALVRHRVSLFGTDAPAVVNCLHILARSLDARTVMKSGPEIVKAGLRSFFESASEDIEKMVENLRLGKVSQARTQVKGVGQNLTYTTVALLPVLTTLFQHIAQHQFGDDVILDDVQVSCYRTLCSIYSLGTTKNTYVEKLRPALGECLARLAAAMPVAFLEPQLNEYNACSVYTTKSPRERAILGLPNSVEEMCPDIPVLERLMADIGGLAESGARYTEMPHVIEITLPMLCSYLPRWWERGPEAPPSALPAGAPPPCTAVTSDHLNSLLGNILRIIVNNLGIDEASWMKRLAVFAQPIVSRARPELLQSHFIPTIGRLRKRAGKVVSEEEQLRLEAKAEAQEGELLVRDEFSVLCRDLYALYPLLIRYVDNNRAQWLTEPNPSAEELFRMVGEIFIYWSKSHNFKREEQNFVVQNEINNMSFLTADNKSKMAKAGDIQSGGSDQERTKKKRRGDRYSVQTSLIVATLKKMLPIGLNMCAPTDQDLITLAKTRYALKDTDEEVREFLHNNLHLQGKVEGSPSLRWQMALYRGVPGREEDADDPEKIVRRVQEVSAVLYYLDQTEHPYKSKKAVWHKLLSKQRRRAVVACFRMTPLYNLPTHRACNMFLESYKAAWILTEDHSFEDRMIDDLSKAGEQEEEEEEVEEKKPDPLHQLVLHFSRTALTEKSKLDEDYLYMAYADIMAKSCHLEEGGENGEAEEEVEVSFEEKQMEKQRLLYQQARLHTRGAAEMVLQMISACKGETGAMVSSTLKLGISILNGGNAEVQQKMLDYLKDKKEVGFFQSIQALMQTCSVLDLNAFERQNKAEGLGMVNEDGTVGEKVMADDEFTQDLFRFLQLLCEGHNNDFQNYLRTQTGNTTTINIIICTVDYLLRLQESISDFYWYYSGKDVIEEQGKRNFSKAMSVAKQVFNSLTEYIQGPCTGNQQSLAHSRLWDAVVGFLHVFAHMMMKLAQDSSQIELLKELLDLQKDMVVMLLSLLEGNVVNGMIARQMVDMLVESSSNVEMILKFFDMFLKLKDIVGSEAFQDYVTDPRGLISKKDFQKAMDSQKQFSGPEIQFLLSCSEADENEMINCEEFANRFQEPARDIGFNVAVLLTNLSEHVPHDPRLHNFLELAESILEYFRPYLGRIEIMGASRRIERIYFEISETNRAQWEMPQVKESKRQFIFDVVNEGGEAEKMELFVSFCEDTIFEMQIAAQISEPEGEPETDEDEGAGAAEAGAEGAEEGAAGLEGTAATAAAGATARVVAAAGRALRGLSYRSLRRRVRRLRRLTAREAATAVAALLWAAVTRAGAAGAGAAAGALGLLWGSLFGGGLVEGAKKVTVTELLAGMPDPTSDEVHGEQPAGPGGDADGEGASEGAGDAAEGAGDEEEAVHEAGPGGADGAVAVTDGGPFRPEGAGGLGDMGDTTPAEPPTPEGSPILKRKLGVDGVEEELPPEPEPEPEPELEPEKADAENGEKEEVPEPTPEPPKKQAPPSPPPKKEEAGGEFWGELEVQRVKFLNYLSRNFYTLRFLALFLAFAINFILLFYKVSDSPPGEDDMEGSAAGDVSGAGSGGSSGWGLGAGEEAEGDEDENMVYYFLEESTGYMEPALRCLSLLHTLVAFLCIIGYNCLKVPLVIFKREKELARKLEFDGLYITEQPEDDDVKGQWDRLVLNTPSFPSNYWDKFVKRKVLDKHGDIYGRERIAELLGMDLATLEITAHNERKPNPPPGLLTWLMSIDVKYQIWKFGVIFTDNSFLYLGWYMVMSLLGHYNNFFFAAHLLDIAMGVKTLRTILSSVTHNGKQLVMTVGLLAVVVYLYTVVAFNFFRKFYNKSEDEDEPDMKCDDMMTCYLFHMYVGVRAGGGIGDEIEDPAGDEYELYRVVFDITFFFFVIVILLAIIQGLIIDAFGELRDQQEQVKEDMETKCFICGIGSDYFDTTPHGFETHTLEEHNLANYMFFLMYLINKDETEHTGQAGCGG

SEQ ID NO: 2168 - protein, 5012 aa, Artificial Sequence
  Synthetic polypeptide
MGDAEGEDEVQFLRTDDEVVLQCSATVLKEQLKLCLAAEGFGNRLCFLEPTSNAQNVPPDLAICCFVLEQSLSVRALQEMLANTVEAGVESSQGGGHRTLLYGHAILLRHAHSRMYLSCLTTSRSMTDKLAFDVGLQEDATGEACWWTMHPASKQRSEGEKVRVGDDIILVSVSSERYLHLSTASGELQVDASFMQTLWNMNPICSRCEEGFVTGGHVLRLFHGHMDECLTISPADSDDQRRLVYYEGGAVCTHARSLWRLEPLRISWSGSHLRWGQPLRVRHVTTGQYLALTEDQGLVVVDASKAHTKATSFCFRISKEKLDVAPKRDVEGMGPPEIKYGESLCFVQHVASGLWLTYAAPDPKALRLGVLKKKAMLHQEGHMDDALSLTRCQQEESQAARMIHSTNGLYNQFIKSLDSFSGKPRGSGPPAGTALPIEGVILSLQDLIIYFEPPSEDLQHEEKQSKLRSLRNRQSLFQEEGMLSMVLNCIDRLNVYTTAAHFAEFAGEEAAESWKEIVNLLYELLASLIRGNRSNCALFSTNLDWLVSKLDRLEASSGILEVLYCVLIESPEVLNIIQENHIKSIISLLDKHGRNHKVLDVLCSLCVCNGVAVRSNQDLITENLLPGRELLLQTNLINYVTSIRPNIFVGRAEGTTQYSKWYFEVMVDEVTPFLTAQATHLRVGWALTEGYTPYPGAGEGWGGNGVGDDLYSYGFDGLHLWTGHVARPVTSPGQHLLAPEDVISCCLDLSVPSISFRINGCPVQGVFESFNLDGLFFPVVSFSAGVKVRFLLGGRHGEFKFLPPPGYAPCHEAVLPRERLHLEPIKEYRREGPRGPHLVGPSRCLSHTDFVPCPVDTVQIVLPPHLERIREKLAENIHELWALTRIEQGWTYGPVRDDNKRLHPCLVDFHSLPEPERNYNLQMSGETLKTLLALGCHVGMADEKAEDNLKKTKLPKTYMMSNGYKPAPLDLSHVRLTPAQTTLVDRLAENGHNVWARDRVGQGWSYSAVQDIPARRNPRLVPYRLLDEATKRSNRDSLCQAVRTLLGYGYNIEPPDQEPSQVENQSRCDRVRIFRAEKSYTVQSGRWYFEFEAVTTGEMRVGWARPELRPDVELGADELAYVFNGHRGQRWHLGSEPFGRPWQPGDVVGCMIDLTENTIIFTLNGEVLMSDSGSETAFREIEIGDGFLPVCSLGPGQVGHLNLGQDVSSLRFFAICGLQEGFEPFAINMQRPVTTWFSKGLPQFEPVPLEHPHYEVSRVDGTVDTPPCLRLTHRTWGSQNSLVEMLFLRLSLPVQFHQHFRCTAGATPLAPPGLQPPAEDEARAAEPDPDYENLRRSAGGWSEAENGKEGTAKEGAPGGTPQAGGEAQPARAENEKDATTEKNKKRGFLFKAKKVAMMTQPPATPTLPRLPHDVVPADNRDDPEIILNTTTYYYSVRVFAGQEPSCVWAGWVTPDYHQHDMSFDLSKVRVVTVTMGDEQGNVHSSLKCSNCYMVWGGDFVSPGQQGRISHTDLVIGCLVDLATGLMTFTANGKESNTFFQVEPNTKLFPAVFVLPTHQNVIQFELGKQKNIMPLSAAMFQSERKNPAPQCPPRLEMQMLMPVSWSRMPNHFLQVETRRAGERLGWAVQCQEPLTMMALHIPEENRCMDILELSERLDLQRFHSHTLRLYRAVCALGNNRVAHALCSHVDQAQLLHALEDAHLPGPLRAGYYDLLISIHLESACRSRRSMLSEYIVPLTPETRAITLFPPGRSTENGHPRHGLPGVGVTTSLRPPHHFSPPCFVAALPAAGAAEAPARLSPAIPLEALRDKALRMLGEAVRDGGQHARDPVGGSVEFQFVPVLKLVSTLLVMGIFGDEDVKQILKMIEPEVFTEEEEEEDEEEEGEEEDEEEKEEDEEETAQEKEDEEKEEEEAAEGEKEEGLEEGLLQMKLPESVKLQMCHLLEYFCDQELQHRVESLAAFAERYVDKLQANQRSRYGLLIKAFSMTAAETARRTREFRSPPQEQINMLLQFKDGTDEEDCPLPEEIRQDLLDFHQDLLAHCGIQLDGEEEEPEEETTLGSRLMSLLEKVRLVKKKEEKPEEERSAEESKPRSLQELVSHMVVRWAQEDFVQSPELVRAMFSLLHRQYDGLGELLRALPRAYTISPSSVEDTMSLLECLGQIRSLLIVQMGPQEENLMIQSIGNIMNNKVFYQHPNLMRALGMHETVMEVMVNVLGGGESKEIRFPKMVTSCCRFLCYFCRISRQNQRSMFDHLSYLLENSGIGLGMQGSTPLDVAAASVIDNNELALALQEQDLEKVVSYLAGCGLQSCPMLVAKGYPDIGWNPCGGERYLDFLRFAVFVNGESVEENANVVVRLLIRKPECFGPALRGEGGSGLLAAIEEAIRISEDPARDGPGIRRDRRREHFGEEPPEENRVHLGHAIMSFYAALIDLLGRCAPEMHLIQAGKGEALRIRAILRSLVPLEDLVGIISLPLQIPTLGKDGALVQPKMSASFVPDHKASMVLFLDRVYGIENQDFLLHVLDVGFLPDMRAAASLDTATFSTTEMALALNRYLCLAVLPLITKCAPLFAGTEHRAIMVDSMLHTVYRLSRGRSLTKAQRDVIEDCLMSLCRYIRPSMLQHLLRRLVFDVPILNEFAKMPLKLLTNHYERCWKYYCLPTGWANFGVTSEEELHLTRKLFWGIFDSLAHKKYDPELYRMAMPCLCAIAGALPPDYVDASYSSKAEKKATVDAEGNFDPRPVETLNVIIPEKLDSFINKFAEYTHEKWAFDKIQNNWSYGENIDEELKTHPMLRPYKTFSEKDKEIYRWPIKESLKAMIAWEWTIEKAREGEEEKTEKKKTRKISQSAQTYDPREGYNPQPPDLSAVTLSRELQAMAEQLAENYHNTWGRKKKQELEAKGGGTHPLLVPYDTLTAKEKARDREKAQELLKFLQMNGYAVTRGLKDMELDSSSIEKRFAFGFLQQLLRWMDISQEFIAHLEAVVSSGRVEKSPHEQEIKFFAKILLPLINQYFTNHCLYFLSTPAKVLGSGGHASNKEKEMITSLFCKLAALVRHRVSLFGTDAPAVVNCLHILARSLDARTVMKSGPEIVKAGLRSFFESASEDIEKMVENLRLGKVSQARTQVKGVGQNLTYTTVALLPVLTTLFQHIAQHQFGDDVILDDVQVSCYRTLCSIYSLGTTKNTYVEKLRPALGECLARLAAAMPVAFLEPQLNEYNACSVYTTKSPRERAILGLPNSVEEMCPDIPVLERLMADIGGLAESGARYTEMPHVIEITLPMLCSYLPRWWERGPEAPPSALPAGAPPPCTAVTSDHLNSLLGNILRIIVNNLGIDEASWMKRLAVFAQPIVSRARPELLQSHFIPTIGRLRKRAGKVVSEEEQLRLEAKAEAQEGELLVRDEFSVLCRDLYALYPLLIRYVDNNRAQWLTEPNPSAEELFRMVGEIFIYWSKSHNFKREEQNFVVQNEINNMSFLTADNKSKMAKAGDIQSGGSDQERTKKKRRGDRYSVQTSLIVATLKKMLPIGLNMCAPTDQDLITLAKTRYALKDTDEEVREFLHNNLHLQGKVEGSPSLRWQMALYRGVPGREEDADDPEKIVRRVQEVSAVLYYLDQTEHPYKSKKAVWHKLLSKQRRRAVVACFRMTPLYNLPTHRACNMFLESYKAAWILTEDHSFEDRMIDDLSKAGEQEEEEEEVEEKKPDPLHQLVLHFSRTALTEKSKLDEDYLYMAYADIMAKSCHLEEGGENGEAEEEVEVSFEEKQMEKQRLLYQQARLHTRGAAEMVLQMISACKGETGAMVSSTLKLGISILNGGNAEVQQKMLDYLKDKKEVGFFQSIQALMQTCSVLDLNAFERQNKAEGLGMVNEDGTVINRQNGEKVMADDEFTQDLFRFLQLLCEGHNNDFQNYLRTQTGNTTTINIIICTVDYLLRLQESISDFYWYYSGKDVIEEQGKRNFSKAMSVAKQVFNSLTEYIQGPCTGNQQSLAHSRLWDAVVGFLHVFAHMMMKLAQDSSQIELLKELLDLQKDMVVMLLSLLEGNVVNGMIARQMVDMLVESSSNVEMILKFFDMFLKLKDIVGSEAFQDYVTDPRGLISKKDFQKAMDSQKQFSGPEIQFLLSCSEADENEMINCEEFANRFQEPARDIGFNVAVLLTNLSEHVPHDPRLHNFLELAESILEYFRPYLGRIEIMGASRRIERIYFEISETNRAQWEMPQVKESKRQFIFDVVNEGGEAEKMELFVSFCEDTIFEMQIAAQISEPEGEPETDEDEGAGAAEAGAEGAEEGAAGLEGTAATAAAGATARVVAAAGRALRGLSYRSLRRRVRRLRRLTAREAATAVAALLWAAVTRAGAAGAGAAAGALGLLWGSLFGGGLVEGAKKVTVTELLAGMPDPTSDEVHGEQPAGPGGDADGEGASEGAGDAAEGAGDEEEAVHEAGPGGADGAVAVTDGGPFRPEGAGGLGDMGDTTPAEPPTPEGSPILKRKLGVDGVEEELPPEPEPEPEPELEPEKADAENGEKEEVPEPTPEPPKKQAPPSPPPKKEEAGGEFWGELEVQRVKFLNYLSRNFYTLRFLALFLAFAINFILLFYKVSDSPPGEDDMEGSAAGDVSGAGSGGSSGWGLGAGEEAEGDEDENMVYYFLEESTGYMEPALRCLSLLHTLVAFLCIIGYNCLKVPLVIFKREKELARKLEFDGLYITEQPEDDDVKGQWDRLVLNTPSFPSNYWDKFVKRKVLDKHGDIYGRERIAELLGMDLATLEITAHNERKPNPPPGLLTWLMSIDVKYQIWKFGVIFTDNSFLYLGWYMVMSLLGHYNNFFFAAHLLDIAMGVKTLRTILSSVTHNGKQLVMTVGLLAVVVYLYTVVAFNFFRKFYNKSEDEDEPDMKCDDMMTCYLFHMYVGVRAGGGIGDEIEDPAGDEYELYRVVFDITFFFFVIVILLAIIQGLIIDAFGELRDQQEQVKEDMETKCFICGIGSDYFDTTPHGFETHTLEEHNLANYMFFLMYLINKDETEHTGQAGCGG

SEQ ID NO: 2169 - protein, 13 aa, Artificial Sequence
  Synthetic polypeptide
CPSKRVPPLSWSS

SEQ ID NO: 2170 - protein, 238 aa, Artificial Sequence
  Synthetic polypeptide
MAYVPAPGYQPTYNPTLPYYQPIPGGLNVGMSVYIQGVASEHMKRFFVNFVVGQDPGSDVAFHFNPRFDGWDKVVFNTLQGGKWGSEERKRSMPFKKGAAFELVFIVLAEHYKVVVNGNPFYEYGHRLPLQMVTHLQVDGDLQLQSINFIGGQPLRPQGPPMMPPYPGPGHCHQQLNSLPTMEGPPTFNPPPALASQSAKSAASARPLPRLGSEVRLCLAAHHLGREESLCLAAQSGK

SEQ ID NO: 2171 - protein, 19 aa, Artificial Sequence
  Synthetic polypeptide
MAEPDRGGGSLEPRNLRLQ

SEQ ID NO: 2172 - protein, 19 aa, Artificial Sequence
  Synthetic polypeptide
MAEPDRGGGSLEPRNLRLQ

SEQ ID NO: 2173 - protein, 19 aa, Artificial Sequence
  Synthetic polypeptide
MAEPDRGGGSLEPRNLRLQ

SEQ ID NO: 2174 - protein, 4 aa, Artificial Sequence
  Synthetic polypeptide
RGRG

SEQ ID NO: 2175 - protein, 94 aa, Artificial Sequence
  Synthetic polypeptide
MEGVWQELLDSAQIEICVADWWGARENCGCVYQLRVRLLDVYEKEVVKFSASPDPVLQWTERGCRQVSHVFTNFGKGIRYHRWVRVSTTELVSA

SEQ ID NO: 2176 - protein, 259 aa, Artificial Sequence
  Synthetic polypeptide
MGARLSRRRLPADPSLALDALPPELLVQVLSHVPPRSLVTRCRPVCRAWRDIVDGPTVWLLQLARDRSAEGRALYAVAQRCLPSNEDKEEFPLCALARYCLRAPFGRNLIFNSCGEQGFRGWEVEHGGNGWAIEKNLTPVPGAPSQTCFVTSFEWCSKRQLVDLVMEGVWQELLDSAQIEICVADWWGARENCGCVYQLRVRLLDVYEKEVVKFSASPDPVLQWTERGCRQVSHVFTNFGKGIRYHRWVRVSTTELVSA

SEQ ID NO: 2177 - protein, 259 aa, Artificial Sequence; identical to SEQ ID NO: 2176
  Synthetic polypeptide

SEQ ID NO: 2178 - protein, 4 aa, Artificial Sequence
  Synthetic polypeptide
RGRG

SEQ ID NO: 2179 - protein, 8 aa, Artificial Sequence
  Synthetic polypeptide
GLLRRPAS

SEQ ID NO: 2180 - protein, 66 aa, Artificial Sequence
  Synthetic polypeptide
MEGVWQELLDSAQIEICVADWWGARENCGCVYQLRVRLLDVYEKEVVKFSASPDPVLQWTERGCRQ

SEQ ID NO: 2181 - protein, 231 aa, Artificial Sequence
  Synthetic polypeptide
MGARLSRRRLPADPSLALDALPPELLVQVLSHVPPRSLVTRCRPVCRAWRDIVDGPTVWLLQLARDRSAEGRALYAVAQRCLPSNEDKEEFPLCALARYCLRAPFGRNLIFNSCGEQGFRGWEVEHGGNGWAIEKNLTPVPGAPSQTCFVTSFEWCSKRQLVDLVMEGVWQELLDSAQIEICVADWWGARENCGCVYQLRVRLLDVYEKEVVKFSASPDPVLQWTERGCRQ

SEQ ID NO: 2182 - protein, 231 aa, Artificial Sequence; identical to SEQ ID NO: 2181
  Synthetic polypeptide

SEQ ID NO: 2183 - protein, 85 aa, Artificial Sequence
  Synthetic polypeptide
MEGVWQELLDSAQIEICVADWWGARENCGCVYQLRVRLLDVYEKEVVKFSASPDPVLQWTERGCRQEAKMGGQLEGRSLRPAWAI

SEQ ID NO: 2184 - protein, 4 aa, Artificial Sequence
  Synthetic polypeptide
RGRG

SEQ ID NO: 2185 - protein, 250 aa, Artificial Sequence
  Synthetic polypeptide
MGARLSRRRLPADPSLALDALPPELLVQVLSHVPPRSLVTRCRPVCRAWRDIVDGPTVWLLQLARDRSAEGRALYAVAQRCLPSNEDKEEFPLCALARYCLRAPFGRNLIFNSCGEQGFRGWEVEHGGNGWAIEKNLTPVPGAPSQTCFVTSFEWCSKRQLVDLVMEGVWQELLDSAQIEICVADWWGARENCGCVYQLRVRLLDVYEKEVVKFSASPDPVLQWTERGCRQEAKMGGQLEGRSLRPAWAI

SEQ ID NO: 2186 - protein, 250 aa, Artificial Sequence; identical to SEQ ID NO: 2185
  Synthetic polypeptide

SEQ ID NO: 2187 - protein, 8 aa, Artificial Sequence
  Synthetic polypeptide
GLLRRPAS

SEQ ID NO: 2188 - protein, 188 aa, Artificial Sequence
  Synthetic polypeptide
MLKSNGERRSRNALPAVYARKMAASQQQASAASSAAGVSGPSSAGGPGPQQQPQPPAQLVGPAQSGLLQQQQQDFDPVQRYKMLIPQLKESLQTLMKVAAQNLIQNTNIDNGQKSSDGPIQRFDKCLEEFYALCDQLELCLRLAHECLSQSCDSAKHSPTLVPTATKPDAVQAGRWLEPRNSRPVRAT

SEQ ID NO: 2189 - protein, 171 aa, Artificial Sequence
  Synthetic polypeptide
MAASQQQASAASSAAGVSGPSSAGGPGPQQQPQPPAQLVGPAQSGLLQQQQQDFDPVQRYKMLIPQLKESLQTLMKVAAQNLIQNTNIDNGQKSSDGPIQRFDKCLEEFYALCDQLELCLPPSPTQCRQADGLSPGIQDQSEQHSKSPYLQKIQKLARCGGACPGSQVLGG

SEQ ID NO: 2190 - protein, 167 aa, Artificial Sequence
  Synthetic polypeptide
MAASQQQASAASSAAGVSGPSSAGGPGPQQQPQPPAQLVGPAQSGLLQQQQQDFDPVQRYKMLIPQLKESLQTLMKVAAQNLIQNTNIDNGQKSSDGPIQRFDKCLEEFYALCDQLELCLRLAHECLSQSCDSAKHSPTLVPTATKPDAVQAGRWLEPRNSRPVRAT

SEQ ID NO: 2191 - protein, 202 aa, Artificial Sequence
  Synthetic polypeptide
MAASQQQASAASSAAGVSGPSSAGGPGPQQQPQPPAQLVGPAQSGLLQQQQQDFDPVQRYKMLIPQLKESLQTLMKVAAQNLIQNTNIDNGQKSSDGPIQRFDKCLEEFYALCDQLELCLVRSLLDTGAWRMSACHRVVTVPSTLQRWCPQPPSPTQCRQADGLSPGIQDQSEQHSKSPYLQKIQKLARCGGACPGSQVLGG

SEQ ID NO: 2192 - protein, 171 aa, Artificial Sequence
  Synthetic polypeptide
VMVEPHRHEGVFICRGKEDALVTKNLVPGESVYGEKRVSISEGDDKIEYRAWNPFRSKLAAAILGGVDQIHIKPGAKVLYLGAASGTTVSHVSDIVGPDGLVYAVEFSHRSGRDLINLAKKRTNIIPVIEDARHPHKYRMLIDLGASRGQGPGLTRLYVPHARPRAGHRVG

SEQ ID NO: 2193 - protein, 256 aa, Artificial Sequence
  Synthetic polypeptide
MKPGFSPRGGGFGGRGGFGDRGGRGGRGGFGGGRGRGGGFRGRGRGGGGGGGGGGGGGRGGGGFHSGGNRGRGRGGKRGNQSGKNVMVEPHRHEGVFICRGKEDALVTKNLVPGESVYGEKRVSISEGDDKIEYRAWNPFRSKLAAAILGGVDQIHIKPGAKVLYLGAASGTTVSHVSDIVGPDGLVYAVEFSHRSGRDLINLAKKRTNIIPVIEDARHPHKYRMLIDLGASRGQGPGLTRLYVPHARPRAGHRVG

SEQ ID NO: 2194 - protein, 194 aa, Artificial Sequence
  Synthetic polypeptide
GRGGFGGGRGRGGGFRGNQSGKNVMVEPHRHEGVFICRGKEDALVTKNLVPGESVYGEKRVSISEGDDKIEYRAWNPFRSKLAAAILGGVDQIHIKPGAKVLYLGAASGTTVSHVSDIVGPDGLVYAVEFSHRSGRDLINLAKKRTNIIPVIEDARHPHKYRMLIDLGASRGQGPGLTRLYVPHARPRAGHRVG

SEQ ID NO: 2195 - protein, 232 aa, Artificial Sequence
  Synthetic polypeptide
MKPGFSPRGGGFGGRGGFGDRGGRGGRGGFGGGRGRGGGFHSGGNRGRGRGGKRGNQSGKNVMVEPHRHEGVFICRGKEDALVTKNLVPGESVYGEKRVSISEGDDKIEYRAWNPFRSKLAAAILGGVDQIHIKPGAKVLYLGAASGTTVSHVSDIVGPDGLVYAVEFSHRSGRDLINLAKKRTNIIPVIEDARHPHKYRMLIDLGASRGQGPGLTRLYVPHARPRAGHRVG

SEQ ID NO: 2196 - protein, 219 aa, Artificial Sequence
  Synthetic polypeptide
MKPGFSPRGGGFGGRGGFGDRGGRGGFHSGGNRGRGRGGKRGNQSGKNVMVEPHRHEGVFICRGKEDALVTKNLVPGESVYGEKRVSISEGDDKIEYRAWNPFRSKLAAAILGGVDQIHIKPGAKVLYLGAASGTTVSHVSDIVGPDGLVYAVEFSHRSGRDLINLAKKRTNIIPVIEDARHPHKYRMLIDLGASRGQGPGLTRLYVPHARPRAGHRVG

SEQ ID NO: 2197 - protein, 58 aa, Artificial Sequence
  Synthetic polypeptide
MEEIGILVEKAQDEIPALSVSRPQTGLSFLGPEPEDLEDLYSRYKKLQQHSGAKKHLE

SEQ ID NO: 2198 - protein, 58 aa, Artificial Sequence; identical to SEQ ID NO: 2197
  Synthetic polypeptide

SEQ ID NO: 2199 - protein, 409 aa, Artificial Sequence
  Synthetic polypeptide
MEEEEGAVAKEWGTTPAGPVWTAVFDYEAAGDEELTLRRGDRVQVLSQDCAVSGDEGWWTGQLPSGRVGVFPSNYVAPGAPAAPAGLQLPQEIPFHELQLEEIIGVGGFGKVYRALWRGEEVAVKAARLDPEKDPAVTAEQVCQEARLFGALQHPNIIALRGACLNPPHLCLVMEYARGGALSRVLAGRRVPPHVLVNWAVQVARGMNYLHNDAPVPIIHRDLKSINILILEAIENHNLADTVLKITDFGLAREWHKTTKMSAAGTYAWMAPEVIRLSLFSKSSDVWSFGVLLWELLTGEVPYREIDALAVAYGVAMNKLTLPIPSTCPEPFARLLEECWDPDPHGRPDFGSILKRLEVIEQSALFQMPLESFHSLQEDWKLEIQHMFDDLRTKEKYLQVTLHDVWGWL

SEQ ID NO: 2200 - protein, 101 aa, Artificial Sequence
  Synthetic polypeptide
QDHGLRPRPRVAQDHQDERCGDLRLDGAGECWDPDPHGRPDFGSILKRLEVIEQSALFQMPLESFHSLQEDWKLEIQHMFDDLRTKEKYLQVTLHDVWGWL

SEQ ID NO: 2201 - protein, 159 aa, Artificial Sequence
  Synthetic polypeptide
LAREWHKTTKMSAAGTYAWMAPEVIRLSLFSKSSDVWSFGVLLWELLTGEVPYREIDALAVAYGVAMNKLTLPIPSTCPEPFARLLEECWDPDPHGRPDFGSILKRLEVIEQSALFQMPLESFHSLQEDWKLEIQHMFDDLRTKEKYLQVTLHDVWGWL

SEQ ID NO: 2202 - protein, 15 aa, Artificial Sequence
  Synthetic polypeptide
GSLPAAEVTWPPFMA

SEQ ID NO: 2203 - protein, 366 aa, Artificial Sequence
  Synthetic polypeptide
MPPSGLRLLPLLLPLLWLLVLTPGRPAAGLSTCKTIDMELVKRKRIEAIRGQILSKLRLASPPSQGEVPPGPLPEAVLALYNSTRDRVAGESAEPEPEPEADYYAKEVTRVLMVETHNEIYDKFKQSTHSIYMFFNTSELREAVPEPVLLSRAELRLLRLKLKVEQHVELYQKYSNNSWRYLSNRLLAPSDSPEWLSFDVTGVVRQWLSRGGEIEGFRLSAHCSCDSRDNTLQVDINGFTTGRRGDLATIHGMNRPFLLLMATPLERAQHLQSSRHRRALDTNYCFSSTEKNCCVRQLYIDFRKDLGWKWIHEPKGYHANFCLGPCPYIWSLDTQYSKVWWRTPVVPGTQEAEVGELFELRRQRLQ

SEQ ID NO: 2204 - protein, 443 aa, Artificial Sequence
  Synthetic polypeptide
MKTLRARFKKTELRLSPTDLGSCPPCGPCPIPKPAARGRRQSQDWGKSDERLLQAVENNDAPRVAALIARKGLVPTKLDPEGKSAFHLAAMRGAASCLEVMIAHGSNVMSADGAGYNALHLAAKYGHPQCLKQLLQASCVVDVVDSSGWTALHHAAAGGCLSCSEVLCSFKAHLNPQDRSGATPLIIAAQMCHTDLCRLLLQQGAAANDQDLQGRTALMLACEGASPETVEVLLQGGAQPGITDALGQDAAHYGALAGDKLILHLLQEAAQRPSPPSALTEDDSGEASSQNSMSSHGKQGAPKKRKAPPPPASIPMPDDRDAYEEIVRLRQERGRLLQKIRGLEQHKERRQQEPPGPPRCSSNSPGAVLPQGLCTTSVLCLECSSAVLPQGLCTTCVLCLECSSPRWPHSSLPHLLYAVGSSPKTLPMPTSHAHFPCPLSSKL

SEQ ID NO: 2205 - protein, 443 aa, Artificial Sequence; identical to SEQ ID NO: 2204
  Synthetic polypeptide

SEQ ID NO: 2206 - protein, 414 aa, Artificial Sequence
  Synthetic polypeptide
MKTLRARFKKTESQDWGKSDERLLQAVENNDAPRVAALIARKGLVPTKLDPEGKSAFHLAAMRGAASCLEVMIAHGSNVMSADGAGYNALHLAAKYGHPQCLKQLLQASCVVDVVDSSGWTALHHAAAGGCLSCSEVLCSFKAHLNPQDRSGATPLIIAAQMCHTDLCRLLLQQGAAANDQDLQGRTALMLACEGASPETVEVLLQGGAQPGITDALGQDAAHYGALAGDKLILHLLQEAAQRPSPPSALTEDDSGEASSQNSMSSHGKQGAPKKRKAPPPPASIPMPDDRDAYEEIVRLRQERGRLLQKIRGLEQHKERRQQEPPGPPRCSSNSPGAVLPQGLCTTSVLCLECSSAVLPQGLCTTCVLCLECSSPRWPHSSLPHLLYAVGSSPKTLPMPTSHAHFPCPLSSKL

SEQ ID NO: 2207 - protein, 533 aa, Artificial Sequence
  Synthetic polypeptide
MQPAACAGEGAGPPAPRPPHPPGDKVRRGRGGAPSLSPQPPAPYLGLPIPSRGGGGWRGGQGGGGGTREGGTGRAGGAGSSGSAQPRPPAAPRGPSRPSGRRLLLEPRAPPAPRAPDAMKQLCLCAAASFASQDWGKSDERLLQAVENNDAPRVAALIARKGLVPTKLDPEGKSAFHLAAMRGAASCLEVMIAHGSNVMSADGAGYNALHLAAKYGHPQCLKQLLQASCVVDVVDSSGWTALHHAAAGGCLSCSEVLCSFKAHLNPQDRSGATPLIIAAQMCHTDLCRLLLQQGAAANDQDLQGRTALMLACEGASPETVEVLLQGGAQPGITDALGQDAAHYGALAGDKLILHLLQEAAQRPSPPSALTEDDSGEASSQNSMSSHGKQGAPKKRKAPPPPASIPMPDDRDAYEEIVRLRQERGRLLQKIRGLEQHKERRQQEPPGPPRCSSNSPGAVLPQGLCTTSVLCLECSSAVLPQGLCTTCVLCLECSSPRWPHSSLPHLLYAVGSSPKTLPMPTSHAHFPCPLSSKL

SEQ ID NO: 2208 - protein, 239 aa, Artificial Sequence
  Synthetic polypeptide
MESPSAPPHRWCIPWQRLLLTASLLTFWNPPTTAKLTIESTPFNVAEGKEVLLLVHNLPQHLFGYSWYKGERVDGNRQIIGYVIGTQQATPGPAYSGREIIYPNASLLIQNIIQNDTGFYTLHVIKSDLVNEEATGQFRVYPELPKPSISSNNSKPVEDKDAVAFTCEPETQDATYLWWVNNQSLPVSPRLQLSNGNRTLTLFNVTRNDTASYKCETQNPVSARRSDSVILNVLYWTRP

SEQ ID NO: 2209 - protein, 239 aa, Artificial Sequence; identical to SEQ ID NO: 2208
  Synthetic polypeptide

SEQ ID NO: 2210 - protein, 239 aa, Artificial Sequence; identical to SEQ ID NO: 2208
  Synthetic polypeptide

SEQ ID NO: 2211 - skipped

SEQ ID NO: 2212 - protein, 338 aa, Artificial Sequence
  Synthetic polypeptide
MESPSAPPHRWCIPWQRLLLTASLLTFWNPPTTAKLTIESTPFNVAEGKEVLLLVHNLPQHLFGYSWYKGERVDGNRQIIGYVIGTQQATPGPAYSGREIIYPNASLLIQNIIQNDTGFYTLHVIKSDLVNEEATGQFRVYPELPKPSISSNNSKPVEDKDAVAFTCEPETQDATYLWWVNNQSLPVSPRLQLSNGNRTLTLFNVTRNDTASYKCETQNPVSARRSDSVILNVLYGPDAPTISPLNTSYRSGENLNLSCHAASNPPAQYSWFVNGTFQQSTQELFIPNITVNNSGSYTCQAHNSDTGLNRTTVTTITVYEPPKPFITSNNSNPMEDEE

SEQ ID NO: 2213 - protein, 339 aa, Artificial Sequence
  Synthetic polypeptide
MESPSAPPHRWCIPWQRLLLTASLLTFWNPPTTAKLTIESTPFNVAEGKEVLLLVHNLPQHLFGYSWYKGERVDGNRQIIGYVIGTQQATPGPAYSGREIIYPNASLLIQNIIQNDTGFYTLHVIKSDLVNEEATGQFRVYPELPKPSISSNNSKPVEDKDAVAFTCEPETQDATYLWWVNNQSLPVSPRLQLSNGNRTLTLFNVTRNDTASYKCETQNPVSARRSDSVILNVLYGPDAPTISPLNTSYRSGENLNLSCHAASNPPAQYSWFVNGTFQQSTQELFIPNITVNNSGSYTCQAHNSDTGLNRTTVTTITVYAEPPKPFITSNNSNPMEDEE

SEQ ID NO: 2214 - protein, 339 aa, Artificial Sequence; identical to SEQ ID NO: 2213
  Synthetic polypeptide

SEQ ID NO: 2215 - skipped

SEQ ID NO: 2216 - protein, 359 aa, Artificial Sequence
  Synthetic polypeptide
MESPSAPPHRWCIPWQRLLLTASLLTFWNPPTTAKLTIESTPFNVAEGKEVLLLVHNLPQHLFGYSWYKGERVDGNRQIIGYVIGTQQATPGPAYSGREIIYPNASLLIQNIIQNDTGFYTLHVIKSDLVNEEATGQFRVYPELPKPSISSNNSKPVEDKDAVAFTCEPETQDATYLWWVNNQSLPVSPRLQLSNGNRTLTLFNVTRNDTASYKCETQNPVSARRSDSVILNVLYGPDAPTISPLNTSYRSGENLNLSCHAASNPPAQYSWFVNGTFQQSTQELFIPNITVNNSGSYTCQAHNSDTGLNRTTVTTITVYEPPKPFITSNNSNPVEDEDAVALTCEPEIQNTTYLWWRLQ

SEQ ID NO: 2217 - protein, 360 aa, Artificial Sequence
  Synthetic polypeptide
MESPSAPPHRWCIPWQRLLLTASLLTFWNPPTTAKLTIESTPFNVAEGKEVLLLVHNLPQHLFGYSWYKGERVDGNRQIIGYVIGTQQATPGPAYSGREIIYPNASLLIQNIIQNDTGFYTLHVIKSDLVNEEATGQFRVYPELPKPSISSNNSKPVEDKDAVAFTCEPETQDATYLWWVNNQSLPVSPRLQLSNGNRTLTLFNVTRNDTASYKCETQNPVSARRSDSVILNVLYGPDAPTISPLNTSYRSGENLNLSCHAASNPPAQYSWFVNGTFQQSTQELFIPNITVNNSGSYTCQAHNSDTGLNRTTVTTITVYAEPPKPFITSNNSNPVEDEDAVALTCEPEIQNTTYLWWRLQ

SEQ ID NO: 2218 - protein, 360 aa, Artificial Sequence; identical to SEQ ID NO: 2217
  Synthetic polypeptide

SEQ ID NO: 2219 - skipped

SEQ ID NO: 2220 - protein, 416 aa, Artificial Sequence
  Synthetic polypeptide
MESPSAPPHRWCIPWQRLLLTASLLTFWNPPTTAKLTIESTPFNVAEGKEVLLLVHNLPQHLFGYSWYKGERVDGNRQIIGYVIGTQQATPGPAYSGREIIYPNASLLIQNIIQNDTGFYTLHVIKSDLVNEEATGQFRVYPELPKPSISSNNSKPVEDKDAVAFTCEPETQDATYLWWVNNQSLPVSPRLQLSNGNRTLTLFNVTRNDTASYKCETQNPVSARRSDSVILNVLYGPDAPTISPLNTSYRSGENLNLSCHAASNPPAQYSWFVNGTFQQSTQELFIPNITVNNSGSYTCQAHNSDTGLNRTTVTTITVYEPPKPFITSNNSNPVEDEDAVALTCEPEIQNTTYLWWVNNQSLPVSPRLQLSNDNRTLTLLSVTRNDVGPYECGIQNKLSVDHSDPVILNVLYWTRP

SEQ ID NO: 2221 - protein, 417 aa, Artificial Sequence
  Synthetic polypeptide
MESPSAPPHRWCIPWQRLLLTASLLTFWNPPTTAKLTIESTPFNVAEGKEVLLLVHNLPQHLFGYSWYKGERVDGNRQIIGYVIGTQQATPGPAYSGREIIYPNASLLIQNIIQNDTGFYTLHVIKSDLVNEEATGQFRVYPELPKPSISSNNSKPVEDKDAVAFTCEPETQDATYLWWVNNQSLPVSPRLQLSNGNRTLTLFNVTRNDTASYKCETQNPVSARRSDSVILNVLYGPDAPTISPLNTSYRSGENLNLSCHAASNPPAQYSWFVNGTFQQSTQELFIPNITVNNSGSYTCQAHNSDTGLNRTTVTTITVYAEPPKPFITSNNSNPVEDEDAVALTCEPEIQNTTYLWWVNNQSLPVSPRLQLSNDNRTLTLLSVTRNDVGPYECGIQNKLSVDHSDPVILNVLYWTRP

SEQ ID NO: 2222 - protein, 417 aa, Artificial Sequence; identical to SEQ ID NO: 2221
  Synthetic polypeptide

SEQ ID NO: 2223 - protein, 442 aa, Artificial Sequence
  Synthetic polypeptide
MESPSAPPHRWCIPWQRLLLTASLLTFWNPPTTAKLTIESTPFNVAEGKEVLLLVHNLPQHLFGYSWYKGERVDGNRQIIGYVIGTQQATPGPAYSGREIIYPNASLLIQNIIQNDTGFYTLHVIKSDLVNEEATGQFRVYPELPKPSISSNNSKPVEDKDAVAFTCEPETQDATYLWWVNNQSLPVSPRLQLSNGNRTLTLFNVTRNDTASYKCETQNPVSARRSDSVILNVLYGPDAPTISPLNTSYRSGENLNLSCHAASNPPAQYSWFVNGTFQQSTQELFIPNITVNNSGSYTCQAHNSDTGLNRTTVTTITVYEPPKPFITSNNSNPVEDEDAVALTCEPEIQNTTYLWWVNNQSLPVSPRLQLSNDNRTLTLLSVTRNDVGPYECGIQNKLSVDHSDPVILNVLYGPDDPTISPSYTYYRPGAGESLEPGRWRLQ

SEQ ID NO: 2224 - protein, 443 aa, Artificial Sequence
  Synthetic polypeptide
MESPSAPPHRWCIPWQRLLLTASLLTFWNPPTTAKLTIESTPFNVAEGKEVLLLVHNLPQHLFGYSWYKGERVDGNRQIIGYVIGTQQATPGPAYSGREIIYPNASLLIQNIIQNDTGFYTLHVIKSDLVNEEATGQFRVYPELPKPSISSNNSKPVEDKDAVAFTCEPETQDATYLWWVNNQSLPVSPRLQLSNGNRTLTLFNVTRNDTASYKCETQNPVSARRSDSVILNVLYGPDAPTISPLNTSYRSGENLNLSCHAASNPPAQYSWFVNGTFQQSTQELFIPNITVNNSGSYTCQAHNSDTGLNRTTVTTITVYAEPPKPFITSNNSNPVEDEDAVALTCEPEIQNTTYLWWVNNQSLPVSPRLQLSNDNRTLTLLSVTRNDVGPYECGIQNKLSVDHSDPVILNVLYGPDDPTISPSYTYYRPGAGESLEPGRWRLQ

SEQ ID NO: 2225 - protein, 443 aa, Artificial Sequence; identical to SEQ ID NO: 2224
  Synthetic polypeptide

SEQ ID NO: 2226 - protein, 465 aa, Artificial Sequence
  Synthetic polypeptide
MESPSAPPHRWCIPWQRLLLTASLLTFWNPPTTAKLTIESTPFNVAEGKEVLLLVHNLPQHLFGYSWYKGERVDGNRQIIGYVIGTQQATPGPAYSGREIIYPNASLLIQNIIQNDTGFYTLHVIKSDLVNEEATGQFRVYPELPKPSISSNNSKPVEDKDAVAFTCEPETQDATYLWWVNNQSLPVSPRLQLSNGNRTLTLFNVTRNDTASYKCETQNPVSARRSDSVILNVLYGPDAPTISPLNTSYRSGENLNLSCHAASNPPAQYSWFVNGTFQQSTQELFIPNITVNNSGSYTCQAHNSDTGLNRTTVTTITVYEPPKPFITSNNSNPVEDEDAVALTCEPEIQNTTYLWWVNNQSLPVSPRLQLSNDNRTLTLLSVTRNDVGPYECGIQNKLSVDHSDPVILNVLYGPDDPTISPSYTYYRPGENRLNPGGGDCSEPRSHHCTPVWQQSKTPSQKEKKR

SEQ ID NO: 2227 - protein, 466 aa, Artificial Sequence
  Synthetic polypeptide
MESPSAPPHRWCIPWQRLLLTASLLTFWNPPTTAKLTIESTPFNVAEGKEVLLLVHNLPQHLFGYSWYKGERVDGNRQIIGYVIGTQQATPGPAYSGREIIYPNASLLIQNIIQNDTGFYTLHVIKSDLVNEEATGQFRVYPELPKPSISSNNSKPVEDKDAVAFTCEPETQDATYLWWVNNQSLPVSPRLQLSNGNRTLTLFNVTRNDTASYKCETQNPVSARRSDSVILNVLYGPDAPTISPLNTSYRSGENLNLSCHAASNPPAQYSWFVNGTFQQSTQELFIPNITVNNSGSYTCQAHNSDTGLNRTTVTTITVYAEPPKPFITSNNSNPVEDEDAVALTCEPEIQNTTYLWWVNNQSLPVSPRLQLSNDNRTLTLLSVTRNDVGPYECGIQNKLSVDHSDPVILNVLYGPDDPTISPSYTYYRPGENRLNPGGGDCSEPRSHHCTPVWQQSKTPSQKEKKR

SEQ ID NO: 2228 - protein, 466 aa, Artificial Sequence; identical to SEQ ID NO: 2227
  Synthetic polypeptide

SEQ ID NO: 2229 - protein, 442 aa, Artificial Sequence
  Synthetic polypeptide
MESPSAPPHRWCIPWQRLLLTASLLTFWNPPTTAKLTIESTPFNVAEGKEVLLLVHNLPQHLFGYSWYKGERVDGNRQIIGYVIGTQQATPGPAYSGREIIYPNASLLIQNIIQNDTGFYTLHVIKSDLVNEEATGQFRVYPELPKPSISSNNSKPVEDKDAVAFTCEPETQDATYLWWVNNQSLPVSPRLQLSNGNRTLTLFNVTRNDTASYKCETQNPVSARRSDSVILNVLYGPDAPTISPLNTSYRSGENLNLSCHAASNPPAQYSWFVNGTFQQSTQELFIPNITVNNSGSYTCQAHNSDTGLNRTTVTTITVYEPPKPFITSNNSNPVEDEDAVALTCEPEIQNTTYLWWVNNQSLPVSPRLQLSNDNRTLTLLSVTRNDVGPYECGIQNKLSVDHSDPVILNVLYGPDDPTISPSYTYYRPGAGERHEPGRQGLQ

SEQ ID NO: 2230 - protein, 443 aa, Artificial Sequence
  Synthetic polypeptide
MESPSAPPHRWCIPWQRLLLTASLLTFWNPPTTAKLTIESTPFNVAEGKEVLLLVHNLPQHLFGYSWYKGERVDGNRQIIGYVIGTQQATPGPAYSGREIIYPNASLLIQNIIQNDTGFYTLHVIKSDLVNEEATGQFRVYPELPKPSISSNNSKPVEDKDAVAFTCEPETQDATYLWWVNNQSLPVSPRLQLSNGNRTLTLFNVTRNDTASYKCETQNPVSARRSDSVILNVLYGPDAPTISPLNTSYRSGENLNLSCHAASNPPAQYSWFVNGTFQQSTQELFIPNITVNNSGSYTCQAHNSDTGLNRTTVTTITVYAEPPKPFITSNNSNPVEDEDAVALTCEPEIQNTTYLWWVNNQSLPVSPRLQLSNDNRTLTLLSVTRNDVGPYECGIQNKLSVDHSDPVILNVLYGPDDPTISPSYTYYRPGAGERHEPGRQGLQ

SEQ ID NO: 2231 - protein, 443 aa, Artificial Sequence; identical to SEQ ID NO: 2230
  Synthetic polypeptide

SEQ ID NO: 2232 - protein, 455 aa, Artificial Sequence
  Synthetic polypeptide
MESPSAPPHRWCIPWQRLLLTASLLTFWNPPTTAKLTIESTPFNVAEGKEVLLLVHNLPQHLFGYSWYKGERVDGNRQIIGYVIGTQQATPGPAYSGREIIYPNASLLIQNIIQNDTGFYTLHVIKSDLVNEEATGQFRVYPELPKPSISSNNSKPVEDKDAVAFTCEPETQDATYLWWVNNQSLPVSPRLQLSNGNRTLTLFNVTRNDTASYKCETQNPVSARRSDSVILNVLYGPDAPTISPLNTSYRSGENLNLSCHAASNPPAQYSWFVNGTFQQSTQELFIPNITVNNSGSYTCQAHNSDTGLNRTTVTTITVYEPPKPFITSNNSNPVEDEDAVALTCEPEIQNTTYLWWVNNQSLPVSPRLQLSNDNRTLTLLSVTRNDVGPYECGIQNKLSVDHSDPVILNVLYGPDDPTISPSYTYYRPGENGMNPGGRACSEPRSCRCTPAWETK

SEQ ID NO: 2233 - protein, 456 aa, Artificial Sequence
  Synthetic polypeptide
MESPSAPPHRWCIPWQRLLLTASLLTFWNPPTTAKLTIESTPFNVAEGKEVLLLVHNLPQHLFGYSWYKGERVDGNRQIIGYVIGTQQATPGPAYSGREIIYPNASLLIQNIIQNDTGFYTLHVIKSDLVNEEATGQFRVYPELPKPSISSNNSKPVEDKDAVAFTCEPETQDATYLWWVNNQSLPVSPRLQLSNGNRTLTLFNVTRNDTASYKCETQNPVSARRSDSVILNVLYGPDAPTISPLNTSYRSGENLNLSCHAASNPPAQYSWFVNGTFQQSTQELFIPNITVNNSGSYTCQAHNSDTGLNRTTVTTITVYAEPPKPFITSNNSNPVEDEDAVALTCEPEIQNTTYLWWVNNQSLPVSPRLQLSNDNRTLTLLSVTRNDVGPYECGIQNKLSVDHSDPVILNVLYGPDDPTISPSYTYYRPGENGMNPGGRACSEPRSCRCTPAWETK

SEQ ID NO: 2234 - protein, 456 aa, Artificial Sequence; identical to SEQ ID NO: 2233
  Synthetic polypeptide

SEQ ID NO: 2235 - protein, 46 aa, Artificial Sequence
  Synthetic polypeptide
PSSLLNPRRSMSQRGRRCFYLSTICPSIFLATAGTKVKEWMATVKL

SEQ ID NO: 2236 - protein, 540 aa, Artificial Sequence
  Synthetic polypeptide
MESPSAPPHRWCIPWQRLLLTASLLTFWNPPTTAKLTIESTPFNVAEGKEVLLLVHNLPQHLFGYSWYKGERVDGNRQIIGYVIGTQQATPGPAYSGREIIYPNASLLIQNIIQNDTGFYTLHVIKSDLVNEEATGQFRVYPELPKPSISSNNSKPVEDKDAVAFTCEPETQDATYLWWVNNQSLPVSPRLQLSNGNRTLTLFNVTRNDTASYKCETQNPVSARRSDSVILNVLYGPDAPTISPLNTSYRSGENLNLSCHAASNPPAQYSWFVNGTFQQSTQELFIPNITVNNSGSYTCQAHNSDTGLNRTTVTTITVYEPPKPFITSNNSNPVEDEDAVALTCEPEIQNTTYLWWVNNQSLPVSPRLQLSNDNRTLTLLSVTRNDVGPYECGIQNKLSVDHSDPVILNVLYGPDDPTISPSYTYYRPGVNLSLSCHAASNPPAQYSWLIDGNIQQHTQELFISNITEKNSGLYTCQANNSASGHSRTTVKTITVSAELPKPSISSNNSKPVEIAVSPDRTTALQSGNRARLHLKKKRKE

SEQ ID NO: 2237 - protein, 541 aa, Artificial Sequence
  Synthetic polypeptide
MESPSAPPHRWCIPWQRLLLTASLLTFWNPPTTAKLTIESTPFNVAEGKEVLLLVHNLPQHLFGYSWYKGERVDGNRQIIGYVIGTQQATPGPAYSGREIIYPNASLLIQNIIQNDTGFYTLHVIKSDLVNEEATGQFRVYPELPKPSISSNNSKPVEDKDAVAFTCEPETQDATYLWWVNNQSLPVSPRLQLSNGNRTLTLFNVTRNDTASYKCETQNPVSARRSDSVILNVLYGPDAPTISPLNTSYRSGENLNLSCHAASNPPAQYSWFVNGTFQQSTQELFIPNITVNNSGSYTCQAHNSDTGLNRTTVTTITVYAEPPKPFITSNNSNPVEDEDAVALTCEPEIQNTTYLWWVNNQSLPVSPRLQLSNDNRTLTLLSVTRNDVGPYECGIQNKLSVDHSDPVILNVLYGPDDPTISPSYTYYRPGVNLSLSCHAASNPPAQYSWLIDGNIQQHTQELFISNITEKNSGLYTCQANNSASGHSRTTVKTITVSAELPKPSISSNNSKPVEIAVSPDRTTALQSGNRARLHLKKKRKE

SEQ ID NO: 2238 - protein, 541 aa, Artificial Sequence; identical to SEQ ID NO: 2237
  Synthetic polypeptide

SEQ ID NO: 2239 - protein, 537 aa, Artificial Sequence
  Synthetic polypeptide
MESPSAPPHRWCIPWQRLLLTASLLTFWNPPTTAKLTIESTPFNVAEGKEVLLLVHNLPQHLFGYSWYKGERVDGNRQIIGYVIGTQQATPGPAYSGREIIYPNASLLIQNIIQNDTGFYTLHVIKSDLVNEEATGQFRVYPELPKPSISSNNSKPVEDKDAVAFTCEPETQDATYLWWVNNQSLPVSPRLQLSNGNRTLTLFNVTRNDTASYKCETQNPVSARRSDSVILNVLYGPDAPTISPLNTSYRSGENLNLSCHAASNPPAQYSWFVNGTFQQSTQELFIPNITVNNSGSYTCQAHNSDTGLNRTTVTTITVYEPPKPFITSNNSNPVEDEDAVALTCEPEIQNTTYLWWVNNQSLPVSPRLQLSNDNRTLTLLSVTRNDVGPYECGIQNKLSVDHSDPVILNVLYGPDDPTISPSYTYYRPGVNLSLSCHAASNPPAQYSWLIDGNIQQHTQELFISNITEKNSGLYTCQANNSASGHSRTTVKTITVSAELPKPSISSNNSKPVEDKDAVAFTCEPEAQNTTYLWWRLQ

SEQ ID NO: 2240 - protein, 538 aa, Artificial Sequence
  Synthetic polypeptide
MESPSAPPHRWCIPWQRLLLTASLLTFWNPPTTAKLTIESTPFNVAEGKEVLLLVHNLPQHLFGYSWYKGERVDGNRQIIGYVIGTQQATPGPAYSGREIIYPNASLLIQNIIQNDTGFYTLHVIKSDLVNEEATGQFRVYPELPKPSISSNNSKPVEDKDAVAFTCEPETQDATYLWWVNNQSLPVSPRLQLSNGNRTLTLFNVTRNDTASYKCETQNPVSARRSDSVILNVLYGPDAPTISPLNTSYRSGENLNLSCHAASNPPAQYSWFVNGTFQQSTQELFIPNITVNNSGSYTCQAHNSDTGLNRTTVTTITVYAEPPKPFITSNNSNPVEDEDAVALTCEPEIQNTTYLWWVNNQSLPVSPRLQLSNDNRTLTLLSVTRNDVGPYECGIQNKLSVDHSDPVILNVLYGPDDPTISPSYTYYRPGVNLSLSCHAASNPPAQYSWLIDGNIQQHTQELFISNITEKNSGLYTCQANNSASGHSRTTVKTITVSAELPKPSISSNNSKPVEDKDAVAFTCEPEAQNTTYLWWRLQ

SEQ ID NO: 2241 - protein, 538 aa, Artificial Sequence; identical to SEQ ID NO: 2240
  Synthetic polypeptide

SEQ ID NO: 2242 - protein, 218 aa, Artificial Sequence
  Synthetic polypeptide
MGPPSAPPCRLHVPWKEVLLTASLLTFWNPPTTAKLTIESTPFNVAEGKEVLLLAHNLPQNRIGYSWYKGERVDGNSLIVGYVIGTQQATPGPAYSGRETIYPNASLLIQNVTQNDTGFYTLQVIKSDLVNEEATGQFHVYPELPKPSISSNNSNPVEDKDAVAFTCEPEVCATQRLHLTRDRQTANHGEKLTTSHYGQLFPRCQNKTPHHDKALTPF

SEQ ID NO: 2243 - protein, 1053 aa, Artificial Sequence
  Synthetic polypeptide
MGDKKDDKDSPKKNKGKERRDLDDLKKEVAMTEHKMSVEEVCRKYNTDCVQGLTHSKAQEILARDGPNALTPPPTTPEWVKFCRQLFGGFSILLWIGAILCFLAYGIQAGTEDDPSGDNLYLGIVLAAVVIITGCFSYYQEAKSSKIMESFKNMVPQQALVIREGEKMQVNAEEVVVGDLVEIKGGDRVPADLRIISAHGCKVDNSSLTGESEPQTRSPDCTHDNPLETRNITFFSTNCVEGTARGVVVATGDRTVMGRIATLASGLEVGKTPIAIEIEHFIQLITGVAVFLGVSFFILSLILGYTWLEAVIFLIGIIVANVPEGLLATVTVCLTLTAKRMARKNCLVKNLEAVETLGSTSTICSDKTGTLTQNRMTVAHMWFDNQIHEADTTEDQSGTSFDKSSHTWVALSHIAGLCNRAVFKGGQDNIPVLKRDVAGDASESALLKCIELSSGSVKLMRERNKKVAEIPFNSTNKYQLSIHETEDPNDNRYLLVMKGAPERILDRCSTILLQGKEQPLDEEMKEAFQNAYLELGGLGERVLGFCHYYLPEEQFPKGFAFDCDDVNFTTDNLCFVGLMSMIDPPRAAVPDAVGKCRSAGIKVIMVTGDHPITAKAIAKGVGIISEGNETVEDIAARLNIPVSQVNPRDAKACVIHGTDLKDFTSEQIDEILQNHTEIVFARTSPQQKLIIVEGCQRQGAIVAVTGDGVNDSPALKKADIGVAMGIAGSDVSKQAADMILLDDNFASIVTGVEEGRLIFDNLKKSIAYTLTSNIPEITPFLLFIMANIPLPLGTITILCIDLGTDMVPAISLAYEAAESDIMKRQPRNPRTDKLVNERLISMAYGQIGMIQALGGFFSYFVILAENGFLPGNLVGIRLNWDDRTVNDLEDSYGQQWTYEQRKVVEFTCHTAFFVSIVVVQWADLIICKTRRNSVFQQGMKNKILIFGLFEETALAAFLSYCPGMDVALRMYPLKPSWWFCAFPYSFLIFVYDEIRKLILRRNPGGQARWLPPVIPALWEAQAGGSLEVRSTRPAWPTWRNPISTKNTKKKKKK

SEQ ID NO: 2244 - protein, 1053 aa, Artificial Sequence; identical to SEQ ID NO: 2243
  Synthetic polypeptide

SEQ ID NO: 2245 - protein, 1066 aa, Artificial Sequence
  Synthetic polypeptide
MGSGGSDSYRIATSQDKKDDKDSPKKNKGKERRDLDDLKKEVAMTEHKMSVEEVCRKYNTDCVQGLTHSKAQEILARDGPNALTPPPTTPEWVKFCRQLFGGFSILLWIGAILCFLAYGIQAGTEDDPSGDNLYLGIVLAAVVIITGCFSYYQEAKSSKIMESFKNMVPQQALVIREGEKMQVNAEEVVVGDLVEIKGGDRVPADLRIISAHGCKVDNSSLTGESEPQTRSPDCTHDNPLETRNITFFSTNCVEGTARGVVVATGDRTVMGRIATLASGLEVGKTPIAIEIEHFIQLITGVAVFLGVSFFILSLILGYTWLEAVIFLIGIIVANVPEGLLATVTVCLTLTAKRMARKNCLVKNLEAVETLGSTSTICSDKTGTLTQNRMTVAHMWFDNQIHEADTTEDQSGTSFDKSSHTWVALSHIAGLCNRAVFKGGQDNIPVLKRDVAGDASESALLKCIELSSGSVKLMRERNKKVAEIPFNSTNKYQLSIHETEDPNDNRYLLVMKGAPERILDRCSTILLQGKEQPLDEEMKEAFQNAYLELGGLGERVLGFCHYYLPEEQFPKGFAFDCDDVNFTTDNLCFVGLMSMIDPPRAAVPDAVGKCRSAGIKVIMVTGDHPITAKAIAKGVGIISEGNETVEDIAARLNIPVSQVNPRDAKACVIHGTDLKDFTSEQIDEILQNHTEIVFARTSPQQKLIIVEGCQRQGAIVAVTGDGVNDSPALKKADIGVAMGIAGSDVSKQAADMILLDDNFASIVTGVEEGRLIFDNLKKSIAYTLTSNIPEITPFLLFIMANIPLPLGTITILCIDLGTDMVPAISLAYEAAESDIMKRQPRNPRTDKLVNERLISMAYGQIGMIQALGGFFSYFVILAENGFLPGNLVGIRLNWDDRTVNDLEDSYGQQWTYEQRKVVEFTCHTAFFVSIVVVQWADLIICKTRRNSVFQQGMKNKILIFGLFEETALAAFLSYCPGMDVALRMYPLKPSWWFCAFPYSFLIFVYDEIRKLILRRNPGGQARWLPPVIPALWEAQAGGSLEVRSTRPAWPTWRNPISTKNTKKKKKK

SEQ ID NO: 2246 - protein, 1064 aa, Artificial Sequence
  Synthetic polypeptide
MGGWEEERNRRATDKKDDKDSPKKNKGKERRDLDDLKKEVAMTEHKMSVEEVCRKYNTDCVQGLTHSKAQEILARDGPNALTPPPTTPEWVKFCRQLFGGFSILLWIGAILCFLAYGIQAGTEDDPSGDNLYLGIVLAAVVIITGCFSYYQEAKSSKIMESFKNMVPQQALVIREGEKMQVNAEEVVVGDLVEIKGGDRVPADLRIISAHGCKVDNSSLTGESEPQTRSPDCTHDNPLETRNITFFSTNCVEGTARGVVVATGDRTVMGRIATLASGLEVGKTPIAIEIEHFIQLITGVAVFLGVSFFILSLILGYTWLEAVIFLIGIIVANVPEGLLATVTVCLTLTAKRMARKNCLVKNLEAVETLGSTSTICSDKTGTLTQNRMTVAHMWFDNQIHEADTTEDQSGTSFDKSSHTWVALSHIAGLCNRAVFKGGQDNIPVLKRDVAGDASESALLKCIELSSGSVKLMRERNKKVAEIPFNSTNKYQLSIHETEDPNDNRYLLVMKGAPERILDRCSTILLQGKEQPLDEEMKEAFQNAYLELGGLGERVLGFCHYYLPEEQFPKGFAFDCDDVNFTTDNLCFVGLMSMIDPPRAAVPDAVGKCRSAGIKVIMVTGDHPITAKAIAKGVGIISEGNETVEDIAARLNIPVSQVNPRDAKACVIHGTDLKDFTSEQIDEILQNHTEIVFARTSPQQKLIIVEGCQRQGAIVAVTGDGVNDSPALKKADIGVAMGIAGSDVSKQAADMILLDDNFASIVTGVEEGRLIFDNLKKSIAYTLTSNIPEITPFLLFIMANIPLPLGTITILCIDLGTDMVPAISLAYEAAESDIMKRQPRNPRTDKLVNERLISMAYGQIGMIQALGGFFSYFVILAENGFLPGNLVGIRLNWDDRTVNDLEDSYGQQWTYEQRKVVEFTCHTAFFVSIVVVQWADLIICKTRRNSVFQQGMKNKILIFGLFEETALAAFLSYCPGMDVALRMYPLKPSWWFCAFPYSFLIFVYDEIRKLILRRNPGGQARWLPPVIPALWEAQAGGSLEVRSTRPAWPTWRNPISTKNTKKKKKK

SEQ ID NO: 2247 - protein, 1023 aa, Artificial Sequence
  Synthetic polypeptide
MTEHKMSVEEVCRKYNTDCVQGLTHSKAQEILARDGPNALTPPPTTPEWVKFCRQLFGGFSILLWIGAILCFLAYGIQAGTEDDPSGDNLYLGIVLAAVVIITGCFSYYQEAKSSKIMESFKNMVPQQALVIREGEKMQVNAEEVVVGDLVEIKGGDRVPADLRIISAHGCKVDNSSLTGESEPQTRSPDCTHDNPLETRNITFFSTNCVEGTARGVVVATGDRTVMGRIATLASGLEVGKTPIAIEIEHFIQLITGVAVFLGVSFFILSLILGYTWLEAVIFLIGIIVANVPEGLLATVTVCLTLTAKRMARKNCLVKNLEAVETLGSTSTICSDKTGTLTQNRMTVAHMWFDNQIHEADTTEDQSGTSFDKSSHTWVALSHIAGLCNRAVFKGGQDNIPVLKRDVAGDASESALLKCIELSSGSVKLMRERNKKVAEIPFNSTNKYQLSIHETEDPNDNRYLLVMKGAPERILDRCSTILLQGKEQPLDEEMKEAFQNAYLELGGLGERVLGFCHYYLPEEQFPKGFAFDCDDVNFTTDNLCFVGLMSMIDPPRAAVPDAVGKCRSAGIKVIMVTGDHPITAKAIAKGVGIISEGNETVEDIAARLNIPVSQVNPRDAKACVIHGTDLKDFTSEQIDEILQNHTEIVFARTSPQQKLIIVEGCQRQGAIVAVTGDGVNDSPALKKADIGVAMGIAGSDVSKQAADMILLDDNFASIVTGVEEGRLIFDNLKKSIAYTLTSNIPEITPFLLFIMANIPLPLGTITILCIDLGTDMVPAISLAYEAAESDIMKRQPRNPRTDKLVNERLISMAYGQIGMIQALGGFFSYFVILAENGFLPGNLVGIRLNWDDRTVNDLEDSYGQQWTYEQRKVVEFTCHTAFFVSIVVVQWADLIICKTRRNSVFQQGMKNKILIFGLFEETALAAFLSYCPGMDVALRMYPLKPSWWFCAFPYSFLIFVYDEIRKLILRRNPGGQARWLPPVIPALWEAQAGGSLEVRSTRPAWPTWRNPISTKNTKKKKKK

SEQ ID NO: 2248 - protein, 419 aa, Artificial Sequence
  Synthetic polypeptide
MGTLSAPPCTQRIKWKGLLLTASLLNFWNLPTTAQVTIEAEPTKVSEGKDVLLLVHNLPQNLTGYIWYKGQMRDLYHYITSYVVDGEIIIYGPAYSGRETAYSNASLLIQNVTREDAGSYTLHIIKGDDGTRGVTGRFTFTLHLETPKPSISSSNLNPRETMEAVSLTCDPETPDASYLWWMNGQSLPMTHSLKLSETNRTLFLLGVTKYTAGPYECEIRNPVSASRSDPVTLNLLPKLPKPYITINNLNPRENKDVLNFTCEPKSENYTYIWWLNGQSLPVSPRVKRPIENRILILPSVTRNETGPYQCEIRDRYGGIRSDPVTLNVLYGPDLPRIYPSFTYYRSGEVLYLSCSADSNPPAQYSWTINEKFQLPGQKLFIRHITTKHSGLYVCSVRNSATGKESSKSMTVEVSDWTLP

SEQ ID NO: 2249 - protein, 419 aa, Artificial Sequence; identical to SEQ ID NO: 2248
  Synthetic polypeptide

SEQ ID NO: 2250 - protein, 419 aa, Artificial Sequence; identical to SEQ ID NO: 2248
  Synthetic polypeptide

SEQ ID NO: 2251 - protein, 419 aa, Artificial Sequence; identical to SEQ ID NO: 2248
  Synthetic polypeptide

SEQ ID NO: 2252 - protein, 326 aa, Artificial Sequence
  Synthetic polypeptide
MGTLSAPPCTQRIKWKGLLLTASLLNFWNLPTTAQVTIEAEPTKVSEGKDVLLLVHNLPQNLTGYIWYKGQMRDLYHYITSYVVDGEIIIYGPAYSGRETAYSNASLLIQNVTREDAGSYTLHIIKGDDGTRGVTGRFTFTLHPKLPKPYITINNLNPRENKDVLNFTCEPKSENYTYIWWLNGQSLPVSPRVKRPIENRILILPSVTRNETGPYQCEIRDRYGGIRSDPVTLNVLYGPDLPRIYPSFTYYRSGEVLYLSCSADSNPPAQYSWTINEKFQLPGQKLFIRHITTKHSGLYVCSVRNSATGKESSKSMTVEVSDWTLP

SEQ ID NO: 2253 - protein, 326 aa, Artificial Sequence; identical to SEQ ID NO: 2252
  Synthetic polypeptide

SEQ ID NO: 2254 - protein, 6 aa, Artificial Sequence
  Synthetic polypeptide
IICSRR

SEQ ID NO: 2255 - protein, 326 aa, Artificial Sequence
  Synthetic polypeptide
MGPLSAPPCTQHITWKGLLLTASLLNFWNLPITAQVTIEALPPKVSEGKDVLLLVHNLPQNLAGYIWYKGQLMDLYHYITSYVVDGQINIYGPAYTGRETVYSNASLLIQNVTREDAGSYTLHIIKRGDRTRGVTGYFTFNLYLKLPKPYITINNSKPRENKDVLAFTCEPKSENYTYIWWLNGQSLPVSPRVKRPIENRILILPSVTRNETGPYECEIRDRDGGMRSDPVTLNVLYGPDLPSIYPSFTYYRSGENLYLSCFAESNPPAEYFWTINGKFQQSGQKLSIPQITTKHRGLYTCSVRNSATGKESSKSMTVEVSDWTLP

SEQ ID NO: 2256 - protein, 326 aa, Artificial Sequence; identical to SEQ ID NO: 2255
  Synthetic polypeptide

SEQ ID NO: 2257 - protein, 326 aa, Artificial Sequence; identical to SEQ ID NO: 2255
  Synthetic polypeptide

SEQ ID NO: 2258 - protein, 326 aa, Artificial Sequence; identical to SEQ ID NO: 2255
  Synthetic polypeptide

SEQ ID NO: 2259 - protein, 419 aa, Artificial Sequence
  Synthetic polypeptide
MGPLSAPPCTQHITWKGLLLTASLLNFWNLPITAQVTIEALPPKVSEGKDVLLLVHNLPQNLAGYIWYKGQLMDLYHYITSYVVDGQINIYGPAYTGRETVYSNASLLIQNVTREDAGSYTLHIIKRGDRTRGVTGYFTFNLYLETPKPSISSSNLNPREAMEAVILTCDPAASDTSYLWWMNGQSLPMTHRLQLSKTNRTLFIFGVTKYIAGPYECEIRNPVSASHSDPVTLNLLLKLPKPYITINNSKPRENKDVLAFTCEPKSENYTYIWWLNGQSLPVSPRVKRPIENRILILPSVTRNETGPYECEIRDRDGGMRSDPVTLNVLYGPDLPSIYPSFTYYRSGENLYLSCFAESNPPAEYFWTINGKFQQSGQKLSIPQITTKHRGLYTCSVRNSATGKESSKSMTVEVSDWTLP

SEQ ID NO: 2260 - protein, 326 aa, Artificial Sequence; identical to SEQ ID NO: 2255
  Synthetic polypeptide

SEQ ID NO: 2261 - protein, 326 aa, Artificial Sequence; identical to SEQ ID NO: 2255
  Synthetic polypeptide

SEQ ID NO: 2262 - protein, 326 aa, Artificial Sequence; identical to SEQ ID NO: 2255
  Synthetic polypeptide

SEQ ID NO: 2263 - protein, 326 aa, Artificial Sequence; identical to SEQ ID NO: 2255
  Synthetic polypeptide

SEQ ID NO: 2264 - protein, 419 aa, Artificial Sequence; identical to SEQ ID NO: 2259
  Synthetic polypeptide

SEQ ID NO: 2265 - protein, 326 aa, Artificial Sequence; identical to SEQ ID NO: 2255
  Synthetic polypeptide

SEQ ID NO: 2266 - protein, 326 aa, Artificial Sequence; identical to SEQ ID NO: 2255
  Synthetic polypeptide

SEQ ID NO: 2267 - protein, 326 aa, Artificial Sequence; identical to SEQ ID NO: 2255
  Synthetic polypeptide

SEQ ID NO: 2268 - protein, 326 aa, Artificial Sequence; identical to SEQ ID NO: 2255
  Synthetic polypeptide

SEQ ID NO: 2269 - protein, 419 aa, Artificial Sequence; identical to SEQ ID NO: 2259
  Synthetic polypeptide

SEQ ID NO: 2270 - protein, 336 aa, Artificial Sequence
  Synthetic polypeptide
MGRARRFQWPLLLLWAAAAGPGAGQEVQTENVTVAEGGVAEITCRLHQYDGSIVVIQNPARQTLFFNGTRALKDERFQLEEFSPRRVRIRLSDARLEDEGGYFCQLYTEDTHHQIATLTVLVAPENPVVEVREQAVEGGEVELSCLVPRSRPAATLRWYRDRKELKGVSSSQENGKVWSVASTVRFRVDRKDDGGIIICEAQNQALPSGHSKQTQYVLDVQYSPTARIHASQAVVREGDTLVLTCAVTGNPRPNQIRWNRGNESLPERAEAVGETLTLPGLVSADNGTYTCEASNKHGHARALYVLVVYGNRTCLRLSLPISKVEINNSTYITRLL

SEQ ID NO: 2271 - protein, 325 aa, Artificial Sequence
  Synthetic polypeptide
MGRARRFQWPLLLLWAAAAGPGAGQEVQTENVTVAEGGVAEITCRLHQYDGSIVVIQNPARQTLFFNGTRALKDERFQLEEFSPRRVRIRLSDARLEDEGGYFCQLYTEDTHHQIATLTVLVAPENPVVEVREQAVEGGEVELSCLVPRSRPAATLRWYRDRKELKGVSSSQENGKVWSVASTVRFRVDRKDDGGIIICEAQNQALPSGHSKQTQYVLDVQYSPTARIHASQAVVREGDTLVLTCAVTGNPRPNQIRWNRGNESLPERAEAVGETLTLPGLVSADNGTYTCEASNKHGHARALYVLVVYDWPAGLKFGLAAFYCR

SEQ ID NO: 2272 - protein, 194 aa, Artificial Sequence
  Synthetic polypeptide
MIDSGEKKPGRRAEEAVTFKDVAVIFTEEELGLLDPAQRKLYRDVMLENFRNLLSVGHQPFHGDTFHFLREEKFWVMGTTSQREGNLGTILLSLELCHSGLCKFPKVGGKMTMSKEAVTFKDVAVVFTEEELGLLDLAQRKLYRDVMLENFRNLLSVGHQPFHRDTFHFLREEKFWMMDIATQREGNSVYAGVC

SEQ ID NO: 2273 - protein, 84 aa, Artificial Sequence
  Synthetic polypeptide
MTMSKEAVTFKDVAVVFTEEELGLLDLAQRKLYRDVMLENFRNLLSVGHQPFHRDTFHFLREEKFWMMDIATQREGNSVYAGVC

SEQ ID NO: 2274 - protein, 84 aa, Artificial Sequence; identical to SEQ ID NO: 2273
  Synthetic polypeptide

SEQ ID NO: 2275 - protein, 84 aa, Artificial Sequence; identical to SEQ ID NO: 2273
  Synthetic polypeptide

SEQ ID NO: 2276 - protein, 48 aa, Artificial Sequence
  Synthetic polypeptide
MLENFRNLLSVGHQPFHRDTFHFLREEKFWMMDIATQREGNSVYAGVC

SEQ ID NO: 2277 - protein, 180 aa, Artificial Sequence
  Synthetic polypeptide
MEPPDAPAQARGAPRLLLLAVLLAAHPDAQAEVRLSVPPLVEVMRGKSVILDCTPTGTHDHYMLEWFLTDRSGARPRLASAEMQGSELQVTMHDTRGRSPPYQLDSQGRLVLAEAQVGDERDYVCVVRAGAAGTAEATARLNVFAKPEATEVSPNKGTLSVMEDSAQEIQKLAGCVGVQL

SEQ ID NO: 2278 - protein, 180 aa, Artificial Sequence; identical to SEQ ID NO: 2277
  Synthetic polypeptide

SEQ ID NO: 2279 - protein, 159 aa, Artificial Sequence
  Synthetic polypeptide
MEPPDAPAQARGAPRLLLLAVLLAAHPDAQAEVRLSVPPLVEVMRGKSVILDCTPTGTHDHYMLEWFLVTMHDTRGRSPPYQLDSQGRLVLAEAQVGDERDYVCVVRAGAAGTAEATARLNVFAKPEATEVSPNKGTLSVMEDSAQEIQKLAGCVGVQL

SEQ ID NO: 2280 - protein, 169 aa, Artificial Sequence
  Synthetic polypeptide
MEPPDAPAQARGAPRLLLLAVLLAAHPDAQAEVRLSVPPLVEVMRGKSVILDCTPTGTHDHYMLEWFLTDRSGARPRLASAEMQGSELQVTMHDTRGRSPPYQLDSQGRLVLAEAQVGDERDYVCVVRAGAAGTAEATARLNVFAKPEATEVSPNKGTLSVMEDSAQEG

SEQ ID NO: 2281 - protein, 169 aa, Artificial Sequence; identical to SEQ ID NO: 2280
  Synthetic polypeptide

SEQ ID NO: 2282 - protein, 148 aa, Artificial Sequence
  Synthetic polypeptide
MEPPDAPAQARGAPRLLLLAVLLAAHPDAQAEVRLSVPPLVEVMRGKSVILDCTPTGTHDHYMLEWFLVTMHDTRGRSPPYQLDSQGRLVLAEAQVGDERDYVCVVRAGAAGTAEATARLNVFAKPEATEVSPNKGTLSVMEDSAQEG

SEQ ID NO: 2283 - protein, 194 aa, Artificial Sequence
  Synthetic polypeptide
MEPPDAPAQARGAPRLLLLAVLLAAHPDAQAEVRLSVPPLVEVMRGKSVILDCTPTGTHDHYMLEWFLTDRSGARPRLASAEMQGSELQVTMHDTRGRSPPYQLDSQGRLVLAEAQVGDERDYVCVVRAGAAGTAEATARLNVFAKPEATEVSPNKGTLSVMEDSAQEIATCNSRNGNPAPKITWYRNGQRLEG

SEQ ID NO: 2284 - protein, 194 aa, Artificial Sequence; identical to SEQ ID NO: 2283
  Synthetic polypeptide

SEQ ID NO: 2285 - protein, 173 aa, Artificial Sequence
  Synthetic polypeptide
MEPPDAPAQARGAPRLLLLAVLLAAHPDAQAEVRLSVPPLVEVMRGKSVILDCTPTGTHDHYMLEWFLVTMHDTRGRSPPYQLDSQGRLVLAEAQVGDERDYVCVVRAGAAGTAEATARLNVFAKPEATEVSPNKGTLSVMEDSAQEIATCNSRNGNPAPKITWYRNGQRLEG

SEQ ID NO: 2286 - protein, 217 aa, Artificial Sequence
  Synthetic polypeptide
MEPPDAPAQARGAPRLLLLAVLLAAHPDAQAEVRLSVPPLVEVMRGKSVILDCTPTGTHDHYMLEWFLTDRSGARPRLASAEMQGSELQVTMHDTRGRSPPYQLDSQGRLVLAEAQVGDERDYVCVVRAGAAGTAEATARLNVFAKPEATEVSPNKGTLSVMEDSAQEIATCNSRNGNPAPKITWYRNGQRLEVPVEMNPGPSPNPSPSQTQHHPLP

SEQ ID NO: 2287 - protein, 217 aa, Artificial Sequence; identical to SEQ ID NO: 2286
  Synthetic polypeptide

SEQ ID NO: 2288 - protein, 196 aa, Artificial Sequence
  Synthetic polypeptide
MEPPDAPAQARGAPRLLLLAVLLAAHPDAQAEVRLSVPPLVEVMRGKSVILDCTPTGTHDHYMLEWFLVTMHDTRGRSPPYQLDSQGRLVLAEAQVGDERDYVCVVRAGAAGTAEATARLNVFAKPEATEVSPNKGTLSVMEDSAQEIATCNSRNGNPAPKITWYRNGQRLEVPVEMNPGPSPNPSPSQTQHHPLP

SEQ ID NO: 2289 - protein, 201 aa, Artificial Sequence
  Synthetic polypeptide
MEPPDAPAQARGAPRLLLLAVLLAAHPDAQAEVRLSVPPLVEVMRGKSVILDCTPTGTHDHYMLEWFLTDRSGARPRLASAEMQGSELQVTMHDTRGRSPPYQLDSQGRLVLAEAQVGDERDYVCVVRAGAAGTAEATARLNVFAKPEATEVSPNKGTLSVMEDSAQEIATCNSRNGNPAPKITWYRNGQRLEVPVEMNPG

SEQ ID NO: 2290 - protein, 201 aa, Artificial Sequence; identical to SEQ ID NO: 2289
  Synthetic polypeptide

SEQ ID NO: 2291 - protein, 180 aa, Artificial Sequence
  Synthetic polypeptide
MEPPDAPAQARGAPRLLLLAVLLAAHPDAQAEVRLSVPPLVEVMRGKSVILDCTPTGTHDHYMLEWFLVTMHDTRGRSPPYQLDSQGRLVLAEAQVGDERDYVCVVRAGAAGTAEATARLNVFAKPEATEVSPNKGTLSVMEDSAQEIATCNSRNGNPAPKITWYRNGQRLEVPVEMNPG

SEQ ID NO: 2292 - protein, 275 aa, Artificial Sequence
  Synthetic polypeptide
MEPPDAPAQARGAPRLLLLAVLLAAHPDAQAEVRLSVPPLVEVMRGKSVILDCTPTGTHDHYMLEWFLTDRSGARPRLASAEMQGSELQVTMHDTRGRSPPYQLDSQGRLVLAEAQVGDERDYVCVVRAGAAGTAEATARLNVFAKPEATEVSPNKGTLSVMEDSAQEIATCNSRNGNPAPKITWYRNGQRLEVPVEMNPEGYMTSRTVREASGLLSLTSTLYLRLRKDDRDASFHCAAHYSLPEGRHGRLDSPTFHLTLHYPTEHVQFWVGSPG

SEQ ID NO: 2293 - protein, 275 aa, Artificial Sequence; identical to SEQ ID NO: 2292
  Synthetic polypeptide

SEQ ID NO: 2294 - protein, 254 aa, Artificial Sequence
  Synthetic polypeptide
MEPPDAPAQARGAPRLLLLAVLLAAHPDAQAEVRLSVPPLVEVMRGKSVILDCTPTGTHDHYMLEWFLVTMHDTRGRSPPYQLDSQGRLVLAEAQVGDERDYVCVVRAGAAGTAEATARLNVFAKPEATEVSPNKGTLSVMEDSAQEIATCNSRNGNPAPKITWYRNGQRLEVPVEMNPEGYMTSRTVREASGLLSLTSTLYLRLRKDDRDASFHCAAHYSLPEGRHGRLDSPTFHLTLHYPTEHVQFWVGSPG

SEQ ID NO: 2295 - protein, 358 aa, Artificial Sequence
  Synthetic polypeptide
MEPPDAPAQARGAPRLLLLAVLLAAHPDAQAEVRLSVPPLVEVMRGKSVILDCTPTGTHDHYMLEWFLTDRSGARPRLASAEMQGSELQVTMHDTRGRSPPYQLDSQGRLVLAEAQVGDERDYVCVVRAGAAGTAEATARLNVFAKPEATEVSPNKGTLSVMEDSAQEIATCNSRNGNPAPKITWYRNGQRLEVPVEMNPEGYMTSRTVREASGLLSLTSTLYLRLRKDDRDASFHCAAHYSLPEGRHGRLDSPTFHLTLHYPTEHVQFWVGSPSTPAGWVREGDTVQLLCRGDGSPSPEYTLFRLQDEQEEVLNVNLEGNLTLEGVTRGQSGTYGCRVEDYDAADDVQLSKTLELRG

SEQ ID NO: 2296 - protein, 358 aa, Artificial Sequence; identical to SEQ ID NO: 2295
  Synthetic polypeptide

SEQ ID NO: 2297 - protein, 507 aa, Artificial Sequence
  Synthetic polypeptide
MEPPDAPAQARGAPRLLLLAVLLAAHPDAQAEVRLSVPPLVEVMRGKSVILDCTPTGTHDHYMLEWFLTDRSGARPRLASAEMQGSELQVTMHDTRGRSPPYQLDSQGRLVLAEAQVGDERDYVCVVRAGAAGTAEATARLNVFAKPEATEVSPNKGTLSVMEDSAQEIATCNSRNGNPAPKITWYRNGQRLEVPVEMNPEGYMTSRTVREASGLLSLTSTLYLRLRKDDRDASFHCAAHYSLPEGRHGRLDSPTFHLTLHYPTEHVQFWVGSPSTPAGWVREGDTVQLLCRGDGSPSPEYTLFRLQDEQEEVLNVNLEGNLTLEGVTRGQSGTYGCRVEDYDAADDVQLSKTLELRVAYLDPLELSEGKVLSLPLNSSAVVNCSVHGLPTPALRWTKDSTPLGDGPMLSLSSITFDSNGTYVCEASLPTVPVLSRTQNFTLLVQGSPELKTAEIEPKADGSWREGDEVTLICSARGHPDPKLSWSQLGGSPAEPIPGRQGWVGGRG

SEQ ID NO: 2298 - protein, 507 aa, Artificial Sequence; identical to SEQ ID NO: 2297
  Synthetic polypeptide

SEQ ID NO: 2299 - protein, 540 aa, Artificial Sequence
  Synthetic polypeptide
MEPPDAPAQARGAPRLLLLAVLLAAHPDAQAEVRLSVPPLVEVMRGKSVILDCTPTGTHDHYMLEWFLTDRSGARPRLASAEMQGSELQVTMHDTRGRSPPYQLDSQGRLVLAEAQVGDERDYVCVVRAGAAGTAEATARLNVFAKPEATEVSPNKGTLSVMEDSAQEIATCNSRNGNPAPKITWYRNGQRLEVPVEMNPEGYMTSRTVREASGLLSLTSTLYLRLRKDDRDASFHCAAHYSLPEGRHGRLDSPTFHLTLHYPTEHVQFWVGSPSTPAGWVREGDTVQLLCRGDGSPSPEYTLFRLQDEQEEVLNVNLEGNLTLEGVTRGQSGTYGCRVEDYDAADDVQLSKTLELRVAYLDPLELSEGKVLSLPLNSSAVVNCSVHGLPTPALRWTKDSTPLGDGPMLSLSSITFDSNGTYVCEASLPTVPVLSRTQNFTLLVQGSPELKTAEIEPKADGSWREGDEVTLICSARGHPDPKLSWSQLGGSPAEPIPGRQGWVSSSLTLKVTSALSRDGISCEASNPHGNKRHVFHFGTG

SEQ ID NO: 2300 - protein, 540 aa, Artificial Sequence; identical to SEQ ID NO: 2299
  Synthetic polypeptide

SEQ ID NO: 2301 - protein, 549 aa, Artificial Sequence
  Synthetic polypeptide
MEPPDAPAQARGAPRLLLLAVLLAAHPDAQAEVRLSVPPLVEVMRGKSVILDCTPTGTHDHYMLEWFLTDRSGARPRLASAEMQGSELQVTMHDTRGRSPPYQLDSQGRLVLAEAQVGDERDYVCVVRAGAAGTAEATARLNVFAKPEATEVSPNKGTLSVMEDSAQEIATCNSRNGNPAPKITWYRNGQRLEVPVEMNPEGYMTSRTVREASGLLSLTSTLYLRLRKDDRDASFHCAAHYSLPEGRHGRLDSPTFHLTLHYPTEHVQFWVGSPSTPAGWVREGDTVQLLCRGDGSPSPEYTLFRLQDEQEEVLNVNLEGNLTLEGVTRGQSGTYGCRVEDYDAADDVQLSKTLELRVAYLDPLELSEGKVLSLPLNSSAVVNCSVHGLPTPALRWTKDSTPLGDGPMLSLSSITFDSNGTYVCEASLPTVPVLSRTQNFTLLVQGSPELKTAEIEPKADGSWREGDEVTLICSARGHPDPKLSWSQLGGSPAEPIPGRQGWVSSSLTLKVTSALSRDGISCEASNPHGNKRHVFHFGTVSPQTSQAGG

SEQ ID NO: 2302 - protein, 549 aa, Artificial Sequence; identical to SEQ ID NO: 2301
  Synthetic polypeptide

SEQ ID NO: 2303 - protein, 554 aa, Artificial Sequence
  Synthetic polypeptide
MEPPDAPAQARGAPRLLLLAVLLAAHPDAQAEVRLSVPPLVEVMRGKSVILDCTPTGTHDHYMLEWFLTDRSGARPRLASAEMQGSELQVTMHDTRGRSPPYQLDSQGRLVLAEAQVGDERDYVCVVRAGAAGTAEATARLNVFAKPEATEVSPNKGTLSVMEDSAQEIATCNSRNGNPAPKITWYRNGQRLEVPVEMNPEGYMTSRTVREASGLLSLTSTLYLRLRKDDRDASFHCAAHYSLPEGRHGRLDSPTFHLTLHYPTEHVQFWVGSPSTPAGWVREGDTVQLLCRGDGSPSPEYTLFRLQDEQEEVLNVNLEGNLTLEGVTRGQSGTYGCRVEDYDAADDVQLSKTLELRVAYLDPLELSEGKVLSLPLNSSAVVNCSVHGLPTPALRWTKDSTPLGDGPMLSLSSITFDSNGTYVCEASLPTVPVLSRTQNFTLLVQGSPELKTAEIEPKADGSWREGDEVTLICSARGHPDPKLSWSQLGGSPAEPIPGRQGWVSSSLTLKVTSALSRDGISCEASNPHGNKRHVFHFGTVSPQTSQAGVAVMAG

SEQ ID NO: 2304 - protein, 554 aa, Artificial Sequence; identical to SEQ ID NO: 2303
  Synthetic polypeptide

SEQ ID NO: 2305 - protein, 602 aa, Artificial Sequence
  Synthetic polypeptide
MEPPDAPAQARGAPRLLLLAVLLAAHPDAQAEVRLSVPPLVEVMRGKSVILDCTPTGTHDHYMLEWFLTDRSGARPRLASAEMQGSELQVTMHDTRGRSPPYQLDSQGRLVLAEAQVGDERDYVCVVRAGAAGTAEATARLNVFAKPEATEVSPNKGTLSVMEDSAQEIATCNSRNGNPAPKITWYRNGQRLEVPVEMNPEGYMTSRTVREASGLLSLTSTLYLRLRKDDRDASFHCAAHYSLPEGRHGRLDSPTFHLTLHYPTEHVQFWVGSPSTPAGWVREGDTVQLLCRGDGSPSPEYTLFRLQDEQEEVLNVNLEGNLTLEGVTRGQSGTYGCRVEDYDAADDVQLSKTLELRVAYLDPLELSEGKVLSLPLNSSAVVNCSVHGLPTPALRWTKDSTPLGDGPMLSLSSITFDSNGTYVCEASLPTVPVLSRTQNFTLLVQGSPELKTAEIEPKADGSWREGDEVTLICSARGHPDPKLSWSQLGGSPAEPIPGRQGWVSSSLTLKVTSALSRDGISCEASNPHGNKRHVFHFGTVSPQTSQAGVAVMAVAVSVGLLLLVVAVFYCVRRKGGPCCRQRREKGAPRILVPPTPILSSSP

SEQ ID NO: 2306 - protein, 602 aa, Artificial Sequence; identical to SEQ ID NO: 2305
  Synthetic polypeptide

SEQ ID NO: 2307 - protein, 589 aa, Artificial Sequence
  Synthetic polypeptide
MEPPDAPAQARGAPRLLLLAVLLAAHPDAQAEVRLSVPPLVEVMRGKSVILDCTPTGTHDHYMLEWFLTDRSGARPRLASAEMQGSELQVTMHDTRGRSPPYQLDSQGRLVLAEAQVGDERDYVCVVRAGAAGTAEATARLNVFAKPEATEVSPNKGTLSVMEDSAQEIATCNSRNGNPAPKITWYRNGQRLEVPVEMNPEGYMTSRTVREASGLLSLTSTLYLRLRKDDRDASFHCAAHYSLPEGRHGRLDSPTFHLTLHYPTEHVQFWVGSPSTPAGWVREGDTVQLLCRGDGSPSPEYTLFRLQDEQEEVLNVNLEGNLTLEGVTRGQSGTYGCRVEDYDAADDVQLSKTLELRVAYLDPLELSEGKVLSLPLNSSAVVNCSVHGLPTPALRWTKDSTPLGDGPMLSLSSITFDSNGTYVCEASLPTVPVLSRTQNFTLLVQGSPELKTAEIEPKADGSWREGDEVTLICSARGHPDPKLSWSQLGGSPAEPIPGRQGWVSSSLTLKVTSALSRDGISCEASNPHGNKRHVFHFGTVSPQTSQAGVAVMAVAVSVGLLLLVVAVFYCVRRKGGPCCRQRREKGAPG

SEQ ID NO: 2308 - protein, 589 aa, Artificial Sequence; identical to SEQ ID NO: 2307
  Synthetic polypeptide

SEQ ID NO: 2309 - protein, 622 aa, Artificial Sequence
  Synthetic polypeptide
MEPPDAPAQARGAPRLLLLAVLLAAHPDAQAEVRLSVPPLVEVMRGKSVILDCTPTGTHDHYMLEWFLTDRSGARPRLASAEMQGSELQVTMHDTRGRSPPYQLDSQGRLVLAEAQVGDERDYVCVVRAGAAGTAEATARLNVFAKPEATEVSPNKGTLSVMEDSAQEIATCNSRNGNPAPKITWYRNGQRLEVPVEMNPEGYMTSRTVREASGLLSLTSTLYLRLRKDDRDASFHCAAHYSLPEGRHGRLDSPTFHLTLHYPTEHVQFWVGSPSTPAGWVREGDTVQLLCRGDGSPSPEYTLFRLQDEQEEVLNVNLEGNLTLEGVTRGQSGTYGCRVEDYDAADDVQLSKTLELRVAYLDPLELSEGKVLSLPLNSSAVVNCSVHGLPTPALRWTKDSTPLGDGPMLSLSSITFDSNGTYVCEASLPTVPVLSRTQNFTLLVQGSPELKTAEIEPKADGSWREGDEVTLICSARGHPDPKLSWSQLGGSPAEPIPGRQGWVSSSLTLKVTSALSRDGISCEASNPHGNKRHVFHFGTVSPQTSQAGVAVMAVAVSVGLLLLVVAVFYCVRRKGGPCCRQRREKGAPPPGEPGLSHSGSEQPEQTGLLMGGKEREGGWVGG

SEQ ID NO: 2310 - protein, 621 aa, Artificial Sequence
  Synthetic polypeptide
MEPPDAPAQARGAPRLLLLAVLLAAHPDAQAEVRLSVPPLVEVMRGKSVILDCTPTGTHDHYMLEWFLTDRSGARPRLASAEMQGSELQVTMHDTRGRSPPYQLDSQGRLVLAEAQVGDERDYVCVVRAGAAGTAEATARLNVFAKPEATEVSPNKGTLSVMEDSAQEIATCNSRNGNPAPKITWYRNGQRLEVPVEMNPEGYMTSRTVREASGLLSLTSTLYLRLRKDDRDASFHCAAHYSLPEGRHGRLDSPTFHLTLHYPTEHVQFWVGSPSTPAGWVREGDTVQLLCRGDGSPSPEYTLFRLQDEQEEVLNVNLEGNLTLEGVTRGQSGTYGCRVEDYDAADDVQLSKTLELRVAYLDPLELSEGKVLSLPLNSSAVVNCSVHGLPTPALRWTKDSTPLGDGPMLSLSSITFDSNGTYVCEASLPTVPVLSRTQNFTLLVQGSPELKTAEIEPKADGSWREGDEVTLICSARGHPDPKLSWSQLGGSPAEPIPGRQGWVSSSLTLKVTSALSRDGISCEASNPHGNKRHVFHFGTVSPQTSQAGVAVMAVAVSVGLLLLVVAVFYCVRRKGGPCCRQRREKGAPPPGEPGLSHSGSEQPEQTGLLMGGEGGWVGGRG

SEQ ID NO: 2311 - protein, 618 aa, Artificial Sequence
  Synthetic polypeptide
MEPPDAPAQARGAPRLLLLAVLLAAHPDAQAEVRLSVPPLVEVMRGKSVILDCTPTGTHDHYMLEWFLTDRSGARPRLASAEMQGSELQVTMHDTRGRSPPYQLDSQGRLVLAEAQVGDERDYVCVVRAGAAGTAEATARLNVFAKPEATEVSPNKGTLSVMEDSAQEIATCNSRNGNPAPKITWYRNGQRLEVPVEMNPEGYMTSRTVREASGLLSLTSTLYLRLRKDDRDASFHCAAHYSLPEGRHGRLDSPTFHLTLHYPTEHVQFWVGSPSTPAGWVREGDTVQLLCRGDGSPSPEYTLFRLQDEQEEVLNVNLEGNLTLEGVTRGQSGTYGCRVEDYDAADDVQLSKTLELRVAYLDPLELSEGKVLSLPLNSSAVVNCSVHGLPTPALRWTKDSTPLGDGPMLSLSSITFDSNGTYVCEASLPTVPVLSRTQNFTLLVQGSPELKTAEIEPKADGSWREGDEVTLICSARGHPDPKLSWSQLGGSPAEPIPGRQGWVSSSLTLKVTSALSRDGISCEASNPHGNKRHVFHFGTVSPQTSQAGVAVMAVAVSVGLLLLVVAVFYCVRRKGGPCCRQRREKGAPPPGEPGLSHSGSEQPEQTGLLMGGWVGGRG

SEQ ID NO: 2312 - protein, 612 aa, Artificial Sequence
  Synthetic polypeptide
MEPPDAPAQARGAPRLLLLAVLLAAHPDAQAEVRLSVPPLVEVMRGKSVILDCTPTGTHDHYMLEWFLTDRSGARPRLASAEMQGSELQVTMHDTRGRSPPYQLDSQGRLVLAEAQVGDERDYVCVVRAGAAGTAEATARLNVFAKPEATEVSPNKGTLSVMEDSAQEIATCNSRNGNPAPKITWYRNGQRLEVPVEMNPEGYMTSRTVREASGLLSLTSTLYLRLRKDDRDASFHCAAHYSLPEGRHGRLDSPTFHLTLHYPTEHVQFWVGSPSTPAGWVREGDTVQLLCRGDGSPSPEYTLFRLQDEQEEVLNVNLEGNLTLEGVTRGQSGTYGCRVEDYDAADDVQLSKTLELRVAYLDPLELSEGKVLSLPLNSSAVVNCSVHGLPTPALRWTKDSTPLGDGPMLSLSSITFDSNGTYVCEASLPTVPVLSRTQNFTLLVQGSPELKTAEIEPKADGSWREGDEVTLICSARGHPDPKLSWSQLGGSPAEPIPGRQGWVSSSLTLKVTSALSRDGISCEASNPHGNKRHVFHFGTVSPQTSQAGVAVMAVAVSVGLLLLVVAVFYCVRRKGGPCCRQRREKGAPPPGEPGLSHSGSEQPEQTGLLMGG

SEQ ID NO: 2313 - protein, 625 aa, Artificial Sequence
  Synthetic polypeptide
MEPPDAPAQARGAPRLLLLAVLLAAHPDAQAEVRLSVPPLVEVMRGKSVILDCTPTGTHDHYMLEWFLTDRSGARPRLASAEMQGSELQVTMHDTRGRSPPYQLDSQGRLVLAEAQVGDERDYVCVVRAGAAGTAEATARLNVFAKPEATEVSPNKGTLSVMEDSAQEIATCNSRNGNPAPKITWYRNGQRLEVPVEMNPEGYMTSRTVREASGLLSLTSTLYLRLRKDDRDASFHCAAHYSLPEGRHGRLDSPTFHLTLHYPTEHVQFWVGSPSTPAGWVREGDTVQLLCRGDGSPSPEYTLFRLQDEQEEVLNVNLEGNLTLEGVTRGQSGTYGCRVEDYDAADDVQLSKTLELRVAYLDPLELSEGKVLSLPLNSSAVVNCSVHGLPTPALRWTKDSTPLGDGPMLSLSSITFDSNGTYVCEASLPTVPVLSRTQNFTLLVQGSPELKTAEIEPKADGSWREGDEVTLICSARGHPDPKLSWSQLGGSPAEPIPGRQGWVSSSLTLKVTSALSRDGISCEASNPHGNKRHVFHFGTVSPQTSQAGVAVMAVAVSVGLLLLVVAVFYCVRRKGGPCCRQRREKGAPPPGEPGLSHSGSEQPEQTGLLMGGASGGARGWVGGRG

SEQ ID NO: 2314 - protein, 619 aa, Artificial Sequence
  Synthetic polypeptide
MEPPDAPAQARGAPRLLLLAVLLAAHPDAQAEVRLSVPPLVEVMRGKSVILDCTPTGTHDHYMLEWFLTDRSGARPRLASAEMQGSELQVTMHDTRGRSPPYQLDSQGRLVLAEAQVGDERDYVCVVRAGAAGTAEATARLNVFAKPEATEVSPNKGTLSVMEDSAQEIATCNSRNGNPAPKITWYRNGQRLEVPVEMNPEGYMTSRTVREASGLLSLTSTLYLRLRKDDRDASFHCAAHYSLPEGRHGRLDSPTFHLTLHYPTEHVQFWVGSPSTPAGWVREGDTVQLLCRGDGSPSPEYTLFRLQDEQEEVLNVNLEGNLTLEGVTRGQSGTYGCRVEDYDAADDVQLSKTLELRVAYLDPLELSEGKVLSLPLNSSAVVNCSVHGLPTPALRWTKDSTPLGDGPMLSLSSITFDSNGTYVCEASLPTVPVLSRTQNFTLLVQGSPELKTAEIEPKADGSWREGDEVTLICSARGHPDPKLSWSQLGGSPAEPIPGRQGWVSSSLTLKVTSALSRDGISCEASNPHGNKRHVFHFGTVSPQTSQAGVAVMAVAVSVGLLLLVVAVFYCVRRKGGPCCRQRREKGAPPPGEPGLSHSGSEQPEQTGLLMGGASGGARG

SEQ ID NO: 2315 - protein, 628 aa, Artificial Sequence
  Synthetic polypeptide
MEPPDAPAQARGAPRLLLLAVLLAAHPDAQAEVRLSVPPLVEVMRGKSVILDCTPTGTHDHYMLEWFLTDRSGARPRLASAEMQGSELQVTMHDTRGRSPPYQLDSQGRLVLAEAQVGDERDYVCVVRAGAAGTAEATARLNVFAKPEATEVSPNKGTLSVMEDSAQEIATCNSRNGNPAPKITWYRNGQRLEVPVEMNPEGYMTSRTVREASGLLSLTSTLYLRLRKDDRDASFHCAAHYSLPEGRHGRLDSPTFHLTLHYPTEHVQFWVGSPSTPAGWVREGDTVQLLCRGDGSPSPEYTLFRLQDEQEEVLNVNLEGNLTLEGVTRGQSGTYGCRVEDYDAADDVQLSKTLELRVAYLDPLELSEGKVLSLPLNSSAVVNCSVHGLPTPALRWTKDSTPLGDGPMLSLSSITFDSNGTYVCEASLPTVPVLSRTQNFTLLVQGSPELKTAEIEPKADGSWREGDEVTLICSARGHPDPKLSWSQLGGSPAEPIPGRQGWVSSSLTLKVTSALSRDGISCEASNPHGNKRHVFHFGTVSPQTSQAGVAVMAVAVSVGLLLLVVAVFYCVRRKGGPCCRQRREKGAPPPGEPGLSHSGSEQPEQTGLLMGGASGGARGGSGGFGDEG

SEQ ID NO: 2316 - protein, 54 aa, Artificial Sequence
  Synthetic polypeptide
MARAAALLPSRSPPTPLLWPLLLLLLLETGLFTIPKTWTQSKCPSWIDWIKKMY

SEQ ID NO: 2317 - protein, 54 aa, Artificial Sequence; identical to SEQ ID NO: 2316
  Synthetic polypeptide

SEQ ID NO: 2318 - protein, 38 aa, Artificial Sequence
  Synthetic polypeptide
MRLFLSLPVLVVVLSIVLEGGGCSKPRSHHLTQQVSVS

SEQ ID NO: 2319 - protein, 38 aa, Artificial Sequence; identical to SEQ ID NO: 2318
  Synthetic polypeptide

SEQ ID NO: 2320 - protein, 38 aa, Artificial Sequence; identical to SEQ ID NO: 2318
  Synthetic polypeptide

SEQ ID NO: 2321 - protein, 38 aa, Artificial Sequence; identical to SEQ ID NO: 2318
  Synthetic polypeptide

SEQ ID NO: 2322 - protein, 38 aa, Artificial Sequence; identical to SEQ ID NO: 2318
  Synthetic polypeptide

SEQ ID NO: 2323 - protein, 38 aa, Artificial Sequence; identical to SEQ ID NO: 2318
  Synthetic polypeptide

SEQ ID NO: 2324 - protein, 38 aa, Artificial Sequence; identical to SEQ ID NO: 2318
  Synthetic polypeptide

SEQ ID NO: 2325 - protein, 38 aa, Artificial Sequence; identical to SEQ ID NO: 2318
  Synthetic polypeptide

SEQ ID NO: 2326 - protein, 38 aa, Artificial Sequence; identical to SEQ ID NO: 2318
  Synthetic polypeptide

SEQ ID NO: 2327 - protein, 38 aa, Artificial Sequence; identical to SEQ ID NO: 2318
  Synthetic polypeptide

SEQ ID NO: 2328 - protein, 69 aa, Artificial Sequence
  Synthetic polypeptide
MRLFLSLPVLVVVLSIVLEGPAPAQGTPDVSSALDKLKEFGNTLEDKARELISRIKQSELSAKMRTMGG

SEQ ID NO: 2329 - protein, 69 aa, Artificial Sequence; identical to SEQ ID NO: 2328
  Synthetic polypeptide

SEQ ID NO: 2330 - protein, 69 aa, Artificial Sequence; identical to SEQ ID NO: 2328
  Synthetic polypeptide

SEQ ID NO: 2331 - protein, 69 aa, Artificial Sequence; identical to SEQ ID NO: 2328
  Synthetic polypeptide

SEQ ID NO: 2332 - protein, 69 aa, Artificial Sequence; identical to SEQ ID NO: 2328
  Synthetic polypeptide

SEQ ID NO: 2333 - protein, 69 aa, Artificial Sequence; identical to SEQ ID NO: 2328
  Synthetic polypeptide

SEQ ID NO: 2334 - protein, 69 aa, Artificial Sequence; identical to SEQ ID NO: 2328
  Synthetic polypeptide

SEQ ID NO: 2335 - protein, 157 aa, Artificial Sequence
  Synthetic polypeptide
MSLLRNRLQALPALCLCVLVLACIGACQPEAQEGTLSPPPKLKMSRWSLVRGRMKELLETVVNRTRDGWQWFWSLDTMGTRLLPALFLVLLVLGFEVQGTQQPQQDEMPSPTFLTQVKESLSSYWESAKTAAQNLYEKTYLPAVDEKLRPPAPPPSN

SEQ ID NO: 2336 - protein, 80 aa, Artificial Sequence
  Synthetic polypeptide
MGTRLLPALFLVLLVLGFEVQGTQQPQQDEMPSPTFLTQVKESLSSYWESAKTAAQNLYEKTYLPAVDEKLRPPAPPPSN

SEQ ID NO: 2337 - protein, 80 aa, Artificial Sequence; identical to SEQ ID NO: 2336
  Synthetic polypeptide

SEQ ID NO: 2338 - protein, 80 aa, Artificial Sequence; identical to SEQ ID NO: 2336
  Synthetic polypeptide

SEQ ID NO: 2339 - protein, 613 aa, Artificial Sequence
  Synthetic polypeptide
MDSEAFQSARDFLDMNFQSLAMKHMDLKQMELDTAAAKVDELTKQLESLWSDSPAPPGPQAGPPSRPPRYSSSSIPEPFGSRGSPRKAATDGADTPFGRSESAPTLHPYSPLSPKGRPSSPRTPLYLQPDAYGSLDRATSPRPRAFDGAGSSLGRAPSPRPGPGPLRQQGPPTPFDFLGRAGSPRGSPLAEGPQAFFPERGPSPRPPATAYDAPASAFGSSLLGSGGSAFAPPLRAQDDLTLRRRPPKAWNESDLDVAYEKKPSQTASYERLDVFARPASPSLQLLPWRESSLDGLGGTGKDNLTSATLPRNYKVSPLASDRRSDAGSYRRSLGSAGPSGTLPRSWQPVSRIPMPPSSPQPRGAPRQRPIPLSMIFKLQNAFWEHGASRAMLPGSPLFTRAPPPKLQPQPQPQPQPQSQPQPQLPPQPQTQPQTPTPAPQHPQQTWPPVNEGPPKPPTELEPEPEIEGLLTPVLEAGDVDEGPVARPLSPTRLQPALPPEAQSVPELEEVARVLAEIPRPLKRRGSMEQAPAVALPPTHKKQYQQIISRLFHRHGGPGPGGPEPELSPITEGSEARAGPPAPAPPAPIPPPAPSQSSPPEQPQSMIMDILTIP

SEQ ID NO: 2340 - protein, 613 aa, Artificial Sequence; identical to SEQ ID NO: 2339
  Synthetic polypeptide

SEQ ID NO: 2341 - protein, 507 aa, Artificial Sequence
  Synthetic polypeptide
MGQVLPVFAHCKEAPSTASSTPDSTEGGNDDSDFRELHTAREFSEEDEEETTSQDWGTPRELTFSYIAFDGVVGSGGRRDSTARRPRPQGRSVSEPRDQHPQPSLGDSLESIPSLSQSPEPGRRGDPDTAPPSERPLEDLRLRLDHLGWVARGTGSGEDSSTSSSTPLEDEEPQEPNRLETGEAGEELDLRLRLAQPSSPEVLTPQLSPGSGTPQAGTPSPSRSRDSNSGPEEPLLEEEEKQWGPLEREPVRGQCLDSTDQLEFTVEPRLLGTAMEWLKTSLLLAVYKTVPILELSPPLWTAIGWVQRGPTPPTPVLRVLLKWAKSPRSSGVPSLSLGADMGSKVADLLYWKDTRTSGVVFTGLMVSLLCLLHFSIVSVAAHLALLLLCGTISLRVYRKVLQAVHRGDGANPFQAYLDVDLTLTREQTERLSHQITSRVVSAATQLRHFFLVEDLVDSLKLALLFYILTFVGAIFNGLTLLILGVIGLFTIPLLYRQHQARHSGSQL

SEQ ID NO: 2342 - protein, 167 aa, Artificial Sequence
  Synthetic polypeptide
MGSKVADLLYWKDTRTSGVVFTGLMVSLLCLLHFSIVSVAAHLALLLLCGTISLRVYRKVLQAVHRGDGANPFQAYLDVDLTLTREQTERLSHQITSRVVSAATQLRHFFLVEDLVDSLKLALLFYILTFVGAIFNGLTLLILGVIGLFTIPLLYRQHQARHSGSQL

SEQ ID NO: 2343 - protein, 434 aa, Artificial Sequence
  Synthetic polypeptide
MGQVLPVFAHCKEAPSTASSTPDSTEGGNDDSDFRELHTAREFSEEDEEETTSQDWGTPRELTFSYIAFDGVVGSGGRRDSTARRPRPQGRSVSEPRDQHPQPSLGDSLESIPSLSQSPEPGRRGDPDTAPPSERPLEDLRLRLDHLGWVARGTGSGEDSSTSSSTPLEDEEPQEPNRLETGEAGEELDLRLRLAQPSSPEVLTPQLSPGSGTPQAGTPSPSRSRDSNSGPEEPLLEEEEKQWGPLEREPVRGQCLDSTDQLEFTVEPRLLVADLLYWKDTRTSGVVFTGLMVSLLCLLHFSIVSVAAHLALLLLCGTISLRVYRKVLQAVHRGDGANPFQAYLDVDLTLTREQTERLSHQITSRVVSAATQLRHFFLVEDLVDSLKLALLFYILTFVGAIFNGLTLLILGVIGLFTIPLLYRQHQARHSGSQL

SEQ ID NO: 2344 - protein, 233 aa, Artificial Sequence
  Synthetic polypeptide
MEWLKTSLLLAVYKTVPILELSPPLWTAIGWVQRGPTPPTPVLRVLLKWAKSPRSSGVPSLSLGADMGSKVADLLYWKDTRTSGVVFTGLMVSLLCLLHFSIVSVAAHLALLLLCGTISLRVYRKVLQAVHRGDGANPFQAYLDVDLTLTREQTERLSHQITSRVVSAATQLRHFFLVEDLVDSLKLALLFYILTFVGAIFNGLTLLILGVIGLFTIPLLYRQHQARHSGSQL

SEQ ID NO: 2345 - protein, 50 aa, Artificial Sequence
  Synthetic polypeptide
MVVGAFPMAKLLYLGIRQVSKPLANRIKEAARRSEFFKTYICLPPAQRTD

SEQ ID NO: 2346 - protein, 50 aa, Artificial Sequence; identical to SEQ ID NO: 2345
  Synthetic polypeptide

SEQ ID NO: 2347 - protein, 98 aa, Artificial Sequence
  Synthetic polypeptide
MRMHTRLSLPGPPHHVGAAYPPAGGNRSENAGSWGGAGASSVEPLARRVASGEAWISALNSRLISWPTLLSLEVHLTFRHKLVPNQSCDFFLSTSKPS

SEQ ID NO: 2348 - protein, 134 aa, Artificial Sequence
  Synthetic polypeptide
MRPRCCILALVCWITVFLLQCSKGTTDAPVGSGLWLCQPTPRCGNKIYNPSEQCCYDDAILSLKETRRCGSTCTFWPCFELCCPESFGPQQKFLVKLRVLGMKSQCHLSPISRSCTRRQTRGEETKQLDIGDYS

SEQ ID NO: 2349 - protein, 153 aa, Artificial Sequence
  Synthetic polypeptide
MRPRCCILALVCWITVFLLQCSKGTTDAPVGSGLWLCQPTPRCGNKIYNPSEQCCYDDAILSLKETRRCGSTCTFWPCFELCCPESFGPQQKFLVKLRVLGMKSQCHLSPISRSCTRLHWQTADKGRRDEAAGHRRLQLNFGEKQLDFRGMAQ

SEQ ID NO: 2350 - protein, 221 aa, Artificial Sequence
  Synthetic polypeptide
MSDDFLWFEGIAFPTMGFRSETLRKVRDEFVIRDEDVIILTYPKSGTNWLAEILCLMHSKGDAKWIQSVPIWERSPWVESEIGYTALSETESPRLFSSHLPIQLFPKSFFSSKAKVIYLMRNPRDVLVSGYFFWKNMKFIKKPKSWEEYFEWFCQGTVLYGSWFDHIHGWMPMREEKNFLLLSYEELKQVRWFTSIIPALWEAEVGRSPELRSWNPAWPTW

SEQ ID NO: 2351 - protein, 76 aa, Artificial Sequence
  Synthetic polypeptide
MSLLLLVVSALHILILILLFVATLDKSWWTLPGKESLNLWYDCTWNNDTKTWACSNVSENGCGGLCLWSQLLRRQG

SEQ ID NO: 2352 - protein, 76 aa, Artificial Sequence; identical to SEQ ID NO: 2351
  Synthetic polypeptide

SEQ ID NO: 2353 - protein, 76 aa, Artificial Sequence; identical to SEQ ID NO: 2351
  Synthetic polypeptide

SEQ ID NO: 2354 - protein, 76 aa, Artificial Sequence; identical to SEQ ID NO: 2351
  Synthetic polypeptide

SEQ ID NO: 2355 - protein, 4 aa, Artificial Sequence
  Synthetic polypeptide
MAGL

SEQ ID NO: 2356 - protein, 4 aa, Artificial Sequence
  Synthetic polypeptide
MAGL

SEQ ID NO: 2357 - protein, 4 aa, Artificial Sequence
  Synthetic polypeptide
MAGL

SEQ ID NO: 2358 - protein, 4 aa, Artificial Sequence
  Synthetic polypeptide
MAGL

SEQ ID NO: 2359 - protein, 4 aa, Artificial Sequence
  Synthetic polypeptide
MAGL

SEQ ID NO: 2360 - protein, 4 aa, Artificial Sequence
  Synthetic polypeptide
MAGL

SEQ ID NO: 2361 - protein, 132 aa, Artificial Sequence
  Synthetic polypeptide
MATGTRYAGKVVVVTGGGRGIGAGIVRAFVNSGARVVICDKDESGGRALEQELPGAVFILCDVTQEDDVKTLVSETIRRFGRLDCVVNNAGHHPPPQRPEETSAQGFRQLLELNLLGTYTLTKACSCLRTLA

SEQ ID NO: 2362 - protein, 96 aa, Artificial Sequence
  Synthetic polypeptide
VICDKDESGGRALEQELPGAVFILCDVTQEDDVKTLVSETIRRFGRLDCVVNNAGHHPPPQRPEETSAQGFRQLLELNLLGTYTLTKACSCLRTLA

SEQ ID NO: 2363 - protein, 19 aa, Artificial Sequence
  Synthetic polypeptide
MATVPGVVVQACNPSYSEG

SEQ ID NO: 2364 - protein, 19 aa, Artificial Sequence
  Synthetic polypeptide
MATVPGVVVQACNPSYSEG

SEQ ID NO: 2365 - protein, 19 aa, Artificial Sequence
  Synthetic polypeptide
MATVPGVVVQACNPSYSEG

SEQ ID NO: 2366 - protein, 19 aa, Artificial Sequence
  Synthetic polypeptide
MATVPGVVVQACNPSYSEG

SEQ ID NO: 2367 - protein, 19 aa, Artificial Sequence
  Synthetic polypeptide
MATVPGVVVQACNPSYSEG

SEQ ID NO: 2368 - protein, 1233 aa, Artificial Sequence
  Synthetic polypeptide
MVVPEKEQSWIPKIFKKKTCTTFIVDSTDPGGTLCQCGRPRTAHPAVAMEDAFGAAVVTVWDSDAHTTEKPTDAYGELDFTGAGRKHSNFLRLSDRTDPAAVYSLVTRTWGFRAPNLVVSVLGGSGGPVLQTWLQDLLRRGLVRAAQSTGAWIVTGGLHTGIGRHVGVAVRDHQMASTGGTKVVAMGVAPWGVVRNRDTLINPKGSFPARYRWRGDPEDGVQFPLDYNYSAFFLVDDGTHGCLGGENRFRLRLESYISQQKTGVGGTGIDIPVLLLLIDGDEKMLTRIENATQAQLPCLLVAGSGGAADCLAETLEDTLAPGSGGARQGEARDRIRRFFPKGDLEVLQAQVERIMTRKELLTVYSSEDGSEEFETIVLKALVKACGSSEASAYLDELRLAVAWNRVDIAQSELFRGDIQWRSFHLEASLMDALLNDRPEFVRLLISHGLSLGHFLTPMRLAQLYSAAPSNSLIRNLLDQASHSAGTKAPALKGGAAELRPPDVGHVLRMLLGKMCAPRYPSGGAWDPHPGQGFGESMYLLSDKATSPLSLDAGLGQAPWSDLLLWALLLNRAQMAMYFWEMGSNAVSSALGACLLLRVMARLEPDAEEAARRKDLAFKFEGMGVDLFGECYRSSEVRAARLLLRRCPLWGDATCLQLAMQADARAFFAQDGVQSLLTQKWWGDMASTTPIWALVLAFFCPPLIYTRLITFRKSEEEPTREELEFDMDSVINGEGPVGTADPAEKTPLGVPRQSGRPGCCGGRCGGRRCLRRWFHFWGAPVTIFMGNVVSYLLFLLLFSRVLLVDFQPAPPGSLELLLYFWAFTLLCEELRQGLSGGGGSLASGGPGPGHASLSQRLRLYLADSWNQCDLVALTCFLLGVGCRLTPGLYHLGRTVLCIDFMVFTVRLLHIFTVNKQLGPKIVIVSKMMKDVFFFLFFLGVWLVAYGVATEGLLRPRDSDFPSILRRVFYRPYLQIFGQIPQEDMDVALMEHSNCSSEPGFWAHPPGAQAGTCVSQYANWLVVLLLVIFLLVANILLVNLLIAMFSYTFGKVQGNSDLYWKAQRYRLIREFHSRPALAPPFIVISHLRLLLRQLCRRPRSPQPSSPALEHFRVYLSKEAERKLLTWESVHKENFLLARARDKRESDSERLKRTSQKVDLALKQLGHIREYEQRLKVLEREVQQCSRVLGWVAEALSRSALLPPGGPPPPDLPGSKGPRDGAVSSLIALTLPRICK

SEQ ID NO: 2369 - protein, 1088 aa, Artificial Sequence
  Synthetic polypeptide
MVVPEKEQSWIPKIFKKKTCTTFIVDSTDPGGTLCQCGRPRTAHPAVAMEDAFGAAVVTVWDSDAHTTEKPTDAYGELDFTGAGRKHSNFLRLSDRTDPAAVYSLVTRTWGFRAPNLVVSVLGGSGGPVLQTWLQDLLRRGLVRAAQSTGAWIVTGGLHTGIGRHVGVAVRDHQMASTGGTKVVAMGVAPWGVVRNRDTLINPKGSFPARYRWRGDPEDGVQFPLDYNYSAFFLVDDGTHGCLGGENRFRLRLESYISQQKTGVGGTGIDIPVLLLLIDGDEKMLTRIENATQAQLPCLLVAGSGGAADCLAETLEDTLAPGSGGARQGEARDRIRRFFPKGDLEVLQAQVERIMTRKELLTVYSSEDGSEEFETIVLKALVKACGSSEASAYLDELRLAVAWNRVDIAQSELFRGDIQWRSFHLEASLMDALLNDRPEFVRLLISHGLSLGHFLTPMRLAQLYSAAPSNSLIRNLLDQASHSAGTKAPALKGGAAELRPPDVGHVLRMLLGKMCAPRYPSGGAWDPHPGQGFGESMYLLSDKATSPLSLDAGLGQAPWSDLLLWALLLNRAQMAMYFWEMGSNAVSSALGACLLLRVMARLEPDAEEAARRKDLAFKFEGMGVDLFGECYRSSEVRAARLLLRRCPLWGDATCLQLAMQADARAFFAQDGVQSLLTQKWWGDMASTTPIWALVLAFFCPPLIYTRLITFRKSEEEPTREELEFDMDSVINGEGPVGLTPGLYHLGRTVLCIDFMVFTVRLLHIFTVNKQLGPKIVIVSKMMKDVFFFLFFLGVWLVAYGVATEGLLRPRDSDFPSILRRVFYRPYLQIFGQIPQEDMDVALMEHSNCSSEPGFWAHPPGAQAGTCVSQYANWLVVLLLVIFLLVANILLVNLLIAMFSYTFGKVQGNSDLYWKAQRYRLIREFHSRPALAPPFIVISHLRLLLRQLCRRPRSPQPSSPALEHFRVYLSKEAERKLLTWESVHKENFLLARARDKRESDSERLKRTSQKVDLALKQLGHIREYEQRLKVLEREVQQCSRVLGWVAEALSRSALLPPGGPPPPDLPGSKGPRDGAVSSLIALTLPRICK

SEQ ID NO: 2370 - protein, 879 aa, Artificial Sequence
  Synthetic polypeptide
MLTRIENATQAQLPCLLVAGSGGAADCLAETLEDTLAPGSGGARQGEARDRIRRFFPKGDLEVLQAQSFHLEASLMDALLNDRPEFVRLLISHGLSLGHFLTPMRLAQLYSAAPSNSLIRNLLDQASHSAGTKAPALKGGAAELRPPDVGHVLRMLLGKMCAPRYPSGGAWDPHPGQGFGESMYLLSDKATSPLSLDAGLGQAPWSDLLLWALLLNRAQMAMYFWEMGSNAVSSALGACLLLRVMARLEPDAEEAARRKDLAFKFEGMGVDLFGECYRSSEVRAARLLLRRCPLWGDATCLQLAMQADARAFFAQDGVQSLLTQKWWGDMASTTPIWALVLAFFCPPLIYTRLITFRKSEEEPTREELEFDMDSVINGEGPVGTADPAEKTPLGVPRQSGRPGCCGGRCGGRRCLRRWFHFWGAPVTIFMGNVVSYLLFLLLFSRVLLVDFQPAPPGSLELLLYFWAFTLLCEELRQGLSGGGGSLASGGPGPGHASLSQRLRLYLADSWNQCDLVALTCFLLGVGCRLTPGLYHLGRTVLCIDFMVFTVRLLHIFTVNKQLGPKIVIVSKMMKDVFFFLFFLGVWLVAYGVATEGLLRPRDSDFPSILRRVFYRPYLQIFGQIPQEDMDVALMEHSNCSSEPGFWAHPPGAQAGTCVSQYANWLVVLLLVIFLLVANILLVNLLIAMFSYTFGKVQGNSDLYWKAQRYRLIREFHSRPALAPPFIVISHLRLLLRQLCRRPRSPQPSSPALEHFRVYLSKEAERKLLTWESVHKENFLLARARDKRESDSERLKRTSQKVDLALKQLGHIREYEQRLKVLEREVQQCSRVLGWVAEALSRSALLPPGGPPPPDLPGSKGPRDGAVSSLIALTLPRICK

SEQ ID NO: 2371 - protein, 329 aa, Artificial Sequence
  Synthetic polypeptide
MGTPKPRILPWLVSQLDLGQLEGVAWVNKSRTRFRIPWKHGLRQDAQQEDFGIFQAWAEATGAYVPGRDKPDLPTWKRNFRSALNRKEGLRLAEDRSKDPHDPHKIYEFVNSGVGDFSQPDTSPDTNGGGSTSDTQEDILDELLGNMVLAPLPDPGPPSLAVAPEPCPQPLRSPSLDNPTPFPNLGPSENPLKRLLVPGEEWEFEVTAFYRGRQVFQQTISCPEGLRLVGSEVGDRTLPGWPVTLPDPGMSLTDRGVMSYVRHVLSCLGGGLALWRAGQWLWAQRLGHCHTYWAVSEELLPNSGHGPDGEVPKDKEGGVFDLGPFIVAW

SEQ ID NO: 2372 - protein, 329 aa, Artificial Sequence; identical to SEQ ID NO: 2371
  Synthetic polypeptide

SEQ ID NO: 2373 - protein, 329 aa, Artificial Sequence; identical to SEQ ID NO: 2371
  Synthetic polypeptide

SEQ ID NO: 2374 - protein, 329 aa, Artificial Sequence; identical to SEQ ID NO: 2371
  Synthetic polypeptide

SEQ ID NO: 2375 - protein, 329 aa, Artificial Sequence; identical to SEQ ID NO: 2371
  Synthetic polypeptide

SEQ ID NO: 2376 - protein, 329 aa, Artificial Sequence; identical to SEQ ID NO: 2371
  Synthetic polypeptide

SEQ ID NO: 2377 - protein, 183 aa, Artificial Sequence
  Synthetic polypeptide
MVLAPLPDPGPPSLAVAPEPCPQPLRSPSLDNPTPFPNLGPSENPLKRLLVPGEEWEFEVTAFYRGRQVFQQTISCPEGLRLVGSEVGDRTLPGWPVTLPDPGMSLTDRGVMSYVRHVLSCLGGGLALWRAGQWLWAQRLGHCHTYWAVSEELLPNSGHGPDGEVPKDKEGGVFDLGPFIVAW

SEQ ID NO: 2378 - protein, 183 aa, Artificial Sequence; identical to SEQ ID NO: 2377
  Synthetic polypeptide

SEQ ID NO: 2379 - protein, 183 aa, Artificial Sequence; identical to SEQ ID NO: 2377
  Synthetic polypeptide

SEQ ID NO: 2380 - protein, 628 aa, Artificial Sequence
  Synthetic polypeptide
MAEAHQAVGFRPSLTSDGAEVELSAPVLQEIYLSGLRSWKRHLSRFWNDFLTGVFPASPLSWLFLFSAIQLAWFLQLDPSLGLMEKIKELLPDWGGQHHGLRGVLAAALFASCLWGALIFTLHVALRLLLSYHGWLLEPHGAMSSPTKTWLALVRIFSGRHPMLFSYQRSLPRQPVPSVQDTVRKYLESVRPILSDEDFDWTAVLAQEFLRLQASLLQWYLRLKSWWASNYVSDWWEEFVYLRSRNPLMVNSNYYMMDFLYVTPTPLQAARAGNAVHALLLYRHRLNRQEIPPTLLMGMRPLCSAQYEKIFNTTRIPGVQKDYIRHLHDSQHVAVFHRGRFFRMGTHSRNSLLSPRALEQQFQRILDDPSPACPHEEHLAALTAAPRGTWAQVRTSLKTQAAEALEAVEGAAFFVSLDAEPAGLTREDPAASLDAYAHALLAGRGHDRWFDKSFTLIVFSNGKLGLSVEHSWADCPISGHMWEFTLATECFQLGYSTDGHCKGHPDPTLPQPQRLQWDLPDQIHSSISLALRGAKILSENVDCHVVPFSLFGKSFIRRCHLSSDSFIQIALQLAHFRDRGQFCLTYESAMTRLFLEGRTETVRSCTREACNFVRAMEDKEKTGCGKLS

SEQ ID NO: 2381 - protein, 628 aa, Artificial Sequence; identical to SEQ ID NO: 2380
  Synthetic polypeptide

SEQ ID NO: 2382 - protein, 628 aa, Artificial Sequence; identical to SEQ ID NO: 2380
  Synthetic polypeptide

SEQ ID NO: 2383 - protein, 628 aa, Artificial Sequence; identical to SEQ ID NO: 2380
  Synthetic polypeptide

SEQ ID NO: 2384 - protein, 617 aa, Artificial Sequence
  Synthetic polypeptide
MAEAHQAVGFRPSLTSDGAEVELSAPVLQEIYLSGLRSWKRHLSRFWNDFLTGVFPASPLSWLFLFSAIQLAWFLQLDPSLGLMEKIKELLPDWGGQHHGLRGVLAAALFASCLWGALIFTLHVALRLLLSYHGWLLEPHGAMSSPTKTWLALVRIFSGRHPMLFSYQRSLPRQPVPSVQDTVRKYLESVRPILSDEDFDWTAVLAQEFLRLQASLLQWYLRLKSWWASNYVSDWWEEFVYLRSRNPLMVNSNYYMMAARAGNAVHALLLYRHRLNRQEIPPTLLMGMRPLCSAQYEKIFNTTRIPGVQKDYIRHLHDSQHVAVFHRGRFFRMGTHSRNSLLSPRALEQQFQRILDDPSPACPHEEHLAALTAAPRGTWAQVRTSLKTQAAEALEAVEGAAFFVSLDAEPAGLTREDPAASLDAYAHALLAGRGHDRWFDKSFTLIVFSNGKLGLSVEHSWADCPISGHMWEFTLATECFQLGYSTDGHCKGHPDPTLPQPQRLQWDLPDQIHSSISLALRGAKILSENVDCHVVPFSLFGKSFIRRCHLSSDSFIQIALQLAHFRDRGQFCLTYESAMTRLFLEGRTETVRSCTREACNFVRAMEDKEKTGCGKLS

SEQ ID NO: 2385 - protein, 250 aa, Artificial Sequence
  Synthetic polypeptide
MAALTAAPRGTWAQVRTSLKTQAAEALEAVEGAAFFVSLDAEPAGLTREDPAASLDAYAHALLAGRGHDRWFDKSFTLIVFSNGKLGLSVEHSWADCPISGHMWEFTLATECFQLGYSTDGHCKGHPDPTLPQPQRLQWDLPDQIHSSISLALRGAKILSENVDCHVVPFSLFGKSFIRRCHLSSDSFIQIALQLAHFRDRGQFCLTYESAMTRLFLEGRTETVRSCTREACNFVRAMEDKEKTGCGKLS

SEQ ID NO: 2386 - protein, 174 aa, Artificial Sequence
  Synthetic polypeptide
MGGILHSPTSPEPPDTTSPESPDTTSPESPDTTSQEPPDTTSPEPPDKTSPEPAPQQGSTHTPRSPGSTRTRRPEISQAGPTQGEVIPTGSSKPAGDQLPAALWTSSAVLGLLLLALPTYHLWKRCRHLAEDDTHPPASLRLLPQRWMHVLIASLEKLIRNSKEGHCLSHLPMT

SEQ ID NO: 2387 - protein, 393 aa, Artificial Sequence
  Synthetic polypeptide
MDFGLALLLAGLLGLLLGQSLQVKPLQVEPPEPVVAVALGASRQLTCRLACADRGASVQWRGLDTSLGAVQSDTGRSVLTVRNASLSAAGTRVCVGSCGGRTFQHTVQLLVYAFPDQLTVSPAALVPGDPEVACTAHKVTPVDPNALSFSLLVGGQELEGAQALGPEVQEEEEEPQGDEDVLFRVTERWRLPPLGTPVPPALYCQATMRLPGLELSHRQAIPVLHSPTSPEPPDTTSPESPDTTSPESPDTTSQEPPDTTSPEPPDKTSPEPAPQQGSTHTPRSPGSTRTRRPEISQAGPTQGEVIPTGSSKPAGDQLPAALWTSSAVLGLLLLALPTYHLWKRCRHLAEDDTHPPASLRLLPQRWMHVLIASLEKLIRNSKEGHCLSHLPMT

SEQ ID NO: 2388 - protein, 306 aa, Artificial Sequence
  Synthetic polypeptide
MDFGLALLLAGLLGLLLGQSLQVKPLQVEPPEPVVAVALGASRQLTCRLACADRGASVQWRGLDTSLGAVQSDTGRSVLTVRNASLSAAGTRVCVGSCGGRTFQHTVQLLVYAFPDQLTVSPAALVPGDPEVACTAHKVTPVDPNALSFSLLVGGQELEGAQALGPEVQEEEEEPQGDEDVLFRVTERWRLPPLGTPVPPALYCQATMRLPGLELSHRQAIPASKPAGDQLPAALWTSSAVLGLLLLALPTYHLWKRCRHLAEDDTHPPASLRLLPQRWMHVLIASLEKLIRNSKEGHCLSHLPMT

SEQ ID NO: 2389 - protein, 211 aa, Artificial Sequence
  Synthetic polypeptide
MDFGLALLLAGLLGLLLAFPDQLTVSPAALVPGDPEVACTAHKVTPVDPNALSFSLLVGGQELEGAQALGPEVQEEEEEPQGDEDVLFRVTERWRLPPLGTPVPPALYCQATMRLPGLELSHRQAIPASKPAGDQLPAALWTSSAVLGLLLLALPTYHLWKRCRHLAEDDTHPPASLRLLPQRWMHVLIASLEKLIRNSKEGHCLSHLPMT

SEQ ID NO: 2390 - protein, 21 aa, Artificial Sequence
  Synthetic polypeptide
GCGRLHEVGGPAVRAGAQPAH

SEQ ID NO: 2391 - protein, 173 aa, Artificial Sequence
  Synthetic polypeptide
MLALEAAQLDGPHFSCLYPDGVFYDLDSCKHSSYPDSEGAPDSLWDWTVAPPVPATPYEAFDPAAAAFSHPQAAQLCYEPPTYSPAGNLELAPSLEAPGPGLPAYPTENFASQTLVPPAYAPYPSPVLSEEEDLPLDSPALEVSDSESDEALVAGPEGKGSEAGFLSVRWGWR

SEQ ID NO: 2392 - protein, 82 aa, Artificial Sequence
  Synthetic polypeptide
MASSMTWTAASIPATLIQRGLLTLVPPAYAPYPSPVLSEEEDLPLDSPALEVSDSESDEALVAGPEGKGSEAGFLSVRWGWR

SEQ ID NO: 2393 - protein, 244 aa, Artificial Sequence
  Synthetic polypeptide
MAAASAGATRLLLLLLMAVAAPSRARGSGCRAGTGARGAGAEGREGEACGTVGLLLEHSFEIDDSANFRKRGSLLWNQQDGTLSLSQRQLSEEERGRLRDVAALNGLYRVRIPRRPGALDGLEAGGYVSSFVPACSLVESHLSDQLTLHVDVAGNVVGVSVVTHPGGCRGHEVEDVDLELFNTSVQLQPPTTAPGPETAAFIERLEMEQAQKAKNPQEQKSFFAKYHRRSVSPRGHGLVFFSAV

SEQ ID NO: 2394 - protein, 244 aa, Artificial Sequence; identical to SEQ ID NO: 2393
  Synthetic polypeptide

SEQ ID NO: 2395 - protein, 244 aa, Artificial Sequence; identical to SEQ ID NO: 2393
  Synthetic polypeptide

SEQ ID NO: 2396 - protein, 6 aa, Artificial Sequence
  Synthetic polypeptide
SSSPCP

SEQ ID NO: 2397 - protein, 68 aa, Artificial Sequence
  Synthetic polypeptide
MWVPVVFLTLSVTWIAPPLQVLVASRGRAVCGGVLVHPQWVLTAAHCIRNQCVSPCISLPGSVSRSLS

SEQ ID NO: 2398 - protein, 87 aa, Artificial Sequence
  Synthetic polypeptide
MWVPVVFLTLSVTWIGAAPLILSRIVGGWECEKHSQPWQVLVASRGRAVCGGVLVHPQWVLTAAHCIRNQCVSPCISLPGSVSRSLS

SEQ ID NO: 2399 - protein, 87 aa, Artificial Sequence; identical to SEQ ID NO: 2398
  Synthetic polypeptide

SEQ ID NO: 2400 - protein, 87 aa, Artificial Sequence; identical to SEQ ID NO: 2398
  Synthetic polypeptide

SEQ ID NO: 2401 - protein, 87 aa, Artificial Sequence; identical to SEQ ID NO: 2398
  Synthetic polypeptide

SEQ ID NO: 2402 - protein, 87 aa, Artificial Sequence; identical to SEQ ID NO: 2398
  Synthetic polypeptide

SEQ ID NO: 2403 - protein, 87 aa, Artificial Sequence; identical to SEQ ID NO: 2398
  Synthetic polypeptide

SEQ ID NO: 2404 - protein, 87 aa, Artificial Sequence; identical to SEQ ID NO: 2398
  Synthetic polypeptide

SEQ ID NO: 2405 - protein, 50 aa, Artificial Sequence
  Synthetic polypeptide
MWVPVVFLTLAVCGGVLVHPQWVLTAAHCIRNQCVSPCISLPGSVSRSLS

SEQ ID NO: 2406 - protein, 6 aa, Artificial Sequence
  Synthetic polypeptide
SSSPCP

SEQ ID NO: 2407 - protein, 214 aa, Artificial Sequence
  Synthetic polypeptide
MWVPVVFLTLSVTWIGAAPLILSRIVGGWECEKHSQPWQVLVASRGRAVCGGVLVHPQWVLTAAHCIRNKSVILLGRHSLFHPEDTGQVFQVSHSFPHPLYDMSLLKNRFLRPGDDSSHDLMLLRLSEPAELTDAVKVMDLPTQEPALGTTCYASGWGSIEPEEFLTPKKLQCVDLHVISNDVCAQVHPQKVTKFMLCAGRWTGGKSTCSFSFF

SEQ ID NO: 2408 - protein, 214 aa, Artificial Sequence; identical to SEQ ID NO: 2407
  Synthetic polypeptide

SEQ ID NO: 2409 - protein, 214 aa, Artificial Sequence; identical to SEQ ID NO: 2407
  Synthetic polypeptide

SEQ ID NO: 2410 - protein, 171 aa, Artificial Sequence
  Synthetic polypeptide
MWVPVVFLTLSVTWIGAAPLILSRIVGGWECEKHSQPWQVLVASRGRAVCGGVLVHPQWVLTAAHCIRKPGDDSSHDLMLLRLSEPAELTDAVKVMDLPTQEPALGTTCYASGWGSIEPEEFLTPKKLQCVDLHVISNDVCAQVHPQKVTKFMLCAGRWTGGKSTCSFSFF

SEQ ID NO: 2411 - protein, 171 aa, Artificial Sequence; identical to SEQ ID NO: 2410
  Synthetic polypeptide

SEQ ID NO: 2412 - protein, 38 aa, Artificial Sequence
  Synthetic polypeptide
MWDLVLSIALSVGCTDGRGGAHPGRVDSDTRWTLSTDH

SEQ ID NO: 2413 - protein, 38 aa, Artificial Sequence; identical to SEQ ID NO: 2412
  Synthetic polypeptide

SEQ ID NO: 2414 - protein, 38 aa, Artificial Sequence; identical to SEQ ID NO: 2412
  Synthetic polypeptide

SEQ ID NO: 2415 - protein, 38 aa, Artificial Sequence; identical to SEQ ID NO: 2412
  Synthetic polypeptide

SEQ ID NO: 2416 - protein, 38 aa, Artificial Sequence; identical to SEQ ID NO: 2412
  Synthetic polypeptide

SEQ ID NO: 2417 - protein, 38 aa, Artificial Sequence; identical to SEQ ID NO: 2412
  Synthetic polypeptide

SEQ ID NO: 2418 - protein, 38 aa, Artificial Sequence; identical to SEQ ID NO: 2412
  Synthetic polypeptide

SEQ ID NO: 2419 - protein, 38 aa, Artificial Sequence; identical to SEQ ID NO: 2412
  Synthetic polypeptide

SEQ ID NO: 2420 - protein, 243 aa, Artificial Sequence
  Synthetic polypeptide
MATARPPWMWVLCALITALLLGVTEHVLANNDVSCDHPSNTVPSGSNQDLGAGAGEDARSDDSSSRIINGSDCDMHTQPWQAALLLRPNQLYCGAVLVHPQWLLTAAHCRKKVFRVRLGHYSLSPVYESGQQMFQGVKSIPHPGYSHPGHSNNLMLIKLNRRIRPTKDVRPINVSSHCPSAGTKCLVSGWGTTKSPQVHFPKVLQCLNISVLSQKRCEDAYPRQIDDTMFCAGDKAGRDSCQV

SEQ ID NO: 2421 - protein, 243 aa, Artificial Sequence; identical to SEQ ID NO: 2420
  Synthetic polypeptide

SEQ ID NO: 2422 - protein, 243 aa, Artificial Sequence; identical to SEQ ID NO: 2420
  Synthetic polypeptide

SEQ ID NO: 2423 - protein, 1907 aa, Artificial Sequence
  Synthetic polypeptide
MAPTWGPGMVSVVGPMGLLVVLLVGGCAAEEPPRFIKEPKDQIGVSGGVASFVCQATGDPKPRVTWNKKGKKVNSQRFETIEFDESAGAVLRIQPLRTPRDENVYECVAQNSVGEITVHAKLTVLREDQLPSGFPNIDMGPQLKVVERTRTATMLCAASGNPDPEITWFKDFLPVDPSASNGRIKQLRSDQAFSHLPTGALQIESSEETDQGKYECVATNSAGVRYSSPANLYVRVRRVAPRFSILPMSHEIMPGGNVNITCVAVGSPMPYVKWMQGAEDLTPEDDMPVGRNVLELTDVKDSANYTCVAMSSLGVIEAVAQITVKSLPKAPGTPMVTENTATSITITWDSGNPDPVSYYVIEYKSKSQDGPYQIKEDITTTRYSIGGLSPNSEYEIWVSAVNSIGQGPPSESVVTRTGEQAPASAPRNVQARMLSATTMIVQWEEPVEPNGLIRGYRVYYTMEPEHPVGNWQKHNVDDSLLTTVGSLLEDETYTVRVLAFTSVGDGPLSDPIQVKTQQGVPGQPMNLRAEARSETSITLSWSPPRQESIIKYELLFREGDHGREVGRTFDPTTSYVVEDLKPNTEYAFRLAARSPQGLGAFTPVVRQRTLQSKPSAPPQDVKCVSVRSTAILVSWRPPPPETHNGALVGYSVRYRPLGSEDPEPKEVNGIPPTTTQILLEALEKWTQYRITTVAHTEVGPGPESSPVVVRTDEDVPSAPPRKVEAEALNATAIRVLWRSPAPGRQHGQIRGYQVHYVRMEGAEARGPPRIKDVMLADAQWETDDTAEYEMVITNLQPETAYSITVAAYTMKGDGARSKPKVVVTKGAVLGRPTLSVQQTPEGSLLARWEPPAGTAEDQVLGYRLQFGREDSTPLATLEFPPSEDRYTASGVHKGATYVFRLAARSRGGLGEEAAEVLSIPEDTPRGHPQILEAAGNASAGTVLLRWLPPVPAERNGAIVKYTVAVREAGALGPARETELPAAAEPGAENALTLQGLKPDTAYDLQVRAHTRRGPGPFSPPVRYRTFLRDQVSPKNFKVKMIMKTSVLLSWEFPDNYNSPTPYKIQYNGLTLDVDGRTTKKLITHLKPHTFYNFVLTNRGSSLGGLQQTVTAWTAFNLLNGKPSVAPKPDADGFIMVYLPDGQSPVPVQSYFIVMVPLRKSRGGQFLTPLGSPEDMDLEELIQDISRLQRRSLRHSRQLEVPRPYIAARFSVLPPTFHPGDQKQYGGFDNRGLEPGHRYVLFVLAVLQKSEPTFAASPFSDPFQLDNPDPQPIVDGEEGLIWVIGPVLAVVFIICIVIAILLYKNKPDSKRKDSEPRTKCLLNNADLAPHHPKDPVEMRRINFQTPGMLSHPPIPIADMAEHTERLKANDSLKLSQEYESIDPGQQFTWEHSNLEVNKPKNRYANVIAYDHSRVILQPIEGIMGSDYINANYVDGYRCQNAYIATQGPLPETFGDFWRMVWEQRSATIVMMTRLEEKSRIKCDQYWPNRGTETYGFIQVTLLDTIELATFCVRTFSLHKNGSSEKREVRQFQFTAWPDHGVPEYPTPFLAFLRRVKTCNPPDAGPIVVHCSAGVGRTGCFIVIDAMLERIKPEKTVDVYGHVTLMRSQRNYMVQTEDQYSFIHEALLEAVGCGNTEVPARSLYAYIQKLAQVEPGEHVTGMELEFKRLANSKAHTSRFISANLPCNKFKNRLVNIMPYESTRVCLQPIRGVEGSDYINASFIDGYRQQKAYIATQGPLAETTEDFWRMLWENNSTIVVMLTKLREMGREKCHQYWPAERSARYQYFVVDPMAEYNMPQYILREFKVTDARDGQSRTVRQFQFTDWPEQGVPKSGEGFIDFIGQVHKTKEQFGQDGPISVHCSAGVGRTGVFITLSIVLERMRYEGVVDIFQTVKMLRTQRPAMVQTED

SEQ ID NO: 2424 - protein, 1889 aa, Artificial Sequence
  Synthetic polypeptide
MAPTWGPGMVSVVGPMGLLVVLLVGGCAAEEPPRFIKEPKDQIGVSGGVASFVCQATGDPKPRVTWNKKGKKVNSQRFETIEFDESAGAVLRIQPLRTPRDENVYECVAQNSVGEITVHAKLTVLREDQLPSGFPNIDMGPQLKVVERTRTATMLCAASGNPDPEITWFKDFLPVDPSASNGRIKQLRSGALQIESSEETDQGKYECVATNSAGVRYSSPANLYVRVRRVAPRFSILPMSHEIMPGGNVNITCVAVGSPMPYVKWMQGAEDLTPEDDMPVGRNVLELTDVKDSANYTCVAMSSLGVIEAVAQITVKSLPKAPGTPMVTENTATSITITWDSGNPDPVSYYVIEYKSKSQDGPYQIKEDITTTRYSIGGLSPNSEYEIWVSAVNSIGQGPPSESVVTRTGEQAPASAPRNVQARMLSATTMIVQWEEPVEPNGLIRGYRVYYTMEPEHPVGNWQKHNVDDSLLTTVGSLLEDETYTVRVLAFTSVGDGPLSDPIQVKTQQGVPGQPMNLRAEARSETSITLSWSPPRQESIIKYELLFREGDHGREVGRTFDPTTSYVVEDLKPNTEYAFRLAARSPQGLGAFTPVVRQRTLQSKPSAPPQDVKCVSVRSTAILVSWRPPPPETHNGALVGYSVRYRPLGSEDPEPKEVNGIPPTTTQILLEALEKWTQYRITTVAHTEVGPGPESSPVVVRTDEDVPSAPPRKVEAEALNATAIRVLWRSPAPGRQHGQIRGYQVHYVRMEGAEARGPPRIKDVMLADAQEMVITNLQPETAYSITVAAYTMKGDGARSKPKVVVTKGAVLGRPTLSVQQTPEGSLLARWEPPAGTAEDQVLGYRLQFGREDSTPLATLEFPPSEDRYTASGVHKGATYVFRLAARSRGGLGEEAAEVLSIPEDTPRGHPQILEAAGNASAGTVLLRWLPPVPAERNGAIVKYTVAVREAGALGPARETELPAAAEPGAENALTLQGLKPDTAYDLQVRAHTRRGPGPFSPPVRYRTFLRDQVSPKNFKVKMIMKTSVLLSWEFPDNYNSPTPYKIQYNGLTLDVDGRTTKKLITHLKPHTFYNFVLTNRGSSLGGLQQTVTAWTAFNLLNGKPSVAPKPDADGFIMVYLPDGQSPVPVQSYFIVMVPLRKSRGGQFLTPLGSPEDMDLEELIQDISRLQRRSLRHSRQLEVPRPYIAARFSVLPPTFHPGDQKQYGGFDNRGLEPGHRYVLFVLAVLQKSEPTFAASPFSDPFQLDNPDPQPIVDGEEGLIWVIGPVLAVVFIICIVIAILLYKNKPDSKRKDSEPRTKCLLNNADLAPHHPKDPVEMRRINFQTPGMLSHPPIPIADMAEHTERLKANDSLKLSQEYESIDPGQQFTWEHSNLEVNKPKNRYANVIAYDHSRVILQPIEGIMGSDYINANYVDGYRCQNAYIATQGPLPETFGDFWRMVWEQRSATIVMMTRLEEKSRIKCDQYWPNRGTETYGFIQVTLLDTIELATFCVRTFSLHKNGSSEKREVRQFQFTAWPDHGVPEYPTPFLAFLRRVKTCNPPDAGPIVVHCSAGVGRTGCFIVIDAMLERIKPEKTVDVYGHVTLMRSQRNYMVQTEDQYSFIHEALLEAVGCGNTEVPARSLYAYIQKLAQVEPGEHVTGMELEFKRLANSKAHTSRFISANLPCNKFKNRLVNIMPYESTRVCLQPIRGVEGSDYINASFIDGYRQQKAYIATQGPLAETTEDFWRMLWENNSTIVVMLTKLREMGREKCHQYWPAERSARYQYFVVDPMAEYNMPQYILREFKVTDARDGQSRTVRQFQFTDWPEQGVPKSGEGFIDFIGQVHKTKEQFGQDGPISVHCSAGVGRTGVFITLSIVLERMRYEGVVDIFQTVKMLRTQRPAMVQTED

SEQ ID NO: 2425 - protein, 1889 aa, Artificial Sequence; identical to SEQ ID NO: 2424
  Synthetic polypeptide

SEQ ID NO: 2426 - protein, 1480 aa, Artificial Sequence
  Synthetic polypeptide
MAPTWGPGMVSVVGPMGLLVVLLVGGCAAEEPPRFIKEPKDQIGVSGGVASFVCQATGDPKPRVTWNKKGKKVNSQRFETIEFDESAGAVLRIQPLRTPRDENVYECVAQNSVGEITVHAKLTVLREDQLPSGFPNIDMGPQLKVVERTRTATMLCAASGNPDPEITWFKDFLPVDPSASNGRIKQLRSGALQIESSEETDQGKYECVATNSAGVRYSSPANLYVRVRRVAPRFSILPMSHEIMPGGNVNITCVAVGSPMPYVKWMQGAEDLTPEDDMPVGRNVLELTDVKDSANYTCVAMSSLGVIEAVAQITVKSLPKAPGTPMVTENTATSITITWDSGNPDPVSYYVIEYKSKSQDGPYQIKEDITTTRYSIGGLSPNSEYEIWVSAVNSIGQGPPSESVVTRTGEQAPASAPRNVQARMLSATTMIVQWEEPVEPNGLIRGYRVYYTMEPEHPVGNWQKHNVDDSLLTTVGSLLEDETYTVRVLAFTSVGDGPLSDPIQVKTQQGVPGQPMNLRAEARSETSITLSWSPPRQESIIKYELLFREGDHGREVGRTFDPTTSYVVEDLKPNTEYAFRLAARSPQGLGAFTPVVRQRTLQSISPKNFKVKMIMKTSVLLSWEFPDNYNSPTPYKIQYNGLTLDVDGRTTKKLITHLKPHTFYNFVLTNRGSSLGGLQQTVTAWTAFNLLNGKPSVAPKPDADGFIMVYLPDGQSPVPVQSYFIVMVPLRKSRGGQFLTPLGSPEDMDLEELIQDISRLQRRSLRHSRQLEVPRPYIAARFSVLPPTFHPGDQKQYGGFDNRGLEPGHRYVLFVLAVLQKSEPTFAASPFSDPFQLDNPDPQPIVDGEEGLIWVIGPVLAVVFIICIVIAILLYKNKPDSKRKDSEPRTKCLLNNADLAPHHPKDPVEMRRINFQTPGMLSHPPIPIADMAEHTERLKANDSLKLSQEYESIDPGQQFTWEHSNLEVNKPKNRYANVIAYDHSRVILQPIEGIMGSDYINANYVDGYRCQNAYIATQGPLPETFGDFWRMVWEQRSATIVMMTRLEEKSRIKCDQYWPNRGTETYGFIQVTLLDTIELATFCVRTFSLHKNGSSEKREVRQFQFTAWPDHGVPEYPTPFLAFLRRVKTCNPPDAGPIVVHCSAGVGRTGCFIVIDAMLERIKPEKTVDVYGHVTLMRSQRNYMVQTEDQYSFIHEALLEAVGCGNTEVPARSLYAYIQKLAQVEPGEHVTGMELEFKRLANSKAHTSRFISANLPCNKFKNRLVNIMPYESTRVCLQPIRGVEGSDYINASFIDGYRQQKAYIATQGPLAETTEDFWRMLWENNSTIVVMLTKLREMGREKCHQYWPAERSARYQYFVVDPMAEYNMPQYILREFKVTDARDGQSRTVRQFQFTDWPEQGVPKSGEGFIDFIGQVHKTKEQFGQDGPISVHCSAGVGRTGVFITLSIVLERMRYEGVVDIFQTVKMLRTQRPAMVQTED

SEQ ID NO: 2427 - protein, 1480 aa, Artificial Sequence; identical to SEQ ID NO: 2426
  Synthetic polypeptide

SEQ ID NO: 2428 - protein, 1927 aa, Artificial Sequence
  Synthetic polypeptide
MAPTWGPGMVSVVGPMGLLVVLLVGGCAAEEPPRFIKEPKDQIGVSGGVASFVCQATGDPKPRVTWNKKGKKVNSQRFETIEFDESAGAVLRIQPLRTPRDENVYECVAQNSVGEITVHAKLTVLREDQLPSGFPNIDMGPQLKVVERTRTATMLCAASGNPDPEITWFKDFLPVDPSASNGRIKQLRSETFESTPIRGALQIESSEETDQGKYECVATNSAGVRYSSPANLYVRELREVRRVAPRFSILPMSHEIMPGGNVNITCVAVGSPMPYVKWMQGAEDLTPEDDMPVGRNVLELTDVKDSANYTCVAMSSLGVIEAVAQITVKSLPKAPGTPMVTENTATSITITWDSGNPDPVSYYVIEYKSKSQDGPYQIKEDITTTRYSIGGLSPNSEYEIWVSAVNSIGQGPPSESVVTRTGEQAPASAPRNVQARMLSATTMIVQWEEPVEPNGLIRGYRVYYTMEPEHPVGNWQKHNVDDSLLTTVGSLLEDETYTVRVLAFTSVGDGPLSDPIQVKTQQGVPGQPMNLRAEARSETSITLSWSPPRQESIIKYELLFREGDHGREVGRTFDPTTSYVVEDLKPNTEYAFRLAARSPQGLGAFTPVVRQRTLQSKPSAPPQDVKCVSVRSTAILVSWRPPPPETHNGALVGYSVRYRPLGSEDPEPKEVNGIPPTTTQILLEALEKWTQYRITTVAHTEVGPGPESSPVVVRTDEDVPSAPPRKVEAEALNATAIRVLWRSPAPGRQHGQIRGYQVHYVRMEGAEARGPPRIKDVMLADAQWETDDTAEYEMVITNLQPETAYSITVAAYTMKGDGARSKPKVVVTKGAVLGRPTLSVQQTPEGSLLARWEPPAGTAEDQVLGYRLQFGREDSTPLATLEFPPSEDRYTASGVHKGATYVFRLAARSRGGLGEEAAEVLSIPEDTPRGHPQILEAAGNASAGTVLLRWLPPVPAERNGAIVKYTVAVREAGALGPARETELPAAAEPGAENALTLQGLKPDTAYDLQVRAHTRRGPGPFSPPVRYRTFLRDQVSPKNFKVKMIMKTSVLLSWEFPDNYNSPTPYKIQYNGLTLDVDGRTTKKLITHLKPHTFYNFVLTNRGSSLGGLQQTVTAWTAFNLLNGKPSVAPKPDADGFIMVYLPDGQSPVPVQSYFIVMVPLRKSRGGQFLTPLGSPEDMDLEELIQDISRLQRRSLRHSRQLEVPRPYIAARFSVLPPTFHPGDQKQYGGFDNRGLEPGHRYVLFVLAVLQKSEPTFAASPFSDPFQLDNPDPQPIVDGEEGLIWVIGPVLAVVFIICIVIAILLYKNKPDSKRKDSEPRTKCLLNNADLAPHHPKDPVEMRRINFQTPDSGLRSPLREPGFHFESMLSHPPIPIADMAEHTERLKANDSLKLSQEYESIDPGQQFTWEHSNLEVNKPKNRYANVIAYDHSRVILQPIEGIMGSDYINANYVDGYRCQNAYIATQGPLPETFGDFWRMVWEQRSATIVMMTRLEEKSRIKCDQYWPNRGTETYGFIQVTLLDTIELATFCVRTFSLHKNGSSEKREVRQFQFTAWPDHGVPEYPTPFLAFLRRVKTCNPPDAGPIVVHCSAGVGRTGCFIVIDAMLERIKPEKTVDVYGHVTLMRSQRNYMVQTEDQYSFIHEALLEAVGCGNTEVPARSLYAYIQKLAQVEPGEHVTGMELEFKRLANSKAHTSRFISANLPCNKFKNRLVNIMPYESTRVCLQPIRGVEGSDYINASFIDGYRQQKAYIATQGPLAETTEDFWRMLWENNSTIVVMLTKLREMGREKCHQYWPAERSARYQYFVVDPMAEYNMPQYILREFKVTDARDGQSRTVRQFQFTDWPEQGVPKSGEGFIDFIGQVHKTKEQFGQDGPISVHCSAGVGRTGVFITLSIVLERMRYEGVVDIFQTVKMLRTQRPAMVQTED

SEQ ID NO: 2429 - protein, 1927 aa, Artificial Sequence; identical to SEQ ID NO: 2428
  Synthetic polypeptide

SEQ ID NO: 2430 - protein, 1928 aa, Artificial Sequence
  Synthetic polypeptide
MAPTWGPGMVSVVGPMGLLVVLLVGGCAAEEPPRFIKEPKDQIGVSGGVASFVCQATGDPKPRVTWNKKGKKVNSQRFETIEFDESAGAVLRIQPLRTPRDENVYECVAQNSVGEITVHAKLTVLREDQLPSGFPNIDMGPQLKVVERTRTATMLCAASGNPDPEITWFKDFLPVDPSASNGRIKQLRRSETFESTPIRGALQIESSEETDQGKYECVATNSAGVRYSSPANLYVRELREVRRVAPRFSILPMSHEIMPGGNVNITCVAVGSPMPYVKWMQGAEDLTPEDDMPVGRNVLELTDVKDSANYTCVAMSSLGVIEAVAQITVKSLPKAPGTPMVTENTATSITITWDSGNPDPVSYYVIEYKSKSQDGPYQIKEDITTTRYSIGGLSPNSEYEIWVSAVNSIGQGPPSESVVTRTGEQAPASAPRNVQARMLSATTMIVQWEEPVEPNGLIRGYRVYYTMEPEHPVGNWQKHNVDDSLLTTVGSLLEDETYTVRVLAFTSVGDGPLSDPIQVKTQQGVPGQPMNLRAEARSETSITLSWSPPRQESIIKYELLFREGDHGREVGRTFDPTTSYVVEDLKPNTEYAFRLAARSPQGLGAFTPVVRQRTLQSKPSAPPQDVKCVSVRSTAILVSWRPPPPETHNGALVGYSVRYRPLGSEDPEPKEVNGIPPTTTQILLEALEKWTQYRITTVAHTEVGPGPESSPVVVRTDEDVPSAPPRKVEAEALNATAIRVLWRSPAPGRQHGQIRGYQVHYVRMEGAEARGPPRIKDVMLADAQWETDDTAEYEMVITNLQPETAYSITVAAYTMKGDGARSKPKVVVTKGAVLGRPTLSVQQTPEGSLLARWEPPAGTAEDQVLGYRLQFGREDSTPLATLEFPPSEDRYTASGVHKGATYVFRLAARSRGGLGEEAAEVLSIPEDTPRGHPQILEAAGNASAGTVLLRWLPPVPAERNGAIVKYTVAVREAGALGPARETELPAAAEPGAENALTLQGLKPDTAYDLQVRAHTRRGPGPFSPPVRYRTFLRDQVSPKNFKVKMIMKTSVLLSWEFPDNYNSPTPYKIQYNGLTLDVDGRTTKKLITHLKPHTFYNFVLTNRGSSLGGLQQTVTAWTAFNLLNGKPSVAPKPDADGFIMVYLPDGQSPVPVQSYFIVMVPLRKSRGGQFLTPLGSPEDMDLEELIQDISRLQRRSLRHSRQLEVPRPYIAARFSVLPPTFHPGDQKQYGGFDNRGLEPGHRYVLFVLAVLQKSEPTFAASPFSDPFQLDNPDPQPIVDGEEGLIWVIGPVLAVVFIICIVIAILLYKKKPHSKRKDSEPRTKCLLNNADLAPHHPKDPVEMRRINFQTPDSGLRSPLREPGFHFESMLSHPPIPIADMAEHTERLKANDSLKLSQEYESIDPGQQFTWEHSNLEVNKPKNRYANVIAYDHSRVILQPIEGIMGSDYINANYVDGYRCQNAYIATQGPLPETFGDFWRMVWEQRSATIVMMTRLEEKSRIKCDQYWPNRGTETYGFIQVTLLDTIELATFCVRTFSLHKNGSSEKREVRQFQFTAWPDHGVPEYPTPFLAFLRRVKTCNPPDAGPIVVHCSAGVGRTGCFIVIDAMLERIKPEKTVDVYGHVTLMRSQRNYMVQTEDQYSFIHEALLEAVGCGNTEVPARSLYAYIQKLAQVEPGEHVTGMELEFKRLANSKAHTSRFISANLPCNKFKNRLVNIMPYESTRVCLQPIRGVEGSDYINASFIDGYRQQKAYIATQGPLAETTEDFWRMLWENNSTIVVMLTKLREMGREKCHQYWPAERSARYQYFVVDPMAEYNMPQYILREFKVTDARDGQSRTVRQFQFTDWPEQGVPKSGEGFIDFIGQVHKTKEQFGQDGPISVHCSAGVGRTGVFITLSIVLERMRYEGVVDIFQTVKMLRTQRPAMVQTED

SEQ ID NO: 2431 - protein, 108 aa, Artificial Sequence
  Synthetic polypeptide
MKNATIVMSVRREQGSSSGEGSLSFEDVAVGFTREEWQFLDQSQKVLYKEVMLENYINLVSIGYRGTKPDSLFKLEQGEPPGIAEGAAHSQICPDLHYRWKTAASEPQ

SEQ ID NO: 2432 - protein, 108 aa, Artificial Sequence; identical to SEQ ID NO: 2431
  Synthetic polypeptide

SEQ ID NO: 2433 - protein, 108 aa, Artificial Sequence; identical to SEQ ID NO: 2431
  Synthetic polypeptide

SEQ ID NO: 2434 - protein, 108 aa, Artificial Sequence; identical to SEQ ID NO: 2431
  Synthetic polypeptide

SEQ ID NO: 2435 - protein, 108 aa, Artificial Sequence; identical to SEQ ID NO: 2431
  Synthetic polypeptide

SEQ ID NO: 2436 - protein, 72 aa, Artificial Sequence
  Synthetic polypeptide
MALTQDVGKLTTAPAARRFAEGRHSLAPGSLKLSTGKSRAYCWKDAVLQACCDPNGRLSYQQSPPLLVISFT

SEQ ID NO: 2437 - protein, 72 aa, Artificial Sequence; identical to SEQ ID NO: 2436
  Synthetic polypeptide

SEQ ID NO: 2438 - protein, 72 aa, Artificial Sequence; identical to SEQ ID NO: 2436
  Synthetic polypeptide

SEQ ID NO: 2439 - protein, 72 aa, Artificial Sequence; identical to SEQ ID NO: 2436
  Synthetic polypeptide

SEQ ID NO: 2440 - protein, 19 aa, Artificial Sequence
  Synthetic polypeptide
MALPQHHWVRVSLTELVSA

SEQ ID NO: 2441 - protein, 19 aa, Artificial Sequence
  Synthetic polypeptide
MALPQHHWVRVSLTELVSA

SEQ ID NO: 2442 - protein, 19 aa, Artificial Sequence
  Synthetic polypeptide
MALPQHHWVRVSLTELVSA

SEQ ID NO: 2443 - protein, 90 aa, Artificial Sequence
  Synthetic polypeptide
MALPQGLLTFRDVAIEFSQEEWKCLDPAQRTLYRDVMLENYRNLVSLEFWSVIPAKVQWCHLRSLQPPLPRFKQFSCLSLPSTWDYRPLH

SEQ ID NO: 2444 - protein, 78 aa, Artificial Sequence
  Synthetic polypeptide
MALPQGLLTFRDVAIEFSQEEWKCLDPAQRTLYRDVMLENYRNLVSLGLSTELYNPVSSCLLSSLLGHQTGISTFTCP

SEQ ID NO: 2445 - protein, 78 aa, Artificial Sequence; identical to SEQ ID NO: 2444
  Synthetic polypeptide

SEQ ID NO: 2446 - protein, 78 aa, Artificial Sequence; identical to SEQ ID NO: 2444
  Synthetic polypeptide

SEQ ID NO: 2447 - protein, 42 aa, Artificial Sequence
  Synthetic polypeptide
MLENYRNLVSLGLSTELYNPVSSCLLSSLLGHQTGISTFTCP

SEQ ID NO: 2448 - protein, 82 aa, Artificial Sequence
  Synthetic polypeptide
MALPQGLLTFRDVAIEFSQEEWKCLDPAQRTLYRDVMLENYRNLVSLGLSTELYNPVCSCLLTSLLGHQTGISTFTCPKVTS

SEQ ID NO: 2449 - protein, 82 aa, Artificial Sequence; identical to SEQ ID NO: 2448
  Synthetic polypeptide

SEQ ID NO: 2450 - protein, 82 aa, Artificial Sequence; identical to SEQ ID NO: 2448
  Synthetic polypeptide

SEQ ID NO: 2451 - protein, 46 aa, Artificial Sequence
  Synthetic polypeptide
MLENYRNLVSLGLSTELYNPVCSCLLTSLLGHQTGISTFTCPKVTS

SEQ ID NO: 2452 - protein, 19 aa, Artificial Sequence
  Synthetic polypeptide
MALPQHHWVRVSLTELVSA

SEQ ID NO: 2453 - protein, 19 aa, Artificial Sequence
  Synthetic polypeptide
MALPQHHWVRVSLTELVSA

SEQ ID NO: 2454 - protein, 19 aa, Artificial Sequence
  Synthetic polypeptide
MALPQHHWVRVSLTELVSA

SEQ ID NO: 2455 - protein, 19 aa, Artificial Sequence
  Synthetic polypeptide
MALPQHHWVRVSLTELVSA

SEQ ID NO: 2456 - protein, 139 aa, Artificial Sequence
  Synthetic polypeptide
MGPHRLWMCLSACCPAVHAMPGIGPLAQTPVLWRADLHRSGCVAAGAHCGIHFHRLETAPEQHSSLLQGPPVACSPLVSISAHVYLMMQMTTETWAQCGVWMLIVPATQEMKAGASLETRSSRPAWATWRDSTSTKIKN

SEQ ID NO: 2457 - protein, 140 aa, Artificial Sequence
  Synthetic polypeptide
MMWSNFFLQEENRRRGAAGRRRAHGQGRSGLTPEREGKVKLALLLAAVGATLAVLSVGTEFWVELNTYKANGSAVCEAAHLGLWKACTKRLWQADVPVDRDTCGPAELPGEANCTYFKFFTTGENARIFQRTTKKVTLEK

SEQ ID NO: 2458 - protein, 140 aa, Artificial Sequence; identical to SEQ ID NO: 2457
  Synthetic polypeptide

SEQ ID NO: 2459 - protein, 596 aa, Artificial Sequence
  Synthetic polypeptide
MEENPTLESEAWGSSRGWLAPREARGGPSLSSVLNELPSAATLRYRDPGVLPWGALEEEEEDGGRSRKAFTEVTQTELQDPHPSRELPWPMQARRAHRQRNASRDQVVYGSGTKTDRWARLLRRSKEKTKEGLRSLQPWAWTLKRIGGQFGAGTESYFSLLRFLLLLNVLASVLMACMTLLPTWLGGAPPGPPGPDISSPCGSYNPHSQGLVTFATQLFNLLSGEGYLEWSPLFYGFYPPRPRLAVTYLCWAFAVGLICLLLILHRSVSGLKQTLLAESEALTSYSHRVFSAWDFGLCGDVHVRLRQRIILYELKVELEETVVRRQAAVRTLGQQARVWLVRVLLNLLVVALLGAAFYGVYWATGCTVELQEMPLVQELPLLKLGVNYLPSIFIAGVNFVLPPVFKLIAPLEGYTRSRQIVFILLRTVFLRLASLVVLLFSLWNQITCGGDSEAEDCKTCGYNYKQLPCWETVLGQEMYKLLLFDLLTVLAVALLIQFPRKLLCGLCPGALGRLAGTQEFQVPDEVLGLIYAQTVVWVGSFFCPLLPLLNTVKFLLLFYLKKGGEGRSEPRSCHCTPAWATERDSVSKRENKQTTT

SEQ ID NO: 2460 - protein, 184 aa, Artificial Sequence
  Synthetic polypeptide
MKGGGGQRDVGADRTVFLRLASLVVLLFSLWNQITCGGDSEAEDCKTCGYNYKQLPCWETVLGQEMYKLLLFDLLTVLAVALLIQFPRKLLCGLCPGALGRLAGTQEFQVPDEVLGLIYAQTVVWVGSFFCPLLPLLNTVKFLLLFYLKKGGEGRSEPRSCHCTPAWATERDSVSKRENKQTTT

SEQ ID NO: 2461 - protein, 602 aa, Artificial Sequence
  Synthetic polypeptide
MEENPTLESEAWGSSRGWLAPREARGAPCSSPGPSLSSVLNELPSAATLRYRDPGVLPWGALEEEEEDGGRSRKAFTEVTQTELQDPHPSRELPWPMQARRAHRQRNASRDQVVYGSGTKTDRWARLLRRSKEKTKEGLRSLQPWAWTLKRIGGQFGAGTESYFSLLRFLLLLNVLASVLMACMTLLPTWLGGAPPGPPGPDISSPCGSYNPHSQGLVTFATQLFNLLSGEGYLEWSPLFYGFYPPRPRLAVTYLCWAFAVGLICLLLILHRSVSGLKQTLLAESEALTSYSHRVFSAWDFGLCGDVHVRLRQRIILYELKVELEETVVRRQAAVRTLGQQARVWLVRVLLNLLVVALLGAAFYGVYWATGCTVELQEMPLVQELPLLKLGVNYLPSIFIAGVNFVLPPVFKLIAPLEGYTRSRQIVFILLRTVFLRLASLVVLLFSLWNQITCGGDSEAEDCKTCGYNYKQLPCWETVLGQEMYKLLLFDLLTVLAVALLIQFPRKLLCGLCPGALGRLAGTQEFQVPDEVLGLIYAQTVVWVGSFFCPLLPLLNTVKFLLLFYLKKGGEGRSEPRSCHCTPAWATERDSVSKRENKQTTT

SEQ ID NO: 2462 - protein, 96 aa, Artificial Sequence
  Synthetic polypeptide
MGSSRCGPGAHPVHLWPPHFAFSGHHPRDLGPHSGPALLVSLASEVQDLHLAQRKEMASGFSKGPTLGLLPDVPSLMETLSYSYCYVGIMTGQPPS

SEQ ID NO: 2463 - protein, 96 aa, Artificial Sequence; identical to SEQ ID NO: 2462
  Synthetic polypeptide

SEQ ID NO: 2464 - protein, 169 aa, Artificial Sequence
  Synthetic polypeptide
MSPEEWTYLVVLLISIPIGFLFKKAGPGLKRWGAAAVGLGLTLFTCGPHTLHSLVTILGTWALIQAQPCSCHALALAWTFSYLLFFRALSLLGLPTPTPFTNAVQLLLTLKLVSLASEVQDLHLAQRKEMASGFSKGPTLGLLPDVPSLMETLSYSYCYVGIMTGQPPS

SEQ ID NO: 2465 - protein, 169 aa, Artificial Sequence; identical to SEQ ID NO: 2464
  Synthetic polypeptide

SEQ ID NO: 2466 - protein, 169 aa, Artificial Sequence; identical to SEQ ID NO: 2464
  Synthetic polypeptide

SEQ ID NO: 2467 - protein, 169 aa, Artificial Sequence; identical to SEQ ID NO: 2464
  Synthetic polypeptide

SEQ ID NO: 2468 - protein, 121 aa, Artificial Sequence
  Synthetic polypeptide
HTLHSLVTILGTWALIQAQPCSCHALALAWTFSYLLFFRALSLLGLPTPTPFTNAVQLLLTLKLVSLASEVQDLHLAQRKEMASGFSKGPTLGLLPDVPSLMETLSYSYCYVGIMTGQPPS

SEQ ID NO: 2469 - protein, 22 aa, Artificial Sequence
  Synthetic polypeptide
GRKWPQASARGPPWGCCPTCPP

SEQ ID NO: 2470 - protein, 402 aa, Artificial Sequence
  Synthetic polypeptide
MIPTFTALLCLGLSLGPRTHMQAGPLPKPTLWAEPGSVISWGNSVTIWCQGTLEAREYRLDKEESPAPWDRQNPLEPKNKARFSIPSMTEDYAGRYRCYYRSPVGWSQPSDPLELVMTGAYSKPTLSALPSPLVTSGKSVTLLCQSRSPMDTFLLIKERAAHPLLHLRSEHGAQQHQAEFPMSPVTSVHGGTYRCFSSHGFSHYLLSHPSDPLELIVSGSLEDPRPSPTRSVSTAAGPEDQPLMPTGSVPHSGLRRHWEVLIGVLVVSILLLSLLLFLLLQHWRQGKHRTLAQRQADFQRPPGAAEPEPKDGGLQRRSSPAADVQGENFCAAVKNTQPEDGVEMDTRHRHGGPLLVQHAASCLLGPHSLLLSWDLMGLLPGPLPAPHPLFGHLVVRELPRPQ

SEQ ID NO: 2471 - protein, 402 aa, Artificial Sequence; identical to SEQ ID NO: 2470
  Synthetic polypeptide

SEQ ID NO: 2472 - protein, 402 aa, Artificial Sequence; identical to SEQ ID NO: 2470
  Synthetic polypeptide

SEQ ID NO: 2473 - protein, 402 aa, Artificial Sequence; identical to SEQ ID NO: 2470
  Synthetic polypeptide

SEQ ID NO: 2474 - protein, 403 aa, Artificial Sequence
  Synthetic polypeptide
MIPTFTALLCLGLSLGPRTHMQAGPLPKPTLWAEPGSVISWGNSVTIWCQGTLEAREYRLDKEESPAPWDRQNPLEPKNKARFSIPSMTEDYAGRYRCYYRSPVGWSQPSDPLELVMTGAYSKPTLSALPSPLVTSGKSVTLLCQSRSPMDTFLLIKERAAHPLLHLRSEHGAQQHQAEFPMSPVTSVHGGTYRCFSSHGFSHYLLSHPSDPLELIVSGSLEDPRPSPTRSVSTAAGPEDQPLMPTGSVPHSGLRRHWEVLIGVLVVSILLLSLLLFLLLQHWRQGKHRTLAQRQADFQRPPGAAEPEPKDGGLQRRSSPAADVQGENFSGAAVKNTQPEDGVEMDTRHRHGGPLLVQHAASCLLGPHSLLLSWDLMGLLPGPLPAPHPLFGHLVVRELPRPQ

SEQ ID NO: 2475 - protein, 401 aa, Artificial Sequence
  Synthetic polypeptide
MIPTFTALLCLGLSLGPRTHMQAGPLPKPTLWAEPGSVISWGNSVTIWCQGTLEAREYRLDKEESPAPWDRQNPLEPKNKARFSIPSMTEDYAGRYRCYYRSPVGWSQPSDPLELVMTGAYSKPTLSALPSPLVTSGKSVTLLCQSRSPMDTFLLIKERAAHPLLHLRSEHGAQQHQAEFPMSPVTSVHGGTYRCFSSHGFSHYLLSHPSDPLELIVSGSLEDPRPSPTRSVSTAGPEDQPLMPTGSVPHSGLRRHWEVLIGVLVVSILLLSLLLFLLLQHWRQGKHRTLAQRQADFQRPPGAAEPEPKDGGLQRRSSPAADVQGENFCAAVKNTQPEDGVEMDTRHRHGGPLLVQHAASCLLGPHSLLLSWDLMGLLPGPLPAPHPLFGHLVVRELPRPQ

SEQ ID NO: 2476 - protein, 12 aa, Artificial Sequence
  Synthetic polypeptide
MVARVWSLMRWE

SEQ ID NO: 2477 - protein, 12 aa, Artificial Sequence
  Synthetic polypeptide
MVARVWSLMRWE

SEQ ID NO: 2478 - protein, 81 aa, Artificial Sequence
  Synthetic polypeptide
MAAAALRFPVQGTVTFEDVAVKFTQEEWNLLSEAQRCLYRDVTLENLALMSSLGCWCGVEDEAAPSKQSIYIQRETQGKKQ

SEQ ID NO: 2479 - protein, 137 aa, Artificial Sequence
  Synthetic polypeptide
MAAAATLRLSAQGTVTFEDVAVNFTWEEWNLLSEAQRCLYRDVTLENLALISSLGCWCGVEDEAAPSKQSIYIQRETQILHWMDQRTTHRPVIWVNQFCHPTQNRKQHEKLTLTPYESISNQTDQHSPLPKPLPAKF

SEQ ID NO: 2480 - protein, 137 aa, Artificial Sequence; identical to SEQ ID NO: 2479
  Synthetic polypeptide

SEQ ID NO: 2481 - protein, 41 aa, Artificial Sequence
  Synthetic polypeptide
MLENLALISSLDPALDGSADNTQTGNLGQSVLPSHPEQKTA

SEQ ID NO: 2482 - protein, 41 aa, Artificial Sequence; identical to SEQ ID NO: 2481
  Synthetic polypeptide

SEQ ID NO: 2483 - protein, 41 aa, Artificial Sequence; identical to SEQ ID NO: 2481
  Synthetic polypeptide

SEQ ID NO: 2484 - protein, 41 aa, Artificial Sequence; identical to SEQ ID NO: 2481
  Synthetic polypeptide

SEQ ID NO: 2485 - protein, 41 aa, Artificial Sequence; identical to SEQ ID NO: 2481
  Synthetic polypeptide

SEQ ID NO: 2486 - protein, 3 aa, Artificial Sequence
  Synthetic polypeptide
MWL

SEQ ID NO: 2487 - protein, 84 aa, Artificial Sequence
  Synthetic polypeptide
MAAAAPRRPTQQGTVTFEDVAVNFSQEEWCLLSEAQRCLYRDVMLENLALISSLDPALDGSADNTQTGNLGQSVLPSHPEQKTA

SEQ ID NO: 2488 - protein, 83 aa, Artificial Sequence
  Synthetic polypeptide
MAAAAPRRPTQGTVTFEDVAVNFSQEEWCLLSEAQRCLYRDVMLENLALISSLDPALDGSADNTQTGNLGQSVLPSHPEQKTA

SEQ ID NO: 2489 - protein, 70 aa, Artificial Sequence
  Synthetic polypeptide
MAAAAPRRPTQILHWMDQRTTHRPVIWVNQFCHPTQNRKQHEKLTLTPYESISNQTDQHSPLPKPLPAKF

SEQ ID NO: 2490 - protein, 70 aa, Artificial Sequence; identical to SEQ ID NO: 2489
  Synthetic polypeptide

SEQ ID NO: 2491 - protein, 74 aa, Artificial Sequence
  Synthetic polypeptide
MEARSMLVPPQASVCFEDVAMAFTQEEWEQLDLAQRTLYREVTLETWEHIVSLAGARRGPVQGRAGGPPRENDI

SEQ ID NO: 2492 - protein, 74 aa, Artificial Sequence; identical to SEQ ID NO: 2491
  Synthetic polypeptide

SEQ ID NO: 2493 - protein, 74 aa, Artificial Sequence; identical to SEQ ID NO: 2491
  Synthetic polypeptide

SEQ ID NO: 2494 - protein, 74 aa, Artificial Sequence; identical to SEQ ID NO: 2491
  Synthetic polypeptide

SEQ ID NO: 2495 - protein, 129 aa, Artificial Sequence
  Synthetic polypeptide
MEARSMLVPPQASVCFEDVAMAFTQEEWEQLDLAQRTLYREVTLETWEHIVSLGLFLSKSDVISQLEQEEDLCRAEQEAPRGKMTFEDKVRHLQAKECQRLPANHQKLRKGMEHILSCSPQKEPTMPTL

SEQ ID NO: 2496 - protein, 129 aa, Artificial Sequence; identical to SEQ ID NO: 2495
  Synthetic polypeptide

SEQ ID NO: 2497 - protein, 129 aa, Artificial Sequence; identical to SEQ ID NO: 2495
  Synthetic polypeptide

SEQ ID NO: 2498 - protein, 129 aa, Artificial Sequence; identical to SEQ ID NO: 2495
  Synthetic polypeptide

SEQ ID NO: 2499 - protein, 129 aa, Artificial Sequence; identical to SEQ ID NO: 2495
  Synthetic polypeptide

SEQ ID NO: 2500 - protein, 129 aa, Artificial Sequence; identical to SEQ ID NO: 2495
  Synthetic polypeptide

SEQ ID NO: 2501 - protein, 38 aa, Artificial Sequence
  Synthetic polypeptide
PLSHPAEAARESARTLSPTPCSGPARLQPKLEAMLPRQ

SEQ ID NO: 2502 - protein, 130 aa, Artificial Sequence
  Synthetic polypeptide
MSDYSTGGPPPGPPPPAGGGGGAGGAGGGPPPGPPGAGDRGGGGPGGGGPGGGSAGGPSQPPGGGGPGIRKDAFADAVQRARQIAAKIGGDAATTVNNSTPDFGFGGQKRQLEDGDRCHLPTYLTGVLWG

SEQ ID NO: 2503 - protein, 27 aa, Artificial Sequence
  Synthetic polypeptide
VPSTAATSPTCWASSPMRASTWPSTRL

SEQ ID NO: 2504 - protein, 11 aa, Artificial Sequence
  Synthetic polypeptide
QPKPSFTLWRC

SEQ ID NO: 2505 - protein, 57 aa, Artificial Sequence
  Synthetic polypeptide
AREADGHVVETAGGRRSGRCRVTDRHGPSGPPQGLHAGPCLKDQPAEHPWGASKHGP

SEQ ID NO: 2506 - protein, 57 aa, Artificial Sequence; identical to SEQ ID NO: 2505
  Synthetic polypeptide

SEQ ID NO: 2507 - protein, 503 aa, Artificial Sequence
  Synthetic polypeptide
MRGSPGDAERRQRWGRLFEELDSNKDGRVDVHELRQGLARLGGGNPDPGAQQGISSEGDADPDGGLDLEEFSRYLQEREQRLLLMFHSLDRNQDGHIDVSEIQQSFRALGISISLEQAEKILHSMDRDGTMTIDWQEWRDHFLLHSLENVEDVLYFWKHSTLSSAGFSAWIKDSTAEQNRSKTTVLARRSGSHLKSQHFGRPKWADHEVLDIGECLTVPDEFSKQEKLTGMWWKQLVAGAVAGAVSRTGTAPLDRLKVFMQVHASKTNRLNILGGLRSMVLEGGIRSLWRGNGINVLKIAPESAIKFMAYEQIKRAILGQQETLHVQERFVAGSLAGATAQTIIYPMEVLKTRLTLRRTGQYKGLLDCARRILEREGPRAFYRGYLPNVLGIIPYAGIDLAVYETLKNWWLQQYSHDSADPGILVLLACGTISSTCGQIASYPLALVRTRMQAQGSRWSCHEQPYGEDHVVRNSANSHVTELGRGSCCPGQHLTAILSVEFPG

SEQ ID NO: 2508 - protein, 117 aa, Artificial Sequence
  Synthetic polypeptide
NVLKIAPESAIKFMAYEQTLKNWWLQQYSHDSADPGILVLLACGTISSTCGQIASYPLALVRTRMQAQGSRWSCHEQPYGEDHVVRNSANSHVTELGRGSCCPGQHLTAILSVEFPG

SEQ ID NO: 2509 - protein, 456 aa, Artificial Sequence
  Synthetic polypeptide
MRGSPGDAERRQRWGRLFEELDSNKDGRVDVHELRQGLARLGGGNPDPGAQQGISSEGDADPDGGLDLEEFSRYLQEREQRLLLMFHSLDRNQDGHIDVSEIQQSFRALGISISLEQAEKILHSMDRDGTMTIDWQEWRDHFLLHSLENVEDVLYFWKHSTVLDIGECLTVPDEFSKQEKLTGMWWKQLVAGAVAGAVSRTGTAPLDRLKVFMQVHASKTNRLNILGGLRSMVLEGGIRSLWRGNGINVLKIAPESAIKFMAYEQIKRAILGQQETLHVQERFVAGSLAGATAQTIIYPMEVLKTRLTLRRTGQYKGLLDCARRILEREGPRAFYRGYLPNVLGIIPYAGIDLAVYETLKNWWLQQYSHDSADPGILVLLACGTISSTCGQIASYPLALVRTRMQAQGSRWSCHEQPYGEDHVVRNSANSHVTELGRGSCCPGQHLTAILSVEFPG

SEQ ID NO: 2510 - protein, 456 aa, Artificial Sequence; identical to SEQ ID NO: 2509
  Synthetic polypeptide

SEQ ID NO: 2511 - protein, 65 aa, Artificial Sequence
  Synthetic polypeptide
SAPCGAAMVLMYSRLPPSQLSSSWPMNRSRGPSWGSRRHCMCRSASWLAPWLVPQPKPSFTLWRC

SEQ ID NO: 2512 - protein, 217 aa, Artificial Sequence
  Synthetic polypeptide
MWWKQLVAGAVAGAVSRTGTAPLDRLKVFMQVHASKTNRLNILGGLRSMVLEGGIRSLWRGNGINVLKIAPESAIKFMAYEQIKRAILGQQETLHVQERFVAGSLAGATAQTIIYPMETLKNWWLQQYSHDSADPGILVLLACGTISSTCGQIASYPLALVRTRMQAQGSRWSCHEQPYGEDHVVRNSANSHVTELGRGSCCPGQHLTAILSVEFPG

SEQ ID NO: 2513 - protein, 1702 aa, Artificial Sequence
  Synthetic polypeptide
MGPTSGPSLLLLLLTHLPLALGSPMYSIITPNILRLESEETMVLEAHDAQGDVPVTVTVHDFPGKKLVLSSEKTVLTPATNHMGNVTFTIPANREFKSEKGRNKFVTVQATFGTQVVEKVVLVSLQSGYLFIQTDKTIYTPGSTVLYRIFTVNHKLLPVGRTVMVNIENPEGIPVKQDSLSSQNQLGVLPLSWDIPELVNMGQWKIRAYYENSPQQVFSTEFEVKEYVLPSFEVIVEPTEKFYYIYNEKGLEVTITARFLYGKKVEGTAFVIFGIQDGEQRISLPESLKRIPIEDGSGEVVLSRKVLLDGVQNPRAEDLVGKSLYVSATVILHSGSDMVQAERSGIPIVTSPYQIHFTKTPKYFKPGMPFDLMVFVTNPDGSPAYRVPVAVQGEDTVQSLTQGDGVAKLSINTHPSQKPLSITVRTKKQELSEAEQATRTMQALPYSTVGNSNNYLHLSVLRTELRPGETLNVNFLLRMDRAHEAKIRYYTYLIMNKGRLLKAGRQVREPGQDLVVLPLSITTDFIPSFRLVAYYTLIGASGQREVVADSVWVDVKDSCVGSLVVKSGQSEDRQPVPGQQMTLKIEGDHGARVVLVAVDKGVFVLNKKNKLTQSKIWDVVEKADIGCTPGSGKDYAGVFSDAGLTFTSSSGQQTAQRAELQCPQPAARRRRSVQLTEKRMDKVGKYPKELRKCCEDGMRENPMRFSCQRRTRFISLGEACKKVFLDCCNYITELRRQHARASHLGLARSNLDEDIIAEENIVSRSEFPESWLWNVEDLKEPPKNGISTKLMNIFLKDSITTWEILAVSMSDKKGICVADPFEVTVMQDFFIDLRLPYSVVRNEQVEIRAVLYNYRQNQELKVRVELLHNPAFCSLATTKRRHQQTVTIPPKSSLSVPYVIVPLKTGLQEVEVKAAVYHHFISDGVRKSLKVVPEGIRMNKTVAVRTLDPERLGREGVQKEDIPPADLSDQVPDTESETRILLQGTPVAQMTEDAVDAERLKHLIVTPSGCGEQNMIGMTPTVIAVHYLDETEQWEKFGLEKRQGALELIKKGYTQQLAFRQPSSAFAAFVKRAPSTWLTAYVVKVFSLAVNLIAIDSQVLCGAVKWLILEKQKPDGVFQEDAPVIHQEMIGGLRNNNEKDMALTAFVLISLQEAKDICEEQVNSLPGSITKAGDFLEANYMNLQRSYTVAIAGYALAQMGRLKGPLLNKFLTTAKDKNRWEDPGKQLYNVEATSYALLALLQLKDFDFVPPVVRWLNEQRYYGGGYGSTQATFMVFQALAQYQKDAPDHQELNLDVSLQLPSRSSKITHRIHWESASLLRSEETKENEGFTVTAEGKGQGTLSVVTMYHAKAKDQLTCNKFDLKVTIKPAPETEKRPQDAKNTMILEICTRYRGDQDATMSILDISMMTGFAPDTDDLKQLANGVDRYISKYELDKAFSDRNTLIIYLDKVSHSEDDCLAFKVHQYFNVELIQPGAVKVYAYYNLEESCTRFYHPEKEDGKLNKLCRDELCRCAEENCFIQKSDDKVTLEERLDKACEPGVDYVYKTRLVKVQLSNDFDEYIMAIEQTIKSGSDEVQVGQQRTFISPIKCREALKLEEKKHYLMWGLSSDFWGEKPNLSYIIGKDTWVEHWPEEDECQDEENQKQCQDLGAFTESMVSCLSGSTRRGAGTLLAVVHCCIPHTESRAWHGQKVLSRYLVAPSE

SEQ ID NO: 2514 - protein, 144 aa, Artificial Sequence
  Synthetic polypeptide
NNEKDMALTAFVLISLQEAKDICEEQVNSLPGSITKAGDFLEANYMNLQRSYTVAIAGYALAQMGRLKGPLLNKFLTTAKDEENQKQCQDLGAFTESMVSCLSGSTRRGAGTLLAVVHCCIPHTESRAWHGQKVLSRYLVAPSE

SEQ ID NO: 2515 - protein, 176 aa, Artificial Sequence
  Synthetic polypeptide
MGPTSGPSLLLLLLTHLPLALGSPMYSIITPNILRLESEETMVLEAHDAQGDVPVTVTVHDFPGKKLVLSSEKTVLTPATNHMGNVTFTIPANREFKSEKGRNKFVTVQATFGTQVVEKVVLVSLQSGYLFIQTDKTIYTPGSTVLYRIFTVNHKLLPVGRTVMVNIEARCSGSHL

SEQ ID NO: 2516 - protein, 139 aa, Artificial Sequence
  Synthetic polypeptide
MNLWLLACLVAGFLGAWAPAVHTQGVFEDCCLAYHYPIGWAVLRRAWTYRIQEVSGSCNLPAAIFYLPKRHRKVCGNPKSREVQRAMKLLDARNKVFAKLHHNTQTFQGPHAVKKLSSGNSKLSSSKFSNPISSSKRNA

SEQ ID NO: 2517 - protein, 140 aa, Artificial Sequence
  Synthetic polypeptide
MNLWLLACLVAGFLGAWAPAVHTQGVFEDCCLAYHYPIGWAVLRRAWTYRIQEVSGSCNLPAAIFYLPKRHRKVCGNPKSREVQRAMKLLDARNKVFAKLHHNTQTFQAGPHAVKKLSSGNSKLSSSKFSNPISSSKRNA

SEQ ID NO: 2518 - protein, 14534 aa, Artificial Sequence
  Synthetic polypeptide
MLKPSGLPGSSSPTRSLMTGSRSTKATPEMDSGLTGATLSPKTSTGAIVVTEHTLPFTSPDKTLASPTSSVVGRTTQSLGVMSSALPESTSRGMTHSEQRTSPSLSPQVNGTPSRNYPATSMVSGLSSPRTRTSSTEGNFTKEASTYTLTVETTSGPVTEKYTVPTETSTTEGDSTETPWDTRYIPVKITSPMKTFADSTASKENAPVSMTPAETTVTDSHTPGRTNPSFGTLYSSFLDLSPKGTPNSRGETSLELILSTTGYPFSSPEPGSAGHSRISTSAPLSSSASVLDNKISETSIFSGQSLTSPLSPGVPEARASTMPNSAIPFSMTLSNAETSAERVRSTISSLGTPSISTKQTAETILTFHAFAETMDIPSTHIAKTLASEWLGSPGTLGGTSTSALTTTSPSTTLVSEETNTHHSTSGKETEGTLNTSMTPLETSAPGEESEMTATLVPTLGFTTLDSKIRSPSQVSSSHPTRELRTTGSTSGRQSSSTAAHGSSDILRATTSSTSKASSWTSESTAQQFSEPQHTQWVETSPSMKTERPPASTSVAAPITTSVPSVVSGFTTLKTSSTKGIWLEETSADTLIGESTAGPTTHQFAVPTGISMTGGSSTRGSQGTTHLLTRATASSETSADLTLATNGVPVSVSPAVSKTAAGSSPPGGTKPSYTMVSSVIPETSSLQSSAFREGTSLGLTPLNTRHPFSSPEPDSAGHTKISTSIPLLSSASVLEDKVSATSTFSHHKATSSITTGTPEISTKTKPSSAVLSSMTLSNAATSPERVRNATSPLTHPSPSGEETAGSVLTLSTSAETTDSPNIHPTGTLTSESSESPSTLSLPSVSGVKTTFSSSTPSTHLFTSGEETEETSNPSVSQPETSVSRVRTTLASTSVPTPVFPTMDTWPTRSAQFSSSHLVSELRATSSTSVTNSTGSALPKISHLTGTATMSQTNRDTFNDSAAPQSTTWPETSPRFKTGLPSATTTVSTSATSLSATVMVSKFTSPATSSMEATSIREPSTTILTTETTNGPGSMAVASTNIPIGKGYITEGRLDTSHLPIGTTASSETSMDFTMAKESVSMSVSPSQSMDAAGSSTPGRTSQFVDTFSDDVYHLTSREITIPRDGTSSALTPQMTATHPPSPDPGSARSTWLGILSSSPSSPTPKVTMSSTFSTQRVTTSMIMDTVETSRWNMPNLPSTTSLTPSNIPTSGAIGKSTLVPLDTPSPATSLEASEGGLPTLSTYPESTNTPSIHLGAHASSESPSTIKLTMASVVKPGSYTPLTFPSIETHIHVSTARMAYSSGSSPEMTAPGETNTGSTWDPTTYITTTDPKDTSSAQVSTPHSVRTLRTTENHPKTESATPAAYSGSPKISSSPNLTSPATKAWTITDTTEHSTQLHYTKLAEKSSGFETQSAPGPVSVVIPTSPTIGSSTLELTSDVPGEPLVLAPSEQTTITLPMATWLSTSLTEEMASTDLDISSPSSPMSTFAIFPPMSTPSHELSKSEADTSAIRNTDSTTLDQHLGIRSLGRTGDLTTVPITPLTTTWTSVIEHSTQAQDTLSATMSPTHVTQSLKDQTSIPASASPSHLTEVYPELGTQGRSSSEATTFWKPSTDTLSREIETGPTNIQSTPPMDNTTTGSSSSGVTLGIAHLPIGTSSPAETSTNMALERRSSTATVSMAGTMGLLVTSAPGRSISQSLGRVSSVLSESTTEGVTDSSKGSSPRLNTQGNTALSSSLEPSYAEGSQMSTSIPLTSSPTTPDVEFIGGSTFWTKEVTTVMTSDISKSSARTESSSATLMSTALGSTENTGKEKLRTASMDLPSPTPSMEVTPWISLTLSNAPNTTDSLDLSHGVHTSSAGTLATDRSLNTGVTRASRLENGSDTSSKSLSMGNSTHTSMTYTEKSEVSSSIHPRPETSAPGAETTLTSTPGNRAISLTLPFSSIPVEEVISTGITSGPDINSAPMTHSPITPPTIVWTSTGTIEQSTQPLHAVSSEKVSVQTQSTPYVNSVAVSASPTHENSVSSGSSTSSPYSSASLESLDSTISRRNAITSWLWDLTTSLPTTTWPSTSLSEALSSGHSGVSNPSSTTTEFPLFSAASTSAAKQRNPETETHGPQNTAASTLNTDASSVTGLSETPVGASISSEVPLPMAITSRSDVSGLTSESTANPSLGTASSAGTKLTRTISLPTSESLVSFRMNKDPWTVSIPLGSHPTTNTETSIPVNSAGPPGLSTVASDVIDTPSDGAESIPTVSFSPSPDTEVTTISHFPEKTTHSFRTISSLTHELTSRVTPIPGDWMSSAMSTKPTGASPSITLGERRTITSAAPTTSPIVLTASFTETSTVSLDNETTVKTSDILDARKTNELPSDSSSSSDLINTSIASSTMDVTKTASISPTSISGMTASSSPSLFSSDRPQVPTSTTETNTATSPSVSSNTYSLDGGSNVGGTPSTLPPFTITHPVETSSALLAWSRPVRTFSTMVSTDTASGENPTSSNSVVTSVPAPGTWTSVGSTTDLPAMGFLKTSPAGEAHSLLASTIEPATAFTPHLSAAVVTGSSATSEASLLTTSESKAIHSSPQTPTTPTSGANWETSATPESLLVVTETSDTTLTSKILVTDTILFSTVSTPPSKFPSTGTLSGASFPTLLPDTPAIPLTATEPTSSLATSFDSTPLVTIASDSLGTVPETTLTMSETSNGDALVLKTVSNPDRSIPGITIQGVTESPLHPSSTSPSKIVAPRNTTYEGSITVALSTLPAGTTGSLVFSQSSENSETTALVDSSAGLERASVMPLTTGSQGMASSGGIRSGSTHSTGTKTFSSLPLTMNPGEVTAMSEITTNRLTATQSTAPKGIPVKPTSAESGLLTPVSASSSPSKAFASLTTAPPTWGIPQSTLTFEFSEVPSLDTKSASLPTPGQSLNTIPDSDASTASSSLSKSPEKNPRARMMTSTKAISASSFQSTGFTETPEGSASPSMAGHEPRVPTSGTGDPRYASESMSYPDPSKASSAMTSTSLASKLTTLFSTGQAARSGSSSSPISLSTEKETSFLSPTASTSRKTSLFLGPSMARQPNILVHLQTSALTLSPTSTLNMSQEEPPELTSSQTIAEEEGTTAETQTLTFTPSETPTSLLPVSSPTEPTARRKSSPETWASSISVPAKTSLVETTDGTLVTTIKMSSQAAQGNSTWPAPAEETGSSPAGTSPGSPEMSTTLKIMSSKEPSISPEIRSTVRNSPWKTPETTVPMETTVEPVTLQSTALGSGSTSISHLPTGTTSPTKSPTENMLATERVSLSPSPPEAWTNLYSGTPGGTRQSLATMSSVSLESPTARSITGTGQQSSPELVSKTTGMEFSMWHGSTGGTTGDTHVSLSTSSNILEDPVTSPNSVSSLTDKSKHKTETWVSTTAIPSTVLNNKIMAAEQQTSRSVDEAYSSTSSWSDQTSGSDITLGASPDVTNTLYITSTAQTTSLVSLPSGDQGITSLTNPSGGKTSSASSVTSPSIGLETLRANVSAVKSDIAPTAGHLSQTSSPAEVSILDVTTAPTPGISTTITTMGTNSISTTTPNPEVGMSTMDSTPATERRTTSTEHPSTWSSTAASDSWTVTDMTSNLKVARSPGTISTMHTTSFLASSTELDSMSTPHGRITVIGTSLVTPSSDASAVKTETSTSERTLSPSDTTASTPISTFSRVQRMSISVPDILSTSWTPSSTEAEDVPVSMVSTDHASTKTDPNTPLSTFLFDSLSTLDWDTGRSLSSATATTSAPQGATTPQELTLETMISPATSQLPFSIGHITSAVTPAAMARSSGVTFSRPDPTSKKAEQTSTQLPTTTSAHPGQVPRSAATTLDVIPHTAKTPDATFQRQGQTALTTEARATSDSWNEKEKSTPSAPWITEMMNSVSEDTIKEVTSSSSVLRTLNTLDINLESGTTSSPSWKSSPYERIAPSESTTDKEAIHPSTNTVETTGWVTSSEHASHSTIPAHSASSKLTSPVVTTSTREQAIVSMSTTTWPESTRARTEPNSFLTIELRDVSPYMDTSSTTQTSIISSPGSTAITKGPRTEITSSKRISSSFLAQSMRSSDSPSEAITRLSNFPAMTESGGMILAMQTSPPGATSLSAPTLDTSATASWTGTPLATTQRFTYSEKTTLFSKGPEDTSQPSPPSVEETSSSSSLVPIHATTSPSNILLTSQGHSPSSTPPVTSVFLSETSGLGKTTDMSRISLEPGTSLPPNLSSTAGEALSTYEASRDTKAIHHSADTAVTNMEATSSEYSPIPGHTKPSKATSPLVTSHIMGDITSSTSVFGSSETTEIETVSSVNQGLQERSTSQVASSATETSTVITHVSSGDATTHVTKTQATFSSGTSISSPHQFITSTNTFTDVSTNPSTSLIMTESSGVTITTQTGPTGAATQGPYLLDTSTMPYLTETPLAVTPDFMQSEKTTLISKGPKDVSWTSPPSVAETSYPSSLTPFLVTTIPPATSTLQGQHTSSPVSATSVLTSGLVKTTDMLNTSMEPVTNSPQNLNNPSNEILATLAATTDIETIHPSINKAVTNMGTASSAHVLHSTLPVSSEPSTATSPMVPASSMGDALASISIPGSETTDIEGEPTSSLTAGRKENSTLQEMNSTTESNIILSNVSVGAITEATKMEVPSFDATFIPTPAQSTKFPDIFSVASSRLSNSPPMTISTHMTTTQTGSSGATSKIPLALDTSTLETSAGTPSVVTEGFAHSKITTAMNNDVKDVSQTNPPFQDEASSPSSQAPVLVTTLPSSVAFTPQWHSTSSPVSMSSVLTSSLVKTAGKVDTSLETVTSSPQSMSNTLDDISVTSAATTDIETTHPSINTVVTNVGTTGSAFESHSTVSAYPEPSKVTSPNVTTSTMEDTTISRSIPKSSKTTRTETETTSSLTPKLRETSISQEITSSTETSTVPYKELTGATTEVSRTDVTSSSSTSFPGPDQSTVSLDISTETNTRLSTSPIMTESAEITITTQTGPHGATSQDTFTMDPSNTTPQAGIHSAMTHGFSQLDVTTLMSRIPQDVSWTSPPSVDKTSSPSSFLSSPAMTTPSLISSTLPEDKLSSPMTSLLTSGLVKITDILRTRLEPVTSSLPNFSSTSDKILATSKDSKDTKEIFPSINTEETNVKANNSGHESHSPALADSETPKATTQMVITTTVGDPAPSTSMPVHGSSETTNIKREPTYFLTPRLRETSTSQESSFPTDTSFLLSKVPTGTITEVSSTGVNSSSKISTPDHDKSTVPPDTFTGEIPRVFTSSIKTKSAEMTITTQASPPESASHSTLPLDTSTTLSQGGTHSTVTQGFPYSEVTTLMGMGPGNVSWMTTPPVEETSSVSSLMSSPAMTSPSPVSSTSPQSIPSSPLPVTALPTSVLVTTTDVLGTTSPESVTSSPPNLSSITHERPATYKDTAHTEAAMHHSTNTAVTNVGTSGSGHKSQSSVLADSETSKATPLMSTTSTLGDTSVSTSTPNISQTNQIQTEPTASLSPRLRESSTSEKTSSTTETNTAFSYVPTGAITQASRTEISSSRTSISDLDRPTIAPDISTGMITRLFTSPIMTKSAEMTVTTQTTTPGATSQGILPWDTSTTLFQGGTHSTVSQGFPHSEITTLRSRTPGDVSWMTTPPVEETSSGFSLMSPSMTSPSPVSSTSPESIPSSPLPVTALLTSVLVTTTNVLGTTSPEPVTSSPPNLSSPTQERLTTYKDTAHTEAMHASMHTNTAVANVGTSISGHESQSSVPADSHTSKATSPMGITFAMGDTSVSTSTPAFFETRIQTESTSSLIPGLRDTRTSEEINTVTETSTVLSEVPTTTTTEVSRTEVITSSRTTISGPDHSKMSPYISTETITRLSTFPFVTGSTEMAITNQTGPIGTISQATLTLDTSSTASWEGTHSPVTQRFPHSEETTTMSRSTKGVSWQSPPSVEETSSPSSPVPLPAITSHSSLYSAVSGSSPTSALPVTSLLTSGRRKTIDMLDTHSELVTSSLPSASSFSGEILTSEASTNTETIHFSENTAETNMGTTNSMHKLHSSVSIHSQPSGHTPPKVTGSMMEDAIVSTSTPGSPETKNVDRDSTSPLTPELKEDSTALVMNSTTESNTVFSSVSLDAATEVSRAEVTYYDPTFMPASAQSTKSPDISPEASSSHSNSPPLTISTHKTIATQTGPSGVTSLGQLTLDTSTIATSAGTPSARTQDFVDSETTSVMNNDLNDVLKTSPFSAEEANSLSSQAPLLVTTSPSPVTSTLQEHSTSSLVSVTSVPTPTLAKITDMDTNLEPVTRSPQNLRNTLATSEATTDTHTMHPSINTAVANVGTTSSPNEFYFTVSPDSDPYKATSAVVITSTSGDSIVSTSMPRSSAMKKIESETTFSLIFRLRETSTSQKIGSSSDTSTVFDKAFTAATTEVSRTELTSSSRTSIQGTEKPTMSPDTSTRSVTMLSTFAGLTKSEERTIATQTGPHRATSQGTLTWDTSITTSQAGTHSAMTHGFSQLDLSTLTSRVPEYISGTSPPSVEKTSSSSSLLSLPAITSPSPVPTTLPESRPSSPVHLTSLPTSGLVKTTDMLASVASLPPNLGSTSHKIPTTSEDIKDTEKMYPSTNIAVTNVGTTTSEKESYSSVPAYSEPPKVTSPMVTSFNIRDTIVSTSMPGSSEITRIEMESTFSLAHGLKGTSTSQDPIVSTEKSAVLHKLTTGATETSRTEVASSRRTSIPGPDHSTESPDISTEVIPSLPISLGITESSNMTIITRTGPPLGSTSQGTFTLDTPTTSSRAGTHSMATQEFPHSEMTTVMNKDPEILSWTIPPSIEKTSFSSSLMPSPAMTSPPVSSTLPKTIHTTPSPMTSLLTPSLVMTTDTLGTSPEPTTSSPPNLSSTSHEILTTDEDTTAIEAMHPSTSTAATNVETTSSGHGSQSSVLADSEKTKATAPMDTTSTMGHTTVSTSMSVSSETTKIKRESTYSLTPGLRETSISQNASFSTDTSIVLSEVPTGTTAEVSRTEVTSSGRTSIPGPSQSTVLPEISTRTMTRLFASPTMTESAEMTIPTQTGPSGSTSQDTLTLDTSTTKSQAKTHSTLTQRFPHSEMTTLMSRGPGDMSWQSSPSLENPSSLPSLLSLPATTSPPPISSTLPVTISSSPLPVTSLLTSSPVTTTDMLHTSPELVTSSPPKLSHTSDERLTTGKDTTNTEAVHPSTNTAASNVEIPSSGHESPSSALADSETSKATSPMFITSTQEDTTVAISTPHFLETSRIQKESISSLSPKLRETGSSVETSSAIETSAVLSEVSIGATTEISRTEVTSSSRTSISGSAESTMLPEISTTRKIIKFPTSPILAESSEMTIKTQTSPPGSTSESTFTLDTSTTPSLVITHSTMTQRLPHSEITTLVSRGAGDVPRPSSLPVEETSPPSSQLSLSAMISPSPVSSTLPASSHSSSASVTSLLTPGQVKTTEVLDASAEPETSSPPSLSSTSVEILATSEVTTDTEKIHPFSNTAVTKVGTSSSGHESPSSVLPDSETTKATSAMGTISIMGDTSVSTLTPALSNTRKIQSEPASSLTTRLRETSTSEETSLATEANTVLSKVSTGATTEVSRTEAISFSRTSMSGPEQSTMSQDISIGTIPRISASSVLTESAKMTITTQTGPSESTLESTLNLNTATTPSWVETHSIVIQGFPHPEMTTSMGRGPGGVSWPSPPFVKETSPPSSPLSLPAVTSPHPVSTTFLAHIPPSPLPVTSLLTSGPATTTDILGTSTEPGTSSSSSLSTTSHERLTTYKDTAHTEAVHPSTNTGGTNVATTSSGYKSQSSVLADSSPMCTTSTMGDTSVLTSTPAFLETRRIQTELASSLTPGLRESSGSEGTSSGTKMSTVLSKVPTGATTEISKEDVTSIPGPAQSTISPDISTRTVSWFSTSPVMTESAEITMNTHTSPLGATTQGTSTLDTSSTTSLTMTHSTISQGFSHSQMSTLMRRGPEDVSWMSPPLLEKTRPSFSLMSSPATTSPSPVSSTLPESISSSPLPVTSLLTSGLAKTTDMLHKSSEPVTNSPANLSSTSVEILATSEVTTDTEKTHPSSNRTVTDVGTSSSGHESTSFVLADSQTSKVTSPMVITSTMEDTSVSTSTPGFFETSRIQTEPTSSLTLGLRKTSSSEGTSLATEMSTVLSGVPTGATAEVSRTEVTSSSRTSISGFAQLTVSPETSTETITRLPTSSIMTESAEMMIKTQTDPPGSTPESTHTVDISTTPNWVETHSTVTQRFSHSEMTTLVSRSPGDMLWPSQSSVEETSSASSLLSLPATTSPSPVSSTLVEDFPSASLPVTSLLNPGLVITTDRMGISREPGTSSTSNLSSTSHERLTTLEDTVDTEDMQPSTHTAVTNVRTSISGHESQSSVLSDSETPKATSPMGTTYTMGETSVSISTSDFFETSRIQIEPTSSLTSGLRETSSSERISSATEGSTVLSEVPSGATTEVSRTEVISSRGTSMSGPDQFTISPDISTEAITRLSTSPIMTESAESAITIETGSPGATSEGTLTLDTSTTTFWSGTHSTASPGFSHSEMTTLMSRTPGDVPWPSLPSVEEASSVSSSLSSPAMTSTSFFSTLPESISSSPHPVTALLTLGPVKTTDMLRTSSEPETSSPPNLSSTSAEILATSEVTKDREKIHPSSNTPVVNVGTVIYKHLSPSSVLADLVTTKPTSPMATTSTLGNTSVSTSTPAFPETMMTQPTSSLTSGLREISTSQETSSATERSASLSGMPTGATTKVSRTEALSLGRTSTPGPAQSTISPEISTETITRISTPLTTTGSAEMTITPKTGHSGASSQGTFTLDTSSRASWPGTHSAATHRSPHSGMTTPMSRGPEDVSWPSRPSVEKTSPPSSLVSLSAVTSPSPLYSTPSESSHSSPLRVTSLFTPVMMKTTDMLDTSLEPVTTSPPSMNITSDESLATSKATMETEAIQLSENTAVTQMGTISARQEFYSSYPGLPEPSKVTSPVVTSSTIKDIVSTTIPASSEITRIEMESTSTLTPTPRETSTSQEIHSATKPSTVPYKALTSATIEDSMTQVMSSSRGPSPDQSTMSQDISTEVITRLSTSPIKTESTEMTITTQTGSPGATSRGTLTLDTSTTFMSGTHSTASQGFSHSQMTALMSRTPGDVPWLSHPSVEEASSASFSLSSPVMTSSSPVSSTLPDSIHSSSLPVTSLLTSGLVKTTELLGTSSEPETSSPPNLSSTSAEILAITEVTTDTEKLEMTNVVTSGYTHESPSSVLADSVTTKATSSMGITYPTGDTNVLTSTPAFSDTSRIQTKSKLSLTPGLMETSISEETSSATEKSTVLSSVPTGATTEVSRTEAISSSRTSIPGPAQSTMSSDTSMETITRISTPLTRKESTDMAITPKTGPSGATSQGTFTLDSSSTASWPGTHSATTQRFPQSVVTTPMSRGPEDVSWPSPLSVEKNSPPSSLVSSSSVTSPSPLYSTPSGSSHSSPVPVTSLFTSIMMKATDMLDASLEPETTSAPNMNITSDESLAASKATTETEAIHVFENTAASHVETTSATEELYSSSPGFSEPTKVISPVVTSSSIRDNMVSTTMPGSSGITRIEIESMSSLTPGLRETRTSQDITSSTETSTVLYKMPSGATPEVSRTEVMPSSRTSIPGPAQSTMSLDISDEVVTRLSTSPIMTESAEITITTQTGYSLATSQVTLPLGTSMTFLSGTHSTMSQGLSHSEMTNLMSRGPESLSWTSPRFVETTRSSSSLTSLPLTTSLSPVSSTLLDSSPSSPLPVTSLILPGLVKTTEVLDTSSEPKTSSSPNLSSTSVEIPATSEIMTDTEKIHPSSNTAVAKVRTSSSVHESHSSVLADSETTITIPSMGITSAVDDTTVFTSNPAFSETRRIPTEPTFSLTPGFRETSTSEETTSITETSAVLYGVPTSATTEVSMTEIMSSNRIHIPDSDQSTMSPDIITEVITRLSSSSMMSESTQMTITTQKSSPGATAQSTLTLATTTAPLARTHSTVPPRFLHSEMTTLMSRSPENPSWKSSLFVEKTSSSSSLLSLPVTTSPSVSSTLPQSIPSSSFSVTSLLTPGMVKTTDTSTEPGTSLSPNLSGTSVEILAASEVTTDTEKIHPSSSMAVTNVGTTSSGHELYSSVSIHSEPSKATYPVGTPSSMAETSISTSMPANFETTGFEAEPFSHLTSGFRKTNMSLDTSSVTPTNTPSSPGSTHLLQSSKTDFTSSAKTSSPDWPPASQYTEIPVDIITPFNASPSITESTGITSFPESRFTMSVTESTHHLSTDLLPSAETISTGTVMPSLSEAMTSFATTGVPRAISGSGSPFSRTESGPGDATLSTIAESLPSSTPVPFSSSTFTTTDSSTIPALHEITSSSATPYRVDTSLGTESSTTEGRLVMVSTLDTSSQPGRTSSSPILDTRMTESVELGTVTSAYQVPSLSTRLTRTDGIMEHITKIPNEAAHRGTIRPVKGPQTSTSPASPKGLHTGGTKRMETTTTALKTTTTALKTTSRATLTTSVYTPTLGTLTPLNASMQMASTIPTEMMITTPYVFPDVPETTSSLATSLGAETSTALPRTTPSVFNRESETTASLVSRSGAERSPVIQTLDVSSSEPDTTASWVIHPAETIPTVSKTTPNFFHSELDTVSSTATSHGADVSSAIPTNISPSELDALTPLVTISGTDTSTTFPTLTKSPHETETRTTWLTHPAETSSTIPRTIPNFSHHESDATPSIATSPGAETSSAIPIMTVSPGAEDLVTSQVTSSGTDRNMTIPTLTLSPGEPKTIASLVTHPEAQTSSAIPTSTISPAVSRLVTSMVTSLAAKTSTTNRALTNSPGEPATTVSLVTHPAQTSPTVPWTTSIFFHSKSDTTPSMTTSHGAESSSAVPTPTVSTEVPGVVTPLVTSSRAVISTTIPILTLSPGEPETTPSMATSHGEEASSAIPTPTVSPGVPGVVTSLVTSSRAVTSTTIPILTFSLGEPETTPSMATSHGTEAGSAVPTVLPEVPGMVTSLVASSRAVTSTTLPTLTLSPGEPETTPSMATSHGAEASSTVPTVSPEVPGVVTSLVTSSSGVNSTSIPTLILSPGELETTPSMATSHGAEASSAVPTPTVSPGVSGVVTPLVTSSRAVTSTTIPILTLSSSEPETTPSMATSHGVEASSAVLTVSPEVPGMVTSLVTSSRAVTSTTIPTLTISSDEPETTTSLVTHSEAKMISAIPTLAVSPTVQGLVTSLVTSSGSETSAFSNLTVASSQPETIDSWVAHPGTEASSVVPTLTVSTGEPFTNISLVTHPAESSSTLPRTTSRFSHSELDTMPSTVTSPEAESSSAISTTISPGIPGVLTSLVTSSGRDISATFPTVPESPHESEATASWVTHPAVTSTTVPRTTPNYSHSEPDTTPSIATSPGAEATSDFPTITVSPDVPDMVTSQVTSSGTDTSITIPTLTLSSGEPETTTSFITYSETHTSSAIPTLPVSPGASKMLTSLVISSGTDSTTTFPTLTETPYEPETTAIQLIHPAETNTMVPRTTPKFSHSKSDTTLPVAITSPGPEASSAVSTTTISPDMSDLVTSLVPSSGTDTSTTFPTLSETPYEPETTATWLTHPAETSTTVSGTIPNFSHRGSDTAPSMVTSPGVDTRSGVPTTTIPPSIPGVVTSQVTSSATDTSTAIPTLTPSPGEPETTASSATHPGTQTGFTVPIRTVPSSEPDTMASWVTHPPQTSTPVSRTTSSFSHSSPDATPVMATSPRTEASSAVLTTISPGAPEMVTSQITSSGAATSTTVPTLTHSPGMPETTALLSTHPRTETSKTFPASTVFPQVSETTASLTIRPGAETSTALPTQTTSSLFTLLVTGTSRVDLSPTASPGVSAKTAPLSTHPGTETSTMIPTSTLSLGLLETTGLLATSSSAETSTSTLTLTVSPAVSGLSSASITTDKPQTVTSWNTETSPSVTSVGPPEFSRTVTGTTMTLIPSEMPTPPKTSHGEGVSPTTILRTTMVEATNLATTGSSPTVAKTTTTFNTLAGSLFTPLTTPGMSTLASESVTSRTSYNHRSWISTTSSYNRRYWTPATSTPVTSTFSPGISTSSIPSSTAATVPFMVPFTLNFTITNLQYEEDMRHPGSRKFNATERELQGLLKPLFRNSSLEYLYSGCRLASLRPEKDSSATAVDAICTHRPDPEDLGLDRERLYWELSNLTNGIQELGPYTLDRNSLYVNGFTHRSSMPTTSTPGTSTVDVGTSGTPSSSPSPTTAGPLLMPFTLNFTITNLQYEEDMRRTGSRKFNTMESVLQGLLKPLFKNTSVGPLYSGCRLTLLRPEKDGAATGVDAICTHRLDPKSPGLNREQLYWELSKLTNDIEELGPYTLDRNSLYVNGFTHQSSVSTTSTPGTSTVDLRTSGTPSSLSSPTIMAAGPLLVPFTLNFTITNLQYGEDMGHPGSRKFNTTERVLQGLLGPIFKNTSVGPLYSGCRLTSLRSEKDGAATGVDAICIHHLDPKSPGLNRERLYWELSQLTNGIKELGPYTLDRNSLYVNGFTHRTSVPTSSTPGTSTVDLGTSGTPFSLPSPATAGPLLVLFTLNFTITNLKYEEDMHRPGSRKFNTTERVLQTLLGPMFKNTSVGLLYSGCRLTLLRSEKDGAATGVDAICTHRLDPKSPGVDREQLYWELSQLTNGIKELGPYTLDRNSLYVNGFTHWIPVPTSSTPGTSTVDLGSGTPSSLPSPTTAGPLLVPFTLNFTITNLKYEEDMHCPGSRKFNTTERVLQSLLGPMFKNTSVGPLYSGCRLTLLRSEKDGAATGVDAICTHRLDPKSPGVDREQLYWELSQLTNGIKELGPYTLDRNSLYVNGFTHQTSAPNTSTPGTSTVDLGTSGTPSSLPSPTSAGPLLVPFTLNFTITNLQYEEDMHHPGSRKFNTTERVLQGLLGPMFKNTSVGLLYSGCRLTLLRPEKNGAATGMDAICSHRLDPKSPGLNREQLYWELSQLTHGIKELGPYTLDRNSLYVNGFTHRSSVAPTSTPGTSTVDLGTSGTPSSLPSPTTAVPLLVPFTLNFTITNLQYGEDMRHPGSRKFNTTERVLQGLLGPLFKNSSVGPLYSGCRLISLRSEKDGAATGVDAICTHHLNPQSPGLDREQLYWQLSQMTNGIKELGPYTLDRNSLYVNGFTHRSSGLTTSTPWTSTVDLGTSGTPSPVPSPTTTGPLLVPFTLNFTITNLQYEENMGHPGSRKFNITESVLQGLLKPLFKSTSVGPLYSGCRLTLLRPEKDGVATRVDAICTHRPDPKIPGLDRQQLYWELSQLTHSITELGPYTLDRDSLYVNGFTQRSSVPTTSTPGTFTVQPETSETPSSLPGPTATGPVLLPFTLNFTITNLQYEEDMRRPGSRKFNTTERVLQGLLMPLFKNTSVSSLYSGCRLTLLRPEKDGAATRVDAVCTHRPDPKSPGLDRERLYWKLSQLTHGITELGPYTLDRHSLYVNGFTHQSSMTTTRTPDTSTMHLATSRTPASLSGPMTASPLLVLFTINFTITNLRYEENMHHPGSRKFNTTERVLQGLLRPVFKNTSVGPLYSGCRLTLLRPKKDGAATKVDAICTYRPDPKSPGLDREQLYWELSQLTHSITELGPYTLDRDSLYVNGFTQRSSVPTTSIPGTPTVDLGTSGTPVSKPGPSAASPLLVLFTLNFTITNLRYEENMQHPGSRKFNTTERVLQGLLRSLFKSTSVGPLYSGCRLTLLRPEKDGTATGVDAICTHHPDPKSPRLDREQLYWELSQLTHNITELGPYALDNDSLFVNGFTHRSSVSTTSTPGTPTVYLGASKTPASIFGPSAASHLLILFTLNFTITNLRYEENMWPGSRKFNTTERVLQGLLRPLFKNTSVGPLYSGCRLTLLRPEKDGEATGVDAICTHRPDPTGPGLDREQLYLELSQLTHSITELGPYTLDRDSLYVNGFTHRSSVPTTSTGVVSEEPFTLNFTINNLRYMADMGQPGSLKFNITDNVMQHLLSPLFQRSSLGARYTGCRVIALRSVKNGAETRVDLLCTYLQPLSGPGLPIKQVFHELSQQTHGITRLGPYSLDKDSLYLNGYNEPGPDEPPTTPKPATTFLPPLSEATTAMGYHLKTLTLNFTISNLQYSPDMGKGSATFNSTEGVLQHLLRPLFQKSSMGPFYLGCQLISLRPEKDGAATGVDTTCTYHPDPVGPGLDIQQLYWELSQLTHGVTQLGFYVLDRDSLFINGYAPQNLSIRGEYQINFHIVNWNLSNPDPTSSEYITLLRDIQDKVTTLYKGSQLHDTFRFCLVTNLTMDSVLVTVKALFSSNLDPSLVEQVFLDKTLNASFHWLGSTYQLVDIHVTEMESSVYQPTSSSSTQHFYLNFTITNLPYSQDKAQPGTTNYQRNKRNIEDALNQLFRNSSIKSYFSDCQVSTFRSVPNRHHTGVDSLCNFSPLARRVDRVAIYEEFLRMTRNGTQLQNFTLDRSSVLVDGYSPNRNEPLTGNSDLPFWAVILIGLAGLLGVITCLICGVLAPQAEEWQNDTAERREGASECRKEFNWGQSERRLATGQPNSRGRSSSHSIPLLAPHPSH

SEQ ID NO: 2519 - protein, 60 aa, Artificial Sequence
  Synthetic polypeptide
PPALSWCHSHSTSPSLTYSMRRTWVTLAPGSSTSRRVFCRVCSSPCSRAPVLALCILAAD

SEQ ID NO: 2520 - protein, 1175 aa, Artificial Sequence
  Synthetic polypeptide
MPLFKNTSVSSLYSGCRLTLLRPEKDGAATRVDAVCTHRPDPKSPGLDRERLYWKLSQLTHGITELGPYTLDRHSLYVNGFTHQSSMTTTRTPDTSTMHLATSRTPASLSGPMTASPLLVLFTINFTITNLRYEENMHHPGSRKFNTTERVLQGLLRPVFKNTSVGPLYSGCRLTLLRPKKDGAATKVDAICTYRPDPKSPGLDREQLYWELSQLTHSITELGPYTLDRDSLYVNGFTQRSSVPTTSIPGTPTVDLGTSGTPVSKPGPSAASPLLVLFTLNFTITNLRYEENMQHPGSRKFNTTERVLQGLLRSLFKSTSVGPLYSGCRLTLLRPEKDGTATGVDAICTHHPDPKSPRLDREQLYWELSQLTHNITELGPYALDNDSLFVNGFTHRSSVSTTSTPGTPTVYLGASKTPASIFGPSAASHLLILFTLNFTITNLRYEENMWPGSRKFNTTERVLQGLLRPLFKNTSVGPLYSGCRLTLLRPEKDGEATGVDAICTHRPDPTGPGLDREQLYLELSQLTHSITELGPYTLDRDSLYVNGFTHRSSVPTTSTGVVSEEPFTLNFTINNLRYMADMGQPGSLKFNITDNVMQHLLSPLFQRSSLGARYTGCRVIALRSVKNGAETRVDLLCTYLQPLSGPGLPIKQVFHELSQQTHGITRLGPYSLDKDSLYLNGYNEPGPDEPPTTPKPATTFLPPLSEATTAMGYHLKTLTLNFTISNLQYSPDMGKGSATFNSTEGVLQHLLRPLFQKSSMGPFYLGCQLISLRPEKDGAATGVDTTCTYHPDPVGPGLDIQQLYWELSQLTHGVTQLGFYVLDRDSLFINGYAPQNLSIRGEYQINFHIVNWNLSNPDPTSSEYITLLRDIQDKVTTLYKGSQLHDTFRFCLVTNLTMDSVLVTVKALFSSNLDPSLVEQVFLDKTLNASFHWLGSTYQLVDIHVTEMESSVYQPTSSSSTQHFYLNFTITNLPYSQDKAQPGTTNYQRNKRNIEDALNQLFRNSSIKSYFSDCQVSTFRSVPNRHHTGVDSLCNFSPLARRVDRVAIYEEFLRMTRNGTQLQNFTLDRSSVLVDGYSPNRNEPLTGNSDLPFWAVILIGLAGLLGVITCLICGVLAPQAEEWQNDTAERREGASECRKEFNWGQSERRLATGQPNSRGRSSSHSIPLLAPHPSH

SEQ ID NO: 2521 - protein, 146 aa, Artificial Sequence
  Synthetic polypeptide
MAFSGRARPCIIPENEEIPRAALNTVHEANGTEDERAVSKLQRRHSDVKVYKEFCDFYAKFNMANALASATCERCKGGFAPAETIVNSNGELYHEQCFVCAQCFQQFPEGLFYEFEGRKYCEHDFQMLFAPCCHQCGASNPSYSRG

SEQ ID NO: 2522 - protein, 146 aa, Artificial Sequence; identical to SEQ ID NO: 2521
  Synthetic polypeptide

SEQ ID NO: 2523 - protein, 146 aa, Artificial Sequence; identical to SEQ ID NO: 2521
  Synthetic polypeptide

SEQ ID NO: 2524 - protein, 69 aa, Artificial Sequence
  Synthetic polypeptide
HLWFSDQHTSKGCSTSGENRHHAGLGRQWKPGAIHRSGSGGKGFYSWTASSLSDDVQHNASAQYSTRWR

SEQ ID NO: 2525 - protein, 687 aa, Artificial Sequence
  Synthetic polypeptide
MSNFYEERTTMIAARDLQEFVPFGRDHCKHHPNALNLQLRQLQPASELWSSDGAAGLVGSLQEVTIHEKQKESWQLRKGVSEIGEDVDYDEELYVAGNMVIWSKGSKSQALAVYKAFTVDSPVQQALWCDFIISQDKSEKAYSSNEVEKCICILQSSCINMHSIEGKDYIASLPFQVANVWPTKYGLLFERSASSHEVPPGSPREPLPTMFSMLHPLDEITPLVCKSGSLFGSSRVQYVVDHAMKIVFLNTDPSIVMTYDAVQNVHSVWTLRRVKSEEENVVLKFSEQGGTPQNVATSSSLTAHLRSLSKGDSPVTSPFQNYSSIHSQSRSTSSPSLHSRSPSISNMAALSRAHSPALGVHSFSGVQRFNISSHNQSPKRHSISHSPNSNSNGSFLAPETEPIVPELCIDHLWTETITNIREKNSQASKVFITSDLCGQKFLCFLVESQLQLRCVKFQESNDKTQLIFGSVTNIPAKDAAPVEKIDTMLVLEGSGNLVLYTGVVRVGKVFIPGLPAPSLTMSNTMPRPSTPLDGVSTPKPLSKLLGSLDEVVLLSPVPELRDSSKLHDSLYNEDCTFQQLGTYIHSIRDPVHNRVTLELSNGSMVRITIPEIATSELVQTCLQAIKFILPKEIAVQMLVKWYNVHSAPGGPSYHSEWNLFVTCLMNMMGYNTDRLAWTRNDLWYCLA

SEQ ID NO: 2526 - protein, 133 aa, Artificial Sequence
  Synthetic polypeptide
MSNFYEERTTMIAARDLQEFVPFGRDHCKHHPNALNLQLRQLQPASELWSSDGAAGLVGSLQEVTIHEKQKESWQLRKGVSEIGEDVDYDEELYVAGNMVIWSKGSKSQALAVYKAFTVDSPVQQEDMQFISI

SEQ ID NO: 2527 - protein, 133 aa, Artificial Sequence; identical to SEQ ID NO: 2526
  Synthetic polypeptide

SEQ ID NO: 2528 - protein, 223 aa, Artificial Sequence
  Synthetic polypeptide
MVPSSPRALFLLLLILACPEPRASQNCLSKQQLLSAIRQLQQLLKGQETRFAEGIRHMKSRLAALQNSVGRVGPDALPVSCPALNTPADGRKFGSKYLVDHEVHFTCNPGFRLVGPSSVVCLPNGTWTGEQPHCRGISECSSQPCQNGGTCVEGVNQYRCICPPGRTGNRCQHQAQTAVQRQRQENHLNAGDRGCSKPRSCHCTPAWVTQRDSVSKRKKERER

SEQ ID NO: 2529 - protein, 223 aa, Artificial Sequence; identical to SEQ ID NO: 2528
  Synthetic polypeptide

SEQ ID NO: 2530 - protein, 223 aa, Artificial Sequence; identical to SEQ ID NO: 2528
  Synthetic polypeptide

SEQ ID NO: 2531 - protein, 117 aa, Artificial Sequence
  Synthetic polypeptide
RFAEGIRHMKSRLAALQNSVGRVGPDALPGISECSSQPCQNGGTCVEGVNQYRCICPPGRTGNRCQHQAQTAVQRQRQENHLNAGDRGCSKPRSCHCTPAWVTQRDSVSKRKKERER

SEQ ID NO: 2532 - protein, 44 aa, Artificial Sequence
  Synthetic polypeptide
MWSTRSPNSTAWPLSLDPLLLFAMSGSSMRPSPDAAAQFGLPSH

SEQ ID NO: 2533 - protein, 44 aa, Artificial Sequence; identical to SEQ ID NO: 2532
  Synthetic polypeptide

SEQ ID NO: 2534 - protein, 490 aa, Artificial Sequence [sequence omitted]

SEQ ID NO: 2535 - protein, 497 aa, Artificial Sequence
  Synthetic polypeptide
MPARPPACRVRPFPPGLPDDGGATPVQDERDSGSDGEDDVNEQHSGSDTGSVERHSENETSDREDGLPKGHHVTDSENDEPLNLNASDSESEELHRQKDSDSESEERAEPPASDSENEDVNQHGSDSESEETRKLPGSDSENEELLNGHASDSENEDVGKHPASDSEIEELQKSPASDSETEDALKPQISDSESEEPPRHQASDSENEEPPKPRMSDSESEELPKPQVSDSESEEPPRHQASDSENEELPKPRISDSESEDPPRHQASDSENEELPKPRISDSESEDPPRNQASDSENEELPKPRVSDSESEGPQKGPASDSETEDASRHKQKPESDDDSDRENKGEDTEMQNDSFHSDSHMDRKKFHSSDSEEEEHKKQKMDSDEDEKEGEEEKVAKRKAAVLSDSEDEEKASAKKSRVVSDADDSDSDAVSDKSGKREKTIASDSEEEAGKELSDKKNEEKDLFGSDSESGNEEENLIADIFGESGDEEEEEFTE

SEQ ID NO: 2536 - protein, 6 aa, Artificial Sequence
  Synthetic polypeptide
GGGSGP

SEQ ID NO: 2537 - protein, 70 aa, Artificial Sequence
  Synthetic polypeptide
VVAASGAPRYFLPSKESACAILVDLLKLNVAPLAVFQMLKSMCAGQRLASEPQDPAAVSLPTSSVPETRG

SEQ ID NO: 2538 - protein, 107 aa, Artificial Sequence
  Synthetic polypeptide
MAAQGVGPGPGSAAPPGLEAARQKLALRRKKVLSTEEMELYELAQAAGGAIDPDVFKILVDLLKLNVAPLAVFQMLKSMCAGQRLASEPQDPAAVSLPTSSVPETRG

SEQ ID NO: 2539 - protein, 107 aa, Artificial Sequence; identical to SEQ ID NO: 2538
  Synthetic polypeptide

SEQ ID NO: 2540 - protein, 367 aa, Artificial Sequence
  Synthetic polypeptide
MSRSLDSARSFLERLEARGGREGAVLAGEFSDIQACSAAWKADGVCSTVAGSRPENVRKNRYKDVLPYDQTRVILSLLQEEGHSDYINGNFIRGVDGSLAYIATQGPLPHTLLDFWRLVWEFGVKVILMACREIENGRKRCERYWAQEQEPLQTGLFCITLIKEKWLNEDIMLRTLKVTFQKESRSVYQLQYMSWPDRGVPSSPDHMLAMVEEARRLQGSGPEPLCVHCSAGCGRTGVLCTVDYVRQLLLTQMIPPDFSLFDVVLKMRKQRPAAVQTEEQYRFLYHTVAQMFCSTLQNASPHYQNIKENCAPLYDDALFLRTPQALLAIPRPPGGVLRWLTPVIPALREAKEGGSLEPSWRPAWLTW

SEQ ID NO: 2541 - protein, 260 aa, Artificial Sequence
  Synthetic polypeptide
MSRSLDSARSFLERLEARGGREGAVLAGEFSKRCERYWAQEQEPLQTGLFCITLIKEKWLNEDIMLRTLKVTFQKESRSVYQLQYMSWPDRGVPSSPDHMLAMVEEARRLQGSGPEPLCVHCSAGCGRTGVLCTVDYVRQLLLTQMIPPDFSLFDVVLKMRKQRPAAVQTEEQYRFLYHTVAQMFCSTLQNASPHYQNIKENCAPLYDDALFLRTPQALLAIPRPPGGVLRWLTPVIPALREAKEGGSLEPSWRPAWLTW

SEQ ID NO: 2542 - protein, 8 aa, Artificial Sequence
  Synthetic polypeptide
RPWGPQQS

SEQ ID NO: 2543 - protein, 1018 aa, Artificial Sequence
  Synthetic polypeptide
MRALVRAHSIAGFSPECPEDPVGQNVVKSGTHVKEGAKNERDPRIQNIPSPAPTQLSGPIPAFQSGAPHLQGPCKPGGFRLQRASQDTPSAGLLGENQLRQDSRSCLVASCLTSELVKLSAEEVPEPAECKSEQSPESRTQEPQGTQLAPRAADERETQKHLWGISVQAGNQTSNYTSKYVLSEESKSPTRAKFPRQPSSEGTQVWSGDLMGCLEVSDSSDAPETTQKSSAIDTSKAAEEAMVLDPNYREQALQGLSEFKAATVSHCGPGAEEGEQGPGGAGGRQLEPKAGGEASRGRGALIIVAVEQKGLQASRSNAGPVPETLPRDFPKERPESPLSTGETPCESPTRGKTPAGNECELPAAPIQGAGDGALQRVAQAAELGRVLVPQAASEETPSTEEPPGERLRGESRSSGSGERGPEEAPEGGAAAARGQRPRVPALEPPQPPRGLRKGAQEPGKRPTFSKVTSFRKGRPLATESPGGVPAPTTEGRRWGSSGPEGLPRENPPAAAGRDAPPLHHGDASAWPEFVPQAAGDRTAGPAGAGHTGTSGDLGSRGPSSESCNAKRLKTTEKKLRARLALAHKTFSNFIESIVLEKENTHERSPSSPKGEKEKSRLRQGSWRAFLKSKDAGSPKKPTLVSLPLGPEVLSPAETDSHCEERAEDKEGYVFSDHWAPPLASTPLSSSLVSPEHRRKSEPTIKCTATQEGGRYLPSGIFPEKSWLASPGSPRAQQAGIAHTLPSSSACCLAYENPGTPCRPTSPKPLSPRPSAQRMGLHYPGRGSAISMVSLGSYSYVDSSSGDPERPKIPKGQTSFLLSLQTLNQDEQKEESREGGQGPRGLGTVPWLRDLPGSENHMPWEEPAGEKPSCSHSQKAFHMEPAQKPCFTTDMVTWALLCISAETVRGEAPSQPRGIPHRSPVSVDDLWLEKTQRKKLQKQAHVERRLHIGAVHKDGVKCWRKTIITSPESLNLPRRSHPLSQSAPTGLNHMGWPEHTPGTANIILNGQKLEAFPLTTGTR

SEQ ID NO: 2544 - protein, 162 aa, Artificial Sequence
  Synthetic polypeptide
MPWEEPAGEKPSCSHSQKAFHMEPAQKPCFTTDMVTWALLCISAETVRGEAPSQPRGIPHRSPVSVDDLWLEKTQRKKLQKQAHVERRLHIGAVHKDGVKCWRKTIITSPESLNLPRRSHPLSQSAPTGLNHMGWPEHTPGTANIILNGQKLEAFPLTTGTR

SEQ ID NO: 2545 - protein, 162 aa, Artificial Sequence; identical to SEQ ID NO: 2544
  Synthetic polypeptide

SEQ ID NO: 2546 - protein, 162 aa, Artificial Sequence; identical to SEQ ID NO: 2544
  Synthetic polypeptide

SEQ ID NO: 2547 - protein, 162 aa, Artificial Sequence; identical to SEQ ID NO: 2544
  Synthetic polypeptide

SEQ ID NO: 2548 - protein, 162 aa, Artificial Sequence; identical to SEQ ID NO: 2544
  Synthetic polypeptide

SEQ ID NO: 2549 - protein, 342 aa, Artificial Sequence
  Synthetic polypeptide
PLASTPLSSSLVSPEHRRKSEPTIKCTATQEGGRYLPSGIFPEKSWLASPGSPRAQQAGIAHTLPSSSACCLAYENPGTPCRPTSPKPLSPRPSAQRMGLHYPGRGSAISMVSLGSYSYVDSSSGDPERPKIPKGQTSFLLSLQTLNQDEQKEESREGGQGPRGLGTVPWLRDLPGSENHMPWEEPAGEKPSCSHSQKAFHMEPAQKPCFTTDMVTWALLCISAETVRGEAPSQPRGIPHRSPVSVDDLWLEKTQRKKLQKQAHVERRLHIGAVHKDGVKCWRKTIITSPESLNLPRRSHPLSQSAPTGLNHMGWPEHTPGTANIILNGQKLEAFPLTTGTR

SEQ ID NO: 2550 - protein, 42 aa, Artificial Sequence
  Synthetic polypeptide
MNPVYSPGSSGVPYANAKGIGYPALRKAEAGESLEPGRQRLQ

SEQ ID NO: 2551 - protein, 42 aa, Artificial Sequence; identical to SEQ ID NO: 2550
  Synthetic polypeptide

SEQ ID NO: 2552 - protein, 104 aa, Artificial Sequence
  Synthetic polypeptide
APGAGGGPAEAGAAAQEGAEHRGDGAVRAGSGGGRRYRPRRVQDPGGPAEAERGPPRRLPDAQVHVCRAEASERAPGPCGRVSAHVERARDPRLRQEHHLKLGV

SEQ ID NO: 2553 - protein, 107 aa, Artificial Sequence
  Synthetic polypeptide
MAAQGVGPGPGSAAPPGLEAARQKLALRRKKVLSTEEMELYELAQAAGGGIDPDVFKILVDLLKLNVAPLAVFQMLKSMCAGQRLASEPQDPAAVSLPTSSVPETRG

SEQ ID NO: 2554 - protein, 104 aa, Artificial Sequence
  Synthetic polypeptide
MWVLGIAATFCGLFLLPGFALQIQCYQCEEFQLNNDCSSPEFIVNCTVNVQDMCQKEVMEQSAGRGNLDTDMHRQEGQPQKDTGRRGPSVSQGEKPQEPTLPTP

SEQ ID NO: 2555 - protein, 52 aa, Artificial Sequence
  Synthetic polypeptide
MCQKEVMEQSAGRGNLDTDMHRQEGQPQKDTGRRGPSVSQGEKPQEPTLPTP

SEQ ID NO: 2556 - protein, 227 aa, Artificial Sequence
  Synthetic polypeptide
MEPAAGIQRRSSQGPTVPPPPRGHAPPAAAPGPAPLSSPVREPPQLEEERQVRISESGQFSDGLEDRGLLESSTRLKPHEAQNYRKKALWVSWFSIIVTLALAVAAFTVSVMRYSASAFGFAFDAILDVLSSAIVLWRYSNAAAVHSAHREYIACVILGVIFLLSSICIVVKAIHDLSTRLLPEVDDFLFSVSILSGILCSILAVLKFMLGKVLTSRALITDGMMMI

SEQ ID NO: 2557 - protein, 125 aa, Artificial Sequence
  Synthetic polypeptide
MEPAAGIQRRSSQGPTVPPPPRGHAPPAAAPGPAPLSSPVREPPQLEEERQVRISESGQFSDGLEDRGLLESSTRLKPHEAQNYRKKALWVSWFSIIVTLALAVAAFTFPAVQVAMENFWQVKCE

SEQ ID NO: 2558 - protein, 177 aa, Artificial Sequence
  Synthetic polypeptide
MSEFLLALLTLSGLLPIARVLTVGADRDQQLCDPGEFLCHDHVTCVSQSWLCDGDPDCPDDSDESLDTCPEEVEIKCPLNHIACLGTNKCVHLSQLCNGVLDCPDGYDEGVHCQGTWMEQEAIILSKLTQEWKTKYRIFSLISGSCMMRTHGHNGRNNTHWGLLEGGRWEEGEHQEE

SEQ ID NO: 2559 - protein, 313 aa, Artificial Sequence
  Synthetic polypeptide
MEPSSLELPADTVQRIAAELKCHPTDERVALHLDEEDKLRHFRECFYIPKIQDLPPVDLSLVNKDENAIYFLGNSLGLQPKMVKTYLEEELDKWAKIAAYGHEVGKRPWITGDESIVGLMKDIVGANEKEIALMNALTVNLHLLMLSFFKPTPKRYKILLEAKAFPSDHYAIESQLQLHGLNIEESMRMIKPREGEETLRIEDILEVIEKEGDSIAVILFSGVHFYTGQHFNIPAITKAGQAKGCYVGFDLAHAVGNVELYLHDWGVDFACWCSYKYLNAGAGGIAGAFIHEKHAHTIKPACSCLPLHPLPWL

SEQ ID NO: 2560 - protein, 313 aa, Artificial Sequence; identical to SEQ ID NO: 2559
  Synthetic polypeptide

SEQ ID NO: 2561 - protein, 313 aa, Artificial Sequence; identical to SEQ ID NO: 2559
  Synthetic polypeptide

SEQ ID NO: 2562 - protein, 170 aa, Artificial Sequence
  Synthetic polypeptide
MPLFTANPFEQDVEKATNEYNTTEDWSLIMDICDKVGSTPNGAKDCLKAIMKRVNHKVPHVALQALTLLGACVANCGKIFHLEVCSRDFATEVRAVIKNKAHPKVCEKLKSLMVEWSEEFQKDPQFSLISATIKSMKEEGITFPPAGSQGWARWLTPVIPALWEAEVGRS

SEQ ID NO: 2563 - protein, 214 aa, Artificial Sequence
  Synthetic polypeptide
MSFAESGWRSALRRRGPGTPGPVARPSYSSFTQGDSWGEGEVDEEEGCDQVARDLRAEFSAGAWSEPRKRSVLPPDGNGSPVLPDKRNGIFPAAAGSRAQPRRWPVQVLSILCSLLFAILLAFLLAIAYLIVKELHAENLKNEDDVDTGLLGFWTLLIISLTAGFSCCSFSWTVTYFDSFEPGMFPPTPLSPARFKIYPREISADSHHPPKTCS

SEQ ID NO: 2564 - protein, 338 aa, Artificial Sequence
  Synthetic polypeptide
MRRFVYCKVVLATSLMWVLVDVFLLLYFSECNKCDDKKERSLLPALRAVISRNQEGPGEMGKAVLIPKDDQEKMKELFKINQFNLMASDLIALNRSLPDVRLEGCKTKVYPDELPNTSVVIVFHNEAWSTLLRTVYSVINRSPHYLLSEVILVDDASERDFLKLTLENYVKNLEVPVKIIRMEERSGLIRARLRGAAASKGQVITFLDAHCECTLGWLEPLLARIKEDRKTVVCPIIDVISDDTFEYMAGSDMTYGGFNWKLNFRWYPVPQREMDRRKGDRTLPVRTPTMAGGLFSIDRNYFEEIGTYDAGMDIWGGENLEMSFRTCLTRSTKRSYST

SEQ ID NO: 2565 - protein, 338 aa, Artificial Sequence; identical to SEQ ID NO: 2564
  Synthetic polypeptide

SEQ ID NO: 2566 - protein, 2096 aa, Artificial Sequence
  Synthetic polypeptide
MESGERLPSSAASSTTPTSSSTPSVASVVSKGGLSTGVASLSSTINPCGHLFRTAGDQPFNLSTVSSAFPMVSHPVFGLHSASSGHSEFGGLGTLGTPTALAAHPQLASFPEWWRTTDAHTRTGATFFPPLLGIPPLFAPPAQNHDSSSFHSRTSGKSNRNGPEKGVNGSINGSNTSSVIGINTSVLSTTASSSMGQTKSTSSGGGNRKCNQEQSKNQPLDARVDKIKDKKPRKKAMESSSNSDSDSGTSSDTSSEGISSSDSDDLEEDEEEEDQSIEESEDDDSDSESEAQHKSNNQVLLHGISDPKADGQKATEKAQEKRIHQPLPLASESQTHSFQSQQKQPQVLSQQLPFIFQSSQAKEESVNKHTSVIQSTGLVSNVKPLSLVNQAKKETYMKLIVPSPDVLKAGNKNTSEESSLLTSELRSKREQYKQAFPSQLKKQESSKSLKKVIAALSNPKATSSSPAHPKQTLENNHPNPFLTNALLGNHQPNGVIQSVIQEAPLALTTKTKMQSKINENIAAASSTPFSSPVNLSTSGRRTPGNQTPVMPSASPILHSQGKEKAVSNNVNPVKTQHHSHPAKSLVEQFRGTDSDIPSSKDSEDSNEDEEEDDEEEDEEDDEDDESDDSQSGTSKRRRVTDERELRIPLEYGWQRETRIRNFGGRLQGEVAYYAPCGKKLRQYPEVIKYLSRNGIMDISRDNFSFSAKIRVGDFYEARDGPQGMQWCLLKEEDVIPRIRAMEGRRGRPPNPDRQRAREESRMRRRKGRPPNVGNAEFLDNADAKLLRKLQAQEIARQAAQIKLLRKLQKQEQARVAKEAKKQQAIMAAEEKRKQKEQIKIMKQQEKIKRIQQIRMEKELRAQQILEAKKKKKEEAANAKLLEAEKRIKEKEMRRQQAVLLKHQERERRRQHMMLMKAMEARKKAEEKERLKQEKRDEKRLNKERKLEQRRLELEMAKELKKPNEDMCLADQKPLPELPRIPGLVLSGSTFSDCLMVVQFLRNFGKVLGFDVNIDVPNLSVLQEGLLNIGDSMGEVQDLLVRLLSAAVCDPGLITGYKAKTALGEHLLNVGVNRDNVSEILQIFMEAHCGQTELTESLKTKAFQAHTPAQKASVLAFLINELACSKSVVSEIDKNIDYMSNLRRDKWVVEGKLRKLRIIHAKKTGKRDTSGGIDLGEEQHPLGTPTPGRKRRRKGGDSDYDDDDDDDSDDQGDEDDEDEEDKEDKKGKKTDICEDEDEGDQAASVEELEKQIEKLSKQQSQYRRKLFDASHSLRSVMFGQDRYRRRYWILPQCGGIFVEGMESGEGLEEIAKEREKLKKAESVQIKEEMFETSGDSLNCSNTDHCEQKEDLKEKDNTNLFLQKPGSFSKLSKLLEVAKMPPESEVMTPKPNAGANGCTLSYQNSGKHSLGSVQSTATQSNVEKADSNNLFNTGSSGPGKFYSPLPNDQLLKTLTEKNRQWFSLLPRTPCDDTSLTHADMSTASLVTPQSQPPSKSPSPTPAPLGSSAQNPVGLNPFALSPLQVKGGVSMMGLQFCGWPTGVVTSNIPFTSSVPSLGSGLGLSEGNGNSFLTSNVASSKSESPVPQNEKATSAQPAAVEVAKPVDFPSPKPIPEEMQFGWWRIIDPEDLKALLKVLHLRGIREKALQKQIQKHLDYITQACLKNKDVAIIELNENEENQVTRDIVENWSVEEQAMEMDLSVLQQVEDLERRVASASLQVKGWMCPEPASEREDLVYFEHKSFTKLCKEHDGEFTGEDESSAHALERKSDNPLDIAVTRLADLERNIERRIEEDIAPGLRVWRRALSEARSAAQVALCIQQLQKSIAWEKSIMKVYCQICRKGDNEELLLLCDGCDKGCHTYCHRPKITTIPDGDWFCPACIAKASGQTLKIKKLHVKGKKTNESKKGKKVTLTGDTEDEDSASTSSSLKRGNKDLKKRKMEENTSINLSKQESFTSVKKPKRDDSKDLALCSMILTEMETHEDAWPFLLPVNLKLVPGYKKVIKKPMDFSTIREKLSSGQYPNLETFALDVRLVFDNCETFNEDDSDIGRAGHNMRKYFEKKWTDTFKPLCYEDALAAQPYGAANSYHQLTSPVPEAS

SEQ ID NO: 2567 - protein, 2162 aa, Artificial Sequence
  Synthetic polypeptide
MESGERLPSSAASSTTPTSSSTPSVASVVSKGGLSTGVASLSSTINPCGHLFRTAGDQPFNLSTVSSAFPMVSHPVFGLHSASSGHSEFGGLGTLGTPTALAAHPQLASFPGAEWWRTTDAHTRTGATFFPPLLGIPPLFAPPAQNHDSSSFHSRTSGKSNRNGPEKGVNGSINGSNTSSVIGINTSVLSTTASSSMGQTKSTSSGGGNRKCNQEQSKNQPLDARVDKIKDKKPRKKAMESSSNSDSDSGTSSDTSSEGISSSDSDDLEEDEEEEDQSIEESEDDDSDSESEAQHKSNNQVLLHGISDPKADGQKATEKAQEKRIHQPLPLASESQTHSFQSQQKQPQVLSQQLPFIFQSSQAKEESVNKHTSVIQSTGLVSNVKPLSLVNQAKKETYMKLIVPSPDVLKAGNKNTSEESSLLTSELRSKREQYKQAFPSQLKKQESSKSLKKVIAALSNPKATSSSPAHPKQTLENNHPNPFLTNALLGNHQPNGVIQSVIQEAPLALTTKTKMQSKINENIAAASSTPFSSPVNLSTSGRRTPGNQTPVMPSASPILHSQGKEKAVSNNVNPVKTQHHSHPAKSLVEQFRGTDSDIPSSKDSEDSNEDEEEDDEEEDEEDDEDDESDDSQSESDSNSESDTEGSEEEDDDDKDQDESDSDTEGEKTSMKLNKTTSSVKSPSMSLTGHSTPRNLHIAKAPGSAPAALCSESQSPAFLGTSSSTLTSSPHSGTSKRRRVTDERELRIPLEYGWQRETRIRNFGGRLQGEVAYYAPCGKKLRQYPEVIKGMQWCLLKEEDVIPRIRAMEGRRGRPPNPDRQRAREESRMRRRKGRPPNVGNAEFLDNADAKLLRKLQAQEIARQAAQIKLLRKLQKQEQARVAKEAKKQQAIMAAEEKRKQKEQIKIMKQQEKIKRIQQIRMEKELRAQQILEAKKKKKEEAANAKLLEAEKRIKEKEMRRQQAVLLKHQERERRRQHMMLMKAMEARKKAEEKERLKQEKRDEKRLNKERKLEQRRLELEMAKELKKPNEDMCLADQKPLPELPRIPGLVLSGSTFSDCLMVVQFLRNFGKVLGFDVNIDVPNLSVLQEGLLNIGDSMGEVQDLLVRLLSAAVCDPGLITGYKAKTALGEHLLNVGVNRDNVSEILQIFMEAHCGQTELTESLKTKAFQAHTPAQKASVLAFLINELACSKSVVSEIDKNIDYMSNLRRDKWVVEGKLRKLRIIHAKKTGKRDTSGGIDLGEEQHPLGTPTPGRKRRRKGGDSDYDDDDDDDSDDQGDEDDEDEEDKEDKKGKKTDICEDEDEGDQAASVEELEKQIEKLSKQQSQYRRKLFDASHSLRSVMFGQDRYRRRYWILPQCGGIFVEGMESGEGLEEIAKEREKLKKAESVQIKEEMFETSGDSLNCSNTDHCEQKEDLKEKDNTNLFLQKPGSFSKLSKLLEVAKMPPESEVMTPKPNAGANGCTLSYQNSGKHSLGSVQSTATQSNVEKADSNNLFNTGSSGPGKFYSPLPNDQLLKTLTEKNRQWFSLLPRTPCDDTSLTHADMSTASLVTPQSQPPSKSPSPTPAPLGSSAQNPVGLNPFALSPLQVKGGVSMMGLQFCGWPTGVVTSNIPFTSSVPSLGSGLGLSEGNGNSFLTSNVASSKSESPVPQNEKATSAQPAAVEVAKPVDFPSPKPIPEEMQFGWWRIIDPEDLKALLKVLHLRGIREKALQKQIQKHLDYITQACLKNKDVAIIELNENEENQVTRDIVENWSVEEQAMEMDLSVLQQVEDLERRVASASLQVKGWMCPEPASEREDLVYFEHKSFTKLCKEHDGEFTGEDESSAHALERKSDNPLDIAVTRLADLERNIERRIEEDIAPGLRVWRRALSEARSAAQVALCIQQLQKSIAWEKSIMKVYCQICRKGDNEELLLLCDGCDKGCHTYCHRPKITTIPDGDWFCPACIAKASGQTLKIKKLHVKGKKTNESKKGKKVTLTGDTEDEDSASTSSSLKRGNKDLKKRKMEENTSINLSKQESFTSVKKPKRDDSKDLALCSMILTEMETHEDAWPFLLPVNLKLVPGYKKVIKKPMDFSTIREKLSSGQYPNLETFALDVRLVFDNCETFNEDDSDIGRAGHNMRKYFEKKWTDTFKPLCYEDALAAQPYGAANSYHQLTSPVPEAS

SEQ ID NO: 2568 - protein, 2160 aa, Artificial Sequence
  Synthetic polypeptide
MESGERLPSSAASSTTPTSSSTPSVASVVSKGGLSTGVASLSSTINPCGHLFRTAGDQPFNLSTVSSAFPMVSHPVFGLHSASSGHSEFGGLGTLGTPTALAAHPQLASFPEWWRTTDAHTRTGATFFPPLLGIPPLFAPPAQNHDSSSFHSRTSGKSNRNGPEKGVNGSINGSNTSSVIGINTSVLSTTASSSMGQTKSTSSGGGNRKCNQEQSKNQPLDARVDKIKDKKPRKKAMESSSNSDSDSGTSSDTSSEGISSSDSDDLEEDEEEEDQSIEESEDDDSDSESEAQHKSNNQVLLHGISDPKADGQKATEKAQEKRIHQPLPLASESQTHSFQSQQKQPQVLSQQLPFIFQSSQAKEESVNKHTSVIQSTGLVSNVKPLSLVNQAKKETYMKLIVPSPDVLKAGNKNTSEESSLLTSELRSKREQYKQAFPSQLKKQESSKSLKKVIAALSNPKATSSSPAHPKQTLENNHPNPFLTNALLGNHQPNGVIQSVIQEAPLALTTKTKMQSKINENIAAASSTPFSSPVNLSTSGRRTPGNQTPVMPSASPILHSQGKEKAVSNNVNPVKTQHHSHPAKSLVEQFRGTDSDIPSSKDSEDSNEDEEEDDEEEDEEDDEDDESDDSQSESDSNSESDTEGSEEEDDDDKDQDESDSDTEGEKTSMKLNKTTSSVKSPSMSLTGHSTPRNLHIAKAPGSAPAALCSESQSPAFLGTSSSTLTSSPHSGTSKRRRVTDERELRIPLEYGWQRETRIRNFGGRLQGEVAYYAPCGKKLRQYPEVIKGMQWCLLKEEDVIPRIRAMEGRRGRPPNPDRQRAREESRMRRRKGRPPNVGNAEFLDNADAKLLRKLQAQEIARQAAQIKLLRKLQKQEQARVAKEAKKQQAIMAAEEKRKQKEQIKIMKQQEKIKRIQQIRMEKELRAQQILEAKKKKKEEAANAKLLEAEKRIKEKEMRRQQAVLLKHQERERRRQHMMLMKAMEARKKAEEKERLKQEKRDEKRLNKERKLEQRRLELEMAKELKKPNEDMCLADQKPLPELPRIPGLVLSGSTFSDCLMVVQFLRNFGKVLGFDVNIDVPNLSVLQEGLLNIGDSMGEVQDLLVRLLSAAVCDPGLITGYKAKTALGEHLLNVGVNRDNVSEILQIFMEAHCGQTELTESLKTKAFQAHTPAQKASVLAFLINELACSKSVVSEIDKNIDYMSNLRRDKWVVEGKLRKLRIIHAKKTGKRDTSGGIDLGEEQHPLGTPTPGRKRRRKGGDSDYDDDDDDDSDDQGDEDDEDEEDKEDKKGKKTDICEDEDEGDQAASVEELEKQIEKLSKQQSQYRRKLFDASHSLRSVMFGQDRYRRRYWILPQCGGIFVEGMESGEGLEEIAKEREKLKKAESVQIKEEMFETSGDSLNCSNTDHCEQKEDLKEKDNTNLFLQKPGSFSKLSKLLEVAKMPPESEVMTPKPNAGANGCTLSYQNSGKHSLGSVQSTATQSNVEKADSNNLFNTGSSGPGKFYSPLPNDQLLKTLTEKNRQWFSLLPRTPCDDTSLTHADMSTASLVTPQSQPPSKSPSPTPAPLGSSAQNPVGLNPFALSPLQVKGGVSMMGLQFCGWPTGVVTSNIPFTSSVPSLGSGLGLSEGNGNSFLTSNVASSKSESPVPQNEKATSAQPAAVEVAKPVDFPSPKPIPEEMQFGWWRIIDPEDLKALLKVLHLRGIREKALQKQIQKHLDYITQACLKNKDVAIIELNENEENQVTRDIVENWSVEEQAMEMDLSVLQQVEDLERRVASASLQVKGWMCPEPASEREDLVYFEHKSFTKLCKEHDGEFTGEDESSAHALERKSDNPLDIAVTRLADLERNIERRIEEDIAPGLRVWRRALSEARSAAQVALCIQQLQKSIAWEKSIMKVYCQICRKGDNEELLLLCDGCDKGCHTYCHRPKITTIPDGDWFCPACIAKASGQTLKIKKLHVKGKKTNESKKGKKVTLTGDTEDEDSASTSSSLKRGNKDLKKRKMEENTSINLSKQESFTSVKKPKRDDSKDLALCSMILTEMETHEDAWPFLLPVNLKLVPGYKKVIKKPMDFSTIREKLSSGQYPNLETFALDVRLVFDNCETFNEDDSDIGRAGHNMRKYFEKKWTDTFKPLCYEDALAAQPYGAANSYHQLTSPVPEAS

SEQ ID NO: 2569 - protein, 2196 aa, Artificial Sequence
  Synthetic polypeptide
MESGERLPSSAASSTTPTSSSTPSVASVVSKGGLSTGVASLSSTINPCGHLFRTAGDQPFNLSTVSSAFPMVSHPVFGLHSASSGHSEFGGLGTLGTPTALAAHPQLASFPGAEWWRTTDAHTRTGATFFPPLLGIPPLFAPPAQNHDSSSFHSRTSGKSNRNGPEKGVNGSINGSNTSSVIGINTSVLSTTASSSMGQTKSTSSGGGNRKCNQEQSKNQPLDARVDKIKDKKPRKKAMESSSNSDSDSGTSSDTSSEGISSSDSDDLEEDEEEEDQSIEESEDDDSDSESEAQHKSNNQVLLHGISDPKADGQKATEKAQEKRIHQPLPLASESQTHSFQSQQKQPQVLSQQLPFIFQSSQAKEESVNKHTSVIQSTGLVSNVKPLSLVNQAKKETYMKLIVPSPDVLKAGNKNTSEESSLLTSELRSKREQYKQAFPSQLKKQESSKSLKKVIAALSNPKATSSSPAHPKQTLENNHPNPFLTNALLGNHQPNGVIQSVIQEAPLALTTKTKMQSKINENIAAASSTPFSSPVNLSTSGRRTPGNQTPVMPSASPILHSQGKEKAVSNNVNPVKTQHHSHPAKSLVEQFRGTDSDIPSSKDSEDSNEDEEEDDEEEDEEDDEDDESDDSQSESDSNSESDTEGSEEEDDDDKDQDESDSDTEGEKTSMKLNKTTSSVKSPSMSLTGHSTPRNLHIAKAPGSAPAALCSESQSPAFLGTSSSTLTSSPHSGTSKRRRVTDERELRIPLEYGWQRETRIRNFGGRLQGEVAYYAPCGKKLRQYPEVIKYLSRNGIMDISRDNFSFSAKIRVGDFYEARDGPQGMQWCLLKEEDVIPRIRAMEGRRGRPPNPDRQRAREESRMRRRKGRPPNVGNAEFLDNADAKLLRKLQAQEIARQAAQIKLLRKLQKQEQARVAKEAKKQQAIMAAEEKRKQKEQIKIMKQQEKIKRIQQIRMEKELRAQQILEAKKKKKEEAANAKLLEAEKRIKEKEMRRQQAVLLKHQERERRRQHMMLMKAMEARKKAEEKERLKQEKRDEKRLNKERKLEQRRLELEMAKELKKPNEDMCLADQKPLPELPRIPGLVLSGSTFSDCLMVVQFLRNFGKVLGFDVNIDVPNLSVLQEGLLNIGDSMGEVQDLLVRLLSAAVCDPGLITGYKAKTALGEHLLNVGVNRDNVSEILQIFMEAHCGQTELTESLKTKAFQAHTPAQKASVLAFLINELACSKSVVSEIDKNIDYMSNLRRDKWVVEGKLRKLRIIHAKKTGKRDTSGGIDLGEEQHPLGTPTPGRKRRRKGGDSDYDDDDDDDSDDQGDEDDEDEEDKEDKKGKKTDICEDEDEGDQAASVEELEKQIEKLSKQQSQYRRKLFDASHSLRSVMFGQDRYRRRYWILPQCGGIFVEGMESGEGLEEIAKEREKLKKAESVQIKEEMFETSGDSLNCSNTDHCEQKEDLKEKDNTNLFLQKPGSFSKLSKLLEVAKMPPESEVMTPKPNAGANGCTLSYQNSGKHSLGSVQSTATQSNVEKADSNNLFNTGSSGPGKFYSPLPNDQLLKTLTEKNRQWFSLLPRTPCDDTSLTHADMSTASLVTPQSQPPSKSPSPTPAPLGSSAQNPVGLNPFALSPLQVKGGVSMMGLQFCGWPTGVVTSNIPFTSSVPSLGSGLGLSEGNGNSFLTSNVASSKSESPVPQNEKATSAQPAAVEVAKPVDFPSPKPIPEEMQFGWWRIIDPEDLKALLKVLHLRGIREKALQKQIQKHLDYITQACLKNKDVAIIELNENEENQVTRDIVENWSVEEQAMEMDLSVLQQVEDLERRVASASLQVKGWMCPEPASEREDLVYFEHKSFTKLCKEHDGEFTGEDESSAHALERKSDNPLDIAVTRLADLERNIERRIEEDIAPGLRVWRRALSEARSAAQVALCIQQLQKSIAWEKSIMKVYCQICRKGDNEELLLLCDGCDKGCHTYCHRPKITTIPDGDWFCPACIAKASGQTLKIKKLHVKGKKTNESKKGKKVTLTGDTEDEDSASTSSSLKRGNKDLKKRKMEENTSINLSKQESFTSVKKPKRDDSKDLALCSMILTEMETHEDAWPFLLPVNLKLVPGYKKVIKKPMDFSTIREKLSSGQYPNLETFALDVRLVFDNCETFNEDDSDIGRAGHNMRKYFEKKWTDTFKPLCYEDALAAQPYGAANSYHQLTSPVPEAS

SEQ ID NO: 2570 - protein, 131 aa, Artificial Sequence
  Synthetic polypeptide
MAVKVQTTKRGDPHELRNIFLQYASTEVDGERYMTPEDFVQRYLGLYNDPNSNPKIVQLLAGVADQTKDGRLPWPPKVPRLQPLPGRHPVWEVRSVSAWPPIVWDVRSPSAWLPSLESEERLCPAAIPSRK

SEQ ID NO: 2571 - protein, 131 aa, Artificial Sequence; identical to SEQ ID NO: 2570
  Synthetic polypeptide

SEQ ID NO: 2572 - protein, 131 aa, Artificial Sequence; identical to SEQ ID NO: 2570
  Synthetic polypeptide

SEQ ID NO: 2573 - protein, 24 aa, Artificial Sequence
  Synthetic polypeptide
MAACLGLPKCRDCSLCPAATPSGK

SEQ ID NO: 2574 - protein, 127 aa, Artificial Sequence
  Synthetic polypeptide
VQTTKRGDPHELRNIFLQYASTEVDGERYMTPEDFVQRYLGLYNDPNSNPKIVQLLAGVADQTKDGRLPWPPKVPRLQPLPGRHPVWEVRSVSAWPPIVWDVRSPSAWLPSLESEERLCPAAIPSRK

SEQ ID NO: 2575 - protein, 54 aa, Artificial Sequence
  Synthetic polypeptide
MALTLFDTDEYRPPVWKSYLYQLQQEAPHPRRITCTCEARIISHWMLKPLEERL

SEQ ID NO: 2576 - protein, 54 aa, Artificial Sequence; identical to SEQ ID NO: 2575
  Synthetic polypeptide

SEQ ID NO: 2577 - protein, 31 aa, Artificial Sequence
  Synthetic polypeptide
MGGLFSRWRVEPYEIASIQLLGLSKMSVSYG

SEQ ID NO: 2578 - protein, 31 aa, Artificial Sequence; identical to SEQ ID NO: 2577
  Synthetic polypeptide

SEQ ID NO: 2579 - protein, 31 aa, Artificial Sequence; identical to SEQ ID NO: 2577
  Synthetic polypeptide

SEQ ID NO: 2580 - protein, 3 aa, Artificial Sequence
  Synthetic polypeptide
MEG

SEQ ID NO: 2581 - protein, 30 aa, Artificial Sequence
  Synthetic polypeptide
MWKGCLTLYTGRGGELQKIGESTVIDQKRD

SEQ ID NO: 2582 - protein, 30 aa, Artificial Sequence; identical to SEQ ID NO: 2581
  Synthetic polypeptide

SEQ ID NO: 2583 - protein, 30 aa, Artificial Sequence; identical to SEQ ID NO: 2581
  Synthetic polypeptide

SEQ ID NO: 2584 - protein, 110 aa, Artificial Sequence
  Synthetic polypeptide
MNRVNDPLIFIRDIKPGLKNLNVVFIVLEIGRVTKTKDGHEVRSCKVADKTGSITISVWDEIGGLIQPGDIIRLTRGYASMWKGCLTLYTGRGGELQKIGESTVIDQKRD

SEQ ID NO: 2585 - protein, 110 aa, Artificial Sequence; identical to SEQ ID NO: 2584
  Synthetic polypeptide

SEQ ID NO: 2586 - protein, 110 aa, Artificial Sequence; identical to SEQ ID NO: 2584
  Synthetic polypeptide

SEQ ID NO: 2587 - protein, 2 aa, Artificial Sequence
  Synthetic polypeptide
DA

SEQ ID NO: 2588 - protein, 156 aa, Artificial Sequence
  Synthetic polypeptide
MVLWESPRQCSSWTLCEGFCWLLLLPVMLLIVARPVKLAAFPTSLSDCQTPTGWNCSGYDDRENDLFLCDTNTCKFDGECLRIGDTVTCVCQFKCNNDYVPVCGSNGESYQNECYLRQAACKQQSEILVVSEGSCATDAGSGSGDGVKCELQEIRD

SEQ ID NO: 2589 - protein, 156 aa, Artificial Sequence; identical to SEQ ID NO: 2588
  Synthetic polypeptide

SEQ ID NO: 2590 - protein, 156 aa, Artificial Sequence; identical to SEQ ID NO: 2588
  Synthetic polypeptide

SEQ ID NO: 2591 - protein, 148 aa, Artificial Sequence
  Synthetic polypeptide
MVLWESPRQCSSWTLCEGFCWLLLLPVMLLIVARPVKLAAFPTSLSDCQTPTGWNCSGYDDRENDLFLCDTNTCKFDGECLRIGDTVTCVCQFKCNNDYVPVCGSNGESYQNECYLRQAACKQQSEILVVSEGSCATDAGSGSGDGGR

SEQ ID NO: 2592 - protein, 148 aa, Artificial Sequence; identical to SEQ ID NO: 2591
  Synthetic polypeptide

SEQ ID NO: 2593 - protein, 148 aa, Artificial Sequence; identical to SEQ ID NO: 2591
  Synthetic polypeptide

SEQ ID NO: 2594 - protein, 102 aa, Artificial Sequence
  Synthetic polypeptide
MSGFSPELIDYLEGKISFEEFERRREERKTREKKSLQEKGKLSAEENPDDSEVPSSSGINSTKSQDKDVNEGTWMELEAVILSKPTQEQKTKHRMFSLISGS

SEQ ID NO: 2595 - protein, 102 aa, Artificial Sequence; identical to SEQ ID NO: 2594
  Synthetic polypeptide

SEQ ID NO: 2596 - protein, 63 aa, Artificial Sequence [sequence omitted]

SEQ ID NO: 2597 - protein, 6 aa, Artificial Sequence
  Synthetic polypeptide
MLPIIF

SEQ ID NO: 2598 - protein, 6 aa, Artificial Sequence
  Synthetic polypeptide
MLPIIF

SEQ ID NO: 2599 - protein, 250 aa, Artificial Sequence
  Synthetic polypeptide
MPQIIKMTRILTAFKVVRTLKTGFGFTNVTAHQKWKFSRPGIRLLSVKAQTAHIVLEDGTKMKGYSFGHPSSVAGEVVFNTGLGGYPEAITDPAYKGQILTMANPIIGNGGAPDTTALDELGLSKYLESNGIKVSGLLVLDYSKDYNHWLATKSLGQWLQEEKVPAIYGVDTRMLTKIIRDKGTMLGKIEFEGQPVDFVDPNKQNLIAEVSTKDVKVYGKGNPTKVVAVDCGIKNNVIRLLVKEMLHGKP

SEQ ID NO: 2600 - protein, 244 aa, Artificial Sequence
  Synthetic polypeptide
MTRILTAFKVVRTLKTGFGFTNVTAHQKWKFSRPGIRLLSVKAQTAHIVLEDGTKMKGYSFGHPSSVAGEVVFNTGLGGYPEAITDPAYKGQILTMANPIIGNGGAPDTTALDELGLSKYLESNGIKVSGLLVLDYSKDYNHWLATKSLGQWLQEEKVPAIYGVDTRMLTKIIRDKGTMLGKIEFEGQPVDFVDPNKQNLIAEVSTKDVKVYGKGNPTKVVAVDCGIKNNVIRLLVKEMLHGKP

SEQ ID NO: 2601 - protein, 339 aa, Artificial Sequence
  Synthetic polypeptide
MAAQRGMPSSAVRVLEEALGMGLTAAGDARDTADAVAAEGAYYLEQVTITEASEDDYEYEEIPDDNFSIPEGEEDLAKAIQMAQEQATDTEILERKTVLPSKHAVPEVIEDFLCNFLIKMGMTRTLDCFQSEWYELIQKGVTELRTVGNVPDVYTQIMLLENENKNLKKDLKHYKQAADKAREDLLKIQKERDFHRMHHKRIVQEKNKLINDLKGLKLHYASYEPTIRVLHEKHHTLLKEKMLTSLERDKVVGQISGLQETLKKLQRGHSYHGPQIKVASKRIKYLRIQLTKDVKDVFKENYKPLLNEVKEDTNKWKNIPCSWIGRINIMIMAILREKI

SEQ ID NO: 2602 - protein, 339 aa, Artificial Sequence; identical to SEQ ID NO: 2601
  Synthetic polypeptide

SEQ ID NO: 2603 - protein, 339 aa, Artificial Sequence; identical to SEQ ID NO: 2601
  Synthetic polypeptide

SEQ ID NO: 2604 - protein, 308 aa, Artificial Sequence
  Synthetic polypeptide
MGVGTKARASHWRRLLSLGATPEEPLLDFKIPDDNFSIPEGEEDLAKAIQMAQEQATDTEILERKTVLPSKHAVPEVIEDFLCNFLIKMGMTRTLDCFQSEWYELIQKGVTELRTVGNVPDVYTQIMLLENENKNLKKDLKHYKQAADKAREDLLKIQKERDFHRMHHKRIVQEKNKLINDLKGLKLHYASYEPTIRVLHEKHHTLLKEKMLTSLERDKVVGQISGLQETLKKLQRGHSYHGPQIKVASKRIKYLRIQLTKDVKDVFKENYKPLLNEVKEDTNKWKNIPCSWIGRINIMIMAILREKI

SEQ ID NO: 2605 - protein, 245 aa, Artificial Sequence
  Synthetic polypeptide
MTMNMKRYQMTILASQKVKKIWQKQFRWPKNRLQILKFWYELIQKGVTELRTVGNVPDVYTQIMLLENENKNLKKDLKHYKQAADKAREDLLKIQKERDFHRMHHKRIVQEKNKLINDLKGLKLHYASYEPTIRVLHEKHHTLLKEKMLTSLERDKVVGQISGLQETLKKLQRGHSYHGPQIKVASKRIKYLRIQLTKDVKDVFKENYKPLLNEVKEDTNKWKNIPCSWIGRINIMIMAILREKI

SEQ ID NO: 2606 - protein, 93 aa, Artificial Sequence
  Synthetic polypeptide
MAKRTKKVGIVGKYGTRYGASLRKMVKKIEISQHAKYTCSFCGKTKMKRRAVGIWHCGSCMKTVAGGAWTYNYLHVAGNLSKPKWTKCNADGI

SEQ ID NO: 2607 - protein, 93 aa, Artificial Sequence; identical to SEQ ID NO: 2606
  Synthetic polypeptide

SEQ ID NO: 2608 - protein, 93 aa, Artificial Sequence; identical to SEQ ID NO: 2606
  Synthetic polypeptide

SEQ ID NO: 2609 - protein, 69 aa, Artificial Sequence
  Synthetic polypeptide
MVKKIEISQHAKYTCSFCGKTKMKRRAVGIWHCGSCMKTVAGGAWTYNYLHVAGNLSKPKWTKCNADGI

SEQ ID NO: 2610 - protein, 69 aa, Artificial Sequence; identical to SEQ ID NO: 2609
  Synthetic polypeptide

SEQ ID NO: 2611 - protein, 69 aa, Artificial Sequence; identical to SEQ ID NO: 2609
  Synthetic polypeptide

SEQ ID NO: 2612 - protein, 69 aa, Artificial Sequence; identical to SEQ ID NO: 2609
  Synthetic polypeptide

SEQ ID NO: 2613 - protein, 80 aa, Artificial Sequence
  Synthetic polypeptide
MAKRTKKVGIVGKYGTRYGASLRKMVKKIEISQHAKYTCSFCGKTKMKRRAVGIWHCGSCMKTVAGGAWTYNTTSAVTVT

SEQ ID NO: 2614 - protein, 56 aa, Artificial Sequence
  Synthetic polypeptide
MVKKIEISQHAKYTCSFCGKTKMKRRAVGIWHCGSCMKTVAGGAWTYNTTSAVTVT

SEQ ID NO: 2615 - protein, 202 aa, Artificial Sequence
  Synthetic polypeptide
MAAVVAATALKGRGARNARVLRGILAGATANKASHNRTRALQSHSSPEGKEEPEPLSPELEYIPRKRGKNPMKAVGLAWYSLYTRTWLGYLFYRQQLRRARNRYPKGHSKTQPRLFNGVKVLPIPVLSDNYSYLIIDTQAQLAVAVDPSDPRAVQATSALCQCFSCGTYHTVFYLFTCLSPLLDCESLRAWTVSYASLYFCA

SEQ ID NO: 2616 - protein, 178 aa, Artificial Sequence
  Synthetic polypeptide
MAWQGWPAAWQWVAGCWLLLVLVLVLLVSPRGCRARRGLRGLLMAHSQRLLFRIGYSLYTRTWLGYLFYRQQLRRARNRYPKGHSKTQPRLFNGVKVLPIPVLSDNYSYLIIDTQAQLAVAVDPSDPRAVQATSALCQCFSCGTYHTVFYLFTCLSPLLDCESLRAWTVSYASLYFCA

SEQ ID NO: 2617 - protein, 142 aa, Artificial Sequence
  Synthetic polypeptide
MPSSVHHTKRQMMSIYCYWYSLYTRTWLGYLFYRQQLRRARNRYPKGHSKTQPRLFNGVKVLPIPVLSDNYSYLIIDTQAQLAVAVDPSDPRAVQATSALCQCFSCGTYHTVFYLFTCLSPLLDCESLRAWTVSYASLYFCA

SEQ ID NO: 2618 - protein, 75 aa, Artificial Sequence
  Synthetic polypeptide
MRQSGASQPLLINMYLPDPVGDGLFKDGKNPSWGPLSPAVQKGRPAEMESGGGYLSLLALESQVPWCAAALTWGE

SEQ ID NO: 2619 - protein, 496 aa, Artificial Sequence
  Synthetic polypeptide
MSGHSPTRGAMQVAMNGKARKEAVQTAAKELLKFVNRSPSPFHAVAECRNRLLQAGFSELKETEKWNIKPESKYFMTRNSSTIIAFAVGGQYVPGNGFSLIGAHTDSPCLRVKRRSRRSQVGFQQVGVETYGGGIWSTWFDRDLTLAGRVIVKCPTSGRLEQQLVHVERPILRIPHLAIHLQRNINENFGPNTEMHLVPILATAIQEELEKGTPEPGPLNAVDERHHSVLMSLLCAHLGLSPKDIVEMELCLADTQPVVLGGAYDEFIFAPRLDNLHSCFCALQALIDSCAGPGSLATEPHVRMVTLYDNEEVGSESAQGAQSLLTELVLRRISASCQHPTAFEEAIPKSFMISADMAHAVHPNYLDKHEENHRPLFHKGPVIKVNSKQRYASNAVSEALIREVANKVKVPLQDLMVRNDTPCGTTIGPILASRLGLRVLDLGSPQLAMHSIREMACTTGVLQTLTLFKVTHSRGSQLLCHEALKQPYGEADVVGN

SEQ ID NO: 2620 - protein, 421 aa, Artificial Sequence
  Synthetic polypeptide
MTRNSSTIIAFAVGGQYVPGNGFSLIGAHTDSPCLRVKRRSRRSQVGFQQVGVETYGGGIWSTWFDRDLTLAGRVIVKCPTSGRLEQQLVHVERPILRIPHLAIHLQRNINENFGPNTEMHLVPILATAIQEELEKGTPEPGPLNAVDERHHSVLMSLLCAHLGLSPKDIVEMELCLADTQPVVLGGAYDEFIFAPRLDNLHSCFCALQALIDSCAGPGSLATEPHVRMVTLYDNEEVGSESAQGAQSLLTELVLRRISASCQHPTAFEEAIPKSFMISADMAHAVHPNYLDKHEENHRPLFHKGPVIKVNSKQRYASNAVSEALIREVANKVKVPLQDLMVRNDTPCGTTIGPILASRLGLRVLDLGSPQLAMHSIREMACTTGVLQTLTLFKVTHSRGSQLLCHEALKQPYGEADVVGN

SEQ ID NO: 2621 - protein, 504 aa, Artificial Sequence
  Synthetic polypeptide
MARSLSIMFVPNSWLNGYHKVAMNGKARKEAVQTAAKELLKFVNRSPSPFHAVAECRNRLLQAGFSELKETEKWNIKPESKYFMTRNSSTIIAFAVGGQYVPGNGFSLIGAHTDSPCLRVKRRSRRSQVGFQQVGVETYGGGIWSTWFDRDLTLAGRVIVKCPTSGRLEQQLVHVERPILRIPHLAIHLQRNINENFGPNTEMHLVPILATAIQEELEKGTPEPGPLNAVDERHHSVLMSLLCAHLGLSPKDIVEMELCLADTQPVVLGGAYDEFIFAPRLDNLHSCFCALQALIDSCAGPGSLATEPHVRMVTLYDNEEVGSESAQGAQSLLTELVLRRISASCQHPTAFEEAIPKSFMISADMAHAVHPNYLDKHEENHRPLFHKGPVIKVNSKQRYASNAVSEALIREVANKVKVPLQDLMVRNDTPCGTTIGPILASRLGLRVLDLGSPQLAMHSIREMACTTGVLQTLTLFKVTHSRGSQLLCHEALKQPYGEADVVGN

SEQ ID NO: 2622 - protein, 327 aa, Artificial Sequence
  Synthetic polypeptide
MLSGAAGAARRGGAALAPSLTRSLAGTHAGADSCAGADKGSHKETIEERDKRQQRQQRQRQHQGCGAAGSGSDSPTSGPHPVPVLFPLALSLEEQPLPPLPLGRAPGLLAREGQGREALASPSSRGQMPIEIVCKIKFAEEDAKPKEKEAGDEQSLLGAVAPGAAPRDLATFASTSTLHGLGRACGPGPHGLRRTLWALALLTSLAAFLYQAAGLARGYLTRPHLVAMDPAAPAPVAGFPAVTLCNINRFRHSALSDADIFHLANLTGLPPKDRDGHRAAGLRYPEPDMVDILNRTGHQLADMLKSCNFSGHHCSASNFSVASFLEL

SEQ ID NO: 2623 - protein, 327 aa, Artificial Sequence; identical to SEQ ID NO: 2622
  Synthetic polypeptide

SEQ ID NO: 2624 - protein, 24 aa, Artificial Sequence
  Synthetic polypeptide
MWQPATERLQERFADTEAAQRRPL

SEQ ID NO: 2625 - protein, 24 aa, Artificial Sequence
  Synthetic polypeptide
MWQPATERLQERFADTEAAQRRPL

SEQ ID NO: 2626 - protein, 24 aa, Artificial Sequence
  Synthetic polypeptide
MWQPATERLQERFADTEAAQRRPL

SEQ ID NO: 2627 - protein, 417 aa, Artificial Sequence
  Synthetic polypeptide
MQPRRAQAPGAQLLPALALLLLLLGAGPRGSSLANPVPAAPLSAPGPCAAQPCRNGGVCTSRPEPDPQHPAPAGEPGYSCTCPAGISGANCQLVADPCASNPCHHGNCSSSSSSSSDGYLCICNEGYEGPNCEQALPSLPATGWTESMAPRQLQPVPATQEPDKILPRSQATVTLPTWQPKTGQKVVEMKWDQVEVIPDIACGNASSNSSAGGRLVSFEVPQNTSVKIRQDATASLILLWKVTATGFQQCSLIDGRSVTPLQASGGLVLLEEMLALGNNHFIGFVNDSVTKSIVALRLTLVVKVSTCVPGESHANDLECSGKGKCTTKPSEATFSCTCEEQYVGTFCEEYDACQRKPCQNNASCIDANEKQDGSNFTCVCLPACKEGHVCLLFLHDCKFLEAPQPCGTVSQLNLFPL

SEQ ID NO: 2628 - protein, 363 aa, Artificial Sequence
  Synthetic polypeptide
MQPRRAQAPGAQLLPALALLLLLLGAGPRGSSLANPVPAAPLSAPGPCAAQPCRNGGVCTSRPEPDPQHPAPAGEPGYSCTCPAGISGANCQLVADPCASNPCHHGNCSSSSSSSSDGYLCICNEGYEGPNCEQALPSLPATGWTESMAPRQLQPVPATQEPDKILPRSQATVTLPTWQPKTGQKVVEMKWDQVEVIPDIACGNASSNSSAGGRLVSFEVPQNTSVKIRQDATASLILLWKVTATGFQQCSLIDGRSVTPLQASGGLVLLEEMLALGNNHFIGFVNDSVTKSIVALRLTLVVKVSTCVPGESHANDLECSGKGKCTTKPSEVQWLTPVIPALWEAEAGGSPEVSSSRPAWPTW

SEQ ID NO: 2629 - protein, 407 aa, Artificial Sequence
  Synthetic polypeptide
MFTMTRAMEEALFQHFMHQKLGIAYAIHKPFPFFEGLLDNSIITKRMYMESLEACRNLIPVSRVVHNILTQLERTFNLSLLVTLFSQINLREYPNLVTIYRSFKRVGASYEWQSRDTPILLEAPTGLAEGSSLHTPLALPPPQPPQPSCSPCAPRVSEPGTSSQQSDEILSESPSPSDPVLPLPALIQEGRSTSVTNDKLTSKMNAEEDSEEMPSLLTSTVQVASDNLIPQIRDKEDPQEMPHSPLGSMPEIRDNSPEPNDPEEPQEVSSTPSDKKGKKRKRCIWSTPKRRHKKKSLPGGTASSRHGIQKKLKRVDQVPQKKDDSTCNSTVETRAQKARTECARKSRSEEIIDGTSEMNEGKRSQKTPSTPRRVTQGTWMKLEPIILSKVTQEQKTKHRMFSLISGS

SEQ ID NO: 2630 - protein, 407 aa, Artificial Sequence; identical to SEQ ID NO: 2629
  Synthetic polypeptide

SEQ ID NO: 2631 - protein, 407 aa, Artificial Sequence; identical to SEQ ID NO: 2629
  Synthetic polypeptide

SEQ ID NO: 2632 - protein, 405 aa, Artificial Sequence
  Synthetic polypeptide
MFTMTRAMEEALFQHFMHQKLGIAYAIHKPFPFFEGLLDNSIITKRMYMESLEACRNLIPVSRVVHNILTQLERTFNLSLLVTLFSQINLREYPNLVTIYRSFKRVGASYEWQSRDTPILLEAPTGLAEGSSLHTPLALPPPQPPQPSCSPCAPRVSEPGTSSQQSDEILSESPSPSDPVLPLPALIQEGRSTSVTNDKLTSKMNAEEDSEEMPSLLTSTVQVASDNLIPQIRDKEDPQEMPHSPLGSMPEIRDNSPEPNDPEEPQEVSSTPSDKKGKKRKRCIWSTPKRRHKKKSLPGASSRHGIQKKLKRVDQVPQKKDDSTCNSTVETRAQKARTECARKSRSEEIIDGTSEMNEGKRSQKTPSTPRRVTQGTWMKLEPIILSKVTQEQKTKHRMFSLISGS

SEQ ID NO: 2633 - protein, 413 aa, Artificial Sequence
  Synthetic polypeptide
MGRGFRMFTMTRAMEEALFQHFMHQKLGIAYAIHKPFPFFEGLLDNSIITKRMYMESLEACRNLIPVSRVVHNILTQLERTFNLSLLVTLFSQINLREYPNLVTIYRSFKRVGASYEWQSRDTPILLEAPTGLAEGSSLHTPLALPPPQPPQPSCSPCAPRVSEPGTSSQQSDEILSESPSPSDPVLPLPALIQEGRSTSVTNDKLTSKMNAEEDSEEMPSLLTSTVQVASDNLIPQIRDKEDPQEMPHSPLGSMPEIRDNSPEPNDPEEPQEVSSTPSDKKGKKRKRCIWSTPKRRHKKKSLPGGTASSRHGIQKKLKRVDQVPQKKDDSTCNSTVETRAQKARTECARKSRSEEIIDGTSEMNEGKRSQKTPSTPRRVTQGTWMKLEPIILSKVTQEQKTKHRMFSLISGS

SEQ ID NO: 2634 - protein, 109 aa, Artificial Sequence
  Synthetic polypeptide
MPEIRDNSPEPNDPEEPQEVSSTPSDKKGKKRKRCIWSTPKRRHKKKSLPGEIIDGTSEMNEGKRSQKTPSTPRRVTQGTWMKLEPIILSKVTQEQKTKHRMFSLISGS

SEQ ID NO: 2635 - protein, 229 aa, Artificial Sequence
  Synthetic polypeptide
MAGGGSDLSTRGLNGGVSQVANEMNHLPAHSQSLQRLFTEDQDVDEGLVYDTVFKHFKRHKLEISNAIKKTFPFLEGLRDRELITNKMFEDSEDSCRNLVPVQRVVYNVLSELEKTFNLSVLEALFSEVNMQEYPDLIHIYKSFKNAIQDKLSFQESDRKEREERPDIKLSLKQGEVPESPEARKESDQACGKMDTVDIANNSTLGKPKRKRSFEDGRGNQGMWMTSRS

SEQ ID NO: 2636 - protein, 229 aa, Artificial Sequence; identical to SEQ ID NO: 2635
  Synthetic polypeptide

SEQ ID NO: 2637 - protein, 229 aa, Artificial Sequence; identical to SEQ ID NO: 2635
  Synthetic polypeptide

SEQ ID NO: 2638 - protein, 229 aa, Artificial Sequence; identical to SEQ ID NO: 2635
  Synthetic polypeptide

SEQ ID NO: 2639 - protein, 142 aa, Artificial Sequence
  Synthetic polypeptide
MFEDSEDSCRNLVPVQRVVYNVLSELEKTFNLSVLEALFSEVNMQEYPDLIHIYKSFKNAIQDKLSFQESDRKEREERPDIKLSLKQGEVPESPEARKESDQACGKMDTVDIANNSTLGKPKRKRSFEDGRGNQGMWMTSRS

SEQ ID NO: 2640 - protein, 133 aa, Artificial Sequence
  Synthetic polypeptide
MRAGRGATPARELFRDAAFPAADSSLFCDLSTPLAQFREDITWRRPQEICATPRLFPDDPREGQVKQGLLGDCWFLCACAALQKSRHLLDQVSCPVQLPADWTCKVQPVWLEFPCLPISCRLRVSSDTSPDSG

SEQ ID NO: 2641 - protein, 134 aa, Artificial Sequence
  Synthetic polypeptide
MRAGRGATPARELFRDAAFPAADSSLFCDLSTPLAQFREDITWRRPQEICATPRLFPDDPREGQVKQGLLGDCWFLCACAALQKSRHLLDQVSCPVQLPADWTCKVQPVWLEFPCLPISCRLRVSSDTSPDSDS

SEQ ID NO: 2642 - protein, 134 aa, Artificial Sequence; identical to SEQ ID NO: 2641
  Synthetic polypeptide

SEQ ID NO: 2643 - protein, 123 aa, Artificial Sequence
  Synthetic polypeptide
MSKQQPTQFINPETPGYVGFANLPNQVHRKSVKKGFEFTLMVVGESGLGKSTLINSLFLTDLYPERVIPGAAEKIERTVQIEASTVEIEERGVKLRLTVVDTPGYGDAINCRDCHVPEKNWQP

SEQ ID NO: 2644 - protein, 123 aa, Artificial Sequence; identical to SEQ ID NO: 2643
  Synthetic polypeptide

SEQ ID NO: 2645 - protein, 123 aa, Artificial Sequence; identical to SEQ ID NO: 2643
  Synthetic polypeptide

SEQ ID NO: 2646 - protein, 123 aa, Artificial Sequence; identical to SEQ ID NO: 2643
  Synthetic polypeptide

SEQ ID NO: 2647 - protein, 123 aa, Artificial Sequence; identical to SEQ ID NO: 2643
  Synthetic polypeptide

SEQ ID NO: 2648 - protein, 123 aa, Artificial Sequence; identical to SEQ ID NO: 2643
  Synthetic polypeptide

SEQ ID NO: 2649 - protein, 123 aa, Artificial Sequence; identical to SEQ ID NO: 2643
  Synthetic polypeptide

SEQ ID NO: 2650 - protein, 83 aa, Artificial Sequence
  Synthetic polypeptide
MVVGESGLGKSTLINSLFLTDLYPERVIPGAAEKIERTVQIEASTVEIEERGVKLRLTVVDTPGYGDAINCRDCHVPEKNWQP

SEQ ID NO: 2651 - protein, 83 aa, Artificial Sequence; identical to SEQ ID NO: 2650
  Synthetic polypeptide

SEQ ID NO: 2652 - protein, 83 aa, Artificial Sequence; identical to SEQ ID NO: 2650
  Synthetic polypeptide

SEQ ID NO: 2653 - protein, 83 aa, Artificial Sequence; identical to SEQ ID NO: 2650
  Synthetic polypeptide

SEQ ID NO: 2654 - protein, 133 aa, Artificial Sequence
  Synthetic polypeptide
MSKQQPTQFINPETPGYVGFANLPNQVHRKSVKKGFEFTLMVVGESGLGKSTLINSLFLTDLYPERVIPGAAALNTRKTLLWEKIERTVQIEASTVEIEERGVKLRLTVVDTPGYGDAINCRDCHVPEKNWQP

SEQ ID NO: 2655 - protein, 134 aa, Artificial Sequence
  Synthetic polypeptide
MEFNSNVKSWSFSLQQPTQFINPETPGYVGFANLPNQVHRKSVKKGFEFTLMVVGESGLGKSTLINSLFLTDLYPERVIPGAAEKIERTVQIEASTVEIEERGVKLRLTVVDTPGYGDAINCRDCHVPEKNWQP

SEQ ID NO: 2656 - protein, 15 aa, Artificial Sequence
  Synthetic polypeptide
NPHGIFGEPTSVERQ

SEQ ID NO: 2657 - protein, 11 aa, Artificial Sequence
  Synthetic polypeptide
MMAQFPTAMNG

SEQ ID NO: 2658 - protein, 11 aa, Artificial Sequence
  Synthetic polypeptide
MMAQFPTAMNG

SEQ ID NO: 2659 - protein, 11 aa, Artificial Sequence
  Synthetic polypeptide
MMAQFPTAMNG

SEQ ID NO: 2660 - protein, 11 aa, Artificial Sequence
  Synthetic polypeptide
MMAQFPTAMNG

SEQ ID NO: 2661 - protein, 54 aa, Artificial Sequence
  Synthetic polypeptide
MNPPGSLEALDPNVDEHLSTQILAPSVHSDNSQERIQARRLRIAARLEARRRLT

SEQ ID NO: 2662 - protein, 54 aa, Artificial Sequence; identical to SEQ ID NO: 2661
  Synthetic polypeptide

SEQ ID NO: 2663 - protein, 190 aa, Artificial Sequence
  Synthetic polypeptide
MEEKQILCVGLVVLDVISLVDKYPKEDSEIRCLSQRWQRGGNASNSCTVLSLLGAPCAFMGSMAPGHVADFVLDDLRRYSVDLRYTVFQTTGSVPIATVIINEASGSRTILYYDRSLPDVSATDFEKVDLTQFKWIHIEGRNASEQVKMLQRIDAHNTRQPPEQKIRVSVEVEKPREELFQLFGYGDVVQ

SEQ ID NO: 2664 - protein, 190 aa, Artificial Sequence
  Synthetic polypeptide
MEEKQILCVGLVVLDVISLVDKYPKEDSEIRCLSQRWQRGGNASNSCTVLSLLGAPCAFMGSMAPGHVADFLVADFRRRGVDVSQVAWQSKGDTPSSCCIINNSNGNRTIVLHDTSLPDVSATDFEKVDLTQFKWIHIEGRNASEQVKMLQRIDAHNTRQPPEQKIRVSVEVEKPREELFQLFGYGDVVQ

SEQ ID NO: 2665 - protein, 235 aa, Artificial Sequence
  Synthetic polypeptide
MEEKQILCVGLVVLDVISLVDKYPKEDSEIRCLSQRWQRGGNASNSCTVLSLLGAPCAFMGSMAPGHVADFVLDDLRRYSVDLRYTVFQTTGSVPIATVIINEASGSRTILYYDSFLVADFRRRGVDVSQVAWQSKGDTPSSCCIINNSNGNRTIVLHDTSLPDVSATDFEKVDLTQFKWIHIEGRNASEQVKMLQRIDAHNTRQPPEQKIRVSVEVEKPREELFQLFGYGDVVQ

SEQ ID NO: 2666 - protein, 72 aa, Artificial Sequence
  Synthetic polypeptide
MGAYLSQPNTVKCSGDGVGAPRLPLPYGFSAMQGWRVSMEDAHNCIPELDSETAMFSVYDGHGGWARGRSHL

SEQ ID NO: 2667 - protein, 72 aa, Artificial Sequence; identical to SEQ ID NO: 2666
  Synthetic polypeptide

SEQ ID NO: 2668 - protein, 239 aa, Artificial Sequence
  Synthetic polypeptide
MSPEVALNRISPMLSPFISSVVRNGKVGLDATNCLRITDLKSGCTSLTPGPNCDRFKLHIPYAGETLKWDIIFNAQYPELPPDFIFGEDAEFLPDPSALQNLASWNPSNPECLLLVVKELVQQYHQFQCSRLRESSRLMFEYQTLLEEPQYGENMEIYAGKKNNWTGEFSARFLLKLPVDFSNIPTYLLKDVNEDPGEDVALLSVSFEDTEATQVYPKLYLSPRIEHWAQWLTSIIPAL

SEQ ID NO: 2669 - protein, 239 aa, Artificial Sequence; identical to SEQ ID NO: 2668
  Synthetic polypeptide

SEQ ID NO: 2670 - protein, 239 aa, Artificial Sequence; identical to SEQ ID NO: 2668
  Synthetic polypeptide

SEQ ID NO: 2671 - protein, 239 aa, Artificial Sequence; identical to SEQ ID NO: 2668
  Synthetic polypeptide

SEQ ID NO: 2672 - protein, 239 aa, Artificial Sequence; identical to SEQ ID NO: 2668
  Synthetic polypeptide

SEQ ID NO: 2673 - protein, 239 aa, Artificial Sequence; identical to SEQ ID NO: 2668
  Synthetic polypeptide

SEQ ID NO: 2674 - protein, 693 aa, Artificial Sequence
  Synthetic polypeptide
MGSSGLGKAATLDELLCTCIEMFDDNGELDNSYLPRIVLLMHRWYLSSTELAEKLLCMYRNATGESCNEFRLKICYFMRYWILKFPAEFNLDLGLIRMTEEFREVASQLGYEKHVSLIDISSIPSYDWMRRVTQRKKVSKKGKACLLFDHLEPIELAEHLTFLEHKSFRRISFTDYQSYVIHGCLENNPTLERSIALFNGISKWVQLMVLSKPTPQQRAEVITKFINVAKKLLQLKNFNTLMAVVGGLSHSSISRLKETHSHLSSEVTKNWNEMTELVSSNGNYCNYRKAFADCDGFKIPILGVHLKDLIAVHVIFPDWTEENKVNIVKMHQLSVTLSELVSLQNASHHLEPNMDLINLLTLSLDLYHTEDDIYKLSLVLEPRNSKSQPTSPTTPNKPVVPLEWALGVMPKPDPTVINKHIRKLVESVFRNYDHDHDGYISQEDFESIAANFPFLDSFCVLDKDQDGLISKDEMMAYFLRAKSQLHCKMGPGFIHNFQEMTYLKPTFCEHCAGFLWGIIKQGYKCKDCGANCHKQCKDLLVLACRRFARAPSLSSGHGSLPGSPSLPPAQDEVFEFPGVTAGHRDLDSRAITLVTGSSRKISVRLQRATTSQATQTEPVWSEAGWGDSGSHTFPKMKSKFHDKAAKDKGFAKWENEKPRVHAGVDVVDRGTEFELDQDEGEETRQDGEELPTD

SEQ ID NO: 2675 - protein, 693 aa, Artificial Sequence; identical to SEQ ID NO: 2674
  Synthetic polypeptide

SEQ ID NO: 2676 - protein, 692 aa, Artificial Sequence
  Synthetic polypeptide
MGSSGLGKAATLDELLCTCIEMFDDNGELDNSYLPRIVLLMHRWYLSSTELAEKLLCMYRNATGESCNEFRLKICYFMRYWILKFPAEFNLDLGLIRMTEEFREVASQLGYEKHVSLIDISSIPSYDWMRRVTQRKKVSKKGKACLLFDHLEPIELAEHLTFLEHKSFRRISFTDYQSYVIHGCLENNPTLERSIALFNGISKWVQLMVLSKPTPQQRAEVITKFINVAKKLLQLKNFNTLMAVVGGLSHSSISRLKETHSHLSSEVTKNWNEMTELVSSNGNYCNYRKAFADCDGFKIPILGVHLKDLIAVHVIFPDWTEENKVNIVKMHQLSVTLSELVSLQNASHHLEPNMDLINLLTLSLDLYHTEDDIYKLSLVLEPRNSKSPTSPTTPNKPVVPLEWALGVMPKPDPTVINKHIRKLVESVFRNYDHDHDGYISQEDFESIAANFPFLDSFCVLDKDQDGLISKDEMMAYFLRAKSQLHCKMGPGFIHNFQEMTYLKPTFCEHCAGFLWGIIKQGYKCKDCGANCHKQCKDLLVLACRRFARAPSLSSGHGSLPGSPSLPPAQDEVFEFPGVTAGHRDLDSRAITLVTGSSRKISVRLQRATTSQATQTEPVWSEAGWGDSGSHTFPKMKSKFHDKAAKDKGFAKWENEKPRVHAGVDVVDRGTEFELDQDEGEETRQDGEELPTD

SEQ ID NO: 2677 - protein, 285 aa, Artificial Sequence
  Synthetic polypeptide
MLADKHAKEIEEESETTVEADLTDKQKHQLKHRELFLSRQYESLPATHIRGKCSVALLNETESVLSYLDKEDTFFYSLVYDPSLKTLLADKGEIRVGPRYQADIPEMLLEGESDEREQSKLEVKVWDPNSPLTDRQIDQFLVVARAVGTFARALDCSSSVRQPSLHMSAAAASRDITLFHAMDTLYRHSYDLSSAISVLVPLGGPVLCRDEMEEWSASEASLFEEALEKYGKDFNDIRQDFLPWKSLTSIIEYYYMWKTTDRYVQQKRLKAAEAESKLKQVYIPT

SEQ ID NO: 2678 - protein, 285 aa, Artificial Sequence; identical to SEQ ID NO: 2677
  Synthetic polypeptide

SEQ ID NO: 2679 - protein, 341 aa, Artificial Sequence
  Synthetic polypeptide
MAANMYRVGDYVYFENSSSNPYLIRRIEELNKTASGNVEAKVVCFYRRRDISNTLIMLADKHAKEIEEESETTVEADLTDKQKHQLKHRELFLSRQYESLPATHIRGKCSVALLNETESVLSYLDKEDTFFYSLVYDPSLKTLLADKGEIRVGPRYQADIPEMLLEGESDEREQSKLEVKVWDPNSPLTDRQIDQFLVVARAVGTFARALDCSSSVRQPSLHMSAAAASRDITLFHAMDTLYRHSYDLSSAISVLVPLGGPVLCRDEMEEWSASEASLFEEALEKYGKDFNDIRQDFLPWKSLTSIIEYYYMWKTTDRYVQQKRLKAAEAESKLKQVYIPT

SEQ ID NO: 2680 - protein, 341 aa, Artificial Sequence; identical to SEQ ID NO: 2679
  Synthetic polypeptide

SEQ ID NO: 2681 - protein, 341 aa, Artificial Sequence; identical to SEQ ID NO: 2679
  Synthetic polypeptide

SEQ ID NO: 2682 - protein, 341 aa, Artificial Sequence; identical to SEQ ID NO: 2679
  Synthetic polypeptide

SEQ ID NO: 2683 - protein, 341 aa, Artificial Sequence; identical to SEQ ID NO: 2679
  Synthetic polypeptide

SEQ ID NO: 2684 - protein, 518 aa, Artificial Sequence
  Synthetic polypeptide
MAVQPKETLQLESAAEVGFVRFFQGMPEKPTTTVRLFDRGDFYTAHGEDALLAAREVFKTQGVIKYMGPAGAKNLQSVVLSKMNFESFVKDLLLVRQYRVEVYKNRAGNKASKENDWYLAYKASPGNLSQFEDILFGNNDMSASIGVVGVKMSAVDGQRQVGVGYVDSIQRKLGLCEFPDNDQFSNLEALLIQIGPKECVLPGGETAGDMGKLRQIIQRGGILITERKKADFSTKDIYQDLNRLLKGKKGEQMNSAVLPEMENQVAVSSLSAVIKFLELLSDDSNFGQFELTTFDFSQYMKLDIAAVRALNLFQGSVEDTTGSQSLAALLNKCKTPQGQRLVNQWIKQPLMDKNRIEERLNLVEAFVEDAELRQTLQEDLLRRFPDLNRLAKKFQRQAANLQDCYRLYQGINQLPNVIQALEKHEGKHQKLLLAVFVTPLTDLRSDFSKFQEMIETTLDMDQVENHEFLVKPSFDPNLSELREIMNDLEKKMQSTLISAARDLGGSLQPRSSRLACAT

SEQ ID NO: 2685 - protein, 518 aa, Artificial Sequence; identical to SEQ ID NO: 2684
  Synthetic polypeptide

SEQ ID NO: 2686 - protein, 452 aa, Artificial Sequence
  Synthetic polypeptide
MGPAGAKNLQSVVLSKMNFESFVKDLLLVRQYRVEVYKNRAGNKASKENDWYLAYKASPGNLSQFEDILFGNNDMSASIGVVGVKMSAVDGQRQVGVGYVDSIQRKLGLCEFPDNDQFSNLEALLIQIGPKECVLPGGETAGDMGKLRQIIQRGGILITERKKADFSTKDIYQDLNRLLKGKKGEQMNSAVLPEMENQVAVSSLSAVIKFLELLSDDSNFGQFELTTFDFSQYMKLDIAAVRALNLFQGSVEDTTGSQSLAALLNKCKTPQGQRLVNQWIKQPLMDKNRIEERLNLVEAFVEDAELRQTLQEDLLRRFPDLNRLAKKFQRQAANLQDCYRLYQGINQLPNVIQALEKHEGKHQKLLLAVFVTPLTDLRSDFSKFQEMIETTLDMDQVENHEFLVKPSFDPNLSELREIMNDLEKKMQSTLISAARDLGGSLQPRSSRLACAT

SEQ ID NO: 2687 - protein, 175 aa, Artificial Sequence
  Synthetic polypeptide
MKILVAFLVVLTIFGIQSHGYEVFNIISPSNNGGNVQETVTIDNEKNTAIINIHAGSCSSTTIFDYKHGYIASRVLSRRACFILKMDHQNIPPLNNLQWYIYEKQALDNMFSSKYTWVKYNPLESLIKDVDWFLLGSPIEKLCKHIPLYKGEVVENTHLWDPSCRGPPASAFELT

SEQ ID NO: 2688 - protein, 175 aa, Artificial Sequence; identical to SEQ ID NO: 2687
  Synthetic polypeptide

SEQ ID NO: 2689 - protein, 40 aa, Artificial Sequence
  Synthetic polypeptide
MAMEIDSRPGGLPGSSCNLGAAREHMQAVTRNYITHPRVT

SEQ ID NO: 2690 - protein, 40 aa, Artificial Sequence; identical to SEQ ID NO: 2689
  Synthetic polypeptide

SEQ ID NO: 2691 - protein, 40 aa, Artificial Sequence; identical to SEQ ID NO: 2689
  Synthetic polypeptide

SEQ ID NO: 2692 - protein, 178 aa, Artificial Sequence
  Synthetic polypeptide
MWFMYLLSWLSLFIQVAFITLAVAAGLYYLAELIEEYTVATSRIIKYMIWFSTAVLIGLYVFERFPTSMIGVGLFTNLVYFGLLQTFPFIMLTSPNFILSCGLVVVNHYLAFQFFAEEYYPFSEVHGPDGTCCLLQTCPFWVLPLTPRSLRSQTGNLFYSCFLFLPTTSNLSKRSGLP

SEQ ID NO: 2693 - protein, 178 aa, Artificial Sequence; identical to SEQ ID NO: 2692
  Synthetic polypeptide

SEQ ID NO: 2694 - protein, 150 aa, Artificial Sequence
  Synthetic polypeptide
MWFMYLLSWLSLFIQVAFITLAVAAGLYYLAELIEEYTVATSRIIKYMIWFSTAVLIGLYVFERFPTSMIGVGLFTNLVYFGLLQTFPFIMLTSPNFILSCGLVVVNHYLAFQFFAEEYYPFSEVHRQFRSMAQMVLAVFCKPAPSGYFP

SEQ ID NO: 2695 - protein, 150 aa, Artificial Sequence; identical to SEQ ID NO: 2694
  Synthetic polypeptide

SEQ ID NO: 2696 - protein, 853 aa, Artificial Sequence
  Synthetic polypeptide
MSRPRFNPRGDFPLQRPRAPNPSGMRPPGPFMRPGSMGLPRFYPAGRARGIPHRFAGHESYQNMGPQRMNVQVTQHRTDPRLTKEKLDFHEAQQKKGKPHGSRWDDEPHISASVAVKQSSVTQVTEQSPKVQSRYTKESASSILASFGLSNEDLEELSRYPDEQLTPENMPLILRDIRMRKMGRRLPNLPSQSRNKETLGSEAVSSNVIDYGHASKYGYTEDPLEVRIYDPEIPTDEVENEFQSQQNISASVPNPNVICNSMFPVEDVFRQMDFPGESSNNRSFFSVESGTKMSGLHISGGQSVLEPIKSVNQSINQTVSQTMSQSLIPPSMNQQPFSSELISSVSQQERIPHEPVINSSNVHVGSRGSKKNYQSQADIPIRSPFGIVKASWLPKFSHADAQKMKRLPTPSMMNDYYAASPRIFPHLCSLCNVECSHLKDWIQHQNTSTHIESCRQLRQQYPDWNPEILPSRRNEGNRKENETPRRRSHSPSPRRSRRSSSSHRFRRSRSPMHYMYRPRSRSPRICHRFISRYRSRSRSRSPYRIRNPFRGSPKCFRSVSPERMSRRSVRSSDRKKALEDVVQRSGHGTEFNKQKHLEAADKGHSPAQKPKTSSGTKPSVKPTSATKSDSNLGGHSIRCKSKNLEDDTLSECKQVSDKAVSLQRKLRKEQSLHYGSVLLITELPEDGCTEEDVRKLFQPFGKVNDVLIVPYRKEAYLEMEFKEAITAIMKYIETTPLTIKGKSVKICVPGKKKAQNKEVKKKTLESKKVSASTLKRDADASKAVEIVTSTSAGPLWIPVRCIRPYHGVARTQHSTRSEGNDPAGPAAPDNTASSDDTSPGHYLGDAEEDNLQG

SEQ ID NO: 2697 - protein, 853 aa, Artificial Sequence; identical to SEQ ID NO: 2696
  Synthetic polypeptide

SEQ ID NO: 2698 - protein, 853 aa, Artificial Sequence; identical to SEQ ID NO: 2696
  Synthetic polypeptide

SEQ ID NO: 2699 - protein, 853 aa, Artificial Sequence; identical to SEQ ID NO: 2696
  Synthetic polypeptide

SEQ ID NO: 2700 - protein, 528 aa, Artificial Sequence
  Synthetic polypeptide
MRPVSVWQWSPWGLLLCLLCSSCLGSPSPSTGPEKKAGSQGLRFRLAGFPRKPYEGRVEIQRAGEWGTICDDDFTLQAAHILCRELGFTEATGWTHSAKYGPGTGRIWLDNLSCSGTEQSVTECASRGWGNSDCTHDEDAGVICKDQRLPGFSDSNVIEVEHHLQVEEVRIRPAVGWGRRPLPVTEGLVEVRLPDGWSQVCDKGWSAHNSHVVCGMLGFPSEKRVNAAFYRLLAQRQQHSFGLHGVACVGTEAHLSLCSLEFYRANDTARCPGGGPAVVSCVPGPVYAASSGQKKQQQSKPQGEARVRLKGGAHPGEGRVEVLKASTWGTVCDRKWDLHAASVVCRELGFGSAREALSGARMGQGMGAIHLSEVRCSGQELSLWKCPHKNITAEDCSHSQDAGVRCNLPYTGAETRIRLSGGRSQHEGRVEVQIGGPGPLRWGLICGDDWGTLEAMVACRQLGLGYANHGLQETWYWDSGNITEVVMSGVRCTGTELSLDQCAHHGTHITCKRTGTRFTAGVICSETL

SEQ ID NO: 2701 - protein, 383 aa, Artificial Sequence
  Synthetic polypeptide
MRPVSVWQWSPWGLLLCLLCSSCLGSPSPSTGPEKKAGSQGLRFRLAGFPRKPYEGRVEIQRAGEWGTICDDDFTLQAAHILCRELGFTEATGWTHSAKYGPGTGRIWLDNLSCSGTEQSVTECASRGWGNSDCTHDEDAGVICKDQRLPGFSDSNVIEARVRLKGGAHPGEGRVEVLKASTWGTVCDRKWDLHAASVVCRELGFGSAREALSGARMGQGMGAIHLSEVRCSGQELSLWKCPHKNITAEDCSHSQDAGVRCNLPYTGAETRIRLSGGRSQHEGRVEVQIGGPGPLRWGLICGDDWGTLEAMVACRQLGLGYANHGLQETWYWDSGNITEVVMSGVRCTGTELSLDQCAHHGTHITCKRTGTRFTAGVICSETL

SEQ ID NO: 2702 - protein, 383 aa, Artificial Sequence; identical to SEQ ID NO: 2701
  Synthetic polypeptide

SEQ ID NO: 2703 - protein, 472 aa, Artificial Sequence
  Synthetic polypeptide
MRPVSVWQWSPWGLLLCLLCSSCLGSPSPSTGPEKKAGSQGLRFRLAGFPRKPYEGRVEIQRAGEWGTICDDDFTLQAAHILCRELGFTEATGWTHSAKYGPGTGRIWLDNLSCSGTEQSVTECASRGWGNSDCTHDEDAGVICKDQRLPGFSDSNVIEVEHHLQVEEVRIRPAVGWGRRPLPVTEGLVEVRLPDGWSQVCDKGWSAHNSHVVCGMLGFPSEKRVNAAFYRLLAQRQQHSFGLHGVACVGTEAHLSLCSLEFYRANDTARCPGGGPAVVSCVPGPVYAASSGQKKQQQSKPQGEARVRLKGGAHPGEGRVEVLKASTWGTVCDRKWDLHAASVVCRELGFGSAREALSGARMGQGMGAIHLSEVRCSGQELSLWKCPHKNITAEDCSHSQDAGVRCNLPYTGAETRETWYWDSGNITEVVMSGVRCTGTELSLDQCAHHGTHITCKRTGTRFTAGVICSETL

SEQ ID NO: 2704 - protein, 325 aa, Artificial Sequence
  Synthetic polypeptide
MKHIPVLEDGPWKTVCVKELNGLKKLKRKGKEPARRANGYKTFRLDLEAPEPRAVATNGLRDRTHRLQPVPVPVPVPVPVAPAVPPRGGTDTAGERGGSRAPEVSDARKRCFALGAVGPGLPTPPPPPPPAPQSQAPGGPEAQPFREPGLRPRILLCAPPARPAPSAPPAPPAPPESTVRPAPPTRPGESSYSSISHVIYNNHQDSSASPRKRPGEATAASSEIKALQQTRRLLANARERTRVHTISAAFEALRKQVPCYSYGQKLSKLAILRIACNYILSLARLADLDYSADHSNLSFSECVQRCTRTLQAEGRAKKRKVLLTV

SEQ ID NO: 2705 - protein, 42 aa, Artificial Sequence
  Synthetic polypeptide
MGLFGKTQEKPPKELVNEWSLKIRKEMRVVDRQIRGSIGVFG

SEQ ID NO: 2706 - protein, 42 aa, Artificial Sequence; identical to SEQ ID NO: 2705
  Synthetic polypeptide

SEQ ID NO: 2707 - protein, 71 aa, Artificial Sequence
  Synthetic polypeptide
MEGELYSALKEEEASESVSSTNFSGEMHFYELVEDTKDGIWLVQVNEWSLKIRKEMRVVDRQIRGSIGVFG

SEQ ID NO: 2708 - protein, 71 aa, Artificial Sequence; identical to SEQ ID NO: 2707
  Synthetic polypeptide

SEQ ID NO: 2709 - protein, 149 aa, Artificial Sequence
  Synthetic polypeptide
MWLKLFFLLLYFLVLFVLARFFEAIVWYETGIFATQLVDPVALSFKKLKTILECRGLGYSGLPEKKDVRELVEKSGDLMEGELYSALKEEEASESVSSTNFSGEMHFYELVEDTKDGIWLVQVNEWSLKIRKEMRVVDRQIRGSIGVFG

SEQ ID NO: 2710 - protein, 216 aa, Artificial Sequence
  Synthetic polypeptide
MRPRLWLLLAAQLTVLHGNSVLQQTPAYIKVQTNKMVMLSCEAKISLSNMRIYWLRQRQAPSSDSHHEFLALWDSAKGTIHGEEVEQEKIAVFRDASRFILNLTSVKPEDSGIYFCMIVGSPELTFGKGTQLSVVDFLPTTAQPTKKSTLKKRVCRLPRPETQKGPLCSPITLGLLVAGVLVLLVSLGVAIHLCCRRRRARLRFMKQKFNIVCLKI

SEQ ID NO: 2711 - protein, 216 aa, Artificial Sequence; identical to SEQ ID NO: 2710
  Synthetic polypeptide

SEQ ID NO: 2712 - protein, 216 aa, Artificial Sequence; identical to SEQ ID NO: 2710
  Synthetic polypeptide

SEQ ID NO: 2713 - protein, 186 aa, Artificial Sequence
  Synthetic polypeptide
MRPRLWLLLAAQLTVLHGNSVLQQTPAYIKVQTNKMVMLSCEAKISLSNMRIYWLRQRQAPSSDSHHEFLALWDSAKGTIHGEEVEQEKIAVFRDASRFILNLTSVKPEDSGIYFCMIVGSPELTFGKGTQLSVVDFLPTTAQPTKKSTLKKRVCRLPRPETQKGRRRRARLRFMKQKFNIVCLKI

SEQ ID NO: 2714 - protein, 36 aa, Artificial Sequence
  Synthetic polypeptide
MRPRLWLLLAAQLTGRRRRARLRFMKQKFNIVCLKI

SEQ ID NO: 2715 - protein, 23 aa, Artificial Sequence
  Synthetic polypeptide
MNVMGFNTDRLAWTRNDLWYCLA

SEQ ID NO: 2716 - protein, 23 aa, Artificial Sequence
  Synthetic polypeptide
MNVMGFNTDRLAWTRNDLWYCLA

SEQ ID NO: 2717 - protein, 23 aa, Artificial Sequence
  Synthetic polypeptide
MNVMGFNTDRLAWTRNDLWYCLA

SEQ ID NO: 2718 - protein, 23 aa, Artificial Sequence
  Synthetic polypeptide
MNVMGFNTDRLAWTRNDLWYCLA

SEQ ID NO: 2719 - protein, 25 aa, Artificial Sequence
  Synthetic polypeptide
LTFGGGTKVEIKRSGIYFSTSLNLD

SEQ ID NO: 2720 - protein, 87 aa, Artificial Sequence
  Synthetic polypeptide
MDMRVPAQLLGLLLLWFPGARCDIQMTQSPSSLSASVGDRVTITCRASQGIRNDLGWYQQKPGKAPKRLIYAASSLQSGVPSRLSGR

SEQ ID NO: 2721 - protein, 134 aa, Artificial Sequence
  Synthetic polypeptide
MDMRVPAQLLGLLLLWLPDTRCDIQMTQSPSSLSASVGDRVTITCRASQGISNYLAWYQQKPGKVPKLLIYAASTLQSGVPSRFSGSGSGTDFTLTISSLQPEDMALYEKMDTVISNGQDSYWRSGKTAISERG

SEQ ID NO: 2722 - protein, 220 aa, Artificial Sequence
  Synthetic polypeptide
LKRAVELDSESRYPQALVCYQEGIDLLLQVLKGTKDNTKRCNLREKISKYMDRAENIKKYLDQEKEDGKYHKQIKIEENATGFSYESLFREYLNETVTEVWIEDPYIRHTHQLYNFLRFCEMLIKRPCKVKTIHLLTSLDEGIEQVQQSRGLQEIEESLRSHGVLLEVQYSSSIHDREIRFNNGWMIKIGRGLDYFKKPQSIFAYLAQYPMPRGNGVALN

SEQ ID NO: 2723 - protein, 238 aa, Artificial Sequence
  Synthetic polypeptide
MAKSGLRQDPQSTAAATVLKRAVELDSESRYPQALVCYQEGIDLLLQVLKGTKDNTKRCNLREKISKYMDRAENIKKYLDQEKEDGKYHKQIKIEENATGFSYESLFREYLNETVTEVWIEDPYIRHTHQLYNFLRFCEMLIKRPCKVKTIHLLTSLDEGIEQVQQSRGLQEIEESLRSHGVLLEVQYSSSIHDREIRFNNGWMIKIGRGLDYFKKPQSIFAYLAQYPMPRGNGVALN

SEQ ID NO: 2724 - protein, 209 aa, Artificial Sequence
  Synthetic polypeptide
MAKSGLRQDPQSTAAATVLKRAVELDSESRYPQALVCYQEGIDLLLQVLKGTKDNTKRCNLREKISKYMDRAENIKKYLDQEKEDGKYHKQIKIEENATGFSYESLFREYLNETVTEVWIEDPYIRHTHQGIEQVQQSRGLQEIEESLRSHGVLLEVQYSSSIHDREIRFNNGWMIKIGRGLDYFKKPQSIFAYLAQYPMPRGNGVALN

SEQ ID NO: 2725 - protein, 189 aa, Artificial Sequence
  Synthetic polypeptide
MILNVLEYGSQQVADLTLNLDDYIDAEHLGDFHRTYKNSEELRSRIVSGIITPIHEQWEKANVSSPHREFPPATAREVDPLRIPPHHPHTSRQPPWCDPLGPFVVGGEDLDPFGPRRGGMIVDPLRSGFPRALIDPSSGLPNRLPPGAVPPGARFDPFGPIGTSPPGAGVKMSPAKCLEYQIHGDVSSL

SEQ ID NO: 2726 - protein, 277 aa, Artificial Sequence
  Synthetic polypeptide
MAGLEVLFASAAPAITCRQDALVCFLHWEVVTHGYFGLGVGDQPGPNDKKSELLPAGWNNNKDLYVLRYEYKDGSRKLLVKAITVESSMILNVLEYGSQQVADLTLNLDDYIDAEHLGDFHRTYKNSEELRSRIVSGIITPIHEQWEKANVSSPHREFPPATAREVDPLRIPPHHPHTSRQPPWCDPLGPFVVGGEDLDPFGPRRGGMIVDPLRSGFPRALIDPSSGLPNRLPPGAVPPGARFDPFGPIGTSPPGAGVKMSPAKCLEYQIHGDVSSL

SEQ ID NO: 2727 - protein, 277 aa, Artificial Sequence; identical to SEQ ID NO: 2726
  Synthetic polypeptide

SEQ ID NO: 2728 - protein, 277 aa, Artificial Sequence; identical to SEQ ID NO: 2726
  Synthetic polypeptide

SEQ ID NO: 2729 - protein, 215 aa, Artificial Sequence
  Synthetic polypeptide
MAGLEVLFASAAPAITCRQDALVCFLHWEVVTHGYFGLGVGDQPGPNDKKSELLPAGWNNNKDLYVLRYEYKDGSRKLLVKAITVESSMILNVLEYGSQQVADLTLNLDDYIDAEHLGDFHRCDPLGPFVVGGEDLDPFGPRRGGMIVDPLRSGFPRALIDPSSGLPNRLPPGAVPPGARFDPFGPIGTSPPGAGVKMSPAKCLEYQIHGDVSSL

SEQ ID NO: 2730 - protein, 2 aa, Artificial Sequence
  Synthetic polypeptide
YP

SEQ ID NO: 2731 - protein, 206 aa, Artificial Sequence
  Synthetic polypeptide
MDGIIEQKSMLVHSKISDAGKRNGLINTRNLMAESRDGLVSVYPAPQYQSHRVGASTVPASLDSSRSEPMQQLLDPNTLQQSVESRYRPNIILYSEGVLRSWGDGVAADCCETTFIEDRSPTKDSLEYPDGKFIDLSADDIKIHTLSYDVEEEEEFQELESDYSSDTESEDNFLMMPPRDHLGLSVFSMLCCFWPLGIAAFYLSHE

SEQ ID NO: 2732 - protein, 195 aa, Artificial Sequence
  Synthetic polypeptide
MREPIYMHSTMVFLPWELHTKKGPSPPEQFMAVKLSDSRIALKSGYGKYLGINSDELVGHSDAIGPREQWEPVFQNGKMALLASNSCFIRCNEAGDIEAKSKTAGEEEMIKIRSCAEKETKKKDDIPEEDKGNVKQCEINYVKKFQSFQDHKLKISKEESKILKKAQKDGFLHETLLDRFGYHVLFVPILTESQS

SEQ ID NO: 2733 - protein, 195 aa, Artificial Sequence; identical to SEQ ID NO: 2732
  Synthetic polypeptide

SEQ ID NO: 2734 - protein, 23 aa, Artificial Sequence
  Synthetic polypeptide
MKLLYLFLAILLAIEEPVISGLQ

SEQ ID NO: 2735 - protein, 23 aa, Artificial Sequence
  Synthetic polypeptide
MKLLYLFLAILLAIEEPVISGLQ

SEQ ID NO: 2736 - protein, 23 aa, Artificial Sequence
  Synthetic polypeptide
MKLLYLFLAILLAIEEPVISGLQ

SEQ ID NO: 2737 - protein, 42 aa, Artificial Sequence
  Synthetic polypeptide
MTQLLLFLVALLVLGHVPSAACLGLPKCRDCSLCPAATPSGK

SEQ ID NO: 2738 - protein, 117 aa, Artificial Sequence
  Synthetic polypeptide
MTEGVLPGLYLGNFIDAKDLDQLGRNKITHIISIHESPQPLLQDITYLRIPVADTPEVPIKKHFKECINFIHCCRLNGGNCLVHCHTVSSRTAKTMPVLYPLHPQCLKKNRCSGHIY

SEQ ID NO: 2739 - protein, 117 aa, Artificial Sequence; identical to SEQ ID NO: 2738
  Synthetic polypeptide

SEQ ID NO: 2740 - protein, 120 aa, Artificial Sequence
  Synthetic polypeptide
MGNGMTKVLPGLYLGNFIDAKDLDQLGRNKITHIISIHESPQPLLQDITYLRIPVADTPEVPIKKHFKECINFIHCCRLNGGNCLVHCHTVSSRTAKTMPVLYPLHPQCLKKNRCSGHIY

SEQ ID NO: 2741 - protein, 79 aa, Artificial Sequence
  Synthetic polypeptide
MGNGMTKMPKTWISWAEIRSHTSSLSMSHPSLCCRISPTFASRSLIPLRYPSKSTSKNVSTSSTAAALMGGTALCTAIL

SEQ ID NO: 2742 - protein, 101 aa, Artificial Sequence
  Synthetic polypeptide
MTEGVLPGLYLGNFIDAKDLDQLGRNKITHIISIHESPQPLLQDITYLRIPVADTPEVPIKKHFKECINFIHCCRLNGGNCLVHCPQTHPQSYYHHLELII

SEQ ID NO: 2743 - protein, 101 aa, Artificial Sequence; identical to SEQ ID NO: 2742
  Synthetic polypeptide

SEQ ID NO: 2744 - protein, 104 aa, Artificial Sequence
  Synthetic polypeptide
MGNGMTKVLPGLYLGNFIDAKDLDQLGRNKITHIISIHESPQPLLQDITYLRIPVADTPEVPIKKHFKECINFIHCCRLNGGNCLVHCPQTHPQSYYHHLELII

SEQ ID NO: 2745 - protein, 90 aa, Artificial Sequence
  Synthetic polypeptide
MGNGMTKMPKTWISWAEIRSHTSSLSMSHPSLCCRISPTFASRSLIPLRYPSKSTSKNVSTSSTAAALMGGTALCTAPRLILKAIITTWN

SEQ ID NO: 2746 - protein, 314 aa, Artificial Sequence
  Synthetic polypeptide
MACAGLLTVCLLRPPAPQPQPQTPRHPQLAPDPGPAGHTLFQDVFRRADKNDDGKLSFEEFQNYFADGVLSLGELQELFSGIDGHLTDNLETEKLCDYFSEHLGVYRPVLAALESLNRAVLAAMDATKLEYERASKVDQFVTRFLLRETVSQLQALQSSLEGASDTLEAQAHGWRSDAESVEAQSRLCGSRRAGRRALRSVSRSSTWSPGSSDTGRSSEAEMQWRLQVNRLQELIDQLECKVRAVGPGPHKGGPSWYPPEPGPCWRPGPHSVPSQAPRLEPLREEDLAKGPDLHLGRPRWEDYLSLGDRSCSKP

SEQ ID NO: 2747 - protein, 280 aa, Artificial Sequence
  Synthetic polypeptide
MACAGLLTVCLLRPPAPQPQPQTPRHPQLAPDPGPAGHTLFQDVFRRADKNDDGKLSFEEFQNYFADGVLSLGELQELFSGIDGHLTDNLETEKLCDYFSEHLGVYRPVLAALESLNRAVLAAMDATKLEYERASKVDQFVTRFLLRETVSQLQALQSSLEGASDTLEAQAHGWRSDAESVEAQSRLCGSRRAGRRALRSVSRSSTWSPGSSDTGRSSEAEMQWRLQVNRLQELIDQLECKAPRLEPLREEDLAKGPDLHLGRPRWEDYLSLGDRSCSKP

SEQ ID NO: 2748 - protein, 59 aa, Artificial Sequence
  Synthetic polypeptide
MQWRLQVNRLQELIDQLECKAPRLEPLREEDLAKGPDLHLGRPRWEDYLSLGDRSCSKP

SEQ ID NO: 2749 - protein, 31 aa, Artificial Sequence
  Synthetic polypeptide
MKMRFFSSPCGKAAVDPVRYHYTPAKMAKRK

SEQ ID NO: 2750 - protein, 174 aa, Artificial Sequence [sequence omitted]

SEQ ID NO: 2751 - protein, 174 aa, Artificial Sequence [sequence omitted]

SEQ ID NO: 2752 - protein, 577 aa, Artificial Sequence
  Synthetic polypeptide
MAAENEASQESALGAYSPVDYMSITSFPRLPEDEPAPAAPLRGRKDEDAFLGDPDTDPDSFLKSARLQRLPSSSSEMGSQDGSPLRETRKDPFSAAAAECSCRQDGLTVIVTACLTFATGVTVALVMQIYFGDPQIFQQGAVVTDAARCTSLGIEVLSKQGSSVDAAVAAALCLGIVAPHSSGLGGGGVMLVHDIRRNESHLIDFRESAPGALREETLQRSWETKPGLLVGVPGMVKGLHEAHQLYGRLPWSQVLAFAAAVAQDGFNVTHDLARALAEQLPPNMSERFRETFLPSGRPPLPGSLLHRPDLAEVLDVLGTSGPAAFYAGGNLTLEMVAEAQHAGGVITEEDFSNYSALVEKPVCGVYRGHLVLSPPPPHTGPALISALNILEGFNLTSLVSREQALHWVAETLKIALALASRLGDPVYDSTITESMDDMLSKVEAAYLRGHINDSQAAPAPLLPVYELDGAPTAAQVLIMGPDDFIVAMVSSLNQPFGSGLITPSGILLNSQMLDFSWPNRTANHSAPSLENSVQPGKRPLSFLLPTVVRPAEGLCGTYLALGANGAARGLSGLTQGC

SEQ ID NO: 2753 - protein, 397 aa, Artificial Sequence
  Synthetic polypeptide
MAPPGSSTVFLLALTIIASTWALTPTHYLTKHDVERLKASLDRPFTNLESAFYSIVGLSSLGAQVPDAKKACTYIRSNLDPSNVDSLFYAAQASQALSGCEISISNETKDLLLAAVSEDSSVTQIYHAVAALSGFGLPLASQEALSALTARLSKEETVLATVQALQTASHLSQQADLRSIVEEIEDLVARLDELGGVYLQFEEGLETTALFVAATYKLMDHVGTEPSIKEDQVIQLMNAIFSKKNFESLSEAFSVASAAAVLSHNRYHVPVVVVPEGSASDTHEQAILRLQVTNVLSQPLTQATVKLEHAKSVASRATVLQKTSFTPVGDVFELNFMNVKFSSGYYDFLVEVEGDNRYIANTVEGQVRWLTPVIPALWEAKAGGSPEVRSSILAWPT

SEQ ID NO: 2754 - protein, 365 aa, Artificial Sequence
  Synthetic polypeptide
MAPPGSSTVFLLALTIIASTWALTPTHYLTKHDVERLKASLDRPFTNLESAFYSIVGLSSLGAQVPDAKISISNETKDLLLAAVSEDSSVTQIYHAVAALSGFGLPLASQEALSALTARLSKEETVLATVQALQTASHLSQQADLRSIVEEIEDLVARLDELGGVYLQFEEGLETTALFVAATYKLMDHVGTEPSIKEDQVIQLMNAIFSKKNFESLSEAFSVASAAAVLSHNRYHVPVVVVPEGSASDTHEQAILRLQVTNVLSQPLTQATVKLEHAKSVASRATVLQKTSFTPVGDVFELNFMNVKFSSGYYDFLVEVEGDNRYIANTVEGQVRWLTPVIPALWEAKAGGSPEVRSSILAWPT

SEQ ID NO: 2755 - protein, 1324 aa, Artificial Sequence
  Synthetic polypeptide
MVAAAAATEARLRRRTAATAALAGRSGGPHWDWDVTRAGRPGLGAGLRLPRLLSPPLRPRLLLLLLLLSPPLLLLLLPCEAEAAAAAAAVSGSAAAEAKECDRPCVNGGRCNPGTGQCVCPAGWVGEQCQHCGGRFRLTGSSGFVTDGPGNYKYKTKCTWLIEGQPNRIMRLRFNHFATECSWDHLYVYDGDSIYAPLVAAFSGLIVPERDGNETVPEVVATSGYALLHFFSDAAYNLTGFNITYSFDMCPNNCSGRGECKISNSSDTVECECSENWKGEACDIPHCTDNCGFPHRGICNSSDVRGCSCFSDWQGPGCSVPVPANQSFWTREEYSNLKLPRASHKAVVNGNIMWVVGGYMFNHSDYNMVLAYDLASREWLPLNRSVNNVVVRYGHSLALYKDKIYMYGGKIDSTGNVTNELRVFHIHNESWVLLTPKAKEQYAVVGHSAHIVTLKNGRVVMLVIFGHCPLYGYISNVQEYDLDKNTWSILHTQGALVQGGYGHSSVYDHRTRALYVHGGYKAFSANKYRLADDLYRYDVDTQMWTILKDSRFFRYLHTAVIVSGTMLVFGGNTHNDTSMSHGAKCFSSDFMAYDIACDRWSVLPRPDLHHDVNRFGHSAVLHNSTMYVFGGFNSLLLSDILVFTSEQCDAHRSEAACLAAGPGIRCVWNTGSSQCISWALATDEQEEKLKSECFSKRTLDHDRCDQHTDCYSCTANTNDCHWCNDHCVPRNHSCSEGQISIFRYENCPKDNPMYYCNKKTSCRSCALDQNCQWEPRNQECIALPENICGIGWHLVGNSCLKITTAKENYDNAKLFCRNHNALLASLTTQKKVEFVLKQLRIMQSSQSMSKLTLTPWVGLRKINVSYWCWEDMSPFTNSLLQWMPSEPSDAGFCGILSEPSTRGLKAATCINPLNGSVCERPANHSAKQCRTPCALRTACGDCTSGSSECMWCSNMKQCVDSNAYVASFPFGQCMEWYTMSTCPPENCSGYCTCSHCLEQPGCGWCTDPSNTGKGKCIEGSYKGPVKMPSQAPTGNFYPQPLLNSSMCLEDSRYNWSFIHCPACQCNGHSKCINQSICEKCENLTTGKHCETCISGFYGDPTNGGKCQPCKCNGHASLCNTNTGKCFCTTKGVKGDECQLCEVENRYQGNPLRGTCYYTLLIDYQFTFSLSQEDDRYYTAINFVATPDEQNRDLDMFINASKNFNLNITWAASFSAGTQAGEEMPVVSKTNIKEYKDSFSNEKFDFRNHPNITFFVYVSNFTWPIKIQIAFSQHSNFMDLVQFFVTFFSCFLSLLLVAAVVWKIKQSCWASRRREQPGWNWRPLF

SEQ ID NO: 2756 - protein, 383 aa, Artificial Sequence
  Synthetic polypeptide
MGWRPRRARGTPLLLLLLLLLLWPVPGAGVLQGHIPGQPVTPHWVLDGQPWRTVSLEEPVSKPDMGLVALEAEGQELLLELEKNHRLLAPGYIETHYGPDGQPVVLAPNHTDHCHYQGRVRGFPDSWVVLCTCSGMSGLITLSRNASYYLRPWPPRGSKDFSTHEIFRMEQLLTWKGTCGHRDPGNKAGMTSLPGGPQSRGRREARRTRKYLELYIVADHTLFLTRHRNLNHTKQRLLEVANYVDQLLRTLDIQVALTGLEVWTERDRSRVTQDANATLWAFLQWRRGLWAQRPHDSAQLLTGRAFQGATVGLAPVEGMCRAESSGGVSTDHSELPIGAAATMAHEIGHSLGLSHDPDGCCVEAAAESGGCVMAAATGVVYEA

SEQ ID NO: 2757 - protein, 383 aa, Artificial Sequence; identical to SEQ ID NO: 2756
  Synthetic polypeptide

SEQ ID NO: 2758 - protein, 383 aa, Artificial Sequence; identical to SEQ ID NO: 2756
  Synthetic polypeptide

SEQ ID NO: 2759 - protein, 418 aa, Artificial Sequence
  Synthetic polypeptide
MAEELVLERCDLELETNGRDHHTADLCREKLVVRRGQPFWLTLHFEGRNYEASVDSLTFSVVTGPAPSQEAGTKARFPLRDAVEEGDWTATVVDQQDCTLSLQLTTPANAPIGLYRLSLEASTGYQGSSFVLGHFILLFNAWCPADAVYLDSEEERQEYVLTQQGFIYQGSAKFIKNIPWNFGQFEDGILDICLILLDVNPKFLKNAGRDCSRRSSPVYVGRVVSGMVNCNDDQGVLLGRWDNNYGDGVSPMSWIGSVDILRRWKNHGCQRVKYGQCWVFAAVACTVLRCLGIPTRVVTNYNSAHDQNSNLLIEYFRNEFGEIQGDKSEMIWNFHCWVESWMTRPDLQPGYEGWQALDPTPQEKSEGTYCCGPVPVRAIKEGDLSTKYDAPFVFAEVPRLARHCLLLSGPLFPCWSEE

SEQ ID NO: 2760 - protein, 337 aa, Artificial Sequence
  Synthetic polypeptide
MAEELVLERCDLELETNGRDHHTADLCREKLVVRRGQPFWLTLHFEGRNYEASVDSLTFSVVTADAVYLDSEEERQEYVLTQQGFIYQGSAKFIKNIPWNFGQFEDGILDICLILLDVNPKFLKNAGRDCSRRSSPVYVGRVVSGMVNCNDDQGVLLGRWDNNYGDGVSPMSWIGSVDILRRWKNHGCQRVKYGQCWVFAAVACTVLRCLGIPTRVVTNYNSAHDQNSNLLIEYFRNEFGEIQGDKSEMIWNFHCWVESWMTRPDLQPGYEGWQALDPTPQEKSEGTYCCGPVPVRAIKEGDLSTKYDAPFVFAEVPRLARHCLLLSGPLFPCWSEE

SEQ ID NO: 2761 - protein, 358 aa, Artificial Sequence
  Synthetic polypeptide
MAEGPAPSQEAGTKARFPLRDAVEEGDWTATVVDQQDCTLSLQLTTPANAPIGLYRLSLEASTGYQGSSFVLGHFILLFNAWCPADAVYLDSEEERQEYVLTQQGFIYQGSAKFIKNIPWNFGQFEDGILDICLILLDVNPKFLKNAGRDCSRRSSPVYVGRVVSGMVNCNDDQGVLLGRWDNNYGDGVSPMSWIGSVDILRRWKNHGCQRVKYGQCWVFAAVACTVLRCLGIPTRVVTNYNSAHDQNSNLLIEYFRNEFGEIQGDKSEMIWNFHCWVESWMTRPDLQPGYEGWQALDPTPQEKSEGTYCCGPVPVRAIKEGDLSTKYDAPFVFAEVPRLARHCLLLSGPLFPCWSEE

SEQ ID NO: 2762 - protein, 475 aa, Artificial Sequence
  Synthetic polypeptide
MGALARALPSILLALLLTSTPEALGANPGLVARITDKGLQYAAQEGLLALQSELLRITLPDFTGDLRIPHVGRGRYEFHSLNIHSCELLHSALRPVPGQGLSLSISDSSIRVQGRWKVRKSFFKLQGSFDVSVKGISISVNLLLGSESSGRPTVTASSCSSDIADVEVDMSGDLGWLLNLFHNQIESKFQKVLESRICEMIQKSVSSDLQPYLQTLPVTTEIDSFADIDYSLVEAPRATAQMLEVMFKGEIFHRNHRSPVTLLAAVMSLPEEHNKMVYFAISDYVFNTASLVYHEEGYLNFSITDDMIPPDSNIRLTTKSFRPFVPRLARLYPNMNLELQGSVPSAPLLNFSPGNLSVDPYMEIDAFVLLPSSSKEPVFRLSVATNVSATLTFNTSKITGFLKPGKVKVELKESKVGLFNAELLEALLNYYILNTFYPKFNDKLAEGFPLPLLKRVQLYDLGLQIHKARSGGSCL

SEQ ID NO: 2763 - protein, 430 aa, Artificial Sequence
  Synthetic polypeptide
MAANVFPFRDARAAPDPVLEAGPVAHGPLPVPLVLDNGSFQVRAGWACPGQDPGPEPRLQFRAVCARGRGGARGASGPQVGNALGSLEPLRWMLRSPFDRNVPVNLELQELLLDYSFQHLGVSSQGCVDHPIVLTEAVCNPLYSRQMMSELLFECYGIPKVAYGIDSLFSFYHNKPKNSMCSGLIISSGYQCTHVLPILEGRLDAKNCKRINLGGSQAAGYLQRLLQLKYPGHLAAITLSRMEEILHEHSYIAEDYVEELHKWRCPDYYENNVHKMQLPFSSKLLGSTLTSEEKQERRQQQLRRLQELNARRREEKLQLDQERLDRLLYVQELLEDGQMDQFHKALIELNMDSPEELQSYIQKLSIAVEQAKQKILQAEVNLEVDVVDSKPELHAWSKRTTIPNRGGLIFRQEYTSSCAPLLEPPNKRSR

SEQ ID NO: 2764 - protein, 68 aa, Artificial Sequence
  Synthetic polypeptide
MPVQETQAPESPGENSEQALQTLSPRAIPRNPDGGPLESSSDLAALSPLTSSGHQEQDTELGSTHTAG

SEQ ID NO: 2765 - protein, 209 aa, Artificial Sequence
  Synthetic polypeptide
MPFAEDKTYKYICRNFSNFCNVDVVEILPYLPCLTARDQDRLRATCTLSGNRDTLWHLFNTLQRRPGWVEYFIAALRGCELVDLADEVASVYQSYQPRTSDRPPDPLEPPSLPAERPGPPTPAAAHSIPYNSCREKEPSYPMPVQETQAPESPGENSEQALQTLSPRAIPRNPDGGPLESSSDLAALSPLTSSGHQEQDTELGSTHTAG

SEQ ID NO: 2766 - protein, 256 aa, Artificial Sequence
  Synthetic polypeptide
MPVQETQAPESPGENSEQALQTLSPRAIPRNPDGGPLESSSDLAALSPLTSSGHQEQDTELGSTHTAGATSSLTPSRGPVSPSVSFQPLARSTPRASRLPGPTGSVVSTGTSFSSSSPGLASAGAAEGKQGAESDQAEPIICSSGAEAPANSLPSKVPTTLMPVNTVALKVPANPASVSTVPSKLPTSSKPPGAVPSNALTNPAPSKLPINSTRAGMVPSKVPTSMVLTKVSASTVPTDGSSRNEAKVFHCNLNGP

SEQ ID NO: 2767 - protein, 397 aa, Artificial Sequence
  Synthetic polypeptide
MPFAEDKTYKYICRNFSNFCNVDVVEILPYLPCLTARDQDRLRATCTLSGNRDTLWHLFNTLQRRPGWVEYFIAALRGCELVDLADEVASVYQSYQPRTSDRPPDPLEPPSLPAERPGPPTPAAAHSIPYNSCREKEPSYPMPVQETQAPESPGENSEQALQTLSPRAIPRNPDGGPLESSSDLAALSPLTSSGHQEQDTELGSTHTAGATSSLTPSRGPVSPSVSFQPLARSTPRASRLPGPTGSVVSTGTSFSSSSPGLASAGAAEGKQGAESDQAEPIICSSGAEAPANSLPSKVPTTLMPVNTVALKVPANPASVSTVPSKLPTSSKPPGAVPSNALTNPAPSKLPINSTRAGMVPSKVPTSMVLTKVSASTVPTDGSSRNEAKVFHCNLNGP

SEQ ID NO: 2768 - protein, 898 aa, Artificial Sequence
  Synthetic polypeptide
MKMKIQKKEKQLSNLKVLNHSPMSDASVNFDYKSPSPFDCSTDQEEKIEDVASHCLPQKDLYTAEEEAATLFPRKMTSHNGMEDSGGGGTGVKKKRKKKEPGDQEGAAKGSKDREPKPKRKREPKEPKEPRKAKEPKKAKEHKEPKQKDGAKKARKPREASGTKEAKEKRSCTDSAARTKSRKASKEQGPTPVEKKKKGKRKSETTVESLELDQGLTNPSLRSPEESTESTDSQKRRSGRQVKRRKYNEDLDFKVVDDDGETIAVLGAGRTSALSASTLAWQAEEPPEDDANIIEKILASKTVQEVHPGEPPFDLELFYVKYRNFSYLHCKWATMEELEKDPRIAQKIKRFRNKQAQMKHIFTEPDEDLFNPDYVEVDRILEVAHTKDAETGEEVTHYLVKWCSLPYEESTWELEEDVDPAKVKEFESLQVLPEIKHVERPASDSWQKLEKSREYKNSNQLREYQLEGMNWLLFNWYNRKNCILADEMGLGKTIQSITFLSEIFLRGIHGPFLIIAPLSTITNWEREFRTWTEMNAIVYHGSQISRQMIQQYEMVYRDAQGNPLSGVFKFHVVITTFEMILADCPELKKIHWSCVIIDEAHRLKNRNCKLLEGLKLMALEHKVLLTGTPLQNSVEELFSLLNFLEPSQFPSETAFLEEFGDLKTEEQVKKLQSILKPMMLRRLKDDVEKNLAPKQETIIEVELTNIQKKYYRAILEKNFSFLTKGANQHNMPNLINTMMELRKCCNHPYLINGAEEKILEDFRKTHSPDAPDFQLQAMIQAAGKLVLIDKLLPKLIAGGHKVLIFSQMVRCLDILEDYLIQRRYTYERIDGRVRGNLRQAAIDRFCKPDSDRFVFLLCTRAGGLGINLTAADTCIIFDSDWNPQNDLQVIDQKKFGGC

SEQ ID NO: 2769 - protein, 512 aa, Artificial Sequence
  Synthetic polypeptide
MASLAALALSLLLRLQLPPLPGARAQSAAGGCSFDEHYSNCGYSVALGTNGFTWEQINTWEKPMLDQAVPTGSFMMVNSSGRASGQKAHLLLPTLKENDTHCIDFHYYFSSRDRSSPGALNVYVKVNGGPQGNPVWNVSGVVTEGWVKAELAISTFWPHFYQVIFESVSLKGHPGYIAVDEVRVLAHPCRKAPHFLRLQNVEVNVGQNATFQCIAGGKWSQHDKLWLQQWNGRDTALMVTRVVNHRRFSATVSVADTAQRSVSKYRCVIRSDGGSGVSNYAELIVKEPPTPIAPPELLAVGATYLWIKPNANSIIGDGPIILKEVEYRTTTGTWAETHIVDSPNYKLWHLDPDVEYEIRVLLTRPGEGGTGPPGPPLTTRTKCADPVHGPQNVEIVDIRARQLTLQWEPFGYAVTRCHSYNLTVQYQYVFNQQQYEAEEVIQTSSHYTLRGLRPFMTIRLRLLLSNPEGRMESEELVVQTEEDALFTIAKTWSQPKWPSMIDWIKKMWYLQP

SEQ ID NO: 2770 - protein, 512 aa, Artificial Sequence; identical to SEQ ID NO: 2769
  Synthetic polypeptide

SEQ ID NO: 2771 - protein, 512 aa, Artificial Sequence; identical to SEQ ID NO: 2769
  Synthetic polypeptide

SEQ ID NO: 2772 - protein, 512 aa, Artificial Sequence; identical to SEQ ID NO: 2769
  Synthetic polypeptide

SEQ ID NO: 2773 - protein, 512 aa, Artificial Sequence; identical to SEQ ID NO: 2769
  Synthetic polypeptide

SEQ ID NO: 2774 - protein, 512 aa, Artificial Sequence; identical to SEQ ID NO: 2769
  Synthetic polypeptide

SEQ ID NO: 2775 - protein, 512 aa, Artificial Sequence; identical to SEQ ID NO: 2769
  Synthetic polypeptide

SEQ ID NO: 2776 - protein, 415 aa, Artificial Sequence
  Synthetic polypeptide
MASLAALALSLLLRLQLPPLPGARAQSAAGGCSFDEHYSNCGYSVALGTNGFTWEQINTWEKPMLDQAVPTGSFMMVNSSGRASGQKAHLLLPTLKENDTHCIDFHYYFSSRDRSSPGALNVYVKVNGGPQGNPVWNVSGVVTEGWVKAELAISTFWPHFYQVIFESVSLKGHPGYIAVDEVRVLAHPCRKAPHFLRLQNVEVNVGQNATFQCIAGGKWSQHDKLWLQQWNGRDTALMVTRVVNHRRFSATVSVADTAQRSVSKYRCVIRSDGGSGVSNYAELIVKEPPTPIAPPELLAVGATYLWIKPNANSIIGDGPIILKEVEYRTTTGTWAETHIVDSPNYKLWHLDPDVEYEIRVLLTRPGEGGTGPPGPPLTTRTKCAATPTFSNQHADQSAAINIETRPSTNKKITTC

SEQ ID NO: 2777 - protein, 415 aa, Artificial Sequence; identical to SEQ ID NO: 2776
  Synthetic polypeptide

SEQ ID NO: 2778 - protein, 415 aa, Artificial Sequence; identical to SEQ ID NO: 2776
  Synthetic polypeptide

SEQ ID NO: 2779 - protein, 415 aa, Artificial Sequence; identical to SEQ ID NO: 2776
  Synthetic polypeptide

SEQ ID NO: 2780 - protein, 415 aa, Artificial Sequence; identical to SEQ ID NO: 2776
  Synthetic polypeptide

SEQ ID NO: 2781 - protein, 415 aa, Artificial Sequence; identical to SEQ ID NO: 2776
  Synthetic polypeptide

SEQ ID NO: 2782 - protein, 415 aa, Artificial Sequence; identical to SEQ ID NO: 2776
  Synthetic polypeptide

SEQ ID NO: 2783 - protein, 395 aa, Artificial Sequence
  Synthetic polypeptide
MASLAALALSLLLRLQLPPLPGARAQSAAGGCSFDEHYSNCGYSVALGTNGFTWEQINTWEKPMLDQAVPTGSFMMVNSSGRASGQKAHLLLPTLKENDTHCIDFHYYFSSRDRSSPGALNVYVKVNGGPQGNPVWNVSGVVTEGWVKAELAISTFWPHFYQVIFESVSLKGHPGYIAVDEVRVLAHPCRKAPHFLRLQNVEVNVGQNATFQCIAGGKWSQHDKLWLQQWNGRDTALMVTRVVNHRRFSATVSVADTAQRSVSKYRCVIRSDGGSGVSNYAELIVKEPPTPIAPPELLAVGATYLWIKPNANSIIGDGPIILKEVEYRTTTGTWAETHIVDSPNYKLWHLDPDVEYEIRVLLTRPGEGGTGPPGPPLTTRTKCAELILSGPDLIN

SEQ ID NO: 2784 - protein, 395 aa, Artificial Sequence; identical to SEQ ID NO: 2783
  Synthetic polypeptide

SEQ ID NO: 2785 - protein, 395 aa, Artificial Sequence; identical to SEQ ID NO: 2783
  Synthetic polypeptide

SEQ ID NO: 2786 - protein, 395 aa, Artificial Sequence; identical to SEQ ID NO: 2783
  Synthetic polypeptide

SEQ ID NO: 2787 - protein, 395 aa, Artificial Sequence; identical to SEQ ID NO: 2783
  Synthetic polypeptide

SEQ ID NO: 2788 - protein, 395 aa, Artificial Sequence; identical to SEQ ID NO: 2783
  Synthetic polypeptide

SEQ ID NO: 2789 - protein, 395 aa, Artificial Sequence; identical to SEQ ID NO: 2783
  Synthetic polypeptide

SEQ ID NO: 2790 - protein, 405 aa, Artificial Sequence
  Synthetic polypeptide
MSGGRFDFDDGGAYCGGWEGGKAHGHGLCTGPKGQGEYSGSWNFGFEVAGVYTWPSGNTFEGYWSQGKRHGLGIETKGRWLYKGEWTHGFKGRYGIRQSSSSGAKYEGTWNNGLQDGYGTETYADGGTYQGQFTNGMRHGYGVRQSVPYGMAVVVRSPLRTSLSSLRSEHSNGTVAPDSPASPASDGPALPSPAIPRGGFALSLLANAEAAARAPKGGGLFQRGALLGKLRRAESRTSVGSQRSRVSFLKSDLSSGASDAASTASLGEAAEGADEAAPFEADIDATTTETYMGEWKNDKRSGFGVSERSSGLRYEGEWLDNLRHGYGCTTLPDGHREEGKYRHNVLVKDTKRRMLQLKSNKVRQKVEHSVEGAQRAAAIARQKAEIAASRWAVGSPEPACAQRKS

SEQ ID NO: 2791 - protein, 445 aa, Artificial Sequence
  Synthetic polypeptide
MNASGSGYPLASLYVGDLHPDVTEAMLYEKFSPAGPILSIRVCRDVATRRSLGYAYINFQQPADAERALDTMNFEMLKGQPIRIMWSQRDPGLRKSGVGNIFIKNLEDSIDNKALYDTFSTFGNILSCKVACDEHGSRGFGFVHFETHEAAQQAINTMNGMLLNDRKVFVGHFKSRREREAELGARALEFTNIYVKNLPVDVDEQGLQDLFSQFGKMLSVKVMRDNSGHSRCFGFVNFEKHEEAQKAVVHMNGKEVSGRLLYAGRAQKRVERQNELKRRFEQMKQDRLRRYQGVNLYVKNLDDSIDDDKLRKEFSPYGVITSAKVMTEGGHSKGFGFVCFSSPEEATKAVTEMNGRIVGTKPLYVALAQRKEERKAILTNQYMQRLSTMRTLSNPLLGSFQQPSSYFLPAMPQPPAQAAYYGCGPVTPTQPAPRWTSQPPRPSCG

SEQ ID NO: 2792 - protein, 445 aa, Artificial Sequence; identical to SEQ ID NO: 2791
  Synthetic polypeptide

SEQ ID NO: 2793 - protein, 80 aa, Artificial Sequence
  Synthetic polypeptide
MGSSSFLVLMVSLVLVTLVAVEGVKEGIEKAGVCPADNVRCFKSDPPQCHTDQDCLGERKCCYLHCGFKCVIPVKELEEA

SEQ ID NO: 2794 - protein, 143 aa, Artificial Sequence
  Synthetic polypeptide
MKSSGLFPFLVLLALGTLAPWAVEGSGKSFKAGVCPPKKSAQCLRYKKPECQSDWQCPGKKRCCPDTCGIKCLDPVDTPNPTRRKPGKCPVTYGQCLMLNPPNFCEMDGQCKRDLKCCMGMCGKSCVSPVKGLAHSRLSRSAS

SEQ ID NO: 2795 - protein, 48 aa, Artificial Sequence
  Synthetic polypeptide
MVSCERRASKSVGQILLWDFGYTCRLSHRRRNSTEILSRNLPALYTEN

SEQ ID NO: 2796 - protein, 144 aa, Artificial Sequence
  Synthetic polypeptide
MVELVISPSLTVNSDCLDKLKFNRADAAVWTLSDRQGITKSAPLRVSQLFSRSCPRVLPRQPSTAMAAYGQTQYSAGIQQATPYTAYPPPAQAYGIPSYSIKTEDSLNHSPGQSGFLSYGSSFSTSPTGQSPYTYQMHGHARTQ

SEQ ID NO: 2797 - protein, 144 aa, Artificial Sequence; identical to SEQ ID NO: 2796
  Synthetic polypeptide

SEQ ID NO: 2798 - protein, 144 aa, Artificial Sequence; identical to SEQ ID NO: 2796
  Synthetic polypeptide

SEQ ID NO: 2799 - protein, 120 aa, Artificial Sequence
  Synthetic polypeptide
MVELVISPSLTVNSDCLDKLKFNRADAAVWTLSDRQGITKSAPLRVSQLFSRSCPRVLPRQPSTAMAAYGQTQYSAGIQQATPYTAYPPPAQAYGIPSFSTSPTGQSPYTYQMHGHARTQ

SEQ ID NO: 2800 - protein, 97 aa, Artificial Sequence
  Synthetic polypeptide
QLFSRSCPRVLPRQPSTAMAAYGQTQYSAGIQQATPYTAYPPPAQAYGIPSYSIKTEDSLNHSPGQSGFLSYGSSFSTSPTGQSPYTYQMHGHARTQ

SEQ ID NO: 2801 - protein, 328 aa, Artificial Sequence
  Synthetic polypeptide
MVELVISPSLTVNSDCLDKLKFNRADAAVWTLSDRQGITKSAPLRVSQLFSRSCPRVLPRQPSTAMAAYGQTQYSAGIQQATPYTAYPPPAQAYGIPSYSIKTEDSLNHSPGQSGFLSYGSSFSTSPTGQSPYTYQMHGTTGFYQGGNGLGNAAGFGSVHQDYPSYPGFPQSQYPQYYGSSYNPPYVPASSICPSPLSTSTYVLQEASHNVPNQSSESLAGEYNTHNGPSTPAKEGDTDRPHRASDGKLRGRSKRSSDPSPAGDNEIERVFVWDLDETIIIFHSLLTGTFASRYGKAISTIRAETMNIFFYFPNHAQYTGQNCSINIC

SEQ ID NO: 2802 - protein, 328 aa, Artificial Sequence; identical to SEQ ID NO: 2801
  Synthetic polypeptide

SEQ ID NO: 2803 - protein, 328 aa, Artificial Sequence; identical to SEQ ID NO: 2801
  Synthetic polypeptide

SEQ ID NO: 2804 - protein, 199 aa, Artificial Sequence
  Synthetic polypeptide
QLFSRSCPRVLPRQPSTAMAAYGQTQYSAGIQQATPYTAYPPPAQAYGIPSYSIKTEDSLNHSPGQSGFLSYGSSFSTSPTGQSPYTYQMHGEYNTHNGPSTPAKEGDTDRPHRASDGKLRGRSKRSSDPSPAGDNEIERVFVWDLDETIIIFHSLLTGTFASRYGKAISTIRAETMNIFFYFPNHAQYTGQNCSINIC

SEQ ID NO: 2805 - protein, 100 aa, Artificial Sequence
  Synthetic polypeptide
MKLGKKPMYKPVDPYSRMQSTYNYNMRGGAYPPRYFYPFPVPPLLYQVELSVGGQQFNGKGKTRQAAKHDAAAKALRILQNEPLPERLEVRIQNFSIFHL

SEQ ID NO: 2806 - protein, 100 aa, Artificial Sequence; identical to SEQ ID NO: 2805
  Synthetic polypeptide

SEQ ID NO: 2807 - protein, 100 aa, Artificial Sequence; identical to SEQ ID NO: 2805
  Synthetic polypeptide

SEQ ID NO: 2808 - protein, 100 aa, Artificial Sequence; identical to SEQ ID NO: 2805
  Synthetic polypeptide

SEQ ID NO: 2809 - protein, 100 aa, Artificial Sequence; identical to SEQ ID NO: 2805
  Synthetic polypeptide

SEQ ID NO: 2810 - protein, 100 aa, Artificial Sequence; identical to SEQ ID NO: 2805
  Synthetic polypeptide

SEQ ID NO: 2811 - protein, 100 aa, Artificial Sequence; identical to SEQ ID NO: 2805
  Synthetic polypeptide

SEQ ID NO: 2812 - protein, 181 aa, Artificial Sequence
  Synthetic polypeptide
MSQVQVQVQNPSAALSGSQILNKNQSLLSQPLMSIPSTTSSLPSENAGRPIQNSALPSASITSTSAAAESITPTVELNALCMKLGKKPMYKPVDPYSRMQSTYNYNMRGGAYPPRYFYPFPVPPLLYQVELSVGGQQFNGKGKTRQAAKHDAAAKALRILQNEPLPERLEVRIQNFSIFHL

SEQ ID NO: 2813 - protein, 140 aa, Artificial Sequence
  Synthetic polypeptide
MCEVSRGWKPCTEGILKVRPTRKISYEESITPTVELNALCMKLGKKPMYKPVDPYSRMQSTYNYNMRGGAYPPRYFYPFPVPPLLYQVELSVGGQQFNGKGKTRQAAKHDAAAKALRILQNEPLPERLEVRIQNFSIFHL

SEQ ID NO: 2814 - protein, 484 aa, Artificial Sequence
  Synthetic polypeptide
MAWAALLGLLAALLLLLLLSRRRTRRPGEPPLDLGSIPWLGYALDFGKDAASFLTRMKEKHGDIFTILVGGRYVTVLLDPHSYDAVVWEPRTRLDFHAYAIFLMERIFDVQLPHYSPSDEKARMKLTLLHRELQALTEAMYTNLHAVLLGDATEAGSGWHEMGLLDFSYSFLLRAGYLTLYGIEALPRTHESQAQDRVHSADVFHTFRQLDRLLPKLARGSLSVGDKDHMCSVKSRLWKLLSPARLARRAHRSKWLESYLLHLEEMGVSEEMQARALVLQLWATQGNMGPAAFWLLLFLLKNPEALAAVRGELESILWQAEQPVSQTTTLPQKVLDSTPVLDSVLSESLRLTAAPFITREVVVDLAMPMADGREFNLRRGDRLLLFPFLSPQRDPEIYTDPEVFKYNRFLNPDGSEKKDFYKDGKRLKNYNMPWGAGHNHCLGRSYAVNSIKQFVFLVLVHLDLELINADVEIPEFDLSSASWT

SEQ ID NO: 2815 - protein, 140 aa, Artificial Sequence
  Synthetic polypeptide
MAWAALLGLLAALLLLLLLSRRRTRCGHITYWLLLQTLQWIPATRGIGAGLPPWPWPSWSTKSSPASSPTSRPHILHSSHAGSCCLENLTEHAPTPVPLHLLLPLPVTLFSLPLPEHSLHILLVFAHVASPEEALLDHLL

SEQ ID NO: 2816 - protein, 99 aa, Artificial Sequence
  Synthetic polypeptide
MRARRGLLRLPRRSLLAALFFFSLSSSLLYFVYVAPGIVNTYLFMMQAQGILIRDNVRTIGAQVYEQVLRSAYAKRNSSVNDSERQHRVQKGGIITERI

SEQ ID NO: 2817 - protein, 176 aa, Artificial Sequence
  Synthetic polypeptide
MQRTGGGAPRPGRNHGLPGSLRQPDPVALLMLLVDADQPEPMRSGARELALFLTPEPGAEAKEVEETIEGMLLRLEEFCSLADLIRSDTSQILEENIPVLKAKLTEMRGIYAKVDRLEAFVKMVGHHVAFLEADVLQAERDHGAFPQALRRWLGSAGLPSFRNPESCSRVGPVSCL

SEQ ID NO: 2818 - protein, 176 aa, Artificial Sequence; identical to SEQ ID NO: 2817
  Synthetic polypeptide

SEQ ID NO: 2819 - protein, 146 aa, Artificial Sequence
  Synthetic polypeptide
MLLVDADQPEPMRSGARELALFLTPEPGAEAKEVEETIEGMLLRLEEFCSLADLIRSDTSQILEENIPVLKAKLTEMRGIYAKVDRLEAFVKMVGHHVAFLEADVLQAERDHGAFPQALRRWLGSAGLPSFRNPESCSRVGPVSCL

SEQ ID NO: 2820 - protein, 122 aa, Artificial Sequence
  Synthetic polypeptide
MNASSEGESFAGSVQIPGGTTVLVELTPDIHICGICKQQFNNLDAFVAHKQSGCQLTGTSAAAPSTVQFVSEETVPATQTQTTTRTITSETQTITGQARWLMPVIPALSEAEAGGSPEVRSS

SEQ ID NO: 2821 - protein, 122 aa, Artificial Sequence; identical to SEQ ID NO: 2820
  Synthetic polypeptide

SEQ ID NO: 2822 - protein, 122 aa, Artificial Sequence; identical to SEQ ID NO: 2820
  Synthetic polypeptide

SEQ ID NO: 2823 - protein, 122 aa, Artificial Sequence; identical to SEQ ID NO: 2820
  Synthetic polypeptide

SEQ ID NO: 2824 - protein, 120 aa, Artificial Sequence
  Synthetic polypeptide
MNASSEGESFAGSVQSGTTVLVELTPDIHICGICKQQFNNLDAFVAHKQSGCQLTGTSAAAPSTVQFVSEETVPATQTQTTTRTITSETQTITGQARWLMPVIPALSEAEAGGSPEVRSS

SEQ ID NO: 2825 - protein, 92 aa, Artificial Sequence
  Synthetic polypeptide
MAATMKKAAAEDVNVTFEDQQKINKFARNTSRITELKEEIEVKKKQLQNLEDACDDIMLADDDCLMIPYQIGDVFISHSQEETQEMLEEAKN

SEQ ID NO: 2826 - protein, 92 aa, Artificial Sequence; identical to SEQ ID NO: 2825
  Synthetic polypeptide

SEQ ID NO: 2827 - protein, 51 aa, Artificial Sequence
  Synthetic polypeptide
MASNFNDIVKQGYVRIRSRRLGVLILRALRSEHPACRSPSWNLFLENPVSS

SEQ ID NO: 2828 - protein, 219 aa, Artificial Sequence
  Synthetic polypeptide
MHVRSLRAAAPHSFVALWAPLFLLRSALADFSLDNEVHSSFIHRRLRSQERREMQREILSILGLPHRPRPHLQGKHNSAPMFMLDLYNAMAVEEGGGPGGQGFSYPYKAVFSTQGPPLASLQDSHFLTDADMVMSFVNLVEHDKEFFHPRYHHREFRFDLSKIPEGEAVTAAEFRIYKDYIRERFDNETFRISVYQVLQEHLGRAGGEIQRTEAWKAPR

SEQ ID NO: 2829 - protein, 219 aa, Artificial Sequence; identical to SEQ ID NO: 2828
  Synthetic polypeptide

SEQ ID NO: 2830 - protein, 219 aa, Artificial Sequence; identical to SEQ ID NO: 2828
  Synthetic polypeptide

SEQ ID NO: 2831 - protein, 8 aa, Artificial Sequence
  Synthetic polypeptide
PPSGQPAR

SEQ ID NO: 2832 - protein, 772 aa, Artificial Sequence
  Synthetic polypeptide
MAMRSGRHPSLLLLLVLLLWLLQVSIIDSVQQETDDLTKQTKEKIYQPLRRSKRRWVITTLELEEEDPGPFPKLIGELFNNMSYNMSLMYLISGPGVDEYPEIGLFSLEDHENGRIYVHRPVDREMTPSFTVYFDVVERSTGKIVDTSLIFNIRISDVNDHAPQFPEKEFNITVQENQSAGQPIFQMLAVDLDEENTPNSQVLYFLISQTPLLKESGFRVDRLSGEIRLSGCLDYETAPQFTLLIRARDCGEPSLSSTTTVHVDVQEGNNHRPAFTQENYKVQIPEGRASQGVLRLLVQDRDSPFTSAWRAKFNILHGNEEGHFDISTDPETNEGILNVIKPLDYETRPAQSLIIVVENEERLVFCERGKLQPPRKAAASATVSVQVTDANDPPAFHPQSFIVNKEEGARPGTLLGTFNAMDPDSQIRYELVHDPANWVSVDKNSGVVITVEPIDRESPHVNNSFYVIIIHAVDDGFPPQTATGTLMLFLSDINDNVPTLRPRSRYMEVCESAVHEPLHIEAEDPDLEPFSDPFTFELDNTWGNAEDTWKLGRNWGQSVELLTLRSLPRGNYLVPLFIGDKQGLSQKQTVHVRICPCASGLTCVELADAEVGLHVGALFPVCAAFVALAVALLFLLRCYFVLEPKRHGCSVSNDEGHQTLVMYNAESKGTSAQTWSDVEGQRPALLICTAAAGPTQGVKAYPDATMHRQLLAPVEGRMAETLNQAGCRPEGGLSAELGKGGIHSGILCWKEPESLTLAGQKGLDPQTFTKEK

SEQ ID NO: 2833 - protein, 813 aa, Artificial Sequence
  Synthetic polypeptide
MAMRSGRHPSLLLLLVLLLWLLQVSIIDSVQQETDDLTKQTKEKIYQPLRRSKRRWVITTLELEEEDPGPFPKLIGELFNNMSYNMSLMYLISGPGVDEYPEIGLFSLEDHENGRIYVHRPVDREMTPSFTVYFDVVERSTGKIVDTSLIFNIRISDVNDHAPQFPEKEFNITVQENQSAGQPIFQMLAVDLDEENTPNSQVLYFLISQTPLLKESGFRVDRLSGEIRLSGCLDYETAPQFTLLIRARDCGEPSLSSTTTVHVDVQEGNNHRPAFTQENYKVQIPEGRASQGVLRLLVQDRDSPFTSAWRAKFNILHGNEEGHFDISTDPETNEGILNVIKPLDYETRPAQSLIIVVENEERLVFCERGKLQPPRKAAASATVSVQVTDANDPPAFHPQSFIVNKEEGARPGTLLGTFNAMDPDSQIRYELVHDPANWVSVDKNSGVVITVEPIDRESPHVNNSFYVIIIHAVDDGFPPQTATGTLMLFLSDINDNVPTLRPRSRYMEVCESAVHEPLHIEAEDPDLEPFSDPFTFELDNTWGNAEDTWKLGRNWGQSVELLTLRSLPRGNYLVPLFIGDKQGLSQKQTVHVRICPCASGLTCVELADAEVGLHVGALFPVCAAFVALAVALLFLLRCYFVLEPKRHGCSVSNDEGHQTLVMYNAESKGTSAQTWSDVEGQRPALLICTAAAGPTQGVKDLEEVPPSAASQSAQARCALGSWGYGKPFEPRSVKNIHSTPAYPDATMHRQLLAPVEGRMAETLNQAGCRPEGGLSAELGKGGIHSGILCWKEPESLTLAGQKGLDPQTFTKEK

SEQ ID NO: 2834 - protein, 18 aa, Artificial Sequence
  Synthetic polypeptide
PGLGPCWELLMPWIQTAR

SEQ ID NO: 2835 - protein, 105 aa, Artificial Sequence
  Synthetic polypeptide
MKPLIWTWSDVEGQRPALLICTAAAGPTQGVKAYPDATMHRQLLAPVEGRMAETLNQAGCRPEGGLSAELGKGGIHSGILCWKEPESLTLAGQKGLDPQTFTKEK

SEQ ID NO: 2836 - protein, 146 aa, Artificial Sequence
  Synthetic polypeptide
MKPLIWTWSDVEGQRPALLICTAAAGPTQGVKDLEEVPPSAASQSAQARCALGSWGYGKPFEPRSVKNIHSTPAYPDATMHRQLLAPVEGRMAETLNQAGCRPEGGLSAELGKGGIHSGILCWKEPESLTLAGQKGLDPQTFTKEK

SEQ ID NO: 2837 - protein, 123 aa, Artificial Sequence
  Synthetic polypeptide
MKPLIWTWSDVEGQRPALLICTAAAGPTQGVKGYGKPFEPRSVKNIHSTPAYPDATMHRQLLAPVEGRMAETLNQAGCRPEGGLSAELGKGGIHSGILCWKEPESLTLAGQKGLDPQTFTKEK

SEQ ID NO: 2838 - protein, 640 aa, Artificial Sequence
  Synthetic polypeptide
MQPTLLLSLLGAVGLAAVNSMPVDNRNHNEGMVTRCIIEVLSNALSKSSAPPITPECRQVLKTSRKDVKDKETTENENTKFEVRLLRDPADASEAHESSSRGEAGAPGEEDIQGPTKADTEKWAEGGGHSRERADEPQWSLYPSDSQVSEEVKTRHSEKSQREDEEEEEGENYQKGERGEDSSEEKHLEEPGETQNAFLNERKQASAIKKEELVARSETHAAGHSQEKTHSREKSSQESGEETGSQENHPQESKGQPRSQEESEEGEEDATSEVDKRRTRPRHHHGRSRPDRSSQGGSLPSEEKGHPQEESEESNVSMASLGEKRDHHSTHYRASEEEPEYGEEIKGYPGVQAPEDLEWERYRGRGSEEYRAPRPQSEESWDEEDKRNYPSLELDKMAHGYGEESEEERGLEPGKGRHHRGRGGEPRAYFMSDTREEKRFLGEGHHRVQENQMDKARRHPQGAWKELDRNYLNYGEEGAPGKWQQQGDLQDTKENREEARFQDKQYSSHHTAEKRKRLGELFNPYYDPLQWKSSHFERRDNMNDNFLEGEEENELTLNEKNFFPEYNYDWWEKKPFSEDVNWGYEKRNLARVPKLDLKRQYDRVAQLDQLLHYRKKSAEFPDFYDSEEPASTHPPQVERH

SEQ ID NO: 2839 - protein, 284 aa, Artificial Sequence
  Synthetic polypeptide
MLALRVARGSWGALRGAAWAPGTRPSKRRACWALLPPVPCCLGCLAERWRLRPAALGLRLPGIGQRNHCSGAGKAAPRPAAGAGAAAEAPGGQWGPASTPSLYENPWTIPNMLSMTRIGLAPVLGYLIIEEDFNIALGVFALAGLTDLLDGFIARNWANQRSALGSALDPLADKILISILYVSLTYADLIPVPLTYMIISRDVMLIAAVFYVRYRTLPTPRTLAKYFNPCYATARLKPTFISKVNTAVQLILVAASLAAPVFNYADSIYLQILWKCEQRENAVR

SEQ ID NO: 2840 - protein, 185 aa, Artificial Sequence
  Synthetic polypeptide
MPQYENPWTIPNMLSMTRIGLAPVLGYLIIEEDFNIALGVFALAGLTDLLDGFIARNWANQRSALGSALDPLADKILISILYVSLTYADLIPVPLTYMIISRDVMLIAAVFYVRYRTLPTPRTLAKYFNPCYATARLKPTFISKVNTAVQLILVAASLAAPVFNYADSIYLQILWKCEQRENAVR

SEQ ID NO: 2841 - protein, 299 aa, Artificial Sequence
  Synthetic polypeptide
MLALRVARGSWGALRGAAWAPGTRPSKRRACWALLPPVPCCLGCLAERWRLRPAALGLRLPGIGQRNHCSGAGKAAPRPAAGAGAAAEAPGGQWGPASTPSLYENPWTIPNMLSMTRIGLAPVLGYLIIEEDFNIALGVFALAGLTDLLDGFIARNWANQRSALGSALDPLADKILISILYVSLTYADLIPVPLTYMIISRDVMLIAAVFYVRYRTLPTPRTLAKYFNPCYATARLKPTFISKVNTAVQLILVAASLAAPVFNYADSIYLQILWCFTAFTTAASAYSYYHYGRKTVQEM

SEQ ID NO: 2842 - protein, 200 aa, Artificial Sequence
  Synthetic polypeptide
MPQYENPWTIPNMLSMTRIGLAPVLGYLIIEEDFNIALGVFALAGLTDLLDGFIARNWANQRSALGSALDPLADKILISILYVSLTYADLIPVPLTYMIISRDVMLIAAVFYVRYRTLPTPRTLAKYFNPCYATARLKPTFISKVNTAVQLILVAASLAAPVFNYADSIYLQILWCFTAFTTAASAYSYYHYGRKTVQEM

SEQ ID NO: 2843 - protein, 835 aa, Artificial Sequence
  Synthetic polypeptide
MAAGSDLLDEVFFNSEVDEKVVSDLVGSLESQLAASAAHHHHLAPRTPEVRAAAAGALGNHVVSGSPAGAAGAGPAAPAEGAPGAAPEPPPAGRARPGGGGPQRPGPPSPRRPLVPAGPAPPAAKLRPPPEGSAGSCAPVPAAAAVAAGPEPAPAGPAKPAGPAALAARAGPGPGPGPGPGPGPGPGKPAGPGAAQTLNGSAALLNSHHAAAPAVSLVNNGPAALLPLPKPAAPGTVIQTPPFVGAAAPPAPAAPSPPAAPAPAAPAAAPPPPPPAPATLARPPGHPAGPPTAAPAVPPPAAAQNGGSAGAAPAPAPAAGGPAGVSGQPGPGAAAAAPAPGVKAESPKRVVQAAPPAAQTLAASGPASTAASMVIGPTMQGALPSPAAVPPPAPGTPTGLPKGAAGAVTQSLSRTPTATTSGIRATLTPTVLAPRLPQPPQNPTNIQNFQLPPGMVLVRSENGQLLMIPQQALAQMQAQAHAQPQTTMAPRPATPTSAPPVQISTVQAPGTPIIARQVTPTTIIKQVSQAQTTVQPSATLQRSPGVQPQLVLGGAAQTASLGTATAVQTGTPQRTVPGATTTSSAATETMENVKKCKNFLSTLIKLASSGKQSTETAANVKELVQNLLDGKIEAEDFTSRLYRELNSSPQPYLVPFLKRSLPALRQLTPDSAAFIQQSQQQPPPPTSQATTALTAVVLSSSVQRTAGKTAATVTSALQPPVLSLTQPTQVGVGKQGQPTPLVIQQPPKPGALIRPPQVTLTQTPMVALRQPHNRIMLTTPQQIQLNPLQPVPVVKPAVLPGTKALSAVSAQAAAAQKNKLKEPGGGSFRTPERKG

SEQ ID NO: 2844 - protein, 170 aa, Artificial Sequence
  Synthetic polypeptide
VPFLKRSLPALRQLTPDSAAFIQQSQQQPPPPTSQATTALTAVVLSSSVQRTAGKTAATVTSALQPPVLSLTQPTQVIQQPPKPGALIRPPQVTLTQTPMVALRQPHNRIMLTTPQQIQLNPLQPVPVVKPAVLPGTKALSAVSAQAAAAQKNKLKEPGGGSFRTPERKG

SEQ ID NO: 2845 - protein, 698 aa, Artificial Sequence
  Synthetic polypeptide
MPLHQLGDKPLTFPSPNSAMENGLDHTPPSRRASPGTPLSPGSLRSAAHSPLDTSKQPLCQLWAEKHGARGTHEVRYVSAGQSVACGWWAFAPPCLQVLNTPKGILFFLCAAAFLQGMTVNGFINTVITSLERRYDLHSYQSGLIASSYDIAACLCLTFVSYFGGSGHKPRWLGWGVLLMGTGSLVFALPHFTAGRYEVELDAGVRTCPANPGAVCADSTSGLSRYQLVFMLGQFLHGVGATPLYTLGVTYLDENVKSSCSPVYIAIFYTAAILGPAAGYLIGGALLNIYTEMGRRTELTTESPLWVGAWWVGFLGSGAAAFFTAVPILGYPRQLPGSQRYAVMRAAEMHQLKDSSRGEASNPDFGKTIRDLPLSIWLLLKNPTFILLCLAGATEATLITGMSTFSPKFLESQFSLSASEAATLFGYLVVPAGGGGTFLGGFFVNKLRLRGSAVIKFCLFCTVVSLLGILVFSLHCPSVPMAGVTASYGGSLLPEGHLNLTAPCNAACSCQPEHYSPVCGSDGLMYFSLCHAGCPAATETNVDGQKVYRDCSCIPQNLSSGFGHATAGKCTSTCQRKPLLLVFIFVVIFFTFLSSIPALTATLRCVRDPQRSFALGIQWIVVRILGGIPGPIAFGWVIDKACLLWQDQCGQQGSCLVYQNSAMSRYILIMGLLYKLPEVHHSLNVLNRKFQKQTVHNL

SEQ ID NO: 2846 - protein, 698 aa, Artificial Sequence; identical to SEQ ID NO: 2845
  Synthetic polypeptide

SEQ ID NO: 2847 - protein, 127 aa, Artificial Sequence
  Synthetic polypeptide
TTALCAARTASCTSHCATQGALQPRRRMWTARRCVRDPQRSFALGIQWIVVRILGGIPGPIAFGWVIDKACLLWQDQCGQQGSCLVYQNSAMSRYILIMGLLYKLPEVHHSLNVLNRKFQKQTVHNL

SEQ ID NO: 2848 - protein, 444 aa, Artificial Sequence
  Synthetic polypeptide
MVQKSRNGGVYPGPSGEKKLKVGFVGLDPGAPDSTRDGALLIAGSEAPKRGSILSKPRAGGAGAGKPPKRNAFYRKLQNFLYNVLERPRGWAFIYHAYVFLLVFSCLVLSVFSTIKEYEKSSEGALYILEIVTIVVFGVEYFVRIWAAGCCCRYRGWRGRLKFARKPFCVIDIMVLIASIAVLAAGSQGNVFATSALRSLRFLQILRMIRMDRRGGTWKLLGSVVYAHSKELVTAWYIGFLCLILASFLVYLAEKGENDHFDTYADALWWGLITLTTIGYGDKYPQTWNGRLLAATFTLIGVSFFALPAGILGSGFALKVQEQHRQKHFEKRRNPAAGLIQEERALPLATTRMGRGDVTLSGGSQTGKAVQLAMPLAGNARGGEVRGAPYTLAVARAWGTRNQERLLNVGGRRGFIWGRRRGVELDRGSGRTALCVQALLKCTL

SEQ ID NO: 2849 - protein, 444 aa, Artificial Sequence; identical to SEQ ID NO: 2848
  Synthetic polypeptide

SEQ ID NO: 2850 - protein, 444 aa, Artificial Sequence; identical to SEQ ID NO: 2848
  Synthetic polypeptide

SEQ ID NO: 2851 - protein, 444 aa, Artificial Sequence; identical to SEQ ID NO: 2848
  Synthetic polypeptide

SEQ ID NO: 2852 - protein, 444 aa, Artificial Sequence; identical to SEQ ID NO: 2848
  Synthetic polypeptide

SEQ ID NO: 2853 - protein, 444 aa, Artificial Sequence; identical to SEQ ID NO: 2848
  Synthetic polypeptide

SEQ ID NO: 2854 - protein, 444 aa, Artificial Sequence; identical to SEQ ID NO: 2848
  Synthetic polypeptide

SEQ ID NO: 2855 - protein, 444 aa, Artificial Sequence; identical to SEQ ID NO: 2848
  Synthetic polypeptide

SEQ ID NO: 2856 - protein, 215 aa, Artificial Sequence
  Synthetic polypeptide
MRALEGPGLSLLCLVLALPALLPVPAVRGVAETPTYPWRDAETGERLVCAQCPPGTFVQRPCRRDSPTTCGPCPPRHYTQFWNYLERCRYCNVLCGEREEEARACHATHNRACRCRTGFFAHAGFCLEHASCPPGAGVIAPGTPSQNTQCQPCPPGTFSASSSSSEQCQPHRNCTALGLALNVPGSSSHDTLCTSCTGFPLSTRVPGCASSPVQA

SEQ ID NO: 2857 - protein, 42 aa, Artificial Sequence
  Synthetic polypeptide
MNKKKKPFLGMPAPLGYVPGLGRGKQRALGSGHTCVCTLLAA

SEQ ID NO: 2858 - protein, 42 aa, Artificial Sequence; identical to SEQ ID NO: 2857
  Synthetic polypeptide

SEQ ID NO: 2859 - protein, 554 aa, Artificial Sequence
  Synthetic polypeptide
MAKPYEFNWQKEVPSFLQEGAVFDRYEEESFVFEPNCLFKVDEFGFFLTWRSEGKEGQVLECSLINSIRSGAIPKDPKILAALEAVGKSENDLEGRIVCVCSGTDLVNISFTYMVAENPEVTKQWVEGLRSIIHNFRANNVSPMTCLKKHWMKLAFMTNTNGKIPVRSITRTFASGKTEKVIFQALKELGLPSGKNDEIEPTAFSYEKFYELTQKICPRTDIEDLFKKINGDKTDYLTVDQLVSFLNEHQRDPRLNEILFPFYDAKRAMQIIEMYEPDEDLKKKGLISSDGFCRYLMSDENAPVFLDRLELYQEMDHPLAHYFISSSHNTYLTGRQFGGKSSVEMYRQVLLAGCRCVELDCWDGKGEDQEPIITHGKAMCTDILFKDVIQAIKETAFVTSEYPVILSFENHCSKYQQYKMSKYCEDLFGDLLLKQALESHPLEPGRALPSPNDLKRKILIKNKRLKPEVEKKQLEALRSMMEAGESASPANILEDDNEEEIESADQEEEAHPEFKFGNELSADDLGHKEAVANSVKKFPHLQSEDDNTYFMGSL

SEQ ID NO: 2860 - protein, 554 aa, Artificial Sequence; identical to SEQ ID NO: 2859
  Synthetic polypeptide

SEQ ID NO: 2861 - protein, 554 aa, Artificial Sequence; identical to SEQ ID NO: 2859
  Synthetic polypeptide

SEQ ID NO: 2862 - protein, 554 aa, Artificial Sequence; identical to SEQ ID NO: 2859
  Synthetic polypeptide

SEQ ID NO: 2863 - protein, 554 aa, Artificial Sequence; identical to SEQ ID NO: 2859
  Synthetic polypeptide

SEQ ID NO: 2864 - protein, 554 aa, Artificial Sequence; identical to SEQ ID NO: 2859
  Synthetic polypeptide

SEQ ID NO: 2865 - protein, 1164 aa, Artificial Sequence
  Synthetic polypeptide
MAKPYEFNWQKEVPSFLQEGAVFDRYEEESFVFEPNCLFKVDEFGFFLTWRSEGKEGQVLECSLINSIRSGAIPKDPKILAALEAVGKSENDLEGRIVCVCSGTDLVNISFTYMVAENPEVTKQWVEGLRSIIHNFRANNVSPMTCLKKHWMKLAFMTNTNGKIPVRSITRTFASGKTEKVIFQALKELGLPSGKNDEIEPTAFSYEKFYELTQKICPRTDIEDLFKKINGDKTDYLTVDQLVSFLNEHQRDPRLNEILFPFYDAKRAMQIIEMYEPDEDLKKKGLISSDGFCRYLMSDENAPVFLDRLELYQEMDHPLAHYFISSSHNTYLTGRQFGGKSSVEMYRQVLLAGCRCVELDCWDGKGEDQEPIITHGKAMCTDILFKDVIQAIKETAFVTSEYPVILSFENHCSKYQQYKMSKYCEDLFGDLLLKQALESHPLEPGRALPSPNDLKRKILIKNKRLKPEVEKKQLEALRSMMEAGESASPANILEDDNEEEIESADQEEEAHPEFKFGNELSADDLGHKEAVANSVKKGLVTVEDEQAWMASYKYVGATTNIHPYLSTMINYAQPVKFQGFHVAEERNIHYNMSSFNESVGLGYLKTHAIEFVNYNKRQMSRIYPKGGRVDSSNYMPQIFWNAGCQMVSLNYQTPDLAMQLNQGKFEYNGSCGYLLKPDFMRRPDRTFDPFSETPVDGVIAATCSVQVISGQFLSDKKIGTYVEVDMYGLPTDTIRKEFRTRMVMNNGLNPVYNEESFVFRKVILPDLAVLRIAVYDDNNKLIGQRILPLDGLQAGYRHISLRNEGNKPLSLPTIFCNIVLKTYVPDGFGDIVDALSDPKKFLSITEKRADQMRAMGIETSDIADVPSDTSKNDKKGKANTAKANVTPQSSSELRPTTTAALASGVEAKKGIELIPQVRIEDLKQMKAYLKHLKKQQKELNSLKKKHAKEHSTMQKLHCTQVDKIVAQYDKEKSTHEKILEKAMKKKGGSNCLEMKKETEIKIQTLTSDHKSKVKEIVAQHTKEWSEMINTHSAEEQEIRDLHLSQQCELLKKLLINAHEQQTQQLKLSHDRESKEMRAHQAKISMENSKAISQDKSIKNKAERERRVRELNSSNTKKFLEERKRLAMKQSKEMDQLKKVQLEHLEFLEKQNEQLNKHWPQEKQY

SEQ ID NO: 2866 - protein, 1164 aa, Artificial Sequence; identical to SEQ ID NO: 2865
  Synthetic polypeptide

SEQ ID NO: 2867 - protein, 1164 aa, Artificial Sequence; identical to SEQ ID NO: 2865
  Synthetic polypeptide

SEQ ID NO: 2868 - protein, 1164 aa, Artificial Sequence; identical to SEQ ID NO: 2865
  Synthetic polypeptide

SEQ ID NO: 2869 - protein, 1176 aa, Artificial Sequence
  Synthetic polypeptide
MAKPYEFNWQKEVPSFLQEGAVFDRYEEESFVFEPNCLFKVDEFGFFLTWRSEGKEGQVLECSLINSIRSGAIPKDPKILAALEAVGKSENDLEGRIVCVCSGTDLVNISFTYMVAENPEVTKQWVEGLRSIIHNFRANNVSPMTCLKKHWMKLAFMTNTNGKIPVRSITRTFASGKTEKVIFQALKELGLPSGKNDEIEPTAFSYEKFYELTQKICPRTDIEDLFKKINGDKTDYLTVDQLVSFLNEHQRDPRLNEILFPFYDAKRAMQIIEMYEPDEDLKKKGLISSDGFCRYLMSDENAPVFLDRLELYQEMDHPLAHYFISSSHNTYLTGRQFGGKSSVEMYRQVLLAGCRCVELDCWDGKGEDQEPIITHGKAMCTDILFKDVIQAIKETAFVTSEYPVILSFENHCSKYQQYKMSKYCEDLFGDLLLKQALESHPLEPGRALPSPNDLKRKILIKNKRLKPEVEKKQLEALRSMMEAGESASPANILEDDNEEEIESADQEEEAHPEFKFGNELSADDLGHKEAVANSVKKASDDLEHENNKKGLVTVEDEQAWMASYKYVGATTNIHPYLSTMINYAQPVKFQGFHVAEERNIHYNMSSFNESVGLGYLKTHAIEFVNYNKRQMSRIYPKGGRVDSSNYMPQIFWNAGCQMVSLNYQTPDLAMQLNQGKFEYNGSCGYLLKPDFMRRPDRTFDPFSETPVDGVIAATCSVQVISGQFLSDKKIGTYVEVDMYGLPTDTIRKEFRTRMVMNNGLNPVYNEESFVFRKVILPDLAVLRIAVYDDNNKLIGQRILPLDGLQAGYRHISLRNEGNKPLSLPTIFCNIVLKTYVPDGFGDIVDALSDPKKFLSITEKRADQMRAMGIETSDIADVPSDTSKNDKKGKANTAKANVTPQSSSELRPTTTAALASGVEAKKGIELIPQVRIEDLKQMKAYLKHLKKQQKELNSLKKKHAKEHSTMQKLHCTQVDKIVAQYDKEKSTHEKILEKAMKKKGGSNCLEMKKETEIKIQTLTSDHKSKVKEIVAQHTKEWSEMINTHSAEEQEIRDLHLSQQCELLKKLLINAHEQQTQQLKLSHDRESKEMRAHQAKISMENSKAISQDKSIKNKAERERRVRELNSSNTKKFLEERKRLAMKQSKEMDQLKKVQLEHLEFLEKQNEQLNKHWPQEKQY

SEQ ID NO: 2870 - protein, 1176 aa, Artificial Sequence; identical to SEQ ID NO: 2869
  Synthetic polypeptide

SEQ ID NO: 2871 - protein, 286 aa, Artificial Sequence
  Synthetic polypeptide
MASTIKEALSVVSEDQSLFECAYGTPHLAKTEMTASSSSDYGQTSKMSPRVPQQDWLSQPPARVTIKMECNPSQVNGSRNSPDECSVAKGGKMVGSPDTVGMNYGSYMEEKHMPPPNMTTNERRVIVPADPTLWSTDHVRQWLEWAVKEYGLPDVNILLFQNIDGKELCKMTKDDFQRLTPSYNADILLSHLHYLRETPLPHLTSDDVDKALQNSPRLMHARNTDLPYEPPRRSAWTGHGHPTPQSKAAQPSPSTVPKTEDQRPQLDPYQILGPTSSRLANPGWTQ

SEQ ID NO: 2872 - protein, 287 aa, Artificial Sequence
  Synthetic polypeptide
MASTIKEALSVVSEDQSLFECAYGTPHLAKTEMTASSSSDYGQTSKMSPRVPQQDWLSQPPARVTIKMECNPSQVNGSRNSPDECSVAKGGKMVGSPDTVGMNYGSYMEEKHMPPPNMTTNERRVIVPADPTLWSTDHVRQWLEWAVKEYGLPDVNILLFQNIDGKELCKMTKDDFQRLTPSYNADILLSHLHYLRETPLPHLTSDDVDKALQNSPRLMHARNTGGAAFIFPNTSVYPEATQRITTRPAAQPSPSTVPKTEDQRPQLDPYQILGPTSSRLANPGWTQ

SEQ ID NO: 2873 - protein, 310 aa, Artificial Sequence
  Synthetic polypeptide
MASTIKEALSVVSEDQSLFECAYGTPHLAKTEMTASSSSDYGQTSKMSPRVPQQDWLSQPPARVTIKMECNPSQVNGSRNSPDECSVAKGGKMVGSPDTVGMNYGSYMEEKHMPPPNMTTNERRVIVPADPTLWSTDHVRQWLEWAVKEYGLPDVNILLFQNIDGKELCKMTKDDFQRLTPSYNADILLSHLHYLRETPLPHLTSDDVDKALQNSPRLMHARNTGGAAFIFPNTSVYPEATQRITTRPDLPYEPPRRSAWTGHGHPTPQSKAAQPSPSTVPKTEDQRPQLDPYQILGPTSSRLANPGWTQ

SEQ ID NO: 2874 - protein, 194 aa, Artificial Sequence
  Synthetic polypeptide
MVGSPDTVGMNYGSYMEEKHMPPPNMTTNERRVIVPADPTLWSTDHVRQWLEWAVKEYGLPDVNILLFQNIDGKELCKMTKDDFQRLTPSYNADILLSHLHYLRETPLPHLTSDDVDKALQNSPRLMHARNTDLPYEPPRRSAWTGHGHPTPQSKAAQPSPSTVPKTEDQRPQLDPYQILGPTSSRLANPGWTQ

SEQ ID NO: 2875 - protein, 293 aa, Artificial Sequence
  Synthetic polypeptide
MIQTVPDPAAHIKEALSVVSEDQSLFECAYGTPHLAKTEMTASSSSDYGQTSKMSPRVPQQDWLSQPPARVTIKMECNPSQVNGSRNSPDECSVAKGGKMVGSPDTVGMNYGSYMEEKHMPPPNMTTNERRVIVPADPTLWSTDHVRQWLEWAVKEYGLPDVNILLFQNIDGKELCKMTKDDFQRLTPSYNADILLSHLHYLRETPLPHLTSDDVDKALQNSPRLMHARNTDLPYEPPRRSAWTGHGHPTPQSKAAQPSPSTVPKTEDQRPQLDPYQILGPTSSRLANPGWTQ

SEQ ID NO: 2876 - protein, 293 aa, Artificial Sequence; identical to SEQ ID NO: 2875
  Synthetic polypeptide

SEQ ID NO: 2877 - protein, 294 aa, Artificial Sequence
  Synthetic polypeptide
MIQTVPDPAAHIKEALSVVSEDQSLFECAYGTPHLAKTEMTASSSSDYGQTSKMSPRVPQQDWLSQPPARVTIKMECNPSQVNGSRNSPDECSVAKGGKMVGSPDTVGMNYGSYMEEKHMPPPNMTTNERRVIVPADPTLWSTDHVRQWLEWAVKEYGLPDVNILLFQNIDGKELCKMTKDDFQRLTPSYNADILLSHLHYLRETPLPHLTSDDVDKALQNSPRLMHARNTGGAAFIFPNTSVYPEATQRITTRPAAQPSPSTVPKTEDQRPQLDPYQILGPTSSRLANPGWTQ

SEQ ID NO: 2878 - protein, 317 aa, Artificial Sequence
  Synthetic polypeptide
MIQTVPDPAAHIKEALSVVSEDQSLFECAYGTPHLAKTEMTASSSSDYGQTSKMSPRVPQQDWLSQPPARVTIKMECNPSQVNGSRNSPDECSVAKGGKMVGSPDTVGMNYGSYMEEKHMPPPNMTTNERRVIVPADPTLWSTDHVRQWLEWAVKEYGLPDVNILLFQNIDGKELCKMTKDDFQRLTPSYNADILLSHLHYLRETPLPHLTSDDVDKALQNSPRLMHARNTGGAAFIFPNTSVYPEATQRITTRPDLPYEPPRRSAWTGHGHPTPQSKAAQPSPSTVPKTEDQRPQLDPYQILGPTSSRLANPGWTQ

SEQ ID NO: 2879 - protein, 317 aa, Artificial Sequence; identical to SEQ ID NO: 2878
  Synthetic polypeptide

SEQ ID NO: 2880 - protein, 218 aa, Artificial Sequence
  Synthetic polypeptide
MVGSPDTVGMNYGSYMEEKHMPPPNMTTNERRVIVPADPTLWSTDHVRQWLEWAVKEYGLPDVNILLFQNIDGKELCKMTKDDFQRLTPSYNADILLSHLHYLRETPLPHLTSDDVDKALQNSPRLMHARNTGGAAFIFPNTSVYPEATQRITTRPDLPYEPPRRSAWTGHGHPTPQSKAAQPSPSTVPKTEDQRPQLDPYQILGPTSSRLANPGWTQ

SEQ ID NO: 2881 - protein, 119 aa, Artificial Sequence
  Synthetic polypeptide
MGALARALLLPLLAQWLLRAAPELAPAPFTLPLRVAAATNRVVAPTPGPGTPAERHADGLALALEPALASPAGAANFLAMVDNLQGDSGRGYYLEMLIGTPPQKDMQRDTRDVRRGTAM

SEQ ID NO: 2882 - protein, 119 aa, Artificial Sequence; identical to SEQ ID NO: 2881
  Synthetic polypeptide

SEQ ID NO: 2883 - protein, 119 aa, Artificial Sequence; identical to SEQ ID NO: 2881
  Synthetic polypeptide

SEQ ID NO: 2884 - protein, 378 aa, Artificial Sequence
  Synthetic polypeptide
MGALARALLLPLLAQWLLRAAPELAPAPFTLPLRVAAATNRVVAPTPGPGTPAERHADGLALALEPALASPAGAANFLAMVDNLQGDSGRGYYLEMLIGTPPQKLQILVDTGSSNFAVAGTPHSYIDTYFDTERSSTYRSKGFDVTVKYTQGSWTGFVGEDLVTIPKGFNTSFLVNIATIFESENFFLPGIKWNGILGLAYATLAKPSSSLETFFDSLVTQANIPNVFSMQMCGAGLPVAGSGTNGGSLVLGGIEPSLYKGDIWYTPIKEEWYYQIEILKLEIGGQSLNLDCREYNADKAIVDSGTTLLRLPQKVFDAVVEAVARASLIPEFSDGFWTGSQLACWTNSETPWSYFPKISIYLRDENSSRSFRITILPQ

SEQ ID NO: 2885 - protein, 378 aa, Artificial Sequence; identical to SEQ ID NO: 2884
  Synthetic polypeptide

SEQ ID NO: 2886 - protein, 449 aa, Artificial Sequence
  Synthetic polypeptide
MGALARALLLPLLAQWLLRAAPELAPAPFTLPLRVAAATNRVVAPTPGPGTPAERHADGLALALEPALASPAGAANFLAMVDNLQGDSGRGYYLEMLIGTPPQKLQILVDTGSSNFAVAGTPHSYIDTYFDTERSSTYRSKGFDVTVKYTQGSWTGFVGEDLVTIPKGFNTSFLVNIATIFESENFFLPGIKWNGILGLAYATLAKPSSSLETFFDSLVTQANIPNVFSMQMCGAGLPVAGSGTNGGSLVLGGIEPSLYKGDIWYTPIKEEWYYQIEILKLEIGGQSLNLDCREYNADKAIVDSGTTLLRLPQKVFDAVVEAVARASLIPEFSDGFWTGSQLACWTNSETPWSYFPKISIYLRDENSSRSFRITILPQLYIQPMMGAGLNYECYRFGISPSTNALVIGATVMEGFYVIFDRAQKRVGFAASPCAETSQKSTKGKQMNNC

SEQ ID NO: 2887 - protein, 399 aa, Artificial Sequence
  Synthetic polypeptide
MGALARALLLPLLAQWLLRAAPELAPAPFTLPLRVAAATNRVVAPTPGPGTPAERHADGLALALEPALASPAGAANFLAMVDNLQGDSGRGYYLEMLIGTPPQKLQILVDTGSSNFAVAGTPHSYIDTYFDTERSSTYRSKGFDVTVKYTQGSWTGFVGEDLVTIPKGFNTSFLVNIATIFESENFFLPGIKWNGILGLAYATLAKPSSSLETFFDSLVTQANIPNVFSMQMCGAGLPVAGSGTNGGSLVLGGIEPSLYKGDIWYTPIKEEWYYQIEILKLEIGGQSLNLDCREYNADKAIVDSGTTLLRLPQKVFDAVVEAVARASLLYIQPMMGAGLNYECYRFGISPSTNALVIGATVMEGFYVIFDRAQKRVGFAASPCAETSQKSTKGKQMNNC

SEQ ID NO: 2888 - protein, 208 aa, Artificial Sequence
  Synthetic polypeptide
MRPLAGGLLKVVFVVFASLCAWYSGYLLAELIPDAPLSSAAYSIRSIGERPVLKAPVPKRQKCDHWTPCPSDTYAYRLLSGGGRSKYAKICFEDNLLMGEQLGNVARGINIAIVNYVTGNVTATRCFDMYEGDNSGPMTKFIQSAAPKSLLFMVTYDDGSTRLNNDAKNAIEALGSKEIRNMKFRSSWVFIAAKGLELPSEIQREKDG

SEQ ID NO: 2889 - protein, 160 aa, Artificial Sequence
  Synthetic polypeptide
MRPLAGAPVPKRQKCDHWTPCPSDTYAYRLLSGGGRSKYAKICFEDNLLMGEQLGNVARGINIAIVNYVTGNVTATRCFDMYEGDNSGPMTKFIQSAAPKSLLFMVTYDDGSTRLNNDAKNAIEALGSKEIRNMKFRSSWVFIAAKGLELPSEIQREKDG

SEQ ID NO: 2890 - protein, 247 aa, Artificial Sequence
  Synthetic polypeptide
MRPLAGGSRWACWLTRCLISCFDINVQGRLLVKLRPKPTANTTCPGLLKVVFVVFASLCAWYSGYLLAELIPDAPLSSAAYSIRSIGERPVLKAPVPKRQKCDHWTPCPSDTYAYRLLSGGGRSKYAKICFEDNLLMGEQLGNVARGINIAIVNYVTGNVTATRCFDMYEGDNSGPMTKFIQSAAPKSLLFMVTYDDGSTRLNNDAKNAIEALGSKEIRNMKFRSSWVFIAAKGLELPSEIQREKDG

SEQ ID NO: 2891 - protein, 231 aa, Artificial Sequence
  Synthetic polypeptide
MKSHRGDGEGQGPGPPPSRSQQLLGVLSAGLLKVVFVVFASLCAWYSGYLLAELIPDAPLSSAAYSIRSIGERPVLKAPVPKRQKCDHWTPCPSDTYAYRLLSGGGRSKYAKICFEDNLLMGEQLGNVARGINIAIVNYVTGNVTATRCFDMYEGDNSGPMTKFIQSAAPKSLLFMVTYDDGSTRLNNDAKNAIEALGSKEIRNMKFRSSWVFIAAKGLELPSEIQREKDG

SEQ ID NO: 2892 - protein, 268 aa, Artificial Sequence
  Synthetic polypeptide
MARLPAGIRFIISFSRDQWYRAFIFILTFLLYASFHLSRKPISIVKGELHKYCTAWDEADVRFSSQNRKSGSAAPHQLPDNETDCGWAPFDKNNYQQLLGALDYSFLCAYAVGMYLSGIIGERLPIRYYLTFGMLASGAFTALFGLGYFYNIHSFGFYVVTQVINGLVQTTGWPSVVTCLGNWFGKGRRGLIMGVWNSHTSVGNILGSLIAGYWVSTCWGLSFVVPGAIVAAMGIVCFLFLIEHPNDVRCSSTLVTNLFFTPHLQRLY

SEQ ID NO: 2893 - protein, 268 aa, Artificial Sequence; identical to SEQ ID NO: 2892
  Synthetic polypeptide

SEQ ID NO: 2894 - protein, 466 aa, Artificial Sequence
  Synthetic polypeptide
MVSRVQLPPEIQLAQRLAGNEQVTRDRAVRKLRKYIVARTQRAAGGFTHDELLKVWKGLFYCMWMQDKPLLQEELGRTISQLVHAFQTTEAQHLFLQAFWQTMNREWTGIDRLRLDKFYMLMRMVLNESLKVLKMQGWEERQIEELLELLMTEILHPSSQAPNGVKSHFIEIFLEELTKVGAEELTADQNLKFIDPFCRIAARTKDSLVLNNITRGIFETIVEQAPLAIEDLLNELDTQDEEVASDSDESSEGGERGDALSQKRSEKPPAGSICRAEPEAGEEQAGDDRDSGGPVLQFDYEAVANRLFEMASRQSTPSQNRKRLYKVIRKLQDLAGGIFPEDEIPEKACRRLLEGRRQKKTKKQKRLLRLQQERGWALNPMTGVLMRRGEATEGHMEKAMDGRGRGQGDTATAEGRLESPEAGRGRKDPPWSLRKERGPAHTLVSAFWTSELRGNPFLLLRATRFV

SEQ ID NO: 2895 - protein, 63 aa, Artificial Sequence
  Synthetic polypeptide
MGLLAFLKTQFVLHLLVGFVFVVSGLVINFVQLCTLALWPVSKQLYRRLNCRLAYSLWSLAQN

SEQ ID NO: 2896 - protein, 63 aa, Artificial Sequence; identical to SEQ ID NO: 2895
  Synthetic polypeptide

SEQ ID NO: 2897 - protein, 63 aa, Artificial Sequence; identical to SEQ ID NO: 2895
  Synthetic polypeptide

SEQ ID NO: 2898 - protein, 63 aa, Artificial Sequence; identical to SEQ ID NO: 2895
  Synthetic polypeptide

SEQ ID NO: 2899 - protein, 63 aa, Artificial Sequence; identical to SEQ ID NO: 2895
  Synthetic polypeptide

SEQ ID NO: 2900 - protein, 63 aa, Artificial Sequence; identical to SEQ ID NO: 2895
  Synthetic polypeptide

SEQ ID NO: 2901 - protein, 63 aa, Artificial Sequence; identical to SEQ ID NO: 2895
  Synthetic polypeptide

SEQ ID NO: 2902 - protein, 63 aa, Artificial Sequence; identical to SEQ ID NO: 2895
  Synthetic polypeptide

SEQ ID NO: 2903 - protein, 63 aa, Artificial Sequence; identical to SEQ ID NO: 2895
  Synthetic polypeptide

SEQ ID NO: 2904 - protein, 63 aa, Artificial Sequence; identical to SEQ ID NO: 2895
  Synthetic polypeptide

SEQ ID NO: 2905 - protein, 769 aa, Artificial Sequence
  Synthetic polypeptide
MLGLRPPLLALVGLLSLGCVLSQECTKFKVSSCRECIESGPGCTWCQKLNFTGPGDPDSIRCDTRPQLLMRGCAADDIMDPTSLAETQEDHNGGQKQLSPQKVTLYLRPGQAAAFNVTFRRAKGYPIDLYYLMDLSYSMLDDLRNVKKLGGDLLRALNEITESGRIGFGSFVDKTVLPFVNTHPDKLRNPCPNKEKECQPPFAFRHVLKLTNNSNQFQTEVGKQLISGNLDAPEGGLDAMMQVAACPEEIGWRNVTRLLVFATDDGFHFAGDGKLGAILTPNDGRCHLEDNLYKRSNEFDYPSVGQLAHKLAENNIQPIFAVTSRMVKTYEKLTEIIPKSAVGELSEDSSNVVQLIKNAYNKLSSRVFLDHNALPDTLKVTYDSFCSNGVTHRNQPRGDCDGVQINVPITFQVKVTATECIQEQSFVIRALGFTDIVTVQVLPQCECRCRDQSRDRSLCHGKGFLECGICRCDTGYIGKNCECQTQGRSSQELEGSCRKDNNSIICSGLGDCVCGQCLCHTSDVPGKLIYGQYCECDTINCERYNGQVCGGPGRGLCFCGKCRCHPGFEGSACQCERTTEGCLNPRRVECSGRGRCRCNVCECHSGYQLPLCQECPGCPSPCGKYISCAECLKFEKGPFGKNCSAACPGLQLSNNPVKGRTCKERDSEGCWVAYTLEQQDGMDRYLIYVDESRECVAGPNIAAIVGGTVAGIVLIGILLLVIWKALIHLSDLREYRRFEKEKLKSQWNNVESLSLDLLSQELLKVFPTP

SEQ ID NO: 2906 - protein, 769 aa, Artificial Sequence; identical to SEQ ID NO: 2905
  Synthetic polypeptide

SEQ ID NO: 2907 - protein, 769 aa, Artificial Sequence; identical to SEQ ID NO: 2905
  Synthetic polypeptide

SEQ ID NO: 2908 - protein, 769 aa, Artificial Sequence; identical to SEQ ID NO: 2905
  Synthetic polypeptide

SEQ ID NO: 2909 - protein, 769 aa, Artificial Sequence; identical to SEQ ID NO: 2905
  Synthetic polypeptide

SEQ ID NO: 2910 - protein, 712 aa, Artificial Sequence
  Synthetic polypeptide
MLGLRPPLLALVGLLSLGCVLSQECTKFKVSSCRECIESGPGCTWCQKLNFTGPGDPDSIRCDTRPQLLMRGCAADDIMDPTSLAETQEDHNGGQKQLSPQKVTLYLRPGFGSFVDKTVLPFVNTHPDKLRNPCPNKEKECQPPFAFRHVLKLTNNSNQFQTEVGKQLISGNLDAPEGGLDAMMQVAACPEEIGWRNVTRLLVFATDDGFHFAGDGKLGAILTPNDGRCHLEDNLYKRSNEFDYPSVGQLAHKLAENNIQPIFAVTSRMVKTYEKLTEIIPKSAVGELSEDSSNVVQLIKNAYNKLSSRVFLDHNALPDTLKVTYDSFCSNGVTHRNQPRGDCDGVQINVPITFQVKVTATECIQEQSFVIRALGFTDIVTVQVLPQCECRCRDQSRDRSLCHGKGFLECGICRCDTGYIGKNCECQTQGRSSQELEGSCRKDNNSIICSGLGDCVCGQCLCHTSDVPGKLIYGQYCECDTINCERYNGQVCGGPGRGLCFCGKCRCHPGFEGSACQCERTTEGCLNPRRVECSGRGRCRCNVCECHSGYQLPLCQECPGCPSPCGKYISCAECLKFEKGPFGKNCSAACPGLQLSNNPVKGRTCKERDSEGCWVAYTLEQQDGMDRYLIYVDESRECVAGPNIAAIVGGTVAGIVLIGILLLVIWKALIHLSDLREYRRFEKEKLKSQWNNVESLSLDLLSQELLKVFPTP

SEQ ID NO: 2911 - protein, 309 aa, Artificial Sequence
  Synthetic polypeptide
MKHSLNALLIFLIITSAWGGSKGPLDQLEKGGETAQSADPQWEQLNNKNLSMPLLPADFHKENTVTNDWIPEGEEDDDYLDLEKIFSEDDDYIDIVDSLSVSPTDSDVSAGNILQLFHGKSRIQRLNILNAKFAFNLYRVLKDQVNTFDNIFIAPVGISTAMGMISLGLKGETHEQVHSILHFKDFVNASSKYEITTIHNLFRKLTHRLFRRNFGYTLRSVNDLYIQKQFPILLDFKTKVREYYFAEAQIADFSDPAFISKTNNHIMKLTKGLIKDALENIDPATQMMILNCIYFKEMTPTLTGPREEP

SEQ ID NO: 2912 - protein, 309 aa, Artificial Sequence; identical to SEQ ID NO: 2911
  Synthetic polypeptide

SEQ ID NO: 2913 - protein, 129 aa, Artificial Sequence
  Synthetic polypeptide
MKKKLVVLGLLAVVLVLVIVGLCLWLPSASKEPDNHVYTRAAMAADAKQCLEIGRDTLRDGGSAVDAAIAALLCVGLMNAHSMGIGVGLFLTIYNSTTRKAEVINAREVAPRLAFASMFNSSEQSQKAL

SEQ ID NO: 2914 - protein, 129 aa, Artificial Sequence; identical to SEQ ID NO: 2913
  Synthetic polypeptide

SEQ ID NO: 2915 - protein, 129 aa, Artificial Sequence; identical to SEQ ID NO: 2913
  Synthetic polypeptide

SEQ ID NO: 2916 - protein, 347 aa, Artificial Sequence
  Synthetic polypeptide
MSSGAPQKSSPMASGAEETPGFLDTLLQDFPALLNPEDPLPWKAPGTVLSQEEVEGELAELAMGFLGSRKAPPPLAAALAHEAVSQLLQTDLSEFRKLPREEEEEEEDDDEEEKAPVTLLDAQSLAQSFFNRLWEVAGQWQKQVPLAARASQRQWLVSIHAIRNTRRKMEDRHVSLPSFNQLFGLSDPVNRAYFAVFDGHGGVDAARYAAVHVHTNAARQPELPTDPEGALREAFRRTDQMFLRKAKRERLQSGTTGVCALIAGATLHVAWLGDSQVILVQQGQVVKLMEPHRPERQDEKARIEALGGFVSHMDCWRVNGTLAVSRAIAIQKAEAGESLEPRRRRLQ

SEQ ID NO: 2917 - protein, 347 aa, Artificial Sequence; identical to SEQ ID NO: 2916
  Synthetic polypeptide

SEQ ID NO: 2918 - protein, 179 aa, Artificial Sequence
  Synthetic polypeptide
MEDRHVSLPSFNQLFGLSDPVNRAYFAVFDGHGGVDAARYAAVHVHTNAARQPELPTDPEGALREAFRRTDQMFLRKAKRERLQSGTTGVCALIAGATLHVAWLGDSQVILVQQGQVVKLMEPHRPERQDEKARIEALGGFVSHMDCWRVNGTLAVSRAIAIQKAEAGESLEPRRRRLQ

SEQ ID NO: 2919 - protein, 243 aa, Artificial Sequence
  Synthetic polypeptide
MGLCPSTRETAPPAVLDAQSLAQSFFNRLWEVAGQWQKQVPLAARASQRQWLVSIHAIRNTRRKMEDRHVSLPSFNQLFGLSDPVNRAYFAVFDGHGGVDAARYAAVHVHTNAARQPELPTDPEGALREAFRRTDQMFLRKAKRERLQSGTTGVCALIAGATLHVAWLGDSQVILVQQGQVVKLMEPHRPERQDEKARIEALGGFVSHMDCWRVNGTLAVSRAIAIQKAEAGESLEPRRRRLQ

SEQ ID NO: 2920 - protein, 99 aa, Artificial Sequence
  Synthetic polypeptide
MAWSPLFLTLITHCAGSWAQSVLTQPPSVSEAPRQRVTISCSGSSSNIGNNAVNWYQQLPGKAPKLLIYYDDLLPSGVSDRFSGSKSGTSASLAINGLQ

SEQ ID NO: 2921 - protein, 82 aa, Artificial Sequence
  Synthetic polypeptide
MAWALLLLTLLTQGTGSWAQSALTQPPSASGSPGQSVTISCTGTSSDVGGYNYVSWYQQHPGKAPKLMIYEENNRLKIFLKK

SEQ ID NO: 2922 - protein, 246 aa, Artificial Sequence
  Synthetic polypeptide
MGNILTCCINSHCGWPRGKDAPCYESDTDIYETVAAATSESTTVEPGKLDVGATEGQDLQHISNQKMPTGPPEDRLSLKFLPSSEEDNDDAKILPSPVQGSSEDNLSLVCLPRSEDDDCDDDDDDDAQILPSRVQGGCYRFDSSSCSSEDNLSLVCLPRSEDDDCDDDDDDAQILPSPVQACSEDSLFLRCSLRHKDEEEEDDDDIHITARIESDLTLESLSDEEIHPASHNHGWQMPRGCVRWPS

SEQ ID NO: 2923 - protein, 14 aa, Artificial Sequence
  Synthetic polypeptide
MLHALLRSRMPYLK

SEQ ID NO: 2924 - protein, 14 aa, Artificial Sequence
  Synthetic polypeptide
MLHALLRSRMPYLK

SEQ ID NO: 2925 - protein, 203 aa, Artificial Sequence
  Synthetic polypeptide
NAPTLHIQEFTNETWQARTGEPLPDHLVLLMWSLIVSLYPLGGLFGALLAGPLAITLGRKKSLLVNNIFVVSAAILFGFSRKAGSFEMIMLGRLLVGVNAGVSMNIQPMYLGESAPKELRGAVAMSSAIFTALGIVMGQVVGLSTSRCTWSRTSSWPSAAPASRARSAACTASARSAARRTAPTASCCAACWPSACASARTGP

SEQ ID NO: 2926 - protein, 96 aa, Artificial Sequence
  Synthetic polypeptide
MPMFIVNTNVPRASVPDGFLSELTQQLAQATGKPPQYIAVHVVPDQLMAFGGSSEPCALCSLHSIGKIGGAQNRSYSKLLCGLLAERLRISPDRPG

SEQ ID NO: 2927 - protein, 75 aa, Artificial Sequence
  Synthetic polypeptide
MGLELFLDLVSQPSRAVYIFAKKNGIPLELRTVDLVKGQHKSKEFLQINSLGKLPTLKDGDFILTERAAAGISQR

SEQ ID NO: 2928 - protein, 75 aa, Artificial Sequence; identical to SEQ ID NO: 2927
  Synthetic polypeptide

SEQ ID NO: 2929 - protein, 129 aa, Artificial Sequence
  Synthetic polypeptide
MKKKLVVLGLLAVVLVLVIVGLCLWLPSASKEPDNHVYTRAAVAADAKQCSKIGRDALRDGGSAVDAAIAALLCVGLMNAHSMGIGGGLFLTIYNSTTRKAEVINAREVAPRLAFATMFNSSEQSQKAL

SEQ ID NO: 2930 - protein, 129 aa, Artificial Sequence; identical to SEQ ID NO: 2929
  Synthetic polypeptide

SEQ ID NO: 2931 - protein, 129 aa, Artificial Sequence; identical to SEQ ID NO: 2929
  Synthetic polypeptide

SEQ ID NO: 2932 - protein, 129 aa, Artificial Sequence; identical to SEQ ID NO: 2929
  Synthetic polypeptide

SEQ ID NO: 2933 - protein, 129 aa, Artificial Sequence; identical to SEQ ID NO: 2929
  Synthetic polypeptide

SEQ ID NO: 2934 - protein, 129 aa, Artificial Sequence; identical to SEQ ID NO: 2929
  Synthetic polypeptide

SEQ ID NO: 2935 - protein, 129 aa, Artificial Sequence; identical to SEQ ID NO: 2929
  Synthetic polypeptide

SEQ ID NO: 2936 - protein, 129 aa, Artificial Sequence; identical to SEQ ID NO: 2929
  Synthetic polypeptide

SEQ ID NO: 2937 - protein, 129 aa, Artificial Sequence; identical to SEQ ID NO: 2929
  Synthetic polypeptide

SEQ ID NO: 2938 - protein, 42 aa, Artificial Sequence
  Synthetic polypeptide
MASAPAEAETRQRLLRTVKKEVPSQGLTFLLSKWTRLDSSRI

SEQ ID NO: 2939 - protein, 42 aa, Artificial Sequence; identical to SEQ ID NO: 2938
  Synthetic polypeptide

SEQ ID NO: 2940 - protein, 890 aa, Artificial Sequence
  Synthetic polypeptide
MPAARPPAAGLRGISLFLALLLGSPAAALERDALPEGDASPLGPYLLPSGAPERGSPGKEHPEERVVTAPPSSSQSAEVLGELVLDGTAPSAHHDIPALSPLLPEEARPKHALPPKKKLPSLKQVNSARKQLRPKATSAATVQRAGSQPASQGLDLLSSSTEKPGPPGDPDPIVASEEASEVPLWLDRKESAVPTTPAPLQISPFTSQPYVAHTLPQRPEPGEPGPDMAQEAPQEDTSPMALMDKGENELTGSASEESQETTTSTIITTTVITTEQAPALCSVSFSNPEGYIDSSDYPLLPLNNFLECTYNVTVYTGYGVELQVKSVNLSDGELLSIRGVDGPTLTVLANQTLLVEGQVIRSPTNTISVYFRTFQDDGLGTFQLHYQAFMLSCNFPRRPDSGDVTVMDLHSGGVAHFHCHLGYELQGAKMLTCINASKPHWSSQEPICSAPCGGAVHNATIGRVLSPSYPENTNGSQFCIWTIEAPEGQKLHLHFERLLLHDKDRMTVHSGQTNKSALLYDSLQTESVPFEGLLSEGNTIRIEFTSDQARAASTFNIRFEAFEKGHCYEPYIQNGNFTTSDPTYNIGTIVEFTCDPGHSLEQGPAIIECINVRDPYWNDTEPLCRAMCGGELSAVAGVVLSPNWPEPYVEGEDCIWKIHVGEEKRIFLDIQFLNLSNSDILTIYDGDEVMPHILGQYLGNSGPQKLYSSTPDLTIQFHSDPAGLIFGKGQGFIMNYIEVSRNDSCSDLPEIQNGWKTTSHTELVRGARITYQCDPGYDIVGSDTLTCQWDLSWSSDPPFCEKIMYCTDPGEVDHSTRLISDPVLLVGTTIQYTCNPGFVLEGSSLLTCYSRETGTPIWTSRLPHCVSSQPRSFCCPKPPGLWSFVKGSPR

SEQ ID NO: 2941 - protein, 890 aa, Artificial Sequence; identical to SEQ ID NO: 2940
  Synthetic polypeptide

SEQ ID NO: 2942 - protein, 890 aa, Artificial Sequence; identical to SEQ ID NO: 2940
  Synthetic polypeptide

SEQ ID NO: 2943 - protein, 890 aa, Artificial Sequence; identical to SEQ ID NO: 2940
  Synthetic polypeptide

SEQ ID NO: 2944 - protein, 663 aa, Artificial Sequence
  Synthetic polypeptide
MAQEAPQEDTSPMALMDKGENELTGSASEESQETTTSTIITTTVITTEQAPALCSVSFSNPEGYIDSSDYPLLPLNNFLECTYNVTVYTGYGVELQVKSVNLSDGELLSIRGVDGPTLTVLANQTLLVEGQVIRSPTNTISVYFRTFQDDGLGTFQLHYQAFMLSCNFPRRPDSGDVTVMDLHSGGVAHFHCHLGYELQGAKMLTCINASKPHWSSQEPICSAPCGGAVHNATIGRVLSPSYPENTNGSQFCIWTIEAPEGQKLHLHFERLLLHDKDRMTVHSGQTNKSALLYDSLQTESVPFEGLLSEGNTIRIEFTSDQARAASTFNIRFEAFEKGHCYEPYIQNGNFTTSDPTYNIGTIVEFTCDPGHSLEQGPAIIECINVRDPYWNDTEPLCRAMCGGELSAVAGVVLSPNWPEPYVEGEDCIWKIHVGEEKRIFLDIQFLNLSNSDILTIYDGDEVMPHILGQYLGNSGPQKLYSSTPDLTIQFHSDPAGLIFGKGQGFIMNYIEVSRNDSCSDLPEIQNGWKTTSHTELVRGARITYQCDPGYDIVGSDTLTCQWDLSWSSDPPFCEKIMYCTDPGEVDHSTRLISDPVLLVGTTIQYTCNPGFVLEGSSLLTCYSRETGTPIWTSRLPHCVSSQPRSFCCPKPPGLWSFVKGSPR

SEQ ID NO: 2945 - protein, 663 aa, Artificial Sequence; identical to SEQ ID NO: 2944
  Synthetic polypeptide

SEQ ID NO: 2946 - protein, 87 aa, Artificial Sequence
  Synthetic polypeptide
MYCTDPGEVDHSTRLISDPVLLVGTTIQYTCNPGFVLEGSSLLTCYSRETGTPIWTSRLPHCVSSQPRSFCCPKPPGLWSFVKGSPR

SEQ ID NO: 2947 - protein, 945 aa, Artificial Sequence
  Synthetic polypeptide
MMSFGGADALLGAPFAPLHGGGSLHYALARKGGAGGTRSAAGSSSGFHSWTRTSVSSVSASPSRFRGAGAASSTDSLDTLSNGPEGCMVAVATSRSEKEQLQALNDRFAGYIDKVRQLEAHNRSLEGEAAALRQQQAGRSAMGELYEREVREMRGAVLRLGAARGQLRLEQEHLLEDIAHVRQRLDDEARQREEAEAAARALARFAQEAEAARVDLQKKAQALQEECGYLRRHHQEEVGELLGQIQGSGAAQAQMQAETRDALKCDVTSALREIRAQLEGHAVQSTLQSEEWFRVRLDRLSEAAKVNTDAMRSAQEEITEYRRQLQARTTELEALKSTKDSLERQRSELEDRHQADIASYQEAIQQLDAELRNTKWEMAAQLREYQDLLNVKMALDIEIAAYRKLLEGEECRIGFGPIPFSLPEGLPKIPSVSTHIKVKSEEKIKVVEKSEKETVIVEEQTEETQVTEEVTEEEEKEAKEEEGKEEEGGEEEEAEGGEEETKSPPAEEAASPEKEAKSPVKEEAKSPAEAKSPEKEEAKSPAEVKSPEKAKSPAKEEAKSPPEAKSPEKEEAKSPAEVKSPEKAKSPAKEEAKSPAEAKSPEKAKSPVKEEAKSPAEAKSPVKEEAKSPAEVKSPEKAKSPTKEEAKSPEKAKSPEKEEAKSPEKAKSPVKAEAKSPEKAKSPVKAEAKSPEKAKSPVKEEAKSPEKAKSPVKEEAKSPEKAKSPVKEEAKTPEKAKSPVKEEAKSPEKAKSPEKAKTLDVKSPEAKTPAKEEARSPADKFPEKAKSPVKEEVKSPEKAKSPLKEDAKAPEKEIPKKEEVKSPVKEEEKPQEVKVKEPPKKAEEEKAPATPKTEEKKDSKKEEAPKKEAPKPKVEEKKEPAVEKPKESKVEAKKEEAEDKKKVPTPEKEAPAKVEVKEDAKPKEKTEEAKTGGSLEPGKVEVAVS

SEQ ID NO: 2948 - protein, 121 aa, Artificial Sequence
  Synthetic polypeptide
MSRSYNDELQFLEKINKNCWRIKKGFVPNMQVEGVFYVNDALEKLMFEELRNACRGGGVGGFLPAMKQIGNVAALPGIVHRSIGLPDVHSGYGFAIGNMAAFDMNDPEAVVSPGTENLLRQ

SEQ ID NO: 2949 - protein, 121 aa, Artificial Sequence; identical to SEQ ID NO: 2948
  Synthetic polypeptide

SEQ ID NO: 2950 - protein, 741 aa, Artificial Sequence
  Synthetic polypeptide
MSGFDDPGIFYSDSFGGDAQADEGQARKSQLQRRFKEFLRQYRVGTDRTGFTFKYRDELKRHYNLGEYWIEVEMEDLASFDEDLADYLYKQPAEHLQLLEEAAKEVADEVTRPRPSGEEVLQDIQVMLKSDASPSSIRSLKSDMMSHLVKIPGIIIAASAVRAKATRISIQCRSCRNTLTNIAMRPGLEGYALPRKCNTDQAGRPKCPLDPYFIMPDKCKCVDFQTLKLQELPDAVPHGEMPRHMQLYCDRYLCDKVVPGNRVTIMGIYSIKKFGLTTSRGRDRVGVGIRSSYIRVLGIQVDTDGSGRSFAGAVSPQEEEEFRRLAALPNVYEVISKSIAPSIFGGTDMKKAIACLLFGGSRKRLPDGLTRRGDINLLMLGDPGTAKSQLLKFVEKCSPIGVYTSGKGSSAAGLTASVMRDPSSRNFIMEGGAMVLADGGVVCIDEFDKMREDDRVAIHEAMEQQTISIAKAGITTTLNSRCSVLAAANSVFGRWDETKGEDNIDFMPTILSRFDMIFIVKDEHNEERDVMLAKHVITLHVSALTQTQAVEGEIDLAKLKKFIAYCRVKCGPRLSAEAAEKLKNRYIIMRSGARQHERDSDRRSSIPITVRQLEAIVRIAEALSKMKLQPFATEADVEEALRLFQVSTLDAALSGTLSGVEGFTSQEDQEMLSRIEKQLKRRFAIGSQVSEHSIIKDFTKQIPPLLIWELRPCCLSLVTYDLICTHCGPLVSDRKPKRRYH

SEQ ID NO: 2951 - protein, 698 aa, Artificial Sequence
  Synthetic polypeptide
MSGFDDPGIFYSDSFGGDAQADEGQARKSQLQRRFKEFLRQYRVGTDRTGFTFKYRDELKRHYNLGEYWIEVEMEDLASFDEDLADYLYKQPAEHLQLSDMMSHLVKIPGIIIAASAVRAKATRISIQCRSCRNTLTNIAMRPGLEGYALPRKCNTDQAGRPKCPLDPYFIMPDKCKCVDFQTLKLQELPDAVPHGEMPRHMQLYCDRYLCDKVVPGNRVTIMGIYSIKKFGLTTSRGRDRVGVGIRSSYIRVLGIQVDTDGSGRSFAGAVSPQEEEEFRRLAALPNVYEVISKSIAPSIFGGTDMKKAIACLLFGGSRKRLPDGLTRRGDINLLMLGDPGTAKSQLLKFVEKCSPIGVYTSGKGSSAAGLTASVMRDPSSRNFIMEGGAMVLADGGVVCIDEFDKMREDDRVAIHEAMEQQTISIAKAGITTTLNSRCSVLAAANSVFGRWDETKGEDNIDFMPTILSRFDMIFIVKDEHNEERDVMLAKHVITLHVSALTQTQAVEGEIDLAKLKKFIAYCRVKCGPRLSAEAAEKLKNRYIIMRSGARQHERDSDRRSSIPITVRQLEAIVRIAEALSKMKLQPFATEADVEEALRLFQVSTLDAALSGTLSGVEGFTSQEDQEMLSRIEKQLKRRFAIGSQVSEHSIIKDFTKQIPPLLIWELRPCCLSLVTYDLICTHCGPLVSDRKPKRRYH

SEQ ID NO: 2952 - protein, 727 aa, Artificial Sequence
  Synthetic polypeptide
MSGFDDPGIFYSDSFGGDAQADEGQARKSQLQRRFKEFLRQYRVGTDRTGFTFKYRDELKRHYNLGEYWIEVEMEDLASFDEDLADYLYKQPAEHLQLLEEAAKEVADEVTRPRPSGEEVLQDIQVMLKSDASPSSIRSLKSDMMSHLVKIPGIIIAASAVRAKATRISIQCRSCRNTLTNIAMRPGLEGYALPRKCNTDQAGRPKCPLDPYFIMPDKCKCVDFQTLKLQELPDAVPHGEMPRHMQLYCDRYLCDKVVPGNRVTIMGIYSIKKFGLTTSRGRDRVGVGIRSSYIRVLGIQVDTDGSGRSFAGAVSPQEEEEFRRLAALPNVYEVISKSIAPSIFGGTDMKKAIACLLFGGSRKRLPDGLTRRGDINLLMLGDPGTAKSQLLKFVEKCSPIGVYTSGKGSSAAGLTASVMRDPSSRNFIMEGGAMVLADGGVVCIDEFDKMREDDRVAIHEAMEQQTISIAKAGITTTLNSRCSVLAAANSVFGRWDETKGEDNIDFMPTILSRFDMIFIVKDEHNEERDVMLAKHVITLHVSALTQTQAVEGEIDLAKLKKFIAYCRVKCGPRLSAEAAEKLKNRYIIMRSGARQHERDSDRRSSIPITVRQLEAIVRIAEALSKMKLQPFATEADVEEALRLFQVSTLDAALSGTLSGVEGFTSQEDQEMLSRIEKQLKRRFAIGSQVSEHSIIKDFTKQKIRMIKAPASYSGHEDRTKRAMWRAW

SEQ ID NO: 2953 - protein, 684 aa, Artificial Sequence
  Synthetic polypeptide
MSGFDDPGIFYSDSFGGDAQADEGQARKSQLQRRFKEFLRQYRVGTDRTGFTFKYRDELKRHYNLGEYWIEVEMEDLASFDEDLADYLYKQPAEHLQLSDMMSHLVKIPGIIIAASAVRAKATRISIQCRSCRNTLTNIAMRPGLEGYALPRKCNTDQAGRPKCPLDPYFIMPDKCKCVDFQTLKLQELPDAVPHGEMPRHMQLYCDRYLCDKVVPGNRVTIMGIYSIKKFGLTTSRGRDRVGVGIRSSYIRVLGIQVDTDGSGRSFAGAVSPQEEEEFRRLAALPNVYEVISKSIAPSIFGGTDMKKAIACLLFGGSRKRLPDGLTRRGDINLLMLGDPGTAKSQLLKFVEKCSPIGVYTSGKGSSAAGLTASVMRDPSSRNFIMEGGAMVLADGGVVCIDEFDKMREDDRVAIHEAMEQQTISIAKAGITTTLNSRCSVLAAANSVFGRWDETKGEDNIDFMPTILSRFDMIFIVKDEHNEERDVMLAKHVITLHVSALTQTQAVEGEIDLAKLKKFIAYCRVKCGPRLSAEAAEKLKNRYIIMRSGARQHERDSDRRSSIPITVRQLEAIVRIAEALSKMKLQPFATEADVEEALRLFQVSTLDAALSGTLSGVEGFTSQEDQEMLSRIEKQLKRRFAIGSQVSEHSIIKDFTKQKIRMIKAPASYSGHEDRTKRAMWRAW

SEQ ID NO: 2954 - protein, 718 aa, Artificial Sequence
  Synthetic polypeptide
MSGFDDPGIFYSDSFGGDAQADEGQARKSQLQRRFKEFLRQYRVGTDRTGFTFKYRDELKRHYNLGEYWIEVEMEDLASFDEDLADYLYKQPAEHLQLLEEAAKEVADEVTRPRPSGEEVLQDIQVMLKSDASPSSIRSLKSDMMSHLVKIPGIIIAASAVRAKATRISIQCRSCRNTLTNIAMRPGLEGYALPRKCNTDQAGRPKCPLDPYFIMPDKCKCVDFQTLKLQELPDAVPHGEMPRHMQLYCDRYLCDKVVPGNRVTIMGIYSIKKFGLTTSRGRDRVGVGIRSSYIRVLGIQVDTDGSGRSFAGAVSPQEEEEFRRLAALPNVYEVISKSIAPSIFGGTDMKKAIACLLFGGSRKRLPDGLTRRGDINLLMLGDPGTAKSQLLKFVEKCSPIGVYTSGKGSSAAGLTASVMRDPSSRNFIMEGGAMVLADGGVVCIDEFDKMREDDRVAIHEAMEQQTISIAKAGITTTLNSRCSVLAAANSVFGRWDETKGEDNIDFMPTILSRFDMIFIVKDEHNEERDVMLAKHVITLHVSALTQTQAVEGEIDLAKLKKFIAYCRVKCGPRLSAEAAEKLKNRYIIMRSGARQHERDSDRRSSIPITVRQLEAIVRIAEALSKMKLQPFATEADVEEALRLFQVSTLDAALSGTLSGVEGFTSQEDQEMLSRIEKQLKRRFAIGSQVSEHSIIKDFTKQNGDNGICLLGLSRELDE

SEQ ID NO: 2955 - protein, 675 aa, Artificial Sequence
  Synthetic polypeptide
MSGFDDPGIFYSDSFGGDAQADEGQARKSQLQRRFKEFLRQYRVGTDRTGFTFKYRDELKRHYNLGEYWIEVEMEDLASFDEDLADYLYKQPAEHLQLSDMMSHLVKIPGIIIAASAVRAKATRISIQCRSCRNTLTNIAMRPGLEGYALPRKCNTDQAGRPKCPLDPYFIMPDKCKCVDFQTLKLQELPDAVPHGEMPRHMQLYCDRYLCDKVVPGNRVTIMGIYSIKKFGLTTSRGRDRVGVGIRSSYIRVLGIQVDTDGSGRSFAGAVSPQEEEEFRRLAALPNVYEVISKSIAPSIFGGTDMKKAIACLLFGGSRKRLPDGLTRRGDINLLMLGDPGTAKSQLLKFVEKCSPIGVYTSGKGSSAAGLTASVMRDPSSRNFIMEGGAMVLADGGVVCIDEFDKMREDDRVAIHEAMEQQTISIAKAGITTTLNSRCSVLAAANSVFGRWDETKGEDNIDFMPTILSRFDMIFIVKDEHNEERDVMLAKHVITLHVSALTQTQAVEGEIDLAKLKKFIAYCRVKCGPRLSAEAAEKLKNRYIIMRSGARQHERDSDRRSSIPITVRQLEAIVRIAEALSKMKLQPFATEADVEEALRLFQVSTLDAALSGTLSGVEGFTSQEDQEMLSRIEKQLKRRFAIGSQVSEHSIIKDFTKQNGDNGICLLGLSRELDE

SEQ ID NO: 2956 - protein, 242 aa, Artificial Sequence
  Synthetic polypeptide
MEGAALLRVSVLCIWMSALFLGVGVRAEEAGARVQQNVPSGTDTGDPQSKPLGDWAAGTMDPESSIFIEDAIKYFKEKVSTQNLLLLLTDNEAWNGFVAAAELPRNEADELRKALDNLARQMIMKDKNWHDKGQQYRNWFLKEFPRLKSELEDNIRRLRALADGVQKVHKGTTIANVVSGSLSISSGILTLVGMGLAPFTEGGSLVLLEPGMELGITAALTGITSSTMDYGKKWWAMAMVPS

SEQ ID NO: 2957 - protein, 242 aa, Artificial Sequence; identical to SEQ ID NO: 2956
  Synthetic polypeptide

SEQ ID NO: 2958 - protein, 242 aa, Artificial Sequence; identical to SEQ ID NO: 2956
  Synthetic polypeptide

SEQ ID NO: 2959 - protein, 224 aa, Artificial Sequence
  Synthetic polypeptide
MEGAALLRVSVLCIWVQQNVPSGTDTGDPQSKPLGDWAAGTMDPESSIFIEDAIKYFKEKVSTQNLLLLLTDNEAWNGFVAAAELPRNEADELRKALDNLARQMIMKDKNWHDKGQQYRNWFLKEFPRLKSELEDNIRRLRALADGVQKVHKGTTIANVVSGSLSISSGILTLVGMGLAPFTEGGSLVLLEPGMELGITAALTGITSSTMDYGKKWWAMAMVPS

SEQ ID NO: 2960 - protein, 258 aa, Artificial Sequence
  Synthetic polypeptide
MRFKSHTVELRRPCSDMEGAALLRVSVLCIWMSALFLGVGVRAEEAGARVQQNVPSGTDTGDPQSKPLGDWAAGTMDPESSIFIEDAIKYFKEKVSTQNLLLLLTDNEAWNGFVAAAELPRNEADELRKALDNLARQMIMKDKNWHDKGQQYRNWFLKEFPRLKSELEDNIRRLRALADGVQKVHKGTTIANVVSGSLSISSGILTLVGMGLAPFTEGGSLVLLEPGMELGITAALTGITSSTMDYGKKWWAMAMVPS

SEQ ID NO: 2961 - protein, 121 aa, Artificial Sequence
  Synthetic polypeptide
MIMKDKNWHDKGQQYRNWFLKEFPRLKSELEDNIRRLRALADGVQKVHKGTTIANVVSGSLSISSGILTLVGMGLAPFTEGGSLVLLEPGMELGITAALTGITSSTMDYGKKWWAMAMVPS

SEQ ID NO: 2962 - protein, 333 aa, Artificial Sequence
  Synthetic polypeptide
MEGAALLRVSVLCIWMSALFLGVGVRAEEAGARVQQNVPSGTDTGDPQSKPLGDWAAGTMDPESSIFIEDAIKYFKEKVSTQNLLLLLTDNEAWNGFVAAAELPRNEADELRKALDNLARQMIMKDKNWHDKGQQYRNWFLKEFPRLKSELEDNIRRLRALADGVQKVHKGTTIANVVSGSLSISSGILTLVGMGLAPFTEGGSLVLLEPGMELGITAALTGITSSTMDYGKKWWTQAQAHDLVIKSLDKLKEVREFLGENISNFLSLAGNTYQLTRGIGKDIRALRRARANLQSVPHASASRPRVTEPISAESGEQVELAVSRDIATALQPG

SEQ ID NO: 2963 - protein, 333 aa, Artificial Sequence; identical to SEQ ID NO: 2962
  Synthetic polypeptide

SEQ ID NO: 2964 - protein, 333 aa, Artificial Sequence; identical to SEQ ID NO: 2962
  Synthetic polypeptide

SEQ ID NO: 2965 - protein, 315 aa, Artificial Sequence
  Synthetic polypeptide
MEGAALLRVSVLCIWVQQNVPSGTDTGDPQSKPLGDWAAGTMDPESSIFIEDAIKYFKEKVSTQNLLLLLTDNEAWNGFVAAAELPRNEADELRKALDNLARQMIMKDKNWHDKGQQYRNWFLKEFPRLKSELEDNIRRLRALADGVQKVHKGTTIANVVSGSLSISSGILTLVGMGLAPFTEGGSLVLLEPGMELGITAALTGITSSTMDYGKKWWTQAQAHDLVIKSLDKLKEVREFLGENISNFLSLAGNTYQLTRGIGKDIRALRRARANLQSVPHASASRPRVTEPISAESGEQVELAVSRDIATALQPG

SEQ ID NO: 2966 - protein, 349 aa, Artificial Sequence
  Synthetic polypeptide
MRFKSHTVELRRPCSDMEGAALLRVSVLCIWMSALFLGVGVRAEEAGARVQQNVPSGTDTGDPQSKPLGDWAAGTMDPESSIFIEDAIKYFKEKVSTQNLLLLLTDNEAWNGFVAAAELPRNEADELRKALDNLARQMIMKDKNWHDKGQQYRNWFLKEFPRLKSELEDNIRRLRALADGVQKVHKGTTIANVVSGSLSISSGILTLVGMGLAPFTEGGSLVLLEPGMELGITAALTGITSSTMDYGKKWWTQAQAHDLVIKSLDKLKEVREFLGENISNFLSLAGNTYQLTRGIGKDIRALRRARANLQSVPHASASRPRVTEPISAESGEQVELAVSRDIATALQPG

SEQ ID NO: 2967 - protein, 212 aa, Artificial Sequence
  Synthetic polypeptide
MIMKDKNWHDKGQQYRNWFLKEFPRLKSELEDNIRRLRALADGVQKVHKGTTIANVVSGSLSISSGILTLVGMGLAPFTEGGSLVLLEPGMELGITAALTGITSSTMDYGKKWWTQAQAHDLVIKSLDKLKEVREFLGENISNFLSLAGNTYQLTRGIGKDIRALRRARANLQSVPHASASRPRVTEPISAESGEQVELAVSRDIATALQPG

SEQ ID NO: 2968 - protein, 332 aa, Artificial Sequence
  Synthetic polypeptide
MEGAALLRVSVLCIWMSALFLGVGVRAEEAGARVQQNVPSGTDTGDPQSKPLGDWAAGTMDPESSIFIEDAIKYFKEKVSTQNLLLLLTDNEAWNGFVAAAELPRNEADELRKALDNLARQMIMKDKNWHDKGQQYRNWFLKEFPRLKSELEDNIRRLRALADGVQKVHKGTTIANVVSGSLSISSGILTLVGMGLAPFTEGGSLVLLEPGMELGITAALTGITSSTMDYGKKWWTQAQAHDLVIKSLDKLKEVREFLGENISNFLSLAGNTYQLTRGIGKDIRALRRARANLQSVPHASASRPRVTEPISAESGEQVVGHGHGPQLRSRCP

SEQ ID NO: 2969 - protein, 332 aa, Artificial Sequence; identical to SEQ ID NO: 2968
  Synthetic polypeptide

SEQ ID NO: 2970 - protein, 332 aa, Artificial Sequence; identical to SEQ ID NO: 2968
  Synthetic polypeptide

SEQ ID NO: 2971 - protein, 314 aa, Artificial Sequence
  Synthetic polypeptide
MEGAALLRVSVLCIWVQQNVPSGTDTGDPQSKPLGDWAAGTMDPESSIFIEDAIKYFKEKVSTQNLLLLLTDNEAWNGFVAAAELPRNEADELRKALDNLARQMIMKDKNWHDKGQQYRNWFLKEFPRLKSELEDNIRRLRALADGVQKVHKGTTIANVVSGSLSISSGILTLVGMGLAPFTEGGSLVLLEPGMELGITAALTGITSSTMDYGKKWWTQAQAHDLVIKSLDKLKEVREFLGENISNFLSLAGNTYQLTRGIGKDIRALRRARANLQSVPHASASRPRVTEPISAESGEQVVGHGHGPQLRSRCP

SEQ ID NO: 2972 - protein, 348 aa, Artificial Sequence
  Synthetic polypeptide
MRFKSHTVELRRPCSDMEGAALLRVSVLCIWMSALFLGVGVRAEEAGARVQQNVPSGTDTGDPQSKPLGDWAAGTMDPESSIFIEDAIKYFKEKVSTQNLLLLLTDNEAWNGFVAAAELPRNEADELRKALDNLARQMIMKDKNWHDKGQQYRNWFLKEFPRLKSELEDNIRRLRALADGVQKVHKGTTIANVVSGSLSISSGILTLVGMGLAPFTEGGSLVLLEPGMELGITAALTGITSSTMDYGKKWWTQAQAHDLVIKSLDKLKEVREFLGENISNFLSLAGNTYQLTRGIGKDIRALRRARANLQSVPHASASRPRVTEPISAESGEQVVGHGHGPQLRSRCP

SEQ ID NO: 2973 - protein, 211 aa, Artificial Sequence
  Synthetic polypeptide
MIMKDKNWHDKGQQYRNWFLKEFPRLKSELEDNIRRLRALADGVQKVHKGTTIANVVSGSLSISSGILTLVGMGLAPFTEGGSLVLLEPGMELGITAALTGITSSTMDYGKKWWTQAQAHDLVIKSLDKLKEVREFLGENISNFLSLAGNTYQLTRGIGKDIRALRRARANLQSVPHASASRPRVTEPISAESGEQVVGHGHGPQLRSRCP

SEQ ID NO: 2974 - protein, 118 aa, Artificial Sequence
  Synthetic polypeptide
MSMTDLLNAEDIKKAVGAFSATDSFDHKKFFQMVGLKKKSADDVKKVFHMLDKDKSGFIEEDELGFILKGFSPDARDLSAKETKMLMAAGDKDGDGKIGVDETHLGAGQQCALWKILP

SEQ ID NO: 2975 - protein, 118 aa, Artificial Sequence; identical to SEQ ID NO: 2974
  Synthetic polypeptide

SEQ ID NO: 2976 - protein, 118 aa, Artificial Sequence; identical to SEQ ID NO: 2974
  Synthetic polypeptide

SEQ ID NO: 2977 - protein, 1 aa, Artificial Sequence
  Synthetic peptide
R

SEQ ID NO: 2978 - protein, 86 aa, Artificial Sequence
  Synthetic polypeptide
MVGLKKKSADDVKKVFHMLDKDKSGFIEEDELGFILKGFSPDARDLSAKETKMLMAAGDKDGDGKIGVDETHLGAGQQCALWKILP

SEQ ID NO: 2979 - protein, 163 aa, Artificial Sequence
  Synthetic polypeptide
MPVAEAPQVAGGQGDGGDGEEAEPEGMFKACEDSKRKARGYLRLVPLFVLLALLVLASAGVLLWYFLGYKAEVMVSQVYSGSLRVLNRHFSQDLTRRESSAFRSETAKAQKMLKELITSTRLGTYYNSSSVYSFGIMRAPPSEVARRLLREDGQQWLRCGKCS

SEQ ID NO: 2980 - protein, 163 aa, Artificial Sequence; identical to SEQ ID NO: 2979
  Synthetic polypeptide

SEQ ID NO: 2981 - protein, 163 aa, Artificial Sequence; identical to SEQ ID NO: 2979
  Synthetic polypeptide

SEQ ID NO: 2982 - protein, 163 aa, Artificial Sequence; identical to SEQ ID NO: 2979
  Synthetic polypeptide

SEQ ID NO: 2983 - protein, 172 aa, Artificial Sequence
  Synthetic polypeptide
MLLLFHSKRMPVAEAPQVAGGQGDGGDGEEAEPEGMFKACEDSKRKARGYLRLVPLFVLLALLVLASAGVLLWYFLGYKAEVMVSQVYSGSLRVLNRHFSQDLTRRESSAFRSETAKAQKMLKELITSTRLGTYYNSSSVYSFGIMRAPPSEVARRLLREDGQQWLRCGKCS

SEQ ID NO: 2984 - protein, 172 aa, Artificial Sequence; identical to SEQ ID NO: 2983
  Synthetic polypeptide

SEQ ID NO: 2985 - protein, 290 aa, Artificial Sequence
  Synthetic polypeptide
MQCRLPRGLAGALLTLLCMGLLCLRYHLNLSPQRVQGTPELSQPNPGPPKLQLHDVFIAVKTTRAFHRLRLELLLDTWVSRTREQVTRSHLVVTNCSAEHSHPALSCKMAAEFDTFLASGLRWFCHVDDDNYVNPRALLQLLRAFPLARDVYVGRPSLNRPIHASEPQPHNRTRLVQFWFATGGAGFCINRKLALKMAPWASGSRFMDTSALIRLPDDCTMGYIIECKLGGRLQPSPLFHSHLETLQLLRTAQLPEQVTLSYGVFEGKLNVIKLQGPFSPEEDPSSLSCC

SEQ ID NO: 2986 - protein, 304 aa, Artificial Sequence
  Synthetic polypeptide
MQCRLPRGLAGALLTLLCMGLLCLRYHLNLSPQRVQGTPELSQPNPGPPKLQLHDVFIAVKTTRAFHRLRLELLLDTWVSRTREQTFVFTDSPDKGLQERLGSHLVVTNCSAEHSHPALSCKMAAEFDTFLASGLRWFCHVDDDNYVNPRALLQLLRAFPLARDVYVGRPSLNRPIHASEPQPHNRTRLVQFWFATGGAGFCINRKLALKMAPWASGSRFMDTSALIRLPDDCTMGYIIECKLGGRLQPSPLFHSHLETLQLLRTAQLPEQVTLSYGVFEGKLNVIKLQGPFSPEEDPSSLSCC

SEQ ID NO: 2987 - protein, 105 aa, Artificial Sequence
  Synthetic polypeptide
MACGLVASNLNLKPGECLRVRGEVAPDAKSFVLNLGKDSNNLCLHFNPRFNAHGDANTIVCNSKDGGAWGTEQREAVFPFQPGSVAEATCAPPSAPVFACVTSDK

SEQ ID NO: 2988 - protein, 1 aa, Artificial Sequence
  Synthetic peptide
L

SEQ ID NO: 2989 - protein, 490 aa, Artificial Sequence
  Synthetic polypeptide
MAGPRGALLAWCRRQCEGYRGVEIRDLSSSFRDGLAFCAILHRHRPDLLDFDSLSKDNVFENNRLAFEVAEKELGIPALLDPNDMVSMSVPDCLSIMTYVSQYYNHFCSPGQAGVSPPRKGLAPCSPPSVAPTPVEPEDVAQGEELSSGSLSEQGTGQTPSSTCAACQQHVHLVQRYLADGRLYHRHCFRCRRCSSTLLPGAYENGPEEGTFVCAEHCARLGPGTRSGTRPGPFSQPKQQHQQQLAEDAKDVPGGGPSSSAPAGAEADGPKASPEARPQIPTKPRVPGKLQELASPPAGRPTPAPRKASESTTPAPPTPRPRSSLQQENLVEQAGSSSLVNGRLHELPVPKPRGTPKPSEGTPAPRKDPPWITLVQAEPKKKPAPLPPSSSPGPPSQDSRQVENGGTEEVAQPSPTASLESKPYNPFEEEEEDKEEEAPAAPSLATSPALGHPESTPKSLHPWYGITPTSSPKTKKRPAPRAPSASPLDN

SEQ ID NO: 2990 - protein, 418 aa, Artificial Sequence
  Synthetic polypeptide
MKPHFRNTVERMYRDTFSYNFYNRPILSRRNTVWLCYEVKTKGPSRPRLDAKIFRGQVYSQPEHHAEMCFLSWFCGNQLPAYKCFQITWFVSWTPCPDCVAKLAEFLAEHPNVTLTISAARLYYYWERDYRRALCRLSQAGARVKIMDDEEFAYCWENFVYSEGQPFMPWYKFDDNYAFLHRTLKEILRNPMEAMYPHIFYFHFKNLRKAYGRNESWLCFTMEVVKHHSPVSWKRGVFRNQVDPETHCHAERCFLSWFCDDILSPNTNYEVTWYTSWSPCPECAGEVAEFLARHSNVNLTIFTARLYYFWDTDYQEGLRSLSQEGASVEIMGYKAKTEPRSQGGKAVRPHTIAPKMDFSASLTPETVHCTLKPALSIASAINGCKSWTPCYNRSYSAMEPPSSQPFLVPMGFPIGQEN

SEQ ID NO: 2991 - protein, 161 aa, Artificial Sequence
  Synthetic polypeptide
MTHIVREVDRPGSKVNKKEVVEAVTIVETPPMVVVGIVGYVETPRGLRTFKTVFAEHISDECKRRFYKNWHKSKKKAFTKYCKKWQDEDGKKQLEKDFSSMKKYCQVIRVIAHTQMRLLPLRQKKAHLMEIQVNGGTESQGSFSGLEIFSVLILEPVLLVC

SEQ ID NO: 2992 - protein, 161 aa, Artificial Sequence; identical to SEQ ID NO: 2991
  Synthetic polypeptide

SEQ ID NO: 2993 - protein, 213 aa, Artificial Sequence
  Synthetic polypeptide
MSHRKFSAPRHGSLGFLPRKRSSRHRGKVKSFPKDDPSKPVHLTAFLGYKAGMTHIVREVDRPGSKVNKKEVVEAVTIVETPPMVVVGIVGYVETPRGLRTFKTVFAEHISDECKRRFYKNWHKSKKKAFTKYCKKWQDEDGKKQLEKDFSSMKKYCQVIRVIAHTQMRLLPLRQKKAHLMEIQVNGGTESQGSFSGLEIFSVLILEPVLLVC

SEQ ID NO: 2994 - protein, 240 aa, Artificial Sequence
  Synthetic polypeptide
QMMNLLTGGQKLCADCHVLIWLCGVLWPSHRKFSAPRHGSLGFLPRKRSSRHRGKVKSFPKDDPSKPVHLTAFLGYKAGMTHIVREVDRPGSKVNKKEVVEAVTIVETPPMVVVGIVGYVETPRGLRTFKTVFAEHISDECKRRFYKNWHKSKKKAFTKYCKKWQDEDGKKQLEKDFSSMKKYCQVIRVIAHTQMRLLPLRQKKAHLMEIQVNGGTESQGSFSGLEIFSVLILEPVLLVC

SEQ ID NO: 2995 - protein, 64 aa, Artificial Sequence
  Synthetic polypeptide
GMCCNGGRFIVTGVGTAESATHRRHPVLAGAGVSQKVLRSQTWVPRLPASEAQQQASWEGEELP

SEQ ID NO: 2996 - protein, 173 aa, Artificial Sequence
  Synthetic polypeptide
MEGGAYGAGKAGGAFDPYTLVRQPHTILRVVSWLFSIVVFGSIVNEGYLNSASEGEEFCIYNRNPNACSYGVAVGVLAFLTCLLYLALDVYFPQISSVKDRKKAVLSDIGVSAFWAFLWFVGFCYLANQWQVSKPKDNPLNEGTDAARAAIAFSFFSIFTWASIFPALKQGSG

SEQ ID NO: 2997 - protein, 173 aa, Artificial Sequence; identical to SEQ ID NO: 2996
  Synthetic polypeptide

SEQ ID NO: 2998 - protein, 173 aa, Artificial Sequence; identical to SEQ ID NO: 2996
  Synthetic polypeptide

SEQ ID NO: 2999 - protein, 174 aa, Artificial Sequence
  Synthetic polypeptide
MLTLEFGILEFDPSWIGSWTQRSWVSWRSRPGCELFSIVVFGSIVNEGYLNSASEGEEFCIYNRNPNACSYGVAVGVLAFLTCLLYLALDVYFPQISSVKDRKKAVLSDIGVSAFWAFLWFVGFCYLANQWQVSKPKDNPLNEGTDAARAAIAFSFFSIFTWASIFPALKQGSG

SEQ ID NO: 3000 - protein, 217 aa, Artificial Sequence
  Synthetic polypeptide
MAFRRQVKNFVKNYSDAEIKVREATSNDPWGPSSSLMLDISDLTFNTISLSEIMNMLWHRLNDHGKNWRHVYKSLTLMDYLIKNGSKKVIQHCREGFCNLQTLKDFQHIDEAGKDQGYYIREKSKQVITLLMDEPLLCKEREVACRTRQRTSHSILFSKRQLGSSNSLTACTSAPTPDISASEKKYKLPKFGRLHNKTHGSRSDFNFQVLLLKKYIS

SEQ ID NO: 3001 - protein, 264 aa, Artificial Sequence
  Synthetic polypeptide
MEAVAKFDFTASGEDELSFHTGDVLKILSNQEEWFKAELGSQEGYVPKNFIDIQFPKHEDDVQHFKVMRDNKGNYFLWTEKFPSLNKLVDYYRTNSISRQKQIFLRDRTREDQGHRGNSLDRRSQGGPHLSGAVGEEIRPSMNRKLSDHPPTLPLQQHQHQPQPPQYAPAPQQLQQPPQQRYLQHHHFHQERRGGSLDINDGHCGTGLGSEMNAALMHRRHTDPVQLQAAGAMWRGGKVTSFESETRGLQSRLCYLRYQPGQVS

SEQ ID NO: 3002 - protein, 304 aa, Artificial Sequence
  Synthetic polypeptide
MEAVAKFDFTASGEDELSFHTGDVLKILSNQEEWFKAELGSQEGYVPKNFIDIQFPKWFHEGLSRHQAENLLMGKEVGFFIIRASQSSPGDFSISVRHEDDVQHFKVMRDNKGNYFLWTEKFPSLNKLVDYYRTNSISRQKQIFLRDRTREDQGHRGNSLDRRSQGGPHLSGAVGEEIRPSMNRKLSDHPPTLPLQQHQHQPQPPQYAPAPQQLQQPPQQRYLQHHHFHQERRGGSLDINDGHCGTGLGSEMNAALMHRRHTDPVQLQAAGAMWRGGKVTSFESETRGLQSRLCYLRYQPGQVS

SEQ ID NO: 3003 - protein, 304 aa, Artificial Sequence; identical to SEQ ID NO: 3002
  Synthetic polypeptide

SEQ ID NO: 3004 - protein, 238 aa, Artificial Sequence
  Synthetic polypeptide
MLEFVSLLARKDSNNSVSKPRHKLNPFSSKRHEDDVQHFKVMRDNKGNYFLWTEKFPSLNKLVDYYRTNSISRQKQIFLRDRTREDQGHRGNSLDRRSQGGPHLSGAVGEEIRPSMNRKLSDHPPTLPLQQHQHQPQPPQYAPAPQQLQQPPQQRYLQHHHFHQERRGGSLDINDGHCGTGLGSEMNAALMHRRHTDPVQLQAAGAMWRGGKVTSFESETRGLQSRLCYLRYQPGQVS

SEQ ID NO: 3005 - protein, 232 aa, Artificial Sequence
  Synthetic polypeptide
MGKEVGFFIIRASQSSPGDFSISVRHEDDVQHFKVMRDNKGNYFLWTEKFPSLNKLVDYYRTNSISRQKQIFLRDRTREDQGHRGNSLDRRSQGGPHLSGAVGEEIRPSMNRKLSDHPPTLPLQQHQHQPQPPQYAPAPQQLQQPPQQRYLQHHHFHQERRGGSLDINDGHCGTGLGSEMNAALMHRRHTDPVQLQAAGAMWRGGKVTSFESETRGLQSRLCYLRYQPGQVS

SEQ ID NO: 3006 - protein, 191 aa, Artificial Sequence
  Synthetic polypeptide
MVSRRPLSTPGRELTHGQGGWLLHHPGQPELPRGLLHLCQGHRGNSLDRRSQGGPHLSGAVGEEIRPSMNRKLSDHPPTLPLQQHQHQPQPPQYAPAPQQLQQPPQQRYLQHHHFHQERRGGSLDINDGHCGTGLGSEMNAALMHRRHTDPVQLQAAGAMWRGGKVTSFESETRGLQSRLCYLRYQPGQVS

SEQ ID NO: 3007 - protein, 458 aa, Artificial Sequence
  Synthetic polypeptide
MAAGGDHGSPDSYRSPLASRYASPEMCFVFSDRYKFRTWRQLWLWLAEAEQTLGLPITDEQIQEMKSNLENIDFKMAAEEEKRLRHDVMAHVHTFGHCCPKAAGIIHLGATSCYVGDNTDLIILRNALDLLLPKLARVISRLADFAKERASLPTLGFTHFQPAQLTTVGKRCCLWIQDLCMDLQNLKRVRDDLRFRGVKGTTGTQASFLQLFEGDDHKVEQLDKMVTEKAGFKRAFIITGQTYTRKVDIEVLSVLASLGASVHKICTDIRLLANLKEMEEPFEKQQIGSSAMPYKRNPMRSERCCSLARHLMTLVMDPLQTASVQWFERTLDDSANRRICLAEAFLTADTILNTLQNISEGLVVYPKVIERRIRQELPFMATENIIMAMVKAGGSRQDCHEKIRVLSQQAASVVKQEGGDNDLIERIQVDAYFSPIHSQLDHLLDPSSFTGRASQQGR

SEQ ID NO: 3008 - protein, 472 aa, Artificial Sequence
  Synthetic polypeptide
MAAGGDHGSPDSYRSPLASRYASPEMCFVFSDRYKFRTWRQLWLWLAEAEQTLGLPITDEQIQEMKSNLENIDFKMAAEEEKRLRHDVMAHVHTFGHCCPKAAGIIHLGATSCYVGDNTSLILSRGVIKAYCNLRLPGSDSSPVSVSQLARVISRLADFAKERASLPTLGFTHFQPAQLTTVGKRCCLWIQDLCMDLQNLKRVRDDLRFRGVKGTTGTQASFLQLFEGDDHKVEQLDKMVTEKAGFKRAFIITGQTYTRKVDIEVLSVLASLGASVHKICTDIRLLANLKEMEEPFEKQQIGSSAMPYKRNPMRSERCCSLARHLMTLVMDPLQTASVQWFERTLDDSANRRICLAEAFLTADTILNTLQNISEGLVVYPKVIERRIRQELPFMATENIIMAMVKAGGSRQDCHEKIRVLSQQAASVVKQEGGDNDLIERIQVDAYFSPIHSQLDHLLDPSSFTGRASQQGR

SEQ ID NO: 3009 - protein, 8 aa, Artificial Sequence
  Synthetic polypeptide
GRASQQGR

SEQ ID NO: 3010 - protein, 81 aa, Artificial Sequence
  Synthetic polypeptide
MEPPNLYPVKLYVYDLSKGLARRLSPIMLGKQLEGIWEEDATGILWIEAGTLLNRLECTGQPHTTKKYPASNVNSAKIEKP

SEQ ID NO: 3011 - protein, 737 aa, Artificial Sequence
  Synthetic polypeptide
MAVRQAATAGTPGPRREEEAALLFERAHYRHDPRWLLPVTPRLCLACALELLPDPGVSLVRKKHMLSCFQDALVRHTSLVTQLVSQDQRVCIHFISVLFGLLCSMEDGSVTDLCIEVLIQITTQLKLEQTIRCLLDECHKELCNMPSMRGSLATLTLLGKLVDAIPALADELVMEHGNLMEHLLRGLVYPSEGIQASVCYLYGKLYSSPVAAEMLSGHFREKLFPLFLSILDGAQTKELQINCLGLLRQLLKYDLFVSMIMNQDGLGESAKNIEGSSGNTSLPLVLKKLLLSRDETLQVASAHCITAVLVHSPAKHASAFIHADIPEFLFEHLSSSSEVLVWSSCNCLTLLVEEPLFFSKCHTVYGIEAVVRSLQGSLKMNNIELHKQGLLLFAEILTRQPEEIKLFTSSAMCRDAGRALQEAVSSPVLEVAAEALKATSAFLRKDHQSTPPVQYGELQALLEAMLNRCAEFSQTLLSRRPLGHASSRDSEKAILQRGKFLLSTLEGFRSACRLAIEFQSEPSAQENPFTAPSAKKEDTLEAFSEFLLSACDSLCIPMVMRHLEQTTHPALMEVFLSILHNLFVIVPHMKEKFSKKLASSSFIRLTLELKARFCSGLSHSALNQVCSNFLYYMCLNLLSAPEKTGPPSKEELSAVSELLQHGLPQISSRSPESLAFLSDRQYMEGAARQRQYCILLLFYLAYIHEDRPGAVAYSCNPSSLGGRDGQITRSGDRDHHG

SEQ ID NO: 3012 - protein, 477 aa, Artificial Sequence
  Synthetic polypeptide
MNQDGLGESAKNIEGSSGNTSLPLVLKKLLLSRDETLQVASAHCITAVLVHSPAKHASAFIHADIPEFLFEHLSSSSEVLVWSSCNCLTLLVEEPLFFSKCHTVYGIEAVVRSLQGSLKMNNIELHKQGLLLFAEILTRQPEEIKLFTSSAMCRDAGRALQEAVSSPVLEVAAEALKATSAFLRKDHQSTPPVQYGELQALLEAMLNRCAEFSQTLLSRRPLGHASSRDSEKAILQRGKFLLSTLEGFRSACRLAIEFQSEPSAQENPFTAPSAKKEDTLEAFSEFLLSACDSLCIPMVMRHLEQTTHPALMEVFLSILHNLFVIVPHMKEKFSKKLASSSFIRLTLELKARFCSGLSHSALNQVCSNFLYYMCLNLLSAPEKTGPPSKEELSAVSELLQHGLPQISSRSPESLAFLSDRQYMEGAARQRQYCILLLFYLAYIHEDRPGAVAYSCNPSSLGGRDGQITRSGDRDHHG

SEQ ID NO: 3013 - protein, 105 aa, Artificial Sequence
  Synthetic polypeptide
MCLNLLSAPEKTGPPSKEELSAVSELLQHGLPQISSRSPESLAFLSDRQYMEGAARQRQYCILLLFYLAYIHEDRPGAVAYSCNPSSLGGRDGQITRSGDRDHHG

SEQ ID NO: 3014 - protein, 55 aa, Artificial Sequence
  Synthetic polypeptide
MEGAARQRQYCILLLFYLAYIHEDRPGAVAYSCNPSSLGGRDGQITRSGDRDHHG

SEQ ID NO: 3015 - protein, 248 aa, Artificial Sequence
  Synthetic polypeptide
MPPLWALLALGCLRFGSAVNLQPQLASVTFATNNPTLTTVALEKPLCMFDSKEALTGTHEVYLYVLVDSAISRNASVQDSTNTPLGSTFLQTEGGRTGPYKAVAFDLIPCSDLPSLDAIGDVSKASQILNAYLVRVGANGTCLWDPNFQGLCNAPLSAATEYRFKYVLVNMSTGLVEDQTLWSDPIRTNQLTPYSTIDTWPGRRSGGMIVITSILGSLPFFLLVGFAGAIALSLVAWHRVSAPERWID

SEQ ID NO: 3016 - protein, 127 aa, Artificial Sequence
  Synthetic polypeptide
MPPLWALLALGCLRFGSAVNLQPQLASVTFATNNPTLTTVALEKPLCMFDSKEALTGTHEVYLYVLVDSVTPYSTIDTWPGRRSGGMIVITSILGSLPFFLLVGFAGAIALSLVAWHRVSAPERWID

SEQ ID NO: 3017 - protein, 120 aa, Artificial Sequence
  Synthetic polypeptide
MRQNDKIMCILENRKKRDRKNLCRAINDFQQSFQKPETRREFDLSDPLALKKDLPARQSDNDVRNTISGMQKFMGEDLNFHERKKFQEEQNREWSLQQQREWKNARAEQKCADLTFYPHP

SEQ ID NO: 3018 - protein, 188 aa, Artificial Sequence
  Synthetic polypeptide
MAVALPRDLRQDANLAKRRHAELCRQKRVFNARNRIIGGDTEAWDVQVHDQKIKEATEKARHETLAAEMRQNDKIMCILENRKKRDRKNLCRAINDFQQSFQKPETRREFDLSDPLALKKDLPARQSDNDVRNTISGMQKFMGEDLNFHERKKFQEEQNREWSLQQQREWKNARAEQKCADLTFYPHP

SEQ ID NO: 3019 - protein, 363 aa, Artificial Sequence
  Synthetic polypeptide
MAAPRPPPARLSGVMVPAPIQDLEALRALTALFKEQRNRNLDTIGVAVDLILLFRELRVEQESLLTAFRCGLQFLGNIASRNEDSQSIVWVHAFPELFLSCLNHPDKKIVAYSSMILFTSLNHERMKELEENLNIAIDVIDAYQKHPESEWPFLIITDLFLKSPELVQAMFPKLNNQERVTLLDLMIAKITSDEPLTKDDIPVFLRHAELIASTFVDQCKTVLKLASEEPPDDEEALATIRLLDVLCEMTVNTELLGYLQVFPGLLERVIDLLRVIHVAGKETTNIFSNCGCVRAEGDISNVANGFKSHLIRLIGNLCYKNKDNQDKEQGKNFCSHHSSKQRAEGPEQLTKPRKIRCMQVGKK

SEQ ID NO: 3020 - protein, 427 aa, Artificial Sequence
  Synthetic polypeptide
MAAPRPPPARLSGVMVPAPIQDLEALRALTALFKEQRNRETAPRTIFQRVLDILKKSSHAVELACRDPSQVENLASSLQLITECFRCLRNACIECSVNQNSIRNLDTIGVAVDLILLFRELRVEQESLLTAFRCGLQFLGNIASRNEDSQSIVWVHAFPELFLSCLNHPDKKIVAYSSMILFTSLNHERMKELEENLNIAIDVIDAYQKHPESEWPFLIITDLFLKSPELVQAMFPKLNNQERVTLLDLMIAKITSDEPLTKDDIPVFLRHAELIASTFVDQCKTVLKLASEEPPDDEEALATIRLLDVLCEMTVNTELLGYLQVFPGLLERVIDLLRVIHVAGKETTNIFSNCGCVRAEGDISNVANGFKSHLIRLIGNLCYKNKDNQDKEQGKNFCSHHSSKQRAEGPEQLTKPRKIRCMQVGKK

SEQ ID NO: 3021 - protein, 179 aa, Artificial Sequence
  Synthetic polypeptide
LMIAKITSDEPLTKDDIPVFLRHAELIASTFVDQCKTVLKLASEEPPDDEEALATIRLLDVLCEMTVNTELLGYLQVFPGLLERVIDLLRVIHVAGKETTNIFSNCGCVRAEGDISNVANGFKSHLIRLIGNLCYKNKDNQDKEQGKNFCSHHSSKQRAEGPEQLTKPRKIRCMQVGKK

SEQ ID NO: 3022 - protein, 3 aa, Artificial Sequence
  Synthetic polypeptide
GYN

SEQ ID NO: 3023 - protein, 535 aa, Artificial Sequence
  Synthetic polypeptide
MLRRLDKIRFRGHKRDDFLDLAESPNASDTECSDEIPLKVPRTSPRDSEELRDPAGPGTLIMATGVQDFNRTEFDRLNEIKGHLEIALLEKHFLQEELRKLREETNAEMLRQELDRERQRRMELEQKVQEVLKARTEEQMAQQPPKGQAQASNGAERRSQGLSSRLQKWFYERFGEYVEDFRFQPEENTVETEEPLSARRLTENMRRLKRGAKPVTNFVKNLSALSDWYSVYTSAIAFTVYMNAVWHGWAIPLFLFLAILRLSLNYLIARGWRIQWSIVPEVSEPVEPPKEDLTVSEKFQLVLDVAQKAQNLFGKMADILEKIKNLFMWVQPEITQKLYVALWAAFLASCFFPYRLVGLAVGLYAGIKFFLIDFIFKRCPRLRAKYDTPYIIWRSLPTDPQLKERSSAAVSRRLQTTSSRSYVPSAPAGLGKEEDAGRFHSTKKGNFHEIFNLTENERPLAVCENGWRCCLINRDRKMPTDYIRNGVLYVTENYLCFESSKSGSSKRNKVIKLVDITDIQKVNHHHRSVEAAGTK

SEQ ID NO: 3024 - protein, 535 aa, Artificial Sequence; identical to SEQ ID NO: 3023
  Synthetic polypeptide

SEQ ID NO: 3025 - protein, 58 aa, Artificial Sequence
  Synthetic polypeptide
MPTDYIRNGVLYVTENYLCFESSKSGSSKRNKVIKLVDITDIQKVNHHHRSVEAAGTK

SEQ ID NO: 3026 - protein, 558 aa, Artificial Sequence
  Synthetic polypeptide
MLRRLDKIRFRGHKRDDFLDLAESPNASDTECSDEIPLKVPRTSPRDSEELRDPAGPGTLIMATGVQDFNRTEFDRLNEIKGHLEIALLEKHFLQEELRKLREETNAEMLRQELDRERQRRMELEQKVQEVLKARTEEQMAQQPPKGQAQASNGAERRSQGLSSRLQKWFYERFGEYVEDFRFQPEENTVETEEPLSARRLTENMRRLKRGAKPVTNFVKNLSALSDWYSVYTSAIAFTVYMNAVWHGWAIPLFLFLAILRLSLNYLIARGWRIQWSIVPEVSEPVEPPKEDLTVSEKFQLVLDVAQKAQNLFGKMADILEKIKNLFMWVQPEITQKLYVALWAAFLASCFFPYRLVGLAVGLYAGIKFFLIDFIFKRCPRLRAKYDTPYIIWRSLPTDPQLKERSSAAVSRRLQTTSSRSYVPSAPAGLGKEEDAGRFHSTKKGNFHEIFNLTENERPLAVCENGWRCCLINRDRKMPTDYIRNGVLYVTENYLCFESSKSGSSKRNKVIKLVDITDIQKYKVLSVLPGSGMGIAVSTPSTQKVNHHHRSVEAAGTK

SEQ ID NO: 3027 - protein, 558 aa, Artificial Sequence; identical to SEQ ID NO: 3026
  Synthetic polypeptide

SEQ ID NO: 3028 - protein, 81 aa, Artificial Sequence
  Synthetic polypeptide
MPTDYIRNGVLYVTENYLCFESSKSGSSKRNKVIKLVDITDIQKYKVLSVLPGSGMGIAVSTPSTQKVNHHHRSVEAAGTK

SEQ ID NO: 3029 - protein, 42 aa, Artificial Sequence
  Synthetic polypeptide
MFPASPWAQPAQAKWSRTLCQQGQDDLLNKKKKKKKRLHPAR

SEQ ID NO: 3030 - protein, 41 aa, Artificial Sequence
  Synthetic polypeptide
MAPSPRTGSRQDATALPSMSSTFWAFMILASLLIAYCNGIS

SEQ ID NO: 3031 - protein, 41 aa, Artificial Sequence; identical to SEQ ID NO: 3030
  Synthetic polypeptide

SEQ ID NO: 3032 - protein, 204 aa, Artificial Sequence
  Synthetic polypeptide
MAVYRAALGASLAAARLLPLGRCSPSPAPRSTLSGAAMEPAPRWLAGLRFDNRALRALPVEAPPPGPEGAPSAPRPVPGACFTRVQPTPLRQPRLVALSEPALALLGLGAPPAREAEAEAALFFSGNALLPGAEPAAHCYCGHQFGQFAGQLGDGAAMYLGEVCTATGERWELQLKGAGPTPFSRKKMLICYNTDEPGGRGAVK

SEQ ID NO: 3033 - protein, 87 aa, Artificial Sequence
  Synthetic polypeptide
MGPSSCLLLILIPLLQLINPGSTQCSLDSVMDKKIKDVLNSLEYSPSPISKKLSCASVKSQGRPSSCPAGILCHSHPPTLRPSYVLS

SEQ ID NO: 3034 - protein, 381 aa, Artificial Sequence
  Synthetic polypeptide
MTAEKALPLGNGKAAEEARESEAPGGGCSSGGAAPARHPRVKRDKAVHERGHWNNKVEFVLSVAGEIIGLGNVWRFPYLCYKNGGGAFLIPYVVFFICCGIPVFFLETALGQFTSEGGITCWRKVCPLFEGIGYATQVIEAHLNVYYIIILAWAIFYLSNCFTTELPWATCGHEWNTENCVEFQKLNVSNYSHVSLQNATSPVMEFWEHRVLAISDGIEHIGNLRWELALCLLAAWTICYFCIWKGTKSTGKVVYVTATFPYIMLLILLIRGVTLPGASEGIKFYLYPDLSRLSDPQVWVDAGTQIFFSYAICLGCLTALGSYNNYNNNCYRDCIMLCCLNSGTSFVAGFAIFSVLGFMAYEQGVPIAEVAESAKRCTTSP

SEQ ID NO: 3035 - protein, 167 aa, Artificial Sequence
  Synthetic polypeptide
MKSSRKILLAYFILMFIVYAFEVASCITAATQQDFFTPNLFLKQMLERYQNNSPPNNDDQWKNNGVTKTWDRLMLQDNCCGVNGPSDWQKYTSAFRTENNDADYPWPRQCCVMNNLKEPLNLEACKLGVPGFYHNQGCYELISGPMNRHAWGVAWFGFAILCWTGHG

SEQ ID NO: 3036 - protein, 247 aa, Artificial Sequence
  Synthetic polypeptide
MAKDNSTVRCFQGLLIFGNVIIGCCGIALTAECIFFVSDQHSLYPLLEATDNDDIYGAAWIGIFVGICLFCLSVLGIVGIMKSSRKILLAYFILMFIVYAFEVASCITAATQQDFFTPNLFLKQMLERYQNNSPPNNDDQWKNNGVTKTWDRLMLQDNCCGVNGPSDWQKYTSAFRTENNDADYPWPRQCCVMNNLKEPLNLEACKLGVPGFYHNQGCYELISGPMNRHAWGVAWFGFAILCWTGHG

SEQ ID NO: 3037 - protein, 239 aa, Artificial Sequence
  Synthetic polypeptide
MAKDNSTVRCFQGLLIFGNVIIGCCGIALTAECIFFVSDQHSLYPLLEATDNDDIYGAAWIGIFVGICLFCLSVLGIVGIMKSSRKILLAYFILMFIVYAFEVASCITAATQQDFQMLERYQNNSPPNNDDQWKNNGVTKTWDRLMLQDNCCGVNGPSDWQKYTSAFRTENNDADYPWPRQCCVMNNLKEPLNLEACKLGVPGFYHNQGCYELISGPMNRHAWGVAWFGFAILCWTGHG

SEQ ID NO: 3038 - protein, 229 aa, Artificial Sequence
  Synthetic polypeptide
MGFNLTFHLSYKFRLLLLLTLCLTVVGWATSNYFVGAIQEIPKAKEFMANFHKTLILGKGKTLTNEASTKKVELDNCPSVSPYLRGQSKLIFKPDLTLEEVQAENPKVSRGRYRPQECKALQRVAILVPHRNREKHLMYLLEHLHPFLQRQQLDYGIYVIHQAEGKKFNRAKLLNVGYLEALKEENWDCFIFHDVDLVPENDFNLYKCEEHPKHLVVGRNSTGYRVPQS

SEQ ID NO: 3039 - protein, 229 aa, Artificial Sequence; identical to SEQ ID NO: 3038
  Synthetic polypeptide

SEQ ID NO: 3040 - protein, 229 aa, Artificial Sequence; identical to SEQ ID NO: 3038
  Synthetic polypeptide

SEQ ID NO: 3041 - protein, 229 aa, Artificial Sequence; identical to SEQ ID NO: 3038
  Synthetic polypeptide

SEQ ID NO: 3042 - protein, 229 aa, Artificial Sequence; identical to SEQ ID NO: 3038
  Synthetic polypeptide

SEQ ID NO: 3043 - protein, 170 aa, Artificial Sequence
  Synthetic polypeptide
MEEAGAAVVTAGEAELNWSRLSVSTETLESELEARGEERRGAREALLRLLLPHNRLVSLPRALGSGFPHLQLLDVSGNALTALGPELLALRGLRTLLAKNNRLGGPSALPKGLAQSPLCRSLQVLNLSGNCFQEVPASLLELRALQTLSLGGNQLQSIPAEIENLQSFLF

SEQ ID NO: 3044 - protein, 14 aa, Artificial Sequence
  Synthetic polypeptide
MGSLSGLRLAAASQ

SEQ ID NO: 3045 - protein, 14 aa, Artificial Sequence
  Synthetic polypeptide
MGSLSGLRLAAASQ

SEQ ID NO: 3046 - protein, 188 aa, Artificial Sequence
  Synthetic polypeptide
MPCGFSPSPVAHHLVPGPPDTPAQQLRCGWTVGGWLLSLVRGLLPCLPPGARTAEGPIMVLAGPLAVSLLLPSLTLLVSHLSSSQDVSSEPSSEQQLCALSKHPTVAFEDLQPWVSNFTYPGARDFSQLALDPSGNQLIVGARNYLFRLSLANVSLLQEDTGDVFHQNKRINQERGKHAIRKAGEERR

SEQ ID NO: 3047 - protein, 188 aa, Artificial Sequence; identical to SEQ ID NO: 3046
  Synthetic polypeptide

SEQ ID NO: 3048 - protein, 188 aa, Artificial Sequence; identical to SEQ ID NO: 3046
  Synthetic polypeptide

SEQ ID NO: 3049 - protein, 188 aa, Artificial Sequence; identical to SEQ ID NO: 3046
  Synthetic polypeptide

SEQ ID NO: 3050 - protein, 242 aa, Artificial Sequence
  Synthetic polypeptide
MLHLSAEEAIGCVRVRRSFIDELAFGRGHSTGTGKQKRRDRVSGSSWCLACVSWMPCGFSPSPVAHHLVPGPPDTPAQQLRCGWTVGGWLLSLVRGLLPCLPPGARTAEGPIMVLAGPLAVSLLLPSLTLLVSHLSSSQDVSSEPSSEQQLCALSKHPTVAFEDLQPWVSNFTYPGARDFSQLALDPSGNQLIVGARNYLFRLSLANVSLLQEDTGDVFHQNKRINQERGKHAIRKAGEERR

SEQ ID NO: 3051 - protein, 470 aa, Artificial Sequence
  Synthetic polypeptide
MTMVDTEMPFWPTNFGISSVDLSVMEDHSHSFDIKPFTTVDFSSISTPHYEDIPFTRTDPVVADYKYDLKLQEYQSAIKVEPASPPYYSEKTQLYNKPHEEPSNSLMAIECRVCGDKASGFHYGVHACEGCKGFFRRTIRLKLIYDRCDLNCRIHKKSRNKCQYCRFQKCLAVGMSHNAIRFGRMPQAEKEKLLAEISSDIDQLNPESADLRALAKHLYDSYIKSFPLTKAKARAILTGKTTDKSPFVIYDMNSLMMGEDKIKFKHITPLQEQSKEVAIRIFQGCQFRSVEAVQEITEYAKSIPGFVNLDLNDQVTLLKYGVHEIIYTMLASLMNKDGVLISEGQGFMTREFLKSLRKPFGDFMEPKFEFAVKFNALELDDSDLAIFIAVIILSGEEEAPGACTHREEGPVRTQREDSCLQAQERALPRDQPCCHLDLGLPASRTVRKLISVFEGPQAVAFCYGSRSSQV

SEQ ID NO: 3052 - protein, 470 aa, Artificial Sequence; identical to SEQ ID NO: 3051
  Synthetic polypeptide

SEQ ID NO: 3053 - protein, 470 aa, Artificial Sequence; identical to SEQ ID NO: 3051
  Synthetic polypeptide

SEQ ID NO: 3054 - protein, 470 aa, Artificial Sequence; identical to SEQ ID NO: 3051
  Synthetic polypeptide

SEQ ID NO: 3055 - protein, 476 aa, Artificial Sequence
  Synthetic polypeptide
MKGFSEMTMVDTEMPFWPTNFGISSVDLSVMEDHSHSFDIKPFTTVDFSSISTPHYEDIPFTRTDPVVADYKYDLKLQEYQSAIKVEPASPPYYSEKTQLYNKPHEEPSNSLMAIECRVCGDKASGFHYGVHACEGCKGFFRRTIRLKLIYDRCDLNCRIHKKSRNKCQYCRFQKCLAVGMSHNAIRFGRMPQAEKEKLLAEISSDIDQLNPESADLRALAKHLYDSYIKSFPLTKAKARAILTGKTTDKSPFVIYDMNSLMMGEDKIKFKHITPLQEQSKEVAIRIFQGCQFRSVEAVQEITEYAKSIPGFVNLDLNDQVTLLKYGVHEIIYTMLASLMNKDGVLISEGQGFMTREFLKSLRKPFGDFMEPKFEFAVKFNALELDDSDLAIFIAVIILSGEEEAPGACTHREEGPVRTQREDSCLQAQERALPRDQPCCHLDLGLPASRTVRKLISVFEGPQAVAFCYGSRSSQV

SEQ ID NO: 3056 - protein, 498 aa, Artificial Sequence
  Synthetic polypeptide
MGETLGDSPIDPESDSFTDTLSANISQEMTMVDTEMPFWPTNFGISSVDLSVMEDHSHSFDIKPFTTVDFSSISTPHYEDIPFTRTDPVVADYKYDLKLQEYQSAIKVEPASPPYYSEKTQLYNKPHEEPSNSLMAIECRVCGDKASGFHYGVHACEGCKGFFRRTIRLKLIYDRCDLNCRIHKKSRNKCQYCRFQKCLAVGMSHNAIRFGRMPQAEKEKLLAEISSDIDQLNPESADLRALAKHLYDSYIKSFPLTKAKARAILTGKTTDKSPFVIYDMNSLMMGEDKIKFKHITPLQEQSKEVAIRIFQGCQFRSVEAVQEITEYAKSIPGFVNLDLNDQVTLLKYGVHEIIYTMLASLMNKDGVLISEGQGFMTREFLKSLRKPFGDFMEPKFEFAVKFNALELDDSDLAIFIAVIILSGEEEAPGACTHREEGPVRTQREDSCLQAQERALPRDQPCCHLDLGLPASRTVRKLISVFEGPQAVAFCYGSRSSQV

SEQ ID NO: 3057 - protein, 92 aa, Artificial Sequence
  Synthetic polypeptide
MRRAAAGGLAVGQLPGEGPAGEEGAALGKAMRGGGCSPHSPSGCLSGVMAGFNMGGDLREPAASIPPGSLAAVGISKKLLCPSLGRCEEAKR

SEQ ID NO: 3058 - protein, 291 aa, Artificial Sequence
  Synthetic polypeptide
MTQMSQVQELFHEAAQQDALAQPQPWWKTQLFMWEPVLFGTWDGVFTSCMINIFGVVLFLRTGWLVGNTGVLLGMFLVSFVILVALVTVLSGIGVGERSSIGSGGVYSMISSVLGGQTGGTIGLLYVFGQCVAGAMYITGFAESISDLLGLGNIWAVRGISVAVLLALLGINLAGVKWIIRLQLLLLFLLAVSTLDFVVGSFTHLDPEHGFIGYSPELLQNNTLPDYSPGESFFTVFGVFFPAATGVMAGFNMGGDLREPAASIPPGSLAAVGISKKLLCPSLGRCEEAKR

SEQ ID NO: 3059 - protein, 291 aa, Artificial Sequence; identical to SEQ ID NO: 3058
  Synthetic polypeptide

SEQ ID NO: 3060 - protein, 320 aa, Artificial Sequence
  Synthetic polypeptide
MLPLERTITYRDMSSFIQVKNHFNVVNVTCVSYRSTCFRDMRRFILDALAQPQPWWKTQLFMWEPVLFGTWDGVFTSCMINIFGVVLFLRTGWLVGNTGVLLGMFLVSFVILVALVTVLSGIGVGERSSIGSGGVYSMISSVLGGQTGGTIGLLYVFGQCVAGAMYITGFAESISDLLGLGNIWAVRGISVAVLLALLGINLAGVKWIIRLQLLLLFLLAVSTLDFVVGSFTHLDPEHGFIGYSPELLQNNTLPDYSPGESFFTVFGVFFPAATGVMAGFNMGGDLREPAASIPPGSLAAVGISKKLLCPSLGRCEEAKR

SEQ ID NO: 3061 - protein, 44 aa, Artificial Sequence
  Synthetic polypeptide
MAGFNMGGDLREPAASIPPGSLAAVGISKKLLCPSLGRCEEAKR

SEQ ID NO: 3062 - protein, 173 aa, Artificial Sequence
  Synthetic polypeptide
MGWCVHILHDQHLWGCALPEDWLAGGKHRSAPGHVPGVLRHPGGPRHGAVWHWRRGAQQHRQRWRLLHDLLGPGWADGRHHRAALCVWTEHGFIGYSPELLQNNTLPDYSPGESFFTVFGVFFPAATGVMAGFNMGGDLREPAASIPPGSLAAVGISKKLLCPSLGRCEEAKR

SEQ ID NO: 3063 - protein, 570 aa, Artificial Sequence
  Synthetic polypeptide
MQGGEPVSTMKVSESEGKLEGQATAVTPNKNSSCGGGISSSSSSRGGSAKGWQYSDHMENVYGYLMKYTNLVTGWQYRFFVLNNEAGLLEYFVNEQSRNQKPRGTLQLAGAVISPSDEDSHTFTVNAASGEQYKLRATDAKERQHWVSRLQICTQHHTEAIGKNNPPLKSRSFSLASSSNSPISQRRPSQNAISFFNVGHSKLQSLSKRTNLPPDHLVEVREMMSHAEGQQRDLIRRIECLPTSGHLSSLDQDLLMLKATSMATMNCLNDCFHILQLQHASHQKGSLPSGTTIEWLEPKISLSNHYKNGADQPFATDQSKPVAVPEEQPVAESGLLAREPEEINADDEIEDTCDHKEDDLGAVEEQRSVILHLLSQLKLGMDLTRVVLPTFILEKRSLLEMYADFMSHPDLFIAITNGATAEDRMIRFVEYYLTSFHEGRKGAIAKKPYNPIIGETFHCSWKMPKSEVASSVFSSSSTQGVTNHAPLSGESLTQVGSDCYTVRFVAEQVSHHPPVSGFYAECTERKMCVNAHVWTKSKFLGMSIGVTMVGEGTWETEVAGSLELRKLRQQ

SEQ ID NO: 3064 - protein, 856 aa, Artificial Sequence
  Synthetic polypeptide
MAGPSNPPATMKIAVIGQSLFGQEVYCHLRKEGHEVVGVFTVPDKDGKADPLGLEAEKDGVPVFKYSRWRAKGQALPDVVAKYQALGAELNVLPFCSQFIPMEIISAPRHGSIIYHPSLLPRHRGASAINWTLIHGDKKGGFSIFWADDGLDTGDLLLQKECEVLPDDTVSTLYNRFLFPEGIKGMVQAVRLIAEGKAPRLPQPEEGATYEGIQKKETAKINWDQPAEAIHNWIRGNDKVPGAWTEACEQKLTFFNSTLNTSGLVPEGDALPIPGAHRPGVVTKAGLILFGNDDKMLLVKNIQLEDGKMILASNFFKGAASSVLELTEAELVTAEAVRSVWQRILPKVLEVEDSTDFFKSGAASVDVVRLVEEVKELCDGLELENEDVYMASTFGDFIQLLVRKLRGDDEEGECSIDYVEMAVNKRTVRMPHQLFIGGEFVDAEGAKTSETINPTDGSVICQVSLAQVTDVDKAVAAAKDAFENGRWGKISARDRGRLMYRLADLMEQHQEELATIEALDAGAVYTLALKTHVGMSIQTFRYFAGWCDKIQGSTIPINQARPNRNLTLTRKEPVGVCGIIIPWNYPLMMLSWKTAACLAAGNTVVIKPAQVTPLTALKFAELTLKAGIPKGVVNVLPGSGSLVGQRLSDHPDVRKIGFTGSTEVGKHIMKSCAISNVKKVSLELGGKSPLIIFADCDLNKAVQMGMSSVFFNKGENCIAAGRLFVEDSIHDEFVRRVVEEVRKMKVGNPLDRDTDHGPQNHHAHLVKLMEYCQHGVKEGATLVCGGNQVPRPGASLPILSLEHLSWGTFCPQDLSPAAAQTLPDTGLQAPPHPELLTAQPAALDTSTWMSPRPFKL

SEQ ID NO: 3065 - protein, 846 aa, Artificial Sequence
  Synthetic polypeptide
MKIAVIGQSLFGQEVYCHLRKEGHEVVGVFTVPDKDGKADPLGLEAEKDGVPVFKYSRWRAKGQALPDVVAKYQALGAELNVLPFCSQFIPMEIISAPRHGSIIYHPSLLPRHRGASAINWTLIHGDKKGGFSIFWADDGLDTGDLLLQKECEVLPDDTVSTLYNRFLFPEGIKGMVQAVRLIAEGKAPRLPQPEEGATYEGIQKKETAKINWDQPAEAIHNWIRGNDKVPGAWTEACEQKLTFFNSTLNTSGLVPEGDALPIPGAHRPGVVTKAGLILFGNDDKMLLVKNIQLEDGKMILASNFFKGAASSVLELTEAELVTAEAVRSVWQRILPKVLEVEDSTDFFKSGAASVDVVRLVEEVKELCDGLELENEDVYMASTFGDFIQLLVRKLRGDDEEGECSIDYVEMAVNKRTVRMPHQLFIGGEFVDAEGAKTSETINPTDGSVICQVSLAQVTDVDKAVAAAKDAFENGRWGKISARDRGRLMYRLADLMEQHQEELATIEALDAGAVYTLALKTHVGMSIQTFRYFAGWCDKIQGSTIPINQARPNRNLTLTRKEPVGVCGIIIPWNYPLMMLSWKTAACLAAGNTVVIKPAQVTPLTALKFAELTLKAGIPKGVVNVLPGSGSLVGQRLSDHPDVRKIGFTGSTEVGKHIMKSCAISNVKKVSLELGGKSPLIIFADCDLNKAVQMGMSSVFFNKGENCIAAGRLFVEDSIHDEFVRRVVEEVRKMKVGNPLDRDTDHGPQNHHAHLVKLMEYCQHGVKEGATLVCGGNQVPRPGASLPILSLEHLSWGTFCPQDLSPAAAQTLPDTGLQAPPHPELLTAQPAALDTSTWMSPRPFKL

SEQ ID NO: 3066 - protein, 846 aa, Artificial Sequence; identical to SEQ ID NO: 3065
  Synthetic polypeptide

SEQ ID NO: 3067 - protein, 745 aa, Artificial Sequence
  Synthetic polypeptide
MKIAVIGQSLFGQEVYCHLRKEGHEVVGVFTVPDKDGKADPLGLEAEKDGVPVFKYSRWRAKGQALPDVVAKYQALGAELNVLPFCSQFIPMEIISAPRHGSIIYHPSLLPRHRGASAIHNWIRGNDKVPGAWTEACEQKLTFFNSTLNTSGLVPEGDALPIPGAHRPGVVTKAGLILFGNDDKMLLVKNIQLEDGKMILASNFFKGAASSVLELTEAELVTAEAVRSVWQRILPKVLEVEDSTDFFKSGAASVDVVRLVEEVKELCDGLELENEDVYMASTFGDFIQLLVRKLRGDDEEGECSIDYVEMAVNKRTVRMPHQLFIGGEFVDAEGAKTSETINPTDGSVICQVSLAQVTDVDKAVAAAKDAFENGRWGKISARDRGRLMYRLADLMEQHQEELATIEALDAGAVYTLALKTHVGMSIQTFRYFAGWCDKIQGSTIPINQARPNRNLTLTRKEPVGVCGIIIPWNYPLMMLSWKTAACLAAGNTVVIKPAQVTPLTALKFAELTLKAGIPKGVVNVLPGSGSLVGQRLSDHPDVRKIGFTGSTEVGKHIMKSCAISNVKKVSLELGGKSPLIIFADCDLNKAVQMGMSSVFFNKGENCIAAGRLFVEDSIHDEFVRRVVEEVRKMKVGNPLDRDTDHGPQNHHAHLVKLMEYCQHGVKEGATLVCGGNQVPRPGASLPILSLEHLSWGTFCPQDLSPAAAQTLPDTGLQAPPHPELLTAQPAALDTSTWMSPRPFKL

SEQ ID NO: 3068 - protein, 240 aa, Artificial Sequence
  Synthetic polypeptide
MCGRTSCHLPRDVLTRACAYQDRRGQQRLPEWRDPDKYCPSYNKSPQSNSPVLLSRLHFEKVPLGKGRRCVVLADGFYEWQRCQGTNQRQPYFIYFPQIKTEKSGSIGAADSPENWEKVWDNWRLLTMAGIFDCWEPPEGGDVLYSYTIITVDSCKGLSDIHHRMPAILDGEEAVSKWLDFGEVSTQEALKLIHPTENITFHAVSSVVNNSRNNTPECLAPVDLVVKKGGPGGRFSSDLE

SEQ ID NO: 3069 - protein, 288 aa, Artificial Sequence
  Synthetic polypeptide
MCGRTSCHLPRDVLTRACAYQDRRGQQRLPEWRDPDKYCPSYNKSPQSNSPVLLSRLHFEKDADSSERIIAPMRWGLVPSWFKESDPSKLQFNTTNCRSDTVMEKRSFKVPLGKGRRCVVLADGFYEWQRCQGTNQRQPYFIYFPQIKTEKSGSIGAADSPENWEKVWDNWRLLTMAGIFDCWEPPEGGDVLYSYTIITVDSCKGLSDIHHRMPAILDGEEAVSKWLDFGEVSTQEALKLIHPTENITFHAVSSVVNNSRNNTPECLAPVDLVVKKGGPGGRFSSDLE

SEQ ID NO: 3070 - protein, 288 aa, Artificial Sequence; identical to SEQ ID NO: 3069
  Synthetic polypeptide

SEQ ID NO: 3071 - protein, 288 aa, Artificial Sequence; identical to SEQ ID NO: 3069
  Synthetic polypeptide

SEQ ID NO: 3072 - protein, 246 aa, Artificial Sequence
  Synthetic polypeptide
MCGRTSCHLPRDVLTRACAYQDRRGQQRLPEWRDPDKYCPSYNKSPQSNSPVLLSRLHFEKDADSSERIIAPMRWGLVPSWFKESDPSKLQFNTTNCRSDTVMEKRSFKSGSIGAADSPENWEKVWDNWRLLTMAGIFDCWEPPEGGDVLYSYTIITVDSCKGLSDIHHRMPAILDGEEAVSKWLDFGEVSTQEALKLIHPTENITFHAVSSVVNNSRNNTPECLAPVDLVVKKGGPGGRFSSDLE

SEQ ID NO: 3073 - protein, 278 aa, Artificial Sequence
  Synthetic polypeptide
MRAAPLLLARAASLSLGFLFLLFFWLDRSVLAKELKFVTLVFRHGDRSPIDTFPTDPIKESSWPQGFGQLTQLGMEQHYELGEYIRKRYRKFLNESYKHEQVYIRSTDVDRTLMSAMTNLAALFPPEGVSIWNPILLWQPIPVHTVPLSEDQLLYLPFRNCPRFQELESETLKSEEFQKRLHPYKDFIATLGKLSGLHGQDLFGIWSKVYDPLYCESVHNFTLPSWATEDTMTKLRELSELSLLSLYGIHKQKEKSRLQGDSSLNHSCTSFHSAKWGY

SEQ ID NO: 3074 - protein, 278 aa, Artificial Sequence; identical to SEQ ID NO: 3073
  Synthetic polypeptide

SEQ ID NO: 3075 - protein, 245 aa, Artificial Sequence
  Synthetic polypeptide
MRAAPLLLARAASLSLGFLFLLFFWLDRSVLAKELKFVTLVFRHGDRSPIDTFPTDPIKESSWPQGFGQLTQLGMEQHYELGEYIRKRYRKFLNESYKHEQVYIRSTDVDRTLMSAMTNLAALFPPEGVSIWNPILLWQPIPVHTVPLSEDQDFIATLGKLSGLHGQDLFGIWSKVYDPLYCESVHNFTLPSWATEDTMTKLRELSELSLLSLYGIHKQKEKSRLQGDSSLNHSCTSFHSAKWGY

SEQ ID NO: 3076 - protein, 542 aa, Artificial Sequence
  Synthetic polypeptide
MKPGATGESDLAEVLPQHKFDSKSLEAYLNQHLSGFGAEREATLTIAQYRAGKSNPTFYLQKGFQTYVLRKKPPGSLLPKAHQIDREFKVQKALFSIGFPVPKPILYCSDTSVIGTEFYVMEHVQGRIFRDLTIPGLSPAERSAIYVATVETLAQLRSLNIQSLQLEGYGIGAGYCKRQVSTWTKQYQAAAHQDIPAMQQLSEWLMKNLPDNDNEENLIHGDFRLDNIVFHPKECRVIAVLDWELSTIGHPLSDLAHFSLFYFWPRTVPMINQGSYSENSGIPSMEELISIYCRCRGINSILPNWNFFLALSYFKMAGIAQGVYSRYLLGNNSSEDSFLFANIVQPLAETGLQLSKRTFSTVLPQIDTTGQLFVQTRKGQEVLIKVKHFMKQHILPAEKEVTEFYVQNENSVDKWGKPLVIDKLKEMAKVEGLWNLFLPAVSGLSHVDYALIAEETGKCFFAPDVFNCQAPDTGNMEVLHLYGSEEQKKQWLEPLLQGNITSCFCMTEPDVASSDATNIECSIQRDEDSYVINGKKWWSSGG

SEQ ID NO: 3077 - protein, 542 aa, Artificial Sequence; identical to SEQ ID NO: 3076
  Synthetic polypeptide

SEQ ID NO: 3078 - protein, 67 aa, Artificial Sequence
  Synthetic polypeptide
MEVLHLYGSEEQKKQWLEPLLQGNITSCFCMTEPDVASSDATNIECSIQRDEDSYVINGKKWWSSGG

SEQ ID NO: 3079 - protein, 100 aa, Artificial Sequence
  Synthetic polypeptide
GLSHVDYALIAEETGKCFFAPDVFNCQAPDTGNMEVLHLYGSEEQKKQWLEPLLQGNITSCFCMTEPDVASSDATNIECSIQRDEDSYVINGKKWWSSGG

SEQ ID NO: 3080 - protein, 695 aa, Artificial Sequence
  Synthetic polypeptide
METSLSLESGHHGSYRRGDRPGLAWTMVLLWEPAGAWLALGLALALGPSVAAAAPRQDCTGVECPPLENCIEEALEPGACCATCVQQGCACEGYQYYDCLQGGFVRGRVPAGQSYFVDFGSTECSCPPGGGKISCQFMLCPELPPNCIEAVVVADSCPQCGQVGCVHAGHKYAAGHTVHLPPCRACHCPDAGGELICYQLPGCHGNFSDAEEGDPERHYEDPYSYDQEVAEVEAATALGGEVQAGAVQAGAGGPPAALGGGSQPLSTIQAPPWPAVLPRPTAAAALGPPAPVQAKARRVTEDSEEEEEEEEEREEMAVTEQLAAGGHRGLDGLPTTAPAGPSLPIQEERAEAGARAEAGARPEENLILDAQATSRSTGPEGVTHAPSLGKAALVPTQAVPGSPRDPVKPSPHNILSTSLPDAAWIPPTREVPRKPQVLPHSHVEEDTDPNSVHSIPRSSPEGSTKDLIETCCAAGQQWAIDNDECLEIPESGTEDNVCRTAQRHCCVSYLQEKSCMAGVLGAKEGETCGAEDNDSCGISLYKQCCDCCGLGLRVRAEGQSCESNPNLGYPCNHVMLSCCEGEEPLIVPEVRRPPEPAAAPRRVSEAEMAGREALSLGTEAELPNSLPGDDQDECLLLPGELCQHLCINTVGSYHCACFPGFSLQDDGRTCRPVAEIDLSQGICTLQTSFSSPVKW

SEQ ID NO: 3081 - protein, 669 aa, Artificial Sequence
  Synthetic polypeptide
MVLLWEPAGAWLALGLALALGPSVAAAAPRQDCTGVECPPLENCIEEALEPGACCATCVQQGCACEGYQYYDCLQGGFVRGRVPAGQSYFVDFGSTECSCPPGGGKISCQFMLCPELPPNCIEAVVVADSCPQCGQVGCVHAGHKYAAGHTVHLPPCRACHCPDAGGELICYQLPGCHGNFSDAEEGDPERHYEDPYSYDQEVAEVEAATALGGEVQAGAVQAGAGGPPAALGGGSQPLSTIQAPPWPAVLPRPTAAAALGPPAPVQAKARRVTEDSEEEEEEEEEREEMAVTEQLAAGGHRGLDGLPTTAPAGPSLPIQEERAEAGARAEAGARPEENLILDAQATSRSTGPEGVTHAPSLGKAALVPTQAVPGSPRDPVKPSPHNILSTSLPDAAWIPPTREVPRKPQVLPHSHVEEDTDPNSVHSIPRSSPEGSTKDLIETCCAAGQQWAIDNDECLEIPESGTEDNVCRTAQRHCCVSYLQEKSCMAGVLGAKEGETCGAEDNDSCGISLYKQCCDCCGLGLRVRAEGQSCESNPNLGYPCNHVMLSCCEGEEPLIVPEVRRPPEPAAAPRRVSEAEMAGREALSLGTEAELPNSLPGDDQDECLLLPGELCQHLCINTVGSYHCACFPGFSLQDDGRTCRPVAEIDLSQGICTLQTSFSSPVKW

SEQ ID NO: 3082 - protein, 669 aa, Artificial Sequence; identical to SEQ ID NO: 3081
  Synthetic polypeptide

SEQ ID NO: 3083 - protein, 669 aa, Artificial Sequence; identical to SEQ ID NO: 3081
  Synthetic polypeptide

SEQ ID NO: 3084 - protein, 694 aa, Artificial Sequence
  Synthetic polypeptide
METSLSLESGHHGSYRRGDRPGLAWTMVLLWEPAGAWLALGLALALGPSVAAAAPRQDCTGVECPPLENCIEEALEPGACCATCVQQGCACEGYQYYDCLQGGFVRGRVPAGQSYFVDFGSTECSCPPGGGKISCQFMLCPELPPNCIEAVVVADSCPQCGQVGCVHAGHKYAAGHTVHLPPCRACHCPDAGGELICYQLPGCHGNFSDAEEGDPERHYEDPYSYDQEVAEVEAATALGGEVQAGAVQAGAGGPPAALGGGSQPLSTIQAPPWPAVLPRPTAAAALGPPAPVQAKARRVTEDSEEEEEEEEEREEMAVTEQLAAGGHRGLDGLPTTAPAGPSLPIQEERAEAGARAEAGARPEENLILDAQATSRSTGPEGVTHAPSLGKAALVPTQAVPGSPRDPVKPSPHNILSTSLPDAAWIPPTREVPRKPQVLPHSHVEEDTDPNSVHSIPRSSPEGSTKDLIETCCAAGQQWAIDNDECLEIPESGTEDNVCRTAQRHCCVSYLQEKSCMAGVLGAKEGETCGAEDNDSCGISLYKQCCDCCGLGLRVRAEGQSCESNPNLGYPCNHVMLSCCEGEEPLIVPEVRRPPEPAAAPRRVSEAEMAGREALSLGTEAELPNSLPGDDQDECLLLPGELCQHLCINTVGSYHCACFPGFSLQDDGRTCRPAEIDLSQGICTLQTSFSSPVKW

SEQ ID NO: 3085 - protein, 668 aa, Artificial Sequence
  Synthetic polypeptide
MVLLWEPAGAWLALGLALALGPSVAAAAPRQDCTGVECPPLENCIEEALEPGACCATCVQQGCACEGYQYYDCLQGGFVRGRVPAGQSYFVDFGSTECSCPPGGGKISCQFMLCPELPPNCIEAVVVADSCPQCGQVGCVHAGHKYAAGHTVHLPPCRACHCPDAGGELICYQLPGCHGNFSDAEEGDPERHYEDPYSYDQEVAEVEAATALGGEVQAGAVQAGAGGPPAALGGGSQPLSTIQAPPWPAVLPRPTAAAALGPPAPVQAKARRVTEDSEEEEEEEEEREEMAVTEQLAAGGHRGLDGLPTTAPAGPSLPIQEERAEAGARAEAGARPEENLILDAQATSRSTGPEGVTHAPSLGKAALVPTQAVPGSPRDPVKPSPHNILSTSLPDAAWIPPTREVPRKPQVLPHSHVEEDTDPNSVHSIPRSSPEGSTKDLIETCCAAGQQWAIDNDECLEIPESGTEDNVCRTAQRHCCVSYLQEKSCMAGVLGAKEGETCGAEDNDSCGISLYKQCCDCCGLGLRVRAEGQSCESNPNLGYPCNHVMLSCCEGEEPLIVPEVRRPPEPAAAPRRVSEAEMAGREALSLGTEAELPNSLPGDDQDECLLLPGELCQHLCINTVGSYHCACFPGFSLQDDGRTCRPAEIDLSQGICTLQTSFSSPVKW

SEQ ID NO: 3086 - protein, 668 aa, Artificial Sequence; identical to SEQ ID NO: 3085
  Synthetic polypeptide

SEQ ID NO: 3087 - protein, 668 aa, Artificial Sequence; identical to SEQ ID NO: 3085
  Synthetic polypeptide

SEQ ID NO: 3088 - protein, 17 aa, Artificial Sequence
  Synthetic polypeptide
MACLLETPIRMSVLSFF

SEQ ID NO: 3089 - protein, 17 aa, Artificial Sequence
  Synthetic polypeptide
MACLLETPIRMSVLSFF

SEQ ID NO: 3090 - protein, 17 aa, Artificial Sequence
  Synthetic polypeptide
MACLLETPIRMSVLSFF

SEQ ID NO: 3091 - protein, 17 aa, Artificial Sequence
  Synthetic polypeptide
MACLLETPIRMSVLSFF

SEQ ID NO: 3092 - protein, 17 aa, Artificial Sequence
  Synthetic polypeptide
MACLLETPIRMSVLSFF

SEQ ID NO: 3093 - protein, 17 aa, Artificial Sequence
  Synthetic polypeptide
MACLLETPIRMSVLSFF

SEQ ID NO: 3094 - protein, 17 aa, Artificial Sequence
  Synthetic polypeptide
MACLLETPIRMSVLSFF

SEQ ID NO: 3095 - protein, 7 aa, Artificial Sequence
  Synthetic polypeptide
MSVLSFF

SEQ ID NO: 3096 - protein, 166 aa, Artificial Sequence
  Synthetic polypeptide
MFPVAPKPQDSSQPSDRLMTEKQQEEAEWESINVLLMMHGLKPLSLVKRTDLKDLIIFDKQSSQRMRQNLKLLVEETSCQQNMIQELIETNQQLRNELQLEQSRAANQEQRANDLEQIMESVKSKIGELEDESLSRACHQQNKIKDLQKEQKTLQDKNLGLTEWRE

SEQ ID NO: 3097 - protein, 166 aa, Artificial Sequence; identical to SEQ ID NO: 3096
  Synthetic polypeptide

SEQ ID NO: 3098 - protein, 166 aa, Artificial Sequence; identical to SEQ ID NO: 3096
  Synthetic polypeptide

SEQ ID NO: 3099 - protein, 166 aa, Artificial Sequence; identical to SEQ ID NO: 3096
  Synthetic polypeptide

SEQ ID NO: 3100 - protein, 146 aa, Artificial Sequence
  Synthetic polypeptide
MTEQEEAEWESINVLLMMHGLKPLSLVKRTDLKDLIIFDKQSSQRMRQNLKLLVEETSCQQNMIQELIETNQQLRNELQLEQSRAANQEQRANDLEQIMESVKSKIGELEDESLSRACHQQNKIKDLQKEQKTLQDKNLGLTEWRE

SEQ ID NO: 3101 - protein, 146 aa, Artificial Sequence; identical to SEQ ID NO: 3100
  Synthetic polypeptide

SEQ ID NO: 3102 - protein, 148 aa, Artificial Sequence
  Synthetic polypeptide
MTEKQQEEAEWESINVLLMMHGLKPLSLVKRTDLKDLIIFDKQSSQRMRQNLKLLVEETSCQQNMIQELIETNQQLRNELQLEQSRAANQEQRANDLEQIMESVKSKIGELEDESLSRACHQQNKIKDLQKEQKTLQDKNLGLTEWRE

SEQ ID NO: 3103 - protein, 145 aa, Artificial Sequence
  Synthetic polypeptide
MTEEEAEWESINVLLMMHGLKPLSLVKRTDLKDLIIFDKQSSQRMRQNLKLLVEETSCQQNMIQELIETNQQLRNELQLEQSRAANQEQRANDLEQIMESVKSKIGELEDESLSRACHQQNKIKDLQKEQKTLQDKNLGLTEWRE

SEQ ID NO: 3104 - protein, 241 aa, Artificial Sequence
  Synthetic polypeptide
MTKNEKKSLNQSLAEWKLFIYNPTTGEFLGRTAKSWGLILLFYLVFYGFLAALFSFTMWVMLQTLNDEVPKYRDQIPSPGLMVFPKPVTALEYTFSRSDPTSYAGYIEDLKKFLKPYTLEEQKNLTVCPDGALFEQKGPVYVACQFPISLLQACSGMNDPDFGYSQGNPCILVKMNRIIGLKPEGVPRIDCVSKNEDIPNVAVYPHNGMIDLKYFPYYGKKLHDSVESTQQQRRFSPDAAP

SEQ ID NO: 3105 - protein, 494 aa, Artificial Sequence
  Synthetic polypeptide
MLLCYRHLKTKRILRRNLLALIHRMIEFVVREGPMFEAMIMNREINNPMFRFLFENQTPAHVYYRWKLYSILQGDSPTKWRTEDFRMFKNGSFWRPPPLNPYLHGMSEEQETEAFVEEPSKKGALKEEQRDKLEEILRGLTPRKNDIGDAMVFCLNNAEAAEEIVDCITESLSILKTPLPKKIARLYLVSDVLYNSSAKVANASYYRKFFETKLCQIFSDLNATYRTIQGHLQSENFKQRVMTCFRAWEDWAIYPEPFLIKLQNIFLGLVNIIEEKETEDVPDDLDGAPIEEELDGAPLEDVDGIPIDATPIDDLDGVPIKSLDDDLDGVPLDATEDSKKNEPIFKVAPSKWEAVDESELEAQAVTTSKWELFDQHEESEEEENQNQEEESEDEEDTQSSKSEEHHLYSNPIKEEMTESKFSKYSEMSEEKRAKLREIELKVMKFQDELESGKRPKKPGQSFQEQVEHYRDKLLQRVGQWGKSSDSRAWSQILT

SEQ ID NO: 3106 - protein, 903 aa, Artificial Sequence
  Synthetic polypeptide
MADKTPGGSQKASSKTRSSDVHSSGSSDAHMDASGPSDSDMPSRTRPKSPRKHNYRNESARESLCDSPHQNLSRPLLENKLKAFSIGKMSTAKRTLSKKEQEELKKKEDEKAAAEIYEEFLAAFEGSDGNKVKTFVRGGVVNAAKEEHETDEKRGKIYKPSSRFADQKNPPNQSSNERPPSLLVIETKKPPLKKGEKEKKKSNLELFKEELKQIQEERDERHKTKGRLSRFEPPQSDSDGQRRSMDAPSRRNRSSGVLDDYAPGSHDVGDPSTTNLYLGNINPQMNEEMLCQEFGRFGPLASVKIMWPRTDEERARERNCGFVAFMNRRDAERALKNLNGKMIMSFEMKLGWGKAVPIPPHPIYIPPSMMEHTLPPPPSGLPFNAQPRERLKNPNAPMLPPPKNKEDFEKTLSQAIVKVVIPTERNLLALIHRMIEFVVREGPMFEAMIMNREINNPMFRFLFENQTPAHVYYRWKLYSILQGDSPTKWRTEDFRMFKNGSFWRPPPLNPYLHGMSEEQETEAFVEEPSKKGALKEEQRDKLEEILRGLTPRKNDIGDAMVFCLNNAEAAEEIVDCITESLSILKTPLPKKIARLYLVSDVLYNSSAKVANASYYRKFFETKLCQIFSDLNATYRTIQGHLQSENFKQRVMTCFRAWEDWAIYPEPFLIKLQNIFLGLVNIIEEKETEDVPDDLDGAPIEEELDGAPLEDVDGIPIDATPIDDLDGVPIKSLDDDLDGVPLDATEDSKKNEPIFKVAPSKWEAVDESELEAQAVTTSKWELFDQHEESEEEENQNQEEESEDEEDTQSSKSEEHHLYSNPIKEEMTESKFSKYSEMSEEKRAKLREIELKVMKFQDELESGKRPKKPGQSFQEQVEHYRDKLLQRVGQWGKSSDSRAWSQILT

SEQ ID NO: 3107 - protein, 902 aa, Artificial Sequence
  Synthetic polypeptide
MADKTPGGSQKASSKTRSSDVHSSGSSDAHMDASGPSDSDMPSRTRPKSPRKHNYRNESARESLCDSPHQNLSRPLLENKLKAFSIGKMSTAKRTLSKKEQEELKKKEDEKAAAEIYEEFLAAFEGSDGNKVKTFVRGGVVNAAKEEHETDEKRGKIYKPSSRFADQKNPPNQSSNERPPSLLVIETKKPPLKKGEKEKKKSNLELFKEELKQIQEERDERHKTKGRLSRFEPPQSDSDGQRRSMDAPSRRNRSSVLDDYAPGSHDVGDPSTTNLYLGNINPQMNEEMLCQEFGRFGPLASVKIMWPRTDEERARERNCGFVAFMNRRDAERALKNLNGKMIMSFEMKLGWGKAVPIPPHPIYIPPSMMEHTLPPPPSGLPFNAQPRERLKNPNAPMLPPPKNKEDFEKTLSQAIVKVVIPTERNLLALIHRMIEFVVREGPMFEAMIMNREINNPMFRFLFENQTPAHVYYRWKLYSILQANSPTKWRTEDFRMFKNGSFWRPPPLNPYLHGMSEEQETEAFVEEPSKKGALKEEQRDKLEEILRGLTPRKNDIGDAMVFCLNNAEAAEEIVDCITESLSILKTPLPKKIARLYLVSDVLYNSSAKVANASYYRKFFETKLCQIFSDLNATYRTIQGHLQSENFKQRVMTCFRAWEDWAIYPEPFLIKLQNIFLGLVNIIEEKETEDVPDDLDGAPIEEELDGAPLEDVDGIPIDATPIDDLDGVPIKSLDDDLDGVPLDATEDSKKNEPIFKVAPSKWEAVDESELEAQAVTTSKWELFDQHEESEEEENQNQEEESEDEEDTQSSKSEEHHLYSNPIKEEMTESKFSKYSEMSEEKRAKLREIELKVMKFQDELESGKRPKKPGQSFQEQVEHYRDKLLQRVGQWGKSSDSRAWSQILT

SEQ ID NO: 3108 - protein, 470 aa, Artificial Sequence
  Synthetic polypeptide
MIEFVVREGPMFEAMIMNREINNPMFRFLFENQTPAHVYYRWKLYSILQGDSPTKWRTEDFRMFKNGSFWRPPPLNPYLHGMSEEQETEAFVEEPSKKGALKEEQRDKLEEILRGLTPRKNDIGDAMVFCLNNAEAAEEIVDCITESLSILKTPLPKKIARLYLVSDVLYNSSAKVANASYYRKFFETKLCQIFSDLNATYRTIQGHLQSENFKQRVMTCFRAWEDWAIYPEPFLIKLQNIFLGLVNIIEEKETEDVPDDLDGAPIEEELDGAPLEDVDGIPIDATPIDDLDGVPIKSLDDDLDGVPLDATEDSKKNEPIFKVAPSKWEAVDESELEAQAVTTSKWELFDQHEESEEEENQNQEEESEDEEDTQSSKSEEHHLYSNPIKEEMTESKFSKYSEMSEEKRAKLREIELKVMKFQDELESGKRPKKPGQSFQEQVEHYRDKLLQRVGQWGKSSDSRAWSQILT

SEQ ID NO: 3109 - protein, 1 aa, Artificial Sequence
  Synthetic peptide
Y

SEQ ID NO: 3110 - protein, 519 aa, Artificial Sequence
  Synthetic polypeptide
MATKEKLQCLKDFHKDILKPSPGKSPGTRPEDEAEGKPPQREKWSSKIDFVLSVAGGFVGLGNVWRFPYLCYKNGGGAFLIPYFIFLFGSGLPVFFLEIIIGQYTSEGGITCWEKICPLFSGIGYASVVIVSLLNVYYIVILAWATYYLFQSFQKELPWAHCNHSWNTPHCMEDTMRKNKSVWITISSTNFTSPVIEFWERNVLSLSPGIDHPGSLKWDLALCLLLVWLVCFFCIWKGVRSTGKVVYFTATFPFAMLLVLLVRGLTLPGAGAGIKFYLYPDITRLEDPQVWIDAGTQIFFSYAICLGAMTSLGSYNKYKYNSYRDCMLLGCLNSGTSFVSGFAIFSILGFMAQEQGVDIADVAESGPGLAFIAYPKAVTMMPLPTFWSILFFIMLLLLGLDSQFVEVEGQITSLVDLYPSFLRKGYRREIFIAFVCSISYLLGLTMVTEGGMYVFQLFDYYAASGVCLLWVAFFECFVIAWIYGGDNLYDGIEDMIGYRPGPWMKYSWAVITPVLCVET

SEQ ID NO: 3111 - protein, 519 aa, Artificial Sequence; identical to SEQ ID NO: 3110
  Synthetic polypeptide

SEQ ID NO: 3112 - protein, 372 aa, Artificial Sequence
  Synthetic polypeptide
MLENHILHKRIYILTFFSQQIFILCHAHFIFFFTVRDFCRQDEKCDYYFSVDADVVLTNPRTLKILIEQNRKIIAPLVTRHGKLWSNFWGALSPDGYYARSEDYVDIVQGNRVGVWNVPYMANVYLIKGKTLRSEMNERNYFVRDKLDPDMALCRNAREMTLQREKDSPTPETFQMLSPPKGVFMYISNRHEFGRLLSTANYNTSHYNNDLWQIFENPVDWKEKYINRDYSKIFTENIVEQPCPDVFWFPIFSEKACDELVEEMEHYGKWSGGKHHDSRISGGYENVPTDDIHMKQVDLENVWLHFIREFIAPVTLKVFAGYYTKGFALLNFVVKYSPERQRSLRPHHDASTFTINIALNNVGEDFQAITNA

SEQ ID NO: 3113 - protein, 712 aa, Artificial Sequence
  Synthetic polypeptide
MGGCTVKPQLLLLALVLHPWNPCLGADSEKPSSIPTDKLLVITVATKESDGFHRFMQSAKYFNYTVKVLGQGEEWRGGDGINSIGGGQKVRLMKEVMEHYADQDDLVVMFTECFDVIFAGGPEEVLKKFQKANHKVVFAADGILWPDKRLADKYPVVHIGKRYLNSGGFIGYAPYVNRIVQQWNLQDNDDDQLFYTKVYIDPLKREAINITLDHKCKIFQTLNGAVDEVVLKFENGKARAKNTFYETLPVAINGNGPTKILLNYFGNYVPNSWTQDNGCTLCEFDTVDLSAVDVHPNVSIGVFIEQPTPFLPRFLDILLTLDYPKEALKLFIHNKEVYHEKDIKVFFDKAKHEIKTIKIVGPEENLSQAEARNMGMDFCRQDEKCDYYFSVDADVVLTNPRTLKILIEQNRKIIAPLVTRHGKLWSNFWGALSPDGYYARSEDYVDIVQGNRVGVWNVPYMANVYLIKGKTLRSEMNERNYFVRDKLDPDMALCRNAREMTLQREKDSPTPETFQMLSPPKGVFMYISNRHEFGRLLSTANYNTSHYNNDLWQIFENPVDWKEKYINRDYSKIFTENIVEQPCPDVFWFPIFSEKACDELVEEMEHYGKWSGGKHHDSRISGGYENVPTDDIHMKQVDLENVWLHFIREFIAPVTLKVFAGYYTKGFALLNFVVKYSPERQRSLRPHHDASTFTINIALNNVGEDFQAITNA

SEQ ID NO: 3114 - protein, 691 aa, Artificial Sequence
  Synthetic polypeptide
MGGCTVKPQLLLLALVLHPWNPCLGADSEKPSSIPTDKLLVITVATKESDGFHRFMQSAKYFNYTVKVLGQGEEWRGGDGINSIGGGQKVRLMKEVMEHYADQDDLVVMFTECFDVIFAGGPEEVLKKFQKANHKVVFAADGILWPDKRLADKYPVVHIGKRYLNSGGFIGYAPYVNRIVQQWNLQDNDDDQLFYTKVYIDPLKREAINITLDHKCKIFQTLNGAVDEVVLKFENGKARAKNTFYETLPVAINGNGPTKILLNYFGNYVPNSWTQDNGCTLCEFDTVDLSAVDVHPNVSIGVFIEQPTPFLPRFLDILLTLDYPKEALKLFIHNKEVYHEKDIKVFFDKAKHEIKTIKIVGPEENLSQAEARNMGMDFCRQDEKCDYYFSVDADVVLTNPRTLKILIEQNRKIIAPLVTRHGKLWSNFWGALSPDGYYARSEDYVDIVQGNRVGVWNVPYMANVYLIKGKTLRSEMNERNYFVRDKLDPDMALCRNAREMGVFMYISNRHEFGRLLSTANYNTSHYNNDLWQIFENPVDWKEKYINRDYSKIFTENIVEQPCPDVFWFPIFSEKACDELVEEMEHYGKWSGGKHHDSRISGGYENVPTDDIHMKQVDLENVWLHFIREFIAPVTLKVFAGYYTKGFALLNFVVKYSPERQRSLRPHHDASTFTINIALNNVGEDFQAITNA

SEQ ID NO: 3115 - protein, 657 aa, Artificial Sequence
  Synthetic polypeptide
MQSAKYFNYTVKVLGQGEEWRGGDGINSIGGGQKVRLMKEVMEHYADQDDLVVMFTECFDVIFAGGPEEVLKKFQKANHKVVFAADGILWPDKRLADKYPVVHIGKRYLNSGGFIGYAPYVNRIVQQWNLQDNDDDQLFYTKVYIDPLKREAINITLDHKCKIFQTLNGAVDEVVLKFENGKARAKNTFYETLPVAINGNGPTKILLNYFGNYVPNSWTQDNGCTLCEFDTVDLSAVDVHPNVSIGVFIEQPTPFLPRFLDILLTLDYPKEALKLFIHNKEVYHEKDIKVFFDKAKHEIKTIKIVGPEENLSQAEARNMGMDFCRQDEKCDYYFSVDADVVLTNPRTLKILIEQNRKIIAPLVTRHGKLWSNFWGALSPDGYYARSEDYVDIVQGNRVGVWNVPYMANVYLIKGKTLRSEMNERNYFVRDKLDPDMALCRNAREMTLQREKDSPTPETFQMLSPPKGVFMYISNRHEFGRLLSTANYNTSHYNNDLWQIFENPVDWKEKYINRDYSKIFTENIVEQPCPDVFWFPIFSEKACDELVEEMEHYGKWSGGKHHDSRISGGYENVPTDDIHMKQVDLENVWLHFIREFIAPVTLKVFAGYYTKGFALLNFVVKYSPERQRSLRPHHDASTFTINIALNNVGEDFQAITNA

SEQ ID NO: 3116 - protein, 451 aa, Artificial Sequence
  Synthetic polypeptide
MLENHILHKRIYILTFFSQQIFILCHAHFIFFFTVRDFCRQDEKCDYYFSVDADVVLTNPRTLKILIEQNRKIIAPLVTRHGKLWSNFWGALSPDGYYARSEDYVDIVQGNRVGVWNVPYMANVYLIKGKTLRSEMNERNYFVRDKLDPDMALCRNAREMTLQREKDSPTPETFQMLSPPKGVFMYISNRHEFGRLLSTANYNTSHYNNDLWQIFENPVDWKEKYINRDYSKIFTENIVEQPCPDVFWFPIFSEKACDELVEEMEHYGKWSGGKHHDSRISGGYENVPTDDIHMKQVDLENVWLHFIREFIAPVTLKVFAGYYTKGFALLNFVVKYSPERQRSLRPHHDASTFTINIALNNVGEDFQTGNNKCLRGCGEKGPLHIGTTAVENVINYNHYGVQFGGSSKKLKMELPYDTAIPVLDIYPEEKEISVPKQYLHSCVCCSTVHNR

SEQ ID NO: 3117 - protein, 791 aa, Artificial Sequence
  Synthetic polypeptide
MGGCTVKPQLLLLALVLHPWNPCLGADSEKPSSIPTDKLLVITVATKESDGFHRFMQSAKYFNYTVKVLGQGEEWRGGDGINSIGGGQKVRLMKEVMEHYADQDDLVVMFTECFDVIFAGGPEEVLKKFQKANHKVVFAADGILWPDKRLADKYPVVHIGKRYLNSGGFIGYAPYVNRIVQQWNLQDNDDDQLFYTKVYIDPLKREAINITLDHKCKIFQTLNGAVDEVVLKFENGKARAKNTFYETLPVAINGNGPTKILLNYFGNYVPNSWTQDNGCTLCEFDTVDLSAVDVHPNVSIGVFIEQPTPFLPRFLDILLTLDYPKEALKLFIHNKEVYHEKDIKVFFDKAKHEIKTIKIVGPEENLSQAEARNMGMDFCRQDEKCDYYFSVDADVVLTNPRTLKILIEQNRKIIAPLVTRHGKLWSNFWGALSPDGYYARSEDYVDIVQGNRVGVWNVPYMANVYLIKGKTLRSEMNERNYFVRDKLDPDMALCRNAREMTLQREKDSPTPETFQMLSPPKGVFMYISNRHEFGRLLSTANYNTSHYNNDLWQIFENPVDWKEKYINRDYSKIFTENIVEQPCPDVFWFPIFSEKACDELVEEMEHYGKWSGGKHHDSRISGGYENVPTDDIHMKQVDLENVWLHFIREFIAPVTLKVFAGYYTKGFALLNFVVKYSPERQRSLRPHHDASTFTINIALNNVGEDFQTGNNKCLRGCGEKGPLHIGTTAVENVINYNHYGVQFGGSSKKLKMELPYDTAIPVLDIYPEEKEISVPKQYLHSCVCCSTVHNR

SEQ ID NO: 3118 - protein, 770 aa, Artificial Sequence
  Synthetic polypeptide
MGGCTVKPQLLLLALVLHPWNPCLGADSEKPSSIPTDKLLVITVATKESDGFHRFMQSAKYFNYTVKVLGQGEEWRGGDGINSIGGGQKVRLMKEVMEHYADQDDLVVMFTECFDVIFAGGPEEVLKKFQKANHKVVFAADGILWPDKRLADKYPVVHIGKRYLNSGGFIGYAPYVNRIVQQWNLQDNDDDQLFYTKVYIDPLKREAINITLDHKCKIFQTLNGAVDEVVLKFENGKARAKNTFYETLPVAINGNGPTKILLNYFGNYVPNSWTQDNGCTLCEFDTVDLSAVDVHPNVSIGVFIEQPTPFLPRFLDILLTLDYPKEALKLFIHNKEVYHEKDIKVFFDKAKHEIKTIKIVGPEENLSQAEARNMGMDFCRQDEKCDYYFSVDADVVLTNPRTLKILIEQNRKIIAPLVTRHGKLWSNFWGALSPDGYYARSEDYVDIVQGNRVGVWNVPYMANVYLIKGKTLRSEMNERNYFVRDKLDPDMALCRNAREMGVFMYISNRHEFGRLLSTANYNTSHYNNDLWQIFENPVDWKEKYINRDYSKIFTENIVEQPCPDVFWFPIFSEKACDELVEEMEHYGKWSGGKHHDSRISGGYENVPTDDIHMKQVDLENVWLHFIREFIAPVTLKVFAGYYTKGFALLNFVVKYSPERQRSLRPHHDASTFTINIALNNVGEDFQTGNNKCLRGCGEKGPLHIGTTAVENVINYNHYGVQFGGSSKKLKMELPYDTAIPVLDIYPEEKEISVPKQYLHSCVCCSTVHNR

SEQ ID NO: 3119 - protein, 736 aa, Artificial Sequence
  Synthetic polypeptide
MQSAKYFNYTVKVLGQGEEWRGGDGINSIGGGQKVRLMKEVMEHYADQDDLVVMFTECFDVIFAGGPEEVLKKFQKANHKVVFAADGILWPDKRLADKYPVVHIGKRYLNSGGFIGYAPYVNRIVQQWNLQDNDDDQLFYTKVYIDPLKREAINITLDHKCKIFQTLNGAVDEVVLKFENGKARAKNTFYETLPVAINGNGPTKILLNYFGNYVPNSWTQDNGCTLCEFDTVDLSAVDVHPNVSIGVFIEQPTPFLPRFLDILLTLDYPKEALKLFIHNKEVYHEKDIKVFFDKAKHEIKTIKIVGPEENLSQAEARNMGMDFCRQDEKCDYYFSVDADVVLTNPRTLKILIEQNRKIIAPLVTRHGKLWSNFWGALSPDGYYARSEDYVDIVQGNRVGVWNVPYMANVYLIKGKTLRSEMNERNYFVRDKLDPDMALCRNAREMTLQREKDSPTPETFQMLSPPKGVFMYISNRHEFGRLLSTANYNTSHYNNDLWQIFENPVDWKEKYINRDYSKIFTENIVEQPCPDVFWFPIFSEKACDELVEEMEHYGKWSGGKHHDSRISGGYENVPTDDIHMKQVDLENVWLHFIREFIAPVTLKVFAGYYTKGFALLNFVVKYSPERQRSLRPHHDASTFTINIALNNVGEDFQTGNNKCLRGCGEKGPLHIGTTAVENVINYNHYGVQFGGSSKKLKMELPYDTAIPVLDIYPEEKEISVPKQYLHSCVCCSTVHNR

SEQ ID NO: 3120 - protein, 386 aa, Artificial Sequence
  Synthetic polypeptide
MLALLVLVTVALASAHHGGEHFEGEKVFRVNVEDENHINIIRELASTTQIDFWKPDSVTQIKPHSTVDFRVKAEDTVTVENVLKQNELQYKVLISNLRNVVEAQFDSRVRATGHSYEKYNKWETIEAWTQQVATENPALISRSVIGTTFEGRAIYLLKVGKAGQNKPAIFMDCGFHAREWISPAFCQWFVREAVRTYGREIQVTELLDKLDFYVLPVLNIDGYIYTWTKSRFWRKTRSTHTGSSCIGTDPNRNFDAGWCEIGASRNPCDETYCGPAAESEKETKALADFIRNKLSSIKAYLTIHSYSQMMIYPYSYAYKLGENNAELMTFGNVWETSLVVITVELYWHLVSRGQGMLINILQCTEQPSHPQQIIQPKTSRVPRLRN

SEQ ID NO: 3121 - protein, 386 aa, Artificial Sequence; identical to SEQ ID NO: 3120
  Synthetic polypeptide

SEQ ID NO: 3122 - protein, 137 aa, Artificial Sequence
  Synthetic polypeptide
MCTGGCARCLGGTLIPLAFFGFLANILLFFPGGKVIDDNDHLSQEIWFFGGILGSGVLMIFPALVFLGLKNNDCCGCCGNEGCGKRFAMFTSTIFAVVGFLGAGYSFIISAISINKGPKCLMANSTWGYPFHDGLHL

SEQ ID NO: 3123 - protein, 165 aa, Artificial Sequence
  Synthetic polypeptide
MAPKGSSKQQSEEDLLLQDFSRNLSAKSSALFFGNAFIVSAIPIWLYWRIWHMDLIQSAVLYSVMTLVSTYLVAFAYKNVKFVLKHKVAQKREDAVSKEVTRKLSEADNRKMSRKEKDERILWKKNEVADYEATTFSIFYNNTLFLVVVIVASFFILKNFNPTVL

SEQ ID NO: 3124 - protein, 165 aa, Artificial Sequence; identical to SEQ ID NO: 3123
  Synthetic polypeptide

SEQ ID NO: 3125 - protein, 178 aa, Artificial Sequence
  Synthetic polypeptide
MAPKGSSKQQSEEDLLLQDFSRNLSAKSSALFFGNAFIVSAIPIWLYWRIWHMDLIQSAVLYSVMTLVSTYLVAFAYKNVKFVLKHKVAQKREDAVSKEVTRKLSEADNRKMSRKEKDERFDSCLKYGHHKRGILWKKNEVADYEATTFSIFYNNTLFLVVVIVASFFILKNFNPTVL

SEQ ID NO: 3126 - protein, 113 aa, Artificial Sequence
  Synthetic polypeptide
MDLIQSAVLYSVMTLVSTYLVAFAYKNVKFVLKHKVAQKREDAVSKEVTRKLSEADNRKMSRKEKDERILWKKNEVADYEATTFSIFYNNTLFLVVVIVASFFILKNFNPTVL

SEQ ID NO: 3127 - protein, 113 aa, Artificial Sequence; identical to SEQ ID NO: 3126
  Synthetic polypeptide

SEQ ID NO: 3128 - protein, 226 aa, Artificial Sequence
  Synthetic polypeptide
MLLRKRYRHRPCRLQFLLLLLMLGCVLMMVAMLHPPHHTLHQTVTAQASKHSPEARYRLDFGESQDWVLEAEDEGEEYSPLEGLPPFISLREDQLLVAVALPQARRNQSQGRRGGSYRLIKQPRRQDKEAPKRDWGADEDGEVSEEEELTPFSLDPRGLQEALSARIPLQRALPEVRHPLNQQHQHYLGAHQKCRISGPTPDLLDLSLHLMRSRMVQGHMDTGEAL

SEQ ID NO: 3129 - protein, 226 aa, Artificial Sequence; identical to SEQ ID NO: 3128
  Synthetic polypeptide

SEQ ID NO: 3130 - protein, 55 aa, Artificial Sequence
  Synthetic polypeptide
ALPEVRHPLNQQHQHYLGAHQKCRISGPTPDLLDLSLHLMRSRMVQGHMDTGEAL

SEQ ID NO: 3131 - protein, 289 aa, Artificial Sequence [sequence omitted]

SEQ ID NO: 3132 - protein, 4 aa, Artificial Sequence
  Synthetic polypeptide
IWTL

SEQ ID NO: 3133 - protein, 142 aa, Artificial Sequence
  Synthetic polypeptide
MAAASAVSVLLVAAERNRWHRLPSLLLPPRTWVWRQRTMKYTTATGRNITKVLIANRGEIACRVMRTAKKLGVQTVAVYSEADRNSMHVDMADEAYSIGPAPSQQSYLSMEKIIQVAKTSAAQAYRRKGLALSQTRCWTVDF

SEQ ID NO: 3134 - protein, 33 aa, Artificial Sequence
  Synthetic polypeptide
MEKIIQVAKTSAAQAYRRKGLALSQTRCWTVDF

SEQ ID NO: 3135 - protein, 104 aa, Artificial Sequence
  Synthetic polypeptide
MKYTTATGRNITKVLIANRGEIACRVMRTAKKLGVQTVAVYSEADRNSMHVDMADEAYSIGPAPSQQSYLSMEKIIQVAKTSAAQAYRRKGLALSQTRCWTVDF

SEQ ID NO: 3136 - protein, 95 aa, Artificial Sequence
  Synthetic polypeptide
MAAASAVSVLLVAAERNRWHRLPSLLLPPRTWVWRQRTMKYTTATDEAYSIGPAPSQQSYLSMEKIIQVAKTSAAQAYRRKGLALSQTRCWTVDF

SEQ ID NO: 3137 - protein, 321 aa, Artificial Sequence
  Synthetic polypeptide
MSGIKRTIKETDPDYEDVSVALPNKRHKAIENSARDAAVQKIETIIKEQFALEMKNKEHEIEVIDQRLIEARRMMDKLRACIVANYYASAGLLKVSEGSKTCDTMVFNHPAIKKFLESPSRSSSPANQRAETPSANHSESDSLSQHNDFLSDKDNNSNMDIEERLSNNMEQRPSRNTGRDTSRITGSHKTEQRNADLTDETSRLFVKKTIVVGNVSKYIPPDKREENDQSTHKWMVYVRGSRREPSINHFVKKVWFFLHPSYKPNDLVEVREPPFHLTRRGWGEFPVRVQVHFKDSQNKRIDIIHNLKEKRKSNCPCLQTT

SEQ ID NO: 3138 - protein, 114 aa, Artificial Sequence
  Synthetic polypeptide
MMNKLYIGNLSPAVTADDLRQLFGDRKLPLAGQVLLKSGYAFVDYPDQNWAIRAIETLSGKVELHGKIMEVDYSVSKKLRSRKIQIRNIPPHLQWEVLDGLLAQYGTVENVEQA

SEQ ID NO: 3139 - protein, 114 aa, Artificial Sequence; identical to SEQ ID NO: 3138
  Synthetic polypeptide

SEQ ID NO: 3140 - protein, 114 aa, Artificial Sequence; identical to SEQ ID NO: 3138
  Synthetic polypeptide

SEQ ID NO: 3141 - protein, 51 aa, Artificial Sequence
  Synthetic polypeptide
MFSCPGHYHVDGFLNPGSRKIQIRNIPPHLQWEVLDGLLAQYGTVENVEQA

SEQ ID NO: 3142 - protein, 167 aa, Artificial Sequence
  Synthetic polypeptide
MKSLVLLLCLAQLWGCHSAPHGPGLIYRQPNCDDPETEEAALVAIDYINQNLPWGYKHTLNQIDEVKVWPQQPSGELFEIEIDTLETTCHVLDPTPVARCSVRQLKEHAVEGDCDFQLLKLDGKFSVVYAKCDSSPGTWMKLETTILSKLSQGQKTKHRMFSLIGGS

SEQ ID NO: 3143 - protein, 167 aa, Artificial Sequence; identical to SEQ ID NO: 3142
  Synthetic polypeptide

SEQ ID NO: 3144 - protein, 194 aa, Artificial Sequence
  Synthetic polypeptide
MKSLVLLLCLAQLWGCHSAPHGPGLIYRQPNCDDPETEEAALVAIDYINQNLPWGYKHTLNQIDEVKVWPQQPSGELFEIEIDTLETTCHVLDPTPVARCSVRQLKEHAVEGDCDFQLLKLDGKFSVVYAKCDSSPDSAEDVRKVCQDCPLLAPLNDTRVVHAAKAALAAFNAQNNGSNFQLEEISRAQLVGHG

SEQ ID NO: 3145 - protein, 195 aa, Artificial Sequence
  Synthetic polypeptide
MKSLVLLLCLAQLWGCHSAPHGPGLIYRQPNCDDPETEEAALVAIDYINQNLPWGYKHTLNQIDEVKVWPQQPSGELFEIEIDTLETTCHVLDPTPVARCSVRQLKEHAVEGDCDFQLLKLDGKFSVVYAKCDSSPADSAEDVRKVCQDCPLLAPLNDTRVVHAAKAALAAFNAQNNGSNFQLEEISRAQLVGHG

SEQ ID NO: 3146 - protein, 251 aa, Artificial Sequence
  Synthetic polypeptide
MKSLVLLLCLAQLWGCHSAPHGPGLIYRQPNCDDPETEEAALVAIDYINQNLPWGYKHTLNQIDEVKVWPQQPSGELFEIEIDTLETTCHVLDPTPVARCSVRQLKEHAVEGDCDFQLLKLDGKFSVVYAKCDSSPDSAEDVRKVCQDCPLLAPLNDTRVVHAAKAALAAFNAQNNGSNFQLEEISRAQLVPLPPSTYVEFTVSGTDCVAKEATEAAKCNLLAEKLETTILSKLSQGQKTKHRMFSLIGGS

SEQ ID NO: 3147 - protein, 252 aa, Artificial Sequence
  Synthetic polypeptide
MKSLVLLLCLAQLWGCHSAPHGPGLIYRQPNCDDPETEEAALVAIDYINQNLPWGYKHTLNQIDEVKVWPQQPSGELFEIEIDTLETTCHVLDPTPVARCSVRQLKEHAVEGDCDFQLLKLDGKFSVVYAKCDSSPADSAEDVRKVCQDCPLLAPLNDTRVVHAAKAALAAFNAQNNGSNFQLEEISRAQLVPLPPSTYVEFTVSGTDCVAKEATEAAKCNLLAEKLETTILSKLSQGQKTKHRMFSLIGGS

SEQ ID NO: 3148 - protein, 256 aa, Artificial Sequence
  Synthetic polypeptide
MKSLVLLLCLAQLWGCHSAPHGPGLIYRQPNCDDPETEEAALVAIDYINQNLPWGYKHTLNQIDEVKVWPQQPSGELFEIEIDTLETTCHVLDPTPVARCSVRQLKEHAVEGDCDFQLLKLDGKFSVVYAKCDSSPDSAEDVRKVCQDCPLLAPLNDTRVVHAAKAALAAFNAQNNGSNFQLEEISRAQLVPLPPSTYVEFTVSGTDCVAKEATEAAKCNLLAEKQYGFCKATLSEKLGGAEVAVTCMVFQTQGHG

SEQ ID NO: 3149 - protein, 257 aa, Artificial Sequence
  Synthetic polypeptide
MKSLVLLLCLAQLWGCHSAPHGPGLIYRQPNCDDPETEEAALVAIDYINQNLPWGYKHTLNQIDEVKVWPQQPSGELFEIEIDTLETTCHVLDPTPVARCSVRQLKEHAVEGDCDFQLLKLDGKFSVVYAKCDSSPADSAEDVRKVCQDCPLLAPLNDTRVVHAAKAALAAFNAQNNGSNFQLEEISRAQLVPLPPSTYVEFTVSGTDCVAKEATEAAKCNLLAEKQYGFCKATLSEKLGGAEVAVTCMVFQTQGHG

SEQ ID NO: 3150 - protein, 1 aa, Artificial Sequence
  Synthetic peptide
H

SEQ ID NO: 3151 - protein, 193 aa, Artificial Sequence
  Synthetic polypeptide
MSTIGSFEGFQAVSLKQEGDDQPSETDHLSMEEEDPMPRQISRQSSVTESTLYPNPYHQPYISRKYFATRPGAIETAMEDLKGHVAETSGETIQGFWLLTKIDHWNNEKERILLVTDKTLLICKYDFIMLSCVQLQRIPLSAVYRICLGKFTFPGMSLDKAVPLHMLFCLPPCKTSLCSSFTFRYDYKASPAT

SEQ ID NO: 3152 - protein, 193 aa, Artificial Sequence; identical to SEQ ID NO: 3151
  Synthetic polypeptide

SEQ ID NO: 3153 - protein, 452 aa, Artificial Sequence
  Synthetic polypeptide
MNFETSRCATLQYCPDPYIQRFVETPAHFSWKESYYRSTMSQSTQTNEFLSPEVFQHIWDFLEQPICSVQPIDLNFVDEPSEDGATNKIEISMDCIRMQDSDLSDPMWPQYTNLGLLNSMDQQIQNGSSSTSPYNTDHAQNSVTAPSPYAQPSSTFDALSPSPAIPSNTDYPGPHSFDVSFQQSSTAKSATWTYSTELKKLYCQIAKTCPIQIKVMTPPPQGAVIRAMPVYKKAEHVTEVVKRCPNHELSREFNEGQIAPPSHLIRVEGNSHAQYVEDPITGRQSVLVPYEPPQVGTEFTTVLYNFMCNSSCVGGMNRRPILIIVTLETRDGQVLGRRCFEARICACPGRDRKADEDSIRKQQVSDSTKNGDGTKRPFRQNTHGIQMTSIKKRRSPDDELLYLPVRGRETYEMLLKIKESLELMQYLPQHTIETYRQQQQQQHQHLLQKQMV

SEQ ID NO: 3154 - protein, 452 aa, Artificial Sequence; identical to SEQ ID NO: 3153
  Synthetic polypeptide

SEQ ID NO: 3155 - protein, 452 aa, Artificial Sequence; identical to SEQ ID NO: 3153
  Synthetic polypeptide

SEQ ID NO: 3156 - protein, 452 aa, Artificial Sequence; identical to SEQ ID NO: 3153
  Synthetic polypeptide

SEQ ID NO: 3157 - protein, 367 aa, Artificial Sequence
  Synthetic polypeptide
MNFETSRCATLQYCPDPYIQRFVETPAHFSWKESYYRSTMSQSTQTNEFLSPEVFQHIWDFLEQPICSVQPIDLNFVDEPSEDGATNKIEISMDCIRMQDSDLSDPMWYSTELKKLYCQIAKTCPIQIKVMTPPPQGAVIRAMPVYKKAEHVTEVVKRCPNHELSREFNEGQIAPPSHLIRVEGNSHAQYVEDPITGRQSVLVPYEPPQVGTEFTTVLYNFMCNSSCVGGMNRRPILIIVTLETRDGQVLGRRCFEARICACPGRDRKADEDSIRKQQVSDSTKNGDGTKRPFRQNTHGIQMTSIKKRRSPDDELLYLPVRGRETYEMLLKIKESLELMQYLPQHTIETYRQQQQQQHQHLLQKQMV

SEQ ID NO: 3158 - protein, 448 aa, Artificial Sequence
  Synthetic polypeptide
MNFETSRCATLQYCPDPYIQRFVETPAHFSWKESYYRSTMSQSTQTNEFLSPEVFQHIWDFLEQPICSVQPIDLNFVDEPSEDGATNKIEISMDCIRMQDSDLSDPMWPQYTNLGLLNSMDQQIQNGSSSTSPYNTDHAQNSVTAPSPYAQPSSTFDALSPSPAIPSNTDYPGPHSFDVSFQQSSTAKSATWTYSTELKKLYCQIAKTCPIQIKVMTPPPQGAVIRAMPVYKKAEHVTEVVKRCPNHELSREFNEGQIAPPSHLIRVEGNSHAQYVEDPITGRQSVLVPYEPPQVGTEFTTVLYNFMCNSSCVGGMNRRPILIIVTLETRDGQVLGRRCFEARICACPGRDRKADEDSIRKQQVSDSTKNGDAFRQNTHGIQMTSIKKRRSPDDELLYLPVRGRETYEMLLKIKESLELMQYLPQHTIETYRQQQQQQHQHLLQKQMV

SEQ ID NO: 3159 - protein, 358 aa, Artificial Sequence
  Synthetic polypeptide
MLYLENNAQTQFSEPQYTNLGLLNSMDQQIQNGSSSTSPYNTDHAQNSVTAPSPYAQPSSTFDALSPSPAIPSNTDYPGPHSFDVSFQQSSTAKSATWTYSTELKKLYCQIAKTCPIQIKVMTPPPQGAVIRAMPVYKKAEHVTEVVKRCPNHELSREFNEGQIAPPSHLIRVEGNSHAQYVEDPITGRQSVLVPYEPPQVGTEFTTVLYNFMCNSSCVGGMNRRPILIIVTLETRDGQVLGRRCFEARICACPGRDRKADEDSIRKQQVSDSTKNGDGTKRPFRQNTHGIQMTSIKKRRSPDDELLYLPVRGRETYEMLLKIKESLELMQYLPQHTIETYRQQQQQQHQHLLQKQMV

SEQ ID NO: 3160 - protein, 358 aa, Artificial Sequence; identical to SEQ ID NO: 3159
  Synthetic polypeptide

SEQ ID NO: 3161 - protein, 358 aa, Artificial Sequence; identical to SEQ ID NO: 3159
  Synthetic polypeptide

SEQ ID NO: 3162 - protein, 358 aa, Artificial Sequence; identical to SEQ ID NO: 3159
  Synthetic polypeptide

SEQ ID NO: 3163 - protein, 273 aa, Artificial Sequence
  Synthetic polypeptide
MLYLENNAQTQFSEYSTELKKLYCQIAKTCPIQIKVMTPPPQGAVIRAMPVYKKAEHVTEVVKRCPNHELSREFNEGQIAPPSHLIRVEGNSHAQYVEDPITGRQSVLVPYEPPQVGTEFTTVLYNFMCNSSCVGGMNRRPILIIVTLETRDGQVLGRRCFEARICACPGRDRKADEDSIRKQQVSDSTKNGDGTKRPFRQNTHGIQMTSIKKRRSPDDELLYLPVRGRETYEMLLKIKESLELMQYLPQHTIETYRQQQQQQHQHLLQKQMV

SEQ ID NO: 3164 - protein, 354 aa, Artificial Sequence
  Synthetic polypeptide
MLYLENNAQTQFSEPQYTNLGLLNSMDQQIQNGSSSTSPYNTDHAQNSVTAPSPYAQPSSTFDALSPSPAIPSNTDYPGPHSFDVSFQQSSTAKSATWTYSTELKKLYCQIAKTCPIQIKVMTPPPQGAVIRAMPVYKKAEHVTEVVKRCPNHELSREFNEGQIAPPSHLIRVEGNSHAQYVEDPITGRQSVLVPYEPPQVGTEFTTVLYNFMCNSSCVGGMNRRPILIIVTLETRDGQVLGRRCFEARICACPGRDRKADEDSIRKQQVSDSTKNGDAFRQNTHGIQMTSIKKRRSPDDELLYLPVRGRETYEMLLKIKESLELMQYLPQHTIETYRQQQQQQHQHLLQKQMV

SEQ ID NO: 3165 - protein, 163 aa, Artificial Sequence
  Synthetic polypeptide
MANAGLQLLGFILAFLGWIGAIVSTALPQWRIYSYAGDNIVTAQAMYEGLWMSCVSQSTGQIQCKVFDSLLNLSSTLQATRALMVVGILLGVIAIFVATVGMKCMKCLEDDEVQKMRMAVIGGAIFLLAGQVWWFTPVIPALLEAEEGGSPEVVSSRPAWPTW

SEQ ID NO: 3166 - protein, 457 aa, Artificial Sequence
  Synthetic polypeptide
MGEAPSPAPALWDWDYLDRCFARHRVCISFGLWICASSCWIAAHALLLYLRCAQKPRQDQSALCAACCLLTSLCDTVGALLARQLTIQVFTGAYLAAIDLVNFMFILFPVCGSKFKSNSDREARERKRRRQLRASVFALALPLSLGPCWALWVAVPKASATIRGPQRRLLASLLQENTEILGYLLGSVAAFGSWASRIPPLSRIAPPPTLGITTQHEIWRGQMSKPSQSPSRSPSGHWRAAAQRQVLGTEMCRGKTFPSIHLWTRLLSALAGLLYASAIVAHDQHPEYLLRATPWFLTSLGRAALDLAIIFLSCVMKSKMRQALGFAKEARESPDTQALLTCAEKEEENQENLDWVPLTTLSHCKSLRTMTAISRYMELTIEPVQQAGCSATRLPGDGQTSAGDASLQDPPSYPPVQVIRARVSSGSSSEVSSINSDLETPHLMDQLAPPRWINWLI

SEQ ID NO: 3167 - protein, 410 aa, Artificial Sequence
  Synthetic polypeptide
MGEAPSPAPALWDWDYLDRCFARHRVCISFGLWICASSCWIAAHALLLYLRCAQKPRQDQSALCAACCLLTSLCDTVGALLARQLTIQVFTGAYLAAIDLVNFMFILFPVCGSKFKSNSDREARERKRRRQLRASVFALALPLSLGPCWALWVAVPKASATIRGPQRRLLASLLQENTEILGYLLGSVAAFGSWASRIPPLSRICRGKTFPSIHLWTRLLSALAGLLYASAIVAHDQHPEYLLRATPWFLTSLGRAALDLAIIFLSCVMKSKMRQALGFAKEARESPDTQALLTCAEKEEENQENLDWVPLTTLSHCKSLRTMTAISRYMELTIEPVQQAGCSATRLPGDGQTSAGDASLQDPPSYPPVQVIRARVSSGSSSEVSSINSDLETPHLMDQLAPPRWINWLI

SEQ ID NO: 3168 - protein, 410 aa, Artificial Sequence; identical to SEQ ID NO: 3167
  Synthetic polypeptide

SEQ ID NO: 3169 - protein, 410 aa, Artificial Sequence; identical to SEQ ID NO: 3167
  Synthetic polypeptide

SEQ ID NO: 3170 - protein, 168 aa, Artificial Sequence
  Synthetic polypeptide
MRATPWFLTSLGRAALDLAIIFLSCVMKSKMRQALGFAKEARESPDTQALLTCAEKEEENQENLDWVPLTTLSHCKSLRTMTAISRYMELTIEPVQQAGCSATRLPGDGQTSAGDASLQDPPSYPPVQVIRARVSSGSSSEVSSINSDLETPHLMDQLAPPRWINWLI

SEQ ID NO: 3171 - protein, 394 aa, Artificial Sequence
  Synthetic polypeptide
MGEAPSPAPALWDWDYLDRCFARHRVCISFGLWICASSCWIAAHALLLYLRCAQKPRQDQSALCAACCLLTSLCDTVGALLARQLTIQVFTGAYLAAIDLVNFMFILFPVCGSKFKSNSDREARERKRRRQLRASVFALALPLSLGPCWALWVAVPKASATIRGPQRRLLASLLQENTEILGYLLGSVAAFGSWASRIPPLSRICRGKTFPSIHLWTRLLSALAGLLYASAIVAHDQHPEYLLRATPWFLTSLGRAALDLAIIFLSCVMKSKMRQALGFAKEARESPDTQALLTCAEKEEENQENLDWVPLTTLSHCKSLRTMTAISRYMELTIEPVQQAAVPPGCQVTGRRAPEMRPCRTPRRTLPFRSSGPGCLPAAPLRSPPSTPTWRLHT

SEQ ID NO: 3172 - protein, 243 aa, Artificial Sequence
  Synthetic polypeptide
NFMFILFPVCGSKFKSNSDREARERKRRRQLRASVFALALPLSLGPCWALWVAVPKASATIRGPQRRLLASLLQENTEILGYLLGSVAAFGSWASRIPPLSRISKMRQALGFAKEARESPDTQALLTCAEKEEENQENLDWVPLTTLSHCKSLRTMTAISRYMELTIEPVQQAGCSATRLPGDGQTSAGDASLQDPPSYPPVQVIRARVSSGSSSEVSSINSDLETPHLMDQLAPPRWINWLI

SEQ ID NO: 3173 - protein, 68 aa, Artificial Sequence
  Synthetic polypeptide
TDHGHRNQGALPHQQGPSSFCPSDYNQQQPRDEQHLSQDHNLSEDHDEAPNSHAHDCPDEADHRRECR

SEQ ID NO: 3174 - protein, 791 aa, Artificial Sequence
  Synthetic polypeptide
MGCLWGLALPLFFFCWEVGVSGSSAGPSTRRADTAMTTDDTEVPAMTLAPGHAALETQTLSAETSSRASTPAGPIPEAETRGAKRISPARETRSFTKTSPNFMVLIATSVETSAASGSPEGAGMTTVQTITGSDPREAIFDTLCTDDSSEEAKTLTMDILTLAHTSTEAKGLSSESSASSDSPHPVITPSRASESSASSDGPHPVITPSRASESSASSDGPHPVITPSRASESSASSDGPHPVITPSRASESSASSDGPHPVITPSRASESSASSDGPHPVITPSRASESSASSDGPHPVITPSRASESSASSDGPHPVITPSRASESSASSDGPHPVITPSRASESSASSDGLHPVITPSRASESSASSDGPHPVITPSRASESSASSDGPHPVITPSWSPGSDVTLLAEALVTVTNIEVINCSITEIETTTSSIPGASDTDLIPTEGVKASSTSDPPALPDSTEAKPHITEVTASAETLSTAGTTESAAPDATVGTPLPTNSATEREVTAPGATTLSGALVTVSRNPLEETSALSVETPSYVKVSGAAPVSIEAGSAVGKTTSFAGSSASSYSPSEAALKNFTPSETPTMDIATKGPFPTSRDPLPSVPPTTTNSSRGTNSTLAKITTSAKTTMKPPTATPTTARTRPTTDVSAGENGGFLLLRLSVASPEDLTDPRVAERLMQQEILLALRPSNCAQNVAPPQHLQCYHRDGPRCHHLSPALLQVSLFPAQPPPQSSPSVSARAVFLQHKADHTTSLLQSSHFTQKKSSDNSCKAVHDLRPSPASLIC

SEQ ID NO: 3175 - protein, 791 aa, Artificial Sequence; identical to SEQ ID NO: 3174
  Synthetic polypeptide

SEQ ID NO: 3176 - protein, 620 aa, Artificial Sequence
  Synthetic polypeptide
MGCLWGLALPLFFFCWEVGVSGSSAGPSTRRADTAMTTDDTEVPAMTLAPGHAALETQTLSAETSSRASTPAGPIPEAETRGAKRISPARETRSFTKTSPNFMVLIATSVETSAASGSPEGAGMTTVQTITGSDPREAIFDTLCTDDSSEEAKTLTMDILTLAHTSTEAKGLSSESSASSDSPHPVITPSRASESSASSDGPHPVITPSRASESSASSDGPHPVITPSWSPGSDVTLLAEALVTVTNIEVINCSITEIETTTSSIPGASDTDLIPTEGVKASSTSDPPALPDSTEAKPHITEVTASAETLSTAGTTESAAPDATVGTPLPTNSATEREVTAPGATTLSGALVTVSRNPLEETSALSVETPSYVKVSGAAPVSIEAGSAVGKTTSFAGSSASSYSPSEAALKNFTPSETPTMDIATKGPFPTSRDPLPSVPPTTTNSSRGTNSTLAKITTSAKTTMKPPTATPTTARTRPTTDVSAGENGGFLLLRLSVASPEDLTDPRVAERLMQQEILLALRPSNCAQNVAPPQHLQCYHRDGPRCHHLSPALLQVSLFPAQPPPQSSPSVSARAVFLQHKADHTTSLLQSSHFTQKKSSDNSCKAVHDLRPSPASLIC

SEQ ID NO: 3177 - protein, 756 aa, Artificial Sequence
  Synthetic polypeptide
MTTDDTEVPAMTLAPGHAALETQTLSAETSSRASTPAGPIPEAETRGAKRISPARETRSFTKTSPNFMVLIATSVETSAASGSPEGAGMTTVQTITGSDPREAIFDTLCTDDSSEEAKTLTMDILTLAHTSTEAKGLSSESSASSDSPHPVITPSRASESSASSDGPHPVITPSRASESSASSDGPHPVITPSRASESSASSDGPHPVITPSRASESSASSDGPHPVITPSRASESSASSDGPHPVITPSRASESSASSDGPHPVITPSRASESSASSDGPHPVITPSRASESSASSDGPHPVITPSRASESSASSDGLHPVITPSRASESSASSDGPHPVITPSRASESSASSDGPHPVITPSWSPGSDVTLLAEALVTVTNIEVINCSITEIETTTSSIPGASDTDLIPTEGVKASSTSDPPALPDSTEAKPHITEVTASAETLSTAGTTESAAPDATVGTPLPTNSATEREVTAPGATTLSGALVTVSRNPLEETSALSVETPSYVKVSGAAPVSIEAGSAVGKTTSFAGSSASSYSPSEAALKNFTPSETPTMDIATKGPFPTSRDPLPSVPPTTTNSSRGTNSTLAKITTSAKTTMKPPTATPTTARTRPTTDVSAGENGGFLLLRLSVASPEDLTDPRVAERLMQQEILLALRPSNCAQNVAPPQHLQCYHRDGPRCHHLSPALLQVSLFPAQPPPQSSPSVSARAVFLQHKADHTTSLLQSSHFTQKKSSDNSCKAVHDLRPSPASLIC

SEQ ID NO: 3178 - protein, 272 aa, Artificial Sequence
  Synthetic polypeptide
MEPGRTQIKLDPRYTADLLEVLKTNYGIPSACFSQPPTAAQLLRALGPVELALTSILTLLALGSIAIFLEDAVYLYKNTLCPIKRRTLLWKSSAPTVVSVLCCFGLWIPRSLVLVEMTITSFYAVCFYLLMLVMVEGFGGKEAVLRTLRDTPMMVHTGPCCCCCPCCPRLLLTRKKLQLLMLGPFQYAFLKITLTLVGLFLVPDGIYDPADISEGSTALWINTFLGVSTLLALWTLGIISRQARLHLGEQNMGAKFALFQGFAVLAGLVSSS

SEQ ID NO: 3179 - protein, 31 aa, Artificial Sequence
  Synthetic polypeptide
QARLHLGEQNMGAKFALFQGFAVLAGLVSSS

SEQ ID NO: 3180 - protein, 200 aa, Artificial Sequence
  Synthetic polypeptide
MALPKDAIPSLSECQCGICMEILVEPVTLPCNHTLCKPCFQSTVEKASLCCPFCRRRVSSWTRYHTRRNSLVNVELWTIIQKHYPRECKLRASGQESEEVADDYQPVRLLSKPGELRREYEEEISKVAAERRASEEEENKASEEYIQRLLAEEEEEEKRQAEKRRRAMEEQLKSDEELARKLSIDIGAMARACNPSTLGS

SEQ ID NO: 3181 - protein, 114 aa, Artificial Sequence
  Synthetic polypeptide
MALPKDAIPSLSECQCGICMEILVEPVTLPCNHTLCKPCFQSTVEKASLCCPFCRRRVSSWTRYHTRRNSLVNVELWTIIQKHYPRECKLRASGQESEEVGEIWTQRQTRTEGR

SEQ ID NO: 3182 - protein, 114 aa, Artificial Sequence; identical to SEQ ID NO: 3181
  Synthetic polypeptide

SEQ ID NO: 3183 - protein, 18 aa, Artificial Sequence
  Synthetic polypeptide
MCSEIILRQEVLKDGFHS

SEQ ID NO: 3184 - protein, 18 aa, Artificial Sequence
  Synthetic polypeptide
MCSEIILRQEVLKDGFHS

SEQ ID NO: 3185 - protein, 18 aa, Artificial Sequence
  Synthetic polypeptide
MCSEIILRQEVLKDGFHS

SEQ ID NO: 3186 - protein, 18 aa, Artificial Sequence
  Synthetic polypeptide
MCSEIILRQEVLKDGFHS

SEQ ID NO: 3187 - protein, 18 aa, Artificial Sequence
  Synthetic polypeptide
MCSEIILRQEVLKDGFHS

SEQ ID NO: 3188 - protein, 59 aa, Artificial Sequence
  Synthetic polypeptide
MAARVAAVRAAAWLLLGAATGLTRGPAAAFTAARSDAGIRAMCSEIILRQEVLKDGFHS

SEQ ID NO: 3189 - protein, 59 aa, Artificial Sequence; identical to SEQ ID NO: 3188
  Synthetic polypeptide

SEQ ID NO: 3190 - protein, 50 aa, Artificial Sequence
  Synthetic polypeptide
AAAWLLLGAATGLTRGPAAAFTAARSDAGIRAMCSEIILRQEVLKDGFHS

SEQ ID NO: 3191 - protein, 50 aa, Artificial Sequence; identical to SEQ ID NO: 3190
  Synthetic polypeptide

SEQ ID NO: 3192 - protein, 118 aa, Artificial Sequence
  Synthetic polypeptide
MRGPSGALWLLLALRTVLGGMEVRWCATSDPEQHKCGNMSEAFREAGIQPSLLCVRGTSADHCVQLIAAQEADAITLDGGAIYEAGKEHGLKPVVGEVYDQDCIMGIVTPALSPRLNE

SEQ ID NO: 3193 - protein, 118 aa, Artificial Sequence; identical to SEQ ID NO: 3192
  Synthetic polypeptide

SEQ ID NO: 3194 - protein, 118 aa, Artificial Sequence; identical to SEQ ID NO: 3192
  Synthetic polypeptide

SEQ ID NO: 3195 - protein, 125 aa, Artificial Sequence
  Synthetic polypeptide
MGAYKYIQELWRKKQSDVMRFLLRVRCWQYRQLSALHRAPRPTRPDKARRLGYKAKQGYVIYRIRVRRGGRKRPVPKGATYGKPVHHGVNQLKFARSLQSVAEERAGRHCGALRVLNSYWVGVIL

SEQ ID NO: 3196 - protein, 125 aa, Artificial Sequence; identical to SEQ ID NO: 3195
  Synthetic polypeptide

SEQ ID NO: 3197 - protein, 125 aa, Artificial Sequence; identical to SEQ ID NO: 3195
  Synthetic polypeptide

SEQ ID NO: 3198 - protein, 125 aa, Artificial Sequence; identical to SEQ ID NO: 3195
  Synthetic polypeptide

SEQ ID NO: 3199 - protein, 125 aa, Artificial Sequence; identical to SEQ ID NO: 3195
  Synthetic polypeptide

SEQ ID NO: 3200 - protein, 125 aa, Artificial Sequence; identical to SEQ ID NO: 3195
  Synthetic polypeptide

SEQ ID NO: 3201 - protein, 125 aa, Artificial Sequence; identical to SEQ ID NO: 3195
  Synthetic polypeptide

SEQ ID NO: 3202 - protein, 125 aa, Artificial Sequence; identical to SEQ ID NO: 3195
  Synthetic polypeptide

SEQ ID NO: 3203 - protein, 125 aa, Artificial Sequence
  Synthetic polypeptide
MGAYKYIQELWRKKQSDVMRFLLRVRCWQYRQLSALHRAPRPTRPDKARRLGYKAKQGYVIYRIRVRRGGRKRPVPKGATYGKPVHHGVNQLKFARSLQSVAEVNAGRHCGALRVLNSYWVGVIL

SEQ ID NO: 3204 - protein, 82 aa, Artificial Sequence
  Synthetic polypeptide
MALDPADQHLRHVEKDVLIPKIMREKAKERCSEQVQDFTKCCKNSGVLMVVKCRKENSALKECLTAYSSFGLRLPSFLPGLF

SEQ ID NO: 3205 - protein, 52 aa, Artificial Sequence
  Synthetic polypeptide
MALDPADFTKCCKNSGVLMVVKCRKENSALKECLTAYSSFGLRLPSFLPGLF

SEQ ID NO: 3206 - protein, 4 aa, Artificial Sequence
  Synthetic polypeptide
QSKQ

SEQ ID NO: 3207 - protein, 86 aa, Artificial Sequence
  Synthetic polypeptide
MEEPQRARSHTVTTTASSFAENFSTSSSSFAYDREFLRTLPGFLIVAEILISLPITDPLHRSALSTTARDILVRCVMIFHFPLHLE

SEQ ID NO: 3208 - protein, 86 aa, Artificial Sequence; identical to SEQ ID NO: 3207
  Synthetic polypeptide

SEQ ID NO: 3209 - protein, 662 aa, Artificial Sequence
  Synthetic polypeptide
MEPRSMEYFCAQVQQKDVGGRLQVGQELLLYLGAPGAISDLEEDLGRLGKTVDALTGWVGSSNYRVSLMGLEILSAFVDRLSTRFKSYVAMVIVALIDRMGDAKDKVRDEAQTLILKLMDQVAPPMYIWEQLASGFKHKNFRSREGVCLCLIETLNIFGAQPLVISKLIPHLCILFGDSNSQVRDAAILAIVEIYRHVGEKVRMDLYKRGIPPARLEMIFAKFDEVQSSGGMILSVCKDKSFDDEESVDGNRPSSAASAFKVPAPKTSGNPANSARKPGSAGGPKVGAGASKEGGAGAVDEDDFIKAFTDVPSIQIYSSRELEETLNKIREILSDDKHDWDQRANALKKIRSLLVAGAAQYDCFFQHLRLLDGALKLSAKDLRSQVVREACITVAHLSTVLGNKFDHGAEAIVPTLFNLVPNSAKVMATSGCAAIRFIIRHTHVPRLIPLITSNCTSKSVPVRRRSFEFLDLLLQEWQTHSLERHAAVLVETIKKGIHDADAEARVEARKTYMGLRNHFPGEAETLYNSLEPSYQKSLQTYLKSSGSVASLPQSDRSSSSSQESLNRPFSSKWSTANPSTVAGRVSAGSSKASSLPGSLQRSRSDIDVNAAAGAKAHHAAGQSVRSGRLGAGALNAGSYASLEDTSDKLDGTASEDGIGVHT

SEQ ID NO: 3210 - protein, 661 aa, Artificial Sequence
  Synthetic polypeptide
MEPRSMEYFCAQVQQKDVGGRLQVGQELLLYLGAPGAISDLEEDLGRLGKTVDALTGWVGSSNYRVSLMGLEILSAFVDRLSTRFKSYVAMVIVALIDRMGDAKDKVRDEAQTLILKLMDQVAPPMYIWEQLASGFKHKNFRSREGVCLCLIETLNIFGAQPLVISKLIPHLCILFGDSNSQVRDAAILAIVEIYRHVGEKVRMDLYKRGIPPARLEMIFAKFDEVQSSGGMILSVCKDKSFDDEESVDGNRPSSAASAFKVPAPKTSGNPANSARKPGSAGGPKVGGASKEGGAGAVDEDDFIKAFTDVPSIQIYSSRELEETLNKIREILSDDKHDWDQRANALKKIRSLLVAGAAQYDCFFQHLRLLDGALKLSAKDLRSQVVREACITVAHLSTVLGNKFDHGAEAIVPTLFNLVPNSAKVMATSGCAAIRFIIRHTHVPRLIPLITSNCTSKSVPVRRRSFEFLDLLLQEWQTHSLERHAAVLVETIKKGIHDADAEARVEARKTYMGLRNHFPGEAETLYNSLEPSYQKSLQTYLKSSGSVASLPQSDRSSSSSQESLNRPFSSKWSTANPSTVAGRVSAGSSKASSLPGSLQRSRSDIDVNAAAGAKAHHAAGQSVRSGRLGAGALNAGSYASLEDTSDKLDGTASEDGIGVHT

SEQ ID NO: 3211 - protein, 661 aa, Artificial Sequence; identical to SEQ ID NO: 3210
  Synthetic polypeptide

SEQ ID NO: 3212 - protein, 150 aa, Artificial Sequence
  Synthetic polypeptide
MGLRNHFPGEAETLYNSLEPSYQKSLQTYLKSSGSVASLPQSDRSSSSSQESLNRPFSSKWSTANPSTVAGRVSAGSSKASSLPGSLQRSRSDIDVNAAAGAKAHHAAGQSVRSGRLGAGALNAGSYASLEDTSDKLDGTASEDGIGVHT

SEQ ID NO: 3213 - protein, 428 aa, Artificial Sequence
  Synthetic polypeptide
MAMGDDKSFDDEESVDGNRPSSAASAFKVPAPKTSGNPANSARKPGSAGGPKVGGASKEGGAGAVDEDDFIKAFTDVPSIQIYSSRELEETLNKIREILSDDKHDWDQRANALKKIRSLLVAGAAQYDCFFQHLRLLDGALKLSAKDLRSQVVREACITVAHLSTVLGNKFDHGAEAIVPTLFNLVPNSAKVMATSGCAAIRFIIRHTHVPRLIPLITSNCTSKSVPVRRRSFEFLDLLLQEWQTHSLERHAAVLVETIKKGIHDADAEARVEARKTYMGLRNHFPGEAETLYNSLEPSYQKSLQTYLKSSGSVASLPQSDRSSSSSQESLNRPFSSKWSTANPSTVAGRVSAGSSKASSLPGSLQRSRSDIDVNAAAGAKAHHAAGQSVRSGRLGAGALNAGSYASLEDTSDKLDGTASEDGIGVHT

SEQ ID NO: 3214 - protein, 428 aa, Artificial Sequence; identical to SEQ ID NO: 3213
  Synthetic polypeptide

SEQ ID NO: 3215 - protein, 100 aa, Artificial Sequence
  Synthetic polypeptide
MGRKLDLSGLTDDETEHVLQVVQRDFNLRKKEEERLRNMDEAGNHHSQQTVTRSENQTLHVLTHKWELNEEHMDTGRGTSHTGACRGVWGYGRDNIRRNT

SEQ ID NO: 3216 - protein, 100 aa, Artificial Sequence; identical to SEQ ID NO: 3215
  Synthetic polypeptide

SEQ ID NO: 3217 - protein, 100 aa, Artificial Sequence; identical to SEQ ID NO: 3215
  Synthetic polypeptide

SEQ ID NO: 3218 - protein, 100 aa, Artificial Sequence; identical to SEQ ID NO: 3215
  Synthetic polypeptide

SEQ ID NO: 3219 - protein, 100 aa, Artificial Sequence; identical to SEQ ID NO: 3215
  Synthetic polypeptide

SEQ ID NO: 3220 - protein, 634 aa, Artificial Sequence
  Synthetic polypeptide
MEPLLLGRGLIVYLMFLLLKFSKAIEIPSSVQQVPTIIKQSKVQVAFPFDEYFQIECEAKGNPEPTFSWTKDGNPFYFTDHRIIPSNNSGTFRIPNEGHISHFQGKYRCFASNKLGIAMSEEIEFIVPSVPKFPKEKIDPLEVEEGDPIVLPCNPPKGLPPLHIYWMNIELEHIEQDERVYMSQKGDLYFANVEEKDSRNDYCCFAAFPRLRTIVQKMPMKLTVNSLKHANDSSSSTEIGSKANSIKQRKPKLLLPPTESGSESSITILKGEILLLECFAEGLPTPQVDWNKIGGDLPKGRETKENYGKTLKIENVSYQDKGNYRCTASNFLGTATHDFHVIVEEPPRWTKKPQSAVYSTGSNGILLCEAEGEPQPTIKWRVNGSPVDNHPFAGDVVFPREISFTNLQPNHTAVYQCEASNVHGTILANANIDVVDVRPLIQTKDGENYATVVGYSAFLHCEFFASPEAVVSWQKVEEVKPLEGRRYHIYENGTLQINRTTEEDAGSYSCWVENAIGKTAVTANLDIRNATKLRVSPKNPRIPKLHMLELHCESKCDSHLKHSLKLSWSKDGEAFEINGTEDGRIIIDGANLTISNVTLEDQGIYCCSAHTALDSAADITQVTVLDSLSTSSLT

SEQ ID NO: 3221 - protein, 618 aa, Artificial Sequence
  Synthetic polypeptide
MEPLLLGRGLIVYLMFLLLKFSKAIEIPSSVQQVPTIIKQSKVQVAFPFDEYFQIECEAKGNPEPTFSWTKDGNPFYFTDHRIIPSNNSGTFRIPNEGHISHFQGKYRCFASNKLGIAMSEEIEFIVPSVPKFPKEKIDPLEVEEGDPIVLPCNPPKGLPPLHIYWMNIELEHIEQDERVYMSQKGDLYFANVEEKDSRNDYCCFAAFPRLRTIVQKMPMKLTVNSSNSIKQRKPKLLLPPTESGSESSITILKGEILLLECFAEGLPTPQVDWNKIGGDLPKGRETKENYGKTLKIENVSYQDKGNYRCTASNFLGTATHDFHVIVEEPPRWTKKPQSAVYSTGSNGILLCEAEGEPQPTIKWRVNGSPVDNHPFAGDVVFPREISFTNLQPNHTAVYQCEASNVHGTILANANIDVVDVRPLIQTKDGENYATVVGYSAFLHCEFFASPEAVVSWQKVEEVKPLEGRRYHIYENGTLQINRTTEEDAGSYSCWVENAIGKTAVTANLDIRNATKLRVSPKNPRIPKLHMLELHCESKCDSHLKHSLKLSWSKDGEAFEINGTEDGRIIIDGANLTISNVTLEDQGIYCCSAHTALDSAADITQVTVLDSLSTSSLT

SEQ ID NO: 3222 - protein, 64 aa, Artificial Sequence
  Synthetic polypeptide
MSVIFFACVVRVRDGLPLSASTDFYHTQDFLEWRRRLKSLALRLAQYPGRGSAEGCDFSIQCGE

SEQ ID NO: 3223 - protein, 64 aa, Artificial Sequence; identical to SEQ ID NO: 3222
  Synthetic polypeptide

SEQ ID NO: 3224 - protein, 64 aa, Artificial Sequence; identical to SEQ ID NO: 3222
  Synthetic polypeptide

SEQ ID NO: 3225 - protein, 64 aa, Artificial Sequence; identical to SEQ ID NO: 3222
  Synthetic polypeptide

SEQ ID NO: 3226 - protein, 64 aa, Artificial Sequence; identical to SEQ ID NO: 3222
  Synthetic polypeptide

SEQ ID NO: 3227 - protein, 64 aa, Artificial Sequence; identical to SEQ ID NO: 3222
  Synthetic polypeptide

SEQ ID NO: 3228 - protein, 64 aa, Artificial Sequence; identical to SEQ ID NO: 3222
  Synthetic polypeptide

SEQ ID NO: 3229 - protein, 64 aa, Artificial Sequence; identical to SEQ ID NO: 3222
  Synthetic polypeptide

SEQ ID NO: 3230 - protein, 64 aa, Artificial Sequence; identical to SEQ ID NO: 3222
  Synthetic polypeptide

SEQ ID NO: 3231 - protein, 64 aa, Artificial Sequence; identical to SEQ ID NO: 3222
  Synthetic polypeptide

SEQ ID NO: 3232 - protein, 64 aa, Artificial Sequence; identical to SEQ ID NO: 3222
  Synthetic polypeptide

SEQ ID NO: 3233 - protein, 64 aa, Artificial Sequence; identical to SEQ ID NO: 3222
  Synthetic polypeptide

SEQ ID NO: 3234 - protein, 14 aa, Artificial Sequence
  Synthetic polypeptide
MLHLTDIQLLQFIN

SEQ ID NO: 3235 - protein, 14 aa, Artificial Sequence
  Synthetic polypeptide
MLHLTDIQLLQFIN

SEQ ID NO: 3236 - protein, 117 aa, Artificial Sequence
  Synthetic polypeptide
MATAAYEQLKLHITPEKFYVEACDDGADDVLTIDRVSTEVTLAVKKDVPPSAVTRPIFGILGTIHLVAGNYLIVITKKIKVGEFFSHVVWKATDFDVLSYKKTMLHLTDIQLLQFIN

SEQ ID NO: 3237 - protein, 117 aa, Artificial Sequence; identical to SEQ ID NO: 3236
  Synthetic polypeptide

SEQ ID NO: 3238 - protein, 89 aa, Artificial Sequence
  Synthetic polypeptide
MTLATDGTADMFGIRFKRRGCSKKDYRVINHLLRESLLRKLSSHQPLHLVPCVASGWKLLSPTSESVCRFHRLSLGSRLHIPQGKYLVP

SEQ ID NO: 3239 - protein, 720 aa, Artificial Sequence
  Synthetic polypeptide
MYRALYAFRSAEPNALAFAAGETFLVLERSSAHWWLAARARSGETGYVPPAYLRRLQGLEQDVLQAIDRAIEAVHNTAMRDGGKYSLEQRGVLQKLIHHRKETLSRRGPSASSVAVMTSSTSDHHLDAAAARQPNGVCRAGFERQHSLPSSEHLGADGGLYQIPLPSSQIPPQPRRAAPTTPPPPVKRRDREALMASGSGGHNTMPSGGNSVSSGSSVSSTSLDTLYTSSSPSEPGSSCSPTPPPVPRRGTHTTVSQVQPPPSKASAPEPPAEEEVATGTTSASDDLEALGTLSLGTTEEKAAAEAAVPRTIGAELMELVRRNTGLSHELCRVAIGIIVGHIQASVPASSPVMEQVLLSLVEGKDLSMALPSGQVCHDQQRLEVIFADLARRKDDAQQRSWALYEDEGVIRCYLEELLHILTDADPEVCKKMCKRNEFESVLALVAYYQMEHRASLRLLLLKCFGAMCSLDAAIISTLVSSVLPVELARDMQTDTQDHQKLCYSALILAMVFSMGEAVPYAHYEHLGTPFAQFLLNIVEDGLPLDTTEQLPDLCVNLLLALNLHLPAADQNVIMAALSKHANVKIFSEKLLLLLNRGDDPVRIFKHEPQPPHSVLKFLQDVFGSPATAAIFYHTDMMALIDITVRHIADLSPGDKMRISPWSFKALLRHLMQEGVPGCEGDSDASFGTPTPFPGRAPACLPPWCQVLCPLLTRLWTQKAL

SEQ ID NO: 3240 - protein, 720 aa, Artificial Sequence; identical to SEQ ID NO: 3239
  Synthetic polypeptide

SEQ ID NO: 3241 - protein, 713 aa, Artificial Sequence
  Synthetic polypeptide
MYRALYAFRSAEPNALAFAAGETFLVLERSSAHWWLAARARSGETGYVPPAYLRRLQGLEQDVLQAIDRAIEAVHNTAMRDGGKYSLEQRGVLQKLIHHRKETLSRRGPSASSVAVMTSSTSDHHLDAAAARQPNGVCRAGFERQHSLPSSEHLGADGGLYQIPPQPRRAAPTTPPPPVKRRDREALMASGSGGHNTMPSGGNSVSSGSSVSSTSLDTLYTSSSPSEPGSSCSPTPPPVPRRGTHTTVSQVQPPPSKASAPEPPAEEEVATGTTSASDDLEALGTLSLGTTEEKAAAEAAVPRTIGAELMELVRRNTGLSHELCRVAIGIIVGHIQASVPASSPVMEQVLLSLVEGKDLSMALPSGQVCHDQQRLEVIFADLARRKDDAQQRSWALYEDEGVIRCYLEELLHILTDADPEVCKKMCKRNEFESVLALVAYYQMEHRASLRLLLLKCFGAMCSLDAAIISTLVSSVLPVELARDMQTDTQDHQKLCYSALILAMVFSMGEAVPYAHYEHLGTPFAQFLLNIVEDGLPLDTTEQLPDLCVNLLLALNLHLPAADQNVIMAALSKHANVKIFSEKLLLLLNRGDDPVRIFKHEPQPPHSVLKFLQDVFGSPATAAIFYHTDMMALIDITVRHIADLSPGDKMRISPWSFKALLRHLMQEGVPGCEGDSDASFGTPTPFPGRAPACLPPWCQVLCPLLTRLWTQKAL

SEQ ID NO: 3242 - protein, 176 aa, Artificial Sequence
  Synthetic polypeptide
DTTEQLPDLCVNLLLALNLHLPAADQNVIMAALSKHANVKIFSEKLLLLLNRGDDPVRIFKHEPQPPHSVLKFLQDVFGSPATAAIFYHTDMMALIDITVRHIADLSPGDKMRISPWSFKALLRHLMQEGVPGCEGDSDASFGTPTPFPGRAPACLPPWCQVLCPLLTRLWTQKAL

SEQ ID NO: 3243 - protein, 44 aa, Artificial Sequence
  Synthetic polypeptide
MTLATDGTADMFGIRFKRRGCSKKDYRVINHLLRESLLRWIRVI

SEQ ID NO: 3244 - protein, 44 aa, Artificial Sequence; identical to SEQ ID NO: 3243
  Synthetic polypeptide

SEQ ID NO: 3245 - protein, 54 aa, Artificial Sequence
  Synthetic polypeptide
MTLATDGTADMFGIRFKRRGCSKKDYRVINHLLRESLLRPGMVAHACNPSALGG

SEQ ID NO: 3246 - protein, 54 aa, Artificial Sequence; identical to SEQ ID NO: 3245
  Synthetic polypeptide

SEQ ID NO: 3247 - protein, 28 aa, Artificial Sequence
  Synthetic polypeptide
MTLATDGTADMFGIRWGQATSQGTEAAS

SEQ ID NO: 3248 - protein, 28 aa, Artificial Sequence
  Synthetic polypeptide
MTLATDGTADMFGIRWGQATSQGTEAAS

SEQ ID NO: 3249 - protein, 23 aa, Artificial Sequence
  Synthetic polypeptide
GCKCGGPSGLSPAGIPPGLVSST

SEQ ID NO: 3250 - protein, 307 aa, Artificial Sequence
  Synthetic polypeptide
MQRAVSVVARLGFRLQAFPPALCRPLSCAQEVLRRTPLYDFHLAHGGKMVAFAGWSLPVQYRDSHTDSHLHTRQHCSLFDVSHMLQTKILGSDRVKLMESLVVGDIAELRPNQGTLSLFTNEAGGILDDLIVTNTSEGHLYVVSNAGCWEKDLALMQDKVRELQNQGRDVGLEVLDNALLALQGPTAAQVLQAGVADDLRKLPFMTSAVMEVFGVSGCRVTRCGYTGEDGVEISVPVAGAVHLATAILKNPEVKLAGLAARDSLRLEAGLCLYGNDIDEHTTPVEGSLSWTLGLGDRVTPSQKKKKE

SEQ ID NO: 3251 - protein, 307 aa, Artificial Sequence; identical to SEQ ID NO: 3250
  Synthetic polypeptide

SEQ ID NO: 3252 - protein, 263 aa, Artificial Sequence
  Synthetic polypeptide
MQRAVSVVARLGFRLQAFPPALCRPLSCAQEVLRRTPLYDFHLAHGGKMVAFAGWSLPVQYRDSHTDSHLHTRQHCSLFDVSHMLQTKILGSDRVKLMESLVVGDIAELRPNQDKVRELQNQGRDVGLEVLDNALLALQGPTAAQVLQAGVADDLRKLPFMTSAVMEVFGVSGCRVTRCGYTGEDGVEISVPVAGAVHLATAILKNPEVKLAGLAARDSLRLEAGLCLYGNDIDEHTTPVEGSLSWTLGLGDRVTPSQKKKKE

SEQ ID NO: 3253 - protein, 251 aa, Artificial Sequence
  Synthetic polypeptide
MQRAVSVVARLGFRLQAFPPALCRPLSCAQTKILGSDRVKLMESLVVGDIAELRPNQGTLSLFTNEAGGILDDLIVTNTSEGHLYVVSNAGCWEKDLALMQDKVRELQNQGRDVGLEVLDNALLALQGPTAAQVLQAGVADDLRKLPFMTSAVMEVFGVSGCRVTRCGYTGEDGVEISVPVAGAVHLATAILKNPEVKLAGLAARDSLRLEAGLCLYGNDIDEHTTPVEGSLSWTLGLGDRVTPSQKKKKE

SEQ ID NO: 3254 - protein, 251 aa, Artificial Sequence; identical to SEQ ID NO: 3253
  Synthetic polypeptide

SEQ ID NO: 3255 - protein, 210 aa, Artificial Sequence
  Synthetic polypeptide
MESLVVGDIAELRPNQGTLSLFTNEAGGILDDLIVTNTSEGHLYVVSNAGCWEKDLALMQDKVRELQNQGRDVGLEVLDNALLALQGPTAAQVLQAGVADDLRKLPFMTSAVMEVFGVSGCRVTRCGYTGEDGVEISVPVAGAVHLATAILKNPEVKLAGLAARDSLRLEAGLCLYGNDIDEHTTPVEGSLSWTLGLGDRVTPSQKKKKE

SEQ ID NO: 3256 - protein, 368 aa, Artificial Sequence
  Synthetic polypeptide
MERQVLLSEPEEAAALYRGLSRQPALSAACLGPEVTTQYGGQYRTVHTEWTQRDLERMENIRFCRQYLVFHDGDSVVFAGPAGNSVETRGELLSRESPSGTMKAVLRKAGGTGPGEEKQFLEVWEKNRKLKSFNLSALEKHGPVYEDDCFGCLSWSHSETHLLYVAEKKRPKAESFFQTKALDVSASDDEIARLKKPDQAIKGDQFVFYEDWGENMVSKSIPVLCVLDVESGNISVLEGVPENVSPGQAFWAPGDAGVVFVGWWHEPFRLGIRFCTNRRSALYYVDLIGGKCELLSDDSLAVSSPRLSPDQCRIVYLQYPSLIPHHQCSQLCLYDWYTKVTSVVVDVVPRQLGDRVLASLSSHFFMEG

SEQ ID NO: 3257 - protein, 368 aa, Artificial Sequence; identical to SEQ ID NO: 3256
  Synthetic polypeptide

SEQ ID NO: 3258 - protein, 293 aa, Artificial Sequence
  Synthetic polypeptide
TPRLAPAAERRLWNVRLLSRESPSGTMKAVLRKAGGTGPGEEKQFLEVWEKNRKLKSFNLSALEKHGPVYEDDCFGCLSWSHSETHLLYVAEKKRPKAESFFQTKALDVSASDDEIARLKKPDQAIKGDQFVFYEDWGENMVSKSIPVLCVLDVESGNISVLEGVPENVSPGQAFWAPGDAGVVFVGWWHEPFRLGIRFCTNRRSALYYVDLIGGKCELLSDDSLAVSSPRLSPDQCRIVYLQYPSLIPHHQCSQLCLYDWYTKVTSVVVDVVPRQLGDRVLASLSSHFFMEG

SEQ ID NO: 3259 - protein, 1328 aa, Artificial Sequence
  Synthetic polypeptide
MELLPPLPQSFLLLLLLPAKPAAGEDWQCPRTPYAASRDFDVKYVVPSFSAGGLVQAMVTYEGDRNESAVFVAIRNRLHVLGPDLKSVQSLATGPAGDPGCQTCAACGPGPHGPPGDTDTKVLVLDPALPALVSCGSSLQGRCFLHDLEPQGTAVHLAAPACLFSAHHNRPDDCPDCVASPLGTRVTVVEQGQASYFYVASSLDAAVAASFSPRSVSIRRLKADASGFAPGFVALSVLPKHLVSYSIEYVHSFHTGAFVYFLTVQPASVTDDPSALHTRLARLSATEPELGDYRELVLDCRFAPKRRRRGAPEGGQPYPVLRVAHSAPVGAQLATELSIAEGQEVLFGVFVTGKDGGPGVGPNSVVCAFPIDLLDTLIDEGVERCCESPVHPGLRRGLDFFQSPSFCPNPPGLEALSPNTSCRHFPLLVSSSFSRVDLFNGLLGPVQVTALYVTRLDNVTVAHMGTMDGRILQVELVRSLNYLLYVSNFSLGDSGQPVQRDVSRLGDHLLFASGDQVFQVPIQGPGCRHFLTCGRCLRAWHFMGCGWCGNMCGQQKECPGSWQQDHCPPKLTEFHPHSGPLRGSTRLTLCGSNFYLHPSGLVPEGTHQVTVGQSPCRPLPKDSSKLRPVPRKDFVEEFECELEPLGTQAVGPTNVSLTVTNMPPGKHFRVDGTSVLRGFSFMEPVLIAVQPLFGPRAGGTCLTLEGQSLSVGTSRAVLVNGTECLLARVSEGQLLCATPPGATVASVPLSLQVGGAQVPGSWTFQYREDPVVLSISPNCGYINSHITICGQHLTSAWHLVLSFHDGLRAVESRCERQLPEQQLCRLPEYVVRDPQGWVAGNLSARGDGAAGFTLPGFRFLPPPHPPSANLVPLKPEEHAIKFEYIGLGAVADCVGINVTVGGESCQHEFRGDMVVCPLPPSLQLGQDGAPLQVCVDGECHILGRVVRPGPDGVPQSTLLGILLPLLLLVAALATALVFSYWWRRKQLVLPPNLNDLASLDQTAGATPLPILYSGSDYRSGLALPAIDGLDSTTCVHGASFSDSEDESCVPLLRKESIQLRDLDSALLAEVKDVLIPHERVVTHSDRVIGKGHFGVVYHGEYIDQAQNRIQCAIKSLSRITEMQQVEAFLREGLLMRGLNHPNVLALIGIMLPPEGLPHVLLPYMCHGDLLQFIRSPQRNPTVKDLISFGLQVARSMEYLAEQKFVHRDLAARNCMLDESFTVKVADFGLARDILDREYYSVQQHRHARLPVKWMALESLQTYRFTTKSDVWSFGVLLWELLTRGAPPYRHIDPFDLTHFLAQGRRLPQPEYCPDSLKGTLAGPQFPHL

SEQ ID NO: 3260 - protein, 1279 aa, Artificial Sequence
  Synthetic polypeptide
MELLPPLPQSFLLLLLLPAKPAAGEDWQCPRTPYAASRDFDVKYVVPSFSAGGLVQAMVTYEGDRNESAVFVAIRNRLHVLGPDLKSVQSLATGPAGDPGCQTCAACGPGPHGPPGDTDTKVLVLDPALPALVSCGSSLQGRCFLHDLEPQGTAVHLAAPACLFSAHHNRPDDCPDCVASPLGTRVTVVEQGQASYFYVASSLDAAVAASFSPRSVSIRRLKADASGFAPGFVALSVLPKHLVSYSIEYVHSFHTGAFVYFLTVQPASVTDDPSALHTRLARLSATEPELGDYRELVLDCRFAPKRRRRGAPEGGQPYPVLRVAHSAPVGAQLATELSIAEGQEVLFGVFVTGKDGGPGVGPNSVVCAFPIDLLDTLIDEGVERCCESPVHPGLRRGLDFFQSPSFCPNPPGLEALSPNTSCRHFPLLVSSSFSRVDLFNGLLGPVQVTALYVTRLDNVTVAHMGTMDGRILQVELVRSLNYLLYVSNFSLGDSGQPVQRDVSRLGDHLLFASGDQVFQVPIQGPGCRHFLTCGRCLRAWHFMGCGWCGNMCGQQKECPGSWQQDHCPPKLTEFHPHSGPLRGSTRLTLCGSNFYLHPSGLVPEGTHQVTVGQSPCRPLPKDSSKLRPVPRKDFVEEFECELEPLGTQAVGPTNVSLTVTNMPPGKHFRVDGTSVLRGFSFMEPVLIAVQPLFGPRAGGTCLTLEGQSLSVGTSRAVLVNGTECLLARVSEGQLLCATPPGATVASVPLSLQVGGAQVPGSWTFQYREDPVVLSISPNCGYINSHITICGQHLTSAWHLVLSFHDGLRAVESRCERQLPEQQLCRLPEYVVRDPQGWVAGNLSARGDGAAGFTLPGFRFLPPPHPPSANLVPLKPEEHAIKFEVCVDGECHILGRVVRPGPDGVPQSTLLGILLPLLLLVAALATALVFSYWWRRKQLVLPPNLNDLASLDQTAGATPLPILYSGSDYRSGLALPAIDGLDSTTCVHGASFSDSEDESCVPLLRKESIQLRDLDSALLAEVKDVLIPHERVVTHSDRVIGKGHFGVVYHGEYIDQAQNRIQCAIKSLSRITEMQQVEAFLREGLLMRGLNHPNVLALIGIMLPPEGLPHVLLPYMCHGDLLQFIRSPQRNPTVKDLISFGLQVARSMEYLAEQKFVHRDLAARNCMLDESFTVKVADFGLARDILDREYYSVQQHRHARLPVKWMALESLQTYRFTTKSDVWSFGVLLWELLTRGAPPYRHIDPFDLTHFLAQGRRLPQPEYCPDSLKGTLAGPQFPHL

SEQ ID NO: 3261 - protein, 1221 aa, Artificial Sequence
  Synthetic polypeptide
MELLPPLPQSFLLLLLLPAKPAAGEDWQCPRTPYAASRDFDVKYVVPSFSAGGLVQAMVTYEGDRNESAVFVAIRNRLHVLGPDLKSVQSLATGPAGDPGCQTCAACGPGPHGPPGDTDTKVLVLDPALPALVSCGSSLQGRCFLHDLEPQGTAVHLAAPACLFSAHHNRPDDCPDCVASPLGTRVTVVEQGQASYFYVASSLDAAVAASFSPRSVSIRRLKADASGFAPGFVALSVLPKHLVSYSIEYVHSFHTGAFVYFLTVQPASVTDDPSALHTRLARLSATEPELGDYRELVLDCRFAPKRRRRGAPEGGQPYPVLRVAHSAPVGAQLATELSIAEGQEVLFGVFVTGKDGGPGVGPNSVVCAFPIDLLDTLIDEGVERCCESPVHPGLRRGLDFFQSPSFCPNPPGLEALSPNTSCRHFPLLVSSSFSRVDLFNGLLGPVQVTALYVTRLDNVTVAHMGTMDGRILQVELVRSLNYLLYVSNFSLGDSGQPVQRDVSRLGDHLLFASGDQVFQVPIQGPGCRHFLTCGRCLRAWHFMGCGWCGNMCGQQKECPGSWQQDHCPPKLTEFHPHSGPLRGSTRLTLCGSNFYLHPSGLVPEGTHQVTVGQSPCRPLPKDSSKLRPVPRKDFVEEFECELEPLGTQAVGPTNVSLTVTNMPPGKHFRVDGTSVLRGFSFMEPVLIAVQPLFGPRAGGTCLTLEGQSLSVGTSRAVLVNGTECLLARVSEGQLLCATPPGATVASVPLSLQVGGAQVPGSWTFQYREDPVVLSISPNCGYINSHITICGQHLTSAWHLVLSFHDGLRAVESRCERQLPEQQLCRLPEYVVRDPQGWVAGNLSARGDGAAGFTLPGFRFLPPPHPPSANLVPLKPEEHAIKFEYIGLGAVADCVGINVTVGGESCQHEFRGDMVVCPLPPSLQLGQDGAPLQVCVDGECHILGRVVRPGPDGVPQSTLLGILLPLLLLVAALATALVFSYWWRRKQLVLPPNLNDLASLDQTAGATPLPILYSGSDYRSGLALPAIDGLDSTTCVHGASFSDSEDESCVPLLRKESIQLRDLDSALLAEVKDVLIPHERVVTHSDRVIGKGHFGVVYHGEYIDQAQNRIQCAIKSLSRITEMQQVEAFLREGLLMRGLNHPNVLALIGIMLPPEGLPHVLLPYMCHGDLLQFIRSPQRNPTVKDLISFGLQVARSMEYLAEQKFVHRDLAARNCMRGGSRL

SEQ ID NO: 3262 - protein, 1172 aa, Artificial Sequence
  Synthetic polypeptide
MELLPPLPQSFLLLLLLPAKPAAGEDWQCPRTPYAASRDFDVKYVVPSFSAGGLVQAMVTYEGDRNESAVFVAIRNRLHVLGPDLKSVQSLATGPAGDPGCQTCAACGPGPHGPPGDTDTKVLVLDPALPALVSCGSSLQGRCFLHDLEPQGTAVHLAAPACLFSAHHNRPDDCPDCVASPLGTRVTVVEQGQASYFYVASSLDAAVAASFSPRSVSIRRLKADASGFAPGFVALSVLPKHLVSYSIEYVHSFHTGAFVYFLTVQPASVTDDPSALHTRLARLSATEPELGDYRELVLDCRFAPKRRRRGAPEGGQPYPVLRVAHSAPVGAQLATELSIAEGQEVLFGVFVTGKDGGPGVGPNSVVCAFPIDLLDTLIDEGVERCCESPVHPGLRRGLDFFQSPSFCPNPPGLEALSPNTSCRHFPLLVSSSFSRVDLFNGLLGPVQVTALYVTRLDNVTVAHMGTMDGRILQVELVRSLNYLLYVSNFSLGDSGQPVQRDVSRLGDHLLFASGDQVFQVPIQGPGCRHFLTCGRCLRAWHFMGCGWCGNMCGQQKECPGSWQQDHCPPKLTEFHPHSGPLRGSTRLTLCGSNFYLHPSGLVPEGTHQVTVGQSPCRPLPKDSSKLRPVPRKDFVEEFECELEPLGTQAVGPTNVSLTVTNMPPGKHFRVDGTSVLRGFSFMEPVLIAVQPLFGPRAGGTCLTLEGQSLSVGTSRAVLVNGTECLLARVSEGQLLCATPPGATVASVPLSLQVGGAQVPGSWTFQYREDPVVLSISPNCGYINSHITICGQHLTSAWHLVLSFHDGLRAVESRCERQLPEQQLCRLPEYVVRDPQGWVAGNLSARGDGAAGFTLPGFRFLPPPHPPSANLVPLKPEEHAIKFEVCVDGECHILGRVVRPGPDGVPQSTLLGILLPLLLLVAALATALVFSYWWRRKQLVLPPNLNDLASLDQTAGATPLPILYSGSDYRSGLALPAIDGLDSTTCVHGASFSDSEDESCVPLLRKESIQLRDLDSALLAEVKDVLIPHERVVTHSDRVIGKGHFGVVYHGEYIDQAQNRIQCAIKSLSRITEMQQVEAFLREGLLMRGLNHPNVLALIGIMLPPEGLPHVLLPYMCHGDLLQFIRSPQRNPTVKDLISFGLQVARSMEYLAEQKFVHRDLAARNCMRGGSRL

SEQ ID NO: 3263 - protein, 33 aa, Artificial Sequence
  Synthetic polypeptide
HRARSLVSCCLCCCLWLHWRLHWSSATGGGGSS

SEQ ID NO: 3264 - protein, 3 aa, Artificial Sequence
  Synthetic polypeptide
VST

SEQ ID NO: 3265 - protein, 702 aa, Artificial Sequence
  Synthetic polypeptide
MGSDKRVSRTERSGRYGSIIDRDDRDERESRSRRRDSDYKRSSDDRRGDRYDDYRDYDSPERERERRNSDRSEDGYHSDGDYGEHDYRHDISDERESKTIMLRGLPITITESDIREMMESFEGPQPADVRLMKRKTGVSRGFAFVEFYHLQDATSWMEANQKKLVIQGKHIAMHYSNPRPKFEDWLCNKCCLNNFRKRLKCFRCGADKFDSEQEVPPGTTESVQSVDYYCDTIILRNIAPHTVVDSIMTALSPYASLAVNNIRLIKDKQTQQNRGFAFVQLSSAMDASQLLQILQSLHPPLKIDGKTIGVDFAKSARKDLVLSDGNRVSAFSVASTAIAAAQWSSTQSQSGEGGSVDYSYLQPGQDGYAQYAQYSQDYQQFYQQQAGGLESDASSASGTAVTTTSAAVVSQSPQLYNQTSNPPGSPTEEAQPSTSTSTQAPAASPTGVVPGTKYAVPDTSTYQYDESSGYYYDPTTGLYYDPNSQYYYNSLTQQYLYWDGEKETYVPAAESSSHQQSGLPPAKEGKEKKEKPKSKTAQQIAKDMERWAKSLNKQKENFKNSFQPVNSLREEERRESAAADAGFALFEKKGALAERQQLIPELVRNGDEENPLKRGLVAAYSGDSDNEEELVERLESEEEKLADWKKMACLLCRRQFPNKDALVRHQQLSDLHKQNMDIYRRSRLSEQELEALELRERERERE

SEQ ID NO: 3266 - protein, 701 aa, Artificial Sequence
  Synthetic polypeptide
MGSDKRVSRTERSGRYGSIIDRDDRDERESRSRRRDSDYKRSSDDRRGDRYDDYRDYDSPERERERRNSDRSEDGYHSDGDYGEHDYRHDISDERESKTIMLRGLPITITESDIREMMESFEGPQPADVRLMKRKTGVSRGFAFVEFYHLQDATSWMEANQKKLVIQGKHIAMHYSNPRPKFEDWLCNKCCLNNFRKRLKCFRCGADKFDSEQEVPPGTTESVQSVDYYCDTIILRNIAPHTVVDSIMTALSPYASLAVNNIRLIKDKQTQQNRGFAFVQLSSAMDASQLLQILQSLHPPLKIDGKTIGVDFAKSARKDLVLSDGNRVSAFSVASTAIAAAQWSSTQSQSGEGGSVDYSYLQPGQDGYAQYAQYSQDYQQFYQQQAGGLESDASSASGTAVTTTSAAVVSQSPQLYNQTSNPPGSPTEEAQPSTSTSTQAPAASPTGVVPGTKYAVPDTSTYQYDESSGYYYDPTTGLYYDPNSQYYYNSLTQQYLYWDGEKETYVPAAESSSHQQSGLPPAKEGKEKKEKPKSKTAQQIAKDMERWAKSLNKQKENFKNSFQPVNSLREEERRESAAADAGFALFEKKGALAERQQLIPELVRNGDEENPLKRGLVAAYSGDSDNEEELVERLESEEEKLADWKKMACLLCRRQFPNKDALVRHQQLSDLHKQNMDIYRRSRLSEQELEALELRERERER

SEQ ID NO: 3267 - protein, 698 aa, Artificial Sequence
  Synthetic polypeptide
MGSDKRVSRTERSGRYGSIIDRDDRDERESRSRRRDSDYKRSSDDRRGDRYDDYRDYDSPERERERRNSDRSEDGYHSDGDYGEHDYRHDISDERESKTIMLRGLPITITESDIREMMESFEGPQPADVRLMKRKTGVSRGFAFVEFYHLQDATSWMEANQKKLVIQGKHIAMHYSNPRPKFEDWLCNKCCLNNFRKRLKCFRCGADKFDSEQEVPPGTTESVQSVDYYCDTIILRNIAPHTVVDSIMTALSPYASLAVNNIRLIKDKQTQQNRGFAFVQLSSAMDASQLLQILQSLHPPLKIDGKTIGVDFAKSARKDLVLSDGNRVSAFSVASTAIAAAQWSSTQSQSGEGGSVDYSYLQPGQDGYAQYAQYSQDYQQFYQQQAGGLESDASSASGTAVTTTSAAVVSQSPQLYNQTSNPPGSPTEEAQPSTSTSTQAPAASPTGVVPGTKYAVPDTSTYQYDESSGYYYDPTTGLYYDPNSQYYYNSLTQQYLYWDGEKETYVPAAESSSHQQSGLPPAKEGKEKKEKPKSKTAQQIAKDMERWAKSLNKQKENFKNSFQPVNSLREEERRESAAADAGFALFEKKGALAERQQLIPELVRNGDEENPLKRGLVAAYSGDSDNEEELVERLESEEEKLADWKKMACLLCRRQFPNKDALVRHQQLSDLHKQNMDIYRRSRLSEQELEALELRERE

SEQ ID NO: 3268 - protein, 780 aa, Artificial Sequence
  Synthetic polypeptide
MDGAMGPRGLLLCMYLVSLLILQAMPALGSATGRSKSSEKRQAVDTAVDGVFIRSLKVNCKVTSRFAHYVVTSQVVNTANEAREVAFDLEIPKTAFISDFAVTADGNAFIGDIKDKVTAWKQYRKAAISGENAGLVRASGRTMEQFTIHLTVNPQSKVTFQLTYEEVLKRNHMQYEIVIKVKPKQLVHHFEIDVDIFEPQGISKLDAQASFLPKELAAQTIKKSFSGKKGHVLFRPTVSQQQSCPTCSTSLLNGHFKVTYDVSRDKICDLLVANNHFAHFFAPQNLTNMNKNVVFVIDISGSMRGQKVKQTKEALLKILGDMQPGDYFDLVLFGTRVQSWKGSLVQASEANLQAAQDFVRGFSLDEATNLNGGLLRGIEILNQVQESLPELSNHASILIMLTDGDPTEGVTDRSQILKNVRNAIRGRFPLYNLGFGHNVDFNFLEVMSMENNGRAQRIYEDHDATQQLQGFYSQVAKPLLVDVDLQYPQDAVLALTQNHHKQYYEGSEIVVAGRIADNKQSSFKADVQAHGEGQEFSITCLVDEEEMKKLLRERGHMLENHVERLWAYLTIQELLAKRMKVDREERANLSSQALQMSLDYGFVTPLTSMSIRGMADQDGLKPTIDKPSEDSPPLEMLGPRRTFVLSALQPSPTHSSSNTQRLPDRVTGVDTDPHFIIHVPQKEDTLCFNINEEPGVILSLVQDPNTGFSVNGQLIGNKARSPGQHDGTYFGRLGIANPATDFQLEVTPQNITLNPGFGGPVFSWRDQAVLRQDGLGVRIE

SEQ ID NO: 3269 - protein, 638 aa, Artificial Sequence
  Synthetic polypeptide
MEQFTIHLTVNPQSKVTFQLTYEEVLKRNHMQYEIVIKVKPKQLVHHFEIDVDIFEPQGISKLDAQASFLPKELAAQTIKKSFSGKKGHVLFRPTVSQQQSCPTCSTSLLNGHFKVTYDVSRDKICDLLVANNHFAHFFAPQNLTNMNKNVVFVIDISGSMRGQKVKQTKEALLKILGDMQPGDYFDLVLFGTRVQSWKGSLVQASEANLQAAQDFVRGFSLDEATNLNGGLLRGIEILNQVQESLPELSNHASILIMLTDGDPTEGVTDRSQILKNVRNAIRGRFPLYNLGFGHNVDFNFLEVMSMENNGRAQRIYEDHDATQQLQGFYSQVAKPLLVDVDLQYPQDAVLALTQNHHKQYYEGSEIVVAGRIADNKQSSFKADVQAHGEGQEFSITCLVDEEEMKKLLRERGHMLENHVERLWAYLTIQELLAKRMKVDREERANLSSQALQMSLDYGFVTPLTSMSIRGMADQDGLKPTIDKPSEDSPPLEMLGPRRTFVLSALQPSPTHSSSNTQRLPDRVTGVDTDPHFIIHVPQKEDTLCFNINEEPGVILSLVQDPNTGFSVNGQLIGNKARSPGQHDGTYFGRLGIANPATDFQLEVTPQNITLNPGFGGPVFSWRDQAVLRQDGLGVRIE

SEQ ID NO: 3270 - protein, 492 aa, Artificial Sequence
  Synthetic polypeptide
MNKNVVFVIDISGSMRGQKVKQTKEALLKILGDMQPGDYFDLVLFGTRVQSWKGSLVQASEANLQAAQDFVRGFSLDEATNLNGGLLRGIEILNQVQESLPELSNHASILIMLTDGDPTEGVTDRSQILKNVRNAIRGRFPLYNLGFGHNVDFNFLEVMSMENNGRAQRIYEDHDATQQLQGFYSQVAKPLLVDVDLQYPQDAVLALTQNHHKQYYEGSEIVVAGRIADNKQSSFKADVQAHGEGQEFSITCLVDEEEMKKLLRERGHMLENHVERLWAYLTIQELLAKRMKVDREERANLSSQALQMSLDYGFVTPLTSMSIRGMADQDGLKPTIDKPSEDSPPLEMLGPRRTFVLSALQPSPTHSSSNTQRLPDRVTGVDTDPHFIIHVPQKEDTLCFNINEEPGVILSLVQDPNTGFSVNGQLIGNKARSPGQHDGTYFGRLGIANPATDFQLEVTPQNITLNPGFGGPVFSWRDQAVLRQDGLGVRIE

SEQ ID NO: 3271 - protein, 333 aa, Artificial Sequence
  Synthetic polypeptide
SMENNGRAQRIYEDHDATQQLQGFYSQVAKPLLVDVDLQYPQDAVLALTQNHHKQYYEGSEIVVAGRIADNKQSSFKADVQAHGEGQEFSITCLVDEEEMKKLLRERGHMLENHVERLWAYLTIQELLAKRMKVDREERANLSSQALQMSLDYGFVTPLTSMSIRGMADQDGLKPTIDKPSEGIGCREMLGPRRTFVLSALQPSPTHSSSNTQRLPDRVTGVDTDPHFIIHVPQKEDTLCFNINEEPGVILSLVQDPNTGFSVNGQLIGNKARSPGQHDGTYFGRLGIANPATDFQLEVTPQNITLNPGFGGPVFSWRDQAVLRQDGLGVRIE

SEQ ID NO: 3272 - protein, 146 aa, Artificial Sequence
  Synthetic polypeptide
MPLPLPSAFVLSALQPSPTHSSSNTQRLPDRVTGVDTDPHFIIHVPQKEDTLCFNINEEPGVILSLVQDPNTGFSVNGQLIGNKARSPGQHDGTYFGRLGIANPATDFQLEVTPQNITLNPGFGGPVFSWRDQAVLRQDGLGVRIE

SEQ ID NO: 3273 - protein, 413 aa, Artificial Sequence
  Synthetic polypeptide
MMMMMMMKKMQHQRQQQADHANEANYARGTRLPLSGEGPTSQPNSSKQTVLSWQAAIDAARQAKAAQTMSTSAPPPVGSLSQRKRQQYAKSKKQGNSSNSRPARALFCLSLNNPIRRACISIVEWKPFDIFILLAIFANCVALAIYIPFPEDDSNSTNHNLEKVEYAFLIIFTVETFLKIIAYGLLLHPNAYVRNGWNLLDFVIVIVGLFSVILEQLTKETEGGNHSSGKSGGFDVKALRAFRVLRPLRLVSGVPSLQVVLNSIIKAMVPLLHIALLVLFVIIIYAIIGLELFIGKMHKTCFFADSDIVAEEDPAPCAFSGNGRQCTANGTECRSGWVGPNGGITNFDNFAFAMLTVFQCITMEGWTDVLYWMNDAMGFELPWVYFVSLVIFGSFFVLNLVLGVLSGHSGSRL

SEQ ID NO: 3274 - protein, 413 aa, Artificial Sequence; identical to SEQ ID NO: 3273
  Synthetic polypeptide

SEQ ID NO: 3275 - protein, 86 aa, Artificial Sequence
  Synthetic polypeptide
ANGTECRSGWVGPNGGITNFDNFAFAMLTVFQCITMEGWTDVLYWMNDAMGFELPWVYFVSLVIFGSFFVLNLVLGVLSGHSGSRL

SEQ ID NO: 3276 - protein, 124 aa, Artificial Sequence
  Synthetic polypeptide
MAGPGSPRRASRGASALLAAALLYAALGDVVRSEQQIPLSVVKLWASAFGGEIKSIAAKYSGSQLLQKVYTAKEQKEETEIETGTTMFLAGLSTIAKGGNSPNVHQQMSELIKCDICIQWNFQP

SEQ ID NO: 3277 - protein, 124 aa, Artificial Sequence; identical to SEQ ID NO: 3276
  Synthetic polypeptide

SEQ ID NO: 3278 - protein, 124 aa, Artificial Sequence; identical to SEQ ID NO: 3276
  Synthetic polypeptide

SEQ ID NO: 3279 - protein, 436 aa, Artificial Sequence
  Synthetic polypeptide
MAGPGSPRRASRGASALLAAALLYAALGDVVRSEQQIPLSVVKLWASAFGGEIKSIAAKYSGSQLLQKKYKEYEKDVAIEEIDGLQLVKKLAKNMEEMFHKKSEAVRRLVEAAEEAHLKHEFDADLQYEYFNAVLINERDKDGNFLELGKEFILAPNDHFNNLPVNISLSDVQVPTNMYNKDPAIVNGVYWSESLNKVFVDNFDRDPSLIWQYFGSAKGFFRQYPGIKWEPDENGVIAFDCRNRKWYIQAATSPKDVVILVDVSGSMKGLRLTIAKQTVSSILDTLGDDDFFNIIAYNEELHYVEPCLNGTLVQADRTNKEHFREHLDKLFAKGIGMLDIALNEAFNILSDFNHTGQGSICSQAIMLITDGAVDTYDTIFAKYNWPDRKVRIFTYLIGREAAFADNLKWMACANKGTWSRQNSHEMQQPSSAWVPE

SEQ ID NO: 3280 - protein, 436 aa, Artificial Sequence; identical to SEQ ID NO: 3279
  Synthetic polypeptide

SEQ ID NO: 3281 - protein, 436 aa, Artificial Sequence; identical to SEQ ID NO: 3279
  Synthetic polypeptide

SEQ ID NO: 3282 - protein, 342 aa, Artificial Sequence
  Synthetic polypeptide
MEEMFHKKSEAVRRLVEAAEEAHLKHEFDADLQYEYFNAVLINERDKDGNFLELGKEFILAPNDHFNNLPVNISLSDVQVPTNMYNKDPAIVNGVYWSESLNKVFVDNFDRDPSLIWQYFGSAKGFFRQYPGIKWEPDENGVIAFDCRNRKWYIQAATSPKDVVILVDVSGSMKGLRLTIAKQTVSSILDTLGDDDFFNIIAYNEELHYVEPCLNGTLVQADRTNKEHFREHLDKLFAKGIGMLDIALNEAFNILSDFNHTGQGSICSQAIMLITDGAVDTYDTIFAKYNWPDRKVRIFTYLIGREAAFADNLKWMACANKGTWSRQNSHEMQQPSSAWVPE

SEQ ID NO: 3283 - protein, 342 aa, Artificial Sequence; identical to SEQ ID NO: 3282
  Synthetic polypeptide

SEQ ID NO: 3284 - protein, 342 aa, Artificial Sequence; identical to SEQ ID NO: 3282
  Synthetic polypeptide

SEQ ID NO: 3285 - protein, 84 aa, Artificial Sequence
  Synthetic polypeptide
MALRGPAGLGPGSRRPLDEAVAGAEGREAPALVAAGGAPEDDEEDDGRGRGLLRWDSFSAWLHCVCVVGFDLELGQAVEAHLAP

SEQ ID NO: 3286 - protein, 85 aa, Artificial Sequence
  Synthetic polypeptide
MAFMEKPPAGKVLLDDTVPLTAAIEASQSLQSHTEYIIRVQRGISVENSWQIVRRYSDFDLLNNSLQNPWKVPALAVPGAAPRVG

SEQ ID NO: 3287 - protein, 85 aa, Artificial Sequence; identical to SEQ ID NO: 3286
  Synthetic polypeptide

SEQ ID NO: 3288 - protein, 85 aa, Artificial Sequence; identical to SEQ ID NO: 3286
  Synthetic polypeptide

SEQ ID NO: 3289 - protein, 68 aa, Artificial Sequence
  Synthetic polypeptide
MAFMEKPPAGKVLLDDTVPLTAAIEASQSLQSHTIVRRYSDFDLLNNSLQNPWKVPALAVPGAAPRVG

SEQ ID NO: 3290 - protein, 68 aa, Artificial Sequence; identical to SEQ ID NO: 3289
  Synthetic polypeptide

SEQ ID NO: 3291 - protein, 68 aa, Artificial Sequence; identical to SEQ ID NO: 3289
  Synthetic polypeptide

SEQ ID NO: 3292 - protein, 76 aa, Artificial Sequence
  Synthetic polypeptide
MKCDSRAYLLGQQSVSGWGLQPRFQEYIIRVQRGISVENSWQIVRRYSDFDLLNNSLQNPWKVPALAVPGAAPRVG

SEQ ID NO: 3293 - protein, 114 aa, Artificial Sequence
  Synthetic polypeptide
MYSEIQRERADIGGLMARPEYREWNPELIKPKKLLNPVKASRSHQELHRELLMNHRRGLGVDSKPELQRVLEHRRRNQLIKKKKEELEAKRLQCPFEQELLRRQQRLNQLRMAM

SEQ ID NO: 3294 - protein, 114 aa, Artificial Sequence; identical to SEQ ID NO: 3293
  Synthetic polypeptide

SEQ ID NO: 3295 - protein, 114 aa, Artificial Sequence; identical to SEQ ID NO: 3293
  Synthetic polypeptide

SEQ ID NO: 3296 - protein, 145 aa, Artificial Sequence
  Synthetic polypeptide
MGAAQGKKKTYSPQARFHSENEKQRRNGSAAMYSEIQRERADIGGLMARPEYREWNPELIKPKKLLNPVKASRSHQELHRELLMNHRRGLGVDSKPELQRVLEHRRRNQLIKKKKEELEAKRLQCPFEQELLRRQQRLNQLRMAM

SEQ ID NO: 3297 - protein, 142 aa, Artificial Sequence
  Synthetic polypeptide
MAQRLGEWARGPSDATGLYRAVLLRSAAMYSEIQRERADIGGLMARPEYREWNPELIKPKKLLNPVKASRSHQELHRELLMNHRRGLGVDSKPELQRVLEHRRRNQLIKKKKEELEAKRLQCPFEQELLRRQQRLNQLRMAM

SEQ ID NO: 3298 - protein, 51 aa, Artificial Sequence
  Synthetic polypeptide
MMAEEHTDLEAQIVKDIHCKEIDLVNRDPKNINEDIVKTGENGKREYPGGI

SEQ ID NO: 3299 - protein, 51 aa, Artificial Sequence; identical to SEQ ID NO: 3298
  Synthetic polypeptide

SEQ ID NO: 3300 - protein, 142 aa, Artificial Sequence
  Synthetic polypeptide
MSIAIPLGVTTSDTSYSDMAAGSDPESVEASPAVNEKSVYSTHNYGTTQRHGCRGLPYATIIPRSDLNGLPSPVEERCGDSPNSEGETVPTWCPCGLSQDGFLLNCDKCRGMSRGKVIRLHRRKQDNISGRPKRADHLRSGV

SEQ ID NO: 3301 - protein, 142 aa, Artificial Sequence; identical to SEQ ID NO: 3300
  Synthetic polypeptide

SEQ ID NO: 3302 - protein, 142 aa, Artificial Sequence; identical to SEQ ID NO: 3300
  Synthetic polypeptide

SEQ ID NO: 3303 - protein, 31 aa, Artificial Sequence
  Synthetic polypeptide
MSRGKVIRLHRRKQDNISGRPKRADHLRSGV

SEQ ID NO: 3304 - protein, 31 aa, Artificial Sequence; identical to SEQ ID NO: 3303
  Synthetic polypeptide

SEQ ID NO: 3305 - protein, 31 aa, Artificial Sequence; identical to SEQ ID NO: 3303
  Synthetic polypeptide

SEQ ID NO: 3306 - protein, 161 aa, Artificial Sequence
  Synthetic polypeptide
MSIAIPLGVTTSDTSYSDMAAGSDPESVEASPAVNEKSVYSTHNYGTTQRHGCRGLPYADHNYGAPPPPTPPASPPVQTIIPRSDLNGLPSPVEERCGDSPNSEGETVPTWCPCGLSQDGFLLNCDKCRGMSRGKVIRLHRRKQDNISGRPKRADHLRSGV

SEQ ID NO: 3307 - protein, 108 aa, Artificial Sequence
  Synthetic polypeptide
MGESFDVVTKCVSFTLTEQFMEKFVDPGNHNSGIDLLRTYLWRCQFLLPFVSLGLMCFGALIGLCACICRSLYPTIATGILHLLAGFGTWTAFLAPQLADGLLWDLTL

SEQ ID NO: 3308 - protein, 108 aa, Artificial Sequence; identical to SEQ ID NO: 3307
  Synthetic polypeptide

SEQ ID NO: 3309 - protein, 203 aa, Artificial Sequence
  Synthetic polypeptide
MDNRFATAFVIACVLSLISTIYMAASIGTDFWYEYRSPVQENSSDLNKSIWDEFISDEADEKTYNDALFRYNGTVGLWRRCITIPKNMHWYSPPERTESFDVVTKCVSFTLTEQFMEKFVDPGNHNSGIDLLRTYLWRCQFLLPFVSLGLMCFGALIGLCACICRSLYPTIATGILHLLAGFGTWTAFLAPQLADGLLWDLTL

SEQ ID NO: 3310 - protein, 203 aa, Artificial Sequence; identical to SEQ ID NO: 3309
  Synthetic polypeptide

SEQ ID NO: 3311 - protein, 203 aa, Artificial Sequence; identical to SEQ ID NO: 3309
  Synthetic polypeptide

SEQ ID NO: 3312 - protein, 203 aa, Artificial Sequence; identical to SEQ ID NO: 3309
  Synthetic polypeptide

SEQ ID NO: 3313 - protein, 203 aa, Artificial Sequence; identical to SEQ ID NO: 3309
  Synthetic polypeptide

SEQ ID NO: 3314 - protein, 203 aa, Artificial Sequence; identical to SEQ ID NO: 3309
  Synthetic polypeptide

SEQ ID NO: 3315 - protein, 203 aa, Artificial Sequence; identical to SEQ ID NO: 3309
  Synthetic polypeptide

SEQ ID NO: 3316 - protein, 203 aa, Artificial Sequence; identical to SEQ ID NO: 3309
  Synthetic polypeptide

SEQ ID NO: 3317 - protein, 203 aa, Artificial Sequence; identical to SEQ ID NO: 3309
  Synthetic polypeptide

SEQ ID NO: 3318 - protein, 203 aa, Artificial Sequence; identical to SEQ ID NO: 3309
  Synthetic polypeptide

SEQ ID NO: 3319 - protein, 203 aa, Artificial Sequence; identical to SEQ ID NO: 3309
  Synthetic polypeptide

SEQ ID NO: 3320 - protein, 203 aa, Artificial Sequence; identical to SEQ ID NO: 3309
  Synthetic polypeptide

SEQ ID NO: 3321 - protein, 203 aa, Artificial Sequence; identical to SEQ ID NO: 3309
  Synthetic polypeptide

SEQ ID NO: 3322 - protein, 226 aa, Artificial Sequence
  Synthetic polypeptide
MGGDRLENKTSVSVASWSSLNARMDNRFATAFVIACVLSLISTIYMAASIGTDFWYEYRSPVQENSSDLNKSIWDEFISDEADEKTYNDALFRYNGTVGLWRRCITIPKNMHWYSPPERTESFDVVTKCVSFTLTEQFMEKFVDPGNHNSGIDLLRTYLWRCQFLLPFVSLGLMCFGALIGLCACICRSLYPTIATGILHLLAGFGTWTAFLAPQLADGLLWDLTL

SEQ ID NO: 3323 - protein, 156 aa, Artificial Sequence
  Synthetic polypeptide
KSIWDEFISDEADEKTYNDALFRYNGTVGLWRRCITIPKNMHWYSPPERTESFDVVTKCVSFTLTEQFMEKFVDPGNHNSGIDLLRTYLWRCQFLLPFVSLGLMCFGALIGLCACICRSLYPTIATGILHLLAGFGTWTAFLAPQLADGLLWDLTL

SEQ ID NO: 3324 - protein, 59 aa, Artificial Sequence
  Synthetic polypeptide
FVSLGLMCFGALIGLCACICRSLYPTIATGILHLLAGFGTWTAFLAPQLADGLLWDLTL

SEQ ID NO: 3325 - protein, 181 aa, Artificial Sequence
  Synthetic polypeptide
MAASIGTDFWYEYRSPVQENSSDLNKSIWDEFISDEADEKTYNDALFRYNGTVGLWRRCITIPKNMHWYSPPERTESFDVVTKCVSFTLTEQFMEKFVDPGNHNSGIDLLRTYLWRCQFLLPFVSLGLMCFGALIGLCACICRSLYPTIATGILHLLAGFGTWTAFLAPQLADGLLWDLTL

SEQ ID NO: 3326 - protein, 88 aa, Artificial Sequence
  Synthetic polypeptide
MEKFVDPGNHNSGIDLLRTYLWRCQFLLPFVSLGLMCFGALIGLCACICRSLYPTIATGILHLLAGFGTWTAFLAPQLADGLLWDLTL

SEQ ID NO: 3327 - protein, 88 aa, Artificial Sequence; identical to SEQ ID NO: 3326
  Synthetic polypeptide

SEQ ID NO: 3328 - protein, 375 aa, Artificial Sequence
  Synthetic polypeptide
MSELKDCPLQFHDFKSVDHLKVCPRYTAVLARSEDDGIGIEELDTLQLELETLLSSASRRLRVLEAETQILTDWQDKKGDRRFLKLGRDHELGAPPKHGKPKKQKLEGKAGHGPGPGPGRPKSKNLQPKIQEYEFTDDPIDVPRIPKNDAPNRFWASVEPYCADITSEEVRTLEELLKPPEDEAEHYKIPPLGKHYSQRWAQEDLLEEQKDGARAAAVADKKKGLMGPLTELDTKDVDALLKKSEAQHEQPEDGCPFGALTQRLLQALVEENIISPMEDSPIPDMSGKESGADGASTSPRNQNKPFSVPHTKSLESRIKEELIAQGLLESEDRPAEDSEDEVLAELRKRQAELKALSAHNRTKKHDLLRLDSITK

SEQ ID NO: 3329 - protein, 375 aa, Artificial Sequence; identical to SEQ ID NO: 3328
  Synthetic polypeptide

SEQ ID NO: 3330 - protein, 375 aa, Artificial Sequence; identical to SEQ ID NO: 3328
  Synthetic polypeptide

SEQ ID NO: 3331 - protein, 58 aa, Artificial Sequence
  Synthetic polypeptide
TVMTHSPPRRSCGSSSEEDGSGGGESKEKQGRRENEKVLGGRRRNEREEVENRTEKEE

SEQ ID NO: 3332 - protein, 397 aa, Artificial Sequence
  Synthetic polypeptide
MALQLGRLSSGPCWLVARGGCGGPRAWSQCGGGGLRAWSQRSAAGRVCRPPGPAGTEQSRGLGHGSTSRGGPWVGTGLAAALAGLVGLATAAFGHVQRAEMLPKTSGTRATSLGRPEEEEDELAHRCSSFMAPPVTDLGELRRRPGDMKTKMELLILETQAQVCQALAQVDGGANFSVDRWERKEGGGGISCVLQDGCVFEKAGVSISVVHGNLSEEAAKQMRSRGKVLKTKDGKLPFCAMGVSSVIHPKNPHAPTIHFNYRYFEVEEADGNKQWWFGGGCDLTPTYLNQEDAVHFHRTLKEACDQHGPDLYPKFKKWCDDYFFIAHRGERRGIGGIFFDDLDSPSKEEVFRFVQSCARAVVPSYIPLVKKHCDDSFTPQEKLWQQLRRGREWRRRK

SEQ ID NO: 3333 - protein, 180 aa, Artificial Sequence
  Synthetic polypeptide
MASRAVVRARRCPQCPQVRAAAAAPAWAALPLSRSLPPCSNSSSFSMPLFLLLLLVLLLLLEDAGAQQGDGCGHTVLGPESGTLTSINYPQTYPNSTVCEWEIRVKMGERVRIKFGDFDIEDSDSCHFNYLRIYNGIGVSRTEIGIQLTRAVKDLFKENYKPLLNEIKEDTNGRTFHAHG

SEQ ID NO: 3334 - protein, 180 aa, Artificial Sequence; identical to SEQ ID NO: 3333
  Synthetic polypeptide

SEQ ID NO: 3335 - protein, 74 aa, Artificial Sequence
  Synthetic polypeptide
MGERVRIKFGDFDIEDSDSCHFNYLRIYNGIGVSRTEIGIQLTRAVKDLFKENYKPLLNEIKEDTNGRTFHAHG

SEQ ID NO: 3336 - protein, 607 aa, Artificial Sequence
  Synthetic polypeptide
MAEDDPYLGRPEQMFHLDPSLTHTIFNPEVFQPQMALPTADGPYLQILEQPKQRGFRFRYVCEGPSHGGLPGASSEKNKKSYPQVKICNYVGPAKVIVQLVTNGKNIHLHAHSLVGKHCEDGICTVTAGPKDMVVGFANLGILHVTKKKVFETLEARMTEACIRGYNPGLLVHPDLAYLQAEGGGDRQLGDREKELIRQAALQQTKEMDLSVVRLMFTAFLPDSTGSFTRRLEPVVSDAIYDSKAPNASNLKIVRMDRTAGCVTGGEEIYLLCDKVQKDDIQIRFYEEEENGGVWEGFGDFSPTDVHRQFAIVFKTPKYKDINITKPASVFVQLRRKSDLETSEPKPFLYYPEIKDKEEVQRKRQKLMPNFSDSFGGGSGAGAGGGGMFGSGGGGGGTGSTGPGYSFPHYGFPTYGGITFHPGTTKSNAGMKHGTMDTESKKDPEGCDKSDDKNTVNLFGKVIETTEQDQEPSEATVGNGEVTLTYATGTKEESAGVQDNLFLEKAMQLAKRHANALFDYAVTGDVKMLLAVQRHLTAVQDENGDSVLHLAIIHLHSQLVRDLLEVTSGLISDDIINMRNDLYQRSSNTAKGELAGDTARPFDGHMQ

SEQ ID NO: 3337 - protein, 606 aa, Artificial Sequence
  Synthetic polypeptide
MAEDDPYLGRPEQMFHLDPSLTHTIFNPEVFQPQMALPTDGPYLQILEQPKQRGFRFRYVCEGPSHGGLPGASSEKNKKSYPQVKICNYVGPAKVIVQLVTNGKNIHLHAHSLVGKHCEDGICTVTAGPKDMVVGFANLGILHVTKKKVFETLEARMTEACIRGYNPGLLVHPDLAYLQAEGGGDRQLGDREKELIRQAALQQTKEMDLSVVRLMFTAFLPDSTGSFTRRLEPVVSDAIYDSKAPNASNLKIVRMDRTAGCVTGGEEIYLLCDKVQKDDIQIRFYEEEENGGVWEGFGDFSPTDVHRQFAIVFKTPKYKDINITKPASVFVQLRRKSDLETSEPKPFLYYPEIKDKEEVQRKRQKLMPNFSDSFGGGSGAGAGGGGMFGSGGGGGGTGSTGPGYSFPHYGFPTYGGITFHPGTTKSNAGMKHGTMDTESKKDPEGCDKSDDKNTVNLFGKVIETTEQDQEPSEATVGNGEVTLTYATGTKEESAGVQDNLFLEKAMQLAKRHANALFDYAVTGDVKMLLAVQRHLTAVQDENGDSVLHLAIIHLHSQLVRDLLEVTSGLISDDIINMRNDLYQRSSNTAKGELAGDTARPFDGHMQ

SEQ ID NO: 3338 - protein, 606 aa, Artificial Sequence; identical to SEQ ID NO: 3337
  Synthetic polypeptide

SEQ ID NO: 3339 - protein, 426 aa, Artificial Sequence
  Synthetic polypeptide
MNGLCCMALDREKELIRQAALQQTKEMDLSVVRLMFTAFLPDSTGSFTRRLEPVVSDAIYDSKAPNASNLKIVRMDRTAGCVTGGEEIYLLCDKVQKDDIQIRFYEEEENGGVWEGFGDFSPTDVHRQFAIVFKTPKYKDINITKPASVFVQLRRKSDLETSEPKPFLYYPEIKDKEEVQRKRQKLMPNFSDSFGGGSGAGAGGGGMFGSGGGGGGTGSTGPGYSFPHYGFPTYGGITFHPGTTKSNAGMKHGTMDTESKKDPEGCDKSDDKNTVNLFGKVIETTEQDQEPSEATVGNGEVTLTYATGTKEESAGVQDNLFLEKAMQLAKRHANALFDYAVTGDVKMLLAVQRHLTAVQDENGDSVLHLAIIHLHSQLVRDLLEVTSGLISDDIINMRNDLYQRSSNTAKGELAGDTARPFDGHMQ

SEQ ID NO: 3340 - protein, 230 aa, Artificial Sequence
  Synthetic polypeptide
MEPKEATGKENMVTKKKNLAFLRSRLYMLERRKTDTVVESSVSGDHSGTLRRSQSDRTEYNQKLQEKMTPQGECSVAETLTPEEEHHMKRMMAKREKIIKELIQTEKDYLNDLELCVREVVQPLRNKKTDRLDVDSLFSNIESVHQISAKLLSLLEEATTDVEPAMQVIGEVFLQIKGPLEDIYKIYCYHHDEAHSILESYEKEEELKEHLSHCIQSLKKIYMQENRRNY

SEQ ID NO: 3341 - protein, 228 aa, Artificial Sequence
  Synthetic polypeptide
MEPKEATGKENMVTKKKNLAFLRSRLYMLERRKTDTVVESSVSGDHSGTLRRSQSDRTEYNQKLQEKMTPQGECSVAETLTPEEEHHMKRMMAKREKIIKELIQTEKDYLNDLELCVREVVQPLRNKKTDRLDVDSLFSNIESVHQISAKLLSLLEEATTDVEPAMQVIGEVFLQIKGPLEDIYKIYCYHHDEAHSILESYEKEEELKEHLSHCIQSLKKIYMQERNY

SEQ ID NO: 3342 - protein, 52 aa, Artificial Sequence
  Synthetic polypeptide
MLPAVAVSEPVVLRFILPSSWDCRCAPPLLTGFCIFWWRRGFTVLAGLVSSS

SEQ ID NO: 3343 - protein, 368 aa, Artificial Sequence
  Synthetic polypeptide
MPQLSGGGGGGGGDPELCATDEMIPFKDEGDPQKEKIFAEISHPEEEGDLADIKSSLVNESEIIPASNGHEVARQAQTSQEPYHDKAREHPDDGKHPDGGLYNKGPSYSSYSGYIMMPNMNNDPYMSNGSLSPPIPRTSNKVPVVQPSHAVHPLTPLITYSDEHFSPGSHPSHIPSDVNSKQGMSRHPPAPDIPTFYPLSPGGVGQITPPLGWQGQPVYPITGGFRQPYPSSLSVDTSMSRFSHHMIPGPPGPHTTGIPHPAIVTPQVKQEHPHTDSDLMHVKPQHEQRKEQEPKRPHIKKPLNAFMLYMKEMRANVVAECTLKESAAINQILGRRCCGGKIAGAQEFEAAVSHDHTTVLQQHSETLS

SEQ ID NO: 3344 - protein, 340 aa, Artificial Sequence
  Synthetic polypeptide
MPQLSGGGGGGGGDPELCATDEMIPFKDEGDPQKEKIFAEISHPEEEGDLADIKSSLVNESEIIPASNGHEVARQAQTSQEPYHDKAREHPDDGKHPDGGLYNKGPSYSSYSGYIMMPNMNNDPYMSNGSLSPPIPRTSNKVPVVQPSHAVHPLTPLITYSDEHFSPGSHPSHIPSDVNSKQGMSRHPPAPDIPTFYPLSPGGVGQITPPLGWFSHHMIPGPPGPHTTGIPHPAIVTPQVKQEHPHTDSDLMHVKPQHEQRKEQEPKRPHIKKPLNAFMLYMKEMRANVVAECTLKESAAINQILGRRCCGGKIAGAQEFEAAVSHDHTTVLQQHSETLS

SEQ ID NO: 3345 - protein, 340 aa, Artificial Sequence; identical to SEQ ID NO: 3344
  Synthetic polypeptide

SEQ ID NO: 3346 - protein, 272 aa, Artificial Sequence
  Synthetic polypeptide
MAEVARQAQTSQEPYHDKAREHPDDGKHPDGGLYNKGPSYSSYSGYIMMPNMNNDPYMSNGSLSPPIPRTSNKVPVVQPSHAVHPLTPLITYSDEHFSPGSHPSHIPSDVNSKQGMSRHPPAPDIPTFYPLSPGGVGQITPPLGWFSHHMIPGPPGPHTTGIPHPAIVTPQVKQEHPHTDSDLMHVKPQHEQRKEQEPKRPHIKKPLNAFMLYMKEMRANVVAECTLKESAAINQILGRRCCGGKIAGAQEFEAAVSHDHTTVLQQHSETLS

SEQ ID NO: 3347 - protein, 353 aa, Artificial Sequence
  Synthetic polypeptide
MPQLSGGGGGGGGDPELCATDEMIPFKDEGDPQKEKIFAEISHPEEEGDLADIKSSLVNESEIIPASNGHEVARQAQTSQEPYHDKAREHPDDGKHPDGGLYNKGPSYSSYSGYIMMPNMNNDPYMSNGSLSPPIPRTSNKVPVVQPSHAVHPLTPLITYSDEHFSPGSHPSHIPSDVNSKQGMSRHPPAPDIPTFYPLSPGGVGQITPPLGWQGQPVYPITGGFRQPYPSSLSVDTSMSRFSHHMIPGPPGPHTTGIPHPAIVTPQVKQEHPHTDSDLMHVKPQHEQRKEQEPKRPHIKKPLNAFMLYMKEMRANVVAECTLKESAAINQILGRRLSAAVGRLLEPRSSRLR

SEQ ID NO: 3348 - protein, 325 aa, Artificial Sequence
  Synthetic polypeptide
MPQLSGGGGGGGGDPELCATDEMIPFKDEGDPQKEKIFAEISHPEEEGDLADIKSSLVNESEIIPASNGHEVARQAQTSQEPYHDKAREHPDDGKHPDGGLYNKGPSYSSYSGYIMMPNMNNDPYMSNGSLSPPIPRTSNKVPVVQPSHAVHPLTPLITYSDEHFSPGSHPSHIPSDVNSKQGMSRHPPAPDIPTFYPLSPGGVGQITPPLGWFSHHMIPGPPGPHTTGIPHPAIVTPQVKQEHPHTDSDLMHVKPQHEQRKEQEPKRPHIKKPLNAFMLYMKEMRANVVAECTLKESAAINQILGRRLSAAVGRLLEPRSSRLR

SEQ ID NO: 3349 - protein, 325 aa, Artificial Sequence; identical to SEQ ID NO: 3348
  Synthetic polypeptide

SEQ ID NO: 3350 - protein, 257 aa, Artificial Sequence
  Synthetic polypeptide
MAEVARQAQTSQEPYHDKAREHPDDGKHPDGGLYNKGPSYSSYSGYIMMPNMNNDPYMSNGSLSPPIPRTSNKVPVVQPSHAVHPLTPLITYSDEHFSPGSHPSHIPSDVNSKQGMSRHPPAPDIPTFYPLSPGGVGQITPPLGWFSHHMIPGPPGPHTTGIPHPAIVTPQVKQEHPHTDSDLMHVKPQHEQRKEQEPKRPHIKKPLNAFMLYMKEMRANVVAECTLKESAAINQILGRRLSAAVGRLLEPRSSRLR

SEQ ID NO: 3351 - protein, 76 aa, Artificial Sequence
  Synthetic polypeptide
MANWVFCNRCFQPPHRTSCFSLTNCGHVYCDACLGKGKKNECLICKAPCRTVLLSKHAQWLTPVIPALWEAEAGGS

SEQ ID NO: 3352 - protein, 76 aa, Artificial Sequence; identical to SEQ ID NO: 3351
  Synthetic polypeptide

SEQ ID NO: 3353 - protein, 76 aa, Artificial Sequence; identical to SEQ ID NO: 3351
  Synthetic polypeptide

SEQ ID NO: 3354 - protein, 76 aa, Artificial Sequence; identical to SEQ ID NO: 3351
  Synthetic polypeptide

SEQ ID NO: 3355 - protein, 76 aa, Artificial Sequence; identical to SEQ ID NO: 3351
  Synthetic polypeptide

SEQ ID NO: 3356 - protein, 30 aa, Artificial Sequence
  Synthetic polypeptide
MKLLHVFLLFLCFHLRFCKVSVEDLSRQKK

SEQ ID NO: 3357 - protein, 30 aa, Artificial Sequence; identical to SEQ ID NO: 3356
  Synthetic polypeptide

SEQ ID NO: 3358 - protein, 30 aa, Artificial Sequence; identical to SEQ ID NO: 3356
  Synthetic polypeptide

SEQ ID NO: 3359 - protein, 30 aa, Artificial Sequence; identical to SEQ ID NO: 3356
  Synthetic polypeptide

SEQ ID NO: 3360 - protein, 195 aa, Artificial Sequence
  Synthetic polypeptide
MLSHNTMMKQRKQQATAIMKEVHGNDVDGMDLGKKVSIPRDIMLEELSHLSNRGARLFKMRQRRSDKYTFENFQYQSRAQINHSIAMQNGKVDGSNLEGGSQQAPLTPPNTPDPRSPPNPDNIAPGYSGPLKEIPPEKFNTTAVPKYYQSPWEQAISNDPELLEALYPKLFKPEGKAELPDYRSFNRGSRLHWRK

SEQ ID NO: 3361 - protein, 1057 aa, Artificial Sequence
  Synthetic polypeptide
MIVLLLFALLWMVEGVFSQLHYTVQEEQEHGTFVGNIAEDLGLDITKLSARGFQTVPNSRTPYLDLNLETGVLYVNEKIDREQICKQSPSCVLHLEVFLENPLELFQVEIEVLDINDNPPSFPEPDLTVEISESATPGTRFPLESAFDPDVGTNSLRDYEITPNSYFSLDVQTQGDGNRFAELVLEKPLDREQQAVHRYVLTAVDGGGGGGVGEGGGGGGGAGLPPQQQRTGTALLTIRVLDSNDNVPAFDQPVYTVSLPENSPPGTLVIQLNATDPDEGQNGEVVYSFSSHISPRARELFGLSPRTGRLEVSGELDYEESPVYQVYVQAKDLGPNAVPAHCKVLVRVLDANDNAPEISFSTVKEAVSEGAAPGTVVALFSVTDRDSEENGQVQCELLGDVPFRLKSSFKNYYTIVTEAPLDREAGDSYTLTVVARDRGEPALSTSKSIQVQVSDVNDNAPRFSQPVYDVYVTENNVPGAYIYAVSATDRDEGANAQLAYSILECQIQGMSVFTYVSINSENGYLYALRSFDYEQLKDFSFQVEARDAGSPQALAGNATVNILIVDQNDNAPAIVAPLPGRNGTPAREVLPRSAEPGYLLTRVAAVDADDGENARLTYSIVRGNEMNLFRMDWRTGELRTARRVPAKRDPQRPYELVIEVRDHGQPPLSSTATLVVQLVDGAVEPQGGGGSGGGGSGEHQRPSRSGGGETSLDLTLILIIALGSVSFIFLLAMIVLAVRCQKEKKLNIYTCLASDCCLCCCCCGGGGSTCCGRQARARKKKLSKSDIMLVQSSNVPSNPAQVPIEESGGFGSHHHNQNYCYQVCLTPESAKTDLMFLKPCSPSRSTDTEHNPCGAIVTGYTDQQPDIISNGSILSNETKHQRAELSYLVDRPRRVNSSAFQEADIVSSKDSGHGDSEQGDSDHDATNRAQSAGMDLFSNCTEECKALGHSDRCWMPSFVPSDGRQAADYRSNLHVPGMDSVPDTEVFETPEAQPGAERSFSTFGKEKALHSTLERKELDGLLTNTRAPYKPPYLKLLWRQLCGETHVAQDQGLSTTT

SEQ ID NO: 3362 - protein, 279 aa, Artificial Sequence
  Synthetic polypeptide
MVRKPVVSTISKGGYLQGNVNGRLPSLGNKEPPGQEKVQLKRKVTLLRGVSIIIGTIIGAGIFISPKGVLQNTGSVGMSLTIWTVCGVLSLFGALSYAELGTTIKKSGGHYTYILEVFGPLPAFVRVWVELLIIRPAATAVISLAFGRYILEPFFIQCEIPELAIKLITAVGITVVMVLNSMSVSWSARIQIFLTFCKLTAILIIIVPGVMQLIKGQTQNFKDAFSGRDSSITRLPLAFYYGMYAYAGWFYLNFVTEEVENPEKPGLCLYHYCCIPDSW

SEQ ID NO: 3363 - protein, 79 aa, Artificial Sequence
  Synthetic polypeptide
AILIIIVPGVMQLIKGQTQNFKDAFSGRDSSITRLPLAFYYGMYAYAGWFYLNFVTEEVENPEKPGLCLYHYCCIPDSW

SEQ ID NO: 3364 - protein, 895 aa, Artificial Sequence
  Synthetic polypeptide
MEIKEEGASEEGQHFLPTAQANDPGDCQFTSIQKTPNEPQLEFILACKDLVAPVRDRKLNTLVQISVIHPVEQSLTRYSSTEIVEGTRDPLFLTGVTFPSEYPIYEETKIKLTVYDVKDKSHDTVRTSVLPEHKDPPPEVGRSFLGYASFKVGELLKSKEQLLVLSLRTSDGGKVVGTIEVSVVKMGEIEDGEADHITTDVQGQKCALVCECTAPESVSGKDNLPFLNSVLKNPVCKLYRFPTSDNKWMRIREQMSESILSFHIPKELISLHIKEDLCRNQEIKELGELSPHWDNLRKNVLTHCDQMVNMYQDILTELSKETGSSFKSSSSKGEKTLEFVPINLHLQRMQVHSPHLKDALYDVITVGAPAAHFQGFKNGGLRKLLHRFETERRNTGYQFIYYSPENTAKAKEVLSNINQLQPLIATHADLLLNSASQHSPDSLKNSLKMLSEKTELFVHAFKDQLVRSALLALYTARPGGILKKPPSPKSSTEESSPQDQPPVMRGQDSIPHHSDYDEEEWDRVWANVGKSLNCIIAMVDKLIERDGGSEGSGGNNDGEKEPSLTDAIPSHPREDWYEQLYPLILTLKDCMGEVVNRAKQSLTFVLLQELAYSLPQCLMLTLRRDIVFSQALAGLVCGFIIKLQTSLYDPGFLQQLHTVGLIVQYEGLLSTYSDEIGMLEDMAVGISDLKKVAFKIIEAKSNDVLPVITGRREHYVVEVKLPARMFESLPLQIKEGQLLHVYPVLFNVGINEQQTLAERFGDVSLQESINQENFELLQEYYKIFMEKMPPDYISHFQEQNDLKALLENLLQNIQSKKRKNVEIMWLAATICRKLNGIRFTCCKSAKDRTSMSVTLEQCSILRDEHQLHKDFFIRALDCMRRCDHLVAGKQAQGCH

SEQ ID NO: 3365 - protein, 895 aa, Artificial Sequence; identical to SEQ ID NO: 3364
  Synthetic polypeptide

SEQ ID NO: 3366 - protein, 895 aa, Artificial Sequence; identical to SEQ ID NO: 3364
  Synthetic polypeptide

SEQ ID NO: 3367 - protein, 895 aa, Artificial Sequence; identical to SEQ ID NO: 3364
  Synthetic polypeptide

SEQ ID NO: 3368 - protein, 895 aa, Artificial Sequence; identical to SEQ ID NO: 3364
  Synthetic polypeptide

SEQ ID NO: 3369 - protein, 111 aa, Artificial Sequence
  Synthetic polypeptide
MSHYFYLTPQILLPFSPLTSQEFDLIRRKAGASWQDETRWSDSSVTTYTGSYRKKQLDKSMCSQFSFRAGQHEPECKQMSLTNSSACHLLCWAGTQETTDIKDSAHLHPGD

SEQ ID NO: 3370 - protein, 4 aa, Artificial Sequence
  Synthetic polypeptide
QILP

SEQ ID NO: 3371 - protein, 357 aa, Artificial Sequence
  Synthetic polypeptide
MASTRSIELEHFEERDKRPRPGSRRGAPSSSGGSSSSGPKGNGLIPSPAHSAHCSFYRTRTLQALSSEKKAKKARFYRNGDRYFKGLVFAISSDRFRSFDALLIELTRSLSDNVNLPQGVRTIYTIDGSRKVTSLDELLEGESYVCASNEPFRKVDYTKNINPNWSVNIKGGTSRALAAASSVKSEVKESKDFIKPKLVTVIRSGVKPRKAVRILLNKKTAHSFEQVLTDITEAIKLDSGVVKRLCTLDGKQVTCLQDFFGDDDVFIACGPEKFRYAQDDFVLDHSECRVLKSSYSRSSAVKYSGSKSPGPSRRSKSPASVNGTPSSQLSTPKSTKSSSSSPTSPGSFRGLKKMFLT

SEQ ID NO: 3372 - protein, 357 aa, Artificial Sequence; identical to SEQ ID NO: 3371
  Synthetic polypeptide

SEQ ID NO: 3373 - protein, 357 aa, Artificial Sequence; identical to SEQ ID NO: 3371
  Synthetic polypeptide

SEQ ID NO: 3374 - protein, 374 aa, Artificial Sequence
  Synthetic polypeptide
MASTRSIELEHFEERDKRPRPGSRRGAPSSSGGSSSSGPKGNGLIPSPAHSAHCSFYRTRTLQALSSEKKAKKARFYRNGDRYFKGLVFAISSDRFRSFDALLIELTRSLSDNVNLPQGVRTIYTIDGSRKVTSLDELLEGESYVCASNEPFRKVDYTKNINPNWSVNIKGGTSRALAAASSVKSEVKESKDFIKPKLVTVIRSGVKPRKAVRILLNKKTAHSFEQVLTDITEAIKLDSGVVKRLCTLDGKQVTCLQDFFGDDDVFIACGPEKFRYAQDDFVLDHSECRVLKSSYSRSSAVKYSGSKSPGPSRRSKSPASVKRGGHYSSAYSTAKSPVNGTPSSQLSTPKSTKSSSSSPTSPGSFRGLKKMFLT

SEQ ID NO: 3375 - protein, 374 aa, Artificial Sequence
  Synthetic polypeptide
MLVPLAKLSCLAYQCFHALKIKKNYLPLCATRWSSTSTVPRITTHYTIYPRDKDKRWEGVNMERFAEEADVVIVGAGPAGLSAAVRLKQLAVAHEKDIRVCLVEKAAQIGAHTLSGACLDPGAFKELFPDWKEKGAPLNTPVTEDRFGILTEKYRIPVPILPGLPMNNHGNYIVRLGHLVSWMGEQAEALGVEVYPGYAAAEVLFHDDGSVKGIATNDVGIQKDGAPKATFERGLELHAKVTIFAEGCHGHLAKQLYKKFDLRANCEPQTYGIGLKELWVIDEKNWKPGRVDHTVGWPLDRHTYGGSFLYHLNEGEPLVALGLVVGLDYQNPYLSPFREFQRWKHHPSIRPTLEGGKRIAYGARALNEGGFQEE

SEQ ID NO: 3376 - protein, 327 aa, Artificial Sequence
  Synthetic polypeptide
MLVPLAKLSCLGVNMERFAEEADVVIVGAGPAGLSAAVRLKQLAVAHEKDIRVCLVEKAAQIGAHTLSGACLDPGAFKELFPDWKEKGAPLNTPVTEDRFGILTEKYRIPVPILPGLPMNNHGNYIVRLGHLVSWMGEQAEALGVEVYPGYAAAEVLFHDDGSVKGIATNDVGIQKDGAPKATFERGLELHAKVTIFAEGCHGHLAKQLYKKFDLRANCEPQTYGIGLKELWVIDEKNWKPGRVDHTVGWPLDRHTYGGSFLYHLNEGEPLVALGLVVGLDYQNPYLSPFREFQRWKHHPSIRPTLEGGKRIAYGARALNEGGFQEE

SEQ ID NO: 3377 - protein, 169 aa, Artificial Sequence
  Synthetic polypeptide
MFCGDYVQGTIFPAPNFNPIMDAQMLGGALQGFDCDKDMLINILTQRCNAQRMMIAEAYQSMYGRDLIGDMREQLSDHFKDVMAGLMYPPPLYDAHELWHAMKGVGTDENCLIEILASRTNGEIFQMREAYCLQYSNNLQEDIYSETSGHFRDTLMNLVQVLIPRTFHN

SEQ ID NO: 3378 - protein, 200 aa, Artificial Sequence
  Synthetic polypeptide
MACRPRSPPRHQSRCDGDASFTTPEGPKPRSRCSDWASAVEEDEMRTRVNKEMARYKRKLLINDFGRERKSSSGSSDSKESMSTVPADFETDESVLMRRQKQINYGKNTIAYDRYIKEVPRHLRQPGIHPKTPNKFKKYSRRSWDQQIKLWKVALHFWDPPAEEGCDLQEIHPVDLESAESSSEPQTSSQDDFEPKMVLV

SEQ ID NO: 3379 - protein, 239 aa, Artificial Sequence
  Synthetic polypeptide
MACRPRSPPRHQSRCDGDASPPSPARWSLGRKRRADGRRWRPEDAEEAEHRGAERRPESFTTPEGPKPRSRCSDWASAVEEDEMRTRVNKEMARYKRKLLINDFGRERKSSSGSSDSKESMSTVPADFETDESVLMRRQKQINYGKNTIAYDRYIKEVPRHLRQPGIHPKTPNKFKKYSRRSWDQQIKLWKVALHFWDPPAEEGCDLQEIHPVDLESAESSSEPQTSSQDDFEPKMVLV

SEQ ID NO: 3380 - protein, 246 aa, Artificial Sequence
  Synthetic polypeptide
MACRPRSPPRHQSRCDGDASPPSPARWSLGRKRRADGRRWRPEDAEEAEHRGAERRPESFTTPEGPKPRSRCSDWASAVEEDEMRTRVNKEMASNIYFALRYKRKLLINDFGRERKSSSGSSDSKESMSTVPADFETDESVLMRRQKQINYGKNTIAYDRYIKEVPRHLRQPGIHPKTPNKFKKYSRRSWDQQIKLWKVALHFWDPPAEEGCDLQEIHPVDLESAESSSEPQTSSQDDFEPKMVLV

SEQ ID NO: 3381 - protein, 89 aa, Artificial Sequence
  Synthetic polypeptide
AQPTASLPAARRPPRDGAWDGSAEPTAGAGGPKTPRRQSTAAPSADPRDIKGNSSSMTLEERENHHQEVLIQRSLCLLCRLTLRQMKVS

SEQ ID NO: 3382 - protein, 204 aa, Artificial Sequence
  Synthetic polypeptide
MACRPRSPPRHQSRCDGDASPPSPARWSLGRKRRADGRRWRPEDAEEAEHRGAERRPERYKRKLLINDFGRERKSSSGSSDSKESMSTVPADFETDESVLMRRQKQINYGKNTIAYDRYIKEVPRHLRQPGIHPKTPNKFKKYSRRSWDQQIKLWKVALHFWDPPAEEGCDLQEIHPVDLESAESSSEPQTSSQDDFEPKMVLV

SEQ ID NO: 3383 - protein, 753 aa, Artificial Sequence
  Synthetic polypeptide
MSLQVLNDKNVSNEKNTENCDFLFSPPEVTGRSSVLRVSQKENVPPKNLAKAMKVTFQTPLRDPQTHRILSPSMASKLEAPFTQDDTLGLENSHPVWTQKENQQLIKEVDAKTTHGILQKPVEADTDLLGDASPAFGSGSSSESGPGALADLDCSSSSQSPGSSENQMVSPGKVSGSPEQAVEENLSSYSLDRRVTPASETLEDPCRTESQHKAETPHGAEEECKAETPHGAEEECRHGGVCAPAAVATSPPGAIPKEACGGAPLQGLPGEALGCPAGVGTPVPADGTQTLTCAHTSAPESTAPTNHLVAGRAMTLSPQEEVAAGQMASSSRSGPVKLEFDVSDGATSKRAPPPRRLGERSGLKPPLRKAAVRQQKAPQEVEEDDGRSGAGEDPPMPASRGSYHLDWDKMDDPNFIPFGGDTKSGCSEAQPPESPETRLGQPAAEQLHAGPATEEPGPCLSQQLHSASAEDTPVVQLAAETPTAESKERALNSASTSLPTSCPGSEPVPTHQQGQPALELKEESFRDPAEVLGTGAEVDYLEQFGTSSFKESALRKQSLYLKFDPLLRDSPGRPVPVATETSSMHGANETPSGRPREAKLVEFDFLGALDIPVPGPPPGVPAPGGPPLSTGPIVDLLQYSQKDLDAVVKATQEENRELRSRCEELHGKNLELGKIMDRFEEVVYQAMEEVQKQKELSKAEIQKVLKEKDQLTTDLNSMEKSFSDLFKRFEKQKEVIEGYRKIQKLAGHGGTHL

SEQ ID NO: 3384 - protein, 116 aa, Artificial Sequence
  Synthetic polypeptide
MAAPLGGMFSGQPPGPPQAPPGLPGQASLLQAAPGAPRPSSSTLVDELESSFEACFASLVSQDYVNGTDQEEIRTGVDQCIQKFLDIARQTECFFLQKRLQLSVQKPEQVIKEVFL

SEQ ID NO: 3385 - protein, 113 aa, Artificial Sequence
  Synthetic polypeptide
PLGGMFSGQPPGPPQAPPGLPGQASLLQAAPGAPRPSSSTLVDELESSFEACFASLVSQDYVNGTDQEEIRTGVDQCIQKFLDIARQTECFFLQKRLQLSVQKPEQVIKEVFL

SEQ ID NO: 3386 - protein, 181 aa, Artificial Sequence
  Synthetic polypeptide
MAAPLGGMFSGQPPGPPQAPPGLPGQASLLQAAPGAPRPSSSTLVDELESSFEACFASLVSQDYVNGTDQEEIRTGVDQCIQKFLDIARQTECFFLQKRLQLSVQKPEQVIKEDVSELRNELQRKDALVQKHLTKLRHWQQVLEDINVQHKKPADIPQGSLAYLEQASANIPAPLKPTCFS

SEQ ID NO: 3387 - protein, 178 aa, Artificial Sequence
  Synthetic polypeptide
PLGGMFSGQPPGPPQAPPGLPGQASLLQAAPGAPRPSSSTLVDELESSFEACFASLVSQDYVNGTDQEEIRTGVDQCIQKFLDIARQTECFFLQKRLQLSVQKPEQVIKEDVSELRNELQRKDALVQKHLTKLRHWQQVLEDINVQHKKPADIPQGSLAYLEQASANIPAPLKPTCFS

SEQ ID NO: 3388 - protein, 1093 aa, Artificial Sequence
  Synthetic polypeptide
MQRRGAGLGWPRQQQQQPPPLAVGPRAAAMVPSGGVPQGLGGRSACALLLLCYLNVVPSLGRQTSLTTSVIPKAEQSVAYKDFIYFTVFEGNVRNVSEVSVEYLCSQPCVVNLEAVVSSEFRSSIPVYKKRWKNEKHLHTSRTQIVHVKFPSIMVYRDDYFIRHSISVSAVIVRAWITHKYSGRDWNVKWEENLLHAVAKNYTLLQTIPPFERPFKDHQVCLEWNMGYIWNLRANRIPQCPLENDVVALLGFPYASSGENTGIVKKFPRFRNRELEATRRQRMDYPVFTVSLWLYLLHYCKANLCGILYFVDSNEMYGTPSVFLTEEGYLHIQMHLVKGEDLAVKTKFIIPLKEWFRLDISFNGGQIVVTTSIGQDLKSYHNQTISFREDFHYNDTAGYFIIGGSRYVAGIEGFFGPLKYYRLRSLHPAQIFNPLLEKQLAEQIKLYYERCAEVQEIVSVYASAAKHGGERQEACHLHNSYLDLQRRYGRPSMCRAFPWEKELKDKHPSLFQALLEMDLLTVPRNQNESVSEIGGKIFEKAVKRLSSIDGLHQISSIVPFLTDSSCCGYHKASYYLAVFYETGLNVPRDQLQGMLYSLVGGQGSERLSSMNLGYKHYQGIDNYPLDWELSYAYYSNIATKTPLDQHTLQGDQAYVETIRLKDDEILKVQTKEDGDVFMWLKHEATRGNAAAQQRLAQMLFWGQQGVAKNPEAAIEWYAKGALETEDPALIYDYAIVLFKGQGVKKNRRLALELMKKAASKGLHQAVNGLGWYYHKFKKNYAKAAKYWLKAEEMGNPDASYNLGVLHLDGIFPGVPGRNQTLAGEYFHKAAQGGHMEGTLWCSLYYITGNLETFPRDPEKAVVWAKHVAEKNGYLGHVIRKGLNAYLEGSWHEALLYYVLAAETGIEVSQTNLAHICEERPDLARRYLGVNCVWRYYNFSVFQIDAPSFAYLKMGDLYYYGHQNQSQDLELSVQMYAQAALDGDSQGFFNLALLIEEGTIIPHHILDFLEIDSTLHSNNISILQELYERCWSHSNEESFSPCSLAWLYLHLRLLWGAILHSALIYFLGTFLLSILIAWTVQYFQSVSGRGGSHL

SEQ ID NO: 3389 - protein, 1058 aa, Artificial Sequence
  Synthetic polypeptide
MAPRPKKQPDKNPLHGRELNVVPSLGRQTSLTTSVIPKAEQSVAYKDFIYFTVFEGNVRNVSEVSVEYLCSQPCVVNLEAVVSSEFRSSIPVYKKRWKNEKHLHTSRTQIVHVKFPSIMVYRDDYFIRHSISVSAVIVRAWITHKYSGRDWNVKWEENLLHAVAKNYTLLQTIPPFERPFKDHQVCLEWNMGYIWNLRANRIPQCPLENDVVALLGFPYASSGENTGIVKKFPRFRNRELEATRRQRMDYPVFTVSLWLYLLHYCKANLCGILYFVDSNEMYGTPSVFLTEEGYLHIQMHLVKGEDLAVKTKFIIPLKEWFRLDISFNGGQIVVTTSIGQDLKSYHNQTISFREDFHYNDTAGYFIIGGSRYVAGIEGFFGPLKYYRLRSLHPAQIFNPLLEKQLAEQIKLYYERCAEVQEIVSVYASAAKHGGERQEACHLHNSYLDLQRRYGRPSMCRAFPWEKELKDKHPSLFQALLEMDLLTVPRNQNESVSEIGGKIFEKAVKRLSSIDGLHQISSIVPFLTDSSCCGYHKASYYLAVFYETGLNVPRDQLQGMLYSLVGGQGSERLSSMNLGYKHYQGIDNYPLDWELSYAYYSNIATKTPLDQHTLQGDQAYVETIRLKDDEILKVQTKEDGDVFMWLKHEATRGNAAAQQRLAQMLFWGQQGVAKNPEAAIEWYAKGALETEDPALIYDYAIVLFKGQGVKKNRRLALELMKKAASKGLHQAVNGLGWYYHKFKKNYAKAAKYWLKAEEMGNPDASYNLGVLHLDGIFPGVPGRNQTLAGEYFHKAAQGGHMEGTLWCSLYYITGNLETFPRDPEKAVVWAKHVAEKNGYLGHVIRKGLNAYLEGSWHEALLYYVLAAETGIEVSQTNLAHICEERPDLARRYLGVNCVWRYYNFSVFQIDAPSFAYLKMGDLYYYGHQNQSQDLELSVQMYAQAALDGDSQGFFNLALLIEEGTIIPHHILDFLEIDSTLHSNNISILQELYERCWSHSNEESFSPCSLAWLYLHLRLLWGAILHSALIYFLGTFLLSILIAWTVQYFQSVSGRGGSHL

SEQ ID NO: 3390 - protein, 940 aa, Artificial Sequence
  Synthetic polypeptide
MVYRDDYFIRHSISVSAVIVRAWITHKYSGRDWNVKWEENLLHAVAKNYTLLQTIPPFERPFKDHQVCLEWNMGYIWNLRANRIPQCPLENDVVALLGFPYASSGENTGIVKKFPRFRNRELEATRRQRMDYPVFTVSLWLYLLHYCKANLCGILYFVDSNEMYGTPSVFLTEEGYLHIQMHLVKGEDLAVKTKFIIPLKEWFRLDISFNGGQIVVTTSIGQDLKSYHNQTISFREDFHYNDTAGYFIIGGSRYVAGIEGFFGPLKYYRLRSLHPAQIFNPLLEKQLAEQIKLYYERCAEVQEIVSVYASAAKHGGERQEACHLHNSYLDLQRRYGRPSMCRAFPWEKELKDKHPSLFQALLEMDLLTVPRNQNESVSEIGGKIFEKAVKRLSSIDGLHQISSIVPFLTDSSCCGYHKASYYLAVFYETGLNVPRDQLQGMLYSLVGGQGSERLSSMNLGYKHYQGIDNYPLDWELSYAYYSNIATKTPLDQHTLQGDQAYVETIRLKDDEILKVQTKEDGDVFMWLKHEATRGNAAAQQRLAQMLFWGQQGVAKNPEAAIEWYAKGALETEDPALIYDYAIVLFKGQGVKKNRRLALELMKKAASKGLHQAVNGLGWYYHKFKKNYAKAAKYWLKAEEMGNPDASYNLGVLHLDGIFPGVPGRNQTLAGEYFHKAAQGGHMEGTLWCSLYYITGNLETFPRDPEKAVVWAKHVAEKNGYLGHVIRKGLNAYLEGSWHEALLYYVLAAETGIEVSQTNLAHICEERPDLARRYLGVNCVWRYYNFSVFQIDAPSFAYLKMGDLYYYGHQNQSQDLELSVQMYAQAALDGDSQGFFNLALLIEEGTIIPHHILDFLEIDSTLHSNNISILQELYERCWSHSNEESFSPCSLAWLYLHLRLLWGAILHSALIYFLGTFLLSILIAWTVQYFQSVSGRGGSHL

SEQ ID NO: 3391 - protein, 19 aa, Artificial Sequence
  Synthetic polypeptide
CTPKPPWMETPRDFLTWPC

SEQ ID NO: 3392 - protein, 1095 aa, Artificial Sequence
  Synthetic polypeptide
MQRRGAGLGWPRQQQQQPPPLAVGPRAAAMVPSGGVPQGLGGRSACALLLLCYLNVVPSLGRQTSLTTSVIPKAEQSVAYKDFIYFTVFEGNVRNVSEVSVEYLCSQPCVVNLEAVVSSEFRSSIPVYKKRWKNEKHLHTSRTQIVHVKFPSIMVYRDDYFIRHSISVSAVIVRAWITHKYSGRDWNVKWEENLLHAVAKNYTLLQTIPPFERPFKDHQVCLEWNMGYIWNLRANRIPQCPLENDVVALLGFPYASSGENTGIVKKFPRFRNRELEATRRQRMDYPVFTVSLWLYLLHYCKANLCGILYFVDSNEMYGTPSVFLTEEGYLHIQMHLVKGEDLAVKTKFIIPLKEWFRLDISFNGGQIVVTTSIGQDLKSYHNQTISFREDFHYNDTAGYFIIGGSRYVAGIEGFFGPLKYYRLRSLHPAQIFNPLLEKQLAEQIKLYYERCAEVQEIVSVYASAAKHGGERQEACHLHNSYLDLQRRYGRPSMCRAFPWEKELKDKHPSLFQALLEMDLLTVPRNQNESVSEIGGKIFEKAVKRLSSIDGLHQISSIVPFLTDSSCCGYHKASYYLAVFYETGLNVPRDQLQGMLYSLVGGQGSERLSSMNLGYKHYQGIDNYPLDWELSYAYYSNIATKTPLDQHTLQGDQAYVETIRLKDDEILKVQTKEDGDVFMWLKHEATRGNAAAQQRLAQMLFWGQQGVAKNPEAAIEWYAKGALETEDPALIYDYAIVLFKGQGVKKNRRLALELMKKAASKGLHQAVNGLGWYYHKFKKNYAKAAKYWLKAEEMGNPDASYNLGVLHLDGIFPGVPGRNQTLAGEYFHKAAQGGHMEGTLWCSLYYITGNLETFPRDPEKAVVWAKHVAEKNGYLGHVIRKGLNAYLEGSWHEALLYYVLAAETGIEVSQTNLAHICEERPDLARRYLGVNCVWRYYNFSVFQIDAPSFAYLKMGDLYYYGHQNQSQDLELSVQMYAQAALDGDSQGFFNLALLIEEGTIIPHHILDFLEIDSTLHSNNISILQELYERCWSHSNEESFSPCSLAWLYLHLRLLWGAILHSALIYFLGTFLLSILIAWTVQYFQSVSDPQEQNITE

SEQ ID NO: 3393 - protein, 1060 aa, Artificial Sequence
  Synthetic polypeptide
MAPRPKKQPDKNPLHGRELNVVPSLGRQTSLTTSVIPKAEQSVAYKDFIYFTVFEGNVRNVSEVSVEYLCSQPCVVNLEAVVSSEFRSSIPVYKKRWKNEKHLHTSRTQIVHVKFPSIMVYRDDYFIRHSISVSAVIVRAWITHKYSGRDWNVKWEENLLHAVAKNYTLLQTIPPFERPFKDHQVCLEWNMGYIWNLRANRIPQCPLENDVVALLGFPYASSGENTGIVKKFPRFRNRELEATRRQRMDYPVFTVSLWLYLLHYCKANLCGILYFVDSNEMYGTPSVFLTEEGYLHIQMHLVKGEDLAVKTKFIIPLKEWFRLDISFNGGQIVVTTSIGQDLKSYHNQTISFREDFHYNDTAGYFIIGGSRYVAGIEGFFGPLKYYRLRSLHPAQIFNPLLEKQLAEQIKLYYERCAEVQEIVSVYASAAKHGGERQEACHLHNSYLDLQRRYGRPSMCRAFPWEKELKDKHPSLFQALLEMDLLTVPRNQNESVSEIGGKIFEKAVKRLSSIDGLHQISSIVPFLTDSSCCGYHKASYYLAVFYETGLNVPRDQLQGMLYSLVGGQGSERLSSMNLGYKHYQGIDNYPLDWELSYAYYSNIATKTPLDQHTLQGDQAYVETIRLKDDEILKVQTKEDGDVFMWLKHEATRGNAAAQQRLAQMLFWGQQGVAKNPEAAIEWYAKGALETEDPALIYDYAIVLFKGQGVKKNRRLALELMKKAASKGLHQAVNGLGWYYHKFKKNYAKAAKYWLKAEEMGNPDASYNLGVLHLDGIFPGVPGRNQTLAGEYFHKAAQGGHMEGTLWCSLYYITGNLETFPRDPEKAVVWAKHVAEKNGYLGHVIRKGLNAYLEGSWHEALLYYVLAAETGIEVSQTNLAHICEERPDLARRYLGVNCVWRYYNFSVFQIDAPSFAYLKMGDLYYYGHQNQSQDLELSVQMYAQAALDGDSQGFFNLALLIEEGTIIPHHILDFLEIDSTLHSNNISILQELYERCWSHSNEESFSPCSLAWLYLHLRLLWGAILHSALIYFLGTFLLSILIAWTVQYFQSVSDPQEQNITE

SEQ ID NO: 3394 - protein, 942 aa, Artificial Sequence
  Synthetic polypeptide
MVYRDDYFIRHSISVSAVIVRAWITHKYSGRDWNVKWEENLLHAVAKNYTLLQTIPPFERPFKDHQVCLEWNMGYIWNLRANRIPQCPLENDVVALLGFPYASSGENTGIVKKFPRFRNRELEATRRQRMDYPVFTVSLWLYLLHYCKANLCGILYFVDSNEMYGTPSVFLTEEGYLHIQMHLVKGEDLAVKTKFIIPLKEWFRLDISFNGGQIVVTTSIGQDLKSYHNQTISFREDFHYNDTAGYFIIGGSRYVAGIEGFFGPLKYYRLRSLHPAQIFNPLLEKQLAEQIKLYYERCAEVQEIVSVYASAAKHGGERQEACHLHNSYLDLQRRYGRPSMCRAFPWEKELKDKHPSLFQALLEMDLLTVPRNQNESVSEIGGKIFEKAVKRLSSIDGLHQISSIVPFLTDSSCCGYHKASYYLAVFYETGLNVPRDQLQGMLYSLVGGQGSERLSSMNLGYKHYQGIDNYPLDWELSYAYYSNIATKTPLDQHTLQGDQAYVETIRLKDDEILKVQTKEDGDVFMWLKHEATRGNAAAQQRLAQMLFWGQQGVAKNPEAAIEWYAKGALETEDPALIYDYAIVLFKGQGVKKNRRLALELMKKAASKGLHQAVNGLGWYYHKFKKNYAKAAKYWLKAEEMGNPDASYNLGVLHLDGIFPGVPGRNQTLAGEYFHKAAQGGHMEGTLWCSLYYITGNLETFPRDPEKAVVWAKHVAEKNGYLGHVIRKGLNAYLEGSWHEALLYYVLAAETGIEVSQTNLAHICEERPDLARRYLGVNCVWRYYNFSVFQIDAPSFAYLKMGDLYYYGHQNQSQDLELSVQMYAQAALDGDSQGFFNLALLIEEGTIIPHHILDFLEIDSTLHSNNISILQELYERCWSHSNEESFSPCSLAWLYLHLRLLWGAILHSALIYFLGTFLLSILIAWTVQYFQSVSDPQEQNITE

SEQ ID NO: 3395 - protein, 19 aa, Artificial Sequence
  Synthetic polypeptide
CTPKPPWMETPRDFLTWPC

SEQ ID NO: 3396 - protein, 1088 aa, Artificial Sequence
  Synthetic polypeptide
MQRRGAGLGWPRQQQQQPPPLAVGPRAAAMVPSGGVPQGLGGRSACALLLLCYLNVVPSLGRQTSLTTSVIPKAEQSVAYKDFIYFTVFEGNVRNVSEVSVEYLCSQPCVVNLEAVVSSEFRSSIPVYKKRWKNEKHLHTSRTQIVHVKFPSIMVYRDDYFIRHSISVSAVIVRAWITHKYSGRDWNVKWEENLLHAVAKNYTLLQTIPPFERPFKDHQVCLEWNMGYIWNLRANRIPQCPLENDVVALLGFPYASSGENTGIVKKFPRFRNRELEATRRQRMDYPVFTVSLWLYLLHYCKANLCGILYFVDSNEMYGTPSVFLTEEGYLHIQMHLVKGEDLAVKTKFIIPLKEWFRLDISFNGGQIVVTTSIGQDLKSYHNQTISFREDFHYNDTAGYFIIGGSRYVAGIEGFFGPLKYYRLRSLHPAQIFNPLLEKQLAEQIKLYYERCAEVQEIVSVYASAAKHGGERQEACHLHNSYLDLQRRYGRPSMCRAFPWEKELKDKHPSLFQALLEMDLLTVPRNQNESVSEIGGKIFEKAVKRLSSIDGLHQISSIVPFLTDSSCCGYHKASYYLAVFYETGLNVPRDQLQGMLYSLVGGQGSERLSSMNLGYKHYQGIDNYPLDWELSYAYYSNIATKTPLDQHTLQGDQAYVETIRLKDDEILKVQTKEDGDVFMWLKHEATRGNAAAQQRLAQMLFWGQQGVAKNPEAAIEWYAKGALETEDPALIYDYAIVLFKGQGVKKNRRLALELMKKAASKGLHQAVNGLGWYYHKFKKNYAKAAKYWLKAEEMGNPDASYNLGVLHLDGIFPGVPGRNQTLAGEYFHKAAQGGHMEGTLWCSLYYITGNLETFPRDPEKAVVWAKHVAEKNGYLGHVIRKGLNAYLEGSWHEALLYYVLAAETGIEVSQTNLAHICEERPDLARRYLGVNCVWRYYNFSVFQIDAPSFAYLKMGDLYYYGHQNQSQDLELSVQMYAQAALDGDSQGFFNLALLIEEGTIIPHHILDFLEIDSTLHSNNISILQELYERCWSHSNEESFSPCSLAWLYLHLRLLWGAILHSALIYFLGTFLLSILIAWTVQYFQSVSAF

SEQ ID NO: 3397 - protein, 1053 aa, Artificial Sequence
  Synthetic polypeptide
MAPRPKKQPDKNPLHGRELNVVPSLGRQTSLTTSVIPKAEQSVAYKDFIYFTVFEGNVRNVSEVSVEYLCSQPCVVNLEAVVSSEFRSSIPVYKKRWKNEKHLHTSRTQIVHVKFPSIMVYRDDYFIRHSISVSAVIVRAWITHKYSGRDWNVKWEENLLHAVAKNYTLLQTIPPFERPFKDHQVCLEWNMGYIWNLRANRIPQCPLENDVVALLGFPYASSGENTGIVKKFPRFRNRELEATRRQRMDYPVFTVSLWLYLLHYCKANLCGILYFVDSNEMYGTPSVFLTEEGYLHIQMHLVKGEDLAVKTKFIIPLKEWFRLDISFNGGQIVVTTSIGQDLKSYHNQTISFREDFHYNDTAGYFIIGGSRYVAGIEGFFGPLKYYRLRSLHPAQIFNPLLEKQLAEQIKLYYERCAEVQEIVSVYASAAKHGGERQEACHLHNSYLDLQRRYGRPSMCRAFPWEKELKDKHPSLFQALLEMDLLTVPRNQNESVSEIGGKIFEKAVKRLSSIDGLHQISSIVPFLTDSSCCGYHKASYYLAVFYETGLNVPRDQLQGMLYSLVGGQGSERLSSMNLGYKHYQGIDNYPLDWELSYAYYSNIATKTPLDQHTLQGDQAYVETIRLKDDEILKVQTKEDGDVFMWLKHEATRGNAAAQQRLAQMLFWGQQGVAKNPEAAIEWYAKGALETEDPALIYDYAIVLFKGQGVKKNRRLALELMKKAASKGLHQAVNGLGWYYHKFKKNYAKAAKYWLKAEEMGNPDASYNLGVLHLDGIFPGVPGRNQTLAGEYFHKAAQGGHMEGTLWCSLYYITGNLETFPRDPEKAVVWAKHVAEKNGYLGHVIRKGLNAYLEGSWHEALLYYVLAAETGIEVSQTNLAHICEERPDLARRYLGVNCVWRYYNFSVFQIDAPSFAYLKMGDLYYYGHQNQSQDLELSVQMYAQAALDGDSQGFFNLALLIEEGTIIPHHILDFLEIDSTLHSNNISILQELYERCWSHSNEESFSPCSLAWLYLHLRLLWGAILHSALIYFLGTFLLSILIAWTVQYFQSVSAF

SEQ ID NO: 3398 - protein, 935 aa, Artificial Sequence
  Synthetic polypeptide
MVYRDDYFIRHSISVSAVIVRAWITHKYSGRDWNVKWEENLLHAVAKNYTLLQTIPPFERPFKDHQVCLEWNMGYIWNLRANRIPQCPLENDVVALLGFPYASSGENTGIVKKFPRFRNRELEATRRQRMDYPVFTVSLWLYLLHYCKANLCGILYFVDSNEMYGTPSVFLTEEGYLHIQMHLVKGEDLAVKTKFIIPLKEWFRLDISFNGGQIVVTTSIGQDLKSYHNQTISFREDFHYNDTAGYFIIGGSRYVAGIEGFFGPLKYYRLRSLHPAQIFNPLLEKQLAEQIKLYYERCAEVQEIVSVYASAAKHGGERQEACHLHNSYLDLQRRYGRPSMCRAFPWEKELKDKHPSLFQALLEMDLLTVPRNQNESVSEIGGKIFEKAVKRLSSIDGLHQISSIVPFLTDSSCCGYHKASYYLAVFYETGLNVPRDQLQGMLYSLVGGQGSERLSSMNLGYKHYQGIDNYPLDWELSYAYYSNIATKTPLDQHTLQGDQAYVETIRLKDDEILKVQTKEDGDVFMWLKHEATRGNAAAQQRLAQMLFWGQQGVAKNPEAAIEWYAKGALETEDPALIYDYAIVLFKGQGVKKNRRLALELMKKAASKGLHQAVNGLGWYYHKFKKNYAKAAKYWLKAEEMGNPDASYNLGVLHLDGIFPGVPGRNQTLAGEYFHKAAQGGHMEGTLWCSLYYITGNLETFPRDPEKAVVWAKHVAEKNGYLGHVIRKGLNAYLEGSWHEALLYYVLAAETGIEVSQTNLAHICEERPDLARRYLGVNCVWRYYNFSVFQIDAPSFAYLKMGDLYYYGHQNQSQDLELSVQMYAQAALDGDSQGFFNLALLIEEGTIIPHHILDFLEIDSTLHSNNISILQELYERCWSHSNEESFSPCSLAWLYLHLRLLWGAILHSALIYFLGTFLLSILIAWTVQYFQSVSAF

SEQ ID NO: 3399 - protein, 19 aa, Artificial Sequence
  Synthetic polypeptide
CTPKPPWMETPRDFLTWPC

SEQ ID NO: 3400 - protein, 127 aa, Artificial Sequence
  Synthetic polypeptide
MILALCNFRLLGSSDSPVSGSGVAGTTGMRHNTREKNKPTNKLSLKLITQIRTASYLSNQSELLQWRCFIGLVSSSEEEETSEAGLHRGEAMLGYNERASVSKPRREASGETTAIDTLILDFQPPEM

SEQ ID NO: 3401 - protein, 103 aa, Artificial Sequence
  Synthetic polypeptide
MELLTFRDVAIEFSPEEWKCLDPAQQNLYRDVMLENYRNLISLGVAISNPDLVIYLEQRKEPYKVKIHETVAKHPGHWTMLHLQSEPAYNPLDTSPKNRLTSG

SEQ ID NO: 3402 - protein, 965 aa, Artificial Sequence
  Synthetic polypeptide
MEPITFTARKHLLSNEVSVDFGLQLVGSLPVHSLTTMPMLPWVVAEVRRLSRQSTRKEPVTKQVRLCVSPSGLRCEPEPGRSQQWDPLIYSSIFECKPQRVHKLIHNSHDPSYFACLIKEDAVHRQSICYVFKADDQTKVPEIISSIRQAGKIARQEELHCPSEFDDTFSKKFEVLFCGRVTVAHKKAPPALIDECIEKFNHVSGSRGSESPRPNPPHAAPTGSQEPVRRPMRKSFSQPGLRSLAFRKELQDGGLRSSGFFSSFEESDIENHLISGHNIVQPTDIEENRTMLFTIGQSEVYLISPDTKKIALEKNFKEISFCSQGIRHVDHFGFICRESSGGGGFHFVCYVFQCTNEALVDEIMMTLKQAFTVAAVQQTAKAPAQLCEGCPLQSLHKLCERIEGMNSSKTKLELQKHLTTLTNQEQATIFEEVQKLRPRNEQRENELIISFLRCLYEEKQKEHIHIGEMKQTSQMAAENIGSELPPSATRFRLDMLKNKAKRSLTESLESILSRGNKARGLQEHSISVDLDSSLSSTLSNTSKEPSVCEKEALPISESSFKLLGSSEDLSSDSESHLPEEPAPLSPQQAFRRRANTLSHFPIECQEPPQPARGSPGVSQRKLMRYHSVSTETPHERNVDPSPVGESKHRPGQSSAPAPPPRLNPSASSPNFFKYLKHNSSGEQSGNAVPKSISYRNALRKKLHSSSSVPNFLKFLAPVDENNTSDFMNTKRDFESKANHLGDSGGTPVKTRRHSWRQQIFLRVATPQKACDSSSRYEDYSELGELPPRSPLEPVCEDGPFGPPPEEKKRTSRELRELWQKAILQQILLLRMEKENQKLQASENDLLNKRLKLDYEEITPCLKEVTTVWEKMLSTPGRSKIKFDMEKMHSAVGQGVPRHHRGEIWKFLAEQFHLKHQFPSKQQPKDVPYKELLKQLTSQQHAILIDLGYSPLRTGLGLFGHYTLGF

SEQ ID NO: 3403 - protein, 871 aa, Artificial Sequence
  Synthetic polypeptide
MEPITFTARKHLLSNEVSVDFGLQLVGSLPVHSLTTMPMLPWVVAEVRRLSRQSTRKEPVTKQVRLCVSPSGLRCEPEPGRSQQWDPLIYSSIFECKPQRVHKLIHNSHDPSYFACLIKEDAVHRQSICYVFKADDQTKVPEIISSIRQAGKIARQEELHCPSEFDDTFSKKFEVLFCGRVTVAHKKAPPALIDECIEKFNHVSGSRGSESPRPNPPHAAPTGSQEPVRRPMRKSFSQPGLRSLAFRKELQDGGLRSSGFFSSFEESDIENHLISGHNIVQPTDIEENRTMLFTIGQSEVYLISPDTKKIALEKNFKEISFCSQGIRHVDHFGFICRESSGGGGFHFVCYVFQCTNEALVDEIMMTLKQAFTVAAVQQTAKAPAQLCEGCPLQSLHKLCERIEGMNSSKTKLELQKHLTTLTNQEQATIFEEVQKLRPRNEQRENELIISFLRCLYEEKQKEHIHIGEMKQTSQMAAENIGSELPPSATRFRLDMLKNKAKRSLTESLESILSRGNKARGLQEHSISVDLDSSLSSTLSNTSKEPSVCEKEALPISESSFKLLGSSEDLSSDSESHLPEEPAPLSPQQAFRRRANTLSHFPIECQEPPQPARGSPGVSQRKLMRYHSVSTETPHERKDFESKANHLGDSGGTPVKTRRHSWRQQIFLRVATPQKACDSSSRYEDYSELGELPPRSPLEPVCEDGPFGPPPEEKKRTSRELRELWQKAILQQILLLRMEKENQKLQASENDLLNKRLKLDYEEITPCLKEVTTVWEKMLSTPGRSKIKFDMEKMHSAVGQGVPRHHRGEIWKFLAEQFHLKHQFPSKQQPKDVPYKELLKQLTSQQHAILIDLGYSPLRTGLGLFGHYTLGF

SEQ ID NO: 3404 - protein, 54 aa, Artificial Sequence
  Synthetic polypeptide
MDFTAQPKPATALCGVVSADGKIAYPPGVKEITDKITTDEMIKRLKGKTNCLFT

SEQ ID NO: 3405 - protein, 54 aa, Artificial Sequence; identical to SEQ ID NO: 3404
  Synthetic polypeptide

SEQ ID NO: 3406 - protein, 354 aa, Artificial Sequence
  Synthetic polypeptide
MAVDITLLFRASVKTVKTRNKALGVAVGGGVDGSRDELFRRSPRPKGDFSSRAREVISHIGKLRDFLLEHRKDYINAYSHTMSEYGRMTDTERDQIDQDAQIFMRTCSEAIQQLRTEAHKEIHSQQVKEHRTAVLDFIEDYLKRVCKLYSEQRAIRVKRVVDKKRLSKLEPEPNTKTRESTSSEKVSQSPSKDSEENPATEERPEKILAETQPELGTWGDGKGEDELSPEEIQMFEQENQRLIGEMNSLFDEVRQIEGRVVEISRLQEIFTEKVLQQEAEIDSIHQLVVGATENIKEGNEDIREAIKNNAGFRVWILFFLVMCSFSLLFLDWSLTYKMRPMSHTTVLLRTQVNA

SEQ ID NO: 3407 - protein, 1270 aa, Artificial Sequence
  Synthetic polypeptide
MTEALQWARYHWRRLIRGATRDDDSGPYNYSSLLACGRKSSQTPKLSGRHRIVVPHIQPFKDEYEKFSGAYVNNRIRTTKYTLLNFVPRNLFEQFHRAANLYFLFLVVLNWVPLVEAFQKEITMLPLVVVLTIIAIKDGLEDYRKYKIDKQINNLITKVYSRKEKKYIDRCWKDVTVGDFIRLSCNEVIPADMVLLFSTDPDGICHIETSGLDGESNLKQRQVVRGYAEQDSEVDPEKFSSRIECESPNNDLSRFRGFLEHSNKERVGLSKENLLLRGCTIRNTEAVVGIVVYAGHETKAMLNNSGPRYKRSKLERRANTDVLWCVMLLVIMCLTGAVGHGIWLSRYEKMHFFNVPEPDGHIISPLLAGFYMFWTMIILLQVLIPISLYVSIEIVKLGQIYFIQSDVDFYNEKMDSIVQCRALNIAEDLGQIQYLFSDKTGTLTENKMVFRRCSVAGFDYCHEENARRLESYQEAVSEDEDFIDTVSGSLSNMAKPRAPSCRTVHNGPLGNKPSNHLAGSSFTLGSGEGASEVPHSRQAAFSSPIETDVVPDTRLLDKFSQITPRLFMPLDETIQNPPMETLYIIDFFIALAICNTVVVSAPNQPRQKIRHPSLGGLPIKSLEEIKSLFQRWSVRRSSSPSLNSGKEPSSGVPNAFVSRLPLFSRMKPASPVEEEVSQVCESPQCSSSSACCTETEKQHGDAGLLNGKAESLPGQPLACNLCYEAESPDEAALVYAARAYQCTLRSRTPEQVMVDFAALGPLTFQLLHILPFDSVRKRMSVVVRHPLSNQVVVYTKGADSVIMELLSVASPDGASLEKQQMIVREKTQKHLDDYAKQGLRTLCIAKKVMSDTEYAEWLRNHFLAETSIDNREELLLESAMRLENKLTLLGATGIEDRLQEGVPESIEALHKAGIKIWMLTGDKQETAVNIAYACKLLEPDDKLFILNTQSKDACGMLMSTILKELQKKTQALPEQVSLSEDLLQPPVPRDSGLRAGLIITGKTLEFALQESLQKQFLELTSWCQAVVCCRATPLQKSEVVKLVRSHLQVMTLAIGDGANDVSMIQVADIGIGVSGQEGMQAVMASDFAVSQFKHLSKLLLVHGHWCYTRLSNMILYFFYKNVAYVNLLFWYQFFCGFSGTSMTDYWVLIFFNLLFTSAPPVIYGVLEKDVSAETLMQLPELYRSGQKSEAYLPHTFWITLLDAFYQSLVCFFVPYFTYQGSDTDIFAFGNPLNTAALFIVLLHLVIESKSLTRCSDSHLQFQSFGRLWIT

SEQ ID NO: 3408 - protein, 199 aa, Artificial Sequence
  Synthetic polypeptide
MAPWAEAEHSALNPLRAVWLTLTAAFLLTLLLQLLPPGLLPGCAIFQDLIRYGKTKCGEPSRPAACRAFDVPKRYFSHFYIISVLWNGFLLWCLTQSLFLGAPFPSWLHGLLRILGAAQFQGGELALSAFLVLVFLWLHSLRRLFECLYVSVFSNVMIHVVQYCFGLVYYVLVGLTVLSQVPMDGRNASPPSFCWELGC

SEQ ID NO: 3409 - protein, 304 aa, Artificial Sequence
  Synthetic polypeptide
MIPIEWVCRRIATGSFLKRNPGVKEGYKFYPPKVELFFKDDANNDPQWSEEQLIAAKFCFAGLLIGQTEVDIMSHATQAIFEILEKSWLPQNCTLVDMKIEFGVDVTTKEIVLADVIDNDSWRLWPSGDRSQQKDKQSYRDLKEVTPEGLQMVKKNFEWVAERVELLLKSESQCRVVVLMGSTSDLGHCEKIKKACGNFGIPCELRVTSAHKGPDETLRIKAEYEGDGIPTVFVAVAGRSNGLGPVMSGNTAYPVISCPPLTPDWGVQDVWSSLRLPSGMVVSICNPSYSEAEVGESLEPGRQR

SEQ ID NO: 3410 - protein, 396 aa, Artificial Sequence
  Synthetic polypeptide
MATAEVLNIGKKLYEGKTKEVYELLDSPGKVLLQSKDQITAGNAARKNHLEGKAAISNKITSCIFQLLQEAGIKTAFTRKCGETAFIAPQCEMIPIEWVCRRIATGSFLKRNPGVKEGYKFYPPKVELFFKDDANNDPQWSEEQLIAAKFCFAGLLIGQTEVDIMSHATQAIFEILEKSWLPQNCTLVDMKIEFGVDVTTKEIVLADVIDNDSWRLWPSGDRSQQKDKQSYRDLKEVTPEGLQMVKKNFEWVAERVELLLKSESQCRVVVLMGSTSDLGHCEKIKKACGNFGIPCELRVTSAHKGPDETLRIKAEYEGDGIPTVFVAVAGRSNGLGPVMSGNTAYPVISCPPLTPDWGVQDVWSSLRLPSGMVVSICNPSYSEAEVGESLEPGRQR

SEQ ID NO: 3411 - protein, 396 aa, Artificial Sequence; identical to SEQ ID NO: 3410
  Synthetic polypeptide

SEQ ID NO: 3412 - protein, 396 aa, Artificial Sequence; identical to SEQ ID NO: 3410
  Synthetic polypeptide

SEQ ID NO: 3413 - protein, 403 aa, Artificial Sequence
  Synthetic polypeptide
MATAEVLNIGKKLYEGKTKEVYELLDSPGKVLLQSKDQITAGNAARKNHLEGKAAISNKITSCIFQLLQEAVTSYKSNRIKTAFTRKCGETAFIAPQCEMIPIEWVCRRIATGSFLKRNPGVKEGYKFYPPKVELFFKDDANNDPQWSEEQLIAAKFCFAGLLIGQTEVDIMSHATQAIFEILEKSWLPQNCTLVDMKIEFGVDVTTKEIVLADVIDNDSWRLWPSGDRSQQKDKQSYRDLKEVTPEGLQMVKKNFEWVAERVELLLKSESQCRVVVLMGSTSDLGHCEKIKKACGNFGIPCELRVTSAHKGPDETLRIKAEYEGDGIPTVFVAVAGRSNGLGPVMSGNTAYPVISCPPLTPDWGVQDVWSSLRLPSGMVVSICNPSYSEAEVGESLEPGRQR

SEQ ID NO: 3414 - protein, 62 aa, Artificial Sequence
  Synthetic polypeptide
MTELETAMGMIIDVFSRYSGSEGSTQTLTKGELKVLMEKELPGFLQGDASAVSGGVEEFLFV

SEQ ID NO: 3415 - protein, 109 aa, Artificial Sequence
  Synthetic polypeptide
MTELETAMGMIIDVFSRYSGSEGSTQTLTKGELKVLMEKELPGFLQSGKDKDAVDKLLKDLDANGDAQVDFSEFIVFVAAITSAFHKHFERLRQADHKVRRSRPSWLTW

SEQ ID NO: 3416 - protein, 315 aa, Artificial Sequence
  Synthetic polypeptide
MPGPATDAGKIPFCDAKEEIRAGLESSEGGGGPERPGARGQRQNIVWRNVVLMSLLHLGAVYSLVLIPKAKPLTLLWAYFCFLLAALGVTAGAHRLWSHRSYRAKLPLRIFLAVANSMAFQNDIFEWSRDHRAHHKYSETDADPHNARRGFFFSHIGWLFVRKHRDVIEKGRKLDVTDLLADPVVRIQRKYYKISVVLMCFVVPTLVPWYIWGESLWNSYFLASILRYTISLNISWLVNSAAHMYGNRPYDKHISPRQNPLVALGAIGLFTVAKMCNQIKCPSTDEWIKNMYHICIMEYYSALKKRKSCHLPQLE

SEQ ID NO: 3417 - protein, 130 aa, Artificial Sequence
  Synthetic polypeptide
MPGPATDAGKIPFCDAKEEIRAGLESSEGGGGPERPGARGQRQNIVWRNVVLMSLLHLGAVYSLVLIPKAKPLTLLWAYFCFLLAALGVTAGAHRLWSHRSYRAKLPLRIFLAVANSMAFQNGFELRSFT

SEQ ID NO: 3418 - protein, 130 aa, Artificial Sequence; identical to SEQ ID NO: 3417
  Synthetic polypeptide

SEQ ID NO: 3419 - protein, 130 aa, Artificial Sequence; identical to SEQ ID NO: 3417
  Synthetic polypeptide

SEQ ID NO: 3420 - protein, 135 aa, Artificial Sequence
  Synthetic polypeptide
MPGPATDAGKIPFCDAKEEIRAGLESSEGGGGPERPGARGQRQNIVWRNVVLMSLLHLGAVYSLVLIPKAKPLTLLWAYFCFLLAALGVTAGAHRLWSHRSYRAKLPLRIFLAVANSMAFQLTLEQNGFELRSFT

SEQ ID NO: 3421 - protein, 135 aa, Artificial Sequence; identical to SEQ ID NO: 3420
  Synthetic polypeptide

SEQ ID NO: 3422 - protein, 135 aa, Artificial Sequence; identical to SEQ ID NO: 3420
  Synthetic polypeptide

SEQ ID NO: 3423 - protein, 94 aa, Artificial Sequence
  Synthetic polypeptide
MEENNDSTENPQQGQGRQNAIKCGWLRKQGGFVKTWHTRWFVLKGDQLYYFKDEDETKPLEYLTTSGDSVWLVTVGEDTTDISWVEAGVQLNIL

SEQ ID NO: 3424 - protein, 94 aa, Artificial Sequence; identical to SEQ ID NO: 3423
  Synthetic polypeptide

SEQ ID NO: 3425 - protein, 74 aa, Artificial Sequence
  Synthetic polypeptide
MAFTERVNSSGNSSLPWPPKVPRLQPLPGRHPVWEVRSVSARPPIVWDVRSPSAWLPSLESEERLCLAAIPSGK

SEQ ID NO: 3426 - protein, 74 aa, Artificial Sequence; identical to SEQ ID NO: 3425
  Synthetic polypeptide

SEQ ID NO: 3427 - protein, 74 aa, Artificial Sequence; identical to SEQ ID NO: 3425
  Synthetic polypeptide

SEQ ID NO: 3428 - protein, 230 aa, Artificial Sequence
  Synthetic polypeptide
MKFLLDILLLLPLLIVCSLESFVKLFIPKRRKSVTGEIVLITGAGHGIGRLTAYEFAKLKSKLVLWDINKHGLEETAAKCKGLGAKVHTFVVDCSNREDIYSSAKKVKAEIGDVSILVNNAGVVYTSDLFATQDPQIEKTFEVNVLAHFWTTKAFLPAMTKNNHGHIVTVASAAGHVSVPFLLAYWPGAVAHTCISQHFGRPRWVDHLRSEVQDQPDQHGETLSLLKIQN

SEQ ID NO: 3429 - protein, 186 aa, Artificial Sequence
  Synthetic polypeptide
MKFLLDILLLLPLLIVCSLESFVKLFIPKRRKSVTGEIVLITGAGHGIGRLTAYEFAKLKSKLVLWDINKHGLEETAAKCKGLGAKVHTFVVDCSNREDIYSSAKKTTKAFLPAMTKNNHGHIVTVASAAGHVSVPFLLAYWPGAVAHTCISQHFGRPRWVDHLRSEVQDQPDQHGETLSLLKIQN

SEQ ID NO: 3430 - protein, 568 aa, Artificial Sequence
  Synthetic polypeptide
MGDSGSRRSTLVSRLPIFRRSINRRHDSLPSSPSSSNTVGVHSSSPSSTNSSSGSTGKRRSIFRTPSISFHHKKGSEPKQEPTNQNLSISNGAQPGHSNMQKLSLEEHIKTRGRHSVGFSSSRNKKITRSLTEDFEREKEHSTNKNVFINCLSSGKSEGDDSGFTEDQTRRSVKQSTRKLLPKSFSSHYKFSKPVLQSQSISLVQQSEFSLEVTQYQEREPVLVRASPSCSVDVTERAGSSLQSPLLSADLTTAQTPSEFLALTEDSVSEMDAFSKSGSMASHCDNFGHNDSTSQMSLNSAAVTKTTTELTGTVPCAIMSPGKYRLEGQCSTESNSLPETSAANQKEVLLQIAELPATSVSHSESNLPADSEREENIGLQNGETMLGTNSPRKLGFYEQHKAIAEHVKGIHPISDSKIIPTSGDHHIFNKTSHGYEANPAKVLASSLSPFREGRFIERRLRSSSEGTAGSSRMILKPKDGNIEEVNSLRKQRAGSSSSKMNSLDVLNNLGSCELDEDDLMLDLEFLEEQSLHPSELPQEHTRKAKRIHRPLKELDHRHRLPEMAKNCE

SEQ ID NO: 3431 - protein, 568 aa, Artificial Sequence; identical to SEQ ID NO: 3430
  Synthetic polypeptide

SEQ ID NO: 3432 - protein, 568 aa, Artificial Sequence; identical to SEQ ID NO: 3430
  Synthetic polypeptide

SEQ ID NO: 3433 - protein, 568 aa, Artificial Sequence; identical to SEQ ID NO: 3430
  Synthetic polypeptide

SEQ ID NO: 3434 - protein, 19 aa, Artificial Sequence
  Synthetic polypeptide
MTRKALRRTLRPLVLYVLG

SEQ ID NO: 3435 - protein, 210 aa, Artificial Sequence
  Synthetic polypeptide
MADNLSDTLKKLKITAVDKTEDSLEGCLDCLLQALAQNNTETSEKIQASGILQLFASLLTPQSSCKAKVANIIAEVAKNEFMRIPCVDAGLISPLVQLLNSKDQEVLLQTGRALGNICYDSHSLQAQLINMGVIPTLVKLLGIHCQNAALTEMCLVAFGNLAELESSKEQFASTNIAEELVKLFKKQIEHDKREMIFEVLAPLAENGKQD

SEQ ID NO: 3436 - protein, 167 aa, Artificial Sequence
  Synthetic polypeptide
MADNLSDTLKKLKITAVDKTEDSLEGCLDCLLQALAQNNTETSEKIQASGILQLFASLLTPQSSCKAKVANIIAEVAKNEFMRIPCVDAGLISPLVQLLNSKDQEVLLQTGRALGNICYDSQSSKEQFASTNIAEELVKLFKKQIEHDKREMIFEVLAPLAENGKQD

SEQ ID NO: 3437 - protein, 258 aa, Artificial Sequence
  Synthetic polypeptide
MDNLSDTLKKLKITAVDKTEDSLEGCLDCLLQALAQNNTETSEKIQASGILQLFASLLTPQSSCKAKVANIIAEVAKNEFMRIPCVDAGLISPLVQLLNSKDQEVLLQTGRALGNICYDSHEGRSAVDQAGGAQIVIDHLRSLCSITDPANEKLLTVFCGMLMNYSNENDSLQAQLINMGVIPTLVKLLGIHCQNAALTEMCLVAFGNLAELESSKEQFASTNIAEELVKLFKKQIEHDKREMIFEVLAPLAENGKQD

SEQ ID NO: 3438 - protein, 259 aa, Artificial Sequence
  Synthetic polypeptide
MADNLSDTLKKLKITAVDKTEDSLEGCLDCLLQALAQNNTETSEKIQASGILQLFASLLTPQSSCKAKVANIIAEVAKNEFMRIPCVDAGLISPLVQLLNSKDQEVLLQTGRALGNICYDSHEGRSAVDQAGGAQIVIDHLRSLCSITDPANEKLLTVFCGMLMNYSNENDSLQAQLINMGVIPTLVKLLGIHCQNAALTEMCLVAFGNLAELESSKEQFASTNIAEELVKLFKKQIEHDKREMIFEVLAPLAENGKQD

SEQ ID NO: 3439 - protein, 259 aa, Artificial Sequence; identical to SEQ ID NO: 3438
  Synthetic polypeptide

SEQ ID NO: 3440 - protein, 209 aa, Artificial Sequence
  Synthetic polypeptide
MDNLSDTLKKLKITAVDKTEDSLEGCLDCLLQALAQNNTETSEKIQASGILQLFASLLTPQSSCKAKVANIIAEVAKNEFMRIPCVDAGLISPLVQLLNSKDQEVLLQTGRALGNICYDSHSLQAQLINMGVIPTLVKLLGIHCQNAALTEMCLVAFGNLAELESSKEQFASTNIAEELVKLFKKQIEHDKREMIFEVLAPLAENGKQD

SEQ ID NO: 3441 - protein, 90 aa, Artificial Sequence
  Synthetic polypeptide
MSSPPEGKLETKAGHPPAVKAGGMRIVQKHPHTGDTKEEKDKDDQEWESPRYTLKRTENKCSSRNLYMNVHPIIIHNSQKIETAQMLISQ

SEQ ID NO: 3442 - protein, 90 aa, Artificial Sequence; identical to SEQ ID NO: 3441
  Synthetic polypeptide

SEQ ID NO: 3443 - protein, 416 aa, Artificial Sequence [sequence omitted]

SEQ ID NO: 3444 - protein, 437 aa, Artificial Sequence
  Synthetic polypeptide
MRLTHICCCCLLYQLGFLSNGIVSELQFAPDREEWEVVFPALWRREPVDPAGGSGGSADPGWVRGVGGGGSARAQAAGSSREVRSVAPVPLEEPVEGRSESRLRPPPPSEGEEDEELESQELPRGSSGAAALSPGAPASWQPPPPPQPPPSPPPAQHAEPDGDEVLLRIPAFSRDLYLLLRRDGRFLAPRFAVEQRPNPGPGPTGAASAPQPPAPPDAGCFYTGAVLRHPGSLASFSTCGGGLMGFIQLNEDFIFIEPLNDTMAITGHPHRVYRQKRSMEEKVTEKSALHSHYCGIISDKGRPRSRKIAESGRGKRYSYKLPQEYNIETVVVADPAMVSYHGADAARRFILTILNMVFNLFQHKSLSVQVNLRVIKLILLHETPPELYIGHHGEKMLESFCKWQHEEFGKKNDIHLEMSTNWGEDMTSVDAAILITR

SEQ ID NO: 3445 - protein, 37 aa, Artificial Sequence
  Synthetic polypeptide
MPHSVTLRGPSPWGFRLVGGRDFSAPLTISRELDGSA

SEQ ID NO: 3446 - protein, 37 aa, Artificial Sequence; identical to SEQ ID NO: 3445
  Synthetic polypeptide

SEQ ID NO: 3447 - protein, 71 aa, Artificial Sequence
  Synthetic polypeptide
MDRTCEERPAEDGSDEEDPDSMEAPTRIRDTPEDIVLEAPASGLAFHPARDLLAAGDVDGDVFGELYLPLQ

SEQ ID NO: 3448 - protein, 71 aa, Artificial Sequence; identical to SEQ ID NO: 3447
  Synthetic polypeptide

SEQ ID NO: 3449 - protein, 508 aa, Artificial Sequence
  Synthetic polypeptide
MSKSKCSVGLMSSVVAPAKEPNAVGPKEVELILVKEQNGVQLTSSTLTNPRQSPVEAQDRETWGKKIDFLLSVIGFAVDLANVWRFPYLCYKNGGGAFLVPYLLFMVIAGMPLFYMELALGQFNREGAAGVWKICPILKGVGFTVILISLYVGFFYNVIIAWALHYLFSSFTTELPWIHCNNSWNSPNCSDAHPGDSSGDSSGLNDTFGTTPAAEYFERGVLHLHQSHGIDDLGPPRWQLTACLVLVIVLLYFSLWKGVKTSGKVVWITATMPYVVLTALLLRGVTLPGAIDGIRAYLSVDFYRLCEASVWIDAATQVCFSLGVGFGVLIAFSSYNKFTNNCYRDAIVTTSINSLTSFSSGFVVFSFLGYMAQKHSVPIGDVAKDGPGLIFIIYPEAIATLPLSSAWAVVFFIMLLTLGIDSAMGGMESVITGLIDEFQLLHRHRELFTLFIVLATFLLSLFCVTNGGIYVFTLLDHFAAGTSILFGVLIEAIGVAWFYGWSSEDGRW

SEQ ID NO: 3450 - protein, 508 aa, Artificial Sequence; identical to SEQ ID NO: 3449
  Synthetic polypeptide

SEQ ID NO: 3451 - protein, 35 aa, Artificial Sequence
  Synthetic polypeptide
MLLSLPALHLQTSEHHPFFQLPHRRCALLPLRLLP

SEQ ID NO: 3452 - protein, 35 aa, Artificial Sequence; identical to SEQ ID NO: 3451
  Synthetic polypeptide

SEQ ID NO: 3453 - protein, 76 aa, Artificial Sequence
  Synthetic polypeptide
MKCFSRYLPYIFRPPNTILSSSCHTEDVPCFPFAFCHDCKFPETSPAMQNCESIKLFFIIYPVSGSYLYNSCVRTN

SEQ ID NO: 3454 - protein, 76 aa, Artificial Sequence; identical to SEQ ID NO: 3453
  Synthetic polypeptide

SEQ ID NO: 3455 - protein, 76 aa, Artificial Sequence; identical to SEQ ID NO: 3453
  Synthetic polypeptide

SEQ ID NO: 3456 - protein, 68 aa, Artificial Sequence
  Synthetic polypeptide
MIPGIGTLTQDTLWCFSQVKGTIEIGTTEERHSGRRWPCNWGGGDRSEASTSQRMPRLAANTKSWKKQ

SEQ ID NO: 3457 - protein, 34 aa, Artificial Sequence
  Synthetic polypeptide
MVLQPSERHYRDWNHRRETLRKKMAMQLGRRRPE

SEQ ID NO: 3458 - protein, 79 aa, Artificial Sequence
  Synthetic polypeptide
MIPGIGTLTQDTLWCFSQVKGTIEIGTTEDVPCFPFAFCHDCKFPETSPAMQNCESIKLFFIIYPVSGSYLYNSCVRTN

SEQ ID NO: 3459 - protein, 27 aa, Artificial Sequence
  Synthetic polypeptide
MVLQPSERHYRDWNHRRCALLPLRLLP

SEQ ID NO: 3460 - protein, 66 aa, Artificial Sequence
  Synthetic polypeptide
MKVTGIFLLSALALLSLSGNTGADSLGREAKCYNELNGCTKIYDPVCGTDGNTYPNECVLCFENRS

SEQ ID NO: 3461 - protein, 66 aa, Artificial Sequence; identical to SEQ ID NO: 3460
  Synthetic polypeptide

SEQ ID NO: 3462 - protein, 96 aa, Artificial Sequence
  Synthetic polypeptide
MAVSVLRLTVVLGLLVLFLTCYADDKPDKPDDKPDDSGKDPKPDFPKFLSLLGTEIIENAVEFILRSMSRSTSNSLHSGNGPGSKPRVTKEVLRKR

SEQ ID NO: 3463 - protein, 96 aa, Artificial Sequence; identical to SEQ ID NO: 3462
  Synthetic polypeptide

SEQ ID NO: 3464 - protein, 76 aa, Artificial Sequence
  Synthetic polypeptide
MAVSVLRLTVVLGLLVLFLTCYADDKPDKPDDKPDDSGKDPKPDFPKFLSLLGTEIIENAVEFILRSMSRSTMEAP

SEQ ID NO: 3465 - protein, 76 aa, Artificial Sequence; identical to SEQ ID NO: 3464
  Synthetic polypeptide

SEQ ID NO: 3466 - protein, 27 aa, Artificial Sequence
  Synthetic polypeptide
MAAFPHKIIFFLVCSTLTHVAFSGGTI

SEQ ID NO: 3467 - protein, 27 aa, Artificial Sequence
  Synthetic polypeptide
MAAFPHKIIFFLVCSTLTHVAFSGGTI

SEQ ID NO: 3468 - protein, 45 aa, Artificial Sequence
  Synthetic polypeptide
MAAFPHKIIFFLVCSTLTHVAFSEGGRRAQVREDVTMEAEVRMVQ

SEQ ID NO: 3469 - protein, 45 aa, Artificial Sequence; identical to SEQ ID NO: 3468
  Synthetic polypeptide

SEQ ID NO: 3470 - protein, 32 aa, Artificial Sequence
  Synthetic polypeptide
MAAFPHKIIFFLVCSTLTHVAFSETPGGMHHC

SEQ ID NO: 3471 - protein, 32 aa, Artificial Sequence; identical to SEQ ID NO: 3470
  Synthetic polypeptide

SEQ ID NO: 3472 - protein, 303 aa, Artificial Sequence
  Synthetic polypeptide
MATITCTRFTEEYQLFEELGKGAFSVVRRCVKVLAGQEYAAKIINTKKLSARDHQKLEREARICRLLKHPNIVRLHDSISEEGHHYLIFDLVTGGELFEDIVAREYYSEADASHCIQQILEAVLHCHQMGVVHRDLKPENLLLASKLKGAAVKLADFGLAIEVEGEQQAWFGFAGTPGYLSPEVLRKDPYGKPVDLWACGVILYILLVGYPPFWDEDQHRLYQQIKAGAYDFPSPEWDTVTPEAKDLINKMLTINPSKRITAAEALKHPWISHRSTVASCMHRQETVDCLKKFNARRKLKGHG

SEQ ID NO: 3473 - protein, 303 aa, Artificial Sequence; identical to SEQ ID NO: 3472
  Synthetic polypeptide

SEQ ID NO: 3474 - protein, 12 aa, Artificial Sequence
  Synthetic polypeptide
QELSGRSEASHG

SEQ ID NO: 3475 - protein, 266 aa, Artificial Sequence
  Synthetic polypeptide
MHRRRSRSCREDQKPVMDDQRDLISNNEQLPMLGRRPGAPESKCSRGALYTGFSILVTLLLAGQATTAYFLYQQQGRLDKLTVTSQNLQLENLRMKLPKPPKPVSKMRMATPLLMQALPMGALPQGPMQNATKYGNMTEDHVMHLLQNADPLKVYPPLKGSFPENLRHLKNTMETIDWKVFESWMHHWLLFEMSRHSLEQKPTDAPPKVLTKCQEEVSHIPAVHPGSFRPKCDENGNYLPLQCYGSIGYCWGWGPHWMHNVMSVLS

SEQ ID NO: 3476 - protein, 619 aa, Artificial Sequence
  Synthetic polypeptide
MEATRLRQKAEELVKDNELLPPPSPSLGSFDPLAELTGKDSNVTASPTAPACPSDKPAPVQKPPSSGTSSEFEVVTPEEQNSPESSSHANAMALGPLPREDGNLMLHLQRLETTLSVCAEEPDHGQLFTHLGRMALEFNRLASKVHKNEQRTSILQTLCEQLRKENEALKAKLDKGLEQRDQAAERLREENLELKKLLMSNGNKEGASGRPGSPKMEGTGKKAVAGQQQASVTAGKVPEVVALGAAEKKVKMLEQQRSELLEVNKQWDQHFRSMKQQYEQKITELRQKLADLQKQVTDLEAEREQKQRDFDRKLLLAKSKIEMEETDKEQLTAEAKELRQKVKYLQDQLSPLTRQREYQEKEIQRLNKALEEALSIQTPPSSPPTAFGSPEGAGALLRKQELVTQNELLKQQVKIFEEDFQRERSDRERMNEEKEELKKQVEKLQAQVTLSNAQLKAFKDEEKAREALRQQKRKAKASGERYHVEPHPEHLCGAYPYAYPPMPAMVPHHGFEDWSQIRYPPPPMAMEHPPPLPNSRLFHLPEYTWRLPCGGVRNPNQSSQVMDPPTARPTEPGTQLCRNGASSGRWRVSLCRCVSRGHGTDTLEGLQFGGFGDWKKGLG

SEQ ID NO: 3477 - protein, 672 aa, Artificial Sequence
  Synthetic polypeptide
MEGRGPYRIYDPGGSVPSGEASAAFERLVKENSRLKEKMQGIKMLGELLEESQMEATRLRQKAEELVKDNELLPPPSPSLGSFDPLAELTGKDSNVTASPTAPACPSDKPAPVQKPPSSGTSSEFEVVTPEEQNSPESSSHANAMALGPLPREDGNLMLHLQRLETTLSVCAEEPDHGQLFTHLGRMALEFNRLASKVHKNEQRTSILQTLCEQLRKENEALKAKLDKGLEQRDQAAERLREENLELKKLLMSNGNKEGASGRPGSPKMEGTGKKAVAGQQQASVTAGKVPEVVALGAAEKKVKMLEQQRSELLEVNKQWDQHFRSMKQQYEQKITELRQKLADLQKQVTDLEAEREQKQRDFDRKLLLAKSKIEMEETDKEQLTAEAKELRQKVKYLQDQLSPLTRQREYQEKEIQRLNKALEEALSIQTPPSSPPTAFGSPEGAGALLRKQELVTQNELLKQQVKIFEEDFQRERSDRERMNEEKEELKKQVEKLQAQVTLSNAQLKAFKDEEKAREALRQQKRKAKASGERYHVEPHPEHLCGAYPYAYPPMPAMVPHHGFEDWSQIRYPPPPMAMEHPPPLPNSRLFHLPEYTWRLPCGGVRNPNQSSQVMDPPTARPTEPGTQLCRNGASSGRWRVSLCRCVSRGHGTDTLEGLQFGGFGDWKKGLG

SEQ ID NO: 3478 - protein, 672 aa, Artificial Sequence; identical to SEQ ID NO: 3477
  Synthetic polypeptide

SEQ ID NO: 3479 - protein, 672 aa, Artificial Sequence; identical to SEQ ID NO: 3477
  Synthetic polypeptide

SEQ ID NO: 3480 - protein, 672 aa, Artificial Sequence; identical to SEQ ID NO: 3477
  Synthetic polypeptide

SEQ ID NO: 3481 - protein, 672 aa, Artificial Sequence; identical to SEQ ID NO: 3477
  Synthetic polypeptide

SEQ ID NO: 3482 - protein, 672 aa, Artificial Sequence; identical to SEQ ID NO: 3477
  Synthetic polypeptide

SEQ ID NO: 3483 - protein, 608 aa, Artificial Sequence
  Synthetic polypeptide
MEGRGPYRIYDPGGSVPSGEASAAFERLVKENSRLKEKMQGIKMLGELLEESQMEATRLRQKAEELVKDNELLPPPSPSLGSFDPLAELTGKDSNVTASPTAPACPSDKPAPVQKPPSSGTSSEFEVVTPEEQNSPESSSHANAMALGPLPREDGNLMLHLQRLETTLSVCAEEPDHGQLFTHLGRMALEFNRLASKVHKNEQRTSILQTLCEQLRKENEALKAKLDKGLEQRDQAAERLREENLELKKLLMSNGNKEGASGRPGSPKMEGTGKKAVAGQQQASVTAGKVPEVVALGAAEKKVKMLEQQRSELLEVNKQWDQHFRSMKQQYEQKITELRQKLADLQKQVTDLEAEREQKQRDFDRKLLLAKSKIEMEETDKEQLTAEAKELRQKVKYLQDQLSPLTRQREYQEKEIQRLNKALEEALSIQTPPSSPPTAFGSPEGAGALLRKQELVTQNELLKQQVKIFEEDFQRERSDRERMNEEKEELKKQVEKLQAQVTLSNAQLKAFKDEEKAREALRQQKRKAKPEYTWRLPCGGVRNPNQSSQVMDPPTARPTEPGTQLCRNGASSGRWRVSLCRCVSRGHGTDTLEGLQFGGFGDWKKGLG

SEQ ID NO: 3484 - protein, 57 aa, Artificial Sequence
  Synthetic polypeptide
MQSLMQAPLLIALGLLLAAPAQAHLKKPMAFSQCLEQPSFFVPRGLCLSSLGLHLHV

SEQ ID NO: 3485 - protein, 81 aa, Artificial Sequence
  Synthetic polypeptide
MRAWIFFLLCLAGRALAAPQQEALPDETEVVEETVAEVTEVSVGANPVQAEVGGSLEAESKVTVNYDCTIHSSLGDRVRAC

SEQ ID NO: 3486 - protein, 81 aa, Artificial Sequence; identical to SEQ ID NO: 3485
  Synthetic polypeptide

SEQ ID NO: 3487 - protein, 81 aa, Artificial Sequence; identical to SEQ ID NO: 3485
  Synthetic polypeptide

SEQ ID NO: 3488 - protein, 87 aa, Artificial Sequence
  Synthetic polypeptide
MQHIFAFFCTGFLGAVVGANFPNNIQIGGLFPNQQSQEHAAFRFALSQLTEPPKLLPQIDIVNISDSFEMTYRFVQIEGDQLGKCLA

SEQ ID NO: 3489 - protein, 87 aa, Artificial Sequence; identical to SEQ ID NO: 3488
  Synthetic polypeptide

SEQ ID NO: 3490 - protein, 87 aa, Artificial Sequence; identical to SEQ ID NO: 3488
  Synthetic polypeptide

SEQ ID NO: 3491 - protein, 18 aa, Artificial Sequence
  Synthetic polypeptide
MTYRFVQIEGDQLGKCLA

SEQ ID NO: 3492 - protein, 97 aa, Artificial Sequence
  Synthetic polypeptide
MCCSTHLFQPLQLAGGLEWPWSNLLCFLTPVKLHPEVWGLFPNQQSQEHAAFRFALSQLTEPPKLLPQIDIVNISDSFEMTYRFVQIEGDQLGKCLA

SEQ ID NO: 3493 - protein, 97 aa, Artificial Sequence; identical to SEQ ID NO: 3492
  Synthetic polypeptide

SEQ ID NO: 3494 - protein, 326 aa, Artificial Sequence
  Synthetic polypeptide
MHPQVVILSLILHLADSVAGSVKVGGEAGPSVTLPCHYSGAVTSMCWNRGSCSLFTCQNGIVWTNGTHVTYRKDTRYKLLGDLSRRDVSLTIENTAVSDSGVYCCRVEHRGWFNDMKITVSLEIVPPKVTTTPIVTTVPTVTTVRTSTTVPTTTTVPMTTVPTTTVPTTMSIPTTTTVLTTMTVSTTTSVPTTTSIPTTTSVPVTTTVSTFVPPMPLPRQNHEPVATSPSSPQPAETHPTTLQGAIRREPTSSPLYSYTTDGNDTVTESSDGLWNNNQTQLFLEHSLLTANTTKGIYAGVCISVLVLLALLGVIIAKNAKLHEDSR

SEQ ID NO: 3495 - protein, 326 aa, Artificial Sequence; identical to SEQ ID NO: 3494
  Synthetic polypeptide

SEQ ID NO: 3496 - protein, 326 aa, Artificial Sequence; identical to SEQ ID NO: 3494
  Synthetic polypeptide

SEQ ID NO: 3497 - protein, 326 aa, Artificial Sequence; identical to SEQ ID NO: 3494
  Synthetic polypeptide

SEQ ID NO: 3498 - protein, 326 aa, Artificial Sequence; identical to SEQ ID NO: 3494
  Synthetic polypeptide

SEQ ID NO: 3499 - protein, 195 aa, Artificial Sequence
  Synthetic polypeptide
MSSFDLPAPSPPRCSPQFPSIGQEPPEMNLYYENFFHPQGVPSPQRPSFEGGGEYGATPNPYLWFNGPTMTPPPYLPGPNASPFLPQAYGVQRPLLPSVSGLGGSDLGWLPIPSQEELMKLVRPPYSYSALIAMAIHGAPDKRLTLSQIYQYVADNFPFYNKSKAGWQNSIRHNLSLNDCFKKVPRDEDDPAPST

SEQ ID NO: 3500 - protein, 195 aa, Artificial Sequence; identical to SEQ ID NO: 3499
  Synthetic polypeptide

SEQ ID NO: 3501 - protein, 221 aa, Artificial Sequence
  Synthetic polypeptide
MSSFDLPAPSPPRCSPQFPSIGQEPPEMNLYYENFFHPQGVPSPQRPSFEGGGEYGATPNPYLWFNGPTMTPPPYLPGPNASPFLPQAYGVQRPLLPSVSGLGGSDLGWLPIPSQEELMKLVRPPYSYSALIAMAIHGAPDKRLTLSQIYQYVADNFPFYNKSKAGWQNSIRHNLSLNDCFKKVPRDEDDPDSVRPESCPSGSLQPPQDRTQILAPSRCAQ

SEQ ID NO: 3502 - protein, 221 aa, Artificial Sequence; identical to SEQ ID NO: 3501
  Synthetic polypeptide

SEQ ID NO: 3503 - protein, 60 aa, Artificial Sequence
  Synthetic polypeptide
MGNTVHRTLPESAFADTLTPARLSQARFSACLPPSSHDAANFDNNELENNQNVCVRERER

SEQ ID NO: 3504 - protein, 242 aa, Artificial Sequence
  Synthetic polypeptide
MGNTVHRTLPDPSPPARLLATRPCCGPGPERRPVLGEAPRFHAQAKGKNVRLDGHSRRATRRNSFCNGVTFTQRPIRLYEQVRLRLVAVRPGWSGALRFGFTAHDPSLMSAQDIPKYACPDLVTRPGYWAKALPENLALRDTVLAYWADRHGRVFYSVNDGEPVLFHCGVAVGGPLWALIDVYGITDEVQLLESAFADTLTPARLSQARFSACLPPSSHDAANFDNNELENNQNVCVRERER

SEQ ID NO: 3505 - protein, 142 aa, Artificial Sequence
  Synthetic polypeptide
MPFDFRRFDIYRKVPKDLTQPTYTGAIISICCCLFILFLFLSELTGFITTEVVNELYVDDPDKDSGGKIDVSLNISLPNLHCELVGLDIQDEMGRHEVGHIDNSMKIPLNNGAGCRFEGQFSINKVSLDWQRIIRGTKSLKN

SEQ ID NO: 3506 - protein, 142 aa, Artificial Sequence; identical to SEQ ID NO: 3505
  Synthetic polypeptide

SEQ ID NO: 3507 - protein, 142 aa, Artificial Sequence; identical to SEQ ID NO: 3505
  Synthetic polypeptide

SEQ ID NO: 3508 - protein, 97 aa, Artificial Sequence
  Synthetic polypeptide
MERWAMRVNELYVDDPDKDSGGKIDVSLNISLPNLHCELVGLDIQDEMGRHEVGHIDNSMKIPLNNGAGCRFEGQFSINKVSLDWQRIIRGTKSLKN

SEQ ID NO: 3509 - protein, 97 aa, Artificial Sequence; identical to SEQ ID NO: 3508
  Synthetic polypeptide

SEQ ID NO: 3510 - protein, 28 aa, Artificial Sequence
  Synthetic polypeptide
EIQLVLSVITSWAPVCLSPSSSFALGGL

SEQ ID NO: 3511 - protein, 132 aa, Artificial Sequence
  Synthetic polypeptide
MADGGGGGGTGAVGGGGTSQASAGAATGATGASGGGGPINPASLPPGDPQLIALIVEQLKSRGLFDSFRRDCLADVDTKPAYQNLRQKVDNFVSTHLDKQEWNPTMNKNQLRNGLRQSVVQLIGGRDLPFLR

SEQ ID NO: 3512 - protein, 132 aa, Artificial Sequence; identical to SEQ ID NO: 3511
  Synthetic polypeptide

SEQ ID NO: 3513 - protein, 27 aa, Artificial Sequence
  Synthetic polypeptide
MNKNQLRNGLRQSVVQLIGGRDLPFLR

SEQ ID NO: 3514 - protein, 192 aa, Artificial Sequence
  Synthetic polypeptide
MEDFIVISDDSGSESSGGARPGRSRRPRRALSRTSGALPRRTVNKGQKLEPIPHRRLRMVTNTIEENFPLGTVQFLMDFVSPQHYPPREIVAHIIQKILLSGSETVDVLKEAYMLLMKIQQLHPANAKTVEWDWKLLTYVMEEEPPALASQSAEIAASARPPPRLGSEECLCLAAHRLGCEEPLCLAAQSGK

SEQ ID NO: 3515 - protein, 192 aa, Artificial Sequence; identical to SEQ ID NO: 3514
  Synthetic polypeptide

SEQ ID NO: 3516 - protein, 607 aa, Artificial Sequence
  Synthetic polypeptide
MAPASASGEDLRKLPTMAEVNGEQDFIDLTRETRPRTKDRSGLYVIDLTRAEGENRPIATLDLTLEPVTPSQKEPTSLQTCASLSGKAVMEGHVDRSSQPTARRIINSDPVDLDLVEENTFVGPPPATSISGGSVYPTEPNCSSATFTGNLSFLASLQLSSDVSSLSPTSNNSRSSSSSSNQKAPLPCPQQDVSRPPQALPCPLRPLPCPPRASPCPPRASSCPPRALSCPSQTMQCQLPALTHPPQEVPCPRQNIPGPPQDSLGLPQDVPGLPQSILHPQDVAYLQDMPRSPGDVPQSPSDVSPSPDAPQSPGGMPHLPGDVLHSPGDMPHSSGDVTHSPRDIPHLPGDRPDFTQNDVQNRDMPMDISALSSPSCSPSPQSETPLEKVPWLSVMETPARKEISLSEPAKPGSAHVQSRTPQGGLYNRPCLHRLKYFLRPPVHHLFFQTLIPDKDTRENKGQKLEPIPHRRLRMVTNTIEENFPLGTVQFLMDFVSPQHYPPREIVAHIIQKILLSGSETVDVLKEAYMLLMKIQQLHPANAKTVEWDWKLLTYVMEEEPPALASQSAEIAASARPPPRLGSEECLCLAAHRLGCEEPLCLAAQSGK

SEQ ID NO: 3517 - protein, 626 aa, Artificial Sequence
  Synthetic polypeptide
MEDFIVISDDSGSESSGGARPGRSRRPRRALSRTSGALPRRTVDFIDLTRETRPRTKDRSGLYVIDLTRAEGENRPIATLDLTLEPVTPSQKEPTSLQTCASLSGKAVMEGHVDRSSQPTARRIINSDPVDLDLVEENTFVGPPPATSISGGSVYPTEPNCSSATFTGNLSFLASLQLSSDVSSLSPTSNNSRSSSSSSNQKAPLPCPQQDVSRPPQALPCPLRPLPCPPRASPCPPRASSCPPRALSCPSQTMQCQLPALTHPPQEVPCPRQNIPGPPQDSLGLPQDVPGLPQSILHPQDVAYLQDMPRSPGDVPQSPSDVSPSPDAPQSPGGMPHLPGDVLHSPGDMPHSSGDVTHSPRDIPHLPGDRPDFTQNDVQNRDMPMDISALSSPSCSPSPQSETPLEKVPWLSVMETPARKEISLSEPAKPGSAHVQSRTPQGGLYNRPCLHRLKYFLRPPVHHLFFQTLIPDKDTRENKGQKLEPIPHRRLRMVTNTIEENFPLGTVQFLMDFVSPQHYPPREIVAHIIQKILLSGSETVDVLKEAYMLLMKIQQLHPANAKTVEWDWKLLTYVMEEEPPALASQSAEIAASARPPPRLGSEECLCLAAHRLGCEEPLCLAAQSGK

SEQ ID NO: 3518 - protein, 309 aa, Artificial Sequence
  Synthetic polypeptide
MAAEGWIWRWGWGRRCLGRPGLLGPGPGPTTPLFLLLLLGSVTADITDGNSEHLKREHSLIKPYQGVGSSSMPLWDFQGSTMLTSQYVRLTPDERSKEGSIWNHQPCFLKDWEMHVHFKVHGTGKKNLHGDGIALWYTRDRLVPGPVFGSKDNFHGLAIFLDTYPNDETTERVFPYISVMVNNGSLSYDHSKDGRWTELAGCTADFRNRDHDTFLAVRYSRGRLTVMTDLEDKNEWKNCIDITGVRLPTGYYFGASAGTGDLSDNHDIISMKLFQLMVEHTPDEESIDWTKIEPSVNFLKSPKGNFRAT

SEQ ID NO: 3519 - protein, 309 aa, Artificial Sequence; identical to SEQ ID NO: 3518
  Synthetic polypeptide

SEQ ID NO: 3520 - protein, 222 aa, Artificial Sequence
  Synthetic polypeptide
MAAEGWIWRWGWGRRCLGRPGLLGPGPGPTTPLFLLLLLGSVTADITDGNSEHLKREHSLIKPYQGVGSSSMPLWDFQGSTMLTSQYVRLTPDERSKEGSIWNHQPCFLKDWEMHVHFKVHGTGKKNLHGDGIALWYTRDRLVPGPVFGSKDNFHGLAIFLDTYPNDETTEHRLDQDRAQRQLPQVAQRQLQSHLRSFTGHMGSECPMNSSLLTNKSRLVYG

SEQ ID NO: 3521 - protein, 518 aa, Artificial Sequence
  Synthetic polypeptide
MRALLLLGFLLVSLESTLSIPPWEAPKEHKYKAEEHTVVLTVTGEPCHFPFQYHRQLYHKCTHKGRPGPQPWCATTPNFDQDQRWGYCLEPKKVKDHCSKHSPCQKGGTCVNMPSGPHCLCPQHLTGNHCQKEKCFEPQLLRFFHKNEIWYRTEQAAVARCQCKGPDAHCQRLASQACRTNPCLHGGRCLEVEGHRLCHCPVGYTGAFCDVDTKASCYDGRGLSYRGLARTTLSGAPCQPWASEATYRNVTAEQARNWGLGGHAFCRNPDNDIRPWCFVLNRDRLSWEYCDLAQCQTPTQAAPPTPVSPRLHVPLMPAQPAPPKPQPTTRTPPQSQTPGALPAKREQPPSLTRNGPLSCGQRLRKSLSSMTRVVGGLVALRGAHPYIAALYWGHSFCAGSLIAPCWVLTAAHCLQDRPAPEDLTVVLGQERRNHSCEPCQTLAVRSYRLHEAFSPVSYQHDLALLRLQEDADGSCALLSPYVQPVCLPSGAARPSETTLCQVAGWGHQFEASLPMKLN

SEQ ID NO: 3522 - protein, 118 aa, Artificial Sequence
  Synthetic polypeptide
MAADQRPKADTLALRQRLISSSCRLFFPEDPVKIVRAQGQYMYDEQGAEYIDCISNVAHVGHCHPLVVQAAHEQNQVLNTNSRYLHDNIVDYAQRLSETLPEQLCVFYFLNSGIIAGA

SEQ ID NO: 3523 - protein, 118 aa, Artificial Sequence; identical to SEQ ID NO: 3522
  Synthetic polypeptide

SEQ ID NO: 3524 - protein, 50 aa, Artificial Sequence
  Synthetic polypeptide
QAAHEQNQVLNTNSRYLHDNIVDYAQRLSETLPEQLCVFYFLNSGIIAGA

SEQ ID NO: 3525 - protein, 132 aa, Artificial Sequence
  Synthetic polypeptide
MAADQRPKADTLALRQRLISHLFSGSGRLTRTHAEMSKEATEAENAFRNNPKFQRLVTPSASCFATTCGVERQVGHCHPLVVQAAHEQNQVLNTNSRYLHDNIVDYAQRLSETLPEQLCVFYFLNSGIIAGA

SEQ ID NO: 3526 - protein, 419 aa, Artificial Sequence
  Synthetic polypeptide
MWLSPEEVLVANALWVTERANPFFVLQRRRGHGRGGGLTGLLVGTLDVVLDSSARVAPYRILHQTQDSQVYWTVACGSSRKEITKHWEWLENNLLQTLSIFDSEEDITTFVKGKIHGIIAEENKNLQPQGDEDPGKFKEAELKMRKQFGMPEGEKLVNYYSCSYWKGRVPRQGWLYLTVNHLCFYSFLLGKEVSLVVQWVDITRLEKNATLLFPESIRVDTRDQELFFSMFLNIGETFKLMEQLANLAMRQLLDSEGFLEDKALPRPIRPHRNISALKRDLDARAKNECYRATFRLPRDERLDGHTSCTLWTPFNKLHIPGQMFISNNYICFASKEEDACHLIIPLREVTIVEKADSSSVLPSPLSISTKSKMTFLFANLKDRDFLVQRISDFLQKTPSKQPGSIGSRKASVVDPSTEC

SEQ ID NO: 3527 - protein, 419 aa, Artificial Sequence; identical to SEQ ID NO: 3526
  Synthetic polypeptide

SEQ ID NO: 3528 - protein, 63 aa, Artificial Sequence
  Synthetic polypeptide
MAAAMTFCRLLNRCGEAARSLPLGARCFGVRVSPTGEKVTHTGQVYDDKDYRRIRFVGRQKEV

SEQ ID NO: 3529 - protein, 63 aa, Artificial Sequence; identical to SEQ ID NO: 3528
  Synthetic polypeptide

SEQ ID NO: 3530 - protein, 130 aa, Artificial Sequence
  Synthetic polypeptide
MAAAMTFCRLLNRCGEAARSLPLGARCFGVRVSPTGEKVTHTGQVYDDKDYRRIRFVGRQKEQDQPSLPPPQPALREDDEDEDLYDDPLPLNEKSVHFLFLVISFIAFSSSSLLYYKNPIYNTCNMQNIC

SEQ ID NO: 3531 - protein, 130 aa, Artificial Sequence; identical to SEQ ID NO: 3530
  Synthetic polypeptide

SEQ ID NO: 3532 - protein, 120 aa, Artificial Sequence
  Synthetic polypeptide
MAAAMTFCRLLNRCGEAARSLPLGARCFGVRVSPTGEKVTHTGQVYDDKDYRRIRFVGRQKEPALREDDEDEDLYDDPLPLNEKSVHFLFLVISFIAFSSSSLLYYKNPIYNTCNMQNIC

SEQ ID NO: 3533 - protein, 120 aa, Artificial Sequence; identical to SEQ ID NO: 3532
  Synthetic polypeptide

SEQ ID NO: 3534 - protein, 129 aa, Artificial Sequence
  Synthetic polypeptide
MPEPPTPSVGSCAARASRMSAAPCSRAPSPIDHPRAEECGRAARDWQAAPPAAPVRDPLGEASWAPESGEDMENLYVQLKLQSVGTCFNREELPSVLQLSFFHAPLNHFLHHSGESKNSISWNHFQADV

SEQ ID NO: 3535 - protein, 129 aa, Artificial Sequence; identical to SEQ ID NO: 3534
  Synthetic polypeptide

SEQ ID NO: 3536 - protein, 617 aa, Artificial Sequence
  Synthetic polypeptide
MMQGNTCHRMSFHPGRGCPRGRGGHGARPSAPSFRPQNLRLLHPQQPPVQYQYEPPSAPSTTFSNSPAPNFLPPRPDFVPFPPPMPPSAQGPLPPCPIRPPFPNHQMRHPFPVPPCFPPMPPPMPCPNNPPVPGAPPGQGTFPFMMPPPSMPHPPPPPVMPQQVNYQYPPGYSHHNFPPPSFNSFQNNPSSFLPSANNSSSPHFRHLPPYPLPKAPSERRSPERLKHYDDHRHRDHSHGRGERHRSLDRRERGRSPDRRRQDSRYRSDYDRGRTPSRHRSYERSRERERERHRHRDNRRSPSLERSYKKEYKRSGRSYGLSVVPEPAGCTPELPGEIIKNTDSWAPPLEIVNHRSPSREKKRARWEEEKDRWSDNQSSGKDKNYTSIKEKEPEETMPDKNEEEEEELLKPVWIRCTHSENYYSSDPMDQVGDSTVVGTSRLRDLYDKFEEELGSRQEKAKAARPPWEPPKTKLDEDLESSSESECESDEDSTCSSSSDSEVFDVIAEIKRKKAHPDRLHDELWYNDPGQMNDGPLCKCSAKARRTGIRHSIYPGEEAIKPCRPMTNNAGRLFHYRITVSPPTNFLTDRPTVIEYDDHEYIFEGFSMFAHAPLTNIAF

SEQ ID NO: 3537 - protein, 617 aa, Artificial Sequence; identical to SEQ ID NO: 3536
  Synthetic polypeptide

SEQ ID NO: 3538 - protein, 580 aa, Artificial Sequence
  Synthetic polypeptide
MMQGNTCHRMSFHPGRGCPRGRGGHGARPSAPSFRPQNLRLLHPQQPPVQYQYEPPSAPSTTFSNSPAPNFLPPRPDFVPFPPPMPPSAQGPLPPCPIRPPFPNHQMRHPFPVPPCFPPMPPPMPCPNNPPVPGAPPGQGTFPFMMPPPSMPHPPPPPVMPQQVNYQYPPGYSHHNFPPPSFNSFQNNPSSFLPSANNSSSPHFRHLPPYPLPKAPSERRSPERLKHYDDHRHRDHSHGRGERHRSLDRRERGRSPDRRRQDSRYRSDYDRGRTPSRHRSYERSRERERERHRHRDNRRSPSLERSYKKEYKRSGSRSPSREKKRARWEEEKDRWSDNQSSGKDKNYTSIKEKEPEETMPDKNEEEEEELLKPVWIRCTHSENYYSSDPMDQVGDSTVVGTSRLRDLYDKFEEELGSRQEKAKAARPPWEPPKTKLDEDLESSSESECESDEDSTCSSSSDSEVFDVIAEIKRKKAHPDRLHDELWYNDPGQMNDGPLCKCSAKARRTGIRHSIYPGEEAIKPCRPMTNNAGRLFHYRITVSPPTNFLTDRPTVIEYDDHEYIFEGFSMFAHAPLTNIAF

SEQ ID NO: 3539 - protein, 580 aa, Artificial Sequence; identical to SEQ ID NO: 3538
  Synthetic polypeptide

SEQ ID NO: 3540 - protein, 255 aa, Artificial Sequence
  Synthetic polypeptide
MALQGISVVELSGLAPGPFCAMVLADFGARVVRVDRPGSRYDVSRLGRGKRSLVLDLKQPRGAAVLRRLCKRSDVLLEPFRRGVMEKLQLGPEILQRENPRLIYARLSGFGQSGSFCRLAGHDINYLALSGVLSKIGRSGENPYAPLNLLADFAGGGLMCALGIIMALFDRTRTGKGQVIDANMVEGTAYLSSFLWKTQKLSLWEAPRGQNMLDGGAPFYTTYRTADGEFMAVGAIEPQFYELLIKVTLFTIAKR

SEQ ID NO: 3541 - protein, 255 aa, Artificial Sequence; identical to SEQ ID NO: 3540
  Synthetic polypeptide

SEQ ID NO: 3542 - protein, 255 aa, Artificial Sequence; identical to SEQ ID NO: 3540
  Synthetic polypeptide

SEQ ID NO: 3543 - protein, 255 aa, Artificial Sequence; identical to SEQ ID NO: 3540
  Synthetic polypeptide

SEQ ID NO: 3544 - protein, 211 aa, Artificial Sequence
  Synthetic polypeptide
MALQGISVVELSGLAPGPFCAMVLADFGARVVRVDRPGSRYDVSRLGRGKRSLVLDLKQPRGAAVLRRLCKRSDVLLEPFRRGVMEKLQLGPEILQRENPRLIYARLSGFGQSGSFCRLAGHDINYLALSGGRNSIFKFFSVENSEIESVGSTSRTEHVGWWSTFLYDLQDSRWGIHGCWSNRTPVLRAADQSDIIHNSQEVEATQVSINR

SEQ ID NO: 3545 - protein, 211 aa, Artificial Sequence; identical to SEQ ID NO: 3544
  Synthetic polypeptide

SEQ ID NO: 3546 - protein, 211 aa, Artificial Sequence; identical to SEQ ID NO: 3544
  Synthetic polypeptide

SEQ ID NO: 3547 - protein, 211 aa, Artificial Sequence; identical to SEQ ID NO: 3544
  Synthetic polypeptide

SEQ ID NO: 3548 - protein, 240 aa, Artificial Sequence
  Synthetic polypeptide
MALQGISVVELSGLAPGPFCAMVLADFGARVVRVDRPGSRYDVSRLGRGKRSLVLDLKQPRGAAVLRRLCKRSDVLLEPFRRGVMEKLQLGPEILQRENPRLIYARLSGFGQSGSFCRLAGHDINYLALSGVLSKIGRSGENPYAPLNLLADFAGGGLMCALGIIMALFDRTRTGKGQVIDANMKLSLWEAPRGQNMLDGGAPFYTTYRTADGEFMAVGAIEPQFYELLIKVTLFTIAKR

SEQ ID NO: 3549 - protein, 85 aa, Artificial Sequence
  Synthetic polypeptide
MALQGISVVELSGLAPGPFCAMVLADFGARVVRVDRPGSRYDVSRLGRGKRSLVLDLKQPRGAAVLRRLCKRSDVLLEPFRRVNA

SEQ ID NO: 3550 - protein, 85 aa, Artificial Sequence; identical to SEQ ID NO: 3549
  Synthetic polypeptide

SEQ ID NO: 3551 - protein, 85 aa, Artificial Sequence; identical to SEQ ID NO: 3549
  Synthetic polypeptide

SEQ ID NO: 3552 - protein, 85 aa, Artificial Sequence; identical to SEQ ID NO: 3549
  Synthetic polypeptide

SEQ ID NO: 3553 - protein, 85 aa, Artificial Sequence; identical to SEQ ID NO: 3549
  Synthetic polypeptide

SEQ ID NO: 3554 - protein, 85 aa, Artificial Sequence; identical to SEQ ID NO: 3549
  Synthetic polypeptide

SEQ ID NO: 3555 - protein, 85 aa, Artificial Sequence; identical to SEQ ID NO: 3549
  Synthetic polypeptide

SEQ ID NO: 3556 - protein, 85 aa, Artificial Sequence; identical to SEQ ID NO: 3549
  Synthetic polypeptide

SEQ ID NO: 3557 - protein, 85 aa, Artificial Sequence; identical to SEQ ID NO: 3549
  Synthetic polypeptide

SEQ ID NO: 3558 - protein, 427 aa, Artificial Sequence
  Synthetic polypeptide
MAALKLLSSGLRLCASARGSGATWYKGCVCSFSTSAHRHTKFYTDPVEAVKDIPDGATVLVGGFGLCGIPENLIDALLKTGVKGLTAVSNNAGVDNFGLGLLLRSKQIKRMVSSYVGENAEFERQYLSGELEVELTPQGTLAERIRAGGAGVPAFYTPTGYGTLVQEGGSPIKYNKDGSVAIASKPREVREFNGQHFILEEAITGDFALVKAWKADRAGNVIFRKSARNFNLPMCKAAETTVVEVEEIVDIGAFAPEDIHIPQIYVHRLIKGEKYEKRIERLSIRKEGDGEAKSAKPGDDVRERIIKRAALEFEDGMYANLGIGIPLLASNFISPNITVHLQSENGVLGLGPYPRQHEADADLINAGKETVTILPGASFFSSDESFAMIRGGHVDLTMLGAMQVSKYGDLANWMIPATSFSRRRTLF

SEQ ID NO: 3559 - protein, 30 aa, Artificial Sequence
  Synthetic polypeptide
MLGAMQVSKYGDLANWMIPATSFSRRRTLF

SEQ ID NO: 3560 - protein, 30 aa, Artificial Sequence; identical to SEQ ID NO: 3559
  Synthetic polypeptide

SEQ ID NO: 3561 - protein, 241 aa, Artificial Sequence
  Synthetic polypeptide
MMVREFNGQHFILEEAITGDFALVKAWKADRAGNVIFRKSARNFNLPMCKAAETTVVEVEEIVDIGAFAPEDIHIPQIYVHRLIKGEKYEKRIERLSIRKEGDGEAKSAKPGDDVRERIIKRAALEFEDGMYANLGIGIPLLASNFISPNITVHLQSENGVLGLGPYPRQHEADADLINAGKETVTILPGASFFSSDESFAMIRGGHVDLTMLGAMQVSKYGDLANWMIPATSFSRRRTLF

SEQ ID NO: 3562 - protein, 309 aa, Artificial Sequence
  Synthetic polypeptide
MAGSEPRSGTNSPPPPFSDWGRLEAAILSGWKTFWQSVSKERVARTTSREEVDEAASTLTRLPIDVQLYILSFLSPHDLCQLGSTNHYWNETVRDPILWRYFLLRDLPSWSSVDWKSLPDLEILKKPISEVTDGAFFDYMAVYRMCCPYTRRASKSSRPMYGAVTSFLHSLIIQNEPRFAMFGPGLEELNTSLVLSLMSSEELCPTAGLPQRQIDGIGSGVNFQLNNQHKFNILILYSTTRKERDRAREEHTSAVNKMFSRHNEGDDQQGSRYSVIPQIQKVCEVVDGFIYVANAEAHKRQNSAVMLEH

SEQ ID NO: 3563 - protein, 309 aa, Artificial Sequence; identical to SEQ ID NO: 3562
  Synthetic polypeptide

SEQ ID NO: 3564 - protein, 309 aa, Artificial Sequence; identical to SEQ ID NO: 3562
  Synthetic polypeptide

SEQ ID NO: 3565 - protein, 97 aa, Artificial Sequence
  Synthetic polypeptide
MQQRGLAIVALAVCAALHASEAILPIASSCCTEVSHHISRRLLERVNMCRIQRADGDCDLAAVILHVKRRRICVSPHNHTVKQWMKVQAAKKNGPAY

SEQ ID NO: 3566 - protein, 97 aa, Artificial Sequence; identical to SEQ ID NO: 3565
  Synthetic polypeptide

SEQ ID NO: 3567 - protein, 50 aa, Artificial Sequence
  Synthetic polypeptide
MCRIQRADGDCDLAAVILHVKRRRICVSPHNHTVKQWMKVQAAKKNGPAY

SEQ ID NO: 3568 - protein, 99 aa, Artificial Sequence
  Synthetic polypeptide
MANMNSDSRHLGTSEVDHERDPGPMNIQFEPSDLRSKSRLPWPPKVPRLQPLPGRHPVWEVRSVSAWPPIVWDVRSPSAWLPSLESEERLCPAAIPSGK

SEQ ID NO: 3569 - protein, 99 aa, Artificial Sequence; identical to SEQ ID NO: 3568
  Synthetic polypeptide

SEQ ID NO: 3570 - protein, 99 aa, Artificial Sequence; identical to SEQ ID NO: 3568
  Synthetic polypeptide

SEQ ID NO: 3571 - protein, 99 aa, Artificial Sequence; identical to SEQ ID NO: 3568
  Synthetic polypeptide

SEQ ID NO: 3572 - protein, 99 aa, Artificial Sequence; identical to SEQ ID NO: 3568
  Synthetic polypeptide

SEQ ID NO: 3573 - protein, 99 aa, Artificial Sequence; identical to SEQ ID NO: 3568
  Synthetic polypeptide

SEQ ID NO: 3574 - protein, 99 aa, Artificial Sequence; identical to SEQ ID NO: 3568
  Synthetic polypeptide

SEQ ID NO: 3575 - protein, 99 aa, Artificial Sequence; identical to SEQ ID NO: 3568
  Synthetic polypeptide

SEQ ID NO: 3576 - protein, 99 aa, Artificial Sequence; identical to SEQ ID NO: 3568
  Synthetic polypeptide

SEQ ID NO: 3577 - protein, 99 aa, Artificial Sequence; identical to SEQ ID NO: 3568
  Synthetic polypeptide

SEQ ID NO: 3578 - protein, 18 aa, Artificial Sequence
  Synthetic polypeptide
MKRNTCDLLSRSKSDLSI

SEQ ID NO: 3579 - protein, 18 aa, Artificial Sequence
  Synthetic polypeptide
MKRNTCDLLSRSKSDLSI

SEQ ID NO: 3580 - protein, 18 aa, Artificial Sequence
  Synthetic polypeptide
MKRNTCDLLSRSKSDLSI

SEQ ID NO: 3581 - protein, 18 aa, Artificial Sequence
  Synthetic polypeptide
MKRNTCDLLSRSKSDLSI

SEQ ID NO: 3582 - protein, 18 aa, Artificial Sequence
  Synthetic polypeptide
MKRNTCDLLSRSKSDLSI

SEQ ID NO: 3583 - protein, 18 aa, Artificial Sequence
  Synthetic polypeptide
MKRNTCDLLSRSKSDLSI

SEQ ID NO: 3584 - protein, 98 aa, Artificial Sequence
  Synthetic polypeptide
MKRNTCDLLSRSKSFLFLQSLTLEAASCQLTKTLKQPMEEGHMVKYGGLQPTVSKELRQVNNHVSDSRSASLAPVETCSSSSLSWRLDCNLLRDPKLS

SEQ ID NO: 3585 - protein, 98 aa, Artificial Sequence; identical to SEQ ID NO: 3584
  Synthetic polypeptide

SEQ ID NO: 3586 - protein, 98 aa, Artificial Sequence; identical to SEQ ID NO: 3584
  Synthetic polypeptide

SEQ ID NO: 3587 - protein, 98 aa, Artificial Sequence; identical to SEQ ID NO: 3584
  Synthetic polypeptide

SEQ ID NO: 3588 - protein, 98 aa, Artificial Sequence; identical to SEQ ID NO: 3584
  Synthetic polypeptide

SEQ ID NO: 3589 - protein, 98 aa, Artificial Sequence; identical to SEQ ID NO: 3584
  Synthetic polypeptide

SEQ ID NO: 3590 - protein, 184 aa, Artificial Sequence
  Synthetic polypeptide
MTTKRSLFVRLVPCRCLRGEEETVTTLDYSHCSLEQVPKEIFTFEKTLEELYLDANQIEELPKQLFNCQSLHKLSLPDNDLTTLPASIANLINLRELDVSKNGIQEFPENIKNCKVLTIVEASVNPISKLPDGFSQLLNLTQLYLNDAFLEFLPANFGRLTKLQILELRENQLKMLPKKNLPTH

SEQ ID NO: 3591 - protein, 184 aa, Artificial Sequence; identical to SEQ ID NO: 3590
  Synthetic polypeptide

SEQ ID NO: 3592 - protein, 184 aa, Artificial Sequence; identical to SEQ ID NO: 3590
  Synthetic polypeptide

SEQ ID NO: 3593 - protein, 184 aa, Artificial Sequence; identical to SEQ ID NO: 3590
  Synthetic polypeptide

SEQ ID NO: 3594 - protein, 184 aa, Artificial Sequence; identical to SEQ ID NO: 3590
  Synthetic polypeptide

SEQ ID NO: 3595 - protein, 184 aa, Artificial Sequence; identical to SEQ ID NO: 3590
  Synthetic polypeptide

SEQ ID NO: 3596 - protein, 184 aa, Artificial Sequence; identical to SEQ ID NO: 3590
  Synthetic polypeptide

SEQ ID NO: 3597 - protein, 184 aa, Artificial Sequence; identical to SEQ ID NO: 3590
  Synthetic polypeptide

SEQ ID NO: 3598 - protein, 184 aa, Artificial Sequence; identical to SEQ ID NO: 3590
  Synthetic polypeptide

SEQ ID NO: 3599 - protein, 184 aa, Artificial Sequence; identical to SEQ ID NO: 3590
  Synthetic polypeptide

SEQ ID NO: 3600 - protein, 2602 aa, Artificial Sequence
  Synthetic polypeptide
MFRRARLSVKPNVRPGVGARGSTASNPQRGRESPRPPDPATDSASKPAEPTDVPTVDFGGAEPQEKAPRSSTEKTGGDNDVEESSRSSSTVSQRRKRISSTSSLVKSSVSVPSESHPLSTINQEAPQPTATSTKEKQPCSDRYRIYKAQKLREMLKEELRKEKKQWKNKYAINESQRPPDRSKMTMRDFIYYLPDNNPMTSSLEQEKKTEKPSTPVQTREQEGKSTPNAEDNEMEEETDDGPLLVPRVKVAEDGSIILDEESLTVEVLRTKGPCVVEENDPIFERGSTTTYSSFRKNYYSKPWSNKETDMFFLAISMVGTDFSMIGQLFPHRARIEIKNKFKREEKTNGWRIDKAFQEKRPFDFDFFAHLLQKVLAEEEKRKQKSVKNHSLKEKKSTKPRKNVKVKKVACEGVNNDPDESMSSRISDTERSQKDAQTVEEESLTLSREDAEQVALEVDLNQKKRRRKKQDGANELGVNNLLENATVQAGPSKGEKHKNKCQAIRPELKEGECSKEQMLSCTQNIDGIVGFASTEKVEKRTDPILSLSNQQDATSVATESSESSTSDLPSFEVGIRALCEVNNAEGSCIEERNVDLKNNSLEIDQTENVKPMLRGRFQRPKPNLSRAGKKSVLSQGKTESESKNSHSKTSVEKNHVEKDKMNTLDILRMETTERENPEAETVSVLGEKNCLQEGSQLKALRPVQVRGRLQKPKPNAGKAAERKEILISQEEIGANVEKNENESCADRDTPQHMEDQSRKDFEEEDVILQPEKNDSFQNVQPDEPKVLNECLSVQENNKANKLNQVPILRTRFQKPKPNIGRGTGRREISSKEEVLEKILVSGEMAAALRETVRLDTSPKEMVPAEINTKEMQSDLKETGRRAISPREKILDVIDDTIEMETGLKAMGREICLREKTPEVIDATEEIDKDLEEAGRREISPQKNGPEEVKPLGEVETDLKATGNESSPREKTPEVTDATEEIDKNLEETGRRKISPRENGPEEVKPVDEMETDLNATGRESSPREKTPEVIDATEEIDLEETEREVSPQENGLEEVKPLGEMETDLKATGRDSFPRGKTPEVIDAIEEIEIDLEETEREISPQENGLEEVKPLGEMQTDLKATGREISPREKTPEVIDATEEIDKDLEETGRREISPEENGPEEVKPVDEMETDLKTTGREGSSREKTREVIDAAEVIETDLEETEREISPQENGPEEVKPVGKMETDLKEIREEISQREKVLAEFSAIREKEIDLKETGKRDIPIMEKVSGKMAVVEEMEADLKETGKENFRERGSEEICVTEEKVAELKQTGKTDISPRENELEETSTSRQTDTHLMQSGSNDFSAVPSLDIQNISSEVLSMMHTPVEEKRNSEKEVSSHFSHFKISSQTHESDKTEVQGIQSPDVPEQFSDINLSKSLPQEQKPLEIKPAPFVRSRFKRPKPNLARAALKRETTESEKYIYEKKSETKKMETIVMQENNEQTDTLPSQHDEASLMISREKDTLGHRNEEAVILPCTQTERNLSPSNSCEPKEESQSAPVQKNDSVVSVGTNNVNTFQQEMKESVIQTARQVRGRLQRPRPNIRKTGQRQIVDKGEAKGIIKEGRTILPKDETEKKVLTVSNSQIETEIEVPSSAVPEHRMYENQSQVVLVENLHVNKTNETIRHENKPYVPSSAQMTRRKFQKAKPNLGRAHSKKEEPVLEKVTTDQSKEGKPEDHLLQKGASNTQLLLKEKAELLTSLEVSARKDCVGSKESALAKIDAELEEVGPSRRVGEETVGDNSPSSVVEEQYLNKLTSCPQPLNETSYSKIALDGKTTISSTSEYERNRGERRSHKKFKPNVTRGRGSKRVRGKTSKKEPRASKAMLVTLRASQEEDDDADDFESDYEEESYHLAPEEVNKAPVFVPVGLRSPEPVSAQIEETMEELEITVNVPDVGCIAVVEHELPNTDVTTEEMKQEENLSVPFEMTTSEHIQDEPGTNDGSTEAAITLLTMGDLVLQSEISSEQGDVGVCIIPHVHSKDKSHIPSSLDNVNHKIVHECQELSSPVITTSPASFEENKIVLEEQSSREEISLMEKVKENATPTRNTISKVTSNLRIRSRLAKPKPNLEKTLGTNRLDDYQEVSSLCVTKGAEMETQRETEKNASKATELENKNLGPVTTAENKDQSKLACVHGIKGTSISSEVNLTERNENQEESSQEVHMLSVAPVASSETGPCTLGLDRGLGENSVEEPQIKDSKGDSVLTLPVPEYTPTSIPEVQQENIINPQDLTVNLVANVPQDGEDEQAFILTLVEIPANAVEEFTDATAQFMPNPLLPAPILVKSVNTEERGDMSICLPATSVGQDAMGLSISGRDNSKKPPDNLDLVSRKRFQCRLDKNDHIPPAKKRSLTLRDDCQEYTTEVHSKELTNVFEETGESHKGQDIFLTSGSTLTTPEPQRQQVEAAFQSRGSRSPDACMDKNVPQLPQDEMIVSDKEERTDAAPKSQQMDSRTSSSKASLSRPGRRPLGFLSLICSKNSLESDEPMQVHSKKRLKPLIPGLRKKLKRSNPFNESQEKNRESSDLLPSPSVITTQSENISSSATQSTRDPGRLQVVPRTATESGAL

SEQ ID NO: 3601 - protein, 624 aa, Artificial Sequence
  Synthetic polypeptide
TDVTTEEMKQEENLSVPFEMTTSEHIQDEPGVCIIPHVHSKDKSHIPSSLDNVNHKIVHECQELSSPVITTSPASFEENKIVLEEQSSREEISLMEKVKENATPTRNTISKVTSNLRIRSRLAKPKPNLEKTLGTNRLDDYQEVSSLCVTKGAEMETQRETEKNASKATELENKNLGPVTTAENKDQSKLACVHGIKGTSISSEVNLTERNENQEESSQEVHMLSVAPVASSETGPCTLGLDRGLGENSVEEPQIKDSKGDSVLTLPVPEYTPTSIPEVQQENIINPQDLTVNLVANVPQDGEDEQAFILTLVEIPANAVEEFTDATAQFMPNPLLPAPILVKSVNTEERGDMSICLPATSVGQDAMGLSISGRDNSKKPPDNLDLVSRKRFQCRLDKNDHIPPAKKRSLTLRDDCQEYTTEVHSKELTNVFEETGESHKGQDIFLTSGSTLTTPEPQRQQVEAAFQSRGSRSPDACMDKNVPQLPQDEMIVSDKEERTDAAPKSQQMDSRTSSSKASLSRPGRRPLGFLSLICSKNSLESDEPMQVHSKKRLKPLIPGLRKKLKRSNPFNESQEKNRESSDLLPSPSVITTQSENISSSATQSTRDPGRLQVVPRTATESGAL

SEQ ID NO: 3602 - protein, 481 aa, Artificial Sequence
  Synthetic polypeptide
MWAVLRLALRPCARASPAGPRAYHGDSVASLGTQPDLGSALYQENYKQMKALVNQLHERVEHIKLGGGEKARALHISRGKLLPRERIDNLIDPGSPFLELSQFAGYQLYDNEEVPGGGIITGIGRVSGVECMIIANDATVKGGAYYPVTVKKQLRAQEIAMQNRLPCIYLVDSGGAYLPRQADVFPDRDHFGRTFYNQAIMSSKNIAQIAVVMGSCTAGGAYVPAMADENIIVRKQGTIFLAGPPLVKAATGEEVSAEDLGGADLHCRKSGVSDHWALDDHHALHLTRKVVRNLNYQKKLDVTIEPSEEPLFPADELYGIVGANLKRSFDVREVIARIVDGSRFTEFKAFYGDTLVTGFARIFGYPVGIVGNNGVLFSESAKKGTHFVQLCCQRNIPLLFLQNITGFMVGREYEAEGIAKDGAKMVAAVACAQVPKITLIIGGSYGAGNYGMCGRAYSPRFLMNMDVKLLTQHHLTESSTI

SEQ ID NO: 3603 - protein, 443 aa, Artificial Sequence
  Synthetic polypeptide
MWAVLRLALRPCARASPAGPRAYHGDSVASLGTQPDLGSALYQENYKQMKALVNQLHERVEHIKLGGGEKARALHISRGKLLPRERIDNLIDPGSPFLELSQFAGYQLYDNEEVPGGGIITGIGRVSGVECMIIANDATVKGGAYYPVTVKKQLRAQEIAMQNRLPCIYLVDSGGAYLPRQADVFPDRDHFGRTFYNQAIMSSKNIAQVKAATGEEVSAEDLGGADLHCRKSGVSDHWALDDHHALHLTRKVVRNLNYQKKLDVTIEPSEEPLFPADELYGIVGANLKRSFDVREVIARIVDGSRFTEFKAFYGDTLVTGFARIFGYPVGIVGNNGVLFSESAKKGTHFVQLCCQRNIPLLFLQNITGFMVGREYEAEGIAKDGAKMVAAVACAQVPKITLIIGGSYGAGNYGMCGRAYSPRFLMNMDVKLLTQHHLTESSTI

SEQ ID NO: 3604 - protein, 253 aa, Artificial Sequence
  Synthetic polypeptide
MADENIIVRKQGTIFLAGPPLVKAATGEEVSAEDLGGADLHCRKSGVSDHWALDDHHALHLTRKVVRNLNYQKKLDVTIEPSEEPLFPADELYGIVGANLKRSFDVREKFFMKYFLRLDLNSYNSTWQHGFARIFGYPVGIVGNNGVLFSESAKKGTHFVQLCCQRNIPLLFLQNITGFMVGREYEAEGIAKDGAKMVAAVACAQVPKITLIIGGSYGAGNYGMCGRAYSPRFLMNMDVKLLTQHHLTESSTI

SEQ ID NO: 3605 - protein, 415 aa, Artificial Sequence
  Synthetic polypeptide
MSSDEEKYSLPVVQNDSSRGSSVSSNLQEEYEELLHYAIVTPNIEPCASQSSHPKGELVPDVRISTIHDILHSQGNNSEVRETAIEVGKGCDFHISSHSKTDESSPVLSPRKPSHPVMDFFSSHLLADSSSPATNSSHTDAHEILVSDFLVSDENLQKMENVLDLWSSGLKTNIISELSKWRLNFIDWHRMEMRKEKEKHAAHLKQLCNQINELKELQKTFEISIGRKDEVISSLSHAIGKQKEKIELMRTFFHWRIGHVRARQDVYEGKLADQYYQRTLLKKVWKVWRSVVQKQWKDVVERACQARAEEVCIQISNDYEAKVAMLSGALENAKAEIQRMQHEKEHFEDSMKKAFMRGVCALNLEAMTIFQNRNDAGQARSLTPVIPALWEAEVSGSRGQEIETILANMVKSRLY

SEQ ID NO: 3606 - protein, 387 aa, Artificial Sequence
  Synthetic polypeptide
MSSDEEKYSLPVVQNDSSRGSSVSSNLQEEYEELLHYAIVTPNIEPCASQSSHPKGELVPDVRISTIHDILHSQESSPVLSPRKPSHPVMDFFSSHLLADSSSPATNSSHTDAHEILVSDFLVSDENLQKMENVLDLWSSGLKTNIISELSKWRLNFIDWHRMEMRKEKEKHAAHLKQLCNQINELKELQKTFEISIGRKDEVISSLSHAIGKQKEKIELMRTFFHWRIGHVRARQDVYEGKLADQYYQRTLLKKVWKVWRSVVQKQWKDVVERACQARAEEVCIQISNDYEAKVAMLSGALENAKAEIQRMQHEKEHFEDSMKKAFMRGVCALNLEAMTIFQNRNDAGQARSLTPVIPALWEAEVSGSRGQEIETILANMVKSRLY

SEQ ID NO: 3607 - protein, 298 aa, Artificial Sequence
  Synthetic polypeptide
MDFFSSHLLADSSSPATNSSHTDAHEILVSDFLVSDENLQKMENVLDLWSSGLKTNIISELSKWRLNFIDWHRMEMRKEKEKHAAHLKQLCNQINELKELQKTFEISIGRKDEVISSLSHAIGKQKEKIELMRTFFHWRIGHVRARQDVYEGKLADQYYQRTLLKKVWKVWRSVVQKQWKDVVERACQARAEEVCIQISNDYEAKVAMLSGALENAKAEIQRMQHEKEHFEDSMKKAFMRGVCALNLEAMTIFQNRNDAGQARSLTPVIPALWEAEVSGSRGQEIETILANMVKSRLY

SEQ ID NO: 3608 - protein, 298 aa, Artificial Sequence; identical to SEQ ID NO: 3607
  Synthetic polypeptide

SEQ ID NO: 3609 - protein, 390 aa, Artificial Sequence
  Synthetic polypeptide
MKWEEYEELLHYAIVTPNIEPCASQSSHPKGELVPDVRISTIHDILHSQGNNSEVRETAIEVGKGCDFHISSHSKTDESSPVLSPRKPSHPVMDFFSSHLLADSSSPATNSSHTDAHEILVSDFLVSDENLQKMENVLDLWSSGLKTNIISELSKWRLNFIDWHRMEMRKEKEKHAAHLKQLCNQINELKELQKTFEISIGRKDEVISSLSHAIGKQKEKIELMRTFFHWRIGHVRARQDVYEGKLADQYYQRTLLKKVWKVWRSVVQKQWKDVVERACQARAEEVCIQISNDYEAKVAMLSGALENAKAEIQRMQHEKEHFEDSMKKAFMRGVCALNLEAMTIFQNRNDAGQARSLTPVIPALWEAEVSGSRGQEIETILANMVKSRLY

SEQ ID NO: 3610 - protein, 457 aa, Artificial Sequence
  Synthetic polypeptide
MSAQCCAGQLACCCGSAGCSLCCDCCPRIRQSLSTRFMYALYFILVVVLCCIMMSTTVAHKMKEHIPFFEDMCKGIKAGDTCEKLVGYSAVYRVCFGMACFFFIFCLLTLKINNSKSCRAHIHNGFWFFKLLLLGAMCSGAFFIPDQDTFLNAWRYVGAVGGFLFIGIQLLLLVEFAHKWNKNWTAGTASNKLWYASLALVTLIMYSIATGGLVLMAVFYTQKDSCMENKILLGVNGGLCLLISLVAISPWVQNRQPHSGLLQSGVISCYVTYLTFSALSSKPAEVDEHGKNVTICVPDFGQDLYRDENLVTILGTSLLIGCILYSCLTSTTRSSSDALQGRYAAPELEIARCCFCFSPGGEDTEEQQPGKEGPRVIYDEKKGTVYIYSYFHFVFFLASLYVMMTVTNWFKWSPTLLPRLEYSGMILAHCNLHLPDVKRFSCLSLPSSWGYRHVPPC

SEQ ID NO: 3611 - protein, 463 aa, Artificial Sequence
  Synthetic polypeptide
MSAQCCAGQLACCCGSAGCSLCCDCCPRIRQSLSTRFMYALYFILVVVLCCIMMSTTVAHKMKEHIPFFEDMCKGIKAGDTCEKLVGYSAVYRVCFGMACFFFIFCLLTLKINNSKSCRAHIHNGFWFFKLLLLGAMCSGAFFIPDQDTFLNAWRYVGAVGGFLFIGIQLLLLVEFAHKWNKNWTAGTASNKLWYASLALVTLIMYSIATGGLVLMAVFYTQKDSCMENKILLGVNGGLCLLISLVAISPWVQNRQPHSGLLQSGVISCYVTYLTFSALSSKPAEVDEHGKNVTICVPDFGQDLYRDENLVTILGTSLLIGCILYSCLTSTTRSSSDALQGRYAAPELEIARCCFCFSPGGEDTEEQQPGKEGPRVIYDEKKGTVYIYSYFHFVFFLASLYVMMTVTNWFKWSPTLLPRLEYSGMILAHCNLHLPDVKRFSCLSLPSSWGYRHVPPCAFHLLP

SEQ ID NO: 3612 - protein, 413 aa, Artificial Sequence
  Synthetic polypeptide
MSAQCCAGQLACCCGSAGCSLCCDCCPRIRQSLSTRFMYALYFILVVVLCCIMMSTTVAHKMKEHIPFFEDMCKGIKAGDTCEKLVGYSAVYRVCFGMACFFFIFCLLTLKINNSKSCRAHIHNGFWFFKLLLLGAMCSGAFFIPDQDTFLNAWRYVGAVGGFLFIGIQLLLLVEFAHKWNKNWTAGTASNKLWYASLALVTLIMYSIATGGLVLMAVFYTQKDSCMENKILLGVNGGLCLLISLVAISPWVQNRQPHSGLLQSGVISCYVTYLTFSALSSKPAEVVLDEHGKNVTICVPDFGQDLYRDENLVTILGTSLLIGCILYSCLTSTTRSSSDALQGRYAAPELEIARCCFCFSPGGEDTEEQQPGKEGPRVIYDEKKGTVYIYSYFHFVFFLASLYVMMTVTNWFN

SEQ ID NO: 3613 - protein, 413 aa, Artificial Sequence; identical to SEQ ID NO: 3612
  Synthetic polypeptide

SEQ ID NO: 3614 - protein, 413 aa, Artificial Sequence; identical to SEQ ID NO: 3612
  Synthetic polypeptide

SEQ ID NO: 3615 - protein, 411 aa, Artificial Sequence
  Synthetic polypeptide
MSAQCCAGQLACCCGSAGCSLCCDCCPRIRQSLSTRFMYALYFILVVVLCCIMMSTTVAHKMKEHIPFFEDMCKGIKAGDTCEKLVGYSAVYRVCFGMACFFFIFCLLTLKINNSKSCRAHIHNGFWFFKLLLLGAMCSGAFFIPDQDTFLNAWRYVGAVGGFLFIGIQLLLLVEFAHKWNKNWTAGTASNKLWYASLALVTLIMYSIATGGLVLMAVFYTQKDSCMENKILLGVNGGLCLLISLVAISPWVQNRQPHSGLLQSGVISCYVTYLTFSALSSKPAEVDEHGKNVTICVPDFGQDLYRDENLVTILGTSLLIGCILYSCLTSTTRSSSDALQGRYAAPELEIARCCFCFSPGGEDTEEQQPGKEGPRVIYDEKKGTVYIYSYFHFVFFLASLYVMMTVTNWFN

SEQ ID NO: 3616 - protein, 71 aa, Artificial Sequence
  Synthetic polypeptide
MSAQCCAGQLACCCGSAGCSLCCDCCPRIRQSLSTRFMYALYFILVVVLCCIMMSTTVAHKMKEHVYAQMA

SEQ ID NO: 3617 - protein, 71 aa, Artificial Sequence; identical to SEQ ID NO: 3616
  Synthetic polypeptide

SEQ ID NO: 3618 - protein, 71 aa, Artificial Sequence; identical to SEQ ID NO: 3616
  Synthetic polypeptide

SEQ ID NO: 3619 - protein, 71 aa, Artificial Sequence; identical to SEQ ID NO: 3616
  Synthetic polypeptide

SEQ ID NO: 3620 - protein, 193 aa, Artificial Sequence
  Synthetic polypeptide
MYGKGKSNSSAVPSDSQAREKLALYVYEYLLHVGAQKSAQTFLSEIRWEKNITLGEPPGFLHSWWCVFWDLYCAAPERRETCEHSSEAKAFHDYSAAAAPSPVLGNIPPGDGMPVGPVPPGFFQPFMSPRYPGGPRPPLRIPNQALGGVPGSQPLLPSGMDPTRQQGHPNMGGPMQRMTPPRGMVPLGPQAHG

SEQ ID NO: 3621 - protein, 163 aa, Artificial Sequence
  Synthetic polypeptide
MYGKGKSNSSAVPSDSQAREKLALYVYEYLLHVGAQKSAQTFLSEIRWEKNITLGEPPGFLHSWWCVFWDLYCAAPERRETCEHSSEAKAFHDYPFMSPRYPGGPRPPLRIPNQALGGVPGSQPLLPSGMDPTRQQGHPNMGGPMQRMTPPRGMVPLGPQAHG

SEQ ID NO: 3622 - protein, 163 aa, Artificial Sequence; identical to SEQ ID NO: 3621
  Synthetic polypeptide

SEQ ID NO: 3623 - protein, 163 aa, Artificial Sequence; identical to SEQ ID NO: 3621
  Synthetic polypeptide

SEQ ID NO: 3624 - protein, 99 aa, Artificial Sequence
  Synthetic polypeptide
SAAAAPSPVLGNIPPGDGMPVGPVPPGFFQPFMSPRYPGGPRPPLRIPNQALGGVPGSQPLLPSGMDPTRQQGHPNMGGPMQRMTPPRGMVPLGPQAHG

SEQ ID NO: 3625 - protein, 99 aa, Artificial Sequence; identical to SEQ ID NO: 3624
  Synthetic polypeptide

SEQ ID NO: 3626 - protein, 173 aa, Artificial Sequence
  Synthetic polypeptide
MYGKGKSNSSAVPSDSQAREKLALYVYEYLLHVGAQKSAQTFLSEIRWEKNITLGEPPGFLHSWWCVFWDLYCAAPERRETCEHSSEAKAFHDYSAAAAPSPVLGNIPPGDGMPVGPVPPGFFQALGGVPGSQPLLPSGMDPTRQQGHPNMGGPMQRMTPPRGMVPLGPQAHG

SEQ ID NO: 3627 - protein, 189 aa, Artificial Sequence
  Synthetic polypeptide
MLVIPSALMYSFVLYWRLALYVYEYLLHVGAQKSAQTFLSEIRWEKNITLGEPPGFLHSWWCVFWDLYCAAPERRETCEHSSEAKAFHDYSAAAAPSPVLGNIPPGDGMPVGPVPPGFFQPFMSPRYPGGPRPPLRIPNQALGGVPGSQPLLPSGMDPTRQQGHPNMGGPMQRMTPPRGMVPLGPQAHG

SEQ ID NO: 3628 - protein, 310 aa, Artificial Sequence
  Synthetic polypeptide
MERKISRIHLVSEPSITHFLQVSWEKTLESGFVITLTDGHSAWTGTVSESEISQEADDMAMEKGKYVGELRKALLSGAGPADVYTFNFSKESCYFFFEKNLKDVSFRLGSFNLEKVENPAEVIRELICYCLDTIAENQAKNEHLQKENERLLRDWNDVQGRFEKCVSAKEALETDLYKRFILVLNEKKTKIRSLHNKLLNAAQEREKDIKQEGETAICSEMTADRDPVYDESTDEESENQTDLSGLASAAVSKDDSIISSLDVTDIAPSRKRRQRMQRNLGTEPKMAPQENQLQEKEKGRKKETSEKEAV

SEQ ID NO: 3629 - protein, 310 aa, Artificial Sequence; identical to SEQ ID NO: 3628
  Synthetic polypeptide

SEQ ID NO: 3630 - protein, 310 aa, Artificial Sequence; identical to SEQ ID NO: 3628
  Synthetic polypeptide

SEQ ID NO: 3631 - protein, 310 aa, Artificial Sequence; identical to SEQ ID NO: 3628
  Synthetic polypeptide

SEQ ID NO: 3632 - protein, 112 aa, Artificial Sequence
  Synthetic polypeptide
MGRKKIQITRIMDERNRQVTFTKRKFGLMKKAYELSVLCDCEIALIIFNSTNKLFQYASTDMDKVLLKYTEYNEPHESRTNSDIVEGMTKLCSSLYLQLPAQCLAYCGHSIY

SEQ ID NO: 3633 - protein, 112 aa, Artificial Sequence; identical to SEQ ID NO: 3632
  Synthetic polypeptide

SEQ ID NO: 3634 - protein, 112 aa, Artificial Sequence; identical to SEQ ID NO: 3632
  Synthetic polypeptide

SEQ ID NO: 3635 - protein, 112 aa, Artificial Sequence; identical to SEQ ID NO: 3632
  Synthetic polypeptide

SEQ ID NO: 3636 - protein, 112 aa, Artificial Sequence; identical to SEQ ID NO: 3632
  Synthetic polypeptide

SEQ ID NO: 3637 - protein, 112 aa, Artificial Sequence; identical to SEQ ID NO: 3632
  Synthetic polypeptide

SEQ ID NO: 3638 - protein, 112 aa, Artificial Sequence; identical to SEQ ID NO: 3632
  Synthetic polypeptide

SEQ ID NO: 3639 - protein, 112 aa, Artificial Sequence; identical to SEQ ID NO: 3632
  Synthetic polypeptide

SEQ ID NO: 3640 - protein, 112 aa, Artificial Sequence; identical to SEQ ID NO: 3632
  Synthetic polypeptide

SEQ ID NO: 3641 - protein, 112 aa, Artificial Sequence; identical to SEQ ID NO: 3632
  Synthetic polypeptide

SEQ ID NO: 3642 - protein, 112 aa, Artificial Sequence; identical to SEQ ID NO: 3632
  Synthetic polypeptide

SEQ ID NO: 3643 - protein, 112 aa, Artificial Sequence; identical to SEQ ID NO: 3632
  Synthetic polypeptide

SEQ ID NO: 3644 - protein, 112 aa, Artificial Sequence; identical to SEQ ID NO: 3632
  Synthetic polypeptide

SEQ ID NO: 3645 - protein, 112 aa, Artificial Sequence; identical to SEQ ID NO: 3632
  Synthetic polypeptide

SEQ ID NO: 3646 - protein, 112 aa, Artificial Sequence; identical to SEQ ID NO: 3632
  Synthetic polypeptide

SEQ ID NO: 3647 - protein, 112 aa, Artificial Sequence; identical to SEQ ID NO: 3632
  Synthetic polypeptide

SEQ ID NO: 3648 - protein, 112 aa, Artificial Sequence; identical to SEQ ID NO: 3632
  Synthetic polypeptide

SEQ ID NO: 3649 - protein, 6152 aa, Artificial Sequence
  Synthetic polypeptide
MSVFLGPGMPSASLLVNLLSALLILFVFGETEIRFTGQTEFVVNETSTTVIRLIIERIGEPANVTAIVSLYGEDAGDFFDTYAAAFIPAGETNRTVYIAVCDDDLPEPDETFIFHLTLQKPSANVKLGWPRTVTVTILSNDNAFGIISFNMLPSIAVSEPKGRNESMPLTLIREKGTYGMVMVTFEVEGGPNPPDEDLSPVKGNITFPPGRATVIYNLTVLDDEVPENDEIFLIQLKSVEGGAEINTSRNSIEIIIKKNDSPVRFLQSIYLVPEEDHILIIPVVRGKDNNGNLIGSDEYEVSISYAVTTGNSTAHAQQNLDFIDLQPNTTVVFPPFIHESHLKFQIVDDTIPEIAESFHIMLLKDTLQGDAVLISPSVVQVTIKPNDKPYGVLSFNSVLFERTVIIDEDRISRYEEITVVRNGGTHGNVSANWVLTRNSTDPSPVTADIRPSSGVLHFAQGQMLATIPLTVVDDDLPEEAEAYLLQILPHTIRGGAEVSEPAELLFYIQDSDDVYGLITFFPMENQKIESSPGERYLSLSFTRLGGTKGDVRLLYSVLYIPAGAVDPLQAKEGILNISRRNDLIFPEQKTQVTTKLPIRNDAFLQNGAHFLVQLETVELLNIIPLIPPISPRFGEICNISLLVTPAIANGEIGFLSNLPIILHEPEDFAAEVVYIPLHRDGTDGQATVYWSLKPSGFNSKAVTPDDIGPFNGSVLFLSGQSDTTINITIKGDDIPEMNETVTLSLDRVNVENQVLKSGYTSRDLIILENDDPGGVFEFSPASRGPYVIKEGESVELHIIRSRGSLVKQFLHYRVEPRDSNEFYGNTGVLEFKPGEREIVITLLARLDGIPELDEHYWVVLSSHGERESKLGSATIVNITILKNDDPHGIIEFVSDGLIVMINESKGDAIYSAVYDVVRNRGNFGDVSVSWVVSPDFTQDVFPVQGTVVFGDQEFSKNITIYSLPDEIPEEMEEFTVILLNGTGGAKVGNRTTATLRIRRNDDPIYFAEPRVVRVQEGETANFTVLRNGSVDVTCMVQYATKDGKATARERDFIPVEKGETLIFEVGSRQQSISIFVNEDGIPETDEPFYIILLNSTGDTVVYQYGVATVIIEANDDPNGIFSLEPIDKAVEEGKTNAFWILRHRGYFGSVSVSWQLFQNDSALQPGQEFYETSGTVNFMDGEEAKPIILHAFPDKIPEFNEFYFLKLVNISGGSPGPGGQLAETNLQVTVMVPFNDDPFGVFILDPECLEREVAEDVLSEDDMSYITNFTILRQQGVFGDVQLGWEILSSEFPAGLPPMIDFLLVGIFPTTVHLQQHMRRHHSGTDALYFTGLEGAFGTVNPKYHPSRNNTIANFTFSAWVMPNANTNGFIIAKDDGNGSIYYGVKIQTNESHVTLSLHYKTLGSNATYIAKTTVMKYLEESVWLHLLIILEDGIIEFYLDGNAMPRGIKSLKGEAITDGPGILRIGAGINGNDRFTGLMQDVRSYERKLTLEEIYELHAMPAKSDLHPISGYLEFRQGETNKSFIISARDDNDEEGEELFILKLVSVYGGARISEENTTARLTIQKSDNANGLFGFTGACIPEIAEEGSTISCVVERTRGALDYVHVFYTISQIETDGINYLVDDFANASGTITFLPWQRSEVLNIYVLDDDIPELNEYFRVTLVSAIPGDGKLGSTPTSGASIDPEKETTDITIKASDHPYGLLQFSTGLPPQPKDAMTLPASSVPHITVEEEDGEIRLLVIRAQGLLGRVTAEFRTVSLTAFSPEDYQNVAGTLEFQPGERYKYIFINITDNSIPELEKSFKVELLNLEGGVAELFRVDGSGSGDGDMEFFLPTIHKRASLGVASQILVTIAASDHAHGVFEFSPESLFVSGTEPEDGYSTVTLNVIRHHGTLSPVTLHWNIDSDPDGDLAFTSGNITFEIGQTSANITVEILPDEDPELDKAFSVSVLSVSSGSLGAHINATLTVLASDDPYGIFIFSEKNRPVKVEEATQNITLSIIRLKGLMGKVLVSYATLDDMEKPPYFPPNLARATQGRDYIPASGFALFGANQSEATIAISILDDDEPERSESVFIELLNSTLVAKVQSRSIPNSPRLGPKVETIAQLIIIANDDAFGTLQLSAPIVRVAENHVGPIINVTRTGGAFADVSVKFKAVPITAIAGEDYSIASSDVVLLEGETSKAVPIYVINDIYPELEESFLVQLMNETTGGARLGALTEAVIIIEASDDPYGLFGFQITKLIVEEPEFNSVKVNLPIIRNSGTLGNVTVQWVATINGQLATGDLRVVSGNVTFAPGETIQTLLLEVLADDVPEIEEVIQVQLTDASGGGTIGLDRIANIIIPANDDPYGTVAFAQMVYRVQEPLERSSCANITVRRSGGHFGRLLLFYSTSDIDVVALAMEEGQDLLSYYESPIQGVPDPLWRTWMNVSAVGEPLYTCATLCLKEQACSAFSFFSASEGPQCFWMTSWISPAVNNSDFWTYRKNMTRVASLFSGQAVAGSDYEPVTRQWAIMQEGDEFANLTVSILPDDFPEMDESFLISLLEVHLMNISASLKNQPTIGQPNISTVVIALNGDAFGVFVIYNISPNTSEDGLFVEVQEQPQTLVELMIHRTGGSLGQVAVEWRVVGGTATEGLDFIGAGEILTFAEGETKKTVILTILDDSEPEDDESIIVSLVYTEGGSRILPSSDTVRVNILANDNVAGIVSFQTASRSVIGHEGEILQFHVIRTFPGRGNVTVNWKIIGQNLELNFANFSGQLFFPEGSLNTTLFVHLLDDNIPEEKEVYQVILYDVRTQGVPPAGIALLDAQGYAAVLTVEASDEPHGVLNFALSSRFVLLQEANITIQLFINREFGSLGAINVTYTTVPGMLSLKNQTVGNLAEPEVDFVPIIGFLILEEGETAAAINITILEDDVPELEEYFLVNLTYVGLTMAASTSFPPRLDSEGLTAQVIIDANDGARGVIEWQQSRFEVNETHGSLTLVAQRSREPLGHVSLFVYAQNLEAQVGLDYIFTPMILHFADGERYKNVNIMILDDDIPEGDEKFQLILTNPSPGLELGKNTIALIIVLANDDGPGVLSFNNSEHFFLREPTALYVQESVAVLYIVREPAQGLFGTVTVQFIVTEVNSSNESKDLTPSKGYIVLEEGVRFKALQISAILDTEPEMDEYFVCTLFNPTGGARLGVHVQTLITVLQNQAPLGLFSISAVENRATSIDIEEANRTVYLNVSRTNGIDLAVSVQWETVSETAFGMRGMDVVFSVFQSFLDESASGWCFFTLENLIYGIMLRKSSVTVYRWQGIFIPVEDLNIENPKTCEAFNIGFSPYFVITHEERNEEKPSLNSVFTFTSGFKLFLVQTIIILESSQVRYFTSDSQDYLIIASQRDDSELTQVFRWNGGSFVLHQKLPVRGVLTVALFNKGGSVFLAISQANARLNSLLFRWSGSGFINFQEVPVSGTTEVEALSSANDIYLIFAENVFLGDQNSIDIFIWEMGQSSFRYFQSVDFAAVNRIHSFTPASGIAHILLIGQDMSALYCWNSERNQFSFVLEVPSAYDVASVTVKSLNSSKNLIALVGAHSHIYELAYISSHSDFIPSSGELIFEPGEREATIAVNILDDTVPEKEESFKVQLKNPKGGAEIGINDSVTITILSNDDAYGIVAFAQNSLYKQVEEMEQDSLVTLNVERLKGTYGRITIAWEADGSISDIFPTSGVILFTEGQVLSTITLTILADNIPELSEVVIVTLTRITTEGVEDSYKGATIDQDRSKSVITTLPNDSPFGLVGWRAASVFIRVAEPKENTTTLQLQIARDKGLLGDIAIHLRAQPNFLLHVDNQATENEDYVLQETIIIMKENIKEAHAEVSILPDDLPELEEGFIVTITEVNLVNSDFSTGQPSVRRPGMEIAEIMIEENDDPRGIFMFHVTRGAGEVITAYEVPPPLNVLQVPVVRLAGSFGAVNVYWKASPDSAGLEDFKPSHGILEFADKQVTAMIEITIIDDAEFELTETFNISLISVAGGGRLGDDVVVTVVIPQNDSPFGVFGFEEKTVMIDESLSSDDPDSYVTLTVVRSPGGKGTVRLEWTIDEKAKHNLSPLNGTLHFDETESQKTIVLHTLQDTVLEEDRRFTIQLISIDEVEISPVKGSASIIIRGDKRASGEVGIAPSSRHILIGEPSAKYNGTAIISLVRGPGILGEVTVFWRIFPPSVGEFAETSGKLTMRDEQSAVIVVIQALNDDIPEEKSFYEFQLTAVSEGGVLSESSSTANITVVASDSPYGRFAFSHEQLRVSEAQRVNITIIRSSGDFGHVRLWYKTMSGTAEAGLDFVPAAGELLFEAGEMRKSLHVEILDDDYPEGPEEFSLTITKVELQGRGYDFTIQENGLQIDQPPEIGNISIVRIIIMKNDNAEGIIEFDPKYTAFEVEEDVGLIMIPVVRLHGTYGYVTADFISQSSSASPGGVDYILHGSTVTFQHGQNLSFINISIIDDNESEFEEPIEILLTGATGGAVLGRHLVSRIIIAKSDSPFGVIRFLNQSKISIANPNSTMILSLVLERTGGLLGEIQVNWETVGPNSQEALLPQNRDIADPVSGLFYFGEGEGGVRTIILTIYPHEEIEVEETFIIKLHLVKGEAKLDSRAKDVTLTIQEFGDPNGVVQFAPETLSKKTYSEPLALEGPLLITFFVRRVKGTFGEIMVYWELSSEFDITEDFLSTSGFFTIADGESEASFDVHLLPDEVPEIEEDYVIQLVSVEGGAELDLEKSITWFSVYANDDPHGVFALYSDRQSILIGQNLIRSIQINITRLAGTFGDVAVGLRISSDHKEQPIVTENAERQLVVKDGATYKVDVVPIKNQVFLSLGSNFTLQLVTVMLVGGRFYGMPTILQEAKSAVLPVSEKAANSQVGFESTAFQLMNITAGTSHVMISRRGTYGALSVAWTTGYAPGLEIPEFIVVGNMTPTLGSLSFSHGEQRKGVFLWTFPSPGWPEAFVLHLSGVQSSAPGGAQLRSGFIVAEIEPMGVFQFSTSSRNIIVSEDTQMIRLHVQRLFGFHSDLIKVSYQTTAGSAKPLEDFEPVQNGELFFQKFQTEVDFEITIINDQLSEIEEFFYINLTSVEIRGLQKFDVNWSPRLNLDFSVAVITILDNDDLAGMDISFPETTVAVAVDTTLIPVETESTTYLSTSKTTTILQPTNVVAIVTEATGVSAIPEKLVTLHGTPAVSEKPDVATVTANVSIHGTFSLGPSIVYIEEEMKNGTFNTAEVLIRRTGGFTGNVSITVKTFGERCAQMEPNALPFRGIYGISNLTWAVEEEDFEEQTLTLIFLDGERERKVSVQILDDDEPEGQEFFYVFLTNPQGGAQIVEEKDDTGFAAFAMVIITGSDLHNGIIGFSEESQSGLELREGAVMRRLHLIVTRQPNRAFEDVKVFWRVTLNKTVVVLQKDGVNLVEELQSVSGTTTCTMGQTKCFISIELKPEKVPQVEVYFFVELYEATAGAAINNSARFAQIKILESDESQSLVYFSVGSRLAVAHKKATLISLQVARDSGTGLMMSVNFSTQELRSAETIGRTIISPAISGKDFVITEGTLVFEPGQRSTVLDVILTPETGSLNSFPKRFQIVLFDPKGGARIDKVYGTANITLVSDADSQAIWGLADQLHQPVNDDILNRVLHTISMKVATENTDEQLSAMMHLIEKITTEGKIQAFSVASRTLFYEILCSLINPKRKDTRGFSHFAEVTENFAFSLLTNVTCGSPGEKSKTILDSCPYLSILALHWYPQQINGHKFEGKEGDYIRIPERLLDVQDAEIMAGKSTCKLVQFTEYSSQQWFISGNNLPTLKNKVLSLSVKGQSSQLLTNDNEVLYRIYAAEPRIIPQTSLCLLWNQAAASWLSDSQFCKVVEETADYVECACSHMSVYAVYARTDNLSSYNEAFFTSGFICISGLCLAVLSHIFCARYSMFAAKLLTHMMAASLGTQILFLASAYASPQLAEESCSAMAAVTHYLYLCQFSWMLIQSVNFWYVLVMNDEHTERRYLLFFLLSWGLPAFVVILLIVILKGIYHQSMSQIYGLIHGDLCFIPNVYAALFTAALVPLTCLVVVFVVFIHAYQVKPQWKAYDDVFRGRTNAAEIPLILYLFALISVTWLWGGLHMAYRHFWMLVLFVIFNSLQANYVISLK

SEQ ID NO: 3650 - protein, 1813 aa, Artificial Sequence
  Synthetic polypeptide
MQLCIFCCCCILFYFDLYDFGRGYDFTIQENGLQIDQPPEIGNISIVRIIIMKNDNAEGIIEFDPKYTAFEVEEDVGLIMIPVVRLHGTYGYVTADFISQSSSASPGGVDYILHGSTVTFQHGQNLSFINISIIDDNESEFEEPIEILLTGATGGAVLGRHLVSRIIIAKSDSPFGVIRFLNQSKISIANPNSTMILSLVLERTGGLLGEIQVNWETVGPNSQEALLPQNRDIADPVSGLFYFGEGEGGVRTIILTIYPHEEIEVEETFIIKLHLVKGEAKLDSRAKDVTLTIQEFGDPNGVVQFAPETLSKKTYSEPLALEGPLLITFFVRRVKGTFGEIMVYWELSSEFDITEDFLSTSGFFTIADGESEASFDVHLLPDEVPEIEEDYVIQLVSVEGGAELDLEKSITWFSVYANDDPHGVFALYSDRQSILIGQNLIRSIQINITRLAGTFGDVAVGLRISSDHKEQPIVTENAERQLVVKDGATYKVDVVPIKNQVFLSLGSNFTLQLVTVMLVGGRFYGMPTILQEAKSAVLPVSEKAANSQVGFESTAFQLMNITAGTSHVMISRRGTYGALSVAWTTGYAPGLEIPEFIVVGNMTPTLGSLSFSHGEQRKGVFLWTFPSPGWPEAFVLHLSGVQSSAPGGAQLRSGFIVAEIEPMGVFQFSTSSRNIIVSEDTQMIRLHVQRLFGFHSDLIKVSYQTTAGSAKPLEDFEPVQNGELFFQKFQTEVDFEITIINDQLSEIEEFFYINLTSVEIRGLQKFDVNWSPRLNLDFSVAVITILDNDDLAGMDISFPETTVAVAVDTTLIPVETESTTYLSTSKTTTILQPTNVVAIVTEATGVSAIPEKLVTLHGTPAVSEKPDVATVTANVSIHGTFSLGPSIVYIEEEMKNGTFNTAEVLIRRTGGFTGNVSITVKTFGERCAQMEPNALPFRGIYGISNLTWAVEEEDFEEQTLTLIFLDGERERKVSVQILDDDEPEGQEFFYVFLTNPQGGAQIVEEKDDTGFAAFAMVIITGSDLHNGIIGFSEESQSGLELREGAVMRRLHLIVTRQPNRAFEDVKVFWRVTLNKTVVVLQKDGVNLVEELQSVSGTTTCTMGQTKCFISIELKPEKVPQVEVYFFVELYEATAGAAINNSARFAQIKILESDESQSLVYFSVGSRLAVAHKKATLISLQVARDSGTGLMMSVNFSTQELRSAETIGRTIISPAISGKDFVITEGTLVFEPGQRSTVLDVILTPETGSLNSFPKRFQIVLFDPKGGARIDKVYGTANITLVSDADSQAIWGLADQLHQPVNDDILNRVLHTISMKVATENTDEQLSAMMHLIEKITTEGKIQAFSVASRTLFYEILCSLINPKRKDTRGFSHFAEVTENFAFSLLTNVTCGSPGEKSKTILDSCPYLSILALHWYPQQINGHKFEGKEGDYIRIPERLLDVQDAEIMAGKSTCKLVQFTEYSSQQWFISGNNLPTLKNKVLSLSVKGQSSQLLTNDNEVLYRIYAAEPRIIPQTSLCLLWNQAAASWLSDSQFCKVVEETADYVECACSHMSVYAVYARTDNLSSYNEAFFTSGFICISGLCLAVLSHIFCARYSMFAAKLLTHMMAASLGTQILFLASAYASPQLAEESCSAMAAVTHYLYLCQFSWMLIQSVNFWYVLVMNDEHTERRYLLFFLLSWGLPAFVVILLIVILKGIYHQSMSQIYGLIHGDLCFIPNVYAALFTAALVPLTCLVVVFVVFIHAYQVKPQWKAYDDVFRGRTNAAEIPLILYLFALISVTWLWGGLHMAYRHFWMLVLFVIFNSLQANYVISLK

SEQ ID NO: 3651 - protein, 835 aa, Artificial Sequence
  Synthetic polypeptide
MKIIFPILSNPVFRRTVKLLLCLLWIGYSQGTTHVLRFGGIFEYVESGPMGAEELAFRFAVNTINRNRTLLPNTTLTYDTQKINLYDSFEASKKACDQLSLGVAAIFGPSHSSSANAVQSICNALGVPHIQTRWKHQVSDNKDSFYVSLYPDFSSLSRAILDLVQFFKWKTVTVVYDDSTGLIRLQELIKAPSRYNLRLKIRQLPADTKDAKPLLKEMKRGKEFHVIFDCSHEMAAGILKQALAMGMMTEYYHYIFTTLDLFALDVEPYRYSGVNMTGFRILNTENTQVSSIIEKWSMERLQAPPKPDSGLLDGFMTTDAALMYDAVHVVSVAVQQFPQMTVSSLQCNRHKPWRFGTRFMSLIKEAHWEGLTGRITFNKTNGLRTDFDLDVISLKEEGLEKIGTWDPASGLNMTESQKGKPANITDSLSNRSLIVTTILEEPYVLFKKSDKPLYGNDRFEGYCIDLLRELSTILGFTYEIRLVEDGKYGAQDDANGQWNGMVRELIDHKADLAVAPLAITYVREKVIDFSKPFMTLGISILYRKPNGTNPGVFSFLNPLSPDIWMYILLAYLGVSCVLFVIARFSPYEWYNPHPCNPDSDVVENNFTLLNSFWFGVGALMQQGSELMPKALSTRIVGGIWWFFTLIIISSYTANLAAFLTVERMESPIDSADDLAKQTKIEYGAVEDGATMTFFKKSKISTYDKMWAFMSSRRQSVLVKSNEEGIQRVLTSDYAFLMESTTIEFVTQRNCNLTQIGGLIDSKGYGVGTPMGSVAYACNLSTLGGRAGWITRSGVRDQPGQHGETPSLLKIQKISWAWWCEPVIPATQEGEAGELL

SEQ ID NO: 3652 - protein, 835 aa, Artificial Sequence; identical to SEQ ID NO: 3651
  Synthetic polypeptide

SEQ ID NO: 3653 - protein, 835 aa, Artificial Sequence; identical to SEQ ID NO: 3651
  Synthetic polypeptide

SEQ ID NO: 3654 - protein, 835 aa, Artificial Sequence; identical to SEQ ID NO: 3651
  Synthetic polypeptide

SEQ ID NO: 3655 - protein, 759 aa, Artificial Sequence
  Synthetic polypeptide
MKIIFPILSNPVFRRTVKLLLCLLWIGYSQGTTHVLRFGGIFEYVESGPMGAEELAFRFAVNTINRNRTLLPNTTLTYDTQKINLYDSFEASKKACDQLSLGVAAIFGPSHSSSANAVQSICNALGVPHIQTRWKHQVSDNKDSFYVSLYPDFSSLSRAILDLVQFFKWKTVTVVYDDSTGLIRLQELIKAPSRYNLRLKIRQLPADTKDAKPLLKEMKRGKEFHVIFDCSHEMAAGILKQALAMGMMTEYYHYIFTTLDLFALDVEPYRYSGVNMTGFRILNTENTQVSSIIEKWSMERLQAPPKPDSGLLDGFMTTDAALMYDAVHVVSVAVQQFPQMTVSSLQCNRHKPWRFGTRFMSLIKEAHWEGLTGRITFNKTNGLRTDFDLDVISLKEEGLEKIGTWDPASGLNMTESQKGKPANITDSLSNRSLIVTTILEEPYVLFKKSDKPLYGNDRFEGYCIDLLRELSTILGFTYEIRLVEDGKYGAQDDANGQWNGMVRELIDHKADLAVAPLAITYVREKVIDFSKPFMTLGISILYRKPNGSELMPKALSTRIVGGIWWFFTLIIISSYTANLAAFLTVERMESPIDSADDLAKQTKIEYGAVEDGATMTFFKKSKISTYDKMWAFMSSRRQSVLVKSNEEGIQRVLTSDYAFLMESTTIEFVTQRNCNLTQIGGLIDSKGYGVGTPMGSVAYACNLSTLGGRAGWITRSGVRDQPGQHGETPSLLKIQKISWAWWCEPVIPATQEGEAGELL

SEQ ID NO: 3656 - protein, 786 aa, Artificial Sequence
  Synthetic polypeptide
MGAEELAFRFAVNTINRNRTLLPNTTLTYDTQKINLYDSFEASKKACDQLSLGVAAIFGPSHSSSANAVQSICNALGVPHIQTRWKHQVSDNKDSFYVSLYPDFSSLSRAILDLVQFFKWKTVTVVYDDSTGLIRLQELIKAPSRYNLRLKIRQLPADTKDAKPLLKEMKRGKEFHVIFDCSHEMAAGILKQALAMGMMTEYYHYIFTTLDLFALDVEPYRYSGVNMTGFRILNTENTQVSSIIEKWSMERLQAPPKPDSGLLDGFMTTDAALMYDAVHVVSVAVQQFPQMTVSSLQCNRHKPWRFGTRFMSLIKEAHWEGLTGRITFNKTNGLRTDFDLDVISLKEEGLEKIGTWDPASGLNMTESQKGKPANITDSLSNRSLIVTTILEEPYVLFKKSDKPLYGNDRFEGYCIDLLRELSTILGFTYEIRLVEDGKYGAQDDANGQWNGMVRELIDHKADLAVAPLAITYVREKVIDFSKPFMTLGISILYRKPNGTNPGVFSFLNPLSPDIWMYILLAYLGVSCVLFVIARFSPYEWYNPHPCNPDSDVVENNFTLLNSFWFGVGALMQQGSELMPKALSTRIVGGIWWFFTLIIISSYTANLAAFLTVERMESPIDSADDLAKQTKIEYGAVEDGATMTFFKKSKISTYDKMWAFMSSRRQSVLVKSNEEGIQRVLTSDYAFLMESTTIEFVTQRNCNLTQIGGLIDSKGYGVGTPMGSVAYACNLSTLGGRAGWITRSGVRDQPGQHGETPSLLKIQKISWAWWCEPVIPATQEGEAGELL

SEQ ID NO: 3657 - protein, 492 aa, Artificial Sequence
  Synthetic polypeptide
MLSLQYPDVYRDETAVQDYHGHKICDPYAWLEDPDSEQTKAFVEAQNKITVPFLEQCPIRGLYKERMTELYDYPKYSCHFKKGKRYFYFYNTGLQNQRVLYVQDSLEGEARVFLDPNILSDDGTVALRGYAFSEDGEYFAYGLSASGSDWVTIKFMKVDGAKELPDVLERVKFSCMAWTHDGKGMFYNSYPQQDGKSDGTETSTNLHQKLYYHVLGTDQSEDILCAEFPDEPKWMGGAELSDDGRYVLLSIREGCDPVNRLWYCDLQQESSGIAGILKWVKLIDNFEGEYDYVTNEGTVFTFKTNRQSPNYRVINIDFRDPEESKWKVLVPEHEKDVLEWIACVRSNFLVLCYLHDVKNILQLHDLTTGALLKTFPLDVGSIVGYSGQKKDTEIFYQFTSFLSPGIIYHCDLTKEELEPRVFREVTVKGIDASDYQTVQIPRFLKTEGLKQPCVEQVCYHHFPNSMCSVRVCHILIILTMFQAFSLLHHSEL

SEQ ID NO: 3658 - protein, 20 aa, Artificial Sequence
  Synthetic polypeptide
VSFITVILPKRSWSQEFSER

SEQ ID NO: 3659 - protein, 39 aa, Artificial Sequence
  Synthetic polypeptide
MEKPLFPLVPLHWFGFGYTALVVSGGIVGYVKTAALANQ

SEQ ID NO: 3660 - protein, 39 aa, Artificial Sequence; identical to SEQ ID NO: 3659
  Synthetic polypeptide

SEQ ID NO: 3661 - protein, 39 aa, Artificial Sequence; identical to SEQ ID NO: 3659
  Synthetic polypeptide

SEQ ID NO: 3662 - protein, 39 aa, Artificial Sequence; identical to SEQ ID NO: 3659
  Synthetic polypeptide

SEQ ID NO: 3663 - protein, 39 aa, Artificial Sequence; identical to SEQ ID NO: 3659
  Synthetic polypeptide

SEQ ID NO: 3664 - protein, 39 aa, Artificial Sequence; identical to SEQ ID NO: 3659
  Synthetic polypeptide

SEQ ID NO: 3665 - protein, 39 aa, Artificial Sequence; identical to SEQ ID NO: 3659
  Synthetic polypeptide

SEQ ID NO: 3666 - protein, 39 aa, Artificial Sequence; identical to SEQ ID NO: 3659
  Synthetic polypeptide

SEQ ID NO: 3667 - protein, 39 aa, Artificial Sequence; identical to SEQ ID NO: 3659
  Synthetic polypeptide

SEQ ID NO: 3668 - protein, 39 aa, Artificial Sequence; identical to SEQ ID NO: 3659
  Synthetic polypeptide

SEQ ID NO: 3669 - protein, 39 aa, Artificial Sequence; identical to SEQ ID NO: 3659
  Synthetic polypeptide

SEQ ID NO: 3670 - protein, 39 aa, Artificial Sequence; identical to SEQ ID NO: 3659
  Synthetic polypeptide

SEQ ID NO: 3671 - protein, 17 aa, Artificial Sequence
  Synthetic polypeptide
VSGGIVGYVKTAALANQ

SEQ ID NO: 3672 - protein, 72 aa, Artificial Sequence
  Synthetic polypeptide
MEKPLFPLVPLHWFGFGYTALVVSGGIVGYVKTGSVPSLAAGLLFGSLAGLGAYQLYQDPRNVWGFLALANQ

SEQ ID NO: 3673 - protein, 72 aa, Artificial Sequence; identical to SEQ ID NO: 3672
  Synthetic polypeptide

SEQ ID NO: 3674 - protein, 72 aa, Artificial Sequence; identical to SEQ ID NO: 3672
  Synthetic polypeptide

SEQ ID NO: 3675 - protein, 50 aa, Artificial Sequence
  Synthetic polypeptide
VSGGIVGYVKTGSVPSLAAGLLFGSLAGLGAYQLYQDPRNVWGFLALANQ

SEQ ID NO: 3676 - protein, 26 aa, Artificial Sequence
  Synthetic polypeptide
QSSRPGCLPAVSGSKERLGFPSPSKP

SEQ ID NO: 3677 - protein, 103 aa, Artificial Sequence
  Synthetic polypeptide
MEKPLFPLVPLHWFGFGYTALVVSGGIVGYVKTGSVPSLAAGLLFGSLAGLGAYQLYQDPRNVWGFLAATSVTFVGVMGMRSYYYGKFMPVGLIAGASSPSKP

SEQ ID NO: 3678 - protein, 103 aa, Artificial Sequence; identical to SEQ ID NO: 3677
  Synthetic polypeptide

SEQ ID NO: 3679 - protein, 103 aa, Artificial Sequence; identical to SEQ ID NO: 3677
  Synthetic polypeptide

SEQ ID NO: 3680 - protein, 69 aa, Artificial Sequence
  Synthetic polypeptide
MEKPLFPLVPLHWFGFGYTALVVSGGIVGYVKTAATSVTFVGVMGMRSYYYGKFMPVGLIAGASSPSKP

SEQ ID NO: 3681 - protein, 69 aa, Artificial Sequence; identical to SEQ ID NO: 3680
  Synthetic polypeptide

SEQ ID NO: 3682 - protein, 69 aa, Artificial Sequence; identical to SEQ ID NO: 3680
  Synthetic polypeptide

SEQ ID NO: 3683 - protein, 40 aa, Artificial Sequence
  Synthetic polypeptide
MEKPLFPFRYICYFCWCYGNEILLLWKIHACRFNCRCQQP

SEQ ID NO: 3684 - protein, 54 aa, Artificial Sequence
  Synthetic polypeptide
QSSRPGCLPAVSGSKERLGFPSRYICYFCWCYGNEILLLWKIHACRFNCRCQQP

SEQ ID NO: 3685 - protein, 108 aa, Artificial Sequence
  Synthetic polypeptide
MEKPLFPLVPLHWFGFGYTALVVSGGIVGYVKTAATSVTFVGVMGMRSYYYGKFMPVGLIAGARWSMALVAQAGVQWCDLSSLQPPPPRFKRFSCLTLLSSWDFRPCT

SEQ ID NO: 3686 - protein, 142 aa, Artificial Sequence
  Synthetic polypeptide
MEKPLFPLVPLHWFGFGYTALVVSGGIVGYVKTGSVPSLAAGLLFGSLAGLGAYQLYQDPRNVWGFLAATSVTFVGVMGMRSYYYGKFMPVGLIAGARWSMALVAQAGVQWCDLSSLQPPPPRFKRFSCLTLLSSWDFRPCT

SEQ ID NO: 3687 - protein, 237 aa, Artificial Sequence [sequence omitted]

SEQ ID NO: 3688 - protein, 114 aa, Artificial Sequence
  Synthetic polypeptide
MEHLKAFDDEINAFLDNMFGPRDSRVRGWFMLDSYLPTFFLTVMYLLSIWLGNKYMKNRPALSLRGILTLYNLGITLLSAYMLAELILSTWEGGYNLQCQDLTSAGEADIRRTN

SEQ ID NO: 3689 - protein, 326 aa, Artificial Sequence
  Synthetic polypeptide
MARERPPGRGCGVLRRCLLGAVLLFGLRLCAELRRAGPGSPTRSAPPGPAWRPPGPHLPPAPGQPRGASRRQVTYVRSGRRAPPGGGGSGTPEPGCCAPRGRPRRKGPRWHIDLQPWAGSAQSLDEEAWRFLRYISTTQIACNHMNTDSLATDSSPTHKPWSVCLDDRFNLAHQIRNKQCRLYSLGLGSDDTHFEVSMANNGCEVHRFDPSVKSAHILESQHLWYHRLSIDWRDPHPAVAAQKPHSNTRKLGSILNEFGHHKIDVLKADLESAEWKVLENLILEDVLEQIGQLIFEIHLHWPGFEKDVFASPSTTTVSFLRPRQPC

SEQ ID NO: 3690 - protein, 39 aa, Artificial Sequence
  Synthetic polypeptide
MARERPPGRGCGVLRRCLLGAVLLFGLRLCAELRRAGPG

SEQ ID NO: 3691 - protein, 875 aa, Artificial Sequence
  Synthetic polypeptide
MKNIYCLIPKLVNFATLGCLWISVVQCTVLNSCLKSCVTNLGQQLDLGTPHNLSEPCIQGCHFWNSVDQKNCALKCNDTYATVCERESCEVGCSSAEGAYEEEVLENADLPTAPFASSIGSHNMTLRWKSANFSGVKYIIQWKYAQLLGSWTYTKTVSRPSYVVKPLHPFTEYIFRVVWIFTAQLQLYSPPSPSYRTHPHGVPETAPLIRNIESSSPDTVEVSWDPPQFPGGPILGYNLRLISKNQKLDAGTQRTSFQFYSTLPNTIYRFSIAAVNEVGEGPEAESSITTSSSAVQQEEQWLFLSRKTSLRKRSLKHLVDEAHCLRLDAIYHNITGISVDVHQQIVYFSEGTLIWAKKAANMSDVSDLRIFYRGSGLISSISIDWLYQRMYFIMDELVCVCDLENCSNIEEITPPSISAPQKIVADSYNGYVFYLLRDGIYRADLPVPSGRCAEAVRIVESCTLKDFAIKPQAKRIIYFNDTAQVFMSTFLDGSASHLILPRIPFADVKSFACENNDFLVTDGKVIFQQDALSFNEFIVGCDLSHIEEFGFGNLVIFGSSSQLHPLPGRPQELSVLFGSHQALVQWKPPALAIGASPSAWQNWTYEVKVSTQDPPEVTHIFLNISGTMLNVPELQSAMKYKVSVRASSPKRPGPWSEPSVGTTLVPASEPPFIMAVKEDGLWSKPLNSFGPGEFLSSDIGNVSDMDWYNNSLYYSDTKGDVFVWLLNGTDISENYHLPSIAGAGALAFEWLGHFLYWAGKTYVIQRQSVLTGHTDIVTHVKLLVNDMVVDSVGGYLYWTTLYSVESTRLNGESSLVLQTQPWFSGKKVIALTLDLSDGLLYWLVQDSQCIHLYTAVLRGQRSTASLLRPVRPRTQ

SEQ ID NO: 3692 - protein, 880 aa, Artificial Sequence
  Synthetic polypeptide
MKNIYCLIPKLVNFATLGCLWISVVQCTVLNSCLKSCVTNLGQQLDLGTPHNLSEPCIQGCHFWNSVDQKNCALKCRESCEVGCSSAEGAYEEEVLENADLPTAPFASSIGSHNMTLRWKSANFSGVKYIIQWKYAQLLGSWTYTKTVSRPSYVVKPLHPFTEYIFRVVWIFTAQLQLYSPPSPSYRTHPHGVPETAPLIRNIESSSPDTVEVSWDPPQFPGGPILGYNLRLISKNQKLDAGTQRTSFQFYSTLPNTIYRFSIAAVNEVGEGPEAESSITTSSSAVQQEEQWLFLSRKTSLRKRSLKHLVDEAHCLRLDAIYHNITGISVDVHQQIVYFSEGTLIWAKKAANMSDVSDLRIFYRGSGLISSISIDWLYQRMYFIMDELVCVCDLENCSNIEEITPPSISAPQKIVADSYNGYVFYLLRDGIYRADLPVPSGRCAEAVRIVESCTLKDFAIKPQAKRIIYFNDTAQVFMSTFLDGSASHLILPRIPFADVKSFACENNDFLVTDGKVIFQQDALSFNEFIVGCDLSHIEEFGFGNLVIFGSSSQLHPLPGRPQELSVLFGSHQALVQWKPPALAIGANVILISDIIELFELGPSAWQNWTYEVKVSTQDPPEVTHIFLNISGTMLNVPELQSAMKYKVSVRASSPKRPGPWSEPSVGTTLVPASEPPFIMAVKEDGLWSKPLNSFGPGEFLSSDIGNVSDMDWYNNSLYYSDTKGDVFVWLLNGTDISENYHLPSIAGAGALAFEWLGHFLYWAGKTYVIQRQSVLTGHTDIVTHVKLLVNDMVVDSVGGYLYWTTLYSVESTRLNGESSLVLQTQPWFSGKKVIALTLDLSDGLLYWLVQDSQCIHLYTAVLRGQRSTASLLRPVRPRTQ

SEQ ID NO: 3693 - protein, 81 aa, Artificial Sequence
  Synthetic polypeptide
MNVDHEVNLLVEEIHRLGSKNADGKLSVKFGVLFRDDKCANLFEALVGTLKAAKRRKIVTYPGELLLQGEPGSCVTCMFVP

SEQ ID NO: 3694 - protein, 35 aa, Artificial Sequence
  Synthetic polypeptide
MAKYGEHEASPDNGQNEFSDIIKSRSALSYYRRER

SEQ ID NO: 3695 - protein, 35 aa, Artificial Sequence; identical to SEQ ID NO: 3694
  Synthetic polypeptide

SEQ ID NO: 3696 - protein, 297 aa, Artificial Sequence
  Synthetic polypeptide
MAAAASPAFLLRLPLLLLLSSWCRTGLADPHSLCYDITVIPKFRPGPRWCAVQGQVDEKTFLHYDCGSKTVTPVSPLGKKLNVTTAWKAQNPVLREVVDILTEQLLDIQLENYIPKEPLTLQARMSCEQKAEGHGSGSWQLSFDGQIFLLFDSENRMWTTVHPGARKMKEKWENDKDMTMSFHYISMGDCTGWLEDFLMGMDSTLEPSAGAPPTMSSGTAQPRATATTLILCCLLIMCLLICSRHSLTQSHGHHPQSLQPPPHPPLLHPTWLLRRVLWSDRKNQAMQRQELKGHGEK

SEQ ID NO: 3697 - protein, 191 aa, Artificial Sequence
  Synthetic polypeptide
MGVENSAKEGDPGTIFFFREGAAVFWNVKDKTMKHVMKVLEKHEIQPYEIALVHWENEELNYIKIEGQSKLHRGEIKLNSELDLDDAILEKFAFSNALCLSVKLAIWEASLDKFIESIQSIPEALKAGKKVKLSHEEVMQKIGELFALRHRINLSSDFLITPDFYWDRENLEGLYDKTCQFLSIGRRVKAV

SEQ ID NO: 3698 - protein, 402 aa, Artificial Sequence
  Synthetic polypeptide
MPATLLRAVARSHHILSKAHQCRRIGHLMLKPLKEFENTTCSTLTIRQSLDLFLPDKTASGLNKSQILEMNQKKSDTSMLSPLNAARCQDEKAHLPTMKSFGTHRRVTHKPNLLGSKWFIKILKRHFSSVSTETFVPKQDFPQVKRPLKASRTRQPSRTNLPVLSVNEDLMHCTAFATADEYHLGNLSQDLASHGYVEVTSLPRDAANILVMGVENSAKEGDPGTIFFFREGAAVFWNVKDKTMKHVMKVLEKHEIQPYEIALVHWENEELNYIKIEGQSKLHRGEIKLNSELDLDDAILEKFAFSNALCLSVKLAIWEASLDKFIESIQSIPEALKAGKKVKLSHEEVMQKIGELFALRHRINLSSDFLITPDFYWDRENLEGLYDKTCQFLSIGRRVKAV

SEQ ID NO: 3699 - protein, 161 aa, Artificial Sequence
  Synthetic polypeptide
MGVENSAKEGDPGTIFFFREGAAVFWNVKDKTMKHVMKVLEKHEIQPYEIALVHWENEELNYIKIEGQSKLHRGEIKLNSELDLDDAILEKFAFSNALCLSVKLAIWEASLDKFIESIQSIPEALKAGKKVKLSHEEVMQKIGELFALRRLRQEDHLSPGV

SEQ ID NO: 3700 - protein, 372 aa, Artificial Sequence
  Synthetic polypeptide
MPATLLRAVARSHHILSKAHQCRRIGHLMLKPLKEFENTTCSTLTIRQSLDLFLPDKTASGLNKSQILEMNQKKSDTSMLSPLNAARCQDEKAHLPTMKSFGTHRRVTHKPNLLGSKWFIKILKRHFSSVSTETFVPKQDFPQVKRPLKASRTRQPSRTNLPVLSVNEDLMHCTAFATADEYHLGNLSQDLASHGYVEVTSLPRDAANILVMGVENSAKEGDPGTIFFFREGAAVFWNVKDKTMKHVMKVLEKHEIQPYEIALVHWENEELNYIKIEGQSKLHRGEIKLNSELDLDDAILEKFAFSNALCLSVKLAIWEASLDKFIESIQSIPEALKAGKKVKLSHEEVMQKIGELFALRRLRQEDHLSPGV

SEQ ID NO: 3701 - protein, 202 aa, Artificial Sequence
  Synthetic polypeptide
MHCTAFATADEYHLGNLSQDLASHGYVEVTSLPRDAANILVMGVENSAKEGDPGTIFFFREGAAVFWNVKDKTMKHVMKVLEKHEIQPYEIALVHWENEELNYIKIEGQSKLHRGEIKLNSELDLDDAILEKFAFSNALCLSVKLAIWEASLDKFIESIQSIPEALKAGKKVKLSHEEVMQKIGELFALRRLRQEDHLSPGV

SEQ ID NO: 3702 - protein, 284 aa, Artificial Sequence
  Synthetic polypeptide
MTMTLHTKASGMALLHQIQGNELEPLNRPQLKIPLERPLGEVYLDSSKPAVYNYPEGAAYEFNAAAAANAQVYGQTGLPYGPGSEAAAFGSNGLGGFPPLNSVSPSPLMLLHPPPQLSPFLQPHGQQVPYYLENEPSGYTVREAGPPAFYRPNSDNRRQGGRERLASTNDKGSMAMESAKETRYCAVCNDYASGYHYGVWSCEGCKAFFKRSIQGHNDYMCPATNQCTIDKNRRKSCQACRLRKCYEVGMMKGGTWMKPEAIILSKLTQEQKTKHLMFALISGS

SEQ ID NO: 3703 - protein, 284 aa, Artificial Sequence; identical to SEQ ID NO: 3702
  Synthetic polypeptide

SEQ ID NO: 3704 - protein, 284 aa, Artificial Sequence; identical to SEQ ID NO: 3702
  Synthetic polypeptide

SEQ ID NO: 3705 - protein, 284 aa, Artificial Sequence; identical to SEQ ID NO: 3702
  Synthetic polypeptide

SEQ ID NO: 3706 - protein, 284 aa, Artificial Sequence; identical to SEQ ID NO: 3702
  Synthetic polypeptide

SEQ ID NO: 3707 - protein, 111 aa, Artificial Sequence
  Synthetic polypeptide
MAMESAKETRYCAVCNDYASGYHYGVWSCEGCKAFFKRSIQGHNDYMCPATNQCTIDKNRRKSCQACRLRKCYEVGMMKGGTWMKPEAIILSKLTQEQKTKHLMFALISGS

SEQ ID NO: 3708 - protein, 69 aa, Artificial Sequence
  Synthetic polypeptide
HNDYMCPATNQCTIDKNRRKSCQACRLRKCYEVGMMKGGTWMKPEAIILSKLTQEQKTKHLMFALISGS

SEQ ID NO: 3709 - protein, 276 aa, Artificial Sequence
  Synthetic polypeptide
MTMTLHTKASGMALLHQIQGNELEPLNRPQLKIPLERPLGEVYLDSSKPAVYNYPEGAAYEFNAAAAANAQVYGQTGLPYGPGSEAAAFGSNGLGGFPPLNSVSPSPLMLLHPPPQLSPFLQPHGQQVPYYLENEPSGYTVREAGPPAFYRPNSDNRRQGGRERLASTNDKGSMAMESAKETRYCAVCNDYASGYHYGVWSCEGCKAFFKRSIQGHNDYMCPATNQCTIDKNRRKSCQACRLRKCYEVGMMKGVTSSHPLCFRQFIRSLIHSTNIE

SEQ ID NO: 3710 - protein, 276 aa, Artificial Sequence; identical to SEQ ID NO: 3709
  Synthetic polypeptide

SEQ ID NO: 3711 - protein, 276 aa, Artificial Sequence; identical to SEQ ID NO: 3709
  Synthetic polypeptide

SEQ ID NO: 3712 - protein, 276 aa, Artificial Sequence; identical to SEQ ID NO: 3709
  Synthetic polypeptide

SEQ ID NO: 3713 - protein, 276 aa, Artificial Sequence; identical to SEQ ID NO: 3709
  Synthetic polypeptide

SEQ ID NO: 3714 - protein, 103 aa, Artificial Sequence
  Synthetic polypeptide
MAMESAKETRYCAVCNDYASGYHYGVWSCEGCKAFFKRSIQGHNDYMCPATNQCTIDKNRRKSCQACRLRKCYEVGMMKGVTSSHPLCFRQFIRSLIHSTNIE

SEQ ID NO: 3715 - protein, 61 aa, Artificial Sequence
  Synthetic polypeptide
HNDYMCPATNQCTIDKNRRKSCQACRLRKCYEVGMMKGVTSSHPLCFRQFIRSLIHSTNIE

SEQ ID NO: 3716 - protein, 483 aa, Artificial Sequence
  Synthetic polypeptide
MTMTLHTKASGMALLHQIQGNELEPLNRPQLKIPLERPLGEVYLDSSKPAVYNYPEGAAYEFNAAAAANAQVYGQTGLPYGPGSEAAAFGSNGLGGFPPLNSVSPSPLMLLHPPPQLSPFLQPHGQQVPYYLENEPSGYTVREAGPPAFYRPNSDNRRQGGRERLASTNDKGSMAMESAKETRYCAVCNDYASGYHYGVWSCEGCKAFFKRSIQGHNDYMCPATNQCTIDKNRRKSCQACRLRKCYEVGMMKGGIRKDRRGGRMLKHKRQRDDGEGRGEVGSAGDMRAANLWPSPLMIKRSKKNSLALSLTADQMVSALLDAEPPILYSEYDPTRPFSEASMMGLLTNLADRELVHMINWAKRVPGFVDLTLHDQVHLLECAWLEILMIGLVWRSMEHPGKLLFAPNLLLDRNQGKCVEGMVEIFDMLLATSSRFRMMNLQGEEFVCLKSIILLNSVLTTGRPGDTLPCLAQWVTRPWRLAHC

SEQ ID NO: 3717 - protein, 483 aa, Artificial Sequence; identical to SEQ ID NO: 3716
  Synthetic polypeptide

SEQ ID NO: 3718 - protein, 483 aa, Artificial Sequence; identical to SEQ ID NO: 3716
  Synthetic polypeptide

SEQ ID NO: 3719 - protein, 483 aa, Artificial Sequence; identical to SEQ ID NO: 3716
  Synthetic polypeptide

SEQ ID NO: 3720 - protein, 371 aa, Artificial Sequence
  Synthetic polypeptide
MTMTLHTKASGMALLHQIQGNELEPLNRPQLKIPLERPLGEVYLDSSKPAVYNYPEGAAYEFNAAAAANAQVYGQTGLPYGPGSEAAAFGSNGLGGFPPLNSVSPSPLMLLHPPPQLSPFLQPHGQQVPYYLENEPSGYTVREAGPPAFYRPNSDNRRQGGRERLASTNDKGSMAMESAKETRYCAVCNDYASGYHYGVWSCEGCKAFFKRSIQGHNDYMCPATNQCTIDKNRRKSCQACRLRKCYEVGMMKGGFVDLTLHDQVHLLECAWLEILMIGLVWRSMEHPGKLLFAPNLLLDRNQGKCVEGMVEIFDMLLATSSRFRMMNLQGEEFVCLKSIILLNSVLTTGRPGDTLPCLAQWVTRPWRLAHC

SEQ ID NO: 3721 - protein, 222 aa, Artificial Sequence
  Synthetic polypeptide
MTMTLHTKASGMALLHQIQGNELEPLNRPQLKIPLERPLGEVYLDSSKPAVYNYPEGAAYEFNAAAAANAQVYGQTGLPYGPGSEAAAFGSNGLGGFPPLNSVSPSPLMLLHPPPQLSPFLQPHGQQVPYYLENEPSGYTVREAGPPAFYRNQGKCVEGMVEIFDMLLATSSRFRMMNLQGEEFVCLKSIILLNSVLTTGRPGDTLPCLAQWVTRPWRLAHC

SEQ ID NO: 3722 - protein, 310 aa, Artificial Sequence
  Synthetic polypeptide
MAMESAKETRYCAVCNDYASGYHYGVWSCEGCKAFFKRSIQGHNDYMCPATNQCTIDKNRRKSCQACRLRKCYEVGMMKGGIRKDRRGGRMLKHKRQRDDGEGRGEVGSAGDMRAANLWPSPLMIKRSKKNSLALSLTADQMVSALLDAEPPILYSEYDPTRPFSEASMMGLLTNLADRELVHMINWAKRVPGFVDLTLHDQVHLLECAWLEILMIGLVWRSMEHPGKLLFAPNLLLDRNQGKCVEGMVEIFDMLLATSSRFRMMNLQGEEFVCLKSIILLNSVLTTGRPGDTLPCLAQWVTRPWRLAHC

SEQ ID NO: 3723 - protein, 284 aa, Artificial Sequence
  Synthetic polypeptide
MVAEKETLSLNKCPDKMPKRTKLLAQQPLPVHQPHSLVSEGFTVKAMMKNSVVRGPPAAGAFKERPTKPTAFRKFYERGDFPIALEHDSKGNKIAWKVEIEKLDYHHYLPLFFDGLCEMTFPYEFFARQGIHDMLEHGGNKILPVLPQLIIPIKNALNLRNRQVICVTLKVLQHLVVSAEMVGKALVPYYRQILPVLNIFKNMNGSYSLPRLECSGAIMARCNLDHLGSSDPPTSASQVAEIIVNSGDGIDYSQQKRENIGDLIQETLEAFERYGGENAFINIK

SEQ ID NO: 3724 - protein, 245 aa, Artificial Sequence
  Synthetic polypeptide
MVAEKETLSLNKCPDKMPKRTKLLAQQPLPVHQPHSLVSEGFTVKAMMKNSVVRGPPAAGAFKERPTKPTAFRKFYERGDFPIALEHDSKGNKIAWKVEIEKLDYHHYLPLFFDGLCEMTFPYEFFARQGIHDMLEHGGNKILPVLPQLIIPIKNALNLRNRQVICVTLKVLQHLVVSAEMVGKALVPYYRQILPVLNIFKNMNVNSGDGIDYSQQKRENIGDLIQETLEAFERYGGENAFINIK

SEQ ID NO: 3725 - protein, 245 aa, Artificial Sequence; identical to SEQ ID NO: 3724
  Synthetic polypeptide

SEQ ID NO: 3726 - protein, 17 aa, Artificial Sequence
  Synthetic polypeptide
AWAVRTSACVTTMSGKN

SEQ ID NO: 3727 - protein, 124 aa, Artificial Sequence
  Synthetic polypeptide
MVQHWPETVCEKIQNDCRDPPDYWTIHGLWPDKSEGCNRSWPFNLEEIKDLLPEMRAYWPDVIHSFPNRSRFWKHEWEKHGTCAAQVDALNSQKKYFGRSLELYRELDLNRLPSTLKSLPALKI

SEQ ID NO: 3728 - protein, 162 aa, Artificial Sequence
  Synthetic polypeptide
MRPAALRGALLGCLCLALLCLGGADKRLRDNHEWKKLIMVQHWPETVCEKIQNDCRDPPDYWTIHGLWPDKSEGCNRSWPFNLEEIKDLLPEMRAYWPDVIHSFPNRSRFWKHEWEKHGTCAAQVDALNSQKKYFGRSLELYRELDLNRLPSTLKSLPALKI

SEQ ID NO: 3729 - protein, 162 aa, Artificial Sequence; identical to SEQ ID NO: 3728
  Synthetic polypeptide

SEQ ID NO: 3730 - protein, 162 aa, Artificial Sequence; identical to SEQ ID NO: 3728
  Synthetic polypeptide

SEQ ID NO: 3731 - protein, 237 aa, Artificial Sequence
  Synthetic polypeptide
MCKMDGSYLAEFLLEKGYEVHGIVRRSSSFNTGRIEHLYKNPQAHIEGNMKLHYGDLTDSTCLVKIINEVKPTEIYNLGAQSHVKISFDLAEYTADVDGVGTLRLLDAVKTCGLINSVKFYQASTSELYGKVQEIPQKETTPFYPRSPYGAAKLYAYWIVVNFREAYNLFAVNGILFNHESPRRGANFVTRKISRSVAKIYLGQLECFSLGNLDAKRDWGHAKDYVEEVLEPILCKY

SEQ ID NO: 3732 - protein, 267 aa, Artificial Sequence
  Synthetic polypeptide
MAHAPARCPSARGSGDGEMGKPRNVALITGITGQDGSYLAEFLLEKGYEVHGIVRRSSSFNTGRIEHLYKNPQAHIEGNMKLHYGDLTDSTCLVKIINEVKPTEIYNLGAQSHVKISFDLAEYTADVDGVGTLRLLDAVKTCGLINSVKFYQASTSELYGKVQEIPQKETTPFYPRSPYGAAKLYAYWIVVNFREAYNLFAVNGILFNHESPRRGANFVTRKISRSVAKIYLGQLECFSLGNLDAKRDWGHAKDYVEEVLEPILCKY

SEQ ID NO: 3733 - protein, 194 aa, Artificial Sequence
  Synthetic polypeptide
MCKMDGSYLAEFLLEKGYEVHGIVRRSSSFNTGRIEHLYKNPQAHIEGNMKLHYGDLTDSTCLVKIINEVKPTEIYNLGAQSHVKISFDLAEYTADVDGVGTLRLLDAVKTCGLINSVKFYQASTSELYGKVQEIPQKETTPFYPRSPYGAAKLYAYWIVVNFREAYNLFAVNGILFNHESPRRGTMNCTHKRQ

SEQ ID NO: 3734 - protein, 224 aa, Artificial Sequence
  Synthetic polypeptide
MAHAPARCPSARGSGDGEMGKPRNVALITGITGQDGSYLAEFLLEKGYEVHGIVRRSSSFNTGRIEHLYKNPQAHIEGNMKLHYGDLTDSTCLVKIINEVKPTEIYNLGAQSHVKISFDLAEYTADVDGVGTLRLLDAVKTCGLINSVKFYQASTSELYGKVQEIPQKETTPFYPRSPYGAAKLYAYWIVVNFREAYNLFAVNGILFNHESPRRGTMNCTHKRQ

SEQ ID NO: 3735 - protein, 181 aa, Artificial Sequence
  Synthetic polypeptide
MPSASCDTLLDDIEDIVSQEDSKPQDRHFVRKDVVPKVRRRNTQKYLQEEENSPPSDSTIPGIQKIWIRTWGCSHNNSDGEYMAGQLAAYGYKITENASDADLWLLNSCTVKNPAEDHFRNSIKKAQEENKKIVLAGCVPQAQPRQDYLKGLSIIGVQQIDRVVEVVEETIKGGHPLCLLP

SEQ ID NO: 3736 - protein, 181 aa, Artificial Sequence; identical to SEQ ID NO: 3735
  Synthetic polypeptide

SEQ ID NO: 3737 - protein, 111 aa, Artificial Sequence
  Synthetic polypeptide
MLSRRYEGEIPKNICKRKKTVHQVTENASDADLWLLNSCTVKNPAEDHFRNSIKKAQEENKKIVLAGCVPQAQPRQDYLKGLSIIGVQQIDRVVEVVEETIKGGHPLCLLP

SEQ ID NO: 3738 - protein, 214 aa, Artificial Sequence
  Synthetic polypeptide
MPSASCDTLLDDIEDIVSQEDSKPQDRHFVRKDVVPKVRRRNTQKYLQEEENSPPSDSTIPGIQKIWIRTWGCSHNNSDGEYMAGQLAAYGYKITENASDADLWLLNSCTVKNPAEDHFRNSIKKAQEENKKIVLAGCVPQAQPRQDYLKGLSIIGVQQIDRVVEVVEETIKGHSVRLLGQKKDNGRRLGGARLDLPKIRKNPLIEIISINTGE

SEQ ID NO: 3739 - protein, 214 aa, Artificial Sequence; identical to SEQ ID NO: 3738
  Synthetic polypeptide

SEQ ID NO: 3740 - protein, 144 aa, Artificial Sequence
  Synthetic polypeptide
MLSRRYEGEIPKNICKRKKTVHQVTENASDADLWLLNSCTVKNPAEDHFRNSIKKAQEENKKIVLAGCVPQAQPRQDYLKGLSIIGVQQIDRVVEVVEETIKGHSVRLLGQKKDNGRRLGGARLDLPKIRKNPLIEIISINTGE

SEQ ID NO: 3741 - protein, 223 aa, Artificial Sequence
  Synthetic polypeptide
MPSASCDTLLDDIEDIVSQEDSKPQDRHFVRKDVVPKVRRRNTQKYLQEEENSPPSDSTIPGIQKIWIRTWGCSHNNSDGEYMAGQLAAYGYKITENASDADLWLLNSCTVKNPAEDHFRNSIKKAQEENKKIVLAGCVPQAQPRQDYLKGLSIIGVQQIDRVVEVVEETIKGHSVRLLGQKKDNGRRLGGARLDLPKIRKNPLIEIISINTGRATVRKIKTT

SEQ ID NO: 3742 - protein, 223 aa, Artificial Sequence; identical to SEQ ID NO: 3741
  Synthetic polypeptide

SEQ ID NO: 3743 - protein, 153 aa, Artificial Sequence
  Synthetic polypeptide
MLSRRYEGEIPKNICKRKKTVHQVTENASDADLWLLNSCTVKNPAEDHFRNSIKKAQEENKKIVLAGCVPQAQPRQDYLKGLSIIGVQQIDRVVEVVEETIKGHSVRLLGQKKDNGRRLGGARLDLPKIRKNPLIEIISINTGRATVRKIKTT

SEQ ID NO: 3744 - protein, 117 aa, Artificial Sequence
  Synthetic polypeptide
MCKMDGSYLAEFLLEKGYEVHGIVRRSSSFNTGRIEHLYKNPQAHIEGNMKLHYGDLTDSTCLVKIINEVKPTEIYNLGAQSHVKNWPAWTCNTSASVHCLGAQGNACSTHCCYHGA

SEQ ID NO: 3745 - protein, 147 aa, Artificial Sequence
  Synthetic polypeptide
MAHAPARCPSARGSGDGEMGKPRNVALITGITGQDGSYLAEFLLEKGYEVHGIVRRSSSFNTGRIEHLYKNPQAHIEGNMKLHYGDLTDSTCLVKIINEVKPTEIYNLGAQSHVKNWPAWTCNTSASVHCLGAQGNACSTHCCYHGA

SEQ ID NO: 3746 - protein, 107 aa, Artificial Sequence
  Synthetic polypeptide
MCKMDGSYLAEFLLEKGYEVHGIVRRSSSFNTGRIEHLYKNPQAHIEGNMKLHYGDLTDSTCLVKIINEVKPTEIYNLGAQSHVKISTCLIPLTTLELKHQLLREAP

SEQ ID NO: 3747 - protein, 137 aa, Artificial Sequence
  Synthetic polypeptide
MAHAPARCPSARGSGDGEMGKPRNVALITGITGQDGSYLAEFLLEKGYEVHGIVRRSSSFNTGRIEHLYKNPQAHIEGNMKLHYGDLTDSTCLVKIINEVKPTEIYNLGAQSHVKISTCLIPLTTLELKHQLLREAP

SEQ ID NO: 3748 - protein, 172 aa, Artificial Sequence
  Synthetic polypeptide
MVQQTNNAENTEALLAGESSDSGAGLELGIASSPTPGSTASTGGKADDPSWCKTPSGHIKRPMNAFMVWSQIERRKIMEQSPDMHNAEISKRLGKRWKLLKDSDKIPFIREAERLRLKHMADYPDYKYRPRKKVKSGNANSSSSAAASSKPGEKGDKKKKVKKRNEKDRRRV

SEQ ID NO: 3749 - protein, 172 aa, Artificial Sequence; identical to SEQ ID NO: 3748
  Synthetic polypeptide

SEQ ID NO: 3750 - protein, 446 aa, Artificial Sequence
  Synthetic polypeptide
MVADCGVREARAAVRAAYEAFCRWREVSAKERSSLLRKWYNLMIQNKDDLARIITAESGKPLKEAHGEILYSAFFLEWFSEEARRVYGDIIHTPAKDRRALVLKQPIGVAAVITPWNFPSAMITRKVGAALAAGCTVVVKPAEDTPFSALALAELASQAGIPSGVYNVIPCSRKNAKEVGEAICTDPLVSKISFTGSTTTGKILLHHAANSVKRVSMELGGLAPFIVFDSANVDQAVAGAMASKFRNTGQTCVCSNQFLVQRGIHDAFVKAFAEAMKKNLRVGNGFEEGTTQGPLINEKAVEKVEKQVNDAVSKGATVVTGGKRHQLGKNFFEPTLLCNVTQDMLCTHEETFGPLAPVIKFDTEEEAIAIANAADVGLAGYFYSQDPAQIWRVAEQLEVGMVGVNEGLISSVECPFGGVKQSGLGREGSKYGIDEYLELKKSLPAP

SEQ ID NO: 3751 - protein, 534 aa, Artificial Sequence
  Synthetic polypeptide
MATCIWLRSCGARRLGSTFPGCRLRPRAGGLVPASGPAPGPAQLRCYAGRLAGLSAALLRTDSFVGGRWLPAAATFPVQDPASGAALGMVADCGVREARAAVRAAYEAFCRWREVSAKERSSLLRKWYNLMIQNKDDLARIITAESGKPLKEAHGEILYSAFFLEWFSEEARRVYGDIIHTPAKDRRALVLKQPIGVAAVITPWNFPSAMITRKVGAALAAGCTVVVKPAEDTPFSALALAELASQAGIPSGVYNVIPCSRKNAKEVGEAICTDPLVSKISFTGSTTTGKILLHHAANSVKRVSMELGGLAPFIVFDSANVDQAVAGAMASKFRNTGQTCVCSNQFLVQRGIHDAFVKAFAEAMKKNLRVGNGFEEGTTQGPLINEKAVEKVEKQVNDAVSKGATVVTGGKRHQLGKNFFEPTLLCNVTQDMLCTHEETFGPLAPVIKFDTEEEAIAIANAADVGLAGYFYSQDPAQIWRVAEQLEVGMVGVNEGLISSVECPFGGVKQSGLGREGSKYGIDEYLELKKSLPAP

SEQ ID NO: 3752 - protein, 506 aa, Artificial Sequence
  Synthetic polypeptide
MATCIWLRSCGARRLGSTFPGCRLRPRAGGLVPASGPAPGPAQLRCYAGRLAGLSAALLRTDSFVGGRWLPAAATFPVQDPASGAALGMVADCGVREARAAVRAAYEAFCRWREVSAKGKPLKEAHGEILYSAFFLEWFSEEARRVYGDIIHTPAKDRRALVLKQPIGVAAVITPWNFPSAMITRKVGAALAAGCTVVVKPAEDTPFSALALAELASQAGIPSGVYNVIPCSRKNAKEVGEAICTDPLVSKISFTGSTTTGKILLHHAANSVKRVSMELGGLAPFIVFDSANVDQAVAGAMASKFRNTGQTCVCSNQFLVQRGIHDAFVKAFAEAMKKNLRVGNGFEEGTTQGPLINEKAVEKVEKQVNDAVSKGATVVTGGKRHQLGKNFFEPTLLCNVTQDMLCTHEETFGPLAPVIKFDTEEEAIAIANAADVGLAGYFYSQDPAQIWRVAEQLEVGMVGVNEGLISSVECPFGGVKQSGLGREGSKYGIDEYLELKKSLPAP

SEQ ID NO: 3753 - protein, 547 aa, Artificial Sequence
  Synthetic polypeptide
MATCIWLRSCGARRLGSTFPGCRLRPRAGGLVPASGPAPGPAQLRCYAGRLAGLSAALLRTDSFVGGRWLPAAATFPVQDPASGAALGMVADCGVREARAAVRAAYEAFCRWREVSAKERSSLLRKWYNLMIQNKDDLARIITAESGKPLKEAHGEILYSAFFLEWFSEEARRVYGDIIHTPAKDRRALVLKQPIGVAAVITPWNFPSAMITRKVGAALAAGCTVVVKPAEDTPFSALALAEVNQGFLLDLDPLLLASQAGIPSGVYNVIPCSRKNAKEVGEAICTDPLVSKISFTGSTTTGKILLHHAANSVKRVSMELGGLAPFIVFDSANVDQAVAGAMASKFRNTGQTCVCSNQFLVQRGIHDAFVKAFAEAMKKNLRVGNGFEEGTTQGPLINEKAVEKVEKQVNDAVSKGATVVTGGKRHQLGKNFFEPTLLCNVTQDMLCTHEETFGPLAPVIKFDTEEEAIAIANAADVGLAGYFYSQDPAQIWRVAEQLEVGMVGVNEGLISSVECPFGGVKQSGLGREGSKYGIDEYLELKKSLPAP

SEQ ID NO: 3754 - protein, 445 aa, Artificial Sequence
  Synthetic polypeptide
MVADCGVREARAAVRAAYEAFCRWREVSAKERSSLLRKWYNLMIQNKDDLARIITAESGKPLKEAHGEILYSAFFLEWFSEEARRVYGDIIHTPAKDRRALVLKQPIGVAAVITPWNFPSAMITRKVGAALAAGCTVVVKPAEDTPFSALALAELASQAGIPSGVYNVIPCSRKNAKEVGEAICTDPLVSKISFTGSTTTGKILLHHAANSVKRVSMELGGLAPFIVFDSANVDQAVAGAMASKFRNTGQTCVCSNQFLVQRGIHDAFVKAFAEAMKKNLRVGNGFEEGTTQGPLINEKAVEKVEKQVNDAVSKGATVVTGGKRHQLGKNFFEPTLLCNVTQDMLCTHEETFGPLAPVIKFDTEEEAIAIANAADVGLAGYFYSQDPAQIWRVAEQLEVGMVGVNEGLISSVECPFGGVKQSGLGREGSKYGIDEYLELKELLFT

SEQ ID NO: 3755 - protein, 533 aa, Artificial Sequence
  Synthetic polypeptide
MATCIWLRSCGARRLGSTFPGCRLRPRAGGLVPASGPAPGPAQLRCYAGRLAGLSAALLRTDSFVGGRWLPAAATFPVQDPASGAALGMVADCGVREARAAVRAAYEAFCRWREVSAKERSSLLRKWYNLMIQNKDDLARIITAESGKPLKEAHGEILYSAFFLEWFSEEARRVYGDIIHTPAKDRRALVLKQPIGVAAVITPWNFPSAMITRKVGAALAAGCTVVVKPAEDTPFSALALAELASQAGIPSGVYNVIPCSRKNAKEVGEAICTDPLVSKISFTGSTTTGKILLHHAANSVKRVSMELGGLAPFIVFDSANVDQAVAGAMASKFRNTGQTCVCSNQFLVQRGIHDAFVKAFAEAMKKNLRVGNGFEEGTTQGPLINEKAVEKVEKQVNDAVSKGATVVTGGKRHQLGKNFFEPTLLCNVTQDMLCTHEETFGPLAPVIKFDTEEEAIAIANAADVGLAGYFYSQDPAQIWRVAEQLEVGMVGVNEGLISSVECPFGGVKQSGLGREGSKYGIDEYLELKELLFT

SEQ ID NO: 3756 - protein, 505 aa, Artificial Sequence
  Synthetic polypeptide
MATCIWLRSCGARRLGSTFPGCRLRPRAGGLVPASGPAPGPAQLRCYAGRLAGLSAALLRTDSFVGGRWLPAAATFPVQDPASGAALGMVADCGVREARAAVRAAYEAFCRWREVSAKGKPLKEAHGEILYSAFFLEWFSEEARRVYGDIIHTPAKDRRALVLKQPIGVAAVITPWNFPSAMITRKVGAALAAGCTVVVKPAEDTPFSALALAELASQAGIPSGVYNVIPCSRKNAKEVGEAICTDPLVSKISFTGSTTTGKILLHHAANSVKRVSMELGGLAPFIVFDSANVDQAVAGAMASKFRNTGQTCVCSNQFLVQRGIHDAFVKAFAEAMKKNLRVGNGFEEGTTQGPLINEKAVEKVEKQVNDAVSKGATVVTGGKRHQLGKNFFEPTLLCNVTQDMLCTHEETFGPLAPVIKFDTEEEAIAIANAADVGLAGYFYSQDPAQIWRVAEQLEVGMVGVNEGLISSVECPFGGVKQSGLGREGSKYGIDEYLELKELLFT

SEQ ID NO: 3757 - protein, 546 aa, Artificial Sequence
  Synthetic polypeptide
MATCIWLRSCGARRLGSTFPGCRLRPRAGGLVPASGPAPGPAQLRCYAGRLAGLSAALLRTDSFVGGRWLPAAATFPVQDPASGAALGMVADCGVREARAAVRAAYEAFCRWREVSAKERSSLLRKWYNLMIQNKDDLARIITAESGKPLKEAHGEILYSAFFLEWFSEEARRVYGDIIHTPAKDRRALVLKQPIGVAAVITPWNFPSAMITRKVGAALAAGCTVVVKPAEDTPFSALALAEVNQGFLLDLDPLLLASQAGIPSGVYNVIPCSRKNAKEVGEAICTDPLVSKISFTGSTTTGKILLHHAANSVKRVSMELGGLAPFIVFDSANVDQAVAGAMASKFRNTGQTCVCSNQFLVQRGIHDAFVKAFAEAMKKNLRVGNGFEEGTTQGPLINEKAVEKVEKQVNDAVSKGATVVTGGKRHQLGKNFFEPTLLCNVTQDMLCTHEETFGPLAPVIKFDTEEEAIAIANAADVGLAGYFYSQDPAQIWRVAEQLEVGMVGVNEGLISSVECPFGGVKQSGLGREGSKYGIDEYLELKELLFT

SEQ ID NO: 3758 - protein, 984 aa, Artificial Sequence
  Synthetic polypeptide
MRVSHTFPVVDCTAACCDLSSCDLAWWFEGRCYLVSCPHKENCEPKKMGPIRSYLTFVLRPVQRPAQLLDYGDMMLNRGSPSGIWGDSPEDIRKDLTFLGKDWGLEEMSEYSDDYRELEKDLLQPSGKQEPRGSAEYTDWGLLPGSEGAFNSSVGDSPAVPAETQQDPELHYLNESASTPAPKLPERSVLLPLPTTPSSGEVLEKEKASQLQEQSSNSSGKEVLMPSHSLPPASLELSSVTVEKSPVLTVTPGSTEHSIPTPPTSAAPSESTPSELPISPTTAPRTVKELTVSAGDNLIITLPDNEVELKAFVAPAPPVETTYNYEWNLISHPTDYQGEIKQGHKQTLNLSQLSVGLYVFKVTVSSENAFGEGFVNVTVKPARRVNLPPVAVVSPQLQELTLPLTSALIDGSQSTDDTEIVSYHWEEINGPFIEEKTSVDSPVLRLSNLDPGNYSFRLTVTDSDGATNSTTAALIVNNAVDYPPVANAGPNHTITLPQNSITLNGNQSSDDHQIVLYEWSLGPGSEGKHVVMQGVQTPYLHLSAMQEGDYTFQLKVTDSSRQQSTAVVTVIVQPENNRPPVAVAGPDKELIFPVESATLDGSSSSDDHGIVFYHWEHVRGPSAVEMENIDKAIATVTGLQVGTYHFRLTVKDQQGLSSTSTLTVAVKKENNSPPRARAGGRHVLVLPNNSITLDGSRSTDDQRIVSYLWIRDGQSPAAGDVIDGSDHSVALQLTNLVEGVYTFHLRVTDSQGASDTDTATVEVQPDPRKSGLVELTLQVGVGQLTEQRKDTLVRQLAVLLNVLDSDIKVQKIRAHSDLSTVIVFYVQSRPPFKVLKAAEVARNLHMRLSKEKADFLLFKVLRVDTAGCLLKCSGHGHCDPLTKRCICSHLWMENLIQRYIWDGESNCEWSIFYVTVLAFTLIVLTGGFTWLCICCCKRQKRTKIRKKTKYTILDNMDEQERMELRPKYETGDSQESLAKPHLQA

SEQ ID NO: 3759 - protein, 1020 aa, Artificial Sequence
  Synthetic polypeptide
MTRLGWPSPCCARKQCSEGRTYSNAVISPNLETTRIMRVSHTFPVVDCTAACCDLSSCDLAWWFEGRCYLVSCPHKENCEPKKMGPIRSYLTFVLRPVQRPAQLLDYGDMMLNRGSPSGIWGDSPEDIRKDLTFLGKDWGLEEMSEYSDDYRELEKDLLQPSGKQEPRGSAEYTDWGLLPGSEGAFNSSVGDSPAVPAETQQDPELHYLNESASTPAPKLPERSVLLPLPTTPSSGEVLEKEKASQLQEQSSNSSGKEVLMPSHSLPPASLELSSVTVEKSPVLTVTPGSTEHSIPTPPTSAAPSESTPSELPISPTTAPRTVKELTVSAGDNLIITLPDNEVELKAFVAPAPPVETTYNYEWNLISHPTDYQGEIKQGHKQTLNLSQLSVGLYVFKVTVSSENAFGEGFVNVTVKPARRVNLPPVAVVSPQLQELTLPLTSALIDGSQSTDDTEIVSYHWEEINGPFIEEKTSVDSPVLRLSNLDPGNYSFRLTVTDSDGATNSTTAALIVNNAVDYPPVANAGPNHTITLPQNSITLNGNQSSDDHQIVLYEWSLGPGSEGKHVVMQGVQTPYLHLSAMQEGDYTFQLKVTDSSRQQSTAVVTVIVQPENNRPPVAVAGPDKELIFPVESATLDGSSSSDDHGIVFYHWEHVRGPSAVEMENIDKAIATVTGLQVGTYHFRLTVKDQQGLSSTSTLTVAVKKENNSPPRARAGGRHVLVLPNNSITLDGSRSTDDQRIVSYLWIRDGQSPAAGDVIDGSDHSVALQLTNLVEGVYTFHLRVTDSQGASDTDTATVEVQPDPRKSGLVELTLQVGVGQLTEQRKDTLVRQLAVLLNVLDSDIKVQKIRAHSDLSTVIVFYVQSRPPFKVLKAAEVARNLHMRLSKEKADFLLFKVLRVDTAGCLLKCSGHGHCDPLTKRCICSHLWMENLIQRYIWDGESNCEWSIFYVTVLAFTLIVLTGGFTWLCICCCKRQKRTKIRKKTKYTILDNMDEQERMELRPKYETGDSQESLAKPHLQA

SEQ ID NO: 3760 - protein, 1029 aa, Artificial Sequence
  Synthetic polypeptide
MAPPTGVLSSLLLLVTIAGCARKQCSEGRTYSNAVISPNLETTRIMRVSHTFPVVDCTAACCDLSSCDLAWWFEGRCYLVSCPHKENCEPKKMGPIRSYLTFVLRPVQRPAQLLDYGDMMLNRGSPSGIWGDSPEDIRKDLTFLGKDWGLEEMSEYSDDYRELEKDLLQPSGKQEPRGSAEYTDWGLLPGSEGAFNSSVGDSPAVPAETQQDPELHYLNESASTPAPKLPERSVLLPLPTTPSSGEVLEKEKASQLQEQSSNSSGKEVLMPSHSLPPASLELSSVTVEKSPVLTVTPGSTEHSIPTPPTSAAPSESTPSELPISPTTAPRTVKELTVSAGDNLIITLPDNEVELKAFVAPAPPVETTYNYEWNLISHPTDYQGEIKQGHKQTLNLSQLSVGLYVFKVTVSSENAFGEGFVNVTVKPARRVNLPPVAVVSPQLQELTLPLTSALIDGSQSTDDTEIVSYHWEEINGPFIEEKTSVDSPVLRLSNLDPGNYSFRLTVTDSDGATNSTTAALIVNNAVDYPPVANAGPNHTITLPQNSITLNGNQSSDDHQIVLYEWSLGPGSEGKHVVMQGVQTPYLHLSAMQEGDYTFQLKVTDSSRQQSTAVVTVIVQPENNRPPVAVAGPDKELIFPVESATLDGSSSSDDHGIVFYHWEHVRGPSAVEMENIDKAIATVTGLQVGTYHFRLTVKDQQGLSSTSTLTVAVKKENNSPPRARAGGRHVLVLPNNSITLDGSRSTDDQRIVSYLWIRDGQSPAAGDVIDGSDHSVALQLTNLVEGVYTFHLRVTDSQGASDTDTATVEVQPDPRKSGLVELTLQVGVGQLTEQRKDTLVRQLAVLLNVLDSDIKVQKIRAHSDLSTVIVFYVQSRPPFKVLKAAEVARNLHMRLSKEKADFLLFKVLRVDTAGCLLKCSGHGHCDPLTKRCICSHLWMENLIQRYIWDGESNCEWSIFYVTVLAFTLIVLTGGFTWLCICCCKRQKRTKIRKKTKYTILDNMDEQERMELRPKYETGDSQESLAKPHLQA

SEQ ID NO: 3761 - protein, 1029 aa, Artificial Sequence; identical to SEQ ID NO: 3760
  Synthetic polypeptide

SEQ ID NO: 3762 - protein, 251 aa, Artificial Sequence
  Synthetic polypeptide
MDSSREPTLGRLDAAGFWQVWQRFDADEKGYIEEKELDAFFLHMLMKLGTDDTVMKANLHKVKQQFMTTQDASKDGRIRMKELAGMFLSEDENFLLLFRRENPLDSSVEFMQIWRKYDADSSGFISAAELRNFLRDLFLHHKKAISEAKLEEYTGTMMKIFDRNKDGRLDLNDLARILALQENFLLQFKMDACSTEERKRDFEKIFAYYDVSKTGALEGPEVDGFVKDMMELVQLPTVFTTVTCCTETQEK

SEQ ID NO: 3763 - protein, 250 aa, Artificial Sequence
  Synthetic polypeptide
MDSSREPTLGRLDAAGFWQVWQRFDADEKGYIEEKELDAFFLHMLMKLGTDDTVMKANLHKVKQQFMTTQDASKDGRIRMKELAGMFLSEDENFLLLFRRENPLDSSVEFMQIWRKYDADSSGFISAAELRNFLRDLFLHHKKAISEAKLEEYTGTMMKIFDRNKDGRLDLNDLARILALQENFLLQFKMDACSTEERKRDFEKIFAYYDVSKTGALEGPEVDGFVKDMMELVQAFAFLMTGWPHWIHDS

SEQ ID NO: 3764 - skipped

SEQ ID NO: 3765 - protein, 17 aa, Artificial Sequence
  Synthetic polypeptide
SGFLLSQENGWCWRPLS

SEQ ID NO: 3766 - protein, 464 aa, Artificial Sequence
  Synthetic polypeptide
MATKTELSPTARESKNAQDMQVDETLIPRKVPSLCSARYGIALVLHFCNFTTIAQNVIMNITMVAMVNSTSPQSQLNDSSEVLPVDSFGGLSKAPKSLPAKAPVYDWSPQIQGIIFGAVGYGGILTMAPSGYLAGRVGTKRVVGISLFATSFLTLCIPLATDFGIVLLIVTRIVQGLSQSSILGGQFAIWEKWGPPQERSRLCSIALSGMLLGCFTAILIGGFISETLGWPFVFYIFGGVGCVCCLLWFVVIYDDPVSYPWISTSEKEYIISSLKQQVGSSKQPLPIKAMLRSLPIWSICLGCFSHQWLVSTMVVYIPTYISSVYHVNIRDNGLLSALPFIVAWVIGMVGGYLADFLLTKKFRLITVRKIATILGSLPSSALIVSLPYLNSGYITATALLTLSCGLSTLCQSGIYINVLDIAPRYSSFLMGASRGFSSIAPVIVPTVSGFLLSQENGWCWRPLS

SEQ ID NO: 3767 - protein, 386 aa, Artificial Sequence
  Synthetic polypeptide
MATKTELSPTARESKNAQDMQVDETLIPRKVPSLCSARYGIALVLHFCNFTTIAQNVIMNITMVAMVNSTSPQSQLNDSSEVLPVDSFGGLSKAPKSLPAKSSILGGQFAIWEKWGPPQERSRLCSIALSGMLLGCFTAILIGGFISETLGWPFVFYIFGGVGCVCCLLWFVVIYDDPVSYPWISTSEKEYIISSLKQQVGSSKQPLPIKAMLRSLPIWSICLGCFSHQWLVSTMVVYIPTYISSVYHVNIRDNGLLSALPFIVAWVIGMVGGYLADFLLTKKFRLITVRKIATILGSLPSSALIVSLPYLNSGYITATALLTLSCGLSTLCQSGIYINVLDIAPRYSSFLMGASRGFSSIAPVIVPTVSGFLLSQENGWCWRPLS

SEQ ID NO: 3768 - protein, 386 aa, Artificial Sequence; identical to SEQ ID NO: 3767
  Synthetic polypeptide

SEQ ID NO: 3769 - protein, 290 aa, Artificial Sequence
  Synthetic polypeptide
MATKTELSPTARESKNAQDMQVDETLIPRKVPSLCSARYGIALVLHFCNFTTIAQNVIMNITMVAMVNSTSPQSQLNDSSEVLPVDSFGGLSKAPKSLPAKAPVYDWSPQIQGIIFGAVGYGGILTMAPSGYLAGRVGTKRVVGISLFATSFLTLCIPLATDFGIVLLIVTRIVQGLSQSSILGGQFAIWEKWGPPQERSRLCSIALSGMLLGCFTAILIGGFISETLGWPFVFYIFGGVGCVCCLLWFVVIYDDPVSYPWISTSEKEYIISSLKQQAELPCPGNHPETH

SEQ ID NO: 3770 - protein, 212 aa, Artificial Sequence
  Synthetic polypeptide
MATKTELSPTARESKNAQDMQVDETLIPRKVPSLCSARYGIALVLHFCNFTTIAQNVIMNITMVAMVNSTSPQSQLNDSSEVLPVDSFGGLSKAPKSLPAKSSILGGQFAIWEKWGPPQERSRLCSIALSGMLLGCFTAILIGGFISETLGWPFVFYIFGGVGCVCCLLWFVVIYDDPVSYPWISTSEKEYIISSLKQQAELPCPGNHPETH

SEQ ID NO: 3771 - protein, 212 aa, Artificial Sequence; identical to SEQ ID NO: 3770
  Synthetic polypeptide

SEQ ID NO: 3772 - protein, 209 aa, Artificial Sequence
  Synthetic polypeptide
MATKTELSPTARESKNAQDMQVDETLIPRKVPSLCSARYGIALVLHFCNFTTIAQNVIMNITMVAMVNSTSPQSQLNDSSEVLPVDSFGGLSKAPKSLPAKAPVYDWSPQIQGIIFGAVGYGGILTMAPSGYLAGRVGTKRVVGISLFATSFLTLCIPLATDFGIVLLIVTRIVQGLSQSSILGGQFAIWEKWGPPQERSRLCSIALSG

SEQ ID NO: 3773 - protein, 131 aa, Artificial Sequence
  Synthetic polypeptide
MATKTELSPTARESKNAQDMQVDETLIPRKVPSLCSARYGIALVLHFCNFTTIAQNVIMNITMVAMVNSTSPQSQLNDSSEVLPVDSFGGLSKAPKSLPAKSSILGGQFAIWEKWGPPQERSRLCSIALSG

SEQ ID NO: 3774 - protein, 131 aa, Artificial Sequence; identical to SEQ ID NO: 3773
  Synthetic polypeptide

SEQ ID NO: 3775 - protein, 166 aa, Artificial Sequence
  Synthetic polypeptide
MPEPAKSAPAPKKGSKKAVTKAQKKDGKKRKRSRKESYSVYVYKVLKQVHPDTGISSKAMGIMNSFVNDIFERIAGEASRLAHYNKRSTITSREIQTAVRLLLPGELAKHAVSEGTKAVTKYTSAKEGLSLEFPDMTKKASYQKKHNCLRLPHYLLQKRRRECNHT

SEQ ID NO: 3776 - protein, 166 aa, Artificial Sequence; identical to SEQ ID NO: 3775
  Synthetic polypeptide

SEQ ID NO: 3777 - protein, 160 aa, Artificial Sequence
  Synthetic polypeptide
MAVWLAQWLGPLLLVSLWGLLAPASLLRRLGEHIQQFQESSAQGLGLSLGPGAAALPKVGWLEQLLDPFNVSDRRSFLQRYWVNDQHWVGQDGPIFLHLGGEGSLGPGSVMRGHPAALAPAWGALVISLEHRFYGLSIPAGGLEMAQLRFLSSRLAWKSE

SEQ ID NO: 3778 - protein, 160 aa, Artificial Sequence; identical to SEQ ID NO: 3777
  Synthetic polypeptide

SEQ ID NO: 3779 - protein, 105 aa, Artificial Sequence
  Synthetic polypeptide
SDERPSRSLGPSLGRPGDKPGTQILWPEYTCWRPGNGPAPLLVQPPCVEIRVILLEHKPGHDPPWLKSLRHLLYCFRSKAILTVFDFRVKSKLLQSPWSPVGFGL

SEQ ID NO: 3780 - protein, 105 aa, Artificial Sequence; identical to SEQ ID NO: 3779
  Synthetic polypeptide

SEQ ID NO: 3781 - protein, 49 aa, Artificial Sequence
  Synthetic polypeptide
SDERPSRSLGPSLGRPGDKPGTQILWPEYTCWRPGNGPAPLLVQPPCAG

SEQ ID NO: 3782 - protein, 49 aa, Artificial Sequence; identical to SEQ ID NO: 3781
  Synthetic polypeptide

SEQ ID NO: 3783 - protein, 140 aa, Artificial Sequence
  Synthetic polypeptide
MAVWLAQWLGPLLLVSLWGLLAPASLLRRLGEHIQQFQESSAQGLGLSLGPGAAALPKVGWLEQLLDPFNVSDRRSFLQIVLHSLGQKCLSFSRAETVAQLRSTEPQLSGVGDRQWLYQTCTEFGFWLFQGLKEVIFVAF

SEQ ID NO: 3784 - protein, 397 aa, Artificial Sequence
  Synthetic polypeptide
MAVWLAQWLGPLLLVSLWGLLAPASLLRRLGEHIQQFQESSAQGLGLSLGPGAAALPKVGWLEQLLDPFNVSDRRSFLQRYWVNDQHWVGQDGPIFLHLGGEGSLGPGSVMRGHPAALAPAWGALVISLEHRFYGLSIPAGGLEMAQLRFLSSRLALADVVSARLALSRLFNISSSSPWICFGGSYAGSLAAWARLKFPHLIFASVASSAPVRAVLDFSEYNDVVSRSLMSTAIGGSLECRAAVSVAFAEVERRLRSGGAAQAALRTELSACGPLGRAENQAELLGALQALVGGVVQYDGQTGAPLSVRQLCGLLLGGGGNRSHSTPYCGLRRAVQIVLHSLGQKCLSFSRAETVAQLRSTEPQLSGVGDRQWLYQTCTEFGFWLFQGLKEVIFVAF

SEQ ID NO: 3785 - protein, 342 aa, Artificial Sequence
  Synthetic polypeptide
MAPRSLLLLLSGALALTDTWAGSHSLRYFSTAVSRPGRGEPRYIAVEYVDDTQFLRFDSDAAIPRMEPREPWVEQEGPQYWEWTTGYAKANAQTDRVALRNLLRRYNQSEAGSHTLQGMNGCDMGPDGRLLRGYHQHAYDGKDYISLNEDLRSWTAADTVAQITQRFYEAEEYAEEFRTYLEGECLELLRRYLENGKETLQRADPPKAHVAHHPISDHEATLRCWALGFYPAEITLTWQRDGEEQTQDTELVETRPAGDGTFQKWAAVVVPPGEEQRYTCHVQHEGLPQPLILRWEQSPQPTIPIVGIVAGLVVLGAVVTGAVVAAVMWRKKSSETKTKTKT

SEQ ID NO: 3786 - protein, 342 aa, Artificial Sequence; identical to SEQ ID NO: 3785
  Synthetic polypeptide

SEQ ID NO: 3787 - protein, 342 aa, Artificial Sequence; identical to SEQ ID NO: 3785
  Synthetic polypeptide

SEQ ID NO: 3788 - protein, 224 aa, Artificial Sequence
  Synthetic polypeptide
MNGCDMGPDGRLLRGYHQHAYDGKDYISLNEDLRSWTAADTVAQITQRFYEAEEYAEEFRTYLEGECLELLRRYLENGKETLQRADPPKAHVAHHPISDHEATLRCWALGFYPAEITLTWQRDGEEQTQDTELVETRPAGDGTFQKWAAVVVPPGEEQRYTCHVQHEGLPQPLILRWEQSPQPTIPIVGIVAGLVVLGAVVTGAVVAAVMWRKKSSETKTKTKT

SEQ ID NO: 3789 - protein, 250 aa, Artificial Sequence
  Synthetic polypeptide
MAPRSLLLLLSGALALTDTWAGSHSLRYFSTAVSRPGRGEPRYIAVEYVDDTQFLRFDSDAAIPRMEPREPWVEQEGPQYWEWTTGYAKANAQTDRVALRNLLRRYNQSEAGSHTLQGMNGCDMGPDGRLLRGYHQHAYDGKDYISLNEDLRSWTAADTVAQITQRFYEAEEYAEEFRTYLEGECLELLRRYLENGKETLQRAEQSPQPTIPIVGIVAGLVVLGAVVTGAVVAAVMWRKKSSETKTKTKT

SEQ ID NO: 3790 - protein, 25 aa, Artificial Sequence
  Synthetic polypeptide
AQTLHPGESQAPLPSTRTTARITSP

SEQ ID NO: 3791 - protein, 2 aa, Artificial Sequence
  Synthetic polypeptide
ML

SEQ ID NO: 3792 - protein, 111 aa, Artificial Sequence
  Synthetic polypeptide
MAVMAPRTLLLLLSGALALTQTWAGSHSMRYFFTSVSRPGRGEPRFIAVGYVDDTQFVRFDSDAASQRMEPRAPWIEQEGPEYWDQETRNVKAQSQTDRGNLGKNQKEPRV

SEQ ID NO: 3793 - protein, 111 aa, Artificial Sequence; identical to SEQ ID NO: 3792
  Synthetic polypeptide

SEQ ID NO: 3794 - protein, 111 aa, Artificial Sequence; identical to SEQ ID NO: 3792
  Synthetic polypeptide

SEQ ID NO: 3795 - protein, 111 aa, Artificial Sequence; identical to SEQ ID NO: 3792
  Synthetic polypeptide

SEQ ID NO: 3796 - protein, 366 aa, Artificial Sequence
  Synthetic polypeptide
MAVMAPRTLLLLLSGALALTQTWAGSHSMRYFFTSVSRPGRGEPRFIAVGYVDDTQFVRFDSDAASQRMEPRAPWIEQEGPEYWDQETRNVKAQSQTDRVDLGTLRGYYNQSEAGSHTIQIMYGCDVGSDGRFLRGYRQDAYDGKDYIALNEDLRSWTAADMAAQITKRKWEAAHEAEQLRAYLDGTCVEWLRRYLENGKETLQRTDPPKTHMTHHPISDHEATLRCWALGFYPAEITLTWQRDGEDQTQDTELVETRPAGDGTFQKWAAVVVPSGEEQRYTCHVQHEGLPKPLTLRWELSSQPTIPIVGIIAGLVLLGAVITGAVVAAVMWRRKSSDRKGGSYTQAASSDSAQGSDVSLTACKEA

SEQ ID NO: 3797 - protein, 366 aa, Artificial Sequence; identical to SEQ ID NO: 3796
  Synthetic polypeptide

SEQ ID NO: 3798 - protein, 372 aa, Artificial Sequence
  Synthetic polypeptide
MAVMAPRTLLLLLSGALALTQTWAGSHSMRYFFTSVSRPGRGEPRFIAVGYVDDTQFVRFDSDAASQRMEPRAPWIEQEGPEYWDQETRNVKAQSQTDRVDLGTLRGYYNQSEAGSHTIQIMYGCDVGSDGRFLRGYRQDAYDGKDYIALNEDLRSWTAADMAAQITKRKWEAAHEAEQLRAYLDGTCVEWLRRYLENGKETLQRTDPPKTHMTHHPISDHEATLRCWALGFYPAEITLTWQRDGEDQTQDTELVETRPAGDGTFQKWAAVVVPSGEEQRYTCHVQHEGLPKPLTLRWELSSQPTIPIVGIIAGLVLLGAVITGAVVAAVMWRRKSSGGEGVKDRKGGSYTQAASSDSAQGSDVSLTACKEA

SEQ ID NO: 3799 - protein, 208 aa, Artificial Sequence
  Synthetic polypeptide
MVDGTLLLLLSEALALTQTWAGSHSLKYFHTSVSRPGRGEPRFISVGYVDDTQFVRFDNDAASPRMVPRAPWMEQEGSEYWDRETRSARDTAQIFRVNLRTLRGYYNQSEAGSHTLQWMHGCELGPDGRFLRGYEQFAYDGKDYLTLNEDLRSWTAVDTAAQISEQKSNDASEAEHQRAYLEDTCVEWLHKYLEKGKETLLHLEPPLE

SEQ ID NO: 3800 - protein, 265 aa, Artificial Sequence
  Synthetic polypeptide
MVDGTLLLLLSEALALTQTWAGSHSLKYFHTSVSRPGRGEPRFISVGYVDDTQFVRFDNDAASPRMVPRAPWMEQEGSEYWDRETRSARDTAQIFRVNLRTLRGYYNQSEAGSHTLQWMHGCELGPDGRFLRGYEQFAYDGKDYLTLNEDLRSWTAVDTAAQISEQKSNDASEAEHQRAYLEDTCVEWLHKYLEKGKETLLHLEPPKTHVTHHPISDHEATLRTPELWSQWQHAAPPWESFRHQPATHSSSHVGCTQQSHRHGAT

SEQ ID NO: 3801 - protein, 296 aa, Artificial Sequence
  Synthetic polypeptide
MVDGTLLLLLSEALALTQTWAGSHSLKYFHTSVSRPGRGEPRFISVGYVDDTQFVRFDNDAASPRMVPRAPWMEQEGSEYWDRETRSARDTAQIFRVNLRTLRGYYNQSEAGSHTLQWMHGCELGPDGRFLRGYEQFAYDGKDYLTLNEDLRSWTAVDTAAQISEQKSNDASEAEHQRAYLEDTCVEWLHKYLEKGKETLLHLEPPKTHVTHHPISDHEATLRCWALGFYPAEITLTWQQDGEGHTQDTELVETRPAGDGTFQKWAAVVVPSGEEQRYTCHVQLPQRAPTREMSSV

SEQ ID NO: 3802 - protein, 337 aa, Artificial Sequence
  Synthetic polypeptide
MVDGTLLLLLSEALALTQTWAGSHSLKYFHTSVSRPGRGEPRFISVGYVDDTQFVRFDNDAASPRMVPRAPWMEQEGSEYWDRETRSARDTAQIFRVNLRTLRGYYNQSEAGSHTLQWMHGCELGPDGRFLRGYEQFAYDGKDYLTLNEDLRSWTAVDTAAQISEQKSNDASEAEHQRAYLEDTCVEWLHKYLEKGKETLLHLEPPKTHVTHHPISDHEATLRCWALGFYPAEITLTWQQDGEGHTQDTELVETRPAGDGTFQKWAAVVVPSGEEQRYTCHVQHEGLPEPVTLRWKPASQPTIPIVGIIAGLVLLGSVVSGAVVAVSQDCATALQPG

SEQ ID NO: 3803 - protein, 29 aa, Artificial Sequence
  Synthetic polypeptide
MAQPVHSLCSAFGLQCCLLFLLASWGAGG

SEQ ID NO: 3804 - protein, 157 aa, Artificial Sequence
  Synthetic polypeptide
MAVEFDGGVVMGSDSRVSAGEAVVNRVFDKLSPLHERIYCALSGSAADAQAVADMAAYQLELHGIELEEPPLVLAAANVVRNISYKYREDLSAHLMVAGWDQREGGQVYGTLGGMLTRQPFAIGGSGSTFIYGYVDAAYKPGMSPEECRRFTTDALP

SEQ ID NO: 3805 - protein, 136 aa, Artificial Sequence
  Synthetic polypeptide
MLRAGAPTGDLPRAGEVHTGTTIMAVEFDGGVVMGSDSRVSAGIELEEPPLVLAAANVVRNISYKYREDLSAHLMVAGWDQREGGQVYGTLGGMLTRQPFAIGGSGSTFIYGYVDAAYKPGMSPEECRRFTTDALP

SEQ ID NO: 3806 - protein, 180 aa, Artificial Sequence
  Synthetic polypeptide
MLRAGAPTGDLPRAGEVHTGTTIMAVEFDGGVVMGSDSRVSAGEAVVNRVFDKLSPLHERIYCALSGSAADAQAVADMAAYQLELHGIELEEPPLVLAAANVVRNISYKYREDLSAHLMVAGWDQREGGQVYGTLGGMLTRQPFAIGGSGSTFIYGYVDAAYKPGMSPEECRRFTTDALP

SEQ ID NO: 3807 - protein, 475 aa, Artificial Sequence
  Synthetic polypeptide
MKSLSLLLAVALGLATAVSAGPAVIECWFVEDASGKGLAKRPGALLLRQGPGEPPPRPDLDPELYLSVHDPAGALQAAFRRYPRGAPAPHCEMSRFVPLPASAKWASGLTPAQNCPRALDGAWLMVSISSPVLSLSSLLRPQPEPQQEPVLITMATVVLTVLTHTPAPRVRLGQDALLDLSFAYMPPTSEAASSLAPGPPPFGLEWRRQHLGKGHLLLAATPGLNGQMPAAQEGAVAFAAWDDDEPWGPWTGNGTFWLPTVQPFQEGTYLATIHLPYLQGQVTLELAVYKPPKVSLMPATLARAAPGEAPPELLCLVSHFYPSGGLEVEWELRGGPGGRSQKAEGQRWLSALRHHSDGSVSLSGHLQPPPVTTEQHGARYACRIHHPSLPASGRSAEVTLEVAGLSGPSLEDSVGLFLSAFLLLGLFKALGWAAVYLSTCKDSKKGLACLSTAVTPRRHRDLRPTGGRSSSSCWM

SEQ ID NO: 3808 - protein, 475 aa, Artificial Sequence; identical to SEQ ID NO: 3807
  Synthetic polypeptide

SEQ ID NO: 3809 - protein, 475 aa, Artificial Sequence; identical to SEQ ID NO: 3807
  Synthetic polypeptide

SEQ ID NO: 3810 - protein, 493 aa, Artificial Sequence
  Synthetic polypeptide
MKSLSLLLAVALGLATAVSAGPAVIECWFVEDASGKGLAKRPGALLLRQGPGEPPPRPDLDPELYLSVHDPAGALQAAFRRYPRGAPAPHCEMSRFVPLPASAKWASGLTPAQNCPRALDGAWLMVSISSPVLSLSSLLRPQPEPQQEPVLITMATVEMGFHHVGQAALELLTSVVLTVLTHTPAPRVRLGQDALLDLSFAYMPPTSEAASSLAPGPPPFGLEWRRQHLGKGHLLLAATPGLNGQMPAAQEGAVAFAAWDDDEPWGPWTGNGTFWLPTVQPFQEGTYLATIHLPYLQGQVTLELAVYKPPKVSLMPATLARAAPGEAPPELLCLVSHFYPSGGLEVEWELRGGPGGRSQKAEGQRWLSALRHHSDGSVSLSGHLQPPPVTTEQHGARYACRIHHPSLPASGRSAEVTLEVAGLSGPSLEDSVGLFLSAFLLLGLFKALGWAAVYLSTCKDSKKGLACLSTAVTPRRHRDLRPTGGRSSSSCWM

SEQ ID NO: 3811 - protein, 388 aa, Artificial Sequence
  Synthetic polypeptide
MKSLSLLLAVALGLATAVSAGPAVIECWFVEDASGKGLAKRPGALLLRQGPGEPPPRPDLDPELYLSVHVVLTVLTHTPAPRVRLGQDALLDLSFAYMPPTSEAASSLAPGPPPFGLEWRRQHLGKGHLLLAATPGLNGQMPAAQEGAVAFAAWDDDEPWGPWTGNGTFWLPTVQPFQEGTYLATIHLPYLQGQVTLELAVYKPPKVSLMPATLARAAPGEAPPELLCLVSHFYPSGGLEVEWELRGGPGGRSQKAEGQRWLSALRHHSDGSVSLSGHLQPPPVTTEQHGARYACRIHHPSLPASGRSAEVTLEVAGLSGPSLEDSVGLFLSAFLLLGLFKALGWAAVYLSTCKDSKKGLACLSTAVTPRRHRDLRPTGGRSSSSCWM

SEQ ID NO: 3812 - protein, 93 aa, Artificial Sequence
  Synthetic polypeptide
MSESSSKSSQPLASKQEKDGTEKRGRGRPRKQPPVSPGTALVGSQKEPSEVPTPKRPRGRPKGSKNKGAAKTRAHHHHRLWPPPPSSTCALTT

SEQ ID NO: 3813 - protein, 93 aa, Artificial Sequence; identical to SEQ ID NO: 3812
  Synthetic polypeptide

SEQ ID NO: 3814 - protein, 82 aa, Artificial Sequence
  Synthetic polypeptide
MSESSSKSSQPLASKQEKDGTEKRGRGRPRKQPPKEPSEVPTPKRPRGRPKGSKNKGAAKTRAHHHHRLWPPPPSSTCALTT

SEQ ID NO: 3815 - protein, 82 aa, Artificial Sequence; identical to SEQ ID NO: 3814
  Synthetic polypeptide

SEQ ID NO: 3816 - protein, 82 aa, Artificial Sequence; identical to SEQ ID NO: 3814
  Synthetic polypeptide

SEQ ID NO: 3817 - protein, 155 aa, Artificial Sequence
  Synthetic polypeptide
MLMPKKNRIAIYELLFKEGVMVAKKDVHMPKHPELADKNVPNLHVMKAMQSLKSRGYVKEQFAWRHFYWYLTNEGIQYLRDYLHLPPEIVPATLRRSRPETGRPRPKGLEGERPARLTRGEADRDTYRRSAVPPGADKKAEAGAGSATEFQFYWH

SEQ ID NO: 3818 - protein, 155 aa, Artificial Sequence; identical to SEQ ID NO: 3817
  Synthetic polypeptide

SEQ ID NO: 3819 - protein, 155 aa, Artificial Sequence; identical to SEQ ID NO: 3817
  Synthetic polypeptide

SEQ ID NO: 3820 - protein, 182 aa, Artificial Sequence
  Synthetic polypeptide
MGSASPGLSSVSPSHLLLPPDTVSRTGLEKAAAGAVGLERRDWSPSPPATPEQGLSAFYLSYFDMLYPEDSSWAAKAPGASSREEPPEEPEQCPVIDSQAPAGSLDLVPGGLTLEEHSLEQVQSMVVGEVLKDIETACKLLNITAGLGSDGTIRMRPSLTPPLKLLPMSTGHGKENKQKNEK

SEQ ID NO: 3821 - protein, 182 aa, Artificial Sequence; identical to SEQ ID NO: 3820
  Synthetic polypeptide

SEQ ID NO: 3822 - protein, 44 aa, Artificial Sequence
  Synthetic polypeptide
MHQRGGEERLFPAAITSRKEERLCPAAHRLRCGERLCPAAPSGM

SEQ ID NO: 3823 - protein, 375 aa, Artificial Sequence
  Synthetic polypeptide
MTTDEGAKNNEESPTATVAEQGEDITSKKDRGVLKIVKRVGNGEETPMIGDKVYVHYKGKLSNGKKFDSSHDRNEPFVFSLGKGQVIKAWDIGVATMKKGEICHLLCKPEYAYGSAGSLPKIPSNATLFFEIELLDFKGEDLFEDGGIIRRTKRKGEGYSNPNEGATVEIHLEGRCGGRMFDCRDVAFTVGEGEDHDIPIGIDKALEKMQREEQCILYLGPRYGFGEAGKPKFGIEPNAELIYEVTLKSFEKAKESWEMDTKEKLEQAAIVKEKGTVYFKGGKYMQAVIQYGKIVSWLEMEYGLSEKESKASESFLLAAFLNLAMCYLKLREYTKAVECCDKVLPLEFPEHQHQLPSSSKGGKKESLNQLGKDLI

SEQ ID NO: 3824 - protein, 375 aa, Artificial Sequence; identical to SEQ ID NO: 3823
  Synthetic polypeptide

SEQ ID NO: 3825 - protein, 375 aa, Artificial Sequence; identical to SEQ ID NO: 3823
  Synthetic polypeptide

SEQ ID NO: 3826 - protein, 196 aa, Artificial Sequence
  Synthetic polypeptide
MFDCRDVAFTVGEGEDHDIPIGIDKALEKMQREEQCILYLGPRYGFGEAGKPKFGIEPNAELIYEVTLKSFEKAKESWEMDTKEKLEQAAIVKEKGTVYFKGGKYMQAVIQYGKIVSWLEMEYGLSEKESKASESFLLAAFLNLAMCYLKLREYTKAVECCDKVLPLEFPEHQHQLPSSSKGGKKESLNQLGKDLI

SEQ ID NO: 3827 - protein, 165 aa, Artificial Sequence
  Synthetic polypeptide
MEQPEDMASLSEFDSLAGSIPATKVEITVSCRNLLDKDMFSKSDPLCVMYTQGMENKQWREFGRTEVIDNTLNPDFVRKFIVDYFFEEKQNLRFDLYDVDSKSPDLSKHDFLGQAFCTLGEIVGSPGSRLEKPLTIGAFSLNSRTGKPMPAVSNGGLWMESLRTT

SEQ ID NO: 3828 - protein, 166 aa, Artificial Sequence
  Synthetic polypeptide
MEQPEDMASLSEFDSLAGSIPATKVEITVSCRNLLDKDMFSKSDPLCVMYTQGMENKQWREFGRTEVIDNTLNPDFVRKFIVDYFFEEKQNLRFDLYDVDSKSPDLSKHDFLGQAFCTLGEIVGSPGSRLEKPLTIGAFSLNSRTGKPMPAVSNGSGLWMESLRTT

SEQ ID NO: 3829 - protein, 74 aa, Artificial Sequence
  Synthetic polypeptide
MHGSCSFLMLLLPLLLLLVATTGPVGALTDEEKRLMVELHNLYRAQVSPTASDMLHMHNPGSGFFHSSTQGLLG

SEQ ID NO: 3830 - protein, 882 aa, Artificial Sequence
  Synthetic polypeptide
MEVTCLLLLALIPFHCRGQGVYAPAQAQIVHAGQACVVKEDNISERVYTIREGDTLMLQCLVTGHPRPQVRWTKTAGSASDKFQETSVFNETLRIERIARTQGGRYYCKAENGVGVPAIKSIRVDVQYLDEPMLTVHQTVSDVRGNFYQEKTVFLRCTVNSNPPARFIWKRGSDTLSHSQDNGVDIYEPLYTQGETKVLKLKNLRPQDYASYTCQVSVRNVCGIPDKAITFRLTNTTAPPALKLSVNETLVVNPGENVTVQCLLTGGDPLPQLQWSHGPGPLPLGALAQGGTLSIPSVQARDSGYYNCTATNNVGNPAKKTVNLLVRSMKNATFQITPDVIKESENIQLGQDLKLSCHVDAVPQEKVTYQWFKNGKPARMSKRLLVTRNDPELPAVTSSLELIDLHFSDYGTYLCMASFPGAPVPDLSVEVNISSETVPPTISVPKGRAVVTVREGSPAELQCEVRGKPRPPVLWSRVDKEAALLPSGLPLEETPDGKLRLERVSRDMSGTYRCQTARYNGFNVRPREAQVQLNVQSPCFPPEVEPSSQDVRQALGRPVLLRCSLLRGSPQRIASAVWRFKGQLLPPPPVVPAAAEAPDHAELRLDAVTRDSSGSYECSVSNDVGSAACLFQVSAKAYSPEFYFDTPNPTRSHKLSKNYSYVLQWTQREPDAVDPVLNYRLSIRQLNQHNAVVKAIPVRRVEKGQLLEYILTDLRVPHSYEVRLTPYTTFGAGDMASRIIHYTELLALRTLSSDNTCHFEDEKICGYTQDLTDNFDWTRQNALTQNPKRSPNTGPPTDISGTPEGYYMFIETSRPRELGDRARLVSPLYNASAKFYCVSFFYHMYGKHIGGEGCSELRLYHCTPSWAARAKLHFKKKKGKRK

SEQ ID NO: 3831 - protein, 878 aa, Artificial Sequence
  Synthetic polypeptide
MEVTCLLLLALIPFHCRGQGVYAPAQAQIVHAGQACVVKEDNISERVYTIREGDTLMLQCLVTGHPRPQVRWTKTAGSASDKFQETSVFNETLRIERIARTQGGRYYCKAENGVGVPAIKSIRVDVQYLDEPMLTVHQTVSDVRGNFYQEKTVFLRCTVNSNPPARFIWKRGSDTLSHSQDNGVDIYEPLYTQGETKVLKLKNLRPQDYASYTCQVSVRNVCGIPDKAITFRLTNTTAPPALKLSVNETLVVNPGENVTVQCLLTGGDPLPQLQWSHGPGPLPLGALAQGGTLSIPSVQARDSGYYNCTATNNVGNPAKKTVNLLVRSMKNATFQITPDVIKESENIQLGQDLKLSCHVDAVPQEKVTYQWFKNGKPARMSKRLLVTRNDPELPAVTSSLELIDLHFSDYGTYLCMASFPGAPVPDLSVEVNISSETVPPTISVPKGRAVVTVREGSPAELQCEVRGKPRPPVLWSRVDKEAALLPSGLPLEETPDGKLRLERVSRDMSGTYRCQTARYNGFNVRPREAQVQLNVQFPPEVEPSSQDVRQALGRPVLLRCSLLRGSPQRIASAVWRFKGQLLPPPPVVPAAAEAPDHAELRLDAVTRDSSGSYECSVSNDVGSAACLFQVSAKAYSPEFYFDTPNPTRSHKLSKNYSYVLQWTQREPDAVDPVLNYRLSIRQLNQHNAVVKAIPVRRVEKGQLLEYILTDLRVPHSYEVRLTPYTTFGAGDMASRIIHYTEPINSPNLSDNTCHFEDEKICGYTQDLTDNFDWTRQNALTQNPKRSPNTGPPTDISGTPEGYYMFIETSRPRELGDRARLVSPLYNASAKFYCVSFFYHMYGKHIGGEGCSELRLYHCTPSWAARAKLHFKKKKGKRK

SEQ ID NO: 3832 - protein, 878 aa, Artificial Sequence; identical to SEQ ID NO: 3831
  Synthetic polypeptide

SEQ ID NO: 3833 - skipped

SEQ ID NO: 3834 - protein, 2757 aa, Artificial Sequence
  Synthetic polypeptide
MEKDAEDGAPSEGAEAPPSTEEAAPPRSEEEEAPRPPTVEAPAEDGFSPSAEDAVSSVVDYRDLIPSEEGIVLPDDHEADLNRVRQRLAPRPVQSVISEVLSLPSSRRSSRYRRSMSGLPNLQETLKERQARFREARESRRLKIDPSYKYIFEILAENLGLDIVTVEELILDCPSLEAFTNFFAKDGCKTLKFLYQEGDVPGIECGRTIAGATKGAKMMKLYIDNAAPDKLKGLCIFFVRCRNDVAINVKTIQEEALFTVLDASKGLLNGIRDMLANIFLPAVLATNNWGALNQSKQGESEKHIFTETINRYLSFLDGARISIEGTVKLKTIDNVNFSKLHTFEEVTAAASNSETVHQLEEVLMVWYKQIEQVLIESEQMRKEAGDSGPLTELEHWKRMSAKFNYIIEQIKGPSCKAVINVLNVAHSKLLKNWRDLDARITDTANESKDNVRYLYTLEKVCQPLYNHDLVSMAHGIQNLINAIRMIHGVSRYYNTSERMTSLFIKVTNQMVTACKAYITDGGLNHVWDQETPVVLKKIQDCIFLFKEYQASFHKTRKLISESSGEKSFEVSEMYIFGKFEAFCKRLEKITEMITVVQTYSTLSNSTIEGIDIMAIKFRNIYQGVKKKQYDILDPRRTEFDTDFLDFMTKINGLEVQIQAFMNSSFGKILSSQQALQLLQRFQKLNIPCLGLEINHTIERILQYYVAELDATKKLYHSQKDDPPLARNMPPIAGKILWVRQLYRRISEPINYFFKNSDILSSPDGKAVIRQYNKISYVLVEFEVVYHTAWIREISQLHYALQATLFVRHPETGKLLVNFDPKILEVVRETKCMIKMKLDVPEQAKRLLKLESKLKADKLYLQGLLQYYDELCQEVPSVFVNLMTPKMKKVESVLRQGLTVLTWSSLTLESFFQEVELVLDMFNQLLKKISDLCEMHIDTVLKEIAKTVLISLPESGATKVEDMLTLNETYTKEWADILNHKSKHVEEAVRELISIFEQIYEVKYTGKVGKQSEQRKHVVFGSETGEGENNDYEANIVNEFDTHDKEDEFKKECKEVFAFFSHQLLDSLQKATRLSLDTMKRRIFVASLYGRKQSEDIISFIKSEVHLAIPNVVMIPSLDDIQQAINRMIQLTLEVSRGVAHWGQQQIRPIKSVIPSPTTTDVTHQNTGKLLKKEERSFEEAIPARKLKNFYPGVAEHKDISKLVLLLSSSVNSLRKAAHEALQDFQKYKTLWTEDRDVKVKEFLANNPSLTEIRSEILHYATFEQEIDELKPIIVVGALELHTEPMKLALSIEAKAWKMLLCRYLNEEYKKKMSYMIAFINEYLKKLSRPIRDLDDVRFAMEALSCIRDNEIQMDMTLGPIEEAYAILNRFEVEVTKEESEAVDTLRYSFNKLQSKAVSVQEDLVQVQPKFKSNLLESVEVFREDVINFAEAYELEGPMVPNIPPQEASNRLQIFQASFDDLWRKFVTYSSGEQLFGLPVTDYEVLHKTRKELNLLQKLYGLYDTVMSSISGYYEILWGDVDIEKINAELLEFQNRCRKLPKGLKDWQAFLDLKKRIDDFSESCPLLEMMTNKAMKQRHWDRISELTGTPFDVESDSFCLRNIMEAPLLKHKDDIEDICISAIKEKDIEAKLTQVIENWTNQNLSFAAFKGKGELLLKGTESGEIITLMEDSLMVLGSLLSNRYNAPFKKNIQNWVYKLSTSSDIIEEWLVVQNLWVYLEAVFVGGDIAKQLPQEAKRFQNIDKSWIKIMQRAHENPNVINCCVGDETMGQLLPHLHEQLEVCQKSLTGYLEKKRLLFPRFFFVSDPVLLEILGQASDSHTIQPHLPAVSDNINEVTFHAKDYDRIMAVISREGEKIVLDNSVMAKGPVEIWLLDLLKMQMSSLHNIIRSAFYQISDSGFQLLPFLSHFPAQVGLLGIQMLWTHDSEEALRNAKDDRKIMQVTNQKFLDILNTLISQTTHDLSKFDRVKFETLITIHVHQRDIFDDLVKMHIKSPTDFEWLKQSRFYFKEDLDQTVVSITDVDFIYQNEFLGCTDRLVITPLTDRCYITLAQALGMNMGGAPAGPAGTGKTETTKDMGRCLGKYVVVFNCSDQMDFRGLGRIFKGLAQSGSWGCFDEFNRIELPVLSVAAQQIYIVLTARKERKKQFIFSDGDCVDLNPEFGIFLTMNPGYAGRQELPENLKIQFRTVAMMVPDRQIIMRVKLASCGFLENVILAQKFYVLYKLCEEQLTKQVHYDFGLRNILSVLRTLGSQKRARPEDSELSIVMRGLRDMNLSKLVDEDEPLFLSLINDLFPGLQLDSNTYAELQNAVAHQVQIEGLINHPPWNLKLVQLYETSLVRHGLMTLGPSGSGKTTVITILMKAQTECGRPHREMRMNPKAITAPQMFGRLDTATNDWTDGIFSTLWRKTLKAKKGENIFLILDGPVDAIWIENLNSVLDDNKTLTLANGDRIPMAPSCKLLFEVHNIENASPATVSRMGMVYISSSALSWRPILQAWLKKRTAQEAAVFLTLYEKVFEDTYTYMKLNLNPKMQLLECNYIVQSLNLLEGLIPSKEEGGVSCVEHLHKLFVFGLMWSLGALLELESREKLEAFLRQHESKLDLPEIPKGSNQTMYEFYVTDYGDWEHWNKKLQPYYYPTDSIPEYSSILVPNVDNIRTNFLIDTIAKQHKAVLLTGEQGTAKTVMVKAYLKKYDPEVQLSKSLNFSSATEPMMFQRTIESYVDKRIGSTYGPPGGRKMTVFIDDINMPVINEWGDQVIPH

SEQ ID NO: 3835 - protein, 2745 aa, Artificial Sequence
  Synthetic polypeptide
GAEAPPSTEEAAPPRSEEEEAPRPPTVEAPAEDGFSPSAEDAVSSVVDYRDLIPSEEGIVLPDDHEADLNRVRQRLAPRPVQSVISEVLSLPSSRRSSRYRRSMSGLPNLQETLKERQARFREARESRRLKIDPSYKYIFEILAENLGLDIVTVEELILDCPSLEAFTNFFAKDGCKTLKFLYQEGDVPGIECGRTIAGATKGAKMMKLYIDNAAPDKLKGLCIFFVRCRNDVAINVKTIQEEALFTVLDASKGLLNGIRDMLANIFLPAVLATNNWGALNQSKQGESEKHIFTETINRYLSFLDGARISIEGTVKLKTIDNVNFSKLHTFEEVTAAASNSETVHQLEEVLMVWYKQIEQVLIESEQMRKEAGDSGPLTELEHWKRMSAKFNYIIEQIKGPSCKAVINVLNVAHSKLLKNWRDLDARITDTANESKDNVRYLYTLEKVCQPLYNHDLVSMAHGIQNLINAIRMIHGVSRYYNTSERMTSLFIKVTNQMVTACKAYITDGGLNHVWDQETPVVLKKIQDCIFLFKEYQASFHKTRKLISESSGEKSFEVSEMYIFGKFEAFCKRLEKITEMITVVQTYSTLSNSTIEGIDIMAIKFRNIYQGVKKKQYDILDPRRTEFDTDFLDFMTKINGLEVQIQAFMNSSFGKILSSQQALQLLQRFQKLNIPCLGLEINHTIERILQYYVAELDATKKLYHSQKDDPPLARNMPPIAGKILWVRQLYRRISEPINYFFKNSDILSSPDGKAVIRQYNKISYVLVEFEVVYHTAWIREISQLHYALQATLFVRHPETGKLLVNFDPKILEVVRETKCMIKMKLDVPEQAKRLLKLESKLKADKLYLQGLLQYYDELCQEVPSVFVNLMTPKMKKVESVLRQGLTVLTWSSLTLESFFQEVELVLDMFNQLLKKISDLCEMHIDTVLKEIAKTVLISLPESGATKVEDMLTLNETYTKEWADILNHKSKHVEEAVRELISIFEQIYEVKYTGKVGKQSEQRKHVVFGSETGEGENNDYEANIVNEFDTHDKEDEFKKECKEVFAFFSHQLLDSLQKATRLSLDTMKRRIFVASLYGRKQSEDIISFIKSEVHLAIPNVVMIPSLDDIQQAINRMIQLTLEVSRGVAHWGQQQIRPIKSVIPSPTTTDVTHQNTGKLLKKEERSFEEAIPARKLKNFYPGVAEHKDISKLVLLLSSSVNSLRKAAHEALQDFQKYKTLWTEDRDVKVKEFLANNPSLTEIRSEILHYATFEQEIDELKPIIVVGALELHTEPMKLALSIEAKAWKMLLCRYLNEEYKKKMSYMIAFINEYLKKLSRPIRDLDDVRFAMEALSCIRDNEIQMDMTLGPIEEAYAILNRFEVEVTKEESEAVDTLRYSFNKLQSKAVSVQEDLVQVQPKFKSNLLESVEVFREDVINFAEAYELEGPMVPNIPPQEASNRLQIFQASFDDLWRKFVTYSSGEQLFGLPVTDYEVLHKTRKELNLLQKLYGLYDTVMSSISGYYEILWGDVDIEKINAELLEFQNRCRKLPKGLKDWQAFLDLKKRIDDFSESCPLLEMMTNKAMKQRHWDRISELTGTPFDVESDSFCLRNIMEAPLLKHKDDIEDICISAIKEKDIEAKLTQVIENWTNQNLSFAAFKGKGELLLKGTESGEIITLMEDSLMVLGSLLSNRYNAPFKKNIQNWVYKLSTSSDIIEEWLVVQNLWVYLEAVFVGGDIAKQLPQEAKRFQNIDKSWIKIMQRAHENPNVINCCVGDETMGQLLPHLHEQLEVCQKSLTGYLEKKRLLFPRFFFVSDPVLLEILGQASDSHTIQPHLPAVSDNINEVTFHAKDYDRIMAVISREGEKIVLDNSVMAKGPVEIWLLDLLKMQMSSLHNIIRSAFYQISDSGFQLLPFLSHFPAQVGLLGIQMLWTHDSEEALRNAKDDRKIMQVTNQKFLDILNTLISQTTHDLSKFDRVKFETLITIHVHQRDIFDDLVKMHIKSPTDFEWLKQSRFYFKEDLDQTVVSITDVDFIYQNEFLGCTDRLVITPLTDRCYITLAQALGMNMGGAPAGPAGTGKTETTKDMGRCLGKYVVVFNCSDQMDFRGLGRIFKGLAQSGSWGCFDEFNRIELPVLSVAAQQIYIVLTARKERKKQFIFSDGDCVDLNPEFGIFLTMNPGYAGRQELPENLKIQFRTVAMMVPDRQIIMRVKLASCGFLENVILAQKFYVLYKLCEEQLTKQVHYDFGLRNILSVLRTLGSQKRARPEDSELSIVMRGLRDMNLSKLVDEDEPLFLSLINDLFPGLQLDSNTYAELQNAVAHQVQIEGLINHPPWNLKLVQLYETSLVRHGLMTLGPSGSGKTTVITILMKAQTECGRPHREMRMNPKAITAPQMFGRLDTATNDWTDGIFSTLWRKTLKAKKGENIFLILDGPVDAIWIENLNSVLDDNKTLTLANGDRIPMAPSCKLLFEVHNIENASPATVSRMGMVYISSSALSWRPILQAWLKKRTAQEAAVFLTLYEKVFEDTYTYMKLNLNPKMQLLECNYIVQSLNLLEGLIPSKEEGGVSCVEHLHKLFVFGLMWSLGALLELESREKLEAFLRQHESKLDLPEIPKGSNQTMYEFYVTDYGDWEHWNKKLQPYYYPTDSIPEYSSILVPNVDNIRTNFLIDTIAKQHKAVLLTGEQGTAKTVMVKAYLKKYDPEVQLSKSLNFSSATEPMMFQRTIESYVDKRIGSTYGPPGGRKMTVFIDDINMPVINEWGDQVIPH

SEQ ID NO: 3836 - protein, 2540 aa, Artificial Sequence
  Synthetic polypeptide
MMKLYIDNAAPDKLKGLCIFFVRCRNDVAINVKTIQEEALFTVLDASKGLLNGIRDMLANIFLPAVLATNNWGALNQSKQGESEKHIFTETINRYLSFLDGARISIEGTVKLKTIDNVNFSKLHTFEEVTAAASNSETVHQLEEVLMVWYKQIEQVLIESEQMRKEAGDSGPLTELEHWKRMSAKFNYIIEQIKGPSCKAVINVLNVAHSKLLKNWRDLDARITDTANESKDNVRYLYTLEKVCQPLYNHDLVSMAHGIQNLINAIRMIHGVSRYYNTSERMTSLFIKVTNQMVTACKAYITDGGLNHVWDQETPVVLKKIQDCIFLFKEYQASFHKTRKLISESSGEKSFEVSEMYIFGKFEAFCKRLEKITEMITVVQTYSTLSNSTIEGIDIMAIKFRNIYQGVKKKQYDILDPRRTEFDTDFLDFMTKINGLEVQIQAFMNSSFGKILSSQQALQLLQRFQKLNIPCLGLEINHTIERILQYYVAELDATKKLYHSQKDDPPLARNMPPIAGKILWVRQLYRRISEPINYFFKNSDILSSPDGKAVIRQYNKISYVLVEFEVVYHTAWIREISQLHYALQATLFVRHPETGKLLVNFDPKILEVVRETKCMIKMKLDVPEQAKRLLKLESKLKADKLYLQGLLQYYDELCQEVPSVFVNLMTPKMKKVESVLRQGLTVLTWSSLTLESFFQEVELVLDMFNQLLKKISDLCEMHIDTVLKEIAKTVLISLPESGATKVEDMLTLNETYTKEWADILNHKSKHVEEAVRELISIFEQIYEVKYTGKVGKQSEQRKHVVFGSETGEGENNDYEANIVNEFDTHDKEDEFKKECKEVFAFFSHQLLDSLQKATRLSLDTMKRRIFVASLYGRKQSEDIISFIKSEVHLAIPNVVMIPSLDDIQQAINRMIQLTLEVSRGVAHWGQQQIRPIKSVIPSPTTTDVTHQNTGKLLKKEERSFEEAIPARKLKNFYPGVAEHKDISKLVLLLSSSVNSLRKAAHEALQDFQKYKTLWTEDRDVKVKEFLANNPSLTEIRSEILHYATFEQEIDELKPIIVVGALELHTEPMKLALSIEAKAWKMLLCRYLNEEYKKKMSYMIAFINEYLKKLSRPIRDLDDVRFAMEALSCIRDNEIQMDMTLGPIEEAYAILNRFEVEVTKEESEAVDTLRYSFNKLQSKAVSVQEDLVQVQPKFKSNLLESVEVFREDVINFAEAYELEGPMVPNIPPQEASNRLQIFQASFDDLWRKFVTYSSGEQLFGLPVTDYEVLHKTRKELNLLQKLYGLYDTVMSSISGYYEILWGDVDIEKINAELLEFQNRCRKLPKGLKDWQAFLDLKKRIDDFSESCPLLEMMTNKAMKQRHWDRISELTGTPFDVESDSFCLRNIMEAPLLKHKDDIEDICISAIKEKDIEAKLTQVIENWTNQNLSFAAFKGKGELLLKGTESGEIITLMEDSLMVLGSLLSNRYNAPFKKNIQNWVYKLSTSSDIIEEWLVVQNLWVYLEAVFVGGDIAKQLPQEAKRFQNIDKSWIKIMQRAHENPNVINCCVGDETMGQLLPHLHEQLEVCQKSLTGYLEKKRLLFPRFFFVSDPVLLEILGQASDSHTIQPHLPAVSDNINEVTFHAKDYDRIMAVISREGEKIVLDNSVMAKGPVEIWLLDLLKMQMSSLHNIIRSAFYQISDSGFQLLPFLSHFPAQVGLLGIQMLWTHDSEEALRNAKDDRKIMQVTNQKFLDILNTLISQTTHDLSKFDRVKFETLITIHVHQRDIFDDLVKMHIKSPTDFEWLKQSRFYFKEDLDQTVVSITDVDFIYQNEFLGCTDRLVITPLTDRCYITLAQALGMNMGGAPAGPAGTGKTETTKDMGRCLGKYVVVFNCSDQMDFRGLGRIFKGLAQSGSWGCFDEFNRIELPVLSVAAQQIYIVLTARKERKKQFIFSDGDCVDLNPEFGIFLTMNPGYAGRQELPENLKIQFRTVAMMVPDRQIIMRVKLASCGFLENVILAQKFYVLYKLCEEQLTKQVHYDFGLRNILSVLRTLGSQKRARPEDSELSIVMRGLRDMNLSKLVDEDEPLFLSLINDLFPGLQLDSNTYAELQNAVAHQVQIEGLINHPPWNLKLVQLYETSLVRHGLMTLGPSGSGKTTVITILMKAQTECGRPHREMRMNPKAITAPQMFGRLDTATNDWTDGIFSTLWRKTLKAKKGENIFLILDGPVDAIWIENLNSVLDDNKTLTLANGDRIPMAPSCKLLFEVHNIENASPATVSRMGMVYISSSALSWRPILQAWLKKRTAQEAAVFLTLYEKVFEDTYTYMKLNLNPKMQLLECNYIVQSLNLLEGLIPSKEEGGVSCVEHLHKLFVFGLMWSLGALLELESREKLEAFLRQHESKLDLPEIPKGSNQTMYEFYVTDYGDWEHWNKKLQPYYYPTDSIPEYSSILVPNVDNIRTNFLIDTIAKQHKAVLLTGEQGTAKTVMVKAYLKKYDPEVQLSKSLNFSSATEPMMFQRTIESYVDKRIGSTYGPPGGRKMTVFIDDINMPVINEWGDQVIPH

SEQ ID NO: 3837 - protein, 2504 aa, Artificial Sequence
  Synthetic polypeptide
MMKLYIDNAAPDKLKGLCIFFVRCRNDVAINVKTIQEEALFTVLDASKGLLNGIRDMLANIFLPAVLATNNWGALNQSKQGESEKHIFTETINRYLSFLDGARISIEGTVKLKTIDNVNFSKLHTFEEVTAAASNSETVHQLEEVLMVWYKQIEQVLIESEQMRKEAGDSGPLTELEHWKRMSAKFNYIIEQIKGPSCKAVINVLNVAHSKLLKNWRDLDARITDTANESKDNVRYLYTLEKVCQPLYNHDLVSMAHGIQNLINAIRMIHGVSRYYNTSERMTSLFIKVTNQMVTACKAYITDGGLNHVWDQETPVVLKKIQDCIFLFKEYQASFHKTRKLISESSGEKSFEVSEMYIFGKFEAFCKRLEKITEMITVVQTYSTLSNSTIEGIDIMAIKFRNIYQGVKKKQYDILDPRRTEFDTDFLDFMTKINGLEVQIQAFMNSSFGKILSSQQALQLLQRFQKLNIPCLGLEINHTIERILQYYVAELDATKKLYHSQKDDPPLARNMPPIAGKILWVRQLYRRISEPINYFFKNSDILSSPDGKAVIRQYNKISYVLVEFEVVYHTAWIREISQLHYALQATLFVRHPETGKLLVNFDPKILEVVRETKCMIKMKLDVPEQAKRLLKLESKLKADKLYLQGLLQYYDELCQEVPSVFVNLMTPKMKKVESVLRQGLTVLTWSSLTLESFFQEVELVLDMFNQLLKKISDLCEMHIDTVLKEIAKTVLISLPESGATKVEDMLTLNETYTKEWADILNHKSKHVEEAVRELISIFEQIYEVKYTGKVGKQSEQRKHVVFGSETGEGENNDYEANIVNEFDTHDKEDEFKKECKEVFAFFSHQLLDSLQKATRLSLDTMKRRIFVASLYGRKQSEDIISFIKSEVHLAIPNVVMIPSLDDIQQAINRMIQLTLEVSRGVAHWGQQQIRPIKSVIPSPTTTDVTHQNTGKLLKKEERSFEEAIPARKLKNFYPGVAEHKDISKLVLLLSSSVNSLRKAAHEALQDFQKYKTLWTEDRDVKVKEFLANNPSLTEIRSEILHYATFEQEIDELKPIIVVGALELHTEPMKLALSIEAKAWKMLLCRYLNEEYKKKMSYMIAFINEYLKKLSRPIRDLDDVRFAMEALSCIRDNEIQMDMTLGPIEEAYAILNRFEVEVTKEESEAVDTLRYSFNKLQSKAVSVQEDLVQVQPKFKSNLLESVEVFREDVINFAEAYELEGPMVPNIPPQEASNRLQIFQASFDDLWRKFVTYSSGEQLFGLPVTDYEVLHKTRKELNLLQKLYGLYDTVMSSISGYYEILWGDVDIEKINAELLEFQNRCRKLPKGLKDWQAFLDLKKRIDDFSESCPLLEMMTNKAMKQRHWDRISELTGTPFDVESDSFCLRNIMEAPLLKHKDDIEDICISAIKEKDIEAKLTQVIENWTNQNLSFAAFKGKGELLLKGTESGEIITLMEDSLMVLGSLLSNRYNAPFKKNIQNWVYKLSTSSDIIEEWLVVQNLWVYLEAVFVGGDIAKQLPQEAKRFQNIDKSWIKIMQRAHENPNVINCCVGDETMGQLLPHLHEQLEVCQKSLTGYLEKKRLLFPRFFFVSDPVLLEILGQASDSHTIQPHLPAVSDNINEVTFHAKDYDRIMAVISREGEKIVLDNSVMAKGPVEIWLLDLLKMQMSSLHNIIRSAFYQISDSGFQLLPFLSHFPAQVGLLGIQMLWTHDSEEALRNAKDDRKIMQVTNQKFLDILNTLISQTTHDLSKFDRVKFETLITIHVHQRDIFDDLVKMHIKSPTDFEWLKQSRFYFKEDLDQTVVSITDVDFIYQNEFLGCTDRLVITPLTDRCYITLAQALGMNMGGAPAGPAGTGKTETTKDMGRCLGKYVVVFNCSDQMDFRGLGRIFKGLAQSGSWGCFDEFNRIELPVLSVAAQQIYIVLTARKERKKQFIFSDGDCVDLNPEFGIFLTMNPGYAGRQELPENLKIQFRTVAMMVPDRQVHYDFGLRNILSVLRTLGSQKRARPEDSELSIVMRGLRDMNLSKLVDEDEPLFLSLINDLFPGLQLDSNTYAELQNAVAHQVQIEGLINHPPWNLKLVQLYETSLVRHGLMTLGPSGSGKTTVITILMKAQTECGRPHREMRMNPKAITAPQMFGRLDTATNDWTDGIFSTLWRKTLKAKKGENIFLILDGPVDAIWIENLNSVLDDNKTLTLANGDRIPMAPSCKLLFEVHNIENASPATVSRMGMVYISSSALSWRPILQAWLKKRTAQEAAVFLTLYEKVFEDTYTYMKLNLNPKMQLLECNYIVQSLNLLEGLIPSKEEGGVSCVEHLHKLFVFGLMWSLGALLELESREKLEAFLRQHESKLDLPEIPKGSNQTMYEFYVTDYGDWEHWNKKLQPYYYPTDSIPEYSSILVPNVDNIRTNFLIDTIAKQHKAVLLTGEQGTAKTVMVKAYLKKYDPEVQLSKSLNFSSATEPMMFQRTIESYVDKRIGSTYGPPGGRKMTVFIDDINMPVINEWGDQVIPH

SEQ ID NO: 3838 - protein, 31 aa, Artificial Sequence
  Synthetic polypeptide
MYQVSGQRPSGCDAPYGAPSAAPGPGLFLNL

SEQ ID NO: 3839 - protein, 31 aa, Artificial Sequence; identical to SEQ ID NO: 3838
  Synthetic polypeptide

SEQ ID NO: 3840 - protein, 31 aa, Artificial Sequence; identical to SEQ ID NO: 3838
  Synthetic polypeptide

SEQ ID NO: 3841 - protein, 31 aa, Artificial Sequence; identical to SEQ ID NO: 3838
  Synthetic polypeptide

SEQ ID NO: 3842 - protein, 31 aa, Artificial Sequence; identical to SEQ ID NO: 3838
  Synthetic polypeptide

SEQ ID NO: 3843 - protein, 31 aa, Artificial Sequence; identical to SEQ ID NO: 3838
  Synthetic polypeptide

SEQ ID NO: 3844 - protein, 31 aa, Artificial Sequence; identical to SEQ ID NO: 3838
  Synthetic polypeptide

SEQ ID NO: 3845 - protein, 31 aa, Artificial Sequence; identical to SEQ ID NO: 3838
  Synthetic polypeptide

SEQ ID NO: 3846 - protein, 27 aa, Artificial Sequence
  Synthetic polypeptide
MAGTWLLLLLALGCPALPTAGRCGGHL

SEQ ID NO: 3847 - protein, 27 aa, Artificial Sequence
  Synthetic polypeptide
MAGTWLLLLLALGCPALPTAGRCGGHL

SEQ ID NO: 3848 - protein, 27 aa, Artificial Sequence
  Synthetic polypeptide
MAGTWLLLLLALGCPALPTAGRCGGHL

SEQ ID NO: 3849 - protein, 46 aa, Artificial Sequence
  Synthetic polypeptide
MAGTWLLLLLALGCPALPTGIISILSSFKWECLLTKCPDFQRMLRR

SEQ ID NO: 3850 - protein, 46 aa, Artificial Sequence; identical to SEQ ID NO: 3849
  Synthetic polypeptide

SEQ ID NO: 3851 - protein, 46 aa, Artificial Sequence; identical to SEQ ID NO: 3849
  Synthetic polypeptide

SEQ ID NO: 3852 - protein, 153 aa, Artificial Sequence
  Synthetic polypeptide
MAGTWLLLLLALGCPALPTGVGGTPFPSLAPPIMLLVDGKQQMVVVCLVLDVAPPGLDSPIWFSAGNGSALDAFTYGPSPATDGTWTNLAHLSLPSEELASWEPLVCHTGPGAEGHSRSTQPMHLSGIISILSSFKWECLLTKCPDFQRMLRR

SEQ ID NO: 3853 - protein, 128 aa, Artificial Sequence
  Synthetic polypeptide
MAGTWLLLLLALGCPALPTGPVSFPSSPEAATTGPIWFSAGNGSALDAFTYGPSPATDGTWTNLAHLSLPSEELASWEPLVCHTGPGAEGHSRSTQPMHLSGIISILSSFKWECLLTKCPDFQRMLRR

SEQ ID NO: 3854 - protein, 146 aa, Artificial Sequence
  Synthetic polypeptide
MGPERHLSGAPARMATVVLGGDTMGPERIFPNQTEELGHQGPSEGTGDWSSEEPEEEQEETGSGPAGYSYQPLNQDPEQEEVELAPVGDGDVVADIQDRIQALGLHLPDPPLESEDEDEEGATALNNHSSIPMDPGMYNVQNRRLP

SEQ ID NO: 3855 - protein, 182 aa, Artificial Sequence
  Synthetic polypeptide
MGPERHLSGAPARMATVVLGGDTMGPERIFPNQTEELGHQGPSEGTGDWSSEEPEEEQEETGSGPAGYSYQPLNQDPEQEEVELAPVGDGDVVADIQDRIQALGLHLPDPPLESEDEDEEGATALNNHSSIPMDPARCGGTCLQFQLLRKLTGVPATQGWRIPCAQEFKSPMSYDHTNCTPA

SEQ ID NO: 3856 - protein, 1672 aa, Artificial Sequence
  Synthetic polypeptide
MVGELRYREFRVPLGPGLHAYPDELIRQRVGHDGHPEYQIRWLILRRGDEGDGGSGQVDCKAEHILLWMSKDEIYANCHKMLGEDGQVIGPSQESAGEVGALDKSVLEEMETDVKSLIQRALRQLEECVGTIPPAPLLHTVHVLSAYASIEPLTGVFKDPRVLDLLMHMLSSPDYQIRWSAGRMIQALSSHDAGTRTQILLSLSQQEAIEKHLDFDSRCALLALFAQATLSEHPMSFEGIQLPQVPGRVLFSLVKRYLHVTSLLDQLNDSAAEPGAQNTSAPEELSGERGQLELEFSMAMGTLISELVQAMRWDQASDRPRSSARSPGSIFQPQLADVSPGLPAAQAQPSFRRSRRFRPRSEFASGNTYALYVRDTLQPGMRVRMLDDYEEISAGDEGEFRQSNNGVPPVQVFWESTGRTYWVHWHMLEILGFEEDIEDMVEADEYQGAVASRVLGRALPAWRWRPMTELYAVPYVLPEDEDTEECEHLTLAEWWELLFFIKKLDGPDHQEVLQILQENLDGEILDDEILAELAVPIELAQDLLLTLPQRLNDSALRDLINCHVYKKYGPEALAGNQAYPSLLEAQEDVLLLDAQAQAKDSEDAAKVEAKEPPSQSPNTPLQRLVEGYGPAGKILLDLEQALSSEGTQENKVKPLLLQLQRQPQPFLALMQSLDTPETNRTLHLTVLRILKQLVDFPEALLLPWHEAVDACMACLRSPNTDREVLQELIFFLHRLTSVSRDYAVVLNQLGARDAISKALEKHLGKLELAQELRDMVFKCEKHAHLYRKLITNILGGCIQMVLGQIEDHRRTHQPINIPFFDVFLRYLCQGSSVEVKEDKCWEKVEVSSNPHRASKLTDHNPKTYWESNGSAGSHYITLHMRRGILIRQLTLLVASEDSSYMPARVVVCGGDSTSSLHTELNSVNVMPSASRVILLENLTRFWPIIQIRIKRCQQGGIDTRIRGLEILGPKPTFWPVFREQLCRHTRLFYMVRAQAWSQDMAEDRRSLLHLSSRLNGALRQEQNFADRFLPDDEAAQALGKTCWEALVSPVVQNITSPDEDGISPLGWLLDQYLECQEAVFNPQSRGPAFFSRVRRLTHLLVHVEPCEAPPPVVATPRPKGRNRSHDWSSLATRGLPSSIMRNLTRCWRAVVEKQVNNFLTSSWRDDDFVPRYCEHFNILQNSSSELFGPRAAFLLALQNGCAGALLKLPFLKAAHVSEQFARHIDQQIQGSRIGGAQEMERLAQLQQCLQAVLIFSGLEIATTFEHYYQHYMADRLLGVVSSWLEGAVLEQIGPCFPNRLPQQMLQSLSTSKELQRQFHVYQLQQLDQELLKLEDTEKKIQVGLGASGKEHKSEKEEEAGAAAVVDVAEGEEEEEENEDLYYEGAMPEVSVLVLSRHSWPVASICHTLNPRTCLPSYLRGTLNRYSNFYNKSQSHPALERGSQRRLQWTWLGWAELQFGNQTLHVSTVQMWLLLYLNDLKAVSVESLLAFSGLSADMLNQAIGPLTSSRGPLDLHEQKDIPGGVLKIRDGSKEPRSRWDIVRLIPPQTYLQAEGEDGQNLEKRRNLLNCLIVRILKAHGDEGLHIDQLVCLVLEAWQKGPCPPRGLVSSLGKGSACSSTDVLSCILHLLGKGTLRRHDDRPQAGDPSPTWPLTRWFVTWADYRAGFNSPRLW

SEQ ID NO: 3857 - protein, 1756 aa, Artificial Sequence
  Synthetic polypeptide
MSRGFWLAEPLAGTGPHPAPVAADSRGCSSVPRRHAPSRLSVSTPSRGPGARMVGELRYREFRVPLGPGLHAYPDELIRQRVGHDGHPEYQIRWLILRRGDEGDGGSGQVDCKAEHILLWMSKDEIYANCHKMLGEDGQVIGPSQESAGEVGALDKSVLEEMETDVKSLIQRALRQLEECVGTIPPAPLLHTVHVLSAYASIEPLTGVFKDPRVLDLLMHMLSSPDYQIRWSAGRMIQALSSHDAGEGQCGEEGKAGEGLGRLRDSQDTVAGASDLIRTRTQILLSLSQQEAIEKHLDFDSRCALLALFAQATLSEHPMSFEGIQLPQVPGRVLFSLVKRYLHVTSLLDQLNDSAAEPGAQNTSAPEELSGERGQLELEFSMAMGTLISELVQAMRWDQASDRPRSSARSPGSIFQPQLADVSPGLPAAQAQPSFRRSRRFRPRSEFASGNTYALYVRDTLQPGMRVRMLDDYEEISAGDEGEFRQSNNGVPPVQVFWESTGRTYWVHWHMLEILGFEEDIEDMVEADEYQGAVASRVLGRALPAWRWRPMTELYAVPYVLPEDEDTEECEHLTLAEWWELLFFIKKLDGPDHQEVLQILQENLDGEILDDEILAELAVPIELAQDLLLTLPQRLNDSALRDLINCHVYKKYGPEALAGNQAYPSLLEAQEDVLLLDAQAQAKDSEDAAKVEAKEPPSQSPNTPLQRLVEGYGPAGKILLDLEQALSSEGTQENKVKPLLLQLQRQPQPFLALMQSLDTPETNRTLHLTVLRILKQLVDFPEALLLPWHEAVDACMACLRSPNTDREVLQELIFFLHRLTSVSRDYAVVLNQLGARDAISKALEKHLGKLELAQELRDMVFKCEKHAHLYRKLITNILGGCIQMVLGQIEDHRRTHQPINIPFFDVFLRYLCQGSSVEVKEDKCWEKVEVSSNPHRASKLTDHNPKTYWESNGSAGSHYITLHMRRGILIRQLTLLVASEDSSYMPARVVVCGGDSTSSLHTELNSVNVMPSASRVILLENLTRFWPIIQIRIKRCQQGGIDTRIRGLEILGPKPTFWPVFREQLCRHTRLFYMVRAQAWSQDMAEDRRSLLHLSSRLNGALRQEQNFADRFLPDDEAAQALGKTCWEALVSPVVQNITSPDEDGISPLGWLLDQYLECQEAVFNPQSRGPAFFSRVRRLTHLLVHVEPCEAPPPVVATPRPKGRNRSHDWSSLATRGLPSSIMRNLTRCWRAVVEKQVNNFLTSSWRDDDFVPRYCEHFNILQNSSSELFGPRAAFLLALQNGCAGALLKLPFLKAAHVSEQFARHIDQQIQGSRIGGAQEMERLAQLQQCLQAVLIFSGLEIATTFEHYYQHYMADRLLGVVSSWLEGAVLEQIGPCFPNRLPQQMLQSLSTSKELQRQFHVYQLQQLDQELLKLEDTEKKIQVGLGASGKEHKSEKEEEAGAAAVVDVAEGEEEEEENEDLYYEGAMPEVSVLVLSRHSWPVASICHTLNPRTCLPSYLRGTLNRYSNFYNKSQSHPALERGSQRRLQWTWLGWAELQFGNQTLHVSTVQMWLLLYLNDLKAVSVESLLAFSGLSADMLNQAIGPLTSSRGPLDLHEQKDIPGGVLKIRDGSKEPRSRWDIVRLIPPQTYLQAEGEDGQNLEKRRNLLNCLIVRILKAHGDEGLHIDQLVCLVLEAWQKGPCPPRGLVSSLGKGSACSSTDVLSCILHLLGKGTLRRHDDRPQAGDPSPTWPLTRWFVTWADYRAGFNSPRLW

SEQ ID NO: 3858 - protein, 397 aa, Artificial Sequence
  Synthetic polypeptide
MTTSHQPQDRYKAVWLIFFMLGLGTLLPWNFFMTATQYFTNRLDMSQNVSLVTAELSKDAQASAAPAAPLPERNSLSAIFNNVMTLCAMLPLLLFTYLNSFLHQRIPQSVRILGSLVAILLVFLITAILVKVQLDALPFFVITMIKIVLINSFGAILQGSLFGLAGLLPASYTAPIMSGQGLAGFFASVAMICAIASGSELSESAFGYFITACAVIILTIICYLGLPRLEFYRYYQQLKLEGPGEQETKLDLISKGEEPRAGKEESGVSVSNSQPTNESHSIKAILKNISVLAFSVCFIFTITIGMFPAVTVEVKSSIAGSSTWERYFIPVSCFLTFNIFDWLGRSLTAVFMWVLAGALKQEIRDTRIRRGETKLSLFSDDMVVPIKHQNFYSQIKN

SEQ ID NO: 3859 - protein, 397 aa, Artificial Sequence; identical to SEQ ID NO: 3858
  Synthetic polypeptide

SEQ ID NO: 3860 - protein, 397 aa, Artificial Sequence; identical to SEQ ID NO: 3858
  Synthetic polypeptide

SEQ ID NO: 3861 - protein, 397 aa, Artificial Sequence; identical to SEQ ID NO: 3858
  Synthetic polypeptide

SEQ ID NO: 3862 - protein, 397 aa, Artificial Sequence; identical to SEQ ID NO: 3858
  Synthetic polypeptide

SEQ ID NO: 3863 - protein, 397 aa, Artificial Sequence; identical to SEQ ID NO: 3858
  Synthetic polypeptide

SEQ ID NO: 3864 - protein, 397 aa, Artificial Sequence; identical to SEQ ID NO: 3858
  Synthetic polypeptide

SEQ ID NO: 3865 - protein, 397 aa, Artificial Sequence; identical to SEQ ID NO: 3858
  Synthetic polypeptide

SEQ ID NO: 3866 - protein, 397 aa, Artificial Sequence; identical to SEQ ID NO: 3858
  Synthetic polypeptide

SEQ ID NO: 3867 - protein, 476 aa, Artificial Sequence
  Synthetic polypeptide
MRRERTRGPQAWEFPSPTKSGCSLQSLSRDLRELREGEKPEDQAETEESWQGLARKTPGKACAPEGGSCQPGKTENTITMTTSHQPQDRYKAVWLIFFMLGLGTLLPWNFFMTATQYFTNRLDMSQNVSLVTAELSKDAQASAAPAAPLPERNSLSAIFNNVMTLCAMLPLLLFTYLNSFLHQRIPQSVRILGSLVAILLVFLITAILVKVQLDALPFFVITMIKIVLINSFGAILQGSLFGLAGLLPASYTAPIMSGQGLAGFFASVAMICAIASGSELSESAFGYFITACAVIILTIICYLGLPRLEFYRYYQQLKLEGPGEQETKLDLISKGEEPRAGKEESGVSVSNSQPTNESHSIKAILKNISVLAFSVCFIFTITIGMFPAVTVEVKSSIAGSSTWERYFIPVSCFLTFNIFDWLGRSLTAVFMWVLAGALKQEIRDTRIRRGETKLSLFSDDMVVPIKHQNFYSQIKN

SEQ ID NO: 3868 - protein, 411 aa, Artificial Sequence
  Synthetic polypeptide
MVPPKLHVLFCLCGCLAVVYPFDWQYINPVAHMKSSAWVNKIQVLMAAASFGQTKIPRGNGPYSVGCTDLMFDHTNKGTFLRLYYPSQDNDRLDTLWIPNKEYFWGLSKFLGTHWLMGNILRLLFGSMTTPANWNSPLRPGEKYPLVVFSHGLGAFRTLYSAIGIDLASHGFIVAAVEHRDRSASATYYFKDQSAAEIGDKSWLYLRTLKQEEETHIRNEQVRQRAKECSQALSLILDIDHGKPVKNALDLKFDMEQLKDSIDREKIAVIGHSFGGATVIQTLSEDQRFRCGIALDAWMFPLGDEVYSRIPQPLFFINSEYFQYPANIIKMKKCYSPDKERKMITIRGSVHQNFADFTFATGKIIGHMLKLKGDIDSNVAIDLSNKASLAFLQKHLELCGGAEAERKILSG

SEQ ID NO: 3869 - protein, 411 aa, Artificial Sequence; identical to SEQ ID NO: 3868
  Synthetic polypeptide

SEQ ID NO: 3870 - protein, 76 aa, Artificial Sequence
  Synthetic polypeptide
MKSPRRTTLCLMFIVIYSSKAALNWNYESTIHPLSLHEHEPAGEEALRQKRAVPRPSLLFSLLPLLPRYIPYFTQQ

SEQ ID NO: 3871 - protein, 76 aa, Artificial Sequence; identical to SEQ ID NO: 3870
  Synthetic polypeptide

SEQ ID NO: 3872 - protein, 76 aa, Artificial Sequence; identical to SEQ ID NO: 3870
  Synthetic polypeptide

SEQ ID NO: 3873 - protein, 76 aa, Artificial Sequence; identical to SEQ ID NO: 3870
  Synthetic polypeptide

SEQ ID NO: 3874 - protein, 3416 aa, Artificial Sequence
  Synthetic polypeptide
MTAWLISLMSIEVLLLAVRHLSLHIEPEEGSLAGGTWITVIFDGLELGVLYPNNGSQLEIHLVNVNMVVPALRSVPCDVFPVFLDLPVVTCRTRSVLSEAHEGLYFLEAYFGGQLVSSPNPGPRDSCTFKFSKAQTPIVHQVYPPSGVPGKLIHVYGWIITGRLETFDFDAEYIDSPVILEAQGDKWVTPCSLINRQMGSCYPIQEDHGLGTLQCHVEGDYIGSQNVSFSVFNKGKSMVHKKAWLISAKQDLFLYQTHSEILSVFPETGSLGGRTNITITGDFFDNSAQVTIAGIPCDIRHVSPRKIECTTRAPGKDVRLTTPQPGNRGLLFEVGDAVEGLELTEATPGYRWQIVPNASSPFGFWSQEGQPFRARLSGFFVAPETNNYTFWIQADSQASLHFSWSEEPRTKVKVASISVGTADWFDSWEQNRDEGTWQQKTPKLELLGGAMYYLEAEHHGIAPSRGMRIGVQIHNTWLNPDVVTTYLREKHQIRVRAQRLPEVQVLNVSGRGNFFLTWDNVSSQPIPANATAHLIQTTIEELLAVKCKLEPLWSNILLRLGFERGPEVSNSDGDLTSGTEPFCGRFSLRQPRHLVLTPPAAQKGYRLDQYTHLCLAYKGHMNKILKMIVSFTIGFQNMVKNTTCDWSLTRTSPESWQFDCTDLWETCVRCFGDLQPPPANSPVLVHQINLLPLAQETGLFYVDEIIIADTNVTVSQADSGTARPGGNLVESVSVVGSPPVYSVTSWLAGCGTELPLITARSVPTEGTEEGSGLVLVTTQRRQRTSPPLGGHFRIQLPNTVISDVPVQISAHHLHQLLQNNADDFTSRYLNASDFTVKEDLYTCYEHVWTLSWSTQIGDLPNFIRVSDENLTGVNPAAATRVVYDGGVFLGPIFGDMLATANQHTQVVVRVNDVPAHCPGSCSFQYLQGSTPCVHSVWYSIDGDINLMIYITGTGFSGDSQFLQVTVNKTSCKVIFSNQTNVVCQTDLLPVGMHRILMLVRPSGLAISATGEDLFLNVKPRLDMVEPSRAADIGGLWATIRGSSLEGVSLILFGSYSCAINVATSNSSRIQCKVPPRGKDGRIVNVTVIRGDYSAVLPRAFTYVSSLNPVIVTLSRNISNIAGGETLVIGVARLMNYTDLDVEVHVQDALAPVHTQSAWGLEVALPPLPAGLHRISVSINGVSIHSQGVDLHIQYLTEVFSIEPCCGSLLGGTILSISGIGFSRDPALVWVLVGNRSCDIVNLTEASIWCETLPAPQIPDAGAPTVPAAVEVWAGNRFFARGPSPSLVGKGFTFMYEAAATPVVTAMQGEITNSSLSLHVGGSNLSNSVILLGNLNCDVETQSFQGNVSLSGCSIPLHSLEAGIYPLQVRQKQMGFANMSVVLQQFAVMPRIMAIFPSQGSACGGTILTVRGLLLNSRRRSVRVDLSGPFTCVILSLGDHTILCQVSLEGDPLPGASFSLNVTVLVNGLTSECQGNCTLFIREEASPVMDALSTNTSGSLTTVLIRGQRLATTADEPMVFVDDQLPCNVTFFNASHVVCQTRDLAPGPHYLSVFYTRNGYACSGNVSRHFYIMPQVFHYFPKNFSLHGGSLLTIEGTGLRGQNTTSVYIDQQTCLTVNIGAELIRCIVPTGNGSVALEIEVDGLWYHIGVIGYNKAFTPELISISQSDDILTFAVAQISGAANIDIFIGMSPCVGVSGNHTVLQCVVPSLPAGEYHVRGYDCIRGWASSALVFTSRVIITAVTENFGCLGGRLVHVFGAGFSPGNVSAAVCGAPCRVLANATVSAFSCLVLPLDVSLAFLCGLKREEDSCEAARHTYVQCDLTVAMATEQLLESWPYLYICEESSQCLFVPDHWAESMFPSFSGLFISPKLERDEVLIYNSSCNITMETEAEMECETPNQPITVKITEIRKRWGQNTQGNFSLQFCRRWSRTHSWFPERLPQDGDNVTVENGQLLLLDTNTSILNLLHIKGGKLIFMAPGPIELRAHAILVSDGGELRIGSEDKPFQGRAQITLYGSSYSTPFFPYGVKFLAVRNGTLSLHGSLPEVIVTCLRATAHALDTVLALEDAVDWNPGDEVVIISGTGVKGAKPMEEIVTVETVQDTDLYLKSPLRYSHNFTENWVAGEHHILKATVALLSRSITIQGNLTNEREKLLVSCQEANAPEGNLQHCLYSMSEKMLGSRDMGARVIVQSFPEEPSQVQLKGVQFQVLGQAFHKHLSSLTLVGAMRESFIQGCTVRNSFSRGLSMCGTLGLKVDSNVFYNILGHALLVGTCTEMRYISWEAIHGRKDDWSGHGNIIRNNVIIQVSGAEGLSNPEMLTPSGIYICSPTNVIEGNRVCGAGYGYFFHLMTNQTSQAPLLSFTQNIAHSCTRYGLFVYPKFQPPWDNVTGTTLFQSFTVWESAGGAQIFRSSNLRLKNFKVYSCRDFGIDVLESDANTSVTDSLLLGHFAHKGSLCMSSGIKTPKRWELMVSNTTFVNFDLINCVAIRTCSDCSQGQGGFTVKTSQLKFTNSSNLVAFPFPHAAILEDLDGSLSGKNRSHILASMETLSASCLVNSSFGRVVHGSACGGGVLFHRMSIGLANTPEVSYDLTMTDSRNKTTTVNYVRDTLSNPRGWMALLLDQETYSLQSENLWINRSLQYSATFDNFAPGNYLLLVHTDLPPYPDILLRCGSRVGLSFPFLPSPGQNQGCDWFFNSQLRQLTYLVSGEGQVQVILRVKEGMPPTISASTSAPESALKWSLPETWQGVEEGWGGYNNTIPGPGDDVLILPNRTVLVDTDLPFFKGLYVMGTLDFPVDRSNVLSVACMVIAGGELKVGTLENPLEKEQKLLILLRASEGVFCDRMNGIHIDPGTIGVYGKVHLYSAYPKNSWTHLGADIASGNERIIVEDAVDWRPHDKIVLSSSSYEPHEAEVLTVKEVKGHHVRIYERLKHRHIGSVHVTEDGRHIRLAAEVGLLTRNIQIQPDVSCRGRLFVGSFRKSSREEFSGVLQLLNVEIQNFGSPLYSSVEFSNVSAGSWIISSTLHQSCGGGIHAAASHGVLLNDNIVFGTAGHGIDLEGQAYTVTNNLVVLMTQPAWSTIWVAGIKVNQVKDINLHGNVVAGSERLGFHIRGHKCSSCELLWSDNVAHSSLHGLHLYKESGLDNCTRISGFLAFKNFDYGAMLHVENSVEIENITLVDNTIGLLAVVYVFSAPQNSVKKVQIVLRNSVIVATSSSFDCIQDKVKPHSANLTSTDRAPSNPRGGRIGILWPVFTSEPNQWPQEPWHKVRNDHSISGIMKLQDVTFSSFVKSCYSDDLDVCILPNAENSGIMHPITAERTRMLKIKDKNKFYFPSLQPRKDLGKVVCPELDCASPRKYLFKDLDGRALGLPPPVSVFPKTEAEWTASFFNAGPRLKYHQMLMTSNLYPQPRLDPEIWSSIAN

SEQ ID NO: 3875 - protein, 3416 aa, Artificial Sequence; identical to SEQ ID NO: 3874
  Synthetic polypeptide

SEQ ID NO: 3876 - protein, 369 aa, Artificial Sequence
  Synthetic polypeptide
MFHCIPLWRCNRHVESIDKRHCSLVYVPEEIYRYARSLEELLLDANQLRELPEQFFQLVKLRKLGLSDNEIQRLPPEIANFMQLVELDVSRNEIPEIPESISFCKALQVADFSGNPLTRLPESFPELQNLTCLSVNDISLQSLPENIGNLYNLASLELRENLLTYLPDSLTQLRRLEELDLGNNEIYNLPESIGALLHLKDLWLDGNQLSELPQEIGNLKNLLCLDVSENRLERLPEEISGLTSLTDLVISQNLLETIPDGIGKLKKLSILKVDQNRLTQLPEAVGECESLTELVLTENQLLTLPKSIGKLKKLSNLNADRNKLVSLPKEIGGCCSLTVFCVRDNRLTRIPAEVSQATELHVLDVAGNR

SEQ ID NO: 3877 - protein, 263 aa, Artificial Sequence
  Synthetic polypeptide
MSRSRQPPLVTGISPNEGIPWTKVTIRGENLGTGPTDLIGLTICGHNCLLTAEWMSASKIVCRVGQAKNDKGDIIVTTKSGGRGTSTVSFKLLKPEKIGILDQSAVWVDEMNYYDMRTDRNKGIPPLSLRPANPLGIEIEKSKFSQKDLEMLFHGMSADFTSENFSAAWYLIENHSNTSFEQLKMAVTNLKRQANKKSEGSLAYVKGGLSTFFEAQDALSAIHQKLEADGTEKVEGSMTQKLENVLNSALDDQPHCLLQGHQR

SEQ ID NO: 3878 - protein, 2044 aa, Artificial Sequence
  Synthetic polypeptide
MTDKSIVILSLMVFHSSFINGKTCRRQLVEEWHPQPSSYVVNWTLTENICLDFYRDCWFLGVNTKIDTSGNQAVPQICPLQIQLGDILVISSEPSLQFPEINLMNVSETSFVGCVQNTTTEDQLLFGCRLKGMHTVNSKWLSVGTHYFITVMASGPSPCPLGLRLNVTVKQQFCQESLSSEFCSGHGKCLSEAWSKTYSCHCQPPFSGKYCQELDACSFKPCKNNGSCINKRENWDEQAYECVCHPPFTGKNCSEIIGQCQPHVCFHGNCSNITSNSFICECDEQFSGPFCEVSAKPCVSLLFWKRGICPNSSSAYTYECPKGSSSQNGETDVSEFSLVPCQNGTDCIKISNDVMCICSPIFTDLLCKSIQTSCESFPLRNNATCKKCEKDYPCSCISGFTEKNCEKAIDHCKLLSINCLNEEWCFNIIGRFKYVCIPGCTKNPCWFLKNVYLIHQHLCYCGVTFHGICQDKGPAQFEYVWQLGFAGSEGEKCQGVIDAYFFLAANCTEDATYVNDPEDNNSSCWFPHEGTKEICANGCSCLSEEDSQEYRYLCFLRWAGNMYLENTTDDQENECQHEAVCKDEINRPRCSCSLSYIGRLCVVNVDYCLGNHSISVHGLCLALSHNCNCSGLQRYERNICEIDTEDCKSASCKNGTTSTHLRGYFFRKCVPGFKGTQCEIDIDECASHPCKNGATCIDQPGNYFCQCVPPFKVVDGFSCLCNPGYVGIRCEQDIDDCILNACEHNSTCKDLHLSYQCVCLSDWEGNFCEQESNECKMNPCKNNSTCTDLYKSYRCECTSGWTGQNCSEEINECDSDPCMNGGLCHESTIPGQFVCLCPPLYTGQFCHQRYNLCDLLHNPCRNNSTCLALVDANQHCICREEFEGKNCEIDVKDCLFLSCQDYGDCEDMVNNFRCICRPGFSGSLCEIEINECSSEPCKNNGTCVDLTNRFFCNCEPEYHGPFCELDVNKCKISPCLDEENCVYRTDGYNCLCAPGYTGINCEINLDECLSEPCLHDGVCIDGINHYTCDCKSGFFGTHCETNANDCLSNPCLHGRCTELINEYPCSCDADGTSTQCKIKINDCTSIPCMNEGFCQKSAHGFTCICPRGYTGAYCEKSIDNCAEPELNSVICLNGGICVDGPGHTFDCRCLPGFSGQFCEININECSSSPCLHGADCEDHINGYVCKCQPGWSGHHCENELECIPNSCVHELCMENEPGSTCLCTPGFMTCSIGLLCGDEIRRITCLTPIFQRTDPISTQTYTIPPSETLVSSFPSIKATRIPAIMDTYPVDQGPKQTGIVKHDILPTTGLATLRISTPLESYLLQELIVTRELSAKHSLLSSADVSSSRFLNFGIRDPAQIVQDKTSVSHMPIRTSAATLGFFFPDRRARTPFIMSSLMSDFIFPTQSLLFENCQTVALSATPTTSVIRSIPGADIELNRQSLLSRGFLLIAASISATPVVSRGAQEDIEEYSADSLISRREHWRLLSPSMSPIFPAKVIISKQVTILNSSALHRFSTKAFNPSEYQAITEASSNQRLTNIKSQAADSLRELSQTCATCSMTEIKSSREFSDQVLHSKQSHFYETFWMNSAILASWYALMGAQTITSGHSFSSATEITPSVAFTEVPSLFPSKKSAKRTILSSSLEESITLSSNLDVNLCLDKTCLSIVPSQTISSDLMNSDLTSKMTTDELSVSENILKLLKIRQYGITMGPTEVLNQESLLDMEKSKGSHTLFKLHPSDSSLDFELNLQIYPDVTLKTYSEITHANDFKNNLPPLTGSVPDFSEVTTNVAFYTVSATPALSIQTSSSMSVIRPDWPYFTDYMTSLKKEVKTSSEWSKWELQPSVQYQEFPTASRHLPFTRSLTLSSLESILAPQRLMISDFSCVRYYGDSYLEFQNVALNPQNNISLEFQTFSSYGLLLYVKQDSNLVDGFFIQLFIENGTLKYHFYCPGEAKFKSINTTVRVDNGQKYTLLIRQELDPCNAELTILGRNTQICESINHVLGKPLPKSGSVFIGGFPDLHGKIQARTVPVTLLEFNEQLLNK

SEQ ID NO: 3879 - protein, 2044 aa, Artificial Sequence; identical to SEQ ID NO: 3878
  Synthetic polypeptide

SEQ ID NO: 3880 - protein, 2044 aa, Artificial Sequence; identical to SEQ ID NO: 3878
  Synthetic polypeptide

SEQ ID NO: 3881 - protein, 352 aa, Artificial Sequence
  Synthetic polypeptide
MGKEKTHINIVVIGHVDSGKSTTTGHLIYKCGGIDKRTIEKFEKEAAEMGKGSFKYAWVLDKLKAERERGITIDISLWKFETSKYYVTIIDAPGHRDFIKNMITGTSQADCAVLIVAAGVGEFEAGISKNGQTREHALLAYTLGVKQLIVGVNKMDSTEPPYSQKRYEEIVKEVSTYIKKIGYNPDTVAFVPISGWNGDNMLEPSANMPWFKGWKVTRKDGNASGTTLLEALDCILPPTRPTDKPLRLPLQDVYKIGGIGTVPVGRVETGVLKPGMVVTFAPVNVTTEVKSVEMHHEALSEALPGDNVGFNVKNVSVKDVRRGNVAGDSKNDPPMEAAGFTAQENHLSTRIR

SEQ ID NO: 3882 - protein, 352 aa, Artificial Sequence; identical to SEQ ID NO: 3881
  Synthetic polypeptide

SEQ ID NO: 3883 - protein, 352 aa, Artificial Sequence; identical to SEQ ID NO: 3881
  Synthetic polypeptide

SEQ ID NO: 3884 - protein, 358 aa, Artificial Sequence
  Synthetic polypeptide
MGKEKTHINIVVIGHVDSGKSTTTGHLIYKCGGIDKRTIEKFEKEAAEMGKGSFKYAWVLDKLKAERERGITIDISLWKFETSKYYVTIIDAPGHRDFIKNMITGTSQADCAVLIVAAGVGEFEAGISKNGQTREHALLAYTLGVKQLIVGVNKMDSTEPPYSQKRYEEIVKEVSTYIKKIGYNPDTVAFVPISGWNGDNMLEPSANMPWFKGWKVTRKDGNASGTTLLEALDCILPPTRPTDKPLRLPLQDVYKIGGIGTVPVGRVETGVLKPGMVVTFAPVNVTTEVKSVEMHHEALSEALPGDNVGFNVKNVSVKDVRRGNVAGDSKNDPPMEAAGFTAQADHLSRSSRPAWPTW

SEQ ID NO: 3885 - protein, 358 aa, Artificial Sequence; identical to SEQ ID NO: 3884
  Synthetic polypeptide

SEQ ID NO: 3886 - protein, 358 aa, Artificial Sequence; identical to SEQ ID NO: 3884
  Synthetic polypeptide

SEQ ID NO: 3887 - protein, 14 aa, Artificial Sequence
  Synthetic polypeptide
HFRWWCSVVAVAGQ

SEQ ID NO: 3888 - protein, 40 aa, Artificial Sequence
  Synthetic polypeptide
MHTQDSEVVPVPAWPFSLVVFSCGGCWSVTAKMLRNLLAL

SEQ ID NO: 3889 - protein, 40 aa, Artificial Sequence; identical to SEQ ID NO: 3888
  Synthetic polypeptide

SEQ ID NO: 3890 - protein, 8 aa, Artificial Sequence
  Synthetic polypeptide
MLRNLLAL

SEQ ID NO: 3891 - protein, 8 aa, Artificial Sequence
  Synthetic polypeptide
MLRNLLAL

SEQ ID NO: 3892 - protein, 8 aa, Artificial Sequence
  Synthetic polypeptide
MLRNLLAL

SEQ ID NO: 3893 - protein, 8 aa, Artificial Sequence
  Synthetic polypeptide
MLRNLLAL

SEQ ID NO: 3894 - protein, 8 aa, Artificial Sequence
  Synthetic polypeptide
MLRNLLAL

SEQ ID NO: 3895 - protein, 81 aa, Artificial Sequence
  Synthetic polypeptide
MSAQRLISNRTSQQSASNSDYTWEYEYYEIGPVSFEGLKAHKYSIVIGFWVGLAVFVIFMFFVLTLLTKTGAPHQELPSML

SEQ ID NO: 3896 - protein, 95 aa, Artificial Sequence
  Synthetic polypeptide
MSAQRLISNRTSQQSASNSDYTWEYEYYEIGPVSFEGLKAHKYSIVIGFWVGLAVFVIFMFFVLTLLTKTGAPHQDGLSQQELTWVEKKNFSFLT

SEQ ID NO: 3897 - protein, 229 aa, Artificial Sequence
  Synthetic polypeptide
MIITKAGRRMFPAMRVKISGLDPHQQYYIAMDIVPVDNKRYRYVYHSSKWMVAGNADSPVPPRVYIHPDSPASGETWMRQVISFDKLKLTNNELDDQGHIILHSMHKYQPRVHVIRKDCGDDLSPIKPVPSGEGVKAFSFPETVFTTVTAYQNQQITRLKIDRNPFAKGFRDSGRNRMGLEALVESYAFWRPSLRTLTFEDIPGIPKQDDTLTSAMTVDNHHDNNWKKS

SEQ ID NO: 3898 - protein, 387 aa, Artificial Sequence
  Synthetic polypeptide
MAEKRRGSPCSMLSLKAHAFSVEALIGAEKQQQLQKKRRKLGAEEAAGAVDDGGCSRGGGAGEKGSSEGDEGAALPPPAGATSGPARSGADLERGAAGGCEDGFQQGASPLASPGGSPKGSPARSLARPGTPLPSPQAPRVDLQGAELWKRFHEIGTEMIITKAGRRMFPAMRVKISGLDPHQQYYIAMDIVPVDNKRYRYVYHSSKWMVAGNADSPVPPRVYIHPDSPASGETWMRQVISFDKLKLTNNELDDQGHIILHSMHKYQPRVHVIRKDCGDDLSPIKPVPSGEGVKAFSFPETVFTTVTAYQNQQITRLKIDRNPFAKGFRDSGRNRMGLEALVESYAFWRPSLRTLTFEDIPGIPKQDDTLTSAMTVDNHHDNNWKKS

SEQ ID NO: 3899 - protein, 211 aa, Artificial Sequence
  Synthetic polypeptide
MHWGVGFASSRPCVVDLSWNQSISFFGWWAGSEEPFSFYGDIIAFPLQDYGGIMAGLGSDPWWKKTLYLTGGALLAAAAYLLHELLVIRKQQEIDSKDAIILHQFARPNNGVPSLSPFCLKMETYLRMADLPYQNYFGGKLSAQGKMPWIEYNHEKVSGTEFIIDFLEEKLGVNLNKNLGPHERAISRAVTKMVEEHFYCLPAVNLCFWNK

SEQ ID NO: 3900 - protein, 6 aa, Artificial Sequence
  Synthetic polypeptide
PTSGAP

SEQ ID NO: 3901 - protein, 471 aa, Artificial Sequence
  Synthetic polypeptide
MTSSGPGPRFLLLLPLLLPPAASASDRPRGRDPVNPEKLLVITVATAETEGYLRFLRSAEFFNYTVRTLGLGEEWRGGDVARTVGGGQKVRWLKKEMEKYADREDMIIMFVDSYDVILAGSPTELLKKFVQSGSRLLFSAESFCWPEWGLAEQYPEVGTGKRFLNSGGFIGFATTIHQIVRQWKYKDDDDDQLFYTRLYLDPGLREKLSLNLDHKSRIFQNLNGALDEVVLKFDRNRVRIRNVAYDTLPIVVHGNGPTKLQLNYLGNYVPNGWTPEGGCGFCNQDRRTLPGGQPPPRVFLAVFVEQPTPFLPRFLQRLLLLDYPPDRVTLFLHNNEVFHEPHIADSWPQLQDHFSAVKLVGPEEALSPGEARDMAMDLCRQDPECEFYFSLDADAVLTNLQTLRILIEENRKVIAPMLSRHGKLWSNFWGALSPDEYYARSEDYVELVQRKRVLGDRARLRLKNQKQETKK

SEQ ID NO: 3902 - protein, 25 aa, Artificial Sequence
  Synthetic polypeptide
TSAWTPTLSSPTCRPCVSSLRRTGR

SEQ ID NO: 3903 - protein, 36 aa, Artificial Sequence
  Synthetic polypeptide
DSSVLPPPSTKSCASGSTRMMTTTSCSTHGSTWTQD

SEQ ID NO: 3904 - protein, 107 aa, Artificial Sequence
  Synthetic polypeptide
MSAELNVPIDPSAPACPEPGHKGMDYRDWVRRSYLELVTSNHHSVQALSWRKLYLSRAKLKASSRTSALLSGFAMACWLTPVILTLWEAEVSGSLEIRSSRPAWPTW

SEQ ID NO: 3905 - protein, 107 aa, Artificial Sequence; identical to SEQ ID NO: 3904
  Synthetic polypeptide

SEQ ID NO: 3906 - protein, 107 aa, Artificial Sequence; identical to SEQ ID NO: 3904
  Synthetic polypeptide

SEQ ID NO: 3907 - protein, 107 aa, Artificial Sequence; identical to SEQ ID NO: 3904
  Synthetic polypeptide

SEQ ID NO: 3908 - protein, 107 aa, Artificial Sequence; identical to SEQ ID NO: 3904
  Synthetic polypeptide

SEQ ID NO: 3909 - protein, 107 aa, Artificial Sequence; identical to SEQ ID NO: 3904
  Synthetic polypeptide

SEQ ID NO: 3910 - protein, 107 aa, Artificial Sequence; identical to SEQ ID NO: 3904
  Synthetic polypeptide

SEQ ID NO: 3911 - protein, 267 aa, Artificial Sequence
  Synthetic polypeptide
MAKRSSLYIRIVEGKNLPAKDITGSSDPYCIVKVDNEPIIRTATVWKTLCPFWGEEYQVHLPPTFHAVAFYVMDEDALSRDDVIGKVCLTRDTIASHPKGFSGWAHLTEVDPDEEVQGEIHLRLEVWPGARACRLRCSVLEARDLAPKDRNGTSDPFVRVRYKGRTRETSIVKKSCYPRWNETFEFELQEGAMEALCVEAWDWDLVSRNDFLGKVVIDVQRLRVVQQEEGWFRLQPDQSKSRRHDEPGMVAHACNLSTLGGQGRRIT

SEQ ID NO: 3912 - protein, 267 aa, Artificial Sequence; identical to SEQ ID NO: 3911
  Synthetic polypeptide

SEQ ID NO: 3913 - protein, 195 aa, Artificial Sequence
  Synthetic polypeptide
MDEDALSRDDVIGKVCLTRDTIASHPKGFSGWAHLTEVDPDEEVQGEIHLRLEVWPGARACRLRCSVLEARDLAPKDRNGTSDPFVRVRYKGRTRETSIVKKSCYPRWNETFEFELQEGAMEALCVEAWDWDLVSRNDFLGKVVIDVQRLRVVQQEEGWFRLQPDQSKSRRHDEPGMVAHACNLSTLGGQGRRIT

SEQ ID NO: 3914 - protein, 251 aa, Artificial Sequence
  Synthetic polypeptide
MAKRSSLYIRIVEGKNLPAKDITGSSDPYCIVKVDNEPIIRTATVWKTLCPFWGEEYQVHLPPTFHAVAFYVMDEDALSRDDVIGKVCLTRDTIASHPKGFSGWAHLTEVDPDEEVQGEIHLRLEVWPGARACRLRCSVLEARDLAPKDRNGTSDPFVRVRYKGRTRETSIVKKSCYPRWNETFEFELQEGAMEALCVEAWDWDLVSRNDFLGKVVIDVQRLRVVQQEEGWFRLQPDQSKSRRHDERRRLQ

SEQ ID NO: 3915 - protein, 251 aa, Artificial Sequence; identical to SEQ ID NO: 3914
  Synthetic polypeptide

SEQ ID NO: 3916 - protein, 179 aa, Artificial Sequence
  Synthetic polypeptide
MDEDALSRDDVIGKVCLTRDTIASHPKGFSGWAHLTEVDPDEEVQGEIHLRLEVWPGARACRLRCSVLEARDLAPKDRNGTSDPFVRVRYKGRTRETSIVKKSCYPRWNETFEFELQEGAMEALCVEAWDWDLVSRNDFLGKVVIDVQRLRVVQQEEGWFRLQPDQSKSRRHDERRRLQ

SEQ ID NO: 3917 - protein, 138 aa, Artificial Sequence
  Synthetic polypeptide
MAKRSSLYIRIVEGKNLPAKDITGSSDPYCIVKVDNEPIIRTATVWKTLCPFWGEEYQVHLPPTFHAVAFYVMDEDALSRDDVIGKVCLTRDTIASHPKGRARWLTPVIPALWEAETGGSRGQEIETILANTVKPRLY

SEQ ID NO: 3918 - protein, 138 aa, Artificial Sequence; identical to SEQ ID NO: 3917
  Synthetic polypeptide

SEQ ID NO: 3919 - protein, 66 aa, Artificial Sequence
  Synthetic polypeptide
MDEDALSRDDVIGKVCLTRDTIASHPKGRARWLTPVIPALWEAETGGSRGQEIETILANTVKPRLY

SEQ ID NO: 3920 - protein, 8 aa, Artificial Sequence
  Synthetic polypeptide
PKGPQWHI

SEQ ID NO: 3921 - protein, 267 aa, Artificial Sequence; identical to SEQ ID NO: 3911
  Synthetic polypeptide

SEQ ID NO: 3922 - protein, 267 aa, Artificial Sequence; identical to SEQ ID NO: 3911
  Synthetic polypeptide

SEQ ID NO: 3923 - protein, 195 aa, Artificial Sequence; identical to SEQ ID NO: 3913
  Synthetic polypeptide

SEQ ID NO: 3924 - protein, 195 aa, Artificial Sequence; identical to SEQ ID NO: 3913
  Synthetic polypeptide

SEQ ID NO: 3925 - protein, 248 aa, Artificial Sequence
  Synthetic polypeptide
MAKRSSLYIRIVEGKNLPAKDMTATVWKTLCPFWGEEYQVHLPPTFHAVAFYVMDEDALSRDDVIGKVCLTRDTIASHPKGFSGWAHLTEVDPDEEVQGEIHLRLEVWPGARACRLRCSVLEARDLAPKDRNGTSDPFVRVRYKGRTRETSIVKKSCYPRWNETFEFELQEGAMEALCVEAWDWDLVSRNDFLGKVVIDVQRLRVVQQEEGWFRLQPDQSKSRRHDEPGMVAHACNLSTLGGQGRRIT

SEQ ID NO: 3926 - protein, 251 aa, Artificial Sequence; identical to SEQ ID NO: 3914
  Synthetic polypeptide

SEQ ID NO: 3927 - protein, 251 aa, Artificial Sequence; identical to SEQ ID NO: 3914
  Synthetic polypeptide

SEQ ID NO: 3928 - protein, 179 aa, Artificial Sequence; identical to SEQ ID NO: 3916
  Synthetic polypeptide

SEQ ID NO: 3929 - protein, 179 aa, Artificial Sequence; identical to SEQ ID NO: 3916
  Synthetic polypeptide

SEQ ID NO: 3930 - protein, 8 aa, Artificial Sequence
  Synthetic polypeptide
PKGPQWHI

SEQ ID NO: 3931 - protein, 232 aa, Artificial Sequence
  Synthetic polypeptide
MAKRSSLYIRIVEGKNLPAKDMTATVWKTLCPFWGEEYQVHLPPTFHAVAFYVMDEDALSRDDVIGKVCLTRDTIASHPKGFSGWAHLTEVDPDEEVQGEIHLRLEVWPGARACRLRCSVLEARDLAPKDRNGTSDPFVRVRYKGRTRETSIVKKSCYPRWNETFEFELQEGAMEALCVEAWDWDLVSRNDFLGKVVIDVQRLRVVQQEEGWFRLQPDQSKSRRHDERRRLQ

SEQ ID NO: 3932 - protein, 138 aa, Artificial Sequence; identical to SEQ ID NO: 3917
  Synthetic polypeptide

SEQ ID NO: 3933 - protein, 138 aa, Artificial Sequence; identical to SEQ ID NO: 3917
  Synthetic polypeptide

SEQ ID NO: 3934 - protein, 66 aa, Artificial Sequence; identical to SEQ ID NO: 3919
  Synthetic polypeptide

SEQ ID NO: 3935 - protein, 66 aa, Artificial Sequence; identical to SEQ ID NO: 3919
  Synthetic polypeptide

SEQ ID NO: 3936 - protein, 66 aa, Artificial Sequence; identical to SEQ ID NO: 3919
  Synthetic polypeptide

SEQ ID NO: 3937 - protein, 66 aa, Artificial Sequence; identical to SEQ ID NO: 3919
  Synthetic polypeptide

SEQ ID NO: 3938 - protein, 119 aa, Artificial Sequence
  Synthetic polypeptide
MAKRSSLYIRIVEGKNLPAKDMTATVWKTLCPFWGEEYQVHLPPTFHAVAFYVMDEDALSRDDVIGKVCLTRDTIASHPKGRARWLTPVIPALWEAETGGSRGQEIETILANTVKPRLY

SEQ ID NO: 3939 - protein, 121 aa, Artificial Sequence
  Synthetic polypeptide
MNAPPAFESFLLFEGEKITINKDTKVPKACLFTINKEDHTLGNIIKSQLLKDPQVLFAGYKVPHPLEHKIIIRVQTTPDYSPQEAFTNAITDLISELSLLEERFRFPEASPATLPVQPAEL

SEQ ID NO: 3940 - protein, 121 aa, Artificial Sequence; identical to SEQ ID NO: 3939
  Synthetic polypeptide

SEQ ID NO: 3941 - protein, 121 aa, Artificial Sequence; identical to SEQ ID NO: 3939
  Synthetic polypeptide

SEQ ID NO: 3942 - protein, 225 aa, Artificial Sequence
  Synthetic polypeptide
MAKQKRKVPEVTEKKNKKLKKASAEGPLLGPEAAPSGEGAGSKGEAVLRPGLDAEPELSPEEQRVLERKLKKERKKEERQRLREAGLVAQHPPARRSGAELALDYLCRWAQKHKNWRFQKTRQTWLLLHMYDSDKVPDEHFSTLLAYLEGLQGRARELTVQKAEALMRELDEEGSDPPLPGRAQRIRQDTCAVDPAAMLWGSPAARRGAHVEGNPGPRNRGQAST

SEQ ID NO: 3943 - protein, 225 aa, Artificial Sequence; identical to SEQ ID NO: 3942
  Synthetic polypeptide

SEQ ID NO: 3944 - protein, 225 aa, Artificial Sequence; identical to SEQ ID NO: 3942
  Synthetic polypeptide

SEQ ID NO: 3945 - protein, 225 aa, Artificial Sequence; identical to SEQ ID NO: 3942
  Synthetic polypeptide

SEQ ID NO: 3946 - protein, 115 aa, Artificial Sequence
  Synthetic polypeptide
RGPGGAHCGRIPAPAPSVPAGPDSRVRGRSCAQARAGRRARAVPRGAEGPGKEAEKGTEERGEAASAGGRPCGPAPACQALGGRTGPGLPLQMGPKAQELEVSEDEADVAPAAHV

SEQ ID NO: 3947 - protein, 193 aa, Artificial Sequence
  Synthetic polypeptide
GPQDASTCFPLGEAVLRPGLDAEPELSPEEQRVLERKLKKERKKEERQRLREAGLVAQHPPARRSGAELALDYLCRWAQKHKNWRFQKTRQTWLLLHMYDSDKVPDEHFSTLLAYLEGLQGRARELTVQKAEALMRELDEEGSDPPLPGRAQRIRQDTCAVDPAAMLWGSPAARRGAHVEGNPGPRNRGQAST

SEQ ID NO: 3948 - protein, 135 aa, Artificial Sequence
  Synthetic polypeptide
MLPAQEAAKLYHTNYVRNSRAIGVLWAIFTICFAIVNVVCFIQPYWIGDGVDTPQAGYFGLFHYCIGNGFSRELTCRGSFTDFSTLPSGAFKAASFFIGLSMMLIIACIICFTLFFFCNTATVYKICAWMQLTSA

SEQ ID NO: 3949 - protein, 135 aa, Artificial Sequence; identical to SEQ ID NO: 3948
  Synthetic polypeptide

SEQ ID NO: 3950 - protein, 149 aa, Artificial Sequence
  Synthetic polypeptide
MPGAAAAAAAAAAAMLPAQEAAKLYHTNYVRNSRAIGVLWAIFTICFAIVNVVCFIQPYWIGDGVDTPQAGYFGLFHYCIGNGFSRELTCRGSFTDFSTLPSGAFKAASFFIGLSMMLIIACIICFTLFFFCNTATVYKICAWMQLTSA

SEQ ID NO: 3951 - protein, 149 aa, Artificial Sequence; identical to SEQ ID NO: 3950
  Synthetic polypeptide

SEQ ID NO: 3952 - protein, 55 aa, Artificial Sequence
  Synthetic polypeptide
MAEAATGFLEQLKSCIVWSWTYLWTVWFFIVLFLVYILRVPLKINDNLSTEKNIC

SEQ ID NO: 3953 - protein, 55 aa, Artificial Sequence; identical to SEQ ID NO: 3952
  Synthetic polypeptide

SEQ ID NO: 3954 - protein, 55 aa, Artificial Sequence; identical to SEQ ID NO: 3952
  Synthetic polypeptide

SEQ ID NO: 3955 - protein, 55 aa, Artificial Sequence; identical to SEQ ID NO: 3952
  Synthetic polypeptide

SEQ ID NO: 3956 - protein, 55 aa, Artificial Sequence; identical to SEQ ID NO: 3952
  Synthetic polypeptide

SEQ ID NO: 3957 - protein, 55 aa, Artificial Sequence; identical to SEQ ID NO: 3952
  Synthetic polypeptide

SEQ ID NO: 3958 - protein, 55 aa, Artificial Sequence; identical to SEQ ID NO: 3952
  Synthetic polypeptide

SEQ ID NO: 3959 - protein, 55 aa, Artificial Sequence; identical to SEQ ID NO: 3952
  Synthetic polypeptide

SEQ ID NO: 3960 - protein, 7 aa, Artificial Sequence
  Synthetic polypeptide
MFGTESS

SEQ ID NO: 3961 - protein, 7 aa, Artificial Sequence
  Synthetic polypeptide
MFGTESS

SEQ ID NO: 3962 - protein, 7 aa, Artificial Sequence
  Synthetic polypeptide
MFGTESS

SEQ ID NO: 3963 - protein, 1162 aa, Artificial Sequence
  Synthetic polypeptide
MQRSPLEKASVVSKLFFSWTRPILRKGYRQRLELSDIYQIPSVDSADNLSEKLEREWDRELASKKNPKLINALRRCFFWRFMFYGIFLYLGEVTKAVQPLLLGRIIASYDPDNKEERSIAIYLGIGLCLLFIVRTLLLHPAIFGLHHIGMQMRIAMFSLIYKKTLKLSSRVLDKISIGQLVSLLSNNLNKFDEGLALAHFVWIAPLQVALLMGLIWELLQASAFCGLGFLIVLALFQAGLGRMMMKYRDQRAGKISERLVITSEMIENIQSVKAYCWEEAMEKMIENLRQTELKLTRKAAYVRYFNSSAFFFSGFFVVFLSVLPYALIKGIILRKIFTTISFCIVLRMAVTRQFPWAVQTWYDSLGAINKIQDFLQKQEYKTLEYNLTTTEVVMENVTAFWEEGFGELFEKAKQNNNNRKTSNGDDSLFFSNFSLLGTPVLKDINFKIERGQLLAVAGSTGAGKTSLLMVIMGELEPSEGKIKHSGRISFCSQFSWIMPGTIKENIIFGVSYDEYRYRSVIKACQLEEDISKFAEKDNIVLGEGGITLSGGQRARISLARAVYKDADLYLLDSPFGYLDVLTEKEIFESCVCKLMANKTRILVTSKMEHLKKADKILILHEGSSYFYGTFSELQNLQPDFSSKLMGCDSFDQFSAERRNSILTETLHRFSLEGDAPVSWTETKKQSFKQTGEFGEKRKNSILNPINSIRKFSIVQKTPLQMNGIEEDSDEPLERRLSLVPDSEQGEAILPRISVISTGPTLQARRRQSVLNLMTHSVNQGQNIHRKTTASTRKVSLAPQANLTELDIYSRRLSQETGLEISEEINEEDLKECFFDDMESIPAVTTWNTYLRYITVHKSLIFVLIWCLVIFLAEVAASLVVLWLLGNTPLQDKGNSTHSRNNSYAVIITSTSSYYVFYIYVGVADTLLAMGFFRGLPLVHTLITVSKILHHKMLHSVLQAPMSTLNTLKAGGILNRFSKDIAILDDLLPLTIFDFIQLLLIVIGAIAVVAVLQPYIFVATVPVIVAFIMLRAYFLQTSQQLKQLESEGRSPIFTHLVTSLKGLWTLRAFGRQPYFETLFHKALNLHTANWFLYLSTLRWFQMRIEMIFVIFFIAVTFISILTTGEGEGRVGIILTLAMNIMSTLQWAVNSSIDVDSLKPYLDE

SEQ ID NO: 3964 - protein, 1101 aa, Artificial Sequence
  Synthetic polypeptide
MQRSPLEKASVVSKLFFSWTRPILRKGYRQRLELSDIYQIPSVDSADNLSEKLEREWDRELASKKNPKLINALRRCFFWRFMFYGIFLYLGEVTKAVQPLLLGRIIASYDPDNKEERSIAIYLGIGLCLLFIVRTLLLHPAIFGLHHIGMQMRIAMFSLIYKKTLKLSSRVLDKISIGQLVSLLSNNLNKFDEGLALAHFVWIAPLQVALLMGLIWELLQASAFCGLGFLIVLALFQAGLGRMMMKYRDQRAGKISERLVITSEMIENIQSVKAYCWEEAMEKMIENLRQTELKLTRKAAYVRYFNSSAFFFSGFFVVFLSVLPYALIKGIILRKIFTTISFCIVLRMAVTRQFPWAVQTWYDSLGAINKIQDFLQKQEYKTLEYNLTTTEVVMENVTAFWEETSLLMVIMGELEPSEGKIKHSGRISFCSQFSWIMPGTIKENIIFGVSYDEYRYRSVIKACQLEEDISKFAEKDNIVLGEGGITLSGGQRARISLARAVYKDADLYLLDSPFGYLDVLTEKEIFESCVCKLMANKTRILVTSKMEHLKKADKILILHEGSSYFYGTFSELQNLQPDFSSKLMGCDSFDQFSAERRNSILTETLHRFSLEGDAPVSWTETKKQSFKQTGEFGEKRKNSILNPINSIRKFSIVQKTPLQMNGIEEDSDEPLERRLSLVPDSEQGEAILPRISVISTGPTLQARRRQSVLNLMTHSVNQGQNIHRKTTASTRKVSLAPQANLTELDIYSRRLSQETGLEISEEINEEDLKECFFDDMESIPAVTTWNTYLRYITVHKSLIFVLIWCLVIFLAEVAASLVVLWLLGNTPLQDKGNSTHSRNNSYAVIITSTSSYYVFYIYVGVADTLLAMGFFRGLPLVHTLITVSKILHHKMLHSVLQAPMSTLNTLKAGGILNRFSKDIAILDDLLPLTIFDFIQLLLIVIGAIAVVAVLQPYIFVATVPVIVAFIMLRAYFLQTSQQLKQLESEGRSPIFTHLVTSLKGLWTLRAFGRQPYFETLFHKALNLHTANWFLYLSTLRWFQMRIEMIFVIFFIAVTFISILTTGEGEGRVGIILTLAMNIMSTLQWAVNSSIDVDSLKPYLDE

SEQ ID NO: 3965 - protein, 1132 aa, Artificial Sequence
  Synthetic polypeptide
MQRSPLEKASVVSKLFFSWTRPILRKGYRQRLELSDIYQIPSVDSADNLSEKLEREWDRELASKKNPKLINALRRCFFWRFMFYGIFLYLGEVTKAVQPLLLGRIIASYDPDNKEERSIAIYLGIGLCLLFIVRTLLLHPAIFGLHHIGMQMRIAMFSLIYKKGLALAHFVWIAPLQVALLMGLIWELLQASAFCGLGFLIVLALFQAGLGRMMMKYRDQRAGKISERLVITSEMIENIQSVKAYCWEEAMEKMIENLRQTELKLTRKAAYVRYFNSSAFFFSGFFVVFLSVLPYALIKGIILRKIFTTISFCIVLRMAVTRQFPWAVQTWYDSLGAINKIQDFLQKQEYKTLEYNLTTTEVVMENVTAFWEEGFGELFEKAKQNNNNRKTSNGDDSLFFSNFSLLGTPVLKDINFKIERGQLLAVAGSTGAGKTSLLMVIMGELEPSEGKIKHSGRISFCSQFSWIMPGTIKENIIFGVSYDEYRYRSVIKACQLEEDISKFAEKDNIVLGEGGITLSGGQRARISLARAVYKDADLYLLDSPFGYLDVLTEKEIFESCVCKLMANKTRILVTSKMEHLKKADKILILHEGSSYFYGTFSELQNLQPDFSSKLMGCDSFDQFSAERRNSILTETLHRFSLEGDAPVSWTETKKQSFKQTGEFGEKRKNSILNPINSIRKFSIVQKTPLQMNGIEEDSDEPLERRLSLVPDSEQGEAILPRISVISTGPTLQARRRQSVLNLMTHSVNQGQNIHRKTTASTRKVSLAPQANLTELDIYSRRLSQETGLEISEEINEEDLKECFFDDMESIPAVTTWNTYLRYITVHKSLIFVLIWCLVIFLAEVAASLVVLWLLGNTPLQDKGNSTHSRNNSYAVIITSTSSYYVFYIYVGVADTLLAMGFFRGLPLVHTLITVSKILHHKMLHSVLQAPMSTLNTLKAGGILNRFSKDIAILDDLLPLTIFDFIQLLLIVIGAIAVVAVLQPYIFVATVPVIVAFIMLRAYFLQTSQQLKQLESEGRSPIFTHLVTSLKGLWTLRAFGRQPYFETLFHKALNLHTANWFLYLSTLRWFQMRIEMIFVIFFIAVTFISILTTGEGEGRVGIILTLAMNIMSTLQWAVNSSIDVDSLKPYLDE

SEQ ID NO: 3966 - skipped

SEQ ID NO: 3967 - protein, 34 aa, Artificial Sequence
  Synthetic polypeptide
MRILKRFLACIQLLCVCRLEAAGVYAPVLTKIRE

SEQ ID NO: 3968 - protein, 34 aa, Artificial Sequence; identical to SEQ ID NO: 3967
  Synthetic polypeptide

SEQ ID NO: 3969 - protein, 732 aa, Artificial Sequence
  Synthetic polypeptide
MAGLTLFVGRLPPSARSEQLEELFSQVGPVKQCFVVTEKGSKACRGFGYVTFSMLEDVQRALKEITTFEGCKINVTVAKKKLRNKTKEKGKNENSECPKKEPKAKKAKVADKKARLIIRNLSFKCSEDDLKTVFAQFGAVLEVNIPRKPDGKMRGFGFVQFKNLLEAGKALKGMNMKEIKGRTVAVDWAVAKDKYKDTQSVSAIGEEKSHESKHQESVKKKGREEEDMEEEENDDDDDDDDEEDGVFDDEDEEEENIESKVTKPVQIQKRAVKRPAPAKSSDHSEEDSDLEESDSIDDGEELAQSDTSTEEQEDKAVQVSNKKKRKLPSDVNEGKTVFIRNLSFDSEEEELGELLQQFGELKYVRIVLHPDTEHSKGCAFAQFMTQEAAQKCLLAASPENEAGGLKLDGRQLKVDLAVTRDEAAKLQTTKVKKPTGTRNLYLAREGLIRAGTKAAEGVSAADMAKRERFELLKHQKLKDQNIFVSRTRLCLHNLPKAVDDKQLRKLLLSATSGEKGVRIKECRVMRDLKGVHGNMKGQSLGYAFAEFQEHEHALKALRLINNNPEIFGPLKRPIVEFSLEDRRKLKMKELRIQRSLQKMRSKPATGEPQKGQPEPAKDQQQKAAQHHTEEQSKVPPEQKRKAGSTSWTGFQTKAEVEQVELPDGKKRRKVLALPSHRGPKIRLRDKGKVKPVHPKKPKPQINQWKQEKQQLSSEQEFRDPEWRDWLEPWQRT

SEQ ID NO: 3970 - protein, 591 aa, Artificial Sequence
  Synthetic polypeptide
MAGLTLFVGRLPPSARSEQLEELFSQVGPVKQCFVVTEKGRTVAVDWAVAKDKYKDTQSVSAIGEEKSHESKHQESVKKKGREEEDMEEEENDDDDDDDDEEDGVFDDEDEEEENIESKVTKPVQIQKRAVKRPAPAKSSDHSEEDSDLEESDSIDDGEELAQSDTSTEEQEDKAVQVSNKKKRKLPSDVNEGKTVFIRNLSFDSEEEELGELLQQFGELKYVRIVLHPDTEHSKGCAFAQFMTQEAAQKCLLAASPENEAGGLKLDGRQLKVDLAVTRDEAAKLQTTKVKKPTGTRNLYLAREGLIRAGTKAAEGVSAADMAKRERFELLKHQKLKDQNIFVSRTRLCLHNLPKAVDDKQLRKLLLSATSGEKGVRIKECRVMRDLKGVHGNMKGQSLGYAFAEFQEHEHALKALRLINNNPEIFGPLKRPIVEFSLEDRRKLKMKELRIQRSLQKMRSKPATGEPQKGQPEPAKDQQQKAAQHHTEEQSKVPPEQKRKAGSTSWTGFQTKAEVEQVELPDGKKRRKVLALPSHRGPKIRLRDKGKVKPVHPKKPKPQINQWKQEKQQLSSEQEFRDPEWRDWLEPWQRT

SEQ ID NO: 3971 - protein, 90 aa, Artificial Sequence
  Synthetic polypeptide
MCDKEFMWALKNGDLDEVKDYVAKGEDVNRTLEGGRKPLHYAADCGQLEILEFLLLKGADINAPDKHHITPLLSAVYEGHVSCVKLLLSK

SEQ ID NO: 3972 - protein, 184 aa, Artificial Sequence
  Synthetic polypeptide
MQAQQYQQQRRKFAAAFLAFIFILAAVDTAEAGKKEKPEKKVKKSDCGEWQWSVCVPTSGDCGLGTREGTRTGAECKQTMKTQRCKIPCNWKKQFGAECKYQFQAWGECDLNTALKTRTGSLKRALHNAECQKTVTISKPCGKLTKPKPQAMIVSFLRPLQPCRTVSQLNLFCLCITQSQVMSL

SEQ ID NO: 3973 - protein, 184 aa, Artificial Sequence; identical to SEQ ID NO: 3972
  Synthetic polypeptide

SEQ ID NO: 3974 - protein, 720 aa, Artificial Sequence
  Synthetic polypeptide
MLHHIEEPCSLGAHAAVIVPPTWIIKVKKPQNSLKASNRKKKRTSFKRKASKRGMEQENKGRPFVIKPISSPLMKPLLVFVNPKSGGNQGTKVLQMFMWYLNPRQVFDLSQEGPKDALELYRKVPNLRILACGGDGTVGWILSILDELQLSPQPPVGVLPLGTGNDLARTLNWGGGYTDEPVSKILCQVEDGTVVQLDRWNLHVERNPDLPPEELEDGVCKLPLNVFNNYFSLGFDAHVTLEFHESREANPEKFNSRFRNKMFYAGAAFSDFLQRSSRDLSKHVKVVCDGTDLTPKIQELKFQCIVFLNIPRYCAGTMPWGNPGDHHDFEPQRHDDGYIEVIGFTMASLAALQVGGHGERLHQCREVMLLTYKSIPMQVDGEPCRLAPAMIRISLRNQANMVQKSKRRTSMPLLNDPQSVPDRLRIRVNKISLQDYEGFHYDKEKLREASISDWLRTIAGELVQSFGAIPLGILVVRGDCDLETCRMYIDRLQEDLQSVSSGSQRVHYQDHETSFPRALSAQRLSPRWCFLDATSADRFYRIDRSQEHLHFVMEISQDEIFILDPDMVVSQPAGTPPGMPDLVVEQASGSPVSSEDHAILQAVIAGDLMKLIESYKNGGSLLIQGPDHCSLLHYAAKTGNGEIVKYILDHGPSELLDMADSETGETALHKAACQRNRAVCQLLVDAGASLRKTDSKVSFLPPSEEVAFLPFAFQHDCKAS

SEQ ID NO: 3975 - protein, 1051 aa, Artificial Sequence
  Synthetic polypeptide
MDAAGRGCHLLPLPAARGPARAPAAAAAAAASPPGPCSGAACAPSAAAGAGAMNPSSSAGEEKGATGGSSSSGSGAGSCCLGAEGGADPRGAGSAAAAGAAALDEPAAAGQKEKDEALEEKLRNLTFRKQVSYRKAISRAGLQHLAPAHPLSLPVANGPAKEPRATLDWSENAVNGEHLWLETNVSGDLCYLGEENCQVRFAKSALRRKCAVCKIVVHTACIEQLEKINFRCKPTFREGGSRSPRENFVRHHWVHRRRQEGKCKQCGKGFQQKFSFHSKEIVAISCSWCKQAFHNKVTCFMLHHIEEPCSLGAHAAVIVPPTWIIKVKKPQNSLKASNRKKKRTSFKRKASKRGMEQENKGRPFVIKPISSPLMKPLLVFVNPKSGGNQGTKVLQMFMWYLNPRQVFDLSQEGPKDALELYRKVPNLRILACGGDGTVGWILSILDELQLSPQPPVGVLPLGTGNDLARTLNWGGGYTDEPVSKILCQVEDGTVVQLDRWNLHVERNPDLPPEELEDGVCKLPLNVFNNYFSLGFDAHVTLEFHESREANPEKFNSRFRNKMFYAGAAFSDFLQRSSRDLSKHVKVVCDGTDLTPKIQELKFQCIVFLNIPRYCAGTMPWGNPGDHHDFEPQRHDDGYIEVIGFTMASLAALQVGGHGERLHQCREVMLLTYKSIPMQVDGEPCRLAPAMIRISLRNQANMVQKSKRRTSMPLLNDPQSVPDRLRIRVNKISLQDYEGFHYDKEKLREASISDWLRTIAGELVQSFGAIPLGILVVRGDCDLETCRMYIDRLQEDLQSVSSGSQRVHYQDHETSFPRALSAQRLSPRWCFLDDRSQEHLHFVMEISQDEIFILDPDMVVSQPAGTPPGMPDLVVEQASGISDWWNPALRKRMLSDSGLGMIAPYYEDSDLKDLSHSRVLQSPVSSEDHAILQAVIAGDLMKLIESYKNGGSLLIQGPDHCSLLHYAAKTGNGEIVKYILDHGPSELLDMADSETGETALHKAACQRNRAVCQLLVDAGASLRKTDSKVSFLPPSEEVAFLPFAFQHDCKAS

SEQ ID NO: 3976 - protein, 1064 aa, Artificial Sequence
  Synthetic polypeptide
MDAAGRGCHLLPLPAARGPARAPAAAAAAAASPPGPCSGAACAPSAAAGAGAMNPSSSAGEEKGATGGSSSSGSGAGSCCLGAEGGADPRGAGSAAAAGAAALDEPAAAGQKEKDEALEEKLRNLTFRKQVSYRKAISRAGLQHLAPAHPLSLPVANGPAKEPRATLDWSENAVNGEHLWLETNVSGDLCYLGEENCQVRFAKSALRRKCAVCKIVVHTACIEQLEKINFRCKPTFREGGSRSPRENFVRHHWVHRRRQEGKCKQCGKGFQQKFSFHSKEIVAISCSWCKQAFHNKVTCFMLHHIEEPCSLGAHAAVIVPPTWIIKVKKPQNSLKASNRKKKRTSFKRKASKRGMEQENKGRPFVIKPISSPLMKPLLVFVNPKSGGNQGTKVLQMFMWYLNPRQVFDLSQEGPKDALELYRKVPNLRILACGGDGTVGWILSILDELQLSPQPPVGVLPLGTGNDLARTLNWGGGYTDEPVSKILCQVEDGTVVQLDRWNLHVERNPDLPPEELEDGVCKLPLNVFNNYFSLGFDAHVTLEFHESREANPEKFNSRFRNKMFYAGAAFSDFLQRSSRDLSKHVKVVCDGTDLTPKIQELKFQCIVFLNIPRYCAGTMPWGNPGDHHDFEPQRHDDGYIEVIGFTMASLAALQVGGHGERLHQCREVMLLTYKSIPMQVDGEPCRLAPAMIRISLRNQANMVQKSKRRTSMPLLNDIHQVQTADLRRVSAPPGSFTIPQSVPDRLRIRVNKISLQDYEGFHYDKEKLREASIPLGILVVRGDCDLETCRMYIDRLQEDLQSVSSGSQRVHYQDHETSFPRALSAQRLSPRWCFLDATSADRFYRIDRSQEHLHFVMEISQDEIFILDPDMVVSQPAGTPPGMPDLVVEQASGISDWWNPALRKRMLSDSGLGMIAPYYEDSDLKDLSHSRVLQSPVSSEDHAILQAVIAGDLMKLIESYKNGGSLLIQGPDHCSLLHYAAKTGNGEIVKYILDHGPSELLDMADSETGETALHKAACQRNRAVCQLLVDAGASLRKTDSKVSFLPPSEEVAFLPFAFQHDCKAS

SEQ ID NO: 3977 - protein, 1033 aa, Artificial Sequence
  Synthetic polypeptide
MDAAGRGCHLLPLPAARGPARAPAAAAAAAASPPGPCSGAACAPSAAAGAGAMNPSSSAGEEKGATGGSSSSGSGAGSCCLGAEGGADPRGAGSAAAAGAAALDEPAAAGQKEKDEALEEKLRNLTFRKQVSYRKAISRAGLQHLAPAHPLSLPVANGPAKEPRATLDWSENAVNGEHLWLETNVSGDLCYLGEENCQVRFAKSALRRKCAVCKIVVHTACIEQLEKINFRCKPTFREGGSRSPRENFVRHHWVHRRRQEGKCKQCGKGFQQKFSFHSKEIVAISCSWCKQAFHNKVTCFMLHHIEEPCSLGAHAAVIVPPTWIIKVKKPQNSLKASNRKKKRTSFKRKASKRGMEQENKGRPFVIKPISSPLMKPLLVFVNPKSGGNQGTKVLQMFMWYLNPRQVFDLSQEGPKDALELYRKVPNLRILACGGDGTVGWILSILDELQLSPQPPVGVLPLGTGNDLARTLNWGGGYTDEPVSKILCQVEDGTVVQLDRWNLHVERNPDLPPEELEDGVCKLPLNVFNNYFSLGFDAHVTLEFHESREANPEKFNSRFRNKMFYAGAAFSDFLQRSSRDLSKHVKVVCDGTDLTPKIQELKFQCIVFLNIPRYCAGTMPWGNPGDHHDFEPQRHDDGYIEVIGFTMASLAALQVGGHGERLHQCREVMLLTYKSIPMQVDGEPCRLAPAMIRISLRNQANMVQKSKRRTSMPLLNDPQSVPDRLRIRVNKISLQDYEGFHYDKEKLREASIPLGILVVRGDCDLETCRMYIDRLQEDLQSVSSGSQRVHYQDHETSFPRALSAQRLSPRWCFLDDRSQEHLHFVMEISQDEIFILDPDMVVSQPAGTPPGMPDLVVEQASGISDWWNPALRKRMLSDSGLGMIAPYYEDSDLKDLSHSRVLQSPVSSEDHAILQAVIAGDLMKLIESYKNGGSLLIQGPDHCSLLHYAAKTGNGEIVKYILDHGPSELLDMADSETGETALHKAACQRNRAVCQLLVDAGASLRKTDSKVSFLPPSEEVAFLPFAFQHDCKAS

SEQ ID NO: 3978 - protein, 95 aa, Artificial Sequence
  Synthetic polypeptide
MAWPNVFQRGSLLSQFSHHHVVVFLLTFFSYSLLHASRKTFSNVKVSISEQWTPSAFNTSVELPVEFVSWIIEYSHTCVRCATLEPCYNVGTLFT

SEQ ID NO: 3979 - protein, 95 aa, Artificial Sequence; identical to SEQ ID NO: 3978
  Synthetic polypeptide

SEQ ID NO: 3980 - protein, 95 aa, Artificial Sequence; identical to SEQ ID NO: 3978
  Synthetic polypeptide

SEQ ID NO: 3981 - protein, 95 aa, Artificial Sequence; identical to SEQ ID NO: 3978
  Synthetic polypeptide

SEQ ID NO: 3982 - protein, 95 aa, Artificial Sequence; identical to SEQ ID NO: 3978
  Synthetic polypeptide

SEQ ID NO: 3983 - protein, 95 aa, Artificial Sequence; identical to SEQ ID NO: 3978
  Synthetic polypeptide

SEQ ID NO: 3984 - protein, 95 aa, Artificial Sequence; identical to SEQ ID NO: 3978
  Synthetic polypeptide

SEQ ID NO: 3985 - protein, 93 aa, Artificial Sequence
  Synthetic polypeptide
MDGFYDQQVPYMVTNSQRGRNCNEKPTNVRKRKFINRDLAHDSEELFQDLSQLQETWLAEAQVPDNDEQFVPDYQAESYMSGYWLLATVLVST

SEQ ID NO: 3986 - protein, 93 aa, Artificial Sequence; identical to SEQ ID NO: 3985
  Synthetic polypeptide

SEQ ID NO: 3987 - protein, 93 aa, Artificial Sequence; identical to SEQ ID NO: 3985
  Synthetic polypeptide

SEQ ID NO: 3988 - protein, 93 aa, Artificial Sequence; identical to SEQ ID NO: 3985
  Synthetic polypeptide

SEQ ID NO: 3989 - protein, 93 aa, Artificial Sequence; identical to SEQ ID NO: 3985
  Synthetic polypeptide

SEQ ID NO: 3990 - protein, 93 aa, Artificial Sequence; identical to SEQ ID NO: 3985
  Synthetic polypeptide

SEQ ID NO: 3991 - protein, 53 aa, Artificial Sequence
  Synthetic polypeptide
MLQDLSASVFFPPCSQHRTLAQVPDNDEQFVPDYQAESYMSGYWLLATVLVST

SEQ ID NO: 3992 - protein, 53 aa, Artificial Sequence; identical to SEQ ID NO: 3991
  Synthetic polypeptide

SEQ ID NO: 3993 - protein, 53 aa, Artificial Sequence; identical to SEQ ID NO: 3991
  Synthetic polypeptide

SEQ ID NO: 3994 - protein, 107 aa, Artificial Sequence
  Synthetic polypeptide
MSGRGDGGQQQLLHSKFLAGFVCHIEKNESQRGRNCNEKPTNVRKRKFINRDLAHDSEELFQDLSQLQETWLAEAQVPDNDEQFVPDYQAESYMSGYWLLATVLVST

SEQ ID NO: 3995 - protein, 48 aa, Artificial Sequence
  Synthetic polypeptide
MRLLQLLFRASPATLLLVLCLQLGANKAQDNTLDEANYHSGKTQMARN

SEQ ID NO: 3996 - protein, 69 aa, Artificial Sequence
  Synthetic polypeptide
MRLLQLLFRASPATLLLVLCLQLGANKAQDNTRKIIIKNFDIPKSVRPNDEVTAVLAVQTELKECMVVG

SEQ ID NO: 3997 - protein, 30 aa, Artificial Sequence
  Synthetic polypeptide
MDGRRVPAQPAAEGAQCLFVQLLRVAVQLG

SEQ ID NO: 3998 - protein, 30 aa, Artificial Sequence; identical to SEQ ID NO: 3997
  Synthetic polypeptide

SEQ ID NO: 3999 - protein, 30 aa, Artificial Sequence; identical to SEQ ID NO: 3997
  Synthetic polypeptide

SEQ ID NO: 4000 - protein, 30 aa, Artificial Sequence; identical to SEQ ID NO: 3997
  Synthetic polypeptide

SEQ ID NO: 4001 - protein, 30 aa, Artificial Sequence; identical to SEQ ID NO: 3997
  Synthetic polypeptide

SEQ ID NO: 4002 - protein, 30 aa, Artificial Sequence; identical to SEQ ID NO: 3997
  Synthetic polypeptide

SEQ ID NO: 4003 - protein, 248 aa, Artificial Sequence
  Synthetic polypeptide
MAADEVAGGARKATKSKLFEFLVHGVRPGMPSGARMPHQGAPMGPPGSPYMGSPAVRPGLAPAGMEPARKRAAPPPGQSQAQSQGQPVPTAPARSRSAKRRKMADKILPQRIRELVPESQAYMDLLAFERKLDQTIMRKRVDIQEALKRPMKQKRKLRLYISNTFNPAKPDAEDSDGSIASWELRVEGKLLDDPSKQKRKFSSFFKSLVIELDKDLYGPDNHLVEWHRTPTTQETDGFQVLVLSLDSG

SEQ ID NO: 4004 - protein, 235 aa, Artificial Sequence
  Synthetic polypeptide
MTPGLQHPPTVVQRPGMPSGARMPHQGAPMGPPGSPYMGSPAVRPGLAPAGMEPARKRAAPPPGQSQAQSQGQPVPTAPARSRSAKRRKMADKILPQRIRELVPESQAYMDLLAFERKLDQTIMRKRVDIQEALKRPMKQKRKLRLYISNTFNPAKPDAEDSDGSIASWELRVEGKLLDDPSKQKRKFSSFFKSLVIELDKDLYGPDNHLVEWHRTPTTQETDGFQVLVLSLDSG

SEQ ID NO: 4005 - protein, 235 aa, Artificial Sequence; identical to SEQ ID NO: 4004
  Synthetic polypeptide

SEQ ID NO: 4006 - protein, 46 aa, Artificial Sequence
  Synthetic polypeptide
MGSAVMDTKKKKDVSSPGGSGGKKNASQKRRSLRVHIPGRFRCDEF

SEQ ID NO: 4007 - protein, 46 aa, Artificial Sequence; identical to SEQ ID NO: 4006
  Synthetic polypeptide

SEQ ID NO: 4008 - protein, 415 aa, Artificial Sequence
  Synthetic polypeptide
MGSVTVRYFCYGCLFTSATWTVLLFVYFNFSEVTQPLKNVPVKGSGPHGPSPKKFYPRFTRGPSRVLEPQFKANKIDDVIDSRVEDPEEGHLKFSSELGMIFNERDQELRDLGYQKHAFNMLISDRLGYHRDVPDTRNAACKEKFYPPDLPAASVVICFYNEAFSALLRTVHSVIDRTPAHLLHEIILVDDDSDFDDLKGELDEYVQKYLPGKIKVIRNTKREGLIRGRMIGAAHATGEVLVFLDSHCEVNVMWLQPLLAAIREDRHTVVCPVIDIISADTLAYSSSPVVRGGFNWGLHFKWDLVPLSELGRAEGATAPIKSPTMAGGLFAMNRQYFHELGQYDSGMDIWGGENLEISFRIWMCGGKLFIIPCSRVGHIFRKRRPYGSPEGQDTMTHNSLRLAHVWLDEYKVSLF

SEQ ID NO: 4009 - protein, 415 aa, Artificial Sequence; identical to SEQ ID NO: 4008
  Synthetic polypeptide

SEQ ID NO: 4010 - protein, 415 aa, Artificial Sequence; identical to SEQ ID NO: 4008
  Synthetic polypeptide

SEQ ID NO: 4011 - protein, 334 aa, Artificial Sequence
  Synthetic polypeptide
MPQPESQKAAILGCGQGGMIFNERDQELRDLGYQKHAFNMLISDRLGYHRDVPDTRNAACKEKFYPPDLPAASVVICFYNEAFSALLRTVHSVIDRTPAHLLHEIILVDDDSDFDDLKGELDEYVQKYLPGKIKVIRNTKREGLIRGRMIGAAHATGEVLVFLDSHCEVNVMWLQPLLAAIREDRHTVVCPVIDIISADTLAYSSSPVVRGGFNWGLHFKWDLVPLSELGRAEGATAPIKSPTMAGGLFAMNRQYFHELGQYDSGMDIWGGENLEISFRIWMCGGKLFIIPCSRVGHIFRKRRPYGSPEGQDTMTHNSLRLAHVWLDEYKVSLF

SEQ ID NO: 4012 - protein, 6 aa, Artificial Sequence
  Synthetic polypeptide
DLDVWR

SEQ ID NO: 4013 - protein, 555 aa, Artificial Sequence
  Synthetic polypeptide
MGPPLPLLLLLLLLLPPRVLPAAPSSVPRGRQLPGRLGCLLEEGLCGASEACVNGFTWQDDYTQYVMDQELADLPKTYLRRPEASSPARPSKHSVGSERRYSREGGAALANALRRHLPFLEALSQAPASDVLARTHTAQDRPPAEGDDRFSESILTYVAHTSALTYPPGSRTQLREDLLPRTLGQLQPDELSPKVDSGVDRHHLMAALSAYAAQRPPAPPGEGSLEPQYLLRAPSRMPRPLLAPAAPQKWPSPLGDSEDPSSTGDGARIHTLLKDLQRQPAEVRGLSGLELDGMAELMAGLMQGVDHGVARGSPGRAALGESGEQADGPKATLRGDSFPDDGVQDDDDRLYQEVHRLSATLGGLLQDHGSRLLPGALPFARPLDMERKKSEHPESSLSSEEETAGVENVKSQTYSKDLLGQQPHSEPGAAAFGELQNQMPGPSKEEQSLPAGAQEALSDGLQLEVQPSEEEARGYIVTDRDPLRPEEGRRLVEDVARLLQVPSSAFADVDSIQTTQRVRKNLHDLYIRQKTNIQTLQRTHISKKQTVPSNNGLKT

SEQ ID NO: 4014 - protein, 576 aa, Artificial Sequence
  Synthetic polypeptide
MGPPLPLLLLLLLLLPPRVLPAAPSSVPRGRQLPGRLDGVFGRCQKVPAMDFYRYEVSPVALQRLRVALQKLSGTGFTWQDDYTQYVMDQELADLPKTYLRRPEASSPARPSKHSVGSERRYSREGGAALANALRRHLPFLEALSQAPASDVLARTHTAQDRPPAEGDDRFSESILTYVAHTSALTYPPGSRTQLREDLLPRTLGQLQPDELSPKVDSGVDRHHLMAALSAYAAQRPPAPPGEGSLEPQYLLRAPSRMPRPLLAPAAPQKWPSPLGDSEDPSSTGDGARIHTLLKDLQRQPAEVRGLSGLELDGMAELMAGLMQGVDHGVARGSPGRAALGESGEQADGPKATLRGDSFPDDGVQDDDDRLYQEVHRLSATLGGLLQDHGSRLLPGALPFARPLDMERKKSEHPESSLSSEEETAGVENVKSQTYSKDLLGQQPHSEPGAAAFGELQNQMPGPSKEEQSLPAGAQEALSDGLQLEVQPSEEEARGYIVTDRDPLRPEEGRRLVEDVARLLQVPSSAFADVDSIQTTQRVRKNLHDLYIRQKTNIQTLQRTHISKKQTVPSNNGLKT

SEQ ID NO: 4015 - protein, 593 aa, Artificial Sequence
  Synthetic polypeptide
MGPPLPLLLLLLLLLPPRVLPAAPSSVPRGRQLPGRLGCLLEEGLCGASEACVNDGVFGRCQKVPAMDFYRYEVSPVALQRLRVALQKLSGTGFTWQDDYTQYVMDQELADLPKTYLRRPEASSPARPSKHSVGSERRYSREGGAALANALRRHLPFLEALSQAPASDVLARTHTAQDRPPAEGDDRFSESILTYVAHTSALTYPPGSRTQLREDLLPRTLGQLQPDELSPKVDSGVDRHHLMAALSAYAAQRPPAPPGEGSLEPQYLLRAPSRMPRPLLAPAAPQKWPSPLGDSEDPSSTGDGARIHTLLKDLQRQPAEVRGLSGLELDGMAELMAGLMQGVDHGVARGSPGRAALGESGEQADGPKATLRGDSFPDDGVQDDDDRLYQEVHRLSATLGGLLQDHGSRLLPGALPFARPLDMERKKSEHPESSLSSEEETAGVENVKSQTYSKDLLGQQPHSEPGAAAFGELQNQMPGPSKEEQSLPAGAQEALSDGLQLEVQPSEEEARGYIVTDRDPLRPEEGRRLVEDVARLLQVPSSAFADVDSIQTTQRVRKNLHDLYIRQKTNIQTLQRTHISKKQTVPSNNGLKT

SEQ ID NO: 4016 - protein, 616 aa, Artificial Sequence
  Synthetic polypeptide
MAVESEYSLLRTEASFPTMKMFCVSHTLPRVEVMFVSGPQTRERTEPVDPRWQCLVQMWAGCLLEEGLCGASEACVNDGVFGRCQKVPAMDFYRYEVSPVALQRLRVALQKLSGTGFTWQDDYTQYVMDQELADLPKTYLRRPEASSPARPSKHSVGSERRYSREGGAALANALRRHLPFLEALSQAPASDVLARTHTAQDRPPAEGDDRFSESILTYVAHTSALTYPPGSRTQLREDLLPRTLGQLQPDELSPKVDSGVDRHHLMAALSAYAAQRPPAPPGEGSLEPQYLLRAPSRMPRPLLAPAAPQKWPSPLGDSEDPSSTGDGARIHTLLKDLQRQPAEVRGLSGLELDGMAELMAGLMQGVDHGVARGSPGRAALGESGEQADGPKATLRGDSFPDDGVQDDDDRLYQEVHRLSATLGGLLQDHGSRLLPGALPFARPLDMERKKSEHPESSLSSEEETAGVENVKSQTYSKDLLGQQPHSEPGAAAFGELQNQMPGPSKEEQSLPAGAQEALSDGLQLEVQPSEEEARGYIVTDRDPLRPEEGRRLVEDVARLLQVPSSAFADVDSIQTTQRVRKNLHDLYIRQKTNIQTLQRTHISKKQTVPSNNGLKT

SEQ ID NO: 4017 - protein, 87 aa, Artificial Sequence
  Synthetic polypeptide
MGPPLPLLLLLLLLLPPRVLPAAPSSVPRGRQLPGRLGCLLEEGLCGASEACVNETMETRSVMNLACDGRKHPINSSSLLPGNVSQV

SEQ ID NO: 4018 - protein, 87 aa, Artificial Sequence; identical to SEQ ID NO: 4017
  Synthetic polypeptide

SEQ ID NO: 4019 - protein, 87 aa, Artificial Sequence; identical to SEQ ID NO: 4017
  Synthetic polypeptide

SEQ ID NO: 4020 - protein, 110 aa, Artificial Sequence
  Synthetic polypeptide
MAVESEYSLLRTEASFPTMKMFCVSHTLPRVEVMFVSGPQTRERTEPVDPRWQCLVQMWAGCLLEEGLCGASEACVNETMETRSVMNLACDGRKHPINSSSLLPGNVSQV

SEQ ID NO: 4021 - protein, 150 aa, Artificial Sequence
  Synthetic polypeptide
MMLHSALGLCLLLVTVSSNLAIAIKKEKRPPQTLSRGWGDDITWVQTYEEGLFYAQKSKKPLMVIHHLEDCQYSQALKKVFAQNEEIQEMAQNKFIMLNLMHETTDKNLSPDGQYVPRIMFVDPSLTVRADIAGRYSNRLYTYEPRDLPL

SEQ ID NO: 4022 - protein, 150 aa, Artificial Sequence; identical to SEQ ID NO: 4021
  Synthetic polypeptide

SEQ ID NO: 4023 - protein, 18 aa, Artificial Sequence
  Synthetic polypeptide
KHPEYISNKSTGQVRMGR

SEQ ID NO: 4024 - protein, 136 aa, Artificial Sequence
  Synthetic polypeptide
MMLHSALGLCLLLVTVSSNLAIAIKKEKRPPQTLSRGWGDDITWVQTYEEGLFYAQKSKKPLMVIHHLEDCQYSQALKKVFAQNEEIQEMAQNKFIMLNLMHETTDKNLSPDGQYVPRIMFVEIWIQRHAYRRNAM

SEQ ID NO: 4025 - protein, 136 aa, Artificial Sequence; identical to SEQ ID NO: 4024
  Synthetic polypeptide

SEQ ID NO: 4026 - protein, 18 aa, Artificial Sequence
  Synthetic polypeptide
KHPEYISNKSTGQVRMGR

SEQ ID NO: 4027 - protein, 261 aa, Artificial Sequence
  Synthetic polypeptide
MESRKDITNQEEIWKMKPRRNLEDNDYLQTAHADEFDCPSELQHAQELFPQWHLPIKIAAVMASLTFLYTLLREVIHPLATSHQQYFYKIPILVINKVLPMVSITLLALVYLPGVIAAIVQVHNGTKYKKFPHWLDKWMLTRKQFGLLSLFFAVLHAIYTLSYAMRRSYRYKLLNWAYQQVQQNKEDAWIEHDVWRMEIYVSLGIVGLAILALLAVTSIPSVSDSLTWREFHYIQGWCELQFLLLAKHLKKISVFLVSMPA

SEQ ID NO: 4028 - protein, 280 aa, Artificial Sequence
  Synthetic polypeptide
MESRKDITNQEEIWKMKPRRNLEDNDYLHEDTGETSMLKRPVLLHLQQTAHADEFDCPSELQHAQELFPQWHLPIKIAAVMASLTFLYTLLREVIHPLATSHQQYFYKIPILVINKVLPMVSITLLALVYLPGVIAAIVQVHNGTKYKKFPHWLDKWMLTRKQFGLLSLFFAVLHAIYTLSYAMRRSYRYKLLNWAYQQVQQNKEDAWIEHDVWRMEIYVSLGIVGLAILALLAVTSIPSVSDSLTWREFHYIQGWCELQFLLLAKHLKKISVFLVSMPA

SEQ ID NO: 4029 - protein, 280 aa, Artificial Sequence; identical to SEQ ID NO: 4028
  Synthetic polypeptide

SEQ ID NO: 4030 - protein, 267 aa, Artificial Sequence
  Synthetic polypeptide
MESRKDITNQEEIWKMKPRRNLEDNDYLQTAHADEFDCPSELQHAQELFPQWHLPIKIAAVMASLTFLYTLLREVIHPLATSHQQYFYKIPILVINKVLPMVSITLLALVYLPGVIAAIVQVHNGTKYKKFPHWLDKWMLTRKQFGLLSLFFAVLHAIYTLSYAMRRSYRYKLLNWAYQQVQQNKEDAWIEHDVWRMEIYVSLGIVGLAILALLAVTSIPSVSDSLTWREFHYIQNIADKLTSVKLNLDHMFSFLKIFPKWVLTLKR

SEQ ID NO: 4031 - protein, 286 aa, Artificial Sequence
  Synthetic polypeptide
MESRKDITNQEEIWKMKPRRNLEDNDYLHEDTGETSMLKRPVLLHLQQTAHADEFDCPSELQHAQELFPQWHLPIKIAAVMASLTFLYTLLREVIHPLATSHQQYFYKIPILVINKVLPMVSITLLALVYLPGVIAAIVQVHNGTKYKKFPHWLDKWMLTRKQFGLLSLFFAVLHAIYTLSYAMRRSYRYKLLNWAYQQVQQNKEDAWIEHDVWRMEIYVSLGIVGLAILALLAVTSIPSVSDSLTWREFHYIQNIADKLTSVKLNLDHMFSFLKIFPKWVLTLKR

SEQ ID NO: 4032 - protein, 286 aa, Artificial Sequence; identical to SEQ ID NO: 4031
  Synthetic polypeptide

SEQ ID NO: 4033 - protein, 410 aa, Artificial Sequence
  Synthetic polypeptide
MECLYYFLGFLLLAARLPLDAAKRFHDVLGNERPSAYMREHNQLNGWSSDENDWNEKLYPVWKRGDMRWKNSWKGGRVQAVLTSDSPALVGSNITFAVNLIFPRCQKEDANGNIVYEKNCRNEAGLSADPYVYNWTAWSEDSDGENGTGQSHHNVFPDGKPFPHHPGWRRWNFIYVFHTLGQYFQKLGRCSVRVSVNTANVTLGPQLMEVTVYRRHGRAYVPIAQVKDVYVVTDQIPVFVTMFQKNDRNSSDETFLKDLPIMFDVLIHDPSHFLNYSTINYKWSFGDNTGLFVSTNHTVNHTYVLNGTFSLNLTVKAAAPGPCPPPPPPPRPSKPTPSLAKTWNEPKCPSMIDWIKKMWHIYTIEYYAVIKKDEFMSFVGTWMKLETIILSKLSQGQKTKRRMFSFTGGN

SEQ ID NO: 4034 - protein, 410 aa, Artificial Sequence; identical to SEQ ID NO: 4033
  Synthetic polypeptide

SEQ ID NO: 4035 - protein, 311 aa, Artificial Sequence
  Synthetic polypeptide
MECLYYFLGFLLLAARLPLDAAKQAGLSADPYVYNWTAWSEDSDGENGTGQSHHNVFPDGKPFPHHPGWRRWNFIYVFHTLGQYFQKLGRCSVRVSVNTANVTLGPQLMEVTVYRRHGRAYVPIAQVKDVYVVTDQIPVFVTMFQKNDRNSSDETFLKDLPIMFDVLIHDPSHFLNYSTINYKWSFGDNTGLFVSTNHTVNHTYVLNGTFSLNLTVKAAAPGPCPPPPPPPRPSKPTPSLAKTWNEPKCPSMIDWIKKMWHIYTIEYYAVIKKDEFMSFVGTWMKLETIILSKLSQGQKTKRRMFSFTGGN

SEQ ID NO: 4036 - protein, 352 aa, Artificial Sequence
  Synthetic polypeptide
MECLYYFLGFLLLAARLPLDAAKRFHDVLGNERPSAYMREHNQLNGWSSDENDWNEKLYPVWKRGDMRWKNSWKGGRVQAVLTSDSPALVGSNITFAVNLIFPRCQKEDANGNIVYEKNCRNGQYFQKLGRCSVRVSVNTANVTLGPQLMEVTVYRRHGRAYVPIAQVKDVYVVTDQIPVFVTMFQKNDRNSSDETFLKDLPIMFDVLIHDPSHFLNYSTINYKWSFGDNTGLFVSTNHTVNHTYVLNGTFSLNLTVKAAAPGPCPPPPPPPRPSKPTPSLAKTWNEPKCPSMIDWIKKMWHIYTIEYYAVIKKDEFMSFVGTWMKLETIILSKLSQGQKTKRRMFSFTGGN

SEQ ID NO: 4037 - protein, 342 aa, Artificial Sequence
  Synthetic polypeptide
MECLYYFLGFLLLAARLPLDAAKRFHDVLGNERPSAYMREHNQLNGWSSDENDWNEKLYPVWKRGDMRWKNSWKGGRVQAVLTSDSPALVGSNITFAVNLIFPRCQKEDANGNIVYEKNCRNEAGLSADPYVYNWTAWSEDSDGENGTGQSHHNVFPDGKPFPHHPGWRRWNFIYVFHTLGQYFQKLGRCSVRVSVNTANVTLGPQLMEVTVYRRHGRAYVPIAQVKDVYVVTDQIPVFVTMFQKNDRNSSDETFLKDLPIMFDVLIHDPSHFLNYSTINYKWSFGDNTGLFVSTNHTVNHTYVLNGTFSLNLTVKAAAPGPCPPPPPPPRPSKPTPSLGGN

SEQ ID NO: 4038 - protein, 342 aa, Artificial Sequence; identical to SEQ ID NO: 4037
  Synthetic polypeptide

SEQ ID NO: 4039 - protein, 243 aa, Artificial Sequence
  Synthetic polypeptide
MECLYYFLGFLLLAARLPLDAAKQAGLSADPYVYNWTAWSEDSDGENGTGQSHHNVFPDGKPFPHHPGWRRWNFIYVFHTLGQYFQKLGRCSVRVSVNTANVTLGPQLMEVTVYRRHGRAYVPIAQVKDVYVVTDQIPVFVTMFQKNDRNSSDETFLKDLPIMFDVLIHDPSHFLNYSTINYKWSFGDNTGLFVSTNHTVNHTYVLNGTFSLNLTVKAAAPGPCPPPPPPPRPSKPTPSLGGN

SEQ ID NO: 4040 - protein, 284 aa, Artificial Sequence
  Synthetic polypeptide
MECLYYFLGFLLLAARLPLDAAKRFHDVLGNERPSAYMREHNQLNGWSSDENDWNEKLYPVWKRGDMRWKNSWKGGRVQAVLTSDSPALVGSNITFAVNLIFPRCQKEDANGNIVYEKNCRNGQYFQKLGRCSVRVSVNTANVTLGPQLMEVTVYRRHGRAYVPIAQVKDVYVVTDQIPVFVTMFQKNDRNSSDETFLKDLPIMFDVLIHDPSHFLNYSTINYKWSFGDNTGLFVSTNHTVNHTYVLNGTFSLNLTVKAAAPGPCPPPPPPPRPSKPTPSLGGN

SEQ ID NO: 4041 - protein, 533 aa, Artificial Sequence
  Synthetic polypeptide
MECLYYFLGFLLLAARLPLDAAKRFHDVLGNERPSAYMREHNQLNGWSSDENDWNEKLYPVWKRGDMRWKNSWKGGRVQAVLTSDSPALVGSNITFAVNLIFPRCQKEDANGNIVYEKNCRNEAGLSADPYVYNWTAWSEDSDGENGTGQSHHNVFPDGKPFPHHPGWRRWNFIYVFHTLGQYFQKLGRCSVRVSVNTANVTLGPQLMEVTVYRRHGRAYVPIAQVKDVYVVTDQIPVFVTMFQKNDRNSSDETFLKDLPIMFDVLIHDPSHFLNYSTINYKWSFGDNTGLFVSTNHTVNHTYVLNGTFSLNLTVKAAAPGPCPPPPPPPRPSKPTPSLGPAGDNPLELSRIPDENCQINRYGHFQATITIVEGILEVNIIQMTDVLMPVPWPESSLIDFVVTCQGSIPTEVCTIISDPTCEITQNTVCSPVDVDEMCLLTVRRTFNGSGTYCVNLTLGDDTSLALTSTLISVPDRDPASPLRMANSALISVGCLAIFVTVISLLVYKLPKMKKYLTKSSVERKCNFAVGILN

SEQ ID NO: 4042 - protein, 545 aa, Artificial Sequence
  Synthetic polypeptide
MECLYYFLGFLLLAARLPLDAAKRFHDVLGNERPSAYMREHNQLNGWSSDENDWNEKLYPVWKRGDMRWKNSWKGGRVQAVLTSDSPALVGSNITFAVNLIFPRCQKEDANGNIVYEKNCRNEAGLSADPYVYNWTAWSEDSDGENGTGQSHHNVFPDGKPFPHHPGWRRWNFIYVFHTLGQYFQKLGRCSVRVSVNTANVTLGPQLMEVTVYRRHGRAYVPIAQVKDVYVVTDQIPVFVTMFQKNDRNSSDETFLKDLPIMFDVLIHDPSHFLNYSTINYKWSFGDNTGLFVSTNHTVNHTYVLNGTFSLNLTVKAAAPGPCPPPPPPPRPSKPTPSLATTLKSYDSNTPGPAGDNPLELSRIPDENCQINRYGHFQATITIVEGILEVNIIQMTDVLMPVPWPESSLIDFVVTCQGSIPTEVCTIISDPTCEITQNTVCSPVDVDEMCLLTVRRTFNGSGTYCVNLTLGDDTSLALTSTLISVPDRDPASPLRMANSALISVGCLAIFVTVISLLVYKLPKMKKYLTKSSVERKCNFAVGILN

SEQ ID NO: 4043 - protein, 434 aa, Artificial Sequence
  Synthetic polypeptide
MECLYYFLGFLLLAARLPLDAAKQAGLSADPYVYNWTAWSEDSDGENGTGQSHHNVFPDGKPFPHHPGWRRWNFIYVFHTLGQYFQKLGRCSVRVSVNTANVTLGPQLMEVTVYRRHGRAYVPIAQVKDVYVVTDQIPVFVTMFQKNDRNSSDETFLKDLPIMFDVLIHDPSHFLNYSTINYKWSFGDNTGLFVSTNHTVNHTYVLNGTFSLNLTVKAAAPGPCPPPPPPPRPSKPTPSLGPAGDNPLELSRIPDENCQINRYGHFQATITIVEGILEVNIIQMTDVLMPVPWPESSLIDFVVTCQGSIPTEVCTIISDPTCEITQNTVCSPVDVDEMCLLTVRRTFNGSGTYCVNLTLGDDTSLALTSTLISVPDRDPASPLRMANSALISVGCLAIFVTVISLLVYKLPKMKKYLTKSSVERKCNFAVGILN

SEQ ID NO: 4044 - protein, 487 aa, Artificial Sequence
  Synthetic polypeptide
MECLYYFLGFLLLAARLPLDAAKRFHDVLGNERPSAYMREHNQLNGWSSDENDWNEKLYPVWKRGDMRWKNSWKGGRVQAVLTSDSPALVGSNITFAVNLIFPRCQKEDANGNIVYEKNCRNGQYFQKLGRCSVRVSVNTANVTLGPQLMEVTVYRRHGRAYVPIAQVKDVYVVTDQIPVFVTMFQKNDRNSSDETFLKDLPIMFDVLIHDPSHFLNYSTINYKWSFGDNTGLFVSTNHTVNHTYVLNGTFSLNLTVKAAAPGPCPPPPPPPRPSKPTPSLATTLKSYDSNTPGPAGDNPLELSRIPDENCQINRYGHFQATITIVEGILEVNIIQMTDVLMPVPWPESSLIDFVVTCQGSIPTEVCTIISDPTCEITQNTVCSPVDVDEMCLLTVRRTFNGSGTYCVNLTLGDDTSLALTSTLISVPDRDPASPLRMANSALISVGCLAIFVTVISLLVYKLPKMKKYLTKSSVERKCNFAVGILN

SEQ ID NO: 4045 - protein, 197 aa, Artificial Sequence
  Synthetic polypeptide
MKHLKRWWSAGGGLLHLTLLLSLAGLRVDLDLYLLLPPPTLLQDELLFLGGPASSAYALSPFSASGGWGRAGHLHPKGRELDPAAPPEGQLLREVRALGVPFVPRTSVDAWLVHSVAAGSADEAHGLLGAAAASSTGGAGASVDGGSQAVQGGGGDPRAARSGPLDAGEEEKAPAEPTAQVPDAGGCASEDNSDTKA

SEQ ID NO: 4046 - protein, 213 aa, Artificial Sequence
  Synthetic polypeptide
MAASLRLLGAASGLRYWSRRLRPAAGSFAAVCSRSVASKTPVGFIGLGNMGNPMAKNLMKHGYPLIIYDVFPDACKEFQDAGEQVVSSPADVAEKADRIITMLPTSINAIEAYSGANGILKKVKKGSLLIDSSTIDPAVSKELAKEVEKMGAVFMDAPVSGGVGAARSGNLTFMVGGVEDEFAAAQELLGCMGSNVVYCGAVGTGQCNTINLE

SEQ ID NO: 4047 - protein, 6 aa, Artificial Sequence
  Synthetic polypeptide
MNYLIL

SEQ ID NO: 4048 - protein, 929 aa, Artificial Sequence
  Synthetic polypeptide
MEEQGHSEMEIIPSESHPHIQLLKSNRELLVTHIRNTQCLVDNLLKNDYFSAEDAEIVCACPTQPDKVRKILDLVQSKGEEVSEFFLYLLQQLADAYVDLRPWLLEIGFSPSLLTQSKVVVNTDPVSRYTQQLRHHLGRDSKFVLCYAQKEELLLEEIYMDTIMELVGFSNESLGSLNSLACLLDHTTGILNEQGETIFILGDAGVGKSMLLQRLQSLWATGRLDAGVKFFFHFRCRMFSCFKESDRLCLQDLLFKHYCYPERDPEEVFAFLLRFPHVALFTFDGLDELHSDLDLSRVPDSSCPWEPAHPLVLLANLLSGKLLKGASKLLTARTGIEVPRQFLRKKVLLRGFSPSHLRAYARRMFPERALQDRLLSQLEANPNLCSLCSVPLFCWIIFRCFQHFRAAFEGSPQLPDCTMTLTDVFLLVTEVHLNRMQPSSLVQRNTRSPVETLHAGRDTLCSLGQVAHRGMEKSLFVFTQEEVQASGLQERDMQLGFLRALPELGPGGDQQSYEFFHLTLQAFFTAFFLVLDDRVGTQELLRFFQEWMPPAGAATTSCYPPFLPFQCLQGSGPAREDLFKNKDHFQFTNLFLCGLLSKAKQKLLRHLVPAAALRRKRKALWAHLFSSLRGYLKSLPRVQVESFNQVQAMPTFIWMLRCIYETQSQKVGQLAARGICANYLKLTYCNACSADCSALSFVLHHFPKRLALDLDNNNLNDYGVRELQPCFSRLTVLRLSVNQITDGGVKVLSEELTKYKIVTYLGLYNNQITDVGARYVTKILDECKGLTHLKLGKNKITSEGGKYLALAVKNSKSISEVGMWGNQVGDEGAKAFAEALRNHPSLTTLSLASNGISTEGGKSLARALQQNTSLEILWLTQNELNDEVAESLAEMLKVNQTLKHLWLIQNQITAKGTAQLADALQSNTGITEI

SEQ ID NO: 4049 - protein, 918 aa, Artificial Sequence
  Synthetic polypeptide
MSLFKARDWWSTILGDKEEFDQGCLCLANVDNSGNGQDKIIVGSFMGYLRIFSPHPAKTGDGAQAEDLLLEVDLRDPVLQVEVGKFVSGTEMLHLAVLHSRKLCVYSVSGTLGNVEHGNQCQMKLMYEHNLQRTACNMTYGSFGGVKGRDLICIQSMDGMLMVFEQESYAFGRFLPGFLLPGPLAYSSRTDSFLTVSSCQQVESYKYQVLAFATDADKRQETEQQKLGSGKRLVVDWTLNIGEQALDICIVSFNQSASSVFVLGERNFFCLKDNGQIRFMKKLDWSPSCFLPYCSVSEGTINTLIGNHNNMLHIYQDVTLKWATQLPHIPVAVRVGCLHDLKGVIVTLSDDGHLQCSYLGTDPSLFQAPNVQSRELNYDELDVEMKELQKIIKDVNKSQGVWPMTEREDDLNVSVVVSPNFDSVSQATDVEVGTDLVPSVTVKVTLQNRVILQKAKLSVYVQPPLELTCDQFTFEFMTPDLTRTVSFSVYLKRSYTPSELEGNAVVSYSRPTDRNPDGIPRVIQCKFRLPLKLICLPGQPSKTASHKITIDTNKSPVSLLSLFPGFASQSDDDQVNVMGFHFLGGARITVLASKTSQRYRIQSEQFEDLWLITNELILRLQEYFEKQGVKDFACSFSGSIPLQEYFELIDHHFELRINGEKLEELLSERAVQFRAIQRRLLARFKDKTPAPLQHLDTLLDGTYKQVIALADAVEENQGNLFQSFTRLKSATHLVILLIALWQKLSADQVAILEAAFLPLQEDTQELGWEETVDAAISHLLKTCLSKSSKEQALNLNSQLNIPKDTSQLKKHITLLCDRLSKGGRLCLSTDAAAPQTMVMPGGCTTIPESDLEERSVEQDSTELFTNHRHLTAETPRPGGVFLHKLSLLAAIHVRCDLLLLAFHHDCEATPATWNCKSN

SEQ ID NO: 4050 - protein, 878 aa, Artificial Sequence
  Synthetic polypeptide
MSLFKARDWWSTILGDKEEFDQGCLCLANVDNSGNGQDKIIVGSFMGYLRIFSPHPAKTGDGAQAEDLLLEVDLRDPVLQVEVGKFVSGTEMLHLAVLHSRKLCVYSVSGTLGNVEHGNQCQMKLMYEHNLQRTACNMTYGSFGGVKGRDLICIQSMDGMLMVFEQESYAFGRFLPGFLLPGPLAYSSRTDSFLTVSSCQQVESYKYQVLAFATDADKRQETEQQKLGSGKRLVVDWTLNIGEQALDICIVSFNQSASSVFVLGERNFFCLKDNGQIRFMKKLDWSPSCFLPYCSVSEGTINTLIGNHNNMLHIYQDVTLKWATQLPHIPVAVRVGCLHDLKGVIVTLSDDGHLQCSYLGTDPSLFQAPNVQSRELNYDELDVEMKELQKIIKDVNKSQGVWPMTEREDDLNVSVVVSPNFDSVSQATDVEVGTDLVPSVTVKVTLQNRVILQKAKLSVYVQPPLELTCDQFTFEFMSIPRVIQCKFRLPLKLICLPGQPSKTASHKITIDTNKSPVSLLSLFPGFASQSDDDQVNVMGFHFLGGARITVLASKTSQRYRIQSEQFEDLWLITNELILRLQEYFEKQGVKDFACSFSGSIPLQEYFELIDHHFELRINGEKLEELLSERAVQFRAIQRRLLARFKDKTPAPLQHLDTLLDGTYKQVIALADAVEENQGNLFQSFTRLKSATHLVILLIALWQKLSADQVAILEAAFLPLQEDTQELGWEETVDAAISHLLKTCLSKSSKEQALNLNSQLNIPKDTSQLKKHITLLCDRLSKGGRLCLSTDAAAPQTMVMPGGCTTIPESDLEERSVEQDSTELFTNHRHLTAETPRPGGVFLHKLSLLAAIHVRCDLLLLAFHHDCEATPATWNCKSN

SEQ ID NO: 4051 - protein, 883 aa, Artificial Sequence
  Synthetic polypeptide
MSLFKARDWWSTILGDKEEFDQGCLCLANVDNSGNGQDKIIVGSFMGYLRIFSPHPAKTGDGAQAEDLLLEVDLRDPVLQVEVGKFVSGTEMLHLAVLHSRKLCVYSVSGTLGNVEHGNQCQMKLMYEHNLQRTACNMTYGSFGGVKGRDLICIQSMDGMLMVFEQESYAFGRFLPGFLLPGPLAYSSRTDSFLTVSSCQQVESYKYQVLAFATDADKRQETEQQKLGSGKRLVVDWTLNIGEQALDICIVSFNQSASSVFVLGERNFFCLKDNGQIRFMKKLDWSPSCFLPYCSVSEGTINTLIGNHNNMLHIYQDVTLKWATQLPHIPVAVRVGCLHDLKGVIVTLSDDGHLQCSYLGTDPSLFQAPNVQSRELNYDELDVEMKELQKIIKDVNKSQGVWPMTEREDDLNVSVVVSPNFDSVSQATDVEVGTDLVPSVTVKVTLQNRVILQKAKLSVYVQPPLELTCDQFTFEFMSLNVLGIPRVIQCKFRLPLKLICLPGQPSKTASHKITIDTNKSPVSLLSLFPGFASQSDDDQVNVMGFHFLGGARITVLASKTSQRYRIQSEQFEDLWLITNELILRLQEYFEKQGVKDFACSFSGSIPLQEYFELIDHHFELRINGEKLEELLSERAVQFRAIQRRLLARFKDKTPAPLQHLDTLLDGTYKQVIALADAVEENQGNLFQSFTRLKSATHLVILLIALWQKLSADQVAILEAAFLPLQEDTQELGWEETVDAAISHLLKTCLSKSSKEQALNLNSQLNIPKDTSQLKKHITLLCDRLSKGGRLCLSTDAAAPQTMVMPGGCTTIPESDLEERSVEQDSTELFTNHRHLTAETPRPGGVFLHKLSLLAAIHVRCDLLLLAFHHDCEATPATWNCKSN

SEQ ID NO: 4052 - protein, 913 aa, Artificial Sequence
  Synthetic polypeptide
MSLFKARDWWSTILGDKEEFDQGCLCLANVDNSGNGQDKIIVGSFMGYLRIFSPHPAKTGDGAQAEDLLLEVDLRDPVLQVEVGKFVSGTEMLHLAVLHSRKLCVYSVSGTLGNVEHGNQCQMKLMYEHNLQRTACNMTYGSFGGVKGRDLICIQSMDGMLMVFEQESYAFGRFLPGFLLPGPLAYSSRTDSFLTVSSCQQVESYKYQVLAFATDADKRQETEQQKLGSGKRLVVDWTLNIGEQALDICIVSFNQSASSVFVLGERNFFCLKDNGQIRFMKKLDWSPSCFLPYCSVSEGTINTLIGNHNNMLHIYQDVTLKWATQLPHIPVAVRVGCLHDLKGVIVTLSDDGHLQCSYLGTDPSLFQAPNVQSRELNYDELDVEMKELQKIIKDVNKSQGVWPMTEREDDLNVSVVVSPNFDSVSQATDVEVGTDLVPSVTVKVTLQNRVILQKAKLSVYVQPPLELTCDQFTFEFMTPDLTRTVSFSVYLKRSYTPSELEGNAVVSYSRPTGIPRVIQCKFRLPLKLICLPGQPSKTASHKITIDTNKSPVSLLSLFPGFASQSDDDQVNVMGFHFLGGARITVLASKTSQRYRIQSEQFEDLWLITNELILRLQEYFEKQGVKDFACSFSGSIPLQEYFELIDHHFELRINGEKLEELLSERAVQFRAIQRRLLARFKDKTPAPLQHLDTLLDGTYKQVIALADAVEENQGNLFQSFTRLKSATHLVILLIALWQKLSADQVAILEAAFLPLQEDTQELGWEETVDAAISHLLKTCLSKSSKEQALNLNSQLNIPKDTSQLKKHITLLCDRLSKGGRLCLSTDAAAPQTMVMPGGCTTIPESDLEERSVEQDSTELFTNHRHLTAETPRPGGVFLHKLSLLAAIHVRCDLLLLAFHHDCEATPATWNCKSN

SEQ ID NO: 4053 - protein, 883 aa, Artificial Sequence
  Synthetic polypeptide
MSLFKARDWWSTILGDKEEFDQGCLCLANVDNSGNGQDKIIVGSFMGYLRIFSPHPAKTGDGAQAEDLLLEVDLRDPVLQVEVGKFVSGTEMLHLAVLHSRKLCVYSVSGTLGNVEHGNQCQMKLMYEHNLQRTACNMTYGSFGGVKGRDLICIQSMDGMLMVFEQESYAFGRFLPGFLLPGPLAYSSRTDSFLTVSSCQQVESYKYQVLAFATDADKRQETEQQKLGSGKRLVVDWTLNIGEQALDICIVSFNQSASSVFVLGERNFFCLKDNGQIRFMKKLDWSPSCFLPYCSVSEGTINTLIGNHNNMLHIYQDVTLKWATQLPHIPVAVRVGCLHDLKGVIVTLSDDGHLQCSYLGTDPSLFQAPNVQSRELNYDELDVEMKELQKIIKDVNKSQGVWPMTEREDDLNVSVVVSPNFDSVSQATDVEVGTDLVPSVTVKVTLQNRVILQKAKLSVYVQPPLELTCDQFTFEFMNRNPDGIPRVIQCKFRLPLKLICLPGQPSKTASHKITIDTNKSPVSLLSLFPGFASQSDDDQVNVMGFHFLGGARITVLASKTSQRYRIQSEQFEDLWLITNELILRLQEYFEKQGVKDFACSFSGSIPLQEYFELIDHHFELRINGEKLEELLSERAVQFRAIQRRLLARFKDKTPAPLQHLDTLLDGTYKQVIALADAVEENQGNLFQSFTRLKSATHLVILLIALWQKLSADQVAILEAAFLPLQEDTQELGWEETVDAAISHLLKTCLSKSSKEQALNLNSQLNIPKDTSQLKKHITLLCDRLSKGGRLCLSTDAAAPQTMVMPGGCTTIPESDLEERSVEQDSTELFTNHRHLTAETPRPGGVFLHKLSLLAAIHVRCDLLLLAFHHDCEATPATWNCKSN

SEQ ID NO: 4054 - skipped

SEQ ID NO: 4055 - protein, 348 aa, Artificial Sequence
  Synthetic polypeptide
MPANFTEGSFDSSGTGQTLDSSPVACTETVTFTEVVEGKEWGSFYYSFKTEQLITLWVLFVFTIVGNSVVLFSTWRRKKKSRMTFFVTQLAITDSFTGLVNILTDINWRFTGDFTAPDLVCRVVRYLQVVLLYASTYVLVSLSIDRYHAIVYPMKFLQGEKQARVLIVIAWSLSFLFSIPTLIIFGKRTLSNGEVQCWALWPDDSYWTPYMTIVAFLVYFIPLTIISIMYGIVIRTIWIKSKTYETVISNCSDGKLCSSYNRGLISKAKIKAIKYSIIIILAFICCWSPYFLFDILDNFNLLPDTQERFYASVIIQNLPALNSAINPLIYCVFSSSISFPCRIIDGND

SEQ ID NO: 4056 - protein, 348 aa, Artificial Sequence; identical to SEQ ID NO: 4055
  Synthetic polypeptide

SEQ ID NO: 4057 - protein, 348 aa, Artificial Sequence; identical to SEQ ID NO: 4055
  Synthetic polypeptide

SEQ ID NO: 4058 - protein, 282 aa, Artificial Sequence
  Synthetic polypeptide
MPANFTEGSFDSSGTGQTLDSSPVACTETVTFTEVVEGKEWGSFYYSFKTEQLITLWVLFVFTIVGNSVVLFSTWRRKKKSRMTFFVTQLAITEKQARVLIVIAWSLSFLFSIPTLIIFGKRTLSNGEVQCWALWPDDSYWTPYMTIVAFLVYFIPLTIISIMYGIVIRTIWIKSKTYETVISNCSDGKLCSSYNRGLISKAKIKAIKYSIIIILAFICCWSPYFLFDILDNFNLLPDTQERFYASVIIQNLPALNSAINPLIYCVFSSSISFPCRIIDGND

SEQ ID NO: 4059 - protein, 337 aa, Artificial Sequence
  Synthetic polypeptide
MPANFTEGSFDSSGTGQTLDSSPVACTETVTFTEVVEGKEWGSFYYSFKTEQLITLWVLFVFTIVGNSVVLFSTWRRKKKSRMTFFVTQLAITDINWRFTGDFTAPDLVCRVVRYLQVVLLYASTYVLVSLSIDRYHAIVYPMKFLQGEKQARVLIVIAWSLSFLFSIPTLIIFGKRTLSNGEVQCWALWPDDSYWTPYMTIVAFLVYFIPLTIISIMYGIVIRTIWIKSKTYETVISNCSDGKLCSSYNRGLISKAKIKAIKYSIIIILAFICCWSPYFLFDILDNFNLLPDTQERFYASVIIQNLPALNSAINPLIYCVFSSSISFPCRIIDGND

SEQ ID NO: 4060 - protein, 96 aa, Artificial Sequence
  Synthetic polypeptide
MSWVQAASLIQGPGDKGDVFDEEADESLLAQREWQSNMQRRVKEGYRDGIDAGKAVTLQQGFNQGYKKGAEVILNYGRLRGTLSCNTHCNGLQLRS

SEQ ID NO: 4061 - protein, 96 aa, Artificial Sequence; identical to SEQ ID NO: 4060
  Synthetic polypeptide

SEQ ID NO: 4062 - protein, 96 aa, Artificial Sequence; identical to SEQ ID NO: 4060
  Synthetic polypeptide

SEQ ID NO: 4063 - protein, 770 aa, Artificial Sequence
  Synthetic polypeptide
MARGARPSAAGGGGGGAEPPERAGPGRPRGSPPGRARPSLAPRPGPEPSRPRAAPETSGGDTAGAGRCGGRRAAKLGPGRRGWWALLALQLHLLRALAQDDVAPYFKTEPGLPQIHLEGNRLVLTCLAEGSWPLEFKWMRDDSELTTYSSEYKYIIPSLQKLDAGFYRCVVRNRMGALLQRKSEVQVAYMGSFMDTDQRKTVSQGRAAILNLLPITSYPRPQVTWFREGHKIIPSNRIAITLENQLVILATTTSDAGAYYVQAVNEKNGENKTSPFIHLSIARDVGTPETMAPTIVVPPGNRSVVAGSSETTLECIASARPVEDLSVTWKRNGVRITSGLHSFGRRLTISNPTSADTGPYVCEAALPGSAFEPARATAFLFIIEPPYFTAEPESRISAEVEETVDIGCQAMGVPLPTLQWYKDAISISRLQNPRYKVLASGGLRIQKLRPEDSGIFQCFASNEGGEIQTHTYLDVTNIAPVFTQRPVDTTVTDGMTAILRCEVSGAPKPAITWKRENHILASGSVRIPRFMLLESGGLQIAPVFIQDAGNYTCYAANTEGSLNASATLTVWNRTSIVHPPEDHVVIKGTTATLHCGATHDPRVSLRYVWKKDNVALTPSSTSRIVVEKDGSLLISQTWSGDIGDYSCEIVSEGGNDSRMARLEVIELPHSPQNLLVSPNSSHSHAVVLSWVRPFDGNSPILYYIVELSENNHWYLSPGPLQQPSSRPCFLIQTIHLPAATLIFLRYTQTRPLPCPRPAGVPAACNIEAKC

SEQ ID NO: 4064 - protein, 770 aa, Artificial Sequence; identical to SEQ ID NO: 4063
  Synthetic polypeptide

SEQ ID NO: 4065 - protein, 42 aa, Artificial Sequence
  Synthetic polypeptide
MAMDVTRSQAQTALTLPDSPLNSGLTWPTATWNKSPLGWQMC

SEQ ID NO: 4066 - protein, 135 aa, Artificial Sequence
  Synthetic polypeptide
MATTVTCTRFTDEYQLYEDIGKGAFSVVRRCVKLCTGHEYAAKIINTKKLSARDHQKLEREARICRLLKHSNIVRLHDSISEEGFHYLVFDLVTGGELFEDIVAREYYSEADARPCVVAHTCNSNTLGGRGGRIT

SEQ ID NO: 4067 - protein, 135 aa, Artificial Sequence; identical to SEQ ID NO: 4066
  Synthetic polypeptide

SEQ ID NO: 4068 - protein, 135 aa, Artificial Sequence; identical to SEQ ID NO: 4066
  Synthetic polypeptide

SEQ ID NO: 4069 - protein, 135 aa, Artificial Sequence; identical to SEQ ID NO: 4066
  Synthetic polypeptide

SEQ ID NO: 4070 - protein, 135 aa, Artificial Sequence; identical to SEQ ID NO: 4066
  Synthetic polypeptide

SEQ ID NO: 4071 - protein, 135 aa, Artificial Sequence; identical to SEQ ID NO: 4066
  Synthetic polypeptide

SEQ ID NO: 4072 - protein, 135 aa, Artificial Sequence; identical to SEQ ID NO: 4066
  Synthetic polypeptide

SEQ ID NO: 4073 - protein, 135 aa, Artificial Sequence; identical to SEQ ID NO: 4066
  Synthetic polypeptide

SEQ ID NO: 4074 - protein, 135 aa, Artificial Sequence; identical to SEQ ID NO: 4066
  Synthetic polypeptide

SEQ ID NO: 4075 - protein, 135 aa, Artificial Sequence; identical to SEQ ID NO: 4066
  Synthetic polypeptide

SEQ ID NO: 4076 - protein, 135 aa, Artificial Sequence; identical to SEQ ID NO: 4066
  Synthetic polypeptide

SEQ ID NO: 4077 - protein, 135 aa, Artificial Sequence; identical to SEQ ID NO: 4066
  Synthetic polypeptide

SEQ ID NO: 4078 - protein, 135 aa, Artificial Sequence; identical to SEQ ID NO: 4066
  Synthetic polypeptide

SEQ ID NO: 4079 - protein, 151 aa, Artificial Sequence
  Synthetic polypeptide
MRIPEWVAGSPVFTPQMHRSTPVCPLGLQRCPGHWRGRGAFSVVRRCVKLCTGHEYAAKIINTKKLSARDHQKLEREARICRLLKHSNIVRLHDSISEEGFHYLVFDLVTGGELFEDIVAREYYSEADARPCVVAHTCNSNTLGGRGGRIT

SEQ ID NO: 4080 - protein, 82 aa, Artificial Sequence
  Synthetic polypeptide
MYGVFVRILTERSQRKAFLQARSCIEDRLRLEDENEKQERLLMSLLPRNVAMEMKEDFLKPPERIFHKIYIQRHDNVRRERV

SEQ ID NO: 4081 - protein, 307 aa, Artificial Sequence
  Synthetic polypeptide
MAGAPRGGGGGGGGAGEPGGAERAAGTSRRRGLRACDEEFACPELEALFRGYTLRLEQAATLKALAVLSLLAGALALAELLGAPGPAPGLAKGSHPVHCVLFLALLVVTNVRSLQVPQLQQVGQLALLFSLTFALLCCPFALGGPARGSAGAAGGPATAEQGVWQLLLVTFVSYALLPVRSLLAIGFGLVVAASHLLVTATLVPAKRPRLWRTLGANALLFVGVNMYGVFVRILTERSQRKAFLQARSCIEDRLRLEDENEKQERLLMSLLPRNVAMEMKEDFLKPPERIFHKIYIQRHDNVRRERV

SEQ ID NO: 4082 - protein, 121 aa, Artificial Sequence
  Synthetic polypeptide
MFAPRLLDFQKTKYARFMNHRVPAHKRYQPTEYEHAANCATHAFWIIPSILGSSNLYFLSDDDWETISAWIYGLGLCGLFVVSTVFHTISWKKSHLRMVEHCLHMFDRMVIYFFIAASYAP

SEQ ID NO: 4083 - protein, 121 aa, Artificial Sequence; identical to SEQ ID NO: 4082
  Synthetic polypeptide

SEQ ID NO: 4084 - protein, 121 aa, Artificial Sequence; identical to SEQ ID NO: 4082
  Synthetic polypeptide

SEQ ID NO: 4085 - protein, 115 aa, Artificial Sequence
  Synthetic polypeptide
MDGRDFGPQRSVHGPPPPLLSGLAMDSHRVGAATAGRLPASGLPGPLPPGKYMAGLNLHPHPGEAFLGSFVASGMGPSASSHGSPVPLPSDLSFRSPTPSNLPMVQLWAAHAHEA

SEQ ID NO: 4086 - protein, 115 aa, Artificial Sequence; identical to SEQ ID NO: 4085
  Synthetic polypeptide

SEQ ID NO: 4087 - protein, 41 aa, Artificial Sequence
  Synthetic polypeptide
MGPSASSHGSPVPLPSDLSFRSPTPSNLPMVQLWAAHAHEA

SEQ ID NO: 4088 - protein, 41 aa, Artificial Sequence; identical to SEQ ID NO: 4087
  Synthetic polypeptide

SEQ ID NO: 4089 - protein, 1073 aa, Artificial Sequence
  Synthetic polypeptide
MRPSGTAGAALLALLAALCPASRALEEKKVCQGTSNKLTQLGTFEDHFLSLQRMFNNCEVVLGNLEITYVQRNYDLSFLKTIQEVAGYVLIALNTVERIPLENLQIIRGNMYYENSYALAVLSNYDANKTGLKELPMRNLQGQKCDPSCPNGSCWGAGEENCQKLTKIICAQQCSGRCRGKSPSDCCHNQCAAGCTGPRESDCLVCRKFRDEATCKDTCPPLMLYNPTTYQMDVNPEGKYSFGATCVKKCPRNYVVTDHGSCVRACGADSYEMEEDGVRKCKKCEGPCRKVCNGIGIGEFKDSLSINATNIKHFKNCTSISGDLHILPVAFRGDSFTHTPPLDPQELDILKTVKEITGFLLIQAWPENRTDLHAFENLEIIRGRTKQHGQFSLAVVSLNITSLGLRSLKEISDGDVIISGNKNLCYANTINWKKLFGTSGQKTKIISNRGENSCKATGQVCHALCSPEGCWGPEPRDCVSCRNVSRGRECVDKCNLLEGEPREFVENSECIQCHPECLPQAMNITCTGRGPDNCIQCAHYIDGPHCVKTCPAGVMGENNTLVWKYADAGHVCHLCHPNCTYGCTGPGLEGCPTNGPKIPSIATGMVGALLLLLVVALGIGLFMRRRHIVRKRTLRRLLQERELVEPLTPSGEAPNQALLRILKETEFKKIKVLGSGAFGTVYKGLWIPEGEKVKIPVAIKELREATSPKANKEILDEAYVMASVDNPHVCRLLGICLTSTVQLITQLMPFGCLLDYVREHKDNIGSQYLLNWCVQIAKGMNYLEDRRLVHRDLAARNVLVKTPQHVKITDFGLAKLLGAEEKEYHAEGGKVPIKWMALESILHRIYTHQSDVWSYGVTVWELMTFGSKPYDGIPASEISSILEKGERLPQPPICTIDVYMIMVKCWMIDADSRPKFRELIIEFSKMARDPQRYLVIQGDERMHLPSPTDSNFYRALMDEEDMDDVVDADEYLIPQQGFFSSPSTSRTPLLSSLSATSNNSTVACIDRNGLQSCPIKEDSFLQRYSSDPTGALTEDSIDDTFLPVPGEWLVWKQSCSSTSSTHSAAASLQCPSQ

SEQ ID NO: 4090 - protein, 363 aa, Artificial Sequence
  Synthetic polypeptide
MGETMSKRLKLHLGGEAEMEERAFVNPFPDYEAAAGALLASGAAEETGCVRPPATTDEPGLPFHQDGKIIHNFIRRIQTKIKDLLQQMEEGLKTADPHDCSAYTGWTGIALLYLQLYRVTCDQTYLLRSLDYVKRTLRNLNGRRVTFLCGDAGPLAVGAVIYHKLRSDCESQECVTKLLQLQRSVVCQESDLPDELLYGRAGYLYALLYLNTEIGPGTVCESAIKEVVNAIIESGKTLSREERKTERCPLLYQWHRKQYVGAAHGMAGIYYMLMQEATGVWCLPQQGSTLRRRIRSREEGLPYKTGEQNPQEVDRCKSQDSSVTEDLESSQLWRVASRESKVIVDLTMWKILSRDFLQSCWWV

SEQ ID NO: 4091 - protein, 298 aa, Artificial Sequence [sequence omitted]

SEQ ID NO: 4092 - protein, 298 aa, Artificial Sequence [sequence omitted]

SEQ ID NO: 4093 - protein, 355 aa, Artificial Sequence
  Synthetic polypeptide
MEEGNNNEEVIHLNNFHCHRGQEWINLRDGPITISDSSDEERIPMLVTPAPQQHEEEDLDDDVILTETNKPQRSRPNLIKPAAQWQDLKRLGEERPKKSRAAFESDKSSYFSVCNNPLFDSGAQDDSEDDYGEFLDLGPPGISEFTKPSGQTEREPKPGPSHNQAANDIVNPRSEQKVIILEEGSLLYTESDPLETQNQSSEDSETELLSNLGESAALADDQAIEEDCWLDHPYFQSLNQQPREITNQVVPQERQPEAELGRLLFQHEFPGPAFPRPEPQQGGISGPSSPQPAHPLGEFEDQQLASDDEEPGPAFPMQESQEPNLENIWGQEAAEVDQELVELLVKETTEMLNIC

SEQ ID NO: 4094 - protein, 330 aa, Artificial Sequence
  Synthetic polypeptide
MASPPACPSEEDESLKGCELYVQLHGIQQVLKDCIVHLCISKPERPMKFLREHFEKLEKEENRQILARQKSNSQSDSHDEEVSPTPPNPVVKARRRRGGVSAEVYTEEDAVSYVRKVIPKDYKTMTALAKAISKNVLFAHLDDNERSDIFDAMFPVTHIAGETVIQQGNEGDNFYVVDQGEVDVYVNGEWVTNISEGGSFGELALIYGTPRAATVKAKTDLKLWGIDRDSYRRILMGSTLRKRKMYEEFLSKVSILESLEKWERLTVADALEPVQFEDGEKIVVQGEPGDDFYIITELLGRLKQENRLNPGDGGCSEPRSHHCTPAWTTE

SEQ ID NO: 4095 - protein, 330 aa, Artificial Sequence; identical to SEQ ID NO: 4094
  Synthetic polypeptide

SEQ ID NO: 4096 - protein, 330 aa, Artificial Sequence; identical to SEQ ID NO: 4094
  Synthetic polypeptide

SEQ ID NO: 4097 - protein, 330 aa, Artificial Sequence; identical to SEQ ID NO: 4094
  Synthetic polypeptide

SEQ ID NO: 4098 - protein, 330 aa, Artificial Sequence; identical to SEQ ID NO: 4094
  Synthetic polypeptide

SEQ ID NO: 4099 - protein, 330 aa, Artificial Sequence; identical to SEQ ID NO: 4094
  Synthetic polypeptide

SEQ ID NO: 4100 - protein, 46 aa, Artificial Sequence
  Synthetic polypeptide
LVHPTEETPTTHAPGLSSSSARVATLLPQRQAPAGSMLRTSWERCT

SEQ ID NO: 4101 - protein, 7 aa, Artificial Sequence
  Synthetic polypeptide
MAEVAVS

SEQ ID NO: 4102 - protein, 7 aa, Artificial Sequence
  Synthetic polypeptide
MAEVAVS

SEQ ID NO: 4103 - protein, 7 aa, Artificial Sequence
  Synthetic polypeptide
MAEVAVS

SEQ ID NO: 4104 - protein, 7 aa, Artificial Sequence
  Synthetic polypeptide
MAEVAVS

SEQ ID NO: 4105 - protein, 363 aa, Artificial Sequence
  Synthetic polypeptide
MVGKLKQNLLLACLVISSVTVFYLGQHAMECHHRIEERSQPVKLESTRTTVRTGLDLKANKTFAYHKDMPLIFIGGVPRSGTTLMRAMLDAHPDIRCGEETRVIPRILALKQMWSRSSKEKIRLDEAGVTDEVLDSAMQAFLLEIIVKHGEPAPYLCNKDPFALKSLTYLSRLFPNAKFLLMVRDGRASVHSMISRKVTIAGFDLNSYRDCLTKWNRAIETMYNQCMEVGYKKCMLVHYEQLVLHPERWMRTLLKFLQIPWNHSVLHHEEMIGKAGGVSLSKVERSTDQVIKPVNVGALSKWVGKIPPDVLQDMAVIAPMLAKLGYDPYANPPNYGKPDPKIIENTRREQKTRYHVFSLIRGH

SEQ ID NO: 4106 - protein, 504 aa, Artificial Sequence
  Synthetic polypeptide
MASLRRVKVLLVLNLIAVAGFVLFLAKCRPIAVRSGDAFHEIRPRAEVANLSAHSASPIQDAVLKRLSLLEDIVYRQLNGLSKSLGLIEGYGGRGKGGLPATLSPAEEEKAKGPHEKYGYNSYLSEKISLDRSIPDYRPTKCKELKYSKDLPQISIIFIFVNEALSVILRSVHSAVNHTPTHLLKEIILVDDNSDEEELKVPLEEYVHKRYPGLVKVVRNQKREGLIRARIEGWKVATGQVTGFFDAHVEFTAGWAEPVLSRIQENRKRVILPSIDNIKQDNFEVQRYENSAHGYSWELWCMYISPPKDWWDAGDPSLPIRTPAMIGCSFVVNRKFFGEIGLLDPGMDVYGGENIELGIKVWLCGGSMEVLPCSRVAHIERKKKPYNSNIGFYTKRNALRVAEVWMDDYKSHVYIAWNLPLENPGIDIGDVSERRALRKSLKCKNFQWYLDHVYPEMRRYNNTVAYGELRNNKAKDVCLDQGPLENHTAILYPCHGWGPQKWKS

SEQ ID NO: 4107 - protein, 194 aa, Artificial Sequence
  Synthetic polypeptide
MAGLTAAAPRPGVLLLLLSILHPSRPGGVPGAIPGGVPGGVFYPGAGLGALGGGALGPGGKPLKPVPGGLAGAGLGAGLGAFPAVTFPGALVPGGVADAAAAYKAAKAGAGLGGVPGVGGLGVSAGAVVPQPGAGVKPGKVPGVGLPGVYPGGVLPGARFPGVGVLPGVPTGAGVKPKAPAWATRAKLHLRKKK

SEQ ID NO: 4108 - protein, 194 aa, Artificial Sequence; identical to SEQ ID NO: 4107
  Synthetic polypeptide

SEQ ID NO: 4109 - protein, 194 aa, Artificial Sequence; identical to SEQ ID NO: 4107
  Synthetic polypeptide

SEQ ID NO: 4110 - protein, 194 aa, Artificial Sequence; identical to SEQ ID NO: 4107
  Synthetic polypeptide

SEQ ID NO: 4111 - protein, 194 aa, Artificial Sequence; identical to SEQ ID NO: 4107
  Synthetic polypeptide

SEQ ID NO: 4112 - protein, 194 aa, Artificial Sequence; identical to SEQ ID NO: 4107
  Synthetic polypeptide

SEQ ID NO: 4113 - protein, 194 aa, Artificial Sequence; identical to SEQ ID NO: 4107
  Synthetic polypeptide

SEQ ID NO: 4114 - protein, 182 aa, Artificial Sequence
  Synthetic polypeptide
MAGLTAAAPRPGVLLLLLSILHPSRPGGVPGAIPGGVPGGVFYPGAGLGALGGGALGPGGKPLKPGLGAFPAVTFPGALVPGGVADAAAAYKAAKAGAGLGGVPGVGGLGVSAGAVVPQPGAGVKPGKVPGVGLPGVYPGGVLPGARFPGVGVLPGVPTGAGVKPKAPAWATRAKLHLRKKK

SEQ ID NO: 4115 - protein, 182 aa, Artificial Sequence; identical to SEQ ID NO: 4114
  Synthetic polypeptide

SEQ ID NO: 4116 - protein, 189 aa, Artificial Sequence
  Synthetic polypeptide
MAGLTAAAPRPGVLLLLLSILHPSRPGGVPGAIPGGVPGGVFYPALGPGGKPLKPVPGGLAGAGLGAGLGAFPAVTFPGALVPGGVADAAAAYKAAKAGAGLGGVPGVGGLGVSAAPSVPGAVVPQPGAGVKPGKVPGVGLPGVYPGGVLPGARFPGVGVLPGVPTGAGVKPKAPAWATRAKLHLRKKK

SEQ ID NO: 4117 - protein, 184 aa, Artificial Sequence
  Synthetic polypeptide
MAGLTAAAPRPGVLLLLLSILHPSRPGGVPGAIPGGVPGGVFYPALGPGGKPLKPVPGGLAGAGLGAGLGAFPAVTFPGALVPGGVADAAAAYKAAKAGAGLGGVPGVGGLGVSAGAVVPQPGAGVKPGKVPGVGLPGVYPGGVLPGARFPGVGVLPGVPTGAGVKPKAPAWATRAKLHLRKKK

SEQ ID NO: 4118 - protein, 184 aa, Artificial Sequence; identical to SEQ ID NO: 4117
  Synthetic polypeptide

SEQ ID NO: 4119 - protein, 199 aa, Artificial Sequence
  Synthetic polypeptide
MAGLTAAAPRPGVLLLLLSILHPSRPGGVPGAIPGGVPGGVFYPGAGLGALGGGALGPGGKPLKPVPGGLAGAGLGAGLGAFPAVTFPGALVPGGVADAAAAYKAAKAGAGLGGVPGVGGLGVSAAPSVPGAVVPQPGAGVKPGKVPGVGLPGVYPGGVLPGARFPGVGVLPGVPTGAGVKPKAPAWATRAKLHLRKKK

SEQ ID NO: 4120 - protein, 199 aa, Artificial Sequence; identical to SEQ ID NO: 4119
  Synthetic polypeptide

SEQ ID NO: 4121 - protein, 54 aa, Artificial Sequence
  Synthetic polypeptide
MQKPSGLKPPGRGGKHSSPMGRTSTGSASSSAAVAASSKEGTVVYTCGSSYLAA

SEQ ID NO: 4122 - protein, 54 aa, Artificial Sequence; identical to SEQ ID NO: 4121
  Synthetic polypeptide

SEQ ID NO: 4123 - protein, 54 aa, Artificial Sequence; identical to SEQ ID NO: 4121
  Synthetic polypeptide

SEQ ID NO: 4124 - protein, 805 aa, Artificial Sequence
  Synthetic polypeptide
MALLGKRCDVPTNGCGPDRWNSAFTRKDEIITSLVSALDSMCSALSKLNAEVACVAVHDESAFVVGTEKGRMFLNARKELQSDFLRFCRGPPWKDPEAEHPKKVQRGEGGGRSLPRSSLEHGSDVYLLRKMVEEVFDVLYSEALGRASVVPLPYERLLREPGLLAVQGLPEGLAFRRPAEYDPKALMAILEHSHRIRFKLKRPLEDGGRDSKALVELNGVSLIPKGSRDCGLHGQAPKVPPQDLPPTATSSSMASFLYSTALPNHAIRELKQEAPSCPLAPSDLGLSRPMPEPKATGAQDFSDCCGQKPTGPGGPLIQNVHASKRILFSIVHDKSEKWDAFIKETEDINTLRECVQILFNSRYAEALGLDHMVPVPYRKIACDPEAVEIVGIPDKIPFKRPCTYGVPKLKRILEERHSIHFIIKRMFDERIFTGNKFTKDTTKLEPASPPEDTSAEVSRATVLDLAGNARSDKGSMSEDCGPGTSGELGGLRPIKIEPEDLDIIQVTVPDPSPTSEEMTDSMPGHLPSEDSGYGMEMLTDKGLSEDARPEERPVEDSHGDVIRPLRKQVELLFNTRYAKAIGISEPVKVPYSKFLMHPEELFVVGLPEGISLRRPNCFGIAKLRKILEASNSIQFVIKRPELLTEGVKEPIMDSQGTASSLGFSPPALPPERDSGDPLVDESLKRQGFQENYDARLSRIDIANTLREQVQDLFNKKYGEALGIKYPVQVPYKRIKSNPGSVIIEGLPPGIPFRKPCTFGSQNLERILAVADKIKFTVTRPFQGLIPKPEQGLQTPGMWQSCQLPV

SEQ ID NO: 4125 - protein, 822 aa, Artificial Sequence
  Synthetic polypeptide
MALLGKRCDVPTNGCGPDRWNSAFTRKDEIITSLVSALDSMCSALSKLNAEVACVAVHDESAFVVGTEKGRMFLNARKELQSDFLRFCLSAAQHRAATSQLEGRVVRRVLTVASRALCPTGGPPWKDPEAEHPKKVQRGEGGGRSLPRSSLEHGSDVYLLRKMVEEVFDVLYSEALGRASVVPLPYERLLREPGLLAVQGLPEGLAFRRPAEYDPKALMAILEHSHRIRFKLKRPLEDGGRDSKALVELNGVSLIPKGSRDCGLHGQAPKVPPQDLPPTATSSSMASFLYSTALPNHAIRELKQEAPSCPLAPSDLGLSRPMPEPKATGAQDFSDCCGQKPTGPGGPLIQNVHASKRILFSIVHDKSEKWDAFIKETEDINTLRECVQILFNSRYAEALGLDHMVPVPYRKIACDPEAVEIVGIPDKIPFKRPCTYGVPKLKRILEERHSIHFIIKRMFDERIFTGNKFTKDTTKLEPASPPEDTSAEVSRATVLDLAGNARSDKGSMSEDCGPGTSGELGGLRPIKIEPEDLDIIQVTVPDPSPTSEEMTDSMPGHLPSEDSGYGMEMLTDKGLSEDARPEERPVEDSHGDVIRPLRKQVELLFNTRYAKAIGISEPVKVPYSKFLMHPEELFVVGLPEGISLRRPNCFGIAKLRKILEASNSIQFVIKRPELLTEGVKEPIMDSQERDSGDPLVDESLKRQGFQENYDARLSRIDIANTLREQVQDLFNKKYGEALGIKYPVQVPYKRIKSNPGSVIIEGLPPGIPFRKPCTFGSQNLERILAVADKIKFTVTRPFQGLIPKPEQGLQTPGMWQSCQLPV

SEQ ID NO: 4126 - protein, 790 aa, Artificial Sequence
  Synthetic polypeptide
MALLGKRCDVPTNGCGPDRWNSAFTRKDEIITSLVSALDSMCSALSKLNAEVACVAVHDESAFVVGTEKGRMFLNARKELQSDFLRFCRGPPWKDPEAEHPKKVQRGEGGGRSLPRSSLEHGSDVYLLRKMVEEVFDVLYSEALGRASVVPLPYERLLREPGLLAVQGLPEGLAFRRPAEYDPKALMAILEHSHRIRFKLKRPLEDGGRDSKALVELNGVSLIPKGSRDCGLHGQAPKVPPQDLPPTATSSSMASFLYSTALPNHAIRELKQEAPSCPLAPSDLGLSRPMPEPKATGAQDFSDCCGQKPTGPGGPLIQNVHASKRILFSIVHDKSEKWDAFIKETEDINTLRECVQILFNSRYAEALGLDHMVPVPYRKIACDPEAVEIVGIPDKIPFKRPCTYGVPKLKRILEERHSIHFIIKRMFDERIFTGNKFTKDTTKLEPASPPEDTSAEVSRATVLDLAGNARSDKGSMSEDCGPGTSGELGGLRPIKIEPEDLDIIQVTVPDPSPTSEEMTDSMPGHLPSEDSGYGMEMLTDKGLSEDARPEERPVEDSHGDVIRPLRKQVELLFNTRYAKAIGISEPVKVPYSKFLMHPEELFVVGLPEGISLRRPNCFGIAKLRKILEASNSIQFVIKRPELLTEGVKEPIMDSQERDSGDPLVDESLKRQGFQENYDARLSRIDIANTLREQVQDLFNKKYGEALGIKYPVQVPYKRIKSNPGSVIIEGLPPGIPFRKPCTFGSQNLERILAVADKIKFTVTRPFQGLIPKPEQGLQTPGMWQSCQLPV

SEQ ID NO: 4127 - protein, 790 aa, Artificial Sequence; identical to SEQ ID NO: 4126
  Synthetic polypeptide

SEQ ID NO: 4128 - protein, 21 aa, Artificial Sequence
  Synthetic polypeptide
SGPCGSRWSCSSTHDTARAAH

SEQ ID NO: 4129 - protein, 609 aa, Artificial Sequence
  Synthetic polypeptide
MAQVAMSTLPVEDEESSESRMVVTFLMSALESMCKELAKSKAEVACIAVYETDVFVVGTERGRAFVNTRKDFQKDFVKYCVEEEEKAAEMHKMKSTTQANRMSVDAVEIETLRKTVEDYFCFCYGKALGKSTVVPVPYEKMLRDQSAVVVQGLPEGVAFKHPENYDLATLKWILENKAGISFIIKRPFLEPKKHVGGRVMVTDADRSILSPGGSCGPIKVKTEPTEDSGISLEMAAVTVKEESEDPDYYQYNIQAGPSETDDVDEKQPLSKPLQGSHHSSEGNEGTEMEVPAEDSTQHVPSETSEDPEVEVTIEDDDYSPPSKRPKANELPQPPVPEPANAGKRKVREFNFEKWNARITDLRKQVEELFERKYAQAIKAKGPVTIPYPLFQSHVEDLYVEGLPEGIPFRRPSTYGIPRLERILLAKERIRFVIKKHELLNSTREDLQLDKPASGVKEEWYARITKLRKMVDQLFCKKFAEALGSTEAKAVPYQKFEAHPNDLYVEGLPENIPFRSPSWYGIPRLEKIIQVGNRIKFVIKRPELLTHSTTEVTQPRTNTPVKEDWNVRITKLRKQVEEIFNLKFDLLTAVSWSAVLRTILRRLSKKECFS

SEQ ID NO: 4130 - protein, 588 aa, Artificial Sequence
  Synthetic polypeptide
MAQVAMSTLPVEDEESSESRMVVTFLMSALESMCKELAKSKAEVACIAVYETDVFVVGTERGRAFVNTRKDFQKDFVKYCVEEEEKAAEMHKMKSTTQANRMSVDAVEIETLRKTVEDYFCFCYGKALGKSTVVPVPYEKMLRDQSAVVVQGLPEGVAFKHPENYDLATLKWILENKAGISFIIKRPFLEPKKHVGGRVMVTDADRSILSPGGSCGPIKVKTEPTEDSGISLEMAAVTVKEESEDPDYYQYNIQAGPSETDDVDEKQPLSKPLQGSHHSSEGNEGTEMEVPAEDDDYSPPSKRPKANELPQPPVPEPANAGKRKVREFNFEKWNARITDLRKQVEELFERKYAQAIKAKGPVTIPYPLFQSHVEDLYVEGLPEGIPFRRPSTYGIPRLERILLAKERIRFVIKKHELLNSTREDLQLDKPASGVKEEWYARITKLRKMVDQLFCKKFAEALGSTEAKAVPYQKFEAHPNDLYVEGLPENIPFRSPSWYGIPRLEKIIQVGNRIKFVIKRPELLTHSTTEVTQPRTNTPVKEDWNVRITKLRKQVEEIFNLKFDLLTAVSWSAVLRTILRRLSKKECFS

SEQ ID NO: 4131 - protein, 589 aa, Artificial Sequence
  Synthetic polypeptide
MAQVAMSTLPVEDEESSESRMVVTFLMSALESMCKELAKSKAEVACIAVYETDVFVVGTERGRAFVNTRKDFQKDFVKYCVEEEEKAAEMHKMKSTTQANRMSVDAVEIETLRKTVEDYFCFCYGKALGKSTVVPVPYEKMLRDQSAVVVQGLPEGVAFKHPENYDLATLKWILENKAGISFIIKRPFLEPKKHVGGRVMVTDADRSILSPGGSCGPIKVKTEPTEDSGISLEMAAVTVKEESEDPDYYQYNIQGSHHSSEGNEGTEMEVPAEDSTQHVPSETSEDPEVEVTIEDDDYSPPSKRPKANELPQPPVPEPANAGKRKVREFNFEKWNARITDLRKQVEELFERKYAQAIKAKGPVTIPYPLFQSHVEDLYVEGLPEGIPFRRPSTYGIPRLERILLAKERIRFVIKKHELLNSTREDLQLDKPASGVKEEWYARITKLRKMVDQLFCKKFAEALGSTEAKAVPYQKFEAHPNDLYVEGLPENIPFRSPSWYGIPRLEKIIQVGNRIKFVIKRPELLTHSTTEVTQPRTNTPVKEDWNVRITKLRKQVEEIFNLKFDLLTAVSWSAVLRTILRRLSKKECFS

SEQ ID NO: 4132 - protein, 568 aa, Artificial Sequence
  Synthetic polypeptide
MAQVAMSTLPVEDEESSESRMVVTFLMSALESMCKELAKSKAEVACIAVYETDVFVVGTERGRAFVNTRKDFQKDFVKYCVEEEEKAAEMHKMKSTTQANRMSVDAVEIETLRKTVEDYFCFCYGKALGKSTVVPVPYEKMLRDQSAVVVQGLPEGVAFKHPENYDLATLKWILENKAGISFIIKRPFLEPKKHVGGRVMVTDADRSILSPGGSCGPIKVKTEPTEDSGISLEMAAVTVKEESEDPDYYQYNIQGSHHSSEGNEGTEMEVPAEDDDYSPPSKRPKANELPQPPVPEPANAGKRKVREFNFEKWNARITDLRKQVEELFERKYAQAIKAKGPVTIPYPLFQSHVEDLYVEGLPEGIPFRRPSTYGIPRLERILLAKERIRFVIKKHELLNSTREDLQLDKPASGVKEEWYARITKLRKMVDQLFCKKFAEALGSTEAKAVPYQKFEAHPNDLYVEGLPENIPFRSPSWYGIPRLEKIIQVGNRIKFVIKRPELLTHSTTEVTQPRTNTPVKEDWNVRITKLRKQVEEIFNLKFDLLTAVSWSAVLRTILRRLSKKECFS

SEQ ID NO: 4133 - protein, 963 aa, Artificial Sequence
  Synthetic polypeptide
MAQVAMSTLPVEDEESSESRMVVTFLMSALESMCKELAKSKAEVACIAVYETDVFVVGTERGRAFVNTRKDFQKDFVKYCVEEEEKAAEMHKMKSTTQANRMSVDAVEIETLRKTVEDYFCFCYGKALGKSTVVPVPYEKMLRDQSAVVVQGLPEGVAFKHPENYDLATLKWILENKAGISFIIKRPFLEPKKHVGGRVMVTDADRSILSPGGSCGPIKVKTEPTEDSGISLEMAAVTVKEESEDPDYYQYNIQAGPSETDDVDEKQPLSKPLQGSHHSSEGNEGTEMEVPAEDSTQHVPSETSEDPEVEVTIEDDDYSPPSKRPKANELPQPPVPEPANAGKRKVREFNFEKWNARITDLRKQVEELFERKYAQAIKAKGPVTIPYPLFQSHVEDLYVEGLPEGIPFRRPSTYGIPRLERILLAKERIRFVIKKHELLNSTREDLQLDKPASGVKEEWYARITKLRKMVDQLFCKKFAEALGSTEAKAVPYQKFEAHPNDLYVEGLPENIPFRSPSWYGIPRLEKIIQVGNRIKFVIKRPELLTHSTTEVTQPRTNTPVKEDWNVRITKLRKQVEEIFNLKFAQALGLTEAVKVPYPVFESNPEFLYVEGLPEGIPFRSPTWFGIPRLERIVRGSNKIKFVVKKPELVISYLPPGMASKINTKALQSPKRPRSPGSNSKVPEIEVTVEGPNNNNPQTSAVRTPTQTNGSNVPFKPRGREFSFEAWNAKITDLKQKVENLFNEKCGEALGLKQAVKVPFALFESFPEDFYVEGLPEGVPFRRPSTFGIPRLEKILRNKAKIKFIIKKPEMFETAIKESTSSKSPPRKINSSPNVNTTASGVEDLNIIQVTIPDDDNERLSKVEKARQLREQVNDLFSRKFGEAIGMGFPVKVPYRKITINPGCVVVDGMPPGVSFKAPSYLEISSMRRILDSAEFIKFTVIRVFLKHSYTRIIHGCFPVTVSK

SEQ ID NO: 4134 - protein, 942 aa, Artificial Sequence
  Synthetic polypeptide
MAQVAMSTLPVEDEESSESRMVVTFLMSALESMCKELAKSKAEVACIAVYETDVFVVGTERGRAFVNTRKDFQKDFVKYCVEEEEKAAEMHKMKSTTQANRMSVDAVEIETLRKTVEDYFCFCYGKALGKSTVVPVPYEKMLRDQSAVVVQGLPEGVAFKHPENYDLATLKWILENKAGISFIIKRPFLEPKKHVGGRVMVTDADRSILSPGGSCGPIKVKTEPTEDSGISLEMAAVTVKEESEDPDYYQYNIQAGPSETDDVDEKQPLSKPLQGSHHSSEGNEGTEMEVPAEDDDYSPPSKRPKANELPQPPVPEPANAGKRKVREFNFEKWNARITDLRKQVEELFERKYAQAIKAKGPVTIPYPLFQSHVEDLYVEGLPEGIPFRRPSTYGIPRLERILLAKERIRFVIKKHELLNSTREDLQLDKPASGVKEEWYARITKLRKMVDQLFCKKFAEALGSTEAKAVPYQKFEAHPNDLYVEGLPENIPFRSPSWYGIPRLEKIIQVGNRIKFVIKRPELLTHSTTEVTQPRTNTPVKEDWNVRITKLRKQVEEIFNLKFAQALGLTEAVKVPYPVFESNPEFLYVEGLPEGIPFRSPTWFGIPRLERIVRGSNKIKFVVKKPELVISYLPPGMASKINTKALQSPKRPRSPGSNSKVPEIEVTVEGPNNNNPQTSAVRTPTQTNGSNVPFKPRGREFSFEAWNAKITDLKQKVENLFNEKCGEALGLKQAVKVPFALFESFPEDFYVEGLPEGVPFRRPSTFGIPRLEKILRNKAKIKFIIKKPEMFETAIKESTSSKSPPRKINSSPNVNTTASGVEDLNIIQVTIPDDDNERLSKVEKARQLREQVNDLFSRKFGEAIGMGFPVKVPYRKITINPGCVVVDGMPPGVSFKAPSYLEISSMRRILDSAEFIKFTVIRVFLKHSYTRIIHGCFPVTVSK

SEQ ID NO: 4135 - protein, 943 aa, Artificial Sequence
  Synthetic polypeptide
MAQVAMSTLPVEDEESSESRMVVTFLMSALESMCKELAKSKAEVACIAVYETDVFVVGTERGRAFVNTRKDFQKDFVKYCVEEEEKAAEMHKMKSTTQANRMSVDAVEIETLRKTVEDYFCFCYGKALGKSTVVPVPYEKMLRDQSAVVVQGLPEGVAFKHPENYDLATLKWILENKAGISFIIKRPFLEPKKHVGGRVMVTDADRSILSPGGSCGPIKVKTEPTEDSGISLEMAAVTVKEESEDPDYYQYNIQGSHHSSEGNEGTEMEVPAEDSTQHVPSETSEDPEVEVTIEDDDYSPPSKRPKANELPQPPVPEPANAGKRKVREFNFEKWNARITDLRKQVEELFERKYAQAIKAKGPVTIPYPLFQSHVEDLYVEGLPEGIPFRRPSTYGIPRLERILLAKERIRFVIKKHELLNSTREDLQLDKPASGVKEEWYARITKLRKMVDQLFCKKFAEALGSTEAKAVPYQKFEAHPNDLYVEGLPENIPFRSPSWYGIPRLEKIIQVGNRIKFVIKRPELLTHSTTEVTQPRTNTPVKEDWNVRITKLRKQVEEIFNLKFAQALGLTEAVKVPYPVFESNPEFLYVEGLPEGIPFRSPTWFGIPRLERIVRGSNKIKFVVKKPELVISYLPPGMASKINTKALQSPKRPRSPGSNSKVPEIEVTVEGPNNNNPQTSAVRTPTQTNGSNVPFKPRGREFSFEAWNAKITDLKQKVENLFNEKCGEALGLKQAVKVPFALFESFPEDFYVEGLPEGVPFRRPSTFGIPRLEKILRNKAKIKFIIKKPEMFETAIKESTSSKSPPRKINSSPNVNTTASGVEDLNIIQVTIPDDDNERLSKVEKARQLREQVNDLFSRKFGEAIGMGFPVKVPYRKITINPGCVVVDGMPPGVSFKAPSYLEISSMRRILDSAEFIKFTVIRVFLKHSYTRIIHGCFPVTVSK

SEQ ID NO: 4136 - protein, 922 aa, Artificial Sequence
  Synthetic polypeptide
MAQVAMSTLPVEDEESSESRMVVTFLMSALESMCKELAKSKAEVACIAVYETDVFVVGTERGRAFVNTRKDFQKDFVKYCVEEEEKAAEMHKMKSTTQANRMSVDAVEIETLRKTVEDYFCFCYGKALGKSTVVPVPYEKMLRDQSAVVVQGLPEGVAFKHPENYDLATLKWILENKAGISFIIKRPFLEPKKHVGGRVMVTDADRSILSPGGSCGPIKVKTEPTEDSGISLEMAAVTVKEESEDPDYYQYNIQGSHHSSEGNEGTEMEVPAEDDDYSPPSKRPKANELPQPPVPEPANAGKRKVREFNFEKWNARITDLRKQVEELFERKYAQAIKAKGPVTIPYPLFQSHVEDLYVEGLPEGIPFRRPSTYGIPRLERILLAKERIRFVIKKHELLNSTREDLQLDKPASGVKEEWYARITKLRKMVDQLFCKKFAEALGSTEAKAVPYQKFEAHPNDLYVEGLPENIPFRSPSWYGIPRLEKIIQVGNRIKFVIKRPELLTHSTTEVTQPRTNTPVKEDWNVRITKLRKQVEEIFNLKFAQALGLTEAVKVPYPVFESNPEFLYVEGLPEGIPFRSPTWFGIPRLERIVRGSNKIKFVVKKPELVISYLPPGMASKINTKALQSPKRPRSPGSNSKVPEIEVTVEGPNNNNPQTSAVRTPTQTNGSNVPFKPRGREFSFEAWNAKITDLKQKVENLFNEKCGEALGLKQAVKVPFALFESFPEDFYVEGLPEGVPFRRPSTFGIPRLEKILRNKAKIKFIIKKPEMFETAIKESTSSKSPPRKINSSPNVNTTASGVEDLNIIQVTIPDDDNERLSKVEKARQLREQVNDLFSRKFGEAIGMGFPVKVPYRKITINPGCVVVDGMPPGVSFKAPSYLEISSMRRILDSAEFIKFTVIRVFLKHSYTRIIHGCFPVTVSK

SEQ ID NO: 4137 - protein, 42 aa, Artificial Sequence
  Synthetic polypeptide
MELHILEHRLQVASVAKESIPLFTYGLIKLAFLSSKTRSLAL

SEQ ID NO: 4138 - protein, 75 aa, Artificial Sequence
  Synthetic polypeptide
MAGLMTIVTSLLFLGVCAHHIIPTGSVVIPSPCCMFFVSKRIPENRVVSYQLSSRSTCLKAGVILDNRVRPCVKK

SEQ ID NO: 4139 - protein, 75 aa, Artificial Sequence; identical to SEQ ID NO: 4138
  Synthetic polypeptide

SEQ ID NO: 4140 - protein, 281 aa, Artificial Sequence
  Synthetic polypeptide
MINMGDSHVDTSSTVSEAVAEEVSLFSMTDMILFSLIVGLLTYWFLFRKKKEEVPEFTKIQTLTSSVRESSFVEKMKKTGRNIIVFYGSQTGTAEEFANRLSKDAHRYGMRGMSADPEEYDLADLSSLPEIDNALVVFCMATYGEGDPTDNAQDFYDWLQETDVDLSGVKFAVFGLGNKTYEHFNAMGKYVDKRLEQLGAQRIFELGLGDDDGNLEEDFITWREQFWPAVCEHFGVEATGEESSIRQYELVVHTDIDAAKVYMGEMGRLKSYENQKPCSGG

SEQ ID NO: 4141 - protein, 281 aa, Artificial Sequence; identical to SEQ ID NO: 4140
  Synthetic polypeptide

SEQ ID NO: 4142 - protein, 95 aa, Artificial Sequence
  Synthetic polypeptide
MGKYVDKRLEQLGAQRIFELGLGDDDGNLEEDFITWREQFWPAVCEHFGVEATGEESSIRQYELVVHTDIDAAKVYMGEMGRLKSYENQKPCSGG

SEQ ID NO: 4143 - protein, 252 aa, Artificial Sequence
  Synthetic polypeptide
MINMGDSHVDTSSTVSEAVAEEVSLFSMTDMILFSLIVGLLTYWFLFRKKKEEVPEFTKIQTLTSSVRESSFVEKMKKTGRNIIVFYGSQTGTAEEFANRLSKDAHRYGMRGMSADPEEYDLADLSSLPEIDNALVVFCMATYGEGDPTDNAQDFYDWLQETDVDLSGVKFAVFGLGNKTYEHFNAMGKCGQGVHGGDGPAEELREPEALLRRLRQENCLNLGGRGCSEPRSRRCTPAWVAERNSVSKKKKR

SEQ ID NO: 4144 - protein, 89 aa, Artificial Sequence
  Synthetic polypeptide
DGHDSVFAHRGSPNLLVPLQKEKRRSPRVHQNSDIDLLCQREQLCGKDEENGEEHHRVLRLPDGDCRGVCQPPVQGRPPLRDARHVSGP

SEQ ID NO: 4145 - protein, 89 aa, Artificial Sequence
  Synthetic polypeptide
MPRTSTTGCRRQTWISLGSSSRLEEDFITWREQFWPAVCEHFGVEATGEESSIRQYELVVHTDIDAAKVYMGEMGRLKSYENQKPCSGG

SEQ ID NO: 4146 - protein, 180 aa, Artificial Sequence
  Synthetic polypeptide
MGSRWPAVPPWGLQIHVSERQPSRPPPCPQQPGQATCETLSSAPDPSTTRMSPPCPQPQSAPGGIGCWRLKVFGLGNKTYEHFNAMGKYVDKRLEQLGAQRIFELGLGDDDGNLEEDFITWREQFWPAVCEHFGVEATGEESSIRQYELVVHTDIDAAKVYMGEMGRLKSYENQKPCSGG

SEQ ID NO: 4147 - protein, 19 aa, Artificial Sequence
  Synthetic polypeptide
MGEMGRLKSYENQKPCSGG

SEQ ID NO: 4148 - protein, 43 aa, Artificial Sequence
  Synthetic polypeptide
MQPPPPGPLGDCLRDWEDLQQDFQNIQETHRLYRLKLEELTKL

SEQ ID NO: 4149 - protein, 282 aa, Artificial Sequence
  Synthetic polypeptide
MGLPWGQPHLGLQMLLLALNCLRPSLSLGEWGSWMDASSQTQGAGGPAGVIGPWAPAPLRLGEAAPGTPTPVSVAHLLSPVATELVPYTPQITAWDLEGKVTATTFSLEQPRCVFDGLASASDTVWLVVAFSNASRGFQNPETLADIPASPQLLTDGHYMTLPLSPDQLPCGDPMAGSGGAPVLRVGHDHGCHQQPFCNAPLPGPGPYREDPRIHRHLARAAKWQHDRHYLHPLFSGRPPTLGLLGSLYHALKRACFPFAFCRDCQLLEGSPAMLPVQPAKL

SEQ ID NO: 4150 - protein, 282 aa, Artificial Sequence; identical to SEQ ID NO: 4149
  Synthetic polypeptide

SEQ ID NO: 4151 - protein, 282 aa, Artificial Sequence; identical to SEQ ID NO: 4149
  Synthetic polypeptide

SEQ ID NO: 4152 - protein, 227 aa, Artificial Sequence
  Synthetic polypeptide
MGLPWGQPHLGLQMLLLALNCLRPSLSLELVPYTPQITAWDLEGKVTATTFSLEQPRCVFDGLASASDTVWLVVAFSNASRGFQNPETLADIPASPQLLTDGHYMTLPLSPDQLPCGDPMAGSGGAPVLRVGHDHGCHQQPFCNAPLPGPGPYREDPRIHRHLARAAKWQHDRHYLHPLFSGRPPTLGLLGSLYHALKRACFPFAFCRDCQLLEGSPAMLPVQPAKL

SEQ ID NO: 4153 - protein, 272 aa, Artificial Sequence
  Synthetic polypeptide
MGLPWGQPHLGLQMLLLALNCLRPSLSLELVPYTPQITAWDLEGKVTATTFSLEQPRCVFDGLASASDTVWLVVAFSNASRGFQNPETLADIPASPQLLTDGHYMTLPLSPDQLPCGDPMAGSGGAPVLRVGHDHGCHQQPFCNAPLPGPGPYRVKFLLMDTRGSPRAETKWSDPITLHQGKTPGSIDTWPGRRSGSMIVITSILSSLAGLLLLAFLAASTMRLNVPASPSPSAVIVSFLRAPQPCFLYSLQNCESIKPLFFINSPVSSSSS

SEQ ID NO: 4154 - protein, 272 aa, Artificial Sequence; identical to SEQ ID NO: 4153
  Synthetic polypeptide

SEQ ID NO: 4155 - protein, 272 aa, Artificial Sequence
  Synthetic polypeptide
MGLPWGQPHLGLQMLLLALNCLRPSLSLELVPYTPQITAWDLEGKVTATTFSLEQPRCVFDGLASASDTVWLVVAFSNASRGFQNPETLADIPASPQLLTDGHYMTLPLSPDQLPCGDPMAGSGGAPVLRVGHDHGCHQQPFCNAPLPGPGPYRVKFLLMDTRGSPRAETKWSDPITLHQGKTPGSIDTWPGRRSGSMIVITSILSSLAGLLLLAFLAASTMRLNVPASPSPSAVIVSFLRAPQPCFLYSLQNCESIKPLFFINSPVSSSSL

SEQ ID NO: 4156 - protein, 272 aa, Artificial Sequence; identical to SEQ ID NO: 4155
  Synthetic polypeptide

SEQ ID NO: 4157 - protein, 282 aa, Artificial Sequence; identical to SEQ ID NO: 4149
  Synthetic polypeptide

SEQ ID NO: 4158 - protein, 282 aa, Artificial Sequence; identical to SEQ ID NO: 4149
  Synthetic polypeptide

SEQ ID NO: 4159 - protein, 282 aa, Artificial Sequence; identical to SEQ ID NO: 4149
  Synthetic polypeptide

SEQ ID NO: 4160 - protein, 227 aa, Artificial Sequence; identical to SEQ ID NO: 4152
  Synthetic polypeptide

SEQ ID NO: 4161 - protein, 291 aa, Artificial Sequence
  Synthetic polypeptide
MGLPWGQPHLGLQMLLLALNCLRPSLSLELVPYTPQITAWDLEGKVTATTFSLEQPRCVFDGLASASDTVWLVVAFSNASRGFQNPETLADIPASPQLLTDGHYMTLPLSPDQLPCGDPMAGSGGAPVLRVGHDHGCHQQPFCNAPLPGPGPYRVKFLLMDTRGSPRAETKWSDPITLHQGKTPGSIDTWPGRRSGSMIVITSILSSLAGLLLLAFLAASTMRFSSLWWPEEAPEQLRIGSFMGKRYMTHHIPPREAATLPKRACFPFAFCRDCQLLEGSPAMLPVQPAKL

SEQ ID NO: 4162 - protein, 291 aa, Artificial Sequence; identical to SEQ ID NO: 4161
  Synthetic polypeptide

SEQ ID NO: 4163 - protein, 300 aa, Artificial Sequence
  Synthetic polypeptide
MGLPWGQPHLGLQMLLLALNCLRPSLSLGEWGSWMDASSQTQGAGGPAGVIGPWAPAPLRLGEAAPGTPTPVSVAHLLSPVATELVPYTPQITAWDLEGKVTATTFSLEQPRCVFDGLASASDTVWLVVAFSNASRGFQNPETLADIPASPQLLTDGHYMTLPLSPDQLPCGDPMAGSGGAPVLRVGHDHGCHQQPFCNAPLPGPGPYREDPRIHRHLARAAKWQHDRHYLHPLFSGRPPTLGLLGSLYHALLQPVVAGGGPGAAADRLLHGQALHDPPHPTQRGRHTAETCLLPLRLLP

SEQ ID NO: 4164 - protein, 300 aa, Artificial Sequence; identical to SEQ ID NO: 4163
  Synthetic polypeptide

SEQ ID NO: 4165 - protein, 300 aa, Artificial Sequence; identical to SEQ ID NO: 4163
  Synthetic polypeptide

SEQ ID NO: 4166 - protein, 245 aa, Artificial Sequence
  Synthetic polypeptide
MGLPWGQPHLGLQMLLLALNCLRPSLSLELVPYTPQITAWDLEGKVTATTFSLEQPRCVFDGLASASDTVWLVVAFSNASRGFQNPETLADIPASPQLLTDGHYMTLPLSPDQLPCGDPMAGSGGAPVLRVGHDHGCHQQPFCNAPLPGPGPYREDPRIHRHLARAAKWQHDRHYLHPLFSGRPPTLGLLGSLYHALLQPVVAGGGPGAAADRLLHGQALHDPPHPTQRGRHTAETCLLPLRLLP

SEQ ID NO: 4167 - protein, 291 aa, Artificial Sequence; identical to SEQ ID NO: 4161
  Synthetic polypeptide

SEQ ID NO: 4168 - protein, 291 aa, Artificial Sequence; identical to SEQ ID NO: 4161
  Synthetic polypeptide

SEQ ID NO: 4169 - protein, 300 aa, Artificial Sequence; identical to SEQ ID NO: 4163
  Synthetic polypeptide

SEQ ID NO: 4170 - protein, 300 aa, Artificial Sequence; identical to SEQ ID NO: 4163
  Synthetic polypeptide

SEQ ID NO: 4171 - protein, 300 aa, Artificial Sequence; identical to SEQ ID NO: 4163
  Synthetic polypeptide

SEQ ID NO: 4172 - protein, 245 aa, Artificial Sequence; identical to SEQ ID NO: 4166
  Synthetic polypeptide

SEQ ID NO: 4173 - protein, 128 aa, Artificial Sequence
  Synthetic polypeptide
MEQVEILRKFIQRVQAMKSPDHNGEDNFARDFMRLRRLSTKYRTEKIYPTATGEKEENVKKNRYKDILPFDHSRVKLTLKTPSQDSDYINANFIKGVYGPKAYVATQGPLANTVIDFWRMIWEYNVVI

SEQ ID NO: 4174 - protein, 9 aa, Artificial Sequence
  Synthetic polypeptide
MIWEYNVVI

SEQ ID NO: 4175 - protein, 9 aa, Artificial Sequence
  Synthetic polypeptide
MIWEYNVVI

SEQ ID NO: 4176 - protein, 9 aa, Artificial Sequence
  Synthetic polypeptide
MIWEYNVVI

SEQ ID NO: 4177 - protein, 9 aa, Artificial Sequence
  Synthetic polypeptide
MIWEYNVVI

SEQ ID NO: 4178 - protein, 9 aa, Artificial Sequence
  Synthetic polypeptide
MIWEYNVVI

SEQ ID NO: 4179 - protein, 39 aa, Artificial Sequence
  Synthetic polypeptide
CLPNIEQKRYIPQPLEKKKKMLKRTDTRTYCHLITAELN

SEQ ID NO: 4180 - protein, 101 aa, Artificial Sequence
  Synthetic polypeptide
MAAGCLLALTLTLFQSLLIGPSSEEPFPSAVTIKSWVDKMQEDLVTLAKTASGVNQLVDIYEKYQDLYTVEPNNARQLVEIAARDIEKLLSNRSKALVVSV

SEQ ID NO: 4181 - protein, 101 aa, Artificial Sequence; identical to SEQ ID NO: 4180
  Synthetic polypeptide

SEQ ID NO: 4182 - protein, 101 aa, Artificial Sequence; identical to SEQ ID NO: 4180
  Synthetic polypeptide

SEQ ID NO: 4183 - protein, 239 aa, Artificial Sequence
  Synthetic polypeptide
MSGHKCSYPWDLQDRYAQDKSVVNKMQQKYWETKQAFIKATGKKEDEHVVASDADLDAKLELFHSIQRTCLDLSKAIVLYQKRICFLSQEENELGKFLRSQGFQDKTRAGKMMQATGKALCFSSQQRLALRNPLCRFHQEVETFRHRAISDTWLTVNRMEQCRTEYRGALLWMKDVSQELDPDLYKQMEKFRKVQTQVRLAKKNFDKLKMDVCQKVDLLGASRCNLLSHMLATYQPLSS

SEQ ID NO: 4184 - protein, 239 aa, Artificial Sequence; identical to SEQ ID NO: 4183
  Synthetic polypeptide

SEQ ID NO: 4185 - protein, 239 aa, Artificial Sequence; identical to SEQ ID NO: 4183
  Synthetic polypeptide

SEQ ID NO: 4186 - protein, 239 aa, Artificial Sequence; identical to SEQ ID NO: 4183
  Synthetic polypeptide

SEQ ID NO: 4187 - protein, 239 aa, Artificial Sequence; identical to SEQ ID NO: 4183
  Synthetic polypeptide

SEQ ID NO: 4188 - protein, 239 aa, Artificial Sequence; identical to SEQ ID NO: 4183
  Synthetic polypeptide

SEQ ID NO: 4189 - protein, 238 aa, Artificial Sequence
  Synthetic polypeptide
MSGHKCYPWDLQDRYAQDKSVVNKMQQKYWETKQAFIKATGKKEDEHVVASDADLDAKLELFHSIQRTCLDLSKAIVLYQKRICFLSQEENELGKFLRSQGFQDKTRAGKMMQATGKALCFSSQQRLALRNPLCRFHQEVETFRHRAISDTWLTVNRMEQCRTEYRGALLWMKDVSQELDPDLYKQMEKFRKVQTQVRLAKKNFDKLKMDVCQKVDLLGASRCNLLSHMLATYQPLSS

SEQ ID NO: 4190 - protein, 227 aa, Artificial Sequence
  Synthetic polypeptide
MDRYAQDKSVVNKMQQKYWETKQAFIKATGKKEDEHVVASDADLDAKLELFHSIQRTCLDLSKAIVLYQKRICFLSQEENELGKFLRSQGFQDKTRAGKMMQATGKALCFSSQQRLALRNPLCRFHQEVETFRHRAISDTWLTVNRMEQCRTEYRGALLWMKDVSQELDPDLYKQMEKFRKVQTQVRLAKKNFDKLKMDVCQKVDLLGASRCNLLSHMLATYQPLSS

SEQ ID NO: 4191 - protein, 227 aa, Artificial Sequence; identical to SEQ ID NO: 4190
  Synthetic polypeptide

SEQ ID NO: 4192 - protein, 50 aa, Artificial Sequence
  Synthetic polypeptide
MEDFATRTYGTSGLDNRPLFGETSAKASVTCGQPWSKNIKWKTSEIICKF

SEQ ID NO: 4193 - protein, 50 aa, Artificial Sequence; identical to SEQ ID NO: 4192
  Synthetic polypeptide

SEQ ID NO: 4194 - protein, 50 aa, Artificial Sequence; identical to SEQ ID NO: 4192
  Synthetic polypeptide

SEQ ID NO: 4195 - protein, 612 aa, Artificial Sequence
  Synthetic polypeptide
MENQLAKSTEERTFQYQDSLPSLPVPSLEESLKKYLESVTRTCYQIRGLDPDAKRGFLDLTREGIQVKPFANQEEYKKTEEIVQKFQSGIGEKLHQKLLERAKGKRNWLEEWWLNVAYLDVRIPSQLNVNFAGPAAHFEHYWPPKEGTQLERGSITLWHNLNYWQLLRKEKVPVHKVGNTPLDMNQFRMLFSTCKVPGITRDSIMNYFRTESEGRSPNHIVVLCRGRAFVFDVIHEGCLVTPPELLRQLTYIHKKCHSEPDGPGIAALTSEERTRWAKAREYLIGLDPENLALLEKIQSSLLVYSMEDSSPHVTPEDYSEIIAAILIGDPTVRWGDKSYNLISFSNGVFGCNCDHAPFDAMIMVNISYYVDEKIFQNEGRWKGSEKVRDIPLPEELIFIVDEKVLNDINQAKAQYLREASDLQIAAYAFTSFGKKLTKNKMLHPDTFIQLALQLAYYRLHGHPGCCYETAMTRHFYHGRTETMRSCTVEAVRWCQSMQDPSVNLRERQQKMLQAFAKHNKMMKDCSAGKGFDRHLLGLLLIAKEEGLPVPELFTDPLFSKSGGGGNFVLSTSLVGYLRVQGVVVPMVHNGYGFFYHIRDDREHHESLEGLHH

SEQ ID NO: 4196 - protein, 584 aa, Artificial Sequence
  Synthetic polypeptide
MENQLAKSTEERTFQYQDSLPSLPVPSLEESLKKYLESVKPFANQEEYKKTEEIVQKFQSGIGEKLHQKLLERAKGKRNWLEEWWLNVAYLDVRIPSQLNVNFAGPAAHFEHYWPPKEGTQLERGSITLWHNLNYWQLLRKEKVPVHKVGNTPLDMNQFRMLFSTCKVPGITRDSIMNYFRTESEGRSPNHIVVLCRGRAFVFDVIHEGCLVTPPELLRQLTYIHKKCHSEPDGPGIAALTSEERTRWAKAREYLIGLDPENLALLEKIQSSLLVYSMEDSSPHVTPEDYSEIIAAILIGDPTVRWGDKSYNLISFSNGVFGCNCDHAPFDAMIMVNISYYVDEKIFQNEGRWKGSEKVRDIPLPEELIFIVDEKVLNDINQAKAQYLREASDLQIAAYAFTSFGKKLTKNKMLHPDTFIQLALQLAYYRLHGHPGCCYETAMTRHFYHGRTETMRSCTVEAVRWCQSMQDPSVNLRERQQKMLQAFAKHNKMMKDCSAGKGFDRHLLGLLLIAKEEGLPVPELFTDPLFSKSGGGGNFVLSTSLVGYLRVQGVVVPMVHNGYGFFYHIRDDREHHESLEGLHH

SEQ ID NO: 4197 - protein, 584 aa, Artificial Sequence; identical to SEQ ID NO: 4196
  Synthetic polypeptide

SEQ ID NO: 4198 - protein, 40 aa, Artificial Sequence
  Synthetic polypeptide
MQSLSLGQTRPIKALDSARRGYNGTASCGEKLPAQESPFC

SEQ ID NO: 4199 - protein, 40 aa, Artificial Sequence; identical to SEQ ID NO: 4198
  Synthetic polypeptide

SEQ ID NO: 4200 - protein, 34 aa, Artificial Sequence
  Synthetic polypeptide
MEDALFLRTLHLMDQLAPPTNKLAYLMLWPPLRN

SEQ ID NO: 4201 - protein, 11 aa, Artificial Sequence
  Synthetic polypeptide
MEDALFLRISV

SEQ ID NO: 4202 - protein, 211 aa, Artificial Sequence
  Synthetic polypeptide
MPLGLKPTCSVCKTTSSSMWKKGAQGEILCHHCTGRGGAGSGGAGSGAAGGTGGSGGGGFGAATFASTSATPPQSNGGGGGKQSKQEIHRRSARLRNTKYKSAPAAEKKVSTKGKGRRHIFKLKNPIKAPESVSTIITAESIFYKGVYYQIGDVVSVIDEQDGKPYYAQIRGFIQDQYCEKSAALTWLIPTLSSPRDQFDPASYIIDCLRC

SEQ ID NO: 4203 - protein, 270 aa, Artificial Sequence [sequence omitted]

SEQ ID NO: 4204 - protein, 270 aa, Artificial Sequence [sequence omitted]

SEQ ID NO: 4205 - protein, 81 aa, Artificial Sequence
  Synthetic polypeptide
MLEEEDYPGAIQLCLECQKAASTFKHYSCISELNSKLQDTLEQIEEQLDVALSKICKNFDINHYTKVQQAYRLLGKTQKLP

SEQ ID NO: 4206 - protein, 240 aa, Artificial Sequence
  Synthetic polypeptide
MLTLEEFRELREQPSDPQAEQELINSIEQVYFSVDSFDIVKYELEKLPPVLNLQELEAYRDKLKQQQAAVSKKVADLILEKQPAYVKELERVTSLQTGLQLAAVICTNGRRHLNIAKEGFTQASLGLLANQRKRQLLIGLLKSLRTIKTLQRTDVRLSEMLEEEDYPGAIQLCLECQKAASTFKHYSCISELNSKLQDTLEQIEEQLDVALSKICKNFDINHYTKVQQAYRLLGKTQKLP

SEQ ID NO: 4207 - protein, 5 aa, Artificial Sequence
  Synthetic polypeptide
NITVV

SEQ ID NO: 4208 - protein, 218 aa, Artificial Sequence
  Synthetic polypeptide
MDPARPLGLSILLLFLTEAALGDAAQEPTGNNAEICLLPLDYGPCRALLLRYYYDRYTQSCRQFLYGGCEGNANNFYTWEACDDACWRIEKVPKVCRLQVSVDDQCEGSTEKYFFNLSSMTCEKFFSGGCHRNRIENRFPDEATCMGFCAPKKIPSFCYSPKDEGLCSANVTRYYFNPRYRTCDAFTYTGCGGNDNNFVSREDCKRACAKGLRPIVAS

SEQ ID NO: 4209 - protein, 107 aa, Artificial Sequence
  Synthetic polypeptide
EACDDACWRIEKVPKVCRLQVSVDDQCEGSTEKYFFNLSSMTCEKFFSGGCHRNRIENRFPDEATCMGFCAPKKNTEPVMLSPILAVEGMTITLLAGRIANVHVQKG

SEQ ID NO: 4210 - protein, 183 aa, Artificial Sequence
  Synthetic polypeptide
MDGTTAPVTKSGAAKLVKRNFLEALKSNDFGKLKAILIQRQIDVDTVFEVEDENMVLASYKQGYWLPSYKLKSSWATGLHLSVLFGHVECLLVLLDHNATINCRPNGKTPLHVACEMANVDCVKILCDRGAKLNCYSLSGHTALHFCTTPSSILCAKQLVWRGSWKTTLSSPLEVQQAYDSSS

SEQ ID NO: 4211 - protein, 183 aa, Artificial Sequence; identical to SEQ ID NO: 4210
  Synthetic polypeptide

SEQ ID NO: 4212 - protein, 374 aa, Artificial Sequence
  Synthetic polypeptide
MDGTTAPVTKSGAAKLVKRNFLEALKSNDFGKLKAILIQRQIDVDTVFEVEDENMVLASYKQGYWLPSYKLKSSWATGLHLSVLFGHVECLLVLLDHNATINCRPNGKTPLHVACEMANVDCVKILCDRGAKLNCYSLSGHTALHFCTTPSSILCAKQLVWRGANVNMKTNNQDEETPLHTAAHFGLSELVAFYVEHGAIVDSVNAHMETPLAIAAYWALRFKEQEYSTEHHLVCRMLLDYKAEVNARDDDFKSPLHKAAWNCDHVLMHMMLEAGAEANLMDINGCAAIQYVLKVTSVRPAAQPEICYQLLLNHGAARIYPPQFHKVIQACHSCPKAIEVVVNAYEHIRWNTKWRRAIPDDDLEQLGWSWRPLF

SEQ ID NO: 4213 - protein, 513 aa, Artificial Sequence
  Synthetic polypeptide
MSDKSDLKAELERKKQRLAQIREEKKRKEEERKKKEADMQQKKEPVQDDSDLDRKRRETEALLQSIGISPEPPLVPTPMSPSSKSVSTPSEAGSQDSGDLGPLTRTLQWDTDPSVLQLQSDSELGRRLHKLGVSKVTQVDFLPREVVSYSKETQTPLATHQSEEDEEDEEMVESKVGQDSELENQDKKQEVKEAPPRELTEEEKQQILHSEEFLIFFDRTIRVIERALAEDSDIFFDYSGRELEEKDGDVQAGANLSFNRQFYDEHWSKHRVVTCMDWSLQYPELMVASYNNNEDAPHEPDGVALVWNMKFKKTTPEYVFHCQSSVMSVCFARFHPNLVVGGTYSGQIVLWDNRSHRRTPVQRTPLSAAAHTHPVYCVNVVGTQNAHNLITVSTDGKMCSWSLDMLSTPQESMELVYNKSKPVAVTGMAFPTGDVNNFVVGSEEGTVYTACRHGSKAGIGEVFEGHQGPVTGINCHMAVGPIDFSHLFVTSSFDWTVKLWTTKESMPKIYQQK

SEQ ID NO: 4214 - protein, 513 aa, Artificial Sequence; identical to SEQ ID NO: 4213
  Synthetic polypeptide

SEQ ID NO: 4215 - protein, 530 aa, Artificial Sequence
  Synthetic polypeptide
MSDKSDLKAELERKKQRLAQIREEKKRKEEERKKKEADMQQKKEPVQDDSDLDRKRRETEALLQSIGISPEPPLVQPLHFLTWDTCYFHYLVPTPMSPSSKSVSTPSEAGSQDSGDLGPLTRTLQWDTDPSVLQLQSDSELGRRLHKLGVSKVTQVDFLPREVVSYSKETQTPLATHQSEEDEEDEEMVESKVGQDSELENQDKKQEVKEAPPRELTEEEKQQILHSEEFLIFFDRTIRVIERALAEDSDIFFDYSGRELEEKDGDVQAGANLSFNRQFYDEHWSKHRVVTCMDWSLQYPELMVASYNNNEDAPHEPDGVALVWNMKFKKTTPEYVFHCQSSVMSVCFARFHPNLVVGGTYSGQIVLWDNRSHRRTPVQRTPLSAAAHTHPVYCVNVVGTQNAHNLITVSTDGKMCSWSLDMLSTPQESMELVYNKSKPVAVTGMAFPTGDVNNFVVGSEEGTVYTACRHGSKAGIGEVFEGHQGPVTGINCHMAVGPIDFSHLFVTSSFDWTVKLWTTKESMPKIYQQK

SEQ ID NO: 4216 - protein, 493 aa, Artificial Sequence
  Synthetic polypeptide
MSDKSDLKAELERKKQRLAQIREEKKRKEEERKKKEADMQQKKEPVQDDSDLDRKRRETEALLQSIGISPEPPLVPTPMSPSSKSVSTPSEAGSQDSGDLGPLTRRRLHKLGVSKVTQVDFLPREVVSYSKETQTPLATHQSEEDEEDEEMVESKVGQDSELENQDKKQEVKEAPPRELTEEEKQQILHSEEFLIFFDRTIRVIERALAEDSDIFFDYSGRELEEKDGDVQAGANLSFNRQFYDEHWSKHRVVTCMDWSLQYPELMVASYNNNEDAPHEPDGVALVWNMKFKKTTPEYVFHCQSSVMSVCFARFHPNLVVGGTYSGQIVLWDNRSHRRTPVQRTPLSAAAHTHPVYCVNVVGTQNAHNLITVSTDGKMCSWSLDMLSTPQESMELVYNKSKPVAVTGMAFPTGDVNNFVVGSEEGTVYTACRHGSKAGIGEVFEGHQGPVTGINCHMAVGPIDFSHLFVTSSFDWTVKLWTTKESMPKIYQQK

SEQ ID NO: 4217 - protein, 493 aa, Artificial Sequence; identical to SEQ ID NO: 4216
  Synthetic polypeptide

SEQ ID NO: 4218 - protein, 510 aa, Artificial Sequence
  Synthetic polypeptide
MSDKSDLKAELERKKQRLAQIREEKKRKEEERKKKEADMQQKKEPVQDDSDLDRKRRETEALLQSIGISPEPPLVQPLHFLTWDTCYFHYLVPTPMSPSSKSVSTPSEAGSQDSGDLGPLTRRRLHKLGVSKVTQVDFLPREVVSYSKETQTPLATHQSEEDEEDEEMVESKVGQDSELENQDKKQEVKEAPPRELTEEEKQQILHSEEFLIFFDRTIRVIERALAEDSDIFFDYSGRELEEKDGDVQAGANLSFNRQFYDEHWSKHRVVTCMDWSLQYPELMVASYNNNEDAPHEPDGVALVWNMKFKKTTPEYVFHCQSSVMSVCFARFHPNLVVGGTYSGQIVLWDNRSHRRTPVQRTPLSAAAHTHPVYCVNVVGTQNAHNLITVSTDGKMCSWSLDMLSTPQESMELVYNKSKPVAVTGMAFPTGDVNNFVVGSEEGTVYTACRHGSKAGIGEVFEGHQGPVTGINCHMAVGPIDFSHLFVTSSFDWTVKLWTTKESMPKIYQQK

SEQ ID NO: 4219 - protein, 33 aa, Artificial Sequence
  Synthetic polypeptide
MSNPGTRRNGSSIKIRLTEFDKLIKIYLEMQEI

SEQ ID NO: 4220 - protein, 33 aa, Artificial Sequence; identical to SEQ ID NO: 4219
  Synthetic polypeptide

SEQ ID NO: 4221 - protein, 313 aa, Artificial Sequence
  Synthetic polypeptide
MHERFIHCFCIDWAPKSDRIVTCGADRNAYVWSQKDGVWKPTLVILRINRAATFVKWSPLENKFAVGSGARLISVCYFESENDWWVSKHIKKPIRSTVLSLDWHPNNVLLAAGSCDFKCRVFSAYIKEVDEKPASTPWGSKMPFGQLMSEFGGSGTGGWVHGVSFSASGSRLAWVSHDSTVSVADASKSVQVSTLKTEFLPLLSVSFVSENSVVAAGHDCCPMLFNYDDRGCLTFVSKLDIPKQSIQRNMSAMERFRNMDKRATTEDRNTALETLHQNSITQVSIYEVDKQDCRKFCTTGIDGAMTIWDFKVQ

SEQ ID NO: 4222 - protein, 360 aa, Artificial Sequence
  Synthetic polypeptide
MSLHQFLLEPITCHAWNRDRTQIALSPNNHEVHIYKKNGSQWVKAHELKEHNGHITGIDWAPKSDRIVTCGADRNAYVWSQKDGVWKPTLVILRINRAATFVKWSPLENKFAVGSGARLISVCYFESENDWWVSKHIKKPIRSTVLSLDWHPNNVLLAAGSCDFKCRVFSAYIKEVDEKPASTPWGSKMPFGQLMSEFGGSGTGGWVHGVSFSASGSRLAWVSHDSTVSVADASKSVQVSTLKTEFLPLLSVSFVSENSVVAAGHDCCPMLFNYDDRGCLTFVSKLDIPKQSIQRNMSAMERFRNMDKRATTEDRNTALETLHQNSITQVSIYEVDKQDCRKFCTTGIDGAMTIWDFKVQ

SEQ ID NO: 4223 - protein, 367 aa, Artificial Sequence
  Synthetic polypeptide
MAYHSFLVEPISCHAWNKDRTQIAICPNNHEVHIYEKSGAKWTKVHELKEHNGQVTGIDWAPESNRIVTCGTDRNAYVWTLKGRTWKPTLVILRINRAARCVRWAPNENKFAVGSGSRVISICYFEQENDWWVCKHIKKPIRSTVLSLDWHPNNVLLAAGSCDFKCRIFSAYIKEVEERPAPTPWGSKMPFGELMFESSSSCGWVHGVCFSASGSRVAWVSHDSTVCLADADKKMAVATLASETLPLLALTFITDNSLVAAGHDCFPVLFTYDAAAGMLSFGGRLDVPKQSSQRGLTARERFQNLDKKASSEGGTAAGAGLDSLHKNSVSQISVLSGGKAKCSQFCTTGMDGGMSIWDVKACFLMVW

SEQ ID NO: 4224 - protein, 367 aa, Artificial Sequence; identical to SEQ ID NO: 4223
  Synthetic polypeptide

SEQ ID NO: 4225 - protein, 188 aa, Artificial Sequence
  Synthetic polypeptide
MSCRGRGAGGRWNSTSWSTGCKLPASPRRVSRCSPTGLIKLAFLFSKTRCKFFSLTETPEDYTIIVDEEGFLELPSSEHLSVADATWLALNVVSGGGSFSSSQPIGMTKIAKSVIAPLADQNISVFMLSTYQTDFILVRIQLEASSLQAGRRPSPEPNPWTSASRTVRNTYLLFVRHQSMEFCYSSLN

SEQ ID NO: 4226 - protein, 237 aa, Artificial Sequence
  Synthetic polypeptide
MKMHFCIPVSQQRSDALGGRYVLYSVHLDGFLFCRVRYSQLHGWNEQLRRVFGNCLPPFPPKYYLAMTTAMADERRDQLEQYLQNVTMDPNVLRSDVFVEFLKLAQLNTFDIATKKAYLDIFLPNEQSIRIEIITSDTAERVLEVVSHKIGLCRELLGYFGLFLIRFGKEGKLSVVKKLADFELPYVSLGSSEVENCKVGLRKWYMAPSLDSVLMDCRVAVDLLYMQVDPENYVVGP

SEQ ID NO: 4227 - protein, 138 aa, Artificial Sequence
  Synthetic polypeptide
MLGNTENWNTFDIATKKAYLDIFLPNEQSIRIEIITSDTAERVLEVVSHKIGLCRELLGYFGLFLIRFGKEGKLSVVKKLADFELPYVSLGSSEVENCKVGLRKWYMAPSLDSVLMDCRVAVDLLYMQVDPENYVVGP

SEQ ID NO: 4228 - protein, 11 aa, Artificial Sequence
  Synthetic polypeptide
PERVFSIWYNH

SEQ ID NO: 4229 - protein, 27 aa, Artificial Sequence
  Synthetic polypeptide
SMENKFMLVELRKRWNGRRNLSANLNR

SEQ ID NO: 4230 - protein, 455 aa, Artificial Sequence
  Synthetic polypeptide
MNPSAPSYPMASLYVGDLHPDVTEAMLYEKFSPAGPILSIRVCRDMITRRSLGYAYVNFQQPADAERALDTMNFDVIKGKPVRIMWSQRDPSLRKSGVGNIFIKNLDKSIDNKALYDTFSAFGNILSCKVVCDENGSKGYGFVHFETQEAAERAIEKMNGMLLNDRKVFVGRFKSRKEREAELGARAKEFTNVYIKNFGEDMDDERLKDLFGKFGPALSVKVMTDESGKSKGFGFVSFERHEDAQKAVDEMNGKELNGKQIYVGRAQKKVERQTELKRKFEQMKQDRITRYQGVNLYVKNLDDGIDDERLRKEFSPFGTITSAKVMMEGGRSKGFGFVCFSSPEEATKAVTEMNGRIVATKPLYVALAQRKEERQAHLTNQYMQRMASVRAVPNPVINPYQPAPPSGYFMAAIPQTQNRAAYYPPSQIAQLRPSPRWTAQGARPHRKTRPYRDRS

SEQ ID NO: 4231 - protein, 410 aa, Artificial Sequence
  Synthetic polypeptide
MITRRSLGYAYVNFQQPADAERALDTMNFDVIKGKPVRIMWSQRDPSLRKSGVGNIFIKNLDKSIDNKALYDTFSAFGNILSCKVVCDENGSKGYGFVHFETQEAAERAIEKMNGMLLNDRKVFVGRFKSRKEREAELGARAKEFTNVYIKNFGEDMDDERLKDLFGKFGPALSVKVMTDESGKSKGFGFVSFERHEDAQKAVDEMNGKELNGKQIYVGRAQKKVERQTELKRKFEQMKQDRITRYQGVNLYVKNLDDGIDDERLRKEFSPFGTITSAKVMMEGGRSKGFGFVCFSSPEEATKAVTEMNGRIVATKPLYVALAQRKEERQAHLTNQYMQRMASVRAVPNPVINPYQPAPPSGYFMAAIPQTQNRAAYYPPSQIAQLRPSPRWTAQGARPHRKTRPYRDRS

SEQ ID NO: 4232 - protein, 423 aa, Artificial Sequence
  Synthetic polypeptide
MNPSAPSYPMASLYVGDLHPDVTEAMLYEKFSPAGPILSIRVCRDMITRRSLGYAYVNFQQPADAERALDTMNFDVIKGKPVRIMWSQRDPSLRKSGVVCDENGSKGYGFVHFETQEAAERAIEKMNGMLLNDRKVFVGRFKSRKEREAELGARAKEFTNVYIKNFGEDMDDERLKDLFGKFGPALSVKVMTDESGKSKGFGFVSFERHEDAQKAVDEMNGKELNGKQIYVGRAQKKVERQTELKRKFEQMKQDRITRYQGVNLYVKNLDDGIDDERLRKEFSPFGTITSAKVMMEGGRSKGFGFVCFSSPEEATKAVTEMNGRIVATKPLYVALAQRKEERQAHLTNQYMQRMASVRAVPNPVINPYQPAPPSGYFMAAIPQTQNRAAYYPPSQIAQLRPSPRWTAQGARPHRKTRPYRDRS

SEQ ID NO: 4233 - protein, 239 aa, Artificial Sequence
  Synthetic polypeptide
MSAPVGPRGRLAPIPAASQPPLQPEMPDLSHLTEEERKIILAVMDRQKKEEEKEQSVLKKLHQQFEMYKEQVKKMGEESQQQQEQKGDAPTCGICHKTKFADGCGHNCSYCQTKFCARCGGRVSLRSNKVMWVCNLCRKQQEILTKSGAWFYNSGSNTPQQPDQKVLRGLRNEEAPQEKKPKLHEQTQFQGPSGDLSVPAVEKSRSHGLTRQHSIKNGSGVKHHIASDIASDRKTSSEL

SEQ ID NO: 4234 - protein, 239 aa, Artificial Sequence; identical to SEQ ID NO: 4233
  Synthetic polypeptide

SEQ ID NO: 4235 - protein, 20 aa, Artificial Sequence
  Synthetic polypeptide
LNAELGCSHGRPYTVKRDHR

SEQ ID NO: 4236 - protein, 274 aa, Artificial Sequence
  Synthetic polypeptide
MAEYDLTTRIAHFLDRHLVFPLLEFLSVKEIYNEKELLQGKLDLLSDTNMVDFAMDVYKNLYSDDIPHALREKRTTVVAQLKQLQAETEPIVKMFEDPETTRQMQSTRDGRMLFDYLADKHGFRQEYLDTLYRYAKFQYECGNYSGAAEYLYFFRVLVPATDRNALSSLWGKLASEILMQNWDAAMEDLTRLKETIDNNSVSSPLQSLQQRTWLIHWSLFVFFNHPKGRDNIIDLFLYQPHAYLPCQNREVNFDYDYKAQWSGDFYCRNYKAKY

SEQ ID NO: 4237 - protein, 181 aa, Artificial Sequence
  Synthetic polypeptide
MFEDPETTRQMQSTRDGRMLFDYLADKHGFRQEYLDTLYRYAKFQYECGNYSGAAEYLYFFRVLVPATDRNALSSLWGKLASEILMQNWDAAMEDLTRLKETIDNNSVSSPLQSLQQRTWLIHWSLFVFFNHPKGRDNIIDLFLYQPHAYLPCQNREVNFDYDYKAQWSGDFYCRNYKAKY

SEQ ID NO: 4238 - protein, 147 aa, Artificial Sequence
  Synthetic polypeptide
MAEYDLTTRIAHFLDRHLVFPLLEFLSVKEVPATDRNALSSLWGKLASEILMQNWDAAMEDLTRLKETIDNNSVSSPLQSLQQRTWLIHWSLFVFFNHPKGRDNIIDLFLYQPHAYLPCQNREVNFDYDYKAQWSGDFYCRNYKAKY

SEQ ID NO: 4239 - protein, 132 aa, Artificial Sequence
  Synthetic polypeptide
MAKVSELYDVTWEEMRDKMRKWREENSRNSEQIVEVGEELINEYASKLGDDIWIIYEQVMIAALDYGRDDLALFCLQELRRQFPGSHRVKRLTGMRFEAMERYDDAIQLYDRILQEDPTNTGETPSLLKSKN

SEQ ID NO: 4240 - protein, 6 aa, Artificial Sequence
  Synthetic polypeptide
GSYMNR

SEQ ID NO: 4241 - protein, 274 aa, Artificial Sequence
  Synthetic polypeptide
MWQLWASLCCLLVLANARSRPSFHPLSDELVNYVNKRNTTWQAGHNFYNVDMSYLKRLCGTFLGGPKPPQRVMFTEDLKLPASFDAREQWPQCPTIKEIRDQGSCGSCWAFGAVEAISDRICIHTNAHVSVEVSAEDLLTCCGSMCGDGCNGGYPAEAWNFWTRKGLVSGGLYESHVGCRPYSIPPCEHHVNGSRPPCTGEGDTPKCSKICEPGYSPTYKQDKHYGYNSYSVSNSEKDIMAEIYKNGPVEGAFSVYSDFLLYKSGVLRSALATR

SEQ ID NO: 4242 - protein, 274 aa, Artificial Sequence; identical to SEQ ID NO: 4241
  Synthetic polypeptide

SEQ ID NO: 4243 - protein, 274 aa, Artificial Sequence; identical to SEQ ID NO: 4241
  Synthetic polypeptide

SEQ ID NO: 4244 - protein, 274 aa, Artificial Sequence; identical to SEQ ID NO: 4241
  Synthetic polypeptide

SEQ ID NO: 4245 - protein, 274 aa, Artificial Sequence; identical to SEQ ID NO: 4241
  Synthetic polypeptide

SEQ ID NO: 4246 - protein, 274 aa, Artificial Sequence; identical to SEQ ID NO: 4241
  Synthetic polypeptide

SEQ ID NO: 4247 - protein, 274 aa, Artificial Sequence; identical to SEQ ID NO: 4241
  Synthetic polypeptide

SEQ ID NO: 4248 - protein, 274 aa, Artificial Sequence; identical to SEQ ID NO: 4241
  Synthetic polypeptide

SEQ ID NO: 4249 - protein, 124 aa, Artificial Sequence
  Synthetic polypeptide
MGPGDFRRCRERISQGLQGLPGRAELWFPPRPACDFFGDGRSTDIQEEALAASPLLEDLRRRLTRAFQWAVQRAISRRVQEAAAAAAAREEQSWTGVEATLARLRAELVFSHAIVKLAYAAATL

SEQ ID NO: 4250 - protein, 92 aa, Artificial Sequence
  Synthetic polypeptide
MASPSGSSEATGKPRGRDGRPRREEDDVPPEEKRLRLLLEGGSAEPEDCEDGEDVPRPGREETGTQTGGDGRGAQWLTPVILALWEAKAGGS

SEQ ID NO: 4251 - protein, 47 aa, Artificial Sequence
  Synthetic polypeptide
MSAGGASVPPPPNPAVSFPPPRVTLPAGPDILRTYSGAFVCLEIHLA

SEQ ID NO: 4252 - protein, 1075 aa, Artificial Sequence
  Synthetic polypeptide
MKIFQRKMRYWLLPPFLAIVYFCTIVQGQVAPPTRLRYNVISHDSIQISWKAPRGKFGGYKLLVTPTSGGKTNQLNLQNTATKAIIQGLMPDQNYTVQIIAYNKDKESKPAQGQFRIKDLEKRKDPKPRVKVVDRGNGSRPSSPEEVKFVCQTPAIADIVILVDGSWSIGRFNFRLVRHFLENLVTAFDVGSEKTRIGLAQYSGDPRIEWHLNAFSTKDEVIEAVRNLPYKGGNTLTGLALNYIFENSFKPEAGSRTGVSKIGILITDGKSQDDIIPPSRNLRESGVELFAIGVKNADVNELQEIASEPDSTHVYNVAEFDLMHTVVESLTRTLCSRVEEQDREIKASAHAITGPPTELITSEVTARSFMVNWTHAPGNVEKYRVVYYPTRGGKPDEVVVDGTVSSTVLKNLMSLTEYQIAVFAIYAHTASEGLRGTETTLALPMASDLLLYDVTENSMRVKWDAVPGASGYLILYAPLTEGLAGDEKEMKIGETHTDIELSGLLPNTEYTVTVYAMFGEEASDPVTGQETTLALSPPRNLRISNVGSNSARLTWDPTSRQINGYRIVYNNADGTEINEVEVDPITTFPLKGLTPLTEYTIAIFSIYDEGQSEPLTGVFTTEEVPAQQYLEIDEVTTDSFRVTWHPLSADEGLHKLMWIPVYGGKTEEVVLKEEQDSHVIEGLEPGTEYEVSLLAVLDDGSESEVVTAVGTTLDSFWTEPATTIVPTTSVTSVFQTGIRNLVVGDETTSSLRVKWDISDSDVQQFRVTYMTAQGDPEEEVIGTVMVPGSQNNLLLKPLLPDTEYKVTVTPIYTDGEGVSVSAPGKTLPSSGPQNLRVSEEWYNRLRITWDPPSSPVKGYRIVYKPVSVPGPTLETFVGADINTILITNLLSGMDYNVKIFASQASGFSDALTGMVKTLFLGVTNLQAKHVEMTSLCAHWQVHRHATAYRVVIESLQDRQKQESTVGGGTTRHCFYGLQPDSEYKISVYTKLQEIEGPSVSIMEKTQSLPTRPPTFPPTIPPAKEVCKAAKADLVFMVDGSWSIGDENFNKIISFLYSTVGALNKIGTDGTQHYSQ

SEQ ID NO: 4253 - protein, 1075 aa, Artificial Sequence; identical to SEQ ID NO: 4252
  Synthetic polypeptide

SEQ ID NO: 4254 - protein, 980 aa, Artificial Sequence
  Synthetic polypeptide
MKIFQRKMRYWLLPPFLAIVYFCTIVQGQVAPPTRLRYNVISHDSIQISWKAPRGKFGGYKLLVTPTSGGKTNQLNLQNTATKAIIQGLMPDQNYTVQIIAYNKDKESKPAQGQFRIKDLEKRKDPKPRVKVVDRGNGSRPSSPEEVKFVCQTPAIADIVILVDGSWSIGRFNFRLVRHFLENLVTAFDVGSEKTRIGVKNADVNELQEIASEPDSTHVYNVAEFDLMHTVVESLTRTLCSRVEEQDREIKASAHAITGPPTELITSEVTARSFMVNWTHAPGNVEKYRVVYYPTRGGKPDEVVVDGTVSSTVLKNLMSLTEYQIAVFAIYAHTASEGLRGTETTLALPMASDLLLYDVTENSMRVKWDAVPGASGYLILYAPLTEGLAGDEKEMKIGETHTDIELSGLLPNTEYTVTVYAMFGEEASDPVTGQETTLALSPPRNLRISNVGSNSARLTWDPTSRQINGYRIVYNNADGTEINEVEVDPITTFPLKGLTPLTEYTIAIFSIYDEGQSEPLTGVFTTEEVPAQQYLEIDEVTTDSFRVTWHPLSADEGLHKLMWIPVYGGKTEEVVLKEEQDSHVIEGLEPGTEYEVSLLAVLDDGSESEVVTAVGTTLDSFWTEPATTIVPTTSVTSVFQTGIRNLVVGDETTSSLRVKWDISDSDVQQFRVTYMTAQGDPEEEVIGTVMVPGSQNNLLLKPLLPDTEYKVTVTPIYTDGEGVSVSAPGKTLPSSGPQNLRVSEEWYNRLRITWDPPSSPVKGYRIVYKPVSVPGPTLETFVGADINTILITNLLSGMDYNVKIFASQASGFSDALTGMVKTLFLGVTNLQAKHVEMTSLCAHWQVHRHATAYRVVIESLQDRQKQESTVGGGTTRHCFYGLQPDSEYKISVYTKLQEIEGPSVSIMEKTQSLPTRPPTFPPTIPPAKEVCKAAKADLVFMVDGSWSIGDENFNKIISFLYSTVGALNKIGTDGTQHYSQ

SEQ ID NO: 4255 - protein, 172 aa, Artificial Sequence
  Synthetic polypeptide
MSDIGDWFRSIPAITRYWFAATVAVPLVGKLGLISPAYLFLWPEAFLYRFQIWRPITATFYFPVGPGTGFLYLVNLYFLYQYSTRLETGAFDGRPADYLFMLLFNWICIVITGLAMDMQLLMIPLIMSVLYVWAQLNRDMIVSFWFGTRFKACYLPWVILGFNYIIGGSAGM

SEQ ID NO: 4256 - protein, 172 aa, Artificial Sequence; identical to SEQ ID NO: 4255
  Synthetic polypeptide

SEQ ID NO: 4257 - protein, 72 aa, Artificial Sequence
  Synthetic polypeptide
MSDIGDWFRSIPAITRYWFAATVAVPLVGKLGLISPAYLFLWPEAFLYRFQACYLPWVILGFNYIIGGSAGM

SEQ ID NO: 4258 - protein, 72 aa, Artificial Sequence
  Synthetic polypeptide
MLLFNWICIVITGLAMDMQLLMIPLIMSVLYVWAQLNRDMIVSFWFGTRFKACYLPWVILGFNYIIGGSAGM

SEQ ID NO: 4259 - protein, 72 aa, Artificial Sequence; identical to SEQ ID NO: 4258
  Synthetic polypeptide

SEQ ID NO: 4260 - protein, 152 aa, Artificial Sequence
  Synthetic polypeptide
MPGRSSSNSGSTGFISFSGVESALSSLKNFQACINSGMDTASSVALDLVESQTEVSSEYSMDKAMVEFATLDRQLNHYVKAVQSTINHVKEERPEKIPDLKLLVEKKFLALQSKNSDADFQNNEKFVQFKQQLKELKKQCSTLDLLNLKLGE

SEQ ID NO: 4261 - protein, 152 aa, Artificial Sequence; identical to SEQ ID NO: 4260
  Synthetic polypeptide

SEQ ID NO: 4262 - protein, 152 aa, Artificial Sequence; identical to SEQ ID NO: 4260
  Synthetic polypeptide

SEQ ID NO: 4263 - protein, 152 aa, Artificial Sequence; identical to SEQ ID NO: 4260
  Synthetic polypeptide

SEQ ID NO: 4264 - protein, 92 aa, Artificial Sequence
  Synthetic polypeptide
MDKAMVEFATLDRQLNHYVKAVQSTINHVKEERPEKIPDLKLLVEKKFLALQSKNSDADFQNNEKFVQFKQQLKELKKQCSTLDLLNLKLGE

SEQ ID NO: 4265 - protein, 139 aa, Artificial Sequence
  Synthetic polypeptide
MSREMQDVDLAEVKPLVEKGETITGLLQEFDVQEQDIETLHGSVHVTLCGTPKGNRPVILTYHDIGMNHKTCYNPLFNYEDMQEITQHFAVCHVDAPGQQDGAASFPAGASAYTASLPTRFTHQVPMTPSASLLPRSPP

SEQ ID NO: 4266 - protein, 139 aa, Artificial Sequence; identical to SEQ ID NO: 4265
  Synthetic polypeptide

SEQ ID NO: 4267 - protein, 139 aa, Artificial Sequence; identical to SEQ ID NO: 4265
  Synthetic polypeptide

SEQ ID NO: 4268 - protein, 139 aa, Artificial Sequence; identical to SEQ ID NO: 4265
  Synthetic polypeptide

SEQ ID NO: 4269 - protein, 139 aa, Artificial Sequence; identical to SEQ ID NO: 4265
  Synthetic polypeptide

SEQ ID NO: 4270 - protein, 139 aa, Artificial Sequence; identical to SEQ ID NO: 4265
  Synthetic polypeptide

SEQ ID NO: 4271 - protein, 139 aa, Artificial Sequence; identical to SEQ ID NO: 4265
  Synthetic polypeptide

SEQ ID NO: 4272 - protein, 91 aa, Artificial Sequence
  Synthetic polypeptide
MSREMQDVDLAEVKPLVEKGETITGLLQEFDVQTKPATTPSSTTRTCRRSPSTLPSATWTPLASRTAQPPSPQGRPHTLLPCPHALLIRFP

SEQ ID NO: 4273 - protein, 58 aa, Artificial Sequence
  Synthetic polypeptide
MQEITQHFAVCHVDAPGQQDGAASFPAGASAYTASLPTRFTHQVPMTPSASLLPRSPP

SEQ ID NO: 4274 - protein, 73 aa, Artificial Sequence
  Synthetic polypeptide
MNHKTCYNPLFNYEDMQEITQHFAVCHVDAPGQQDGAASFPAGASAYTASLPTRFTHQVPMTPSASLLPRSPP

SEQ ID NO: 4275 - protein, 73 aa, Artificial Sequence; identical to SEQ ID NO: 4274
  Synthetic polypeptide

SEQ ID NO: 4276 - protein, 73 aa, Artificial Sequence; identical to SEQ ID NO: 4274
  Synthetic polypeptide

SEQ ID NO: 4277 - protein, 156 aa, Artificial Sequence
  Synthetic polypeptide
MAVPPPGIMKQAGDSRDMSREMQDVDLAEVKPLVEKGETITGLLQEFDVQEQDIETLHGSVHVTLCGTPKGNRPVILTYHDIGMNHKTCYNPLFNYEDMQEITQHFAVCHVDAPGQQDGAASFPAGASAYTASLPTRFTHQVPMTPSASLLPRSPP

SEQ ID NO: 4278 - protein, 150 aa, Artificial Sequence
  Synthetic polypeptide
MTVPAAGDSRDMSREMQDVDLAEVKPLVEKGETITGLLQEFDVQEQDIETLHGSVHVTLCGTPKGNRPVILTYHDIGMNHKTCYNPLFNYEDMQEITQHFAVCHVDAPGQQDGAASFPAGASAYTASLPTRFTHQVPMTPSASLLPRSPP

SEQ ID NO: 4279 - protein, 193 aa, Artificial Sequence
  Synthetic polypeptide
MSGSRESCTVGCVCVFTRMRVPVCLCVCITNLLLGLTVRLKLALCLYVAGDSRDMSREMQDVDLAEVKPLVEKGETITGLLQEFDVQEQDIETLHGSVHVTLCGTPKGNRPVILTYHDIGMNHKTCYNPLFNYEDMQEITQHFAVCHVDAPGQQDGAASFPAGASAYTASLPTRFTHQVPMTPSASLLPRSPP

SEQ ID NO: 4280 - protein, 1340 aa, Artificial Sequence
  Synthetic polypeptide
MAGLRGNAVAGLLWMLLLWSGGGGCQAQRAGCKSVHYDLVFLLDTSSSVGKEDFEKVRQWVANLVDTFEVGPDRTRVGVVRYSDRPTTAFELGLFGSQEEVKAAARRLAYHGGNTNTGDALRYITARSFSPHAGGRPRDRAYKQVAILLTDGRSQDLVLDAAAAAHRAGIRIFAVGVGEALKEELEEIASEPKSAHVFHVSDFNAIDKIRGKLRRRLCENVLCPSVRVEGDRFKHTNGGTKEITGFDLMDLFSVKEILGKRENGAQSSYVRMGSFPVVQSTEDVFPQGLPDEYAFVTTFRFRKTSRKEDWYIWQVIDQYSIPQVSIRLDGENKAVEYNAVGAMKDAVRVVFRGSRVNDLFDRDWHKMALSIQAQNVSLHIDCALVQTLPIEERENIDIQGKTVIGKRLYDSVPIDFDLQRIVIYCDSRHAELETCCDIPSGPCQVTVVTEPPPPPPPQRPPTPGSEQIGFLKTINCSCPAGEKGEMGVAGPMGLPGPKGDIGAIGPVGAPGPKGEKGDVGIGPFGQGEKGEKGSLGLPGPPGRDGSKGMRGEPGELGEPGLPGEVGMRGPQGPPGLPGPPGRVGAPGLQGERGEKGTRGEKGERGLDGFPGKPGDTGQQGRPGPSGVAGPQGEKGDVGPAGPPGVPGSVVQQEGLKGEQGAPGPRGHQGAPGPPGARGPIGPEGRDGPPGLQGLRGKKGDMGPPGIPGLLGLQGPPGPPGVPGPPGPGGSPGLPGEIGFPGKPGPPGPTGPPGKDGPNGPPGPPGTKGEPGERGEDGLPGKPGLRGEIGEQGLAGRPGEKGEAGLPGAPGFPGVRGEKGDQGEKGELGLPGLKGDRGEKGEAGPAGPPGLPGTTSLFTPHPRMPGEQGPKGEKGDPGLPGEPGLQGRPGELGPQGPTGPPGAKGQEGAHGAPGAAGNPGAPGHVGAPGPSGPPGSVGAPGLRGTPGKDGERGEKGAAGEEGSPGPVGPRGDPGAPGLPGPPGKGKDGEPGLRGSPGLPGPLGTKAACGKVRGSENCALGGQCVKGDRGAPGIPGSPGSRGDPGIGVAGPPGPSGPPGDKGSPGSRGLPGFPGPQGPAGRDGAPGNPGERGPPGKPGLSSLLSPGDINLLAKDVCNDCPPGPPGLPGLPGFKGDKGVPGKPGREGTEGKKGEAGPPGLPGPPGIAGPQGSQGERGADGEVGQKGDQGHPGVPGFMGPPGNPGPPGADGIAGAAGPPGIQGSPGKEGPPGPQGPSGLPGIPGEEGKEGRDGKPGPPGEPGKAGEPGLPGPEGARGPPGFKGHTGDSGAPGPRGESGAMGLPGQEGLPGKDGDTGPTGPQGPQGPRGPPVSCCTAPRTQFSHL

SEQ ID NO: 4281 - protein, 1320 aa, Artificial Sequence
  Synthetic polypeptide
MAGLRGNAVAGLLWMLLLWSGGGGCQAQRAGCKSVHYDLVFLLDTSSSVGKEDFEKVRQWVANLVDTFEVGPDRTRVGVVRYSDRPTTAFELGLFGSQEEVKAAARRLAYHGGNTNTGDALRYITARSFSPHAGGRPRDRAYKQVAILLTDGRSQDLVLDAAAAAHRAGIRIFAVGVGEALKEELEEIASEPKSAHVFHVSDFNAIDKIRGKLRRRLCENVLCPSVRVEGDRFKHTNGGTKEITGFDLMDLFSVKEILGKRENGAQSSYVRMGSFPVVQSTEDVFPQGLPDEYAFVTTFRFRKTSRKEDWYIWQVIDQYSIPQVSIRLDGENKAVEYNAVGAMKDAVRVVFRGSRVNDLFDRDWHKMALSIQAQNVSLHIDCALVQTLPIEERENIDIQGKTVIGKRLYDSVPIDFDLQRIVIYCDSRHAELETCCDIPSGPCQVTVVTEPPPPPPPQRPPTPGSEQIGFLKTINCSCPAGEKGEMGVAGPMGLPGPKGDIGAIGPVGAPGPKGEKGDVGIGPFGQGEKGEKGSLGLPGPPGRDGSKGMRGEPGELGEPGLPGEVGMRGPQGPPGLPGPPGRVGAPGLQGERGEKGTRGEKGERGLDGFPGKPGDTGQQGRPGPSGVAGPQGEKGDVGPAGPPGVPGSVVQQEGLKGEQGAPGPRGHQGAPGPPGARGPIGPEGRDGPPGLQGLRGKKGDMGPPGIPGLLGLQGPPGPPGVPGPPGPGGSPGLPGEIGFPGKPGPPGPTGPPGKDGPNGPPGPPGTKGEPGERGEDGLPGKPGLRGEIGEQGLAGRPGEKGEAGLPGAPGFPGVRGEKGDQGEKGELGLPGLKGDRGEKGEAGPAGPPGLPGTTSLFTPHPRMPGEQGPKGEKGDPGLPGEPGLQGRPGELGPQGPTGPPGAKGQEGAHGAPGAAGNPGAPGHVGAPGPSGPPGSVGAPGLRGTPGKDGERGEKGAAGEEGSPGPVGPRGDPGAPGLPGPPGKGKDGEPGLRGSPGLPGPLGTKGDRGAPGIPGSPGSRGDPGIGVAGPPGPSGPPGDKGSPGSRGLPGFPGPQGPAGRDGAPGNPGERGPPGKPGLSSLLSPGDINLLAKDVCNDCPPGPPGLPGLPGFKGDKGVPGKPGREGTEGKKGEAGPPGLPGPPGIAGPQGSQGERGADGEVGQKGDQGHPGVPGFMGPPGNPGPPGADGIAGAAGPPGIQGSPGKEGPPGPQGPSGLPGIPGEEGKEGRDGKPGPPGEPGKAGEPGLPGPEGARGPPGFKGHTGDSGAPGPRGESGAMGLPGQEGLPGKDGDTGPTGPQGPQGPRGPPVSCCTAPRTQFSHL

SEQ ID NO: 4282 - protein, 230 aa, Artificial Sequence
  Synthetic polypeptide
MAGLRGNAVAGLLWMLLLWSGGGGCQAQRAGCKSVHYDLVFLLDTSSSVGKEDFEKVRQWVANLVDTFEVGPDRTRVGVVRYSDRPTTAFELGLFGSQEEVKAAARRLAYHGGNTNTGDALRYITARSFSPHAGGRPRDRAYKQVAILLTDGRSQDLVLDAAAAAHRAGIRIFAVGVGEALKEELEEIASEPKSAHVFHVSDFNAIDKIRGKLRRRLCETSVKWVEQAHL

SEQ ID NO: 4283 - protein, 230 aa, Artificial Sequence; identical to SEQ ID NO: 4282
  Synthetic polypeptide

SEQ ID NO: 4284 - protein, 835 aa, Artificial Sequence
  Synthetic polypeptide
MAAAYLDPNLNHTPNSSTKTHLGTGMERSPGAMERVLKVFHYFESNSEPTTWASIIRHGDATDVRGIIQKIVDSHKVKHVACYGFRLSHLRSEEVHWLHVDMGVSSVREKYELAHPPEEWKYELRIRYLPKGFLNQFTEDKPTLNFFYQQVKSDYMLEIADQVDQEIALKLGCLEIRRSYWEMRGNALEKKSNYEVLEKDVGLKRFFPKSLLDSVKAKTLRKLIQQTFRQFANLNREESILKFFEILSPVYRFDKECFKCALGSSWIISVELAIGPEEGISYLTDKGCNPTHLADFTQVQTIQYSNSEDKDRKGMLQLKIAGAPEPLTVTAPSLTIAENMADLIDGYCRLVNGTSQSFIIRPQKEGERALPSIPKLANSEKQGMRTHAVSVSETDDYAEIIDEEDTYTMPSTRDYEIQRERIELGRCIGEGQFGDVHQGIYMSPENPALAVAIKTCKNCTSDSVREKFLQEALTMRQFDHPHIVKLIGVITENPVWIIMELCTLGELRSFLQVRKYSLDLASLILYAYQLSTALAYLESKRFVHRDIAARNVLVSSNDCVKLGDFGLSRYMEDSTYYKASKGKLPIKWMAPESINFRRFTSASDVWMFGVCMWEILMHGVKPFQGVKNNDVIGRIENGERLPMPPNCPPTLYSLMTKCWAYDPSRRPRFTELKAQLSTILEEEKAQQEERMRMESRRQATVSWDSGGSDEAPPKPSRPGYPSPRSSEGFYPSPQHMVQTNHYQVSGYPGSHGITAMAGSIYPGQASLLDQTDSWNHRPQEIAMWQPNVEDSTVLDLRGIGQVLPTHLMEERLIRQQQEMEEDQRWLEKEERFLKS

SEQ ID NO: 4285 - protein, 835 aa, Artificial Sequence; identical to SEQ ID NO: 4284
  Synthetic polypeptide

SEQ ID NO: 4286 - protein, 835 aa, Artificial Sequence; identical to SEQ ID NO: 4284
  Synthetic polypeptide

SEQ ID NO: 4287 - protein, 835 aa, Artificial Sequence; identical to SEQ ID NO: 4284
  Synthetic polypeptide

SEQ ID NO: 4288 - protein, 1 aa, Artificial Sequence
  Synthetic peptide
I

SEQ ID NO: 4289 - protein, 789 aa, Artificial Sequence
  Synthetic polypeptide
MAAAYLDPNLNHTPNSSTKTHLGTGMERSPGAMERVLKVFHYFESNSEPTTWASIIRHGDATDVRGIIQKIVDSHKVKHVACYGFRLSHLRSEEVHWLHVDMGVSSVREKYELAHPPEEWKYELRIRYLPKGFLNQFTEDKPTLNFFYQQVKSDYMLEIADQVDQEIALKLGCLEIRRSYWEMRGNALEKKSNYEVLEKDVGLKRFFPKSLLDSVKAKTLRKLIQQTFRQFANLNREESILKFFEILSPVYRFDKECFKCALGSSWIISVELAIGPEEGISYLTDKGCNPTHLADFTQVQTIQYSNSEDKDRKGMLQLKIAGAPEPLTVTAPSLTIAENMADLIDGYCRLVNGTSQSFIIRPQKEGERALPSIPKLANSEKQGMRTHAVSVSETDDYAEIIDEEDTYTMPSTRDYEIQRERIELGRCIGEGQFGDVHQGIYMSPENPALAVAIKTCKNCTSDSVREKFLQEALTMRQFDHPHIVKLIGVITENPVWIIMELCTLGELRSFLQVRKYSLDLASLILYAYQLSTALAYLESKRFVHRDIAARNVLVSSNDCVKLGDFGLSRYMEDSTYYKASKGKLPIKWMAPESINFRRFTSASDVWMFGVCMWEILMHGVKPFQGVKNNDVIGRIENGERLPMPPNCPPTLYSLMTKCWAYDPSRRPRFTELKAQLSTILEEEKAQQEERMRMESRRQATVSWDSGGSDEAPPKPSRPGYPSPRSSEGFYPSPQHMVQTNHYQDSTVLDLRGIGQVLPTHLMEERLIRQQQEMEEDQRWLEKEERFLKS

SEQ ID NO: 4290 - protein, 463 aa, Artificial Sequence
  Synthetic polypeptide
MKYQEVRCLTSFNISVSFPAETDDYAEIIDEEDTYTMPSTRDYEIQRERIELGRCIGEGQFGDVHQGIYMSPENPALAVAIKTCKNCTSDSVREKFLQEALTMRQFDHPHIVKLIGVITENPVWIIMELCTLGELRSFLQVRKYSLDLASLILYAYQLSTALAYLESKRFVHRDIAARNVLVSSNDCVKLGDFGLSRYMEDSTYYKASKGKLPIKWMAPESINFRRFTSASDVWMFGVCMWEILMHGVKPFQGVKNNDVIGRIENGERLPMPPNCPPTLYSLMTKCWAYDPSRRPRFTELKAQLSTILEEEKAQQEERMRMESRRQATVSWDSGGSDEAPPKPSRPGYPSPRSSEGFYPSPQHMVQTNHYQVSGYPGSHGITAMAGSIYPGQASLLDQTDSWNHRPQEIAMWQPNVEDSTVLDLRGIGQVLPTHLMEERLIRQQQEMEEDQRWLEKEERFLKS

SEQ ID NO: 4291 - protein, 879 aa, Artificial Sequence
  Synthetic polypeptide
MLLELAGQEALKPAGAIYMEKSGCSPFPVCWAKEYDRYLASSKIMAAAYLDPNLNHTPNSSTKTHLGTGMERSPGAMERVLKVFHYFESNSEPTTWASIIRHGDATDVRGIIQKIVDSHKVKHVACYGFRLSHLRSEEVHWLHVDMGVSSVREKYELAHPPEEWKYELRIRYLPKGFLNQFTEDKPTLNFFYQQVKSDYMLEIADQVDQEIALKLGCLEIRRSYWEMRGNALEKKSNYEVLEKDVGLKRFFPKSLLDSVKAKTLRKLIQQTFRQFANLNREESILKFFEILSPVYRFDKECFKCALGSSWIISVELAIGPEEGISYLTDKGCNPTHLADFTQVQTIQYSNSEDKDRKGMLQLKIAGAPEPLTVTAPSLTIAENMADLIDGYCRLVNGTSQSFIIRPQKEGERALPSIPKLANSEKQGMRTHAVSVSETDDYAEIIDEEDTYTMPSTRDYEIQRERIELGRCIGEGQFGDVHQGIYMSPENPALAVAIKTCKNCTSDSVREKFLQEALTMRQFDHPHIVKLIGVITENPVWIIMELCTLGELRSFLQVRKYSLDLASLILYAYQLSTALAYLESKRFVHRDIAARNVLVSSNDCVKLGDFGLSRYMEDSTYYKASKGKLPIKWMAPESINFRRFTSASDVWMFGVCMWEILMHGVKPFQGVKNNDVIGRIENGERLPMPPNCPPTLYSLMTKCWAYDPSRRPRFTELKAQLSTILEEEKAQQEERMRMESRRQATVSWDSGGSDEAPPKPSRPGYPSPRSSEGFYPSPQHMVQTNHYQVSGYPGSHGITAMAGSIYPGQASLLDQTDSWNHRPQEIAMWQPNVEDSTVLDLRGIGQVLPTHLMEERLIRQQQEMEEDQRWLEKEERFLKS

SEQ ID NO: 4292 - protein, 879 aa, Artificial Sequence; identical to SEQ ID NO: 4291
  Synthetic polypeptide

SEQ ID NO: 4293 - protein, 507 aa, Artificial Sequence
  Synthetic polypeptide
IAENMADLIDGYCRLVNGTSQSFIIRPQKEGERALPSIPKLANSEKQGMRTHAVSVSETDDYAEIIDEEDTYTMPSKSYGIDEARDYEIQRERIELGRCIGEGQFGDVHQGIYMSPENPALAVAIKTCKNCTSDSVREKFLQEALTMRQFDHPHIVKLIGVITENPVWIIMELCTLGELRSFLQVRKYSLDLASLILYAYQLSTALAYLESKRFVHRDIAARNVLVSSNDCVKLGDFGLSRYMEDSTYYKASKGKLPIKWMAPESINFRRFTSASDVWMFGVCMWEILMHGVKPFQGVKNNDVIGRIENGERLPMPPNCPPTLYSLMTKCWAYDPSRRPRFTELKAQLSTILEEEKAQQEERMRMESRRQATVSWDSGGSDEAPPKPSRPGYPSPRSSEGFYPSPQHMVQTNHYQVSGYPGSHGITAMAGSIYPGQASLLDQTDSWNHRPQEIAMWQPNVEDSTVLDLRGIGQVLPTHLMEERLIRQQQEMEEDQRWLEKEERFLKS

SEQ ID NO: 4294 - protein, 503 aa, Artificial Sequence
  Synthetic polypeptide
MADLIDGYCRLVNGTSQSFIIRPQKEGERALPSIPKLANSEKQGMRTHAVSVSETDDYAEIIDEEDTYTMPSKSYGIDEARDYEIQRERIELGRCIGEGQFGDVHQGIYMSPENPALAVAIKTCKNCTSDSVREKFLQEALTMRQFDHPHIVKLIGVITENPVWIIMELCTLGELRSFLQVRKYSLDLASLILYAYQLSTALAYLESKRFVHRDIAARNVLVSSNDCVKLGDFGLSRYMEDSTYYKASKGKLPIKWMAPESINFRRFTSASDVWMFGVCMWEILMHGVKPFQGVKNNDVIGRIENGERLPMPPNCPPTLYSLMTKCWAYDPSRRPRFTELKAQLSTILEEEKAQQEERMRMESRRQATVSWDSGGSDEAPPKPSRPGYPSPRSSEGFYPSPQHMVQTNHYQVSGYPGSHGITAMAGSIYPGQASLLDQTDSWNHRPQEIAMWQPNVEDSTVLDLRGIGQVLPTHLMEERLIRQQQEMEEDQRWLEKEERFLKS

SEQ ID NO: 4295 - protein, 145 aa, Artificial Sequence
  Synthetic polypeptide
MRMESRRQATVSWDSGGSDEAPPKPSRPGYPSPRSSEGFYPSPQHMVQTNHYQVSGYPGSHGITAMAGSIYPGQASLLDQTDSWNHRPQEIAMWQPNVEDSTVLDLRGIGQVLPTHLMEERLIRQQQEMEEDQRWLEKEERFLKS

SEQ ID NO: 4296 - protein, 533 aa, Artificial Sequence
  Synthetic polypeptide
AENMADLIDGYCRLVNGTSQSFIIRPQKEGERALPSIPKLANSEKQGMRTHAVSVSGVSHCQHKVKKARRFLPLVFCSHDPPSTDEISGDETDDYAEIIDEEDTYTMPSTRDYEIQRERIELGRCIGEGQFGDVHQGIYMSPENPALAVAIKTCKNCTSDSVREKFLQEALTMRQFDHPHIVKLIGVITENPVWIIMELCTLGELRSFLQVRKYSLDLASLILYAYQLSTALAYLESKRFVHRDIAARNVLVSSNDCVKLGDFGLSRYMEDSTYYKASKGKLPIKWMAPESINFRRFTSASDVWMFGVCMWEILMHGVKPFQGVKNNDVIGRIENGERLPMPPNCPPTLYSLMTKCWAYDPSRRPRFTELKAQLSTILEEEKAQQEERMRMESRRQATVSWDSGGSDEAPPKPSRPGYPSPRSSEGFYPSPQHMVQTNHYQVSGYPGSHGITAMAGSIYPGQASLLDQTDSWNHRPQEIAMWQPNVEDSTVLDLRGIGQVLPTHLMEERLIRQQQEMEEDQRWLEKEERFLKS

SEQ ID NO: 4297 - skipped

SEQ ID NO: 4298 - protein, 59 aa, Artificial Sequence
  Synthetic polypeptide
MRTALLLLAALAVATGPALTLRCHVCTSSSNCKHSVVCPASSRFCKTTNTGPGTGGCAL

SEQ ID NO: 4299 - protein, 150 aa, Artificial Sequence
  Synthetic polypeptide
MKIFLPVLLAALLGVERASSLMCFSCLNQKSNLYCLKPTICSDQDNYCVTVSASAGIGHLANKGKMFCLINKLKIKPASKQMRTQASALFRCHFSREASVIAEGKAPAELTICRLRLHHLEDILARSTDWPRPGGFCLLLVSSSLSWTGS

SEQ ID NO: 4300 - protein, 150 aa, Artificial Sequence; identical to SEQ ID NO: 4299
  Synthetic polypeptide

SEQ ID NO: 4301 - protein, 150 aa, Artificial Sequence; identical to SEQ ID NO: 4299
  Synthetic polypeptide

SEQ ID NO: 4302 - protein, 150 aa, Artificial Sequence; identical to SEQ ID NO: 4299
  Synthetic polypeptide

SEQ ID NO: 4303 - protein, 150 aa, Artificial Sequence; identical to SEQ ID NO: 4299
  Synthetic polypeptide

SEQ ID NO: 4304 - protein, 150 aa, Artificial Sequence; identical to SEQ ID NO: 4299
  Synthetic polypeptide

SEQ ID NO: 4305 - protein, 150 aa, Artificial Sequence; identical to SEQ ID NO: 4299
  Synthetic polypeptide

SEQ ID NO: 4306 - protein, 150 aa, Artificial Sequence; identical to SEQ ID NO: 4299
  Synthetic polypeptide

SEQ ID NO: 4307 - protein, 150 aa, Artificial Sequence; identical to SEQ ID NO: 4299
  Synthetic polypeptide

SEQ ID NO: 4308 - protein, 150 aa, Artificial Sequence; identical to SEQ ID NO: 4299
  Synthetic polypeptide

SEQ ID NO: 4309 - protein, 150 aa, Artificial Sequence; identical to SEQ ID NO: 4299
  Synthetic polypeptide

SEQ ID NO: 4310 - protein, 148 aa, Artificial Sequence
  Synthetic polypeptide
MKIFLPVLLAALLGVERASSLMCFSCLNQKSNLYCLKPTICSDQDNYCVTVSASAGIDEDASKRTLQMSLLTGGLCDCRRKGPSRTHHLPPEAPPPRRHPCKIHRLAQTRRFLSSSCVFFTLLDWFVNPFSYLCFLWMLSATFFVVER

SEQ ID NO: 4311 - protein, 148 aa, Artificial Sequence; identical to SEQ ID NO: 4310
  Synthetic polypeptide

SEQ ID NO: 4312 - protein, 148 aa, Artificial Sequence; identical to SEQ ID NO: 4310
  Synthetic polypeptide

SEQ ID NO: 4313 - protein, 148 aa, Artificial Sequence; identical to SEQ ID NO: 4310
  Synthetic polypeptide

SEQ ID NO: 4314 - protein, 148 aa, Artificial Sequence; identical to SEQ ID NO: 4310
  Synthetic polypeptide

SEQ ID NO: 4315 - protein, 148 aa, Artificial Sequence; identical to SEQ ID NO: 4310
  Synthetic polypeptide

SEQ ID NO: 4316 - protein, 148 aa, Artificial Sequence; identical to SEQ ID NO: 4310
  Synthetic polypeptide

SEQ ID NO: 4317 - protein, 148 aa, Artificial Sequence; identical to SEQ ID NO: 4310
  Synthetic polypeptide

SEQ ID NO: 4318 - protein, 148 aa, Artificial Sequence; identical to SEQ ID NO: 4310
  Synthetic polypeptide

SEQ ID NO: 4319 - protein, 148 aa, Artificial Sequence; identical to SEQ ID NO: 4310
  Synthetic polypeptide

SEQ ID NO: 4320 - protein, 148 aa, Artificial Sequence; identical to SEQ ID NO: 4310
  Synthetic polypeptide

SEQ ID NO: 4321 - protein, 407 aa, Artificial Sequence
  Synthetic polypeptide
MAAPEPAPRRAREREREREDESEDESDILEESPCGRWQKRREQVNQGNMPGLQSTFLAMDTEEGVEVVWNELHFGDRKAFAAHEEKIQTVFEQLVLVDHPNIVKLHKYWLDTSEACARVIFITEYVSSGSLKQFLKKTKKNHKAMNARAWKRWCTQILSALSFLHACSPPIIHGNLTSDTIFIQHNGLIKIGSVWHRIFSNALPDDLRSPIRAEREELRNLHFFPPEYGEVADGTAVDIFSFGMCALEMAVLEIQTNGDTRVTEEAIARARHSLSDPNMREFILCCLARDPARRPSAHSLLFHRVLFEVHSLKLLAAHCFIQHQYLMPENVVEEKTKAMDLHAVLAELPRPRRPPLQWRYSEVSFMELDKFLEDVSSWLPASLPLHSWLSLRDFYALMDSTPAFLAS

SEQ ID NO: 4322 - protein, 164 aa, Artificial Sequence
  Synthetic polypeptide
MCALEMAVLEIQTNGDTRVTEEAIARARHSLSDPNMREFILCCLARDPARRPSAHSLLFHRVLFEVHSLKLLAAHCFIQHQYLMPENVVEEKTKAMDLHAVLAELPRPRRPPLQWRYSEVSFMELDKFLEDVSSWLPASLPLHSWLSLRDFYALMDSTPAFLAS

SEQ ID NO: 4323 - protein, 1373 aa, Artificial Sequence
  Synthetic polypeptide
MSQHQLRVPQPEGLGRKRTSSEDNLYLAVLRASEGKKDERDRVQKKTFTKWVNKHLIKAQRHISDLYEDLRDGHNLISLLEVLSGDSLPREKGRMRFHKLQNVQIALDYLRHRQVKLVNIRNDDIADGNPKLTLGLIWTIILHFQISDIQVSGQSEDMTAKEKLLLWSQRMVEGYQGLRCDNFTSSWRDGRLFNAIIHRHKPLLIDMNKVYRQTNLENLDQAFSVAERDLGVTRLLDPEDVDVPQPDEKSIITYVSSLYDAMPRVPDVQDGVRANELQLRWQEYRELVLLLLQWMRHHTAAFEERRFPSSFEEIEILWSQFLKFKEMELPAKEADKNRSKGIYQSLEGAVQAGQLKVPPGYHPLDVEKEWGKLHVAILEREKQLRSEFERLECLQRIVTKLQMEAGLCEEQLNQADALLQSDVRLLAAGKVPQRAGEVERDLDKADSMIRLLFNDVQTLKDGRHPQGEQMYRRVYRLHERLVAIRTEYNLRLKAGVAAPATQVAQVTLQSVQRRPELEDSTLRYLQDLLAWVEENQHRVDGAEWGVDLPSVEAQLGSHRGLHQSIEEFRAKIERARSDEGQLSPATRGAYRDCLGRLDLQYAKLLNSSKARLRSLESLHSFVAAATKELMWLNEKEEEEVGFDWSDRNTNMTAKKESYSALMRELELKEKKIKELQNAGDRLLREDHPARPTVESFQAALQTQWSWMLQLCCCIEAHLKENAAYFQFFSDVREAEGQLQKLQEALRRKYSCDRSATVTRLEDLLQDAQDEKEQLNEYKGHLSGLAKRAKAVVQLKPRHPAHPMRGRLPLLAVCDYKQVEVTVHKGDECQLVGPAQPSHWKVLSSSGSEAAVPSVCFLVPPPNQEAQEAVTRLEAQHQALVTLWHQLHVDMKSLLAWQSLRRDVQLIRSWSLATFRTLKPEEQRQALHSLELHYQAFLRDSQDAGGFGPEDRLMAEREYGSCSHHYQQLLQSLEQGAQEESRCQRCISELKDIRLQLEACETRTVHRLRLPLDKEPARECAQRIAEQQKAQAEVEGLGKGVARLSAEAEKVLALPEPSPAAPTLRSELELTLGKLEQVRSLSAIYLEKLKTISLVIRGTQGAEEVLRAHEEQLKEAQAVPATLPELEATKASLKKLRAQAEAQQPTFDALRDELRGAQEVGERLQQRHGERDVEVERWRERVAQLLERWQAVLAQTDVRQRELEQLGRQLRYYRESADPLGAWLQDARRRQEQIQAMPLADSQAVREQLRQEQALLEEIERHGEKVEECQRFAKQYINAIKDYELQLVTYKAQLEPVASPAKKPKVQSGSESVIQEYVDLRTHYSELTTLTSQYIKFISETLRRMEEEEMGRWVTKQHEREVCHRGSIPASEQR

SEQ ID NO: 4324 - protein, 1377 aa, Artificial Sequence
  Synthetic polypeptide
MSGAGGAFASPREVLLERPCWLDGGCEPARRGYLYQQLCCVDERDRVQKKTFTKWVNKHLIKAQRHISDLYEDLRDGHNLISLLEVLSGDSLPREKGRMRFHKLQNVQIALDYLRHRQVKLVNIRNDDIADGNPKLTLGLIWTIILHFQISDIQVSGQSEDMTAKEKLLLWSQRMVEGYQGLRCDNFTSSWRDGRLFNAIIHRHKPLLIDMNKVYRQTNLENLDQAFSVAERDLGVTRLLDPEDVDVPQPDEKSIITYVSSLYDAMPRVPDVQDGVRANELQLRWQEYRELVLLLLQWMRHHTAAFEERRFPSSFEEIEILWSQFLKFKEMELPAKEADKNRSKGIYQSLEGAVQAGQLKVPPGYHPLDVEKEWGKLHVAILEREKQLRSEFERLECLQRIVTKLQMEAGLCEEQLNQADALLQSDVRLLAAGKVPQRAGEVERDLDKADSMIRLLFNDVQTLKDGRHPQGEQMYRRVYRLHERLVAIRTEYNLRLKAGVAAPATQVAQVTLQSVQRRPELEDSTLRYLQDLLAWVEENQHRVDGAEWGVDLPSVEAQLGSHRGLHQSIEEFRAKIERARSDEGQLSPATRGAYRDCLGRLDLQYAKLLNSSKARLRSLESLHSFVAAATKELMWLNEKEEEEVGFDWSDRNTNMTAKKESYSALMRELELKEKKIKELQNAGDRLLREDHPARPTVESFQAALQTQWSWMLQLCCCIEAHLKENAAYFQFFSDVREAEGQLQKLQEALRRKYSCDRSATVTRLEDLLQDAQDEKEQLNEYKGHLSGLAKRAKAVVQLKPRHPAHPMRGRLPLLAVCDYKQVEVTVHKGDECQLVGPAQPSHWKVLSSSGSEAAVPSVCFLVPPPNQEAQEAVTRLEAQHQALVTLWHQLHVDMKSLLAWQSLRRDVQLIRSWSLATFRTLKPEEQRQALHSLELHYQAFLRDSQDAGGFGPEDRLMAEREYGSCSHHYQQLLQSLEQGAQEESRCQRCISELKDIRLQLEACETRTVHRLRLPLDKEPARECAQRIAEQQKAQAEVEGLGKGVARLSAEAEKVLALPEPSPAAPTLRSELELTLGKLEQVRSLSAIYLEKLKTISLVIRGTQGAEEVLRAHEEQLKEAQAVPATLPELEATKASLKKLRAQAEAQQPTFDALRDELRGAQEVGERLQQRHGERDVEVERWRERVAQLLERWQAVLAQTDVRQRELEQLGRQLRYYRESADPLGAWLQDARRRQEQIQAMPLADSQAVREQLRQEQALLEEIERHGEKVEECQRFAKQYINAIKDYELQLVTYKAQLEPVASPAKKPKVQSGSESVIQEYVDLRTHYSELTTLTSQYIKFISETLRRMEEEEMGRWVTKQHEREVCHRGSIPASEQR

SEQ ID NO: 4325 - protein, 1373 aa, Artificial Sequence
  Synthetic polypeptide
MEPSGSLFPSLVVVGHVVTLAAVWHWRRGRRWAQDEQDERDRVQKKTFTKWVNKHLIKAQRHISDLYEDLRDGHNLISLLEVLSGDSLPREKGRMRFHKLQNVQIALDYLRHRQVKLVNIRNDDIADGNPKLTLGLIWTIILHFQISDIQVSGQSEDMTAKEKLLLWSQRMVEGYQGLRCDNFTSSWRDGRLFNAIIHRHKPLLIDMNKVYRQTNLENLDQAFSVAERDLGVTRLLDPEDVDVPQPDEKSIITYVSSLYDAMPRVPDVQDGVRANELQLRWQEYRELVLLLLQWMRHHTAAFEERRFPSSFEEIEILWSQFLKFKEMELPAKEADKNRSKGIYQSLEGAVQAGQLKVPPGYHPLDVEKEWGKLHVAILEREKQLRSEFERLECLQRIVTKLQMEAGLCEEQLNQADALLQSDVRLLAAGKVPQRAGEVERDLDKADSMIRLLFNDVQTLKDGRHPQGEQMYRRVYRLHERLVAIRTEYNLRLKAGVAAPATQVAQVTLQSVQRRPELEDSTLRYLQDLLAWVEENQHRVDGAEWGVDLPSVEAQLGSHRGLHQSIEEFRAKIERARSDEGQLSPATRGAYRDCLGRLDLQYAKLLNSSKARLRSLESLHSFVAAATKELMWLNEKEEEEVGFDWSDRNTNMTAKKESYSALMRELELKEKKIKELQNAGDRLLREDHPARPTVESFQAALQTQWSWMLQLCCCIEAHLKENAAYFQFFSDVREAEGQLQKLQEALRRKYSCDRSATVTRLEDLLQDAQDEKEQLNEYKGHLSGLAKRAKAVVQLKPRHPAHPMRGRLPLLAVCDYKQVEVTVHKGDECQLVGPAQPSHWKVLSSSGSEAAVPSVCFLVPPPNQEAQEAVTRLEAQHQALVTLWHQLHVDMKSLLAWQSLRRDVQLIRSWSLATFRTLKPEEQRQALHSLELHYQAFLRDSQDAGGFGPEDRLMAEREYGSCSHHYQQLLQSLEQGAQEESRCQRCISELKDIRLQLEACETRTVHRLRLPLDKEPARECAQRIAEQQKAQAEVEGLGKGVARLSAEAEKVLALPEPSPAAPTLRSELELTLGKLEQVRSLSAIYLEKLKTISLVIRGTQGAEEVLRAHEEQLKEAQAVPATLPELEATKASLKKLRAQAEAQQPTFDALRDELRGAQEVGERLQQRHGERDVEVERWRERVAQLLERWQAVLAQTDVRQRELEQLGRQLRYYRESADPLGAWLQDARRRQEQIQAMPLADSQAVREQLRQEQALLEEIERHGEKVEECQRFAKQYINAIKDYELQLVTYKAQLEPVASPAKKPKVQSGSESVIQEYVDLRTHYSELTTLTSQYIKFISETLRRMEEEEMGRWVTKQHEREVCHRGSIPASEQR

SEQ ID NO: 4326 - protein, 1341 aa, Artificial Sequence
  Synthetic polypeptide
MKIVPDERDRVQKKTFTKWVNKHLIKAQRHISDLYEDLRDGHNLISLLEVLSGDSLPREKGRMRFHKLQNVQIALDYLRHRQVKLVNIRNDDIADGNPKLTLGLIWTIILHFQISDIQVSGQSEDMTAKEKLLLWSQRMVEGYQGLRCDNFTSSWRDGRLFNAIIHRHKPLLIDMNKVYRQTNLENLDQAFSVAERDLGVTRLLDPEDVDVPQPDEKSIITYVSSLYDAMPRVPDVQDGVRANELQLRWQEYRELVLLLLQWMRHHTAAFEERRFPSSFEEIEILWSQFLKFKEMELPAKEADKNRSKGIYQSLEGAVQAGQLKVPPGYHPLDVEKEWGKLHVAILEREKQLRSEFERLECLQRIVTKLQMEAGLCEEQLNQADALLQSDVRLLAAGKVPQRAGEVERDLDKADSMIRLLFNDVQTLKDGRHPQGEQMYRRVYRLHERLVAIRTEYNLRLKAGVAAPATQVAQVTLQSVQRRPELEDSTLRYLQDLLAWVEENQHRVDGAEWGVDLPSVEAQLGSHRGLHQSIEEFRAKIERARSDEGQLSPATRGAYRDCLGRLDLQYAKLLNSSKARLRSLESLHSFVAAATKELMWLNEKEEEEVGFDWSDRNTNMTAKKESYSALMRELELKEKKIKELQNAGDRLLREDHPARPTVESFQAALQTQWSWMLQLCCCIEAHLKENAAYFQFFSDVREAEGQLQKLQEALRRKYSCDRSATVTRLEDLLQDAQDEKEQLNEYKGHLSGLAKRAKAVVQLKPRHPAHPMRGRLPLLAVCDYKQVEVTVHKGDECQLVGPAQPSHWKVLSSSGSEAAVPSVCFLVPPPNQEAQEAVTRLEAQHQALVTLWHQLHVDMKSLLAWQSLRRDVQLIRSWSLATFRTLKPEEQRQALHSLELHYQAFLRDSQDAGGFGPEDRLMAEREYGSCSHHYQQLLQSLEQGAQEESRCQRCISELKDIRLQLEACETRTVHRLRLPLDKEPARECAQRIAEQQKAQAEVEGLGKGVARLSAEAEKVLALPEPSPAAPTLRSELELTLGKLEQVRSLSAIYLEKLKTISLVIRGTQGAEEVLRAHEEQLKEAQAVPATLPELEATKASLKKLRAQAEAQQPTFDALRDELRGAQEVGERLQQRHGERDVEVERWRERVAQLLERWQAVLAQTDVRQRELEQLGRQLRYYRESADPLGAWLQDARRRQEQIQAMPLADSQAVREQLRQEQALLEEIERHGEKVEECQRFAKQYINAIKDYELQLVTYKAQLEPVASPAKKPKVQSGSESVIQEYVDLRTHYSELTTLTSQYIKFISETLRRMEEEEMGRWVTKQHEREVCHRGSIPASEQR

SEQ ID NO: 4327 - protein, 1510 aa, Artificial Sequence
  Synthetic polypeptide
MVAGMLMPRDQLRAIYEVLFREGVMVAKKDRRPRSLHPHVPGVTNLQVMRAMASLRARGLVRETFAWCHFYWYLTNEGIAHLRQYLHLPPEIVPASLQRVRRPVAMVMPARRTPHVQAVQGPLGSPPKRGPLPTEEQRVYRRKELEEVSPETPVVPATTQRTLARPGPEPAPATDERDRVQKKTFTKWVNKHLIKAQRHISDLYEDLRDGHNLISLLEVLSGDSLPREKGRMRFHKLQNVQIALDYLRHRQVKLVNIRNDDIADGNPKLTLGLIWTIILHFQISDIQVSGQSEDMTAKEKLLLWSQRMVEGYQGLRCDNFTSSWRDGRLFNAIIHRHKPLLIDMNKVYRQTNLENLDQAFSVAERDLGVTRLLDPEDVDVPQPDEKSIITYVSSLYDAMPRVPDVQDGVRANELQLRWQEYRELVLLLLQWMRHHTAAFEERRFPSSFEEIEILWSQFLKFKEMELPAKEADKNRSKGIYQSLEGAVQAGQLKVPPGYHPLDVEKEWGKLHVAILEREKQLRSEFERLECLQRIVTKLQMEAGLCEEQLNQADALLQSDVRLLAAGKVPQRAGEVERDLDKADSMIRLLFNDVQTLKDGRHPQGEQMYRRVYRLHERLVAIRTEYNLRLKAGVAAPATQVAQVTLQSVQRRPELEDSTLRYLQDLLAWVEENQHRVDGAEWGVDLPSVEAQLGSHRGLHQSIEEFRAKIERARSDEGQLSPATRGAYRDCLGRLDLQYAKLLNSSKARLRSLESLHSFVAAATKELMWLNEKEEEEVGFDWSDRNTNMTAKKESYSALMRELELKEKKIKELQNAGDRLLREDHPARPTVESFQAALQTQWSWMLQLCCCIEAHLKENAAYFQFFSDVREAEGQLQKLQEALRRKYSCDRSATVTRLEDLLQDAQDEKEQLNEYKGHLSGLAKRAKAVVQLKPRHPAHPMRGRLPLLAVCDYKQVEVTVHKGDECQLVGPAQPSHWKVLSSSGSEAAVPSVCFLVPPPNQEAQEAVTRLEAQHQALVTLWHQLHVDMKSLLAWQSLRRDVQLIRSWSLATFRTLKPEEQRQALHSLELHYQAFLRDSQDAGGFGPEDRLMAEREYGSCSHHYQQLLQSLEQGAQEESRCQRCISELKDIRLQLEACETRTVHRLRLPLDKEPARECAQRIAEQQKAQAEVEGLGKGVARLSAEAEKVLALPEPSPAAPTLRSELELTLGKLEQVRSLSAIYLEKLKTISLVIRGTQGAEEVLRAHEEQLKEAQAVPATLPELEATKASLKKLRAQAEAQQPTFDALRDELRGAQEVGERLQQRHGERDVEVERWRERVAQLLERWQAVLAQTDVRQRELEQLGRQLRYYRESADPLGAWLQDARRRQEQIQAMPLADSQAVREQLRQEQALLEEIERHGEKVEECQRFAKQYINAIKDYELQLVTYKAQLEPVASPAKKPKVQSGSESVIQEYVDLRTHYSELTTLTSQYIKFISETLRRMEEEEMGRWVTKQHEREVCHRGSIPASEQR

SEQ ID NO: 4328 - protein, 1351 aa, Artificial Sequence
  Synthetic polypeptide
MDPSRAIQNEISSLKDERDRVQKKTFTKWVNKHLIKAQRHISDLYEDLRDGHNLISLLEVLSGDSLPREKGRMRFHKLQNVQIALDYLRHRQVKLVNIRNDDIADGNPKLTLGLIWTIILHFQISDIQVSGQSEDMTAKEKLLLWSQRMVEGYQGLRCDNFTSSWRDGRLFNAIIHRHKPLLIDMNKVYRQTNLENLDQAFSVAERDLGVTRLLDPEDVDVPQPDEKSIITYVSSLYDAMPRVPDVQDGVRANELQLRWQEYRELVLLLLQWMRHHTAAFEERRFPSSFEEIEILWSQFLKFKEMELPAKEADKNRSKGIYQSLEGAVQAGQLKVPPGYHPLDVEKEWGKLHVAILEREKQLRSEFERLECLQRIVTKLQMEAGLCEEQLNQADALLQSDVRLLAAGKVPQRAGEVERDLDKADSMIRLLFNDVQTLKDGRHPQGEQMYRRVYRLHERLVAIRTEYNLRLKAGVAAPATQVAQVTLQSVQRRPELEDSTLRYLQDLLAWVEENQHRVDGAEWGVDLPSVEAQLGSHRGLHQSIEEFRAKIERARSDEGQLSPATRGAYRDCLGRLDLQYAKLLNSSKARLRSLESLHSFVAAATKELMWLNEKEEEEVGFDWSDRNTNMTAKKESYSALMRELELKEKKIKELQNAGDRLLREDHPARPTVESFQAALQTQWSWMLQLCCCIEAHLKENAAYFQFFSDVREAEGQLQKLQEALRRKYSCDRSATVTRLEDLLQDAQDEKEQLNEYKGHLSGLAKRAKAVVQLKPRHPAHPMRGRLPLLAVCDYKQVEVTVHKGDECQLVGPAQPSHWKVLSSSGSEAAVPSVCFLVPPPNQEAQEAVTRLEAQHQALVTLWHQLHVDMKSLLAWQSLRRDVQLIRSWSLATFRTLKPEEQRQALHSLELHYQAFLRDSQDAGGFGPEDRLMAEREYGSCSHHYQQLLQSLEQGAQEESRCQRCISELKDIRLQLEACETRTVHRLRLPLDKEPARECAQRIAEQQKAQAEVEGLGKGVARLSAEAEKVLALPEPSPAAPTLRSELELTLGKLEQVRSLSAIYLEKLKTISLVIRGTQGAEEVLRAHEEQLKEAQAVPATLPELEATKASLKKLRAQAEAQQPTFDALRDELRGAQEVGERLQQRHGERDVEVERWRERVAQLLERWQAVLAQTDVRQRELEQLGRQLRYYRESADPLGAWLQDARRRQEQIQAMPLADSQAVREQLRQEQALLEEIERHGEKVEECQRFAKQYINAIKDYELQLVTYKAQLEPVASPAKKPKVQSGSESVIQEYVDLRTHYSELTTLTSQYIKFISETLRRMEEEEMGRWVTKQHEREVCHRGSIPASEQR

SEQ ID NO: 4329 - protein, 1359 aa, Artificial Sequence
  Synthetic polypeptide
MAGPLPDEQDFIQAYEEVREKYKDERDRVQKKTFTKWVNKHLIKAQRHISDLYEDLRDGHNLISLLEVLSGDSLPREKGRMRFHKLQNVQIALDYLRHRQVKLVNIRNDDIADGNPKLTLGLIWTIILHFQISDIQVSGQSEDMTAKEKLLLWSQRMVEGYQGLRCDNFTSSWRDGRLFNAIIHRHKPLLIDMNKVYRQTNLENLDQAFSVAERDLGVTRLLDPEDVDVPQPDEKSIITYVSSLYDAMPRVPDVQDGVRANELQLRWQEYRELVLLLLQWMRHHTAAFEERRFPSSFEEIEILWSQFLKFKEMELPAKEADKNRSKGIYQSLEGAVQAGQLKVPPGYHPLDVEKEWGKLHVAILEREKQLRSEFERLECLQRIVTKLQMEAGLCEEQLNQADALLQSDVRLLAAGKVPQRAGEVERDLDKADSMIRLLFNDVQTLKDGRHPQGEQMYRRVYRLHERLVAIRTEYNLRLKAGVAAPATQVAQVTLQSVQRRPELEDSTLRYLQDLLAWVEENQHRVDGAEWGVDLPSVEAQLGSHRGLHQSIEEFRAKIERARSDEGQLSPATRGAYRDCLGRLDLQYAKLLNSSKARLRSLESLHSFVAAATKELMWLNEKEEEEVGFDWSDRNTNMTAKKESYSALMRELELKEKKIKELQNAGDRLLREDHPARPTVESFQAALQTQWSWMLQLCCCIEAHLKENAAYFQFFSDVREAEGQLQKLQEALRRKYSCDRSATVTRLEDLLQDAQDEKEQLNEYKGHLSGLAKRAKAVVQLKPRHPAHPMRGRLPLLAVCDYKQVEVTVHKGDECQLVGPAQPSHWKVLSSSGSEAAVPSVCFLVPPPNQEAQEAVTRLEAQHQALVTLWHQLHVDMKSLLAWQSLRRDVQLIRSWSLATFRTLKPEEQRQALHSLELHYQAFLRDSQDAGGFGPEDRLMAEREYGSCSHHYQQLLQSLEQGAQEESRCQRCISELKDIRLQLEACETRTVHRLRLPLDKEPARECAQRIAEQQKAQAEVEGLGKGVARLSAEAEKVLALPEPSPAAPTLRSELELTLGKLEQVRSLSAIYLEKLKTISLVIRGTQGAEEVLRAHEEQLKEAQAVPATLPELEATKASLKKLRAQAEAQQPTFDALRDELRGAQEVGERLQQRHGERDVEVERWRERVAQLLERWQAVLAQTDVRQRELEQLGRQLRYYRESADPLGAWLQDARRRQEQIQAMPLADSQAVREQLRQEQALLEEIERHGEKVEECQRFAKQYINAIKDYELQLVTYKAQLEPVASPAKKPKVQSGSESVIQEYVDLRTHYSELTTLTSQYIKFISETLRRMEEEEMGRWVTKQHEREVCHRGSIPASEQR

SEQ ID NO: 4330 - protein, 1400 aa, Artificial Sequence
  Synthetic polypeptide
MSGEDAEVRAVSEDVSNGSSGSPSPGDTLPWNLGKTQRSRRSGGGAGSNGSVLDPAERAVIRIADERDRVQKKTFTKWVNKHLIKAQRHISDLYEDLRDGHNLISLLEVLSGDSLPREKGRMRFHKLQNVQIALDYLRHRQVKLVNIRNDDIADGNPKLTLGLIWTIILHFQISDIQVSGQSEDMTAKEKLLLWSQRMVEGYQGLRCDNFTSSWRDGRLFNAIIHRHKPLLIDMNKVYRQTNLENLDQAFSVAERDLGVTRLLDPEDVDVPQPDEKSIITYVSSLYDAMPRVPDVQDGVRANELQLRWQEYRELVLLLLQWMRHHTAAFEERRFPSSFEEIEILWSQFLKFKEMELPAKEADKNRSKGIYQSLEGAVQAGQLKVPPGYHPLDVEKEWGKLHVAILEREKQLRSEFERLECLQRIVTKLQMEAGLCEEQLNQADALLQSDVRLLAAGKVPQRAGEVERDLDKADSMIRLLFNDVQTLKDGRHPQGEQMYRRVYRLHERLVAIRTEYNLRLKAGVAAPATQVAQVTLQSVQRRPELEDSTLRYLQDLLAWVEENQHRVDGAEWGVDLPSVEAQLGSHRGLHQSIEEFRAKIERARSDEGQLSPATRGAYRDCLGRLDLQYAKLLNSSKARLRSLESLHSFVAAATKELMWLNEKEEEEVGFDWSDRNTNMTAKKESYSALMRELELKEKKIKELQNAGDRLLREDHPARPTVESFQAALQTQWSWMLQLCCCIEAHLKENAAYFQFFSDVREAEGQLQKLQEALRRKYSCDRSATVTRLEDLLQDAQDEKEQLNEYKGHLSGLAKRAKAVVQLKPRHPAHPMRGRLPLLAVCDYKQVEVTVHKGDECQLVGPAQPSHWKVLSSSGSEAAVPSVCFLVPPPNQEAQEAVTRLEAQHQALVTLWHQLHVDMKSLLAWQSLRRDVQLIRSWSLATFRTLKPEEQRQALHSLELHYQAFLRDSQDAGGFGPEDRLMAEREYGSCSHHYQQLLQSLEQGAQEESRCQRCISELKDIRLQLEACETRTVHRLRLPLDKEPARECAQRIAEQQKAQAEVEGLGKGVARLSAEAEKVLALPEPSPAAPTLRSELELTLGKLEQVRSLSAIYLEKLKTISLVIRGTQGAEEVLRAHEEQLKEAQAVPATLPELEATKASLKKLRAQAEAQQPTFDALRDELRGAQEVGERLQQRHGERDVEVERWRERVAQLLERWQAVLAQTDVRQRELEQLGRQLRYYRESADPLGAWLQDARRRQEQIQAMPLADSQAVREQLRQEQALLEEIERHGEKVEECQRFAKQYINAIKDYELQLVTYKAQLEPVASPAKKPKVQSGSESVIQEYVDLRTHYSELTTLTSQYIKFISETLRRMEEEEMGRWVTKQHEREVCHRGSIPASEQR

SEQ ID NO: 4331 - protein, 1396 aa, Artificial Sequence
  Synthetic polypeptide
MSGEDAEVRAVSEDVSNGSSGSPSPGDTLPWNLGKTQRSRRSGGGAGSNGSVLDPAERAVIRIADERDRVQKKTFTKWVNKHLIKAQRHISDLYEDLRDGHNLISLLEVLSGDSLPREKGRMRFHKLQNVQIALDYLRHRQVKLVNIRNDDIADGNPKLTLGLIWTIILHFQISDIQVSGQSEDMTAKEKLLLWSQRMVEGYQGLRCDNFTSSWRDGRLFNAIIHRHKPLLIDMNKVYRQTNLENLDQAFSVAERDLGVTRLLDPEDVDVPQPDEKSIITYVSSLYDAMPRVPDVQDGELQLRWQEYRELVLLLLQWMRHHTAAFEERRFPSSFEEIEILWSQFLKFKEMELPAKEADKNRSKGIYQSLEGAVQAGQLKVPPGYHPLDVEKEWGKLHVAILEREKQLRSEFERLECLQRIVTKLQMEAGLCEEQLNQADALLQSDVRLLAAGKVPQRAGEVERDLDKADSMIRLLFNDVQTLKDGRHPQGEQMYRRVYRLHERLVAIRTEYNLRLKAGVAAPATQVAQVTLQSVQRRPELEDSTLRYLQDLLAWVEENQHRVDGAEWGVDLPSVEAQLGSHRGLHQSIEEFRAKIERARSDEGQLSPATRGAYRDCLGRLDLQYAKLLNSSKARLRSLESLHSFVAAATKELMWLNEKEEEEVGFDWSDRNTNMTAKKESYSALMRELELKEKKIKELQNAGDRLLREDHPARPTVESFQAALQTQWSWMLQLCCCIEAHLKENAAYFQFFSDVREAEGQLQKLQEALRRKYSCDRSATVTRLEDLLQDAQDEKEQLNEYKGHLSGLAKRAKAVVQLKPRHPAHPMRGRLPLLAVCDYKQVEVTVHKGDECQLVGPAQPSHWKVLSSSGSEAAVPSVCFLVPPPNQEAQEAVTRLEAQHQALVTLWHQLHVDMKSLLAWQSLRRDVQLIRSWSLATFRTLKPEEQRQALHSLELHYQAFLRDSQDAGGFGPEDRLMAEREYGSCSHHYQQLLQSLEQGAQEESRCQRCISELKDIRLQLEACETRTVHRLRLPLDKEPARECAQRIAEQQKAQAEVEGLGKGVARLSAEAEKVLALPEPSPAAPTLRSELELTLGKLEQVRSLSAIYLEKLKTISLVIRGTQGAEEVLRAHEEQLKEAQAVPATLPELEATKASLKKLRAQAEAQQPTFDALRDELRGAQEVGERLQQRHGERDVEVERWRERVAQLLERWQAVLAQTDVRQRELEQLGRQLRYYRESADPLGAWLQDARRRQEQIQAMPLADSQAVREQLRQEQALLEEIERHGEKVEECQRFAKQYINAIKDYELQLVTYKAQLEPVASPAKKPKVQSGSESVIQEYVDLRTHYSELTTLTSQYIKFISETLRRMEEEEMGRWVTKQHEREVCHRGSIPASEQR

SEQ ID NO: 4332 - protein, 22 aa, Artificial Sequence
  Synthetic polypeptide
RSSRDQRVSSRSTWTCVRTTAS

SEQ ID NO: 4333 - protein, 249 aa, Artificial Sequence
  Synthetic polypeptide
MAALGHLAGEAAAAPGPGTPCASRGARLPGPVSSARNPSTVCLCPEQPTCSNADSRAHPLGDEGGTASKKQKNKKKTRNRASVANGGEKASEKLAPEEVPLSAEAQAQQLAQELAWCVEQLELGLKRQKPTPKQKEQAIGAIRTLRSKRTPLPRKRQLMHSLFGDYRAQMEAEWREALRALRAAAYSAQVQPVDGATRKKSQRVCRPRSIWRAKATLDMPDEEFRATRGLGLAVTPVSGKMPVAKWTMV

SEQ ID NO: 4334 - protein, 1951 aa, Artificial Sequence
  Synthetic polypeptide
MATGGGPFEDGMNDQDLPNWSNENVDDRLNNMDWGAQQKKANRSSEKNKKKFGVESDKRVTNDISPESSPGVGRRRTKTPHTFPHSRYMSQMSVPEQAELEKLKQRINFSDLDQRSIGSDSQGRATAANNKRQLSENRKPFNFLPMQINTNKSKDASTNPPNRETIGSAQCKELFASALSNDLLQNCQVSEEDGRGEPAMESSQIVSRLVQIRDYITKASSMREDLVEKNERSANVERLTHLIDHLKEQEKSYMKFLKKILARDPQQEPMEEIENLKKQHDLLKRMLQQQEQLRALQGRQAALLALQHKAEQAIAVMDDSVVAETAGSLSGVSITSELNEELNDLIQRFHNQLRDSQPPAVPDNRRQAESLSLTREVSQSRKPSASERLPDEKVELFSKMRVLQEKKQKMDKLLGELHTLRDQHLNNSSSSPQRSVDQRSTSAPSASVGLAPVVNGESNSLTSSVPYPTASLVSQNESENEGHLNPSEKLQKLNEVRKRLNELRELVHYYEQTSDMMTDAVNENRKDEETEESEYDSEHENSEPVTNIRNPQVASTWNEVNSHSNAQCVSNNRDGRTVNSNCEINNRSAANIRALNMPPSLDCRYNREGEQEIHVAQGEDDEEEEEEAEEEGVSGASLSSHRSSLVDEHPEDAEFEQKINRLMAAKQKLRQLQDLVAMVQDDDAAQGVISASASNLDDFYPAEEDTKQNSNNTRGNANKTQKDTGVNEKAREKFYEAKLQQQQRELKQLQEERKKLIDIQEKIQALQTACPDLQLSAASVGNCPTKKYMPAVTSTPTVNQHETSTSKSVFEPEDSSIVDNELWSEMRRHEMLREELRQRRKQLEALMAEHQRRQGLAETASPVAVSLRSDGSENLCTPQQSRTEKTMATWGGSTQCALDEEGDEDGYLSEGIVRTDEEEEEEQDASSNDNFSVCPSNSVNHNSYNGKETKNRWKNNCPFSADENYRPLAKTRQQNISMQRQENLRWVSELSYVEEKEQWQEQINQLKKQLDFSVSICQTLMQDQQTLSCLLQTLLTGPYSVMPSNVASPQVHFIMHQLNQCYTQLTWQQNNVQRLKQMLNELMRQQNQHPEKPGGKERGSSASHPPSPSLFCPFSFPTQPVNLFNIPGFTNFSSFAPGMNFSPLFPSNFGDFSQNISTPSEQQQPLAQNSSGKTEYMAFPKPFESSSSIGAEKPRNKKLPEEEVESSRTPWLYEQEGEVEKPFIKTGFSVSVEKSTSSNRKNQLDTNGRRRQFDEESLESFSSMPDPVDPTTVTKTFKTRKASAQASLASKDKTPKSKSKKRNSTQLKSRVKNIRYESASMSSTCEPCKSRNRHSAQTEEPVQAKVFSRKNHEQLEKIIKCNRSTEISSETGSDFSMFEALRDTIYSEVATLISQNESRPHFLIELFHELQLLNTDYLRQRALYALQDIVSRHISESHEKGENVKSVNSGTWIASNSELTPSESLATTDDETFEKNFERETHKISEQNDADNASVLSVSSNFEPFATDDLGNTVIHLDQALARMREYERMKTEAESNSNMRCTCRIIEDGDGAGAGTTVNNLEETPVIENRSSQQPVSEVSTIPCPRIDTQQLDRQIKAIMKEVIPFLKEHMDEVCSSQLLTSVRRMVLTLTQQNDESKEFVKFFHKQLGSILQDSLAKFAGRKLKDCGEDLLVEISEVLFNELAFFKLMQDLDNNSITVKQRCKRKIEATGVIQSCAKEAKRILEDHGSPAGEIDDEDKDKDETETVKQTQTSEVYDGPKNVRSDISDQEEDEESEGCPVSINLSKAETQALTNYGSGEDENEDEEMEEFEEGPVDVQTSLQANTEATEENEHDEQVLQRDFKKTAESKNVPLEREATSKNDQNNCPVKPCYLNILEDEQPLNSAAHKESPPTVDSTQQPNPLPLRLPEMEPLVPRVKEVKSAQETPESSLAGSPDTESPVLVNDYICLL

SEQ ID NO: 4335 - protein, 1943 aa, Artificial Sequence
  Synthetic polypeptide
MATGGGPFEDGMNDQDLPNWSNENVDDRLNNMDWGAQQKKANRSSEKNKKKFGVESDKRVTNDISPESSPGVGRRRTKTPHTFPHSRYMSQMSVPEQAELEKLKQRINFSDLDQRSIGSDSQGRATAANNKRQLSENRKPFNFLPMQINTNKSKDASTNPPNRETIGSAQCKELFASALSNDLLQNCQVSEEDGRGEPAMESSQIVSRLVQIRDYITKASSMREDLVEKNERSANVERLTHLIDHLKEQEKSYMKFLKKILARDPQQEPMEEIENLKKQHDLLKRMLQQQEQLRALQGRQAALLALQHKAEQAIAVMDDSVVAETAGSLSGVSITSELNEELNDLIQRFHNQLRDSQPPAVPDNRRQAESLSLTREVSQSRKPSASERLPDEKVELFSKMRVLQEKKQKMDKLLGELHTLRDQHLNNSSSSPQRSVDQRSTSAPSASVGLAPVVNGESNSLTSSVPYPTASLVSQNESENEGHLNPSEKLQKLNEVRKRLNELRELVHYYEQTSDMMTDAVNENRKDEETEESEYDSEHENSEPVTNIRNPQVASTWNEVNSHSNAQCVSNNRDGRTVNSNCEINNRSAANIRALNMPPSLDCRYNREGEQEIHVAQGEDDEEEEEEAEEEGVSGASLSSHRSSLVDEHPEDAEFEQKINRLMAAKQKLRQLQDLVAMVQDDDAAQGVISASASNLDDFYPAEEDTKQNSNNTRGNANKTQKDTGVNEKAREKFYEAKLQQQQRELKQLQEERKKLIDIQEKIQALQTACPDLQLSAASVGNCPTKKYMPAVTSTPTVNQHETSTSKSVFEPEDSSIVDNELWSEMRRHEMLREELRQRRKQLEALMAEHQRRQGLAETASPVAVSLRSDGSENLCTPQQSRTEKTMATWGGSTQCALDEEGDEDGYLSEGIVRTDEEEEEEQDASSNDNFSVCPSNSVNHNSYNGKETKNRWKNNCPFSADENYRPLAKTRQQNISMQRQENLRWVSELSYVEEKEQWQEQINQLKKQLDFSVSICQTLMQDQQTLSCLLQTLLTGPYSVMPSNVASPQVHFIMHQLNQCYTQLTWQQNNVQRLKQMLNELMRQQNQHPEKPGGKERGSSASHPPSPSLFCPFSFPTQPVNLFNIPGFTNFSSFAPGMNFSPLFPSNFGDFSQNISTPSEQQQPLAQNSSGKTEYMAFPKPFESSSSIGAEKPRNKKLPEEEVESSRTPWLYEQEGEVEKPFIKTGFSVSVEKSTSSNRKNQLDTNGRRRQFDEESLESFSSMPDPVDPTTVTKTFKTRKASAQASLASKDKTPKSKSKKRNSTQLKSRVKNIRYESASMSSTCEPCKSRNRHSAQTEEPVQAKVFSRKNHEQLEKIIKCNRSTEISSETGSDFSMFEALRDTIYSEVATLISQNESRPHFLIELFHELQLLNTDYLRQRALYALQDIVSRHISESHEKGENVKSVNSGTWIASNSELTPSESLATTDDETFEKNFERETHKISEQNDADNASVLSVSSNFEPFATDDLGNTVIHLDQALARMREYERMKTEAESNSNMRCTCRIIEDGDGAGAETPVIENRSSQQPVSEVSTIPCPRIDTQQLDRQIKAIMKEVIPFLKEHMDEVCSSQLLTSVRRMVLTLTQQNDESKEFVKFFHKQLGSILQDSLAKFAGRKLKDCGEDLLVEISEVLFNELAFFKLMQDLDNNSITVKQRCKRKIEATGVIQSCAKEAKRILEDHGSPAGEIDDEDKDKDETETVKQTQTSEVYDGPKNVRSDISDQEEDEESEGCPVSINLSKAETQALTNYGSGEDENEDEEMEEFEEGPVDVQTSLQANTEATEENEHDEQVLQRDFKKTAESKNVPLEREATSKNDQNNCPVKPCYLNILEDEQPLNSAAHKESPPTVDSTQQPNPLPLRLPEMEPLVPRVKEVKSAQETPESSLAGSPDTESPVLVNDYICLL

SEQ ID NO: 4336 - protein, 650 aa, Artificial Sequence
  Synthetic polypeptide
MSSTCEPCKSRNRHSAQTEEPVQAKVFSRKNHEQLEKIIKCNRSTEISSAHARRILQQSNRNACNEAPETGSDFSMFEALRDTIYSEVATLISQNESRPHFLIELFHELQLLNTDYLRQRALYALQDIVSRHISESHEKGENVKSVNSGTWIASNSELTPSESLATTDDETFEKNFERETHKISEQNDADNASVLSVSSNFEPFATDDLGNTVIHLDQALARMREYERMKTEAESNSNMRCTCRIIEDGDGAGAGTTVNNLEETPVIENRSSQQPVSEVSTIPCPRIDTQQLDRQIKAIMKEVIPFLKEHMDEVCSSQLLTSVRRMVLTLTQQNDESKEFVKFFHKQLGSILQDSLAKFAGRKLKDCGEDLLVEISEVLFNELAFFKLMQDLDNNSITVKQRCKRKIEATGVIQSCAKEAKRILEDHGSPAGEIDDEDKDKDETETVKQTQTSEVYDGPKNVRSDISDQEEDEESEGCPVSINLSKAETQALTNYGSGEDENEDEEMEEFEEGPVDVQTSLQANTEATEENEHDEQVLQRDFKKTAESKNVPLEREATSKNDQNNCPVKPCYLNILEDEQPLNSAAHKESPPTVDSTQQPNPLPLRLPEMEPLVPRVKEVKSAQETPESSLAGSPDTESPVLVNDYICLL

SEQ ID NO: 4337 - protein, 27 aa, Artificial Sequence
  Synthetic polypeptide
EKRLHRPAWHLKIKLPSQKVRRGILLS

SEQ ID NO: 4338 - protein, 1397 aa, Artificial Sequence
  Synthetic polypeptide
MARWIPTKRQKYGVAIYNYNASQDVELSLQIGDTVHILEMYEGWYRGYTLQNKSKKGIFPETYIHLKEATVEDLGQHETVIPGELPLVQELTSTLREWAVIWRKLYVNNKLTLFRQLQQMTYSLIEWRSQILSGTLPKDELAELKKKVTAKIDHGNRMLGLDLVVRDDNGNILDPDETSTIALFKAHEVASKRIEEKIQEEKSILQNLDLRGQSIFSTIHTYGLYVNFKNFVCNIGEDAELFMALYDPDQSTFISENYLIRWGSNGMPKEIEKLNNLQAVFTDLSSMDLIRPRVSLVCQIVRVGHMELKEGKKHTCGLRRPFGVAVMDITDIIHGKVDDEEKQHFIPFQQIAMETYIRQRQLIMSPLITSHVIGENEPLTSVLNKVIAAKEVNHKGQGLWVSLKLLPGDLTQVQKNFSHLVDRSTAIARKMGFPEIILPGDVRNDIYVTLIHGEFDKGKKKTPKNVEVTMSVHDEEGKLLEKAIHPGAGYEGISEYKSVVYYQVKQPCWYETVKVSIAIEEVTRCHIRFTFRHRSSQETRDKSERAFGVAFVKLMNPDGTTLQDGRHDLVVYKGDNKKMEDAKFYLTLPGTKMEMEEKELQASKNLVTFTPSKDSTKDSFQIATLICSTKLTQNVDLLGLLNWRSNSQNIKHNLKKLMEVDGGEIVKFLQDTLDALFNIMMEMSDSETYDFLVFDALVFIISLIGDIKFQHFNPVLETYIYKHFSATLAYVKLSKVLNFYVANADDSSKTELLFAALKALKYLFRFIIQSRVLYLRFYGQSKDGDEFNNSIRQLFLAFNMLMDRPLEEAVKIKGAALKYLPSIINDVKLVFDPVELSVLFCKFIQSIPDNQLVRQKLNCMTKIVESTLFRQSECREVLLPLLTDQLSGQLDDNSNKPDHEASSQLLSNILEVLDRKDVGATAVHIQLIMERLLRRINRTVIGMNRQSPHIGSFVACMIALLQQMDDSHYSHYISTFKTRQDIIDFLMETFIMFKDLIGKNVYAKDWMVMNMTQNRVFLRAINQFAEVLTRFFMDQASFELQLWNNYFHLAVAFLTHESLQLETFSQAKRNKIVKKYGDMRKEIGFRIRDMWYNLGPHKIKFIPSMVGPILEVTLTPEVELRKATIPIFFDMMQCEFNFSGNGNFHMFENELITKLDQEVEGGRGDEQYKVLLEKLLLEHCRKHKYLSSSGEVFALLVSSLLENLLDYRTIIMQDESKENRMSCTVNVLNFYKEKKREDIYIRYLYKLRDLHRDCENYTEAAYTLLLHAELLQWSDKPCVPHLLQKDSYYVYTQQELKEKLYQEIISYFDKGKMWEKAIKLSKELAETYESKVFDYEGLGNLLKKRASFYENIIKAMRPQPEYFAVGYYGQGFPSFLRMGPDCLQTGHGPWATLEEEL

SEQ ID NO: 4339 - protein, 223 aa, Artificial Sequence
  Synthetic polypeptide
MSSHLVEPPPPLHNNNNNCEENEQSLPPPAGLNSSWVELPMNSSNGNDNGNGKNGGLEHVPSSSSIHNGDMEKILLDAQHESGQSSSRGSSHCDSPSPQEDGQIMFDVEMHTSRDHSSQSEEEVVEGEKEVEALKKSADWVSDWSSRPENIPPKEFHFRHPKRSVSLSMRKSGAMKKGGIFSAEFLKVFIPSLFLSHVLALGLGGQPQLRSMKGREKFLLLSY

SEQ ID NO: 4340 - protein, 201 aa, Artificial Sequence
  Synthetic polypeptide
EQSLPPPAGLNSSWVELPMNSSNGNDNGNGKNGGLEHVPSSSSIHNGDMEKILLDAQHESGQSSSRGSSHCDSPSPQEDGQIMFDVEMHTSRDHSSQSEEEVVEGEKEVEALKKSADWVSDWSSRPENIPPKEFHFRHPKRSVSLSMRKSGAMKKGGIFSAEFLKVFIPSLFLSHVLALGLGGQPQLRSMKGREKFLLLSY

SEQ ID NO: 4341 - protein, 183 aa, Artificial Sequence
  Synthetic polypeptide
MNSSNGNDNGNGKNGGLEHVPSSSSIHNGDMEKILLDAQHESGQSSSRGSSHCDSPSPQEDGQIMFDVEMHTSRDHSSQSEEEVVEGEKEVEALKKSADWVSDWSSRPENIPPKEFHFRHPKRSVSLSMRKSGAMKKGGIFSAEFLKVFIPSLFLSHVLALGLGGQPQLRSMKGREKFLLLSY

SEQ ID NO: 4342 - protein, 183 aa, Artificial Sequence; identical to SEQ ID NO: 4341
  Synthetic polypeptide

SEQ ID NO: 4343 - protein, 183 aa, Artificial Sequence; identical to SEQ ID NO: 4341
  Synthetic polypeptide

SEQ ID NO: 4344 - protein, 2 aa, Artificial Sequence
  Synthetic polypeptide
PA

SEQ ID NO: 4345 - protein, 325 aa, Artificial Sequence
  Synthetic polypeptide
MMKTLLLFVGLLLTWESGQVLGDQTVSDNELQEMSNQGSKYVNKEIQNAVNGVKQIKTLIEKTNEERKTLLSNLEEAKKKKEDALNETRESETKLKELPGVCNETMMALWEECKPCLKQTCMKFYARVCRSGSGLVGRQLEEFLNQSSPFYFWMNGDRIDSLLENDRQQTHMLDVMQDHFSRASSIIDELFQDRFFTREPQDTYHYLPFSLPHRRPHFFFPKSRIVRSLMPFSPYEPLNFHAMFQPFLEMIHEAQQAMDIHFHSPAFQHPPTEFIREGDDDRTVCREIRHNSTGCLRMKDQCDKCREILSVAWETRAKFCLKKKT

SEQ ID NO: 4346 - protein, 325 aa, Artificial Sequence; identical to SEQ ID NO: 4345
  Synthetic polypeptide

SEQ ID NO: 4347 - protein, 325 aa, Artificial Sequence; identical to SEQ ID NO: 4345
  Synthetic polypeptide

SEQ ID NO: 4348 - protein, 336 aa, Artificial Sequence
  Synthetic polypeptide
MEACKDSRIGGMMKTLLLFVGLLLTWESGQVLGDQTVSDNELQEMSNQGSKYVNKEIQNAVNGVKQIKTLIEKTNEERKTLLSNLEEAKKKKEDALNETRESETKLKELPGVCNETMMALWEECKPCLKQTCMKFYARVCRSGSGLVGRQLEEFLNQSSPFYFWMNGDRIDSLLENDRQQTHMLDVMQDHFSRASSIIDELFQDRFFTREPQDTYHYLPFSLPHRRPHFFFPKSRIVRSLMPFSPYEPLNFHAMFQPFLEMIHEAQQAMDIHFHSPAFQHPPTEFIREGDDDRTVCREIRHNSTGCLRMKDQCDKCREILSVAWETRAKFCLKKKT

SEQ ID NO: 4349 - protein, 377 aa, Artificial Sequence
  Synthetic polypeptide
MQVCSQPQRGCVREQSAINTAPPSAHNAASPGGARGHRVPLTEACKDSRIGGMMKTLLLFVGLLLTWESGQVLGDQTVSDNELQEMSNQGSKYVNKEIQNAVNGVKQIKTLIEKTNEERKTLLSNLEEAKKKKEDALNETRESETKLKELPGVCNETMMALWEECKPCLKQTCMKFYARVCRSGSGLVGRQLEEFLNQSSPFYFWMNGDRIDSLLENDRQQTHMLDVMQDHFSRASSIIDELFQDRFFTREPQDTYHYLPFSLPHRRPHFFFPKSRIVRSLMPFSPYEPLNFHAMFQPFLEMIHEAQQAMDIHFHSPAFQHPPTEFIREGDDDRTVCREIRHNSTGCLRMKDQCDKCREILSVAWETRAKFCLKKKT

SEQ ID NO: 4350 - protein, 44 aa, Artificial Sequence
  Synthetic polypeptide
MQVCSQPQRGCVREQSAINTAPPSAHNAASPGGARGHRVPLTGP

SEQ ID NO: 4351 - protein, 479 aa, Artificial Sequence
  Synthetic polypeptide
MKVRSAGGDGDALCVTEEDLAGDDEDMPTFPCTQKGRPGPRCSRCQKNLSLHTSVRILYLFLALLLVAVAVLASLVFRKVDSLSEDISLTQSIYDKKLVLMQKNLQGLDPKALNNCSFCHEAGQLGPEIRKLQEELEGIQKLLLAQEVQLDQTLQAQEVLSTTSRQISQEMGSCSFSIHQVNQSLGLFLAQVRGWQATTAGLDLSLKDLTQECYDVKAAVHQINFTVGQTSEWIHGIQRKTDEETLTLQKIVTDWQNYTRLFSGLRTTSTKTGEAVKNIQATLGASSQRISQNSESMHDLVLQVMGLQLQLDNISSFLDDHEENMHDLQYHTHYAQNRTVERFESLEGRMASHEIEIGTIFTNINATDNHVHSMLKYLDDVRLSCTLGFHTHAEELYYLNKSVSIMLGTTDLLRERFSLLSARLDLNVRNLSMIVEEMKAVDTQHGEILRNVTILRGNRNLDLQEGVESSRSGKLERKY

SEQ ID NO: 4352 - protein, 479 aa, Artificial Sequence; identical to SEQ ID NO: 4351
  Synthetic polypeptide

SEQ ID NO: 4353 - protein, 72 aa, Artificial Sequence
  Synthetic polypeptide
MKLYCLSGHPTLPCNVLKFKSTTIMLDCGLDMTSTLNFLPLPLVQSPRLSNLPGWSLKDGNAFLDKGQPVGE

SEQ ID NO: 4354 - protein, 72 aa, Artificial Sequence; identical to SEQ ID NO: 4353
  Synthetic polypeptide

SEQ ID NO: 4355 - protein, 72 aa, Artificial Sequence; identical to SEQ ID NO: 4353
  Synthetic polypeptide

SEQ ID NO: 4356 - protein, 72 aa, Artificial Sequence; identical to SEQ ID NO: 4353
  Synthetic polypeptide

SEQ ID NO: 4357 - protein, 72 aa, Artificial Sequence; identical to SEQ ID NO: 4353
  Synthetic polypeptide

SEQ ID NO: 4358 - protein, 48 aa, Artificial Sequence
  Synthetic polypeptide
MLDCGLDMTSTLNFLPLPLVQSPRLSNLPGWSLKDGNAFLDKGQPVGE

SEQ ID NO: 4359 - protein, 48 aa, Artificial Sequence; identical to SEQ ID NO: 4358
  Synthetic polypeptide

SEQ ID NO: 4360 - protein, 29 aa, Artificial Sequence
  Synthetic polypeptide
MKLSQAVQSSWLVPEGWKCFLGQGSACGG

SEQ ID NO: 4361 - protein, 63 aa, Artificial Sequence
  Synthetic polypeptide
PNLTMQCAQIQINHHYVGLRTGHDFYPQFPSFATCSKSQAVQSSWLVPEGWKCFLGQGSACGG

SEQ ID NO: 4362 - protein, 932 aa, Artificial Sequence
  Synthetic polypeptide
MFQTKLRNETWEDLPKMSCTTEIQAAFILSSFVTFFSGLIILLIFRLIWRSVKKWQIIKGTGIILELFTSGTIARSHVRSLHFQGQFRDHIEMLLSAQTFVGQVLVILVFVLSIGSLIIYFINSADPVGSCSSYEDKTIPIDLVFNAFFSFYFGLRFMAADDKIKFWLEMNSIVDIFTIPPTFISYYLKSNWLGLRFLRALRLLELPQILQILRAIKTSNSVKFSKLLSIILSTWFTAAGFIHLVENSGDPWLKGRNSQNISYFESIYLVMATTSTVGFGDVVAKTSLGRTFIMFFTLGSLILFANYIPEMVELFANKRKYTSSYEALKGKKFIVVCGNITVDSVTAFLRNFLRDKSGEINTEIVFLGETPPSLELETIFKCYLAYTTFISGSAMKWEDLRRVAVESAEACLIIANPLCSDSHAEDISNIMRVLSIKNYDSTTRIIIQILQSHNKVYLPKIPSWNWDTGDNIICFAELKLGFIAQGCLVPGLCTFLTSLFVEQNKKVMPKQTWKKHFLNSMKNKILTQRLSDDFAGMSFPEVARLCFLKMHLLLIAIEYKSLFTDGFCGLILNPPPQVRIRKNTLGFFIAETPKDVRRALFYCSVCHDDVFIPELITNCGCKSRSRQHITVPSVKRMKKCLKGISSRISGQDSPPRVSASTSSISNFTTRTLQHDVEQDSDQLDSSGMFHWCKPTSLDKVTLKRTGKSKYKFRNHIVACVFGDAHSAPMGLRNFVMPLRASNYTRKELKDIVFIGSLDYLQREWRFLWNFPQIYILPGCALYSGDLHAANIEQCSMCAVLSPPPQPSSNQTLVDTEAIMATLTIGSLQIDSSSDPSPSVSEETPGYTNGHNEKSNCRKVPILTELKNPSNIHFIEQLGGLEGSLQETNLHLSTAFSTGTVFSGSFLDSLLATEIWDPRNLHSLISLQMIQIH

SEQ ID NO: 4363 - protein, 932 aa, Artificial Sequence; identical to SEQ ID NO: 4362
  Synthetic polypeptide

SEQ ID NO: 4364 - protein, 47 aa, Artificial Sequence
  Synthetic polypeptide
MTEEVDFLGQDSDGGSEEVVLTPAELIERLEQPDVVAHACNPSYSGG

SEQ ID NO: 4365 - protein, 47 aa, Artificial Sequence; identical to SEQ ID NO: 4364
  Synthetic polypeptide

SEQ ID NO: 4366 - protein, 47 aa, Artificial Sequence; identical to SEQ ID NO: 4364
  Synthetic polypeptide

SEQ ID NO: 4367 - protein, 47 aa, Artificial Sequence; identical to SEQ ID NO: 4364
  Synthetic polypeptide

SEQ ID NO: 4368 - protein, 47 aa, Artificial Sequence; identical to SEQ ID NO: 4364
  Synthetic polypeptide

SEQ ID NO: 4369 - protein, 261 aa, Artificial Sequence
  Synthetic polypeptide
MAMDEYLWMVILGFIIAFILAFSVGANDVANSFGTAVGSGVVTLRQACILASIFETTGSVLLGAKVGETIRKGIIDVNLYNETVETLMAGEVSAMVGSAVWQLIASFLRLPISGTHCIVGSTIGFSLVAIGTKGVQWMELVKIVASWFISPLLSGFMSGLLFVLIRIFILKKEDPVPNGLRALPVFYAATIAINVFSIMYTGAPVLGLVLPMWAIALISFGVALLFAFFVWLFVCPWMRRKITGKWVTKLSKFMRWTTTQQ

SEQ ID NO: 4370 - protein, 261 aa, Artificial Sequence; identical to SEQ ID NO: 4369
  Synthetic polypeptide

SEQ ID NO: 4371 - protein, 261 aa, Artificial Sequence; identical to SEQ ID NO: 4369
  Synthetic polypeptide

SEQ ID NO: 4372 - protein, 125 aa, Artificial Sequence
  Synthetic polypeptide
MARQRQATSSRRSYPGHVQPATARDRAEWADIDPVPQNDGPNPVVQIIYSDKFRDVYDYFRAVLQRDERSERAFKLTRDAIELNAANYTVWHFRRVLLKSLQKDLHEEMNYITAIIEEQPKNYQV

SEQ ID NO: 4373 - protein, 168 aa, Artificial Sequence
  Synthetic polypeptide
MAATEGVGEAAQGGEPGQPAQPPPQPHPPPPQQQHKEEMAAEAGEAVASPMDDGFVSLDSPSYVLYRDRAEWADIDPVPQNDGPNPVVQIIYSDKFRDVYDYFRAVLQRDERSERAFKLTRDAIELNAANYTVWHFRRVLLKSLQKDLHEEMNYITAIIEEQPKNYQV

SEQ ID NO: 4374 - protein, 101 aa, Artificial Sequence
  Synthetic polypeptide
MAATEGVGEAAQGGEPGQPAQPPPQPHPPPPQQQHKEEMAAEAGEAVASPMDDGFVSLDSPSYVLYRHFRRVLLKSLQKDLHEEMNYITAIIEEQPKNYQV

SEQ ID NO: 4375 - protein, 101 aa, Artificial Sequence; identical to SEQ ID NO: 4374
  Synthetic polypeptide

SEQ ID NO: 4376 - protein, 150 aa, Artificial Sequence
  Synthetic polypeptide
GVGEAAQGGEPGQPAQPPPQPHPPPPQQQHKEEMAAEAGEAVASPMDDGDRAEWADIDPVPQNDGPNPVVQIIYSDKFRDVYDYFRAVLQRDERSERAFKLTRDAIELNAANYTVWHFRRVLLKSLQKDLHEEMNYITAIIEEQPKNYQV

SEQ ID NO: 4377 - protein, 17 aa, Artificial Sequence
  Synthetic polypeptide
MNYITAIIEEQPKNYQV

SEQ ID NO: 4378 - protein, 17 aa, Artificial Sequence
  Synthetic polypeptide
MNYITAIIEEQPKNYQV

SEQ ID NO: 4379 - protein, 106 aa, Artificial Sequence
  Synthetic polypeptide
MSVFRDRAEWADIDPVPQNDGPNPVVQIIYSDKFRDVYDYFRAVLQRDERSERAFKLTRDAIELNAANYTVWHFRRVLLKSLQKDLHEEMNYITAIIEEQPKNYQV

SEQ ID NO: 4380 - protein, 280 aa, Artificial Sequence
  Synthetic polypeptide
MAATEGVGEAAQGGEPGQPAQPPPQPHPPPPQQQHKEEMAAEAGEAVASPMDDGFVSLDSPSYVLYRDRAEWADIDPVPQNDGPNPVVQIIYSDKFRDVYDYFRAVLQRDERSERAFKLTRDAIELNAANYTVWHFRRVLLKSLQKDLHEEMNYITAIIEEQPKNYQVWHHRRVLVEWLRDPSQELEFIADILNQDAKNYHAWQHRQWVIQEFKLWDNELQYVDQLLKEDVRNNSVWNQRYFVISNTTGYNDRAVLEREVQLREVRKLQKKTWMLAEVGS

SEQ ID NO: 4381 - protein, 213 aa, Artificial Sequence
  Synthetic polypeptide
MAATEGVGEAAQGGEPGQPAQPPPQPHPPPPQQQHKEEMAAEAGEAVASPMDDGFVSLDSPSYVLYRHFRRVLLKSLQKDLHEEMNYITAIIEEQPKNYQVWHHRRVLVEWLRDPSQELEFIADILNQDAKNYHAWQHRQWVIQEFKLWDNELQYVDQLLKEDVRNNSVWNQRYFVISNTTGYNDRAVLEREVQLREVRKLQKKTWMLAEVGS

SEQ ID NO: 4382 - protein, 129 aa, Artificial Sequence
  Synthetic polypeptide
MNYITAIIEEQPKNYQVWHHRRVLVEWLRDPSQELEFIADILNQDAKNYHAWQHRQWVIQEFKLWDNELQYVDQLLKEDVRNNSVWNQRYFVISNTTGYNDRAVLEREVQLREVRKLQKKTWMLAEVGS

SEQ ID NO: 4383 - protein, 218 aa, Artificial Sequence
  Synthetic polypeptide
MSVFRDRAEWADIDPVPQNDGPNPVVQIIYSDKFRDVYDYFRAVLQRDERSERAFKLTRDAIELNAANYTVWHFRRVLLKSLQKDLHEEMNYITAIIEEQPKNYQVWHHRRVLVEWLRDPSQELEFIADILNQDAKNYHAWQHRQWVIQEFKLWDNELQYVDQLLKEDVRNNSVWNQRYFVISNTTGYNDRAVLEREVQLREVRKLQKKTWMLAEVGS

SEQ ID NO: 4384 - protein, 497 aa, Artificial Sequence
  Synthetic polypeptide
NNLQQPTWGAALTAFARLLQPAYRDGIRAPRGLGLPVGSRQPLPPPRLVATVWARAAAVTPDHSYTRMLMHWGWFLEHDLDHTVPALSTARFSDGRPCSSVCTNDPPCFPMNTRHADPRGTHAPCMLFARSSPACASGRPSATVDSVYAREQINQQTAYIDGSNVYGSSERESQALRDPSVPRGLLKTGFPWPPSGKPLLPFSTGPPTECARQEQESPCFLAGDHRANEHLALAAMHTLWFREHNRMATELSALNPHWEGNTVYQEARKIVGAELQHITYSHWLPKVLGDPGTRMLRGYRGYNPNVNAGIINSFATAAFRFGHTLINPILYRLNATLGEISEGHLPFHKALFSPSRIIKEGGIDPVLRGLFGVAAKWRAPSYLLSPELTQRLFSAAYSAAVDSAATIIQRGRDHGIPPYVDFRVFCNLTSVKNFEDLQNEIKDSEIRQKLRKLYGSPGDIDLWPALMVEDLIPGTRVGPTLMCLFVTQFQRLRDGDR

SEQ ID NO: 4385 - protein, 1231 aa, Artificial Sequence
  Synthetic polypeptide
MEPRLFCWTTLFLLAGWCLPGLPCPSRCLCFKSTVRCMHLMLDHIPQVPQQTTVLDLRFNRIREIPGSAFKKLKNLNTLLLNNNHIRKISRNAFEGLENLLYLYLYKNEIHALDKQTFKGLISLEHLYIHFNQLEMLQPETFGDLLRLERLFLHNNKLSKIPAGSFSNLDSLKRLRLDSNALVCDCDLMWLGELLQGFAQHGHTQAAATCEYPRRLHGRAVASVTVEEFNCQSPRITFEPQDVEVPSGNTVYFTCRAEGNPKPEIIWIHNNHSLDLEDDTRLNVFDDGTLMIRNTRESDQGVYQCMARNSAGEAKTQSAMLRYSSLPAKPSFVIQPQDTEVLIGTSTTLECMATGHPHPLITWTRDNGLELDGSRHVATSSGLYLQNITQRDHGRFTCHANNSHGTVQAAANIIVQAPPQFTVTPKDQVVLEEHAVEWLCEADGNPPPVIVWTKTGGQLPVEGQHTVLSSGTLRIDRAAQHDQGQYECQAVSSLGVKKVSVQLTVKPKALAVFTQLPQDTSVEVGKNINISCHAQGEPQPIITWNKEGVQITESGKFHVDDEGTLTIYDAGFPDQGRYECVARNSFGLAVTNMFLTVTAIQGRQAGDDFVESSILDAVQRVDSAINSTRRHLFSQKPHTSSDLLAQFHYPRDPLIVEMARAGEIFEHTLQLIRERVKQGLTVDLEGKEFRYNDLVSPRSLSLIANLSGCTARRPLPNCSNRCFHAKYRAHDGTCNNLQQPTWGAALTAFARLLQPAYRDGIRAPRGLGLPVGSRQPLPPPRLVATVWARAAAVTPDHSYTRMLMHWGWFLEHDLDHTVPALSTARFSDGRPCSSVCTNDPPCFPMNTRHADPRGTHAPCMLFARSSPACASGRPSATVDSVYAREQINQQTAYIDGSNVYGSSERESQALRDPSVPRGLLKTGFPWPPSGKPLLPFSTGPPTECARQEQESPCFLAGDHRANEHLALAAMHTLWFREHNRMATELSALNPHWEGNTVYQEARKIVGAELQHITYSHWLPKVLGDPGTRMLRGYRGYNPNVNAGIINSFATAAFRFGHTLINPILYRLNATLGEISEGHLPFHKALFSPSRIIKEGGIDPVLRGLFGVAAKWRAPSYLLSPELTQRLFSAAYSAAVDSAATIIQRGRDHGIPPYVDFRVFCNLTSVKNFEDLQNEIKDSEIRQKLRKLYGSPGDIDLWPALMVEDLIPGTRVGPTLMCLFVTQFQRLRDGDR

SEQ ID NO: 4386 - protein, 1231 aa, Artificial Sequence; identical to SEQ ID NO: 4385
  Synthetic polypeptide

SEQ ID NO: 4387 - protein, 182 aa, Artificial Sequence
  Synthetic polypeptide
MPQLSQDNQECLQKHFSRPSIWTQFLPLFRAQRYNTDIHQITENEGDLRAVPDIKSFPPAQLPDSPAAPKLFGLLSSPLSSLARFFSHLLRRPPPEAPRRRLDFSPLLPALPAARLSRGHEELPGRLSLLLGAALALPGRPSGGRPLRPPHPVAKPREEDATAGQSSPMPGLCMHHHIWLIK

SEQ ID NO: 4388 - protein, 35 aa, Artificial Sequence
  Synthetic polypeptide
MRTADGGEPAGASSPAGRVDGGLGLCMHHHIWLIK

SEQ ID NO: 4389 - protein, 40 aa, Artificial Sequence
  Synthetic polypeptide
MCGNNMSTPLPAIVPAARKATAAVIFLHGLGDTGCGGSCL

SEQ ID NO: 4390 - protein, 40 aa, Artificial Sequence; identical to SEQ ID NO: 4389
  Synthetic polypeptide

SEQ ID NO: 4391 - protein, 40 aa, Artificial Sequence; identical to SEQ ID NO: 4389
  Synthetic polypeptide

SEQ ID NO: 4392 - protein, 40 aa, Artificial Sequence; identical to SEQ ID NO: 4389
  Synthetic polypeptide

SEQ ID NO: 4393 - protein, 40 aa, Artificial Sequence; identical to SEQ ID NO: 4389
  Synthetic polypeptide

SEQ ID NO: 4394 - protein, 344 aa, Artificial Sequence
  Synthetic polypeptide
MAAHRKHDQDPHDQPKRRRIRKHKSKKKFKNPNNVLIEQAELEKQQSLLQEKSQRQHTDGTTISKNKKRKLKKKQQIKRKKAAGLAAKAAGVSFMYQPEDSSNEGEGVGEACEEDGVDTSEEDPTLAGEEDVKDTREEDGADASEEDLTRARQEEGADASEEDPTPAGEEDVKDAREEDGVDTIEEDLTRAGEEDGKDTREEDGADASEEDPTWAGEEEGADSGEEDGADASEEDDTITNEKAHSILNFLKSTQEMYFYDAWGRPTVMPGVTRKPGWETPVEGIRKLLRKTAHRKMELLEPSRGDYHGNICSHLSSGICKSCVWALGEGLGKGPGGAQRGRKTS

SEQ ID NO: 4395 - protein, 11 aa, Artificial Sequence
  Synthetic polypeptide
FFEVNTGNVFL

SEQ ID NO: 4396 - protein, 438 aa, Artificial Sequence
  Synthetic polypeptide
MAAHRKHVFVEKVLQRLFPPVPSGQGKREPQTLAVQNPPKKVTSEKVSQKHAEPLTDTGSETPTARRLYTASGPPEGYVPCWPEPSSCGSPENASSGDDTEDQDPHDQPKRRRIRKHKSKKKFKNPNNVLIEQAELEKQQSLLQEKSQRQHTDGTTISKNKKRKLKKKQQIKRKKAAGLAAKAAGVSFMYQPEDSSNEGEGVGEACEEDGVDTSEEDPTLAGEEDVKDTREEDGADASEEDLTRARQEEGADASEEDPTPAGEEDVKDAREEDGVDTIEEDLTRAGEEDGKDTREEDGADASEEDPTWAGEEEGADSGEEDGADASEEDDTITNEKAHSILNFLKSTQEMYFYDAWGRPTVMPGVTRKPGWETPVEGIRKLLRKTAHRKMELLEPSRGDYHGNICSHLSSGICKSCVWALGEGLGKGPGGAQRGRKTS

SEQ ID NO: 4397 - protein, 10 aa, Artificial Sequence
  Synthetic polypeptide
KMVRTLARKT

SEQ ID NO: 4398 - protein, 303 aa, Artificial Sequence
  Synthetic polypeptide
MAEDKETKHGGHKNGRKGGLSGTSFFTWFMVIALLGVWTSVAVVWFDLVDYEEVLGKLGIYDADGDGDFDVDDAKVLLGLKERSTSEPAVPPEEAEPHTEPEEQVPVEAEPQNIEDEAKEQIQSLLHEMVHAEHVEGEDLQQEDGPTGEPQQEDDEFLMATDVDDRFETLEPEVSHEETEHSYHVEETVSQDCNQDMEEMMSEQENPDSSEPVVEDERLHHDTDDVTYQVYEEQAVYEPLENEGIEITEVTAPPEDNPVEDSQVIVEEVSIFPVEEQQEVPPGGPVFSQGYMSSTPAGTSKQD

SEQ ID NO: 4399 - protein, 332 aa, Artificial Sequence
  Synthetic polypeptide
MAQRKNAKSSGNSSSSGSGSGSTSAGSSSPGARRETKHGGHKNGRKGGLSGTSFFTWFMVIALLGVWTSVAVVWFDLVDYEEVLGKLGIYDADGDGDFDVDDAKVLLGLKERSTSEPAVPPEEAEPHTEPEEQVPVEAEPQNIEDEAKEQIQSLLHEMVHAEHVEGEDLQQEDGPTGEPQQEDDEFLMATDVDDRFETLEPEVSHEETEHSYHVEETVSQDCNQDMEEMMSEQENPDSSEPVVEDERLHHDTDDVTYQVYEEQAVYEPLENEGIEITEVTAPPEDNPVEDSQVIVEEVSIFPVEEQQEVPPGGPVFSQGYMSSTPAGTSKQD

SEQ ID NO: 4400 - protein, 332 aa, Artificial Sequence; identical to SEQ ID NO: 4399
  Synthetic polypeptide

SEQ ID NO: 4401 - protein, 145 aa, Artificial Sequence
  Synthetic polypeptide
MATDVDDRFETLEPEVSHEETEHSYHVEETVSQDCNQDMEEMMSEQENPDSSEPVVEDERLHHDTDDVTYQVYEEQAVYEPLENEGIEITEVTAPPEDNPVEDSQVIVEEVSIFPVEEQQEVPPGGPVFSQGYMSSTPAGTSKQD

SEQ ID NO: 4402 - protein, 346 aa, Artificial Sequence
  Synthetic polypeptide
MAQRKNAKSSGNSSSSGSGSGSTSAGSSSPGARRETKHGGHKNGRKGGLSGTSFFTWFMVIALLGVWTSVAVVWFDLVDYEEVLAKAKDFRYNLSEVLQGKLGIYDADGDGDFDVDDAKVLLGLKERSTSEPAVPPEEAEPHTEPEEQVPVEAEPQNIEDEAKEQIQSLLHEMVHAEHVEGEDLQQEDGPTGEPQQEDDEFLMATDVDDRFETLEPEVSHEETEHSYHVEETVSQDCNQDMEEMMSEQENPDSSEPVVEDERLHHDTDDVTYQVYEEQVYEPLENEGIEITEVTAPPEDNPVEDSQVIVEEVSIFPVEEQQEVPPGGPVFSQGYMSSTPAGTSKQD

SEQ ID NO: 4403 - protein, 289 aa, Artificial Sequence
  Synthetic polypeptide
MAQRKNAKSSGNSSSSGSGSGSTSAGSSSPGARRETKHGGHKNGRKGGLSGTSFFTWFMVIALLGVWTSVAVVWFDLVDYEEVLGKLGIYDADGDGDFDVDDAKVLLGLKERSTSEPAVPPEEAEPHTEPEEQVPVEAEPQNIEDEAKEQIQSLLHEMVHAEHETEHSYHVEETVSQDCNQDMEEMMSEQENPDSSEPVVEDERLHHDTDDVTYQVYEEQAVYEPLENEGIEITEVTAPPEDNPVEDSQVIVEEVSIFPVEEQQEVPPGGPVFSQGYMSSTPAGTSKQD

SEQ ID NO: 4404 - protein, 317 aa, Artificial Sequence
  Synthetic polypeptide
MAEDKETKHGGHKNGRKGGLSGTSFFTWFMVIALLGVWTSVAVVWFDLVDYEEVLAKAKDFRYNLSEVLQGKLGIYDADGDGDFDVDDAKVLLGLKERSTSEPAVPPEEAEPHTEPEEQVPVEAEPQNIEDEAKEQIQSLLHEMVHAEHVEGEDLQQEDGPTGEPQQEDDEFLMATDVDDRFETLEPEVSHEETEHSYHVEETVSQDCNQDMEEMMSEQENPDSSEPVVEDERLHHDTDDVTYQVYEEQVYEPLENEGIEITEVTAPPEDNPVEDSQVIVEEVSIFPVEEQQEVPPGGPVFSQGYMSSTPAGTSKQD

SEQ ID NO: 4405 - protein, 318 aa, Artificial Sequence
  Synthetic polypeptide
MAEDKETKHGGHKNGRKGGLSGTSFFTWFMVIALLGVWTSVAVVWFDLVDYEEVLAKAKDFRYNLSEVLQGKLGIYDADGDGDFDVDDAKVLLGLKERSTSEPAVPPEEAEPHTEPEEQVPVEAEPQNIEDEAKEQIQSLLHEMVHAEHVEGEDLQQEDGPTGEPQQEDDEFLMATDVDDRFETLEPEVSHEETEHSYHVEETVSQDCNQDMEEMMSEQENPDSSEPVVEDERLHHDTDDVTYQVYEEQAVYEPLENEGIEITEVTAPPEDNPVEDSQVIVEEVSIFPVEEQQEVPPGGPVFSQGYMSSTPAGTSKQD

SEQ ID NO: 4406 - protein, 318 aa, Artificial Sequence; identical to SEQ ID NO: 4405
  Synthetic polypeptide

SEQ ID NO: 4407 - protein, 275 aa, Artificial Sequence
  Synthetic polypeptide
MAEDKETKHGGHKNGRKGGLSGTSFFTWFMVIALLGVWTSVAVVWFDLVDYEEVLAKAKDFRYNLSEVLQGKLGIYDADGDGDFDVDDAKVLLGLKERSTSEPAVPPEEAEPHTEPEEQVPVEAEPQNIEDEAKEQIQSLLHEMVHAEHETEHSYHVEETVSQDCNQDMEEMMSEQENPDSSEPVVEDERLHHDTDDVTYQVYEEQAVYEPLENEGIEITEVTAPPEDNPVEDSQVIVEEVSIFPVEEQQEVPPGGPVFSQGYMSSTPAGTSKQD

SEQ ID NO: 4408 - protein, 342 aa, Artificial Sequence
  Synthetic polypeptide
MAEDKETKHGGHKNGRKGGLSGTSFFTWFMVIALLGVWTSVAVVWFDLVDYEEVLGKLGIYDADGDGDFDVDDAKVLLGLKERSTSEPAVPPEEAEPHTEPEEQVPVEAEPQNIEDEAKEQIQSLLHEMVHAEHVEGEDLQQEDGPTGEPQQEDDEFLMATDVDDRFETLEPEVSHEETEHSYHVEETVSQDCNQDMEEMMSEQENPDSSEPVVEDERLHHDTDDVTYQVYEEQAVYEPLENEGIEITEVTAPPEDNPVEDSQVIVEEVSIFPVEEQQEVPPGLIQLIWLARQVSPSSLSTPCASLPKLHAQLTSMTVPDTGGPVFSQGYMSSTPAGTSKQD

SEQ ID NO: 4409 - protein, 371 aa, Artificial Sequence
  Synthetic polypeptide
MAQRKNAKSSGNSSSSGSGSGSTSAGSSSPGARRETKHGGHKNGRKGGLSGTSFFTWFMVIALLGVWTSVAVVWFDLVDYEEVLGKLGIYDADGDGDFDVDDAKVLLGLKERSTSEPAVPPEEAEPHTEPEEQVPVEAEPQNIEDEAKEQIQSLLHEMVHAEHVEGEDLQQEDGPTGEPQQEDDEFLMATDVDDRFETLEPEVSHEETEHSYHVEETVSQDCNQDMEEMMSEQENPDSSEPVVEDERLHHDTDDVTYQVYEEQAVYEPLENEGIEITEVTAPPEDNPVEDSQVIVEEVSIFPVEEQQEVPPGLIQLIWLARQVSPSSLSTPCASLPKLHAQLTSMTVPDTGGPVFSQGYMSSTPAGTSKQD

SEQ ID NO: 4410 - protein, 371 aa, Artificial Sequence; identical to SEQ ID NO: 4409
  Synthetic polypeptide

SEQ ID NO: 4411 - protein, 184 aa, Artificial Sequence
  Synthetic polypeptide
MATDVDDRFETLEPEVSHEETEHSYHVEETVSQDCNQDMEEMMSEQENPDSSEPVVEDERLHHDTDDVTYQVYEEQAVYEPLENEGIEITEVTAPPEDNPVEDSQVIVEEVSIFPVEEQQEVPPGLIQLIWLARQVSPSSLSTPCASLPKLHAQLTSMTVPDTGGPVFSQGYMSSTPAGTSKQD

SEQ ID NO: 4412 - protein, 385 aa, Artificial Sequence
  Synthetic polypeptide
MAQRKNAKSSGNSSSSGSGSGSTSAGSSSPGARRETKHGGHKNGRKGGLSGTSFFTWFMVIALLGVWTSVAVVWFDLVDYEEVLAKAKDFRYNLSEVLQGKLGIYDADGDGDFDVDDAKVLLGLKERSTSEPAVPPEEAEPHTEPEEQVPVEAEPQNIEDEAKEQIQSLLHEMVHAEHVEGEDLQQEDGPTGEPQQEDDEFLMATDVDDRFETLEPEVSHEETEHSYHVEETVSQDCNQDMEEMMSEQENPDSSEPVVEDERLHHDTDDVTYQVYEEQVYEPLENEGIEITEVTAPPEDNPVEDSQVIVEEVSIFPVEEQQEVPPGLIQLIWLARQVSPSSLSTPCASLPKLHAQLTSMTVPDTGGPVFSQGYMSSTPAGTSKQD

SEQ ID NO: 4413 - protein, 328 aa, Artificial Sequence
  Synthetic polypeptide
MAQRKNAKSSGNSSSSGSGSGSTSAGSSSPGARRETKHGGHKNGRKGGLSGTSFFTWFMVIALLGVWTSVAVVWFDLVDYEEVLGKLGIYDADGDGDFDVDDAKVLLGLKERSTSEPAVPPEEAEPHTEPEEQVPVEAEPQNIEDEAKEQIQSLLHEMVHAEHETEHSYHVEETVSQDCNQDMEEMMSEQENPDSSEPVVEDERLHHDTDDVTYQVYEEQAVYEPLENEGIEITEVTAPPEDNPVEDSQVIVEEVSIFPVEEQQEVPPGLIQLIWLARQVSPSSLSTPCASLPKLHAQLTSMTVPDTGGPVFSQGYMSSTPAGTSKQD

SEQ ID NO: 4414 - protein, 356 aa, Artificial Sequence
  Synthetic polypeptide
MAEDKETKHGGHKNGRKGGLSGTSFFTWFMVIALLGVWTSVAVVWFDLVDYEEVLAKAKDFRYNLSEVLQGKLGIYDADGDGDFDVDDAKVLLGLKERSTSEPAVPPEEAEPHTEPEEQVPVEAEPQNIEDEAKEQIQSLLHEMVHAEHVEGEDLQQEDGPTGEPQQEDDEFLMATDVDDRFETLEPEVSHEETEHSYHVEETVSQDCNQDMEEMMSEQENPDSSEPVVEDERLHHDTDDVTYQVYEEQVYEPLENEGIEITEVTAPPEDNPVEDSQVIVEEVSIFPVEEQQEVPPGLIQLIWLARQVSPSSLSTPCASLPKLHAQLTSMTVPDTGGPVFSQGYMSSTPAGTSKQD

SEQ ID NO: 4415 - protein, 357 aa, Artificial Sequence
  Synthetic polypeptide
MAEDKETKHGGHKNGRKGGLSGTSFFTWFMVIALLGVWTSVAVVWFDLVDYEEVLAKAKDFRYNLSEVLQGKLGIYDADGDGDFDVDDAKVLLGLKERSTSEPAVPPEEAEPHTEPEEQVPVEAEPQNIEDEAKEQIQSLLHEMVHAEHVEGEDLQQEDGPTGEPQQEDDEFLMATDVDDRFETLEPEVSHEETEHSYHVEETVSQDCNQDMEEMMSEQENPDSSEPVVEDERLHHDTDDVTYQVYEEQAVYEPLENEGIEITEVTAPPEDNPVEDSQVIVEEVSIFPVEEQQEVPPGLIQLIWLARQVSPSSLSTPCASLPKLHAQLTSMTVPDTGGPVFSQGYMSSTPAGTSKQD

SEQ ID NO: 4416 - protein, 357 aa, Artificial Sequence; identical to SEQ ID NO: 4415
  Synthetic polypeptide

SEQ ID NO: 4417 - protein, 314 aa, Artificial Sequence
  Synthetic polypeptide
MAEDKETKHGGHKNGRKGGLSGTSFFTWFMVIALLGVWTSVAVVWFDLVDYEEVLAKAKDFRYNLSEVLQGKLGIYDADGDGDFDVDDAKVLLGLKERSTSEPAVPPEEAEPHTEPEEQVPVEAEPQNIEDEAKEQIQSLLHEMVHAEHETEHSYHVEETVSQDCNQDMEEMMSEQENPDSSEPVVEDERLHHDTDDVTYQVYEEQAVYEPLENEGIEITEVTAPPEDNPVEDSQVIVEEVSIFPVEEQQEVPPGLIQLIWLARQVSPSSLSTPCASLPKLHAQLTSMTVPDTGGPVFSQGYMSSTPAGTSKQD

SEQ ID NO: 4418 - protein, 114 aa, Artificial Sequence
  Synthetic polypeptide
MGCCTGRCSLICLCALQLVSALERQIFDFLGFQWAPILGNFLHIIVVILGLFGTIQYRPRYIMVYTVWTALWVTWNVFIICFYLEVGGLSKETNNQASHIDQGIETYQITSSGQ

SEQ ID NO: 4419 - protein, 114 aa, Artificial Sequence; identical to SEQ ID NO: 4418
  Synthetic polypeptide

SEQ ID NO: 4420 - protein, 21 aa, Artificial Sequence
  Synthetic polypeptide
MRTSYLLLFTLCLLLSEMASE

SEQ ID NO: 4421 - protein, 66 aa, Artificial Sequence
  Synthetic polypeptide
MKCLGKRRGQAAAFLPLCWLFLKILQPGHSHLYNNRYAGDKVIRFIPKTEEEAYALKKISYQLKPG

SEQ ID NO: 4422 - protein, 66 aa, Artificial Sequence; identical to SEQ ID NO: 4421
  Synthetic polypeptide

SEQ ID NO: 4423 - protein, 66 aa, Artificial Sequence; identical to SEQ ID NO: 4421
  Synthetic polypeptide

SEQ ID NO: 4424 - protein, 168 aa, Artificial Sequence
  Synthetic polypeptide
MKYTKQNFMMSVLGIIIYVTDLIVDIWVSVRFFHEGQYVFSALALSFMLFGTLVAQCFSYSWFKADLKKAGQESQHCFLLLHCLQGGVFTRYWFALKRGYHAAFKYDSNTSNFVEEQIDLHKEVIDRVTDLSMLRLFETYLEGCPQLILQLYILLEHGQANFSQYSRS

SEQ ID NO: 4425 - protein, 168 aa, Artificial Sequence; identical to SEQ ID NO: 4424
  Synthetic polypeptide

SEQ ID NO: 4426 - protein, 107 aa, Artificial Sequence
  Synthetic polypeptide
MAEDVSSAAPSPRGCADGRDADPTEEQMAETERNDEEQFECQELLECQVQVGAPEEEEEEEEDAGLVAEAEAVAAGWMLDFLCLSLCRAFRDGRSEDFRRTRNSAED

SEQ ID NO: 4427 - protein, 107 aa, Artificial Sequence; identical to SEQ ID NO: 4426
  Synthetic polypeptide

SEQ ID NO: 4428 - protein, 107 aa, Artificial Sequence; identical to SEQ ID NO: 4426
  Synthetic polypeptide

SEQ ID NO: 4429 - protein, 138 aa, Artificial Sequence
  Synthetic polypeptide
MLPFLFFSTLFSSIFTEAQKQYWVCNSSDASISYTYCDKMQYPISINVNPCIELKRSKGLLHIFYIPRRDLKQLYFNLYITVNTMNLPKRKEVICRGSDDDYSFCRALKGETVNTTISFSFKGIKFSKEEEVKTKRQK

SEQ ID NO: 4430 - protein, 108 aa, Artificial Sequence
  Synthetic polypeptide
MLPFLFFSTLFSSIFTEAQKQYWVCNSSDASISYTYCGRDLKQLYFNLYITVNTMNLPKRKEVICRGSDDDYSFCRALKGETVNTTISFSFKGIKFSKEEEVKTKRQK

SEQ ID NO: 4431 - protein, 56 aa, Artificial Sequence
  Synthetic polypeptide
MLEGAELYFNVDHGYLEGLVRGCKASLLTQQDYINLVQCETLEGLQDAFQGLWRQE

SEQ ID NO: 4432 - protein, 56 aa, Artificial Sequence; identical to SEQ ID NO: 4431
  Synthetic polypeptide

SEQ ID NO: 4433 - protein, 128 aa, Artificial Sequence
  Synthetic polypeptide
MLEGAELYFNVDHGYLEGLVRGCKASLLTQQDYINLVQCETLEDLKIHLQTTDYGNFLANHTNPLTVSKIDTEMRKRLCGEFEYFRNHSLEPLSTFLTYMTMLSKGYGDRSDYKMTTFQILSAYMYIY

SEQ ID NO: 4434 - protein, 321 aa, Artificial Sequence
  Synthetic polypeptide
MKLPARVFFTLGSRLPCGLAPRRFFSYGTKILYQNTEALQSKFFSPLQKAMLPPNSFQGKVAFITGGGTGLGKGMTTLLSSLGAQCVIASRKMDVLKATAEQISSQTGNKVHAIQCDVRDPDMVQNTVSELIKVAGHPNIVINNAAGNFISPTERLSPNAWKTITDIVLNGTAFVTLEIGKQLIKAQKGAAFLSITTIYAETGSGFVVPSASAKAGVEAMSKSLAAEWGKYGMRFNVIQPGPIKTKGAFSRLDPTGTFEKEMIGRIPCGRLGTVEELANLAAFLCSDYASWINGAECSSSPATEQSWTENDFDELREEGFR

SEQ ID NO: 4435 - protein, 312 aa, Artificial Sequence
  Synthetic polypeptide
MSGLGKKHLLLMGEFFSYGTKILYQNTEALQSKFFSPLQKAMLPPNSFQGKVAFITGGGTGLGKGMTTLLSSLGAQCVIASRKMDVLKATAEQISSQTGNKVHAIQCDVRDPDMVQNTVSELIKVAGHPNIVINNAAGNFISPTERLSPNAWKTITDIVLNGTAFVTLEIGKQLIKAQKGAAFLSITTIYAETGSGFVVPSASAKAGVEAMSKSLAAEWGKYGMRFNVIQPGPIKTKGAFSRLDPTGTFEKEMIGRIPCGRLGTVEELANLAAFLCSDYASWINGAECSSSPATEQSWTENDFDELREEGFR

SEQ ID NO: 4436 - protein, 131 aa, Artificial Sequence
  Synthetic polypeptide
MSYRRELEKYRDLDEDEILGALTEEELRTLENELDELDPDNALLPAGLRQKDQTTKAPTGPFKREELLDHLEKQAKEFKDREDLVPYTGEKRGLLLLFSNFPPQDLCTYSLCLECWSCCPAPCCLLHGWLL

SEQ ID NO: 4437 - protein, 131 aa, Artificial Sequence; identical to SEQ ID NO: 4436
  Synthetic polypeptide

SEQ ID NO: 4438 - protein, 229 aa, Artificial Sequence
  Synthetic polypeptide
MDMKRRIHLELRNRTPAAVRELVLDNCKSNDGKIEGLTAEFVNLEFLSLINVGLISVSNLPKLPKLKKLELSENRIFGGLDMLAEKLPNLTHLNLSGNKLKDISTLEPLKKLECLKSLDLFNCEVTNLNDYRESVFKLLPQLTYLDGYDREDQEAPDSDAEVDGVDEEEEDEEGEDEEDEDDEDGEEEEFDEEDDEDEDVEGDEDDDEVSEEEEEFGLDEEDEDEDEDE

SEQ ID NO: 4439 - protein, 37 aa, Artificial Sequence
  Synthetic polypeptide
MPGPTPSGTNVGSSGRSPSKAVAARAAGSTVRQRYPP

SEQ ID NO: 4440 - protein, 67 aa, Artificial Sequence
  Synthetic polypeptide
MPGPTPSGTNVGSSGRSPSKAVAARAAGSTVRQREEKILNTCMETSEGCEEGCDIFWLQQVNLKLMI

SEQ ID NO: 4441 - protein, 246 aa, Artificial Sequence
  Synthetic polypeptide
MIQLTATPVSALVDEPVHIRATGLIPFQMVSFQASLEDENGDMFYSQAHYRANEFGEVDLNHASSLGGDYMGVHPMGLFWSLKPEKLLTRLLKRDVMNRPFQVQVKLYDLELIVNNKVASAPKASLTLERWYVAPGVTRIKVREGRLRGALFLPPGEGLFPGVIDLFGGLGGLLEFRASLLASRGFASLALAYHNYEDLPRKPEVTDLEYFEEAANFLLRHPKAQTAKAGGNISVSKEEAWKPVGP

SEQ ID NO: 4442 - protein, 246 aa, Artificial Sequence; identical to SEQ ID NO: 4441
  Synthetic polypeptide

SEQ ID NO: 4443 - protein, 307 aa, Artificial Sequence
  Synthetic polypeptide
MIQLTATPVSALVDEPVHIRATGLIPFQMVSFQASLEDENGDMFYSQAHYRANEFGEVDLNHASSLGGDYMGVHPMGLFWSLKPEKLLTRLLKRDVMNRPFQVQVKLYDLELIVNNKVASAPKASLTLERWYVAPGVTRIKVREGRLRGALFLPPGTDCQGWGQHICIKRGSLETGRTLTPGGLKSPLPAFCCNAPHLPQVWFTQAHVQFGPLSGRQYSKSWWCLCSAISTKVQSAQVMRACLPPLRFQRMPQKASEPRQRTITGAGPPQTAPTPVWQCPVKPWEQSHPQDPRLVEPPVCNSSLGEP

SEQ ID NO: 4444 - protein, 307 aa, Artificial Sequence; identical to SEQ ID NO: 4443
  Synthetic polypeptide

SEQ ID NO: 4445 - protein, 52 aa, Artificial Sequence
  Synthetic polypeptide
MIQLTATPVSALVDEPVHIRATGLIPFQMAQTAKAGGNISVSKEEAWKPVGP

SEQ ID NO: 4446 - protein, 52 aa, Artificial Sequence; identical to SEQ ID NO: 4445
  Synthetic polypeptide

SEQ ID NO: 4447 - protein, 88 aa, Artificial Sequence
  Synthetic polypeptide
MTDTSVLDQWKASFFVEDFLEKKTITRMVTQINCEFEEVVPSSNPDSQIEVEEVSLYTHMDYNEVFTPVSCLEKCSALQNQNQGDFFI

SEQ ID NO: 4448 - protein, 88 aa, Artificial Sequence; identical to SEQ ID NO: 4447
  Synthetic polypeptide

SEQ ID NO: 4449 - protein, 152 aa, Artificial Sequence
  Synthetic polypeptide
MFSALKYHAIDYLYENVVRKKFYRDALLLRIPSCLYQDESYHVAVTDNKFRRPWTRVSAVSVPGMTDTSVLDQWKASFFVEDFLEKKTITRMVTQINCEFEEVVPSSNPDSQIEVEEVSLYTHMDYNEVFTPVSCLEKCSALQNQNQGDFFI

SEQ ID NO: 4450 - protein, 229 aa, Artificial Sequence
  Synthetic polypeptide
MRSLGALLLLLSACLAVSAGPVPTPPDNIQVQENFNISRIYGKWYNLAIGSTCPWLKKIMDRMTVSTLVLGEGATEAEISMTSTRWRKGVCEETSGAYEKTDTDGKFLYHKSKWNITMESYVVHTNYDEYAIFLTKKFSRHHGPTITAKLYGRAPQLRETLLQDFRVVAQGVGIPEDSIFTMADRGECVPGEQEPEPILIPRVRRAVLPQEEEGSGGGQLVTEVTKKEV

SEQ ID NO: 4451 - protein, 120 aa, Artificial Sequence
  Synthetic polypeptide
HKSKWNITMESYVVHTNYDEYAIFLTKKFSRHHGPTITAKLYGRAPQLRETLLQDFRVVAQGVGIPEDSIFTMADRGECVPGEQEPEPILIPRVRRAVLPQEEEGSGGGQLVTEVTKKEV

SEQ ID NO: 4452 - protein, 53 aa, Artificial Sequence
  Synthetic polypeptide
MALSWVLTVLSLLPLLEAQIPLCANLVPVPITNATLDRGEICLSLLPADSQRF

SEQ ID NO: 4453 - protein, 53 aa, Artificial Sequence; identical to SEQ ID NO: 4452
  Synthetic polypeptide

SEQ ID NO: 4454 - protein, 1650 aa, Artificial Sequence
  Synthetic polypeptide
MGLLGILCFLIFLGKTWGQEQTYVISAPKIFRVGASENIVIQVYGYTEAFDATISIKSYPDKKFSYSSGHVHLSSENKFQNSAILTIQPKQLPGGQNPVSYVYLEVVSKHFSKSKRMPITYDNGFLFIHTDKPVYTPDQSVKVRVYSLNDDLKPAKRETVLTFIDPEGSEVDMVEEIDHIGIISFPDFKIPSNPRYGMWTIKAKYKEDFSTTGTAYFEVKEYVLPHFSVSIEPEYNFIGYKNFKNFEITIKARYFYNKVVTEADVYITFGIREDLKDDQKEMMQTAMQNTMLINGIAQVTFDSETAVKELSYYSLEDLNNKYLYIAVTVIESTGGFSEEAEIPGIKYVLSPYKLNLVATPLFLKPGIPYPIKVQVKDSLDQLVGGVPVTLNAQTIDVNQETSDLDPSKSVTRVDDGVASFVLNLPSGVTVLEFNVKTDAPDLPEENQAREGYRAIAYSSLSQSYLYIDWTDNHKALLVGEHLNIIVTPKSPYIDKITHYNYLILSKGKIIHFGTREKFSDASYQSINIPVTQNMVPSSRLLVYYIVTGEQTAELVSDSVWLNIEEKCGNQLQVHLSPDADAYSPGQTVSLNMATGMDSWVALAAVDSAVYGVQRGAKKPLERVFQFLEKSDLGCGAGGGLNNANVFHLAGLTFLTNANADDSQENDEPCKEILRPRRTLQKKIEEIAAKYKHSVVKKCCYDGACVNNDETCEQRAARISLGPRCIKAFTECCVVASQLRANISHKDMQLGRLHMKTLLPVSKPEIRSYFPESWLWEVHLVPRRKQLQFALPDSLTTWEIQGVGISNTGICVADTVKAKVFKDVFLEMNIPYSVVRGEQIQLKGTVYNYRTSGMQFCVKMSAVEGICTSESPVIDHQGTKSSKCVRQKVEGSSSHLVTFTVLPLEIGLHNINFSLETWFGKEILVKTLRVVPEGVKRESYSGVTLDPRGIYGTISRRKEFPYRIPLDLVPKTEIKRILSVKGLLVGEILSAVLSQEGINILTHLPKGSAEAELMSVVPVFYVFHYLETGNHWNIFHSDPLIEKQKLKKKLKEGMLSIMSYRNADYSYSVWKGGSASTWLTAFALRVLGQVNKYVEQNQNSICNSLLWLVENYQLDNGSFKENSQYQPIKLQGTLPVEARENSLYLTAFTVIGIRKAFDICPLVKIDTALIKADNFLLENTLPAQSTFTLAISAYALSLGDKTHPQFRSIVSALKREALVKGNPPIYRFWKDNLQHKDSSVPNTGTARMVETTAYALLTSLNLKDINYVNPVIKWLSEEQRYGGGFYSTQDTINAIEGLTEYSLLVKQLRLSMDIDVSYKHKGALHNYKMTDKNFLGRPVEVLLNDDLIVSTGFGSGLATVHVTTVVHKTSTSEEVCSFYLKIDTQDIEASHYRGYGNSDYKRIVACASYKPSREESSSGSSHAVMDISLPTGISANEEDLKALVEGVDQLFTDYQIKDGHVILQLNSIPSSDFLCVRFRIFELFEVGFLSPATFTVYEYHRPDKQCTMFYSTSNIKIQKVCEGAACKCVEADCGQMQEELDLTISAETRKQTACKPEIAYAYKVSITSITVENVFVKYKATLLDIYKTGEAVAEKDSEITFIKKVTCTNAELVKGRQYLIMGKEALQIKYNFSFRLSIPNLKIQNLKCFKI

SEQ ID NO: 4455 - protein, 133 aa, Artificial Sequence
  Synthetic polypeptide
MALGLKCFRMVHPTFRNYLAASIRPVSEVTLKTVHERQHGHRQYMAYSAVPVRHFATKKAKGSLDKIAVVTADGKLALNQISQISMKSPQLILVNMASFPECTAAAIKAIRESGMNLNPEVEGTLIRVPIPQM

SEQ ID NO: 4456 - protein, 185 aa, Artificial Sequence [sequence omitted]

SEQ ID NO: 4457 - protein, 185 aa, Artificial Sequence [sequence omitted]

SEQ ID NO: 4458 - protein, 185 aa, Artificial Sequence [sequence omitted]

SEQ ID NO: 4459 - protein, 141 aa, Artificial Sequence
  Synthetic polypeptide
MAYSAVPVRHFATKKAKAKGKGQSQTRVNINAALVEDIINLEEVNEEMKSVIEALKDNFNKTLNIRTSPGSLDKIAVVTADGKLALNQISQISMKSPQLILVNMASFPECTAAAIKAIRESGMNLNPEVEGTLIRVPIPQM

SEQ ID NO: 4460 - protein, 405 aa, Artificial Sequence
  Synthetic polypeptide
MGSRIKQNPETTFEVYVEVAYPRTGGTLSDPEVQRQFPEDYSDQEVLQTLTKFCFPFYVDSLTVSQVGQNFTFVLTDIDSKQRFGFCRLSSGAKSCFCILSYLPWFEVFYKLLNILADYTTKRQENQWNELLETLHKLPIPDPGVSVHLSVHSYFTVPDTRELPSIPENRNLTEYFVAVDVNNMLHLYASMLYERRILIICSKLSTLTACIHGSAAMLYPMYWQHVYIPVLPPHLLDYCCAPMPYLIGIHLSLMEKVRNMALDDVVILNVDTNTLETPFDDLQSLPNDVISSLKNRLKKVSTTTGDGVARAFLKAQAAFFGSYRNALKIEPEEPITFCEEAFVSHYRSGAMRQFLQNATQLQLFKQFIDGRLDLLNSGEGFSDVFEEEINMGEYAGFLLRLNQST

SEQ ID NO: 4461 - protein, 405 aa, Artificial Sequence; identical to SEQ ID NO: 4460
  Synthetic polypeptide

SEQ ID NO: 4462 - protein, 147 aa, Artificial Sequence
  Synthetic polypeptide
MLYPMYWQHVYIPVLPPHLLDYCCAPMPYLIGIHLSLMEKVRNMALDDVVILNVDTNTLETPFDDLQSLPNDVEEPITFCEEAFVSHYRSGAMRQFLQNATQLQLFKQFIDGRLDLLNSGEGFSDVFEEEINMGEYAGFLLRLNQST

SEQ ID NO: 4463 - protein, 373 aa, Artificial Sequence
  Synthetic polypeptide
MRRPGDHGLQDQEVLQTLTKFCFPFYVDSLTVSQVGQNFTFVLTDIDSKQRFGFCRLSSGAKSCFCILSYLPWFEVFYKLLNILADYTTKRQENQWNELLETLHKLPIPDPGVSVHLSVHSYFTVPDTRELPSIPENRNLTEYFVAVDVNNMLHLYASMLYERRILIICSKLSTLTACIHGSAAMLYPMYWQHVYIPVLPPHLLDYCCAPMPYLIGIHLSLMEKVRNMALDDVVILNVDTNTLETPFDDLQSLPNDVISSLKNRLKKVSTTTGDGVARAFLKAQAAFFGSYRNALKIEPEEPITFCEEAFVSHYRSGAMRQFLQNATQLQLFKQFIDGRLDLLNSGEGFSDVFEEEINMGEYAGFLLRLNQST

SEQ ID NO: 4464 - protein, 375 aa, Artificial Sequence
  Synthetic polypeptide
MLKWPIPGQVALFQEVLQTLTKFCFPFYVDSLTVSQVGQNFTFVLTDIDSKQRFGFCRLSSGAKSCFCILSYLPWFEVFYKLLNILADYTTKRQENQWNELLETLHKLPIPDPGVSVHLSVHSYFTVPDTRELPSIPENRNLTEYFVAVDVNNMLHLYASMLYERRILIICSKLSTLTACIHGSAAMLYPMYWQHVYIPVLPPHLLDYCCAPMPYLIGIHLSLMEKVRNMALDDVVILNVDTNTLETPFDDLQSLPNDVISSLKNRLKKVSTTTGDGVARAFLKAQAAFFGSYRNALKIEPEEPITFCEEAFVSHYRSGAMRQFLQNATQLQLFKQFIDGRLDLLNSGEGFSDVFEEEINMGEYAGFLLRLNQST

SEQ ID NO: 4465 - protein, 373 aa, Artificial Sequence
  Synthetic polypeptide
MLKWPIPGQVALFQILRCRGNSRRTTVTSLTVSQVGQNFTFVLTDIDSKQRFGFCRLSSGAKSCFCILSYLPWFEVFYKLLNILADYTTKRQENQWNELLETLHKLPIPDPGVSVHLSVHSYFTVPDTRELPSIPENRNLTEYFVAVDVNNMLHLYASMLYERRILIICSKLSTLTACIHGSAAMLYPMYWQHVYIPVLPPHLLDYCCAPMPYLIGIHLSLMEKVRNMALDDVVILNVDTNTLETPFDDLQSLPNDVISSLKNRLKKVSTTTGDGVARAFLKAQAAFFGSYRNALKIEPEEPITFCEEAFVSHYRSGAMRQFLQNATQLQLFKQFIDGRLDLLNSGEGFSDVFEEEINMGEYAGFLLRLNQST

SEQ ID NO: 4466 - protein, 74 aa, Artificial Sequence
  Synthetic polypeptide
MAKIKARDLRGKKKEELLKQLDDLKVELSQLRVAKVTGGAASKLSKIRVVRKSIARVLTVINQTQKENLRKFYK

SEQ ID NO: 4467 - protein, 74 aa, Artificial Sequence; identical to SEQ ID NO: 4466
  Synthetic polypeptide

SEQ ID NO: 4468 - protein, 74 aa, Artificial Sequence; identical to SEQ ID NO: 4466
  Synthetic polypeptide

SEQ ID NO: 4469 - protein, 125 aa, Artificial Sequence
  Synthetic polypeptide
MDDQSRMLQTLAGVNLAGHSVQGGMALPPPPHGHEGADGDGRKQDIGDILHQIMTITDQSLDEAQAKKHALNCHRMKPALFSVLCEIKEKTARAQAYDTEPANQMQSPEFGRKKCEEGGAVWNLS

SEQ ID NO: 4470 - protein, 125 aa, Artificial Sequence; identical to SEQ ID NO: 4469
  Synthetic polypeptide

SEQ ID NO: 4471 - protein, 125 aa, Artificial Sequence; identical to SEQ ID NO: 4469
  Synthetic polypeptide

SEQ ID NO: 4472 - protein, 125 aa, Artificial Sequence; identical to SEQ ID NO: 4469
  Synthetic polypeptide

SEQ ID NO: 4473 - protein, 125 aa, Artificial Sequence; identical to SEQ ID NO: 4469
  Synthetic polypeptide

SEQ ID NO: 4474 - protein, 50 aa, Artificial Sequence
  Synthetic polypeptide
MKPALFSVLCEIKEKTARAQAYDTEPANQMQSPEFGRKKCEEGGAVWNLS

SEQ ID NO: 4475 - protein, 50 aa, Artificial Sequence; identical to SEQ ID NO: 4474
  Synthetic polypeptide

SEQ ID NO: 4476 - protein, 25 aa, Artificial Sequence
  Synthetic polypeptide
MPPKFDPNEIKVASSRVGGEGGLDH

SEQ ID NO: 4477 - protein, 25 aa, Artificial Sequence
  Synthetic polypeptide
MPPKFDPNEIKVASSRVGGEGGLDH

SEQ ID NO: 4478 - protein, 33 aa, Artificial Sequence
  Synthetic polypeptide
MTEGTKKTSKKFSAVVAHACNPSTLGGRGWWIT

SEQ ID NO: 4479 - protein, 30 aa, Artificial Sequence
  Synthetic polypeptide
MKAPTVWPQAGGIHSAVSVPCYPCKTEVTL

SEQ ID NO: 4480 - protein, 547 aa, Artificial Sequence
  Synthetic polypeptide
MGNRGMEDLIPLVNRLQDAFSAIGQNADLDLPQIAVVGGQSAGKSSVLENFVGRDFLPRGSGIVTRRPLVLQLVNATTEYAEFLHCKGKKFTDFEEVRLEIEAETDRVTGTNKGISPVPINLRVYSPHVLNLTLVDLPGMTKVPVGDQPPDIEFQIRDMLMQFVTKENCLILAVSPANSDLANSDALKVAKEVDPQGQRTIGVITKLDLMDEGTDARDVLENKLLPLRRGYIGVVNRSQKDIDGKKDITAALAAERKFFLSHPSYRHLADRMGTPYLQKVLNQQLTNHIRDTLPGLRNKLQSQLLSIEKEVEEYKNFRPDDPARKTKALLQMVQQFAVDFEKRIEGSGDQIDTYELSGGARINRIFHERFPFELVKMEFDEKELRREISYAIKNIHGIRTGLFTPDLAFEATVKKQVQKLKEPSIKCVDMVVSELTATIRKCSEKLQQYPRLREEMERIVTTHIREREGRTKEQVMLLIDIELAYMNTNHEDFIGFANAQQRSNQMNKKKTSGNQMSAETSLVRSACSVVHMSPRVLSFSFHRFQRP

SEQ ID NO: 4481 - protein, 547 aa, Artificial Sequence; identical to SEQ ID NO: 4480
  Synthetic polypeptide

SEQ ID NO: 4482 - protein, 547 aa, Artificial Sequence; identical to SEQ ID NO: 4480
  Synthetic polypeptide

SEQ ID NO: 4483 - protein, 547 aa, Artificial Sequence
  Synthetic polypeptide
MGNRGMEDLIPLVNRLQDAFSAIGQNADLDLPQIAVVGGQSAGKSSVLENFVGRDFLPRGSGIVTRRPLVLQLVNATTEYAEFLHCKGKKFTDFEEVRLEIEAETDRVTGTNKGISPVPINLRVYSPHVLNLTLVDLPGMTKVPVGDQPPDIEFQIRDMLMQFVTKENCLILAVSPANSDLANSDALKVAKEVDPQGQRTIGVITKLDLMDEGTDARDVLENKLLPLRRGYIGVVNRSQKDIDGKKDITAALAAERKFFLSHPSYRHLADRMGTPYLQKVLNQQLTNHIRDTLPGLRNKLQSQLLSIEKEVEEYKNFRPDDPARKTKALLQMVQQFAVDFEKRIEGSGDQIDTYELSGGARINRIFHERFPFELVKMEFDEKELRREISYAIKNIHGIRTGLFTPDMAFETIVKKQVKKIREPCLKCVDMVISELISTVRQCTKKLQQYPRLREEMERIVTTHIREREGRTKEQVMLLIDIELAYMNTNHEDFIGFANAQQRSNQMNKKKTSGNQMSAETSLVRSACSVVHMSPRVLSFSFHRFQRP

SEQ ID NO: 4484 - protein, 547 aa, Artificial Sequence; identical to SEQ ID NO: 4483
  Synthetic polypeptide

SEQ ID NO: 4485 - protein, 551 aa, Artificial Sequence
  Synthetic polypeptide
MGNRGMEDLIPLVNRLQDAFSAIGQNADLDLPQIAVVGGQSAGKSSVLENFVGRDFLPRGSGIVTRRPLVLQLVNATTEYAEFLHCKGKKFTDFEEVRLEIEAETDRVTGTNKGISPVPINLRVYSPHVLNLTLVDLPGMTKVPVGDQPPDIEFQIRDMLMQFVTKENCLILAVSPANSDLANSDALKVAKEVDPQGQRTIGVITKLDLMDEGTDARDVLENKLLPLRRGYIGVVNRSQKDIDGKKDITAALAAERKFFLSHPSYRHLADRMGTPYLQKVLNQQLTNHIRDTLPGLRNKLQSQLLSIEKEVEEYKNFRPDDPARKTKALLQMVQQFAVDFEKRIEGSGDQIDTYELSGGARINRIFHERFPFELVKMEFDEKELRREISYAIKNIHGIRTGLFTPDLAFEATVKKQVQKLKEPSIKCVDMVVSELTATIRKCSEKLQQYPRLREEMERIVTTHIREREGRTKEQVMLLIDIELAYMNTNHEDFIGFANAQQRSNQMNKKKTSGNQDEILMSAETSLVRSACSVVHMSPRVLSFSFHRFQRP

SEQ ID NO: 4486 - protein, 551 aa, Artificial Sequence; identical to SEQ ID NO: 4485
  Synthetic polypeptide

SEQ ID NO: 4487 - protein, 551 aa, Artificial Sequence; identical to SEQ ID NO: 4485
  Synthetic polypeptide

SEQ ID NO: 4488 - protein, 551 aa, Artificial Sequence
  Synthetic polypeptide
MGNRGMEDLIPLVNRLQDAFSAIGQNADLDLPQIAVVGGQSAGKSSVLENFVGRDFLPRGSGIVTRRPLVLQLVNATTEYAEFLHCKGKKFTDFEEVRLEIEAETDRVTGTNKGISPVPINLRVYSPHVLNLTLVDLPGMTKVPVGDQPPDIEFQIRDMLMQFVTKENCLILAVSPANSDLANSDALKVAKEVDPQGQRTIGVITKLDLMDEGTDARDVLENKLLPLRRGYIGVVNRSQKDIDGKKDITAALAAERKFFLSHPSYRHLADRMGTPYLQKVLNQQLTNHIRDTLPGLRNKLQSQLLSIEKEVEEYKNFRPDDPARKTKALLQMVQQFAVDFEKRIEGSGDQIDTYELSGGARINRIFHERFPFELVKMEFDEKELRREISYAIKNIHGIRTGLFTPDMAFETIVKKQVKKIREPCLKCVDMVISELISTVRQCTKKLQQYPRLREEMERIVTTHIREREGRTKEQVMLLIDIELAYMNTNHEDFIGFANAQQRSNQMNKKKTSGNQDEILMSAETSLVRSACSVVHMSPRVLSFSFHRFQRP

SEQ ID NO: 4489 - protein, 551 aa, Artificial Sequence; identical to SEQ ID NO: 4488
  Synthetic polypeptide

SEQ ID NO: 4490 - protein, 585 aa, Artificial Sequence
  Synthetic polypeptide
MGNRGMEDLIPLVNRLQDAFSAIGQNADLDLPQIAVVGGQSAGKSSVLENFVGRDFLPRGSGIVTRRPLVLQLVNATTEYAEFLHCKGKKFTDFEEVRLEIEAETDRVTGTNKGISPVPINLRVYSPHVLNLTLVDLPGMTKVPVGDQPPDIEFQIRDMLMQFVTKENCLILAVSPANSDLANSDALKVAKEVDPQGQRTIGVITKLDLMDEGTDARDVLENKLLPLRRGYIGVVNRSQKDIDGKKDITAALAAERKFFLSHPSYRHLADRMGTPYLQKVLNQQLTNHIRDTLPGLRNKLQSQLLSIEKEVEEYKNFRPDDPARKTKALLQMVQQFAVDFEKRIEGSGDQIDTYELSGGARINRIFHERFPFELVKMEFDEKELRREISYAIKNIHGIRTGLFTPDLAFEATVKKQVQKLKEPSIKCVDMVVSELTATIRKCSEKLQQYPRLREEMERIVTTHIREREGRTKEQVMLLIDIELAYMNTNHEDFIGFANAQQRSNQMNKKKTSGNQDEILVIRKGWLTINNIGIMKGGSKEYWFVLTAENLSWYKDDEVCWRAPVIPATREAETQECLEPGRRRLQ

SEQ ID NO: 4491 - protein, 585 aa, Artificial Sequence; identical to SEQ ID NO: 4490
  Synthetic polypeptide

SEQ ID NO: 4492 - protein, 585 aa, Artificial Sequence; identical to SEQ ID NO: 4490
  Synthetic polypeptide

SEQ ID NO: 4493 - protein, 585 aa, Artificial Sequence
  Synthetic polypeptide
MGNRGMEDLIPLVNRLQDAFSAIGQNADLDLPQIAVVGGQSAGKSSVLENFVGRDFLPRGSGIVTRRPLVLQLVNATTEYAEFLHCKGKKFTDFEEVRLEIEAETDRVTGTNKGISPVPINLRVYSPHVLNLTLVDLPGMTKVPVGDQPPDIEFQIRDMLMQFVTKENCLILAVSPANSDLANSDALKVAKEVDPQGQRTIGVITKLDLMDEGTDARDVLENKLLPLRRGYIGVVNRSQKDIDGKKDITAALAAERKFFLSHPSYRHLADRMGTPYLQKVLNQQLTNHIRDTLPGLRNKLQSQLLSIEKEVEEYKNFRPDDPARKTKALLQMVQQFAVDFEKRIEGSGDQIDTYELSGGARINRIFHERFPFELVKMEFDEKELRREISYAIKNIHGIRTGLFTPDMAFETIVKKQVKKIREPCLKCVDMVISELISTVRQCTKKLQQYPRLREEMERIVTTHIREREGRTKEQVMLLIDIELAYMNTNHEDFIGFANAQQRSNQMNKKKTSGNQDEILVIRKGWLTINNIGIMKGGSKEYWFVLTAENLSWYKDDEVCWRAPVIPATREAETQECLEPGRRRLQ

SEQ ID NO: 4494 - protein, 585 aa, Artificial Sequence; identical to SEQ ID NO: 4493
  Synthetic polypeptide

SEQ ID NO: 4495 - protein, 182 aa, Artificial Sequence
  Synthetic polypeptide
MSWGTELWDQFDNLEKHTQWGIDILEKYIKFVKERTEIELSYAKQLRNLSKKYQPKKNSKEEEEYKYTSCKAFISNLNEMNDYAGQHEVISENMASQIIVDLARYVQELKQERKSNFHDGRKAQQHIETCWKQLESSKRRFERDCKEADRAQQYFEKMDADINVTKADVEKVLWHIPLDSAT

SEQ ID NO: 4496 - protein, 182 aa, Artificial Sequence; identical to SEQ ID NO: 4495
  Synthetic polypeptide

SEQ ID NO: 4497 - protein, 182 aa, Artificial Sequence; identical to SEQ ID NO: 4495
  Synthetic polypeptide

SEQ ID NO: 4498 - protein, 38 aa, Artificial Sequence
  Synthetic polypeptide
NSAMQSNSGIFQRSTNLKRTRRRKKNTSIRHVKLSFPT

SEQ ID NO: 4499 - protein, 370 aa, Artificial Sequence
  Synthetic polypeptide
HLQRDDAGRYQCLAENEMGVAKKVVILVLQSAPVFQVEPQDMTVRSGDDVALRCQATGEPTPTIEWLQAGQPLRASRRLRTLPDGSLWLENVETGDAGTYDCVAHNLLGSATARAFLVVRGEPQGSWGSMTGVINGRKFGVATLNTSVMQEAHSGVSSIHSSIRHVPANVGPLMRVLVVTIAPIYWALARESGEALNGHSLTGGRFRQESHVEFATGELLTMTQVARGLDPDGLLLLDVVVNGVVPESLADADLQVQDFEEHYVQTGPGQLFVGSTQRFFQGGLPSFLRCNHSIQYNAARGPQPQLVQHLRASAISSAFDPEAEALRFQLATALQAAHQLSLVLVYFMCDPRQFFFFQRGPQKPKDRTPL

SEQ ID NO: 4500 - protein, 218 aa, Artificial Sequence
  Synthetic polypeptide
MSSKGSVVLAYSGGLDTSCILVWLKEQGYDVIAYLANIGQKEDFEEARKKALKLGAKKVFIEDVSREFVEEFIWPAIQSSALYEDRYLLGTSLARPCIARKQVEIAQREGAKYVSHGATGKGNDQVRFELSCYSLAPQIKVIAPWRMPEFYNRFKGRNDLMEYAKQHGIPIPVTPKNPWSMDENLMHISYEAGILENPKNQAPPGLSCRDSISTQNKY

SEQ ID NO: 4501 - protein, 218 aa, Artificial Sequence; identical to SEQ ID NO: 4500
  Synthetic polypeptide

SEQ ID NO: 4502 - protein, 218 aa, Artificial Sequence; identical to SEQ ID NO: 4500
  Synthetic polypeptide

SEQ ID NO: 4503 - protein, 509 aa, Artificial Sequence
  Synthetic polypeptide
MPALSRWASLPGPSMREAAFMYSTAVAIFLVILVAALQGSAPRESPLPYHIPLDPEGSLELSWNVSYTQEAIHFQLLVRRLKAGVLFGMSDRGELENADLVVLWTDGDTAYFADAWSDQKGQIHLDPQQDYQLLQVQRTPEGLTLLFKRPFGTCDPKDYLIEDGTVHLVYGILEEPFRSLEAINGSGLQMGLQRVQLLKPNIPEPELPSDACTMEVQAPNIQIPSQETTYWCYIKELPKGFSRHHIIKYEPIVTKGNEALVHHMEVFQCAPEMDSVPHFSGPCDSKMKPDRLNYCRHVLAAWALGAKAFYYPEEAGLAFGGPGSSRYLRLEVHYHNPLVIEGRNDSSGIRLYYTAKLRRFNAGIMELGLVYTPVMAIPPRETAFILTGYCTDKCTQLALPPSGIHIFASQLHTHLTGRKVVTVLVRDGREWEIVNQDNHYSPHFQEIRMLKKVVSVHPGDVLITSCTYNTEDRELATVHHQYLIRISWLTHSLTACLSCQWWQFLEGRD

SEQ ID NO: 4504 - protein, 479 aa, Artificial Sequence
  Synthetic polypeptide
MPALSRWASLPGPSMREAAFMYSTAVAIFLVILVAALQGSAPRESPLPYHIPLDPEGSLELSWNVSYTQEAIHFQLLVRRLKAGVLFGMSDRGELENADLVVLWTDGDTAYFADAWSDQKGQIHLDPQQDYQLLQVQRTPEGLTLLFKRPFGTCDPKDYLIEDGTVHLVYGILEEPFRSLEAINGSGLQMGLQRVQLLKPNIPEPELPSDACTMEVQAPNIQIPSQETTYWCYIKELPKGFSRHHIIKYEPIVTKGNEALVHHMEVFQCAPEMDSVPHFSGPCDSKMKPDRLNYCRHVLAAWALGAKAFYYPEEAGLAFGGPGSSRYLRLEVHYHNPLVIEGRNDSSGIRLYYTAKLRRFNAGIMELGLVYTPVMAIPPRETAFILTGYCTDKCTQLALPPSGIHIFASQLHTHLTGRKVVTVLVRDGREWEIVNQDNHYSPHFQEIRMLKKVVSVHPGDVLITSCTYNTEDRELATVG

SEQ ID NO: 4505 - protein, 95 aa, Artificial Sequence
  Synthetic polypeptide
MRLLCGLWLWLSLLKVLQAQTPTPLPLPPPMQSFQGNQFQGEWFVLGLAGNSFRPEHRALLNAFTATFELSDDGRFEVWNAMTRTSGAGRAGSHL

SEQ ID NO: 4506 - protein, 37 aa, Artificial Sequence
  Synthetic polypeptide
ALLNAFTATFELSDDGRFEVWNAMTRTSGAGRAGSHL

SEQ ID NO: 4507 - protein, 29 aa, Artificial Sequence
  Synthetic polypeptide
TFELSDDGRFEVWNAMTRTSGAGRAGSHL

SEQ ID NO: 4508 - protein, 94 aa, Artificial Sequence
  Synthetic polypeptide
MRLLCGLWLWLSLLKVLQAQTPTPLPLPPPMQSFQGNQFQGEWFVLGLAGNSFRPEHRALLNAFTATFELSDDGRFEVWNAMTRTSGGRGRRIT

SEQ ID NO: 4509 - protein, 36 aa, Artificial Sequence
  Synthetic polypeptide
ALLNAFTATFELSDDGRFEVWNAMTRTSGGRGRRIT

SEQ ID NO: 4510 - protein, 28 aa, Artificial Sequence
  Synthetic polypeptide
TFELSDDGRFEVWNAMTRTSGGRGRRIT

SEQ ID NO: 4511 - protein, 59 aa, Artificial Sequence
  Synthetic polypeptide
MATHHTLWMGLALLGVLGDLQAAPEAQVSVQPNFQQDKFLGRGVRGVAARGIGRGGGAG

SEQ ID NO: 4512 - protein, 59 aa, Artificial Sequence; identical to SEQ ID NO: 4511
  Synthetic polypeptide

SEQ ID NO: 4513 - protein, 59 aa, Artificial Sequence; identical to SEQ ID NO: 4511
  Synthetic polypeptide

SEQ ID NO: 4514 - protein, 59 aa, Artificial Sequence; identical to SEQ ID NO: 4511
  Synthetic polypeptide

SEQ ID NO: 4515 - protein, 59 aa, Artificial Sequence; identical to SEQ ID NO: 4511
  Synthetic polypeptide

SEQ ID NO: 4516 - protein, 110 aa, Artificial Sequence
  Synthetic polypeptide
MSIPLLLQDKVALVERYVAGFPDLQRRLLVLMDSWCQPGFDIKDVARQKFQENKRGDGSWNPEDRCPGSDCPRRPESAEPANARSQLASEPPGGTGSGGPDSSKKLGWKQ

SEQ ID NO: 4517 - protein, 282 aa, Artificial Sequence
  Synthetic polypeptide
MDPGDPAGDPAAGERHRMGRDPLLLLQALQTLWSTRERKQLREEAWRGFAALDDPLAGLLDMLESCRGQRGEGPSLAAWISHQLQCWLQAQPCPSLAQHSLRLKQLQARAVKVLTESPPSLAAPLASIFQLQDADRSCLLAHVHRLHHEGRFREAATLGATLKLQSELGVEKMSIPLLLQDKVALVERYVAGFPDLQRRLLVLMDSWCQPGFDIKDVARQKFQENKRGDGSWNPEDRCPGSDCPRRPESAEPANARSQLASEPPGGTGSGGPDSSKKLGWKQ

SEQ ID NO: 4518 - protein, 282 aa, Artificial Sequence; identical to SEQ ID NO: 4517
  Synthetic polypeptide

SEQ ID NO: 4519 - protein, 80 aa, Artificial Sequence
  Synthetic polypeptide
SWIPGASPALTSRTLPDKNFKRIRGETGAGTRKTDVQAATVLGGLRVLNLQMQGASWLRSPREAQEVEAQIPPRSWAGNR

SEQ ID NO: 4520 - protein, 61 aa, Artificial Sequence
  Synthetic polypeptide
MTRDFKPGDLIFAKMKGYPHWPARVDEVPDGAVKPPTNKLPIFFFGTHETLLGGRDLPCLR

SEQ ID NO: 4521 - protein, 61 aa, Artificial Sequence; identical to SEQ ID NO: 4520
  Synthetic polypeptide

SEQ ID NO: 4522 - protein, 61 aa, Artificial Sequence; identical to SEQ ID NO: 4520
  Synthetic polypeptide

SEQ ID NO: 4523 - protein, 61 aa, Artificial Sequence; identical to SEQ ID NO: 4520
  Synthetic polypeptide

SEQ ID NO: 4524 - protein, 61 aa, Artificial Sequence; identical to SEQ ID NO: 4520
  Synthetic polypeptide

SEQ ID NO: 4525 - protein, 203 aa, Artificial Sequence
  Synthetic polypeptide
MAARSPPSPHPSPPARQLGPRSPRVGRGAEVHAMRSEASGFAGAAREVVADESDKIWVGEEGSGGRRGPGGAAPAHAPLLSAPMGSRRLEGISVEEAMVTRTQLLEEELSSLKEELALCQADKEFVWSLWKRLQVTNPDLTQVVSLVVERRPPEDVYHQNEEYTKKDKKLGLRKCEIQHMNNIKIFQGEDERRLRRLGSSSSQ

SEQ ID NO: 4526 - protein, 203 aa, Artificial Sequence; identical to SEQ ID NO: 4525
  Synthetic polypeptide

SEQ ID NO: 4527 - protein, 203 aa, Artificial Sequence; identical to SEQ ID NO: 4525
  Synthetic polypeptide

SEQ ID NO: 4528 - protein, 203 aa, Artificial Sequence; identical to SEQ ID NO: 4525
  Synthetic polypeptide

SEQ ID NO: 4529 - protein, 52 aa, Artificial Sequence
  Synthetic polypeptide
MKLNISFPATGCQKLIEVDDERKLRTFYEKRMATEVAADALGEEWKGYVVRI

SEQ ID NO: 4530 - protein, 21 aa, Artificial Sequence
  Synthetic polypeptide
MATEVAADALGEEWKGYVVRI

SEQ ID NO: 4531 - protein, 21 aa, Artificial Sequence
  Synthetic polypeptide
MATEVAADALGEEWKGYVVRI

SEQ ID NO: 4532 - protein, 13 aa, Artificial Sequence
  Synthetic polypeptide
MSNVNLSVSDFWR

SEQ ID NO: 4533 - protein, 13 aa, Artificial Sequence
  Synthetic polypeptide
MSNVNLSVSDFWR

SEQ ID NO: 4534 - protein, 13 aa, Artificial Sequence
  Synthetic polypeptide
MSNVNLSVSDFWR

SEQ ID NO: 4535 - protein, 13 aa, Artificial Sequence
  Synthetic polypeptide
MSNVNLSVSDFWR

SEQ ID NO: 4536 - protein, 13 aa, Artificial Sequence
  Synthetic polypeptide
MSNVNLSVSDFWR

SEQ ID NO: 4537 - protein, 13 aa, Artificial Sequence
  Synthetic polypeptide
MSNVNLSVSDFWR

SEQ ID NO: 4538 - protein, 13 aa, Artificial Sequence
  Synthetic polypeptide
MSNVNLSVSDFWR

SEQ ID NO: 4539 - protein, 13 aa, Artificial Sequence
  Synthetic polypeptide
MSNVNLSVSDFWR

SEQ ID NO: 4540 - protein, 13 aa, Artificial Sequence
  Synthetic polypeptide
MSNVNLSVSDFWR

SEQ ID NO: 4541 - protein, 4 aa, Artificial Sequence
  Synthetic polypeptide
PTSG

SEQ ID NO: 4542 - protein, 138 aa, Artificial Sequence
  Synthetic polypeptide
MCGPDDRCPARWPGPGRAVKCGKGLAAARPGRVERGGAQRGGAGLELHPLLGGRTWRAARDADGCEALGTVAVPFDDDDKIVGGYTCEENSLPYQVSLNSGSHFCGGSLISEQWVVSAAHCYKTAINSNFSGRQCEYQ

SEQ ID NO: 4543 - protein, 93 aa, Artificial Sequence
  Synthetic polypeptide
MRETSGFTLKKGRSAPLVFHPPDALIAVPFDDDDKIVGGYTCEENSLPYQVSLNSGSHFCGGSLISEQWVVSAAHCYKTAINSNFSGRQCEYQ

SEQ ID NO: 4544 - protein, 95 aa, Artificial Sequence
  Synthetic polypeptide
MHMRETSGFTLKKGRSAPLVFHPPDALIAVPFDDDDKIVGGYTCEENSLPYQVSLNSGSHFCGGSLISEQWVVSAAHCYKTAINSNFSGRQCEYQ

SEQ ID NO: 4545 - protein, 74 aa, Artificial Sequence
  Synthetic polypeptide
MGPAGEVAVPFDDDDKIVGGYTCEENSLPYQVSLNSGSHFCGGSLISEQWVVSAAHCYKTAINSNFSGRQCEYQ

SEQ ID NO: 4546 - protein, 81 aa, Artificial Sequence
  Synthetic polypeptide
MNPFLILAFVGAAVAVPFDDDDKIVGGYTCEENSLPYQVSLNSGSHFCGGSLISEQWVVSAAHCYKTAINSNFSGRQCEYQ

SEQ ID NO: 4547 - protein, 274 aa, Artificial Sequence
  Synthetic polypeptide
MCGPDDRCPARWPGPGRAVKCGKGLAAARPGRVERGGAQRGGAGLELHPLLGGRTWRAARDADGCEALGTVAVPFDDDDKIVGGYTCEENSLPYQVSLNSGSHFCGGSLISEQWVVSAAHCYKTRIQVRLGEHNIKVLEGNEQFINAAKIIRHPKYNRDTLDNDIMLIKLSSPAVINARVSTISLPTTPPAAGTECLISGWGNTLSFGADYPDELKCLDAPVLTQAECKASYPGKITNSMFCVGFLEGGKKSWRLSQSPMSNDLINHAYKMESP

SEQ ID NO: 4548 - protein, 231 aa, Artificial Sequence
  Synthetic polypeptide
MHMRETSGFTLKKGRSAPLVFHPPDALIAVPFDDDDKIVGGYTCEENSLPYQVSLNSGSHFCGGSLISEQWVVSAAHCYKTRIQVRLGEHNIKVLEGNEQFINAAKIIRHPKYNRDTLDNDIMLIKLSSPAVINARVSTISLPTTPPAAGTECLISGWGNTLSFGADYPDELKCLDAPVLTQAECKASYPGKITNSMFCVGFLEGGKKSWRLSQSPMSNDLINHAYKMESP

SEQ ID NO: 4549 - protein, 210 aa, Artificial Sequence
  Synthetic polypeptide
MGPAGEVAVPFDDDDKIVGGYTCEENSLPYQVSLNSGSHFCGGSLISEQWVVSAAHCYKTRIQVRLGEHNIKVLEGNEQFINAAKIIRHPKYNRDTLDNDIMLIKLSSPAVINARVSTISLPTTPPAAGTECLISGWGNTLSFGADYPDELKCLDAPVLTQAECKASYPGKITNSMFCVGFLEGGKKSWRLSQSPMSNDLINHAYKMESP

SEQ ID NO: 4550 - protein, 217 aa, Artificial Sequence
  Synthetic polypeptide
MNPFLILAFVGAAVAVPFDDDDKIVGGYTCEENSLPYQVSLNSGSHFCGGSLISEQWVVSAAHCYKTRIQVRLGEHNIKVLEGNEQFINAAKIIRHPKYNRDTLDNDIMLIKLSSPAVINARVSTISLPTTPPAAGTECLISGWGNTLSFGADYPDELKCLDAPVLTQAECKASYPGKITNSMFCVGFLEGGKKSWRLSQSPMSNDLINHAYKMESP

SEQ ID NO: 4551 - protein, 296 aa, Artificial Sequence
  Synthetic polypeptide
MRPVRLMKVFVTRRIPAEGRVALARAADCEVEQWDSDEPIPAKELERGVAGAHGLLCLLSDHVDKRILDAAGANLKVISTMSVGIDHLALDEIKKRGIRVGYTPDVLTDTTAELAVSLLLTTCRRLPEAIEEVKNGGWTSWKPLWLCGYGLTQSTVGIIGLGRIGQAIARRLKPFGVQRFLYTGRQPRPEEAAEFQAEFVSTPELAAQSDFIVVACSLTPATEGLCNKDFFQKMKETAVFINISRGDVVNQDDLYQALASGKIAAAGLDVTSPEPLPTNHPLLTLKNCARYGGACL

SEQ ID NO: 4552 - protein, 296 aa, Artificial Sequence; identical to SEQ ID NO: 4551
  Synthetic polypeptide

SEQ ID NO: 4553 - protein, 323 aa, Artificial Sequence
  Synthetic polypeptide
MFPFGPHSPGGDGSAGAGAEEPTPHEGQAAATGPPSPLHPGADATHPPPPARSPRRPGAPSLSPAPRSGELGLPGAPESSTASAPGEPSPPSPPCRRPGPDCRAKSRGRHGLGAGLGGPGARLFGWLKERSLGRGLFVDPARDNFRTMTSLYGSIHPADSVYLSTRTHGAVFNLEYSPDGSVLTVACEQTEVLLFDPISSKHIKTLSEAHEDCVNNIRFLDNRLFATCSDDTTIALWDLRKLNTKVCTLHGHTSWVKNIEYDTNTRLLVTSGFDGNVIIWDTNRLRQENRLNPGGGVHSKPRSRHCTLAWATRVKLRLKKKKK

SEQ ID NO: 4554 - protein, 323 aa, Artificial Sequence; identical to SEQ ID NO: 4553
  Synthetic polypeptide

SEQ ID NO: 4555 - protein, 713 aa, Artificial Sequence
  Synthetic polypeptide
MMVQRLGLISPPASQVSTACNQISPSLQRAMNAANLNIPPSDTRSLISRESLASTTLSLTESQSASSMKQEWSQGYRALPSLSNHGSQNGLDLGDLLSLPPGTSMSSNSVSNSLPSYLFGTESSHSPYPSPRHSSTRSHSARSKKRALSLSPLSDGIGIDFNTIIRTSPTSLVAYINGSRASPANLSPQPEVYGHFLGVRGSCIPQPRPVPGSQKGVLVAPGGLALPAYGEDGALEHERMQQLEHGGLQPGLVNHMVVQHGLPGPDSQSAGLFKTERLEEFPGSTVDLPPAPPLPPLPPPPGPPPPYHAHAHLHHPELGPHAQQLALPQATLDDDGEMDGIGGKHCCRWIDCSALYDQQEELVRHIEKVHIDQRKGEDFTCFWAGCPRRYKPFNARYKLLIHMRVHSGEKPNKCTFEGCEKAFSRLENLKIHLRSHTGEKPYLCQHPGCQKAFSNSSDRAKHQRTHLDTKPYACQIPGCTKRYTDPSSLRKHVKAHSSKEQQARKKLRSSTELHPDLLTDCLTVQSLQPATSPRDAAAEGTVGRSPGPGPDLYSAPIFSSNYSSRSGTAAGAVPPPHPVSHPSPGHNVQGSPHNPSSQLPPLTAVDAGAERFAPSAPSPHHISPRRVPAPSSILQRTQPPYTQQPSGSHLKSYQPETNSSFQPNGIHVHGPHPLRPSRRRWNDTSSLKPFLIPQLMSSLQALNSDFISPVFLW

SEQ ID NO: 4556 - protein, 868 aa, Artificial Sequence
  Synthetic polypeptide
MNGRSCSMSLHRTSGTPQGPRMVSGHHIPAIRAHSGTPGPSPCGSTSSPTMASLANNLHLKMPSGGGMAPQNNVAESRIHLPALSPRRQMLTNGKPRFQVTQAGGMSGSHTLKPKQQEFGSPFPPNPGKGALGFGPQCKSIGKGSCNNLVVTSSPMMVQRLGLISPPASQVSTACNQISPSLQRAMNAANLNIPPSDTRSLISRESLASTTLSLTESQSASSMKQEWSQGYRALPSLSNHGSQNGLDLGDLLSLPPGTSMSSNSVSNSLPSYLFGTESSHSPYPSPRHSSTRSHSARSKKRALSLSPLSDGIGIDFNTIIRTSPTSLVAYINGSRASPANLSPQPEVYGHFLGVRGSCIPQPRPVPGSQKGVLVAPGGLALPAYGEDGALEHERMQQLEHGGLQPGLVNHMVVQHGLPGPDSQSAGLFKTERLEEFPGSTVDLPPAPPLPPLPPPPGPPPPYHAHAHLHHPELGPHAQQLALPQATLDDDGEMDGIGGKHCCRWIDCSALYDQQEELVRHIEKVHIDQRKGEDFTCFWAGCPRRYKPFNARYKLLIHMRVHSGEKPNKCTFEGCEKAFSRLENLKIHLRSHTGEKPYLCQHPGCQKAFSNSSDRAKHQRTHLDTKPYACQIPGCTKRYTDPSSLRKHVKAHSSKEQQARKKLRSSTELHPDLLTDCLTVQSLQPATSPRDAAAEGTVGRSPGPGPDLYSAPIFSSNYSSRSGTAAGAVPPPHPVSHPSPGHNVQGSPHNPSSQLPPLTAVDAGAERFAPSAPSPHHISPRRVPAPSSILQRTQPPYTQQPSGSHLKSYQPETNSSFQPNGIHVHGPHPLRPSRRRWNDTSSLKPFLIPQLMSSLQALNSDFISPVFLW

SEQ ID NO: 4557 - protein, 126 aa, Artificial Sequence
  Synthetic polypeptide
MPRLLRLSLLWLGLLLVRFSRELSDISSARKLCGRYLVKEIEKLCGHANWSQFRFEEETPFSRLIAQASEKVEAYSPYQFESPQTASPARGRGTNPVSTSWEEAVNSWEMQSLPEYKDKKGYSPLV

SEQ ID NO: 4558 - protein, 141 aa, Artificial Sequence
  Synthetic polypeptide
MPRLFLFHLLEFCLLLNQFSRAVAAKWKDDVIKLCGRELVRAQIAICGMSTWSKRSLSQEDAPQTPRPVAEIVPSFINKDTETIIIMLEFIANLPPELKAALSERQPSLPELQHLKELMVSCYCQPLGAFSSLEVTIDTTQ

SEQ ID NO: 4559 - protein, 113 aa, Artificial Sequence
  Synthetic polypeptide
MYFLSGWPKRLLCPLGSPAEAPFHVQSDPQRAFFAVLAAARLSIWYSRPSVLIVTYKEPAKSSTQFGSYKQAEWRPDSTMIAVSTANGYILFFHITSTRGDKYLYEPVYPKQV

SEQ ID NO: 4560 - protein, 113 aa, Artificial Sequence; identical to SEQ ID NO: 4559
  Synthetic polypeptide

SEQ ID NO: 4561 - protein, 34 aa, Artificial Sequence
  Synthetic polypeptide
MIAVSTANGYILFFHITSTRGDKYLYEPVYPKQV

SEQ ID NO: 4562 - protein, 34 aa, Artificial Sequence; identical to SEQ ID NO: 4561
  Synthetic polypeptide

SEQ ID NO: 4563 - protein, 34 aa, Artificial Sequence; identical to SEQ ID NO: 4561
  Synthetic polypeptide

SEQ ID NO: 4564 - skipped

SEQ ID NO: 4565 - protein, 122 aa, Artificial Sequence
  Synthetic polypeptide
MYFLSGWPKRLLCPLGSPAEAPFHVQSDPQRAFFAVLAAARLSIWYSRPSVLIVTYKEPAKSSTQFGSYKQAEWRPDSTMIAVSTANGYILFFHITSTRGDKYLYEPVYPKASAQQKKLPSE

SEQ ID NO: 4566 - protein, 122 aa, Artificial Sequence; identical to SEQ ID NO: 4565
  Synthetic polypeptide

SEQ ID NO: 4567 - protein, 43 aa, Artificial Sequence
  Synthetic polypeptide
MIAVSTANGYILFFHITSTRGDKYLYEPVYPKASAQQKKLPSE

SEQ ID NO: 4568 - protein, 43 aa, Artificial Sequence; identical to SEQ ID NO: 4567
  Synthetic polypeptide

SEQ ID NO: 4569 - protein, 43 aa, Artificial Sequence; identical to SEQ ID NO: 4567
  Synthetic polypeptide

SEQ ID NO: 4570 - skipped

SEQ ID NO: 4571 - protein, 97 aa, Artificial Sequence
  Synthetic polypeptide
MQNRTGLILCALALLMGFLMVCLGAFFISWGSIFDCQGSLIAAYLLLPLGFVILLSGIFWSNYRQVTESKGVLRHMLRQHLAHGALPVATVDREEGF

SEQ ID NO: 4572 - protein, 96 aa, Artificial Sequence
  Synthetic polypeptide
MGSRLSQPFESYITAPPGTAAAPAKPAPPATPGAPTSPAEHRLLKTCWSCRVLSGLGLMGAGGYVYWVARKPMKMGYPPSPWTITQMVIGLSIVVF

SEQ ID NO: 4573 - protein, 129 aa, Artificial Sequence
  Synthetic polypeptide
MGWGSRCCCPGRLDLLCVLALLGGCLLPVCRTRVYTNHWAVKIAGGFPEANRIASKYGFINIGQIGALKDYYHFYHSRTIKRSVISSRGTHSFISMEPKKLYKPEESGDQYSTFLKKRIFNQEFHIQPN

SEQ ID NO: 4574 - protein, 129 aa, Artificial Sequence; identical to SEQ ID NO: 4573
  Synthetic polypeptide

SEQ ID NO: 4575 - protein, 129 aa, Artificial Sequence; identical to SEQ ID NO: 4573
  Synthetic polypeptide

SEQ ID NO: 4576 - protein, 307 aa, Artificial Sequence
  Synthetic polypeptide
MDAPRQVVNFGPGPAKLPHSVLLEIQKELLDYKGVGISVLEMSHRSSDFAKIINNTENLVRELLAVPDNYKVIFLQGGGCGQFSAVPLNLIGLKAGRCADYVVTGAWSAKAAEEAKKFGTINIVHPKLGSYTKIPDPSTWNLNPDASYVYYCANETVHGVEFDFIPDVKGAVLVCDMSSNFLSKPVDVSKFGVIFAGAQKNVGSAGVTVVIVRDDLLGFALRECPSVLEYKVQAGNSSLYNTPPCFSIYVMGLVLEWIKNNGGAAAMEKLSSIKSQTIYEIIDNSQGFYVCCVILDELLNLAVFLHQ

SEQ ID NO: 4577 - protein, 307 aa, Artificial Sequence; identical to SEQ ID NO: 4576
  Synthetic polypeptide

SEQ ID NO: 4578 - protein, 107 aa, Artificial Sequence
  Synthetic polypeptide
MVDILGERHLVTCKGATVEAEAALQNKVVALYFAAARCAPSRDFTPLLCDFYTALVAEARRPAPFEVVFVSADGSSQEMLDFMRELHGAWLALPFHDPYRHSRSQLI

SEQ ID NO: 4579 - protein, 107 aa, Artificial Sequence; identical to SEQ ID NO: 4578
  Synthetic polypeptide

SEQ ID NO: 4580 - protein, 106 aa, Artificial Sequence
  Synthetic polypeptide
MVDILGERHLVTCKGATVEAEAALQNKVVALYFAAARCAPSRDFTPLLCDFYTALVAEARRPAPFEVVFVSADGSSQEMLDFMRELHGAWLALPFHDPYRHRSQLI

SEQ ID NO: 4581 - protein, 106 aa, Artificial Sequence; identical to SEQ ID NO: 4580
  Synthetic polypeptide

SEQ ID NO: 4582 - protein, 1159 aa, Artificial Sequence
  Synthetic polypeptide
MLQQVPENINFPAEEEKILEFWTEFNCFQECLKQSKHKPKFTFYDGPPFATGLPHYGHILAGTIKDIVTRYAHQSGFHVDRRFGWDCHGLPVEYEIDKTLGIRGPEDVAKMGITEYNNQCRAIVMRYSAEWKSTVSRLGRWIDFDNDYKTLYPQFMESVWWVFKQLYDKGLVYRGVKVMPFSTACNTPLSNFESHQNYKDVQDPSVFVTFPLEEDETVSLVAWTTTPWTLPSNLAVCVNPEMQYVKIKDVARGRLLILMEARLSALYKLESDYEILERFPGAYLKGKKYRPLFDYFLKCKENGAFTVLVDNYVKEEEGTGVVHQAPYFGAEDYRVCMDFNIIRKDSLPVCPVDASGCFTTEVTDFAGQYVKDADKSIIRTLKEQGRLLVATTFTHSYPFCWRSDTPLIYKAVPSWFVRVENMVDQLLRNNDLCYWVPELVREKRFGNWLKDARDWTISRNRYWGTPIPLWVSDDFEEVVCIGSVAELEELSGAKISDLHRESVDHLTIPSRCGKGSLHRISEVFDCWFESGSMPYAQVHYPFENKREFEDAFPADFIAEGIDQTRGWFYTLLVLATALFGQPPFKNVIVNGLVLASDGQKMSKRKKNYPDPVSIIQKYGADALRLYLINSPVVRAENLRFKEEGVRDVLKDVLLPWYNAYRFLIQNVLRLQKEEEIEFLYNENTVRESPNITDRWILSFMQSLIGFFETEMAAYRLYTVVPRLVKFVDILTNWYVRMNRRRLKGENGMEDCVMALETLFSVLLSLCRLMAPYTPFLTELMYQNLKVLIDPVSVQDKDTLSIHYLMLPRVREELIDKKTESAVSQMQSVIELGRVIRDRKTIPIKYPLKEIVVIHQDPEALKDIKSLEKYIIEELNVRKVTLSTDKNKYGIRLRAEPDHMVLGKRLKGAFKAVMTSIKQLSSEELEQFQKTGTIVVEGHELHDEDIRLMYTFDQATGGTAQFEAHSDAQALVLLDVTPDQSMVDEGMAREVINRIQKLRKKCNLVPTDEITVYYKAKSEGTYLNSVIESHTEFIFTTIKAPLKPYPVSPSDKVLIQEKTQLKGSELEITLTRGSSLPGPACAYVNLNICANGSEQGGVLLLENPKGDNRLDLLKLKSVVTSIFGVKNTELAVFHDETAACLGLPKCRDCSLCPAATPSGK

SEQ ID NO: 4583 - protein, 1159 aa, Artificial Sequence; identical to SEQ ID NO: 4582
  Synthetic polypeptide

SEQ ID NO: 4584 - protein, 1049 aa, Artificial Sequence
  Synthetic polypeptide
MGITEYNNQCRAIVMRYSAEWKSTVSRLGRWIDFDNDYKTLYPQFMESVWWVFKQLYDKGLVYRGVKVMPFSTACNTPLSNFESHQNYKDVQDPSVFVTFPLEEDETVSLVAWTTTPWTLPSNLAVCVNPEMQYVKIKDVARGRLLILMEARLSALYKLESDYEILERFPGAYLKGKKYRPLFDYFLKCKENGAFTVLVDNYVKEEEGTGVVHQAPYFGAEDYRVCMDFNIIRKDSLPVCPVDASGCFTTEVTDFAGQYVKDADKSIIRTLKEQGRLLVATTFTHSYPFCWRSDTPLIYKAVPSWFVRVENMVDQLLRNNDLCYWVPELVREKRFGNWLKDARDWTISRNRYWGTPIPLWVSDDFEEVVCIGSVAELEELSGAKISDLHRESVDHLTIPSRCGKGSLHRISEVFDCWFESGSMPYAQVHYPFENKREFEDAFPADFIAEGIDQTRGWFYTLLVLATALFGQPPFKNVIVNGLVLASDGQKMSKRKKNYPDPVSIIQKYGADALRLYLINSPVVRAENLRFKEEGVRDVLKDVLLPWYNAYRFLIQNVLRLQKEEEIEFLYNENTVRESPNITDRWILSFMQSLIGFFETEMAAYRLYTVVPRLVKFVDILTNWYVRMNRRRLKGENGMEDCVMALETLFSVLLSLCRLMAPYTPFLTELMYQNLKVLIDPVSVQDKDTLSIHYLMLPRVREELIDKKTESAVSQMQSVIELGRVIRDRKTIPIKYPLKEIVVIHQDPEALKDIKSLEKYIIEELNVRKVTLSTDKNKYGIRLRAEPDHMVLGKRLKGAFKAVMTSIKQLSSEELEQFQKTGTIVVEGHELHDEDIRLMYTFDQATGGTAQFEAHSDAQALVLLDVTPDQSMVDEGMAREVINRIQKLRKKCNLVPTDEITVYYKAKSEGTYLNSVIESHTEFIFTTIKAPLKPYPVSPSDKVLIQEKTQLKGSELEITLTRGSSLPGPACAYVNLNICANGSEQGGVLLLENPKGDNRLDLLKLKSVVTSIFGVKNTELAVFHDETAACLGLPKCRDCSLCPAATPSGK

SEQ ID NO: 4585 - protein, 981 aa, Artificial Sequence
  Synthetic polypeptide
MATSEYPYSECQNAAQIYRKVTCGIKPASFEKVHDPEIKEIIGECICKNKEERYEIKDLLSHAFFAEDTGVRVELAEEDHGRKSTIALRLWVEDPKKLKGKPKDNGAIEFTFDLEKETPDEVAQEMIESGFFHESDVKIVAKSIRDRVALIQWRRERIWPALQPKEQQDVGSPDKARGPPVPLQVQVTYHAQAGQPGPPEPEEPEADQHLLPPTLPTSATSLASDSTFDSGQGSTVYSDSQSSQQSVMLGSLADAAPSPAQCVCSPPVSEGPVLPQSLPSLGAYQQPTAAPGLPVGSVPAPACPPSLQQHFPDPAMSFAPVLPPPSTPMPTGPGQPAPPGQQPPPLAQPTPLPQVLAPQPVVPLQPVPPHLPPYLAPASQVGAPAQLKPLQMPQAPLQPLAQVPPQMPPIPVVPPITPLAGIDGLPPALPDLPTATVPPVPPPQYFSPAVILPSLAAPLPPASPALPLQAVKLPHPPGAPLAMPCRTIVPNAPATIPLLAVAPPGVAALSIHSAVAQLPGQPVYPAAFPQMAPTDVPPSPHHTVQNMRATPPQPALPPQPTLPPQPVLPPQPTLPPQPVLPPQPTRPPQPVLPPQPMLPPQPVLPPQPALPVRPEPLQPHLPEQAAPAATPGSQILLGHPAPYAVDVAAQVPTVPVPPAAVLSPPLPEVLLPAAPELLPQFPSSLATVSASVQSVPTQTATLLPPANPPLPGGPGIASPCPTVQLTVEPVQEEQASQDKPPGLPQSCESYGGSDVTSGKELSDSCEGAFGGGRLEGRAARKHHRRSTRARSRQERASRPRLTILNVCNTGDKMVECQLETHNHKMVTFKFDLDGDAPDEIATYMVEHDFILQAERETFIEQMKDVMDKAEDMLSEDTDADRGSDPGTSPPHLSTCGLGTGEESRQSQANAPVYQQNVLHTGKRWFIICPVAEHPAPEAPESSPPLPLSSLPPEASQGFEHQSVKDPARLKKSHYSYLSLLP

SEQ ID NO: 4586 - protein, 981 aa, Artificial Sequence; identical to SEQ ID NO: 4585
  Synthetic polypeptide

SEQ ID NO: 4587 - protein, 1369 aa, Artificial Sequence
  Synthetic polypeptide
MDGDGGRRDVPGTLMEPGRGAGPAGMAEPRAKAARPGPQRFLRRSVVESDQEEPPGLEAAEAPGPQPPQPLQRRVLLLCKTRRLIAERARGRPAAPAPAALVAQPGAPGAPADAGPEPVGTQEPGPDPIAAAVETAPAPDGGPREEAAATVRKEDEGAAEAKPEPGRTRRDEPEEEEDDEDDLKAVATSLDGRFLKFDIELGRGSFKTVYKGLDTETWVEVAWCELQDRKLTKLERQRFKEEAEMLKGLQHPNIVRFYDFWESSAKGKRCIVLVTELMTSGTLKTYLKRFKVMKPKVLRSWCRQILKGLLFLHTRTPPIIHRDLKCDNIFITGPTGSVKIGDLGLATLKRASFAKSVIGTPEFMAPEMYEEHYDESVDVYAFGMCMLEMATSEYPYSECQNAAQIYRKVTCGIKPASFEKVHDPEIKEIIGECICKNKEERYEIKDLLSHAFFAEDTGVRVELAEEDHGRKSTIALRLWVEDPKKLKGKPKDNGAIEFTFDLEKETPDEVAQEMIESGFFHESDVKIVAKSIRDRVALIQWRRERIWPALQPKEQQDVGSPDKARGPPVPLQVQVTYHAQAGQPGPPEPEEPEADQHLLPPTLPTSATSLASDSTFDSGQGSTVYSDSQSSQQSVMLGSLADAAPSPAQCVCSPPVSEGPVLPQSLPSLGAYQQPTAAPGLPVGSVPAPACPPSLQQHFPDPAMSFAPVLPPPSTPMPTGPGQPAPPGQQPPPLAQPTPLPQVLAPQPVVPLQPVPPHLPPYLAPASQVGAPAQLKPLQMPQAPLQPLAQVPPQMPPIPVVPPITPLAGIDGLPPALPDLPTATVPPVPPPQYFSPAVILPSLAAPLPPASPALPLQAVKLPHPPGAPLAMPCRTIVPNAPATIPLLAVAPPGVAALSIHSAVAQLPGQPVYPAAFPQMAPTDVPPSPHHTVQNMRATPPQPALPPQPTLPPQPVLPPQPTLPPQPVLPPQPTRPPQPVLPPQPMLPPQPVLPPQPALPVRPEPLQPHLPEQAAPAATPGSQILLGHPAPYAVDVAAQVPTVPVPPAAVLSPPLPEVLLPAAPELLPQFPSSLATVSASVQSVPTQTATLLPPANPPLPGGPGIASPCPTVQLTVEPVQEEQASQDKPPGLPQSCESYGGSDVTSGKELSDSCEGAFGGGRLEGRAARKHHRRSTRARSRQERASRPRLTILNVCNTGDKMVECQLETHNHKMVTFKFDLDGDAPDEIATYMVEHDFILQAERETFIEQMKDVMDKAEDMLSEDTDADRGSDPGTSPPHLSTCGLGTGEESRQSQANAPVYQQNVLHTGKRWFIICPVAEHPAPEAPESSPPLPLSSLPPEASQGFEHQSVKDPARLKKSHYSYLSLLP

SEQ ID NO: 4588 - protein, 1369 aa, Artificial Sequence; identical to SEQ ID NO: 4587
  Synthetic polypeptide

SEQ ID NO: 4589 - protein, 9 aa, Artificial Sequence
  Synthetic polypeptide
AAAETSPAR

SEQ ID NO: 4590 - protein, 21 aa, Artificial Sequence
  Synthetic polypeptide
GVPECGPDLPQGHLWYQAGQL

SEQ ID NO: 4591 - protein, 10 aa, Artificial Sequence
  Synthetic polypeptide
ASWRRTTTRW

SEQ ID NO: 4592 - protein, 223 aa, Artificial Sequence
  Synthetic polypeptide
MNKTNQVYAANEDHNSQFIDDYSSSDESLSVSHFSFSKQSHRPRTIRDRTSFSSKLPSHNKKNSTFIPRKPMKCSNEKVVNQEQSYESMDKFLDGVQEVAYIHSNQNVIGSSKAENHMSRWAAHDVFELKQFSQLPANIAVCSSKTYKEKVDADTLPHTKKGQQPSEGSISLPLYISNPVNQKKKKVYHTNQTTFIIGETPKGIRRSQSSFSNLFWRKPAAMS

SEQ ID NO: 4593 - protein, 36 aa, Artificial Sequence
  Synthetic polypeptide
QMRIITLSLLMIIHPQMRVYPSATSVSLNRATDQEL

SEQ ID NO: 4594 - protein, 164 aa, Artificial Sequence
  Synthetic polypeptide
MTAGGQAEAEGAGGEPGAARLPSRVARLLSALFYGTCSFLIVLVNKALLTTYGFPSPIFLGIGQMAATIMILYVSKLNKIIHFPDFDKKIPVKLFPLPLLYVGNHISGLSSTSKLSPVRWLTPIIPALWEAEAGGSPEIRSSRPAWPTWQNFISTKNTKISWAW

SEQ ID NO: 4595 - protein, 164 aa, Artificial Sequence; identical to SEQ ID NO: 4594
  Synthetic polypeptide

SEQ ID NO: 4596 - protein, 164 aa, Artificial Sequence; identical to SEQ ID NO: 4594
  Synthetic polypeptide

SEQ ID NO: 4597 - protein, 381 aa, Artificial Sequence
  Synthetic polypeptide
MNTRPQHSERTSTMDRVYEIPEEPNVDPVSSLEEDVIRGANPRFTFPFSILFSTFLYCGEAASALYMVRIYRKNSETYWMTYTFSFFMFSSIMVQLTLIFVHRDLAKDKPLSLFMHLILLGPVIRCLEAMIKYLTLWKKEEQEEPYVSLTRKKMLIDGEEVLIEWEVGHSIRTLAMHRNAYKRMSQIQAFLGSVPQLTYQLYVSLISAEVPLGRVVLMVFSLVSVTYGATLCNMLAIQIKYDDYKIRLGPLEVLCITIWRTLEITSRLLILVLFSATLKLKAVPFLVLNFLIILFEPWIKFWRSGAQMPNNIEKNFSRVGTLVVLISVTILYAGINFSCWSALQLRLADRDLVDKGQNWGHMGLHYSVRSFVHGKSFCLEP

SEQ ID NO: 4598 - protein, 368 aa, Artificial Sequence
  Synthetic polypeptide
MDRVYEIPEEPNVDPVSSLEEDVIRGANPRFTFPFSILFSTFLYCGEAASALYMVRIYRKNSETYWMTYTFSFFMFSSIMVQLTLIFVHRDLAKDKPLSLFMHLILLGPVIRCLEAMIKYLTLWKKEEQEEPYVSLTRKKMLIDGEEVLIEWEVGHSIRTLAMHRNAYKRMSQIQAFLGSVPQLTYQLYVSLISAEVPLGRVVLMVFSLVSVTYGATLCNMLAIQIKYDDYKIRLGPLEVLCITIWRTLEITSRLLILVLFSATLKLKAVPFLVLNFLIILFEPWIKFWRSGAQMPNNIEKNFSRVGTLVVLISVTILYAGINFSCWSALQLRLADRDLVDKGQNWGHMGLHYSVRSFVHGKSFCLEP

SEQ ID NO: 4599 - protein, 224 aa, Artificial Sequence
  Synthetic polypeptide
MNTRPQHSERTSTMDRVYEIPEEPNVDPVSSLEEDVIRGANPRFTFPFSILFSTFLYCGEAASALYMVRIYRKNSETYWMTYTFSFFMFSSIMVQLTLIFVHRDLAKDKPLSLFMHLILLGPVIRCLEAMIKYLTLWKKEEQEEPYVSLTRKKMLIDGEEVLIEWEVGHSIRTLAMHRNAYKRMSQIQAFLGSVPQLTYQLYVSLISAEVPLGRGPLYMASLSV

SEQ ID NO: 4600 - protein, 211 aa, Artificial Sequence
  Synthetic polypeptide
MDRVYEIPEEPNVDPVSSLEEDVIRGANPRFTFPFSILFSTFLYCGEAASALYMVRIYRKNSETYWMTYTFSFFMFSSIMVQLTLIFVHRDLAKDKPLSLFMHLILLGPVIRCLEAMIKYLTLWKKEEQEEPYVSLTRKKMLIDGEEVLIEWEVGHSIRTLAMHRNAYKRMSQIQAFLGSVPQLTYQLYVSLISAEVPLGRGPLYMASLSV

SEQ ID NO: 4601 - protein, 51 aa, Artificial Sequence
  Synthetic polypeptide
MSDKPDLSEVEKFDRSKLKKTNTEEKNTLPSKEKLHYVRYGKRESEYADIR

SEQ ID NO: 4602 - protein, 51 aa, Artificial Sequence; identical to SEQ ID NO: 4601
  Synthetic polypeptide

SEQ ID NO: 4603 - protein, 51 aa, Artificial Sequence; identical to SEQ ID NO: 4601
  Synthetic polypeptide

SEQ ID NO: 4604 - protein, 51 aa, Artificial Sequence; identical to SEQ ID NO: 4601
  Synthetic polypeptide

SEQ ID NO: 4605 - protein, 51 aa, Artificial Sequence; identical to SEQ ID NO: 4601
  Synthetic polypeptide

SEQ ID NO: 4606 - protein, 51 aa, Artificial Sequence; identical to SEQ ID NO: 4601
  Synthetic polypeptide

SEQ ID NO: 4607 - protein, 421 aa, Artificial Sequence
  Synthetic polypeptide
MVFAFWKVFLILSCLAGQVSVVQVTIPDGFVNVTVGSNVTLICIYTTTVASREQLSIQWSFFHKKEMEPISHSSCLSTEGMEEKAVSQCLKMTHARDARGRCSWTSEIYFSQGGQAVAIGQFKDRITGSNDPGNASITISHMQPADSGIYICDVNNPPDFLGQNQGILNVSVLVKPSKPLCSVQGRPETGHTISLSCLSALGTPSPVYYWHKLEGRDIVPVKENFNPTTGILVIGNLTNFEQGYYQCTAINRLGNSSCEIDLTSSHPEVGIIVGALIGSLVGAAIIISVVCFARNKAKAKAKERNSKTIAELEPMTKINPRGESEAMPREDATQLEVTLPSSIHETGPDTIQEPDYEPKPTQEPAPEPAPGSEPMAVPDLDIELELEPETQSELEPEPEPEPESEPGVAVSRDCATALQPG

SEQ ID NO: 4608 - protein, 385 aa, Artificial Sequence
  Synthetic polypeptide
MVFAFWKVFLILSCLAGQVSVVQVTIPDGFVNVTVGSNVTLICIYTTTVASREQLSIQWSFFHKKEMEPISIYFSQGGQAVAIGQFKDRITGSNDPGNASITISHMQPADSGIYICDVNNPPDFLGQNQGILNVSVLVKPSKPLCSVQGRPETGHTISLSCLSALGTPSPVYYWHKLEGRDIVPVKENFNPTTGILVIGNLTNFEQGYYQCTAINRLGNSSCEIDLTSSHPEVGIIVGALIGSLVGAAIIISVVCFARNKAKAKAKERNSKTIAELEPMTKINPRGESEAMPREDATQLEVTLPSSIHETGPDTIQEPDYEPKPTQEPAPEPAPGSEPMAVPDLDIELELEPETQSELEPEPEPEPESEPGVAVSRDCATALQPG

SEQ ID NO: 4609 - protein, 341 aa, Artificial Sequence
  Synthetic polypeptide
MEWPARLCGLWALLLCAGGGGGGGGAAPTETQPPVTNLSVSVENLCTVIWTWNPPEGASSNCSLWYFSHFGDKQDKKIAPETRRSIEVPLNERICLQVGSQCSTNESEKPSILVEKCISPPEGDPESAVTELQCIWHNLSYMKCSWLPGRNTSPDTNYTLYYWHRSLEKIHQCENIFREGQYFGCSFDLTKVKDSSFEQHSVQIMVKDNAGKIKPSFNIVPLTSRVKPDPPHIKNLSFHNDDLYVQWENPQNFISRCLFYEVEVNNSQTETHNVFYVQEAKCENPEFERNVENTSCFMVPGVLPDTLNTVRIRVKTNKLCYEDDKLWSNWSQEMSIGFLQI

SEQ ID NO: 4610 - protein, 371 aa, Artificial Sequence
  Synthetic polypeptide
MEWPARLCGLWALLLCAGGGGGGGGAAPTETQPPVTNLSVSVENLCTVIWTWNPPEGASSNCSLWYFSHFGDKQDKKIAPETRRSIEVPLNERICLQVGSQCSTNESEKPSILVEKCISPPEGDPESAVTELQCIWHNLSYMKCSWLPGRNTSPDTNYTLYYWHRSLEKIHQCENIFREGQYFGCSFDLTKVKDSSFEQHSVQIMVKDNAGKIKPSFNIVPLTSRVKPDPPHIKNLSFHNDDLYVQWENPQNFISRCLFYEVEVNNSQTETHNVFYVQEAKCENPEFERNVENTSCFMVPGVLPDTLNTVRIRVKTNKLCYEDDKLWSNWSQEMSIGNKPSGLPESIRDLKITKSPHPDSEKPDPSPFLIG

SEQ ID NO: 4611 - protein, 41 aa, Artificial Sequence
  Synthetic polypeptide
MSSHKTFRIKRFLAKKQKQNRPIPQWIRMKTGNKIRSTLLL

SEQ ID NO: 4612 - protein, 382 aa, Artificial Sequence
  Synthetic polypeptide
MVCFRLFPVPGSGLVLVCLVLGAVRSYALELNLTDSENATCLYAKWQMNFTVRYETTNKTYKTVTISDHGTVTYNGSICGDDQNGPKIAVQFGPGFSWIANFTKAASTYSIDSVSFSYNTGDNTTFPDAEDKGILTVDELLAIRIPLNDLFRCNSLSTLEKNDVVQHYWDVLVQAFVQNGTVSTNEFLCDKDKTSTVAPTIHTTVPSPTTTPTPKEKPEAGTYSVNNGNDTCLLATMGLQLNITQDKVASVININPNTTHSTGSCRSHTALLRLNSSTIKYLDFVFAVKNENRFYLKEVNISMYLVNGSVFSIANNNLSYWDAPLGSSYMCNKEQTVSVSGAFQINTFDLRVQPFNVTQGKYSTGHIWQPQLSGFLTEPRSK

SEQ ID NO: 4613 - protein, 382 aa, Artificial Sequence; identical to SEQ ID NO: 4612
  Synthetic polypeptide

SEQ ID NO: 4614 - protein, 382 aa, Artificial Sequence; identical to SEQ ID NO: 4612
  Synthetic polypeptide

SEQ ID NO: 4615 - protein, 271 aa, Artificial Sequence
  Synthetic polypeptide
MVCFRLFPVPGSGLVLVCLVLGILTVDELLAIRIPLNDLFRCNSLSTLEKNDVVQHYWDVLVQAFVQNGTVSTNEFLCDKDKTSTVAPTIHTTVPSPTTTPTPKEKPEAGTYSVNNGNDTCLLATMGLQLNITQDKVASVININPNTTHSTGSCRSHTALLRLNSSTIKYLDFVFAVKNENRFYLKEVNISMYLVNGSVFSIANNNLSYWDAPLGSSYMCNKEQTVSVSGAFQINTFDLRVQPFNVTQGKYSTGHIWQPQLSGFLTEPRSK

SEQ ID NO: 4616 - protein, 29 aa, Artificial Sequence
  Synthetic polypeptide
AIVYQLWKRMMLSNTTGMFLYKLLSKMAQ

SEQ ID NO: 4617 - protein, 335 aa, Artificial Sequence
  Synthetic polypeptide
MNFTVRYETTNKTYKTVTISDHGTVTYNGSICGDDQNGPKIAVQFGPGFSWIANFTKAASTYSIDSVSFSYNTGDNTTFPDAEDKGILTVDELLAIRIPLNDLFRCNSLSTLEKNDVVQHYWDVLVQAFVQNGTVSTNEFLCDKDKTSTVAPTIHTTVPSPTTTPTPKEKPEAGTYSVNNGNDTCLLATMGLQLNITQDKVASVININPNTTHSTGSCRSHTALLRLNSSTIKYLDFVFAVKNENRFYLKEVNISMYLVNGSVFSIANNNLSYWDAPLGSSYMCNKEQTVSVSGAFQINTFDLRVQPFNVTQGKYSTGHIWQPQLSGFLTEPRSK

SEQ ID NO: 4618 - protein, 32 aa, Artificial Sequence
  Synthetic polypeptide
MMSQSSGSGDGNDDEATTSKDGGLLNISHTAW

SEQ ID NO: 4619 - protein, 105 aa, Artificial Sequence
  Synthetic polypeptide
MAQEKMKLGFKSLPSSTTADGNILRRVNSAPLINGLGFNSQVLQADMLRIRTNRTTFRNRRSLLLPPPPFHGSISRLHQIKQSPSDAERKLDCTAAISAHCNLPA

SEQ ID NO: 4620 - protein, 105 aa, Artificial Sequence; identical to SEQ ID NO: 4619
  Synthetic polypeptide

SEQ ID NO: 4621 - protein, 35 aa, Artificial Sequence
  Synthetic polypeptide
MTDKTEKVPPSLLQQGQDFRTVSGQFFPGCFNFAL

SEQ ID NO: 4622 - protein, 35 aa, Artificial Sequence; identical to SEQ ID NO: 4621
  Synthetic polypeptide

SEQ ID NO: 4623 - protein, 35 aa, Artificial Sequence; identical to SEQ ID NO: 4621
  Synthetic polypeptide

SEQ ID NO: 4624 - protein, 35 aa, Artificial Sequence; identical to SEQ ID NO: 4621
  Synthetic polypeptide

SEQ ID NO: 4625 - protein, 35 aa, Artificial Sequence; identical to SEQ ID NO: 4621
  Synthetic polypeptide

SEQ ID NO: 4626 - protein, 35 aa, Artificial Sequence; identical to SEQ ID NO: 4621
  Synthetic polypeptide

SEQ ID NO: 4627 - protein, 35 aa, Artificial Sequence; identical to SEQ ID NO: 4621
  Synthetic polypeptide

SEQ ID NO: 4628 - protein, 35 aa, Artificial Sequence; identical to SEQ ID NO: 4621
  Synthetic polypeptide

SEQ ID NO: 4629 - protein, 35 aa, Artificial Sequence; identical to SEQ ID NO: 4621
  Synthetic polypeptide

SEQ ID NO: 4630 - protein, 35 aa, Artificial Sequence; identical to SEQ ID NO: 4621
  Synthetic polypeptide

SEQ ID NO: 4631 - protein, 35 aa, Artificial Sequence; identical to SEQ ID NO: 4621
  Synthetic polypeptide

SEQ ID NO: 4632 - protein, 35 aa, Artificial Sequence; identical to SEQ ID NO: 4621
  Synthetic polypeptide

SEQ ID NO: 4633 - protein, 35 aa, Artificial Sequence; identical to SEQ ID NO: 4621
  Synthetic polypeptide

SEQ ID NO: 4634 - protein, 2 aa, Artificial Sequence
  Synthetic polypeptide
MG

SEQ ID NO: 4635 - protein, 165 aa, Artificial Sequence
  Synthetic polypeptide
MKFGCLSFRQPYAGFVLNGIKTVETRWRPLLSSQRNCTIAVHIAHRDWEGDAWRELLVERLGMTPAQIQTLLRKGEKFGRGVIAGLVDIGETLQCPEDLTPDEVVELENQAVLTNLKQKYLTVISNPRWLLEPIPRKGGKDVFQAHSWKKRALSLRFWNFELMLK

SEQ ID NO: 4636 - protein, 165 aa, Artificial Sequence; identical to SEQ ID NO: 4635
  Synthetic polypeptide

SEQ ID NO: 4637 - protein, 165 aa, Artificial Sequence; identical to SEQ ID NO: 4635
  Synthetic polypeptide

SEQ ID NO: 4638 - protein, 165 aa, Artificial Sequence; identical to SEQ ID NO: 4635
  Synthetic polypeptide

SEQ ID NO: 4639 - protein, 165 aa, Artificial Sequence; identical to SEQ ID NO: 4635
  Synthetic polypeptide

SEQ ID NO: 4640 - protein, 165 aa, Artificial Sequence; identical to SEQ ID NO: 4635
  Synthetic polypeptide

SEQ ID NO: 4641 - protein, 165 aa, Artificial Sequence; identical to SEQ ID NO: 4635
  Synthetic polypeptide

SEQ ID NO: 4642 - protein, 165 aa, Artificial Sequence; identical to SEQ ID NO: 4635
  Synthetic polypeptide

SEQ ID NO: 4643 - protein, 165 aa, Artificial Sequence; identical to SEQ ID NO: 4635
  Synthetic polypeptide

SEQ ID NO: 4644 - protein, 103 aa, Artificial Sequence
  Synthetic polypeptide
MTPAQIQTLLRKGEKFGRGVIAGLVDIGETLQCPEDLTPDEVVELENQAVLTNLKQKYLTVISNPRWLLEPIPRKGGKDVFQAHSWKKRALSLRFWNFELMLK

SEQ ID NO: 4645 - protein, 57 aa, Artificial Sequence
  Synthetic polypeptide
MAENHAQNKAKLISETRRRFEAEYVTGTWMKLETIILSKLWQGQKTKHRMFSLIGGN

SEQ ID NO: 4646 - protein, 57 aa, Artificial Sequence; identical to SEQ ID NO: 4645
  Synthetic polypeptide

SEQ ID NO: 4647 - protein, 57 aa, Artificial Sequence; identical to SEQ ID NO: 4645
  Synthetic polypeptide

SEQ ID NO: 4648 - protein, 165 aa, Artificial Sequence
  Synthetic polypeptide
MKFGCLSFRQPYAGFVLNGIKTVETRWRPLLSSQRNCTIAVHIAHRDWEGDACRELLVERLGMTPAQIQALLRKGEKFGRGVIAGLVDIGETLQCPEDLTPDEVVELENQAALTNLKQKYLTVISNPRWLLEPIPRKGGKDVFQAHSWKKRALSLRFWNFELMLK

SEQ ID NO: 4649 - protein, 165 aa, Artificial Sequence; identical to SEQ ID NO: 4648
  Synthetic polypeptide

SEQ ID NO: 4650 - protein, 165 aa, Artificial Sequence; identical to SEQ ID NO: 4648
  Synthetic polypeptide

SEQ ID NO: 4651 - protein, 165 aa, Artificial Sequence; identical to SEQ ID NO: 4648
  Synthetic polypeptide

SEQ ID NO: 4652 - protein, 165 aa, Artificial Sequence; identical to SEQ ID NO: 4648
  Synthetic polypeptide

SEQ ID NO: 4653 - protein, 301 aa, Artificial Sequence
  Synthetic polypeptide
MTEQAISFAKDFLAGGIAAAISKTAVAPIERVKLLLQVQHASKQIAADKQYKGIVDCIVRIPKEQGVLSFWRGNLANVIRYFPTQALNFAFKDKYKQIFLGGVDKHTQFWRYFAGNLASGGAAGATSLCFVYPLDFARTRLAADVGKSGTEREFRGLGDCLVKITKSDGIRGLYQGFSVSVQGIIIYRAAYFGVYDTAKGMLPDPKNTHIVVSWMIAQTVTAVAGVVSYPFDTVRRRMMMQSGRKGADIMYTGTVDCWRKIFRDEGGKAFFKGAWSNVLRGMGGAFVLVGRSPEVRSSRST

SEQ ID NO: 4654 - protein, 169 aa, Artificial Sequence
  Synthetic polypeptide
MASNFKKANMASSSQRKRMSPKPELTEEQKQEIREAFDLFDADGTGTIDVKELKVAMRALGFEPKKEEIKKMISEIDKEGTGKMNFGDFLTVMTQKMSEKDTKEEILKAFKLFDDDETGKISFKNLKRVAKELGENLTDEELQEMIDEADRDGDGEGHGWSWKPLSSAN

SEQ ID NO: 4655 - protein, 28 aa, Artificial Sequence
  Synthetic polypeptide
MMSHPCVSLLGHINSARTEHLTQGQQAI

SEQ ID NO: 4656 - protein, 28 aa, Artificial Sequence
  Synthetic polypeptide
MMSHPCVSLLGHINSARTEHLTQGQQAI

SEQ ID NO: 4657 - protein, 112 aa, Artificial Sequence
  Synthetic polypeptide
MGGARLGARNMAGQDAGCGRGGDDYSEDEGDSSVSRAAVEVFGKLKDLNCPFLEGLYITEPKTIQELLCSPSEYRLEILEWMCTRVWPSLQDRFSSLKGVPTEVKIQGLLAG

SEQ ID NO: 4658 - protein, 112 aa, Artificial Sequence; identical to SEQ ID NO: 4657
  Synthetic polypeptide

SEQ ID NO: 4659 - protein, 102 aa, Artificial Sequence
  Synthetic polypeptide
MAGQDAGCGRGGDDYSEDEGDSSVSRAAVEVFGKLKDLNCPFLEGLYITEPKTIQELLCSPSEYRLEILEWMCTRVWPSLQDRFSSLKGVPTEVKIQGLLAG

SEQ ID NO: 4660 - protein, 1129 aa, Artificial Sequence
  Synthetic polypeptide
MGDMANSSIEFHPKPQQQRDVPQAGGFGCTLAELRTLMELRGAEALQKIEEAYGDVSGLCRRLKTSPTEGLADNTNDLEKRRQIYGQNFIPPKQPKTFLQLVWEALQDVTLIILEVAAIVSLGLSFYAPPGEESEACGNVSGGAEDEGEAEAGWIEGAAILLSVICVVLVTAFNDWSKEKQFRGLQSRIEQEQKFTVIRNGQLLQVPVAALVVGDIAQVKYGDLLPADGVLIQANDLKIDESSLTGESDHVRKSADKDPMLLSGTHVMEGSGRMVVTAVGVNSQTGIIFTLLGAGGEEEEKKDKKGKQQDGAMESSQTKAKKQDGAVAMEMQPLKSAEGGEMEEREKKKANAPKKEKSVLQGKLTKLAVQIGKAGLVMSAITVIILVLYFVIETFVVEGRTWLAECTPVYVQYFVKFFIIGVTVLVVAVPEGLPLAVTISLAYSVKKMMKDNNLVRHLDACETMGNATAICSDKTGTLTTNRMTVVQSYLGDTHYKEIPAPSALTPKILDLLVHAISINSAYTTKILPPEKEGALPRQVGNKTECALLGFVLDLKRDFQPVREQIPEDKLYKVYTFNSVRKSMSTVIRMPDGGFRLFSKGASEILLKKCTNILNSNGELRGFRPRDRDDMVRKIIEPMACDGLRTICIAYRDFSAGQEPDWDNENEVVGDLTCIAVVGIEDPVRPEVPEAIRKCQRAGITVRMVTGDNINTARAIAAKCGIIQPGEDFLCLEGKEFNRRIRNEKGEIEQERLDKVWPKLRVLARSSPTDKHTLVKGIIDSTTGEQRQVVAVTGDGTNDGPALKKADVGFAMGIAGTDVAKEASDIILTDDNFTSIVKAVMWGRNVYDSISKFLQFQLTVNVVAVIVAFTGACITQDSPLKAVQMLWVNLIMDTFASLALATEPPTESLLLRKPYGRDKPLISRTMMKNILGHAVYQLAIIFTLLFVGELFFDIDSGRNAPLHSPPSEHYTIIFNTFVMMQLFNEINARKIHGERNVFDGIFSNPIFCTIVLGTFGIQIVIVQFGGKPFSCSPLSTEQWLWCLFVGVGELVWGQVIATIPTSQLKCLKEAGHGPGKDEMTDEELAEGEEEIDHAERELRRGQILWFRGLNRIQTQPGLCPPLPRNGARLG

SEQ ID NO: 4661 - protein, 1129 aa, Artificial Sequence; identical to SEQ ID NO: 4660
  Synthetic polypeptide

SEQ ID NO: 4662 - protein, 1129 aa, Artificial Sequence; identical to SEQ ID NO: 4660
  Synthetic polypeptide

SEQ ID NO: 4663 - protein, 1115 aa, Artificial Sequence
  Synthetic polypeptide
MGDMANSSIEFHPKPQQQRDVPQAGGFGCTLAELRTLMELRGAEALQKIEEAYGDVSGLCRRLKTSPTEGLADNTNDLEKRRQIYGQNFIPPKQPKTFLQLVWEALQDVTLIILEVAAIVSLGLSFYAPPGEESEACGNVSGGAEDEGEAEAGWIEGAAILLSVICVVLVTAFNDWSKEKQFRGLQSRIEQEQKFTVIRNGQLLQVPVAALVVGDIAQVKYGDLLPADGVLIQANDLKIDESSLTGESDHVRKSADKDPMLLSGTHVMEGSGRMVVTAVGVNSQTGIIFTLLGAGGEEEEKKDKKAKKQDGAVAMEMQPLKSAEGGEMEEREKKKANAPKKEKSVLQGKLTKLAVQIGKAGLVMSAITVIILVLYFVIETFVVEGRTWLAECTPVYVQYFVKFFIIGVTVLVVAVPEGLPLAVTISLAYSVKKMMKDNNLVRHLDACETMGNATAICSDKTGTLTTNRMTVVQSYLGDTHYKEIPAPSALTPKILDLLVHAISINSAYTTKILPPEKEGALPRQVGNKTECALLGFVLDLKRDFQPVREQIPEDKLYKVYTFNSVRKSMSTVIRMPDGGFRLFSKGASEILLKKCTNILNSNGELRGFRPRDRDDMVRKIIEPMACDGLRTICIAYRDFSAGQEPDWDNENEVVGDLTCIAVVGIEDPVRPEVPEAIRKCQRAGITVRMVTGDNINTARAIAAKCGIIQPGEDFLCLEGKEFNRRIRNEKGEIEQERLDKVWPKLRVLARSSPTDKHTLVKGIIDSTTGEQRQVVAVTGDGTNDGPALKKADVGFAMGIAGTDVAKEASDIILTDDNFTSIVKAVMWGRNVYDSISKFLQFQLTVNVVAVIVAFTGACITQDSPLKAVQMLWVNLIMDTFASLALATEPPTESLLLRKPYGRDKPLISRTMMKNILGHAVYQLAIIFTLLFVGELFFDIDSGRNAPLHSPPSEHYTIIFNTFVMMQLFNEINARKIHGERNVFDGIFSNPIFCTIVLGTFGIQIVIVQFGGKPFSCSPLSTEQWLWCLFVGVGELVWGQVIATIPTSQLKCLKEAGHGPGKDEMTDEELAEGEEEIDHAERELRRGQILWFRGLNRIQTQPGLCPPLPRNGARLG

SEQ ID NO: 4664 - protein, 1115 aa, Artificial Sequence; identical to SEQ ID NO: 4663
  Synthetic polypeptide

SEQ ID NO: 4665 - protein, 1115 aa, Artificial Sequence; identical to SEQ ID NO: 4663
  Synthetic polypeptide

SEQ ID NO: 4666 - protein, 37 aa, Artificial Sequence
  Synthetic polypeptide
MEAPEGGGGPAARGPEGPAPEARVHFRVARFIMEAGG

SEQ ID NO: 4667 - protein, 220 aa, Artificial Sequence
  Synthetic polypeptide
QRAVKTHGARTKYLKDLVEEEAEEAGVALRSTQSTLQAGLAADAWAAPIAMQIYKKHLDPRPGPCPPELGLGLGQLACCCLHRRAKRRPPMTQDWPLAALHHRRQSHRRLSSTLPDRRWSRSWPCTRMGPWTACSCCRPAPSQAWAWNRTGRGPKKVMNFRADVFTWADPPNPEVKVLMVRSSHGARVLSTLPAVGVGAHARGGEKEDHLCLGGRGCSES

SEQ ID NO: 4668 - protein, 257 aa, Artificial Sequence
  Synthetic polypeptide
MAGGPGPGEPAAPGAQHFLYEVPPWVMCRFYKVMDALEPADWCQFAALIVRDQTELRLCERSGQRTASVLWPWINRNARVADLVHILTHLQLLRARDIITAWHPPAPLPSPGTTAPRPSSIPAPAEAEAWSPRKLPSSASTFLSPAFPGSQTHSGPELGLVPSPASLWPPPPSPAPSSTKPGPESSVSLLQGARPFPFCWPLCEISRGTHNFSEELKIGEGGFGCVYRAVMRNTVYAVKRLKEEDHLCLGGRGCSES

SEQ ID NO: 4669 - protein, 257 aa, Artificial Sequence; identical to SEQ ID NO: 4668
  Synthetic polypeptide

SEQ ID NO: 4670 - protein, 257 aa, Artificial Sequence; identical to SEQ ID NO: 4668
  Synthetic polypeptide

SEQ ID NO: 4671 - protein, 283 aa, Artificial Sequence
  Synthetic polypeptide
MAGGPGPGEPAAPGAQHFLYEVPPWVMCRFYKVMDALEPADWCQFGGWRRAAGGREARGLLAPTPDAPRPAAALIVRDQTELRLCERSGQRTASVLWPWINRNARVADLVHILTHLQLLRARDIITAWHPPAPLPSPGTTAPRPSSIPAPAEAEAWSPRKLPSSASTFLSPAFPGSQTHSGPELGLVPSPASLWPPPPSPAPSSTKPGPESSVSLLQGARPFPFCWPLCEISRGTHNFSEELKIGEGGFGCVYRAVMRNTVYAVKRLKEEDHLCLGGRGCSES

SEQ ID NO: 4672 - protein, 283 aa, Artificial Sequence; identical to SEQ ID NO: 4671
  Synthetic polypeptide

SEQ ID NO: 4673 - protein, 283 aa, Artificial Sequence; identical to SEQ ID NO: 4671
  Synthetic polypeptide

SEQ ID NO: 4674 - protein, 25 aa, Artificial Sequence
  Synthetic polypeptide
DEEHGVCCEEAEGGGSFMLGRSRLQ

SEQ ID NO: 4675 - protein, 173 aa, Artificial Sequence
  Synthetic polypeptide
MNRHLWKSQLCEMVQPSGGPAADQDVLGEESPLGKPAMLHLPSEQGAPETLQRCLEENQELRDAIRQSNQILRERCEELLHFQASQREEKEFLMCKFQEARKLVERLGLEKLDLKRQKEQALREVEHLKRCQQQMAEDKASVKAQVTSLLGELQESQSRLEAATKECQALEGR

SEQ ID NO: 4676 - protein, 173 aa, Artificial Sequence; identical to SEQ ID NO: 4675
  Synthetic polypeptide

SEQ ID NO: 4677 - protein, 173 aa, Artificial Sequence; identical to SEQ ID NO: 4675
  Synthetic polypeptide

SEQ ID NO: 4678 - protein, 173 aa, Artificial Sequence; identical to SEQ ID NO: 4675
  Synthetic polypeptide

SEQ ID NO: 4679 - protein, 173 aa, Artificial Sequence; identical to SEQ ID NO: 4675
  Synthetic polypeptide

SEQ ID NO: 4680 - protein, 173 aa, Artificial Sequence; identical to SEQ ID NO: 4675
  Synthetic polypeptide

SEQ ID NO: 4681 - protein, 173 aa, Artificial Sequence; identical to SEQ ID NO: 4675
  Synthetic polypeptide

SEQ ID NO: 4682 - protein, 173 aa, Artificial Sequence; identical to SEQ ID NO: 4675
  Synthetic polypeptide

SEQ ID NO: 4683 - protein, 241 aa, Artificial Sequence
  Synthetic polypeptide
MALVIQVGKLRPREVRTPQTINPSLFPSLPVKLSSIIEVPSGGERCCSRRTLVYKARAFWKGAPLPCWMNRHLWKSQLCEMVQPSGGPAADQDVLGEESPLGKPAMLHLPSEQGAPETLQRCLEENQELRDAIRQSNQILRERCEELLHFQASQREEKEFLMCKFQEARKLVERLGLEKLDLKRQKEQALREVEHLKRCQQQMAEDKASVKAQVTSLLGELQESQSRLEAATKECQALEGR

SEQ ID NO: 4684 - protein, 161 aa, Artificial Sequence [sequence omitted]

SEQ ID NO: 4685 - protein, 172 aa, Artificial Sequence
  Synthetic polypeptide
MNRHLWKSQLCEMVQPSGGPAADQDVLGEESPLGKPAMLHLPSEQGAPETLQRCLEENQELRDAIRQSNQILRERCEELLHFQASQREEKEFLMCKFQEARKLVERLGLEKLDLKRQKEQALREVEHLKRCQQMAEDKASVKAQVTSLLGELQESQSRLEAATKECQALEGR

SEQ ID NO: 4686 - protein, 172 aa, Artificial Sequence; identical to SEQ ID NO: 4685
  Synthetic polypeptide

SEQ ID NO: 4687 - protein, 39 aa, Artificial Sequence
  Synthetic polypeptide
MAEDKASVKAQVTSLLGELQESQSRLEAATKECQALEGR

SEQ ID NO: 4688 - protein, 550 aa, Artificial Sequence
  Synthetic polypeptide
MEAETGSSVETGKKANRGTRIALVVFVGGTLVLGTILFLVSQGLLSLQAKQEYCLKPECIEAAAAILSKVNLSVDPCDNFFRFACDGWISNNPIPEDMPSYGVYPWLRHNVDLKLKELLEKSISRRRDTEAIQKAKILYSSCMNEKAIEKADAKPLLHILRHSPFRWPVLESNIGPEGVWSERKFSLLQTLATFRGQYSNSVFIRLYVSPDDKASNEHILKLDQATLSLAVREDYLDNSTEAKSYRDALYKFMVDTAVLLGANSSRAEHDMKSVLRLEIKIAEIMIPHENRTSEAMYNKMNISELSAMIPQFDWLGYIKKVIDTRLYPHLKDISPSENVVVRVPQYFKDLFRILGSERKKTIANYLVWRMVYSRIPNLSRRFQYRWLEFSRVIQGTTTLLPQWDKCVNFIESALPYVVGKMFVDVYFQEDKKEMMEELVEGVRWAFIDMLEKENEWMDAGTKRKAKEKARAVLAKVGYPEFIMNDTHVNEDLKAIKFSEADYFGNVLQTRKYLAQSDFFWLRKAVPKTEWFTNPTTVNAFYSASTNQIRR

SEQ ID NO: 4689 - protein, 550 aa, Artificial Sequence; identical to SEQ ID NO: 4688
  Synthetic polypeptide

SEQ ID NO: 4690 - protein, 453 aa, Artificial Sequence
  Synthetic polypeptide
MPSYGVYPWLRHNVDLKLKELLEKSISRRRDTEAIQKAKILYSSCMNEKAIEKADAKPLLHILRHSPFRWPVLESNIGPEGVWSERKFSLLQTLATFRGQYSNSVFIRLYVSPDDKASNEHILKLDQATLSLAVREDYLDNSTEAKSYRDALYKFMVDTAVLLGANSSRAEHDMKSVLRLEIKIAEIMIPHENRTSEAMYNKMNISELSAMIPQFDWLGYIKKVIDTRLYPHLKDISPSENVVVRVPQYFKDLFRILGSERKKTIANYLVWRMVYSRIPNLSRRFQYRWLEFSRVIQGTTTLLPQWDKCVNFIESALPYVVGKMFVDVYFQEDKKEMMEELVEGVRWAFIDMLEKENEWMDAGTKRKAKEKARAVLAKVGYPEFIMNDTHVNEDLKAIKFSEADYFGNVLQTRKYLAQSDFFWLRKAVPKTEWFTNPTTVNAFYSASTNQIRR

SEQ ID NO: 4691 - protein, 253 aa, Artificial Sequence
  Synthetic polypeptide
MIHLPRPPKVLGLQFDWLGYIKKVIDTRLYPHLKDISPSENVVVRVPQYFKDLFRILGSERKKTIANYLVWRMVYSRIPNLSRRFQYRWLEFSRVIQGTTTLLPQWDKCVNFIESALPYVVGKMFVDVYFQEDKKEMMEELVEGVRWAFIDMLEKENEWMDAGTKRKAKEKARAVLAKVGYPEFIMNDTHVNEDLKAIKFSEADYFGNVLQTRKYLAQSDFFWLRKAVPKTEWFTNPTTVNAFYSASTNQIRR

SEQ ID NO: 4692 - protein, 449 aa, Artificial Sequence
  Synthetic polypeptide
MAGGEAGVTLGQPHLSRQDLTTLDVTKLTPLSHEVISRQATINIGTIGHVAHGKSTVVKAISGVHTVRFKNELERNITIKLGYANAKIYKLDDPSCPRPECYRSCGSSTPDEFPTDIPGTKGNFKLVRHVSFVDCPGHDILMATMLNGAAVMDAALLLIAGNESCPQPQTSEHLAAIEIMKLKHILILQNKIDLVKESQAKEQYEQILAFVQGTVAEGAPIIPISAQLKYNIEVVCEYIVKKIPVPPRDFTSEPRLIVIRSFDVNKPGCEVDDLKGGVAGGSILKGVLKVGQEIEVRPGIVSKDSEGKLMCKPIFSKIVSLFAEHNDLQYAAPGGLIGVGTKIDPTLCRADRMVGQVLGAVGALPEIFTELEISYFLLRRLLGVRTEGDKKAAKVQKLSKNEVLMVNIGSLSTGGRVSAVKADLGKIVLTNPVCTEAGEWREPGSRSLQ

SEQ ID NO: 4693 - protein, 163 aa, Artificial Sequence
  Synthetic polypeptide
MADDDVLFEDVYELCEVIGKGPFSVVRRCINRETGQQFAVKIVDVAKFTSSPGLSTEDLKREASICHMLKHPHIVELLETYSSDGMLYMVFEFMDGADLCFEIVKRADAGFVYSEAVASHYMRQILEALRYCHDNNIIHRDVKARWLMPVIPALWEAEAGGSP

SEQ ID NO: 4694 - protein, 163 aa, Artificial Sequence; identical to SEQ ID NO: 4693
  Synthetic polypeptide

SEQ ID NO: 4695 - protein, 163 aa, Artificial Sequence; identical to SEQ ID NO: 4693
  Synthetic polypeptide

SEQ ID NO: 4696 - protein, 163 aa, Artificial Sequence; identical to SEQ ID NO: 4693
  Synthetic polypeptide

SEQ ID NO: 4697 - protein, 163 aa, Artificial Sequence; identical to SEQ ID NO: 4693
  Synthetic polypeptide

SEQ ID NO: 4698 - protein, 163 aa, Artificial Sequence; identical to SEQ ID NO: 4693
  Synthetic polypeptide

SEQ ID NO: 4699 - protein, 163 aa, Artificial Sequence; identical to SEQ ID NO: 4693
  Synthetic polypeptide

SEQ ID NO: 4700 - protein, 163 aa, Artificial Sequence; identical to SEQ ID NO: 4693
  Synthetic polypeptide

SEQ ID NO: 4701 - protein, 82 aa, Artificial Sequence
  Synthetic polypeptide
MLLLADMDVVNQLVAGGQFRVVKEPLGFVKVLQWVFAIFAFATCGSYSGELQLSVDCANKTESDLSIEVEFEYPFRHSGSRL

SEQ ID NO: 4702 - protein, 82 aa, Artificial Sequence; identical to SEQ ID NO: 4701
  Synthetic polypeptide

SEQ ID NO: 4703 - protein, 82 aa, Artificial Sequence; identical to SEQ ID NO: 4701
  Synthetic polypeptide

SEQ ID NO: 4704 - protein, 82 aa, Artificial Sequence; identical to SEQ ID NO: 4701
  Synthetic polypeptide

SEQ ID NO: 4705 - protein, 118 aa, Artificial Sequence
  Synthetic polypeptide
MSWRGRSTYRPRPRRYVEPPEMIGPMRPEQFSDEVEPATPEEGEPATQRQDPAAAQEGQDEGASAGQGPKPEAHSQEQGHPQTGCECEDGPDGQEMDPPNPEEVKTPEEGCKALLGEF

SEQ ID NO: 4706 - protein, 119 aa, Artificial Sequence
  Synthetic polypeptide
MSWRGRSTYYWPRPRRYVQPPEMIGPMRPEQFSDEVEPATPEEGEPATQRQDPAAAQEGEDEGASAGQGPKPEADSQEQGHPQTGCECEDGPDGQEMDPPNPEEVKTPEEGCKALLGEF

SEQ ID NO: 4707 - protein, 119 aa, Artificial Sequence; identical to SEQ ID NO: 4706
  Synthetic polypeptide

SEQ ID NO: 4708 - protein, 1212 aa, Artificial Sequence
  Synthetic polypeptide
MGFLKLIEIENFKSYKGRQIIGPFQRFTAIIGPNGSGKSNLMDAISFVLGEKTSNLRVKTLRDLIHGAPVGKPAANRAFVSMVYSEEGAEDRTFARVIVGGSSEYKINNKVVQLHEYSEELEKLGILIKARNFLVFQGAVESIAMKNPKERTALFEEISRSGELAQEYDKRKKEMVKAEEDTQFNYHRKKNIAAERKEAKQEKEEADRYQRLKDEVVRAQVQLQLFKLYHNEVEIEKLNKELASKNKEIEKDKKRMDKVEDELKEKKKELGKMMREQQQIEKEIKEKDSELNQKRPQYIKAKENTSHKIKKLEAAKKSLQNAQKHYKKRKGDMDELEKEMLSVEKARQEFEERMEEESQSQGRDLTLEENQVKKYHRLKEEASKRAATLAQELEKFNRDQKADQDRLDLEERKKVETEAKIKQKLREIEENQKRIEKLEEYITTSKQSLEEQKKLEGELTEEVEMAKRRIDEINKELNQVMEQLGDARIDRQESSRQQRKAEIMESIKRLYPGSVYGRLIDLCQPTQKKYQIAVTKVLGKNMDAIIVDSEKTGRDCIQYIKEQRGEPETFLPLDYLEVKPTDEKLRELKGAKLVIDVIRYEPPHIKKALQYACGNALVCDNVEDARRIAFGGHQRHKTVALDGTLFQKSGVISGGASDLKAKARRWDEKAVDKLKEKKERLTEELKEQMKAKRKEAELRQVQSQAHGLQMRLKYSQSDLEQTKTRHLALNLQEKSKLESELANFGPRINDIKRIIQSREREMKDLKEKMNQVEDEVFEEFCREIGVRNIREFEEEKVKRQNEIAKKRLEFENQKTRLGIQLDFEKNQLKEDQDKVHMWEQTVKKDENEIEKLKKEEQRHMKIIDETMAQLQDLKNQHLAKKSEVNDKNHEMEEIRKKLGGANKEMTHLQKEVTAIETKLEQKRSDRHNLLQACKMQDIKLPLSKGTMDDISQEEGSSQGEDSVSGSQRISSIYAREALIEIDYGDLCEDLKDAQAEEEIKQEMNTLQQKLNEQQSVLQRIAAPNMKAMEKLESVRDKFQETSDEFEAARKRAKKAKQAFEQIKKERFDRFNACFESVATNIDEIYKALSRNSSAQAFLGPENPEEPYLDGINYNCVAPGKRFRPMDNLSGGEKTVAALALLFAIHSYKPAPFFVLDEIDAALDNTNIGKVANYIKEQSTCNFQAIVISLKEEFYTKAESLIGVYPESSRLEL

SEQ ID NO: 4709 - protein, 1 aa, Artificial Sequence
  Synthetic polypeptide
K

SEQ ID NO: 4710 - protein, 469 aa, Artificial Sequence
  Synthetic polypeptide
MSWESGAGPGLGSQGMDLVWSAWYGKCVKGKGSLPLSAHGIVVAWLSRAEWDQVTVYLFCDDHKLQRYALNRITVWRSRSGNELPLAVASTADLIRCKLLDVTGGLGTDELRLLYGMALVRFVNLISERKTKFAKVPLKCLAQEVNIPDWIVDLRHELTHKKMPHINDCRRGCYFVLDWLQKTYWCRQLENSLRETWELEEFREGIEEEDQEEDKNIVVDDITEQKPEPQDDGKSTESDVKADGDSKGSEEVDSHCKKALSHKELYERARELLVSYEEEQFTVLEKFRYLPKAIKAWNNPSPRVECVLAELKGVTCENREAVLDAFLDDGFLVPTFEQLAALQIEYEENVDLNDVLVPKPFSQFWQPLLRGLHSQNFTQALLERMLSELPALGISGIRPTYILRWTVELIVANTKTGRNARRFSAGQWEARRGWRLFNCSASLDWPRMVESCLGSPCWASPQLLRIPGS

SEQ ID NO: 4711 - protein, 486 aa, Artificial Sequence
  Synthetic polypeptide
MSWESGAGPGLGSQGMDLVWSAWYGKCVKGKGSLPLSAHGIVVAWLSRAEWDQVTVYLFCDDHKLQRYALNRITVWRSRSGNELPLAVASTADLIRCKLLDVTGGLGTDELRLLYGMALVRFVNLISERKTKFAKVPLKCLAQEVNIPDWIVDLRHELTHKKMPHINDCRRGCYFVLDWLQKTYWCRQLENSLRETWELEEFREGIEEEDQEEDKNIVVDDITEQKPEPQDDGKSTESDVKADGDSKGSEEVDSHCKKALSHKELYERARELLVSYEEEQFTVLEKFRYLPKAIKAWNNPSPRVECVLAELKGVTCENREAVLDAFLDDGFLVPTFEQLAALQIEYEDGQTEVQRGEGTDPKSHKNVDLNDVLVPKPFSQFWQPLLRGLHSQNFTQALLERMLSELPALGISGIRPTYILRWTVELIVANTKTGRNARRFSAGQWEARRGWRLFNCSASLDWPRMVESCLGSPCWASPQLLRIPGS

SEQ ID NO: 4712 - protein, 427 aa, Artificial Sequence
  Synthetic polypeptide
MSWESGAGPGLGSQGMDLVWSAWYGKCVKGKGSLPLSAHGIVVAWLSRAEWDQVTVYLFCDDHKLQRYALNRITVWRSRFVNLISERKTKFAKVPLKCLAQEVNIPDWIVDLRHELTHKKMPHINDCRRGCYFVLDWLQKTYWCRQLENSLRETWELEEFREGIEEEDQEEDKNIVVDDITEQKPEPQDDGKSTESDVKADGDSKGSEEVDSHCKKALSHKELYERARELLVSYEEEQFTVLEKFRYLPKAIKAWNNPSPRVECVLAELKGVTCENREAVLDAFLDDGFLVPTFEQLAALQIEYEENVDLNDVLVPKPFSQFWQPLLRGLHSQNFTQALLERMLSELPALGISGIRPTYILRWTVELIVANTKTGRNARRFSAGQWEARRGWRLFNCSASLDWPRMVESCLGSPCWASPQLLRIPGS

SEQ ID NO: 4713 - protein, 103 aa, Artificial Sequence
  Synthetic polypeptide
GWLSPAWAHLAGPAPNSFGSRVAELCWRKPHSPADCCHCRGMIFNLGRGLSSACLNFYLFSDHFLSHFLTILNPYRSPQAPPPLPFHPSFLEHMEASGRAPST

SEQ ID NO: 4714 - protein, 58 aa, Artificial Sequence
  Synthetic polypeptide
MPMAGLLKGLVRQLERFSVQQQASKMPPKGKSGSGKAGKGNLPWLAPVSLCASTAPCP

SEQ ID NO: 4715 - protein, 58 aa, Artificial Sequence; identical to SEQ ID NO: 4714
  Synthetic polypeptide

SEQ ID NO: 4716 - protein, 58 aa, Artificial Sequence; identical to SEQ ID NO: 4714
  Synthetic polypeptide

SEQ ID NO: 4717 - protein, 58 aa, Artificial Sequence; identical to SEQ ID NO: 4714
  Synthetic polypeptide

SEQ ID NO: 4718 - protein, 40 aa, Artificial Sequence
  Synthetic polypeptide
VQQQASKMPPKGKSGSGKAGKGNLPWLAPVSLCASTAPCP

SEQ ID NO: 4719 - protein, 40 aa, Artificial Sequence; identical to SEQ ID NO: 4718
  Synthetic polypeptide

SEQ ID NO: 4720 - protein, 40 aa, Artificial Sequence
  Synthetic polypeptide
QRKKWFWKSGERKPSLAGSSVPLCFHSPLSITISASPAFS

SEQ ID NO: 4721 - protein, 69 aa, Artificial Sequence
  Synthetic polypeptide
MRRGWKMALSGGLRCCRRVLSWVPVLVIVLVVLWSYYAYVFELCLVTVLSPAEKGKGNLDTDRYRRKTM

SEQ ID NO: 4722 - protein, 69 aa, Artificial Sequence; identical to SEQ ID NO: 4721
  Synthetic polypeptide

SEQ ID NO: 4723 - protein, 149 aa, Artificial Sequence
  Synthetic polypeptide
INAETENHIPHVLTYKLAAMFLGMDLPGLNLPDSWKTYAMTGFVAWHVGTEVVLELKYWMMTEFRSFSHLLQWKQRVMLLKRQCWQFMSVGMLLFSSYFYLQSTIYEQAKTLAFAGQVIIIIKPKKLEACPDCLEHICEFSLGRLGSCL

SEQ ID NO: 4724 - protein, 56 aa, Artificial Sequence
  Synthetic polypeptide
VDYAAIKKNEVMSFVATWMLLEVIILHELMQKQKITYHMFSLINWQRCSWEWIYQD

SEQ ID NO: 4725 - protein, 56 aa, Artificial Sequence; identical to SEQ ID NO: 4724
  Synthetic polypeptide

SEQ ID NO: 4726 - protein, 115 aa, Artificial Sequence
  Synthetic polypeptide
INAETENHIPHVLTYKLAAMFLGMDLPGLNLPDSWKTYAMTGFVAWHVGTEVVLEVHAYRLSRKVEILDDDRIQILQSFTAVETEGHAFKKAVLAIYVCGNVTFLIIFLSAINHL

SEQ ID NO: 4727 - protein, 11 aa, Artificial Sequence
  Synthetic polypeptide
KTYHPRIQLFL

SEQ ID NO: 4728 - protein, 11 aa, Artificial Sequence
  Synthetic polypeptide
KTYHPRIQLFL

SEQ ID NO: 4729 - protein, 11 aa, Artificial Sequence
  Synthetic polypeptide
KTYHPRIQLFL

SEQ ID NO: 4730 - protein, 11 aa, Artificial Sequence
  Synthetic polypeptide
KTYHPRIQLFL

SEQ ID NO: 4731 - protein, 43 aa, Artificial Sequence
  Synthetic polypeptide
AFERHITQEYSYFCESIHKAARRWLCDHDLFQRGSTSSRDFLE

SEQ ID NO: 4732 - protein, 43 aa, Artificial Sequence; identical to SEQ ID NO: 4731
  Synthetic polypeptide

SEQ ID NO: 4733 - protein, 43 aa, Artificial Sequence; identical to SEQ ID NO: 4731
  Synthetic polypeptide

SEQ ID NO: 4734 - protein, 43 aa, Artificial Sequence; identical to SEQ ID NO: 4731
  Synthetic polypeptide

SEQ ID NO: 4735 - protein, 551 aa, Artificial Sequence
  Synthetic polypeptide
QYFEKNSQDRGYFSEEKTKPGWKRHLIKHLKDISPKNTVISVNPSTKLQEGGSVTMTCSSEGLPAPEIFWSKKLDNGNLQHLSGNATLTLIAMRMEDSGIYVCEGVNLIGKNRKEVELIVQEKPFTVEISPGPRIAAQIGDSVMLTCSVMGCESPSFSWRTQIDSPLSGKVRSEGTNSTLTLSPVSFENEHSYLCTVTCGHKKLEKGIQVELYSFPRDPEIEMSGGLVNGSSVTVSCKVPSVYPLDRLEIELLKGETILENIEFLEDTDMKSLENKSLEMTFIPTIEDTGKALVCQAKLHIDDMEFEPKQRQSTQTLYVNVAPRDTTVLVSPSSILEEGSSVNMTCLSQGFPAPKILWSRQLPNGELQPLSENATLTLISTKMEDSGVYLCEGINQAGRSRKEVELIIQVTPKDIKLTAFPSESVKEGDTVIISCTCGNVPETWIILKKKAETGDTVLKSIDGAYTIRKAQLKDAGVYECESKNKVGSQLRSLTLDVQGRENNKDYFSPELLVLYFASSLIIPAIGMIIYFARKANMKGSYSLVEAQKSKV

SEQ ID NO: 4736 - protein, 551 aa, Artificial Sequence; identical to SEQ ID NO: 4735
  Synthetic polypeptide

SEQ ID NO: 4737 - protein, 459 aa, Artificial Sequence
  Synthetic polypeptide
QYFEKNSQDRGYFSEEKTKPGWKRHLIKHLKDISPKNTVISVNPSTKLQEGGSVTMTCSSEGLPAPEIFWSKKLDNGNLQHLSGNATLTLIAMRMEDSGIYVCEGVNLIGKNRKEVELIVQAFPRDPEIEMSGGLVNGSSVTVSCKVPSVYPLDRLEIELLKGETILENIEFLEDTDMKSLENKSLEMTFIPTIEDTGKALVCQAKLHIDDMEFEPKQRQSTQTLYVNVAPRDTTVLVSPSSILEEGSSVNMTCLSQGFPAPKILWSRQLPNGELQPLSENATLTLISTKMEDSGVYLCEGINQAGRSRKEVELIIQVTPKDIKLTAFPSESVKEGDTVIISCTCGNVPETWIILKKKAETGDTVLKSIDGAYTIRKAQLKDAGVYECESKNKVGSQLRSLTLDVQGRENNKDYFSPELLVLYFASSLIIPAIGMIIYFARKANMKGSYSLVEAQKSKV

SEQ ID NO: 4738 - protein, 352 aa, Artificial Sequence
  Synthetic polypeptide
QYFEKNSQDRGYFSEEKTKPGWKRHLIKHLKDISPKNTVISVNPSTKLQEGGSVTMTCSSEGLPAPEIFWSKKLDNGNLQHLSGNATLTLIAMRMEDSGIYVCEGVNLIGKNRKEVELIVQVAPRDTTVLVSPSSILEEGSSVNMTCLSQGFPAPKILWSRQLPNGELQPLSENATLTLISTKMEDSGVYLCEGINQAGRSRKEVELIIQVTPKDIKLTAFPSESVKEGDTVIISCTCGNVPETWIILKKKAETGDTVLKSIDGAYTIRKAQLKDAGVYECESKNKVGSQLRSLTLDVQGRENNKDYFSPELLVLYFASSLIIPAIGMIIYFARKANMKGSYSLVEAQKSKV

SEQ ID NO: 4739 - protein, 41 aa, Artificial Sequence
  Synthetic polypeptide
FSHITQEYSYFCESIHKAARRWLCDHDLFQRGSTSSRDFLE

SEQ ID NO: 4740 - protein, 41 aa, Artificial Sequence; identical to SEQ ID NO: 4739
  Synthetic polypeptide

SEQ ID NO: 4741 - protein, 41 aa, Artificial Sequence; identical to SEQ ID NO: 4739
  Synthetic polypeptide

SEQ ID NO: 4742 - protein, 41 aa, Artificial Sequence; identical to SEQ ID NO: 4739
  Synthetic polypeptide

SEQ ID NO: 4743 - protein, 539 aa, Artificial Sequence
  Synthetic polypeptide
YVELSKNQIDSFGKQWVDSLISPKNTVISVNPSTKLQEGGSVTMTCSSEGLPAPEIFWSKKLDNGNLQHLSGNATLTLIAMRMEDSGIYVCEGVNLIGKNRKEVELIVQEKPFTVEISPGPRIAAQIGDSVMLTCSVMGCESPSFSWRTQIDSPLSGKVRSEGTNSTLTLSPVSFENEHSYLCTVTCGHKKLEKGIQVELYSFPRDPEIEMSGGLVNGSSVTVSCKVPSVYPLDRLEIELLKGETILENIEFLEDTDMKSLENKSLEMTFIPTIEDTGKALVCQAKLHIDDMEFEPKQRQSTQTLYVNVAPRDTTVLVSPSSILEEGSSVNMTCLSQGFPAPKILWSRQLPNGELQPLSENATLTLISTKMEDSGVYLCEGINQAGRSRKEVELIIQVTPKDIKLTAFPSESVKEGDTVIISCTCGNVPETWIILKKKAETGDTVLKSIDGAYTIRKAQLKDAGVYECESKNKVGSQLRSLTLDVQGRENNKDYFSPELLVLYFASSLIIPAIGMIIYFARKANMKGSYSLVEAQKSKV

SEQ ID NO: 4744 - protein, 539 aa, Artificial Sequence; identical to SEQ ID NO: 4743
  Synthetic polypeptide

SEQ ID NO: 4745 - protein, 27 aa, Artificial Sequence
  Synthetic polypeptide
SCPKIKLTLLESSGLILSYHPRIQLFL

SEQ ID NO: 4746 - protein, 27 aa, Artificial Sequence
  Synthetic polypeptide
SCPKIKLTLLESSGLILSYHPRIQLFL

SEQ ID NO: 4747 - protein, 27 aa, Artificial Sequence
  Synthetic polypeptide
SCPKIKLTLLESSGLILSYHPRIQLFL

SEQ ID NO: 4748 - protein, 27 aa, Artificial Sequence
  Synthetic polypeptide
SCPKIKLTLLESSGLILSYHPRIQLFL

SEQ ID NO: 4749 - protein, 447 aa, Artificial Sequence
  Synthetic polypeptide
YVELSKNQIDSFGKQWVDSLISPKNTVISVNPSTKLQEGGSVTMTCSSEGLPAPEIFWSKKLDNGNLQHLSGNATLTLIAMRMEDSGIYVCEGVNLIGKNRKEVELIVQAFPRDPEIEMSGGLVNGSSVTVSCKVPSVYPLDRLEIELLKGETILENIEFLEDTDMKSLENKSLEMTFIPTIEDTGKALVCQAKLHIDDMEFEPKQRQSTQTLYVNVAPRDTTVLVSPSSILEEGSSVNMTCLSQGFPAPKILWSRQLPNGELQPLSENATLTLISTKMEDSGVYLCEGINQAGRSRKEVELIIQVTPKDIKLTAFPSESVKEGDTVIISCTCGNVPETWIILKKKAETGDTVLKSIDGAYTIRKAQLKDAGVYECESKNKVGSQLRSLTLDVQGRENNKDYFSPELLVLYFASSLIIPAIGMIIYFARKANMKGSYSLVEAQKSKV

SEQ ID NO: 4750 - protein, 340 aa, Artificial Sequence
  Synthetic polypeptide
YVELSKNQIDSFGKQWVDSLISPKNTVISVNPSTKLQEGGSVTMTCSSEGLPAPEIFWSKKLDNGNLQHLSGNATLTLIAMRMEDSGIYVCEGVNLIGKNRKEVELIVQVAPRDTTVLVSPSSILEEGSSVNMTCLSQGFPAPKILWSRQLPNGELQPLSENATLTLISTKMEDSGVYLCEGINQAGRSRKEVELIIQVTPKDIKLTAFPSESVKEGDTVIISCTCGNVPETWIILKKKAETGDTVLKSIDGAYTIRKAQLKDAGVYECESKNKVGSQLRSLTLDVQGRENNKDYFSPELLVLYFASSLIIPAIGMIIYFARKANMKGSYSLVEAQKSKV

SEQ ID NO: 4751 - protein, 7 aa, Artificial Sequence
  Synthetic polypeptide
GRFQPPS

SEQ ID NO: 4752 - protein, 7 aa, Artificial Sequence
  Synthetic polypeptide
GRFQPPS

SEQ ID NO: 4753 - protein, 7 aa, Artificial Sequence
  Synthetic polypeptide
GRFQPPS

SEQ ID NO: 4754 - protein, 22 aa, Artificial Sequence
  Synthetic polypeptide
AGSSHQVKHDEQNQPWPEHEQV

SEQ ID NO: 4755 - protein, 22 aa, Artificial Sequence
  Synthetic polypeptide
AGSSHQVKHDEQNQPWPEHEQV

SEQ ID NO: 4756 - protein, 22 aa, Artificial Sequence
  Synthetic polypeptide
AGSSHQVKHDEQNQPWPEHEQV

SEQ ID NO: 4757 - protein, 588 aa, Artificial Sequence
  Synthetic polypeptide
PVPATKLNTMSKTSLGQSMSKYDLLVWFEISELEPTGEYIPAVVDHTAGLPCQGTFLLHQGIQRRITVTIIHEKGSELHWKDVRELVVGRIRNKPEVDEAAVDAILSLNIISAKYLKSSHNSSRTFYRFEAVWDSSLHNSLLLNRVTPYGEKIYMTLSAYLELDHCIQPAVITKDVCMVFYSRDAKISPPRSLRSLFGSGYSKSPDSNRVTGIYELSLCKMSDTGSPGMQRRRRKILDTSVAYVRGEENLAGWRPRGDSLILEHQWELEKLELLHEVEKTRHFLLLRERLGDSIPKSLSDSLSPSLSSGTLSTSTSISSQISTTTFESAITPSESSGYDSGDIESLVDREKELATKCLQLLTHTFNREFSQVHGSVSDCKLSDISPIGRDPSESSFSSATLTPSSTCPSLVDSRSNSLDQKTPEANSRASSPCPEFEQFQIVPAVETPYLARAGKNEFLNLVPDIEEIRPSSVVSKKGYLHFKEPLYSNWAKHFVVVRRPYVFIYNSDKDPVERGIINLSTAQVEYSEDQQAMVKTPNTFAVCTKHRGVLLQALNDKDMNDWLYAFNPLLAGTIRSKLSRRCPSQSKY

SEQ ID NO: 4758 - protein, 588 aa, Artificial Sequence; identical to SEQ ID NO: 4757
  Synthetic polypeptide

SEQ ID NO: 4759 - protein, 595 aa, Artificial Sequence
  Synthetic polypeptide
PVPATKLNTMSKTSLGQSMSKYDLLVWFEISELEPTGEYIPAVVDHTAGLPCQGTFLLHQGIQRRITVTIIHEKGSELHWKDVRELVVGRIRNKPEVDEAAVDAILSLNIISAKYLKSSHNSSRTFYRFEAVWDSSLHNSLLLNRVTPYGEKIYMTLSAYLELDHCIQPAVITKDVCMVFYSRDAKISPPRSLRSLFGSGYSKSPDSNRVTGIYELSLCKMSDTGSPGMQRRRRKILDTSVAYVRGEENLAGWRPRGDSLILEHQWELEKLELLHEVEKTRHFLLLRERLGDSIPKSLSDSLSPSLSSGTLSTSTSISSQISTTTFESAITPSESSGYDSGDIESLVDREKELATKCLQLLTHTFNREFSQVHGSVSDCKLSDISPIGRDPSESSFSSATLTPSSTCPSLVDSRSNSLDQKTPEANSRASSPCPEFEQFQIVPAVETPYLARAGKNEFLNLVPDIEEIRPSSVVSKKGYLHFKEPLYSNWAKHFVVVRRPYVFIYNSDKDPVERGIINLSTAQVEYSEDQQAMVKTPNTFAVCTKHRGVLLQALNDKDMNDWLYAFNPLLAGTIRPGHLASEIIREDKSVSFSCQ

SEQ ID NO: 4760 - protein, 18 aa, Artificial Sequence
  Synthetic polypeptide
SQHFGRQLDHETCEKNHN

SEQ ID NO: 4761 - protein, 18 aa, Artificial Sequence
  Synthetic polypeptide
SQHFGRQLDHETCEKNHN

SEQ ID NO: 4762 - protein, 18 aa, Artificial Sequence
  Synthetic polypeptide
SQHFGRQLDHETCEKNHN

SEQ ID NO: 4763 - protein, 18 aa, Artificial Sequence
  Synthetic polypeptide
SQHFGRQLDHETCEKNHN

SEQ ID NO: 4764 - protein, 18 aa, Artificial Sequence
  Synthetic polypeptide
SQHFGRQLDHETCEKNHN

SEQ ID NO: 4765 - protein, 114 aa, Artificial Sequence
  Synthetic polypeptide
MGLVAHACNPSTLGGSWIMRHAKRTTINTEDVKLLARRSNSLHMQEAAGIRKSSLLTFLAWWFEWTSQASAGPLIGEEAREVARRQEGAPPQQSARRDRMPCRNFFWKTFSSCK

SEQ ID NO: 4766 - protein, 114 aa, Artificial Sequence; identical to SEQ ID NO: 4765
  Synthetic polypeptide

SEQ ID NO: 4767 - protein, 88 aa, Artificial Sequence
  Synthetic polypeptide
MGLVAHACNPSTLGGSWIMRHAKRTTINTEDVKLLARRSNSLLKYITDKSEEIAQINLERKAQKKKKSEDGSKNSRQPAEAGVVESEN

SEQ ID NO: 4768 - protein, 88 aa, Artificial Sequence; identical to SEQ ID NO: 4767
  Synthetic polypeptide

SEQ ID NO: 4769 - protein, 65 aa, Artificial Sequence
  Synthetic polypeptide
MGLVAHACNPSTLGGSWIMRHAKRTTINTEDVKLLARRSNSLLKYITDKSEEIAQINLERKAQKK

SEQ ID NO: 4770 - protein, 2 aa, Artificial Sequence
  Synthetic polypeptide
CA

SEQ ID NO: 4771 - protein, 2 aa, Artificial Sequence
  Synthetic polypeptide
CA

SEQ ID NO: 4772 - protein, 2 aa, Artificial Sequence
  Synthetic polypeptide
CA

SEQ ID NO: 4773 - protein, 2 aa, Artificial Sequence
  Synthetic polypeptide
CA

SEQ ID NO: 4774 - protein, 2 aa, Artificial Sequence
  Synthetic polypeptide
CA

SEQ ID NO: 4775 - protein, 2 aa, Artificial Sequence
  Synthetic polypeptide
CA

SEQ ID NO: 4776 - protein, 2 aa, Artificial Sequence
  Synthetic polypeptide
CA

SEQ ID NO: 4777 - protein, 2 aa, Artificial Sequence
  Synthetic polypeptide
CA

SEQ ID NO: 4778 - protein, 131 aa, Artificial Sequence
  Synthetic polypeptide
SQHWEAEAGGSLEVCSSRPAWPTWQSPISTENTRKLARRDVHKSPVLDTKPKETGGILGEGTPKESSTESSQSAKPVSGQDTSGNTEGSPAAEKAQLKSEAAGSPDQGSTYSPARGVAGPRGQDPVSSPCG

SEQ ID NO: 4779 - protein, 131 aa, Artificial Sequence; identical to SEQ ID NO: 4778
  Synthetic polypeptide

SEQ ID NO: 4780 - protein, 131 aa, Artificial Sequence; identical to SEQ ID NO: 4778
  Synthetic polypeptide

SEQ ID NO: 4781 - protein, 131 aa, Artificial Sequence; identical to SEQ ID NO: 4778
  Synthetic polypeptide

SEQ ID NO: 4782 - protein, 131 aa, Artificial Sequence; identical to SEQ ID NO: 4778
  Synthetic polypeptide

SEQ ID NO: 4783 - protein, 131 aa, Artificial Sequence; identical to SEQ ID NO: 4778
  Synthetic polypeptide

SEQ ID NO: 4784 - protein, 131 aa, Artificial Sequence; identical to SEQ ID NO: 4778
  Synthetic polypeptide

SEQ ID NO: 4785 - protein, 131 aa, Artificial Sequence; identical to SEQ ID NO: 4778
  Synthetic polypeptide

SEQ ID NO: 4786 - protein, 95 aa, Artificial Sequence
  Synthetic polypeptide
PGVMCINHLFWIQSPRRQVESWGKAHRKKAVLKAASRPSLSLAKTHQGIQKVHPQRKRPSSSLKPQAAQTKAAHTAPQEVWLDHVDRIRSAAPVA

SEQ ID NO: 4787 - protein, 95 aa, Artificial Sequence; identical to SEQ ID NO: 4786
  Synthetic polypeptide

SEQ ID NO: 4788 - protein, 95 aa, Artificial Sequence; identical to SEQ ID NO: 4786
  Synthetic polypeptide

SEQ ID NO: 4789 - protein, 95 aa, Artificial Sequence; identical to SEQ ID NO: 4786
  Synthetic polypeptide

SEQ ID NO: 4790 - protein, 95 aa, Artificial Sequence; identical to SEQ ID NO: 4786
  Synthetic polypeptide

SEQ ID NO: 4791 - protein, 95 aa, Artificial Sequence; identical to SEQ ID NO: 4786
  Synthetic polypeptide

SEQ ID NO: 4792 - protein, 95 aa, Artificial Sequence; identical to SEQ ID NO: 4786
  Synthetic polypeptide

SEQ ID NO: 4793 - protein, 95 aa, Artificial Sequence; identical to SEQ ID NO: 4786
  Synthetic polypeptide

SEQ ID NO: 4794 - protein, 62 aa, Artificial Sequence
  Synthetic polypeptide
KYKKISQAWWCMPVIPAIREAESEYHYEYTACDSTGSRWRVAVPHTPGLCTSLPDPIKGTEC

SEQ ID NO: 4795 - protein, 48 aa, Artificial Sequence
  Synthetic polypeptide
SQLFGRLSLSTTMSTRRVTARVPGGGSPCRIPRACAPACLTPSRAPSA

SEQ ID NO: 4796 - protein, 176 aa, Artificial Sequence
  Synthetic polypeptide
KYKKISQAWWCMPVIPAIREAESEYHYEYTACDSTGSRWRVAVPHTPGLCTSLPDPIKGTECSFSCNAGEFLDMKDQSCKPCAEGRYSLGTGIRFDEWDELPHGFASLSANMELDDSAAESTGNCTSSKWVPRGDYIASNTDECTATLMYAVNLKQSGTVNFEYYYPDSSIIFEFF

SEQ ID NO: 4797 - protein, 59 aa, Artificial Sequence
  Synthetic polypeptide
SQLFGRLSLSTTMSTRRVTARVPGGGSPCRIPRACAPACLTPSRAPSAPSPATPGSFWI

SEQ ID NO: 4798 - protein, 59 aa, Artificial Sequence; identical to SEQ ID NO: 4797
  Synthetic polypeptide

SEQ ID NO: 4799 - protein, 59 aa, Artificial Sequence; identical to SEQ ID NO: 4797
  Synthetic polypeptide

SEQ ID NO: 4800 - protein, 59 aa, Artificial Sequence; identical to SEQ ID NO: 4797
  Synthetic polypeptide

SEQ ID NO: 4801 - protein, 59 aa, Artificial Sequence; identical to SEQ ID NO: 4797
  Synthetic polypeptide

SEQ ID NO: 4802 - protein, 59 aa, Artificial Sequence; identical to SEQ ID NO: 4797
  Synthetic polypeptide

SEQ ID NO: 4803 - protein, 123 aa, Artificial Sequence
  Synthetic polypeptide
KYKKISQAWWCMPVIPAIREAESEYHYEYTACDSTGSRWRVAVPHTPGLCTSLPDPIKGTECSFSCNAGEFLDMKDQSCKPCAEGRYSLGTGIRFDEWDELPHGFASLSANMELDDSAAESTG

SEQ ID NO: 4804 - protein, 126 aa, Artificial Sequence
  Synthetic polypeptide
KYKKISQAWWCMPVIPAIREAESEYHYEYTACDSTGSRWRVAVPHTPGLCTSLPDPIKGTECSFSCNAGEFLDMKDQSCKPCAEGRYSLGTGIRFDEWDELPHGFASLSANMELDDSAAESTGNCT

SEQ ID NO: 4805 - protein, 984 aa, Artificial Sequence
  Synthetic polypeptide
KYKKISQAWWCMPVIPAIREAESEYHYEYTACDSTGSRWRVAVPHTPGLCTSLPDPIKGTECSFSCNAGEFLDMKDQSCKPCAEGRYSLGTGIRFDEWDELPHGFASLSANMELDDSAAESTGNCTSSKWVPRGDYIASNTDECTATLMYAVNLKQSGTVNFEYYYPDSSIIFEFFVQNDQCQPNADDSRWMKTTEKGWEFHSVELNRGNNVLYWRTTAFSVWTKVPKPVLVRNIAITGVAYTSECFPCKPGTYADKQGSSFCKLCPANSYSNKGETSCHQCDPDKYSEKGSSSCNVRPACTDKDYFYTHTACDANGETQLMYKWAKPKICSEDLEGAVKLPASGVKTHCPPCNPGFFKTNNSTCQPCPYGSYSNGSDCTRCPAGTEPAVGFEYKWWNTLPTNMETTVLSGINFEYKGMTGWEVAGDHIYTAAGASDNDFMILTLVVPGFRPPQSVMADTENKEVARITFVFETLCSVNCELYFMVGVNSRTNTPVETWKGSKGKQSYTYIIEENTTTSFTWAFQRTTFHEASRKYTNDVAKIYSINVTNVMNGVASYCRPCALEASDVGSSCTSCPAGYYIDRDSGTCHSCPTNTILKAHQPYGVQACVPCGPGTKNNKIHSLCYNDCTFSRNTPTRTFNYNFSALANTVTLAGGPSFTSKGLKYFHHFTLSLCGNQGRKMSVCTDNVTDLRIPEGESGFSKSITAYVCQAVIIPPEVTGYKAGVSSQPVSLADRLIGVTTDMTLDGITSPAELFHLESLGIPDVIFFYRSNDVTQSCSSGRSTTIRVRCSPQKTVPGSLLLPGTCSDGTCDGCNFHFLWESAAACPLCSVADYHAIVSSCVAGIQKTTYVWREPKLCSGGISLPEQRVTICKTIDFWLKVGISAGTCTAILLTVLTCYFWKKNQKLEYKYSKLVMNATLKDCDLPAADSCAIMEGEDVEDDLIFTSKKSLFGKIKSFTSKRTPDGFDSVPLKTSSGGLDMDL

SEQ ID NO: 4806 - protein, 872 aa, Artificial Sequence
  Synthetic polypeptide
KYKKISQAWWCMPVIPAIREAESEYHYEYTACDSTGSRWRVAVPHTPGLCTSLPDPIKGTECSFSCNAGEFLDMKDQSCKPCAEGRYSLGTGIRFDEWDELPHGFASLSANMELDDSAAESTGNCTSSKWVPRGDYIASNTDECTATLMYAVNLKQSGTVNFEYYYPDSSIIFEFFVQNDQCQPNADDSRWMKTTEKGWEFHSVELNRGNNVLYWRTTAFSVWTKVPKPVLVRNIAITEKGSSSCNVRPACTDKDYFYTHTACDANGETQLMYKWAKPKICSEDLEGAVKLPASGVKTHCPPCNPGFFKTNNSTCQPCPYGSYSNGSDCTRCPAGTEPAVGFEYKWWNTLPTNMETTVLSGINFEYKGMTGWEVAGDHIYTAAGASDNDFMILTLVVPGFRPPQSVMADTENKEVARITFVFETLCSVNCELYFMVGVNSRTNTPVETWKGSKGKQSYTYIIEENTTTSFTWAFQRTTFHEASRKYTNDVAKIYSINVTNVMNGVASYCRPCALEASDVGSSCTSCPAGYYIDRDSGTCHSCPTNTILKAHQPYGVQACVPCGPGTKNNKIHSLCYNDCTFSRNTPTRTFNYNFSALANTVTLAGGPSFTSKGLKYFHHFTLSLCGNQGRKMSVCTDNVTDLRIPEGESGFSKSITAYVCQAVIIPPEVTGYKAGVSSQPVSLADRLIGVTTDMTLDGITSPAELFHLESLGIPDVIFFYRSNDVTQSCSSGRSTTIRVRCSPQKTVPGSLLLPGTCSDGTCDGCNFHFLWESAAACPLCSVADYHAIVSSCVAGIQKTTYVWREPKLCSGGISLPEQRVTICKTIDFWLKVGISAGTCTAILLTVLTCYFWKKNQKLEYKYSKLVMNATLK

SEQ ID NO: 4807 - protein, 897 aa, Artificial Sequence
  Synthetic polypeptide
KYKKISQAWWCMPVIPAIREAESEYHYEYTACDSTGSRWRVAVPHTPGLCTSLPDPIKGTECSFSCNAGEFLDMKDQSCKPCAEGRYSLGTGIRFDEWDELPHGFASLSANMELDDSAAESTGNCTSSKWVPRGDYIASNTDECTATLMYAVNLKQSGTVNFEYYYPDSSIIFEFFVQNDQCQPNADDSRWMKTTEKGWEFHSVELNRGNNVLYWRTTAFSVWTKVPKPVLTQLMYKWAKPKICSEDLEGAVKLPASGVKTHCPPCNPGFFKTNNSTCQPCPYGSYSNGSDCTRCPAGTEPAVGFEYKWWNTLPTNMETTVLSGINFEYKGMTGWEVAGDHIYTAAGASDNDFMILTLVVPGFRPPQSVMADTENKEVARITFVFETLCSVNCELYFMVGVNSRTNTPVETWKGSKGKQSYTYIIEENTTTSFTWAFQRTTFHEASRKYTNDVAKIYSINVTNVMNGVASYCRPCALEASDVGSSCTSCPAGYYIDRDSGTCHSCPTNTILKAHQPYGVQACVPCGPGTKNNKIHSLCYNDCTFSRNTPTRTFNYNFSALANTVTLAGGPSFTSKGLKYFHHFTLSLCGNQGRKMSVCTDNVTDLRIPEGESGFSKSITAYVCQAVIIPPEVTGYKAGVSSQPVSLADRLIGVTTDMTLDGITSPAELFHLESLGIPDVIFFYRSNDVTQSCSSGRSTTIRVRCSPQKTVPGSLLLPGTCSDGTCDGCNFHFLWESAAACPLCSVADYHAIVSSCVAGIQKTTYVWREPKLCSGGISLPEQRVTICKTIDFWLKVGISAGTCTAILLTVLTCYFWKKNQKLEYKYSKLVMNATLKDCDLPAADSCAIMEGEDVEDDLIFTSKKSLFGKIKSFTSKRTPDGFDSVPLKTSSGGLDMDL

SEQ ID NO: 4808 - protein, 718 aa, Artificial Sequence
  Synthetic polypeptide
GRERWLTPVIPALWEAKAGGSREKGSSSCNVRPACTDKDYFYTHTACDANGETQLMYKWAKPKICSEDLEGAVKLPASGVKTHCPPCNPGFFKTNNSTCQPCPYGSYSNGSDCTRCPAGTEPAVGFEYKWWNTLPTNMETTVLSGINFEYKGMTGWEVAGDHIYTAAGASDNDFMILTLVVPGFRPPQSVMADTENKEVARITFVFETLCSVNCELYFMVGVNSRTNTPVETWKGSKGKQSYTYIIEENTTTSFTWAFQRTTFHEASRKYTNDVAKIYSINVTNVMNGVASYCRPCALEASDVGSSCTSCPAGYYIDRDSGTCHSCPTNTILKAHQPYGVQACVPCGPGTKNNKIHSLCYNDCTFSRNTPTRTFNYNFSALANTVTLAGGPSFTSKGLKYFHHFTLSLCGNQGRKMSVCTDNVTDLRIPEGESGFSKSITAYVCQAVIIPPEVTGYKAGVSSQPVSLADRLIGVTTDMTLDGITSPAELFHLESLGIPDVIFFYRSNDVTQSCSSGRSTTIRVRCSPQKTVPGSLLLPGTCSDGTCDGCNFHFLWESAAACPLCSVADYHAIVSSCVAGIQKTTYVWREPKLCSGGISLPEQRVTICKTIDFWLKVGISAGTCTAILLTVLTCYFWKKNQKLEYKYSKLVMNATLKDCDLPAADSCAIMEGEDVEDDLIFTSKKSLFGKIKSFTSKRTPDGFDSVPLKTSSGGLDMDL

SEQ ID NO: 4809 - protein, 63 aa, Artificial Sequence
  Synthetic polypeptide
SQHFGRPRQADHERKDLLPVTCAQLAQTKIISTHTRPAMPTERHNSCTNGPSRKSVARTLRGQ

SEQ ID NO: 4810 - protein, 63 aa, Artificial Sequence; identical to SEQ ID NO: 4809
  Synthetic polypeptide

SEQ ID NO: 4811 - protein, 28 aa, Artificial Sequence
  Synthetic polypeptide
PGAVAHTCNPSTLGGQGRRITRERIFFL

SEQ ID NO: 4812 - protein, 28 aa, Artificial Sequence
  Synthetic polypeptide
PGAVAHTCNPSTLGGQGRRITRERIFFL

SEQ ID NO: 4813 - protein, 656 aa, Artificial Sequence
  Synthetic polypeptide
GRERWLTPVIPALWEAKAGGSREKGSSSCNVRPACTDKDYFYTHTACDANGETQLMYKWAKPKICSEDLEGAVKLPASGVKTHCPPCNPGFFKTNNSTCQPCPYGSYSNGSDCTRCPAGTEPAVGFEYKWWNTLPTNMETTVLSGINFEYKGMTGWEVAGDHIYTAAGASDNDFMILTLVVPGFRPPQSVMADTENKEVARITFVFETLCSVNCELYFMVGVNSRTNTPVETWKGSKGKQSYTYIIEENTTTSFTWAFQRTTFHEASRKYTNDVAKIYSINVTNVMNGVASYCRPCALEASDVGSSCTSCPAGYYIDRDSGTCHSCPTNTILKAHQPYGVQACVPCGPGTKNNKIHSLCYNDCTFSRNTPTRTFNYNFSALANTVTLAGGPSFTSKGLKYFHHFTLSLCGNQGRKMSVCTDNVTDLRIPEGESGFSKSITAYVCQAVIIPPEVTGYKAGVSSQPVSLADRLIGVTTDMTLDGITSPAELFHLESLGIPDVIFFYRSNDVTQSCSSGRSTTIRVRCSPQKTVPGSLLLPGTCSDGTCDGCNFHFLWESAAACPLCSVADYHAIVSSCVAGIQKTTYVWREPKLCSGGISLPEQRVTICKTIDFWLKVGISAGTCTAILLTVLTCYFWKKNQKLEYKYSKLVMNATLK

SEQ ID NO: 4814 - protein, 46 aa, Artificial Sequence
  Synthetic polypeptide
GFGVGLLGSVLSSSRRCGWVMLLNLWVCFLISKAGARHPASGQARF

SEQ ID NO: 4815 - protein, 45 aa, Artificial Sequence
  Synthetic polypeptide
ALESGCWVLFCLLAAGVAGSCCLTYGSAFSSLKLEPDILLRAKQD

SEQ ID NO: 4816 - protein, 51 aa, Artificial Sequence
  Synthetic polypeptide
GFGVGLLGSVLSSSRRCGWVMLLNLWVCFLISKAGARHPASGQARFPEDGQ

SEQ ID NO: 4817 - protein, 51 aa, Artificial Sequence; identical to SEQ ID NO: 4816
  Synthetic polypeptide

SEQ ID NO: 4818 - protein, 51 aa, Artificial Sequence; identical to SEQ ID NO: 4816
  Synthetic polypeptide

SEQ ID NO: 4819 - protein, 51 aa, Artificial Sequence; identical to SEQ ID NO: 4816
  Synthetic polypeptide

SEQ ID NO: 4820 - protein, 51 aa, Artificial Sequence; identical to SEQ ID NO: 4816
  Synthetic polypeptide

SEQ ID NO: 4821 - protein, 51 aa, Artificial Sequence; identical to SEQ ID NO: 4816
  Synthetic polypeptide

SEQ ID NO: 4822 - protein, 51 aa, Artificial Sequence; identical to SEQ ID NO: 4816
  Synthetic polypeptide

SEQ ID NO: 4823 - protein, 51 aa, Artificial Sequence; identical to SEQ ID NO: 4816
  Synthetic polypeptide

SEQ ID NO: 4824 - protein, 51 aa, Artificial Sequence; identical to SEQ ID NO: 4816
  Synthetic polypeptide

SEQ ID NO: 4825 - protein, 740 aa, Artificial Sequence
  Synthetic polypeptide
ALESGCWVLFCLLAAGVAGSCCLTYGSAFSSLKLEPDILLRAKQDFLKTDSDSDLQLYKEQGEGQGDRSLRERDVLEREFQRVTISGEEKCGVPFTDLLDAAKSVVRALFIREKYMALSLQSFCPTTRRYLQQLAEKPLETRTYEQGPDTPVSADAPVHPPALEQHPYEHCEPSTMPGDLGLGLRMVRGVVHVYTRREPDEHCSEVELPYPDLQEFVADVNVLMALIINGPIKSFCYRRLQYLSSKFQMHVLLNEMKELAAQKKVPHRDFYNIRKVDTHIHASSCMNQKHLLRFIKRAMKRHLEEIVHVEQGREQTLREVFESMNLTAYDLSVDTLDVHADRNTFHRFDKFNAKYNPIGESVLREIFIKTDNRVSGKYFAHIIKEVMSDLEESKYQNAELRLSIYGRSRDEWDKLARWAVMHRVHSPNVRWLVQVPRLFDVYRTKGQLANFQEMLENIFLPLFEATVHPASHPELHLFLEHVDGFDSVDDESKPENHVFNLESPLPEAWVEEDNPPYAYYLYYTFANMAMLNHLRRQRGFHTFVLRPHCGEAGPIHHLVSAFMLAENISHGLLLRKAPVLQYLYYLAQIGIAMSPLSNNSLFLSYHRNPLPEYLSRGLMVSLSTDDPLQFHFTKEPLMEEYSIATQVWKLSSCDMCELARNSVLMSGFSHKVKSHWLGPNYTKEGPEGNDIRRTNVPDIRVGYRYETLCQELALITQAVQSEMLETIPEEAGITMSPGPQ

SEQ ID NO: 4826 - protein, 740 aa, Artificial Sequence; identical to SEQ ID NO: 4825
  Synthetic polypeptide

SEQ ID NO: 4827 - protein, 740 aa, Artificial Sequence; identical to SEQ ID NO: 4825
  Synthetic polypeptide

SEQ ID NO: 4828 - protein, 740 aa, Artificial Sequence; identical to SEQ ID NO: 4825
  Synthetic polypeptide

SEQ ID NO: 4829 - protein, 740 aa, Artificial Sequence; identical to SEQ ID NO: 4825
  Synthetic polypeptide

SEQ ID NO: 4830 - protein, 740 aa, Artificial Sequence; identical to SEQ ID NO: 4825
  Synthetic polypeptide

SEQ ID NO: 4831 - protein, 66 aa, Artificial Sequence
  Synthetic polypeptide
ALESGCWVLFCLLAAGVAGSCCLTYGSAFSSLKLEPDILLRAKQDFLKTDSDSDLQLYKEQGEGQG

SEQ ID NO: 4832 - protein, 751 aa, Artificial Sequence
  Synthetic polypeptide
ALESGCWVLFCLLAAGVAGSCCLTYGSAFSSLKLEPDILLRAKQDFLKTDSDSDLQLYKEQGEGQGDRSLRERDVLEREFQRVTISGEEKCGVPFTDLLDAAKSVVRALFIREKYMALSLQSFCPTTRRYLQQLAEKPLETRTYEQGPDTPVSADAPVHPPALEQHPYEHCEPSTMPGDLGLGLRMVRGVVHVYTRREPDEHCSEVELPYPDLQEFVADVNVLMALIINGPIKSFCYRRLQYLSSKFQMHVLLNEMKELAAQKKVPHRDFYNIRKVDTHIHASSCMNQKHLLRFIKRAMKRHLEEIVHVEQGREQTLREVFESMNLTAYDLSVDTLDVHADRNTFHRFDKFNAKYNPIGESVLREIFIKTDNRVSGKYFAHIIKEVMSDLEESKYQNAELRLSIYGRSRDEWDKLARWAVMHRVHSPNVRWLVQVPRLFDVYRTKGQLANFQEMLENIFLPLFEATVHPASHPELHLFLEHVDGFDSVDDESKPENHVFNLESPLPEAWVEEDNPPYAYYLYYTFANMAMLNHLRRQRGFHTFVLRPHCGEAGPIHHLVSAFMLAENISHGLLLRKAPVLQYLYYLAQIGIAMSPLSNNSLFLSYHRNPLPEYLSRGLMVSLSTDDPLQFHFTKVRAQQAARRAGEPLMEEYSIATQVWKLSSCDMCELARNSVLMSGFSHKVKSHWLGPNYTKEGPEGNDIRRTNVPDIRVGYRYETLCQELALITQAVQSEMLETIPEEAGITMSPGPQ

SEQ ID NO: 4833 - protein, 89 aa, Artificial Sequence
  Synthetic polypeptide
ALESGCWVLFCLLAAGVAGSCCLTYGSAFSSLKLEPDILLRAKQDFLKTDSDSDLQLYKEQGEGQGDRSLRERDVLEREFQRVTISGEE

SEQ ID NO: 4834 - protein, 51 aa, Artificial Sequence
  Synthetic polypeptide
GRGQNWRETEPGYTAVLFPLLGLGEDLCLHEVQPLPPKTCVLKDGCLGQQV

SEQ ID NO: 4835 - protein, 51 aa, Artificial Sequence; identical to SEQ ID NO: 4834
  Synthetic polypeptide

SEQ ID NO: 4836 - protein, 51 aa, Artificial Sequence; identical to SEQ ID NO: 4834
  Synthetic polypeptide

SEQ ID NO: 4837 - protein, 51 aa, Artificial Sequence; identical to SEQ ID NO: 4834
  Synthetic polypeptide

SEQ ID NO: 4838 - protein, 29 aa, Artificial Sequence
  Synthetic polypeptide
KRPELERDRTRLHCSSIPLTRAWRRSLPT

SEQ ID NO: 4839 - protein, 29 aa, Artificial Sequence
  Synthetic polypeptide
KRPELERDRTRLHCSSIPLTRAWRRSLPT

SEQ ID NO: 4840 - protein, 29 aa, Artificial Sequence
  Synthetic polypeptide
KRPELERDRTRLHCSSIPLTRAWRRSLPT

SEQ ID NO: 4841 - protein, 29 aa, Artificial Sequence
  Synthetic polypeptide
KRPELERDRTRLHCSSIPLTRAWRRSLPT

SEQ ID NO: 4842 - protein, 13 aa, Artificial Sequence
  Synthetic polypeptide
PKGVTSHWVTLVQ

SEQ ID NO: 4843 - protein, 13 aa, Artificial Sequence
  Synthetic polypeptide
PKGVTSHWVTLVQ

SEQ ID NO: 4844 - protein, 13 aa, Artificial Sequence
  Synthetic polypeptide
PKGVTSHWVTLVQ

SEQ ID NO: 4845 - protein, 225 aa, Artificial Sequence
  Synthetic polypeptide
PLGDTGTVAPEKCLFGAMLNIAAVLCIATIYVRYKQVHALSPEENVIIKLNKAGLVLGILSCLGLSIVANFQKTTLFAAHVSGAVLTFGMGSLYMFVQTILSYQMQPKIHGKQVFWIRLLLVIWCGVSALSMLTCSSVLHSGNFGTDLEQKLHWNPEDKGYVLHMITTAAEWSMSFSFFGFFLTYIRDFQKISLRVEANLHGLTLYDTAPCPINNERTRLLSRDI

SEQ ID NO: 4846 - protein, 225 aa, Artificial Sequence; identical to SEQ ID NO: 4845
  Synthetic polypeptide

SEQ ID NO: 4847 - protein, 25 aa, Artificial Sequence
  Synthetic polypeptide
PLGDTGTVAPEKCLFGAMLNIAAVL

SEQ ID NO: 4848 - protein, 36 aa, Artificial Sequence
  Synthetic polypeptide
TSDLHHIVLGTWKLTQGMVYKARAFWGGHGVDIGHG

SEQ ID NO: 4849 - protein, 340 aa, Artificial Sequence
  Synthetic polypeptide
LKAWFIRREHFGGAMVWTLDMDDVRGTFCGTGPFPLVYVLNDILVRAEFSSTSLPQFWLSSAVNSSSTDPERLAVTTAWTTDSKILPPGGEAGVTEIHGKCENMTITPRGTTVTPTKETVSLGKHTVALGEKTEITGAMTMTSVGHQSMTPGEKALTPVGHQSVTTGQKTLTSVGYQSVTPGEKTLTPVGHQSVTPVSHQSVSPGGTTMTPVHFQTETLRQNTVAPRRKAVAREKVTVPSRNISVTPEGQTMPLRGENLTSEVGTHPRMGNLGLQMEAENRMMLSSSPVIQLPEQTPLAFDNRFVPIYGNHSSVNSVTPQTSPLSLKKEIPENSAVDEEA

SEQ ID NO: 4850 - protein, 17 aa, Artificial Sequence
  Synthetic polypeptide
PSSHCPWDMETDSRHGL

SEQ ID NO: 4851 - protein, 17 aa, Artificial Sequence
  Synthetic polypeptide
PSSHCPWDMETDSRHGL

SEQ ID NO: 4852 - protein, 20 aa, Artificial Sequence
  Synthetic polypeptide
TSDLHHIVLGTWKLTQGMVY

SEQ ID NO: 4853 - protein, 6 aa, Artificial Sequence
  Synthetic polypeptide
LKAWFI

SEQ ID NO: 4854 - protein, 14 aa, Artificial Sequence
  Synthetic polypeptide
IGDPMDSEHKQFAL

SEQ ID NO: 4855 - protein, 655 aa, Artificial Sequence
  Synthetic polypeptide
PRPLTQDPKCAPLKPLSSLLTDRSGIQWILNTSSLLCDCHLKWLLQWLVDNNFQHSVNVSCAHPEWLAGQSILNVDLKDFVCDDFLKPQIRTHPETIIALRGMNVTLTCTAVSSSDSPMSTVWRKDSEILYDVDTENFVRYWQQAGEALEYTSILHLFNVNFTDEGKYQCIVTNHFGSNYSQKAKLTVNEMPSFLKTPMDLTIRTGAMARLECAAEGHPAPQISWQKDGGTDFPAARERRMHVMPEDDVFFIANVKIEDMGIYSCMAQNTAGGLSANASLTVLETPSFIRPLEDKTVTRGETAVLQCIAGGSPAPRLNWTKDDGPLLVTERHFFAAANQLLIIVDAGLEDAGKYTCIMSNTLGTERGHIYLNVISSPNCDSSQSSIGHEDDGWTTVGIVIIVVVCCVVGTSLIWVIVIYHMRRKNEDYSITNTEELNLPADIPSYLSSQGTLSEPQEGYSNSEAGSHQQLMPPANGYIHKGTDGGTGTRVICSDCYDNANIYSRTREYCPYTYIAEEDVLDQTLSSLMVQMPKETYLVHPPQDTTALESLIPSANREPSAFPTNHERISEKKLPSTQMSGETLQRPVWNINRELGLPHPPFSQQPVHESPQLHQNEGLAGREPDCSASSMSCHRLQDHAFDFSRTRNIQDGSEGT

SEQ ID NO: 4856 - protein, 9 aa, Artificial Sequence
  Synthetic polypeptide
LIDRGSNGF

SEQ ID NO: 4857 - protein, 629 aa, Artificial Sequence
  Synthetic polypeptide
SWILNTSSLLCDCHLKWLLQWLVDNNFQHSVNVSCAHPEWLAGQSILNVDLKDFVCDDFLKPQIRTHPETIIALRGMNVTLTCTAVSSSDSPMSTVWRKDSEILYDVDTENFVRYWQQAGEALEYTSILHLFNVNFTDEGKYQCIVTNHFGSNYSQKAKLTVNEMPSFLKTPMDLTIRTGAMARLECAAEGHPAPQISWQKDGGTDFPAARERRMHVMPEDDVFFIANVKIEDMGIYSCMAQNTAGGLSANASLTVLETPSFIRPLEDKTVTRGETAVLQCIAGGSPAPRLNWTKDDGPLLVTERHFFAAANQLLIIVDAGLEDAGKYTCIMSNTLGTERGHIYLNVISSPNCDSSQSSIGHEDDGWTTVGIVIIVVVCCVVGTSLIWVIVIYHMRRKNEDYSITNTEELNLPADIPSYLSSQGTLSEPQEGYSNSEAGSHQQLMPPANGYIHKGTDGGTGTRVICSDCYDNANIYSRTREYCPYTYIAEEDVLDQTLSSLMVQMPKETYLVHPPQDTTALESLIPSANREPSAFPTNHERISEKKLPSTQMSGETLQRPVWNINRELGLPHPPFSQQPVHESPQLHQNEGLAGREPDCSASSMSCHRLQDHAFDFSRTRNIQDGSEGT

SEQ ID NO: 4858 - protein, 17 aa, Artificial Sequence
  Synthetic polypeptide
VRLTNHCSGQTSVEAGF

SEQ ID NO: 4859 - protein, 21 aa, Artificial Sequence
  Synthetic polypeptide
RTIAPDKHLLKLDSEHKQFAL

SEQ ID NO: 4860 - protein, 2 aa, Artificial Sequence
  Synthetic polypeptide
KG

SEQ ID NO: 4861 - protein, 2 aa, Artificial Sequence
  Synthetic polypeptide
KG

SEQ ID NO: 4862 - protein, 2 aa, Artificial Sequence
  Synthetic polypeptide
KG

SEQ ID NO: 4863 - protein, 2 aa, Artificial Sequence
  Synthetic polypeptide
KG

SEQ ID NO: 4864 - protein, 498 aa, Artificial Sequence
  Synthetic polypeptide
GKQLQALRAAQGFSTQGMIINVMSMNQPNRQKDHIMFSLFEKDDNWGETTTAITGTSEHSISQEDIARISKDMEDSVGLDCKRYLGLTVASFLGLLVFLTPIAFILLPPILWRDELEPCGTICEGLFISMAFKLLILLIGTWALFFRKRRADMPRVFVFRALLLVLIFLFVVSYWLFYGVRILDSRDRNYQGIVQYAVSLVDALLFIHYLAIVLLELRQLQPMFTLQVVRSTDGESRFYSLGHLSIQRAALVVLENYYKDFTIYNPNLLTASKFRAAKHMAGLKVYNVDGPSNNATGQSRAMIAAAARRRDSSHNELYYEEAEHERRVKKRKARLVVAVEEAFIHIQRLQAEEQQKAPGEVMDPREAAQAIFPSMARALQKYLRITRQQNYHSMESILQHLAFCITNGMTPKAFLERYLSAGPTLQYDKDRWLSTQWRLVSDEAVTNGLRDGIVFVLKCLDFSLVVNVKKIPFIILSEEFIDPKSHKFVLRLQSETSV

SEQ ID NO: 4865 - protein, 498 aa, Artificial Sequence; identical to SEQ ID NO: 4864
  Synthetic polypeptide

SEQ ID NO: 4866 - protein, 498 aa, Artificial Sequence; identical to SEQ ID NO: 4864
  Synthetic polypeptide

SEQ ID NO: 4867 - protein, 498 aa, Artificial Sequence; identical to SEQ ID NO: 4864
  Synthetic polypeptide

SEQ ID NO: 4868 - protein, 70 aa, Artificial Sequence
  Synthetic polypeptide
ISQTDRKITLCFLCLKRMTTGERPPRPSQAPRSTAYPKRTLPGSARTWRTAWGWIANATWASPSPLFLDF

SEQ ID NO: 4869 - protein, 70 aa, Artificial Sequence; identical to SEQ ID NO: 4868
  Synthetic polypeptide

SEQ ID NO: 4870 - protein, 70 aa, Artificial Sequence; identical to SEQ ID NO: 4868
  Synthetic polypeptide

SEQ ID NO: 4871 - protein, 70 aa, Artificial Sequence; identical to SEQ ID NO: 4868
  Synthetic polypeptide

SEQ ID NO: 4872 - protein, 31 aa, Artificial Sequence
  Synthetic polypeptide
FLHFHLRHRCVCSGEQPFLVLAGEADHQCCL

SEQ ID NO: 4873 - protein, 39 aa, Artificial Sequence
  Synthetic polypeptide
RRSQDGRIGTALVYSSQRERRRRWVISAFPSETQVCLQW

SEQ ID NO: 4874 - protein, 8 aa, Artificial Sequence
  Synthetic polypeptide
LLFAEGVW

SEQ ID NO: 4875 - protein, 54 aa, Artificial Sequence
  Synthetic polypeptide
NFLSTDTLLRGHARRKCSLEHFGFWIFRLGILNCSLPRACGESPHSDPGSSGGH

SEQ ID NO: 4876 - protein, 893 aa, Artificial Sequence
  Synthetic polypeptide
ALIRCSEVMLGGNARWSTLDFGFSDWESLTALCRGRVVRVPTATLVRVVGTELVIPCNVSDYDGPSEQNFDWSFSSLGSSFVELASTWEVGFPAQLYQERLQRGEILLRRTANDAVELHIKNVQPSDQGHYKCSTPSTDATVQGNYEDTVQVKVLADSLHVGPSARPPPSLSLREGEPFELRCTAASASPLHTHLALLWEVHRGPARRSVLALTHEGRFHPGLGYEQRYHSGDVRLDTVGSDAYRLSVSRALSADQGSYRCIVSEWIAEQGNWQEIQEKAVEVATVVIQPSVLRAAVPKNVSVAEGKELDLTCNITTDRADDVRPEVTWSFSRMPDSTLPGSRVLARLDRDSLVHSSPHVALSHVDARSYHLLVRDVSKENSGYYYCHVSLWAPGHNRSWHKVAEAVSSPAGVGVTWLEPDYQVYLNASKVPGFADDPTELACRVVDTKSGEANVRFTVSWYYRMNRRSDNVVTSELLAVMDGDWTLKYGERSKQRAQDGDFIFSKEHTDTFNFRIQRTTEEDRGNYYCVVSAWTKQRNNSWVKSKDVFSKPVNIFWALEDSVLVVKARQPKPFFAAGNTFEMTCKVSSKNIKSPRYSVLIMAEKPVGDLSSPNETKYIISLDQDSVVKLENWTDASRVDGVVLEKVQEDEFRYRMYQTQVSDAGLYRCMVTAWSPVRGSLWREAATSLSNPIEIDFQTSGPIFNASVHSDTPSVIRGDLIKLFCIITVEGAALDPDDMAFDVSWFAVHSFGLDKAPVLLSSLDRKGIVTTSRRDWKSDLSLERVSVLEFLLQVHGSEDQDFGNYYCSVTPWVKSPTGSWQKEAEIHSKPVFITVKMDVLNAFKYPLLIGVGLSTVIGLLSCLIGYCSSHWCCKKEVQETRRERRRLMSMEMD

SEQ ID NO: 4877 - protein, 16 aa, Artificial Sequence
  Synthetic polypeptide
FPNVADIRNHLGKTTF

SEQ ID NO: 4878 - protein, 16 aa, Artificial Sequence
  Synthetic polypeptide
FPNVADIRNHLGKTTF

SEQ ID NO: 4879 - protein, 16 aa, Artificial Sequence
  Synthetic polypeptide
FPNVADIRNHLGKTTF

SEQ ID NO: 4880 - protein, 16 aa, Artificial Sequence
  Synthetic polypeptide
FPNVADIRNHLGKTTF

SEQ ID NO: 4881 - protein, 24 aa, Artificial Sequence
  Synthetic polypeptide
SDSQMWLTSEITWERQPFSPHGGH

SEQ ID NO: 4882 - protein, 24 aa, Artificial Sequence
  Synthetic polypeptide
SDSQMWLTSEITWERQPFSPHGGH

SEQ ID NO: 4883 - protein, 24 aa, Artificial Sequence
  Synthetic polypeptide
SDSQMWLTSEITWERQPFSPHGGH

SEQ ID NO: 4884 - protein, 24 aa, Artificial Sequence
  Synthetic polypeptide
SDSQMWLTSEITWERQPFSPHGGH

SEQ ID NO: 4885 - protein, 160 aa, Artificial Sequence
  Synthetic polypeptide
HQKSPGKDNLLVLTVATKETEGFRRFKRSAQFFNYKIQALGLGEDWNVEKGTSAGGGQKVRLLKKALEKHADKEDLVILFADSYDVLFASGPRELLKKFRQARSQVVFSAEELIYPDRRLETKYPVVSDGKRFLGSGGFIGYAPNLSKLVAEWEGQDSDS

SEQ ID NO: 4886 - protein, 709 aa, Artificial Sequence
  Synthetic polypeptide
HQKSPGKDNLLVLTVATKETEGFRRFKRSAQFFNYKIQALGLGEDWNVEKGTSAGGGQKVRLLKKALEKHADKEDLVILFADSYDVLFASGPRELLKKFRQARSQVVFSAEELIYPDRRLETKYPVVSDGKRFLGSGGFIGYAPNLSKLVAEWEGQDSDSDQLFYTKIFLDPEKREQINITLDHRCRIFQNLDGALDEVVLKFEMGHVRARNLAYDTLPVLIHGNGPTKLQLNYLGNYIPRFWTFETGCTVCDEGLRSLKGIGDEALPTVLVGVFIEQPTPFVSLFFQRLLRLHYPQKHMRLFIHNHEQHHKAQVEEFLAQHGSEYQSVKLVGPEVRMANADARNMGADLCRQDRSCTYYFSVDADVALTEPNSLRLLIQQNKNVIAPLMTRHGRLWSNFWGALSADGYYARSEDYVDIVQGRRVGVWNVPYISNIYLIKGSALRGELQSSDLFHHSKLDPDMAFCANIRQQDVFMFLTNRHTLGHLLSLDSYRTTHLHNDLWEVFSNPEDWKEKYIHQNYTKALAGKLVETPCPDVYWFPIFTEVACDELVEEMEHFGQWSLGNNKDNRIQGGYENVPTIDIHMNQIGFEREWHKFLLEYIAPMTEKLYPGYYTRAQFDLAFVVRYKPDEQPSLMPHHDASTFTINIALNRVGVDYEGGGCRFLRYNCSIRAPRKGWTLMHPGRLTHYHEGLPTTRGTRYIAVSFVDP

SEQ ID NO: 4887 - protein, 709 aa, Artificial Sequence; identical to SEQ ID NO: 4886
  Synthetic polypeptide

SEQ ID NO: 4888 - protein, 265 aa, Artificial Sequence
  Synthetic polypeptide
HQKSPGKDNLLVLTVATKETEGFRRFKRSAQFFNYKIQALGLGEDWNVEKGTSAGGGQKVRLLKKALEKHADKEDLVILFADSYDVLFASGPRELLKKFRQARSQVVFSAEELIYPDRRLETKYPVVSDGKRFLGSGGFIGYAPNLSKLVAEWEGQDSDSDQLFYTKIFLDPEKREQINITLDHRCRIFQNLDGALVSPWGQGHLPGACYELTASVLTSELSVMPSFPAVVLQLNYLGNYIPRFWTFETGCTVCDEGLRSLKGIG

SEQ ID NO: 4889 - protein, 15 aa, Artificial Sequence
  Synthetic polypeptide
IVRTVKALLFALPPR

SEQ ID NO: 4890 - protein, 15 aa, Artificial Sequence
  Synthetic polypeptide
IVRTVKALLFALPPR

SEQ ID NO: 4891 - protein, 512 aa, Artificial Sequence
  Synthetic polypeptide
SLRGHDEHFKKQSRKYQTAMQIDSKDCEGLIVRSATKVTADVINAAEKLQVVGRAGTGVDNVDLEAATRKGILVMNTPNGNSLSAAELTCGMIMCLARQIPQATASMKDGKWERKKFMGTELNGKTLGILGLGRIGREVATRMQSFGMKTIGYDPIISPEVSASFGVQQLPLEEIWPLCDFITVHTPLLPSTTGLLNDNTFAQCKKGVRVVNCARGGIVDEGALLRALQSGQCAGAALDVFTEEPPRDRALVDHENVISCPHLGASTKEAQSRCGEEIAVQFVDMVKGKSLTGVVNAQALTSAFSPHTKPWIGLAEALGTLMRAWAGSPKGTIQVITQGTSLKNAGNCLSPAVIVGLLKEASKQADVNLVNAKLLVKEAGLNVTTSHSPAAPGEQGFGECLLAVALAGAPYQAVGLVQGTTPVLQGLNGAVFRPEVPLRRDLPLLLFRTQTSDPAMLPTMIGLLAEAGVRLLSYQTSLVSDGETWHVMGISSLLPSLEAWKQHVTEAFQFHF

SEQ ID NO: 4892 - protein, 512 aa, Artificial Sequence; identical to SEQ ID NO: 4891
  Synthetic polypeptide

SEQ ID NO: 4893 - protein, 374 aa, Artificial Sequence
  Synthetic polypeptide
FSNSRASGSGKTIGYDPIISPEVSASFGVQQLPLEEIWPLCDFITVHTPLLPSTTGLLNDNTFAQCKKGVRVVNCARGGIVDEGALLRALQSGQCAGAALDVFTEEPPRDRALVDHENVISCPHLGASTKEAQSRCGEEIAVQFVDMVKGKSLTGVVNAQALTSAFSPHTKPWIGLAEALGTLMRAWAGSPKGTIQVITQGTSLKNAGNCLSPAVIVGLLKEASKQADVNLVNAKLLVKEAGLNVTTSHSPAAPGEQGFGECLLAVALAGAPYQAVGLVQGTTPVLQGLNGAVFRPEVPLRRDLPLLLFRTQTSDPAMLPTMIGLLAEAGVRLLSYQTSLVSDGETWHVMGISSLLPSLEAWKQHVTEAFQFHF

SEQ ID NO: 4894 - protein, 374 aa, Artificial Sequence; identical to SEQ ID NO: 4893
  Synthetic polypeptide

SEQ ID NO: 4895 - protein, 14 aa, Artificial Sequence
  Synthetic polypeptide
SDSQTQEPRVLARL

SEQ ID NO: 4896 - protein, 14 aa, Artificial Sequence
  Synthetic polypeptide
SDSQTQEPRVLARL

SEQ ID NO: 4897 - protein, 16 aa, Artificial Sequence
  Synthetic polypeptide
VILKLKSLGFWQDYRV

SEQ ID NO: 4898 - protein, 16 aa, Artificial Sequence
  Synthetic polypeptide
VILKLKSLGFWQDYRV

SEQ ID NO: 4899 - protein, 4 aa, Artificial Sequence
  Synthetic polypeptide
GHRL

SEQ ID NO: 4900 - protein, 4 aa, Artificial Sequence
  Synthetic polypeptide
GHRL

SEQ ID NO: 4901 - protein, 22 aa, Artificial Sequence
  Synthetic polypeptide
SDSQTQEPRVLARCLRDTDYRV

SEQ ID NO: 4902 - protein, 22 aa, Artificial Sequence
  Synthetic polypeptide
SDSQTQEPRVLARCLRDTDYRV

SEQ ID NO: 4903 - protein, 381 aa, Artificial Sequence
  Synthetic polypeptide
VILKLKSLGFWQGALGTQTIGYDPIISPEVSASFGVQQLPLEEIWPLCDFITVHTPLLPSTTGLLNDNTFAQCKKGVRVVNCARGGIVDEGALLRALQSGQCAGAALDVFTEEPPRDRALVDHENVISCPHLGASTKEAQSRCGEEIAVQFVDMVKGKSLTGVVNAQALTSAFSPHTKPWIGLAEALGTLMRAWAGSPKGTIQVITQGTSLKNAGNCLSPAVIVGLLKEASKQADVNLVNAKLLVKEAGLNVTTSHSPAAPGEQGFGECLLAVALAGAPYQAVGLVQGTTPVLQGLNGAVFRPEVPLRRDLPLLLFRTQTSDPAMLPTMIGLLAEAGVRLLSYQTSLVSDGETWHVMGISSLLPSLEAWKQHVTEAFQFHF

SEQ ID NO: 4904 - protein, 381 aa, Artificial Sequence; identical to SEQ ID NO: 4903
  Synthetic polypeptide

SEQ ID NO: 4905 - protein, 14 aa, Artificial Sequence
  Synthetic polypeptide
SLAPHSLLEHYQMA

SEQ ID NO: 4906 - protein, 14 aa, Artificial Sequence
  Synthetic polypeptide
SLAPHSLLEHYQMA

SEQ ID NO: 4907 - protein, 14 aa, Artificial Sequence
  Synthetic polypeptide
SLAPHSLLEHYQMA

SEQ ID NO: 4908 - protein, 14 aa, Artificial Sequence
  Synthetic polypeptide
SLAPHSLLEHYQMA

SEQ ID NO: 4909 - protein, 37 aa, Artificial Sequence
  Synthetic polypeptide
AWHLIVCWNIIRWLREDDGQSASVRAGVHQVPCSHKW

SEQ ID NO: 4910 - protein, 37 aa, Artificial Sequence; identical to SEQ ID NO: 4909
  Synthetic polypeptide

SEQ ID NO: 4911 - protein, 37 aa, Artificial Sequence; identical to SEQ ID NO: 4909
  Synthetic polypeptide

SEQ ID NO: 4912 - protein, 37 aa, Artificial Sequence; identical to SEQ ID NO: 4909
  Synthetic polypeptide

SEQ ID NO: 4913 - protein, 145 aa, Artificial Sequence
  Synthetic polypeptide
LDMVAASTGQPEDDTETTGLEGGVAMPGAEDDVVTPGTSEDRYKSGLTTLVATSVNSVTGIRIEDLPTSESTVHAQEQSPSATASNVATSHSTEKVDGDTQTTVEKDGLSTVTLVGIIVGVLLAIGFIGAIIVVVMRKMSGRYSP

SEQ ID NO: 4914 - protein, 145 aa, Artificial Sequence; identical to SEQ ID NO: 4913
  Synthetic polypeptide

SEQ ID NO: 4915 - protein, 52 aa, Artificial Sequence
  Synthetic polypeptide
EQPGQHDEIPSLLKIQKISWTWWQPAQASQKMTLRLQVWKAALPCQVPKMMW

SEQ ID NO: 4916 - protein, 52 aa, Artificial Sequence; identical to SEQ ID NO: 4915
  Synthetic polypeptide

SEQ ID NO: 4917 - protein, 52 aa, Artificial Sequence; identical to SEQ ID NO: 4915
  Synthetic polypeptide

SEQ ID NO: 4918 - protein, 52 aa, Artificial Sequence; identical to SEQ ID NO: 4915
  Synthetic polypeptide

SEQ ID NO: 4919 - protein, 18 aa, Artificial Sequence
  Synthetic polypeptide
KYKKLAGHGGSQHRPARR

SEQ ID NO: 4920 - protein, 18 aa, Artificial Sequence
  Synthetic polypeptide
KYKKLAGHGGSQHRPARR

SEQ ID NO: 4921 - protein, 18 aa, Artificial Sequence
  Synthetic polypeptide
KYKKLAGHGGSQHRPARR

SEQ ID NO: 4922 - protein, 18 aa, Artificial Sequence
  Synthetic polypeptide
KYKKLAGHGGSQHRPARR

SEQ ID NO: 4923 - protein, 143 aa, Artificial Sequence
  Synthetic polypeptide
LDMVAASTGQPEDDTETTGLEGGVAMPGAEDDVVTPGTSEDRYKSGLTTLVATSVNSVTGIRIEDLPTSESTVHAQEQSPSATASNVATSHSTEKVDGDTQTTVEKDGLSTVTLVGIIVGVLLAIGFIGAIIVVVMRKMSGRP

SEQ ID NO: 4924 - protein, 144 aa, Artificial Sequence
  Synthetic polypeptide
LDMVAASTGQPEDDTETTGLEGGVAMPGAEDDVVTPGTSEDRYKSGLTTLVATSVNSVTGIRIEDLPTSESTVHAQEQSPSATASNVATSHSTEKVDGDTQTTVEKDGLSTVTLVGIIVGVLLAIGFIGAIIVVVMRKMSGRYS

SEQ ID NO: 4925 - protein, 29 aa, Artificial Sequence
  Synthetic polypeptide
SQTFGGGGRQIRGQEIETILANLPPALHG

SEQ ID NO: 4926 - protein, 275 aa, Artificial Sequence
  Synthetic polypeptide
PGVVAHGCNPRLSEAEAGRYEARRLRPSWLTCLLLFMDEADAFLRKRATEEISKDLRATLNAFLYHMGQHSNKFMLVLASNLPEQFDCAINSRIDVMVHFDLPQQEERERLVRLHFDNCVLKPATEGKRRLKLAQFDYGRKCSEVARLTEGMSGREIAQLAVSWQATAYASKDGVLTEAMMDACVQDAVQQYRQKMRWLKAEGPGRGVEHPLSGVQGETLTSWSLATDPSYPCLAGPCTFRICSWMGTGLCPGPLSPRMSCGGGRPFCPPGHPLL

SEQ ID NO: 4927 - protein, 21 aa, Artificial Sequence
  Synthetic polypeptide
LASCSSWMKQTPSFGSEPLRR

SEQ ID NO: 4928 - protein, 86 aa, Artificial Sequence
  Synthetic polypeptide
GQNKGFAVKEVVSRLGSDLHSLCGPGQGQASDLAGPLFLREYYNTSLQDSLQILPFLDLHTLFPGAGCCTPTLGTMPGVRQGLMPL

SEQ ID NO: 4929 - protein, 67 aa, Artificial Sequence
  Synthetic polypeptide
ALTFTHCVAQAKGKRLTSLGLCFSGNTTTHLCRILCKFCHSWISTPFFLERDAALQPWGLCLGSDRA

SEQ ID NO: 4930 - protein, 170 aa, Artificial Sequence
  Synthetic polypeptide
PRWAFVSQGILQHIFAGFFANSAIPGSPHPFSWSGMLHSNPGDYAWGQTGLDAIVTQLLGQLENTGPPPADKEKITSLPTVTVTQEQVDMGLECPVCKEDYTVEEEVRQLPCNHFFHSSCIVPWLELHDTCPVCRKSLNGEDSTRQSQSTEASASNRFSNDSQLHDRWTF

SEQ ID NO: 4931 - protein, 42 aa, Artificial Sequence
  Synthetic polypeptide
SQHFGRPRSEFQRTGDLPACARGQCGHPGQPRGGHPGGVSHL

SEQ ID NO: 4932 - protein, 89 aa, Artificial Sequence
  Synthetic polypeptide
AGAVTQACNPSTLGGRDLNSREQETCQPVHVVNVDIQDNHEEATLGAFLICELCQCIQHTEDMENEIDELLQEFEEKSGRTFLHTVCFY

SEQ ID NO: 4933 - protein, 13 aa, Artificial Sequence
  Synthetic polypeptide
LRPVIPALWEAEI

SEQ ID NO: 4934 - protein, 127 aa, Artificial Sequence
  Synthetic polypeptide
SQHFGRPSYTQNGILHMLDRNKRIKPRPERFQNCKDLFDLILTCEERVYDQVVEDLNSREQETCQPVHVVNVDIQDNHEEATLGAFLICELCQCIQHTEDMENEIDELLQEFEEKSGRTFLHTVCFY

SEQ ID NO: 4935 - protein, 48 aa, Artificial Sequence
  Synthetic polypeptide
AGAVTQACNPSTLGGRAIHRMGFYICWTEIRESSPGQKDSRTAKTCLI

SEQ ID NO: 4936 - protein, 25 aa, Artificial Sequence
  Synthetic polypeptide
LRPVIPALWEAELYTEWDFTYAGQK

SEQ ID NO: 4937 - protein, 39 aa, Artificial Sequence
  Synthetic polypeptide
GQARWLTPVIPALWEAEVGGSQGYGKTCEPWWLSMLHGM

SEQ ID NO: 4938 - protein, 39 aa, Artificial Sequence; identical to SEQ ID NO: 4937
  Synthetic polypeptide

SEQ ID NO: 4939 - protein, 39 aa, Artificial Sequence; identical to SEQ ID NO: 4937
  Synthetic polypeptide

SEQ ID NO: 4940 - protein, 70 aa, Artificial Sequence
  Synthetic polypeptide
SQHFGRPRWADHKATEKPASPGGCPCYMVCESISGTASALHQFQIHTKNPFSGQPGGAGPTHIPGSSPHP

SEQ ID NO: 4941 - protein, 70 aa, Artificial Sequence; identical to SEQ ID NO: 4940
  Synthetic polypeptide

SEQ ID NO: 4942 - protein, 70 aa, Artificial Sequence; identical to SEQ ID NO: 4940
  Synthetic polypeptide

SEQ ID NO: 4943 - protein, 95 aa, Artificial Sequence
  Synthetic polypeptide
PGTVAHACNPSTLGGRGGRITRLRKNLRALVVVHATWYVKAFLALLRPFISSKFTRKIRFLDSLGELAQLISLDQVHIPEAVRQLDRDLHGSGGT

SEQ ID NO: 4944 - protein, 95 aa, Artificial Sequence; identical to SEQ ID NO: 4943
  Synthetic polypeptide

SEQ ID NO: 4945 - protein, 95 aa, Artificial Sequence; identical to SEQ ID NO: 4943
  Synthetic polypeptide

SEQ ID NO: 4946 - protein, 70 aa, Artificial Sequence; identical to SEQ ID NO: 4940
  Synthetic polypeptide

SEQ ID NO: 4947 - protein, 70 aa, Artificial Sequence; identical to SEQ ID NO: 4940
  Synthetic polypeptide

SEQ ID NO: 4948 - protein, 70 aa, Artificial Sequence; identical to SEQ ID NO: 4940
  Synthetic polypeptide

SEQ ID NO: 4949 - protein, 39 aa, Artificial Sequence
  Synthetic polypeptide
GWAQWLMPVIPTLWEAEVGGSQGYGKTCEPWWLSMLHGM

SEQ ID NO: 4950 - protein, 39 aa, Artificial Sequence; identical to SEQ ID NO: 4949
  Synthetic polypeptide

SEQ ID NO: 4951 - protein, 39 aa, Artificial Sequence; identical to SEQ ID NO: 4949
  Synthetic polypeptide

SEQ ID NO: 4952 - protein, 95 aa, Artificial Sequence
  Synthetic polypeptide
MGAVAHACNPNTLGGRGGRITRLRKNLRALVVVHATWYVKAFLALLRPFISSKFTRKIRFLDSLGELAQLISLDQVHIPEAVRQLDRDLHGSGGT

SEQ ID NO: 4953 - protein, 95 aa, Artificial Sequence; identical to SEQ ID NO: 4952
  Synthetic polypeptide

SEQ ID NO: 4954 - protein, 95 aa, Artificial Sequence; identical to SEQ ID NO: 4952
  Synthetic polypeptide

SEQ ID NO: 4955 - protein, 74 aa, Artificial Sequence
  Synthetic polypeptide
GRARWLTSVIPALWKAEATEKPASPGGCPCYMVCESISGTASALHQFQIHTKNPFSGQPGGAGPTHIPGSSPHP

SEQ ID NO: 4956 - protein, 74 aa, Artificial Sequence; identical to SEQ ID NO: 4955
  Synthetic polypeptide

SEQ ID NO: 4957 - protein, 74 aa, Artificial Sequence; identical to SEQ ID NO: 4955
  Synthetic polypeptide

SEQ ID NO: 4958 - protein, 81 aa, Artificial Sequence
  Synthetic polypeptide
SQHFGRPRLRKNLRALVVVHATWYVKAFLALLRPFISSKFTRKIRFLDSLGELAQLISLDQVHIPEAVRQLDRDLHGSGGT

SEQ ID NO: 4959 - protein, 81 aa, Artificial Sequence; identical to SEQ ID NO: 4958
  Synthetic polypeptide

SEQ ID NO: 4960 - protein, 81 aa, Artificial Sequence; identical to SEQ ID NO: 4958
  Synthetic polypeptide

SEQ ID NO: 4961 - protein, 33 aa, Artificial Sequence
  Synthetic polypeptide
SGAVAHVCNPSTLEGRGYGKTCEPWWLSMLHGM

SEQ ID NO: 4962 - protein, 33 aa, Artificial Sequence; identical to SEQ ID NO: 4961
  Synthetic polypeptide

SEQ ID NO: 4963 - protein, 33 aa, Artificial Sequence; identical to SEQ ID NO: 4961
  Synthetic polypeptide

SEQ ID NO: 4964 - protein, 9 aa, Artificial Sequence
  Synthetic polypeptide
SSGGLPCTG

SEQ ID NO: 4965 - protein, 9 aa, Artificial Sequence
  Synthetic polypeptide
SSGGLPCTG

SEQ ID NO: 4966 - protein, 9 aa, Artificial Sequence
  Synthetic polypeptide
SSGGLPCTG

SEQ ID NO: 4967 - protein, 55 aa, Artificial Sequence
  Synthetic polypeptide
RLNKGRYCRGRGEVRALEDFRAQDEQADPGQASRQREPRRRPEALCGDAREAADR

SEQ ID NO: 4968 - protein, 55 aa, Artificial Sequence; identical to SEQ ID NO: 4967
  Synthetic polypeptide

SEQ ID NO: 4969 - protein, 360 aa, Artificial Sequence
  Synthetic polypeptide
TKGDTAGVGERLELWRTSVHRMNRPIQVKPADSESRGEDRKLFVGMLGKQQTDEDVRKMFEPFGTIDECTVLRGPDGTSKGCAFVKFQTHAEAQAAINTLHSSRTLPGASSSLVVKFADTEKERGLRRMQQVATQLGMFSPIALQFGAYSAYTQALMQQQAALVAAHSAYLSPMATMAAVQMQHMAAINANGLIATPITPSSAQSPAAPVDPLQQAYAGMQHYTAAYPAAYSLVAPAFPQPPALVAQQPPPPPQQQQQQQQQQQQQQQREGPDGCNIFIYHLPQEFTDSEILQMFVPFGHVISAKVFVDRATNQSKCFGFVSFDNPASAQAAIQAMNGFQIGMKRLKVQLKRPKDANRPY

SEQ ID NO: 4970 - protein, 410 aa, Artificial Sequence
  Synthetic polypeptide
TKGDTAGVGERLELWRTSVHRMNRPIQVKPADSESRGEDRKLFVGMLGKQQTDEDVRKMFEPFGTIDECTVLRGPDGTSKGCAFVKFQTHAEAQAAINTLHSSRTLPGASSSLVVKFADTEKERGLRRMQQVATQLGMFSPIALQFGAYSAYTQALMQQQAALVAAHSAYLSPMATMAAVQMQHMAAINANGLIATPITPSSGTSTPPAIAATPVSAIPAALGVNGYSPVPTQPTGQPAPDALYPNGVHPYPAQSPAAPVDPLQQAYAGMQHYTAAYPAAYSLVAPAFPQPPALVAQQPPPPPQQQQQQQQQQQQQQQREGPDGCNIFIYHLPQEFTDSEILQMFVPFGHVISAKVFVDRATNQSKCFGFVSFDNPASAQAAIQAMNGFQIGMKRLKVQLKRPKDANRPY

SEQ ID NO: 4971 - protein, 54 aa, Artificial Sequence
  Synthetic polypeptide
RLNKGRYCRGRGEVRALEDFRAQDEQADPGQASRQREPRRPEALCGDAREAADR

SEQ ID NO: 4972 - protein, 409 aa, Artificial Sequence
  Synthetic polypeptide
TKGDTAGVGERLELWRTSVHRMNRPIQVKPADSESRGDRKLFVGMLGKQQTDEDVRKMFEPFGTIDECTVLRGPDGTSKGCAFVKFQTHAEAQAAINTLHSSRTLPGASSSLVVKFADTEKERGLRRMQQVATQLGMFSPIALQFGAYSAYTQALMQQQAALVAAHSAYLSPMATMAAVQMQHMAAINANGLIATPITPSSGTSTPPAIAATPVSAIPAALGVNGYSPVPTQPTGQPAPDALYPNGVHPYPAQSPAAPVDPLQQAYAGMQHYTAAYPAAYSLVAPAFPQPPALVAQQPPPPPQQQQQQQQQQQQQQQREGPDGCNIFIYHLPQEFTDSEILQMFVPFGHVISAKVFVDRATNQSKCFGFVSFDNPASAQAAIQAMNGFQIGMKRLKVQLKRPKDANRPY

SEQ ID NO: 4973 - protein, 24 aa, Artificial Sequence
  Synthetic polypeptide
GFITWIICESKDGQKGHKLPRRCL

SEQ ID NO: 4974 - protein, 24 aa, Artificial Sequence
  Synthetic polypeptide
GFITWIICESKDGQKGHKLPRRCL

SEQ ID NO: 4975 - protein, 75 aa, Artificial Sequence
  Synthetic polypeptide
LKNFPFANRALLLGSYVNLRMDKKGTNYLADVFEKKDKNEDKKIDFSEFLSLLGDIATDYHKQSHGAAPCSGGSQ

SEQ ID NO: 4976 - protein, 75 aa, Artificial Sequence; identical to SEQ ID NO: 4975
  Synthetic polypeptide

SEQ ID NO: 4977 - protein, 36 aa, Artificial Sequence
  Synthetic polypeptide
GWTKRAQITSPMSLRKRTRMRIRRLIFLSFCPCWET

SEQ ID NO: 4978 - protein, 36 aa, Artificial Sequence; identical to SEQ ID NO: 4977
  Synthetic polypeptide

SEQ ID NO: 4979 - protein, 9 aa, Artificial Sequence
  Synthetic polypeptide
CSKKAFSRG

SEQ ID NO: 4980 - protein, 9 aa, Artificial Sequence
  Synthetic polypeptide
CSKKAFSRG

SEQ ID NO: 4981 - protein, 9 aa, Artificial Sequence
  Synthetic polypeptide
CSKKAFSRG

SEQ ID NO: 4982 - protein, 9 aa, Artificial Sequence
  Synthetic polypeptide
CSKKAFSRG

SEQ ID NO: 4983 - protein, 108 aa, Artificial Sequence
  Synthetic polypeptide
KDEFVPPPFISLPLFALPPGDDAARRPSPEGDKFKLNKSELKELLTRELPSFLGKRTDEAAFQKLMSNLDSNRDNEVDFQEYCVFLSCIAMMCNEFFEGFPDKQPRKK

SEQ ID NO: 4984 - protein, 108 aa, Artificial Sequence; identical to SEQ ID NO: 4983
  Synthetic polypeptide

SEQ ID NO: 4985 - protein, 108 aa, Artificial Sequence; identical to SEQ ID NO: 4983
  Synthetic polypeptide

SEQ ID NO: 4986 - protein, 108 aa, Artificial Sequence; identical to SEQ ID NO: 4983
  Synthetic polypeptide

SEQ ID NO: 4987 - protein, 63 aa, Artificial Sequence
  Synthetic polypeptide
LGHEGSAVMNGFVLLSQERVPYRRMNLSPHLLFLSLSLLFHQEMMQQEGLLQRVTSSSSTSQN

SEQ ID NO: 4988 - protein, 63 aa, Artificial Sequence; identical to SEQ ID NO: 4987
  Synthetic polypeptide

SEQ ID NO: 4989 - protein, 63 aa, Artificial Sequence; identical to SEQ ID NO: 4987
  Synthetic polypeptide

SEQ ID NO: 4990 - protein, 63 aa, Artificial Sequence; identical to SEQ ID NO: 4987
  Synthetic polypeptide

SEQ ID NO: 4991 - protein, 41 aa, Artificial Sequence
  Synthetic polypeptide
QRPLCCDEQPHQTAFGPKRCIQALLADSGCRTVPARFSGYH

SEQ ID NO: 4992 - protein, 155 aa, Artificial Sequence
  Synthetic polypeptide
TMIAPLHSSLDDKGHYAVMNNPTRQPLALNVAYRRCLQILAAGLFLPGSVGITDPCESGNFRVHTVMTLEQQDMVCYTAQTLVRILSHGGFRKILGQEGDASYLASEISTWDGVIVTPSEKAYEKPPEKKEGEEEEENTEEPPQGEEEESMETQE

SEQ ID NO: 4993 - protein, 15 aa, Artificial Sequence
  Synthetic polypeptide
LRHCTPAWMTKAIML

SEQ ID NO: 4994 - protein, 1238 aa, Artificial Sequence
  Synthetic polypeptide
GRARGLTPVIPTLWEAEGYSLSGYYTHPFQGYEHRQLRYQQPGPGSSPSSFLLKQIEFLKGQLPEAPVIGKQTPSLPPSLPGLRPRFPVLLASSTRGRQVDIRGVPRGVHLRSQGLQRGFQHPSPRGRSLPQRGVDCLSSHFQELSIYQDQEQRILKFLEELGEGKATTAHDLSGKLGTPKKEINRVLYSLAKKGKLQKEAGTPPLWKIAVSTQAWNQHSGVVRPDGHSQGAPNSDPSLEPEDRNSTSVSEDLLEPFIAVSAQAWNQHSGVVRPDSHSQGSPNSDPGLEPEDSNSTSALEDPLEFLDMAEIKEKICDYLFNVSDSSALNLAKNIGLTKARDINAVLIDMERQGDVYRQGTTPPIWHLTDKKRERMQIKRNTNSVPETAPAAIPETKRNAEFLTCNIPTSNASNNMVTTEKVENGQEPVIKLENRQEARPEPARLKPPVHYNGPSKAGYVDFENGQWATDDIPDDLNSIRAAPGEFRAIMEMPSFYSHGLPRCSPYKKLTECQLKNPISGLLEYAQFASQTCEFNMIEQSGPPHEPRFKFQVVINGREFPPAEAGSKKVAKQDAAMKAMTILLEEAKAKDSGKSEESSHYSTEKESEKTAESQTPTPSATSFFSGKSPVTTLLECMHKLGNSCEFRLLSKEGPAHEPKFQYCVAVGAQTFPSVSAPSKKVAKQMAAEEAMKALHGEATNSMASDNQPEGMISESLDNLESMMPNKVRKIGELVRYLNTNPVGGLLEYARSHGFAAEFKLVDQSGPPHEPKFVYQAKVGGRWFPAVCAHSKKQGKQEAADAALRVLIGENEKAERMGFTEVTPVTGASLRRTMLLLSRSPEAQPKTLPLTGSTFHDQIAMLSHRCFNTLTNSFQPSLLGRKILAAIIMKKDSEDMGVVVSLGTGNRCVKGDSLSLKGETVNDCHAEIISRRGFIRFLYSELMKYNSQTAKDSIFEPAKGGEKLQIKKTVSFHLYISTAPCGDGALFDKSCSDRAMESTESRHYPVFENPKQGKLRTKVENGEGTIPVESSDIVPTWDGIRLGERLRTMSCSDKILRWNVLGLQGALLTHFLQPIYLKSVTLGYLFSQGHLTRAICCRVTRDGSAFEDGLRHPFIVNHPKVGRVSIYDSKRQSGKTKETSVNWCLADGYDLEILDGTRGTVDGPRNELSRVSKKNIFLLFKKLCSFRYRRDLLRLSYGEAKKAARDYETAKNYFKKGLKDMGYGNWISKPQEEKNFYLCPV

SEQ ID NO: 4995 - protein, 1238 aa, Artificial Sequence; identical to SEQ ID NO: 4994
  Synthetic polypeptide

SEQ ID NO: 4996 - protein, 46 aa, Artificial Sequence
  Synthetic polypeptide
SQHFGRPRGIPSADTTPIHFKAMSTDSSGTSSLGQDLPPVVSCLSK

SEQ ID NO: 4997 - protein, 46 aa, Artificial Sequence; identical to SEQ ID NO: 4996
  Synthetic polypeptide

SEQ ID NO: 4998 - protein, 46 aa, Artificial Sequence; identical to SEQ ID NO: 4996
  Synthetic polypeptide

SEQ ID NO: 4999 - protein, 31 aa, Artificial Sequence
  Synthetic polypeptide
TGAGADACNPNTLGGRGVFPQRILHPSISRL

SEQ ID NO: 5000 - protein, 31 aa, Artificial Sequence; identical to SEQ ID NO: 4999
  Synthetic polypeptide

SEQ ID NO: 5001 - protein, 31 aa, Artificial Sequence; identical to SEQ ID NO: 4999
  Synthetic polypeptide

SEQ ID NO: 5002 - protein, 1212 aa, Artificial Sequence
  Synthetic polypeptide
GRARGLTPVIPTLWEAEGYSLSGYYTHPFQGYEHRQLRYQQPGPGSSPSSFLLKQIEFLKGQLPEAPVIGKQTPSLPPSLPGLRPRFPVLLASSTRGRQVDIRGVPRGVHLRSQGLQRGFQHPSPRGRSLPQRGVDCLSSHFQELSIYQDQEQRILKFLEELGEGKATTAHDLSGKLGTPKKEINRVLYSLAKKGKLQKEAGTPPLWKIAVSTQAWNQHSGVVRPDGHSQGAPNSDPSLEPEDRNSTSVSEDLLEPFIAVSAQAWNQHSGVVRPDSHSQGSPNSDPGLEPEDSNSTSALEDPLEFLDMAEIKEKICDYLFNVSDSSALNLAKNIGLTKARDINAVLIDMERQGDVYRQGTTPPIWHLTDKKRERMQIKRNTNSVPETAPAAIPETKRNAEFLTCNIPTSNASNNMVTTEKVENGQEPVIKLENRQEARPEPARLKPPVHYNGPSKAGYVDFENGQWATDDIPDDLNSIRAAPGEFRAIMEMPSFYSHGLPRCSPYKKLTECQLKNPISGLLEYAQFASQTCEFNMIEQSGPPHEPRFKFQVVINGREFPPAEAGSKKVAKQDAAMKAMTILLEEAKAKDSGKSEESSHYSTEKESEKTAESQTPTPSATSFFSGKSPVTTLLECMHKLGNSCEFRLLSKEGPAHEPKFQYCVAVGAQTFPSVSAPSKKVAKQMAAEEAMKALHGEATNSMASDNQPEGMISESLDNLESMMPNKVRKIGELVRYLNTNPVGGLLEYARSHGFAAEFKLVDQSGPPHEPKFVYQAKVGGRWFPAVCAHSKKQGKQEAADAALRVLIGENEKAERMGFTELPLTGSTFHDQIAMLSHRCFNTLTNSFQPSLLGRKILAAIIMKKDSEDMGVVVSLGTGNRCVKGDSLSLKGETVNDCHAEIISRRGFIRFLYSELMKYNSQTAKDSIFEPAKGGEKLQIKKTVSFHLYISTAPCGDGALFDKSCSDRAMESTESRHYPVFENPKQGKLRTKVENGEGTIPVESSDIVPTWDGIRLGERLRTMSCSDKILRWNVLGLQGALLTHFLQPIYLKSVTLGYLFSQGHLTRAICCRVTRDGSAFEDGLRHPFIVNHPKVGRVSIYDSKRQSGKTKETSVNWCLADGYDLEILDGTRGTVDGPRNELSRVSKKNIFLLFKKLCSFRYRRDLLRLSYGEAKKAARDYETAKNYFKKGLKDMGYGNWISKPQEEKNFYLCPV

SEQ ID NO: 5003 - protein, 725 aa, Artificial Sequence
  Synthetic polypeptide
KCFENSKDITKSLPVETLGPASRMDPESERALQAPHSPSKTDGKELAGTMDGEGTLFQTESPQSGSILTEETEVKGTLEGDVCGVEPPGPGDTVVQGDLQETTVVTGLGPDTQDLEGQSPPQSLPSTPKAAWIREEGRCSSSDDDTDVDMEGLRRRRGREAGPPQPMVPLAVENQAGGEGAGGELGISLNMCLLGALVLLGLGVLLFSGGLSESETGPMEEVERQVLPDPEVLEAVGDRQDGLREQLQAPVPPDSVPSLQNMGLLLDKLAKENQDIRLLQAQLQAQKEELQSLMHQPKGLEEENAQLRGALQQGEAFQRALESELQQLRARLQGLEADCVRGPDGVCLSGGRGPQGDKAIREQGPREQEPELSFLKQKEQLEAEAQALRQELERQRRLLGSVQQDLERSLQDASRGDPAHAGLAELGHRLAQKLQGLENWGQDPGVSANASKAWHQKSHFQNSREWSGKEKWWDGQRDRKAEHWKHKKEESGRERKKNWGGQEDREPAGRWKEGRPRVEESGSKKEGKRQGPKEPPRKSGSFHSSGEKQKQPRWREGTKDSHDPLPSWAELLRPKYRAPQGCSGVDECARQEGLTFFGTELAPVRQQELASLLRTYLARLPWAGQLTKELPLSPAFFGEDGIFRHDRLRFRDFVDALEDSLEEVAVQQTGDDDEVDDFEDFIFSHFFGDKALKKRSGKKDKHSQSPRAAGPREGHSHSHHHHHRG

SEQ ID NO: 5004 - protein, 36 aa, Artificial Sequence
  Synthetic polypeptide
LRACQWRHWARHPGWTQNLREPCRPLTAPPRQMGKN

SEQ ID NO: 5005 - protein, 36 aa, Artificial Sequence; identical to SEQ ID NO: 5004
  Synthetic polypeptide

SEQ ID NO: 5006 - protein, 36 aa, Artificial Sequence; identical to SEQ ID NO: 5004
  Synthetic polypeptide

SEQ ID NO: 5007 - protein, 309 aa, Artificial Sequence
  Synthetic polypeptide
KCFENSKDITKSLPVETLGPASRMDPESERALQAPHSPSKTDGKELAGTMDGEGTLFQTESPQSGSILTEETEVKGTLEGDVCGVEPPGPGDTVVQGDLQETTVVTGLGPDTQDLEGQSPPQSLPSTPKAAWIREEGRCSSSDDDTDVDMEGLRRRRGREAGPPQPMVPLAVENQAGGGLSESETGPMEEVERQVLPDPEVLEAVGDRQDGLREQLQAPVPPDSVPSLQNMGLLLDKLAKENQDIRLLQAQLQVGTGRRGWARVTHLGQASVLASSPKRNVSYLPTHPDPPLSHYSQGVFPVLGSHPLC

SEQ ID NO: 5008 - protein, 141 aa, Artificial Sequence
  Synthetic polypeptide
KCFENSKDITKSLPVETLGPASRMDPESERALQAPHSPSKTDGKELAGTMDGEGTLFQTESPQSGSILTEETEVKGTLEGDVCGVEPPGPGDTVVQGDLQETTVVTGLGPDTQDLEGQSPPQSLPSTPKAVTSLPCPCPFP

SEQ ID NO: 5009 - protein, 218 aa, Artificial Sequence
  Synthetic polypeptide
EQSPINSLCLGFPICKRRVCIDHRCQRVDLLGAQECRSKCHGHGVCDSNRHCYCEEGWAPPDCTTQLKATSSLTTGLLLSLLVLLVLVMLGASYWYRARLHQRLCQLKGPTCQYRAAQSGPSERPGPPQRALLARGTKQASALSFPAPPSRPLPPDPVSKRLQSQGPAKPPPPRKPLPADPQGRCPSGDLPGPGAGIPPLVVPSRPAPPPPTVSSLYL

SEQ ID NO: 5010 - protein, 20 aa, Artificial Sequence
  Synthetic polypeptide
SKVLSTHYALVSPSVNAGCV

SEQ ID NO: 5011 - protein, 20 aa, Artificial Sequence
  Synthetic polypeptide
SKVLSTHYALVSPSVNAGCV

SEQ ID NO: 5012 - protein, 20 aa, Artificial Sequence
  Synthetic polypeptide
SKVLSTHYALVSPSVNAGCV

SEQ ID NO: 5013 - protein, 20 aa, Artificial Sequence
  Synthetic polypeptide
SKVLSTHYALVSPSVNAGCV

SEQ ID NO: 5014 - protein, 20 aa, Artificial Sequence
  Synthetic polypeptide
SKVLSTHYALVSPSVNAGCV

SEQ ID NO: 5015 - protein, 20 aa, Artificial Sequence
  Synthetic polypeptide
SKVLSTHYALVSPSVNAGCV

SEQ ID NO: 5016 - protein, 20 aa, Artificial Sequence
  Synthetic polypeptide
SKVLSTHYALVSPSVNAGCV

SEQ ID NO: 5017 - protein, 20 aa, Artificial Sequence
  Synthetic polypeptide
SKVLSTHYALVSPSVNAGCV

SEQ ID NO: 5018 - protein, 20 aa, Artificial Sequence
  Synthetic polypeptide
SKVLSTHYALVSPSVNAGCV

SEQ ID NO: 5019 - protein, 20 aa, Artificial Sequence
  Synthetic polypeptide
SKVLSTHYALVSPSVNAGCV

SEQ ID NO: 5020 - protein, 20 aa, Artificial Sequence
  Synthetic polypeptide
SKVLSTHYALVSPSVNAGCV

SEQ ID NO: 5021 - protein, 20 aa, Artificial Sequence
  Synthetic polypeptide
SKVLSTHYALVSPSVNAGCV

SEQ ID NO: 5022 - protein, 30 aa, Artificial Sequence
  Synthetic polypeptide
TQGVYRPSMPACGSPGGTGMSKQMPWTWGL

SEQ ID NO: 5023 - protein, 30 aa, Artificial Sequence; identical to SEQ ID NO: 5022
  Synthetic polypeptide

SEQ ID NO: 5024 - protein, 30 aa, Artificial Sequence; identical to SEQ ID NO: 5022
  Synthetic polypeptide

SEQ ID NO: 5025 - protein, 30 aa, Artificial Sequence; identical to SEQ ID NO: 5022
  Synthetic polypeptide

SEQ ID NO: 5026 - protein, 30 aa, Artificial Sequence; identical to SEQ ID NO: 5022
  Synthetic polypeptide

SEQ ID NO: 5027 - protein, 30 aa, Artificial Sequence; identical to SEQ ID NO: 5022
  Synthetic polypeptide

SEQ ID NO: 5028 - protein, 30 aa, Artificial Sequence; identical to SEQ ID NO: 5022
  Synthetic polypeptide

SEQ ID NO: 5029 - protein, 30 aa, Artificial Sequence; identical to SEQ ID NO: 5022
  Synthetic polypeptide

SEQ ID NO: 5030 - protein, 30 aa, Artificial Sequence; identical to SEQ ID NO: 5022
  Synthetic polypeptide

SEQ ID NO: 5031 - protein, 30 aa, Artificial Sequence; identical to SEQ ID NO: 5022
  Synthetic polypeptide

SEQ ID NO: 5032 - protein, 30 aa, Artificial Sequence; identical to SEQ ID NO: 5022
  Synthetic polypeptide

SEQ ID NO: 5033 - protein, 30 aa, Artificial Sequence; identical to SEQ ID NO: 5022
  Synthetic polypeptide

SEQ ID NO: 5034 - protein, 242 aa, Artificial Sequence
  Synthetic polypeptide
EQSPINSLCLGFPICKRRVCIDHRCQRVDLLGAQECRSKCHGHGVCDSNRHCYCEEGWAPPDCTTQLKATSSLTTGLLLSLLVLLVLVMLGASYWYRARLHQRLCQLKGPTCQYRAAQSGPSERPGPPQRALLARGTKQASALSFPAPPSRPLPPDPVSKRLQAELADRPNPPTRPLPADPVVRSPKSQGPAKPPPPRKPLPADPQGRCPSGDLPGPGAGIPPLVVPSRPAPPPPTVSSLYL

SEQ ID NO: 5035 - protein, 217 aa, Artificial Sequence
  Synthetic polypeptide
EQSPINSLCLGFPICKRRVCIDHRCQRVDLLGAQECRSKCHGHGVCDSNRHCYCEEGWAPPDCTTQLKATSSLTTGLLLSLLVLLVLVMLGASYWYRARLHQRLCQLKGPTCQYRAAQSGPSERPGPPQRALLARGTKAELADRPNPPTRPLPADPVVRSPKSQGPAKPPPPRKPLPADPQGRCPSGDLPGPGAGIPPLVVPSRPAPPPPTVSSLYL

SEQ ID NO: 5036 - protein, 151 aa, Artificial Sequence
  Synthetic polypeptide
EQSPINSLCLGFPICKRRVCIDHRCQRVDLLGAQECRSKCHGHGVCDSNRHCYCEEGWAPPDCTTQLKATSSLTTGLLLSLLVLLVLVMLGASYWYRARLHQRLCQLKGPTCQYSLRGQPSPHPQGSHCLPTPRAGAHRVTCPAQGLESRP

SEQ ID NO: 5037 - protein, 175 aa, Artificial Sequence
  Synthetic polypeptide
EQSPINSLCLGFPICKRRVCIDHRCQRVDLLGAQECRSKCHGHGVCDSNRHCYCEEGWAPPDCTTQLKATSSLTTGLLLSLLVLLVLVMLGASYWYRARLHQRLCQLKGPTCQYRLVLSASRPPLPGRCRLTLCPRDSSLRGQPSPHPQGSHCLPTPRAGAHRVTCPAQGLESRP

SEQ ID NO: 5038 - protein, 241 aa, Artificial Sequence
  Synthetic polypeptide
EQSPINSLCLGFPICKRRVCIDHRCQRVDLLGAQECRSKCHGHGVCDSNRHCYCEEGWAPPDCTTQLKATSSLTTGLLLSLLVLLVLVMLGASYWYRARLHQRLCQLKGPTCQYRAAQSGPSERPGPPQRALLARGTKASALSFPAPPSRPLPPDPVSKRLQAELADRPNPPTRPLPADPVVRSPKSQGPAKPPPPRKPLPADPQGRCPSGDLPGPGAGIPPLVVPSRPAPPPPTVSSLYL

SEQ ID NO: 5039 - protein, 201 aa, Artificial Sequence
  Synthetic polypeptide
EQSPINSLCLGFPICKRRVCIDHRCQRVDLLGAQECRSKCHGHGVCDSNRHCYCEEGWAPPDCTTQLKATSSLTTGLLLSLLVLLVLVMLGASYWYRARLHQRLCQLKGPTCQYRAAQSGPSERPGPPQRALLARGTKQASALSFPAPPSRPLPPDPVSKRLQAELADRPNPPTRPLPADPVVRSPKVTVGGEKGTASPPT

SEQ ID NO: 5040 - protein, 176 aa, Artificial Sequence
  Synthetic polypeptide
EQSPINSLCLGFPICKRRVCIDHRCQRVDLLGAQECRSKCHGHGVCDSNRHCYCEEGWAPPDCTTQLKATSSLTTGLLLSLLVLLVLVMLGASYWYRARLHQRLCQLKGPTCQYRAAQSGPSERPGPPQRALLARGTKAELADRPNPPTRPLPADPVVRSPKVTVGGEKGTASPPT

SEQ ID NO: 5041 - protein, 193 aa, Artificial Sequence
  Synthetic polypeptide
EQSPINSLCLGFPICKRRVCIDHRCQRVDLLGAQECRSKCHGHGVCDSNRHCYCEEGWAPPDCTTQLKATSSLTTGLLLSLLVLLVLVMLGASYWYRARLHQRLCQLKGPTCQYRAAQSGPSERPGPPQRALLARGTKSQGPAKPPPPRKPLPADPQGRCPSGDLPGPGAGIPPLVVPSRPAPPPPTVSSLYL

SEQ ID NO: 5042 - protein, 193 aa, Artificial Sequence; identical to SEQ ID NO: 5041
  Synthetic polypeptide

SEQ ID NO: 5043 - protein, 193 aa, Artificial Sequence; identical to SEQ ID NO: 5041
  Synthetic polypeptide

SEQ ID NO: 5044 - protein, 193 aa, Artificial Sequence; identical to SEQ ID NO: 5041
  Synthetic polypeptide

SEQ ID NO: 5045 - protein, 184 aa, Artificial Sequence
  Synthetic polypeptide
PHLSHLYNGLIIPSTLGSLAGLLRGDAVVELGLNDYLDIVCPHYEGPGPPEGPETFALYMVDWPGYESCQAEGPRAYKRWVCSLPFGHVQFSEKIQRFTPFSLGFEFLPGETYYYISVPTPESSGQCLRLQVSVCCKERKSESAHPVGSPGESGTSGWRGGDTPSPLCLLLLLLLLILRLLRIL

SEQ ID NO: 5046 - protein, 25 aa, Artificial Sequence
  Synthetic polypeptide
YLVPWEVWQGCFEETPWWSWASTIT

SEQ ID NO: 5047 - protein, 25 aa, Artificial Sequence
  Synthetic polypeptide
YLVPWEVWQGCFEETPWWSWASTIT

SEQ ID NO: 5048 - protein, 25 aa, Artificial Sequence
  Synthetic polypeptide
YLVPWEVWQGCFEETPWWSWASTIT

SEQ ID NO: 5049 - protein, 36 aa, Artificial Sequence
  Synthetic polypeptide
YPGKSGRVASRRRRGGAGPQRLPRHCLPPLRRPRAP

SEQ ID NO: 5050 - protein, 36 aa, Artificial Sequence; identical to SEQ ID NO: 5049
  Synthetic polypeptide

SEQ ID NO: 5051 - protein, 36 aa, Artificial Sequence; identical to SEQ ID NO: 5049
  Synthetic polypeptide

SEQ ID NO: 5052 - protein, 176 aa, Artificial Sequence
  Synthetic polypeptide
PHLSHLYNGLIIPSTLGSLAGLLRGDAVVELGLNDYLDIVCPHYEGPGPPEGPETFALYMVDWPGYESCQAEGPRAYKRWVCSLPFGHVQFSEKIQRFTPFSLGFEFLPGETYYYISVPTPESSGQCLRLQVSVCCKERNLPSHPKEPESSQDPLEEEGSLLPALGVPIQTDKMEH

SEQ ID NO: 5053 - protein, 190 aa, Artificial Sequence
  Synthetic polypeptide
PHLSHLYNGLIIPSTLGSLAGLLRGDAVVELGLNDYLDIVCPHYEGPGPPEGPETFALYMVDWPGYESCQAEGPRAYKRWVCSLPFGHVQFSEKIQRFTPFSLGFEFLPGETYYYISVPTPESSGQCLRLQVSVCCKERRARVLPRSPGGGGIPAACTGGANSDRQDGALMGEIRGSEVTLAGACPLITG

SEQ ID NO: 5054 - protein, 20 aa, Artificial Sequence
  Synthetic polypeptide
SNEKTPGWEFRPMPDLLVLH

SEQ ID NO: 5055 - protein, 20 aa, Artificial Sequence
  Synthetic polypeptide
SNEKTPGWEFRPMPDLLVLH

SEQ ID NO: 5056 - protein, 20 aa, Artificial Sequence
  Synthetic polypeptide
SNEKTPGWEFRPMPDLLVLH

SEQ ID NO: 5057 - protein, 20 aa, Artificial Sequence
  Synthetic polypeptide
SNEKTPGWEFRPMPDLLVLH

SEQ ID NO: 5058 - protein, 64 aa, Artificial Sequence
  Synthetic polypeptide
AMKRRLVGSSDLCQIYWCSTEGTQDQQPLAEPFRNSACPSDQSWRGHLSSTQDHHPPSKREVQC

SEQ ID NO: 5059 - protein, 64 aa, Artificial Sequence; identical to SEQ ID NO: 5058
  Synthetic polypeptide

SEQ ID NO: 5060 - protein, 298 aa, Artificial Sequence
  Synthetic polypeptide
KDAWLGVQTYARFTGAPLKVHKISNPWQSPSGTLPALRTSHGEVISVPHKIITHLRKEKYNADYDLSARQGADTLAFMSLLEEKLLPVLVHTFWIDTKNYVEVTRKWYAEAMPFPLNFFLPGRMQRQYMERLQLLTGEHRPEDEEELEKELYREARECLTLLSQRLGSQKFFFGDAPASLDAFVFSYLALLLQAKLPSGKLQVHLRGLHNLCAYCTHILSLYFPWDGAEVPPQRQTPAGPETEEEPYRRRNQILSVLAGLAAMVGYALLSGIVSIQRATPARAPGTRTLGMAEEDEEE

SEQ ID NO: 5061 - protein, 298 aa, Artificial Sequence; identical to SEQ ID NO: 5060
  Synthetic polypeptide

SEQ ID NO: 5062 - protein, 112 aa, Artificial Sequence
  Synthetic polypeptide
AMKRRLVGSSDLCQIYWCSTEGTQDQQPLAEPFRNSACPSDQSWRGHLSSTQDHHPPSKRGTYFLDRHQELRGSDPEVVCRGYALSPQLLPAWPHAAAVHGTATAADWGAQA

SEQ ID NO: 5063 - protein, 267 aa, Artificial Sequence
  Synthetic polypeptide
KDAWLGVQTYARFTGAPLKVHKISNPWQSPSGTLPALRTSHGEVISVPHKIITHLRKEVHTFWIDTKNYVEVTRKWYAEAMPFPLNFFLPGRMQRQYMERLQLLTGEHRPEDEEELEKELYREARECLTLLSQRLGSQKFFFGDAPASLDAFVFSYLALLLQAKLPSGKLQVHLRGLHNLCAYCTHILSLYFPWDGAEVPPQRQTPAGPETEEEPYRRRNQILSVLAGLAAMVGYALLSGIVSIQRATPARAPGTRTLGMAEEDEEE

SEQ ID NO: 5064 - protein, 104 aa, Artificial Sequence
  Synthetic polypeptide
AMKRRLVGSSDLCQIYWCSTEGTQDQQPLAEPFRYPVSLGGTLPALRTSHGEVISVPHKIITHLRKEKYNADYDLSARQGADTLAFMSLLEEKLLPVLVHTFWI

SEQ ID NO: 5065 - protein, 101 aa, Artificial Sequence
  Synthetic polypeptide
KDAWLGVQTYARFTGAPLKVHKISNPWQSPSGTQYPLGELCLPFGPVMERSSQFHTRSSPTFEKRSTMLIMICQLGKGQTPWPSCLSWRRSCSRCWYILFG

SEQ ID NO: 5066 - protein, 16 aa, Artificial Sequence
  Synthetic polypeptide
HHLSPADFSFTGKQRG

SEQ ID NO: 5067 - protein, 27 aa, Artificial Sequence
  Synthetic polypeptide
ALQTFHLRENREDEGLSKERRRLFCPK

SEQ ID NO: 5068 - protein, 165 aa, Artificial Sequence
  Synthetic polypeptide
GLMTSLEPCRLFIYGKTERMKAYLKSAEGFFVLNKSTTIGRHENSDLVLQVSFPWMRGPAPWPGPQPPRATQQPNQAPPPSHIPFHQGVQPAPMQRSWSQAFPRPTVVLPASHRRPVSANKEMFSFVVDDARKPPVIKQVWTNAMKLSEKSVAEGIPGAVPPAEI

SEQ ID NO: 5069 - protein, 67 aa, Artificial Sequence
  Synthetic polypeptide
AVKHLGSRIGLHDFTLQLTTCQPCDTEVHQQRGAPGVSVISACGTENDSGGPQSQTLAEDGYHRSLR

SEQ ID NO: 5070 - protein, 170 aa, Artificial Sequence
  Synthetic polypeptide
QLNTWAPELDCTTLLSSLPLASRVTRKCISRGELQVSLSYQPVAQRMTVVVLKARHLPKMDITGLSGNPYVKVNVYYGRKRIAKKKTHVKKCTLNPIFNESFIYDIPTDLLPDISIEFLVIDFDRTTKNEVVGRLILGAHSVTASGAEHWREVCESPRKPVAKWHSLSEY

SEQ ID NO: 5071 - protein, 22 aa, Artificial Sequence
  Synthetic polypeptide
HGSASAEGSSRCLCHISLWHRE

SEQ ID NO: 5072 - protein, 34 aa, Artificial Sequence
  Synthetic polypeptide
LGFWSQPSTYQLWNLGPRLWCSTWRSPSPKWRHL

SEQ ID NO: 5073 - protein, 34 aa, Artificial Sequence; identical to SEQ ID NO: 5072
  Synthetic polypeptide

SEQ ID NO: 5074 - protein, 44 aa, Artificial Sequence
  Synthetic polypeptide
GRIPGPERSDLGSGLSHPLISCGTLGPGFGAVPGGAPHPSGGIL

SEQ ID NO: 5075 - protein, 44 aa, Artificial Sequence; identical to SEQ ID NO: 5074
  Synthetic polypeptide

SEQ ID NO: 5076 - protein, 46 aa, Artificial Sequence
  Synthetic polypeptide
GGEEGSLDLRGLTWVLVSAIHLSVVEPWAQALVQYLEEPLTQVAAS

SEQ ID NO: 5077 - protein, 46 aa, Artificial Sequence; identical to SEQ ID NO: 5076
  Synthetic polypeptide

SEQ ID NO: 5078 - protein, 46 aa, Artificial Sequence; identical to SEQ ID NO: 5076
  Synthetic polypeptide

SEQ ID NO: 5079 - protein, 47 aa, Artificial Sequence
  Synthetic polypeptide
LGFWSQPSTYQLWNLGPRLWCSTWRSPSPKWRHLNGIGGSWGQKREM

SEQ ID NO: 5080 - protein, 56 aa, Artificial Sequence
  Synthetic polypeptide
GRIPGPERSDLGSGLSHPLISCGTLGPGFGAVPGGAPHPSGGILTALVEAGVRKEK

SEQ ID NO: 5081 - protein, 29 aa, Artificial Sequence
  Synthetic polypeptide
GWVWWLTPVIPGLWEADAGGSREQYQEGG

SEQ ID NO: 5082 - protein, 29 aa, Artificial Sequence
  Synthetic polypeptide
GWVWWLTPVIPGLWEADAGGSREQYQEGG

SEQ ID NO: 5083 - protein, 29 aa, Artificial Sequence
  Synthetic polypeptide
GWVWWLTPVIPGLWEADAGGSREQYQEGG

SEQ ID NO: 5084 - protein, 29 aa, Artificial Sequence
  Synthetic polypeptide
GWVWWLTPVIPGLWEADAGGSREQYQEGG

SEQ ID NO: 5085 - protein, 29 aa, Artificial Sequence
  Synthetic polypeptide
GWVWWLTPVIPGLWEADAGGSREQYQEGG

SEQ ID NO: 5086 - protein, 29 aa, Artificial Sequence
  Synthetic polypeptide
GWVWWLTPVIPGLWEADAGGSREQYQEGG

SEQ ID NO: 5087 - protein, 29 aa, Artificial Sequence
  Synthetic polypeptide
GWVWWLTPVIPGLWEADAGGSREQYQEGG

SEQ ID NO: 5088 - protein, 29 aa, Artificial Sequence
  Synthetic polypeptide
GWVWWLTPVIPGLWEADAGGSREQYQEGG

SEQ ID NO: 5089 - protein, 29 aa, Artificial Sequence
  Synthetic polypeptide
GWVWWLTPVIPGLWEADAGGSREQYQEGG

SEQ ID NO: 5090 - protein, 29 aa, Artificial Sequence
  Synthetic polypeptide
GWVWWLTPVIPGLWEADAGGSREQYQEGG

SEQ ID NO: 5091 - protein, 467 aa, Artificial Sequence
  Synthetic polypeptide
SQDFGRLMQEDHVSNTKKEGDLIAAQARLKDLEALLNSKEAALSTALSEKRTLEGELHDLRGQVAKLEAALGEAKKQLQDEMLRRVDAENRLQTMKEELDFQKNIYSEELRETKRRHETRLVEIDNGKQREFESRLADALQELRAQHEDQVEQYKKELEKTYSAKLDNARQSAERNSNLVGAAHEELQQSRIRIDSLSAQLSQLQKQLAAKEAKLRDLEDSLARERDTSRRLLAEKEREMAEMRARMQQQLDEYQELLDIKLALDMEIHAYRKLLEGEEERLRLSPSPTSQRSRGRASSHSSQTQGGGSVTKKRKLESTESRSSFSQHARTSGRVAVEEVDEEGKFVRLRNKSNEDQSMGNWQIKRQNGDDPLLTYRFPPKFTLKAGQVVTIWAAGAGATHSPPTDLVWKAQNTWGCGNSLRTALINSTGEEVAMRKLVRSVTVVEDDEDEDGDDLLHHHHVSGSRR

SEQ ID NO: 5092 - protein, 467 aa, Artificial Sequence; identical to SEQ ID NO: 5091
  Synthetic polypeptide

SEQ ID NO: 5093 - protein, 467 aa, Artificial Sequence; identical to SEQ ID NO: 5091
  Synthetic polypeptide

SEQ ID NO: 5094 - protein, 467 aa, Artificial Sequence; identical to SEQ ID NO: 5091
  Synthetic polypeptide

SEQ ID NO: 5095 - protein, 529 aa, Artificial Sequence
  Synthetic polypeptide
SQDFGRLMQEDHVSNTKKEGDLIAAQARLKDLEALLNSKEAALSTALSEKRTLEGELHDLRGQVAKLEAALGEAKKQLQDEMLRRVDAENRLQTMKEELDFQKNIYSEELRETKRRHETRLVEIDNGKQREFESRLADALQELRAQHEDQVEQYKKELEKTYSAKLDNARQSAERNSNLVGAAHEELQQSRIRIDSLSAQLSQLQKQLAAKEAKLRDLEDSLARERDTSRRLLAEKEREMAEMRARMQQQLDEYQELLDIKLALDMEIHAYRKLLEGEEERLRLSPSPTSQRSRGRASSHSSQTQGGGSVTKKRKLESTESRSSFSQHARTSGRVAVEEVDEEGKFVRLRNKSNEDQSMGNWQIKRQNGDDPLLTYRFPPKFTLKAGQVVTIWAAGAGATHSPPTDLVWKAQNTWGCGNSLRTALINSTGEGSHCSSSGDPAEYNLRSRTVLCGTCGQPADKASASGSGAQVGGPISSGSSASSVTVTRSYRSVGGSGGGSFGDNLVTRSYLLGNSSPRTQSPQNCSIM

SEQ ID NO: 5096 - protein, 559 aa, Artificial Sequence
  Synthetic polypeptide
SQDFGRLMQEDHVSNTKKEGDLIAAQARLKDLEALLNSKEAALSTALSEKRTLEGELHDLRGQVAKLEAALGEAKKQLQDEMLRRVDAENRLQTMKEELDFQKNIYSEELRETKRRHETRLVEIDNGKQREFESRLADALQELRAQHEDQVEQYKKELEKTYSAKLDNARQSAERNSNLVGAAHEELQQSRIRIDSLSAQLSQLQKQLAAKEAKLRDLEDSLARERDTSRRLLAEKEREMAEMRARMQQQLDEYQELLDIKLALDMEIHAYRKLLEGEEERLRLSPSPTSQRSRGRASSHSSQTQGGGSVTKKRKLESTESRSSFSQHARTSGRVAVEEVDEEGKFVRLRNKSNEDQSMGNWQIKRQNGDDPLLTYRFPPKFTLKAGQVVTIWAAGAGATHSPPTDLVWKAQNTWGCGNSLRTALINSTGEEVAMRKLVRSVTVVEDDEDEDGDDLLHHHHGSHCSSSGDPAEYNLRSRTVLCGTCGQPADKASASGSGAQVGGPISSGSSASSVTVTRSYRSVGGSGGGSFGDNLVTRSYLLGNSSPRTQSPQNCSIM

SEQ ID NO: 5097 - protein, 559 aa, Artificial Sequence; identical to SEQ ID NO: 5096
  Synthetic polypeptide

SEQ ID NO: 5098 - protein, 509 aa, Artificial Sequence
  Synthetic polypeptide
SQDFGRLMQEDHVSNTKKEGDLIAAQARLKDLEALLNSKEAALSTALSEKRTLEGELHDLRGQVAKLEAALGEAKKQLQDEMLRRVDAENRLQTMKEELDFQKNIYSEELRETKRRHETRLVEIDNGKQREFESRLADALQELRAQHEDQVEQYKKELEKTYSAKLDNARQSAERNSNLVGAAHEELQQSRIRIDSLSAQLSQLQKQLAAKEAKLRDLEDSLARERDTSRRLLAEKEREMAEMRARMQQQLDEYQELLDIKLALDMEIHAYRKLLEGEEERLRLSPSPTSQRSRGRASSHSSQTQGGGSVTKKRKLESTESRSSFSQHARTSGRVAVEEVDEEGKFVRLRNKSNEDQSMGNWQIKRQNGDDPLLTYRFPPKFTLKAGQVVTIWAAGAGATHSPPTDLVWKAQNTWGCGNSLRTALINSTGEEVAMRKLVRSVTVVEDDEDEDGDDLLHHHHGSHCSSSGDPAEYNLRSRTVLCGTCGQPADKASASGSGAQSPQNCSIM

SEQ ID NO: 5099 - protein, 581 aa, Artificial Sequence
  Synthetic polypeptide
SQDFGRLMQEDHVSNTKKEGDLIAAQARLKDLEALLNSKEAALSTALSEKRTLEGELHDLRGQVAKLEAALGEAKKQLQDEMLRRVDAENRLQTMKEELDFQKNIYSEELRETKRRHETRLVEIDNGKQREFESRLADALQELRAQHEDQVEQYKKELEKTYSAKLDNARQSAERNSNLVGAAHEELQQSRIRIDSLSAQLSQLQKQLAAKEAKLRDLEDSLARERDTSRRLLAEKEREMAEMRARMQQQLDEYQELLDIKLALDMEIHAYRKLLEGEEERLRLSPSPTSQRSRGRASSHSSQTQGGGSVTKKRKLESTESRSSFSQHARTSGRVAVEEVDEEGKFVRLRNKSNEDQSMGNWQIKRQNGDDPLLTYRFPPKFTLKAGQVVTIWAAGAGATHSPPTDLVWKAQNTWGCGNSLRTALINSTGEEVAMRKLVRSVTVVEDDEDEDGDDLLHHHHGSHCSSSGDPAEYNLRSRTVLCGTCGQPADKASASGSGAQVGGPISSGSSASSVTVTRSYRSVGGSGGGSFGDNLVTRSYLLGNSSPRTQSPQNCSIIQEMGMRWEVEEGRRKVSLSCLP

SEQ ID NO: 5100 - protein, 160 aa, Artificial Sequence
  Synthetic polypeptide
SQDFGRLMQEDHVSNTKKEGDLIAAQARLKDLEALLNSKEAALSTALSEKRTLEGELHDLRGQVAKLEAALGEAKKQLQDEMLRRVDAENRLQTMKEELDFQKNIYSEELRETKRRHETRLVEIDNGKQREFESRLADALQELRAQHEDQVEQYKKELEK

SEQ ID NO: 5101 - protein, 463 aa, Artificial Sequence
  Synthetic polypeptide
GLGGARPAGLSLCVLGNQPEATRVLLSAGCRADAINSTQSTALHVAVQRGFLEVVRALCERGCDVNLPDAHSDTPLHSAISAGTGASGIVEVLTEVPNIDVTATNSQGFTLLHHASLKGHALAVRKILARARQLVDAKKEDGFTALHLAALNNHREVAQILIREGRCDVNVRNRKLQSPLHLAVQQAHVGLVPLLVDAGCSVNAEDEEGDTALHVALQRHQLLPLVADGAGGDPGPLQLLSRLQASGLPGSAELTVGAAVACFLALEGADVSYTNHRGRSPLDLAAEGRVLKALQGCAQRFRERQAGGGAAPGPRQTLGTPNTVTNLHVGAAPGPEAAECLVCSELALLVLFSPCQHRTVCEECARRMKKCIRCQVVVSKKLRPDGSEVASAAPAPGPPRQLVEELQSRYRQMEERITCPICIDSHIRLVFQCGHGACAPCGSALSACPICRQPIRDRIQIFV

SEQ ID NO: 5102 - protein, 463 aa, Artificial Sequence; identical to SEQ ID NO: 5101
  Synthetic polypeptide

SEQ ID NO: 5103 - protein, 463 aa, Artificial Sequence; identical to SEQ ID NO: 5101
  Synthetic polypeptide

SEQ ID NO: 5104 - protein, 463 aa, Artificial Sequence; identical to SEQ ID NO: 5101
  Synthetic polypeptide

SEQ ID NO: 5105 - protein, 463 aa, Artificial Sequence; identical to SEQ ID NO: 5101
  Synthetic polypeptide

SEQ ID NO: 5106 - protein, 463 aa, Artificial Sequence; identical to SEQ ID NO: 5101
  Synthetic polypeptide

SEQ ID NO: 5107 - protein, 463 aa, Artificial Sequence; identical to SEQ ID NO: 5101
  Synthetic polypeptide

SEQ ID NO: 5108 - protein, 463 aa, Artificial Sequence; identical to SEQ ID NO: 5101
  Synthetic polypeptide

SEQ ID NO: 5109 - protein, 463 aa, Artificial Sequence; identical to SEQ ID NO: 5101
  Synthetic polypeptide

SEQ ID NO: 5110 - protein, 463 aa, Artificial Sequence; identical to SEQ ID NO: 5101
  Synthetic polypeptide

SEQ ID NO: 5111 - protein, 15 aa, Artificial Sequence
  Synthetic polypeptide
ACASWGTSPRPPGCS

SEQ ID NO: 5112 - protein, 15 aa, Artificial Sequence
  Synthetic polypeptide
ACASWGTSPRPPGCS

SEQ ID NO: 5113 - protein, 15 aa, Artificial Sequence
  Synthetic polypeptide
ACASWGTSPRPPGCS

SEQ ID NO: 5114 - protein, 15 aa, Artificial Sequence
  Synthetic polypeptide
ACASWGTSPRPPGCS

SEQ ID NO: 5115 - protein, 15 aa, Artificial Sequence
  Synthetic polypeptide
ACASWGTSPRPPGCS

SEQ ID NO: 5116 - protein, 15 aa, Artificial Sequence
  Synthetic polypeptide
ACASWGTSPRPPGCS

SEQ ID NO: 5117 - protein, 15 aa, Artificial Sequence
  Synthetic polypeptide
ACASWGTSPRPPGCS

SEQ ID NO: 5118 - protein, 15 aa, Artificial Sequence
  Synthetic polypeptide
ACASWGTSPRPPGCS

SEQ ID NO: 5119 - protein, 15 aa, Artificial Sequence
  Synthetic polypeptide
ACASWGTSPRPPGCS

SEQ ID NO: 5120 - protein, 15 aa, Artificial Sequence
  Synthetic polypeptide
ACASWGTSPRPPGCS

SEQ ID NO: 5121 - protein, 15 aa, Artificial Sequence
  Synthetic polypeptide
ACASWGTSPRPPGCS

SEQ ID NO: 5122 - protein, 15 aa, Artificial Sequence
  Synthetic polypeptide
ACASWGTSPRPPGCS

SEQ ID NO: 5123 - protein, 310 aa, Artificial Sequence
  Synthetic polypeptide
GLGGARPAGLSLCVLGNQPEATRVLLSAGCRADAINSTQSTALHVAVQRGFLEVVRALCERGCDVNLPDAHSDTPLHSAISAGTGASGIVEVLTEVPNIDVTATNSQGFTLLHHASLKGHALAVRKILARARQLVDAKKEDGFTALHLAALNNHREVAQILIREGRCDVNVRNRKLQSPLHLAVQQAHVGLVPLLVDAGCSVNAEDEEGDTALHVALQRHQLLPLVADGAGGDPGPLQLLSRLQASGLPGSAELTVGAAVACFLALEGADVSYTNHRGRSPLDLAAEGRVLKALQGCAQRFRERQAGGGR

SEQ ID NO: 5124 - protein, 326 aa, Artificial Sequence
  Synthetic polypeptide
GLGGARPAGLSLCVLGNQPEATRVLLSAGCRADAINSTQSTALHVAVQRGFLEVVRALCERGCDVNLPDAHSDTPLHSAISAGTGASGIVEVLTEVPNIDVTATNSQGFTLLHHASLKGHALAVRKILARARQLVDAKKEDGFTALHLAALNNHREVAQILIREGRCDVNVRNRKLQSPLHLAVQQAHVGLVPLLVDAGCSVNAEDEEGDTALHVALQRHQLLPLVADGAGGDPGPLQLLSRLQASGLPGSAELTVGAAVACFLALEGADVSYTNHRGRSPLDLAAEGRVLKALQGCAQRFRVRAQDEEVHQVPGGRQQETAPRRL

SEQ ID NO: 5125 - protein, 58 aa, Artificial Sequence
  Synthetic polypeptide
PGRGPAGGAEPVRPGEPARGHQGAPECWVPGGRHQQHPEHSTARGRAEGLPGGGAGPV

SEQ ID NO: 5126 - protein, 58 aa, Artificial Sequence; identical to SEQ ID NO: 5125
  Synthetic polypeptide

SEQ ID NO: 5127 - protein, 58 aa, Artificial Sequence; identical to SEQ ID NO: 5125
  Synthetic polypeptide

SEQ ID NO: 5128 - protein, 58 aa, Artificial Sequence; identical to SEQ ID NO: 5125
  Synthetic polypeptide

SEQ ID NO: 5129 - protein, 58 aa, Artificial Sequence; identical to SEQ ID NO: 5125
  Synthetic polypeptide

SEQ ID NO: 5130 - protein, 58 aa, Artificial Sequence; identical to SEQ ID NO: 5125
  Synthetic polypeptide

SEQ ID NO: 5131 - protein, 58 aa, Artificial Sequence; identical to SEQ ID NO: 5125
  Synthetic polypeptide

SEQ ID NO: 5132 - protein, 58 aa, Artificial Sequence; identical to SEQ ID NO: 5125
  Synthetic polypeptide

SEQ ID NO: 5133 - protein, 58 aa, Artificial Sequence; identical to SEQ ID NO: 5125
  Synthetic polypeptide

SEQ ID NO: 5134 - protein, 58 aa, Artificial Sequence; identical to SEQ ID NO: 5125
  Synthetic polypeptide

SEQ ID NO: 5135 - protein, 58 aa, Artificial Sequence; identical to SEQ ID NO: 5125
  Synthetic polypeptide

SEQ ID NO: 5136 - protein, 58 aa, Artificial Sequence; identical to SEQ ID NO: 5125
  Synthetic polypeptide

SEQ ID NO: 5137 - protein, 463 aa, Artificial Sequence; identical to SEQ ID NO: 5101
  Synthetic polypeptide

SEQ ID NO: 5138 - protein, 463 aa, Artificial Sequence; identical to SEQ ID NO: 5101
  Synthetic polypeptide

SEQ ID NO: 5139 - protein, 463 aa, Artificial Sequence; identical to SEQ ID NO: 5101
  Synthetic polypeptide

SEQ ID NO: 5140 - protein, 463 aa, Artificial Sequence; identical to SEQ ID NO: 5101
  Synthetic polypeptide

SEQ ID NO: 5141 - protein, 463 aa, Artificial Sequence; identical to SEQ ID NO: 5101
  Synthetic polypeptide

SEQ ID NO: 5142 - protein, 463 aa, Artificial Sequence; identical to SEQ ID NO: 5101
  Synthetic polypeptide

SEQ ID NO: 5143 - protein, 463 aa, Artificial Sequence; identical to SEQ ID NO: 5101
  Synthetic polypeptide

SEQ ID NO: 5144 - protein, 463 aa, Artificial Sequence; identical to SEQ ID NO: 5101
  Synthetic polypeptide

SEQ ID NO: 5145 - protein, 463 aa, Artificial Sequence; identical to SEQ ID NO: 5101
  Synthetic polypeptide

SEQ ID NO: 5146 - protein, 463 aa, Artificial Sequence; identical to SEQ ID NO: 5101
  Synthetic polypeptide

SEQ ID NO: 5147 - protein, 15 aa, Artificial Sequence
  Synthetic polypeptide
ACASWGTSPRPPGCS

SEQ ID NO: 5148 - protein, 15 aa, Artificial Sequence
  Synthetic polypeptide
ACASWGTSPRPPGCS

SEQ ID NO: 5149 - protein, 15 aa, Artificial Sequence
  Synthetic polypeptide
ACASWGTSPRPPGCS

SEQ ID NO: 5150 - protein, 15 aa, Artificial Sequence
  Synthetic polypeptide
ACASWGTSPRPPGCS

SEQ ID NO: 5151 - protein, 15 aa, Artificial Sequence
  Synthetic polypeptide
ACASWGTSPRPPGCS

SEQ ID NO: 5152 - protein, 15 aa, Artificial Sequence
  Synthetic polypeptide
ACASWGTSPRPPGCS

SEQ ID NO: 5153 - protein, 15 aa, Artificial Sequence
  Synthetic polypeptide
ACASWGTSPRPPGCS

SEQ ID NO: 5154 - protein, 15 aa, Artificial Sequence
  Synthetic polypeptide
ACASWGTSPRPPGCS

SEQ ID NO: 5155 - protein, 15 aa, Artificial Sequence
  Synthetic polypeptide
ACASWGTSPRPPGCS

SEQ ID NO: 5156 - protein, 15 aa, Artificial Sequence
  Synthetic polypeptide
ACASWGTSPRPPGCS

SEQ ID NO: 5157 - protein, 15 aa, Artificial Sequence
  Synthetic polypeptide
ACASWGTSPRPPGCS

SEQ ID NO: 5158 - protein, 15 aa, Artificial Sequence
  Synthetic polypeptide
ACASWGTSPRPPGCS

SEQ ID NO: 5159 - protein, 75 aa, Artificial Sequence
  Synthetic polypeptide
PGRGPAGGAEPVRPGVRPGRGPAGGAEPVRPGEPARGHQGAPECWVPGGRHQQHPEHSTARGRAEGLPGGGAGPV

SEQ ID NO: 5160 - protein, 75 aa, Artificial Sequence; identical to SEQ ID NO: 5159
  Synthetic polypeptide

SEQ ID NO: 5161 - protein, 75 aa, Artificial Sequence; identical to SEQ ID NO: 5159
  Synthetic polypeptide

SEQ ID NO: 5162 - protein, 75 aa, Artificial Sequence; identical to SEQ ID NO: 5159
  Synthetic polypeptide

SEQ ID NO: 5163 - protein, 75 aa, Artificial Sequence; identical to SEQ ID NO: 5159
  Synthetic polypeptide

SEQ ID NO: 5164 - protein, 75 aa, Artificial Sequence; identical to SEQ ID NO: 5159
  Synthetic polypeptide

SEQ ID NO: 5165 - protein, 75 aa, Artificial Sequence; identical to SEQ ID NO: 5159
  Synthetic polypeptide

SEQ ID NO: 5166 - protein, 75 aa, Artificial Sequence; identical to SEQ ID NO: 5159
  Synthetic polypeptide

SEQ ID NO: 5167 - protein, 75 aa, Artificial Sequence; identical to SEQ ID NO: 5159
  Synthetic polypeptide

SEQ ID NO: 5168 - protein, 75 aa, Artificial Sequence; identical to SEQ ID NO: 5159
  Synthetic polypeptide

SEQ ID NO: 5169 - protein, 75 aa, Artificial Sequence; identical to SEQ ID NO: 5159
  Synthetic polypeptide

SEQ ID NO: 5170 - protein, 75 aa, Artificial Sequence; identical to SEQ ID NO: 5159
  Synthetic polypeptide

SEQ ID NO: 5171 - protein, 310 aa, Artificial Sequence; identical to SEQ ID NO: 5123
  Synthetic polypeptide

SEQ ID NO: 5172 - protein, 326 aa, Artificial Sequence; identical to SEQ ID NO: 5124
  Synthetic polypeptide

SEQ ID NO: 5173 - protein, 15 aa, Artificial Sequence
  Synthetic polypeptide
ACASWGTSPRPPGCS

SEQ ID NO: 5174 - protein, 15 aa, Artificial Sequence
  Synthetic polypeptide
ACASWGTSPRPPGCS

SEQ ID NO: 5175 - protein, 15 aa, Artificial Sequence
  Synthetic polypeptide
ACASWGTSPRPPGCS

SEQ ID NO: 5176 - protein, 15 aa, Artificial Sequence
  Synthetic polypeptide
ACASWGTSPRPPGCS

SEQ ID NO: 5177 - protein, 15 aa, Artificial Sequence
  Synthetic polypeptide
ACASWGTSPRPPGCS

SEQ ID NO: 5178 - protein, 15 aa, Artificial Sequence
  Synthetic polypeptide
ACASWGTSPRPPGCS

SEQ ID NO: 5179 - protein, 15 aa, Artificial Sequence
  Synthetic polypeptide
ACASWGTSPRPPGCS

SEQ ID NO: 5180 - protein, 15 aa, Artificial Sequence
  Synthetic polypeptide
ACASWGTSPRPPGCS

SEQ ID NO: 5181 - protein, 15 aa, Artificial Sequence
  Synthetic polypeptide
ACASWGTSPRPPGCS

SEQ ID NO: 5182 - protein, 15 aa, Artificial Sequence
  Synthetic polypeptide
ACASWGTSPRPPGCS

SEQ ID NO: 5183 - protein, 15 aa, Artificial Sequence
  Synthetic polypeptide
ACASWGTSPRPPGCS

SEQ ID NO: 5184 - protein, 15 aa, Artificial Sequence
  Synthetic polypeptide
ACASWGTSPRPPGCS

SEQ ID NO: 5185 - protein, 64 aa, Artificial Sequence
  Synthetic polypeptide
ACASWGEAWEGPGGAEPVRPGEPARGHQGAPECWVPGGRHQQHPEHSTARGRAEGLPGGGAGPV

SEQ ID NO: 5186 - protein, 64 aa, Artificial Sequence; identical to SEQ ID NO: 5185
  Synthetic polypeptide

SEQ ID NO: 5187 - protein, 64 aa, Artificial Sequence; identical to SEQ ID NO: 5185
  Synthetic polypeptide

SEQ ID NO: 5188 - protein, 64 aa, Artificial Sequence; identical to SEQ ID NO: 5185
  Synthetic polypeptide

SEQ ID NO: 5189 - protein, 64 aa, Artificial Sequence; identical to SEQ ID NO: 5185
  Synthetic polypeptide

SEQ ID NO: 5190 - protein, 64 aa, Artificial Sequence; identical to SEQ ID NO: 5185
  Synthetic polypeptide

SEQ ID NO: 5191 - protein, 64 aa, Artificial Sequence; identical to SEQ ID NO: 5185
  Synthetic polypeptide

SEQ ID NO: 5192 - protein, 64 aa, Artificial Sequence; identical to SEQ ID NO: 5185
  Synthetic polypeptide

SEQ ID NO: 5193 - protein, 64 aa, Artificial Sequence; identical to SEQ ID NO: 5185
  Synthetic polypeptide

SEQ ID NO: 5194 - protein, 64 aa, Artificial Sequence; identical to SEQ ID NO: 5185
  Synthetic polypeptide

SEQ ID NO: 5195 - protein, 64 aa, Artificial Sequence; identical to SEQ ID NO: 5185
  Synthetic polypeptide

SEQ ID NO: 5196 - protein, 64 aa, Artificial Sequence; identical to SEQ ID NO: 5185
  Synthetic polypeptide

SEQ ID NO: 5197 - protein, 495 aa, Artificial Sequence
  Synthetic polypeptide
PGRGPAGGAEPVRPGVRPGRGPAGGAEPVRPGVRPGRGPAGLSLCVLGNQPEATRVLLSAGCRADAINSTQSTALHVAVQRGFLEVVRALCERGCDVNLPDAHSDTPLHSAISAGTGASGIVEVLTEVPNIDVTATNSQGFTLLHHASLKGHALAVRKILARARQLVDAKKEDGFTALHLAALNNHREVAQILIREGRCDVNVRNRKLQSPLHLAVQQAHVGLVPLLVDAGCSVNAEDEEGDTALHVALQRHQLLPLVADGAGGDPGPLQLLSRLQASGLPGSAELTVGAAVACFLALEGADVSYTNHRGRSPLDLAAEGRVLKALQGCAQRFRERQAGGGAAPGPRQTLGTPNTVTNLHVGAAPGPEAAECLVCSELALLVLFSPCQHRTVCEECARRMKKCIRCQVVVSKKLRPDGSEVASAAPAPGPPRQLVEELQSRYRQMEERITCPICIDSHIRLVFQCGHGACAPCGSALSACPICRQPIRDRIQIFV

SEQ ID NO: 5198 - protein, 495 aa, Artificial Sequence; identical to SEQ ID NO: 5197
  Synthetic polypeptide

SEQ ID NO: 5199 - protein, 495 aa, Artificial Sequence; identical to SEQ ID NO: 5197
  Synthetic polypeptide

SEQ ID NO: 5200 - protein, 495 aa, Artificial Sequence; identical to SEQ ID NO: 5197
  Synthetic polypeptide

SEQ ID NO: 5201 - protein, 495 aa, Artificial Sequence; identical to SEQ ID NO: 5197
  Synthetic polypeptide

SEQ ID NO: 5202 - protein, 495 aa, Artificial Sequence; identical to SEQ ID NO: 5197
  Synthetic polypeptide

SEQ ID NO: 5203 - protein, 495 aa, Artificial Sequence; identical to SEQ ID NO: 5197
  Synthetic polypeptide

SEQ ID NO: 5204 - protein, 495 aa, Artificial Sequence; identical to SEQ ID NO: 5197
  Synthetic polypeptide

SEQ ID NO: 5205 - protein, 495 aa, Artificial Sequence; identical to SEQ ID NO: 5197
  Synthetic polypeptide

SEQ ID NO: 5206 - protein, 495 aa, Artificial Sequence; identical to SEQ ID NO: 5197
  Synthetic polypeptide

SEQ ID NO: 5207 - protein, 342 aa, Artificial Sequence
  Synthetic polypeptide
PGRGPAGGAEPVRPGVRPGRGPAGGAEPVRPGVRPGRGPAGLSLCVLGNQPEATRVLLSAGCRADAINSTQSTALHVAVQRGFLEVVRALCERGCDVNLPDAHSDTPLHSAISAGTGASGIVEVLTEVPNIDVTATNSQGFTLLHHASLKGHALAVRKILARARQLVDAKKEDGFTALHLAALNNHREVAQILIREGRCDVNVRNRKLQSPLHLAVQQAHVGLVPLLVDAGCSVNAEDEEGDTALHVALQRHQLLPLVADGAGGDPGPLQLLSRLQASGLPGSAELTVGAAVACFLALEGADVSYTNHRGRSPLDLAAEGRVLKALQGCAQRFRERQAGGGR

SEQ ID NO: 5208 - protein, 358 aa, Artificial Sequence
  Synthetic polypeptide
PGRGPAGGAEPVRPGVRPGRGPAGGAEPVRPGVRPGRGPAGLSLCVLGNQPEATRVLLSAGCRADAINSTQSTALHVAVQRGFLEVVRALCERGCDVNLPDAHSDTPLHSAISAGTGASGIVEVLTEVPNIDVTATNSQGFTLLHHASLKGHALAVRKILARARQLVDAKKEDGFTALHLAALNNHREVAQILIREGRCDVNVRNRKLQSPLHLAVQQAHVGLVPLLVDAGCSVNAEDEEGDTALHVALQRHQLLPLVADGAGGDPGPLQLLSRLQASGLPGSAELTVGAAVACFLALEGADVSYTNHRGRSPLDLAAEGRVLKALQGCAQRFRVRAQDEEVHQVPGGRQQETAPRRL

SEQ ID NO: 5209 - protein, 520 aa, Artificial Sequence
  Synthetic polypeptide
ILDRYSTIADIIRTCLGPKSMMKMLLDPMGGIVMTNDGNAILREIQVQHPAAKSMIEISRTQDEEVGDGTTSVIILAGEMLSVAEHFLEQQMHPTVVISAYRKALDDMISTLKKISIPVDISDSDMMLNIINSSITTKAISRWSSLACNIALDAVKMVQFEENGRKEIDIKKYARVEKIPGGIIEDSCVLRGVMINKDVTHPRMRRYIKNPRIVLLDSSLEYKKGESQTDIEITREEDFTRILQMEEEYIQQLCEDIIQLKPDVVITEKGISDLAQHYLMRANITAIRRVRKTDNNRIARACGARIVSRPEELREDDVGTGAGLLEIKKIGDEYFTFITDCKDPKACTILLRGASKEILSEVERNLQDAMQVCRNVLLDPQLVPGGGASEMAVAHALTEKSKAMTGVEQWPYRAVAQALEVIPRTLIQNCGASTIRLLTSLRAKHTQENCETWGVNGETGTLVDMKELGIWEPLAVKLQTYKTAVETAVLLLRIDDIVSGHKKKGDDQSRQGGAPDAGQE

SEQ ID NO: 5210 - protein, 40 aa, Artificial Sequence
  Synthetic polypeptide
TELLEHKYFIPFCIPSAHRRSWIDIRLLQISSEHVWDPSP

SEQ ID NO: 5211 - protein, 40 aa, Artificial Sequence; identical to SEQ ID NO: 5210
  Synthetic polypeptide

SEQ ID NO: 5212 - protein, 40 aa, Artificial Sequence; identical to SEQ ID NO: 5210
  Synthetic polypeptide

SEQ ID NO: 5213 - protein, 40 aa, Artificial Sequence; identical to SEQ ID NO: 5210
  Synthetic polypeptide

SEQ ID NO: 5214 - protein, 40 aa, Artificial Sequence; identical to SEQ ID NO: 5210
  Synthetic polypeptide

SEQ ID NO: 5215 - protein, 40 aa, Artificial Sequence; identical to SEQ ID NO: 5210
  Synthetic polypeptide

SEQ ID NO: 5216 - protein, 32 aa, Artificial Sequence
  Synthetic polypeptide
IFDYCRYHPNMFGTQVHDEDAFGPNGRHCDDQ

SEQ ID NO: 5217 - protein, 32 aa, Artificial Sequence; identical to SEQ ID NO: 5216
  Synthetic polypeptide

SEQ ID NO: 5218 - protein, 32 aa, Artificial Sequence; identical to SEQ ID NO: 5216
  Synthetic polypeptide

SEQ ID NO: 5219 - protein, 32 aa, Artificial Sequence; identical to SEQ ID NO: 5216
  Synthetic polypeptide

SEQ ID NO: 5220 - protein, 32 aa, Artificial Sequence; identical to SEQ ID NO: 5216
  Synthetic polypeptide

SEQ ID NO: 5221 - protein, 36 aa, Artificial Sequence
  Synthetic polypeptide
ILDRYSTIADIIRTCLGPKSMMKMLLDPMGGIVMTN

SEQ ID NO: 5222 - protein, 227 aa, Artificial Sequence
  Synthetic polypeptide
ILDRYSTIADIIRTCLGPKSMMKMLLDPMGGIVMTNDGNAILREIQVQHPAAKSMIEISRTQDEEVGDGTTSVIILAGEMLSVAEHFLEQQMHPTVVISAYRKALDDMISTLKKISIPVDISDSDMMLNIINSSITTKAISRWSSLACNIALDAVKMVQFEENGRKEIDIKKYARVEKIPGGIIEDSCVLRGVMINKDVTHPRMRRYIKNPRIVLLDSSLEYKKGES

SEQ ID NO: 5223 - protein, 209 aa, Artificial Sequence
  Synthetic polypeptide
ILDRYSTIADIIRTCLGPKSMMKMLLDPMGGIVMTNDGNAILREIQVQHPAAKSMIEISRTQDEEVGDGTTSVIILGEMLSVAEHFLEQQMHPTVVISAYRKALDDMISTLKKISIPVDISDSDMMLNIINSSITTKAISRWSSLACNIALDAVKMVQFEENGRKEIDIKKYARVEKIPGGIIEDSCVLRGVMINKDVTHPRMRRYIKN

SEQ ID NO: 5224 - protein, 129 aa, Artificial Sequence
  Synthetic polypeptide
ILDRYSTIADIIRTCLGPKSMMKIQVQHPAAKSMIEISRTQDEEVGDGTTSVIILAGEMLSVAEHFLEQQMHPTVVISAYRKALDDMISTLKKISIPVDISDSDMMLNIINSSITTKAISRWSSLACNI

SEQ ID NO: 5225 - protein, 33 aa, Artificial Sequence
  Synthetic polypeptide
IFDYCRYHPNMFGTQVHDEDSSPASSGQVHDRN

SEQ ID NO: 5226 - protein, 136 aa, Artificial Sequence
  Synthetic polypeptide
ILDRYSTIADIIRTCLGPKSMMKMLLDPMGGIVMTNDGNAILREIQVQHPAAKSMIEISRTQDEEVGDGTTSVIILESHSVTMLECGGAILAHCNLCLPAGEMLSVAEHFLEQQMHPTVVISAYRKALDDMISTLK

SEQ ID NO: 5227 - protein, 7 aa, Artificial Sequence
  Synthetic polypeptide
MRPEHKA

SEQ ID NO: 5228 - protein, 7 aa, Artificial Sequence
  Synthetic polypeptide
MRPEHKA

SEQ ID NO: 5229 - protein, 7 aa, Artificial Sequence
  Synthetic polypeptide
MRPEHKA

SEQ ID NO: 5230 - protein, 7 aa, Artificial Sequence
  Synthetic polypeptide
MRPEHKA

SEQ ID NO: 5231 - protein, 7 aa, Artificial Sequence
  Synthetic polypeptide
MRPEHKA

SEQ ID NO: 5232 - protein, 7 aa, Artificial Sequence
  Synthetic polypeptide
MRPEHKA

SEQ ID NO: 5233 - protein, 7 aa, Artificial Sequence
  Synthetic polypeptide
MRPEHKA

SEQ ID NO: 5234 - protein, 39 aa, Artificial Sequence
  Synthetic polypeptide
ELNEARTQSVNPEEKFNLETSMLPRLLQISSEHVWDPSP

SEQ ID NO: 5235 - protein, 39 aa, Artificial Sequence; identical to SEQ ID NO: 5234
  Synthetic polypeptide

SEQ ID NO: 5236 - protein, 39 aa, Artificial Sequence; identical to SEQ ID NO: 5234
  Synthetic polypeptide

SEQ ID NO: 5237 - protein, 39 aa, Artificial Sequence; identical to SEQ ID NO: 5234
  Synthetic polypeptide

SEQ ID NO: 5238 - protein, 39 aa, Artificial Sequence; identical to SEQ ID NO: 5234
  Synthetic polypeptide

SEQ ID NO: 5239 - protein, 35 aa, Artificial Sequence
  Synthetic polypeptide
ELNEARTQSVNPEEKFNLETSMLPRFKSSIQRPSP

SEQ ID NO: 5240 - protein, 35 aa, Artificial Sequence; identical to SEQ ID NO: 5239
  Synthetic polypeptide

SEQ ID NO: 5241 - protein, 27 aa, Artificial Sequence
  Synthetic polypeptide
SFRSQLRYYFLRTCFPALQTSSSQRGS

SEQ ID NO: 5242 - protein, 27 aa, Artificial Sequence
  Synthetic polypeptide
SFRSQLRYYFLRTCFPALQTSSSQRGS

SEQ ID NO: 5243 - protein, 27 aa, Artificial Sequence
  Synthetic polypeptide
SFRSQLRYYFLRTCFPALQTSSSQRGS

SEQ ID NO: 5244 - protein, 27 aa, Artificial Sequence
  Synthetic polypeptide
SFRSQLRYYFLRTCFPALQTSSSQRGS

SEQ ID NO: 5245 - protein, 27 aa, Artificial Sequence
  Synthetic polypeptide
SFRSQLRYYFLRTCFPALQTSSSQRGS

SEQ ID NO: 5246 - protein, 27 aa, Artificial Sequence
  Synthetic polypeptide
SFRSQLRYYFLRTCFPALQTSSSQRGS

SEQ ID NO: 5247 - protein, 27 aa, Artificial Sequence
  Synthetic polypeptide
SFRSQLRYYFLRTCFPALQTSSSQRGS

SEQ ID NO: 5248 - protein, 27 aa, Artificial Sequence
  Synthetic polypeptide
SFRSQLRYYFLRTCFPALQTSSSQRGS

SEQ ID NO: 5249 - protein, 128 aa, Artificial Sequence
  Synthetic polypeptide
DIISSGHVFQLYRLVPAKEEANAVPLCRAKPSPSYINLQASSPPATFLNIQTTKLPSVDHKPKECLGLLECMYANLQLQTQLAQQQMAVLEHLQASVTQLAPGRGSNNSSLPALSPNPLLNHLPQFSK

SEQ ID NO: 5250 - protein, 128 aa, Artificial Sequence; identical to SEQ ID NO: 5249
  Synthetic polypeptide

SEQ ID NO: 5251 - protein, 128 aa, Artificial Sequence; identical to SEQ ID NO: 5249
  Synthetic polypeptide

SEQ ID NO: 5252 - protein, 128 aa, Artificial Sequence; identical to SEQ ID NO: 5249
  Synthetic polypeptide

SEQ ID NO: 5253 - protein, 128 aa, Artificial Sequence; identical to SEQ ID NO: 5249
  Synthetic polypeptide

SEQ ID NO: 5254 - protein, 103 aa, Artificial Sequence
  Synthetic polypeptide
DIISSGHVFQLYRLVPAKEEANAVPLCRAKPSPSYINLQASSPPATFLNIQTTKLPSAQGMPRTPGMYVCKPPASDPARPTTDGCFGTFTGICDTTGSWEGKQ

SEQ ID NO: 5255 - protein, 103 aa, Artificial Sequence; identical to SEQ ID NO: 5254
  Synthetic polypeptide

SEQ ID NO: 5256 - protein, 103 aa, Artificial Sequence; identical to SEQ ID NO: 5254
  Synthetic polypeptide

SEQ ID NO: 5257 - protein, 235 aa, Artificial Sequence
  Synthetic polypeptide
SNFLLSVCLHTRQWFLEEGAIWFISKACLTGATAVLFAVFVRYNHKTDAALWHRSNHSNADNEFYFRYPRTIFLWIFWPSFNAALTALGAGQHRTALNTYYSLAASTLGTFALSALVGEDGRLDMVHIQNAALAGGVVVGTSSEMMLTPFGALAAGFLAGTVSTLGPSLNQNSKSKTHVESTTSMGCRGSWGPSWGSLWLDLPPMKLTEMGEFPPNPYCSRHPSGMTSVILFHCV

SEQ ID NO: 5258 - protein, 111 aa, Artificial Sequence
  Synthetic polypeptide
VSVSTPDSGSWRKGLSGSSPKPASQAPLPSSLLSLSATTTKPTLPSGTGATTVTRTMNFTFATQGPSSCGSSGLASMLHSQRWGLGSIGRPSTHTTPWLPAPLAPLPCQPL

SEQ ID NO: 5259 - protein, 112 aa, Artificial Sequence
  Synthetic polypeptide
IVLPDHLHTFITFSGSNSPSQSPPLPLSLGPLRPLLLDPCSLCSSLGWSLIPLVIKFPPKCLSPHQTVVPGGRGYLVHLQSLPHRRHCRPLCCLCPLQPQNRRCPLAPEQPQ

SEQ ID NO: 5260 - protein, 112 aa, Artificial Sequence; identical to SEQ ID NO: 5259
  Synthetic polypeptide

SEQ ID NO: 5261 - protein, 112 aa, Artificial Sequence; identical to SEQ ID NO: 5259
  Synthetic polypeptide

SEQ ID NO: 5262 - protein, 112 aa, Artificial Sequence; identical to SEQ ID NO: 5259
  Synthetic polypeptide

SEQ ID NO: 5263 - protein, 112 aa, Artificial Sequence; identical to SEQ ID NO: 5259
  Synthetic polypeptide

SEQ ID NO: 5264 - protein, 112 aa, Artificial Sequence; identical to SEQ ID NO: 5259
  Synthetic polypeptide

SEQ ID NO: 5265 - protein, 112 aa, Artificial Sequence; identical to SEQ ID NO: 5259
  Synthetic polypeptide

SEQ ID NO: 5266 - protein, 104 aa, Artificial Sequence
  Synthetic polypeptide
SNFLLSVCLHTRQWFLEEGAIWFISKACLTGATAVLFAVFVRYNHKTDAALWHRSNHSNADNEFYFRYPNGVSLLLPRLECNGTISAHHNLCLPGSSDSPASVS

SEQ ID NO: 5267 - protein, 104 aa, Artificial Sequence; identical to SEQ ID NO: 5266
  Synthetic polypeptide

SEQ ID NO: 5268 - protein, 104 aa, Artificial Sequence; identical to SEQ ID NO: 5266
  Synthetic polypeptide

SEQ ID NO: 5269 - protein, 99 aa, Artificial Sequence
  Synthetic polypeptide
VSVSTPDSGSWRKGLSGSSPKPASQAPLPSSLLSLSATTTKPTLPSGTGATTVTRTMNFTFATQMEFRSCCPGWSAMAQSRLTTTSASRVQAILLPQSP

SEQ ID NO: 5270 - protein, 99 aa, Artificial Sequence; identical to SEQ ID NO: 5269
  Synthetic polypeptide

SEQ ID NO: 5271 - protein, 99 aa, Artificial Sequence; identical to SEQ ID NO: 5269
  Synthetic polypeptide

SEQ ID NO: 5272 - protein, 464 aa, Artificial Sequence
  Synthetic polypeptide
SNFLLSVCLHTRQWFLEEGAIWFISKACLTGATAVLFAVFVRYNHKTDAALWHRSNHSNADNEFYFRYPSFQDVHAMVFVGFGFLMVFLQRYGFSSVGFTFLLAAFALQWSTLVQGFLHSFHGGHIHVGVESMINADFCAGAVLISFGAVLGKTGPTQLLLMALLEVVLFGINEFVLLHLLGVRDAGGSMTIHTFGAYFGLVLSRVLYRPQLEKSKHRQGSVYHSDLFAMIGTIFLWIFWPSFNAALTALGAGQHRTALNTYYSLAASTLGTFALSALVGEDGRLDMVHIQNAALAGGVVVGTSSEMMLTPFGALAAGFLAGTVSTLGYKFFTPILESKFKVQDTCGVHNLHGMPGVLGALLGVLVAGLATHEAYGDGLESVFPLIAEGQRSATSQAMHQLFGLFVTLMFASVGGGLGGLLLKLPFLDPPDSQHYEDQVHWQVPGEHEDKAQRPLRVEEADTQA

SEQ ID NO: 5273 - protein, 127 aa, Artificial Sequence
  Synthetic polypeptide
VSVSTPDSGSWRKGLSGSSPKPASQAPLPSSLLSLSATTTKPTLPSGTGATTVTRTMNFTFATQASRTCMPWSSWALASSWSSCSVTASAAWASPSSWPPLPCSGPHWSRAFSTPSTVATSMLAWRA

SEQ ID NO: 5274 - protein, 127 aa, Artificial Sequence; identical to SEQ ID NO: 5273
  Synthetic polypeptide

SEQ ID NO: 5275 - protein, 448 aa, Artificial Sequence
  Synthetic polypeptide
SNFLLSVCLHTRQWFLEEGAIWFISKACLTGATAVLFAVFVRYNHKTDAALWHRSNHSNADNEFYFRYPSFQDVHAMVFVGFGFLMVFLQRYGFSSVGFTFLLAAFALQWSTLVQGFLHSFHGGHIHVGVESMINADFCAGAVLISFGAVLGKTGPTQLLLMALLEVVLFGINEFVLLHLLGVRDAGGSMTIHTFGAYFGLVLSRVLYRPQLEKSKHRQGSVYHSDLFAMIGTIFLWIFWPSFNAALTALGAGQHRTALNTYYSLAASTLGTFALSALVGEDGRLDMVHIQNAALAGGVVVGTSSEMMLTPFGALAAGFLAGTVSTLGYKFFTPILESKFKVQDTCGVHNLHGMPGVLGALLGVLVAGLATHEAYGDGLESVFPLIAEGQRSATSQAMHQLFGLFVTLMFASVGGGLGGLLLKLPFLDSPPRLPALRGPSSLAGAWRA

SEQ ID NO: 5276 - protein, 160 aa, Artificial Sequence
  Synthetic polypeptide
SNFLLSVCLHTRQWFLEEGAIWFISKACLTGATAVLFAVFVRYNHKTDAALWHRSNHSNADNEFYFRYPKESHSVAQAGVQRRNLGSLQPSPPRLPGRACHGLRGLWLPHGLPAALRLQQRGLHLPPGRLCPAVVHTGPGLSPLLPRWPHPCWRGEHDQC

SEQ ID NO: 5277 - protein, 155 aa, Artificial Sequence
  Synthetic polypeptide
VSVSTPDSGSWRKGLSGSSPKPASQAPLPSSLLSLSATTTKPTLPSGTGATTVTRTMNFTFATQKSLTLLPRLECNGAISAHCNLHLPGFQDVHAMVFVGFGFLMVFLQRYGFSSVGFTFLLAAFALQWSTLVQGFLHSFHGGHIHVGVESMINA

SEQ ID NO: 5278 - protein, 37 aa, Artificial Sequence
  Synthetic polypeptide
WHAPVIPATQRLRPKRRMYFIWLGWIPSDKPSQLTER

SEQ ID NO: 5279 - protein, 37 aa, Artificial Sequence; identical to SEQ ID NO: 5278
  Synthetic polypeptide

SEQ ID NO: 5280 - protein, 31 aa, Artificial Sequence
  Synthetic polypeptide
PGVMACACNPSYSEAETKKKNVLHLVGLDSL

SEQ ID NO: 5281 - protein, 31 aa, Artificial Sequence; identical to SEQ ID NO: 5280
  Synthetic polypeptide

SEQ ID NO: 5282 - protein, 31 aa, Artificial Sequence; identical to SEQ ID NO: 5280
  Synthetic polypeptide

SEQ ID NO: 5283 - protein, 31 aa, Artificial Sequence; identical to SEQ ID NO: 5280
  Synthetic polypeptide

SEQ ID NO: 5284 - protein, 31 aa, Artificial Sequence; identical to SEQ ID NO: 5280
  Synthetic polypeptide

SEQ ID NO: 5285 - protein, 28 aa, Artificial Sequence
  Synthetic polypeptide
WHAPVIPATQRLRPKRRMYFIWLGWIPS

SEQ ID NO: 5286 - protein, 28 aa, Artificial Sequence
  Synthetic polypeptide
WHAPVIPATQRLRPKRRMYFIWLGWIPS

SEQ ID NO: 5287 - protein, 28 aa, Artificial Sequence
  Synthetic polypeptide
WHAPVIPATQRLRPKRRMYFIWLGWIPS

SEQ ID NO: 5288 - protein, 53 aa, Artificial Sequence
  Synthetic polypeptide
PWTPLKVLPVTGHVTLEPSLPLSEAKGKRPELCTQRRTQKDVRGGYWDAGRRC

SEQ ID NO: 5289 - protein, 50 aa, Artificial Sequence
  Synthetic polypeptide
PWSHHCPSLRQRGRGPSSAPRGGPRRTSGEATGTLEGAVDPPFQPHARSL

SEQ ID NO: 5290 - protein, 40 aa, Artificial Sequence
  Synthetic polypeptide
GKGEEARALHPEEDPEGRQGRLLGRWKALLIPPSSPMPGP

SEQ ID NO: 5291 - protein, 3 aa, Artificial Sequence
  Synthetic polypeptide
LFD

SEQ ID NO: 5292 - protein, 3 aa, Artificial Sequence
  Synthetic polypeptide
LFD

SEQ ID NO: 5293 - protein, 3 aa, Artificial Sequence
  Synthetic polypeptide
LFD

SEQ ID NO: 5294 - protein, 3 aa, Artificial Sequence
  Synthetic polypeptide
LFD

SEQ ID NO: 5295 - protein, 232 aa, Artificial Sequence
  Synthetic polypeptide
DRQPFDLTPPLQPEQLPFSCLIDEMPEAAVKSTANKYQVFFFGTHETAFLGPKDLFPYEESKEKFGKPNKRKGFSEGLWEIENNPTVKASGYQSSQKKSCVEEPEPEPEAAEGDGDKKGNAEGSSDEEGKLVIDEPAKEKNEKGALKRRAGDLLEDSPKRPKEAENPEGEEKEAATLEVERPLPMEVEKNSTPSEPGSGRGPPQEEEEEEDEEEEATKEDAEAPGIRDHESL

SEQ ID NO: 5296 - protein, 232 aa, Artificial Sequence; identical to SEQ ID NO: 5295
  Synthetic polypeptide

SEQ ID NO: 5297 - protein, 232 aa, Artificial Sequence; identical to SEQ ID NO: 5295
  Synthetic polypeptide

SEQ ID NO: 5298 - protein, 232 aa, Artificial Sequence; identical to SEQ ID NO: 5295
  Synthetic polypeptide

SEQ ID NO: 5299 - protein, 32 aa, Artificial Sequence
  Synthetic polypeptide
KPTGLFLMSCSRAGCWLWTMPPAPALPGGAAA

SEQ ID NO: 5300 - protein, 55 aa, Artificial Sequence
  Synthetic polypeptide
DSESGEASKCLAFRPSSVSHGETLGKPLPNLSFLICKMETLLVKTKRGESQRGCS

SEQ ID NO: 5301 - protein, 111 aa, Artificial Sequence
  Synthetic polypeptide
RLKEVKANGAVPDVLQQGRLLVVDYATCSSSAWWGSSVKTSMICAGGDGVISSCNGDSGGPLNCQASDGRWQVHGIVSFGSRLGCNYYHKPSVFTRVSNYIDWINSVIANN

SEQ ID NO: 5302 - protein, 10 aa, Artificial Sequence
  Synthetic polypeptide
KYKNKVIANN

SEQ ID NO: 5303 - protein, 42 aa, Artificial Sequence
  Synthetic polypeptide
WLTPVIQALWEVKMGRSPEVRSSRPAWSTRGNPVSTKNTKIR

SEQ ID NO: 5304 - protein, 255 aa, Artificial Sequence
  Synthetic polypeptide
FFFFTIDCIKMFFIFMAEVLGAPLSCVPEVSLQYSSNGQWYHTCGGSLIANSWVLTAAHCISSSGIYRVMLGQHNLYVAESGSLAVSVSKIVVHKDWNSDQVSKGNDIALLKLANPVSLTDKIQLACLPPAGTILPNNYPCYVTGWGRLQTNGALPDDLKQGQLLVVDYATCSSSGWWGSTVKTNMICAGGDGVICTCNGDSGGPLNCQASDGRWEVHGIGSLTSVLGCNYYYKPSIFTRVSNYNDWINSVIANN

SEQ ID NO: 5305 - protein, 23 aa, Artificial Sequence
  Synthetic polypeptide
VVYLRSPCSTAPMASGTTPAEGP

SEQ ID NO: 5306 - protein, 23 aa, Artificial Sequence
  Synthetic polypeptide
VVYLRSPCSTAPMASGTTPAEGP

SEQ ID NO: 5307 - protein, 127 aa, Artificial Sequence
  Synthetic polypeptide
FFFFTIDCIKMFFIFMAEVLGAPLSCVPEVSLQYSSNGQWYHTCGGSLIANSWVLTAAHCIRQIIKAHKVLQRCSLILFFVRDLCSSQLELTGVSAGSSGIYRVMLGQHNLYVAESGSLAVSVSKIV

SEQ ID NO: 5308 - protein, 13 aa, Artificial Sequence
  Synthetic polypeptide
WTSIGLIKSSQEK

SEQ ID NO: 5309 - protein, 13 aa, Artificial Sequence
  Synthetic polypeptide
WTSIGLIKSSQEK

SEQ ID NO: 5310 - protein, 13 aa, Artificial Sequence
  Synthetic polypeptide
WTSIGLIKSSQEK

SEQ ID NO: 5311 - protein, 13 aa, Artificial Sequence
  Synthetic polypeptide
WTSIGLIKSSQEK

SEQ ID NO: 5312 - protein, 291 aa, Artificial Sequence
  Synthetic polypeptide
LKVVKKSEDTISKMNDFMRMQILKEGSHFPGPFMTSIGPAESHPHTPQMPPSTPSSSFLTTLKPRLKTEPEEVSIEDSAQSDLKEVMVLNATESFVYEPKEQKKMFHATVATENEVFRVKVFNIDLKEKFTPKKIIAIANYVCRNGFLEVYPFTLVADVNADRNMEIPKGLIRSASVTPKINQLCSQTKGSFVNGVFEVHKKNVRGEFTYYEIQDNTGKMEVVVHGRLTTINCEEGDKLKLTCFELAPKSGNTGELRSVIHSHIKVIKTRKNKKDILNPDSSMETSPDFFF

SEQ ID NO: 5313 - protein, 10 aa, Artificial Sequence
  Synthetic polypeptide
SRKVKTQSPK

SEQ ID NO: 5314 - protein, 10 aa, Artificial Sequence
  Synthetic polypeptide
SRKVKTQSPK

SEQ ID NO: 5315 - protein, 10 aa, Artificial Sequence
  Synthetic polypeptide
SRKVKTQSPK

SEQ ID NO: 5316 - protein, 10 aa, Artificial Sequence
  Synthetic polypeptide
SRKVKTQSPK

SEQ ID NO: 5317 - protein, 347 aa, Artificial Sequence
  Synthetic polypeptide
LKVVKKSEDTISKMNDFMRMQILKEGSHFPGPFMTSIGPAESHPHTPQMPPSTPSSSFLTTKSEDTISKMNDFMRMQILKEGSHFPGPFMTSIGPAESHPHTPQMPPSTPSSSFLTTLKPRLKTEPEEVSIEDSAQSDLKEVMVLNATESFVYEPKEQKKMFHATVATENEVFRVKVFNIDLKEKFTPKKIIAIANYVCRNGFLEVYPFTLVADVNADRNMEIPKGLIRSASVTPKINQLCSQTKGSFVNGVFEVHKKNVRGEFTYYEIQDNTGKMEVVVHGRLTTINCEEGDKLKLTCFELAPKSGNTGELRSVIHSHIKVIKTRKNKKDILNPDSSMETSPDFFF

SEQ ID NO: 5318 - protein, 347 aa, Artificial Sequence; identical to SEQ ID NO: 5317
  Synthetic polypeptide

SEQ ID NO: 5319 - protein, 347 aa, Artificial Sequence; identical to SEQ ID NO: 5317
  Synthetic polypeptide

SEQ ID NO: 5320 - protein, 13 aa, Artificial Sequence
  Synthetic polypeptide
WTSIGLIKSSQEK

SEQ ID NO: 5321 - protein, 13 aa, Artificial Sequence
  Synthetic polypeptide
WTSIGLIKSSQEK

SEQ ID NO: 5322 - protein, 13 aa, Artificial Sequence
  Synthetic polypeptide
WTSIGLIKSSQEK

SEQ ID NO: 5323 - protein, 13 aa, Artificial Sequence
  Synthetic polypeptide
WTSIGLIKSSQEK

SEQ ID NO: 5324 - protein, 291 aa, Artificial Sequence; identical to SEQ ID NO: 5312
  Synthetic polypeptide

SEQ ID NO: 5325 - protein, 291 aa, Artificial Sequence; identical to SEQ ID NO: 5312
  Synthetic polypeptide

SEQ ID NO: 5326 - protein, 291 aa, Artificial Sequence; identical to SEQ ID NO: 5312
  Synthetic polypeptide

SEQ ID NO: 5327 - protein, 291 aa, Artificial Sequence; identical to SEQ ID NO: 5312
  Synthetic polypeptide

SEQ ID NO: 5328 - protein, 10 aa, Artificial Sequence
  Synthetic polypeptide
SRKVKTQSPK

SEQ ID NO: 5329 - protein, 10 aa, Artificial Sequence
  Synthetic polypeptide
SRKVKTQSPK

SEQ ID NO: 5330 - protein, 10 aa, Artificial Sequence
  Synthetic polypeptide
SRKVKTQSPK

SEQ ID NO: 5331 - protein, 10 aa, Artificial Sequence
  Synthetic polypeptide
SRKVKTQSPK

SEQ ID NO: 5332 - protein, 132 aa, Artificial Sequence
  Synthetic polypeptide
PTGSSCSTFGIYAVPGSPSPWLCTARVLAPGQSCTARVPVPGHACPPQAFSNGQSVPELPAKSAETVRRIKAAKGDSGDGVDPRKWLRSFRSPSASPWKYHQMKRLRTSSGPLTKVLPLWCQGKRDIQLPSW

SEQ ID NO: 5333 - protein, 132 aa, Artificial Sequence; identical to SEQ ID NO: 5332
  Synthetic polypeptide

SEQ ID NO: 5334 - protein, 35 aa, Artificial Sequence
  Synthetic polypeptide
DASRQPKETLEMVWIRGSGCGPSGVHQPPPGNTTR

SEQ ID NO: 5335 - protein, 35 aa, Artificial Sequence; identical to SEQ ID NO: 5334
  Synthetic polypeptide

SEQ ID NO: 5336 - protein, 189 aa, Artificial Sequence
  Synthetic polypeptide
DCETHQGSQRRLWRWCGSEEVVAVLQESISLPLEIPPDEEVENIIWSSHKSLATVVPGKEGHPATIMVTNPHYQGQVSFLDPSYSLHISNLSWEDSGLYQAQVNLRTSQISTMQQYNICVYHPNYASEKPSTAFCLLAKGLLIFLLLVILAMGLWVIRVQKRHKMPRMKKLMRNRMKLRKEAKPGSSPA

SEQ ID NO: 5337 - protein, 280 aa, Artificial Sequence
  Synthetic polypeptide
DCETHQGSQRRLWRWCGSEEVVAVLQESISLPLEIPPDEEVENIIWSSHKSLATVVPGKEGHPATIMVTNPHYQGQVSFLDPSYSLHISNLSWEDSGLYQAQVNLRTSQISTMQQYNICVYRWLSEPQITVNFESSGEGACSMSLVCSVEKAGMDMTYSWLSRGDSTYTFHEGPVLSTSWRPGDSALSYTCRANNPISNVSSCPIPDGPFYADPNYASEKPSTAFCLLAKGLLIFLLLVILAMGLWVIRVQKRHKMPRMKKLMRNRMKLRKEAKPGSSPA

SEQ ID NO: 5338 - protein, 7 aa, Artificial Sequence
  Synthetic polypeptide
DVTWTGR

SEQ ID NO: 5339 - protein, 302 aa, Artificial Sequence
  Synthetic polypeptide
AKMSPGLEDEANTYFKEWTCSSSPSLPRSCKEIKDECPSAFDGLYFLRTENGVIYQTFCDMTSGGGGWTLVASVHENDMRGKCTVGDRWSSQQGSKAVYPEGDGNWANYNTFGSAEAATSDDYKNPGYYDIQAKDLGIWHVPNKSPMQHWRNSSLLRYRTDTGFLQTLGHNLFGIYQKYPVKYGEGKCWTDNGPVIPVVYDFGDAQKTASYYSPYGQREFTAGFVQFRVFNNERAANALCAGMRVTGCNTEHHCIGGGGYFPEASPQQCGDFSGFDWSGYGTHVGYSSSREITEAAVLLFYR

SEQ ID NO: 5340 - protein, 85 aa, Artificial Sequence
  Synthetic polypeptide
AFGYAVFPALDWLPTDKSCLFSQNKLRCHLDWKMRLILTSRNGPVLRLHLCPEAARKSKTNVLVHLMACIFSALRMVLSTRPSVT

SEQ ID NO: 5341 - protein, 21 aa, Artificial Sequence
  Synthetic polypeptide
SQHFGRSKQVDYLRPFHTLTG

SEQ ID NO: 5342 - protein, 21 aa, Artificial Sequence
  Synthetic polypeptide
SQHFGRSKQVDYLRPFHTLTG

SEQ ID NO: 5343 - protein, 21 aa, Artificial Sequence
  Synthetic polypeptide
SQHFGRSKQVDYLRPFHTLTG

SEQ ID NO: 5344 - protein, 350 aa, Artificial Sequence
  Synthetic polypeptide
LTPVIPALWEVEAGGLLEALPYFDRLDYVSMMCNEQAYSLAVEKLLNIRPPPRAQWIRVLFGEITRLLNHIMAVTTHALDLGAMTPFFWLFEEREKMFEFYERVSGARMHAAYIRPGGVHQDLPLGLMDDIYQFSKNFSLRLDELEELLTNNRIWRNRTIDIGVVTAEEALNYGFSGVMLRGSGIQWDLRKTQPYDVYDQVEFDVPVGSRGDCYDRYLCRVEEMRQSLRIIAQCLNKMPPGEIKVDDAKVSPPKRAEMKTSMESLIHHFKLYTEGYQVPPGATYTAIEAPKGEFGVYLVSDGSSRPYRCKIKAPGFAHLAGLDKMSKGHMLADVVAIIGTQDIVFGEVDR

SEQ ID NO: 5345 - protein, 344 aa, Artificial Sequence
  Synthetic polypeptide
LTPVIPALWEVEAGGLLEALPYFDRLDYVSMMCNEQAYSLAVEKLLNIRPPPRAQWIRVLFGEITRLLNHIMAVTTHALDLGAMTPFFWLFEEREKMFEFYERVSGARMHAAYIRPGGVHQDLPLGLMDDIYQFSKNFSLRLDELEELLTNNRIWRNRTIDIGVVTAEEALNYGFSGVMLRGSGIQWDLRKTQPYDVYDQVEFDVPVGSRGDCYDRYLCRVEEMRQSLRIIAQCLNKMPPGEIKVDDAKVSPPKRAEMKTSMESLIHHFKLYTEGYQVPPGATYTAIEAPKGEFGVYLVSDGSSRPYRCKIKAPGFAHLAGLDKMSKGHMLADVVAIIGTRPIV

SEQ ID NO: 5346 - protein, 216 aa, Artificial Sequence
  Synthetic polypeptide
LTPVIPALWEVEAGGLLEALPYFDRLDYVSMMCNEQAYSLAVEKLLNIRPPPRAQWIRVLFGEITRLLNHIMAVTTHALDLGAMTPFFWLFEEREKMFEFYERVSGARMHAAYIRPGGVHQDLPLGLMDDIYQFSKNFSLRLDELEELLTNNRIWRNRTIDIGVVTAEEALNYGFSGVMLRGSGIQWDLRKTQPYDVYDQVEFDVPVGSRGDCYDR

SEQ ID NO: 5347 - protein, 67 aa, Artificial Sequence
  Synthetic polypeptide
MSLSLFPTVHSLHSRHSTLFETSWIMSLFTQDIQWLPISNDTVGRSPGIAASKAGPAAGTANTCATE

SEQ ID NO: 5348 - protein, 67 aa, Artificial Sequence; identical to SEQ ID NO: 5347
  Synthetic polypeptide

SEQ ID NO: 5349 - protein, 67 aa, Artificial Sequence; identical to SEQ ID NO: 5347
  Synthetic polypeptide

SEQ ID NO: 5350 - protein, 67 aa, Artificial Sequence; identical to SEQ ID NO: 5347
  Synthetic polypeptide

SEQ ID NO: 5351 - protein, 67 aa, Artificial Sequence; identical to SEQ ID NO: 5347
  Synthetic polypeptide

SEQ ID NO: 5352 - protein, 67 aa, Artificial Sequence; identical to SEQ ID NO: 5347
  Synthetic polypeptide

SEQ ID NO: 5353 - protein, 67 aa, Artificial Sequence; identical to SEQ ID NO: 5347
  Synthetic polypeptide

SEQ ID NO: 5354 - protein, 67 aa, Artificial Sequence; identical to SEQ ID NO: 5347
  Synthetic polypeptide

SEQ ID NO: 5355 - protein, 67 aa, Artificial Sequence; identical to SEQ ID NO: 5347
  Synthetic polypeptide

SEQ ID NO: 5356 - protein, 67 aa, Artificial Sequence; identical to SEQ ID NO: 5347
  Synthetic polypeptide

SEQ ID NO: 5357 - protein, 67 aa, Artificial Sequence; identical to SEQ ID NO: 5347
  Synthetic polypeptide

SEQ ID NO: 5358 - protein, 67 aa, Artificial Sequence; identical to SEQ ID NO: 5347
  Synthetic polypeptide

SEQ ID NO: 5359 - protein, 67 aa, Artificial Sequence; identical to SEQ ID NO: 5347
  Synthetic polypeptide

SEQ ID NO: 5360 - protein, 67 aa, Artificial Sequence; identical to SEQ ID NO: 5347
  Synthetic polypeptide

SEQ ID NO: 5361 - protein, 67 aa, Artificial Sequence; identical to SEQ ID NO: 5347
  Synthetic polypeptide

SEQ ID NO: 5362 - protein, 67 aa, Artificial Sequence; identical to SEQ ID NO: 5347
  Synthetic polypeptide

SEQ ID NO: 5363 - protein, 67 aa, Artificial Sequence; identical to SEQ ID NO: 5347
  Synthetic polypeptide

SEQ ID NO: 5364 - protein, 67 aa, Artificial Sequence; identical to SEQ ID NO: 5347
  Synthetic polypeptide

SEQ ID NO: 5365 - protein, 67 aa, Artificial Sequence; identical to SEQ ID NO: 5347
  Synthetic polypeptide

SEQ ID NO: 5366 - protein, 67 aa, Artificial Sequence; identical to SEQ ID NO: 5347
  Synthetic polypeptide

SEQ ID NO: 5367 - protein, 256 aa, Artificial Sequence
  Synthetic polypeptide
CLCPCSQQCILYIAGTVLFLKLVGLCHYSLKTSNGSPSQMILSAEALALRRAKQAQRRAQQTPVQLSKEQEELIRTLLGAHTRHMGTMFEQFVQFRPPAHLFIHHQPLPTLAPVLPLVTHFADINTFMVLQVIKFTKDLPVFRSLPIEDQISLLKGAAVEICHIVLNTTFCLQTQNFLCGPLRYTIEDGARDRPGVTQRDEIDQLQEEMALTLQSYIKGQQRRPRDRSPGTPWIHWSGKMLGPKIGPGSKGAQWLQ

SEQ ID NO: 5368 - protein, 256 aa, Artificial Sequence; identical to SEQ ID NO: 5367
  Synthetic polypeptide

SEQ ID NO: 5369 - protein, 317 aa, Artificial Sequence
  Synthetic polypeptide
CLCPCSQQCILYIAGTVLFLKLVGLCHYSLKTSNGSPSQMILSAEALALRRAKQAQRRAQQTPVQLSKEQEELIRTLLGAHTRHMGTMFEQFVQFRPPAHLFIHHQPLPTLAPVLPLVTHFADINTFMVLQVIKFTKDLPVFRSLPIEDQISLLKGAAVEICHIVLNTTFCLQTQNFLCGPLRYTIEDGARVSPTVGFQVEFLELLFHFHGTLRKLQLQEPEYVLLAAMALFSPAPYLTDRPGVTQRDEIDQLQEEMALTLQSYIKGQQRRPRDRFLYAKLLGLLAELRSINEAYGYQIQHIQGLSAMMPLLQEICS

SEQ ID NO: 5370 - protein, 317 aa, Artificial Sequence; identical to SEQ ID NO: 5369
  Synthetic polypeptide

SEQ ID NO: 5371 - protein, 308 aa, Artificial Sequence
  Synthetic polypeptide
CLCPCSQQCILYIAGTVLFLKLVGLCHYSLKTSNGSPSQMILSAEALALRRAKQAQRRAQQTPVQLSKEQEELIRTLLGAHTRHMGTMFEQFVQFRPPAHLFIHHQPLPTLAPVLPLVTHFADINTFMVLQVIKFTKDLPVFRSLPIEDQISLLKGAAVEICHIVLNTTFCLQTQNFLCGPLRYTIEDGARVGFQVEFLELLFHFHGTLRKLQLQEPEYVLLAAMALFSPDRPGVTQRDEIDQLQEEMALTLQSYIKGQQRRPRDRFLYAKLLGLLAELRSINEAYGYQIQHIQGLSAMMPLLQEICS

SEQ ID NO: 5372 - protein, 308 aa, Artificial Sequence; identical to SEQ ID NO: 5371
  Synthetic polypeptide

SEQ ID NO: 5373 - protein, 308 aa, Artificial Sequence; identical to SEQ ID NO: 5371
  Synthetic polypeptide

SEQ ID NO: 5374 - protein, 295 aa, Artificial Sequence
  Synthetic polypeptide
CLCPCSQQCILYIAGTVLFLKLVGLCHYSLKTSNGSPSQMILSAEALALRRAKQAQRRAQQTPVQLSKEQEELIRTLLGAHTRHMGTMFEQFVQFRPPAHLFIHHQPLPTLAPVLPLVTHFADINTFMVLQVIKFTKDLPVFRSLPIEDQISLLKGAAVEICHIVLNTTFCLQTQNFLCGPLRYTIEDGARVGFQVEFLELLFHFHGTLRKLQLQEPEYVLLAAMALFSPDRPGVTQRDEIDQLQEEMALTLQSYIKGQQRRPRDRSPGTPWIHWSGKMLGPKIGPGSKGAQWLQ

SEQ ID NO: 5375 - protein, 304 aa, Artificial Sequence
  Synthetic polypeptide
CLCPCSQQCILYIAGTVLFLKLVGLCHYSLKTSNGSPSQMILSAEALALRRAKQAQRRAQQTPVQLSKEQEELIRTLLGAHTRHMGTMFEQFVQFRPPAHLFIHHQPLPTLAPVLPLVTHFADINTFMVLQVIKFTKDLPVFRSLPIEDQISLLKGAAVEICHIVLNTTFCLQTQNFLCGPLRYTIEDGARVSPTVGFQVEFLELLFHFHGTLRKLQLQEPEYVLLAAMALFSPAPYLTDRPGVTQRDEIDQLQEEMALTLQSYIKGQQRRPRDRSPGTPWIHWSGKMLGPKIGPGSKGAQWLQ

SEQ ID NO: 5376 - protein, 300 aa, Artificial Sequence
  Synthetic polypeptide
CLCPCSQQCILYIAGTVLFLKLVGLCHYSLKTSNGSPSQMILSAEALALRRAKQAQRRAQQTPVQLSKEQEELIRTLLGAHTRHMGTMFEQFVQFRPPAHLFIHHQPLPTLAPVLPLVTHFADINTFMVLQVIKFTKDLPVFRSLPIEDQISLLKGAAVEICHIVLNTTFCLQTQNFLCGPLRYTIEDGARVGFQVEFLELLFHFHGTLRKLQLQEPEYVLLAAMALFSPAPYLTDRPGVTQRDEIDQLQEEMALTLQSYIKGQQRRPRDRSPGTPWIHWSGKMLGPKIGPGSKGAQWLQ

SEQ ID NO: 5377 - protein, 300 aa, Artificial Sequence; identical to SEQ ID NO: 5376
  Synthetic polypeptide

SEQ ID NO: 5378 - protein, 299 aa, Artificial Sequence
  Synthetic polypeptide
CLCPCSQQCILYIAGTVLFLKLVGLCHYSLKTSNGSPSQMILSAEALALRRAKQAQRRAQQTPVQLSKEQEELIRTLLGAHTRHMGTMFEQFVQFRPPAHLFIHHQPLPTLAPVLPLVTHFADINTFMVLQVIKFTKDLPVFRSLPIEDQISLLKGAAVEICHIVLNTTFCLQTQNFLCGPLRYTIEDGARVSPTVGFQVEFLELLFHFHGTLRKLQLQEPEYVLLAAMALFSPDRPGVTQRDEIDQLQEEMALTLQSYIKGQQRRPRDRSPGTPWIHWSGKMLGPKIGPGSKGAQWLQ

SEQ ID NO: 5379 - protein, 312 aa, Artificial Sequence
  Synthetic polypeptide
CLCPCSQQCILYIAGTVLFLKLVGLCHYSLKTSNGSPSQMILSAEALALRRAKQAQRRAQQTPVQLSKEQEELIRTLLGAHTRHMGTMFEQFVQFRPPAHLFIHHQPLPTLAPVLPLVTHFADINTFMVLQVIKFTKDLPVFRSLPIEDQISLLKGAAVEICHIVLNTTFCLQTQNFLCGPLRYTIEDGARVSPTVGFQVEFLELLFHFHGTLRKLQLQEPEYVLLAAMALFSPDRPGVTQRDEIDQLQEEMALTLQSYIKGQQRRPRDRFLYAKLLGLLAELRSINEAYGYQIQHIQGLSAMMPLLQEICS

SEQ ID NO: 5380 - protein, 263 aa, Artificial Sequence
  Synthetic polypeptide
CLCPCSQQCILYIAGTVLFLKLVGLCHYSLKTSNGSPSQMILSAEALALRRAKQAQRRAQQTPVQLSKEQEELIRTLLGAHTRHMGTMFEQFVQFRPPAHLFIHHQPLPTLAPVLPLVTHFADINTFMVLQVIKFTKDLPVFRSLPIEDQISLLKGAAVEICHIVLNTTFCLQTQNFLCGPLRYTIEDGARVSPTVGFQVEFLELLFHFHGTLRKLQLQEPEYVLLAAMALFSPGEHLPKPRAFCCTTSAQILSSLSPSTQAF

SEQ ID NO: 5381 - protein, 313 aa, Artificial Sequence
  Synthetic polypeptide
CLCPCSQQCILYIAGTVLFLKLVGLCHYSLKTSNGSPSQMILSAEALALRRAKQAQRRAQQTPVQLSKEQEELIRTLLGAHTRHMGTMFEQFVQFRPPAHLFIHHQPLPTLAPVLPLVTHFADINTFMVLQVIKFTKDLPVFRSLPIEDQISLLKGAAVEICHIVLNTTFCLQTQNFLCGPLRYTIEDGARVGFQVEFLELLFHFHGTLRKLQLQEPEYVLLAAMALFSPAPYLTDRPGVTQRDEIDQLQEEMALTLQSYIKGQQRRPRDRFLYAKLLGLLAELRSINEAYGYQIQHIQGLSAMMPLLQEICS

SEQ ID NO: 5382 - protein, 269 aa, Artificial Sequence
  Synthetic polypeptide
CLCPCSQQCILYIAGTVLFLKLVGLCHYSLKTSNGSPSQMILSAEALALRRAKQAQRRAQQTPVQLSKEQEELIRTLLGAHTRHMGTMFEQFVQFRPPAHLFIHHQPLPTLAPVLPLVTHFADINTFMVLQVIKFTKDLPVFRSLPIEDQISLLKGAAVEICHIVLNTTFCLQTQNFLCGPLRYTIEDGARDRPGVTQRDEIDQLQEEMALTLQSYIKGQQRRPRDRFLYAKLLGLLAELRSINEAYGYQIQHIQGLSAMMPLLQEICS

SEQ ID NO: 5383 - protein, 269 aa, Artificial Sequence; identical to SEQ ID NO: 5382
  Synthetic polypeptide

SEQ ID NO: 5384 - protein, 274 aa, Artificial Sequence
  Synthetic polypeptide
CLCPCSQQCILYIAGTVLFLKLVGLCHYSLKTSNGSPSQMILSAEALALRRAKQAQRRAQQTPVQLSKEQEELIRTLLGAHTRHMGTMFEQFVQFRPPAHLFIHHQPLPTLAPVLPLVTHFADINTFMVLQVIKFTKDLPVFRSLPIEDQISLLKGAAVEICHIVLNTTFCLQTQNFLCGPLRYTIEDGARAPYLTDRPGVTQRDEIDQLQEEMALTLQSYIKGQQRRPRDRFLYAKLLGLLAELRSINEAYGYQIQHIQGLSAMMPLLQEICS

SEQ ID NO: 5385 - protein, 286 aa, Artificial Sequence
  Synthetic polypeptide
CLCPCSQQCILYIAGTVLFLKLVGLCHYSLKTSNGSPSQMILSAEALALRRAKQAQRRAQQTPVQLSKEQEELIRTLLGAHTRHMGTMFEQFVQFRPPAHLFIHHQPLPTLAPVLPLVTHFADINTFMVLQVIKFTKDLPVFRSLPIEDQISLLKGAAVEICHIVLNTTFCLQTQNFLCGPLRYTIEDGARVGFQVEFLELLFHFHGTLRKLQLQEPEYVLLAAMALFSPDRPGVTQRDEIDQLQEEMALTLQSYIKGQQRRPRDRYGGTLRAWRPHQGRKGLVKH

SEQ ID NO: 5386 - protein, 198 aa, Artificial Sequence
  Synthetic polypeptide
CLCPCSQQCILYIAGTVLFLKLVGLCHYSLKTSNGSPSQMILSAEALALRRAKQAQRRAQQTPVQLSKEQEELIRTLLGAHTRHMGTMFEQFVQFRPPAHLFIHHQPLPTLAPVLPLVTHFADINTFMVLQVIKFTKDLPVFRSLPIEDQISLLKGAAVEICHIVLNTTFCLQTQNFLCGPLRYTIEDGARGEMVLEQ

SEQ ID NO: 5387 - protein, 33 aa, Artificial Sequence
  Synthetic polypeptide
MVPRFQLACGLKISQRLWCSWSLNGTGCSRRTV

SEQ ID NO: 5388 - protein, 33 aa, Artificial Sequence; identical to SEQ ID NO: 5387
  Synthetic polypeptide

SEQ ID NO: 5389 - protein, 33 aa, Artificial Sequence; identical to SEQ ID NO: 5387
  Synthetic polypeptide

SEQ ID NO: 5390 - protein, 48 aa, Artificial Sequence
  Synthetic polypeptide
ARNEENAGSNWGILMSEASHFTPLGPRITLWNQRASTRWSLGFSWHAD

SEQ ID NO: 5391 - protein, 48 aa, Artificial Sequence; identical to SEQ ID NO: 5390
  Synthetic polypeptide

SEQ ID NO: 5392 - protein, 48 aa, Artificial Sequence; identical to SEQ ID NO: 5390
  Synthetic polypeptide

SEQ ID NO: 5393 - protein, 48 aa, Artificial Sequence; identical to SEQ ID NO: 5390
  Synthetic polypeptide

SEQ ID NO: 5394 - protein, 48 aa, Artificial Sequence; identical to SEQ ID NO: 5390
  Synthetic polypeptide

SEQ ID NO: 5395 - protein, 48 aa, Artificial Sequence; identical to SEQ ID NO: 5390
  Synthetic polypeptide

SEQ ID NO: 5396 - protein, 32 aa, Artificial Sequence
  Synthetic polypeptide
MVPRFQLACGLISQRLWCSWSLNGTGCSRRTV

SEQ ID NO: 5397 - protein, 32 aa, Artificial Sequence; identical to SEQ ID NO: 5396
  Synthetic polypeptide

SEQ ID NO: 5398 - protein, 32 aa, Artificial Sequence; identical to SEQ ID NO: 5396
  Synthetic polypeptide

SEQ ID NO: 5399 - protein, 164 aa, Artificial Sequence
  Synthetic polypeptide
TREAEVVIRELEPLLCHSDNPSQLIWTSSRSARKSNFSLEDFQHSKGKEPYSSSKYATDLLSVALNRNFNQQLRFFANAFTLTPYNGTEALVWLFHQKPESLNPLIKYLSATTGFGRNYIMTQKMDLDEDTAEKFYQKLLELEKHIRVTIQKTDNQARLSGSCL

SEQ ID NO: 5400 - protein, 31 aa, Artificial Sequence
  Synthetic polypeptide
SQLLGRLRQKNRLNPGSGSCDSGTGASPLSQ

SEQ ID NO: 5401 - protein, 31 aa, Artificial Sequence; identical to SEQ ID NO: 5400
  Synthetic polypeptide

SEQ ID NO: 5402 - protein, 199 aa, Artificial Sequence
  Synthetic polypeptide
TREAEVVIRELEPLLCHSDNPSQLIWTSSRSARKSNFSLEDFQHSKGKEPYSSSKYATDLLSVALNRNFNQQGLYSNVACPGTALTNLTYGILPPFIWTLLMPAILLLRFFANAFTLTPYNGTEALVWLFHQKPESLNPLIKYLSATTGFGRNYIMTQKMDLDEDTAEKFYQKLLELEKHIRVTIQKTDNQARLSGSCL

SEQ ID NO: 5403 - protein, 200 aa, Artificial Sequence
  Synthetic polypeptide
VHVLCRDLDEAGNHHSQQTIARTKNQTAHVLTHRAKEIKIKLGILLQKPDSVGDLVIPYNEKPEKPAKTQKTSLDEALQWRDSLDKLLQNNYGLASFKSFLKSEFSEENLEFWIACEDYKKIKSPAKMAEKAKQIYEEFIQTEAPKEVNIDHFTKDITMKNLVEPSLSSFDMAQKRIHALMEKDSLPRFVRSEFYQELIK

SEQ ID NO: 5404 - protein, 200 aa, Artificial Sequence; identical to SEQ ID NO: 5403
  Synthetic polypeptide

SEQ ID NO: 5405 - protein, 194 aa, Artificial Sequence
  Synthetic polypeptide
DCKLVQPLWKSVWRFLRDLELEIPFDPAILLLGIYPKDYKSCCYKDTCTHMFIVALFTIAKTWNQPKCPTMIDWIKKMWHIYTMEYYAAIKNDEFMSFVGTWMKLETIILSKLLQGQKTKQHMFSLIGPRRLRSSWEFSSRSQTQLVTLSFRTMRSQRNQPRPRKPRWTRPCSGVIPWTNSCRTTMDLPVSKVS

SEQ ID NO: 5406 - protein, 194 aa, Artificial Sequence; identical to SEQ ID NO: 5405
  Synthetic polypeptide

SEQ ID NO: 5407 - protein, 194 aa, Artificial Sequence; identical to SEQ ID NO: 5405
  Synthetic polypeptide

SEQ ID NO: 5408 - protein, 204 aa, Artificial Sequence
  Synthetic polypeptide
VHVLCRDLDEAGNHHSQQTIARTKNQTAHVLTHRAKEIKIKLGILLQKPDSVGDLVIPYNEKPEKPAKTQKTSLDEALQWRDSLDKLLQNNYGLASFKSFLKSEFSEENLEFWIACEDYKKIKSPAKMAEKAKQIYEEFIQTEAPKEVGLWVNIDHFTKDITMKNLVEPSLSSFDMAQKRIHALMEKDSLPRFVRSEFYQELIK

SEQ ID NO: 5409 - protein, 131 aa, Artificial Sequence
  Synthetic polypeptide
NPGTVTYSLYVSRLPWPHWLYIHEPISSLVHREANGQPPQLHRYPSECPTDSECSGDPPQCPGLSISSHHLCHGPTLRSTCSASRNQLGCPTQLSAKCGQQCQQFRGHQALTRASRDWKHELPIHQPRISG

SEQ ID NO: 5410 - protein, 473 aa, Artificial Sequence
  Synthetic polypeptide
QLRDEPCSLTSFARILALLLIPCMSLGSPGHTGSTSMSPSAALSTGKPMDSHPSYTDTPVSAPRTLSAVGTPLNALGSPYRVITSAMGPPSGALAAPPGINLVAPPSSQLNVVNSVSSSEDIKPLPGLPGIGNMNYPSTSPGSLVKHICAICGDRSSGKHYGVYSCEGCKGFFKRTIRKDLIYTCRDNKDCLIDKRQRNRCQYCRYQKCLVMGMKREAVQEERQRSRERAESEAECATSGHEDMPVERILEAELAVEPKTESYGDMNMENSTNDPVTNICHAADKQLFTLVEWAKRIPHFSDLTLEDQVILLRAGWNELLIASFSHRSVSVQDGILLATGLHVHRSSAHSAGVGSIFDRVLTELVSKMKDMQMDKSELGCLRAIVLFNPDAKGLSNPSEVETLREKVYATLEAYTKQKYPEQPGRFAKLLLRLPALRSIGLKCLEHLFFFKLIGDTPIDTFLMEMLETPLQIT

SEQ ID NO: 5411 - protein, 273 aa, Artificial Sequence
  Synthetic polypeptide
DSALGLSKSFHVINFLSSSFLIRKKEDKVILVVMELNEIMSSECHSSVCAKIVQLLGQNEVDYRQKQVVILSQDSFYRVLTSEQKAKALKGQFNFDHPDAFDNELILKTLKEITEGKTVQIPVYDFVSHSRKEETVTVYPADVVLFEGILAFYSQEVRDLFQMKLFVDTDADTRLSRRVLRDISERGRDLEQILSQYITFVKPAFEEFCLPTKKYADVIIPRGADNLVAINLIVQHIQDILNGGPSKRQTNGCLNGYTPSRKRQASESSSRPH

SEQ ID NO: 5412 - protein, 31 aa, Artificial Sequence
  Synthetic polypeptide
CLQNAILPCVLRSCSSWGRMRWTIARSRWSS

SEQ ID NO: 5413 - protein, 31 aa, Artificial Sequence; identical to SEQ ID NO: 5412
  Synthetic polypeptide

SEQ ID NO: 5414 - protein, 12 aa, Artificial Sequence
  Synthetic polypeptide
DNVFRMPFFRVC

SEQ ID NO: 5415 - protein, 12 aa, Artificial Sequence
  Synthetic polypeptide
DNVFRMPFFRVC

SEQ ID NO: 5416 - protein, 142 aa, Artificial Sequence
  Synthetic polypeptide
DSALGLSKSFHVINFLSSSFLIRKKEDKVILVVMELNEIMSSECHSSVCAKIVQLLGQNEVDYRQKQVVILSQDSFYRVLTSEQKAKALKGQFNFDHPDAFDNELILKTLKEITEGKTVQIPVYDFVSHSRIKGHQRERQGS

SEQ ID NO: 5417 - protein, 34 aa, Artificial Sequence
  Synthetic polypeptide
DPGRRRQLLSIPQTWCSLKGSWPSTPRRYETCSR

SEQ ID NO: 5418 - protein, 31 aa, Artificial Sequence
  Synthetic polypeptide
LHFRLIKSELLGGRIQEGGDSYCLSRRRGAL

SEQ ID NO: 5419 - protein, 161 aa, Artificial Sequence
  Synthetic polypeptide
SSSSTSDSLNQSSLGVGSRKEETVTVYPADVVLFEGILAFYSQEVRDLFQMKLFVDTDADTRLSRRVLRDISERGRDLEQILSQYITFVKPAFEEFCLPTKKYADVIIPRGADNLVAINLIVQHIQDILNGGPSKRQTNGCLNGYTPSRKRQASESSSRPH

SEQ ID NO: 5420 - protein, 146 aa, Artificial Sequence
  Synthetic polypeptide
EEAQSFGLLDPKLCYLLDGILFIYGVILTALFLRVKFSRSADAPAYQQGQNQLYNELNLGRREEYDVLDKRRGRDPEMGGKPQRRKNPQEGLYNELQKDKMAEAYSEIGMKGERRRGKGHDGLYQGLSTATKDTYDALHMQALPPR

SEQ ID NO: 5421 - protein, 32 aa, Artificial Sequence
  Synthetic polypeptide
KRHRALACWIPNSATCWMESSSSMVSFSLPCS

SEQ ID NO: 5422 - protein, 32 aa, Artificial Sequence; identical to SEQ ID NO: 5421
  Synthetic polypeptide

SEQ ID NO: 5423 - protein, 145 aa, Artificial Sequence
  Synthetic polypeptide
EEAQSFGLLDPKLCYLLDGILFIYGVILTALFLRVKFSRSADAPAYQQGQNQLYNELNLGRREEYDVLDKRRGRDPEMGGKPRRKNPQEGLYNELQKDKMAEAYSEIGMKGERRRGKGHDGLYQGLSTATKDTYDALHMQALPPR

SEQ ID NO: 5424 - protein, 79 aa, Artificial Sequence
  Synthetic polypeptide
AALACPVEHPCWGLQPARVTRILRALLGRHLPRWDTSPEQCVAGPRGGSTEWLNTGKELALGVRTTKTWKKRIYPKIKT

SEQ ID NO: 5425 - protein, 79 aa, Artificial Sequence; identical to SEQ ID NO: 5424
  Synthetic polypeptide

SEQ ID NO: 5426 - protein, 79 aa, Artificial Sequence; identical to SEQ ID NO: 5424
  Synthetic polypeptide

SEQ ID NO: 5427 - protein, 79 aa, Artificial Sequence; identical to SEQ ID NO: 5424
  Synthetic polypeptide

SEQ ID NO: 5428 - protein, 79 aa, Artificial Sequence; identical to SEQ ID NO: 5424
  Synthetic polypeptide

SEQ ID NO: 5429 - protein, 863 aa, Artificial Sequence
  Synthetic polypeptide
TPGRNWHLESGQLKLGRREFIQRLKLEATLNVHDGCVNTICWNDTGEYILSGSDDTKLVISNPYSRKVLTTIRSGHRANIFSAKFLPCTNDKQIVSCSGDGVIFYTNVEQDAETNRQCQFTCHYGTTYEIMTVPNDPYTFLSCGEDGTVRWFDTRIKTSCTKEDCKDDILINCRRAATSVAICPPIPYYLAVGCSDSSVRIYDRRMLGTRATGNYAGRGTTGMVARFIPSHLNNKSCRVTSLCYSEDGQEILVSYSSDYIYLFDPKDDTARELKTPSAEERREELRQPPVKRLRLRGDWSDTGPRARPESERERDGEQSPNVSLMQRMSDMLSRWFEEASEVAQSNRGRGRSRPRGGTSQSDISTLPTVPSSPDLEVSETAMEVDTPAEQFLQPSTSSTMSAQAHSTSSPTESPHSTPLLSSPDSEQRQSVEASGHHTHHQSDSPSSVVNKQLGSMSLDEQQDNNNEKLSPKPGTGEPVLSLHYSTEGTTTSTIKLNFTDEWSSIASSSRGIGSHCKSEGQEESFVPQSSVQPPEGDSETKAPEESSEDVTKYQEGVSAENPVENHINITQSDKFTAKPLDSNSGERNDLNLDRSCGVPEESASSEKAKEPETSDQTSTESATNENNTNPEPQFQTEATGPSAHEETSTRDSALQDTDDSDDDPVLIPGARYRAGPGDRRSAVARIQEFFRRRKERKEMEELDTLNIRRPLVKMVYKGHRNSRTMIKEANFWGANFVMSGSDCGHIFIWDRHTAEHLMLLEADNHVVNCLQPHPFDPILASSGIDYDIKIWSPLEESRIFNRKLADEVITRNELMLEETRNTITVPASFMLRMLASLNHIRADRLEGDRSEGSGQENENEDEE

SEQ ID NO: 5430 - protein, 10 aa, Artificial Sequence
  Synthetic polypeptide
NLEEENLSKD

SEQ ID NO: 5431 - protein, 10 aa, Artificial Sequence
  Synthetic polypeptide
NLEEENLSKD

SEQ ID NO: 5432 - protein, 10 aa, Artificial Sequence
  Synthetic polypeptide
NLEEENLSKD

SEQ ID NO: 5433 - protein, 10 aa, Artificial Sequence
  Synthetic polypeptide
NLEEENLSKD

SEQ ID NO: 5434 - protein, 10 aa, Artificial Sequence
  Synthetic polypeptide
NLEEENLSKD

SEQ ID NO: 5435 - protein, 455 aa, Artificial Sequence
  Synthetic polypeptide
TPGRNWHLESGQLKLGRREFIQRLKLEATLNVHDGCVNTICWNDTGEYILSGSDDTKLVISNPYSRKVLTTIRSGHRANIFSAKFLPCTNDKQIVSCSGDGVIFYTNVEQDAETNRQCQFTCHYGTTYEIMTVPNDPYTFLSCGEDGTVRWFDTRIKTSCTKEDCKDDILINCRRAATSVAICPPIPYYLAVGCSDSSVRIYDRRMLGTRATGNYAGRGTTGMVARFIPSHLNNKSCRVTSLCYSEDGQEILVSYSSDYIYLFDPKDDTARELKTPSAEERREELRQPPVKRLRLRGDWSDTGPRARPESERERDGEQSPNVSLMQRMSDMLSRWFEEASEVAQSNRGRGRSRPRGGTSQSDISTLPTVPSSPDLEVSETAMEVDTPAEQFLQPSTSSTMSAQAHSTSSPTESPHSTPLLSSPDSEQRQSVEASGHHTHHQSGPLKSWVAGSCSE

SEQ ID NO: 5436 - protein, 903 aa, Artificial Sequence
  Synthetic polypeptide
TPGRNWHLESGQLKLGRREFIQRLKLEATLNVHDGCVLTTIRSGHRANIFSAKFLPCTNDKQIVSCSGDGVIFYTNVEQDAETNRQCQFTCHYGTTYEIMTVPNDPYTFLSCGEDGTVRWFDTRIKTSCTKEDCKDDILINCRRAATSVAICPPIPYYLAVGCSDSSVRIYDRRMLGTRATGNYAGRGTTGMVARFIPSHLNNKSCRVTSLCYSEDGQEILVSYSSDYIYLFDPKDDTARELKTPSAEERREELRQPPVKRLRLRGDWSDTGPRARPESERERDGEQSPNVSLMQRMSDMLSRWFEEASEVAQSNRGRGRSRPRGGTSQSDISTLPTVPSSPDLEVSETAMEVDTPAEQFLQPSTSSTMSAQAHSTSSPTESPHSTPLLSSPDSEQRQSVEASGHHTHHQSEFLRGPEIALLRKRLQQLRLKKAEQQRQQELAAHTQQQPSTSDQSSHEGSSQDPHASDSPSSVVNKQLGSMSLDEQQDNNNEKLSPKPGTGEPVLSLHYSTEGTTTSTIKLNFTDEWSSIASSSRGIGSHCKSEGQEESFVPQSSVQPPEGDSETKAPEESSEDVTKYQEGVSAENPVENHINITQSDKFTAKPLDSNSGERNDLNLDRSCGVPEESASSEKAKEPETSDQTSTESATNENNTNPEPQFQTEATGPSAHEETSTRDSALQDTDDSDDDPVLIPGARYRAGPGDRFNIRGTTIGDRIMRRSAVARIQEFFRRRKERKEMEELDTLNIRRPLVKMVYKGHRNSRTMIKEANFWGANFVMSGSDCGHIFIWDRHTAEHLMLLEADNHVVNCLQPHPFDPILASSGIDYDIKIWSPLEESRIFNRKLADEVITRNELMLEETRNTITVPASFMLRMLASLNHIRADRLEGDRSEGSGQENENEDEE

SEQ ID NO: 5437 - protein, 843 aa, Artificial Sequence
  Synthetic polypeptide
TPGRNWHLESGQLKLGRREFIQRLKLEATLNVHDGCVNTICWNDTGEYILSGSDDTKLVISNPYSRKVLTTIRSGHRANIFSAKFLPCTNDKQIVSCSGDGVIFYTNVEQDAETNRQCQFTCHYGTTYEIMTVPNDPYTFLSCGEDGTVRWFDTRIKTSCTKEDCKDDILINCRRAATSVAICPPIPYYLAVGCSDSSVRIYDRRMLGTRATGNYAGRGTTGMVARFIPSHLNNKSCRVTSLCYSEDGQEILVSYSSDYIYLFDPKDDTARELKTPSAEERREELRQPPVKRLRLRGDWSDTGPRARPESERERDGEQSPNVSLMQRMSDMLSRWFEEASEVAQSNRGRGRSRPRGGTSQSDISTLPTVPSSPDLEVSETAMEVDTPAEQFLQPSTSSTMSAQAHSTSSPTESPHSTPLLSSPDSEQRQSVEASGHHTHHQSDNNNEKLSPKPGTGEPVLSLHYSTEGTTTSTIKLNFTDEWSSIASSSRGIGSHCKSEGQEESFVPQSSVQPPEGDSETKAPEESSEDVTKYQEGVSAENPVENHINITQSDKFTAKPLDSNSGERNDLNLDRSCGVPEESASSEKAKEPETSDQTSTESATNENNTNPEPQFQTEATGPSAHEETSTRDSALQDTDDSDDDPVLIPGARYRAGPGDRRSAVARIQEFFRRRKERKEMEELDTLNIRRPLVKMVYKGHRNSRTMIKEANFWGANFVMSGSDCGHIFIWDRHTAEHLMLLEADNHVVNCLQPHPFDPILASSGIDYDIKIWSPLEESRIFNRKLADEVITRNELMLEETRNTITVPASFMLRMLASLNHIRADRLEGDRSEGSGQENENEDEE

SEQ ID NO: 5438 - protein, 934 aa, Artificial Sequence
  Synthetic polypeptide
TPGRNWHLESGQLKLGRREFIQRLKLEATLNVHDGCVNTICWNDTGEYILSGSDDTKLVISNPYSRKVLTTIRSGHRANIFSAKFLPCTNDKQIVSCSGDGVIFYTNVEQDAETNRQCQFTCHYGTTYEIMTVPNDPYTFLSCGEDGTVRWFDTRIKTSCTKEDCKDDILINCRRAATSVAICPPIPYYLAVGCSDSSVRIYDRRMLGTRATGNYAGRGTTGMVARFIPSHLNNKSCRVTSLCYSEDGQEILVSYSSDYIYLFDPKDDTARELKTPSAEERREELRQPPVKRLRLRGDWSDTGPRARPESERERDGEQSPNVSLMQRMSDMLSRWFEEASEVAQSNRGRGRSRPRGGTSQSDISTLPTVPSSPDLEVSETAMEVDTPAEQFLQPSTSSTMSAQAHSTSSPTESPHSTPLLSSPDSEQRQSVEASGHHTHHQSEFLRGPEIALLRKRLQQLRLKKAEQQRQQELAAHTQQQPSTSDQSSHEGSSQDPHASDSPSSVVNKQLGSMSLDEQQDNNNEKLSPKPGTGEPVLSLHYSTEGTTTSTIKLNFTDEWSSIASSSRGIGSHCKSEGQEESFVPQSSVQPPEGDSETKAPEESSEDVTKYQEGVSAENPVENHINITQSDKFTAKPLDSNSGERNDLNLDRSCGVPEESASSEKAKEPETSDQTSTESATNENNTNPEPQFQTEATGPSAHEETSTRDSALQDTDDSDDDPVLIPGARYRAGPGDRFNIRGTTIGDRIMRRSAVARIQEFFRRRKERKEMEELDTLNIRRPLVKMVYKGHRNSRTMIKEANFWGANFVMSGSDCGHIFIWDRHTAEHLMLLEADNHVVNCLQPHPFDPILASSGIDYDIKIWSPLEESRIFNRKLADEVITRNELMLEETRNTITVPASFMLRMLASLNHIRADRLEGDRSEGSGQENENEDEE

SEQ ID NO: 5439 - protein, 26 aa, Artificial Sequence
  Synthetic polypeptide
SQIAWLSVFLPWVWATMLSCTPWCTP

SEQ ID NO: 5440 - protein, 26 aa, Artificial Sequence
  Synthetic polypeptide
SQIAWLSVFLPWVWATMLSCTPWCTP

SEQ ID NO: 5441 - protein, 26 aa, Artificial Sequence
  Synthetic polypeptide
SQIAWLSVFLPWVWATMLSCTPWCTP

SEQ ID NO: 5442 - protein, 26 aa, Artificial Sequence
  Synthetic polypeptide
SQIAWLSVFLPWVWATMLSCTPWCTP

SEQ ID NO: 5443 - protein, 26 aa, Artificial Sequence
  Synthetic polypeptide
SQIAWLSVFLPWVWATMLSCTPWCTP

SEQ ID NO: 5444 - protein, 26 aa, Artificial Sequence
  Synthetic polypeptide
SQIAWLSVFLPWVWATMLSCTPWCTP

SEQ ID NO: 5445 - protein, 26 aa, Artificial Sequence
  Synthetic polypeptide
SQIAWLSVFLPWVWATMLSCTPWCTP

SEQ ID NO: 5446 - protein, 63 aa, Artificial Sequence
  Synthetic polypeptide
DCRVRSPGFLSFSHGSGLLCCPVPHGVPHEDHREPGCDGTCLHLASLAHRLPATPVWLVIRGV

SEQ ID NO: 5447 - protein, 63 aa, Artificial Sequence; identical to SEQ ID NO: 5446
  Synthetic polypeptide

SEQ ID NO: 5448 - protein, 63 aa, Artificial Sequence; identical to SEQ ID NO: 5446
  Synthetic polypeptide

SEQ ID NO: 5449 - protein, 63 aa, Artificial Sequence; identical to SEQ ID NO: 5446
  Synthetic polypeptide

SEQ ID NO: 5450 - protein, 63 aa, Artificial Sequence; identical to SEQ ID NO: 5446
  Synthetic polypeptide

SEQ ID NO: 5451 - protein, 63 aa, Artificial Sequence; identical to SEQ ID NO: 5446
  Synthetic polypeptide

SEQ ID NO: 5452 - protein, 63 aa, Artificial Sequence; identical to SEQ ID NO: 5446
  Synthetic polypeptide

SEQ ID NO: 5453 - protein, 421 aa, Artificial Sequence
  Synthetic polypeptide
IVESDRLAFCLSPMGLGYYAVLYPMVYPMKITGNRAVMALVYIWLHSLIGCLPPLFGWSSVEFDEFKWMCVAAWHREPGYTAFWQIWCALFPFLVMLVCYGFIFRVARVKARKVHCGTVVIVEEDAQRTGRKNSSTSTSSSGSRRNAFQGVVYSANQCKALITILVVLGAFMVTWGPYMVVIASEALWGKSSVSPSLETWATWLSFASAVCHPLIYGLWNKTVRKELLGMCFGDRYYREPFVQRQRTSRLFSISNRITDLGLSPHLTALMAGGQPLGHSSSTGDTGFSCSQDSGTDMMLLEDYTSDDNPPSHCTCPPKRRSSVTFEDEVEQIKEAAKNSILHVKAEVHKSLDSYAASLAKAIEAEAKINLFGEEALPGVLVTARTVPGGGFGGRRGSRTLVSQRLQLQSIEEGDVLAAEQR

SEQ ID NO: 5454 - protein, 421 aa, Artificial Sequence; identical to SEQ ID NO: 5453
  Synthetic polypeptide

SEQ ID NO: 5455 - protein, 421 aa, Artificial Sequence; identical to SEQ ID NO: 5453
  Synthetic polypeptide

SEQ ID NO: 5456 - protein, 421 aa, Artificial Sequence; identical to SEQ ID NO: 5453
  Synthetic polypeptide

SEQ ID NO: 5457 - protein, 421 aa, Artificial Sequence; identical to SEQ ID NO: 5453
  Synthetic polypeptide

SEQ ID NO: 5458 - protein, 421 aa, Artificial Sequence; identical to SEQ ID NO: 5453
  Synthetic polypeptide

SEQ ID NO: 5459 - protein, 421 aa, Artificial Sequence; identical to SEQ ID NO: 5453
  Synthetic polypeptide

SEQ ID NO: 5460 - protein, 26 aa, Artificial Sequence
  Synthetic polypeptide
SWIFLPPEQKINFCCLSPGLRNFAMV

SEQ ID NO: 5461 - protein, 12 aa, Artificial Sequence
  Synthetic polypeptide
VLVYGILLWCRE

SEQ ID NO: 5462 - protein, 133 aa, Artificial Sequence
  Synthetic polypeptide
EMRPRNETCLASVLILDFPASRTENKFLLFKSWSTEFCYGVGSEVSDKRTCVSLTTQRLPVSRIKTYTITEGSLRAVIFITKRGLKVCADPQATWVRDVVRSMDRKSNTRNNMIQTKPTGTQQSTNTAVTLTG

SEQ ID NO: 5463 - protein, 122 aa, Artificial Sequence
  Synthetic polypeptide
GQARRLMPVIPALWEAKTGFVDETEAAKVERVKQEKGIFWEPFANVTVEEAKRSSLQPYAKRARQEFPWEEEYRSALHTIAGALEATESLLQKGPAPAWLSMEMEALQERMDKLKRYIHTLG

SEQ ID NO: 5464 - protein, 122 aa, Artificial Sequence; identical to SEQ ID NO: 5463
  Synthetic polypeptide

SEQ ID NO: 5465 - protein, 11 aa, Artificial Sequence
  Synthetic polypeptide
SQHFGRPRLGL

SEQ ID NO: 5466 - protein, 11 aa, Artificial Sequence
  Synthetic polypeptide
SQHFGRPRLGL

SEQ ID NO: 5467 - protein, 21 aa, Artificial Sequence
  Synthetic polypeptide
PGAAAHACNPSTLGGQDWVCR

SEQ ID NO: 5468 - protein, 21 aa, Artificial Sequence
  Synthetic polypeptide
PGAAAHACNPSTLGGQDWVCR

SEQ ID NO: 5469 - protein, 72 aa, Artificial Sequence
  Synthetic polypeptide
ISLMRSDGFIRRSFPAQALSLLAAMHVRCDLLFFIFHHDCEASPATRNYQSLQCNKMLRFCCLWPMGGGHYA

SEQ ID NO: 5470 - protein, 72 aa, Artificial Sequence; identical to SEQ ID NO: 5469
  Synthetic polypeptide

SEQ ID NO: 5471 - protein, 72 aa, Artificial Sequence; identical to SEQ ID NO: 5469
  Synthetic polypeptide

SEQ ID NO: 5472 - protein, 72 aa, Artificial Sequence; identical to SEQ ID NO: 5469
  Synthetic polypeptide

SEQ ID NO: 5473 - protein, 122 aa, Artificial Sequence
  Synthetic polypeptide
DVICSSLSSTMIVRLPQPQGTTKVCSVTKCSDSAVSGQWEVVTMHEEKQESAIFDAVMVCTGFLTNPYLPLDSFPGINAFKGQYFHSRQYKHPDIFKDKRVLVIGMGNSGTDIAVEASHLAE

SEQ ID NO: 5474 - protein, 13 aa, Artificial Sequence
  Synthetic polypeptide
GFPSHKELPKSAV

SEQ ID NO: 5475 - protein, 13 aa, Artificial Sequence
  Synthetic polypeptide
GFPSHKELPKSAV

SEQ ID NO: 5476 - protein, 13 aa, Artificial Sequence
  Synthetic polypeptide
GFPSHKELPKSAV

SEQ ID NO: 5477 - protein, 13 aa, Artificial Sequence
  Synthetic polypeptide
GFPSHKELPKSAV

SEQ ID NO: 5478 - protein, 446 aa, Artificial Sequence
  Synthetic polypeptide
DVICSSLSSTMIVRLPQPQGTTKVCSVTKCSDSAVSGQWEVVTMHEEKQESAIFDAVMVCTGFLTNPYLPLDSFPGINAFKGQYFHSRQYKHPDIFKDKRVLVIGMGNSGTDIAVEASHLAEKVFLSTTGGGWVISRIFDSGYPWDMVFMTRFQNMLRNSLPTPIVTWLMERKINNWLNHANYGLIPEDRTQLKEFVLNDELPGRIITGKVFIRPSIKEVKENSVIFNNTSKEEPIDIIVFATGYTFAFPFLDESVVKVEDGQASLYKYIFPAHLQKPTLAIIGLIKPLGSMIPTGETQARWAVRVLKGVNKLPPPSVMIEEINARKENKPSWFGLCYCKALQSDYITYIDELLTYINAKPNLFSMLLTDPHLALTVFFGPCSPYQFRLTGPGKWEGARNAIMTQWDRTFKVIKARVVQESPSPFESFLKVFSFLALLVAIFLIFL

SEQ ID NO: 5479 - protein, 446 aa, Artificial Sequence; identical to SEQ ID NO: 5478
  Synthetic polypeptide

SEQ ID NO: 5480 - protein, 446 aa, Artificial Sequence; identical to SEQ ID NO: 5478
  Synthetic polypeptide

SEQ ID NO: 5481 - protein, 365 aa, Artificial Sequence
  Synthetic polypeptide
VTIILLQIPSQTGLLPDLQQGFPLLPHEIYSNQRCKEHLNSYFLQEVFPDHLQLKEKEKKYMLPLDNLKVRDVEKSFMSSKHIFALFNTEQRNVYKDYRFLELACDSQEDVDSWKASLLRAGVYPDKSVGNNKAENDENGQAENFSMDPQLERQVETIRNLVDSYMSIINKCIRDLIPKTIMHLMINNVKDFINSELLAQLYSSEDQNTLMEESAEQAQRRDEMLRMYQALKEALGIIGDISTATVSTPAPPPVDDSWIQHSRRSPPPSPTTQRRPTLSAPLARPTSGRGPAPAIPSPGPHSGAPPVPFRPGPLPPFPSSSDSFGAPPQVPSRPTRAPPSVPSRRPPPSPTRPTIIRPLESSLLD

SEQ ID NO: 5482 - protein, 28 aa, Artificial Sequence
  Synthetic polypeptide
ILTSFKKSSRITSNSRKKKRSTCFPWTT

SEQ ID NO: 5483 - protein, 28 aa, Artificial Sequence
  Synthetic polypeptide
ILTSFKKSSRITSNSRKKKRSTCFPWTT

SEQ ID NO: 5484 - protein, 28 aa, Artificial Sequence
  Synthetic polypeptide
ILTSFKKSSRITSNSRKKKRSTCFPWTT

SEQ ID NO: 5485 - protein, 28 aa, Artificial Sequence
  Synthetic polypeptide
ILTSFKKSSRITSNSRKKKRSTCFPWTT

SEQ ID NO: 5486 - protein, 51 aa, Artificial Sequence
  Synthetic polypeptide
NLQQPTLQGTFKFLLPSRSLPGSPPTQGKRKEVHASLGQPESSGCGKELYV

SEQ ID NO: 5487 - protein, 51 aa, Artificial Sequence; identical to SEQ ID NO: 5486
  Synthetic polypeptide

SEQ ID NO: 5488 - protein, 51 aa, Artificial Sequence; identical to SEQ ID NO: 5486
  Synthetic polypeptide

SEQ ID NO: 5489 - protein, 51 aa, Artificial Sequence; identical to SEQ ID NO: 5486
  Synthetic polypeptide

SEQ ID NO: 5490 - protein, 361 aa, Artificial Sequence
  Synthetic polypeptide
VTIILLQIPSQTGLLPDLQQGFPLLPHEIYSNQRCKEHLNSYFLQEVFPDHLQLKEKEKKYMLPLDNLKVRDVEKSFMSSKHIFALFNTEQRNVYKDYRFLELACDSQEDVDSWKASLLRAGVYPDKSVAENDENGQAENFSMDPQLERQVETIRNLVDSYMSIINKCIRDLIPKTIMHLMINNVKDFINSELLAQLYSSEDQNTLMEESAEQAQRRDEMLRMYQALKEALGIIGDISTATVSTPAPPPVDDSWIQHSRRSPPPSPTTQRRPTLSAPLARPTSGRGPAPAIPSPGPHSGAPPVPFRPGPLPPFPSSSDSFGAPPQVPSRPTRAPPSVPSRRPPPSPTRPTIIRPLESSLLD

SEQ ID NO: 5491 - protein, 361 aa, Artificial Sequence; identical to SEQ ID NO: 5490
  Synthetic polypeptide

SEQ ID NO: 5492 - protein, 141 aa, Artificial Sequence
  Synthetic polypeptide
VTIILLQIPSQTGLLPDLQQGFPLLPHEIYSNQRCKEHLNSYFLQEVFPDHLQLKEKEKKYMLPLDNLKVRDVEKSFMSSKHIFALFNTEQRNVYKDYRFLELACDSQEDVDSWKASLLRAGVYPDKSVVSWIYLLCKNYY

SEQ ID NO: 5493 - protein, 57 aa, Artificial Sequence
  Synthetic polypeptide
VTIILLQIPSQTGLLPDLQQGFPLLPHEIYSNQRCKEHLNSYFLQEVFPDHLQLKEK

SEQ ID NO: 5494 - protein, 17 aa, Artificial Sequence
  Synthetic polypeptide
ILTSFKKSSRITSNSRK

SEQ ID NO: 5495 - protein, 29 aa, Artificial Sequence
  Synthetic polypeptide
NLQQPTLQGTFKFLLPSRSLPGSPPTQGK

SEQ ID NO: 5496 - protein, 57 aa, Artificial Sequence
  Synthetic polypeptide
LLFTTKPPEEPRQLQPQLPVSRNLPSIDGTQTRLETNLICRLMKLTLINVAPWYWML

SEQ ID NO: 5497 - protein, 44 aa, Artificial Sequence
  Synthetic polypeptide
FNSCSLQSLPRSPDSCSHSSPYQEICHLSMGPRQGWRQTSYADL

SEQ ID NO: 5498 - protein, 266 aa, Artificial Sequence
  Synthetic polypeptide
MFNLTLVHYKASRGAQTAAATAPRIKKFAIYRWDPDKAGDKPHMQTYEVDLNKCGPMVLDALIKIKNEVDSTLTFRRSCREGICGSCAMNINGGNTLACTRRIDTNLNKVSKIYPLPHMYVIKDLVPDLSNFYAQYKSIEPYLKKKDESQEGKQQYLQSIEEREKLDGLYECILCACCSTSCPSYWWNGDKYLGPAVLMQAYRWMIDSRDDFTEERLAKLQDPFSLYRCHTIMNCTRTCPKGLNPGKAIAEIKKMMATYKEKKASV

SEQ ID NO: 5499 - protein, 297 aa, Artificial Sequence
  Synthetic polypeptide
ERALVCKPEDLDDSPSSTATLYELIVDAEDTWIRLEGLLENTDYTVLLQAAQDTTWSSITSTAFTTGGRVFPHPQDCAQHLMNGDTLSGVYPIFLNGELSQKLQVYCDMTTDGGGWIVFQRRQNGQTDFFRKWADYRVGFGNVEDEFWLGLDNIHRITSQGRYELRVDMRDGQEAAFASYDRFSVEDSRNLYKLRIGSYNGTAGDSLSYHQGRPFSTEDRDNDVAVTNCAMSYKGAWWYKNCHRTNLNGKYGESRHSQGINWYHWKGHEFSIPFVEMKMRPYNHRLMAGRKRQSLQF

SEQ ID NO: 5500 - protein, 297 aa, Artificial Sequence; identical to SEQ ID NO: 5499
  Synthetic polypeptide

SEQ ID NO: 5501 - protein, 19 aa, Artificial Sequence
  Synthetic polypeptide
SASQKIWMIVLALLLLSTS

SEQ ID NO: 5502 - protein, 19 aa, Artificial Sequence
  Synthetic polypeptide
SASQKIWMIVLALLLLSTS

SEQ ID NO: 5503 - protein, 91 aa, Artificial Sequence
  Synthetic polypeptide
LYCYSLRADCGCRRHLDSTGGPVGEHRLHGAPAGSTGHHVEQHHLHRFHHRRPGVPSSPRLCPAFDEWRHFEWGLPHLPQWGAEPEITSVL

SEQ ID NO: 5504 - protein, 91 aa, Artificial Sequence; identical to SEQ ID NO: 5503
  Synthetic polypeptide

SEQ ID NO: 5505 - protein, 21 aa, Artificial Sequence
  Synthetic polypeptide
SQHFGRPRQADHLSRWRDHPC

SEQ ID NO: 5506 - protein, 21 aa, Artificial Sequence
  Synthetic polypeptide
SQHFGRPRQADHLSRWRDHPC

SEQ ID NO: 5507 - protein, 77 aa, Artificial Sequence
  Synthetic polypeptide
WASWLTLVIPTLWEAKAGGSLESLERPSLLTESVRNFGLLTCFLAPTILPPCMPPMDLSPVAPSAPTFLLSWTLRQT

SEQ ID NO: 5508 - protein, 77 aa, Artificial Sequence; identical to SEQ ID NO: 5507
  Synthetic polypeptide

SEQ ID NO: 5509 - protein, 79 aa, Artificial Sequence
  Synthetic polypeptide
LYVNMVVLGKYLGIPKPYGPIINGRCCLEEKVQSLLEPLGLHCIFIDDYLSYHELQGEIHCGTNVRRKPFPFKWWNMVP

SEQ ID NO: 5510 - protein, 79 aa, Artificial Sequence; identical to SEQ ID NO: 5509
  Synthetic polypeptide

SEQ ID NO: 5511 - protein, 79 aa, Artificial Sequence; identical to SEQ ID NO: 5509
  Synthetic polypeptide

SEQ ID NO: 5512 - protein, 79 aa, Artificial Sequence; identical to SEQ ID NO: 5509
  Synthetic polypeptide

SEQ ID NO: 5513 - protein, 37 aa, Artificial Sequence
  Synthetic polypeptide
KCSISVQYSPVATQLPPEMWLVSMKNRNCNFMLTWWS

SEQ ID NO: 5514 - protein, 37 aa, Artificial Sequence; identical to SEQ ID NO: 5513
  Synthetic polypeptide

SEQ ID NO: 5515 - protein, 37 aa, Artificial Sequence; identical to SEQ ID NO: 5513
  Synthetic polypeptide

SEQ ID NO: 5516 - protein, 37 aa, Artificial Sequence; identical to SEQ ID NO: 5513
  Synthetic polypeptide

SEQ ID NO: 5517 - protein, 8 aa, Artificial Sequence
  Synthetic polypeptide
RTEIVTLC

SEQ ID NO: 5518 - protein, 8 aa, Artificial Sequence
  Synthetic polypeptide
RTEIVTLC

SEQ ID NO: 5519 - protein, 8 aa, Artificial Sequence
  Synthetic polypeptide
RTEIVTLC

SEQ ID NO: 5520 - protein, 8 aa, Artificial Sequence
  Synthetic polypeptide
RTEIVTLC

SEQ ID NO: 5521 - protein, 81 aa, Artificial Sequence
  Synthetic polypeptide
DAAALCPQQEPGHGEGWGWAHVPLSIFMASVVPALQGHLVGNLGGMMSRSRPSPSTRCSPIKTSSTTISLCRAASTGTVRC

SEQ ID NO: 5522 - protein, 104 aa, Artificial Sequence
  Synthetic polypeptide
FCFVRSDGSVEHLRGLEPLLRHSPVSQPPCLPGTDSLLPTSVLPGASVQGLPHLCHCPEMLQHSAPSRSLGMGRAGVGHMCHSASSWHQSSLPCKGIWWATWEG

SEQ ID NO: 5523 - protein, 245 aa, Artificial Sequence
  Synthetic polypeptide
GLMDQWSIYGAWSLCSGTVLSPSLPASLAQILCCLLLCSLEPQCKASPISVTVLRCCSTLPPAGAWAWGGLGLGTCATQHLHGISRPCPARAFGGQLGRDDEQVKTISINQVLSNKDLINYNKFVQSCIDWNREVLKRELGLAECDIIDIPQLFKTERKKATAFFPDLVNMLVLGKHLGIPKPFGPIINGCCCLEEKVRSLLEPLGLHCTFIDDFTPYHMLHGEVHCGTNVCRKPFSFKWWNMVP

SEQ ID NO: 5524 - protein, 27 aa, Artificial Sequence
  Synthetic polypeptide
LCLEKEEDQRRIEITTSCNLNRQLPIR

SEQ ID NO: 5525 - protein, 27 aa, Artificial Sequence
  Synthetic polypeptide
LCLEKEEDQRRIEITTSCNLNRQLPIR

SEQ ID NO: 5526 - protein, 27 aa, Artificial Sequence
  Synthetic polypeptide
LCLEKEEDQRRIEITTSCNLNRQLPIR

SEQ ID NO: 5527 - protein, 27 aa, Artificial Sequence
  Synthetic polypeptide
LCLEKEEDQRRIEITTSCNLNRQLPIR

SEQ ID NO: 5528 - protein, 356 aa, Artificial Sequence
  Synthetic polypeptide
RKKRTKEELKSPPPVILIGNSPSDESEERERDPKVLTFPEYITSLSDSGTKHMAAGVRMECHSKGRCPSSCPLCHVTSSPDTPAEPVLLEVTKAAPIYELVTNNQTQRLLQEATMSSLWCSGTGDVIEDWCRCDSTAFGADGLPTCAPLPQPVLRLSTVHEPSSTLVVLEWEHSEPPIGVQIVDYLLRQEKVTDRMDHSKVETETVLSFVDDIISGAKSPCAMPSQVPDKQLTTISLIIRCLEPDTIYMFTLWGVDNTGRRSRPSDVIVKTPCPVVDDVKAQEIADKIYNLFNGYTSGKEQQTAYNTLLDLGSPTLHRVLYHYNQHYESFGEFTWRCEDELGPRLPACWDSQRSCR

SEQ ID NO: 5529 - protein, 422 aa, Artificial Sequence
  Synthetic polypeptide
RKKRTKEELKSPPPVILIGNSPSDESEERERDPKVLTFPEYITSLSDSGTKHMAAGVRMECHSKGRCPSSCPLCHVTSSPDTPAEPVLLEVTKAAPIYELVTNNQTQRLLQEATMSSLWCSGTGDVIEDWCRCDSTAFGADGLPTCAPLPQPVLRLSTVHEPSSTLVVLEWEHSEPPIGVQIVDYLLRQEKVTDRMDHSKVETETVLSFVDDIISGAKSPCAMPSQVPDKQLTTISLIIRCLEPDTIYMFTLWGVDNTGRRSRPSDVIVKTPCPVVDDVKAQEIADKIYNLFNGYTSGKEQQTAYNTLLDLGSPTLHRVLYHYNQHYESFGEFTWRCEDELGPRKAGLILSQLGDLSSWCNGLLQEPKISLRRSSLKYLGCRYSEIKPYGLDWAELSRDLRKTCEEQTLSIPYNDYGDSKEI

SEQ ID NO: 5530 - protein, 422 aa, Artificial Sequence; identical to SEQ ID NO: 5529
  Synthetic polypeptide

SEQ ID NO: 5531 - protein, 344 aa, Artificial Sequence
  Synthetic polypeptide
RKKRTKEELKSPPPVILIGNSPSDESEERERDPKVLTFPEYITSLSDSGTKHMAAGVRMECHSKGRCPSSCPLCHVTSSPDTPAEPVLLEVTKAAPIYELVTNNQTQRLLQEATMSSLWCSGTGDVIEDWCRCDSTAFGADGLPTCAPLPQPVLRLSTVHEPSSTLVVLEWEHSEPPIGVQIVDYLLRQEKVTDRMDHSKVETETVLSFVDDIISGAKSPCAMPSQVPDKQLTTISLIIRCLEPDTIYMFTLWGVDNTGRRSRPSDVIVKTPCPVVDDVKAQEIADKIYNLFNGYTSGKEQQTAYNTLLDLGSPTLHRVLYHYNQHYESFGEFTWRCEDELGPR

SEQ ID NO: 5532 - protein, 15 aa, Artificial Sequence
  Synthetic polypeptide
RDIYSRKSTKICLCL

SEQ ID NO: 5533 - protein, 68 aa, Artificial Sequence
  Synthetic polypeptide
GQKANEETSIQENLQKFASACEFLDIVELLLQSGADPTLRDQDGCLPEEVTGCKTVSLVLQRHTTGKA

SEQ ID NO: 5534 - protein, 62 aa, Artificial Sequence
  Synthetic polypeptide
FQHDNVRSSTDMLPCQTGENYFWNYRHLIASRNGTKDKKQMKRHLFKKIYKNLPLPVSFWIL

SEQ ID NO: 5535 - protein, 1023 aa, Artificial Sequence
  Synthetic polypeptide
CWHKKTYCTASPIKAYSNVPGLHIHSPLTDSPRTTSSPASSIHEIIGSTNLIILLEDEVFADFFNTFLSLPVFGQTPFYTVENSQWSLWPEIPCNLIAKYKGLLTWLEKCRLPFFCKTNLCFHYILCQEFISFIKSPEGAKMMRWKKADQWLLQKCIGGVRGMWRFYSYLTGSAGEELVDFWILAENILSIDEMDLEVRDYYLSLLLMLRATHLQEGSRVVTLCNMNIKSLLNLSIWHPNQSTTRREILSHMQKVALFKLQSYWLPNFYTHTKMTMAKEEACHGLMQEYETRLYSVCYTHIGGLPLNMSIKKCHHFQKRYSSRKAKRKMWQLVDPDSWSLEMDLKPDAIGMPLQETCPQEKVVIQMPSLKMASSKETRISSLEKDMHYAKISSMENKAKSHLHMEAPFETKVSTHLRTVIPIVNHSSKMTIQKAIKQSFSLGYIHLALCADACAGNPFRDHLKKLNLKVEIQLLDLWQDLQHFLSVLLNNKKNGNAIFRHLLGDRICELYLNEQIGPCLPLKSQTIQGLKELLPSGDVIPWIPKAQKEICKMLSPWYDEFLDEEDYWFLLFTTQNRFISSRQHKREFIGKEENILLYKRIQQSLELSQALADMKEMDYRQWRKIATEDLKQGGSLQVELTSPVFLTDITKMSFEELCYKNPKMAIQKISDDYKIYCEKAPKIDFKMEIIKETKTVSRSNRKMSLLKRTLVRKPSMRPRNLTEVLLNTQHLEFFREFLKERKAKIPLQFLTAVQKISIETNEKICKSLIENVIKTFFQGQLSPEEMLQCDAPIIKEIASMRHVTTSTLLTLQGHVMKSIEEKWFKDYQDLFPPHHQEVEVQSEVQISSRKPSKIVSTYLQESQKKGWMRMISFIRSFCKYRRFMLNPSKRQEFEDYLHQEMQNSKENFTTAHNTSGRSAPPSTNVRSADQENGEITLVKRRIFGHRIITVNFAINDLYFFSEMEKFNDLVSSAHMLQVNRAYNENDVILMRSKMNIIQKLFLNSDIPPKLRVLFLEGNPLLLTV

SEQ ID NO: 5536 - protein, 1023 aa, Artificial Sequence; identical to SEQ ID NO: 5535
  Synthetic polypeptide

SEQ ID NO: 5537 - protein, 31 aa, Artificial Sequence
  Synthetic polypeptide
KHTVMSQAFTFTHHSLIHPEQLPVLQAPFMR

SEQ ID NO: 5538 - protein, 31 aa, Artificial Sequence; identical to SEQ ID NO: 5537
  Synthetic polypeptide

SEQ ID NO: 5539 - protein, 31 aa, Artificial Sequence; identical to SEQ ID NO: 5537
  Synthetic polypeptide

SEQ ID NO: 5540 - protein, 31 aa, Artificial Sequence; identical to SEQ ID NO: 5537
  Synthetic polypeptide

SEQ ID NO: 5541 - protein, 31 aa, Artificial Sequence; identical to SEQ ID NO: 5537
  Synthetic polypeptide

SEQ ID NO: 5542 - protein, 1115 aa, Artificial Sequence
  Synthetic polypeptide
CWHKKTYCTASPIKAYSNVPGLHIHSPLTDSPRTTSSPASSIHEIIGSTNLIILLEDEVFADFFNTFLSLPVFGQTPFYTVENSQWSLWPEIPCNLIAKYKGLLTWLEKCRLPFFCKTNLCFHYILCQEFISFIKSPEGGEELVDFWILAENILSIDEMDLEVRDYYLSLLLMLRATHLQEGSRVVTLCNMNIKSLLNLSIWHPNQSTTRREILSHMQKVALFKLQSYWLPNFYTHTKMTMAKEEACHGLMQEYETRLYSVCYTHIGGLPLNMSIKKCHHFQKRYSSRKAKRKMWQLVDPDSWSLEMDLKPDAIGMPLQETCPQEKVVIQMPSLKMASSKETRISSLEKDMHYAKISSMENKAKSHLHMEAPFETKVSTHLRTVIPIVNHSSKMTIQKAIKQSFSLGYIHLALCADACAGNPFRDHLKKLNLKVEIQLLDLWQDLQHFLSVLLNNKKNGNAIFRHLLGDRICELYLNEQIGPCLPLKSQTIQGLKELLPSGDVIPWIPKAQKEICKMLSPWYDEFLDEEDYWFLLFTTQNRFISSRQHKREFIGKEENILLYKRIQQSLELSQALADMKEMDYRQWRKIATEDLKQGGSLQVELTSPVFLTDITKMSFEELCYKNPKMAIQKISDDYKIYCEKAPKIDFKMEIIKETKTVSRSNRKMSLLKRTLVRKPSMRPRNLTEVLLNTQHLEFFREFLKERKAKIPLQFLTAVQKISIETNEKICKSLIENVIKTFFQGQLSPEEMLQCDAPIIKEIASMRHVTTSTLLTLQGHVMKSIEEKWFKDYQDLFPPHHQEVEVQSEVQISSRKPSKIVSTYLQESQKKGWMRMISFIRSFCKYRRFMLNPSKRQEFEDYLHQEMQNSKENFTTAHNTSGRSAPPSTNVRSADQENGEITLVKRRIFGHRIITVNFAINDLYFFSEMEKFNDLVSSAHMLQVNRAYNENDVILMRSKMNIIQKLFLNSDIPPKLRVNVPEFQKDAILAAITEGYLDRSVFHGAIMSVFPVVMYFWKRFCFWKATRSYLQYRGKKFKDRKSPPKSTDKYPFSSGGDNAILRFTLLRGIEWLQPQREAISSVQNSSSSKLTQPRLVVSAMQLHPVQGQKLSYIKKEK

SEQ ID NO: 5543 - protein, 199 aa, Artificial Sequence
  Synthetic polypeptide
CWHKKTYCTASPIKAYSNVPGLHIHSPLTDSPRTTSSPASSIHEIIGSTNLIILLEDEVFADFFNTFLSLPVFGQTPFYTVENSQWSLWPEIPCNLIAKYKGLLTWLEKCRLPFFCKTNLCFHYILCQEFISFIKSPEGGEELVDFWILAENILSIDEMDLEVRDYYLSLLLMLRATHLQEGSRVVTLCNMNINAQSLV

SEQ ID NO: 5544 - protein, 193 aa, Artificial Sequence
  Synthetic polypeptide
CWHKKTYCTASPIKAYSNVPGLHIHSPLTDSPRTTSSPASSIHEIIGSTNLIILLEDEVFADFFNTFLSLPVFGQTPFYTVENSQWSLWPEIPCNLIAKYKGLLTWLEKCRLPFFCKTNLCFHYILCQEFISFIKSPEGEARVSLLKSNWWWCWRDSQEDDEIGSTRNLFPHLDNNCTGRICMICSVPGMMSF

SEQ ID NO: 5545 - protein, 11 aa, Artificial Sequence
  Synthetic polypeptide
VTLSLHREKVR

SEQ ID NO: 5546 - protein, 11 aa, Artificial Sequence
  Synthetic polypeptide
VTLSLHREKVR

SEQ ID NO: 5547 - protein, 11 aa, Artificial Sequence
  Synthetic polypeptide
VTLSLHREKVR

SEQ ID NO: 5548 - protein, 11 aa, Artificial Sequence
  Synthetic polypeptide
VTLSLHREKVR

SEQ ID NO: 5549 - protein, 11 aa, Artificial Sequence
  Synthetic polypeptide
VTLSLHREKVR

SEQ ID NO: 5550 - protein, 983 aa, Artificial Sequence
  Synthetic polypeptide
GEGEIIGSTNLIILLEDEVFADFFNTFLSLPVFGQTPFYTVENSQWSLWPEIPCNLIAKYKGLLTWLEKCRLPFFCKTNLCFHYILCQEFISFIKSPEGAKMMRWKKADQWLLQKCIGGVRGMWRFYSYLTGSAGEELVDFWILAENILSIDEMDLEVRDYYLSLLLMLRATHLQEGSRVVTLCNMNIKSLLNLSIWHPNQSTTRREILSHMQKVALFKLQSYWLPNFYTHTKMTMAKEEACHGLMQEYETRLYSVCYTHIGGLPLNMSIKKCHHFQKRYSSRKAKRKMWQLVDPDSWSLEMDLKPDAIGMPLQETCPQEKVVIQMPSLKMASSKETRISSLEKDMHYAKISSMENKAKSHLHMEAPFETKVSTHLRTVIPIVNHSSKMTIQKAIKQSFSLGYIHLALCADACAGNPFRDHLKKLNLKVEIQLLDLWQDLQHFLSVLLNNKKNGNAIFRHLLGDRICELYLNEQIGPCLPLKSQTIQGLKELLPSGDVIPWIPKAQKEICKMLSPWYDEFLDEEDYWFLLFTTQNRFISSRQHKREFIGKEENILLYKRIQQSLELSQALADMKEMDYRQWRKIATEDLKQGGSLQVELTSPVFLTDITKMSFEELCYKNPKMAIQKISDDYKIYCEKAPKIDFKMEIIKETKTVSRSNRKMSLLKRTLVRKPSMRPRNLTEVLLNTQHLEFFREFLKERKAKIPLQFLTAVQKISIETNEKICKSLIENVIKTFFQGQLSPEEMLQCDAPIIKEIASMRHVTTSTLLTLQGHVMKSIEEKWFKDYQDLFPPHHQEVEVQSEVQISSRKPSKIVSTYLQESQKKGWMRMISFIRSFCKYRRFMLNPSKRQEFEDYLHQEMQNSKENFTTAHNTSGRSAPPSTNVRSADQENGEITLVKRRIFGHRIITVNFAINDLYFFSEMEKFNDLVSSAHMLQVNRAYNENDVILMRSKMNIIQKLFLNSDIPPKLRVLFLEGNPLLLTV

SEQ ID NO: 5551 - protein, 983 aa, Artificial Sequence; identical to SEQ ID NO: 5550
  Synthetic polypeptide

SEQ ID NO: 5552 - protein, 1075 aa, Artificial Sequence
  Synthetic polypeptide
GEGEIIGSTNLIILLEDEVFADFFNTFLSLPVFGQTPFYTVENSQWSLWPEIPCNLIAKYKGLLTWLEKCRLPFFCKTNLCFHYILCQEFISFIKSPEGGEELVDFWILAENILSIDEMDLEVRDYYLSLLLMLRATHLQEGSRVVTLCNMNIKSLLNLSIWHPNQSTTRREILSHMQKVALFKLQSYWLPNFYTHTKMTMAKEEACHGLMQEYETRLYSVCYTHIGGLPLNMSIKKCHHFQKRYSSRKAKRKMWQLVDPDSWSLEMDLKPDAIGMPLQETCPQEKVVIQMPSLKMASSKETRISSLEKDMHYAKISSMENKAKSHLHMEAPFETKVSTHLRTVIPIVNHSSKMTIQKAIKQSFSLGYIHLALCADACAGNPFRDHLKKLNLKVEIQLLDLWQDLQHFLSVLLNNKKNGNAIFRHLLGDRICELYLNEQIGPCLPLKSQTIQGLKELLPSGDVIPWIPKAQKEICKMLSPWYDEFLDEEDYWFLLFTTQNRFISSRQHKREFIGKEENILLYKRIQQSLELSQALADMKEMDYRQWRKIATEDLKQGGSLQVELTSPVFLTDITKMSFEELCYKNPKMAIQKISDDYKIYCEKAPKIDFKMEIIKETKTVSRSNRKMSLLKRTLVRKPSMRPRNLTEVLLNTQHLEFFREFLKERKAKIPLQFLTAVQKISIETNEKICKSLIENVIKTFFQGQLSPEEMLQCDAPIIKEIASMRHVTTSTLLTLQGHVMKSIEEKWFKDYQDLFPPHHQEVEVQSEVQISSRKPSKIVSTYLQESQKKGWMRMISFIRSFCKYRRFMLNPSKRQEFEDYLHQEMQNSKENFTTAHNTSGRSAPPSTNVRSADQENGEITLVKRRIFGHRIITVNFAINDLYFFSEMEKFNDLVSSAHMLQVNRAYNENDVILMRSKMNIIQKLFLNSDIPPKLRVNVPEFQKDAILAAITEGYLDRSVFHGAIMSVFPVVMYFWKRFCFWKATRSYLQYRGKKFKDRKSPPKSTDKYPFSSGGDNAILRFTLLRGIEWLQPQREAISSVQNSSSSKLTQPRLVVSAMQLHPVQGQKLSYIKKEK

SEQ ID NO: 5553 - protein, 159 aa, Artificial Sequence
  Synthetic polypeptide
GEGEIIGSTNLIILLEDEVFADFFNTFLSLPVFGQTPFYTVENSQWSLWPEIPCNLIAKYKGLLTWLEKCRLPFFCKTNLCFHYILCQEFISFIKSPEGGEELVDFWILAENILSIDEMDLEVRDYYLSLLLMLRATHLQEGSRVVTLCNMNINAQSLV

SEQ ID NO: 5554 - protein, 153 aa, Artificial Sequence
  Synthetic polypeptide
GEGEIIGSTNLIILLEDEVFADFFNTFLSLPVFGQTPFYTVENSQWSLWPEIPCNLIAKYKGLLTWLEKCRLPFFCKTNLCFHYILCQEFISFIKSPEGEARVSLLKSNWWWCWRDSQEDDEIGSTRNLFPHLDNNCTGRICMICSVPGMMSF

SEQ ID NO: 5555 - protein, 85 aa, Artificial Sequence
  Synthetic polypeptide
HCSFLCLKHFPQLSQAFFHVLQDRAGSIVLKVLISFKANDIEKAVQSLDKNGVDLLMKYIYKGFESPSDNSSAMLLQWHEKVPLV

SEQ ID NO: 5556 - protein, 22 aa, Artificial Sequence
  Synthetic polypeptide
NTFLSYPKPSFTSFRTGQAALS

SEQ ID NO: 5557 - protein, 22 aa, Artificial Sequence
  Synthetic polypeptide
NTFLSYPKPSFTSFRTGQAALS

SEQ ID NO: 5558 - protein, 22 aa, Artificial Sequence
  Synthetic polypeptide
NTFLSYPKPSFTSFRTGQAALS

SEQ ID NO: 5559 - protein, 65 aa, Artificial Sequence
  Synthetic polypeptide
LTHVLFSHQSTPTTLGFFLFLEHTEHTLIALFFPLSETLSSVIPSLLSRPSGPGRQHCLEGAHLF

SEQ ID NO: 5560 - protein, 65 aa, Artificial Sequence; identical to SEQ ID NO: 5559
  Synthetic polypeptide

SEQ ID NO: 5561 - protein, 65 aa, Artificial Sequence; identical to SEQ ID NO: 5559
  Synthetic polypeptide

SEQ ID NO: 5562 - protein, 101 aa, Artificial Sequence
  Synthetic polypeptide
HCSFLCLKHFPQLSQAFFHVLQDRAGSIVLKVLISFKANDIEKAVQSLDKNGVDLLMKYIYKGFESPSDNSSAMLLQWHEKALAAGGVGSIVRVLTARKTV

SEQ ID NO: 5563 - protein, 101 aa, Artificial Sequence; identical to SEQ ID NO: 5562
  Synthetic polypeptide

SEQ ID NO: 5564 - protein, 17 aa, Artificial Sequence
  Synthetic polypeptide
VTDYSDSRNMFQIKYRY

SEQ ID NO: 5565 - protein, 798 aa, Artificial Sequence
  Synthetic polypeptide
VKTPESPITLIPETCSKSSIDIENGFISESQYTYALKEKAKYQCKLGYVTADGETSGSITCGKDGWSAQPTCIKSCDIPVFMNARTKNDFTWFKLNDTLDYECHDGYESNTGSTTGSIVCGYNGWSDLPICYERECELPKIDVHLVPDRKKDQYKVGEVLKFSCKPGFTIVGPNSVQCYHFGLSPDLPICKEQVQSCGPPPELLNGNVKEKTKEEYGHSEVVEYYCNPRFLMKGPNKIQCVDGEWTTLPVCIVEESTCGDIPELEHGWAQLSSPPYYYGDSVEFNCSESFTMIGHRSITCIHGVWTQLPQCVAIDKLKKCKSSNLIILEEHLKNKKEFDHNSNIRYRCRGKEGWIHTVCINGRWDPEVNCSMAQIQLCPPPPQIPNSHNMTTTLNYRDGEKVSVLCQENYLIQEGEEITCKDGRWQSIPLCVEKIPCSQPPQIEHGTINSSRSSQESYAHGTKLSYTCEGGFRISEENETTCYMGKWSSPPQCEGLPCKSPPEISHGVVAHMSDSYQYGEEVTYKCFEGFGIDGPAIAKCLGEKWSHPPSCIKTDCLSLPSFENAIPMGEKKDVYKAGEQVTYTCATYYKMDGASNVTCINSRWTGRPTCRDTSCVNPPTVQNAYIVSRQMSKYPSGERVRYQCRSPYEMFGDEEVMCLNGNWTEPPQCKDSTGKCGPPPPIDNGDITSFPLSVYAPASSVEYQCQNLYQLEGNKRITCRNGQWSEPPKCLHPCVISREIMENYNIALRWTAKQKLYSRTGESVEFVCKRGYRLSSRSHTLRTTCWDGKLEYPTCAKR

SEQ ID NO: 5566 - protein, 9 aa, Artificial Sequence
  Synthetic polypeptide
FQKHVPNQV

SEQ ID NO: 5567 - protein, 100 aa, Artificial Sequence
  Synthetic polypeptide
SRTNRPWCEEGFDPGSAIATCMTRMEKDETVSDCSPHIANIGRLVEDMENKIRSTLNEIYFGKTKDIVNGLRSVQTFADKSKQEALKNDLVEALKRKQQC

SEQ ID NO: 5568 - protein, 100 aa, Artificial Sequence; identical to SEQ ID NO: 5567
  Synthetic polypeptide

SEQ ID NO: 5569 - protein, 100 aa, Artificial Sequence; identical to SEQ ID NO: 5567
  Synthetic polypeptide

SEQ ID NO: 5570 - protein, 8 aa, Artificial Sequence
  Synthetic polypeptide
LGWRRMKL

SEQ ID NO: 5571 - protein, 8 aa, Artificial Sequence
  Synthetic polypeptide
LGWRRMKL

SEQ ID NO: 5572 - protein, 8 aa, Artificial Sequence
  Synthetic polypeptide
LGWRRMKL

SEQ ID NO: 5573 - protein, 8 aa, Artificial Sequence
  Synthetic polypeptide
LGWRRMKL

SEQ ID NO: 5574 - protein, 8 aa, Artificial Sequence
  Synthetic polypeptide
LGWRRMKL

SEQ ID NO: 5575 - protein, 8 aa, Artificial Sequence
  Synthetic polypeptide
LGWRRMKL

SEQ ID NO: 5576 - protein, 8 aa, Artificial Sequence
  Synthetic polypeptide
LGWRRMKL

SEQ ID NO: 5577 - protein, 62 aa, Artificial Sequence
  Synthetic polypeptide
SRTNRPWCEEGFDPGSAIATCMTRMEKDETVSDCSPHIANIGRLVEVCADFCRQIKTRSSEE

SEQ ID NO: 5578 - protein, 105 aa, Artificial Sequence
  Synthetic polypeptide
SRTNRPWCEEGFDPGSAIATCMTRMEKDETVSDCSPHIANIGRLVEDMENKIRSTLNEIYFGKTKDIVNGLRSIDAIPDNQKFKQLQRELSQVLTQRQIYIQPDN

SEQ ID NO: 5579 - protein, 105 aa, Artificial Sequence; identical to SEQ ID NO: 5578
  Synthetic polypeptide

SEQ ID NO: 5580 - protein, 46 aa, Artificial Sequence
  Synthetic polypeptide
SRTNRPWCEEGFDPGSAIATCMTRMEKDETVSDCSPHIANIGRLVE

SEQ ID NO: 5581 - protein, 22 aa, Artificial Sequence
  Synthetic polypeptide
FRILSFDAWIIAAEGLTTGYGL

SEQ ID NO: 5582 - protein, 22 aa, Artificial Sequence
  Synthetic polypeptide
FRILSFDAWIIAAEGLTTGYGL

SEQ ID NO: 5583 - protein, 22 aa, Artificial Sequence
  Synthetic polypeptide
FRILSFDAWIIAAEGLTTGYGL

SEQ ID NO: 5584 - protein, 22 aa, Artificial Sequence
  Synthetic polypeptide
FRILSFDAWIIAAEGLTTGYGL

SEQ ID NO: 5585 - protein, 22 aa, Artificial Sequence
  Synthetic polypeptide
FRILSFDAWIIAAEGLTTGYGL

SEQ ID NO: 5586 - protein, 22 aa, Artificial Sequence
  Synthetic polypeptide
FRILSFDAWIIAAEGLTTGYGL

SEQ ID NO: 5587 - protein, 313 aa, Artificial Sequence
  Synthetic polypeptide
VAVESANSLCPGYNSSSLEYCHLMPGLLQQKALRPDMGYNTLANFRIEKKIGRGQFSEVYRAACLLDGVPVALKKVQIFDLMDAKARADCIKEIDLLKQLNHPNVIKYYASFIEDNELNIVLELADAGDLSRMIKHFKKQKRLIPERTVWKYFVQLCSALEHMHSRRVMHRDIKPANVFITATGVVKLGDLGLGRFFSSKTTAAHSLVGTPYYMSPERIHENGYNFKSDIWSLGCLLYEMAALQSPFYGDKMNLYSLCKKIEQCDYPPLPSDHYSEELRQLVNMCINPDPEKRPDVTYVYDVAKRMHACTASS

SEQ ID NO: 5588 - protein, 313 aa, Artificial Sequence; identical to SEQ ID NO: 5587
  Synthetic polypeptide

SEQ ID NO: 5589 - protein, 18 aa, Artificial Sequence
  Synthetic polypeptide
CLDYCSRRPYDRIWAIIH

SEQ ID NO: 5590 - protein, 18 aa, Artificial Sequence
  Synthetic polypeptide
CLDYCSRRPYDRIWAIIH

SEQ ID NO: 5591 - protein, 18 aa, Artificial Sequence
  Synthetic polypeptide
CLDYCSRRPYDRIWAIIH

SEQ ID NO: 5592 - protein, 18 aa, Artificial Sequence
  Synthetic polypeptide
CLDYCSRRPYDRIWAIIH

SEQ ID NO: 5593 - protein, 18 aa, Artificial Sequence
  Synthetic polypeptide
CLDYCSRRPYDRIWAIIH

SEQ ID NO: 5594 - protein, 18 aa, Artificial Sequence
  Synthetic polypeptide
CLDYCSRRPYDRIWAIIH

SEQ ID NO: 5595 - protein, 43 aa, Artificial Sequence
  Synthetic polypeptide
VAVESANSLCPGYNSSSLEYCHLMPGLLQQKALRPDMGYNTLA

SEQ ID NO: 5596 - protein, 130 aa, Artificial Sequence
  Synthetic polypeptide
VAVESANSLCPGYNSSSLEYCHLMPGLLQQKALRPDMGYNTLANFRIEKKIGRGQFSEVYRAACLLDGVPVALKKVQVCLLPVWERRVCALNACYFLEIIKGSESLQYMATLTNLFENLPVSHHGSFAKK

SEQ ID NO: 5597 - protein, 73 aa, Artificial Sequence
  Synthetic polypeptide
VAVESANSLCPGYNSSSLEYCHLMPGLLQQKALRPDMGYNTLANFRIEKKIGRGQFSEVYRAACLLDGVPVAL

SEQ ID NO: 5598 - protein, 93 aa, Artificial Sequence
  Synthetic polypeptide
VAVESANSLCPGYNSSSLEYCHLMPGLLQQKALRPDMGYNTLANFRIEKKIGRGQFSEVYRAACLLDGVPVALKKVQIFDLMDAKARADCIKE

SEQ ID NO: 5599 - protein, 38 aa, Artificial Sequence
  Synthetic polypeptide
MLLLLLLLVPTVCVLRRSPDGAPVQVFVPEKGEIISQV

SEQ ID NO: 5600 - protein, 38 aa, Artificial Sequence; identical to SEQ ID NO: 5599
  Synthetic polypeptide

SEQ ID NO: 5601 - protein, 38 aa, Artificial Sequence
  Synthetic polypeptide
CCCCCFCWCPQFVCCGDRLMGPLCKSLYLKKERSSARC

SEQ ID NO: 5602 - protein, 38 aa, Artificial Sequence; identical to SEQ ID NO: 5601
  Synthetic polypeptide

SEQ ID NO: 5603 - protein, 18 aa, Artificial Sequence
  Synthetic polypeptide
AAAAASAGAHSLCAAEIA

SEQ ID NO: 5604 - protein, 18 aa, Artificial Sequence
  Synthetic polypeptide
AAAAASAGAHSLCAAEIA

SEQ ID NO: 5605 - protein, 2 aa, Artificial Sequence
  Synthetic polypeptide
VR

SEQ ID NO: 5606 - protein, 2 aa, Artificial Sequence
  Synthetic polypeptide
VR

SEQ ID NO: 5607 - protein, 2 aa, Artificial Sequence
  Synthetic polypeptide
VR

SEQ ID NO: 5608 - protein, 71 aa, Artificial Sequence
  Synthetic polypeptide
HWRASGGSPHPLQHRSRRLDETQERKLGNNPNSQCQHEAPRQHSEVGREAGEIPHGHTEIRICQVSGSALH

SEQ ID NO: 5609 - protein, 71 aa, Artificial Sequence; identical to SEQ ID NO: 5608
  Synthetic polypeptide

SEQ ID NO: 5610 - protein, 71 aa, Artificial Sequence; identical to SEQ ID NO: 5608
  Synthetic polypeptide

SEQ ID NO: 5611 - protein, 469 aa, Artificial Sequence
  Synthetic polypeptide
TDRSVEWCIGRLRLPSVEEAEVPKPLPPASKDEDEDIQSILRTRQERRQRRQVVEAAQAPIQERLEAEEGRNSLSPVQATQKPLVSKKELEIPPRRRLSREQRGPWALEEESLVGREPEERKKGVPEKSPVLEKSSMPKKTAPEKSLVSDKTSISEKVLASEKTSLSEKIAVSEKRNSSEKKSVLEKTSVSEKSLAPGMALGSGRRLVSEKASIFEKALASEKSPTADAKPAPKRATASEQPLAQEPPASGGSPATTKEQRGRALPGKNLPSLAKQGASDPPTVASRLPPVTLQVKIPSKEEEADMSSPTQRTYSSSLKRSSPRTISFRMKPKKENSETTLTRSASMKLPDNTVKLGEKLERYHTAIRRSESVKSRGLPCTELFVAPVGVASKRHLFEKELAGQSRAEPASSRKENLRLSGVVTSRLNLWISRTQESGDQDPQEAQKASSATERTQWGQKSDSSLDAEV

SEQ ID NO: 5612 - protein, 469 aa, Artificial Sequence; identical to SEQ ID NO: 5611
  Synthetic polypeptide

SEQ ID NO: 5613 - protein, 73 aa, Artificial Sequence
  Synthetic polypeptide
MTGVWNGASEDLDYRAWKKQRCPSHCPQPPKMRTRTSRASSEHGRSGGRGGRWWRLHRPPSRRGWRQRRGGTA

SEQ ID NO: 5614 - protein, 73 aa, Artificial Sequence; identical to SEQ ID NO: 5613
  Synthetic polypeptide

SEQ ID NO: 5615 - protein, 24 aa, Artificial Sequence
  Synthetic polypeptide
NQEPGFCQPYGLRLPWLLGEGHGT

SEQ ID NO: 5616 - protein, 24 aa, Artificial Sequence
  Synthetic polypeptide
NQEPGFCQPYGLRLPWLLGEGHGT

SEQ ID NO: 5617 - protein, 24 aa, Artificial Sequence
  Synthetic polypeptide
NQEPGFCQPYGLRLPWLLGEGHGT

SEQ ID NO: 5618 - protein, 24 aa, Artificial Sequence
  Synthetic polypeptide
NQEPGFCQPYGLRLPWLLGEGHGT

SEQ ID NO: 5619 - protein, 24 aa, Artificial Sequence
  Synthetic polypeptide
NQEPGFCQPYGLRLPWLLGEGHGT

SEQ ID NO: 5620 - protein, 281 aa, Artificial Sequence
  Synthetic polypeptide
LAPQSTACGLAALIKTRNLDFVNLMAYDFHGSWEKVTGHNSPLYKRQEESGAAASLNVDAAVQQWLQKGTPASKLILGMPTYGRSFTLASSSDTRVGAPATGSGTPGPFTKEGGMLAYYEVCSWKGATKQRIQDQKVPYIFRDNQWVGFDDVESFKTKVSYLKQKGLGGAMVWALDLDDFAGFSCNQGRYPLIQTLRQELSLPYLPSGTPELEVPKPGQPSEPEHGPSPGQDTFCQGKADGLYPNPRERSSFYSCAAGRLFQQSCPTGLVFSNSCKCCTWN

SEQ ID NO: 5621 - protein, 281 aa, Artificial Sequence; identical to SEQ ID NO: 5620
  Synthetic polypeptide

SEQ ID NO: 5622 - protein, 281 aa, Artificial Sequence; identical to SEQ ID NO: 5620
  Synthetic polypeptide

SEQ ID NO: 5623 - protein, 74 aa, Artificial Sequence
  Synthetic polypeptide
MLLKVQHVDSQPSLKPGTWILSTLWPTTSMALGRRSRDITAPSTRGKKRVVQQPASTWMLLCNSGCRRGPLPAS

SEQ ID NO: 5624 - protein, 74 aa, Artificial Sequence; identical to SEQ ID NO: 5623
  Synthetic polypeptide

SEQ ID NO: 5625 - protein, 74 aa, Artificial Sequence; identical to SEQ ID NO: 5623
  Synthetic polypeptide

SEQ ID NO: 5626 - protein, 74 aa, Artificial Sequence; identical to SEQ ID NO: 5623
  Synthetic polypeptide

SEQ ID NO: 5627 - protein, 74 aa, Artificial Sequence; identical to SEQ ID NO: 5623
  Synthetic polypeptide

SEQ ID NO: 5628 - protein, 202 aa, Artificial Sequence
  Synthetic polypeptide
LAPQSTACGLAALIKTRNLDFVNLMAYDFHGSWEKVTGHNSPLYKRQEESGAAASLNVDAAVQQWLQKGTPASKLILGMPTYGRSFTLASSSDTRVGAPATGSGTPGPFTKEGGMLAYYEVCSWKGATKQRIQDQKVPYIFRDNQWVGFDDVESFKTKVSYLKQKGLGGAMVWALDLDDFAGFSCNQGRYPLIQTLRQELNG

SEQ ID NO: 5629 - protein, 176 aa, Artificial Sequence
  Synthetic polypeptide
LAPQSTACGLAALIKTRNLDFVNLMAYDFHGSWEKVTGHNSPLYKRQEESGAAASLNVDAAVQQWLQKGTPASKLILGMPTYGRSFTLASSSDTRVGAPATGSGTPGPFTKEGGMLAYYEVCSWKGATKQRIQDQKVPYIFRDNQWVGFDDVESFKTKVMLTLRQGDCKMTDVQAA

SEQ ID NO: 5630 - protein, 39 aa, Artificial Sequence
  Synthetic polypeptide
GQSQWLMPIIPAVWEAKACGLLKPRNSRPAQAMWSRAVH

SEQ ID NO: 5631 - protein, 39 aa, Artificial Sequence; identical to SEQ ID NO: 5630
  Synthetic polypeptide

SEQ ID NO: 5632 - protein, 39 aa, Artificial Sequence; identical to SEQ ID NO: 5630
  Synthetic polypeptide

SEQ ID NO: 5633 - protein, 39 aa, Artificial Sequence; identical to SEQ ID NO: 5630
  Synthetic polypeptide

SEQ ID NO: 5634 - protein, 39 aa, Artificial Sequence; identical to SEQ ID NO: 5630
  Synthetic polypeptide

SEQ ID NO: 5635 - protein, 39 aa, Artificial Sequence; identical to SEQ ID NO: 5630
  Synthetic polypeptide

SEQ ID NO: 5636 - protein, 39 aa, Artificial Sequence; identical to SEQ ID NO: 5630
  Synthetic polypeptide

SEQ ID NO: 5637 - protein, 39 aa, Artificial Sequence; identical to SEQ ID NO: 5630
  Synthetic polypeptide

SEQ ID NO: 5638 - protein, 157 aa, Artificial Sequence
  Synthetic polypeptide
SQQFGRPRHVDCLSPGIQDQPRQCGHVRFIDYEYAGYNYQAFDIGNHFNEFAGVNEVDYCLYPARETQLQWLHYYLQAQKGMAVTPREVQRLYVQVNKFALGPSCVSSTMTASLQCCRVGNRHGEIARLTLSGLFPGVSLLLGSLGPHPEPVLHHRL

SEQ ID NO: 5639 - protein, 40 aa, Artificial Sequence
  Synthetic polypeptide
AQEFKTSPGNVVTCGSLTMNMLATTTKLLTLATISMSLQA

SEQ ID NO: 5640 - protein, 40 aa, Artificial Sequence; identical to SEQ ID NO: 5639
  Synthetic polypeptide

SEQ ID NO: 5641 - protein, 40 aa, Artificial Sequence; identical to SEQ ID NO: 5639
  Synthetic polypeptide

SEQ ID NO: 5642 - protein, 40 aa, Artificial Sequence; identical to SEQ ID NO: 5639
  Synthetic polypeptide

SEQ ID NO: 5643 - protein, 40 aa, Artificial Sequence; identical to SEQ ID NO: 5639
  Synthetic polypeptide

SEQ ID NO: 5644 - protein, 40 aa, Artificial Sequence; identical to SEQ ID NO: 5639
  Synthetic polypeptide

SEQ ID NO: 5645 - protein, 40 aa, Artificial Sequence; identical to SEQ ID NO: 5639
  Synthetic polypeptide

SEQ ID NO: 5646 - protein, 40 aa, Artificial Sequence; identical to SEQ ID NO: 5639
  Synthetic polypeptide

SEQ ID NO: 5647 - protein, 149 aa, Artificial Sequence
  Synthetic polypeptide
SQQFGRPRHVDCLSPGIQDQPRQCGHVRFIDYEYAGYNYQAFDIGNHFNEFAGVNEVDYCLYPARETQLQWLHYYLQAQKGMAVTPREVQRLYVQVNKFALASHFFWALWALIQNQYSTIDFDFLRYAVIRFNQYFKVKPQASALEMPK

SEQ ID NO: 5648 - protein, 149 aa, Artificial Sequence; identical to SEQ ID NO: 5647
  Synthetic polypeptide

SEQ ID NO: 5649 - protein, 149 aa, Artificial Sequence; identical to SEQ ID NO: 5647
  Synthetic polypeptide

SEQ ID NO: 5650 - protein, 149 aa, Artificial Sequence; identical to SEQ ID NO: 5647
  Synthetic polypeptide

SEQ ID NO: 5651 - protein, 114 aa, Artificial Sequence
  Synthetic polypeptide
SQQFGRPRHVDCLSPGIQDQPRQCGHVRFIDYEYAGYNYQAFDIGNHFNEFAGVNEVDYCLYPARETQLQWLHYYLQAQKGMAVTPREVQRLYVQVNKFALASHFFWALWALIQ

SEQ ID NO: 5652 - protein, 98 aa, Artificial Sequence
  Synthetic polypeptide
SQQFGRPRHVDCLSPGIQDQPRQCGHVRFIDYEYAGYNYQAFDIGNHFNEFAGVNEVDYCLYPARETQLQWLHYYLQAQKGMAVTPREVQRLYVQVNK

SEQ ID NO: 5653 - protein, 64 aa, Artificial Sequence
  Synthetic polypeptide
SQQFGRPRHVDCLSPGIQDQPRQCGHVRFIDYEYAGYNYQAFDIGNHFNEFAGVNEVDYCLYPA

SEQ ID NO: 5654 - protein, 233 aa, Artificial Sequence
  Synthetic polypeptide
LLIFMFQLLRGLAYCHHRKILHRDLKPQNLLINERGELKLADFGLARAKSVPTKTYSNEVVTLWYRPPDVLLGSTEYSTPIDMWGVGCIHYEMATGRPLFPGSTVKEELHLIFRLLGTPTEETWPGVTAFSEFRTYSFPCYLPQPLINHAPRLDTDGIHLLSSLLLYESKSRMSAEAALSHSYFRSLGERVHQLEDTASIFSLKEIQLQKDPGYRGLAFQQPGRGKNRRQSIF

SEQ ID NO: 5655 - protein, 233 aa, Artificial Sequence; identical to SEQ ID NO: 5654
  Synthetic polypeptide

SEQ ID NO: 5656 - protein, 233 aa, Artificial Sequence; identical to SEQ ID NO: 5654
  Synthetic polypeptide

SEQ ID NO: 5657 - protein, 62 aa, Artificial Sequence
  Synthetic polypeptide
CHCLAVDFHVPAAPGPRLLSPPQDPAPGPEAPEPAHQREGGAEAGRLWTGQGQVSAHKDLLQ

SEQ ID NO: 5658 - protein, 62 aa, Artificial Sequence; identical to SEQ ID NO: 5657
  Synthetic polypeptide

SEQ ID NO: 5659 - protein, 62 aa, Artificial Sequence; identical to SEQ ID NO: 5657
  Synthetic polypeptide

SEQ ID NO: 5660 - protein, 28 aa, Artificial Sequence
  Synthetic polypeptide
LLIFMFQLLRGLAYCHHRKILHRDLKPQ

SEQ ID NO: 5661 - protein, 33 aa, Artificial Sequence
  Synthetic polypeptide
CHCLAVDFHVPAAPGPRLLSPPQDPAPGPEAPE

SEQ ID NO: 5662 - protein, 12 aa, Artificial Sequence
  Synthetic polypeptide
LLIFMFQLLRGL

SEQ ID NO: 5663 - protein, 17 aa, Artificial Sequence
  Synthetic polypeptide
CHCLAVDFHVPAAPGPR

SEQ ID NO: 5664 - protein, 82 aa, Artificial Sequence
  Synthetic polypeptide
GAPLPSQLPRPGGRWGGQPPARPAAPSGREVGGSAPRPASRPVRESHGGLAWLSDRGGVPLPAGLLPHRHQLPAQQAHGPQE

SEQ ID NO: 5665 - protein, 308 aa, Artificial Sequence
  Synthetic polypeptide
GAPLPSRDPVWEVRSVSARPPRLRSEETLRPAAAPSEKLGASPPGSRPVWEVRSVSARQPPRPGGRWGGSAPRPASRPVREVRGTSARPPLLGSEEPLCLASCPVREGGGGVSPPPGQPPRPGGRWGGQPPARPAAPSGRVMEVWHGLVIAVVSLFLQACFLTAINYLLSRHMAHKSEQILKAASLQVPRPSPGHHHPPAVKEMKETQTERDIPMSDSLYRHDSDTPSDSLDSSCSSPPACQATEDVDYTQVVFSDPGELKNDSPLDYENIKEITDYVNVNPERHKPSFWYFVNPALSEPAEYDQVAM

SEQ ID NO: 5666 - protein, 47 aa, Artificial Sequence
  Synthetic polypeptide
PAAPSGREVGGSAPRPASRPVREGGGGVSPPPGQPPRPGESWRSGMA

SEQ ID NO: 5667 - protein, 52 aa, Artificial Sequence
  Synthetic polypeptide
EVRSLSARQPPRLGSEERLCPAATPSGREVGGVSPPPGQPPRPGESWRSGMA

SEQ ID NO: 5668 - protein, 118 aa, Artificial Sequence
  Synthetic polypeptide
GAPLPSRDPVWEVRSVSARPPRLRSEETLRPAAAPSEKLGASPPGSRPVWEVRSVSARQPPRPGGRWGGSAPRPASRPVRESHGGLAWLSDRGGVPLPAGLLPHRHQLPAQQAHGPQE

SEQ ID NO: 5669 - protein, 197 aa, Artificial Sequence
  Synthetic polypeptide
GASLPGSHPVREGGGGGQPPARPAAPSGRVMEVWHGLVIAVVSLFLQACFLTAINYLLSRHMAHKSEQILKAASLQVPRPSPGHHHPPAVKEMKETQTERDIPMSDSLYRHDSDTPSDSLDSSCSSPPACQATEDVDYTQVVFSDPGELKNDSPLDYENIKEITDYVNVNPERHKPSFWYFVNPALSEPAEYDQVAM

SEQ ID NO: 5670 - protein, 45 aa, Artificial Sequence
  Synthetic polypeptide
GASLPGRPSSEMWGAPLPRRPVWDVRSASAQPRPRLGESWRSGMA

SEQ ID NO: 5671 - protein, 49 aa, Artificial Sequence
  Synthetic polypeptide
GAPLPSRDPVWESHGGLAWLSDRGGVPLPAGLLPHRHQLPAQQAHGPQE

SEQ ID NO: 5672 - protein, 195 aa, Artificial Sequence
  Synthetic polypeptide
DVGSAFAPPPRLGCEERLCPAATPSGRVMEVWHGLVIAVVSLFLQACFLTAINYLLSRHMAHKSEQILKAASLQVPRPSPGHHHPPAVKEMKETQTERDIPMSDSLYRHDSDTPSDSLDSSCSSPPACQATEDVDYTQVVFSDPGELKNDSPLDYENIKEITDYVNVNPERHKPSFWYFVNPALSEPAEYDQVAM

SEQ ID NO: 5673 - protein, 23 aa, Artificial Sequence
  Synthetic polypeptide
TPGRNWHLESGHLKLESWRSGMA

SEQ ID NO: 5674 - protein, 39 aa, Artificial Sequence
  Synthetic polypeptide
NLSHGGLAWLSDRGGVPLPAGLLPHRHQLPAQQAHGPQE

SEQ ID NO: 5675 - protein, 197 aa, Artificial Sequence
  Synthetic polypeptide
ILPLTLLHLTEAQFLPRTTRLINPEGGAGSELIFGGYDHSHFSGSLNWVPVTKQAYWQIALDNIQVGGTVMFCSEGCQAIVDTGTSLITGPSDKIKQLQNAIGAAPVDGEYAVECANLNVMPDVTFTINGVPYTLSPTAYTLLDFVDGMQFCSSGFQGLDIHPPAGPLWILGDVFIRQFYSVFDRGNNRVGLAPAVP

SEQ ID NO: 5676 - protein, 197 aa, Artificial Sequence; identical to SEQ ID NO: 5675
  Synthetic polypeptide

SEQ ID NO: 5677 - protein, 164 aa, Artificial Sequence
  Synthetic polypeptide
ILPLTLLHLTEAQFLPRTTRLINPEGGAGSELIFGGYDHSHFSGSLNWVPVTKQAYWQIALDNMLWSVPTLTSCRMSPSPLTESPIPSAQLPTPYWTSWMECSSAAVAFKDLTSTLQLGPSGSWGMSSFDSFTQSLTVGITVWDWPQQSPKEGPCVCACLSDRP

SEQ ID NO: 5678 - protein, 164 aa, Artificial Sequence; identical to SEQ ID NO: 5677
  Synthetic polypeptide

SEQ ID NO: 5679 - protein, 39 aa, Artificial Sequence
  Synthetic polypeptide
EAEQSTVQSFLQWTIAYLSQRRWKDRFWGLTFVSRATTW

SEQ ID NO: 5680 - protein, 39 aa, Artificial Sequence; identical to SEQ ID NO: 5679
  Synthetic polypeptide

SEQ ID NO: 5681 - protein, 39 aa, Artificial Sequence; identical to SEQ ID NO: 5679
  Synthetic polypeptide

SEQ ID NO: 5682 - protein, 39 aa, Artificial Sequence; identical to SEQ ID NO: 5679
  Synthetic polypeptide

SEQ ID NO: 5683 - protein, 19 aa, Artificial Sequence
  Synthetic polypeptide
SRHFERPSRALSRASSSGQ

SEQ ID NO: 5684 - protein, 19 aa, Artificial Sequence
  Synthetic polypeptide
SRHFERPSRALSRASSSGQ

SEQ ID NO: 5685 - protein, 19 aa, Artificial Sequence
  Synthetic polypeptide
SRHFERPSRALSRASSSGQ

SEQ ID NO: 5686 - protein, 19 aa, Artificial Sequence
  Synthetic polypeptide
SRHFERPSRALSRASSSGQ

SEQ ID NO: 5687 - protein, 249 aa, Artificial Sequence
  Synthetic polypeptide
PGAAAQACNPGTLRGRAEHCPELPPVDNSIFVAKEVEGQILGTYVCIKGYHLVGKKTLFCNASKEWDNTTTECRLGHCPDPVLVNGEFSSSGPVNVSDKITFMCNDHYILKGSNRSQCLEDHTWAPPFPICKSRDCDPPGNPVHGYFEGNNFTLGSTISYYCEDRYYLVGVQEQQCVDGEWSSALPVCKLIQEAPKPECEKALLAFQESKNLCEAMENFMQQLKESGMTMEELKYSLELKKAELKAKLL

SEQ ID NO: 5688 - protein, 249 aa, Artificial Sequence; identical to SEQ ID NO: 5687
  Synthetic polypeptide

SEQ ID NO: 5689 - protein, 249 aa, Artificial Sequence; identical to SEQ ID NO: 5687
  Synthetic polypeptide

SEQ ID NO: 5690 - protein, 178 aa, Artificial Sequence
  Synthetic polypeptide
PGAAAQACNPGTLRGRAEHCPELPPVDNSIFVAKEVEGQILGTYVCIKGYHLVGKKTLFCNASKEWDNTTTECRLGHCPDPVLVNGEFSSSGPVNVSDKITFMCNDHYILKGSNRSQCLEDHTWAPPFPICKSRDCDPPGNPVHGYFEGNNFTLGSTISYYCEDRYYLVGVQEQQCVD

SEQ ID NO: 5691 - protein, 241 aa, Artificial Sequence
  Synthetic polypeptide
EAEVGGSRAEHCPELPPVDNSIFVAKEVEGQILGTYVCIKGYHLVGKKTLFCNASKEWDNTTTECRLGHCPDPVLVNGEFSSSGPVNVSDKITFMCNDHYILKGSNRSQCLEDHTWAPPFPICKSRDCDPPGNPVHGYFEGNNFTLGSTISYYCEDRYYLVGVQEQQCVDGEWSSALPVCKLIQEAPKPECEKALLAFQESKNLCEAMENFMQQLKESGMTMEELKYSLELKKAELKAKLL

SEQ ID NO: 5692 - protein, 241 aa, Artificial Sequence; identical to SEQ ID NO: 5691
  Synthetic polypeptide

SEQ ID NO: 5693 - protein, 241 aa, Artificial Sequence; identical to SEQ ID NO: 5691
  Synthetic polypeptide

SEQ ID NO: 5694 - protein, 49 aa, Artificial Sequence
  Synthetic polypeptide
SRHFERPRWADHEQSTVQSFLQWTIAYLSQRRWKDRFWGLTFVSRATTW

SEQ ID NO: 5695 - protein, 49 aa, Artificial Sequence; identical to SEQ ID NO: 5694
  Synthetic polypeptide

SEQ ID NO: 5696 - protein, 49 aa, Artificial Sequence; identical to SEQ ID NO: 5694
  Synthetic polypeptide

SEQ ID NO: 5697 - protein, 49 aa, Artificial Sequence; identical to SEQ ID NO: 5694
  Synthetic polypeptide

SEQ ID NO: 5698 - protein, 33 aa, Artificial Sequence
  Synthetic polypeptide
PGAAAQACNPGTLRGRGGRITSRALSRASSSGQ

SEQ ID NO: 5699 - protein, 33 aa, Artificial Sequence; identical to SEQ ID NO: 5698
  Synthetic polypeptide

SEQ ID NO: 5700 - protein, 33 aa, Artificial Sequence; identical to SEQ ID NO: 5698
  Synthetic polypeptide

SEQ ID NO: 5701 - protein, 33 aa, Artificial Sequence; identical to SEQ ID NO: 5698
  Synthetic polypeptide

SEQ ID NO: 5702 - protein, 170 aa, Artificial Sequence
  Synthetic polypeptide
EAEVGGSRAEHCPELPPVDNSIFVAKEVEGQILGTYVCIKGYHLVGKKTLFCNASKEWDNTTTECRLGHCPDPVLVNGEFSSSGPVNVSDKITFMCNDHYILKGSNRSQCLEDHTWAPPFPICKSRDCDPPGNPVHGYFEGNNFTLGSTISYYCEDRYYLVGVQEQQCVD

SEQ ID NO: 5703 - protein, 80 aa, Artificial Sequence
  Synthetic polypeptide
VLMRSGCLKVCNASSLSRSCTCYVRCLPPPLPSAMIVSFPRPPQKPSRCQHHVSCTACRTGTVTLLGIQFMAILKEITSP

SEQ ID NO: 5704 - protein, 80 aa, Artificial Sequence; identical to SEQ ID NO: 5703
  Synthetic polypeptide

SEQ ID NO: 5705 - protein, 80 aa, Artificial Sequence; identical to SEQ ID NO: 5703
  Synthetic polypeptide

SEQ ID NO: 5706 - protein, 80 aa, Artificial Sequence; identical to SEQ ID NO: 5703
  Synthetic polypeptide

SEQ ID NO: 5707 - protein, 80 aa, Artificial Sequence; identical to SEQ ID NO: 5703
  Synthetic polypeptide

SEQ ID NO: 5708 - protein, 25 aa, Artificial Sequence
  Synthetic polypeptide
VFRGLPRSRADASTMFPVQPAELGL

SEQ ID NO: 5709 - protein, 25 aa, Artificial Sequence
  Synthetic polypeptide
VFRGLPRSRADASTMFPVQPAELGL

SEQ ID NO: 5710 - protein, 25 aa, Artificial Sequence
  Synthetic polypeptide
VFRGLPRSRADASTMFPVQPAELGL

SEQ ID NO: 5711 - protein, 25 aa, Artificial Sequence
  Synthetic polypeptide
VFRGLPRSRADASTMFPVQPAELGL

SEQ ID NO: 5712 - protein, 25 aa, Artificial Sequence
  Synthetic polypeptide
VFRGLPRSRADASTMFPVQPAELGL

SEQ ID NO: 5713 - protein, 164 aa, Artificial Sequence
  Synthetic polypeptide
RLLPLSFLHLLCEMPPSPFAFCHDCKFSEASPEAEQMPAPCFLYSLQNWDCDPPGNPVHGYFEGNNFTLGSTISYYCEDRYYLVGVQEQQCVDGEWSSALPVCKLIQEAPKPECEKALLAFQESKNLCEAMENFMQQLKESGMTMEELKYSLELKKAELKAKLL

SEQ ID NO: 5714 - protein, 164 aa, Artificial Sequence; identical to SEQ ID NO: 5713
  Synthetic polypeptide

SEQ ID NO: 5715 - protein, 164 aa, Artificial Sequence; identical to SEQ ID NO: 5713
  Synthetic polypeptide

SEQ ID NO: 5716 - protein, 164 aa, Artificial Sequence; identical to SEQ ID NO: 5713
  Synthetic polypeptide

SEQ ID NO: 5717 - protein, 93 aa, Artificial Sequence
  Synthetic polypeptide
RLLPLSFLHLLCEMPPSPFAFCHDCKFSEASPEAEQMPAPCFLYSLQNWDCDPPGNPVHGYFEGNNFTLGSTISYYCEDRYYLVGVQEQQCVD

SEQ ID NO: 5718 - protein, 75 aa, Artificial Sequence
  Synthetic polypeptide
LCFSSNRQNSATLGHLCFLFPQSWNVLPMTCCINGLFLLQAQLECYRFRDLLGTPQLRSMQCPGMASICQAYQPN

SEQ ID NO: 5719 - protein, 561 aa, Artificial Sequence
  Synthetic polypeptide
MGCFFCKLSWNVTASETFLEPPNSDQCNVPEWLPFARPTNLTDDFEFPIGTYLNYECRPGYSGRPFSIICLKNSVWTSAKDKCKRKSCRNPPDPVNGMAHVIKDIQFRSQIKYSCPKGYRLIGSSSATCIISGNTVIWDNKTPVCDRIICGLPPTIANGDFTSISREYFHYGSVVTYHCNLGSRGKKVFELVGEPSIYCTSKDDQVGIWSGPAPQCIIPNKCTPPNVENGILVSDNRSLFSLNEVVEFRCQPGFGMKGPSHVKCQALNKWEPELPSCSRVCQPPPDVLHAERTQRDKDNFSPGQEVFYSCEPGYDLRGSTYLHCTPQGDWSPAAPRCEVKSCDDFLGQLPNGHVLFPLNLQLGAKVDFVCDEGFQLKGSSASYCVLAGMESLWNSSVPVCERKSCETPPVPVNGMVHVITDIHVGSRINYSCTTGHRLIGHSSAECILSGNTAHWSMKPPICQQIFCPNPPAILNGRHTGTPLGDIPYGKEVSYTCDPHPDRGMTFNLIGESTIRRTSEPHGNGVWSSPAPRCELPVGAGSHDALIVGKFYEVFAEEFCHL

SEQ ID NO: 5720 - protein, 73 aa, Artificial Sequence
  Synthetic polypeptide
MLLIKQTKLCHFGASVLSVPSVLERSPHDLLHKWAVSSASSAGMLPLQRPSWNPPTQINAMSRNGFHLPGLPT

SEQ ID NO: 5721 - protein, 32 aa, Artificial Sequence
  Synthetic polypeptide
RDKFSLTFVFPGVGDVTCKMILSLHVGPAGKS

SEQ ID NO: 5722 - protein, 6 aa, Artificial Sequence
  Synthetic polypeptide
RRSCGR

SEQ ID NO: 5723 - protein, 6 aa, Artificial Sequence
  Synthetic polypeptide
RRSCGR

SEQ ID NO: 5724 - protein, 6 aa, Artificial Sequence
  Synthetic polypeptide
RRSCGR

SEQ ID NO: 5725 - protein, 6 aa, Artificial Sequence
  Synthetic polypeptide
RRSCGR

SEQ ID NO: 5726 - protein, 11 aa, Artificial Sequence
  Synthetic polypeptide
GGHVADEMLQV

SEQ ID NO: 5727 - protein, 11 aa, Artificial Sequence
  Synthetic polypeptide
GGHVADEMLQV

SEQ ID NO: 5728 - protein, 11 aa, Artificial Sequence
  Synthetic polypeptide
GGHVADEMLQV

SEQ ID NO: 5729 - protein, 11 aa, Artificial Sequence
  Synthetic polypeptide
GGHVADEMLQV

SEQ ID NO: 5730 - protein, 1114 aa, Artificial Sequence
  Synthetic polypeptide
AVMWQMKCCKCDSRQPHNYYSHRVENVASSSGPMRWWQSQNDVNPVSLQLDLDRRFQLQEVMMEFQGPMPAGMLIERSSDFGKTWRVYQYLAADCTSTFPRVRQGRPQSWQDVRCQSLPQRPNARLNGGKVQLNLMDLVSGIPATQSQKIQEVGEITNLRVNFTRLAPVPQRGYHPPSAYYAVSQLRLQGSCFCHGHADRCAPKPGASAGPSTAVQVHDVCVCQHNTAGPNCERCAPFYNNRPWRPAEGQDAHECQRCDCNGHSETCHFDPAVFAASQGAYGGVCDNCRDHTEGKNCERCQLHYFRNRRPGASIQETCISCECDPDGAVPGAPCDPVTGQCVCKEHVQGERCDLCKPGFTGLTYANPQGCHRCDCNILGSRRDMPCDEESGRCLCLPNVVGPKCDQCAPYHWKLASGQGCEPCACDPHNSLSPQCNQFTGQCPCREGFGGLMCSAAAIRQCPDRTYGDVATGCRACDCDFRGTEGPGCDKASGRCLCRPGLTGPRCDQCQRGYCNRYPVCVACHPCFQTYDADLREQALRFGRLRNATASLWSGPGLEDRGLASRILDAKSKIEQIRAVLSSPAVTEQEVAQVASAILSLRRTLQGLQLDLPLEEETLSLPRDLESLDRSFNGLLTMYQRKREQFEKISSADPSGAFRMLSTAYEQSAQAAQQVSDSSRLLDQLRDSRREAERLVRQAGGGGGTGSPKLVALRLEMSSLPDLTPTFNKLCGNSRQMACTPISCPGELCPQDNGTACGSRCRGVLPRAGGAFLMAGQVAEQLRGFNAQLQRTRQMIRAAEESASQIQSSAQRLETQVSASRSQMEEDVRRTRLLIQQVRDFLTDPDTDAATIQEVSEAVLALWLPTDSATVLQKMNEIQAIAARLPNVDLVLSQTKQDIARARRLQAEAEEARSRAHAVEGQVEDVVGNLRQGTVALQEAQDTMQGTSRSLRLIQDRVAEVQQVLRPAEKLVTSMTKQLGDFWTRMEELRHQARQQGAEAVQAQQLAEGASEQALSAQEGFERIKQKYAELKDRLGQSSMLGEQGARIQSVKTEAEELFGETMEMMDRMKDMELELLRGSQAIMLRSADLTGLEKRVEQIRDHINGRVLYYATCK

SEQ ID NO: 5731 - protein, 1114 aa, Artificial Sequence; identical to SEQ ID NO: 5730
  Synthetic polypeptide

SEQ ID NO: 5732 - protein, 1114 aa, Artificial Sequence; identical to SEQ ID NO: 5730
  Synthetic polypeptide

SEQ ID NO: 5733 - protein, 130 aa, Artificial Sequence
  Synthetic polypeptide
AVMWQMKCCKCDSRQPHNYYSHRVENVASSSGPMRWWQSQNDVNPVSLQLDLDRRFQLQEVMMEFQGPMPAGMLIERSSDFGKTWRVYQYLAADCTSTFPRVRQGRPQSWQDVRCQSLPQRPNARLNGGK

SEQ ID NO: 5734 - protein, 17 aa, Artificial Sequence
  Synthetic polypeptide
EAEAATWPSAWPKAQKT

SEQ ID NO: 5735 - protein, 17 aa, Artificial Sequence
  Synthetic polypeptide
EAEAATWPSAWPKAQKT

SEQ ID NO: 5736 - protein, 17 aa, Artificial Sequence
  Synthetic polypeptide
EAEAATWPSAWPKAQKT

SEQ ID NO: 5737 - protein, 33 aa, Artificial Sequence
  Synthetic polypeptide
SQPFERLRQPPGPVLGRKHRRRDVSFMDVQDFE

SEQ ID NO: 5738 - protein, 32 aa, Artificial Sequence
  Synthetic polypeptide
GSHLAQCLAESTEDVTCLSWMCKTLNDPGSQG

SEQ ID NO: 5739 - protein, 25 aa, Artificial Sequence
  Synthetic polypeptide
SQPFERLRQPPGPVLGRKHRRRDVV

SEQ ID NO: 5740 - protein, 25 aa, Artificial Sequence
  Synthetic polypeptide
SQPFERLRQPPGPVLGRKHRRRDVV

SEQ ID NO: 5741 - protein, 17 aa, Artificial Sequence
  Synthetic polypeptide
GSHLAQCLAESTEDVTW

SEQ ID NO: 5742 - protein, 17 aa, Artificial Sequence
  Synthetic polypeptide
GSHLAQCLAESTEDVTW

SEQ ID NO: 5743 - protein, 13 aa, Artificial Sequence
  Synthetic polypeptide
GTLMRKISPSTWQ

SEQ ID NO: 5744 - protein, 117 aa, Artificial Sequence
  Synthetic polypeptide
NLNEEDQPIYLAVKGVVFDVTSGKEFYGRGAPYNALTGKDSTRGVAKMSLDPADLTHDTTGLTAKELEALDEVFTKVYKAKYPIVGYTARRILNEDGSPNLDFKPEDQPHFDIKDEF

SEQ ID NO: 5745 - protein, 30 aa, Artificial Sequence
  Synthetic polypeptide
DPPTQRKYTVQHQLANFGSAHLLGSEGSGV

SEQ ID NO: 5746 - protein, 131 aa, Artificial Sequence
  Synthetic polypeptide
GETLQPRGNTLCSTNWPTLDQPIYLAVKGVVFDVTSGKEFYGRGAPYNALTGKDSTRGVAKMSLDPADLTHDTTGLTAKELEALDEVFTKVYKAKYPIVGYTARRILNEDGSPNLDFKPEDQPHFDIKDEF

SEQ ID NO: 5747 - protein, 30 aa, Artificial Sequence
  Synthetic polypeptide
NLNEVRPSNPEEIHCAAPIGQLWISPSTWQ

SEQ ID NO: 5748 - protein, 147 aa, Artificial Sequence
  Synthetic polypeptide
VLKAKSDGAQDLLPQLSLGNKTMYLEDPGVTLEVADQPIYLAVKGVVFDVTSGKEFYGRGAPYNALTGKDSTRGVAKMSLDPADLTHDTTGLTAKELEALDEVFTKVYKAKYPIVGYTARRILNEDGSPNLDFKPEDQPHFDIKDEF

SEQ ID NO: 5749 - protein, 12 aa, Artificial Sequence
  Synthetic polypeptide
PLKWQISPSTWQ

SEQ ID NO: 5750 - protein, 15 aa, Artificial Sequence
  Synthetic polypeptide
SGRSAHLLGSEGSGV

SEQ ID NO: 5751 - protein, 128 aa, Artificial Sequence
  Synthetic polypeptide
VLKAKSDGAQDLLPQLSLGNKTMYLEDPGVTLEVAEFYGRGAPYNALTGKDSTRGVAKMSLDPADLTHDTTGLTAKELEALDEVFTKVYKAKYPIVGYTARRILNEDGSPNLDFKPEDQPHFDIKDEF

SEQ ID NO: 5752 - protein, 16 aa, Artificial Sequence
  Synthetic polypeptide
PLKWQSFMDEEPPTMP

SEQ ID NO: 5753 - protein, 20 aa, Artificial Sequence
  Synthetic polypeptide
SGRVLWTRSPLQCLDGEGLH

SEQ ID NO: 5754 - protein, 83 aa, Artificial Sequence
  Synthetic polypeptide
VLKAKSDGAQDLLPQLSLGNKTMYLEDPGVTLEVAGKNINFLLYTGAACSVLAHYEEALSSRDCMITGINGQAHRKISPSTWQ

SEQ ID NO: 5755 - protein, 19 aa, Artificial Sequence
  Synthetic polypeptide
MDKLIGRSAHLLGSEGSGV

SEQ ID NO: 5756 - protein, 39 aa, Artificial Sequence
  Synthetic polypeptide
CLLHLRLPWHILPATMSIWGNYYDWGRSAHLLGSEGSGV

SEQ ID NO: 5757 - protein, 122 aa, Artificial Sequence
  Synthetic polypeptide
AYGEIIMIGEDQPIYLAVKGVVFDVTSGKEFYGRGAPYNALTGKDSTRGVAKMSLDPADLTHDTTGLTAKELEALDEVFTKVYKAKYPIVGYTARRILNEDGSPNLDFKPEDQPHFDIKDEF

SEQ ID NO: 5758 - protein, 10 aa, Artificial Sequence
  Synthetic polypeptide
LGKISPSTWQ

SEQ ID NO: 5759 - protein, 115 aa, Artificial Sequence
  Synthetic polypeptide
VQEDQPIYLAVKGVVFDVTSGKEFYGRGAPYNALTGKDSTRGVAKMSLDPADLTHDTTGLTAKELEALDEVFTKVYKAKYPIVGYTARRILNEDGSPNLDFKPEDQPHFDIKDEF

SEQ ID NO: 5760 - protein, 14 aa, Artificial Sequence
  Synthetic polypeptide
QLSKFRKISPSTWQ

SEQ ID NO: 5761 - protein, 22 aa, Artificial Sequence
  Synthetic polypeptide
MDDSCLSSGRSAHLLGSEGSGV

SEQ ID NO: 5762 - protein, 8 aa, Artificial Sequence
  Synthetic polypeptide
MEPNPTGI

SEQ ID NO: 5763 - protein, 88 aa, Artificial Sequence
  Synthetic polypeptide
HFKNCDIEKSIGSTRCGSIKWNQTQQEYESLEQENTMLRREIGKLTEELKHLTEALKEHEKMCPLLLCPMNFVPVPPRPDPVAGCLPR

SEQ ID NO: 5764 - protein, 57 aa, Artificial Sequence
  Synthetic polypeptide
CKELRGPEMLYPNISRTAILKKALDLLDVVLLNGTKPNRNMRAWSKKTPCCGERSGS

SEQ ID NO: 5765 - protein, 90 aa, Artificial Sequence
  Synthetic polypeptide
NPTLKPHSIHHHPRTDGEAAHADKACISLQAQRESSAAWAQHRRGHCHTFALGMVSRTMHCILGATFSEIFWNMRAWSKKTPCCGERSGS

SEQ ID NO: 5766 - protein, 83 aa, Artificial Sequence
  Synthetic polypeptide
GMKFSGDGCKILPLSPIASIIIQGRTEKQHMQIKLAFLCRLRENPQRLGPSTGEVTATHLPLAWSPEPCIASWEQHFLRYSGI

SEQ ID NO: 5767 - protein, 65 aa, Artificial Sequence
  Synthetic polypeptide
DILEYESLEQENTMLRREIGKLTEELKHLTEALKEHEKMCPLLLCPMNFVPVPPRPDPVAGCLPR

SEQ ID NO: 5768 - protein, 65 aa, Artificial Sequence
  Synthetic polypeptide
GWTWWLILVFLALWEADTALIKSDLRRHNINIGITNVDVKAIPADSPTDQEPKTVMLSKQSESAI

SEQ ID NO: 5769 - protein, 65 aa, Artificial Sequence; identical to SEQ ID NO: 5768
  Synthetic polypeptide

SEQ ID NO: 5770 - protein, 8 aa, Artificial Sequence
  Synthetic polypeptide
HFGRLIQH

SEQ ID NO: 5771 - protein, 8 aa, Artificial Sequence
  Synthetic polypeptide
HFGRLIQH

SEQ ID NO: 5772 - protein, 6 aa, Artificial Sequence
  Synthetic polypeptide
YSINQV

SEQ ID NO: 5773 - protein, 6 aa, Artificial Sequence
  Synthetic polypeptide
YSINQV

SEQ ID NO: 5774 - protein, 12 aa, Artificial Sequence
  Synthetic polypeptide
IKESQALPVEKL

SEQ ID NO: 5775 - protein, 12 aa, Artificial Sequence
  Synthetic polypeptide
IKESQALPVEKL

SEQ ID NO: 5776 - protein, 12 aa, Artificial Sequence
  Synthetic polypeptide
IKESQALPVEKL

SEQ ID NO: 5777 - protein, 37 aa, Artificial Sequence
  Synthetic polypeptide
SLSFFSNIFKLRRVKPYPSRSCEEKNSRVPHAGRKYL

SEQ ID NO: 5778 - protein, 37 aa, Artificial Sequence; identical to SEQ ID NO: 5777
  Synthetic polypeptide

SEQ ID NO: 5779 - protein, 37 aa, Artificial Sequence; identical to SEQ ID NO: 5777
  Synthetic polypeptide

SEQ ID NO: 5780 - protein, 189 aa, Artificial Sequence
  Synthetic polypeptide
EVRSPSAQQPPRLRSEEPPPGSHPVWEVPIPGPVGNKRMVHFSPDSHHHDHWFSPGARTEHDQHQLLRDNRAERGHKKNCSVRTASRQTSMHLGSLCTGDIKRRRKAAPLPGPTTAGFVGENAQPILENNIGNRMLQNMGWTPGSGLGRDGKGISEPIQAMQRPKGLGLGFPLPKSTSATTTPNAGKSA

SEQ ID NO: 5781 - protein, 53 aa, Artificial Sequence
  Synthetic polypeptide
EVRSLRPAATPSGKYPFLAQWVTREWFIFPRILITMTIGLALGLGQSMTSISF

SEQ ID NO: 5782 - protein, 19 aa, Artificial Sequence
  Synthetic polypeptide
GASARQPPRLGSTHSWPSG

SEQ ID NO: 5783 - protein, 9 aa, Artificial Sequence
  Synthetic polypeptide
RGDDLRRQN

SEQ ID NO: 5784 - protein, 9 aa, Artificial Sequence
  Synthetic polypeptide
RGDDLRRQN

SEQ ID NO: 5785 - protein, 9 aa, Artificial Sequence
  Synthetic polypeptide
RGDDLRRQN

SEQ ID NO: 5786 - protein, 9 aa, Artificial Sequence
  Synthetic polypeptide
RGDDLRRQN

SEQ ID NO: 5787 - protein, 9 aa, Artificial Sequence
  Synthetic polypeptide
RGDDLRRQN

SEQ ID NO: 5788 - protein, 34 aa, Artificial Sequence
  Synthetic polypeptide
FEEAELTTGTMKEKPSRPCMRRWRWTGPSGRQAA

SEQ ID NO: 5789 - protein, 34 aa, Artificial Sequence; identical to SEQ ID NO: 5788
  Synthetic polypeptide

SEQ ID NO: 5790 - protein, 34 aa, Artificial Sequence; identical to SEQ ID NO: 5788
  Synthetic polypeptide

SEQ ID NO: 5791 - protein, 34 aa, Artificial Sequence; identical to SEQ ID NO: 5788
  Synthetic polypeptide

SEQ ID NO: 5792 - protein, 34 aa, Artificial Sequence; identical to SEQ ID NO: 5788
  Synthetic polypeptide

SEQ ID NO: 5793 - protein, 58 aa, Artificial Sequence
  Synthetic polypeptide
LELQWSLHSLPCLPDIRLLRAGPMPDLCQWQALENISECLLRERVILRNTPQAGLLHL

SEQ ID NO: 5794 - protein, 58 aa, Artificial Sequence; identical to SEQ ID NO: 5793
  Synthetic polypeptide

SEQ ID NO: 5795 - protein, 58 aa, Artificial Sequence; identical to SEQ ID NO: 5793
  Synthetic polypeptide

SEQ ID NO: 5796 - protein, 58 aa, Artificial Sequence; identical to SEQ ID NO: 5793
  Synthetic polypeptide

SEQ ID NO: 5797 - protein, 58 aa, Artificial Sequence; identical to SEQ ID NO: 5793
  Synthetic polypeptide

SEQ ID NO: 5798 - protein, 75 aa, Artificial Sequence
  Synthetic polypeptide
MFVERACHPQEHPTSGTPSSIARGWRTVSAPLVGAAPQAPLDHPTQTPASWGTLRVPRSRSSWKHLSSTCPSWAV

SEQ ID NO: 5799 - protein, 75 aa, Artificial Sequence; identical to SEQ ID NO: 5798
  Synthetic polypeptide

SEQ ID NO: 5800 - protein, 75 aa, Artificial Sequence; identical to SEQ ID NO: 5798
  Synthetic polypeptide

SEQ ID NO: 5801 - protein, 75 aa, Artificial Sequence; identical to SEQ ID NO: 5798
  Synthetic polypeptide

SEQ ID NO: 5802 - protein, 67 aa, Artificial Sequence
  Synthetic polypeptide
MFVERACHPQEHPTSGTPSSIARGWRTVSAPLVGAAPQTPASWGTLRVPRSRSSWKHLSSTCPSWAV

SEQ ID NO: 5803 - protein, 128 aa, Artificial Sequence
  Synthetic polypeptide
GQAQWLTPVIPALYESQHSLDEAEAGPGMRPPLGLREFAPGVPPGRRDLPLHPRGFLPGHAPFRPLGSLGPREYFIPGTRLPPPTHGPQEYPPPPAVRDLLPSGSRDEPPPASQSTSQDCSQALKQSP

SEQ ID NO: 5804 - protein, 128 aa, Artificial Sequence; identical to SEQ ID NO: 5803
  Synthetic polypeptide

SEQ ID NO: 5805 - protein, 128 aa, Artificial Sequence; identical to SEQ ID NO: 5803
  Synthetic polypeptide

SEQ ID NO: 5806 - protein, 12 aa, Artificial Sequence
  Synthetic polypeptide
TRLRQALVCVHH

SEQ ID NO: 5807 - protein, 12 aa, Artificial Sequence
  Synthetic polypeptide
TRLRQALVCVHH

SEQ ID NO: 5808 - protein, 12 aa, Artificial Sequence
  Synthetic polypeptide
TRLRQALVCVHH

SEQ ID NO: 5809 - protein, 39 aa, Artificial Sequence
  Synthetic polypeptide
GRPWYASTTRLKRICTRRSTRKTGPASPPSGIFTWTRTI

SEQ ID NO: 5810 - protein, 39 aa, Artificial Sequence; identical to SEQ ID NO: 5809
  Synthetic polypeptide

SEQ ID NO: 5811 - protein, 39 aa, Artificial Sequence; identical to SEQ ID NO: 5809
  Synthetic polypeptide

SEQ ID NO: 5812 - protein, 78 aa, Artificial Sequence
  Synthetic polypeptide
GQAQWLTPVIPALYESQHSLDEAEAGGSLEPRSLRPAWATWPWYASTTRLKRICTRRSTRKTGPASPPSGIFTWTRTI

SEQ ID NO: 5813 - protein, 78 aa, Artificial Sequence; identical to SEQ ID NO: 5812
  Synthetic polypeptide

SEQ ID NO: 5814 - protein, 78 aa, Artificial Sequence; identical to SEQ ID NO: 5812
  Synthetic polypeptide

SEQ ID NO: 5815 - protein, 109 aa, Artificial Sequence
  Synthetic polypeptide
DQPGQHGPGMRPPLGLREFAPGVPPGRRDLPLHPRGFLPGHAPFRPLGSLGPREYFIPGTRLPPPTHGPQEYPPPPAVRDLLPSGSRDEPPPASQSTSQDCSQALKQSP

SEQ ID NO: 5816 - protein, 109 aa, Artificial Sequence; identical to SEQ ID NO: 5815
  Synthetic polypeptide

SEQ ID NO: 5817 - protein, 109 aa, Artificial Sequence; identical to SEQ ID NO: 5815
  Synthetic polypeptide

SEQ ID NO: 5818 - protein, 16 aa, Artificial Sequence
  Synthetic polypeptide
EFETSLGNMALVCVHH

SEQ ID NO: 5819 - protein, 16 aa, Artificial Sequence
  Synthetic polypeptide
EFETSLGNMALVCVHH

SEQ ID NO: 5820 - protein, 16 aa, Artificial Sequence
  Synthetic polypeptide
EFETSLGNMALVCVHH

SEQ ID NO: 5821 - protein, 38 aa, Artificial Sequence
  Synthetic polypeptide
MLRGLFIVSRGCAEWKPRLPVSQEARNYRATRHQSPGL

SEQ ID NO: 5822 - protein, 36 aa, Artificial Sequence
  Synthetic polypeptide
EDFLLCPGAVQNGNHACLSPRKPETTGQQGTRVPDL

SEQ ID NO: 5823 - protein, 37 aa, Artificial Sequence
  Synthetic polypeptide
VKRTFYCVQGLCRMETTLACLPGSQKLQGNKAPESRT

SEQ ID NO: 5824 - protein, 34 aa, Artificial Sequence
  Synthetic polypeptide
GRALISGCGRRDAYKFQVDHVKKLQGNKAPESRT

SEQ ID NO: 5825 - protein, 16 aa, Artificial Sequence
  Synthetic polypeptide
PCKETTGQQGTRVPDL

SEQ ID NO: 5826 - protein, 38 aa, Artificial Sequence
  Synthetic polypeptide
MLRGLFIVYRGCAEWKPHLPVSQEARNYRATRHQSPGL

SEQ ID NO: 5827 - protein, 36 aa, Artificial Sequence
  Synthetic polypeptide
EDFLLCTGAVQNGNHTCLSPRKPETTGQQGTRVPDL

SEQ ID NO: 5828 - protein, 37 aa, Artificial Sequence; identical to SEQ ID NO: 5823
  Synthetic polypeptide

SEQ ID NO: 5829 - protein, 99 aa, Artificial Sequence
  Synthetic polypeptide
AWEIEVAEIYWETDYNHSGTIDAHEMRTALRKAGFTLNSQVQQTIALRYACSKLGINFDSFVACMIRLETLFKLFSLLDEDKDGMVQLSLAEWLCCVLV

SEQ ID NO: 5830 - protein, 99 aa, Artificial Sequence; identical to SEQ ID NO: 5829
  Synthetic polypeptide

SEQ ID NO: 5831 - protein, 21 aa, Artificial Sequence
  Synthetic polypeptide
RLRRSIGKLIITTRAPSMPTR

SEQ ID NO: 5832 - protein, 21 aa, Artificial Sequence
  Synthetic polypeptide
RLRRSIGKLIITTRAPSMPTR

SEQ ID NO: 5833 - protein, 26 aa, Artificial Sequence
  Synthetic polypeptide
SQLLGRLKHENRLSLGDRGCGDLLGN

SEQ ID NO: 5834 - protein, 26 aa, Artificial Sequence
  Synthetic polypeptide
SQLLGRLKHENRLSLGDRGCGDLLGN

SEQ ID NO: 5835 - protein, 674 aa, Artificial Sequence
  Synthetic polypeptide
GRAGRLTPVIPALWEAEVGRSPEDSKDSSLLESDMKRKGKLKNKGSKRKKEDLQEVDGEIEAVLQKKAKARGLEFQISNVKFEDVGGNDMTLKEVCKMLIHMRHPEVYHHLGVVPPRGVLLHGPPGCGKTLLAHAIAGELDLPILKVAAPEIVSGVSGESEQKLRELFEQAVSNAPCIIFIDEIDAITPKREVASKDMERRIVAQLLTCMDDLNNVAATARVLVIGATNRPDSLDPALRRAGRFDREICLGIPDEASRERILQTLCRKLRLPQAFDFCHLAHLTPGFVGADLMALCREAAMCAVNRVLMKLQEQQKKNPEMEDLPSKGVQEERLGTEPTSETQDELQRLLGLLRDQDPLSEEQMQGLCIELNDFIVALSSVQPSAKREGFVTVPNVTWADIGALEDIREELTMAILAPVRNPDQFKALGLVTPAGVLLAGPPGCGKTLLAKAVANESGLNFISVKGPELLNMYVGESERAVRQVFQRAKNSAPCVIFFDEVDALCPRRSDRETGASVRVVNQLLTEMDGLEARQQVFIMAATNRPDIIDPAILRPGRLDKTLFVGLPPPADRLAILKTITKNGTKPPLDADVNLEAIAGDLRCDCYTGADLSALVREASICALRQEMARQKSGNEKGELKVSHKHFEEAFKKVRSSISKKDQIMYERLQESLSR

SEQ ID NO: 5836 - protein, 674 aa, Artificial Sequence; identical to SEQ ID NO: 5835
  Synthetic polypeptide

SEQ ID NO: 5837 - protein, 674 aa, Artificial Sequence; identical to SEQ ID NO: 5835
  Synthetic polypeptide

SEQ ID NO: 5838 - protein, 674 aa, Artificial Sequence; identical to SEQ ID NO: 5835
  Synthetic polypeptide

SEQ ID NO: 5839 - protein, 25 aa, Artificial Sequence
  Synthetic polypeptide
SQHFGRLRWADHLRIQKILLFWRVI

SEQ ID NO: 5840 - protein, 25 aa, Artificial Sequence
  Synthetic polypeptide
SQHFGRLRWADHLRIQKILLFWRVI

SEQ ID NO: 5841 - protein, 25 aa, Artificial Sequence
  Synthetic polypeptide
SQHFGRLRWADHLRIQKILLFWRVI

SEQ ID NO: 5842 - protein, 25 aa, Artificial Sequence
  Synthetic polypeptide
SQHFGRLRWADHLRIQKILLFWRVI

SEQ ID NO: 5843 - protein, 25 aa, Artificial Sequence
  Synthetic polypeptide
SQHFGRLRWADHLRIQKILLFWRVI

SEQ ID NO: 5844 - protein, 25 aa, Artificial Sequence
  Synthetic polypeptide
SQHFGRLRWADHLRIQKILLFWRVI

SEQ ID NO: 5845 - protein, 25 aa, Artificial Sequence
  Synthetic polypeptide
SQHFGRLRWADHLRIQKILLFWRVI

SEQ ID NO: 5846 - protein, 25 aa, Artificial Sequence
  Synthetic polypeptide
SQHFGRLRWADHLRIQKILLFWRVI

SEQ ID NO: 5847 - protein, 25 aa, Artificial Sequence
  Synthetic polypeptide
SQHFGRLRWADHLRIQKILLFWRVI

SEQ ID NO: 5848 - protein, 513 aa, Artificial Sequence
  Synthetic polypeptide
GRAGRLTPVIPALWEAEVGRSPEDSKDSSLLESDMKRKGKLKNKGSKRKKEDLQEVDGEIEAVLQKKAKARGLEFQISNVKFEDVGGNDMTLKEVCKMLIHMRHPEVYHHLGVVPPRGVLLHGPPGCGKTLLAHAIAGELDLPILKVAAPEIVSGVSGESEQKLRELFEQAVSNAPCIIFIDEIDAITPKREVASKDMERRIVAQLLTCMDDLNNVAATARVLVIGATNRPDSLDPALRRAGRFDREICLGIPDEASRERILQTLCRKLRLPQAFDFCHLAHLTPGFVGADLMALCREAAMCAVNRVLMKLQEQQKKNPEMEDLPSKGVQEERLGTEPTSETQDELQRLLGLLRDQDPLSEEQMQGLCIELNDFIVALSSVQPSAKREGFVTVPNVTWADIGALEDIREELTMAILAPVRNPDQFKALGLVTPAGVLLAGPPGCGKTLLAKAVANESGLNFISVKGPELLNMYVGESERAVRQVFQRAKNSAPCVIFFDEVDALCPRRSDREI

SEQ ID NO: 5849 - protein, 114 aa, Artificial Sequence
  Synthetic polypeptide
GRAGRLTPVIPALWEAEVGRSPEDSKDSSLLESDMKRKGKLKNKGSKRKKEDLQEVDGEIEAVLQKKGGLQDAHTHASPGGVPPPGRRAPSWSSPSWTTRLWEDITCTCNCWGT

SEQ ID NO: 5850 - protein, 93 aa, Artificial Sequence
  Synthetic polypeptide
GRAGRLTPVIPALWEAEVGRSPEDSKDSSLLESDMKRKGKLKNKGSKRKKEDLQEVDGEIEAVLQKKAKARGLEFQISNVKFEDVGGNDMTLK

SEQ ID NO: 5851 - protein, 93 aa, Artificial Sequence; identical to SEQ ID NO: 5850
  Synthetic polypeptide

SEQ ID NO: 5852 - protein, 93 aa, Artificial Sequence; identical to SEQ ID NO: 5850
  Synthetic polypeptide

SEQ ID NO: 5853 - protein, 48 aa, Artificial Sequence
  Synthetic polypeptide
RRCKMCFVKQMLEGSMLLKSHHHSLISSTQGHKNCGRPQGPLPRKASG

SEQ ID NO: 5854 - protein, 48 aa, Artificial Sequence; identical to SEQ ID NO: 5853
  Synthetic polypeptide

SEQ ID NO: 5855 - protein, 48 aa, Artificial Sequence; identical to SEQ ID NO: 5853
  Synthetic polypeptide

SEQ ID NO: 5856 - protein, 48 aa, Artificial Sequence; identical to SEQ ID NO: 5853
  Synthetic polypeptide

SEQ ID NO: 5857 - protein, 66 aa, Artificial Sequence
  Synthetic polypeptide
SQVPRDTKTAEGRRDLCLGKPVGNSRIDWPYHCHCITAHVIALVHLPSQLTCCHLEYISIHYGAEW

SEQ ID NO: 5858 - protein, 66 aa, Artificial Sequence; identical to SEQ ID NO: 5857
  Synthetic polypeptide

SEQ ID NO: 5859 - protein, 96 aa, Artificial Sequence
  Synthetic polypeptide
ESQWVIPELIGHTIVTVLLLMSLHWFIFLLNLPVATWNIYRYIMVPSGNMGVFDPTEIHNRGQLKSHMKEAMIKLGFHLLCFFMYLYSMILALIND

SEQ ID NO: 5860 - protein, 60 aa, Artificial Sequence
  Synthetic polypeptide
SQVPRDTKTAEGRRDLCLGKPVGNSRIDWPYHCHCITAHVIALVHLPSQLTCCHLEYISW

SEQ ID NO: 5861 - protein, 47 aa, Artificial Sequence
  Synthetic polypeptide
ESQWVIPELIGHTIVTVLLLMSLHWFIFLLNLPVATWNIYRGSNCPC

SEQ ID NO: 5862 - protein, 66 aa, Artificial Sequence
  Synthetic polypeptide
SQVPRDTKTAEGRRDLCLGKPVGNSRIDWPYHCHCITAHVIALVHLPSQLTCCHLEYISYDLSFDK

SEQ ID NO: 5863 - protein, 49 aa, Artificial Sequence
  Synthetic polypeptide
ESQWVIPELIGHTIVTVLLLMSLHWFIFLLNLPVATWNIYRMILALIND

SEQ ID NO: 5864 - protein, 94 aa, Artificial Sequence
  Synthetic polypeptide
ESQWVIPELIGHTIVTVLLLMSLHWFIFLLNLPVATWNIYRYIMVPSGNMGVFDPTEIHNRGQLKSHMKEAMIKLGFHLLCFFMYLYSGSNCPC

SEQ ID NO: 5865 - protein, 53 aa, Artificial Sequence
  Synthetic polypeptide
AQRFETSSVGNSRIDWPYHCHCITAHVIALVHLPSQLTCCHLEYISIHYGAEW

SEQ ID NO: 5866 - protein, 53 aa, Artificial Sequence; identical to SEQ ID NO: 5865
  Synthetic polypeptide

SEQ ID NO: 5867 - protein, 117 aa, Artificial Sequence
  Synthetic polypeptide
HLSPVLWEAEEGESLEPSGSRPALWVIPELIGHTIVTVLLLMSLHWFIFLLNLPVATWNIYRYIMVPSGNMGVFDPTEIHNRGQLKSHMKEAMIKLGFHLLCFFMYLYSMILALIND

SEQ ID NO: 5868 - protein, 31 aa, Artificial Sequence
  Synthetic polypeptide
PVAVADTCPQYFGRPRRENHLSPAVRDQLCG

SEQ ID NO: 5869 - protein, 31 aa, Artificial Sequence; identical to SEQ ID NO: 5868
  Synthetic polypeptide

SEQ ID NO: 5870 - protein, 31 aa, Artificial Sequence; identical to SEQ ID NO: 5868
  Synthetic polypeptide

SEQ ID NO: 5871 - protein, 31 aa, Artificial Sequence; identical to SEQ ID NO: 5868
  Synthetic polypeptide

SEQ ID NO: 5872 - protein, 47 aa, Artificial Sequence
  Synthetic polypeptide
AQRFETSSVGNSRIDWPYHCHCITAHVIALVHLPSQLTCCHLEYISW

SEQ ID NO: 5873 - protein, 68 aa, Artificial Sequence
  Synthetic polypeptide
HLSPVLWEAEEGESLEPSGSRPALWVIPELIGHTIVTVLLLMSLHWFIFLLNLPVATWNIYRGSNCPC

SEQ ID NO: 5874 - protein, 53 aa, Artificial Sequence
  Synthetic polypeptide
AQRFETSSVGNSRIDWPYHCHCITAHVIALVHLPSQLTCCHLEYISYDLSFDK

SEQ ID NO: 5875 - protein, 70 aa, Artificial Sequence
  Synthetic polypeptide
HLSPVLWEAEEGESLEPSGSRPALWVIPELIGHTIVTVLLLMSLHWFIFLLNLPVATWNIYRMILALIND

SEQ ID NO: 5876 - protein, 115 aa, Artificial Sequence
  Synthetic polypeptide
HLSPVLWEAEEGESLEPSGSRPALWVIPELIGHTIVTVLLLMSLHWFIFLLNLPVATWNIYRYIMVPSGNMGVFDPTEIHNRGQLKSHMKEAMIKLGFHLLCFFMYLYSGSNCPC

SEQ ID NO: 5877 - protein, 43 aa, Artificial Sequence
  Synthetic polypeptide
QGVIRGWKRQMRRSTTYTRGSISSVSPHLWRTAASTMASTPTT

SEQ ID NO: 5878 - protein, 43 aa, Artificial Sequence; identical to SEQ ID NO: 5877
  Synthetic polypeptide

SEQ ID NO: 5879 - protein, 43 aa, Artificial Sequence; identical to SEQ ID NO: 5877
  Synthetic polypeptide

SEQ ID NO: 5880 - protein, 43 aa, Artificial Sequence; identical to SEQ ID NO: 5877
  Synthetic polypeptide

SEQ ID NO: 5881 - protein, 7 aa, Artificial Sequence
  Synthetic polypeptide
SEGGNVR

SEQ ID NO: 5882 - protein, 7 aa, Artificial Sequence
  Synthetic polypeptide
SEGGNVR

SEQ ID NO: 5883 - protein, 7 aa, Artificial Sequence
  Synthetic polypeptide
SEGGNVR

SEQ ID NO: 5884 - protein, 7 aa, Artificial Sequence
  Synthetic polypeptide
SEGGNVR

SEQ ID NO: 5885 - protein, 114 aa, Artificial Sequence
  Synthetic polypeptide
RSNQRVETSDEEIHDLHQRIDKFRFTPPLEDSCFHYGFNSNYLKKVISYWRNEFDWKKQVEILNRYPHFKTKIEGLDIHFIHVKPPQLPAGHTPKPLLMVHGWPGSFYEFYKII

SEQ ID NO: 5886 - protein, 408 aa, Artificial Sequence
  Synthetic polypeptide
RSNQRVETSDEEIHDLHQRIDKFRFTPPLEDSCFHYGFNSNYLKKVISYWRNEFDWKKQVEILNRYPHFKTKIEGLDIHFIHVKPPQLPAGHTPKPLLMVHGWPGSFYEFYKIIPLLTDPKNHGLSDEHVFEVICPSIPGYGFSEASSKKGFNSVATARIFYKLMLRLGFQEFYIQGGDWGSLICTNMAQLVPSHVKGLHLNMALVLSNFSTLTLLLGQRFGRFLGLTERDVELLYPVKEKVFYSLMRESGYMHIQCTKPDTVGSALNDSPVGLAAYILEKFSTWTNTEFRYLEDGGLERKFSLDDLLTNVMLYWTTGTIISSQRFYKENLGQGWMTQKHERMKVYVPTGFSAFPFELLHTPEKWVRFKYPKLISYSYMVRGGHFAAFEEPELLAQDIRKFLSVLERQ

SEQ ID NO: 5887 - protein, 408 aa, Artificial Sequence; identical to SEQ ID NO: 5886
  Synthetic polypeptide

SEQ ID NO: 5888 - protein, 89 aa, Artificial Sequence
  Synthetic polypeptide
RSNQRVETSDEEIHDLHQRIDKFRFTPPLEDSCFHYGFNSNYLKKVISYWRNEFDWKKQVEILNRYPHFKTKIEGLDIHFIHVKPPQLP

SEQ ID NO: 5889 - protein, 66 aa, Artificial Sequence
  Synthetic polypeptide
QGVIRGEVFHLDQYGIPIPGGWRPGKEVLPGRPADQRHALLDNRHHHLLPALLQGEPGTGLDDPEA

SEQ ID NO: 5890 - protein, 66 aa, Artificial Sequence; identical to SEQ ID NO: 5889
  Synthetic polypeptide

SEQ ID NO: 5891 - protein, 131 aa, Artificial Sequence
  Synthetic polypeptide
SEEKFSTWTNTEFRYLEDGGLERKFSLDDLLTNVMLYWTTGTIISSQRFYKENLGQGWMTQKHERMKVYVPTGFSAFPFELLHTPEKWVRFKYPKLISYSYMVRGGHFAAFEEPELLAQDIRKFLSVLERQ

SEQ ID NO: 5892 - protein, 131 aa, Artificial Sequence; identical to SEQ ID NO: 5891
  Synthetic polypeptide

SEQ ID NO: 5893 - protein, 33 aa, Artificial Sequence
  Synthetic polypeptide
RSNQRRSFPPGPIRNSDTWRMEAWKGSSPWTTC

SEQ ID NO: 5894 - protein, 33 aa, Artificial Sequence; identical to SEQ ID NO: 5893
  Synthetic polypeptide

SEQ ID NO: 5895 - protein, 12 aa, Artificial Sequence
  Synthetic polypeptide
ERGAWWTGGNVR

SEQ ID NO: 5896 - protein, 12 aa, Artificial Sequence
  Synthetic polypeptide
ERGAWWTGGNVR

SEQ ID NO: 5897 - protein, 12 aa, Artificial Sequence
  Synthetic polypeptide
ERGAWWTGGNVR

SEQ ID NO: 5898 - protein, 12 aa, Artificial Sequence
  Synthetic polypeptide
ERGAWWTGGNVR

SEQ ID NO: 5899 - protein, 120 aa, Artificial Sequence
  Synthetic polypeptide
SEGENVEPGGQVETSDEEIHDLHQRIDKFRFTPPLEDSCFHYGFNSNYLKKVISYWRNEFDWKKQVEILNRYPHFKTKIEGLDIHFIHVKPPQLPAGHTPKPLLMVHGWPGSFYEFYKII

SEQ ID NO: 5900 - protein, 51 aa, Artificial Sequence
  Synthetic polypeptide
RSNQRVRTWSLVDRWKRQMRRSTTYTRGSISSVSPHLWRTAASTMASTPTT

SEQ ID NO: 5901 - protein, 51 aa, Artificial Sequence; identical to SEQ ID NO: 5900
  Synthetic polypeptide

SEQ ID NO: 5902 - protein, 51 aa, Artificial Sequence; identical to SEQ ID NO: 5900
  Synthetic polypeptide

SEQ ID NO: 5903 - protein, 51 aa, Artificial Sequence; identical to SEQ ID NO: 5900
  Synthetic polypeptide

SEQ ID NO: 5904 - protein, 414 aa, Artificial Sequence
  Synthetic polypeptide
SEGENVEPGGQVETSDEEIHDLHQRIDKFRFTPPLEDSCFHYGFNSNYLKKVISYWRNEFDWKKQVEILNRYPHFKTKIEGLDIHFIHVKPPQLPAGHTPKPLLMVHGWPGSFYEFYKIIPLLTDPKNHGLSDEHVFEVICPSIPGYGFSEASSKKGFNSVATARIFYKLMLRLGFQEFYIQGGDWGSLICTNMAQLVPSHVKGLHLNMALVLSNFSTLTLLLGQRFGRFLGLTERDVELLYPVKEKVFYSLMRESGYMHIQCTKPDTVGSALNDSPVGLAAYILEKFSTWTNTEFRYLEDGGLERKFSLDDLLTNVMLYWTTGTIISSQRFYKENLGQGWMTQKHERMKVYVPTGFSAFPFELLHTPEKWVRFKYPKLISYSYMVRGGHFAAFEEPELLAQDIRKFLSVLERQ

SEQ ID NO: 5905 - protein, 414 aa, Artificial Sequence; identical to SEQ ID NO: 5904
  Synthetic polypeptide

SEQ ID NO: 5906 - protein, 95 aa, Artificial Sequence
  Synthetic polypeptide
SEGENVEPGGQVETSDEEIHDLHQRIDKFRFTPPLEDSCFHYGFNSNYLKKVISYWRNEFDWKKQVEILNRYPHFKTKIEGLDIHFIHVKPPQLP

SEQ ID NO: 5907 - protein, 18 aa, Artificial Sequence
  Synthetic polypeptide
ERGAWWTAASTMASTPTT

SEQ ID NO: 5908 - protein, 18 aa, Artificial Sequence
  Synthetic polypeptide
ERGAWWTAASTMASTPTT

SEQ ID NO: 5909 - protein, 18 aa, Artificial Sequence
  Synthetic polypeptide
ERGAWWTAASTMASTPTT

SEQ ID NO: 5910 - protein, 18 aa, Artificial Sequence
  Synthetic polypeptide
ERGAWWTAASTMASTPTT

SEQ ID NO: 5911 - protein, 31 aa, Artificial Sequence
  Synthetic polypeptide
SEGENVEPGGQLLPLWLQLQLPEESHLLLAE

SEQ ID NO: 5912 - protein, 31 aa, Artificial Sequence; identical to SEQ ID NO: 5911
  Synthetic polypeptide

SEQ ID NO: 5913 - protein, 31 aa, Artificial Sequence; identical to SEQ ID NO: 5911
  Synthetic polypeptide

SEQ ID NO: 5914 - protein, 31 aa, Artificial Sequence; identical to SEQ ID NO: 5911
  Synthetic polypeptide

SEQ ID NO: 5915 - protein, 96 aa, Artificial Sequence
  Synthetic polypeptide
RSNQRVRTWSLVDSCFHYGFNSNYLKKVISYWRNEFDWKKQVEILNRYPHFKTKIEGLDIHFIHVKPPQLPAGHTPKPLLMVHGWPGSFYEFYKII

SEQ ID NO: 5916 - protein, 390 aa, Artificial Sequence
  Synthetic polypeptide
RSNQRVRTWSLVDSCFHYGFNSNYLKKVISYWRNEFDWKKQVEILNRYPHFKTKIEGLDIHFIHVKPPQLPAGHTPKPLLMVHGWPGSFYEFYKIIPLLTDPKNHGLSDEHVFEVICPSIPGYGFSEASSKKGFNSVATARIFYKLMLRLGFQEFYIQGGDWGSLICTNMAQLVPSHVKGLHLNMALVLSNFSTLTLLLGQRFGRFLGLTERDVELLYPVKEKVFYSLMRESGYMHIQCTKPDTVGSALNDSPVGLAAYILEKFSTWTNTEFRYLEDGGLERKFSLDDLLTNVMLYWTTGTIISSQRFYKENLGQGWMTQKHERMKVYVPTGFSAFPFELLHTPEKWVRFKYPKLISYSYMVRGGHFAAFEEPELLAQDIRKFLSVLERQ

SEQ ID NO: 5917 - protein, 390 aa, Artificial Sequence; identical to SEQ ID NO: 5916
  Synthetic polypeptide

SEQ ID NO: 5918 - protein, 71 aa, Artificial Sequence
  Synthetic polypeptide
RSNQRVRTWSLVDSCFHYGFNSNYLKKVISYWRNEFDWKKQVEILNRYPHFKTKIEGLDIHFIHVKPPQLP

SEQ ID NO: 5919 - protein, 46 aa, Artificial Sequence
  Synthetic polypeptide
TEGKVPRAECCISSQRKADVAKMMLSRPKKARKKNKAEKDREVAHV

SEQ ID NO: 5920 - protein, 46 aa, Artificial Sequence; identical to SEQ ID NO: 5919
  Synthetic polypeptide

SEQ ID NO: 5921 - protein, 46 aa, Artificial Sequence; identical to SEQ ID NO: 5919
  Synthetic polypeptide

SEQ ID NO: 5922 - protein, 46 aa, Artificial Sequence; identical to SEQ ID NO: 5919
  Synthetic polypeptide

SEQ ID NO: 5923 - protein, 993 aa, Artificial Sequence
  Synthetic polypeptide
CCQGRKRQEKKTKRRKTEKSPMFDGKVPHWYHFSCFWKVGHSIRHPDVEVDGFSELRWDDQQKVKKTAEAGGVTGKGQDGIGSKAEKTLGDFAAEYAKSNRSTCKGCMEKIEKGQVRLSKKMVDPEKPQLGMIDRWYHPGCFVKNREELGFRPEYSASQLKGFSLLATEDKEALKKQLPGVKSEGKRKGDEVDGVDEVAKKKSKKEKDKDSKLEKALKAQNDLIWNIKDELKKVCSTNDLKELLIFNKQQVPSGESAILDRVADGMVFGALLPCEECSGQLVFKSDAYYCTGDVTAWTKCMVKTQTPNRKEWVTPKEFREISYLKKLKVKKQDRIFPPETSASVAATPPPSTASAPAAVNSSASADKPLSNMKILTLGKLSRNKDEVKAMIEKLGGKLTGTANKASLCISTKKEVEKMNKKMEEVKEANIRVVSEDFLQDVSASTKSLQELFLAHILSPWGAEVKAEPVEVVAPRGKSGAALSKKSKGQVKEEGINKSEKRMKLTLKGGAAVDPDSGLEHSAHVLEKGGKVFSATLGLVDIVKGTNSYYKLQLLEDDKENRYWIFRSWGRVGTVIGSNKLEQMPSKEDAIEHFMKLYEEKTGNAWHSKNFTKYPKKFYPLEIDYGQDEEAVKKLTVNPGTKSKLPKPVQDLIKMIFDVESMKKAMVEYEIDLQKMPLGKLSKRQIQAAYSILSEVQQAVSQGSSDSQILDLSNRFYTLIPHDFGMKKPPLLNNADSVQAKVEMLDNLLDIEVAYSLLRGGSDDSSKDPIDVNYEKLKTDIKVVDRDSEEAEIIRKYVKNTHATTHNAYDLEVIDIFKIEREGECQRYKPFKQLHNRRLLWHGSRTTNFAGILSQGLRIAPPEAPVTGYMFGKGIYFADMVSKSANYCHTSQGDPIGLILLGEVALGNMYELKHASHISKLPKGKHSVKGLGKTTPDPSANISLDGVDVPLGTGISSGVNDTSLLYNEYIVYDIAQVNLKYLLKLKFNFKTSLW

SEQ ID NO: 5924 - protein, 77 aa, Artificial Sequence
  Synthetic polypeptide
CGKNDAVKAEKGKKKKQSGERQRSRPCLMEKSHTGTTSPASGRWATPSGTLTLRWMGSLSFGGMTSRKSRRQRKLEE

SEQ ID NO: 5925 - protein, 77 aa, Artificial Sequence; identical to SEQ ID NO: 5924
  Synthetic polypeptide

SEQ ID NO: 5926 - protein, 77 aa, Artificial Sequence; identical to SEQ ID NO: 5924
  Synthetic polypeptide

SEQ ID NO: 5927 - protein, 77 aa, Artificial Sequence; identical to SEQ ID NO: 5924
  Synthetic polypeptide

SEQ ID NO: 5928 - protein, 87 aa, Artificial Sequence
  Synthetic polypeptide
CCQGRKRQEKKTKRRKTEKSPMFDGKVPHWYHFSCFWKVGHSIRHPDVEVDGFSELRWDDQQKVKKTAEAGGVTEPPIPCGIEVMGR

SEQ ID NO: 5929 - protein, 87 aa, Artificial Sequence; identical to SEQ ID NO: 5928
  Synthetic polypeptide

SEQ ID NO: 5930 - protein, 134 aa, Artificial Sequence
  Synthetic polypeptide
CCQGRKRQEKKTKRRKTEKSPMFDGKVPHWYHFSCFWKVGHSIRHPDVEVDGFSELRWDDQQKVKKTAEAGGVTGVYILGQHGHSAPTLKLPGGPRLREQSKPPPACPLPHVQIKRMVPMLFQQHLLDSASSVA

SEQ ID NO: 5931 - protein, 215 aa, Artificial Sequence
  Synthetic polypeptide
THAHTHTVKHRHTRLEGEQGEDGWRDRNRGRERDSDRERPERWRAVVSVDGRPVRLQLCDTAGQDEFDKLRPLCYTNTDIFLLCFSVVSPSSFQNVSEKWVPEIRCHCPKAPIILVGTQSDLREDVKVLIELDKCKEKPVPEEAAKLCAEEIKAASYIECSALTQKNLKEVFDAAIVAGIQYSDTQQQPKKSKSRTPDKMKNLSKSWWKKYCCFV

SEQ ID NO: 5932 - protein, 45 aa, Artificial Sequence
  Synthetic polypeptide
NTDTHGLKESKEKMDGEIETEGGRETAIERDRRGGERWCLWMGGP

SEQ ID NO: 5933 - protein, 32 aa, Artificial Sequence
  Synthetic polypeptide
KPREGERQRSRETGEVESGGVCGWAARETPTL

SEQ ID NO: 5934 - protein, 38 aa, Artificial Sequence
  Synthetic polypeptide
SNIQDSRVVMATPCPCQMEVRPSASSTPSLAFPSPSCS

SEQ ID NO: 5935 - protein, 38 aa, Artificial Sequence; identical to SEQ ID NO: 5934
  Synthetic polypeptide

SEQ ID NO: 5936 - protein, 38 aa, Artificial Sequence; identical to SEQ ID NO: 5934
  Synthetic polypeptide

SEQ ID NO: 5937 - protein, 51 aa, Artificial Sequence
  Synthetic polypeptide
FRSNWGCHLHHSSNVQKLEQASMGPPQRALTRATSRIAEWLWPHRALVRWR

SEQ ID NO: 5938 - protein, 51 aa, Artificial Sequence; identical to SEQ ID NO: 5937
  Synthetic polypeptide

SEQ ID NO: 5939 - protein, 51 aa, Artificial Sequence; identical to SEQ ID NO: 5937
  Synthetic polypeptide

SEQ ID NO: 5940 - protein, 220 aa, Artificial Sequence
  Synthetic polypeptide
PSGYGHTVPLSDGGKAFCIIYSVIGIPFTLLFLTAVVQRITVHVTRRPVLYFHIRWGFSKQVVAIVHAVLLGFVTVSCFFFIPAAVFSVLEDDWNFLESFYFCFISLSTIGLGDYVPGEGYNQKFRELYKIGITCYLLLGLIAMLVVLETFCELHELKKFRKMFYVKKDKDEDQVHIIEHDQLSFSSITDQAAGMKEDQKQNEPFVATQSSACVDGPANH

SEQ ID NO: 5941 - protein, 220 aa, Artificial Sequence; identical to SEQ ID NO: 5940
  Synthetic polypeptide

SEQ ID NO: 5942 - protein, 208 aa, Artificial Sequence
  Synthetic polypeptide
PSGYGHTVPLSDGGKAFCIIYSVIGIPFTLLFLTAVVQRITVHVTRRPVLYFHIRWGFSKQVVAIVHAVLLGFVTVSCFFFIPAAVFSVLEDDWNFLESFYFCFISLSTIGLGDYVPGEGYNQKFRELYKIGITCYLLLGLIAMLVVLETFCELHELKKFRKMFYVKKDKDEDQVHIIEHDQLSFSSITDQAAGMKEDQKQNEPFVAT

SEQ ID NO: 5943 - protein, 438 aa, Artificial Sequence
  Synthetic polypeptide
DQAWWLTPVIPALWEAEEGRSRGQEIETILANMMVNLKEKIKELHQQYKEASEVKPPRDITAEFLVKSKHRDLTALCKEYDELAETQGKLEEKLQELEANPPSDVYLSSRDRQILDWHFANLEFANATPLSTLSLKHWDQDDDFEFTGSHLTVRNGYSCVPVALAEGLDIKLNTAVRQVRYTASGCEVIAVNTRSTSQTFIYKCDAVLCTLPLGVLKQQPPAVQFVPPLPEWKTSAVQRMGFGNLNKVVLCFDRVFWDPSVNLFGHVGSTTASRGELFLFWNLYKAPILLALVAGEAAGIMENISDDVIVGRCLAILKGIFGSSAVPQPKETVVSRWRADPWARGSYSYVAAGSSGNDYDLMAQPITPGPSIPGAPQPIPRLFFAGEHTIRNYPATVHGALLSGLREAGRIADQFLGAMYTLPRQATPGVPAQQSPSM

SEQ ID NO: 5944 - protein, 438 aa, Artificial Sequence; identical to SEQ ID NO: 5943
  Synthetic polypeptide

SEQ ID NO: 5945 - protein, 438 aa, Artificial Sequence; identical to SEQ ID NO: 5943
  Synthetic polypeptide

SEQ ID NO: 5946 - protein, 9 aa, Artificial Sequence
  Synthetic polypeptide
HDGKFEREN

SEQ ID NO: 5947 - protein, 9 aa, Artificial Sequence
  Synthetic polypeptide
HDGKFEREN

SEQ ID NO: 5948 - protein, 9 aa, Artificial Sequence
  Synthetic polypeptide
HDGKFEREN

SEQ ID NO: 5949 - protein, 8 aa, Artificial Sequence
  Synthetic polypeptide
GFPSHVEL

SEQ ID NO: 5950 - protein, 8 aa, Artificial Sequence
  Synthetic polypeptide
GFPSHVEL

SEQ ID NO: 5951 - protein, 77 aa, Artificial Sequence
  Synthetic polypeptide
EVPFATHCDSEASPAMWNCDFQSQVKIFSRITQIPVAPLPGLPLHQPCFPVGEFNLCCAGKDGKLGEEGYRLCASGH

SEQ ID NO: 5952 - protein, 77 aa, Artificial Sequence; identical to SEQ ID NO: 5951
  Synthetic polypeptide

SEQ ID NO: 5953 - protein, 301 aa, Artificial Sequence
  Synthetic polypeptide
WVYQGFPLLLLPHFFLLLLPCKKCLSPPTVILRLPQPCGTVIFKAKSKYSPELLKYRLPLYLASLFISLVFLLVNLTCAVLVKTGNWERKVIVSVRVAINDTLFVLCAVSLSICLYKISKMSLANIYLESKGSSVCQVTAIGVTVILLYTSRACYNLFILSFSQNKSVHSFDYDWYNVSDQADLKNQLGDAGYVLFGVVLFVWELLPTTLVVYFFRVRNPTKDLTNPGMVPSHGFSPRSYFFDNPRRYDSDDDLAWNIAPQGLQGGFAPDYYDWGQQTNSFLAQAGTLQDSTLDPDKPSLG

SEQ ID NO: 5954 - protein, 268 aa, Artificial Sequence
  Synthetic polypeptide
WVYQGFPLLLLPHFFLLLLPCKKCLSPPTVILRLPQPCGTVIFKAKSKYSPELLKYRLPLYLASLFISLVFLLVNLTCAVLVKTGNWERKVIVSVRVAINDTLFVLCAVSLSICLYKISKMSLANIYLESKGSSVCQVTAIGVTVILLYTSRACYNLFILSFSQNKSVHSFDYDWYNVSDQADLKNQLGDAGYVLFGVVLFVWELLPTTLVVYFFRVRNPTKDLTNPGMVPSHGFSPRSYFFDNPRRYDSDDDLAWNIAPQGLQGGLL

SEQ ID NO: 5955 - protein, 56 aa, Artificial Sequence
  Synthetic polypeptide
DLSSSVHGQVADSGAQAVASWPGGESSIVWSLEFWMIACVILTASITSIPTKSSPK

SEQ ID NO: 5956 - protein, 56 aa, Artificial Sequence; identical to SEQ ID NO: 5955
  Synthetic polypeptide

SEQ ID NO: 5957 - protein, 7 aa, Artificial Sequence
  Synthetic polypeptide
SGHWSSG

SEQ ID NO: 5958 - protein, 7 aa, Artificial Sequence
  Synthetic polypeptide
SGHWSSG

SEQ ID NO: 5959 - protein, 438 aa, Artificial Sequence
  Synthetic polypeptide
ILHSLVTGVLDDCLCDIDSIDNFNTYKIFPKIKKLQERDYFRYYKVNLKRPCPFWAEDGHCSIKDCHVEPCPESKIPVGIKAGHSNKYLKMANNTKELEDCEQANKLGAINSTLSNQSKEAFIDWARYDDSRDHFCELDDERSPAAQYVDLLLNPERYTGYKGTSAWRVWNSIYEENCFKPRSVYRPLNPLAPSRGEDDGESFYTWLEGLCLEKRVFYKLISGLHASINLHLCANYLLEETWGKPSWGPNIKEFKHRFDPVETKGEGPRRLKNLYFLYLIELRALSKVAPYFERSIVDLYTGNAEEDADTKTLLLNIFQDTKSFPMHFDEKSMFAGDKKGAKSLKEEFRLHFKNISRIMDCVGCDKCRLWGKLQTQGLGTALKILFSEKEIQKLPENSPSKGFQLTRQEIVALLNAFGRLSTSIRDLQNFKVLLQHSR

SEQ ID NO: 5960 - protein, 115 aa, Artificial Sequence
  Synthetic polypeptide
ILHSLVTGVLDDCLCDIDSIDNFNTYKIFPKIKKLQERDYFRYYKVNLKRPCPFWAEDGHCSIKDCHVEPCPESKIPVGIKAGHSNKYLKMANNTKELEDCEQANKLGAINSTLR

SEQ ID NO: 5961 - protein, 19 aa, Artificial Sequence
  Synthetic polypeptide
VCQPLSSASQLPWTLGIIW

SEQ ID NO: 5962 - protein, 19 aa, Artificial Sequence
  Synthetic polypeptide
VCQPLSSASQLPWTLGIIW

SEQ ID NO: 5963 - protein, 212 aa, Artificial Sequence
  Synthetic polypeptide
MSLSASFFSLSASLDFRDHMVKEPVEDTDPSTLSFNMSDKYPIQDTELPKAEECDTITLNCPRNSDMKNQGEENGFPDSTGDPLPEISKDNSCKENCTCSSCLLRAPTISDLLNDQDLLDVIRIKLDPCHPTVKNWRNFASKWGMSYDELCFLEQRPQSPTLEFLLRNSQRTVGQLMELCRLYHRADVEKVLRRWVDEEWPKRERGDPSRHF

SEQ ID NO: 5964 - protein, 212 aa, Artificial Sequence; identical to SEQ ID NO: 5963
  Synthetic polypeptide

SEQ ID NO: 5965 - protein, 4 aa, Artificial Sequence
  Synthetic polypeptide
QSGT

SEQ ID NO: 5966 - protein, 4 aa, Artificial Sequence
  Synthetic polypeptide
QSGT

SEQ ID NO: 5967 - protein, 4 aa, Artificial Sequence
  Synthetic polypeptide
QSGT

SEQ ID NO: 5968 - protein, 322 aa, Artificial Sequence
  Synthetic polypeptide
RVAPEELVLHLAVKVANQASLPLVDFIIQNGGHLDAKAADGNTALHYAALYNQPDCLKLLLKGRALVGTVNEAGETALDIARKKHHKECEELLEQAQAGTFAFPLHVDYSWVISTEPGSDSEEDEEEKRCLLKLPAQAHWASGRLDISNKTYETVASLGAATPQGESEDCPPPLPVKNSSRTLVQGCARHASGDRSEVSSLSSEAPETPESLGSPASSSSLMSPLEPGDPSQAPPNSEEGLREPPGTSRPSLTSGTTPSEMYLPVRFSSESTRSYRRGARSPEDGPSARQPLPRRNVPVGITEGDGSRTGSLPASSVQLLQD

SEQ ID NO: 5969 - protein, 322 aa, Artificial Sequence; identical to SEQ ID NO: 5968
  Synthetic polypeptide

SEQ ID NO: 5970 - protein, 322 aa, Artificial Sequence; identical to SEQ ID NO: 5968
  Synthetic polypeptide

SEQ ID NO: 5971 - protein, 60 aa, Artificial Sequence
  Synthetic polypeptide
EWHLKNSSCIWLSKSPTRLPCLWWISSSRTVVTWMPRLLTGTRLCTTQHSTTSPTASSCC

SEQ ID NO: 5972 - protein, 60 aa, Artificial Sequence; identical to SEQ ID NO: 5971
  Synthetic polypeptide

SEQ ID NO: 5973 - protein, 60 aa, Artificial Sequence; identical to SEQ ID NO: 5971
  Synthetic polypeptide

SEQ ID NO: 5974 - protein, 42 aa, Artificial Sequence
  Synthetic polypeptide
DRALRNNAGIQIQLFGDHGIFLHETKTWREGGVPKCFLQYLA

SEQ ID NO: 5975 - protein, 42 aa, Artificial Sequence; identical to SEQ ID NO: 5974
  Synthetic polypeptide

SEQ ID NO: 5976 - protein, 94 aa, Artificial Sequence
  Synthetic polypeptide
ETTLAFKSSFLETTAYFFMKPKLGEKEVSPNAFFSIWHEFSSDFKDFWKKENKLLLQERVKEAEEVCRQKKGKSLYKIKPRHDSGIKAKISMKT

SEQ ID NO: 5977 - protein, 94 aa, Artificial Sequence; identical to SEQ ID NO: 5976
  Synthetic polypeptide

SEQ ID NO: 5978 - protein, 30 aa, Artificial Sequence
  Synthetic polypeptide
RRLVPLLRSRSEKQRWHSNPAFWRPRHISS

SEQ ID NO: 5979 - protein, 30 aa, Artificial Sequence; identical to SEQ ID NO: 5978
  Synthetic polypeptide

SEQ ID NO: 5980 - protein, 56 aa, Artificial Sequence
  Synthetic polypeptide
FTSTTKKHFFGESNAGQRWPHKNYRFWTLQRRDHRCSHHEDILWHSRISGTRGVRR

SEQ ID NO: 5981 - protein, 56 aa, Artificial Sequence; identical to SEQ ID NO: 5980
  Synthetic polypeptide

SEQ ID NO: 5982 - protein, 56 aa, Artificial Sequence; identical to SEQ ID NO: 5980
  Synthetic polypeptide

SEQ ID NO: 5983 - protein, 56 aa, Artificial Sequence; identical to SEQ ID NO: 5980
  Synthetic polypeptide

SEQ ID NO: 5984 - protein, 223 aa, Artificial Sequence
  Synthetic polypeptide
SLLQRTAKEDIALPYKIRFRFDLQAPPKNISLENLMLDKDGHIKITDFGLCKEGITDAATMKTFCGTPEYLAPEVLEDNDYGRAVDWWGLGVVMYEMMCGRLPFYNQDHEKLFELILMEDIKFPRTLSSDAKSLLSGLLIKDPNKRLGGGPDDAKEIMRHSFFSGVNWQDVYDKKLVPPFKPQVTSETDTRYFDEEFTAQTITITPPEKCQQSDCGMLGNWKK

SEQ ID NO: 5985 - protein, 223 aa, Artificial Sequence; identical to SEQ ID NO: 5984
  Synthetic polypeptide

SEQ ID NO: 5986 - protein, 17 aa, Artificial Sequence
  Synthetic polypeptide
DLGLIYKHHQKTFLWRI

SEQ ID NO: 5987 - protein, 17 aa, Artificial Sequence
  Synthetic polypeptide
DLGLIYKHHQKTFLWRI

SEQ ID NO: 5988 - protein, 17 aa, Artificial Sequence
  Synthetic polypeptide
DLGLIYKHHQKTFLWRI

SEQ ID NO: 5989 - protein, 17 aa, Artificial Sequence
  Synthetic polypeptide
DLGLIYKHHQKTFLWRI

SEQ ID NO: 5990 - protein, 237 aa, Artificial Sequence
  Synthetic polypeptide
SLLQRTAKEDIALPYKIRFRFDLQAPPKNISLENLMLDKDGHIKITDFGLCKEGITDAATMKTFCGTPEYLAPEVLEDNDYGRAVDWWGLGVVMYEMMCGRLPFYNQDHEKLFELILMEDIKFPRTLSSDAKSLLSGLLIKDPNKRLGGGPDDAKEIMRHSFFSGVNWQDVYDKKLVPPFKPQVTSETDTRYFDEEFTAQTITITPPEKYDEDGMDCMDNERRPHFPQFSYSASGRE

SEQ ID NO: 5991 - protein, 237 aa, Artificial Sequence; identical to SEQ ID NO: 5990
  Synthetic polypeptide

SEQ ID NO: 5992 - protein, 644 aa, Artificial Sequence
  Synthetic polypeptide
DDCRLDLGWDLASCALGQGTLPLWPPFPPSSVKYVLKRKGEAIINLPRFRSVRLLKNDPVNLQKFSYTSEDEAWKTYLENPLTAATKAMMRVNGDDDSVAALSFLYDYYMGPKEKRILSSSTGGRNDQGKRYYHGMEYETDLTPLESPTHLMKFLTENVSGTPEYPDLLKKNNLMSLEGALPTPGKAAPLPAGPSKLEAGSVDSYLLPTTDMYDNGSLNSLFESIHGVPPTQRWQPDSTFKDDPQESMLFPDILKTSPEPPCPEDYPSLKSDFEYTLGSPKAIHIKSGESPMAYLNKGQFYPVTLRTPAGGKGLALSSNKVKSVVMVVFDNEKVPVEQLRFWKHWHSRQPTAKQRVIDVADCKENFNTVEHIEEVAYNALSFVWNVNEEAKVFIGVNCLSTDFSSQKGVKGVPLNLQIDTYDCGLGTERLVHRAVCQIKIFCDKGAERKMRDDERKQFRRKVKCPDSSNSGVKGCLLSGFRGNETTYLRPETDLETPPVLFIPNVHFSSLQRSGGAAPSAGPSSSNRLPLKRTCSPFTEEFEPLPSKQAKEGDLQRVLLYVRRETEEVFDALMLKTPDLKGLRNAISEKYGFPEENIYKVYKKCKRGILVNMDNNIIQHYSNHVAFLLDMGELDGKIQIILKEL

SEQ ID NO: 5993 - protein, 644 aa, Artificial Sequence; identical to SEQ ID NO: 5992
  Synthetic polypeptide

SEQ ID NO: 5994 - protein, 10 aa, Artificial Sequence
  Synthetic polypeptide
IYHVSGLCGC

SEQ ID NO: 5995 - protein, 10 aa, Artificial Sequence
  Synthetic polypeptide
IYHVSGLCGC

SEQ ID NO: 5996 - protein, 10 aa, Artificial Sequence
  Synthetic polypeptide
IYHVSGLCGC

SEQ ID NO: 5997 - protein, 55 aa, Artificial Sequence
  Synthetic polypeptide
LCPWARHFASLASISSLICKICVEEEGGSDNKSTTFQVCAAAKERPSQLAEILLH

SEQ ID NO: 5998 - protein, 55 aa, Artificial Sequence; identical to SEQ ID NO: 5997
  Synthetic polypeptide

SEQ ID NO: 5999 - protein, 55 aa, Artificial Sequence; identical to SEQ ID NO: 5997
  Synthetic polypeptide

SEQ ID NO: 6000 - protein, 668 aa, Artificial Sequence
  Synthetic polypeptide
DDCRLDLGWDLASCALGQGTLPLWPPFPPSSVKYVLKRKGEAIINLPRFRSVRLLKNDPVNLQKFSYTSEDEAWKTYLENPLTAATKAMMRVNGDDDSVAALSFLYDYYMGPKEKRILSSSTGGRNDQGKRYYHGMEYETDLTPLESPTHLMKFLTENVSGTPEYPDLLKKNNLMSLEGALPTPGKAAPLPAGPSKLEAGSVDSYLLPTTDMYDNGSLNSLFESIHGVPPTQRWQPDSTFKDDPQESMLFPDILKTSPEPPCPEDYPSLKSDFEYTLGSPKAIHIKSGESPMAYLNKGQFYPVTLRTPAGGKGLALSSNKVKSVVMVVFDNEKVPVEQLRFWKHWHSRQPTAKQRVIDVADCKENFNTVEHIEEVAYNALSFVWNVNEEAKVFIGVNCLSTDFSSQKGVKGVPLNLQIDTYDCGLGTERLVHRAVCQIKIFCDKGAERKMRDDERKQFRRKVKCPDSSNSGVKGCLLSGFRGNETTYLRPETDLETPPVLFIPNVHFSSLQRSGGAAPSAGPSSSNRLPLKRTCSPFTEEFEPLPSKQAKEGDLQRVLLYVRRETEEVFDALMLKTPDLKGLRNAISEKYGFPEENIYKVYKKCKRGETSLLHPRLSRHPPPDCLECSHPVTQVRNMGFGDGFWRQRDLDSNPSPTTVNSLHFTVNSE

SEQ ID NO: 6001 - protein, 11 aa, Artificial Sequence
  Synthetic polypeptide
NYVSGWVVSIR

SEQ ID NO: 6002 - protein, 11 aa, Artificial Sequence
  Synthetic polypeptide
NYVSGWVVSIR

SEQ ID NO: 6003 - protein, 11 aa, Artificial Sequence
  Synthetic polypeptide
NYVSGWVVSIR

SEQ ID NO: 6004 - protein, 11 aa, Artificial Sequence
  Synthetic polypeptide
NYVSGWVVSIR

SEQ ID NO: 6005 - protein, 264 aa, Artificial Sequence
  Synthetic polypeptide
GLELRVRMGCLYKVICNSFTICNAEMQEVGVGLYPSISLLNHSCDPNCSIVFNGPHLLLRAVRDIEVGEELTICYLDMLMTSEERRKQLRDQYCFECDCFRCQTQDKDADMLTGDEQVWKEVQESLKKIEELKAHWKWEQVLAMCQAIISSNSERLPDINIYQLKVLDCAMDACINLGLLEEALFYGTRTMEPYRIFFPGSHPVRGVQVMKVGKLQLHQGMFPQAMKNLRLAFDIMRVTHGREHSLIEDLILLLEECDANIRAS

SEQ ID NO: 6006 - protein, 264 aa, Artificial Sequence; identical to SEQ ID NO: 6005
  Synthetic polypeptide

SEQ ID NO: 6007 - protein, 264 aa, Artificial Sequence; identical to SEQ ID NO: 6005
  Synthetic polypeptide

SEQ ID NO: 6008 - protein, 26 aa, Artificial Sequence
  Synthetic polypeptide
GLELRVRMGCLYKVICNSFTICNAEM

SEQ ID NO: 6009 - protein, 39 aa, Artificial Sequence
  Synthetic polypeptide
DQVQWLTPVISALWEAEAGRSLEEGKADAMLSVPRRQIL

SEQ ID NO: 6010 - protein, 39 aa, Artificial Sequence; identical to SEQ ID NO: 6009
  Synthetic polypeptide

SEQ ID NO: 6011 - protein, 387 aa, Artificial Sequence
  Synthetic polypeptide
SQHFGRPRRADHLRKEKLMRCSQCRVAKYCSAKCQKKAWPDHKRECKCLKSCKPRYPPDSVRLLGRVVFKLMDGAPSESEKLYSFYDLESNINKLTEDKKEGLRQLVMTFQHFMREEIQDASQLPPAFDLFEAFAKVICNSFTICNAEMQEVGVGLYPSISLLNHSCDPNCSIVFNGPHLLLRAVRDIEVGEELTICYLDMLMTSEERRKQLRDQYCFECDCFRCQTQDKDADMLTGDEQVWKEVQESLKKIEELKAHWKWEQVLAMCQAIISSNSERLPDINIYQLKVLDCAMDACINLGLLEEALFYGTRTMEPYRIFFPGSHPVRGVQVMKVGKLQLHQGMFPQAMKNLRLAFDIMRVTHGREHSLIEDLILLLEECDANIRAS

SEQ ID NO: 6012 - protein, 141 aa, Artificial Sequence
  Synthetic polypeptide
SQHFGRPRRADHLRKEKLMRCSQCRVAKYCSAKCQKKAWPDHKRECKCLKSCKPRYPPDSVRLLGRVVFKLMDGAPSESEKLYSFYDLESNINKLTEDKKEGLRQLVMTFQHFMREEIQDASQLPPAFDLFEAFAKPIGMK

SEQ ID NO: 6013 - protein, 372 aa, Artificial Sequence
  Synthetic polypeptide
TLSLLQHPYCSPCIGFSGQQKKAWPDHKRECKCLKSCKPRYPPDSVRLLGRVVFKLMDGAPSESEKLYSFYDLESNINKLTEDKKEGLRQLVMTFQHFMREEIQDASQLPPAFDLFEAFAKVICNSFTICNAEMQEVGVGLYPSISLLNHSCDPNCSIVFNGPHLLLRAVRDIEVGEELTICYLDMLMTSEERRKQLRDQYCFECDCFRCQTQDKDADMLTGDEQVWKEVQESLKKIEELKAHWKWEQVLAMCQAIISSNSERLPDINIYQLKVLDCAMDACINLGLLEEALFYGTRTMEPYRIFFPGSHPVRGVQVMKVGKLQLHQGMFPQAMKNLRLAFDIMRVTHGREHSLIEDLILLLEECDANIRAS

SEQ ID NO: 6014 - protein, 372 aa, Artificial Sequence; identical to SEQ ID NO: 6013
  Synthetic polypeptide

SEQ ID NO: 6015 - protein, 372 aa, Artificial Sequence; identical to SEQ ID NO: 6013
  Synthetic polypeptide

SEQ ID NO: 6016 - protein, 94 aa, Artificial Sequence
  Synthetic polypeptide
EIPPLLLLSCLAVIKLFLCCNTPTVLRVLAFLGSRKKLGQTTSGNANALKAANPDILQTPFDFLAELSSNLWMEHLQNQRSFTHFMIWSQILTN

SEQ ID NO: 6017 - protein, 94 aa, Artificial Sequence; identical to SEQ ID NO: 6016
  Synthetic polypeptide

SEQ ID NO: 6018 - protein, 94 aa, Artificial Sequence; identical to SEQ ID NO: 6016
  Synthetic polypeptide

SEQ ID NO: 6019 - protein, 94 aa, Artificial Sequence; identical to SEQ ID NO: 6016
  Synthetic polypeptide

SEQ ID NO: 6020 - protein, 94 aa, Artificial Sequence; identical to SEQ ID NO: 6016
  Synthetic polypeptide

SEQ ID NO: 6021 - protein, 35 aa, Artificial Sequence
  Synthetic polypeptide
LNSFSAATPLLFSVYWLFWAAEKSLARPQAGMQMP

SEQ ID NO: 6022 - protein, 35 aa, Artificial Sequence; identical to SEQ ID NO: 6021
  Synthetic polypeptide

SEQ ID NO: 6023 - protein, 35 aa, Artificial Sequence; identical to SEQ ID NO: 6021
  Synthetic polypeptide

SEQ ID NO: 6024 - protein, 35 aa, Artificial Sequence; identical to SEQ ID NO: 6021
  Synthetic polypeptide

SEQ ID NO: 6025 - protein, 35 aa, Artificial Sequence; identical to SEQ ID NO: 6021
  Synthetic polypeptide

SEQ ID NO: 6026 - protein, 35 aa, Artificial Sequence; identical to SEQ ID NO: 6021
  Synthetic polypeptide

SEQ ID NO: 6027 - protein, 134 aa, Artificial Sequence
  Synthetic polypeptide
TLSLLQHPYCSPCIGFSGQQKKAWPDHKRECKCLKSCKPRYPPDSVRLLGRVVFKLMDGAPSESEKLYSFYDLESNINKLTEDKKEGLRQLVMTFQHFMREEIQDASQLPPAFDLFEAFAKVICNSFTICNAEM

SEQ ID NO: 6028 - protein, 126 aa, Artificial Sequence
  Synthetic polypeptide
TLSLLQHPYCSPCIGFSGQQKKAWPDHKRECKCLKSCKPRYPPDSVRLLGRVVFKLMDGAPSESEKLYSFYDLESNINKLTEDKKEGLRQLVMTFQHFMREEIQDASQLPPAFDLFEAFAKPIGMK

SEQ ID NO: 6029 - protein, 77 aa, Artificial Sequence
  Synthetic polypeptide
TLSLLQHPYCSPCIGFSGQQKKAWPDHKRECKCLKSCKPRYPPDSVRLLGRVVFKLMDGAPSESEKLYSFYDLESNI

SEQ ID NO: 6030 - protein, 91 aa, Artificial Sequence
  Synthetic polypeptide
EIPPLLLLSCLAVIKLFLCCNTPTVLRVLAFLGSRKKLGQTTSGNANALKAANPDILQTPFDFLAELSSNLWMEHLQNQRSFTHFMIWSQI

SEQ ID NO: 6031 - protein, 36 aa, Artificial Sequence
  Synthetic polypeptide
TLSLLQHPYCSPCIGFSGQQEGKADAMLSVPRRQIL

SEQ ID NO: 6032 - protein, 36 aa, Artificial Sequence; identical to SEQ ID NO: 6031
  Synthetic polypeptide

SEQ ID NO: 6033 - protein, 408 aa, Artificial Sequence
  Synthetic polypeptide
EIPPLLLLSCLAVIKLFLCCNTPTVLRVLAFLGSRKEKLMRCSQCRVAKYCSAKCQKKAWPDHKRECKCLKSCKPRYPPDSVRLLGRVVFKLMDGAPSESEKLYSFYDLESNINKLTEDKKEGLRQLVMTFQHFMREEIQDASQLPPAFDLFEAFAKVICNSFTICNAEMQEVGVGLYPSISLLNHSCDPNCSIVFNGPHLLLRAVRDIEVGEELTICYLDMLMTSEERRKQLRDQYCFECDCFRCQTQDKDADMLTGDEQVWKEVQESLKKIEELKAHWKWEQVLAMCQAIISSNSERLPDINIYQLKVLDCAMDACINLGLLEEALFYGTRTMEPYRIFFPGSHPVRGVQVMKVGKLQLHQGMFPQAMKNLRLAFDIMRVTHGREHSLIEDLILLLEECDANIRAS

SEQ ID NO: 6034 - protein, 25 aa, Artificial Sequence
  Synthetic polypeptide
LNSFSAATPLLFSVYWLFWAAGRKS

SEQ ID NO: 6035 - protein, 25 aa, Artificial Sequence
  Synthetic polypeptide
LNSFSAATPLLFSVYWLFWAAGRKS

SEQ ID NO: 6036 - protein, 162 aa, Artificial Sequence
  Synthetic polypeptide
EIPPLLLLSCLAVIKLFLCCNTPTVLRVLAFLGSRKEKLMRCSQCRVAKYCSAKCQKKAWPDHKRECKCLKSCKPRYPPDSVRLLGRVVFKLMDGAPSESEKLYSFYDLESNINKLTEDKKEGLRQLVMTFQHFMREEIQDASQLPPAFDLFEAFAKPIGMK

SEQ ID NO: 6037 - protein, 400 aa, Artificial Sequence
  Synthetic polypeptide
IQASGRLGDAKGNVFRNEYLEASLSGIFFLSCVEGRPTLSSEVGIIICDIANPASLDEMAKQATVVLNCVGPYRFYGEPVIKACIENGASCIDISGEPQFLELMQLKYHEKAADKGVYIIGSSGFDSIPADLGVIYTRNKMNGTLTAVESFLTIHSGPEGLSIHDGTWKSAIYGFGDQSNLRKLRNVSNLKPVPLIGPKLKRRWPISYCRELKGYSIPFMGSDVSVVRRTQRYLYENLEESPVQYAAYVTVGGITSVIKLMFAGLFFLFFVRFGIGRQLLIKFPWFFSFGYFSKQGPTQKQIDAASFTLTFFGQGYSQGTGTDKNKPNIKICTQVKGPEAGYVATPIAMVQAAMTLLSDASHLPKAGGVFTPGAAFSKTKLIDRLNKHGIEFSVISSSEV

SEQ ID NO: 6038 - protein, 39 aa, Artificial Sequence
  Synthetic polypeptide
AVLREDQHCHLKLESSSVILLIQPRLMKWLNRQQLSSIA

SEQ ID NO: 6039 - protein, 54 aa, Artificial Sequence
  Synthetic polypeptide
GASLPGRPSSEMWGAPLPRLPIWDVRSASARPQPRLGGSQQTCRTWLPGPTHHL

SEQ ID NO: 6040 - protein, 54 aa, Artificial Sequence; identical to SEQ ID NO: 6039
  Synthetic polypeptide

SEQ ID NO: 6041 - protein, 33 aa, Artificial Sequence
  Synthetic polypeptide
GAPLPGRNPVWEEASRPAELGSRDPPTIYNFQQ

SEQ ID NO: 6042 - protein, 33 aa, Artificial Sequence; identical to SEQ ID NO: 6041
  Synthetic polypeptide

SEQ ID NO: 6043 - protein, 219 aa, Artificial Sequence
  Synthetic polypeptide
DVGSASAPPPHLGCEERLCPAATPSGRKPADLQNLAPGTHPPFITFNSEVKTDVNKIEEFLEEVLCPPKYLKLSPKHPESNTAGMDIFAKFSAYIKNSRPEANEALERGLLKTLQKLDEYLNSPLPDEIDENSMEDIKFSTRKFLDGNEMTLADCNLLPKLHIVKVVAKKYRNFDIPKEMTGIWRYLTNAYSRDEFTNTCPSDKEVEIAYSDVAKRLTK

SEQ ID NO: 6044 - protein, 219 aa, Artificial Sequence; identical to SEQ ID NO: 6043
  Synthetic polypeptide

SEQ ID NO: 6045 - protein, 67 aa, Artificial Sequence
  Synthetic polypeptide
GWAWWLITPVIPALWEAEAGGSPEIQTGLSGQNDTSQTSSPSASSNISGGIFLFFVANAIIHLFCFS

SEQ ID NO: 6046 - protein, 36 aa, Artificial Sequence
  Synthetic polypeptide
SQHFGRPRQADHLRYKLDSQDKTTPAKPAAPQHPAT

SEQ ID NO: 6047 - protein, 49 aa, Artificial Sequence
  Synthetic polypeptide
GLPASEIRTPSPPLSSCVLTIVPSARSTLSAESKNCLAEEIKYSLRILS

SEQ ID NO: 6048 - protein, 49 aa, Artificial Sequence; identical to SEQ ID NO: 6047
  Synthetic polypeptide

SEQ ID NO: 6049 - protein, 49 aa, Artificial Sequence; identical to SEQ ID NO: 6047
  Synthetic polypeptide

SEQ ID NO: 6050 - protein, 49 aa, Artificial Sequence; identical to SEQ ID NO: 6047
  Synthetic polypeptide

SEQ ID NO: 6051 - protein, 37 aa, Artificial Sequence
  Synthetic polypeptide
ELLPLPCPVVFSPLFHLRGAPFLQKVKIALLRKLNIA

SEQ ID NO: 6052 - protein, 37 aa, Artificial Sequence; identical to SEQ ID NO: 6051
  Synthetic polypeptide

SEQ ID NO: 6053 - protein, 37 aa, Artificial Sequence; identical to SEQ ID NO: 6051
  Synthetic polypeptide

SEQ ID NO: 6054 - protein, 37 aa, Artificial Sequence; identical to SEQ ID NO: 6051
  Synthetic polypeptide

SEQ ID NO: 6055 - protein, 45 aa, Artificial Sequence
  Synthetic polypeptide
ELSLPGSQADPCHPHHRCHPLLLRHELPAADKLHRPWDPAPGHCL

SEQ ID NO: 6056 - protein, 304 aa, Artificial Sequence
  Synthetic polypeptide
EVRRPSAWQPPRLRSEEPLRPAAAPSENCPYLARKLTLAIPIIAAILFFFVMSCLLQTSFTDPGILPRATVCEAAALEKQIDNTGSSTYRPPPRTREVLINGQMVKLKYCFTCKMFRPPRTSHCSVCDNCVERFDHHCPWVGNCVGRRNYRFFYAFILSLSFLTAFIFACVVTHLTLRAQGSNFLSTLKETPASVLELVICFFSIWSILGLSGFHTYLVASNLTTNEDIKGSWSSKRGGEASVNPYSHKSIITNCCAVLCGPLPPSLIDRRGFVQSDTVLPSPIRSDEPACRAKPDASMVGGHP

SEQ ID NO: 6057 - protein, 22 aa, Artificial Sequence
  Synthetic polypeptide
EVRSPSARQLPRLRTVPTWLAS

SEQ ID NO: 6058 - protein, 39 aa, Artificial Sequence
  Synthetic polypeptide
TISHKGEGLLSYPSSLFLLLIEGVACHREDLTVPTWLAS

SEQ ID NO: 6059 - protein, 73 aa, Artificial Sequence
  Synthetic polypeptide
ATRGRDSCLIRRHYSCCLLKVLPATEKTSLSLPGSQADPCHPHHRCHPLLLRHELPAADKLHRPWDPAPGHCL

SEQ ID NO: 6060 - protein, 286 aa, Artificial Sequence
  Synthetic polypeptide
RCCLPQRRPHCPYLARKLTLAIPIIAAILFFFVMSCLLQTSFTDPGILPRATVCEAAALEKQIDNTGSSTYRPPPRTREVLINGQMVKLKYCFTCKMFRPPRTSHCSVCDNCVERFDHHCPWVGNCVGRRNYRFFYAFILSLSFLTAFIFACVVTHLTLRAQGSNFLSTLKETPASVLELVICFFSIWSILGLSGFHTYLVASNLTTNEDIKGSWSSKRGGEASVNPYSHKSIITNCCAVLCGPLPPSLIDRRGFVQSDTVLPSPIRSDEPACRAKPDASMVGGHP

SEQ ID NO: 6061 - protein, 159 aa, Artificial Sequence
  Synthetic polypeptide
AGFKLVNTFFSFLRRKTDFFIGGEEGMAEKLITQTFSHHNQLAQKTRREKRARQEAERREKAERAARLAKEAKSETSGPQIKELTDEEAERLQLEIDQKKDAENHEAQLKNGSLDSPGKQDTEEDEEEDEKDKGKLKPNLGNGADLPNYRWTQTLSELD

SEQ ID NO: 6062 - protein, 68 aa, Artificial Sequence
  Synthetic polypeptide
QSQTQTPYSKSPHESFEELLVPTDQLEQTLVKTSLLPPASRTLAYPQLEPAHISSLTASPENRLASSL

SEQ ID NO: 6063 - protein, 68 aa, Artificial Sequence; identical to SEQ ID NO: 6062
  Synthetic polypeptide

SEQ ID NO: 6064 - protein, 91 aa, Artificial Sequence
  Synthetic polypeptide
QPLLRIGWLQACEHLLQLPSTQNRLFHWRRRRDGREAYHTDFQPPQSAGTEDPAGEESPAGGRAAGEGGAGGQTGQGSQVRDLRAPDQGAN

SEQ ID NO: 6065 - protein, 91 aa, Artificial Sequence; identical to SEQ ID NO: 6064
  Synthetic polypeptide

SEQ ID NO: 6066 - protein, 308 aa, Artificial Sequence
  Synthetic polypeptide
AGFKLVNTFFSFLRRKTDFFIGGEEGMAEKLITQTFSHHNQLAQKTRREKRARQEAERREKAERAARLAKEAKSETSGPQIKELTDEEAERLQLEIDQKKDAENHEAQLKNGSLDSPGKQDTEEDEEEDEKDKGKLKPNLGNGADLPNYRWTQTLSELDLAVPFCVNFRLKGKDMVVDIQRRHLRVGLKGQPAIIDGELYNEVKVEESSWLIEDGKVVTVHLEKINKMEWWSRLVSSDPEINTKKINPENSKLSDLDSETRSMVEKMMYDQRQKSMGLPTSDEQKKQEILKKFMDQHPEMDFSKAKFN

SEQ ID NO: 6067 - protein, 13 aa, Artificial Sequence
  Synthetic polypeptide
GQEFETSLAQYDQ

SEQ ID NO: 6068 - protein, 114 aa, Artificial Sequence
  Synthetic polypeptide
WLTPVIPTLWETEAGRSSEVRSLRPAWPNMINKMEWWSRLVSSDPEINTKKINPENSKLSDLDSETRSMVEKMMYDQRQKSMGLPTSDEQKKQEILKKFMDQHPEMDFSKAKFN

SEQ ID NO: 6069 - protein, 335 aa, Artificial Sequence
  Synthetic polypeptide
LMLEHFQARVLVTWQGMTIRPLVDLLAVKKKQETKRSINEEIHTQFLDHLLTGIEDICGHYGHHHWKDKLNRFNKKYVKKCLIAGERSKEPQLIAFYHKMEMKQAIELVESGGMGKIPSAVSTVSMQNIHPKSLPSERILPALSKDKEEEIRKILRNNLQKTRQRLRSYNRHTLVADPYEEAWNQMLLRRQKARQLEQKINNYLTVPAHKLDSPTMSRARIGSDPLAYEPKEDLPVITIDPASPQSPESVDLVNEELKGKVLGLSRDPAKVAEEDEDDDGGIMMRSKETSSPGTDDVFTPAPSDSPSSQRIQRCLSDPGPHPEPGEGEPFFPKGQ

SEQ ID NO: 6070 - protein, 335 aa, Artificial Sequence; identical to SEQ ID NO: 6069
  Synthetic polypeptide

SEQ ID NO: 6071 - protein, 13 aa, Artificial Sequence
  Synthetic polypeptide
NTSKHVCWSHGRA

SEQ ID NO: 6072 - protein, 13 aa, Artificial Sequence
  Synthetic polypeptide
NTSKHVCWSHGRA

SEQ ID NO: 6073 - protein, 89 aa, Artificial Sequence
  Synthetic polypeptide
RQWKDLPLSVADIGELIDARTLPSTCVGHMAGHDHSAPGRPVGCEEKARDEALHQRRDPHTVPGPPSDRHRRHLWPLRSPPLEGQAQPV

SEQ ID NO: 6074 - protein, 89 aa, Artificial Sequence; identical to SEQ ID NO: 6073
  Synthetic polypeptide

SEQ ID NO: 6075 - protein, 43 aa, Artificial Sequence
  Synthetic polypeptide
PGFKSRHCHWPSCVIWGRTQPLWTSAFAFVERGPLTCPAGLHL

SEQ ID NO: 6076 - protein, 43 aa, Artificial Sequence; identical to SEQ ID NO: 6075
  Synthetic polypeptide

SEQ ID NO: 6077 - protein, 43 aa, Artificial Sequence; identical to SEQ ID NO: 6075
  Synthetic polypeptide

SEQ ID NO: 6078 - protein, 43 aa, Artificial Sequence; identical to SEQ ID NO: 6075
  Synthetic polypeptide

SEQ ID NO: 6079 - protein, 43 aa, Artificial Sequence; identical to SEQ ID NO: 6075
  Synthetic polypeptide

SEQ ID NO: 6080 - protein, 487 aa, Artificial Sequence
  Synthetic polypeptide
PAPQGSIYEISGNECCLSTGDLIKVTQVRLQKVVCENPKTSQTMELAPNFQGYFTPLNTPQSYETLEELVSATTQSSKQLPTCFMSTHRIVTEGRVVTEDQLLMLEAVVMHLGIRSARCVLGMEGQQVILHLPLSQKGPFWTWEPSAPRTLLQVLQDPALKDLVLTCPTLPWHSLILRPQYEIQAIMHMRRTIVKIPSTLEVDVEDVTASSRHVHFIKPLLLSEVLAWEGPFPLSMEILERLSDQAGEDEEEECKEEAESPERVLLPFHFPGSFVEEMSDSRRYSLADLTAQFSLPCEVKVVAKDTSHPTDPLTSFLGLRLEEKITEPFLVVSLDSEPGMCFEIPPRWLDLTVVKAKGQPDLPEGSLPIATVEELTDTFYYRLRKLPACEIQAPPPRPPKNQGLSKQRRHSSEGGVKSSQVLGLQQHARLPKPKAKTLPEFIKDGSSTYSKIPAHRKGHRPAKPQRQDLDDDEHDYEEILEQFQKTI

SEQ ID NO: 6081 - protein, 56 aa, Artificial Sequence
  Synthetic polypeptide
WVQIPTLPLAKLCDLGPHSTSLDLGFCFRGTGTADLPRRAPSMRSLGMSAASPRGT

SEQ ID NO: 6082 - protein, 56 aa, Artificial Sequence; identical to SEQ ID NO: 6081
  Synthetic polypeptide

SEQ ID NO: 6083 - protein, 56 aa, Artificial Sequence; identical to SEQ ID NO: 6081
  Synthetic polypeptide

SEQ ID NO: 6084 - protein, 56 aa, Artificial Sequence; identical to SEQ ID NO: 6081
  Synthetic polypeptide

SEQ ID NO: 6085 - protein, 56 aa, Artificial Sequence; identical to SEQ ID NO: 6081
  Synthetic polypeptide

SEQ ID NO: 6086 - protein, 233 aa, Artificial Sequence
  Synthetic polypeptide
PAPQGSIYEISGNECCLSTGDLIKVTQVRLQKVVCENPKTSQTMELAPNFQGYFTPLNTPQSYETLEELVSATTQSSKQLPTCFMSTHRIVTEGRVVTEDQLLMLEAVVMHLGIRSARCVLGMEGQQVILHLPLSQKGPFWTWEPSAPRTLLQVLQDPALKDLVLTCPTLPWHSLILRPQYEIQAIMHIFSSLRIAATRSAAQTQGEDLARVHQGWLQYVQQDSCPQEGPQAR

SEQ ID NO: 6087 - protein, 96 aa, Artificial Sequence
  Synthetic polypeptide
PAPQGSIYEISGNECCLSTGDLIKVTQVRLQKVVCENPKTSQTMELAPNFQVFSSLRIAATRSAAQTQGEDLARVHQGWLQYVQQDSCPQEGPQAR

SEQ ID NO: 6088 - protein, 219 aa, Artificial Sequence
  Synthetic polypeptide
PAPQGSIYEISGNECCLSTGDLIKVTQVRLQKVVCENPKTSQTMELAPNFQVRRTIVKIPSTLEVDVEDVTASSRHVHFIKPLLLSEVLAWEGPFPLSMEILEVPEGRPIFLSPWVGSLQKGQRLCVYGLASPPWRVLASSKGRKVPRHFLVSGGYQGKLRRRPREFPTAYDLLGAFQPGRPLRVVATKDCEGEREENPEFTSLAVGDRLEVLGPGQAH

SEQ ID NO: 6089 - protein, 616 aa, Artificial Sequence
  Synthetic polypeptide
PAPQGSIYEISGNECCLSTGDLIKVTQVRLQKVVCENPKTSQTMELAPNFQGYFTPLNTPQSYETLEELVSATTQSSKQLPTCFMSTHRIVTEGRVVTEDQLLMLEAVVMHLGIRSARCVLGMEGQQVILHLPLSQKGPFWTWEPSAPRTLLQVLQDPALKDLVLTCPTLPWHSLILRPQYEIQAIMHMRRTIVKIPSTLEVDVEDVTASSRHVHFIKPLLLSEVLAWEGPFPLSMEILEVPEGRPIFLSPWVGSLQKGQRLCVYGLASPPWRVLASSKGRKVPRHFLVSGGYQGKLRRRPREFPTAYDLLGAFQPGRPLRVVATKDCEGEREENPEFTSLAVGDRLEVLGPGQAHGAQGSDVDVLVCQRLSDQAGEDEEEECKEEAESPERVLLPFHFPGSFVEEMSDSRRYSLADLTAQFSLPCEVKVVAKDTSHPTDPLTSFLGLRLEEKITEPFLVVSLDSEPGMCFEIPPRWLDLTVVKAKGQPDLPEGSLPIATVEELTDTFYYRLRKLPACEIQAPPPRPPKNQGLSKQRRHSSEGGVKSSQVLGLQQHARLPKPKAKTLPEFIKDGSSTYSKIPAHRKGHRPAKPQRQDLDDDEHDYEEILEQFQKTI

SEQ ID NO: 6090 - protein, 162 aa, Artificial Sequence
  Synthetic polypeptide
SRPCLQYWPEPGRQQYGLMEVEFMSGTADEDLVARVFRVQNISRLQEGHLLVRHFQFLRWSAYRDTPDSKKAFLHLLAEVDKWQAESGDGRTIVHCLNGGGRSGTFCACATVLEMIRCHNLVDVFFAAKTLRNYKPNMVETMDQYHFCYDVALEYLEGLESR

SEQ ID NO: 6091 - protein, 162 aa, Artificial Sequence; identical to SEQ ID NO: 6090
  Synthetic polypeptide

SEQ ID NO: 6092 - protein, 162 aa, Artificial Sequence; identical to SEQ ID NO: 6090
  Synthetic polypeptide

SEQ ID NO: 6093 - protein, 162 aa, Artificial Sequence; identical to SEQ ID NO: 6090
  Synthetic polypeptide

SEQ ID NO: 6094 - protein, 162 aa, Artificial Sequence; identical to SEQ ID NO: 6090
  Synthetic polypeptide

SEQ ID NO: 6095 - protein, 34 aa, Artificial Sequence
  Synthetic polypeptide
LFDLGPACSTGQSQAGSNMASWRWSLCRAQLMKT

SEQ ID NO: 6096 - protein, 34 aa, Artificial Sequence; identical to SEQ ID NO: 6095
  Synthetic polypeptide

SEQ ID NO: 6097 - protein, 34 aa, Artificial Sequence; identical to SEQ ID NO: 6095
  Synthetic polypeptide

SEQ ID NO: 6098 - protein, 34 aa, Artificial Sequence; identical to SEQ ID NO: 6095
  Synthetic polypeptide

SEQ ID NO: 6099 - protein, 34 aa, Artificial Sequence; identical to SEQ ID NO: 6095
  Synthetic polypeptide

SEQ ID NO: 6100 - protein, 34 aa, Artificial Sequence; identical to SEQ ID NO: 6095
  Synthetic polypeptide

SEQ ID NO: 6101 - protein, 160 aa, Artificial Sequence
  Synthetic polypeptide
SRPCLQYWPEPGRQQYGLMEVEFMSGTADEDLVARVFRVQNISREGHLLVRHFQFLRWSAYRDTPDSKKAFLHLLAEVDKWQAESGDGRTIVHCLNGGGRSGTFCACATVLEMIRCHNLVDVFFAAKTLRNYKPNMVETMDQYHFCYDVALEYLEGLESR

SEQ ID NO: 6102 - protein, 31 aa, Artificial Sequence
  Synthetic polypeptide
RKHVPPSALFRDGQGCLRRSTCSSACGGATD

SEQ ID NO: 6103 - protein, 80 aa, Artificial Sequence
  Synthetic polypeptide
EENMSHHQLCFEMGRAVSGGLHVQVRVAVLQIDQVHELGGGEEKLQDAPEGGPAVLRGSPVFAIEDPRGGPSTTPILRGV

SEQ ID NO: 6104 - protein, 79 aa, Artificial Sequence
  Synthetic polypeptide
KKTCPTISSVSRWAGLSQEVYMFKCVWRCYRLIKCMNSVEEKRNSKMLQKVVLPSYEEALSLPSKTPEGGPAPPPYSEV

SEQ ID NO: 6105 - protein, 35 aa, Artificial Sequence
  Synthetic polypeptide
HRTYHERLVVHRALSRGGPWQGVLQALPDGLPQDR

SEQ ID NO: 6106 - protein, 252 aa, Artificial Sequence
  Synthetic polypeptide
PQERGNRVHTPAGPRDTGHIMSVLLFIEHSVEVAHGKASCKLSQMGYLRIADLISSFLLITMLFIISLSLLIGVVKNREKYLLPFLSLQIMDYLLCLLTLLGSYIELPAYLKLASRSRASSSKFPLMTLQLLDFCLSILTLCSSYMEVPTYLNFKSMNHMNYLPSQEDMPHNQFIKMMIIFSIAFITVLIFKVYMFKCVWRCYRLIKCMNSVEEKRNSKMLQKVVLPSYEEALSLPSKTPEGGPAPPPYSEV

SEQ ID NO: 6107 - protein, 28 aa, Artificial Sequence
  Synthetic polypeptide
FNLVGSPDPRREATGFTPQPGHVTQDIS

SEQ ID NO: 6108 - protein, 71 aa, Artificial Sequence
  Synthetic polypeptide
GVCGLLVQILALHSRQAVIVGGVVGALFAAFLVTLLIYRMKKKDEGSYTLEEPKQASVTYQKPDKQEEFYA

SEQ ID NO: 6109 - protein, 71 aa, Artificial Sequence; identical to SEQ ID NO: 6108
  Synthetic polypeptide

SEQ ID NO: 6110 - protein, 17 aa, Artificial Sequence
  Synthetic polypeptide
ESVDSWFKSWLCTQGKL

SEQ ID NO: 6111 - protein, 17 aa, Artificial Sequence
  Synthetic polypeptide
ESVDSWFKSWLCTQGKL

SEQ ID NO: 6112 - protein, 43 aa, Artificial Sequence
  Synthetic polypeptide
SLWTPGSNPGFALKASCDCGRGGGRPLCCLLGHTAHLSYEEKG

SEQ ID NO: 6113 - protein, 43 aa, Artificial Sequence; identical to SEQ ID NO: 6112
  Synthetic polypeptide

SEQ ID NO: 6114 - protein, 34 aa, Artificial Sequence
  Synthetic polypeptide
MCCNGESFSSCLGCPAICPQREMCKDISRKCAQL

SEQ ID NO: 6115 - protein, 34 aa, Artificial Sequence; identical to SEQ ID NO: 6114
  Synthetic polypeptide

SEQ ID NO: 6116 - protein, 34 aa, Artificial Sequence; identical to SEQ ID NO: 6114
  Synthetic polypeptide

SEQ ID NO: 6117 - protein, 107 aa, Artificial Sequence
  Synthetic polypeptide
CVVMGKALVRVWDVRPFAPKERCVKIFQGNVHNFEKNLLRCSWSPDGSKIAAGSADRFVYVWDTTSRRILYKLPGHAGSINEVAFHPDEPIIISASSDKRLYMGEIQ

SEQ ID NO: 6118 - protein, 107 aa, Artificial Sequence; identical to SEQ ID NO: 6117
  Synthetic polypeptide

SEQ ID NO: 6119 - protein, 159 aa, Artificial Sequence
  Synthetic polypeptide
CVVMGKALVRVWDVRPFAPKERCVKIFQGNVHNFEKNLLRCSWSPDGSKIAAGSADRFVYVWDTTSRRILYKLPGHAGSINEVAFHPDEPIIETGFHRIGQGGHELLTSSNPPASASQSAGITGVSHCAQLQTVFMWVSMSVSPLLISGESKSNAPFSS

SEQ ID NO: 6120 - protein, 90 aa, Artificial Sequence
  Synthetic polypeptide
PCVPWSPHLAVDSNRAFLTMLLGDEAQFLAYRVLPLRLCPLHPVQLLPRQPQLHREPPHLHVLPLPGGAGVHHYAEPGRGESALQAALGV

SEQ ID NO: 6121 - protein, 90 aa, Artificial Sequence; identical to SEQ ID NO: 6120
  Synthetic polypeptide

SEQ ID NO: 6122 - protein, 90 aa, Artificial Sequence; identical to SEQ ID NO: 6120
  Synthetic polypeptide

SEQ ID NO: 6123 - protein, 90 aa, Artificial Sequence; identical to SEQ ID NO: 6120
  Synthetic polypeptide

SEQ ID NO: 6124 - protein, 473 aa, Artificial Sequence
  Synthetic polypeptide
PVCLGHPIWQLTVTGPFSQCCWEMRHSSWHIASCLCGSAPCILCSCCPASRNSTVSRLIFTFFLFLGVLVSIIMLSPGVESQLYKLPWVCEEGAGIPTVLQGHIDCGSLLGYRAVYRMCFATAAFFFFFTLLMLCVSSSRDPRAAIQNGFWFFKFLILVGLTVGAFYIPDGSFTNIWFYFGVVGSFLFILIQLVLLIDFAHSWNQRWLGKAEECDSRAWYAGLFFFTLLFYLLSIAAVALMFMYYTEPSGCHEGKVFISLNLTFCVCVSIAAVLPKVQDAQPNSGLLQASVITLYTMFVTWSALSSIPEQKCNPHLPTQLGNETVVAGPEGYETQWWDAPSIVGLIIFLLCTLFISLRSSDHRQVNSLMQTEECPPMLDATQQQQQVAACEGRAFDNEQDGVTYSYSFFHFCLVLASLHVMMTLTNWYKPGETRKMISTWTAVWVKICASWAGLLLYLWTLVAPLLLRNRDFS

SEQ ID NO: 6125 - protein, 473 aa, Artificial Sequence; identical to SEQ ID NO: 6124
  Synthetic polypeptide

SEQ ID NO: 6126 - protein, 473 aa, Artificial Sequence; identical to SEQ ID NO: 6124
  Synthetic polypeptide

SEQ ID NO: 6127 - protein, 473 aa, Artificial Sequence; identical to SEQ ID NO: 6124
  Synthetic polypeptide

SEQ ID NO: 6128 - protein, 30 aa, Artificial Sequence
  Synthetic polypeptide
GTVPGISRPASAALPPASCAAAAPPAATPP

SEQ ID NO: 6129 - protein, 30 aa, Artificial Sequence; identical to SEQ ID NO: 6128
  Synthetic polypeptide

SEQ ID NO: 6130 - protein, 30 aa, Artificial Sequence; identical to SEQ ID NO: 6128
  Synthetic polypeptide

SEQ ID NO: 6131 - protein, 30 aa, Artificial Sequence; identical to SEQ ID NO: 6128
  Synthetic polypeptide

SEQ ID NO: 6132 - protein, 36 aa, Artificial Sequence
  Synthetic polypeptide
NDDLESSACASSTGIAVCPAHCCLPSASAQCSACKG

SEQ ID NO: 6133 - protein, 36 aa, Artificial Sequence; identical to SEQ ID NO: 6132
  Synthetic polypeptide

SEQ ID NO: 6134 - protein, 36 aa, Artificial Sequence; identical to SEQ ID NO: 6132
  Synthetic polypeptide

SEQ ID NO: 6135 - protein, 1035 aa, Artificial Sequence
  Synthetic polypeptide
KVLRVQAQQALLFVLLTAVYPVPQPSAPPVKGNFGEAGPAGSPGPPGPVGPAGIKGAKGEPCEPCPALSNLQDGDVRVVALPGPSGEKGEPGPPGFGLPGKQGKAGERGLKGQKGDAGNPGDPGTPGTTGRPGLSGEPGVQGPAGPKGEKGDGCTACPSLQGTVTDMAGRPGQPGPKGEQGPEGVGRPGKPGQPGLPGVQGPPGLKGVQGEPGPPGRGVQGPQGEPGAPGLPGIQGLPGPRGPPGPTGEKGAQGSPGVKGATGPVGPPGASVSGPPGRDGQQGQTGLRGTPGEKGPRGEKGEPGECSCPSQGDLIFSGMPGAPGLWMGSSWQPGPQGPPGIPGPPGPPGVPGLQGVPGNNGLPGQPGLTAELGALALGSHWGSPSICGDCVQGQRAHPGYLVEKGEKGDQGIPGVPGLDNCAQCFLSLERPRAEEARGDNSEGDPGCVGSPGLPGPPGLPGQRGEEGPPGMRGSPGPPGPIGPPGFPGAVGSPGLPGLQGERGLTGLTGDKGEPGPPGQPGYPGATGPPGLPGIKGERGYTGSAGEKGEPGPPGSEGLPGPPGPAGPRGERGPQGNSGEKGDQGFQGQPGFPGPPGPPGFPGKVGSPGPPGPQAEKGSEGIRGPSGLPGSPGPPGPPGIQGPAGLDGLDGKDGKPGLRGDPGPAGPPGLMGPPGFKGKTGHPGLPGPKGDCGKPGPPGSTGRPGAEGEPGAMGPQGRPGPPGHVGPPGPPGQPGPAGISAVGLKGDRGATGERGLAGLPGQPGPPGHPGPPGEPGTDGAAGKEGPPGKQGFYGPPGPKGDPGAAGQKGQAGEKGRAGMPGGPGKSGSMGPVGPPGPAGERGHPGAPGPSGSPGLPGVPGSMGDMVNYDEIKRFIRQEIIKMFDERMAYYTSRMQFPMEMAAAPGRPGPPGKDGAPGRPGAPGSPGLPGQIGREGRQGLPGVRGLPGTKGEKGDIGIGIAGENGLPGPPGPQGPPGYGKMGATGPMGQQGIPGIPGPPGPMGQPGKAGHCNPSDCFGAMPMEQQYPPMKTMKGPFG

SEQ ID NO: 6136 - protein, 1034 aa, Artificial Sequence
  Synthetic polypeptide
KVLRVQAQQALLFVLLTAVYPVPQPSAPPVKGNFGEAGPAGSPGPPGPVGPAGIKGAKGEPCEPCPALSNLQDGDVRVVALPGPSGEKGEPGPPGFGLPGKQGKAGERGLKGQKGDAGNPGDPGTPGTTGRPGLSGEPGVQGPAGPKGEKGDGCTACPSLQGTVTDMAGRPGQPGPKGEQGPEGVGRPGKPGQPGLPGVQGPPGLKGVQGEPGPPGRGVQGPQGEPGAPGLPGIQGLPGPRGPPGPTGEKGAQGSPGVKGATGPVGPPGASVSGPPGRDGQQGQTGLRGTPGEKGPRGEKGEPGECSCPSQGDLIFSGMPGAPGLWMGSSWQPGPQGPPGIPGPPGPPGVPGLQGVPGNNGLPGQPGLTAELGSLPIEQHLLKSICGDCVQGQRAHPGYLVEKGEKGDQGIPGVPGLDNCAQCFLSLERPRAEEARGDNSEGDPGCVGSPGLPGPPGLPGQRGEEGPPGMRGSPGPPGPIGPPGFPGAVGSPGLPGLQGERGLTGLTGDKGEPGPPGQPGYPGATGPPGLPGIKGERGYTGSAGEKGEPGPPGSEGLPGPPGPAGPRGERGPQGNSGEKGDQGFQGQPGFPGPPGPPGFPGKVGSPGPPGPQAEKGSEGIRGPSGLPGSPGPPGPPGIQGPAGLDGLDGKDGKPGLRGDPGPAGPPGLMGPPGFKGKTGHPGLPGPKGDCGKPGPPGSTGRPGAEGEPGAMGPQGRPGPPGHVGPPGPPGQPGPAGISAVGLKGDRGATGERGLAGLPGQPGPPGHPGPPGEPGTDGAAGKEGPPGKQGFYGPPGPKGDPGAAGQKGQAGEKGRAGMPGGPGKSGSMGPVGPPGPAGERGHPGAPGPSGSPGLPGVPGSMGDMVNYDEIKRFIRQEIIKMFDERMAYYTSRMQFPMEMAAAPGRPGPPGKDGAPGRPGAPGSPGLPGQIGREGRQGLPGVRGLPGTKGEKGDIGIGIAGENGLPGPPGPQGPPGYGKMGATGPMGQQGIPGIPGPPGPMGQPGKAGHCNPSDCFGAMPMEQQYPPMKTMKGPFG

SEQ ID NO: 6137 - protein, 396 aa, Artificial Sequence
  Synthetic polypeptide
KVLRVQAQQALLFVLLTAVYPVPQPSAPPVKGNFGEAGPAGSPGPPGPVGPAGIKGAKGEPCEPCPALSNLQDGDVRVVALPGPSGEKGEPGPPGFGLPGKQGKAGERGLKGQKGDAGNPGDPGTPGTTGRPGLSGEPGVQGPAGPKGEKGDGCTACPSLQGTVTDMAGRPGQPGPKGEQGPEGVGRPGKPGQPGLPGVQGPPGLKGVQGEPGPPGRGVQGPQGEPGAPGLPGIQGLPGPRGPPGPTGEKGAQGSPGVKGATGPVGPPGASVSGPPGRDGQQGQTGLRGTPGEKGPRGEKGEPGECSCPSQGDLIFSGMPGPPGIPGPPGPPGVPGLQVKGEKRMRSLGGRAHGSGWLLPAGPQGCCSPTPKTQTCHFSLLCLPASQGGKEGPLSL

SEQ ID NO: 6138 - protein, 37 aa, Artificial Sequence
  Synthetic polypeptide
WWLSWSLTWDRRCSWTAAHRPCPSHQRTPRGSMTTTS

SEQ ID NO: 6139 - protein, 37 aa, Artificial Sequence; identical to SEQ ID NO: 6138
  Synthetic polypeptide

SEQ ID NO: 6140 - protein, 37 aa, Artificial Sequence; identical to SEQ ID NO: 6138
  Synthetic polypeptide

SEQ ID NO: 6141 - protein, 37 aa, Artificial Sequence; identical to SEQ ID NO: 6138
  Synthetic polypeptide

SEQ ID NO: 6142 - protein, 37 aa, Artificial Sequence; identical to SEQ ID NO: 6138
  Synthetic polypeptide

SEQ ID NO: 6143 - protein, 25 aa, Artificial Sequence
  Synthetic polypeptide
PGTADVHGLQPTGPAHRIRGHHGAA

SEQ ID NO: 6144 - protein, 25 aa, Artificial Sequence
  Synthetic polypeptide
PGTADVHGLQPTGPAHRIRGHHGAA

SEQ ID NO: 6145 - protein, 25 aa, Artificial Sequence
  Synthetic polypeptide
PGTADVHGLQPTGPAHRIRGHHGAA

SEQ ID NO: 6146 - protein, 25 aa, Artificial Sequence
  Synthetic polypeptide
PGTADVHGLQPTGPAHRIRGHHGAA

SEQ ID NO: 6147 - protein, 25 aa, Artificial Sequence
  Synthetic polypeptide
PGTADVHGLQPTGPAHRIRGHHGAA

SEQ ID NO: 6148 - protein, 454 aa, Artificial Sequence
  Synthetic polypeptide
VVKLEPDLGPQMFMDCSPQALPIASEDTTGQHDHHFLDPNCHICKDWEPSNELLGSFEAAKSCGDNIFQKALSQTPMPAPEMPKTRELSPTEPQDRVPPSGLHVPAAPTKALPCLPPWEGVLDMFSIKRFRARAQLVSGHSCRLVQALPTVIRSAGCIPSNIVWDLLASICPAKAKDVCVVRLCPHGARDTQNCRLLYSYLNDRQRHGLASVEHMGMVLLPLPAFQPLPTRLRPLGGPGLEVTHSSLLLAVLLPKEGLPDTAGSSPWLGKVQKMVSFNSKVEKRYYQPDDRRPNVPLKGTPPPGGAWQQSQGRGSIAPRGISAWQRPPRGRGRLWPEPENWQHPGRGQWPPEPGLRQSQHPYSVAPAGHGFGRGQHFHRDSCPHQALLRHLESLATMSHQLQALLCPQTKSSIPRPLQRLSSALAAPEPPGPARDSSLGPTDEAGSECPFPRKA

SEQ ID NO: 6149 - protein, 454 aa, Artificial Sequence; identical to SEQ ID NO: 6148
  Synthetic polypeptide

SEQ ID NO: 6150 - protein, 454 aa, Artificial Sequence; identical to SEQ ID NO: 6148
  Synthetic polypeptide

SEQ ID NO: 6151 - protein, 467 aa, Artificial Sequence
  Synthetic polypeptide
VVKLEPDLGPQMFMDCSPQALPIASEDTTGQHDHHFLDPNCHICKDWEPSNELLGSFEAAKSCGDNIFQKALSQTPMPAPEMPKTRELSPTEPQDRVPPSGLHVPAAPTKALPCLPPWEGVLDMFSIKRFRARAQLVSGHSCRLVQALPTVIRSAGCIPSNIVWDLLASICPAKAKDVCVVRLCPHGARDTQNCRLLYSYLNDRQRHGLASVEHMGMVLLPLPAFQPLPTRLRPLGGPGLWALPVSPLLSPGLEVTHSSLLLAVLLPKEGLPDTAGSSPWLGKVQKMVSFNSKVEKRYYQPDDRRPNVPLKGTPPPGGAWQQSQGRGSIAPRGISAWQRPPRGRGRLWPEPENWQHPGRGQWPPEPGLRQSQHPYSVAPAGHGFGRGQHFHRDSCPHQALLRHLESLATMSHQLQALLCPQTKSSIPRPLQRLSSALAAPEPPGPARDSSLGPTDEAGSECPFPRKA

SEQ ID NO: 6152 - protein, 132 aa, Artificial Sequence
  Synthetic polypeptide
VVKLEPDLGPQMFMDCSPQALPIASEDTTGQHDHHFLDPNCHICKDWEPSNELLGSFEAAKSCGDNIFQKALSQTPMPAPEMPKTRELSPTEPQDRVPPSGLHVPAAPTKALPCLPPWEGVLDMFSIKRFRA

SEQ ID NO: 6153 - protein, 19 aa, Artificial Sequence
  Synthetic polypeptide
REPETGHRLPSGAPRPSAE

SEQ ID NO: 6154 - protein, 19 aa, Artificial Sequence
  Synthetic polypeptide
REPETGHRLPSGAPRPSAE

SEQ ID NO: 6155 - protein, 19 aa, Artificial Sequence
  Synthetic polypeptide
REPETGHRLPSGAPRPSAE

SEQ ID NO: 6156 - protein, 19 aa, Artificial Sequence
  Synthetic polypeptide
REPETGHRLPSGAPRPSAE

SEQ ID NO: 6157 - protein, 19 aa, Artificial Sequence
  Synthetic polypeptide
REPETGHRLPSGAPRPSAE

SEQ ID NO: 6158 - protein, 589 aa, Artificial Sequence
  Synthetic polypeptide
VSQRRGTGCLRELPDPVLSEEVVEGIAAGIEAALWDLTQGTNGRYKTKYRSLLFNLRDPRNLDLFLKVVHGDVTPYDLVRMSSMQLAPQELARWRDQEEKRGLNIIEQQQKEPCRLPASKMTHKGEVEIQRDMDQTLTLEDLVGPQMFMDCSPQALPIASEDTTGQHDHHFLDPNCHICKDWEPSNELLGSFEAAKSCGDNIFQKALSQTPMPAPEMPKTRELSPTEPQDRVPPSGLHVPAAPTKALPCLPPWEGVLDMFSIKRFRARAQLVSGHSCRLVQALPTVIRSAGCIPSNIVWDLLASICPAKAKDVCVVRLCPHGARDTQNCRLLYSYLNDRQRHGLASVEHMGMVLLPLPAFQPLPTRLRPLGGPGLEVTHSSLLLAVLLPKEGLPDTAGSSPWLGKVQKMVSFNSKVEKRYYQPDDRRPNVPLKGTPPPGGAWQQSQGRGSIAPRGISAWQRPPRGRGRLWPEPENWQHPGRGQWPPEPGLRQSQHPYSVAPAGHGFGRGQHFHRDSCPHQALLRHLESLATMSHQLQALLCPQTKSSIPRPLQRLSSALAAPEPPGPARDSSLGPTDEAGSECPFPRKA

SEQ ID NO: 6159 - protein, 589 aa, Artificial Sequence; identical to SEQ ID NO: 6158
  Synthetic polypeptide

SEQ ID NO: 6160 - protein, 16 aa, Artificial Sequence
  Synthetic polypeptide
ARDGAQAAFGSSQTQC

SEQ ID NO: 6161 - protein, 16 aa, Artificial Sequence
  Synthetic polypeptide
ARDGAQAAFGSSQTQC

SEQ ID NO: 6162 - protein, 16 aa, Artificial Sequence
  Synthetic polypeptide
ARDGAQAAFGSSQTQC

SEQ ID NO: 6163 - protein, 16 aa, Artificial Sequence
  Synthetic polypeptide
ARDGAQAAFGSSQTQC

SEQ ID NO: 6164 - protein, 16 aa, Artificial Sequence
  Synthetic polypeptide
ARDGAQAAFGSSQTQC

SEQ ID NO: 6165 - protein, 16 aa, Artificial Sequence
  Synthetic polypeptide
ARDGAQAAFGSSQTQC

SEQ ID NO: 6166 - protein, 18 aa, Artificial Sequence
  Synthetic polypeptide
REPETGHRLPSGAPRPSA

SEQ ID NO: 6167 - protein, 18 aa, Artificial Sequence
  Synthetic polypeptide
VSQRRGTGCLRELPDPVL

SEQ ID NO: 6168 - protein, 602 aa, Artificial Sequence
  Synthetic polypeptide
VSQRRGTGCLRELPDPVLSEEVVEGIAAGIEAALWDLTQGTNGRYKTKYRSLLFNLRDPRNLDLFLKVVHGDVTPYDLVRMSSMQLAPQELARWRDQEEKRGLNIIEQQQKEPCRLPASKMTHKGEVEIQRDMDQTLTLEDLVGPQMFMDCSPQALPIASEDTTGQHDHHFLDPNCHICKDWEPSNELLGSFEAAKSCGDNIFQKALSQTPMPAPEMPKTRELSPTEPQDRVPPSGLHVPAAPTKALPCLPPWEGVLDMFSIKRFRARAQLVSGHSCRLVQALPTVIRSAGCIPSNIVWDLLASICPAKAKDVCVVRLCPHGARDTQNCRLLYSYLNDRQRHGLASVEHMGMVLLPLPAFQPLPTRLRPLGGPGLWALPVSPLLSPGLEVTHSSLLLAVLLPKEGLPDTAGSSPWLGKVQKMVSFNSKVEKRYYQPDDRRPNVPLKGTPPPGGAWQQSQGRGSIAPRGISAWQRPPRGRGRLWPEPENWQHPGRGQWPPEPGLRQSQHPYSVAPAGHGFGRGQHFHRDSCPHQALLRHLESLATMSHQLQALLCPQTKSSIPRPLQRLSSALAAPEPPGPARDSSLGPTDEAGSECPFPRKA

SEQ ID NO: 6169 - protein, 588 aa, Artificial Sequence
  Synthetic polypeptide
VSQRRGTGCLRELPDPVLSEEVVEGIAAGIEAALWDLTQGTNGRYKTKYRSLLFNLRDPRNLDLFLKVVHGDVTPYDLVRMSSMQLAPQELARWRDQEEKRGLNIIEQQQKEPCRLPASKMTHKGEVEIQRDMDQTLTLEDLGPQMFMDCSPQALPIASEDTTGQHDHHFLDPNCHICKDWEPSNELLGSFEAAKSCGDNIFQKALSQTPMPAPEMPKTRELSPTEPQDRVPPSGLHVPAAPTKALPCLPPWEGVLDMFSIKRFRARAQLVSGHSCRLVQALPTVIRSAGCIPSNIVWDLLASICPAKAKDVCVVRLCPHGARDTQNCRLLYSYLNDRQRHGLASVEHMGMVLLPLPAFQPLPTRLRPLGGPGLEVTHSSLLLAVLLPKEGLPDTAGSSPWLGKVQKMVSFNSKVEKRYYQPDDRRPNVPLKGTPPPGGAWQQSQGRGSIAPRGISAWQRPPRGRGRLWPEPENWQHPGRGQWPPEPGLRQSQHPYSVAPAGHGFGRGQHFHRDSCPHQALLRHLESLATMSHQLQALLCPQTKSSIPRPLQRLSSALAAPEPPGPARDSSLGPTDEAGSECPFPRKA

SEQ ID NO: 6170 - protein, 225 aa, Artificial Sequence
  Synthetic polypeptide
VSQRRGTGCLRELPDPVLSEEVVEGIAAGIEAALWDLTQGTNGRYKTKYRSLLFNLRDPRNLDLFLKVVHGDVTPYDLVRMSSMQLAPQELARWRDQEEKRGPQMFMDCSPQALPIASEDTTGQHDHHFLDPNCHICKDWEPSNELLGSFEAAKSCGDNIFQKALSQTPMPAPEMPKTRELSPTEPQDRVPPSGLHVPAAPTKALPCLPPWEGVLDMFSIKRFRA

SEQ ID NO: 6171 - protein, 41 aa, Artificial Sequence
  Synthetic polypeptide
GWALWFTPVIPALWEAEAGRLLEPRSSRADWGTCAGCTCFD

SEQ ID NO: 6172 - protein, 41 aa, Artificial Sequence; identical to SEQ ID NO: 6171
  Synthetic polypeptide

SEQ ID NO: 6173 - protein, 41 aa, Artificial Sequence; identical to SEQ ID NO: 6171
  Synthetic polypeptide

SEQ ID NO: 6174 - protein, 41 aa, Artificial Sequence; identical to SEQ ID NO: 6171
  Synthetic polypeptide

SEQ ID NO: 6175 - protein, 82 aa, Artificial Sequence
  Synthetic polypeptide
SQHFGRRRQADCLSLGVQEQTGAPVLVALALIECGMKYEDAVQFIRQKRRGAFNSKQLLYLEKYRPKMRLRFRDTNGHCCVQ

SEQ ID NO: 6176 - protein, 82 aa, Artificial Sequence; identical to SEQ ID NO: 6175
  Synthetic polypeptide

SEQ ID NO: 6177 - protein, 82 aa, Artificial Sequence; identical to SEQ ID NO: 6175
  Synthetic polypeptide

SEQ ID NO: 6178 - protein, 15 aa, Artificial Sequence
  Synthetic polypeptide
EFKSRLGHLCWLHLL

SEQ ID NO: 6179 - protein, 15 aa, Artificial Sequence
  Synthetic polypeptide
EFKSRLGHLCWLHLL

SEQ ID NO: 6180 - protein, 15 aa, Artificial Sequence
  Synthetic polypeptide
EFKSRLGHLCWLHLL

SEQ ID NO: 6181 - protein, 15 aa, Artificial Sequence
  Synthetic polypeptide
EFKSRLGHLCWLHLL

SEQ ID NO: 6182 - protein, 32 aa, Artificial Sequence
  Synthetic polypeptide
SQHFGRRRQADCLSLGVQEQTGAPVLVALALI

SEQ ID NO: 6183 - protein, 540 aa, Artificial Sequence
  Synthetic polypeptide
SLNLDETMASPGKDNYRMKSYKNNALNPEEMRRRREEEGIQLRKQKREQQLFKRRNVELINEEAAMFDSLLMDSYVSSTTGESVITREMVEMLFSDDSDLQLATTQKFRKLLSKEPSPPIDEVINTPRVVDRFVEFLKRNENCTLQFEAAWALTNIASGTSQQTKIVIEAGAVPIFIELLNSDFEDVQEQAVWALGNIAGDSSVCRDYVLNCSILNPLLTLLTKSTRLTMTRNAVWALSNLCRGKNPPPEFAKVSPCLPVLSRLLFSSDSDLLADACWALSYLSDGPNEKIQAVIDSGVCRRLVELLMHNDYKVASPALRAVGNIVTGDDIQTQVILNCSALPCLLHLLSSPKESIRKEACWTISNITAGNRAQIQAVIDANIFPVLIEILQKAEFRTRKEAAWAITNATSGGTPEQIRYLVSLGCIKPLCDLLTVMDSKIVQVALNGLENILRLGEQEGKRSGSGVNPYCGLIEEAYGLDKIEFLQSHENQEIYQKAFDLIEHYFGVEDDDSSLAPQVDETQQQFIFQQPEAPMEGFQL

SEQ ID NO: 6184 - protein, 540 aa, Artificial Sequence; identical to SEQ ID NO: 6183
  Synthetic polypeptide

SEQ ID NO: 6185 - protein, 15 aa, Artificial Sequence
  Synthetic polypeptide
IWMRPWRAQGKTIIE

SEQ ID NO: 6186 - protein, 15 aa, Artificial Sequence
  Synthetic polypeptide
IWMRPWRAQGKTIIE

SEQ ID NO: 6187 - protein, 15 aa, Artificial Sequence
  Synthetic polypeptide
IWMRPWRAQGKTIIE

SEQ ID NO: 6188 - protein, 190 aa, Artificial Sequence
  Synthetic polypeptide
SLNLDETMASPGKDNYRMKSYKNNALNPEEMRRRREEEGIQLRKQKREQQLFKRRNVELINEEAAMFDSLLMDSYESVITREMVEMLFSDDSDLQLATTQKFRKLLSKEPSPPIDEVINTPRVVDRFVEFLKRNENCTLQFEAAWALTNIASGTSQQTKIVIEAGAVPIFIELLNSDFEDVQEQSGHWET

SEQ ID NO: 6189 - protein, 4 aa, Artificial Sequence
  Synthetic polypeptide
PIRK

SEQ ID NO: 6190 - protein, 69 aa, Artificial Sequence
  Synthetic polypeptide
GQEFETSLTNKEVKVLSIDQRNFKLRSIGWGEEFSLSKHPQGTEVKAITYSAMQVYNEENPEVFVIIDI

SEQ ID NO: 6191 - protein, 27 aa, Artificial Sequence
  Synthetic polypeptide
TTRHTGQRTFIMMKTLKEAWIQKDKGP

SEQ ID NO: 6192 - protein, 27 aa, Artificial Sequence
  Synthetic polypeptide
TTRHTGQRTFIMMKTLKEAWIQKDKGP

SEQ ID NO: 6193 - protein, 27 aa, Artificial Sequence
  Synthetic polypeptide
TTRHTGQRTFIMMKTLKEAWIQKDKGP

SEQ ID NO: 6194 - protein, 27 aa, Artificial Sequence
  Synthetic polypeptide
TTRHTGQRTFIMMKTLKEAWIQKDKGP

SEQ ID NO: 6195 - protein, 27 aa, Artificial Sequence
  Synthetic polypeptide
TTRHTGQRTFIMMKTLKEAWIQKDKGP

SEQ ID NO: 6196 - protein, 41 aa, Artificial Sequence
  Synthetic polypeptide
NLSAHLPTLGLQGQRLNSIKTPNLMCFWIGEQLDILGREHL

SEQ ID NO: 6197 - protein, 41 aa, Artificial Sequence; identical to SEQ ID NO: 6196
  Synthetic polypeptide

SEQ ID NO: 6198 - protein, 41 aa, Artificial Sequence; identical to SEQ ID NO: 6196
  Synthetic polypeptide

SEQ ID NO: 6199 - protein, 41 aa, Artificial Sequence; identical to SEQ ID NO: 6196
  Synthetic polypeptide

SEQ ID NO: 6200 - protein, 41 aa, Artificial Sequence; identical to SEQ ID NO: 6196
  Synthetic polypeptide

SEQ ID NO: 6201 - protein, 41 aa, Artificial Sequence; identical to SEQ ID NO: 6196
  Synthetic polypeptide

SEQ ID NO: 6202 - protein, 41 aa, Artificial Sequence; identical to SEQ ID NO: 6196
  Synthetic polypeptide

SEQ ID NO: 6203 - protein, 33 aa, Artificial Sequence
  Synthetic polypeptide
CASGLVNNSTYWAENIYNDEDPEGSVDPEGQGS

SEQ ID NO: 6204 - protein, 33 aa, Artificial Sequence; identical to SEQ ID NO: 6203
  Synthetic polypeptide

SEQ ID NO: 6205 - protein, 33 aa, Artificial Sequence; identical to SEQ ID NO: 6203
  Synthetic polypeptide

SEQ ID NO: 6206 - protein, 33 aa, Artificial Sequence; identical to SEQ ID NO: 6203
  Synthetic polypeptide

SEQ ID NO: 6207 - protein, 33 aa, Artificial Sequence; identical to SEQ ID NO: 6203
  Synthetic polypeptide

SEQ ID NO: 6208 - protein, 33 aa, Artificial Sequence; identical to SEQ ID NO: 6203
  Synthetic polypeptide

SEQ ID NO: 6209 - protein, 33 aa, Artificial Sequence; identical to SEQ ID NO: 6203
  Synthetic polypeptide

SEQ ID NO: 6210 - protein, 63 aa, Artificial Sequence
  Synthetic polypeptide
TTRHTGQRTFIMMKTLKEAWIQKDKGPRYVFTCCDFRLPFFLLNPESDLTLVLRQTLFSYPSI

SEQ ID NO: 6211 - protein, 29 aa, Artificial Sequence
  Synthetic polypeptide
TTRHTGQRTFIMMKTLKEAWIQKDKGVSP

SEQ ID NO: 6212 - protein, 26 aa, Artificial Sequence
  Synthetic polypeptide
NPPLLPQGLSTCCSLSRRLFPRLCQG

SEQ ID NO: 6213 - protein, 26 aa, Artificial Sequence
  Synthetic polypeptide
NPPLLPQGLSTCCSLSRRLFPRLCQG

SEQ ID NO: 6214 - protein, 26 aa, Artificial Sequence
  Synthetic polypeptide
NPPLLPQGLSTCCSLSRRLFPRLCQG

SEQ ID NO: 6215 - protein, 26 aa, Artificial Sequence
  Synthetic polypeptide
NPPLLPQGLSTCCSLSRRLFPRLCQG

SEQ ID NO: 6216 - protein, 1060 aa, Artificial Sequence
  Synthetic polypeptide
FRLLPFFPLLNPPAILASSLFLEIHHSCLKAFPLAVACLEDSSPGSAKAENDKHLSVGPGQGPGSAVDEHQDNVFFPSGRPPHLEELHTQAQEGLRSLQHQEKQKLNKGGWDHGDTQSIQSSRTGPDEDNISFCSQTTSYVAESSTAEDALSIRSEMIQRKGSTFRPHDSFPKSGKSGRRRRERRSTVLGLPQHVQKELGLRNEREAPGTPRAPGARDAVRIPTVDGRPRGTSGMGARVSLQALEAEAEAGAETEAMLQRHIDRVYRDDTFVGRSTGTRAPPLTRPMSLAVPGLTGGAGPAEPLSPAMSISPQATYLSKLIPHAVLPPTVDVVALGRCSLRTLSRCSLHSASPASVRSLGRFSSVSSPQPRSRHPSSSSDTWSHSQSSDTIVSDGSTLSSKGGSEGQPESSTASNSVVPPPQGGSGRGSPSGGSTAEASDTLSIRSSGQLSGRSVSLRKLKRPPPPPRRTHSLHQRGLAVPDGPLGLPPKPERKQQPQLPRPPTTGGSEGAGAAPCPPNPANSWVPGLSPGGSRRPPRSPERTLSPSSGYSSQSGTPTLPPKGLAGPPASPGKAQPPKPERVTSLRSPGASVSSSLTSLCSSSSDPAPSDRSGPQILTPLGDRFVIPPHPKVPAPFSPPPSKPRSPNPAAPALAAPAVVPGPVSTTDASPQSPPTPQTTLTPLQESPVISKDQSPPPSPPPSYHPPPPPTKKPEVVVEAPSASETAEEPLQDPNWPPPPPPAPEEQDLSMADFPPPEEAFFSVASPEPAGPSGSPELVSSPAASSSSATALQIQPPGSPDPPPAPPAPAPASSAPGHVAKLPQKEPVGCSKGGGPPREDVGAPLVTPSLLQMVRLRSVGAPGGAPTPALGPSAPQKPLRRALSGRASPVPAPSSGLHAAVRLKACSLAASEGLSSAQPNGPPEAEPRPPQSPASTASFIFSKGSRKLQLERPVSPETQADLQRNLVAELRSISEQRPPQAPKKSPKAPPPVARKPSVGVPPPASPSYPRAEPLTAPPTNGLPHTQDRTKRELAENGGVLQLVGPEEKMGLPGSDSQKELA

SEQ ID NO: 6217 - protein, 1060 aa, Artificial Sequence; identical to SEQ ID NO: 6216
  Synthetic polypeptide

SEQ ID NO: 6218 - protein, 1060 aa, Artificial Sequence; identical to SEQ ID NO: 6216
  Synthetic polypeptide

SEQ ID NO: 6219 - protein, 15 aa, Artificial Sequence
  Synthetic polypeptide
KTLPQALPRLRMTNI

SEQ ID NO: 6220 - protein, 15 aa, Artificial Sequence
  Synthetic polypeptide
KTLPQALPRLRMTNI

SEQ ID NO: 6221 - protein, 15 aa, Artificial Sequence
  Synthetic polypeptide
KTLPQALPRLRMTNI

SEQ ID NO: 6222 - protein, 15 aa, Artificial Sequence
  Synthetic polypeptide
KTLPQALPRLRMTNI

SEQ ID NO: 6223 - protein, 168 aa, Artificial Sequence
  Synthetic polypeptide
FRLLPFFPLLNPPAILASSLFLEIHHSCLKAFPLAVACLEDSSPGSAKAENDKHLSVGPGQGPGSAVDEHQDNVFFPSGRPPHLEELHTQAQEGLRSLQHQEKQKLNKGGWDHGDTQSIQSSRTGPDEDNISFCSQTTSYVAESSTAEDALSIRSEMIQRKDSQKELA

SEQ ID NO: 6224 - protein, 57 aa, Artificial Sequence
  Synthetic polypeptide
GASLPGCPSSQMWGAPLPRRPVWDVRSASVRPRPGLGTEECLCPTATPSGRLWMKSI

SEQ ID NO: 6225 - protein, 28 aa, Artificial Sequence
  Synthetic polypeptide
GAPLSGRDPVWELRSVSARPPPRLGGFG

SEQ ID NO: 6226 - protein, 370 aa, Artificial Sequence
  Synthetic polypeptide
GVSLPDRHPVWEALDEEYLKVDAQFGGIDQRKIFTFAEKYLPALGYSKRVHLMNPMVPGLTGSKMSSSEEESKIDLLDRKEDVKKKLKKAFCEPGNVENNGVLSFIKHVLFPLKSEFVILRDEKWGGNKTYTAYVDLEKDFAAEVVHPGDLKNSVEVALNKLLDPIREKFNTPALKKLASAAYPDPSKQKPMAKGPAKNSEPEEVIPSRLDIRVGKIITVEKHPDADSLYVEKIDVGEAEPRTVVSGLVQFVPKEELQDRLVVVLCNLKPQKMRGVESQGMLLCASIEGINRQVEPLDPPAGSAPGEHVFVKGYEKGQPDEELKPKKKVFEKLQADFKISEECIAQWKQTNFMTKLGSISCKSLKGGNIS

SEQ ID NO: 6227 - protein, 28 aa, Artificial Sequence
  Synthetic polypeptide
PGWPSLDLTTPTSGPLLPPCPASWTTWF

SEQ ID NO: 6228 - protein, 28 aa, Artificial Sequence
  Synthetic polypeptide
PGWPSLDLTTPTSGPLLPPCPASWTTWF

SEQ ID NO: 6229 - protein, 25 aa, Artificial Sequence
  Synthetic polypeptide
LTYLKHSEQHLTHGNHSNQDGRASI

SEQ ID NO: 6230 - protein, 25 aa, Artificial Sequence
  Synthetic polypeptide
LTYLKHSEQHLTHGNHSNQDGRASI

SEQ ID NO: 6231 - protein, 415 aa, Artificial Sequence
  Synthetic polypeptide
HMVTTVTRMAEPRFNNPYFWPPPPTMPSQLDNLVLINKIKEQLMAEKIRPPHLPPTSASSQQPLLVPPAPAESSQAVMSLPKLQQVPGLHPQAVPQPDVALHARPATSTVTGLGLSTRTPSVSTSESSAGAGTGTGTSTPSTPTTTSQSRLIASSPTLISGITSPPLLDSIKTIQGHGLLGPPKSERGRKKIKAENPGGPPVLVVPYPILASGETAKEGKTYRCKVCPLTFFTKSEMQIHSKSHTEAKPHKCPHCSKSFANASYLAQHLRIHLGVKPYHCSYCDKSFRQLSHLQQHTRIHTGDRPYKCPHPGCEKAFTQLSNLQSHQRQHNKDKPYKCPNCYRAYSDSASLQIHLSAHAIKHAKAYCCSMCGRAYTSETYLMKHMSKHTVVEHLVSHHSPQRTESPGIPVRISLI

SEQ ID NO: 6232 - protein, 415 aa, Artificial Sequence; identical to SEQ ID NO: 6231
  Synthetic polypeptide

SEQ ID NO: 6233 - protein, 740 aa, Artificial Sequence
  Synthetic polypeptide
WLGCPKGYYGKHCRKKCNCANRGRCHRLYGACLCDPGLYGRFCHLTCPPWAFGPGCSEECQCVQPHTQSCDKRDGSCSCKAGFRGERCQAECELGYFGPGCWQACTCPVGVACDSVSGECGKRCPAGFQGEDCGQECPVGTFGVNCSSSCSCGGAPCHGVTGQCRCPPGRTGEDCEADCPEGRWGLGCQEICPACQHAARCDPETGACLCLPGFVGSRCQDVCPAGWYGPSCQTRCSCANDGHCHPATGHCSCAPGWTGFSCQRACDTGHWGPDCSHPCNCSAGHGSCDAISGLCLCEAGYVGPRCEQQCPQGHFGPGCEQRCQCQHGAACDHVSGACTCPAGWRGTFCEHACPAGFFGLDCRSACNCTAGAACDAVNGSCLCPAGRRGPRCAEKCLPRDVRAGCRHSGGCLNGGLCDPHTGRCLCPAGWTGDKCQSPCLRGWFGEACAQRCSCPPGAACHHVTGACRCPPGFTGSGCEQGCPPGRYGPGCEQLCGCLNGGSCDAATGACRCPTGFLGTDCNLTCPQGRFGPNCTHVCGCGQGAACDPVTGTCLCPPGRAGVRCERGCPQNRFGVGCEHTCSCRNGGLCHASNGSCSCGLGWTGRHCELACPPGRYGAACHLECSCHNNSTCEPATGTCRCGPGFYGQACEHRRSGATCNLDCRRGQFGPSCTLHCDCGGGADCDPVSGQCHCVDGYMGPTCREGGPLRLPENPSLAQGSAGTLPASSRPTSRSGGPARH

SEQ ID NO: 6234 - protein, 128 aa, Artificial Sequence
  Synthetic polypeptide
GPCSWKHSSRAGDGWAAPRATMASTVARNATVPTGAGATASTGPASATQGSTAASATSPARRGPLGRAARRSASVCSPTRSPVTRGMAAAPARLASGASAVRQSVSWATLGRGAGRHAPAQWAWPVTP

SEQ ID NO: 6235 - protein, 128 aa, Artificial Sequence; identical to SEQ ID NO: 6234
  Synthetic polypeptide

SEQ ID NO: 6236 - protein, 128 aa, Artificial Sequence; identical to SEQ ID NO: 6234
  Synthetic polypeptide

SEQ ID NO: 6237 - protein, 91 aa, Artificial Sequence
  Synthetic polypeptide
EWVPLRGSEVPVPGSIQVELVMAGLPQGLLWQALSQEMQLCQPGPVPPPLRGLPLRPRALRPLLPPHLPAVGLWAGLLGGVPVCAAPHAVL

SEQ ID NO: 6238 - protein, 91 aa, Artificial Sequence; identical to SEQ ID NO: 6237
  Synthetic polypeptide

SEQ ID NO: 6239 - protein, 91 aa, Artificial Sequence; identical to SEQ ID NO: 6237
  Synthetic polypeptide

SEQ ID NO: 6240 - protein, 947 aa, Artificial Sequence
  Synthetic polypeptide
WLGCPKGYYGKHCRKKCNCANRGRCHRLYGACLCDPGLYGRFCHLTCPPWAFGPGCSEECQCVQPHTQSCDKRDGSCSCKAGFRGERCQAECELGYFGPGCWQACTCPVGVACDSVSGECGKRCPAGFQGEDCGQECPVGTFGVNCSSSCSCGGAPCHGVTGQCRCPPGRTGEDCEADCPEGRWGLGCQEICPACQHAARCDPETGACLCLPGFVGSRCQDVCPAGWYGPSCQTRCSCANDGHCHPATGHCSCAPGWTGFSCQRACDTGHWGPDCSHPCNCSAGHGSCDAISGLCLCEAGYVGPRCEQQCPQGHFGPGCEQRCQCQHGAACDHVSGACTCPAGWRGTFCEHACPAGFFGLDCRSACNCTAGAACDAVNGSCLCPAGRRGPRCAETCPAHTYGHNCSQACACFNGASCDPVHGQCHCAPGWMGPSCLQACPAGLYGDNCRHSCLCQNGGTCDPVSGHCACPEGWAGLACEKECLPRDVRAGCRHSGGCLNGGLCDPHTGRCLCPAGWTGDKCQSPCLRGWFGEACAQRCSCPPGAACHHVTGACRCPPGFTGSGCEQACPPGSFGEDCAQMCQCPGENPACHPATGTCSCAAGYHGPSCQQRCPPGRYGPGCEQLCGCLNGGSCDAATGACRCPTGFLGTDCNLTCPQGRFGPNCTHVCGCGQGAACDPVTGTCLCPPGRAGVRCERGCPQNRFGVGCEHTCSCRNGGLCHASNGSCSCGLGWTGRHCELACPPGRYGAACHLECSCHNNSTCEPATGTCRCGPGFYGQACEHPCPPGFHGAGCQGLCWCQHGAPCDPISGRCLCPAGFHGHFCERGCEPGSFGEGCHQRCDCDGGAPCDPVTGLCLCPPGRSGATCNLDCRRGQFGPSCTLHCDCGGGADCDPVSGQCHCVDGYMGPTCREGGPLRLPENPSLAQGSAGTLPASSRPTSRSGGPARH

SEQ ID NO: 6241 - protein, 722 aa, Artificial Sequence
  Synthetic polypeptide
WLGCPKGYYGKHCRKKCNCANRGRCHRLYGACLCDPGLYGRFCHLTCPPWAFGPGCSEECQCVQPHTQSCDKRDGSCSCKAGFRGERCQAECELGYFGPGCWQACTCPVGVACDSVSGECGKRCPAGFQGEDCGQECPVGTFGVNCSSSCSCGGAPCHGVTGQCRCPPGRTGEDCEADCPEGRWGLGCQEICPACQHAARCDPETGACLCLPGFVGSRCQDVCPAGWYGPSCQTRCSCANDGHCHPATGHCSCAPGWTGFSCQRACDTGHWGPDCSHPCNCSAGHGSCDAISGLCLCEAGYVGPRCEQQCPQGHFGPGCEQRCQCQHGAACDHVSGACTCPAGWRGTFCEHACPAGFFGLDCRSACNCTAGAACDAVNGSCLCPAGRRGPRCAETCPAHTYGHNCSQACACFNGASCDPVHGQCHCAPGWMGPSCLQACPAGLYGDNCRHSCLCQNGGTCDPVSGHCACPEGWAGLACEKECLPRDVRAGCRHSGGCLNGGLCDPHTGRCLCPAGWTGDKCQSPCAKGTFGPHCEGRCACRWGGPCHLATGACLCPPGWRGAPGVRMPACGAGLERPVPSAAAARLALPATTSLGPAAVPLASLAPAASRPAHPAALGRTVRRCASVPVRTRPATLPPGPAHVLLATTAPAASNDVRPGGMGQAVNSCVGVSTGAPVMRPRGPAAAPLGSSGRTATSPVRRAASAPTAPTCVGVGRGRPATL

SEQ ID NO: 6242 - protein, 77 aa, Artificial Sequence
  Synthetic polypeptide
TFRWRSRCTWASLQALLIGAQLVMNSPSFWKITPWWTLWNFLITTHPLFIPISCVGCCGELWRWSRWLWRPSLSRTP

SEQ ID NO: 6243 - protein, 77 aa, Artificial Sequence; identical to SEQ ID NO: 6242
  Synthetic polypeptide

SEQ ID NO: 6244 - protein, 77 aa, Artificial Sequence; identical to SEQ ID NO: 6242
  Synthetic polypeptide

SEQ ID NO: 6245 - protein, 22 aa, Artificial Sequence
  Synthetic polypeptide
MNNGHEHLGGVQDVLGHHSKHY

SEQ ID NO: 6246 - protein, 22 aa, Artificial Sequence
  Synthetic polypeptide
MNNGHEHLGGVQDVLGHHSKHY

SEQ ID NO: 6247 - protein, 22 aa, Artificial Sequence
  Synthetic polypeptide
MNNGHEHLGGVQDVLGHHSKHY

SEQ ID NO: 6248 - protein, 47 aa, Artificial Sequence
  Synthetic polypeptide
SQHFGRPRRANHLSGQEGSVAGEGGEGQGAAGEAAPGAPAPAGGATS

SEQ ID NO: 6249 - protein, 47 aa, Artificial Sequence; identical to SEQ ID NO: 6248
  Synthetic polypeptide

SEQ ID NO: 6250 - protein, 47 aa, Artificial Sequence; identical to SEQ ID NO: 6248
  Synthetic polypeptide

SEQ ID NO: 6251 - protein, 47 aa, Artificial Sequence; identical to SEQ ID NO: 6248
  Synthetic polypeptide

SEQ ID NO: 6252 - protein, 86 aa, Artificial Sequence
  Synthetic polypeptide
AQWLTPVIPALWEAEAGESPERPRRQCGWRRRRRPRRCGRSSSRSAGAGWRSNVLKPSNAVQPWRNGSGRSSRKTRSAMKQPSNGQ

SEQ ID NO: 6253 - protein, 86 aa, Artificial Sequence; identical to SEQ ID NO: 6252
  Synthetic polypeptide

SEQ ID NO: 6254 - protein, 86 aa, Artificial Sequence; identical to SEQ ID NO: 6252
  Synthetic polypeptide

SEQ ID NO: 6255 - protein, 86 aa, Artificial Sequence; identical to SEQ ID NO: 6252
  Synthetic polypeptide

SEQ ID NO: 6256 - protein, 39 aa, Artificial Sequence
  Synthetic polypeptide
SQHFGRPRRANHLSGQEGSVAGEGGEGQGAAGEAAPGAP

SEQ ID NO: 6257 - protein, 46 aa, Artificial Sequence
  Synthetic polypeptide
AQWLTPVIPALWEAEAGESPERPRRQCGWRRRRRPRRCGRSSSRSA

SEQ ID NO: 6258 - protein, 184 aa, Artificial Sequence
  Synthetic polypeptide
SVNPLKYMQNFACETLANLERQIYAFEGSYLEDTQMYGNIIRGWDRYLTNQKNSNSKNDRRNRKFKEAERLFSKSSVTSAAAVSALAGVQDQLIEKREPGSGTESDTSPDFHNQENEPSQEDPEDLDGSVQGVKPQKAASSTSSGSHHSSHKKRKNKNRHSPSGMFDYDFEIDLKLNKKPRADY

SEQ ID NO: 6259 - protein, 42 aa, Artificial Sequence
  Synthetic polypeptide
SICKISRVKHWQIWSDRSMLLREATWKTLRCMAILFVAGIGI

SEQ ID NO: 6260 - protein, 42 aa, Artificial Sequence; identical to SEQ ID NO: 6259
  Synthetic polypeptide

SEQ ID NO: 6261 - protein, 42 aa, Artificial Sequence; identical to SEQ ID NO: 6259
  Synthetic polypeptide

SEQ ID NO: 6262 - protein, 42 aa, Artificial Sequence; identical to SEQ ID NO: 6259
  Synthetic polypeptide

SEQ ID NO: 6263 - protein, 42 aa, Artificial Sequence; identical to SEQ ID NO: 6259
  Synthetic polypeptide

SEQ ID NO: 6264 - protein, 174 aa, Artificial Sequence
  Synthetic polypeptide
SVNPLKYMQNFACETLANLERQIYAFEGSYLEDTQMYGNIIRGWDRYLTNQKNSNSKNDRRNRKFKEAERLFSKSSVTSAAAVSALAGVQDQLIEKREPGSGTESDTSPDFHNQENEPSQEDPEDLDGSVQGVKPQKAASSTSSGSHHSSHKKRKNKNRHRIDLKLNKKPRADY

SEQ ID NO: 6265 - protein, 174 aa, Artificial Sequence; identical to SEQ ID NO: 6264
  Synthetic polypeptide

SEQ ID NO: 6266 - protein, 175 aa, Artificial Sequence
  Synthetic polypeptide
SVNPLKYMQNFACETLANLERQIYAFEGSYLEDTQMYGNIIRGWDRYLTNQKNSNSKNDRRNRKFKEAERLFSKSSVTSAAAVSALAGVQDQLIEKREPGSGTESDTSPDFHNQENEPSQEDPEDLDGSVQGVKPQKAASSTSSGSHHSSHKKRKNKNRHRMNVSPKTGWHQLHL

SEQ ID NO: 6267 - protein, 174 aa, Artificial Sequence
  Synthetic polypeptide
SVNPLKYMQNFACETLANLERQIYAFEGSYLEDTQMYGNIIRGWDRYLTNQKNSNSKNDRRNRKFKEAERLFSKSSVTSAAAVSALAGVQDQLIEKREPGSGTESDTSPDFHNQENEPSQEDPEDLDGSVQGVKPQKAASSTSSGSHHSSHKKRKNKNRHSPSGMFDYDFEYVY

SEQ ID NO: 6268 - protein, 178 aa, Artificial Sequence
  Synthetic polypeptide
SICKISRETLANLERQIYAFEGSYLEDTQMYGNIIRGWDRYLTNQKNSNSKNDRRNRKFKEAERLFSKSSVTSAAAVSALAGVQDQLIEKREPGSGTESDTSPDFHNQENEPSQEDPEDLDGSVQGVKPQKAASSTSSGSHHSSHKKRKNKNRHSPSGMFDYDFEIDLKLNKKPRADY

SEQ ID NO: 6269 - protein, 46 aa, Artificial Sequence
  Synthetic polypeptide
RESSKVYAKFRVKHWQIWSDRSMLLREATWKTLRCMAILFVAGIGI

SEQ ID NO: 6270 - protein, 46 aa, Artificial Sequence; identical to SEQ ID NO: 6269
  Synthetic polypeptide

SEQ ID NO: 6271 - protein, 46 aa, Artificial Sequence; identical to SEQ ID NO: 6269
  Synthetic polypeptide

SEQ ID NO: 6272 - protein, 46 aa, Artificial Sequence; identical to SEQ ID NO: 6269
  Synthetic polypeptide

SEQ ID NO: 6273 - protein, 46 aa, Artificial Sequence; identical to SEQ ID NO: 6269
  Synthetic polypeptide

SEQ ID NO: 6274 - protein, 168 aa, Artificial Sequence
  Synthetic polypeptide
SICKISRETLANLERQIYAFEGSYLEDTQMYGNIIRGWDRYLTNQKNSNSKNDRRNRKFKEAERLFSKSSVTSAAAVSALAGVQDQLIEKREPGSGTESDTSPDFHNQENEPSQEDPEDLDGSVQGVKPQKAASSTSSGSHHSSHKKRKNKNRHRIDLKLNKKPRADY

SEQ ID NO: 6275 - protein, 168 aa, Artificial Sequence; identical to SEQ ID NO: 6274
  Synthetic polypeptide

SEQ ID NO: 6276 - protein, 169 aa, Artificial Sequence
  Synthetic polypeptide
SICKISRETLANLERQIYAFEGSYLEDTQMYGNIIRGWDRYLTNQKNSNSKNDRRNRKFKEAERLFSKSSVTSAAAVSALAGVQDQLIEKREPGSGTESDTSPDFHNQENEPSQEDPEDLDGSVQGVKPQKAASSTSSGSHHSSHKKRKNKNRHRMNVSPKTGWHQLHL

SEQ ID NO: 6277 - protein, 168 aa, Artificial Sequence
  Synthetic polypeptide
SICKISRETLANLERQIYAFEGSYLEDTQMYGNIIRGWDRYLTNQKNSNSKNDRRNRKFKEAERLFSKSSVTSAAAVSALAGVQDQLIEKREPGSGTESDTSPDFHNQENEPSQEDPEDLDGSVQGVKPQKAASSTSSGSHHSSHKKRKNKNRHSPSGMFDYDFEYVY

SEQ ID NO: 6278 - protein, 40 aa, Artificial Sequence
  Synthetic polypeptide
SVNPLKKHWQIWSDRSMLLREATWKTLRCMAILFVAGIGI

SEQ ID NO: 6279 - protein, 40 aa, Artificial Sequence; identical to SEQ ID NO: 6278
  Synthetic polypeptide

SEQ ID NO: 6280 - protein, 40 aa, Artificial Sequence; identical to SEQ ID NO: 6278
  Synthetic polypeptide

SEQ ID NO: 6281 - protein, 40 aa, Artificial Sequence; identical to SEQ ID NO: 6278
  Synthetic polypeptide

SEQ ID NO: 6282 - protein, 40 aa, Artificial Sequence; identical to SEQ ID NO: 6278
  Synthetic polypeptide

SEQ ID NO: 6283 - protein, 176 aa, Artificial Sequence
  Synthetic polypeptide
RESSKETLANLERQIYAFEGSYLEDTQMYGNIIRGWDRYLTNQKNSNSKNDRRNRKFKEAERLFSKSSVTSAAAVSALAGVQDQLIEKREPGSGTESDTSPDFHNQENEPSQEDPEDLDGSVQGVKPQKAASSTSSGSHHSSHKKRKNKNRHSPSGMFDYDFEIDLKLNKKPRADY

SEQ ID NO: 6284 - protein, 166 aa, Artificial Sequence
  Synthetic polypeptide
RESSKETLANLERQIYAFEGSYLEDTQMYGNIIRGWDRYLTNQKNSNSKNDRRNRKFKEAERLFSKSSVTSAAAVSALAGVQDQLIEKREPGSGTESDTSPDFHNQENEPSQEDPEDLDGSVQGVKPQKAASSTSSGSHHSSHKKRKNKNRHRIDLKLNKKPRADY

SEQ ID NO: 6285 - protein, 166 aa, Artificial Sequence; identical to SEQ ID NO: 6284
  Synthetic polypeptide

SEQ ID NO: 6286 - protein, 167 aa, Artificial Sequence
  Synthetic polypeptide
RESSKETLANLERQIYAFEGSYLEDTQMYGNIIRGWDRYLTNQKNSNSKNDRRNRKFKEAERLFSKSSVTSAAAVSALAGVQDQLIEKREPGSGTESDTSPDFHNQENEPSQEDPEDLDGSVQGVKPQKAASSTSSGSHHSSHKKRKNKNRHRMNVSPKTGWHQLHL

SEQ ID NO: 6287 - protein, 166 aa, Artificial Sequence
  Synthetic polypeptide
RESSKETLANLERQIYAFEGSYLEDTQMYGNIIRGWDRYLTNQKNSNSKNDRRNRKFKEAERLFSKSSVTSAAAVSALAGVQDQLIEKREPGSGTESDTSPDFHNQENEPSQEDPEDLDGSVQGVKPQKAASSTSSGSHHSSHKKRKNKNRHSPSGMFDYDFEYVY

SEQ ID NO: 6288 - protein, 35 aa, Artificial Sequence
  Synthetic polypeptide
GSRVRRLRTRTWHQMTRVSILFLPLANWLSGLWTP

SEQ ID NO: 6289 - protein, 35 aa, Artificial Sequence; identical to SEQ ID NO: 6288
  Synthetic polypeptide

SEQ ID NO: 6290 - protein, 35 aa, Artificial Sequence; identical to SEQ ID NO: 6288
  Synthetic polypeptide

SEQ ID NO: 6291 - protein, 35 aa, Artificial Sequence; identical to SEQ ID NO: 6288
  Synthetic polypeptide

SEQ ID NO: 6292 - protein, 35 aa, Artificial Sequence; identical to SEQ ID NO: 6288
  Synthetic polypeptide

SEQ ID NO: 6293 - protein, 35 aa, Artificial Sequence; identical to SEQ ID NO: 6288
  Synthetic polypeptide

SEQ ID NO: 6294 - protein, 13 aa, Artificial Sequence
  Synthetic polypeptide
LEFQSCFYHLLTG

SEQ ID NO: 6295 - protein, 13 aa, Artificial Sequence
  Synthetic polypeptide
LEFQSCFYHLLTG

SEQ ID NO: 6296 - protein, 13 aa, Artificial Sequence
  Synthetic polypeptide
LEFQSCFYHLLTG

SEQ ID NO: 6297 - protein, 13 aa, Artificial Sequence
  Synthetic polypeptide
LEFQSCFYHLLTG

SEQ ID NO: 6298 - protein, 13 aa, Artificial Sequence
  Synthetic polypeptide
LEFQSCFYHLLTG

SEQ ID NO: 6299 - protein, 13 aa, Artificial Sequence
  Synthetic polypeptide
LEFQSCFYHLLTG

SEQ ID NO: 6300 - protein, 552 aa, Artificial Sequence
  Synthetic polypeptide
LAERALDTMNFDVIKGKPIRIMWSQRDPSLRKSGVGNVFIKNLDKSIDNKALYDTFSAFGNILSCKVVCDENGSKGYAFVHFETQEAADKAIEKMNGMLLNDRKVFVGRFKSRKEREAELGAKAKEFTNVYIKNFGEEVDDESLKELFSQFGKTLSVKVMRDPNGKSKGFGFVSYEKHEDANKAVEEMNGKEISGKIIFVGRAQKKVERQAELKRKFEQLKQERISRYQGVNLYIKNLDDTIDDEKLRKEFSPFGSITSAKVMLEDGRSKGFGFVCFSSPEEATKAVTEMNGRIVGSKPLYVALAQRKEERKAHLTNQYMQRVAGMRALPANAILNQFQPAAGGYFVPAVPQAQGRPPYYTPNQLAQMRPNPRWQQGGRPQGFQGMPSAIRQSGPRPTLRHLAPTGVPTAVQNLAPRAAVAAAAPRAVAPYKYASSVRSPHPAIQPLQAPQPAVHVQGQEPLTASMLAAAPPQEQKQMLGERLFPLIQTMHSNLAGKITGMLLEIDNSELLHMLESPESLRSKVDEAVAVLQAHHAKKEAAQKVGAVAAATS

SEQ ID NO: 6301 - protein, 597 aa, Artificial Sequence
  Synthetic polypeptide
LAERALDTMNFDVIKGKPIRIMWSQRDPSLRKSGVGNVFIKNLDKSIDNKALYDTFSAFGNILSCKVVCDENGSKGYAFVHFETQEAADKAIEKMNGMLLNDRKVFVGRFKSRKEREAELGAKAKEFTNVYIKNFGEEVDDESLKELFSQFGKTLSVKVMRDPNGKSKGFGFVSYEKHEDANKAVEEMNGKEISGKIIFVGRAQKKVERQAELKRKFEQLKQERISRYQGVNLYIKNLDDTIDDEKLRKEFSPFGSITSAKVMLEDGRSKGFGFVCFSSPEEATKAVTEMNGRIVGSKPLYVALAQRKEERKAHLTNQYMQRVAGMRALPANAILNQFQPAAGGYFVPAVPQAQGRPPYYTPNQLAQMRPNPRWQQGGRPQGFQGMPSAIRQSGPRPTLRHLAPTGNAPASRGLPTTTQRVGSECPDRLAMDFGGAGAAQQGLTDSCQSGGVPTAVQNLAPRAAVAAAAPRAVAPYKYASSVRSPHPAIQPLQAPQPAVHVQGQEPLTASMLAAAPPQEQKQMLGERLFPLIQTMHSNLAGKITGMLLEIDNSELLHMLESPESLRSKVDEAVAVLQAHHAKKEAAQKVGAVAAATS

SEQ ID NO: 6302 - protein, 581 aa, Artificial Sequence
  Synthetic polypeptide
LAERALDTMNFDVIKGKPIRIMWSQRDPSLRKSGVGNVFIKNLDKSIDNKALYDTFSAFGNILSCKVVCDENGSKGYAFVHFETQEAADKAIEKMNGMLLNDRKVFVGRFKSRKEREAELGAKAKEFTNVYIKNFGEEVDDESLKELFSQFGKTLSVKVMRDPNGKSKGFGFVSYEKHEDANKAVEEMNGKEISGKIIFVGRAQKKVERQAELKRKFEQLKQERISRYQGVNLYIKNLDDTIDDEKLRKEFSPFGSITSAKVMLEDGRSKGFGFVCFSSPEEATKAVTEMNGRIVGSKPLYVALAQRKEERKAHLTNQYMQRVAGMRALPANAILNQFQPAAGGYFVPAVPQAQGRPPYYTPNQLAQMRPNPRWQQGGRPQGFQGMPSAIRQSGPRPTLRHLAPTGSECPDRLAMDFGGAGAAQQGLTDSCQSGGVPTAVQNLAPRAAVAAAAPRAVAPYKYASSVRSPHPAIQPLQAPQPAVHVQGQEPLTASMLAAAPPQEQKQMLGERLFPLIQTMHSNLAGKITGMLLEIDNSELLHMLESPESLRSKVDEAVAVLQAHHAKKEAAQKVGAVAAATS

SEQ ID NO: 6303 - protein, 568 aa, Artificial Sequence
  Synthetic polypeptide
LAERALDTMNFDVIKGKPIRIMWSQRDPSLRKSGVGNVFIKNLDKSIDNKALYDTFSAFGNILSCKVVCDENGSKGYAFVHFETQEAADKAIEKMNGMLLNDRKVFVGRFKSRKEREAELGAKAKEFTNVYIKNFGEEVDDESLKELFSQFGKTLSVKVMRDPNGKSKGFGFVSYEKHEDANKAVEEMNGKEISGKIIFVGRAQKKVERQAELKRKFEQLKQERISRYQGVNLYIKNLDDTIDDEKLRKEFSPFGSITSAKVMLEDGRSKGFGFVCFSSPEEATKAVTEMNGRIVGSKPLYVALAQRKEERKAHLTNQYMQRVAGMRALPANAILNQFQPAAGGYFVPAVPQAQGRPPYYTPNQLAQMRPNPRWQQGGRPQGFQGMPSAIRQSGPRPTLRHLAPTGNAPASRGLPTTTQRVGVPTAVQNLAPRAAVAAAAPRAVAPYKYASSVRSPHPAIQPLQAPQPAVHVQGQEPLTASMLAAAPPQEQKQMLGERLFPLIQTMHSNLAGKITGMLLEIDNSELLHMLESPESLRSKVDEAVAVLQAHHAKKEAAQKVGAVAAATS

SEQ ID NO: 6304 - protein, 105 aa, Artificial Sequence
  Synthetic polypeptide
LAERALDTMNFDVIKGKPIRIMWSQRDPSLRKSGVGNVFIKNLDKSIDNKALYDTFSAFGNILSCKVVCDENGSKGYAFVHFETQEAADKAIEKMNGMLLNDRKV

SEQ ID NO: 6305 - protein, 66 aa, Artificial Sequence
  Synthetic polypeptide
LAERALDTMNFDVIKGKPIRIMWSQRDPSLRKSGVGNVFIKNLDKSIDNKALYDTFSAFGNILSCK

SEQ ID NO: 6306 - protein, 184 aa, Artificial Sequence
  Synthetic polypeptide
WNVPLPLVSYRDDFRCLFTHCLCNSVQNKKQGCKNEEVLAVLGHELGHWKLGHTVKNIIISQMNSFLCFFLFAVLIGRKELFAAFGFYDSQPTLIGLLIIFQFIFSPYNEVLSFCLTVLSRRFEFQADAFAKKLGKAKDLYSALIKLNKDNLGFPVSDWLFSMWHYSHPPLLERLQALKTMKQH

SEQ ID NO: 6307 - protein, 43 aa, Artificial Sequence
  Synthetic polypeptide
CDGMCHCLWCHTEMILDACSLTVCVTLCKIRNKDVKMRRYSLY

SEQ ID NO: 6308 - protein, 4 aa, Artificial Sequence
  Synthetic polypeptide
LCAK

SEQ ID NO: 6309 - protein, 673 aa, Artificial Sequence
  Synthetic polypeptide
RPPPGSEYSRGPPGERGPPGPPGPPGVPGSDGIDGDNGPPGKAGPPGPKGEPGKAGPDGPDGKPGIDGLTGAKGEPGPMGIPGVKGQPGLPGPPGLPGPGFAGPPGPPGPVGLPGEIGIRGPKGDPGPDGPSGPPGPPGKPGRPGTIQGLEGSADFLCPTNCPPGMKGPPGLQGVKGHAGKRGILGDPGHQGKPGPKGDVGASGEQGIPGPPGPQGIRGYPGMAGPKGETGPHGYKGMVGAIGATGPPGEEGPRGPPGRAGEKGDEGSPGIRGPQGITGPKGATGPPGINGKDGTPGTPGMKGSAGQAGQPGSPGHQGLAGVPGQPGTKGGPGDQGEPGPQGLPGFSGPPGKEGEPGPRGEIGPQGIMGQKGDQGERGPVGQPGPQGRQGPKGEQGPPGIPGPQGLPGVKGDKGSPGKTGPRGKVGDPGVAGLPGEKGEKGESGEPGPKGQQGVRGEPGYPGPSGDAGAPGVQGYPGPPGPRGLAGNRGVPGQPGRQGVEGRDATDQHIVDVALKMLQEQLAEVAVSAKREALGAVGMMGPPGPPGPPGYPGKQGPHGHPGPRGVPGIVGAVGQIGNTGPKGKRGEKGDPGEVGRGHPGMPGPPGIPGLPGRPGQAINGKDGDRGSPGAPGEAGRPGLPGPVGLPGFCEPAACLGASAYASARLTEPGSIKGP

SEQ ID NO: 6310 - protein, 88 aa, Artificial Sequence
  Synthetic polypeptide
PWTLHVLSQFLRLQTGARNSARLPVLSILEVHRESGAPRVPRDRRECLDPTASTVTMGPLEKLALRDPRASLAKLGQMGQTGSPGLMV

SEQ ID NO: 6311 - protein, 88 aa, Artificial Sequence; identical to SEQ ID NO: 6310
  Synthetic polypeptide

SEQ ID NO: 6312 - protein, 221 aa, Artificial Sequence
  Synthetic polypeptide
RPPPGSEYSRGPPGERGPPGPPGPPGVPGSDGIDGDNGPPGKAGPPGPKGEPGKAGPDGPDGKPGIDGLTGAKGEPGPMGIPGVKGQPGLPGPPGLPGPGFAGPPGPPGPVGLPGEIGIRGPKGDPGPDGPSGPPGPPGKPGRPGTIQGLEGSADFLCPTNCPPGMKGPPGLQGVKGHAGKRGILGDPGHQGKPGPKGDVGASGEQGIPGPPGPQGIRGYP

SEQ ID NO: 6313 - protein, 67 aa, Artificial Sequence
  Synthetic polypeptide
RPPPGSEYSRGPPGERGPPGPPGPPGVPGSDGIDGPPGPVGLPGEIGIRGPKGDPGPDGPSGPPGPP

SEQ ID NO: 6314 - protein, 86 aa, Artificial Sequence
  Synthetic polypeptide
PWTLHVLSQFLRLQTGARNSARLPVLSILEVHRESGAPRVPRDRRECLDPTASTGLLDLLASLVRLESEAPRGTLDQMDHRGPQDP

SEQ ID NO: 6315 - protein, 9 aa, Artificial Sequence
  Synthetic polypeptide
AKEARHKST

SEQ ID NO: 6316 - protein, 9 aa, Artificial Sequence
  Synthetic polypeptide
AKEARHKST

SEQ ID NO: 6317 - protein, 9 aa, Artificial Sequence
  Synthetic polypeptide
AKEARHKST

SEQ ID NO: 6318 - protein, 50 aa, Artificial Sequence
  Synthetic polypeptide
KQLINTATWMNFKNTKQKKPDTKVHRFCGLGAHHLARRARALPRSLAEAL

SEQ ID NO: 6319 - protein, 50 aa, Artificial Sequence; identical to SEQ ID NO: 6318
  Synthetic polypeptide

SEQ ID NO: 6320 - protein, 50 aa, Artificial Sequence; identical to SEQ ID NO: 6318
  Synthetic polypeptide

SEQ ID NO: 6321 - protein, 269 aa, Artificial Sequence
  Synthetic polypeptide
TSKTLSKRSQTQKYIDSADLEPITSQEEPVRYHEAWQKLCSAHGVLVPGGFGVRGTEGKIQAIAWARNQKKPFLGVCLGMQLAVVEFSRNVLGWQDANSTEFDPTTSHPVVVDMPEHNPGQMGGTMRLGKRRTLFQTKNSVMRKLYGDADYLEERHRHRFEVNPVWKKCLEEQGLKFVGQDVEGERMEIVELEDHPFFVGVQYHPEFLSRPIKPSPPYFGLLLASVGRLSHYLQKGCRLSPRDTYSDRSGSSSPDSEITELKFPSINHD

SEQ ID NO: 6322 - protein, 269 aa, Artificial Sequence; identical to SEQ ID NO: 6321
  Synthetic polypeptide

SEQ ID NO: 6323 - protein, 269 aa, Artificial Sequence; identical to SEQ ID NO: 6321
  Synthetic polypeptide

SEQ ID NO: 6324 - protein, 11 aa, Artificial Sequence
  Synthetic polypeptide
TIRIRFDEHPF

SEQ ID NO: 6325 - protein, 11 aa, Artificial Sequence
  Synthetic polypeptide
TIRIRFDEHPF

SEQ ID NO: 6326 - protein, 11 aa, Artificial Sequence
  Synthetic polypeptide
TIRIRFDEHPF

SEQ ID NO: 6327 - protein, 11 aa, Artificial Sequence
  Synthetic polypeptide
TIRIRFDEHPF

SEQ ID NO: 6328 - protein, 11 aa, Artificial Sequence
  Synthetic polypeptide
TIRIRFDEHPF

SEQ ID NO: 6329 - protein, 11 aa, Artificial Sequence
  Synthetic polypeptide
TIRIRFDEHPF

SEQ ID NO: 6330 - protein, 313 aa, Artificial Sequence
  Synthetic polypeptide
ESGLMNIPSESSQQSHTSCTYQHSPSSTVSTHPHSNQSSLSNSHGSGLNTTGSNSVAQVSLSHPQMHTQPSPHPPHRPHGLPQHPQRSPHPAPHPQQHSQLQSPHPQHPSPHQHIQHHPNHQHQTLTHQAPPPPQQVSCNSGVSNDWYATLDMLKESCRIASSVNWSDVDLSQFQGLMESMRQADLKNWSLDQVQFADLCSSLNQFFTQTGLIHSQSNVQQNVCHGAMHPTKPSQHIGTGNLYIDSRQNLPPSVMPPPGYPHIPQALSTPGTTMAGHHRAMNQQHMMPSQAFQMRRSLPPDDIQDDFDWDSIV

SEQ ID NO: 6331 - protein, 313 aa, Artificial Sequence; identical to SEQ ID NO: 6330
  Synthetic polypeptide

SEQ ID NO: 6332 - protein, 313 aa, Artificial Sequence; identical to SEQ ID NO: 6330
  Synthetic polypeptide

SEQ ID NO: 6333 - protein, 313 aa, Artificial Sequence; identical to SEQ ID NO: 6330
  Synthetic polypeptide

SEQ ID NO: 6334 - protein, 313 aa, Artificial Sequence; identical to SEQ ID NO: 6330
  Synthetic polypeptide

SEQ ID NO: 6335 - protein, 5 aa, Artificial Sequence
  Synthetic polypeptide
NKNQV

SEQ ID NO: 6336 - protein, 5 aa, Artificial Sequence
  Synthetic polypeptide
NKNQV

SEQ ID NO: 6337 - protein, 5 aa, Artificial Sequence
  Synthetic polypeptide
NKNQV

SEQ ID NO: 6338 - protein, 5 aa, Artificial Sequence
  Synthetic polypeptide
NKNQV

SEQ ID NO: 6339 - protein, 5 aa, Artificial Sequence
  Synthetic polypeptide
NKNQV

SEQ ID NO: 6340 - protein, 5 aa, Artificial Sequence
  Synthetic polypeptide
NKNQV

SEQ ID NO: 6341 - protein, 107 aa, Artificial Sequence
  Synthetic polypeptide
ESGLMNIPSESSQQSHTSCTYQHSPSSTVSTHPHSNQSSLSNSHGSGLNTTGSNSVAQVSLSHPQMHTQPSPHPPHRPHGLPQHPQRSPHPAPHPQQHSQLQSPHPQ

SEQ ID NO: 6342 - protein, 151 aa, Artificial Sequence
  Synthetic polypeptide
GQVPWLTLVIPALWEAKADEFIRANATNKLTVIAEQIQHLQEQARKVLEDAHRDANLHHVACNIVKKPGNIYYLYKRESGQQYFSIISPKEWGTSCPHDFLGAYKLQHDLSWTPYEDIEKQDAKISMMDTLLSQSVALPPCTEPNFQGLTH

SEQ ID NO: 6343 - protein, 20 aa, Artificial Sequence
  Synthetic polypeptide
SQHFGRPRLMNSSEQMPPTS

SEQ ID NO: 6344 - protein, 17 aa, Artificial Sequence
  Synthetic polypeptide
PGAVAHTCNPSTLGGQG

SEQ ID NO: 6345 - protein, 489 aa, Artificial Sequence
  Synthetic polypeptide
EHWKLTGRLMLAVGGAVLGSLQFGYNTGVINAPQKVIEEFYNQTWVHRYGESILPTTLTTLWSLSVAIFSVGGMIGSFSVGLFVNRFGRRNSMLMMNLLAFVSAVLMGFSKLGKSFEMLILGRFIIGVYCGLTTGFVPMYVGEVSPTALRGALGTLHQLGIVVGILIAQVFGLDSIMGNKDLWPLLLSIIFIPALLQCIVLPFCPESPRFLLINRNEENRAKSVLKKLRGTADVTHDLQEMKEESRQMMREKKVTILELFRSPAYRQPILIAVVLQLSQQLSGINAVFYYSTSIFEKAGVQQPVYATIGSGIVNTAFTVVSLFVVERAGRRTLHLIGLAGMAGCAILMTIALALLEQLPWMSYLSIVAIFGFVAFFEVGPGPIPWFIVAELFSQGPRPAAIAVAGFSNWTSNFIVGMCFQYVEQLCGPYVFIIFTVLLVLFFIFTYFKVPETKGRTFDEIASGFRQGGASQSDKTPEELFHPLGADSQV

SEQ ID NO: 6346 - protein, 4 aa, Artificial Sequence
  Synthetic polypeptide
STGS

SEQ ID NO: 6347 - protein, 4 aa, Artificial Sequence
  Synthetic polypeptide
STGS

SEQ ID NO: 6348 - protein, 4 aa, Artificial Sequence
  Synthetic polypeptide
STGS

SEQ ID NO: 6349 - protein, 83 aa, Artificial Sequence
  Synthetic polypeptide
ALEADGSPHAGRGRSSAWLPAVWLQHWSHQCPPEGDRGVLQPDMGPPLWGEHPAHHAHHALVPLSGHLFCWGHDWLLLCGPFR

SEQ ID NO: 6350 - protein, 83 aa, Artificial Sequence; identical to SEQ ID NO: 6349
  Synthetic polypeptide

SEQ ID NO: 6351 - protein, 83 aa, Artificial Sequence; identical to SEQ ID NO: 6349
  Synthetic polypeptide

SEQ ID NO: 6352 - protein, 117 aa, Artificial Sequence
  Synthetic polypeptide
EHWKLTGRLMLAVGGAVLGSLQFGYNTGVINAPQKVIEEFYNQTWVHRYGESILPTTLTTLWSLSVAIFSVGGMIGSFSVGLFVNRFGRRNSMLMMNLLAFVSAVLMGFSKLGKSQT

SEQ ID NO: 6353 - protein, 231 aa, Artificial Sequence
  Synthetic polypeptide
EHWKLTGRLMLAVGGAVLGSLQFGYNTGVINAPQKVIEEFYNQTWVHRYGESILPTTLTTLWSLSVAIFSVGGMIGSFSVGLFVNRFGRRNSMLMMNLLAFVSAVLMGFSKLGKSFEMLILGRFIIGVYCGLTTGFVPMYVGEVSPTALRGALGTLHQLGIVVGILIAQVSWGRIYLPGTAPAHSFSGSRICAQQGRVSLPPSPHSLAEDNYGTQVQRTQHHGLPVDSKMT

SEQ ID NO: 6354 - protein, 23 aa, Artificial Sequence
  Synthetic polypeptide
VTAGANGGSSEEAAGESPYDECY

SEQ ID NO: 6355 - protein, 23 aa, Artificial Sequence
  Synthetic polypeptide
VTAGANGGSSEEAAGESPYDECY

SEQ ID NO: 6356 - protein, 129 aa, Artificial Sequence
  Synthetic polypeptide
LQVQTEVLQKRQQEKAHMMNAIKKYQKGFSDKLDFLEGDQKPLAQRKKAGAKGQQMRKGPSAKRRYKNQKFGFGGKKKGSKWNTRESYDDVSSFRAKTAHGRGLKRPGKKGSNKRPGKRTREKMKNRTH

SEQ ID NO: 6357 - protein, 129 aa, Artificial Sequence; identical to SEQ ID NO: 6356
  Synthetic polypeptide

SEQ ID NO: 6358 - protein, 18 aa, Artificial Sequence
  Synthetic polypeptide
DCRCKRRFFRRGSRRKPI

SEQ ID NO: 6359 - protein, 18 aa, Artificial Sequence
  Synthetic polypeptide
DCRCKRRFFRRGSRRKPI

SEQ ID NO: 6360 - protein, 1881 aa, Artificial Sequence
  Synthetic polypeptide
ALHKGKPVFIKVPEDQTGLSGGVASFVCQATGEPKPRITWMKKGKKVSSQRFEVIEFDDGAGSVLRIQPLRVQRDEAIYECTATNSLGEINTSAKLSVLEEEQLPPGFPSIDMGPQLKVVEKARTATMLCAAGGNPDPEISWFKDFLPVDPATSNGRIKQLRSGALQIESSEESDQGKYECVATNSAGTRYSAPANLYVRVRRVAPRFSIPPSSQEVMPGGSVNLTCVAVGAPMPYVKWMMGAEELTKEDEMPVGRNVLELSNVVRSANYTCVAISSLGMIEATAQVTVKALPKPPIDLVVTETTATSVTLTWDSGNSEPVTYYGIQYRAAGTEGPFQEVDGVATTRYSIGGLSPFSEYAFRVLAVNSIGRGPPSEAVRARTGEQAPSSPPRRVQARMLSASTMLVQWEPPEEPNGLVRGYRVYYTPDSRRPPNAWHKHNTDAGLLTTVGSLLPGITYSLRVLAFTAVGDGPPSPTIQVKTQQGVPAQPADFQAEVESDTRIQLSWLLPPQERIIMYELVYWAAEDEDQQHKVTFDPTSSYTLEDLKPDTLYRFQLAARSDMGVGVFTPTIEARTAQSTPSAPPQKVMCVSMGSTTVRVSWVPPPADSRNGVITQYSVAYEAVDGEDRGRHVVDGISREHSSWDLVGLEKWTEYRVWVRAHTDVGPGPESSPVLVRTDEDVPSGPPRKVEVEPLNSTAVHVYWKLPVPSKQHGQIRGYQVTYVRLENGEPRGLPIIQDVMLAEAQWRPEESEDYETTISGLTPETTYSVTVAAYTTKGDGARSKPKIVTTTGAVPGRPTMMISTTAMNTALLQWHPPKELPGELLGYRLQYCRADEARPNTIDFGKDDQHFTVTGLHKGTTYIFRLAAKNRAGLGEEFEKEIRTPEDLPSGFPQNLHVTGLTTSTTELAWDPPVLAERNGRIISYTVVFRDINSQQELQNITTDTRFTLTGLKPDTTYDIKVRAWTSKGSGPLSPSIQSRTMPVEQVFAKNFRVAAAMKTSVLLSWEVPDSYKSAVPFKILYNGQSVEVDGHSMRKLIADLQPNTEYSFVLMNRGSSAGGLQHLVSIRTAPDLLPHKPLPASAYIEDGRFDLSMPHVQDPSLVRWFYIVVVPIDRVGGSMLTPRWSTPEELELDELLEAIEQGGEEQRRRRRQAERLKPYVAAQLDVLPETFTLGDKKNYRGFYNRPLSPDLSYQCFVLASLKEPMDQKRYASSPYSDEIVVQVTPAQQQEEPEMLWVTGPVLAVILIILIVIAILLFKRKRTHSPSSKDEQSIGLKDSLLAHSSDPVEMRRLNYQTPGMRDHPPIPITDLADNIERLKANDGLKFSQEYESIDPGQQFTWENSNLEVNKPKNRYANVIAYDHSRVILTSIDGVPGSDYINANYIDGYRKQNAYIATQGPLPETMGDFWRMVWEQRTATVVMMTRLEEKSRVKCDQYWPARGTETCGLIQVTLLDTVELATYTVRTFALHKSGSSEKRELRQFQFMAWPDHGVPEYPTPILAFLRRVKACNPLDAGPMVVHCSAGVGRTGCFIVIDAMLERMKHEKTVDIYGHVTCMRSQRNYMVQTEDQYVFIHEALLEAATCGHTEVPARNLYAHIQKLGQVPPGESVTAMELEFKLLASSKAHTSRFISANLPCNKFKNRLVNIMPYELTRVCLQPIRGVEGSDYINASFLDGYRQQKAYIATQGPLAESTEDFWRMLWEHNSTIIVMLTKLREMGREKCHQYWPAERSARYQYFVVDPMAEYNMPQYILREFKVTDARDGQSRTIRQFQFTDWPEQGVPKTGEGFIDFIGQVHKTKEQFGQDGPITVHCSAGVGRTGVFITLSIVLERMRYEGVVDMFQTVKTLRTQRPAMVQTEDQYQLCYRAALEYLGSFDHYAT

SEQ ID NO: 6361 - protein, 1881 aa, Artificial Sequence; identical to SEQ ID NO: 6360
  Synthetic polypeptide

SEQ ID NO: 6362 - protein, 57 aa, Artificial Sequence
  Synthetic polypeptide
PLWASRNRYSYSTHLICLTELKNVKLSEQCLAHTKRYIKANLSSLKSLRTRLGCQEG

SEQ ID NO: 6363 - protein, 57 aa, Artificial Sequence; identical to SEQ ID NO: 6362
  Synthetic polypeptide

SEQ ID NO: 6364 - protein, 57 aa, Artificial Sequence; identical to SEQ ID NO: 6362
  Synthetic polypeptide

SEQ ID NO: 6365 - protein, 57 aa, Artificial Sequence; identical to SEQ ID NO: 6362
  Synthetic polypeptide

SEQ ID NO: 6366 - protein, 57 aa, Artificial Sequence; identical to SEQ ID NO: 6362
  Synthetic polypeptide

SEQ ID NO: 6367 - protein, 1872 aa, Artificial Sequence
  Synthetic polypeptide
ALHKGKPVFIKVPEDQTGLSGGVASFVCQATGEPKPRITWMKKGKKVSSQRFEVIEFDDGAGSVLRIQPLRVQRDEAIYECTATNSLGEINTSAKLSVLEEEQLPPGFPSIDMGPQLKVVEKARTATMLCAAGGNPDPEISWFKDFLPVDPATSNGRIKQLRSGALQIESSEESDQGKYECVATNSAGTRYSAPANLYVRVRRVAPRFSIPPSSQEVMPGGSVNLTCVAVGAPMPYVKWMMGAEELTKEDEMPVGRNVLELSNVVRSANYTCVAISSLGMIEATAQVTVKALPKPPIDLVVTETTATSVTLTWDSGNSEPVTYYGIQYRAAGTEGPFQEVDGVATTRYSIGGLSPFSEYAFRVLAVNSIGRGPPSEAVRARTGEQAPSSPPRRVQARMLSASTMLVQWEPPEEPNGLVRGYRVYYTPDSRRPPNAWHKHNTDAGLLTTVGSLLPGITYSLRVLAFTAVGDGPPSPTIQVKTQQGVPAQPADFQAEVESDTRIQLSWLLPPQERIIMYELVYWAAEDEDQQHKVTFDPTSSYTLEDLKPDTLYRFQLAARSDMGVGVFTPTIEARTAQSTPSAPPQKVMCVSMGSTTVRVSWVPPPADSRNGVITQYSVAYEAVDGEDRGRHVVDGISREHSSWDLVGLEKWTEYRVWVRAHTDVGPGPESSPVLVRTDEDVPSGPPRKVEVEPLNSTAVHVYWKLPVPSKQHGQIRGYQVTYVRLENGEPRGLPIIQDVMLAEAQETTISGLTPETTYSVTVAAYTTKGDGARSKPKIVTTTGAVPGRPTMMISTTAMNTALLQWHPPKELPGELLGYRLQYCRADEARPNTIDFGKDDQHFTVTGLHKGTTYIFRLAAKNRAGLGEEFEKEIRTPEDLPSGFPQNLHVTGLTTSTTELAWDPPVLAERNGRIISYTVVFRDINSQQELQNITTDTRFTLTGLKPDTTYDIKVRAWTSKGSGPLSPSIQSRTMPVEQVFAKNFRVAAAMKTSVLLSWEVPDSYKSAVPFKILYNGQSVEVDGHSMRKLIADLQPNTEYSFVLMNRGSSAGGLQHLVSIRTAPDLLPHKPLPASAYIEDGRFDLSMPHVQDPSLVRWFYIVVVPIDRVGGSMLTPRWSTPEELELDELLEAIEQGGEEQRRRRRQAERLKPYVAAQLDVLPETFTLGDKKNYRGFYNRPLSPDLSYQCFVLASLKEPMDQKRYASSPYSDEIVVQVTPAQQQEEPEMLWVTGPVLAVILIILIVIAILLFKRKRTHSPSSKDEQSIGLKDSLLAHSSDPVEMRRLNYQTPGMRDHPPIPITDLADNIERLKANDGLKFSQEYESIDPGQQFTWENSNLEVNKPKNRYANVIAYDHSRVILTSIDGVPGSDYINANYIDGYRKQNAYIATQGPLPETMGDFWRMVWEQRTATVVMMTRLEEKSRVKCDQYWPARGTETCGLIQVTLLDTVELATYTVRTFALHKSGSSEKRELRQFQFMAWPDHGVPEYPTPILAFLRRVKACNPLDAGPMVVHCSAGVGRTGCFIVIDAMLERMKHEKTVDIYGHVTCMRSQRNYMVQTEDQYVFIHEALLEAATCGHTEVPARNLYAHIQKLGQVPPGESVTAMELEFKLLASSKAHTSRFISANLPCNKFKNRLVNIMPYELTRVCLQPIRGVEGSDYINASFLDGYRQQKAYIATQGPLAESTEDFWRMLWEHNSTIIVMLTKLREMGREKCHQYWPAERSARYQYFVVDPMAEYNMPQYILREFKVTDARDGQSRTIRQFQFTDWPEQGVPKTGEGFIDFIGQVHKTKEQFGQDGPITVHCSAGVGRTGVFITLSIVLERMRYEGVVDMFQTVKTLRTQRPAMVQTEDQYQLCYRAALEYLGSFDHYAT

SEQ ID NO: 6368 - protein, 1872 aa, Artificial Sequence; identical to SEQ ID NO: 6367
  Synthetic polypeptide

SEQ ID NO: 6369 - protein, 236 aa, Artificial Sequence
  Synthetic polypeptide
ALHKGKPVFIKVPEDQTGLSGGVASFVCQATGEPKPRITWMKKGKKVSSQRFEVIEFDDGAGSVLRIQPLRVQRDEAIYECTATNSLGEINTSAKLSVLEEEQLPPGFPSIDMGPQLKVVEKARTATMLCAAGGNPDPEISWFKDFLPVDPATSNGRIKQLRSGALQIESSEESDQGKYECVATNSAGTRYSAPANLYVRGLAAWARSPMGIWSHPIRLLGVCACVCAHTGTLICV

SEQ ID NO: 6370 - protein, 394 aa, Artificial Sequence
  Synthetic polypeptide
SAPAWPAAGCPGPLGGPVAACGMSRLLGGTLERVCKAVLLLCLLHFLVAVILYFDVYAQHLAFFSRFSARGPAHALHPAASSSSSSSNCSRPNATASSSGLPEVPSALPGPTAPTLPPCPDSPPGLVGRLLIEFTSPMPLERVQRENPGVLMGGRYTPPDCTPAQTVAVIIPFRHREHHLRYWLHYLHPILRRQRLRYGVYVINQHGEDTFNRAKLLNVGFLEALKEDAAYDCFIFSDVDLVPMDDRNLYRCGDQPRHFAIAMDKFGFRLPYAGYFGGVSGLSKAQFLRINGFPNEYWGWGGEDDDIFNRISLTGMKISRPDIRIGRYRMIKHDRDKHNEPNPQRFTKIQNTKLTMKRDGIGSVRYQVLEVSRQPLFTNITVDIGRPPSWPPRG

SEQ ID NO: 6371 - protein, 27 aa, Artificial Sequence
  Synthetic polypeptide
SHEYKVLLHGQQPDARAHWAGQWPPAG

SEQ ID NO: 6372 - protein, 66 aa, Artificial Sequence
  Synthetic polypeptide
WLLEGLNEVMSIKCSCMASSRMPGPTGRASGRLRDEQTAGGDAGARLQGCAPSLPAALPRGRHPLL

SEQ ID NO: 6373 - protein, 197 aa, Artificial Sequence
  Synthetic polypeptide
NSTEILTPSFRSWITFENSPSPGGKEAETRQPVVILLGWGGCKDKNLAKYSAIYHKRGCIVIRYTAPWHMVFFSESLGIPSLRVLAQKLLELLFDYEIEKEPLLFHVFSNGGVMLYRYVLELLQTRRFCRLRVVGTIFDSAPGDSNLVFCMASCLLLSPLLVDGISAGTEGQLTLRPDWAAQVLTRLGCHLQCITRS

SEQ ID NO: 6374 - protein, 27 aa, Artificial Sequence
  Synthetic polypeptide
LLPLGAGLPLRTAPAQVGRRQKLGSLW

SEQ ID NO: 6375 - protein, 27 aa, Artificial Sequence
  Synthetic polypeptide
LLPLGAGLPLRTAPAQVGRRQKLGSLW

SEQ ID NO: 6376 - protein, 27 aa, Artificial Sequence
  Synthetic polypeptide
LLPLGAGLPLRTAPAQVGRRQKLGSLW

SEQ ID NO: 6377 - protein, 27 aa, Artificial Sequence
  Synthetic polypeptide
LLPLGAGLPLRTAPAQVGRRQKLGSLW

SEQ ID NO: 6378 - protein, 27 aa, Artificial Sequence
  Synthetic polypeptide
LLPLGAGLPLRTAPAQVGRRQKLGSLW

SEQ ID NO: 6379 - protein, 107 aa, Artificial Sequence
  Synthetic polypeptide
NSTEILTPSFRSWITFENSPSPGGKEAETRQPVVILLGWGGCKDKNLAKYSAIYHKRVFCMASCLLLSPLLVDGISAGTEGQLTLRPDWAAQVLTRLGCHLQCITRS

SEQ ID NO: 6380 - protein, 273 aa, Artificial Sequence
  Synthetic polypeptide
NSTEILTPSFRSWITFENSPSPGGKEAETRQPVVILLGWGGCKDKNLAKYSAIYHKRGCIVIRYTAPWHMVFFSESLGIPSLRVLAQKLLELLFDYEIEKEPLLFHVFSNGGVMLYRYVLELLQTRRFCRLRVVGTIFDSAPGDSNLVGALRALAAILERRAAMLRLLLLVAFALVVVLFHVLLAPITALFHTHFYDRLQDAGSRWPELYLYSRADEVVLARDIERMVEARLARRVLARSVDFVSSAHVSHLRDYPTYYTSLCVDFMRNCVRC

SEQ ID NO: 6381 - protein, 243 aa, Artificial Sequence
  Synthetic polypeptide
NSTEILTPSFRSWITFENSPSPGGKEAETRQPVVILLGWGGCKDKNLAKYSAIYHKRKLLELLFDYEIEKEPLLFHVFSNGGVMLYRYVLELLQTRRFCRLRVVGTIFDSAPGDSNLVGALRALAAILERRAAMLRLLLLVAFALVVVLFHVLLAPITALFHTHFYDRLQDAGSRWPELYLYSRADEVVLARDIERMVEARLARRVLARSVDFVSSAHVSHLRDYPTYYTSLCVDFMRNCVRC

SEQ ID NO: 6382 - protein, 130 aa, Artificial Sequence
  Synthetic polypeptide
NSTEILTPSFRSWITFENSPSPGGKEAETRQPVVILLGWGGCKDKNLAKYSAIYHKRLLELLFDYEIEKEPLLFHVFSNGGVMLYRYVLELLQTRRFCRLRVVGTIFDSAPGDSNLVGALRALAAILERR

SEQ ID NO: 6383 - protein, 17 aa, Artificial Sequence
  Synthetic polypeptide
ANTVPLHYSLGDRGQYT

SEQ ID NO: 6384 - protein, 17 aa, Artificial Sequence
  Synthetic polypeptide
ANTVPLHYSLGDRGQYT

SEQ ID NO: 6385 - protein, 17 aa, Artificial Sequence
  Synthetic polypeptide
ANTVPLHYSLGDRGQYT

SEQ ID NO: 6386 - protein, 17 aa, Artificial Sequence
  Synthetic polypeptide
ANTVPLHYSLGDRGQYT

SEQ ID NO: 6387 - protein, 190 aa, Artificial Sequence
  Synthetic polypeptide
HFGRPRRADHLRSGVGDQPSQHDETSSLLKIQKISWAWWCVLVVPDTPEVRRENRLSPGGGGCSKPTPCHCTTAWATGVNTPKKQGGLGPMNIPLVSDPKRTIAQDYGVLKADEGISFRGLFIIDDKGILRQITVNDLPVGRSVDETLRLVQAFQFTDKHGEVCPAGWKPGSDTIKPDVQKSKEYFSKQK

SEQ ID NO: 6388 - protein, 190 aa, Artificial Sequence; identical to SEQ ID NO: 6387
  Synthetic polypeptide

SEQ ID NO: 6389 - protein, 34 aa, Artificial Sequence
  Synthetic polypeptide
AREVEVAVSQHRATALQPGRQGSIHLRNKEDWDP

SEQ ID NO: 6390 - protein, 34 aa, Artificial Sequence; identical to SEQ ID NO: 6389
  Synthetic polypeptide

SEQ ID NO: 6391 - protein, 34 aa, Artificial Sequence; identical to SEQ ID NO: 6389
  Synthetic polypeptide

SEQ ID NO: 6392 - protein, 34 aa, Artificial Sequence; identical to SEQ ID NO: 6389
  Synthetic polypeptide

SEQ ID NO: 6393 - protein, 162 aa, Artificial Sequence
  Synthetic polypeptide
HFGRPRRADHLRSGVGDQPSQHDETSSLLKIQKISWAWWCVLVVPDTPEVRRENRLSPGGGGCSKPTPCHCTTAWATGVNTPKKQGGLGPMNIPLVSDPKRTIAQDYGVLKADEGISFRGLFIIDDKGILRQITVNDLPVGRSVDETLRLVQAFQFTDKHGE

SEQ ID NO: 6394 - protein, 162 aa, Artificial Sequence; identical to SEQ ID NO: 6393
  Synthetic polypeptide

SEQ ID NO: 6395 - protein, 50 aa, Artificial Sequence
  Synthetic polypeptide
ANTVPLHYSLGDRENMLCSSFTLLTSPLCAPRRSLLSVIGQKNLRNSTAK

SEQ ID NO: 6396 - protein, 50 aa, Artificial Sequence; identical to SEQ ID NO: 6395
  Synthetic polypeptide

SEQ ID NO: 6397 - protein, 50 aa, Artificial Sequence; identical to SEQ ID NO: 6395
  Synthetic polypeptide

SEQ ID NO: 6398 - protein, 50 aa, Artificial Sequence; identical to SEQ ID NO: 6395
  Synthetic polypeptide

SEQ ID NO: 6399 - protein, 88 aa, Artificial Sequence
  Synthetic polypeptide
HFGRPRRADHLRSGVGDQPSQHDETSSLLKIQKISWAWWCVLVVPDTPEVRRENRLSPGGGGCSKPTPCHCTTAWATGKICCVLLLPS

SEQ ID NO: 6400 - protein, 88 aa, Artificial Sequence; identical to SEQ ID NO: 6399
  Synthetic polypeptide

SEQ ID NO: 6401 - protein, 88 aa, Artificial Sequence; identical to SEQ ID NO: 6399
  Synthetic polypeptide

SEQ ID NO: 6402 - protein, 88 aa, Artificial Sequence; identical to SEQ ID NO: 6399
  Synthetic polypeptide

SEQ ID NO: 6403 - protein, 185 aa, Artificial Sequence
  Synthetic polypeptide
AREVEVAVSQHRATALQPGRQGKYVVFFFYPLDFTFVCPTEIIAFSDRAEEFKKLNCQVIGASVDSHFCHLAWVNTPKKQGGLGPMNIPLVSDPKRTIAQDYGVLKADEGISFRGLFIIDDKGILRQITVNDLPVGRSVDETLRLVQAFQFTDKHGEVCPAGWKPGSDTIKPDVQKSKEYFSKQK

SEQ ID NO: 6404 - protein, 185 aa, Artificial Sequence; identical to SEQ ID NO: 6403
  Synthetic polypeptide

SEQ ID NO: 6405 - protein, 157 aa, Artificial Sequence
  Synthetic polypeptide
AREVEVAVSQHRATALQPGRQGKYVVFFFYPLDFTFVCPTEIIAFSDRAEEFKKLNCQVIGASVDSHFCHLAWVNTPKKQGGLGPMNIPLVSDPKRTIAQDYGVLKADEGISFRGLFIIDDKGILRQITVNDLPVGRSVDETLRLVQAFQFTDKHGE

SEQ ID NO: 6406 - protein, 157 aa, Artificial Sequence; identical to SEQ ID NO: 6405
  Synthetic polypeptide

SEQ ID NO: 6407 - protein, 761 aa, Artificial Sequence
  Synthetic polypeptide
TPGRNWHLESGHLKLALPGPILQSILPLLNIYYLERIEETALKKGLSTQAIWRRLWDELMKTRPSSLESVTCWRAKFMEAFFSHVLRGTIDVSSDRRLCDQRFSPLLHSSRHVRQLTICNMLQGATELVAEPNRRVLETLASSLHTLKFRHLLFSDVAAQQSLRQLLHQLIHHGAVSQVSLYSWPVPESALFILILTMSAGFWQPGPGGPPCRLCGEASRGRAPSRDEGSLLLGSRRPRRDAAERCAAALMASRRKSEAKQMPRAAPATRVTRRSTQESLTAGGTDLKRELHPPATSHEAPGTKRSPSAPAATSSASSSTSSYKRAPASSAPQPKPLKRFKRAAGKKGARTRQGPGAESEDLYDFVFIVAGEKEDGEEMEIGEVACGALDGSDPSCLGLPALEASQRFRSISTLELFTVPLSTEAALTLCHLLSSWVSLESLTLSYNGLGSNIFRLLDSLRALSGQAGCRLRALHLSDLFSPLPILELTRAIVRALPLLRVLSIRVDHPSQRDNPGVPGNAGPPSHIIGDEEIPENCLEQLEMGFPRGAQPAPLLCSVLKASGSLQQLSLDSATFASPQDFGLVLQTLKEYNLALKRLSFHDMNLADCQSEVLFLLQNLTLQEITFSFCRLFEKRPAQFLPEMVAAMKGNSTLKGLRLPGNRLGNAGLLALADVFSEDSSSSLCQLDISSNCIKPDGLLEFAKRLERWGRGAFGHLRLFQNWLDQDAVTAREAIRRLRATCHVVSDSWDSSQAFADYVSTM

SEQ ID NO: 6408 - protein, 45 aa, Artificial Sequence
  Synthetic polypeptide
NLPSQAQYFKASYLCSIYITWRGLRKLPSRKASQLRPSGADSGMN

SEQ ID NO: 6409 - protein, 92 aa, Artificial Sequence
  Synthetic polypeptide
LTAGLNLPCGASLWGTPDSLSDAIQRVLPGRQLPQWNASPEQHVAGPHRGLTQWLNTRKELALGVRTSETCPPRPNTSKHPTSAQYILLGED

SEQ ID NO: 6410 - protein, 30 aa, Artificial Sequence
  Synthetic polypeptide
KWPYCPRNNCVYQYLGSSPQPLFLGRPSGL

SEQ ID NO: 6411 - protein, 178 aa, Artificial Sequence
  Synthetic polypeptide
QTNREQIMSELPFTIASKRIKYLGIQLTRDVKDLLKGNYKPLLNEIRGHKQMEEYSMLMGRKNQYRENGHTAQGITVFINIWALHHNPYFWEDPQVFNPLRFSRENSEKIHPYAFIPFSAGLRNCIGQHFAIIECKVAVALTLLRFKLAPDHSRPPQPVRQVVLKSKNGIHVFAKKVC

SEQ ID NO: 6412 - protein, 28 aa, Artificial Sequence
  Synthetic polypeptide
EDTNKWKNIPCSWVGRINIVKMAILPKE

SEQ ID NO: 6413 - protein, 30 aa, Artificial Sequence; identical to SEQ ID NO: 6410
  Synthetic polypeptide

SEQ ID NO: 6414 - protein, 134 aa, Artificial Sequence
  Synthetic polypeptide
NKRGHKQMEEHSMLMDRKNQYRENGHTAQGITVFINIWALHHNPYFWEDPQVFNPLRFSRENSEKIHPYAFIPFSAGLRNCIGQHFAIIECKVAVALTLLRFKLAPDHSRPPQPVRQVVLKSKNGIHVFAKKVC

SEQ ID NO: 6415 - protein, 186 aa, Artificial Sequence
  Synthetic polypeptide
QTHSQYHTEWAKLEAFPLKTGTRQGCPLSPPLFNIVLEVLARTIRQEKKRKCIQLGKDEVKLSLFAVDMILYLENTIISAQNFLKLISNFSKVSGYKINVQKSQAFLYTNNRQTERQIMNELPFTIATKRIKYLGIQLTRDVKDLFKENYKPLLNEIKEDTNKWKSIPCSWIGKINIVKMAILPKE

SEQ ID NO: 6416 - protein, 44 aa, Artificial Sequence
  Synthetic polypeptide
QCKGSLSGEQHSHRHPAAGRAGGGPHTRRAGHTQPCPPEPSALS

SEQ ID NO: 6417 - protein, 191 aa, Artificial Sequence
  Synthetic polypeptide
SAKGHFLGNNTVIDILRQAGLEVDHTPAGQAIHSPAPQSPAPSPEGTSTSPAPVTPAAAVPEAPSVTPTAPPEDEDPALSPHLLLPDSLSQLEEFGRQRKWHKRQSTHQRPRQFNDLWVRIEDSTTASPPPLPLQPTHSSGTAKPPFQLSDQLQQQDPPGPASSSAPTLGLLPAIATTIAVCFLLHSLGPS

SEQ ID NO: 6418 - protein, 53 aa, Artificial Sequence
  Synthetic polypeptide
VQRVTFWGTTQSSTSCGRQGWRWTTHPPGRPYTALPPRAQRPLLRGPRRARPQ

SEQ ID NO: 6419 - protein, 27 aa, Artificial Sequence
  Synthetic polypeptide
EDTFQAWPKCLIHPSPALSPLARCCLP

SEQ ID NO: 6420 - protein, 80 aa, Artificial Sequence
  Synthetic polypeptide
SIPLQLCHLWQGAVCPEPNPAAAGECAGREPAGLLHHGGPHQALQLRRPQRSHLQPRHIPAAQLYQHHPPATRAGDGPGD

SEQ ID NO: 6421 - protein, 319 aa, Artificial Sequence
  Synthetic polypeptide
LGGYIPGLAQMPDPSLSSFVTFGKVLFALNQTLLQQESVRAGSLQASYTTEDLIKHYNCGDLSAVIFNHDTSQLPNFINTTLPPHEQVTAQEIDSYFRQELIYKRNERMGKRVMALLRENEDKICFFAFGAGHFLGNNTVIDILRQAGLEVDHTPAGQAIHSPAPQSPAPSPEGTSTSPAPVTPAAAVPEAPSVTPTAPPEDEDPALSPHLLLPDSLSQLEEFGRQRKWHKRQSTHQRPRQFNDLWVRIEDSTTASPPPLPLQPTHSSGTAKPPFQLSDQLQQQDPPGPASSSAPTLGLLPAIATTIAVCFLLHSLGPS

SEQ ID NO: 6422 - protein, 29 aa, Artificial Sequence
  Synthetic polypeptide
EVPFALSHESETSPAMWNCYQDTPWERLR

SEQ ID NO: 6423 - protein, 29 aa, Artificial Sequence
  Synthetic polypeptide
EVPFALSHESETSPAMWNCYQDTPWERLR

SEQ ID NO: 6424 - protein, 29 aa, Artificial Sequence
  Synthetic polypeptide
EVPFALSHESETSPAMWNCYQDTPWERLR

SEQ ID NO: 6425 - protein, 29 aa, Artificial Sequence
  Synthetic polypeptide
EVPFALSHESETSPAMWNCYQDTPWERLR

SEQ ID NO: 6426 - protein, 224 aa, Artificial Sequence
  Synthetic polypeptide
GVYQGFLLLLLPHSLLLPPCKKCLLPSAMKVKPLQPCGTVIRTPHGRDFDDSLEKCEEYLSPRSCSKPRHSARTLLVHSAPSTMPKHSPSPVLNRASLRERFHSDWCSPSNCDEIHDRVKNVLKSHQAHQRHLYDERDLEKDDELELKRSLLCRDSAYDSDPEYSSCQQPRGTFHLDDGEYWSNRAASYKGKSHRPIFENSMDKMYRNLYKKACSSASHTQESF

SEQ ID NO: 6427 - protein, 224 aa, Artificial Sequence; identical to SEQ ID NO: 6426
  Synthetic polypeptide

SEQ ID NO: 6428 - protein, 21 aa, Artificial Sequence
  Synthetic polypeptide
NLSSHVELLSGHPMGETSMTL

SEQ ID NO: 6429 - protein, 21 aa, Artificial Sequence
  Synthetic polypeptide
NLSSHVELLSGHPMGETSMTL

SEQ ID NO: 6430 - protein, 21 aa, Artificial Sequence
  Synthetic polypeptide
NLSSHVELLSGHPMGETSMTL

SEQ ID NO: 6431 - protein, 21 aa, Artificial Sequence
  Synthetic polypeptide
NLSSHVELLSGHPMGETSMTL

SEQ ID NO: 6432 - protein, 208 aa, Artificial Sequence
  Synthetic polypeptide
GVYQGFLLLLLPHSLLLPPCKKCLLPSAMKVKPLQPCGTVIRTPHGRDFDDSLEKCEEYLSPRSCSKPRHSARTLLVHSAPSTMPKHSPSPVLNRASLRERFHSDWCSPSNCDEIHDRDERDLEKDDELELKRSLLCRDSAYDSDPEYSSCQQPRGTFHLDDGEYWSNRAASYKGKSHRPIFENSMDKMYRNLYKKACSSASHTQESF

SEQ ID NO: 6433 - protein, 144 aa, Artificial Sequence
  Synthetic polypeptide
GVYQGFLLLLLPHSLLLPPCKKCLLPSAMKVKPLQPCGTVIRTPHGRDFDDSLEKCEEYLSPRSCSKPRHSARTLLVHSAPSTMPKHSPSPVLNRASLRERFHSDWCSPSNCDEIHDRDERDLEKDDELELKRSLLCRDSAYDS

SEQ ID NO: 6434 - protein, 54 aa, Artificial Sequence
  Synthetic polypeptide
TAVFREQALFPVTLGNLQILFRMPGTQVPLPTFHLCCFAWLTAAYHPDLLRVFV

SEQ ID NO: 6435 - protein, 61 aa, Artificial Sequence
  Synthetic polypeptide
LLLTTQICLECLYDRIAQETVDETEIAQRLSKVNKYICEKIMDINKSCKNEERREAKYNLQ

SEQ ID NO: 6436 - protein, 30 aa, Artificial Sequence
  Synthetic polypeptide
FLHFHLRGSFSTLLTSVKPRVSIEMGWPLW

SEQ ID NO: 6437 - protein, 30 aa, Artificial Sequence; identical to SEQ ID NO: 6436
  Synthetic polypeptide

SEQ ID NO: 6438 - protein, 30 aa, Artificial Sequence; identical to SEQ ID NO: 6436
  Synthetic polypeptide

SEQ ID NO: 6439 - protein, 421 aa, Artificial Sequence
  Synthetic polypeptide
RRRWVISAFPSERVIFNIVNFSKTKSLYRDGMAPMVKSTSRPKWQRLPPKNVYYYRCPDHRKNYVMSFAFCFDREEDIYQFAYCYPYTYTRFQHYLDSLQKRNMDYFFREQLGQSVQQRKLDLLTITSPDNLREGAEQKVVFITGRVHPGETPSSFVCQGIIDFLVSQHPIACVLREYLVFKIAPMLNPDGVYLGNYRCSLMGFDLNRHWLDPSPWVHPTLHGVKQLIVQMYNDPKTSLEFYIDIHAHSTMMNGFMYGNIFEDEERFQRQAIFPKLLCQNAEDFSYSSTSFNRDAVKAGTGRRFLGGLLDHTSYCYTLEVSFYSYIISGTTAAVPYTEEAYMKLGRNVARTFLDYYRLNPVVEKVAIPMPRLRNKEIEVQRRKEKSPPYKHPLLRGPASNYPNSKGDKKSSVNHKDPSTPF

SEQ ID NO: 6440 - protein, 238 aa, Artificial Sequence
  Synthetic polypeptide
RRRWVISAFPSERVIFNIVNFSKTKSLYRDGMAPMVKSTSRPKWQRLPPKNVYYYRCPDHRKNYVMSFAFCFDREEDIYQFAYCYPYTYTRFQHYLDSLQKRNMDYFFREQLGQSVQQRKLDLLTITSPDNLREGAEQKVVFITGRVHPGETPSSFVCQGIIDFLVSQHPIACVLREYLVFKIAPMLNPDGVYLGNYRCSLMGFDLNRHWLDPSPWVHPTLHGVKQLIVQMYNDPVSN

SEQ ID NO: 6441 - protein, 135 aa, Artificial Sequence
  Synthetic polypeptide
RRRWVISAFPSERVIFNIVNFSKTKSLYRDGMAPMVKSTSRPKWQRLPPKNVYYYRCPDHRKNYVMSFAFCFDREEDIYQFAYCYPYTYTRFQHYLDSLQKRNMDYFFREQLGQSVQQRKLDLLTITSPAGRWSW

SEQ ID NO: 6442 - protein, 170 aa, Artificial Sequence
  Synthetic polypeptide
KEAQHYYSPGDCKSKPHEDEREARENVKREQDEAYRLSLEADRAKREAHEREMAEQFRLEQIRKEQEEEREAIRLSLEQALPPEPKEENAEPVSKLRIRTPSGEFLERRFLASNKLQIVFDFVASKGFPWDEYKLLSTFPRRDVTQLDPNKSLLEVKLFPQETLFLEAKE

SEQ ID NO: 6443 - protein, 170 aa, Artificial Sequence; identical to SEQ ID NO: 6442
  Synthetic polypeptide

SEQ ID NO: 6444 - protein, 170 aa, Artificial Sequence; identical to SEQ ID NO: 6442
  Synthetic polypeptide

SEQ ID NO: 6445 - protein, 75 aa, Artificial Sequence
  Synthetic polypeptide
SNNKGLVSGIYKELLQLNNKKTNYPSNNWQRVRKDISPRTIYKWPIAHEKKLNIITHQVTANQSRMRMNVKPEKM

SEQ ID NO: 6446 - protein, 75 aa, Artificial Sequence; identical to SEQ ID NO: 6445
  Synthetic polypeptide

SEQ ID NO: 6447 - protein, 75 aa, Artificial Sequence; identical to SEQ ID NO: 6445
  Synthetic polypeptide

SEQ ID NO: 6448 - protein, 75 aa, Artificial Sequence; identical to SEQ ID NO: 6445
  Synthetic polypeptide

SEQ ID NO: 6449 - protein, 178 aa, Artificial Sequence
  Synthetic polypeptide
KEAQHYYSPGDCKSKPHEDEREARENVKREQDEAYRLSLEADRAKREAHEREMAEQFRLEQIRKEQEEEREAIRLSLEQALPPEPKEENAEPVSKLRIRTPSGEFLERRFLASNKLQIVFDFVASKGFPWDEYKLLSTFPRRDIPGLSRMGKHACSRSLYIHFMFFILILKTWIISCF

SEQ ID NO: 6450 - protein, 1045 aa, Artificial Sequence
  Synthetic polypeptide
SQPLRRLRYIKLQNGLQALLISDLSNMEGKTGNTTDDEEEEEVEEEEEDDDEDSGAEIEDDDEEGFDDEDEFDDEHDDDLDTEDNELEELEERAEARKKTTEKQSAAALCVGVGSFADPDDLPGLAHFLEHMVFMGSLKYPDENGFDAFLKKHGGSDNASTDCERTVFQFDVQRKYFKEALDRWAQFFIHPLMIRDAIDREVEAVDSEYQLARPSDANRKEMLFGSLARPGHPMGKFFWGNAETLKHEPRKNNIDTHARLREFWMRYYSSHYMTLVVQSKETLDTLEKWVTEIFSQIPNNGLPRPNFGHLTDPFDTPAFNKLYRVVPIRKIHALTITWALPPQQQHYRVKPLHYISWLVGHEGKGSILSFLRKKCWALALFGGNGETGFEQNSTYSVFSISITLTDEGYEHFYEVAYTVFQYLKMLQKLGPEKRIFEEIRKIEDNEFHYQEQTDPVEYVENMCENMQLYPLQDILTGDQLLFEYKPEVIGEALNQLVPQKANLVLLSGANEGKCDLKEKWFGTQYSIEDIENSWAELWNSNFELNPDLHLPAENKYIATDFTLKAFDCPETEYPVKIVNTPQGCLWYKKDNKFKIPKAYIRFHLISPLIQKSAANVVLFDIFVNILTHNLAEPAYEADVAQLEYKLVAGEHGLIIRVKGFNHKLPLLFQLIIDYLAEFNSTPAVFTMITEQLKKTYFNILIKPETLAKDVRLLILEYARWSMIDKYQALMDGLSLESLLSFVKEFKSQLFVEGLVQGNVTSTESMDFLKYVVDKLNFKPLEQEMPVQFQVVELPSGHHLCKVKALNKGDANSEVTVYYQSGTRSLREYTLMELLVMHMEEPCFDFLRTKQTLGYHVYPTCRNTSGILGFSVTVGTQATKYNSEVVDKKIEEFLSSFEEKIENLTEEAFNTQVTALIKLKECEDTHLGEEVDRNWNEVVTQQYLFDRLAHEIEALKSFSKSDLVNWFKAHRGPGSKMLSVHVVGYGKYELEEDGTPSSEDSNSSCEVMQLTYLPTSPLLADCIIPITDIRAFTTTLNLLPYHKIVK

SEQ ID NO: 6451 - protein, 30 aa, Artificial Sequence
  Synthetic polypeptide
WHMPVIPATQEAEIHQITEWLAGTSDFRPK

SEQ ID NO: 6452 - protein, 30 aa, Artificial Sequence; identical to SEQ ID NO: 6451
  Synthetic polypeptide

SEQ ID NO: 6453 - protein, 1113 aa, Artificial Sequence
  Synthetic polypeptide
SQPLRRLRYIKLQNGLQALLISDLSNMEGKTGNTTDDEEEEEVEEEEEDDDEDSGAEIEDDDEEGFDDEDEFDDEHDDDLDTEDNELEELEERAEARKKTTEKQQLQSLFLLWSKLTDRLWFKSTYSKMSSTLLVETRNLYGVVGAESRSAPVQHLAGWQAEEQQGETDTVLSAAALCVGVGSFADPDDLPGLAHFLEHMVFMGSLKYPDENGFDAFLKKHGGSDNASTDCERTVFQFDVQRKYFKEALDRWAQFFIHPLMIRDAIDREVEAVDSEYQLARPSDANRKEMLFGSLARPGHPMGKFFWGNAETLKHEPRKNNIDTHARLREFWMRYYSSHYMTLVVQSKETLDTLEKWVTEIFSQIPNNGLPRPNFGHLTDPFDTPAFNKLYRVVPIRKIHALTITWALPPQQQHYRVKPLHYISWLVGHEGKGSILSFLRKKCWALALFGGNGETGFEQNSTYSVFSISITLTDEGYEHFYEVAYTVFQYLKMLQKLGPEKRIFEEIRKIEDNEFHYQEQTDPVEYVENMCENMQLYPLQDILTGDQLLFEYKPEVIGEALNQLVPQKANLVLLSGANEGKCDLKEKWFGTQYSIEDIENSWAELWNSNFELNPDLHLPAENKYIATDFTLKAFDCPETEYPVKIVNTPQGCLWYKKDNKFKIPKAYIRFHLISPLIQKSAANVVLFDIFVNILTHNLAEPAYEADVAQLEYKLVAGEHGLIIRVKGFNHKLPLLFQLIIDYLAEFNSTPAVFTMITEQLKKTYFNILIKPETLAKDVRLLILEYARWSMIDKYQALMDGLSLESLLSFVKEFKSQLFVEGLVQGNVTSTESMDFLKYVVDKLNFKPLEQEMPVQFQVVELPSGHHLCKVKALNKGDANSEVTVYYQSGTRSLREYTLMELLVMHMEEPCFDFLRTKQTLGYHVYPTCRNTSGILGFSVTVGTQATKYNSEVVDKKIEEFLSSFEEKIENLTEEAFNTQVTALIKLKECEDTHLGEEVDRNWNEVVTQQYLFDRLAHEIEALKSFSKSDLVNWFKAHRGPGSKMLSVHVVGYGKYELEEDGTPSSEDSNSSCEVMQLTYLPTSPLLADCIIPITDIRAFTTTLNLLPYHKIVK

SEQ ID NO: 6454 - protein, 32 aa, Artificial Sequence
  Synthetic polypeptide
ALQQINQTQRGGRGNPNLKADTSNYRMACRHF

SEQ ID NO: 6455 - protein, 32 aa, Artificial Sequence; identical to SEQ ID NO: 6454
  Synthetic polypeptide

SEQ ID NO: 6456 - protein, 19 aa, Artificial Sequence
  Synthetic polypeptide
KPIHQITEWLAGTSDFRPK

SEQ ID NO: 6457 - protein, 19 aa, Artificial Sequence
  Synthetic polypeptide
KPIHQITEWLAGTSDFRPK

SEQ ID NO: 6458 - protein, 1052 aa, Artificial Sequence
  Synthetic polypeptide
SNPKRRSWEPQLESRYIKLQNGLQALLISDLSNMEGKTGNTTDDEEEEEVEEEEEDDDEDSGAEIEDDDEEGFDDEDEFDDEHDDDLDTEDNELEELEERAEARKKTTEKQSAAALCVGVGSFADPDDLPGLAHFLEHMVFMGSLKYPDENGFDAFLKKHGGSDNASTDCERTVFQFDVQRKYFKEALDRWAQFFIHPLMIRDAIDREVEAVDSEYQLARPSDANRKEMLFGSLARPGHPMGKFFWGNAETLKHEPRKNNIDTHARLREFWMRYYSSHYMTLVVQSKETLDTLEKWVTEIFSQIPNNGLPRPNFGHLTDPFDTPAFNKLYRVVPIRKIHALTITWALPPQQQHYRVKPLHYISWLVGHEGKGSILSFLRKKCWALALFGGNGETGFEQNSTYSVFSISITLTDEGYEHFYEVAYTVFQYLKMLQKLGPEKRIFEEIRKIEDNEFHYQEQTDPVEYVENMCENMQLYPLQDILTGDQLLFEYKPEVIGEALNQLVPQKANLVLLSGANEGKCDLKEKWFGTQYSIEDIENSWAELWNSNFELNPDLHLPAENKYIATDFTLKAFDCPETEYPVKIVNTPQGCLWYKKDNKFKIPKAYIRFHLISPLIQKSAANVVLFDIFVNILTHNLAEPAYEADVAQLEYKLVAGEHGLIIRVKGFNHKLPLLFQLIIDYLAEFNSTPAVFTMITEQLKKTYFNILIKPETLAKDVRLLILEYARWSMIDKYQALMDGLSLESLLSFVKEFKSQLFVEGLVQGNVTSTESMDFLKYVVDKLNFKPLEQEMPVQFQVVELPSGHHLCKVKALNKGDANSEVTVYYQSGTRSLREYTLMELLVMHMEEPCFDFLRTKQTLGYHVYPTCRNTSGILGFSVTVGTQATKYNSEVVDKKIEEFLSSFEEKIENLTEEAFNTQVTALIKLKECEDTHLGEEVDRNWNEVVTQQYLFDRLAHEIEALKSFSKSDLVNWFKAHRGPGSKMLSVHVVGYGKYELEEDGTPSSEDSNSSCEVMQLTYLPTSPLLADCIIPITDIRAFTTTLNLLPYHKIVK

SEQ ID NO: 6459 - protein, 1120 aa, Artificial Sequence
  Synthetic polypeptide
SNPKRRSWEPQLESRYIKLQNGLQALLISDLSNMEGKTGNTTDDEEEEEVEEEEEDDDEDSGAEIEDDDEEGFDDEDEFDDEHDDDLDTEDNELEELEERAEARKKTTEKQQLQSLFLLWSKLTDRLWFKSTYSKMSSTLLVETRNLYGVVGAESRSAPVQHLAGWQAEEQQGETDTVLSAAALCVGVGSFADPDDLPGLAHFLEHMVFMGSLKYPDENGFDAFLKKHGGSDNASTDCERTVFQFDVQRKYFKEALDRWAQFFIHPLMIRDAIDREVEAVDSEYQLARPSDANRKEMLFGSLARPGHPMGKFFWGNAETLKHEPRKNNIDTHARLREFWMRYYSSHYMTLVVQSKETLDTLEKWVTEIFSQIPNNGLPRPNFGHLTDPFDTPAFNKLYRVVPIRKIHALTITWALPPQQQHYRVKPLHYISWLVGHEGKGSILSFLRKKCWALALFGGNGETGFEQNSTYSVFSISITLTDEGYEHFYEVAYTVFQYLKMLQKLGPEKRIFEEIRKIEDNEFHYQEQTDPVEYVENMCENMQLYPLQDILTGDQLLFEYKPEVIGEALNQLVPQKANLVLLSGANEGKCDLKEKWFGTQYSIEDIENSWAELWNSNFELNPDLHLPAENKYIATDFTLKAFDCPETEYPVKIVNTPQGCLWYKKDNKFKIPKAYIRFHLISPLIQKSAANVVLFDIFVNILTHNLAEPAYEADVAQLEYKLVAGEHGLIIRVKGFNHKLPLLFQLIIDYLAEFNSTPAVFTMITEQLKKTYFNILIKPETLAKDVRLLILEYARWSMIDKYQALMDGLSLESLLSFVKEFKSQLFVEGLVQGNVTSTESMDFLKYVVDKLNFKPLEQEMPVQFQVVELPSGHHLCKVKALNKGDANSEVTVYYQSGTRSLREYTLMELLVMHMEEPCFDFLRTKQTLGYHVYPTCRNTSGILGFSVTVGTQATKYNSEVVDKKIEEFLSSFEEKIENLTEEAFNTQVTALIKLKECEDTHLGEEVDRNWNEVVTQQYLFDRLAHEIEALKSFSKSDLVNWFKAHRGPGSKMLSVHVVGYGKYELEEDGTPSSEDSNSSCEVMQLTYLPTSPLLADCIIPITDIRAFTTTLNLLPYHKIVK

SEQ ID NO: 6460 - protein, 18 aa, Artificial Sequence
  Synthetic polypeptide
EERSLNDTSNYRMACRHF

SEQ ID NO: 6461 - protein, 18 aa, Artificial Sequence
  Synthetic polypeptide
EERSLNDTSNYRMACRHF

SEQ ID NO: 6462 - protein, 18 aa, Artificial Sequence
  Synthetic polypeptide
MIHQITEWLAGTSDFRPK

SEQ ID NO: 6463 - protein, 18 aa, Artificial Sequence
  Synthetic polypeptide
MIHQITEWLAGTSDFRPK

SEQ ID NO: 6464 - protein, 140 aa, Artificial Sequence
  Synthetic polypeptide
ELLKERVDGLPWLMVYSLLISGLPLMVIIHKSWCGACKALKPKFAESTEISELSHNFVMVNLEDEEEPKDEDFSPDGGYIPRILFLDPSGKVHPEIINENGNPSYKYFYVSAEQVVQGMKEAQERLTGDAFRKKHLEDEL

SEQ ID NO: 6465 - protein, 11 aa, Artificial Sequence
  Synthetic polypeptide
WYIPCSSVDCP

SEQ ID NO: 6466 - protein, 29 aa, Artificial Sequence
  Synthetic polypeptide
AVKREGRWAALVDGIFLAHQWTAPDGDYS

SEQ ID NO: 6467 - protein, 55 aa, Artificial Sequence
  Synthetic polypeptide
GRTQWLTPVIPALQEAEAGGSQGVPGGECGQRVRLHRPALPSPAAAAARPGPPPL

SEQ ID NO: 6468 - protein, 154 aa, Artificial Sequence
  Synthetic polypeptide
SQHFRRLRRVDHKVSLVVNVASECGFTDQHYRALQQLQRDLGPHHFNVLAFPCNQFGQQEPDSNKEIESFARRTYSVSFPMFSKIAVTGTGAHPAFKYLAQTSGKEPTWNFWKYLVAPDGKVVGAWDPTVSVEEVRPQITALVRKLILLKREDL

SEQ ID NO: 6469 - protein, 10 aa, Artificial Sequence
  Synthetic polypeptide
GGWITRCPWW

SEQ ID NO: 6470 - protein, 137 aa, Artificial Sequence
  Synthetic polypeptide
SQHFGRLSIGALIGLSVAAVVLLAFIVTACVLCYLFISSKPHTKLDLGLSLQTAGPEEVSPDCQGVNTGMAAEVPKVSPLQQSYSCLNPQLESNEGQAVNSKRLLHHCFMATVTTSDIPGSPEEASVPNPDLCGPVP

SEQ ID NO: 6471 - protein, 47 aa, Artificial Sequence
  Synthetic polypeptide
GHGWLMLVIPTFWEVEHWRSHRPVRSSSGSSRLHCYRLCALLPVHQL

SEQ ID NO: 6472 - protein, 40 aa, Artificial Sequence
  Synthetic polypeptide
VRLAVNSPPVEPPEQHSRSQRALFQAGDRRCAEAYQQFTL

SEQ ID NO: 6473 - protein, 40 aa, Artificial Sequence; identical to SEQ ID NO: 6472
  Synthetic polypeptide

SEQ ID NO: 6474 - protein, 184 aa, Artificial Sequence
  Synthetic polypeptide
ILPRWSLQNNIAEVRELSSKLVTEDVLKHINSLLCSREMEVSYFAAGIIAHLTSDRQLWISRDFQRRTLLQDLHATIQNWPSSSCKMTALVTYRSFKTFFPLLGNFSQPEVQLWALWAMYHVCSKNPSKYCKMLVEEEGLQLLCDIQEHSEATPKAQQIAASILDDFRMHFMNYQRPTLCQMPF

SEQ ID NO: 6475 - protein, 184 aa, Artificial Sequence; identical to SEQ ID NO: 6474
  Synthetic polypeptide

SEQ ID NO: 6476 - protein, 42 aa, Artificial Sequence
  Synthetic polypeptide
EPNVASSKKLNHSVLQPPEMNSASSLSEVGSKFSPGGASRTT

SEQ ID NO: 6477 - protein, 42 aa, Artificial Sequence; identical to SEQ ID NO: 6476
  Synthetic polypeptide

SEQ ID NO: 6478 - protein, 4 aa, Artificial Sequence
  Synthetic polypeptide
LQTC

SEQ ID NO: 6479 - protein, 4 aa, Artificial Sequence
  Synthetic polypeptide
LQTC

SEQ ID NO: 6480 - protein, 4 aa, Artificial Sequence
  Synthetic polypeptide
LQTC

SEQ ID NO: 6481 - protein, 76 aa, Artificial Sequence
  Synthetic polypeptide
ETHGTDSSCTLKQSCPVDCRPVSFIRLRIFTARRSTEICTDLLIGDSMGKKHHVGRTAWVFALVVVCILGPLLCSS

SEQ ID NO: 6482 - protein, 76 aa, Artificial Sequence; identical to SEQ ID NO: 6481
  Synthetic polypeptide

SEQ ID NO: 6483 - protein, 76 aa, Artificial Sequence; identical to SEQ ID NO: 6481
  Synthetic polypeptide

SEQ ID NO: 6484 - protein, 379 aa, Artificial Sequence
  Synthetic polypeptide
SRAAQLTADLLALYVYEYLLHVGAQKSAQTFLSEIRWEKNITLGEPPGFLHSWWCVFWDLYCAAPERRDTCEHSSEAKAFHDYSAAAAPSPVLGNIPPNDGMPGGPIPPGFFQGPPGSQPSPHAQPPPHNPSSMMGPHSQPFMSPRYAGGPRPPIRMGNQPPGGVPGTQPLLPNSMDPTRQQGHPNMGGSMQRMNPPRGMGPMGPGPQNYGSGMRPPPNSLGPAMPGINMGPGAGRPWPNPNSANSIPYSSSSPGTYVGPPGGGGPPGTPIMPSPADSTNSSDNIYTMINPVPPGGSRSNFPMGPGSDGPMGGMGGMEPHHMNGSLGSGDIDGLPKNSPNNISGISNPPGTPRDDGELGGNFLHSFQNDNYSPSMTMSV

SEQ ID NO: 6485 - protein, 352 aa, Artificial Sequence
  Synthetic polypeptide
SRAAQLTADLLALYVYEYLLHVGAQKSAQTFLSEIRWEKNITLGEPPGFLHSWWCVFWDLYCAAPERRDTCEHSSEAKAFHDYSAAAAPSPVLGNIPPNDGMPGGPIPPGFFQPFMSPRYAGGPRPPIRMGNQPPGGVPGTQPLLPNSMDPTRQQGHPNMGGSMQRMNPPRGMGPMGPGPQNYGSGMRPPPNSLGPAMPGINMGPGAGRPWPNPNSANSIPYSSSSPGTYVGPPGGGGPPGTPIMPSPADSTNSSDNIYTMINPVPPGGSRSNFPMGPGSDGPMGGMGGMEPHHMNGSLGSGDIDGLPKNSPNNISGISNPPGTPRDDGELGGNFLHSFQNDNYSPSMTMSV

SEQ ID NO: 6486 - protein, 359 aa, Artificial Sequence
  Synthetic polypeptide
SRAAQLTADLLALYVYEYLLHVGAQKSAQTFLSEIRWEKNITLGEPPGFLHSWWCVFWDLYCAAPERRDTCEHSSEAKAFHDYSAAAAPSPVLGNIPPNDGMPGGPIPPGFFQGPPGSQPSPHAQPPPHNPSSMMGPHSQPPGGVPGTQPLLPNSMDPTRQQGHPNMGGSMQRMNPPRGMGPMGPGPQNYGSGMRPPPNSLGPAMPGINMGPGAGRPWPNPNSANSIPYSSSSPGTYVGPPGGGGPPGTPIMPSPADSTNSSDNIYTMINPVPPGGSRSNFPMGPGSDGPMGGMGGMEPHHMNGSLGSGDIDGLPKNSPNNISGISNPPGTPRDDGELGGNFLHSFQNDNYSPSMTMSV

SEQ ID NO: 6487 - protein, 48 aa, Artificial Sequence
  Synthetic polypeptide
MPSVLGIPSKWCGNGRSRVARPSCARGALAGSLSHYVSGSTRRHTKTS

SEQ ID NO: 6488 - protein, 48 aa, Artificial Sequence; identical to SEQ ID NO: 6487
  Synthetic polypeptide

SEQ ID NO: 6489 - protein, 27 aa, Artificial Sequence
  Synthetic polypeptide
ELHKTVCSRCLVCWEYPVNGAGMEGAG

SEQ ID NO: 6490 - protein, 27 aa, Artificial Sequence
  Synthetic polypeptide
ELHKTVCSRCLVCWEYPVNGAGMEGAG

SEQ ID NO: 6491 - protein, 440 aa, Artificial Sequence
  Synthetic polypeptide
MVREWKEQGSKTFMCTGRPGWLTVSLRVGKYKKTHKNIMINLMDILEVDTKKQIVRVEPLVTMGQVTALLTSIGWTLPVLPELDDLTVGGLIMGTGIESSSHKYGLFQHICTAYELVLADGSFVRCTPSENSDLFYAVPWSCGTLGFLVAAEIRIIPAKKYVKLRFEPVRGLEAICAKFTHESQRQENHFVEGLLYSLDEAVIMTGVMTDEAEPSKLNSIGNYYKPWFFKHVENYLKTNREGLEYIPLRHYYHRHTRSIFWELQDIIPFGNNPIFRYLFGWMVPPKISLLKLTQGETLRKLYEQHHVVQDMLVPMKCLQQALHTFQNDIHVYPIWLCPFILPSQPGLVHPKGNEAELYIDIGAYGEPRVKHFEARSCMRQLEKFVRSVHGFQMLYADCYMNREEFWEMFDGSLYHKLREKLGCQDAFPEVYDKICKAARH

SEQ ID NO: 6492 - protein, 440 aa, Artificial Sequence; identical to SEQ ID NO: 6491
  Synthetic polypeptide

SEQ ID NO: 6493 - protein, 46 aa, Artificial Sequence
  Synthetic polypeptide
ASGNSHSGGCGNGRSRVARPSCARGALAGSLSHYVSGSTRRHTKTS

SEQ ID NO: 6494 - protein, 46 aa, Artificial Sequence; identical to SEQ ID NO: 6493
  Synthetic polypeptide

SEQ ID NO: 6495 - protein, 32 aa, Artificial Sequence
  Synthetic polypeptide
RCPIALQAPSTITDAELRVTLTVEGAGMEGAG

SEQ ID NO: 6496 - protein, 32 aa, Artificial Sequence; identical to SEQ ID NO: 6495
  Synthetic polypeptide

SEQ ID NO: 6497 - protein, 444 aa, Artificial Sequence
  Synthetic polypeptide
LSQWRVREWKEQGSKTFMCTGRPGWLTVSLRVGKYKKTHKNIMINLMDILEVDTKKQIVRVEPLVTMGQVTALLTSIGWTLPVLPELDDLTVGGLIMGTGIESSSHKYGLFQHICTAYELVLADGSFVRCTPSENSDLFYAVPWSCGTLGFLVAAEIRIIPAKKYVKLRFEPVRGLEAICAKFTHESQRQENHFVEGLLYSLDEAVIMTGVMTDEAEPSKLNSIGNYYKPWFFKHVENYLKTNREGLEYIPLRHYYHRHTRSIFWELQDIIPFGNNPIFRYLFGWMVPPKISLLKLTQGETLRKLYEQHHVVQDMLVPMKCLQQALHTFQNDIHVYPIWLCPFILPSQPGLVHPKGNEAELYIDIGAYGEPRVKHFEARSCMRQLEKFVRSVHGFQMLYADCYMNREEFWEMFDGSLYHKLREKLGCQDAFPEVYDKICKAARH

SEQ ID NO: 6498 - protein, 444 aa, Artificial Sequence; identical to SEQ ID NO: 6497
  Synthetic polypeptide

SEQ ID NO: 6499 - protein, 524 aa, Artificial Sequence
  Synthetic polypeptide
DLRWSGDGGSLVEVYLLDTSIQSDHREIEGRVMVTDFENVPEEDGTRFHRQASKCDSHGTHLAGVVSGRDAGVAKGASMRSLRVLNCQGKGTVSGTLIGLEFIRKSQLVQPVGPLVVLLPLAGGYSRVLNAACQRLARAGVVLVTAAGNFRDDACLYSPASAPEVITVGATNAQDQPVTLGTLGTNFGRCVDLFAPGEDIIGASSDCSTCFVSQSGTSQAAAHVAGIAAMMLSAEPELTLAELRQRLIHFSAKDVINEAWFPEDQRVLTPNLVAALPPSTHGAGWQLFCRTVWSAHSGPTRMATAVARCAPDEELLSCSSFSRSGKRRGERMEAQGGKLVCRAHNAFGGEGVYAIARCCLLPQANCSVHTAPPAEASMGTRVHCHQQGHVLTGCSSHWEVEDLGTHKPPVLRPRGQPNQCVGHREASIHASCCHAPGLECKVKEHGIPAPQEQVTVACEEGWTLTGCSALPGTSHVLGAYAVDNTCVVRSRDVSTTGSTSEGAVTAVAICCRSRHLAQASQELQ

SEQ ID NO: 6500 - protein, 27 aa, Artificial Sequence
  Synthetic polypeptide
SLPLAWLRVSETCAGAETEAAWWRCIS

SEQ ID NO: 6501 - protein, 26 aa, Artificial Sequence
  Synthetic polypeptide
EFLRPALERRRRQPGGGVSPRHQHTE

SEQ ID NO: 6502 - protein, 60 aa, Artificial Sequence
  Synthetic polypeptide
WFYKRFSLSLGSHFSLWSAATIVRPPQPRETNLREICWDKAGHFFDLPDFLSWKATGVTA

SEQ ID NO: 6503 - protein, 9 aa, Artificial Sequence
  Synthetic polypeptide
GLPSHAKLT

SEQ ID NO: 6504 - protein, 9 aa, Artificial Sequence
  Synthetic polypeptide
GLPSHAKLT

SEQ ID NO: 6505 - protein, 9 aa, Artificial Sequence
  Synthetic polypeptide
GLPSHAKLT

SEQ ID NO: 6506 - protein, 9 aa, Artificial Sequence
  Synthetic polypeptide
GLPSHAKLT

SEQ ID NO: 6507 - protein, 9 aa, Artificial Sequence
  Synthetic polypeptide
GLPSHAKLT

SEQ ID NO: 6508 - protein, 451 aa, Artificial Sequence
  Synthetic polypeptide
WFYKRFSLSLGSHFSLWSAATIVRPPQPRETNLREICWDKAGHFFDLPDFLSWKATGVTARSLCSLVCKWTYSAEKGWDDSFWKMIGLEDFVADNYSKIGNQVLPPGASLGNGLTPEAARDLGLLPGIAVAASLIDAHAGGLGVIGADVRGHGLICEGQPVTSRLAVICGTSSCHMGISKDPIFVPGVWGPYFSAMVPGFWLNEGGQSVTGKLIDHMVQGHAAFPELQVKATARCQSIYAYLNSHLDLIKKAQPVGFLTVDLHVWPDFHGNRSPLADLTLKGMRTTGYLYIPALAALHSPSSLLSPQVTGLKLSQDLDDLAILYLATVQAIALGTRFIIEAMEAAGHSISTLFLCGGLSKNPLFVQMHADITGMPVVLSQEVESVLVGAAVLGACASGDFASVQEAMAKMSKVGKVVFPRLQDKKYYDKKYQVFLKLVEHQKEYLAIMNDD

SEQ ID NO: 6509 - protein, 427 aa, Artificial Sequence
  Synthetic polypeptide
WFYKRFSLSLGSHFSLWSAATIVRPPQPRETNLREICWDKAGHFFDLPDFLSWKATGVTARSLCSLVCKWTYSAEKGWDDSFWKMIGLEDFVADNYSKIGNQVLPPGASLGNGLTPEAARDLGLLPGIAVAASLIDAHAGGLGVIGADVRGHGLICEGQPVTSRLAVICGTSSCHMGISKDPIFVPGVWGPYFSAMVPGFWLNEGGQSVTGKLIDHMVQGHAAFPELQVKATARCQSIYAYLNSHLDLIKKAQPVGFLTVDLHVWPDFHGNRSPLADLTLKGMVTGLKLSQDLDDLAILYLATVQAIALGTRFIIEAMEAAGHSISTLFLCGGLSKNPLFVQMHADITGMPVVLSQEVESVLVGAAVLGACASGDFASVQEAMAKMSKVGKVVFPRLQDKKYYDKKYQVFLKLVEHQKEYLAIMNDD

SEQ ID NO: 6510 - protein, 427 aa, Artificial Sequence; identical to SEQ ID NO: 6509
  Synthetic polypeptide

SEQ ID NO: 6511 - protein, 383 aa, Artificial Sequence
  Synthetic polypeptide
WFYKRFSLSLGSHFSLWSAATIVRPPQPRETNLREICWDKAGHFFDLPDFLSWKATGVTARSLCSLVCKWTYSAEKGWDDSFWKMIGLEDFVADNYSKIGNQVLPPGASLGNGLTPEAARDLGLLPGIAVAASLIDAHAGGLGVIGADVRGHGLICEGQPVTSRLAVICGTSSCHMGISKDPIFVPGVWGPYFSAMVPGFWLNEGGQSVTGKLIDHMVQGHAAFPELQVKATARCQSIYAYLNSHLDLIKKAQPVGFLTVDLHVWPDFHGNRSPLADLTLKGMVTGLKLSQDLDDLAILYLATVQAIALGTRFIIEAMEAAGHSISTLFLCGGLSKNPLFVQMHADITGMPVVLSQEVESVLVGAAVLGACASGDFASVQWGK

SEQ ID NO: 6512 - protein, 39 aa, Artificial Sequence
  Synthetic polypeptide
VYQGFPLLLLPYSFLLPPCKKCLLLFAMIMRPPQPCGTE

SEQ ID NO: 6513 - protein, 39 aa, Artificial Sequence; identical to SEQ ID NO: 6512
  Synthetic polypeptide

SEQ ID NO: 6514 - protein, 39 aa, Artificial Sequence; identical to SEQ ID NO: 6512
  Synthetic polypeptide

SEQ ID NO: 6515 - protein, 39 aa, Artificial Sequence; identical to SEQ ID NO: 6512
  Synthetic polypeptide

SEQ ID NO: 6516 - protein, 21 aa, Artificial Sequence
  Synthetic polypeptide
DLPSHVELSDWGRCERARPHL

SEQ ID NO: 6517 - protein, 21 aa, Artificial Sequence
  Synthetic polypeptide
DLPSHVELSDWGRCERARPHL

SEQ ID NO: 6518 - protein, 21 aa, Artificial Sequence
  Synthetic polypeptide
DLPSHVELSDWGRCERARPHL

SEQ ID NO: 6519 - protein, 21 aa, Artificial Sequence
  Synthetic polypeptide
DLPSHVELSDWGRCERARPHL

SEQ ID NO: 6520 - protein, 44 aa, Artificial Sequence
  Synthetic polypeptide
EVPFALRHDYETSPAMWNYQQRPDFCTRRLGALFLSHGTWVLAE

SEQ ID NO: 6521 - protein, 44 aa, Artificial Sequence; identical to SEQ ID NO: 6520
  Synthetic polypeptide

SEQ ID NO: 6522 - protein, 44 aa, Artificial Sequence; identical to SEQ ID NO: 6520
  Synthetic polypeptide

SEQ ID NO: 6523 - protein, 44 aa, Artificial Sequence; identical to SEQ ID NO: 6520
  Synthetic polypeptide

SEQ ID NO: 6524 - protein, 44 aa, Artificial Sequence; identical to SEQ ID NO: 6520
  Synthetic polypeptide

SEQ ID NO: 6525 - protein, 312 aa, Artificial Sequence
  Synthetic polypeptide
VYQGFPLLLLPYSFLLPPCKKCLLLFAMIMRPPQPCGTISKDPIFVPGVWGPYFSAMVPGFWLNEGGQSVTGKLIDHMVQGHAAFPELQVKATARCQSIYAYLNSHLDLIKKAQPVGFLTVDLHVWPDFHGNRSPLADLTLKGMRTTGYLYIPALAALHSPSSLLSPQVTGLKLSQDLDDLAILYLATVQAIALGTRFIIEAMEAAGHSISTLFLCGGLSKNPLFVQMHADITGMPVVLSQEVESVLVGAAVLGACASGDFASVQEAMAKMSKVGKVVFPRLQDKKYYDKKYQVFLKLVEHQKEYLAIMNDD

SEQ ID NO: 6526 - protein, 32 aa, Artificial Sequence
  Synthetic polypeptide
DLPSHVELSAKTRFLYQASGGLISQPWYLGSG

SEQ ID NO: 6527 - protein, 32 aa, Artificial Sequence; identical to SEQ ID NO: 6526
  Synthetic polypeptide

SEQ ID NO: 6528 - protein, 32 aa, Artificial Sequence; identical to SEQ ID NO: 6526
  Synthetic polypeptide

SEQ ID NO: 6529 - protein, 32 aa, Artificial Sequence; identical to SEQ ID NO: 6526
  Synthetic polypeptide

SEQ ID NO: 6530 - protein, 32 aa, Artificial Sequence; identical to SEQ ID NO: 6526
  Synthetic polypeptide

SEQ ID NO: 6531 - protein, 288 aa, Artificial Sequence
  Synthetic polypeptide
VYQGFPLLLLPYSFLLPPCKKCLLLFAMIMRPPQPCGTISKDPIFVPGVWGPYFSAMVPGFWLNEGGQSVTGKLIDHMVQGHAAFPELQVKATARCQSIYAYLNSHLDLIKKAQPVGFLTVDLHVWPDFHGNRSPLADLTLKGMVTGLKLSQDLDDLAILYLATVQAIALGTRFIIEAMEAAGHSISTLFLCGGLSKNPLFVQMHADITGMPVVLSQEVESVLVGAAVLGACASGDFASVQEAMAKMSKVGKVVFPRLQDKKYYDKKYQVFLKLVEHQKEYLAIMNDD

SEQ ID NO: 6532 - protein, 288 aa, Artificial Sequence; identical to SEQ ID NO: 6531
  Synthetic polypeptide

SEQ ID NO: 6533 - protein, 288 aa, Artificial Sequence; identical to SEQ ID NO: 6531
  Synthetic polypeptide

SEQ ID NO: 6534 - protein, 244 aa, Artificial Sequence
  Synthetic polypeptide
VYQGFPLLLLPYSFLLPPCKKCLLLFAMIMRPPQPCGTISKDPIFVPGVWGPYFSAMVPGFWLNEGGQSVTGKLIDHMVQGHAAFPELQVKATARCQSIYAYLNSHLDLIKKAQPVGFLTVDLHVWPDFHGNRSPLADLTLKGMVTGLKLSQDLDDLAILYLATVQAIALGTRFIIEAMEAAGHSISTLFLCGGLSKNPLFVQMHADITGMPVVLSQEVESVLVGAAVLGACASGDFASVQWGK

SEQ ID NO: 6535 - protein, 73 aa, Artificial Sequence
  Synthetic polypeptide
KAAGREAVPCKATEAALPKTMGTHLLHQCDLDMRPGVKGGHFGALKFDCLAGFWTCLGPETPLFWPISPGMAE

SEQ ID NO: 6536 - protein, 73 aa, Artificial Sequence; identical to SEQ ID NO: 6535
  Synthetic polypeptide

SEQ ID NO: 6537 - protein, 73 aa, Artificial Sequence; identical to SEQ ID NO: 6535
  Synthetic polypeptide

SEQ ID NO: 6538 - protein, 73 aa, Artificial Sequence; identical to SEQ ID NO: 6535
  Synthetic polypeptide

SEQ ID NO: 6539 - protein, 40 aa, Artificial Sequence
  Synthetic polypeptide
NLIALLDFGLAWALKLLCFGQFLLEWLSDWGRCERARPHL

SEQ ID NO: 6540 - protein, 40 aa, Artificial Sequence; identical to SEQ ID NO: 6539
  Synthetic polypeptide

SEQ ID NO: 6541 - protein, 40 aa, Artificial Sequence; identical to SEQ ID NO: 6539
  Synthetic polypeptide

SEQ ID NO: 6542 - protein, 40 aa, Artificial Sequence; identical to SEQ ID NO: 6539
  Synthetic polypeptide

SEQ ID NO: 6543 - protein, 15 aa, Artificial Sequence
  Synthetic polypeptide
NESDWGRCERARPHL

SEQ ID NO: 6544 - protein, 15 aa, Artificial Sequence
  Synthetic polypeptide
NESDWGRCERARPHL

SEQ ID NO: 6545 - protein, 15 aa, Artificial Sequence
  Synthetic polypeptide
NESDWGRCERARPHL

SEQ ID NO: 6546 - protein, 15 aa, Artificial Sequence
  Synthetic polypeptide
NESDWGRCERARPHL

SEQ ID NO: 6547 - protein, 344 aa, Artificial Sequence
  Synthetic polypeptide
EVTDLFFILQAHGWKGLDLSQMRLWTVDFWINSEMRVIGADVRGHGLICEGQPVTSRLAVICGTSSCHMGISKDPIFVPGVWGPYFSAMVPGFWLNEGGQSVTGKLIDHMVQGHAAFPELQVKATARCQSIYAYLNSHLDLIKKAQPVGFLTVDLHVWPDFHGNRSPLADLTLKGMRTTGYLYIPALAALHSPSSLLSPQVTGLKLSQDLDDLAILYLATVQAIALGTRFIIEAMEAAGHSISTLFLCGGLSKNPLFVQMHADITGMPVVLSQEVESVLVGAAVLGACASGDFASVQEAMAKMSKVGKVVFPRLQDKKYYDKKYQVFLKLVEHQKEYLAIMNDD

SEQ ID NO: 6548 - protein, 320 aa, Artificial Sequence
  Synthetic polypeptide
EVTDLFFILQAHGWKGLDLSQMRLWTVDFWINSEMRVIGADVRGHGLICEGQPVTSRLAVICGTSSCHMGISKDPIFVPGVWGPYFSAMVPGFWLNEGGQSVTGKLIDHMVQGHAAFPELQVKATARCQSIYAYLNSHLDLIKKAQPVGFLTVDLHVWPDFHGNRSPLADLTLKGMVTGLKLSQDLDDLAILYLATVQAIALGTRFIIEAMEAAGHSISTLFLCGGLSKNPLFVQMHADITGMPVVLSQEVESVLVGAAVLGACASGDFASVQEAMAKMSKVGKVVFPRLQDKKYYDKKYQVFLKLVEHQKEYLAIMNDD

SEQ ID NO: 6549 - protein, 320 aa, Artificial Sequence; identical to SEQ ID NO: 6548
  Synthetic polypeptide

SEQ ID NO: 6550 - protein, 276 aa, Artificial Sequence
  Synthetic polypeptide
EVTDLFFILQAHGWKGLDLSQMRLWTVDFWINSEMRVIGADVRGHGLICEGQPVTSRLAVICGTSSCHMGISKDPIFVPGVWGPYFSAMVPGFWLNEGGQSVTGKLIDHMVQGHAAFPELQVKATARCQSIYAYLNSHLDLIKKAQPVGFLTVDLHVWPDFHGNRSPLADLTLKGMVTGLKLSQDLDDLAILYLATVQAIALGTRFIIEAMEAAGHSISTLFLCGGLSKNPLFVQMHADITGMPVVLSQEVESVLVGAAVLGACASGDFASVQWGK

SEQ ID NO: 6551 - protein, 31 aa, Artificial Sequence
  Synthetic polypeptide
NYGARKKKVTQQGIVKMPEYICIFEQSPGSD

SEQ ID NO: 6552 - protein, 31 aa, Artificial Sequence; identical to SEQ ID NO: 6551
  Synthetic polypeptide

SEQ ID NO: 6553 - protein, 31 aa, Artificial Sequence; identical to SEQ ID NO: 6551
  Synthetic polypeptide

SEQ ID NO: 6554 - protein, 31 aa, Artificial Sequence; identical to SEQ ID NO: 6551
  Synthetic polypeptide

SEQ ID NO: 6555 - protein, 31 aa, Artificial Sequence; identical to SEQ ID NO: 6551
  Synthetic polypeptide

SEQ ID NO: 6556 - protein, 259 aa, Artificial Sequence
  Synthetic polypeptide
VPFSHFSNKSNQDFLERWLSLRCGSKIMVPERKKLLNKELSRCQSIYAYLNSHLDLIKKAQPVGFLTVDLHVWPDFHGNRSPLADLTLKGMRTTGYLYIPALAALHSPSSLLSPQVTGLKLSQDLDDLAILYLATVQAIALGTRFIIEAMEAAGHSISTLFLCGGLSKNPLFVQMHADITGMPVVLSQEVESVLVGAAVLGACASGDFASVQEAMAKMSKVGKVVFPRLQDKKYYDKKYQVFLKLVEHQKEYLAIMNDD

SEQ ID NO: 6557 - protein, 30 aa, Artificial Sequence
  Synthetic polypeptide
VYAAAVKLWCQKEKSYSTRNCQDARVYMHI

SEQ ID NO: 6558 - protein, 30 aa, Artificial Sequence; identical to SEQ ID NO: 6557
  Synthetic polypeptide

SEQ ID NO: 6559 - protein, 30 aa, Artificial Sequence; identical to SEQ ID NO: 6557
  Synthetic polypeptide

SEQ ID NO: 6560 - protein, 30 aa, Artificial Sequence; identical to SEQ ID NO: 6557
  Synthetic polypeptide

SEQ ID NO: 6561 - protein, 30 aa, Artificial Sequence; identical to SEQ ID NO: 6557
  Synthetic polypeptide

SEQ ID NO: 6562 - protein, 235 aa, Artificial Sequence
  Synthetic polypeptide
VPFSHFSNKSNQDFLERWLSLRCGSKIMVPERKKLLNKELSRCQSIYAYLNSHLDLIKKAQPVGFLTVDLHVWPDFHGNRSPLADLTLKGMVTGLKLSQDLDDLAILYLATVQAIALGTRFIIEAMEAAGHSISTLFLCGGLSKNPLFVQMHADITGMPVVLSQEVESVLVGAAVLGACASGDFASVQEAMAKMSKVGKVVFPRLQDKKYYDKKYQVFLKLVEHQKEYLAIMNDD

SEQ ID NO: 6563 - protein, 235 aa, Artificial Sequence; identical to SEQ ID NO: 6562
  Synthetic polypeptide

SEQ ID NO: 6564 - protein, 235 aa, Artificial Sequence; identical to SEQ ID NO: 6562
  Synthetic polypeptide

SEQ ID NO: 6565 - protein, 191 aa, Artificial Sequence
  Synthetic polypeptide
VPFSHFSNKSNQDFLERWLSLRCGSKIMVPERKKLLNKELSRCQSIYAYLNSHLDLIKKAQPVGFLTVDLHVWPDFHGNRSPLADLTLKGMVTGLKLSQDLDDLAILYLATVQAIALGTRFIIEAMEAAGHSISTLFLCGGLSKNPLFVQMHADITGMPVVLSQEVESVLVGAAVLGACASGDFASVQWGK

SEQ ID NO: 6566 - protein, 231 aa, Artificial Sequence
  Synthetic polypeptide
KYCFLLRGGDSLYVVQHTGNPTSSFHEENLICSTLDLFFAGTETTSTTLRWALLYMALYPEIQEKVQAEIDRVIGQGQQPSTAARESMPYTNAVIHEVQRMGNIIPLNVPREVTVDTTLAGYHLPKGTMILTNLTALHRDPTEWATPDTFNPDHFLENGQFKKREAFMPFSIGKRACLGEQLARTELFIFFTSLMQKFTFRPPNNEKLSLKFRMGITISPVSHRLCAVPQV

SEQ ID NO: 6567 - protein, 75 aa, Artificial Sequence
  Synthetic polypeptide
IYRSIVFSSEEETRYMLCSTQAILLQVSMKKTSSAAPWTSSLPEPRQLPQLCDGLCFIWPSTQKSKKKYKLRLTE

SEQ ID NO: 6568 - protein, 28 aa, Artificial Sequence
  Synthetic polypeptide
FIEVLFSPQRRRLAICCAAHRQSYFKFP

SEQ ID NO: 6569 - protein, 12 aa, Artificial Sequence
  Synthetic polypeptide
PTAVCEEIWEPF

SEQ ID NO: 6570 - protein, 441 aa, Artificial Sequence
  Synthetic polypeptide
GNRPSDLLLFVKKYGNLFSLELGDISAVLITGLPLIKEALIHMDQNFGNRPVTPMREHIFKKNGLIMSSGQAWKEQRRFTLTALRNFGLGKKSLEERIQEEAQHLTEAIKEENGQPFDPHFKINNAVSNIICSITFGERFEYQDSWFQQLLKLLDEVTYLEASKTCQLYNVFPWIMKFLPGPHQTLFSNWKKLKLFVSHMIDKHRKDWNPAETRDFIDAYLKEMSKHTGNPTSSFHEENLICSTLDLFFAGTETTSTTLRWALLYMALYPEIQEKVQAEIDRVIGQGQQPSTAARESMPYTNAVIHEVQRMGNIIPLNVPREVTVDTTLAGYHLPKGTMILTNLTALHRDPTEWATPDTFNPDHFLENGQFKKREAFMPFSIGKRACLGEQLARTELFIFFTSLMQKFTFRPPNNEKLSLKFRMGITISPVSHRLCAVPQV

SEQ ID NO: 6571 - protein, 10 aa, Artificial Sequence
  Synthetic polypeptide
GTDPLTYCCL

SEQ ID NO: 6572 - protein, 13 aa, Artificial Sequence
  Synthetic polypeptide
LSEKLHFPYIKCL

SEQ ID NO: 6573 - protein, 10 aa, Artificial Sequence
  Synthetic polypeptide
NVCEEIWEPF

SEQ ID NO: 6574 - protein, 441 aa, Artificial Sequence
  Synthetic polypeptide
ETSFPIHKMFVKKYGNLFSLELGDISAVLITGLPLIKEALIHMDQNFGNRPVTPMREHIFKKNGLIMSSGQAWKEQRRFTLTALRNFGLGKKSLEERIQEEAQHLTEAIKEENGQPFDPHFKINNAVSNIICSITFGERFEYQDSWFQQLLKLLDEVTYLEASKTCQLYNVFPWIMKFLPGPHQTLFSNWKKLKLFVSHMIDKHRKDWNPAETRDFIDAYLKEMSKHTGNPTSSFHEENLICSTLDLFFAGTETTSTTLRWALLYMALYPEIQEKVQAEIDRVIGQGQQPSTAARESMPYTNAVIHEVQRMGNIIPLNVPREVTVDTTLAGYHLPKGTMILTNLTALHRDPTEWATPDTFNPDHFLENGQFKKREAFMPFSIGKRACLGEQLARTELFIFFTSLMQKFTFRPPNNEKLSLKFRMGITISPVSHRLCAVPQV

SEQ ID NO: 6575 - protein, 71 aa, Artificial Sequence
  Synthetic polypeptide
TVGQGTSQSHETAFPGLSYQMTFLDTACIRRELAALKGKIQSRSHHLLTEESLGPYNQQQYTVCEEIWEPF

SEQ ID NO: 6576 - protein, 446 aa, Artificial Sequence
  Synthetic polypeptide
LKSPWALITSSNTQFVKKYGNLFSLELGDISAVLITGLPLIKEALIHMDQNFGNRPVTPMREHIFKKNGLIMSSGQAWKEQRRFTLTALRNFGLGKKSLEERIQEEAQHLTEAIKEENGQPFDPHFKINNAVSNIICSITFGERFEYQDSWFQQLLKLLDEVTYLEASKTCQLYNVFPWIMKFLPGPHQTLFSNWKKLKLFVSHMIDKHRKDWNPAETRDFIDAYLKEMSKHTGNPTSSFHEENLICSTLDLFFAGTETTSTTLRWALLYMALYPEIQEKVQAEIDRVIGQGQQPSTAARESMPYTNAVIHEVQRMGNIIPLNVPREVTVDTTLAGYHLPKGTMILTNLTALHRDPTEWATPDTFNPDHFLENGQFKKREAFMPFSIGKRACLGEQLARTELFIFFTSLMQKFTFRPPNNEKLSLKFRMGITISPVSHRLCAVPQV

SEQ ID NO: 6577 - protein, 7 aa, Artificial Sequence
  Synthetic polypeptide
PAAIHSL

SEQ ID NO: 6578 - protein, 27 aa, Artificial Sequence
  Synthetic polypeptide
GAPLPGRPYWEVRSPSARTAAPSGREV

SEQ ID NO: 6579 - protein, 27 aa, Artificial Sequence
  Synthetic polypeptide
GAPLPGRPYWEVRSPSARTAAPSGREV

SEQ ID NO: 6580 - protein, 27 aa, Artificial Sequence
  Synthetic polypeptide
GAPLPGRPYWEVRSPSARTAAPSGREV

SEQ ID NO: 6581 - protein, 27 aa, Artificial Sequence
  Synthetic polypeptide
GAPLPGRPYWEVRSPSARTAAPSGREV

SEQ ID NO: 6582 - protein, 27 aa, Artificial Sequence
  Synthetic polypeptide
GAPLPGRPYWEVRSPSARTAAPSGREV

SEQ ID NO: 6583 - protein, 27 aa, Artificial Sequence
  Synthetic polypeptide
GAPLPGRPYWEVRSPSARTAAPSGREV

SEQ ID NO: 6584 - protein, 27 aa, Artificial Sequence
  Synthetic polypeptide
GAPLPGRPYWEVRSPSARTAAPSGREV

SEQ ID NO: 6585 - protein, 27 aa, Artificial Sequence
  Synthetic polypeptide
GAPLPGRPYWEVRSPSARTAAPSGREV

SEQ ID NO: 6586 - protein, 27 aa, Artificial Sequence
  Synthetic polypeptide
GAPLPGRPYWEVRSPSARTAAPSGREV

SEQ ID NO: 6587 - protein, 21 aa, Artificial Sequence
  Synthetic polypeptide
GAPLPGQPPRPGGRCDHEAHG

SEQ ID NO: 6588 - protein, 21 aa, Artificial Sequence
  Synthetic polypeptide
GAPLPGQPPRPGGRCDHEAHG

SEQ ID NO: 6589 - protein, 21 aa, Artificial Sequence
  Synthetic polypeptide
GAPLPGQPPRPGGRCDHEAHG

SEQ ID NO: 6590 - protein, 21 aa, Artificial Sequence
  Synthetic polypeptide
GAPLPGQPPRPGGRCDHEAHG

SEQ ID NO: 6591 - protein, 21 aa, Artificial Sequence
  Synthetic polypeptide
GAPLPGQPPRPGGRCDHEAHG

SEQ ID NO: 6592 - protein, 21 aa, Artificial Sequence
  Synthetic polypeptide
GAPLPGQPPRPGGRCDHEAHG

SEQ ID NO: 6593 - protein, 21 aa, Artificial Sequence
  Synthetic polypeptide
GAPLPGQPPRPGGRCDHEAHG

SEQ ID NO: 6594 - protein, 21 aa, Artificial Sequence
  Synthetic polypeptide
GAPLPGQPPRPGGRCDHEAHG

SEQ ID NO: 6595 - protein, 21 aa, Artificial Sequence
  Synthetic polypeptide
GAPLPGQPPRPGGRCDHEAHG

SEQ ID NO: 6596 - protein, 212 aa, Artificial Sequence
  Synthetic polypeptide
EAPPPGSHPVWEVRSVSTRQPPRPGGRWGSAAPSGREVGGSAPRPASRPFREVRGASARPPLLGSEEPLCPDSRPVREGGVTMKLMDEVAGIVAARHCKTNIVTASVDAINFHDKIRKGCVITISGRMTFTSNKSMEIEVLVDADPVVDSSQKRYRAASAFFTYVSLSQEGRSLPVPQLVPETEDEKKRFEEGKGRYLQMKAKRQGHAEPQP

SEQ ID NO: 6597 - protein, 212 aa, Artificial Sequence; identical to SEQ ID NO: 6596
  Synthetic polypeptide

SEQ ID NO: 6598 - protein, 212 aa, Artificial Sequence; identical to SEQ ID NO: 6596
  Synthetic polypeptide

SEQ ID NO: 6599 - protein, 212 aa, Artificial Sequence; identical to SEQ ID NO: 6596
  Synthetic polypeptide

SEQ ID NO: 6600 - protein, 212 aa, Artificial Sequence; identical to SEQ ID NO: 6596
  Synthetic polypeptide

SEQ ID NO: 6601 - protein, 212 aa, Artificial Sequence; identical to SEQ ID NO: 6596
  Synthetic polypeptide

SEQ ID NO: 6602 - protein, 157 aa, Artificial Sequence
  Synthetic polypeptide
EAPPPGSHPVWEVRSVSTRQPPRPGGRWGSAAPSGREVGGSAPRPASRPFREVRGASARPPLLGSEEPLCPDSRPVREGGVTMKLMDEVAGIVAARHCKTNIVTASVDAINFHDKIRKAHVMPAGADHTAPSSSPSTGTKCSLLRHHHLGTHDLHEQ

SEQ ID NO: 6603 - protein, 120 aa, Artificial Sequence
  Synthetic polypeptide
EAPPPGSHPVWEVRSVSTRQPPRPGGRWGSAAPSGREVGGSAPRPASRPFREVRGASARPPLLGSEEPLCPDSRPVREGGVTMKLMDEVAGIVAARHCKTNIVTASVDAINFHDKIRKAP

SEQ ID NO: 6604 - protein, 170 aa, Artificial Sequence
  Synthetic polypeptide
EAPPPGSHPVWEVRSVSTRQPPRPGGRWGSAAPSGREVGGSAPRPASRPFREVRGASARPPLLGSEEPLCPDSRPVREGGVTMKLMDEVAGIVAARHCKTNIVTASVDAINFHDKIRKGCVITISGRMTFTSNKSMEIEVLVDADPVVDSSQKRYRAASAFFTYVSLSQE

SEQ ID NO: 6605 - protein, 146 aa, Artificial Sequence
  Synthetic polypeptide
GASPPGSHPVREGGVTMKLMDEVAGIVAARHCKTNIVTASVDAINFHDKIRKGCVITISGRMTFTSNKSMEIEVLVDADPVVDSSQKRYRAASAFFTYVSLSQEGRSLPVPQLVPETEDEKKRFEEGKGRYLQMKAKRQGHAEPQP

SEQ ID NO: 6606 - protein, 146 aa, Artificial Sequence; identical to SEQ ID NO: 6605
  Synthetic polypeptide

SEQ ID NO: 6607 - protein, 146 aa, Artificial Sequence; identical to SEQ ID NO: 6605
  Synthetic polypeptide

SEQ ID NO: 6608 - protein, 146 aa, Artificial Sequence; identical to SEQ ID NO: 6605
  Synthetic polypeptide

SEQ ID NO: 6609 - protein, 146 aa, Artificial Sequence; identical to SEQ ID NO: 6605
  Synthetic polypeptide

SEQ ID NO: 6610 - protein, 146 aa, Artificial Sequence; identical to SEQ ID NO: 6605
  Synthetic polypeptide

SEQ ID NO: 6611 - protein, 30 aa, Artificial Sequence
  Synthetic polypeptide
EVRSPSARQPPRLGSEERLHPAATPSGREV

SEQ ID NO: 6612 - protein, 30 aa, Artificial Sequence; identical to SEQ ID NO: 6611
  Synthetic polypeptide

SEQ ID NO: 6613 - protein, 30 aa, Artificial Sequence; identical to SEQ ID NO: 6611
  Synthetic polypeptide

SEQ ID NO: 6614 - protein, 30 aa, Artificial Sequence; identical to SEQ ID NO: 6611
  Synthetic polypeptide

SEQ ID NO: 6615 - protein, 30 aa, Artificial Sequence; identical to SEQ ID NO: 6611
  Synthetic polypeptide

SEQ ID NO: 6616 - protein, 30 aa, Artificial Sequence; identical to SEQ ID NO: 6611
  Synthetic polypeptide

SEQ ID NO: 6617 - protein, 30 aa, Artificial Sequence; identical to SEQ ID NO: 6611
  Synthetic polypeptide

SEQ ID NO: 6618 - protein, 30 aa, Artificial Sequence; identical to SEQ ID NO: 6611
  Synthetic polypeptide

SEQ ID NO: 6619 - protein, 30 aa, Artificial Sequence; identical to SEQ ID NO: 6611
  Synthetic polypeptide

SEQ ID NO: 6620 - protein, 34 aa, Artificial Sequence
  Synthetic polypeptide
EAPPPGSHPVWEVRSVSTRQPPRPGGRCDHEAHG

SEQ ID NO: 6621 - protein, 34 aa, Artificial Sequence; identical to SEQ ID NO: 6620
  Synthetic polypeptide

SEQ ID NO: 6622 - protein, 34 aa, Artificial Sequence; identical to SEQ ID NO: 6620
  Synthetic polypeptide

SEQ ID NO: 6623 - protein, 34 aa, Artificial Sequence; identical to SEQ ID NO: 6620
  Synthetic polypeptide

SEQ ID NO: 6624 - protein, 34 aa, Artificial Sequence; identical to SEQ ID NO: 6620
  Synthetic polypeptide

SEQ ID NO: 6625 - protein, 34 aa, Artificial Sequence; identical to SEQ ID NO: 6620
  Synthetic polypeptide

SEQ ID NO: 6626 - protein, 34 aa, Artificial Sequence; identical to SEQ ID NO: 6620
  Synthetic polypeptide

SEQ ID NO: 6627 - protein, 34 aa, Artificial Sequence; identical to SEQ ID NO: 6620
  Synthetic polypeptide

SEQ ID NO: 6628 - protein, 34 aa, Artificial Sequence; identical to SEQ ID NO: 6620
  Synthetic polypeptide

SEQ ID NO: 6629 - protein, 91 aa, Artificial Sequence
  Synthetic polypeptide
GASPPGSHPVREGGVTMKLMDEVAGIVAARHCKTNIVTASVDAINFHDKIRKAHVMPAGADHTAPSSSPSTGTKCSLLRHHHLGTHDLHEQ

SEQ ID NO: 6630 - protein, 54 aa, Artificial Sequence
  Synthetic polypeptide
GASPPGSHPVREGGVTMKLMDEVAGIVAARHCKTNIVTASVDAINFHDKIRKAP

SEQ ID NO: 6631 - protein, 104 aa, Artificial Sequence
  Synthetic polypeptide
GASPPGSHPVREGGVTMKLMDEVAGIVAARHCKTNIVTASVDAINFHDKIRKGCVITISGRMTFTSNKSMEIEVLVDADPVVDSSQKRYRAASAFFTYVSLSQE

SEQ ID NO: 6632 - protein, 35 aa, Artificial Sequence
  Synthetic polypeptide
EVRRPSAWQPPRLRSEKPLRPAATPSGKCDHEAHG

SEQ ID NO: 6633 - protein, 35 aa, Artificial Sequence; identical to SEQ ID NO: 6632
  Synthetic polypeptide

SEQ ID NO: 6634 - protein, 35 aa, Artificial Sequence; identical to SEQ ID NO: 6632
  Synthetic polypeptide

SEQ ID NO: 6635 - protein, 35 aa, Artificial Sequence; identical to SEQ ID NO: 6632
  Synthetic polypeptide

SEQ ID NO: 6636 - protein, 35 aa, Artificial Sequence; identical to SEQ ID NO: 6632
  Synthetic polypeptide

SEQ ID NO: 6637 - protein, 35 aa, Artificial Sequence; identical to SEQ ID NO: 6632
  Synthetic polypeptide

SEQ ID NO: 6638 - protein, 35 aa, Artificial Sequence; identical to SEQ ID NO: 6632
  Synthetic polypeptide

SEQ ID NO: 6639 - protein, 35 aa, Artificial Sequence; identical to SEQ ID NO: 6632
  Synthetic polypeptide

SEQ ID NO: 6640 - protein, 35 aa, Artificial Sequence; identical to SEQ ID NO: 6632
  Synthetic polypeptide

SEQ ID NO: 6641 - protein, 147 aa, Artificial Sequence
  Synthetic polypeptide
EVRSPSARQPPRLGSVTMKLMDEVAGIVAARHCKTNIVTASVDAINFHDKIRKGCVITISGRMTFTSNKSMEIEVLVDADPVVDSSQKRYRAASAFFTYVSLSQEGRSLPVPQLVPETEDEKKRFEEGKGRYLQMKAKRQGHAEPQP

SEQ ID NO: 6642 - protein, 147 aa, Artificial Sequence; identical to SEQ ID NO: 6641
  Synthetic polypeptide

SEQ ID NO: 6643 - protein, 147 aa, Artificial Sequence; identical to SEQ ID NO: 6641
  Synthetic polypeptide

SEQ ID NO: 6644 - protein, 147 aa, Artificial Sequence; identical to SEQ ID NO: 6641
  Synthetic polypeptide

SEQ ID NO: 6645 - protein, 147 aa, Artificial Sequence; identical to SEQ ID NO: 6641
  Synthetic polypeptide

SEQ ID NO: 6646 - protein, 147 aa, Artificial Sequence; identical to SEQ ID NO: 6641
  Synthetic polypeptide

SEQ ID NO: 6647 - protein, 13 aa, Artificial Sequence
  Synthetic polypeptide
EAPPPGSHPVWEV

SEQ ID NO: 6648 - protein, 13 aa, Artificial Sequence
  Synthetic polypeptide
EAPPPGSHPVWEV

SEQ ID NO: 6649 - protein, 13 aa, Artificial Sequence
  Synthetic polypeptide
EAPPPGSHPVWEV

SEQ ID NO: 6650 - protein, 13 aa, Artificial Sequence
  Synthetic polypeptide
EAPPPGSHPVWEV

SEQ ID NO: 6651 - protein, 13 aa, Artificial Sequence
  Synthetic polypeptide
EAPPPGSHPVWEV

SEQ ID NO: 6652 - protein, 13 aa, Artificial Sequence
  Synthetic polypeptide
EAPPPGSHPVWEV

SEQ ID NO: 6653 - protein, 13 aa, Artificial Sequence
  Synthetic polypeptide
EAPPPGSHPVWEV

SEQ ID NO: 6654 - protein, 13 aa, Artificial Sequence
  Synthetic polypeptide
EAPPPGSHPVWEV

SEQ ID NO: 6655 - protein, 13 aa, Artificial Sequence
  Synthetic polypeptide
EAPPPGSHPVWEV

SEQ ID NO: 6656 - protein, 92 aa, Artificial Sequence
  Synthetic polypeptide
EVRSPSARQPPRLGSVTMKLMDEVAGIVAARHCKTNIVTASVDAINFHDKIRKAHVMPAGADHTAPSSSPSTGTKCSLLRHHHLGTHDLHEQ

SEQ ID NO: 6657 - protein, 55 aa, Artificial Sequence
  Synthetic polypeptide
EVRSPSARQPPRLGSVTMKLMDEVAGIVAARHCKTNIVTASVDAINFHDKIRKAP

SEQ ID NO: 6658 - protein, 105 aa, Artificial Sequence
  Synthetic polypeptide
EVRSPSARQPPRLGSVTMKLMDEVAGIVAARHCKTNIVTASVDAINFHDKIRKGCVITISGRMTFTSNKSMEIEVLVDADPVVDSSQKRYRAASAFFTYVSLSQE

SEQ ID NO: 6659 - protein, 147 aa, Artificial Sequence
  Synthetic polypeptide
EVRRPSAWQPPRLRSVTMKLMDEVAGIVAARHCKTNIVTASVDAINFHDKIRKGCVITISGRMTFTSNKSMEIEVLVDADPVVDSSQKRYRAASAFFTYVSLSQEGRSLPVPQLVPETEDEKKRFEEGKGRYLQMKAKRQGHAEPQP

SEQ ID NO: 6660 - protein, 147 aa, Artificial Sequence; identical to SEQ ID NO: 6659
  Synthetic polypeptide

SEQ ID NO: 6661 - protein, 147 aa, Artificial Sequence; identical to SEQ ID NO: 6659
  Synthetic polypeptide

SEQ ID NO: 6662 - protein, 147 aa, Artificial Sequence; identical to SEQ ID NO: 6659
  Synthetic polypeptide

SEQ ID NO: 6663 - protein, 147 aa, Artificial Sequence; identical to SEQ ID NO: 6659
  Synthetic polypeptide

SEQ ID NO: 6664 - protein, 147 aa, Artificial Sequence; identical to SEQ ID NO: 6659
  Synthetic polypeptide

SEQ ID NO: 6665 - protein, 2 aa, Artificial Sequence
  Synthetic polypeptide
EV

SEQ ID NO: 6666 - protein, 2 aa, Artificial Sequence
  Synthetic polypeptide
EV

SEQ ID NO: 6667 - protein, 2 aa, Artificial Sequence
  Synthetic polypeptide
EV

SEQ ID NO: 6668 - protein, 2 aa, Artificial Sequence
  Synthetic polypeptide
EV

SEQ ID NO: 6669 - protein, 2 aa, Artificial Sequence
  Synthetic polypeptide
EV

SEQ ID NO: 6670 - protein, 2 aa, Artificial Sequence
  Synthetic polypeptide
EV

SEQ ID NO: 6671 - protein, 2 aa, Artificial Sequence
  Synthetic polypeptide
EV

SEQ ID NO: 6672 - protein, 2 aa, Artificial Sequence
  Synthetic polypeptide
EV

SEQ ID NO: 6673 - protein, 2 aa, Artificial Sequence
  Synthetic polypeptide
EV

SEQ ID NO: 6674 - protein, 57 aa, Artificial Sequence
  Synthetic polypeptide
GASLPGRPSSEMWGAPLPCRPVWDVRSVSARPPRLRSEETLCLATAPSEKCDHEAHG

SEQ ID NO: 6675 - protein, 57 aa, Artificial Sequence; identical to SEQ ID NO: 6674
  Synthetic polypeptide

SEQ ID NO: 6676 - protein, 57 aa, Artificial Sequence; identical to SEQ ID NO: 6674
  Synthetic polypeptide

SEQ ID NO: 6677 - protein, 57 aa, Artificial Sequence; identical to SEQ ID NO: 6674
  Synthetic polypeptide

SEQ ID NO: 6678 - protein, 57 aa, Artificial Sequence; identical to SEQ ID NO: 6674
  Synthetic polypeptide

SEQ ID NO: 6679 - protein, 57 aa, Artificial Sequence; identical to SEQ ID NO: 6674
  Synthetic polypeptide

SEQ ID NO: 6680 - protein, 57 aa, Artificial Sequence; identical to SEQ ID NO: 6674
  Synthetic polypeptide

SEQ ID NO: 6681 - protein, 57 aa, Artificial Sequence; identical to SEQ ID NO: 6674
  Synthetic polypeptide

SEQ ID NO: 6682 - protein, 57 aa, Artificial Sequence; identical to SEQ ID NO: 6674
  Synthetic polypeptide

SEQ ID NO: 6683 - protein, 92 aa, Artificial Sequence
  Synthetic polypeptide
EVRRPSAWQPPRLRSVTMKLMDEVAGIVAARHCKTNIVTASVDAINFHDKIRKAHVMPAGADHTAPSSSPSTGTKCSLLRHHHLGTHDLHEQ

SEQ ID NO: 6684 - protein, 55 aa, Artificial Sequence
  Synthetic polypeptide
EVRRPSAWQPPRLRSVTMKLMDEVAGIVAARHCKTNIVTASVDAINFHDKIRKAP

SEQ ID NO: 6685 - protein, 105 aa, Artificial Sequence
  Synthetic polypeptide
EVRRPSAWQPPRLRSVTMKLMDEVAGIVAARHCKTNIVTASVDAINFHDKIRKGCVITISGRMTFTSNKSMEIEVLVDADPVVDSSQKRYRAASAFFTYVSLSQE

SEQ ID NO: 6686 - protein, 167 aa, Artificial Sequence
  Synthetic polypeptide
PIKTSEPNTVSYSQSSLIHLVGPSDCTLHGFVHGGVTMKLMDEVAGIVAARHCKTNIVTASVDAINFHDKIRKGCVITISGRMTFTSNKSMEIEVLVDADPVVDSSQKRYRAASAFFTYVSLSQEGRSLPVPQLVPETEDEKKRFEEGKGRYLQMKAKRQGHAEPQP

SEQ ID NO: 6687 - protein, 167 aa, Artificial Sequence; identical to SEQ ID NO: 6686
  Synthetic polypeptide

SEQ ID NO: 6688 - protein, 167 aa, Artificial Sequence; identical to SEQ ID NO: 6686
  Synthetic polypeptide

SEQ ID NO: 6689 - protein, 167 aa, Artificial Sequence; identical to SEQ ID NO: 6686
  Synthetic polypeptide

SEQ ID NO: 6690 - protein, 167 aa, Artificial Sequence; identical to SEQ ID NO: 6686
  Synthetic polypeptide

SEQ ID NO: 6691 - protein, 167 aa, Artificial Sequence; identical to SEQ ID NO: 6686
  Synthetic polypeptide

SEQ ID NO: 6692 - protein, 23 aa, Artificial Sequence
  Synthetic polypeptide
NAASRPDPSKPQSRTLSATASPA

SEQ ID NO: 6693 - protein, 23 aa, Artificial Sequence
  Synthetic polypeptide
NAASRPDPSKPQSRTLSATASPA

SEQ ID NO: 6694 - protein, 23 aa, Artificial Sequence
  Synthetic polypeptide
NAASRPDPSKPQSRTLSATASPA

SEQ ID NO: 6695 - protein, 23 aa, Artificial Sequence
  Synthetic polypeptide
NAASRPDPSKPQSRTLSATASPA

SEQ ID NO: 6696 - protein, 23 aa, Artificial Sequence
  Synthetic polypeptide
NAASRPDPSKPQSRTLSATASPA

SEQ ID NO: 6697 - protein, 23 aa, Artificial Sequence
  Synthetic polypeptide
NAASRPDPSKPQSRTLSATASPA

SEQ ID NO: 6698 - protein, 23 aa, Artificial Sequence
  Synthetic polypeptide
NAASRPDPSKPQSRTLSATASPA

SEQ ID NO: 6699 - protein, 23 aa, Artificial Sequence
  Synthetic polypeptide
NAASRPDPSKPQSRTLSATASPA

SEQ ID NO: 6700 - protein, 23 aa, Artificial Sequence
  Synthetic polypeptide
NAASRPDPSKPQSRTLSATASPA

SEQ ID NO: 6701 - protein, 23 aa, Artificial Sequence
  Synthetic polypeptide
NAASRPDPSKPQSRTLSATASPA

SEQ ID NO: 6702 - protein, 54 aa, Artificial Sequence
  Synthetic polypeptide
ECEQSEMLLPGLTHQNLRAEHCQLQPVQLDPPGGAFRLHPARLCARRCDHEAHG

SEQ ID NO: 6703 - protein, 54 aa, Artificial Sequence; identical to SEQ ID NO: 6702
  Synthetic polypeptide

SEQ ID NO: 6704 - protein, 54 aa, Artificial Sequence; identical to SEQ ID NO: 6702
  Synthetic polypeptide

SEQ ID NO: 6705 - protein, 54 aa, Artificial Sequence; identical to SEQ ID NO: 6702
  Synthetic polypeptide

SEQ ID NO: 6706 - protein, 54 aa, Artificial Sequence; identical to SEQ ID NO: 6702
  Synthetic polypeptide

SEQ ID NO: 6707 - protein, 54 aa, Artificial Sequence; identical to SEQ ID NO: 6702
  Synthetic polypeptide

SEQ ID NO: 6708 - protein, 54 aa, Artificial Sequence; identical to SEQ ID NO: 6702
  Synthetic polypeptide

SEQ ID NO: 6709 - protein, 54 aa, Artificial Sequence; identical to SEQ ID NO: 6702
  Synthetic polypeptide

SEQ ID NO: 6710 - protein, 54 aa, Artificial Sequence; identical to SEQ ID NO: 6702
  Synthetic polypeptide

SEQ ID NO: 6711 - protein, 112 aa, Artificial Sequence
  Synthetic polypeptide
PIKTSEPNTVSYSQSSLIHLVGPSDCTLHGFVHGGVTMKLMDEVAGIVAARHCKTNIVTASVDAINFHDKIRKAHVMPAGADHTAPSSSPSTGTKCSLLRHHHLGTHDLHEQ

SEQ ID NO: 6712 - protein, 75 aa, Artificial Sequence
  Synthetic polypeptide
PIKTSEPNTVSYSQSSLIHLVGPSDCTLHGFVHGGVTMKLMDEVAGIVAARHCKTNIVTASVDAINFHDKIRKAP

SEQ ID NO: 6713 - protein, 125 aa, Artificial Sequence
  Synthetic polypeptide
PIKTSEPNTVSYSQSSLIHLVGPSDCTLHGFVHGGVTMKLMDEVAGIVAARHCKTNIVTASVDAINFHDKIRKGCVITISGRMTFTSNKSMEIEVLVDADPVVDSSQKRYRAASAFFTYVSLSQE

SEQ ID NO: 6714 - protein, 40 aa, Artificial Sequence
  Synthetic polypeptide
PIKTSEPNTVSYSQSSLIHLVGPSDCTLHGFVHGGGVDFH

SEQ ID NO: 6715 - protein, 49 aa, Artificial Sequence
  Synthetic polypeptide
ECEQSEMLLPGLTHQNLRAEHCQLQPVQLDPPGGAFRLHPARLCARRRS

SEQ ID NO: 6716 - protein, 238 aa, Artificial Sequence
  Synthetic polypeptide
QDPEGITAKPVSEDMMEWEVEIEGLQNSVWQGLVFQLTIHFTSEYNYAPPVVKFITIPFHPNVDPHTGQPCIDFLDNPEKWNTNYTLSSILLALQVMLSNPVLENPVNLEAARILVKDESLYRTILRLFNRPLQMKDDSQELPKDPRKCIRPIKTTSFSDYYQTWSRIATSKATEYYRTPLLKVPNFIGQYYKWKKMDLQHQKEWNLKYSVIKCWLARKRMPHEVTHSMEEIKLCPTL

SEQ ID NO: 6717 - protein, 10 aa, Artificial Sequence
  Synthetic polypeptide
RILRVSLLSL

SEQ ID NO: 6718 - protein, 10 aa, Artificial Sequence
  Synthetic polypeptide
RILRVSLLSL

SEQ ID NO: 6719 - protein, 208 aa, Artificial Sequence
  Synthetic polypeptide
QDPEGITAKPVSEDMMEWEVEIEGLQNSVWQGLVFQLTIHFTSEYNYAPPVVKFITIPFHPNVDPHTGQPCIDFLDNPEKWNTNYTLSSILLALQVMLSNPVLENPVNLEAARILVKDESLYRTILRLFNRPLQMKDDSQELPKDPRKCIRPIKTTSFSDYYQTWSRIATSKATEYYRTPLLKVPNFIGQYYKWKKMDLQHQKEWNLK

SEQ ID NO: 6720 - protein, 9 aa, Artificial Sequence
  Synthetic polypeptide
QQMRNFGEI

SEQ ID NO: 6721 - protein, 9 aa, Artificial Sequence
  Synthetic polypeptide
QQMRNFGEI

SEQ ID NO: 6722 - protein, 12 aa, Artificial Sequence
  Synthetic polypeptide
TILTADEEFWGN

SEQ ID NO: 6723 - protein, 12 aa, Artificial Sequence
  Synthetic polypeptide
TILTADEEFWGN

SEQ ID NO: 6724 - protein, 268 aa, Artificial Sequence
  Synthetic polypeptide
YQLLRRLRQENCLNPACRSCSDLRLRHYTPAWIEDINNTGTESASEEGDDSLLITVVPVKSYKTSGKMKKNFEDLEKEREEKERIKYEEDKRIRYEEQRPSLKEAKCLSLVMDDEIESEAKKESLSPGKLKLTFEELERQRQENRKKQAEEEARKRLEEEKRAFEEARRQMVNEDEENQDTAKIFKGYRPGKLKLSFEEMERQRREDEKRKAEEEARRRIEEEKKAFAEARRNMVVDDDSPEMYKTISQEFLTPGKLEINFEELLKQK

SEQ ID NO: 6725 - protein, 12 aa, Artificial Sequence
  Synthetic polypeptide
DYDTTLQPGLRT

SEQ ID NO: 6726 - protein, 12 aa, Artificial Sequence
  Synthetic polypeptide
DYDTTLQPGLRT

SEQ ID NO: 6727 - protein, 12 aa, Artificial Sequence
  Synthetic polypeptide
DYDTTLQPGLRT

SEQ ID NO: 6728 - protein, 12 aa, Artificial Sequence
  Synthetic polypeptide
DYDTTLQPGLRT

SEQ ID NO: 6729 - protein, 11 aa, Artificial Sequence
  Synthetic polypeptide
PETTTLHSSLD

SEQ ID NO: 6730 - protein, 11 aa, Artificial Sequence
  Synthetic polypeptide
PETTTLHSSLD

SEQ ID NO: 6731 - protein, 11 aa, Artificial Sequence
  Synthetic polypeptide
PETTTLHSSLD

SEQ ID NO: 6732 - protein, 11 aa, Artificial Sequence
  Synthetic polypeptide
PETTTLHSSLD

SEQ ID NO: 6733 - protein, 558 aa, Artificial Sequence
  Synthetic polypeptide
YQLLRRLRQENCLNPACRSCSDLRLRHYTPAWIEDINNTGTESASEEGDDSLLITVVPVKSYKTSGKMKKNFEDLEKEREEKERIKYEEDKRIRYEEQRPSLKEAKCLSLVMDDEIESEAKKESLSPGKLKLTFEELERQRQENRKKQAEEEARKRLEEEKRAFEEARRQMVNEDEENQDTAKIFKGYRPGKLKLSFEEMERQRREDEKRKAEEEARRRIEEEKKAFAEARRNMVVDDDSPEMYKTISQEFLTPGKLEINFEELLKQKMEEEKRRTEEERKHKLEMEKQEFEQLRQEMGEEEEENETFGLSREYEELIKLKRSGSIQAKNLKSKFEKIGQLSEKEIQKKIEEERARRRAIDLEIKEREAENFHEEDDVDVRPARKSEAPFTHKVNMKARFEQMAKAREEEEQRRIEEQKLLRMQFEQREIDAALQKKREEEEEEEGSIMNGSTAEDEEQTRSGAPWFKKPLKNTSVVDSEPVRFTVKVTGEPKPEITWWFEGEILQDGEDYQYIERGETYCLYLPETFPEDGGEYMCKAVNNKGSAASTCILTIESKN

SEQ ID NO: 6734 - protein, 558 aa, Artificial Sequence; identical to SEQ ID NO: 6733
  Synthetic polypeptide

SEQ ID NO: 6735 - protein, 559 aa, Artificial Sequence
  Synthetic polypeptide
YQLLRRLRQENCLNPACRSCSDLRLRHYTPAWIEDINNTGTESASEEGDDSLLITVVPVKSYKTSGKMKKNFEDLEKEREEKERIKYEEDKRIRYEEQRPSLKEAKCLSLVMDDEIESEAKKESLSPGKLKLTFEELERQRQENRKKQAEEEARKRLEEEKRAFEEARRQMVNEDEENQDTAKIFKGYRPGKLKLSFEEMERQRREDEKRKAEEEARRRIEEEKKAFAEARRNMVVDDDSPEMYKTISQEFLTPGKLEINFEELLKQKMEEEKRRTEEERKHKLEMEKQEFEQLRQEMGEEEEENETFGLSREYEELIKLKRSGSIQAKNLKSKFEKIGQLSEKEIQKKIEEERARRRAIDLEIKEREAENFHEEDDVDVRPARKSEAPFTHKVNMKARFEQMAKAREEEEQRRIEEQKLLRMQFEQREIDAALQKKREEEEEEEGSIMNGSTAEDEEQTRSGAPWFKKPLKNTSVVDSEPVRFTVKVTGEPKPEITWWFEGEILQDGEDYQYIERGETYCLYLPETFPEDGGEYMCKAVNNKGSAASTCILTIETDDY

SEQ ID NO: 6736 - protein, 14 aa, Artificial Sequence
  Synthetic polypeptide
LTLDPFPPCALLDV

SEQ ID NO: 6737 - protein, 14 aa, Artificial Sequence
  Synthetic polypeptide
LTLDPFPPCALLDV

SEQ ID NO: 6738 - protein, 177 aa, Artificial Sequence
  Synthetic polypeptide
SPWTPSLLALCLMFNPMESIKLNHHDYIDSPSLKDRIHCVAFVFDASSIQYFSSQMIVKIKRIRRELVNAGVVHVALLTHVDSMDLITKGDLIEIERCEPVRSKLEEVQRKLGFALSDISVVSNYSSEWELDPVKDVLILSALRRMLWAADDFLEDLPFEQIGNLREEIINCAQGKK

SEQ ID NO: 6739 - protein, 52 aa, Artificial Sequence
  Synthetic polypeptide
SPWTPSLLALCLMFNPMESIKLNHHDYIDSPSLKDRIHCVAFVFDASSIQYF

SEQ ID NO: 6740 - protein, 36 aa, Artificial Sequence
  Synthetic polypeptide
HNMKDLTRCKPLNLGLLSLQNFPWKMGDHLILQTGP

SEQ ID NO: 6741 - protein, 36 aa, Artificial Sequence; identical to SEQ ID NO: 6740
  Synthetic polypeptide

SEQ ID NO: 6742 - protein, 36 aa, Artificial Sequence; identical to SEQ ID NO: 6740
  Synthetic polypeptide

SEQ ID NO: 6743 - protein, 36 aa, Artificial Sequence; identical to SEQ ID NO: 6740
  Synthetic polypeptide

SEQ ID NO: 6744 - protein, 36 aa, Artificial Sequence; identical to SEQ ID NO: 6740
  Synthetic polypeptide

SEQ ID NO: 6745 - protein, 36 aa, Artificial Sequence; identical to SEQ ID NO: 6740
  Synthetic polypeptide

SEQ ID NO: 6746 - protein, 26 aa, Artificial Sequence
  Synthetic polypeptide
RTSPDVSPSTLDFSASRTFHGKWETT

SEQ ID NO: 6747 - protein, 26 aa, Artificial Sequence
  Synthetic polypeptide
RTSPDVSPSTLDFSASRTFHGKWETT

SEQ ID NO: 6748 - protein, 26 aa, Artificial Sequence
  Synthetic polypeptide
RTSPDVSPSTLDFSASRTFHGKWETT

SEQ ID NO: 6749 - protein, 26 aa, Artificial Sequence
  Synthetic polypeptide
RTSPDVSPSTLDFSASRTFHGKWETT

SEQ ID NO: 6750 - protein, 26 aa, Artificial Sequence
  Synthetic polypeptide
RTSPDVSPSTLDFSASRTFHGKWETT

SEQ ID NO: 6751 - protein, 26 aa, Artificial Sequence
  Synthetic polypeptide
RTSPDVSPSTLDFSASRTFHGKWETT

SEQ ID NO: 6752 - protein, 96 aa, Artificial Sequence
  Synthetic polypeptide
APQPWTSQPPELSMENGRPPDPADWAVMDVVNYFRTVGFEEQASAFQEQEIDGKSLLLMTRNDVLTGLQLKLGPALKIYEYHVKPLQTKHLKNNSS

SEQ ID NO: 6753 - protein, 96 aa, Artificial Sequence; identical to SEQ ID NO: 6752
  Synthetic polypeptide

SEQ ID NO: 6754 - protein, 96 aa, Artificial Sequence; identical to SEQ ID NO: 6752
  Synthetic polypeptide

SEQ ID NO: 6755 - protein, 96 aa, Artificial Sequence; identical to SEQ ID NO: 6752
  Synthetic polypeptide

SEQ ID NO: 6756 - protein, 96 aa, Artificial Sequence; identical to SEQ ID NO: 6752
  Synthetic polypeptide

SEQ ID NO: 6757 - protein, 96 aa, Artificial Sequence; identical to SEQ ID NO: 6752
  Synthetic polypeptide

SEQ ID NO: 6758 - protein, 6 aa, Artificial Sequence
  Synthetic polypeptide
LFHKLC

SEQ ID NO: 6759 - protein, 6 aa, Artificial Sequence
  Synthetic polypeptide
LFHKLC

SEQ ID NO: 6760 - protein, 6 aa, Artificial Sequence
  Synthetic polypeptide
LFHKLC

SEQ ID NO: 6761 - protein, 6 aa, Artificial Sequence
  Synthetic polypeptide
LFHKLC

SEQ ID NO: 6762 - protein, 190 aa, Artificial Sequence
  Synthetic polypeptide
DSFTSYVDMMKEALEKLQLNIVEMKDENATLDGGDVLFTGREFFVGLSKRTNQRGAEILADTFKDYAVSTVPVADGLHLKSFCSMAGPNLIAIGSSESAQKALKIMQQMSDHRYDKLTVPDDIAANCIYLNIPNKGHVLLHRTPEEYPESAKVYEKLKDHMLIPVSMSELEKVDGLLTCCSVLINKKVDS

SEQ ID NO: 6763 - protein, 190 aa, Artificial Sequence; identical to SEQ ID NO: 6762
  Synthetic polypeptide

SEQ ID NO: 6764 - protein, 190 aa, Artificial Sequence; identical to SEQ ID NO: 6762
  Synthetic polypeptide

SEQ ID NO: 6765 - protein, 190 aa, Artificial Sequence; identical to SEQ ID NO: 6762
  Synthetic polypeptide

SEQ ID NO: 6766 - protein, 8 aa, Artificial Sequence
  Synthetic polypeptide
TLSQVMLT

SEQ ID NO: 6767 - protein, 8 aa, Artificial Sequence
  Synthetic polypeptide
TLSQVMLT

SEQ ID NO: 6768 - protein, 8 aa, Artificial Sequence
  Synthetic polypeptide
TLSQVMLT

SEQ ID NO: 6769 - protein, 8 aa, Artificial Sequence
  Synthetic polypeptide
TLSQVMLT

SEQ ID NO: 6770 - protein, 131 aa, Artificial Sequence
  Synthetic polypeptide
QVDGNHNLLTKLSLEEENCLIQLKCENLQQKLEQMDAENKELEKKLANQEECLKHSNLKFKEKSAEYTALARQLEAALEEGRQKVAEEIEKMSSRESALQIKILDLETELRKKNEEQNQLVCKMNSDPETP

SEQ ID NO: 6771 - protein, 131 aa, Artificial Sequence; identical to SEQ ID NO: 6770
  Synthetic polypeptide

SEQ ID NO: 6772 - protein, 44 aa, Artificial Sequence
  Synthetic polypeptide
ELNDENTWTHGEEQHTVGPFRGWRVGRGRGSEKITNRLMEITIF

SEQ ID NO: 6773 - protein, 44 aa, Artificial Sequence; identical to SEQ ID NO: 6772
  Synthetic polypeptide

SEQ ID NO: 6774 - protein, 44 aa, Artificial Sequence; identical to SEQ ID NO: 6772
  Synthetic polypeptide

SEQ ID NO: 6775 - protein, 44 aa, Artificial Sequence; identical to SEQ ID NO: 6772
  Synthetic polypeptide

SEQ ID NO: 6776 - protein, 44 aa, Artificial Sequence; identical to SEQ ID NO: 6772
  Synthetic polypeptide

SEQ ID NO: 6777 - protein, 44 aa, Artificial Sequence; identical to SEQ ID NO: 6772
  Synthetic polypeptide

SEQ ID NO: 6778 - protein, 44 aa, Artificial Sequence; identical to SEQ ID NO: 6772
  Synthetic polypeptide

SEQ ID NO: 6779 - protein, 44 aa, Artificial Sequence; identical to SEQ ID NO: 6772
  Synthetic polypeptide

SEQ ID NO: 6780 - protein, 3 aa, Artificial Sequence
  Synthetic polypeptide
LTG

SEQ ID NO: 6781 - protein, 3 aa, Artificial Sequence
  Synthetic polypeptide
LTG

SEQ ID NO: 6782 - protein, 3 aa, Artificial Sequence
  Synthetic polypeptide
LTG

SEQ ID NO: 6783 - protein, 3 aa, Artificial Sequence
  Synthetic polypeptide
LTG

SEQ ID NO: 6784 - protein, 3 aa, Artificial Sequence
  Synthetic polypeptide
LTG

SEQ ID NO: 6785 - protein, 3 aa, Artificial Sequence
  Synthetic polypeptide
LTG

SEQ ID NO: 6786 - protein, 3 aa, Artificial Sequence
  Synthetic polypeptide
LTG

SEQ ID NO: 6787 - protein, 3 aa, Artificial Sequence
  Synthetic polypeptide
LTG

SEQ ID NO: 6788 - protein, 3 aa, Artificial Sequence
  Synthetic polypeptide
LTG

SEQ ID NO: 6789 - protein, 168 aa, Artificial Sequence
  Synthetic polypeptide
QVDGNHNLLTKLSLEEENCLIQLKCENLQQKLEQMDAENKELEKKLANQEECLKHSNLKFKEKSAEYTALARQLEAALEEGRQKVAEEIEKMSSRESALQIKILDLETELRKKNEEQNQLVCKMNSKAQHQEVCLKEVQNSLEKSENQNESIKNYLQFLKTSYVTMFE

SEQ ID NO: 6790 - protein, 168 aa, Artificial Sequence; identical to SEQ ID NO: 6789
  Synthetic polypeptide

SEQ ID NO: 6791 - protein, 168 aa, Artificial Sequence; identical to SEQ ID NO: 6789
  Synthetic polypeptide

SEQ ID NO: 6792 - protein, 168 aa, Artificial Sequence; identical to SEQ ID NO: 6789
  Synthetic polypeptide

SEQ ID NO: 6793 - protein, 168 aa, Artificial Sequence; identical to SEQ ID NO: 6789
  Synthetic polypeptide

SEQ ID NO: 6794 - protein, 141 aa, Artificial Sequence
  Synthetic polypeptide
QVDGNHNLLTKLSLEEENCLIQLKCENLQQKLEQMDAENKELEKKLANQEECLKHSNLKFKEKSAEYTALARQLEAALEEGRQKVAEEIEKMSSRESALQIKILDLETELRKKNEEQNQLVCKMNSKAQHQEVCLKEVQNS

SEQ ID NO: 6795 - protein, 2 aa, Artificial Sequence
  Synthetic polypeptide
QV

SEQ ID NO: 6796 - protein, 38 aa, Artificial Sequence
  Synthetic polypeptide
ELNDENTWTHGEEQHTVGPFRGWRVGRGRGSEKITNRL

SEQ ID NO: 6797 - protein, 10 aa, Artificial Sequence
  Synthetic polypeptide
VAGGVYRRSL

SEQ ID NO: 6798 - protein, 147 aa, Artificial Sequence
  Synthetic polypeptide
LVVSIEDPFDQDDWGAWQKFTASAGIQVVGDDLTVTNPKRIAKAVNEKSCNCLLLKVNQIGSVTESLQACKLAQANGWGVMVSHRSGETEDTFIADLVVGLCTGQIKTGAPCRSERLAKYNQLLRIEEELGSKAKFAGRNFRNPLAK

SEQ ID NO: 6799 - protein, 32 aa, Artificial Sequence
  Synthetic polypeptide
NKISSWWCLSKIPLTRMTGELGRSSQPVQESR

SEQ ID NO: 6800 - protein, 630 aa, Artificial Sequence
  Synthetic polypeptide
LAHGYPESESIMMAPICLVENQEEQLTVNSKALEILDKISQPVVVVAIVGLYRTGKSYLMNRLAGKRNGFPLGSTVQSETKGIWMWCVPHLSKPNHTLVLLDTEGLGDVEKSNPKNDSWIFALAVLLSSSFVYNSVSTINHQALEQLHYVTELAELIRAKSCPRPDEAEDSSEFASFFPDFIWTVRDFTLELKLDGNPITEDEYLENALKLIPGKNPKIQNSNMPRECIRHFFRKRKCFVFDRPTNDKQYLNHMDEVPEENLERHFLMQSDNFCSYIFTHAKTKTLREGIIVTGKRLGTLVVTYVDAINSGAVPCLENAVTALAQLENPAAVQRAADHYSQQMAQQLRLPTDTLQELLDVHAACEREAIAVFMEHSFKDENHEFQKKLVDTIEKKKGDFVLQNEEASAKYCQAELKRLSEHLTESILRGIFSVPGGHNLYLEEKKQVEWDYKLVPRKGVKANEVLQNFLQSQVVVEESILQSDKALTAGEKAIAAERAMKEAAEKEQELLREKQKEQQQMMEAQERSFQEYMAQMEKKLEEERENLLREHERLLKHKLKVQEEMLKEEFQKKSEQLNKEINQLKEKIESTKNEQLRLLKILDMASNIMIVTLPGASKLLGVGTKYLGSRI

SEQ ID NO: 6801 - protein, 10 aa, Artificial Sequence
  Synthetic polypeptide
HMVIQNLNPS

SEQ ID NO: 6802 - protein, 14 aa, Artificial Sequence
  Synthetic polypeptide
ESRTVLISTWLSRI

SEQ ID NO: 6803 - protein, 44 aa, Artificial Sequence
  Synthetic polypeptide
LWDLEADACACPGNPDSCLWVILPVWVQRGCCQLPSTAHATILQ

SEQ ID NO: 6804 - protein, 44 aa, Artificial Sequence; identical to SEQ ID NO: 6803
  Synthetic polypeptide

SEQ ID NO: 6805 - protein, 44 aa, Artificial Sequence; identical to SEQ ID NO: 6803
  Synthetic polypeptide

SEQ ID NO: 6806 - protein, 44 aa, Artificial Sequence; identical to SEQ ID NO: 6803
  Synthetic polypeptide

SEQ ID NO: 6807 - protein, 44 aa, Artificial Sequence; identical to SEQ ID NO: 6803
  Synthetic polypeptide

SEQ ID NO: 6808 - protein, 44 aa, Artificial Sequence; identical to SEQ ID NO: 6803
  Synthetic polypeptide

SEQ ID NO: 6809 - protein, 44 aa, Artificial Sequence; identical to SEQ ID NO: 6803
  Synthetic polypeptide

SEQ ID NO: 6810 - protein, 44 aa, Artificial Sequence; identical to SEQ ID NO: 6803
  Synthetic polypeptide

SEQ ID NO: 6811 - protein, 44 aa, Artificial Sequence; identical to SEQ ID NO: 6803
  Synthetic polypeptide

SEQ ID NO: 6812 - protein, 507 aa, Artificial Sequence
  Synthetic polypeptide
KPPGFIPAPSYSSCGTWRLTLVLALATLIAAFGSSFQYGYNVAAVNSPALLMQQFYNETYYGRTGEFMEDFPLTLLWSVTVSMFPFGGFIGSLLVGPLVNKFGRKGALLFNNIFSIVPAILMGCSRVATSFELIIISRLLVGICAGVSSNVVPMYLGELAPKNLRGALGVVPQLFITVGILVAQIFGLRNLLANVDGWPILLGLTGVPAALQLLLLPFFPESPRYLLIQKKDEAAAKKALQTLRGWDSVDREVAEIRQEDEAEKAAGFISVLKLFRMRSLRWQLLSIIVLMGGQQLSGVNAIYYYADQIYLSAGVPEEHVQYVTAGTGAVNVVMTFCAVFVVELLGRRLLLLLGFSICLIACCVLTAALALQDTVSWMPYISIVCVISYVIGHALGPSPIPALLITEIFLQSSRPSAFMVGGSVHWLSNFTVGLIFPFIQEGLGPYSFIVFAVICLLTTIYIFLIVPETKAKTFIEINQIFTKMNKVSEVYPEKEELKELPPVTSEQ

SEQ ID NO: 6813 - protein, 24 aa, Artificial Sequence
  Synthetic polypeptide
VGLGSRSPQDSFLLHPILAVGLGG

SEQ ID NO: 6814 - protein, 24 aa, Artificial Sequence
  Synthetic polypeptide
VGLGSRSPQDSFLLHPILAVGLGG

SEQ ID NO: 6815 - protein, 24 aa, Artificial Sequence
  Synthetic polypeptide
VGLGSRSPQDSFLLHPILAVGLGG

SEQ ID NO: 6816 - protein, 24 aa, Artificial Sequence
  Synthetic polypeptide
VGLGSRSPQDSFLLHPILAVGLGG

SEQ ID NO: 6817 - protein, 24 aa, Artificial Sequence
  Synthetic polypeptide
VGLGSRSPQDSFLLHPILAVGLGG

SEQ ID NO: 6818 - protein, 24 aa, Artificial Sequence
  Synthetic polypeptide
VGLGSRSPQDSFLLHPILAVGLGG

SEQ ID NO: 6819 - protein, 24 aa, Artificial Sequence
  Synthetic polypeptide
VGLGSRSPQDSFLLHPILAVGLGG

SEQ ID NO: 6820 - protein, 24 aa, Artificial Sequence
  Synthetic polypeptide
VGLGSRSPQDSFLLHPILAVGLGG

SEQ ID NO: 6821 - protein, 24 aa, Artificial Sequence
  Synthetic polypeptide
VGLGSRSPQDSFLLHPILAVGLGG

SEQ ID NO: 6822 - protein, 250 aa, Artificial Sequence
  Synthetic polypeptide
KPPGFIPAPSYSSCGTWRLTLVLALATLIAAFGSSFQYGYNVAAVNSPALLMQQFYNETYYGRTGEFMEDFPLTLLWSVTVSMFPFGGFIGSLLVGPLVNKFGRKGALLFNNIFSIVPAILMGCSRVATSFELIIISRLLVGICAGVSSNVVPMYLGELAPKNLRGALGVVPQLFITVGILVAQIFGLRNLLANVDGEFRTSREHPHPFTTTLGPLLVFQSHHHRTGLSADWSLLTGWMSLGGPSCPEPT

SEQ ID NO: 6823 - protein, 196 aa, Artificial Sequence
  Synthetic polypeptide
KPPGFIPAPSYSSCGTWRLTLVLALATLIAAFGSSFQYGYNVAAVNSPALLMQQFYNETYYGRTGEFMEDFPLTLLWSVTVSMFPFGGFIGSLLVGPLVNKFGRKGALLFNNIFSIVPAILMGCSRVATSFELIIISRLLVGICAGVSSNVVPMYLGELAPKNLRGALGVVPQLFITVGILVAQIFGLRNLLANVD

SEQ ID NO: 6824 - protein, 196 aa, Artificial Sequence; identical to SEQ ID NO: 6823
  Synthetic polypeptide

SEQ ID NO: 6825 - protein, 196 aa, Artificial Sequence; identical to SEQ ID NO: 6823
  Synthetic polypeptide

SEQ ID NO: 6826 - protein, 196 aa, Artificial Sequence; identical to SEQ ID NO: 6823
  Synthetic polypeptide

SEQ ID NO: 6827 - protein, 172 aa, Artificial Sequence
  Synthetic polypeptide
KPPGFIPAPSYSSCGTWRLTLVLALATLIAAFGSSFQYGYNVAAVNSPALLMQQFYNETYYGRTGEFMEDFPLTLLWSVTVSMFPFGGFIGSLLVGPLVNKFGRKGALLFNNIFSIVPAILMGCSRVATSFELIIISRLLVGICAGVSSNVVPMYLGELAPKNLRGALGVVP

SEQ ID NO: 6828 - protein, 145 aa, Artificial Sequence
  Synthetic polypeptide
KPPGFIPAPSYSSCGTWRLTLVLALATLIAAFGSSFQYGYNVAAVNSPALLMQQFYNETYYGRTGEFMEDFPLTLLWSVTVSMFPFGGFIGSLLVGPLVNKFGRKGALLFNNIFSIVPAILMGCSRVATSFELIIISRLLVGICA

SEQ ID NO: 6829 - protein, 87 aa, Artificial Sequence
  Synthetic polypeptide
KPPGFIPAPSYSSCGTWRLTLVLALATLIAAFGSSFQYGYNVAAVNSPALLMQQFYNETYYGRTGEFMEDFPLTLLWSVTVSMFPFG

SEQ ID NO: 6830 - protein, 241 aa, Artificial Sequence
  Synthetic polypeptide
EFVFTKNIAYARIEGDMIVCAAYAHELPKYGVKVGLTNYAAAYCTGLLLARRLLNRFGMDKIYEGQVEVTGDEYNVESIDGQPGAFTCYLDAGLARTTTGNKVFGALKGAVDGGLSIPHSTKRFPGYDSESKEFNAEVHRKHIMGQNVADYMRYLMEEDEDAYKKQFSQYIKNSVTPDMMEEMYKKAHAAIRENPVYEKKPKKEVKKKRWNRPKMSLAQKKDRVAQKKASFLRAQERAAES

SEQ ID NO: 6831 - protein, 20 aa, Artificial Sequence
  Synthetic polypeptide
DQPGQYSESLSSQKILLMPV

SEQ ID NO: 6832 - protein, 20 aa, Artificial Sequence
  Synthetic polypeptide
DQPGQYSESLSSQKILLMPV

SEQ ID NO: 6833 - protein, 67 aa, Artificial Sequence
  Synthetic polypeptide
AQEFETSLGNIVRVCLHKKYCLCPYRGGYDSLRSVCTRTAKIWCEGWPDKLCCSILYWPAAGPQASQ

SEQ ID NO: 6834 - protein, 67 aa, Artificial Sequence; identical to SEQ ID NO: 6833
  Synthetic polypeptide

SEQ ID NO: 6835 - protein, 124 aa, Artificial Sequence
  Synthetic polypeptide
EFVFTKNIAYARIEGDMIVCAAYAHELPKYGVKVGLTNYAAAYCTGLLLARRLLNRFGMDKIYEGQVEVTGDEYNVESIDGQPGAFTCYLDAGLARTTTGNKVFGALKGAVDGGLSIPHSTKRF

SEQ ID NO: 6836 - protein, 952 aa, Artificial Sequence
  Synthetic polypeptide
LVNKHKPWLEPTYHGIVTENDNTVLLDPPLIALDKDAPLRFAESFEVTVTKEGEICGFKIHGQNVPFDAVVVDKSTGEGVIRSKEKLDCELQKDYSFTIQAYDCGKGPDGTNVKKSHKATVHIQVNDVNEYAPVFKEKSYKATVIEGKQYDSILRVEAVDADCSPQFSQICSYEIITPDVPFTVDKDGYIKNTEKLNYGKEHQYKLTVTAYDCGKKRATEDVLVKISIKPTCTPGWQGWNNRIEYEPGTGALAVFPNIHLETCDEPVASVQATVELETSHIGKGCDRDTYSEKSLHRLCGAAAGTAELLPSPSGSLNWTMGLPTDNGHDSDQVFEFNGTQAVRIPDGVVSVSPKEPFTISVWMRHGPFGRKKETILCSSDKTDMNRHHYSLYVHGCRLIFLFRQDPSEEKKYRPAEFHWKLNQVCDEEWHHYVLNVEFPSVTLYVDGTSHEPFSVTEDYPLHPSKIETQLVVGACWQEFSGVENDNETEPVTVASAGGDLHMTQFFRGNLAGLTLRSGKLADKKVIDCLYTCKEGLDLQVLEDSGRGVQIQAHPSQLVLTLEGEDLGELDKAMQHISYLNSRQFPTPGIRRLKITSTIKCFNEATCISVPPVDGYVMVLQPEEPKISLSGVHHFARAASEFESSEGVFLFPELRIISTITREVEPEGDGAEDPTVQESLVSEEIVHDLDTCEVTVEGEELNHEQESLEVDMARLQQKGIEVSSSELGMTFTGVDTMASYEEVLHLLRYRNWHARSLLDRKFKLICSELNGRYISNEFKVEVNVIHTANPMEHANHMAAQPQFVHPEHRSFVDLSGHNLANPHPFAVVPSTATVVIVVCVSFLVFMIILGVFRIRAAHRRTMRDQDTGKENEMDWDDSALTITVNPMETYEDQHSSEEEEEEEEEEESEDGEEEDDITSAESESSEEEEGEQGDPQNATRQQQLEWDDSTLSY

SEQ ID NO: 6837 - protein, 6 aa, Artificial Sequence
  Synthetic polypeptide
IGTLIS

SEQ ID NO: 6838 - protein, 6 aa, Artificial Sequence
  Synthetic polypeptide
IGTLIS

SEQ ID NO: 6839 - protein, 6 aa, Artificial Sequence
  Synthetic polypeptide
IGTLIS

SEQ ID NO: 6840 - protein, 942 aa, Artificial Sequence
  Synthetic polypeptide
LVNKHKPWLEPTYHGIVTENDNTVLLDPPLIALDKDAPLRFAGEICGFKIHGQNVPFDAVVVDKSTGEGVIRSKEKLDCELQKDYSFTIQAYDCGKGPDGTNVKKSHKATVHIQVNDVNEYAPVFKEKSYKATVIEGKQYDSILRVEAVDADCSPQFSQICSYEIITPDVPFTVDKDGYIKNTEKLNYGKEHQYKLTVTAYDCGKKRATEDVLVKISIKPTCTPGWQGWNNRIEYEPGTGALAVFPNIHLETCDEPVASVQATVELETSHIGKGCDRDTYSEKSLHRLCGAAAGTAELLPSPSGSLNWTMGLPTDNGHDSDQVFEFNGTQAVRIPDGVVSVSPKEPFTISVWMRHGPFGRKKETILCSSDKTDMNRHHYSLYVHGCRLIFLFRQDPSEEKKYRPAEFHWKLNQVCDEEWHHYVLNVEFPSVTLYVDGTSHEPFSVTEDYPLHPSKIETQLVVGACWQEFSGVENDNETEPVTVASAGGDLHMTQFFRGNLAGLTLRSGKLADKKVIDCLYTCKEGLDLQVLEDSGRGVQIQAHPSQLVLTLEGEDLGELDKAMQHISYLNSRQFPTPGIRRLKITSTIKCFNEATCISVPPVDGYVMVLQPEEPKISLSGVHHFARAASEFESSEGVFLFPELRIISTITREVEPEGDGAEDPTVQESLVSEEIVHDLDTCEVTVEGEELNHEQESLEVDMARLQQKGIEVSSSELGMTFTGVDTMASYEEVLHLLRYRNWHARSLLDRKFKLICSELNGRYISNEFKVEVNVIHTANPMEHANHMAAQPQFVHPEHRSFVDLSGHNLANPHPFAVVPSTATVVIVVCVSFLVFMIILGVFRIRAAHRRTMRDQDTGKENEMDWDDSALTITVNPMETYEDQHSSEEEEEEEEEEESEDGEEEDDITSAESESSEEEEGEQGDPQNATRQQQLEWDDSTLSY

SEQ ID NO: 6841 - protein, 933 aa, Artificial Sequence
  Synthetic polypeptide
LVNKHKPWLEPTYHGIVTENDNTVLLDPPLIALDKDAPLRFAESFEVTVTKEGEICGFKIHGQNVPFDAVVVDKSTGEGVIRSKEKLDCELQKDYSFTIQAYDCGKGPDGTNVKKSHKATVHIQVNDVNEYAPVFKEKSYKATVIEGKQYDSILRVEAVDADCSPQFSQICSYEIITPDVPFTVDKDGYIKNTEKLNYGKEHQYKLTVTAYDCGKKRATEDVLVKISIKPTCTPGWQGWNNRIEYEPGTGALAVFPNIHLETCDEPVASVQATVELETSHIGKGCDRDTYSEKSLHRLCGAAAGTAELLPSPSGSLNWTMGLPTDNGHDSDQVFEFNGTQAVRIPDGVVSVSPKEPFTISVWMRHGPFGRKKETILCSSDKTDMNRHHYSLYVHGCRLIFLFRQDPSEEKKYRPAEFHWKLNQVCDEEWHHYVLNVEFPSVTLYVDGTSHEPFSVTEDYPLHPSKIETQLVVGACWQGGDLHMTQFFRGNLAGLTLRSGKLADKKVIDCLYTCKEGLDLQVLEDSGRGVQIQAHPSQLVLTLEGEDLGELDKAMQHISYLNSRQFPTPGIRRLKITSTIKCFNEATCISVPPVDGYVMVLQPEEPKISLSGVHHFARAASEFESSEGVFLFPELRIISTITREVEPEGDGAEDPTVQESLVSEEIVHDLDTCEVTVEGEELNHEQESLEVDMARLQQKGIEVSSSELGMTFTGVDTMASYEEVLHLLRYRNWHARSLLDRKFKLICSELNGRYISNEFKVEVNVIHTANPMEHANHMAAQPQFVHPEHRSFVDLSGHNLANPHPFAVVPSTATVVIVVCVSFLVFMIILGVFRIRAAHRRTMRDQDTGKENEMDWDDSALTITVNPMETYEDQHSSEEEEEEEEEEESEDGEEEDDITSAESESSEEEEGEQGDPQNATRQQQLEWDDSTLSY

SEQ ID NO: 6842 - protein, 66 aa, Artificial Sequence
  Synthetic polypeptide
QCCLYWHHRWLASISSNSQMSSNLCTLDLAAMTGVLACRTLNQPRRQFHSSCCLAWLLLDLQLRLW

SEQ ID NO: 6843 - protein, 66 aa, Artificial Sequence; identical to SEQ ID NO: 6842
  Synthetic polypeptide

SEQ ID NO: 6844 - protein, 10 aa, Artificial Sequence
  Synthetic polypeptide
SVAYIGIIGG

SEQ ID NO: 6845 - protein, 10 aa, Artificial Sequence
  Synthetic polypeptide
SVAYIGIIGG

SEQ ID NO: 6846 - protein, 690 aa, Artificial Sequence
  Synthetic polypeptide
VLPILASSVVSLYFLELTDVFKPVHSGFSCYDRSLSMPYIEPTQEAIPFLMLLSLAFAGPAITIMVGEGILYCCLSKRRNGVGLEPNINAGGCNFNSFLRRAVRFVGVHVFGLCSTALITDIIQLSTGYQAPYFLTVCKPNYTSLNVSCKENSYIVEDICSGSDLTVINSGRKSFPSQHATLAAFAAVYVSMYFNSTLTDSSKLLKPLLVFTFIICGIICGLTRITQYKNHPVDVYCGFLIGGGIALYLGLYAVGNFLPSDESMFQHRDALRSLTDLNQDPNRLLSAKNGSSSDGIAHTEGILNRNHRDASSLTNLKRANADVEIITPRSPMGKENMVTFSNTLPRANTPSVEDPVRRNASIHASMDSARSKQLLTQWKNKNESRKLSLQVIEPEPGQSPPRSIEMRSSSEPSRVGVNGDHHGPGNQYLKIQPGAVPGCNNSMPGGPRVSIQSRPGSSQLVHIPEETQENISTSPKSSSARAKWLKAAEKTVACNRSNSQPRIMQVIAMSKQQGVLQSSPKNTEGSTVSCTGSIRYKTLTDHEPSGIVRVEAHPENNRPIIQIPSTEGEGSGSWKWKAPEKGSLRQTYELNDLNRDSESCESLKDSFGSGDRKRSNIDSNEHHHHGITTIRVTPVEGSEIGSETLSISSSRDSTLRRKGNIILIPERSNSPENTRNIFYKGTSPTRAYKD

SEQ ID NO: 6847 - protein, 632 aa, Artificial Sequence
  Synthetic polypeptide
VLPILASSVVSLYFLELTDVFKPVHSGFSCYDRSLSMPYIEPTQEAIPFLMLLSLAFAGPAITIMVGEGILYCCLSKRRNGVGLEPNINAGGCNFNSFLRRAVRFVGVHVFGLCSTALITDIIQLSTGYQAPYFLTVCKPNYTSLNVSCKENSYIVEDICSGSDLTVINSGRKSFPSQHATLAAFAAVYVSGLYAVGNFLPSDESMFQHRDALRSLTDLNQDPNRLLSAKNGSSSDGIAHTEGILNRNHRDASSLTNLKRANADVEIITPRSPMGKENMVTFSNTLPRANTPSVEDPVRRNASIHASMDSARSKQLLTQWKNKNESRKLSLQVIEPEPGQSPPRSIEMRSSSEPSRVGVNGDHHGPGNQYLKIQPGAVPGCNNSMPGGPRVSIQSRPGSSQLVHIPEETQENISTSPKSSSARAKWLKAAEKTVACNRSNSQPRIMQVIAMSKQQGVLQSSPKNTEGSTVSCTGSIRYKTLTDHEPSGIVRVEAHPENNRPIIQIPSTEGEGSGSWKWKAPEKGSLRQTYELNDLNRDSESCESLKDSFGSGDRKRSNIDSNEHHHHGITTIRVTPVEGSEIGSETLSISSSRDSTLRRKGNIILIPERSNSPENTRNIFYKGTSPTRAYKD

SEQ ID NO: 6848 - protein, 102 aa, Artificial Sequence
  Synthetic polypeptide
GQAWGLMPVIPALREAEAGGSPECLIASRSMPLASRTLWLAETSSHHQIWRESSGFLEGTYSTAPCPWTSSTSPAPCPCILATAALSRACISVEVGLILEEV

SEQ ID NO: 6849 - protein, 15 aa, Artificial Sequence
  Synthetic polypeptide
FQHFGRPRQADHPSV

SEQ ID NO: 6850 - protein, 121 aa, Artificial Sequence
  Synthetic polypeptide
PGVGAHACNSSTSGGRGRRITRVFDCIEVYAPGFKDSVVGRDILTPPDLERIFGLPGGNIFHCAMSLDQLYFARPVPLHSGYRCPLQGLYLCGSGAHPGGGVMGAAGRNAAHVAFRDLKSM

SEQ ID NO: 6851 - protein, 381 aa, Artificial Sequence
  Synthetic polypeptide
PNAWLKLAYRTDDCHPWVLPVVKKVEQKIANDNSLNHEYLPILGLAEFRSCASRLALGDDSPALKEKRVGGVQSLGGTGALRIGADFLARWYNGTNNKNTPVYVSSPTWENHNAVFSAAGFKDIRSYRYWDAEKRGLDLQGFLNDLENAPEFSIVVLHACAHNPTGIDPTPEQWKQIASVMKHRFLFPFFDSAYQGFASGNLERDAWAIRYFVSEGFEFFCAQSFSKNFGLYNERVGNLTVVGKEPESILQVLSQMEKIVRITWSNPPAQGARIVASTLSNPELFEEWTGNVKTMADRILTMRSELRARLEALKTPGTWNHITDQIGMFSFTGLNPKQVEYLVNEKHIYLLPSGRINVSGLTTKNLDYVATSIHEAVTKIQ

SEQ ID NO: 6852 - protein, 381 aa, Artificial Sequence; identical to SEQ ID NO: 6851
  Synthetic polypeptide

SEQ ID NO: 6853 - protein, 31 aa, Artificial Sequence
  Synthetic polypeptide
AVSSTRMGTTSALMFAQHLAQCLAQISISHG

SEQ ID NO: 6854 - protein, 31 aa, Artificial Sequence; identical to SEQ ID NO: 6853
  Synthetic polypeptide

SEQ ID NO: 6855 - protein, 30 aa, Artificial Sequence
  Synthetic polypeptide
CRSSKTSCSPGLWGLAQHIARMTAIPGFCQ

SEQ ID NO: 6856 - protein, 30 aa, Artificial Sequence; identical to SEQ ID NO: 6855
  Synthetic polypeptide

SEQ ID NO: 6857 - protein, 21 aa, Artificial Sequence
  Synthetic polypeptide
ADPQRPHAPQASGALHSISHG

SEQ ID NO: 6858 - protein, 21 aa, Artificial Sequence
  Synthetic polypeptide
ADPQRPHAPQASGALHSISHG

SEQ ID NO: 6859 - protein, 390 aa, Artificial Sequence
  Synthetic polypeptide
QILKDLMLPRPLGPCTAYRTDDCHPWVLPVVKKVEQKIANDNSLNHEYLPILGLAEFRSCASRLALGDDSPALKEKRVGGVQSLGGTGALRIGADFLARWYNGTNNKNTPVYVSSPTWENHNAVFSAAGFKDIRSYRYWDAEKRGLDLQGFLNDLENAPEFSIVVLHACAHNPTGIDPTPEQWKQIASVMKHRFLFPFFDSAYQGFASGNLERDAWAIRYFVSEGFEFFCAQSFSKNFGLYNERVGNLTVVGKEPESILQVLSQMEKIVRITWSNPPAQGARIVASTLSNPELFEEWTGNVKTMADRILTMRSELRARLEALKTPGTWNHITDQIGMFSFTGLNPKQVEYLVNEKHIYLLPSGRINVSGLTTKNLDYVATSIHEAVTKIQ

SEQ ID NO: 6860 - protein, 390 aa, Artificial Sequence; identical to SEQ ID NO: 6859
  Synthetic polypeptide

SEQ ID NO: 6861 - protein, 95 aa, Artificial Sequence
  Synthetic polypeptide
IHLSIHYNNLKLLKNINVDLHAPIRESYKIKWGKDAEQQDQFFLPLPSLLVLHCAHSESISPSAGGIPGTLLHILSPFTYVNHRLSTLECFITTR

SEQ ID NO: 6862 - protein, 610 aa, Artificial Sequence
  Synthetic polypeptide
SGGKMQNSRISFSYLCPASWYFTVPTVSPFLRQRVAFLGLFFISCLLLLMLIIDFRHWSASLPRDRQYERYLARVGELEATDTEDPNLNYGLVVDCGSSGSRIFVYFWPRHNGNPHDLLDIKQMRDRNSQPVVKKIKPGISAMADTPEHASDYLRPLLSFAAAHVPVKKHKETPLYILCTAGMRLLPERKQLAILADLVKDLPLEFDFLFSQSQAEVISGKQEGVYAWIGINFVLGRFDHEDESDAEATQELAAGRRRTVGILDMGGASLQIAYEVPTSTSVLPAKQEEAAKILLAEFNLGCDVQHTEHVYRVYVTTFLGFGGNFARQRYEDLVLNETLNKNRLLGQKTGLSPDNPFLDPCLPVGLTDVVERNSQVLHVRGRGDWVSCGAMLSPLLARSNTSQASLNGIYQSPIDFNNSEFYGFSEFFYCTEDVLRIGGRYHGPTFAKAAQDYCGMAWSVLTQRFKNGLFSSHADEHRLKYQCFKSAWMYQVLHEGFHFPYDYPNLRTAQLVYDREVQWTLGAILYKTRFLPLRDLRQEGVRQAHGSWFRLSFVYNHYLFFACILVVLLAIFLYLLRLRRIHHRQTRASAPLDLLWLEEVVPMMGVQVGP

SEQ ID NO: 6863 - protein, 28 aa, Artificial Sequence
  Synthetic polypeptide
NKVGERCRTAGSVFPTSAQPPGTSLCPQ

SEQ ID NO: 6864 - protein, 18 aa, Artificial Sequence
  Synthetic polypeptide
EKSTWQEGKLISGRLQHK

SEQ ID NO: 6865 - protein, 24 aa, Artificial Sequence
  Synthetic polypeptide
YQGDFSTNDRRKFELPWPFKHYYS

SEQ ID NO: 6866 - protein, 82 aa, Artificial Sequence
  Synthetic polypeptide
ISFAEVQPCYITAQEVMQLHILYSTFMREKHMAGRQADIRETSAQMIEENLNCLGHLSTIIHEANEEQGNSMMNLDWSWLTE

SEQ ID NO: 6867 - protein, 6 aa, Artificial Sequence
  Synthetic polypeptide
DYTSGR

SEQ ID NO: 6868 - protein, 41 aa, Artificial Sequence
  Synthetic polypeptide
FRVLFFSPPETAQVQGDETIHQAGDLRARLQNEIPKAFRIQ

SEQ ID NO: 6869 - protein, 768 aa, Artificial Sequence
  Synthetic polypeptide
ATLGSSLLGRIWDRDHSRVASGRCLLWEPFQQSCSNSEFSSSARQRQLRCKEMRLYIRQVTLEQDSRMKFLKLLGYSKDELQKKVATWLKSDVGLGESPQPKGNDLNSDRQQAFCSQASKHTTKEASASSAFFDELVPQNMTPWEIPITKDIDGLLSQALLLGELGPAVELCLKEERFADAIILAQAGGTDLLKQTQERYLAKKKTKISSLLACVVQKNWKDVVCTCSLKNWREALALLLTYSGTEKFPELCDMLGTRMEQEGSRALTSEARLCYVCSGSVERLVECWAKCHQALSPMALQDLMEKVMVLNRSLEQLRGPHGVSPGPATTYRVTQYANLLAAQGSLATAMSFLPRDCAQPPVQQLRDRLFHAQGSAVLGQQSPPFPFPRIVVGATLHSKETSSYRLGSQPSHQVPTPSPRPRVFTPQSSPAMPLAPSHPSPYQGPRTQNISDYRAPGPQAIQPLPLSPGVRPASSQPQLLGGQRVQVPNPVGFPGTWPLPGSPLPMACPGIMRPGSTSLPETPRLFPLLPLRPLGPGRMVSHTPAPPASFPVPYLPGDPGAPCSSVLPTTGILTPHPGPQDSWKEAPAPRGNLQRNKLPETFMPPAPITAPVMSLTPELQGILPSQPPVSSVSHAPPGVPGELSLQLQHLPPEKMERKELPPEHQSLKSSFEALLQRCSLSATDLKTKRKLEEAAQRLEYLYEKLCEGTLSPHVVAGLHEVARCVDAGSFEQGLAVHAQVAGCSSFSEVSSFMPILKAVLIIAHKLLV

SEQ ID NO: 6870 - protein, 29 aa, Artificial Sequence
  Synthetic polypeptide
SWRCPLHQDAGHRGGAGADPRGQAEGHGK

SEQ ID NO: 6871 - protein, 29 aa, Artificial Sequence
  Synthetic polypeptide
SWRCPLHQDAGHRGGAGADPRGQAEGHGK

SEQ ID NO: 6872 - protein, 143 aa, Artificial Sequence
  Synthetic polypeptide
KAAACDRGDVPCTRMLATGEEQVRTHEAKLKAMASELREHRAAQLGKKGRGKEAEEQRQKEAYLEFEKSRYSTYAALLRVKLKAGSEELDAVEAALAQAGSTEDGLPPSHSSPSLQPKPSSQPRAQRHSSEPRPGAGSGRRKP

SEQ ID NO: 6873 - protein, 143 aa, Artificial Sequence; identical to SEQ ID NO: 6872
  Synthetic polypeptide

SEQ ID NO: 6874 - protein, 29 aa, Artificial Sequence
  Synthetic polypeptide
RLLRVIVEMSPAPGCWPQGRSRCGPTRPS

SEQ ID NO: 6875 - protein, 29 aa, Artificial Sequence
  Synthetic polypeptide
RLLRVIVEMSPAPGCWPQGRSRCGPTRPS

SEQ ID NO: 6876 - protein, 111 aa, Artificial Sequence
  Synthetic polypeptide
ASMVGSYISVTSIRALNCQKKSGHTKFYGVSVWVVLYTGRNLLSLLKKLGSALHVWSLPISLQFKTRNWKELSVTVVLFLQHFASSNTLRQDQPRDAKLFTMEELQDMKKN

SEQ ID NO: 6877 - protein, 9 aa, Artificial Sequence
  Synthetic polypeptide
PAWWGVIFQ

SEQ ID NO: 6878 - protein, 200 aa, Artificial Sequence
  Synthetic polypeptide
QHGGELYFSDVYTSLELPEEIRTHKVLWGECLGGALYWKELAVLAQKIGFCPPRLVTANLITIQNKELERVIGDCRFVSATFRLFKHSKTGPTKRCQVIYNGGITGHEKELMFDANFTFKEGEIVEVDEETAAILKNSRFAQDFLIRPIGEKLPTSGGCSALELKDIITDPFKLAEESDSMKSRCVPDAAGGCCGTKKSC

SEQ ID NO: 6879 - protein, 3 aa, Artificial Sequence
  Synthetic polypeptide
EFR

SEQ ID NO: 6880 - protein, 100 aa, Artificial Sequence
  Synthetic polypeptide
PQIFGRLSQEDCLSLGVQVSVWVVLYTGRNLLSLLKKLGSALHVWSLPISLQFKTRNWKELSVTVVLFLQHFASSNTLRQDQPRDAKLFTMEELQDMKKN

SEQ ID NO: 6881 - protein, 198 aa, Artificial Sequence
  Synthetic polypeptide
WTQWHTPVTPDIWEAESGGLLEPRSSGECLGGALYWKELAVLAQKIGFCPPRLVTANLITIQNKELERVIGDCRFVSATFRLFKHSKTGPTKRCQVIYNGGITGHEKELMFDANFTFKEGEIVEVDEETAAILKNSRFAQDFLIRPIGEKLPTSGGCSALELKDIITDPFKLAEESDSMKSRCVPDAAGGCCGTKKSC

SEQ ID NO: 6882 - protein, 56 aa, Artificial Sequence
  Synthetic polypeptide
PQIFGRLSQEDCLSLGVQVTVVLFLQHFASSNTLRQDQPRDAKLFTMEELQDMKKN

SEQ ID NO: 6883 - protein, 3 aa, Artificial Sequence
  Synthetic polypeptide
EFR

SEQ ID NO: 6884 - protein, 154 aa, Artificial Sequence
  Synthetic polypeptide
WTQWHTPVTPDIWEAESGGLLEPRSSGDCRFVSATFRLFKHSKTGPTKRCQVIYNGGITGHEKELMFDANFTFKEGEIVEVDEETAAILKNSRFAQDFLIRPIGEKLPTSGGCSALELKDIITDPFKLAEESDSMKSRCVPDAAGGCCGTKKSC

SEQ ID NO: 6885 - protein, 13 aa, Artificial Sequence
  Synthetic polypeptide
NRLFKSGYNHRSI

SEQ ID NO: 6886 - protein, 97 aa, Artificial Sequence
  Synthetic polypeptide
TDPSCRAKALQSYPKKLVQVTKGRRSLDMPHYSLLPFGIQTLLTSITIKTDLKTDRTDSLNLDIITDPFKLAEESDSMKSRCVPDAAGGCCGTKKSC

SEQ ID NO: 6887 - protein, 3 aa, Artificial Sequence
  Synthetic polypeptide
IWI

SEQ ID NO: 6888 - protein, 114 aa, Artificial Sequence
  Synthetic polypeptide
KQDPSPSSDLLSQKLQFNKLPRRPEDCVHKGQDHHCRYPQLRQQWWWWQWRRWRCWWRWRRPLGTSASLVPLRLLLQLVEVAAGPAAHLAATPGAALRPHCSGGGGEEAEGACG

SEQ ID NO: 6889 - protein, 114 aa, Artificial Sequence; identical to SEQ ID NO: 6888
  Synthetic polypeptide

SEQ ID NO: 6890 - protein, 1100 aa, Artificial Sequence
  Synthetic polypeptide
VRSCSSTSFLGDLKTVSTKGKTTTADIHSYGSSGGGGSGGGGGVGGAGGGPWGPAPAWCPCGSCCSWWKWLLGLLLTWLLLLGLLFGLIALAEEVRKLKARVDELERIRRSILPYGDSMDRIEKDRLQGMAPAAGADLDKIGLHSDSQEELWMFVRKKLMMEQENGNLRGSPGPKGDMGSPGPKGDRGFPGTPGIPGPLGHPGPQGPKGQKGSVGDPGMEGPMGQRGREGPMGPRGEAGPPGSGEKGERGAAGEPGPHGPPGVPGSVGPKGSSGSPGPQGPPGPVGLQGLRGEVGLPGVKGDKGPMGPPGPKGDQGEKGPRGLTGEPGMRGLPGAVGEPGAKGAMGPAGPDGHQGPRGEQGLTGMPGIRGPPGPSGDPGKPGLTGPQGPQGLPGTPGRPGIKGEPGAPGKIVTSEGSSMLTVPGPPGPPGAMGPPGPPGAPGPAGPAGLPGHQEVLNLQGPPGPPGPRGPPGPSIPGPPGPRGPPGEGLPGPPGPPGSFLSNSETFLSGPPGPPGPPGPKGDQGPPGPRGHQGEQGLPGFSTSGSSSFGLNLQGPPGPPGPQGPKGDKGDPGVPGALGIPSGPSEGGSSSTMYVSGPPGPPGPPGPPGSISSSGQEIQQYISEYMQSDSIRSYLSGVQGPPGPPGPPGPVTTITGETFDYSELASHVVSYLRTSGYGVSLFSSSISSEDILAVLQRDDVRQYLRQYLMGPRGPPGPPGASGDGSLLSLDYAELSSRILSYMSSSGISIGLPGPPGPPGLPGTSYEELLSLLRGSEFRGIVGPPGPPGPPGIPGNVWSSISVEDLSSYLHTAGLSFIPGPPGPPGPPGPRGPPGVSGALATYAAENSDSFRSELISYLTSPDVRSFIVGPPGPPGPQGPPGDSRLLSTDASHSRGSSSSSHSSSVRRGSSYSSSMSTGGGGAGSLGAGGAFGEAAGDRGPYGTDIGPGGGYGAAAEGGMYAGNGGLLGADFAGDLDYNELAVRVSESMQRQGLLQGMAYTVQGPPGQPGPQGPPGISKVFSAYSNVTADLMDFFQTYGAIQGPPGQKGEMGTPGPKGDRGPAGPPGHPGPPGPRGHKGEKGDKGDQVYAGRRRRRSIAVKP

SEQ ID NO: 6891 - protein, 1018 aa, Artificial Sequence
  Synthetic polypeptide
VRSCSSTSFLGDLKTVSTKGKTTTADIHSYGSSGGGGSGGGGGVGGAGGGPWGPAPAWCPCGSCCSWWKWLLGLLLTWLLLLGLLFGLIALAEEVRKLKARVDELERIRRSILPYGDSMDRIEKDRLQGMAPAAGADLDKIGLHSDSQEELWMFVRKKLMMEQENGNLRGSPGPKGDMGSPGPKGDRGFPGTPGIPGPLGHPGPQGPKGQKGSVGDPGMEGPMGQRGREGPMGPRGEAGPPGSGEKGERGAAGEPGPHGPPGVPGSVGPKGSSGSPGPQGPPGPVGLQGLRGEVGLPGVKGDKGPMGPPGPKGDQGEKGPRGLTGEPGMRGLPGAVGEPGAKGAMGPAGPDGHQGPRGEQGLTGMPGIRGPPGPSGDPGKPGLTGPQGPQGLPGTPGRPGIKGEPGAPGKIVTSEGSSMLTVPGPPGPPGAMGPPGPPGAPGPAGPAGLPGHQEVLNLQGPPGPPGPRGPPGPSIPGPPGPRGPPGEGLPGPPGPPGSFLSNSETFLSGPPGPPGPPGPKGDQGDPGVPGALGIPSGPSEGGSSSTMYVSGPPGPPGPPGPPGSISSSGQEIQQYISEYMQSDSIRSYLSGVQGPPGPPGPPGPVTTITGETFDYSELASHVVSYLRTSGYGVSLFSSSISSEDILAVLQRDDVRQYLRQYLMGPRGPPGPPGASGDGSLLSLDYAELSSRILSYMSSSGISIGLPGPPGPPGLPGTSYEELLSLLRAAGLSFIPGPPGPPGPPGPRGPPGVSGALATYAAENSDSFRSELISYLTSPDVRSFIVGPPGPPGPQGPPGDSRLLSTDASHSRGSSSSSHSSSVRRGSSYSSSMSTGGGGAGSLGAGGAFGEAAGDRGPYGTDIGPGGGYGAAAEGGMYAGNGGLLGADFAGDLDYNELAVRVSESMQRQGLLQGMAYTVQGPPGQPGPQGPPGISKVFSAYSNVTADLMDFFQTYGAIQGPPGQKGEMGTPGPKGDRGPAGPPGHPGPPGPRGHKGEKGDKGDQVYAGRRRRRSIAVKP

SEQ ID NO: 6892 - protein, 232 aa, Artificial Sequence
  Synthetic polypeptide
QAQLFSCVSLYCTSQVSYVSYKVEVCGSPAWSKSVSTIFLTVCAHFMSLSHFGLLHRAFSVFLFNTENKLLLQQRSDAKITFPGCFTNTCCSHPLSNPAELEESDALGVRRAAQRRLKAELGIPLEEVPPEEINYLTRIHYKAQSDGIWGEHEIDYILLVRKNVTLNPDPNEIKSYCYVSKEELKELLKKAASGEIKITPWFKIIAATFLFKWWDNLNHLNQFVDHEKIYRM

SEQ ID NO: 6893 - protein, 54 aa, Artificial Sequence
  Synthetic polypeptide
QYVLTSCLSHILDYCIELLVSSYSTPKISFCYSKDQMLRLPFQVVLRIRVVVIH

SEQ ID NO: 6894 - protein, 54 aa, Artificial Sequence; identical to SEQ ID NO: 6893
  Synthetic polypeptide

SEQ ID NO: 6895 - protein, 54 aa, Artificial Sequence; identical to SEQ ID NO: 6893
  Synthetic polypeptide

SEQ ID NO: 6896 - protein, 58 aa, Artificial Sequence
  Synthetic polypeptide
GTTVFMCITLLHFTGIICFLQSGGLWQPCMEQVCQHHLSNSMCSLHVSLTFWIIASSF

SEQ ID NO: 6897 - protein, 58 aa, Artificial Sequence; identical to SEQ ID NO: 6896
  Synthetic polypeptide

SEQ ID NO: 6898 - protein, 58 aa, Artificial Sequence; identical to SEQ ID NO: 6896
  Synthetic polypeptide

SEQ ID NO: 6899 - protein, 154 aa, Artificial Sequence
  Synthetic polypeptide
QAQLFSCVSLYCTSQVSYVSYKVEVCGSPAWSKSVSTIFLTVCAHFMSLSHFGLLHRAFSVFLFNTENKLLLQQRSDAKITFPGCFTNTCCSHPLSNPAELEESDALGVRRAAQRRLKAELGIPLEEVTSSPTQPYKLKPKHTIKRFLIKFLNS

SEQ ID NO: 6900 - protein, 127 aa, Artificial Sequence
  Synthetic polypeptide
QAQLFSCVSLYCTSQVSYVSYKVEVCGSPAWSKSVSTIFLTVCAHFMSLSHFGLLHRAFSVFLFNTENKLLLQQRSDAKITFPGCFTNTCCSHPLSNPAELEESDALGVRRAAQRRLKAELGIPLEE

SEQ ID NO: 6901 - protein, 83 aa, Artificial Sequence
  Synthetic polypeptide
QAQLFSCVSLYCTSQVSYVSYKVEVCGSPAWSKSVSTIFLTDYCIELLVSSYSTPKISFCYSKDQMLRLPFQVVLRIRVVVIH

SEQ ID NO: 6902 - protein, 83 aa, Artificial Sequence; identical to SEQ ID NO: 6901
  Synthetic polypeptide

SEQ ID NO: 6903 - protein, 83 aa, Artificial Sequence; identical to SEQ ID NO: 6901
  Synthetic polypeptide

SEQ ID NO: 6904 - protein, 220 aa, Artificial Sequence
  Synthetic polypeptide
GTTVFMCITLLHFTGIICFLQSGGLWQPCMEQVCQHHLSNRLLHRAFSVFLFNTENKLLLQQRSDAKITFPGCFTNTCCSHPLSNPAELEESDALGVRRAAQRRLKAELGIPLEEVPPEEINYLTRIHYKAQSDGIWGEHEIDYILLVRKNVTLNPDPNEIKSYCYVSKEELKELLKKAASGEIKITPWFKIIAATFLFKWWDNLNHLNQFVDHEKIYRM

SEQ ID NO: 6905 - protein, 142 aa, Artificial Sequence
  Synthetic polypeptide
GTTVFMCITLLHFTGIICFLQSGGLWQPCMEQVCQHHLSNRLLHRAFSVFLFNTENKLLLQQRSDAKITFPGCFTNTCCSHPLSNPAELEESDALGVRRAAQRRLKAELGIPLEEVTSSPTQPYKLKPKHTIKRFLIKFLNS

SEQ ID NO: 6906 - protein, 115 aa, Artificial Sequence
  Synthetic polypeptide
GTTVFMCITLLHFTGIICFLQSGGLWQPCMEQVCQHHLSNRLLHRAFSVFLFNTENKLLLQQRSDAKITFPGCFTNTCCSHPLSNPAELEESDALGVRRAAQRRLKAELGIPLEE

SEQ ID NO: 6907 - protein, 236 aa, Artificial Sequence
  Synthetic polypeptide
GGRGVCGKGVRVWEGRARVGGAGAGRGARAWGECEHGYASSFPSMPSPRLQHSKPPRRLSRAQKHSSGSSNTSTANRSTHNELEKNRRAHLRLCLERLKVLIPLGPDCTRHTTLGLLNKAKAHIKKLEEAERKSQHQLENLEREQRFLKWRLEQLQGPQEMERIRMDSIGSTISSDRSDSEREEIEVDVESTEFSHGEVDNISTTSISDIDDHSSLPSIGSDEGYSSASVKLSFTS

SEQ ID NO: 6908 - protein, 236 aa, Artificial Sequence; identical to SEQ ID NO: 6907
  Synthetic polypeptide

SEQ ID NO: 6909 - protein, 58 aa, Artificial Sequence
  Synthetic polypeptide
GGGACAGRACACGRGVRVWEGRVRGGARVRGESVNMATPLHSRPCRAPDCSIQSPHGG

SEQ ID NO: 6910 - protein, 58 aa, Artificial Sequence; identical to SEQ ID NO: 6909
  Synthetic polypeptide

SEQ ID NO: 6911 - protein, 58 aa, Artificial Sequence; identical to SEQ ID NO: 6909
  Synthetic polypeptide

SEQ ID NO: 6912 - protein, 58 aa, Artificial Sequence; identical to SEQ ID NO: 6909
  Synthetic polypeptide

SEQ ID NO: 6913 - protein, 33 aa, Artificial Sequence
  Synthetic polypeptide
GEGRVREGRARVGGACACGRGGCGEGRACVGRV

SEQ ID NO: 6914 - protein, 33 aa, Artificial Sequence; identical to SEQ ID NO: 6913
  Synthetic polypeptide

SEQ ID NO: 6915 - protein, 33 aa, Artificial Sequence; identical to SEQ ID NO: 6913
  Synthetic polypeptide

SEQ ID NO: 6916 - protein, 33 aa, Artificial Sequence; identical to SEQ ID NO: 6913
  Synthetic polypeptide

SEQ ID NO: 6917 - protein, 167 aa, Artificial Sequence
  Synthetic polypeptide
GGRGVCGKGVRVWEGRARVGGAGAGRGARAWGECEHGYASSFPSMPSPRLQHSKPPRRLSRAQKHSSGSSNTSTANRRAHLRLCLERLKVLIPLGPDCTRHTTLGLLNKAKAHIKKLEEAERKSQHQLENLEREQRFLKWRLEQLQGPQEMERIRMDSIGSTISSDR

SEQ ID NO: 6918 - protein, 226 aa, Artificial Sequence
  Synthetic polypeptide
GGRGVCGKGVRVWEGRARVGGAGAGRGARAWGECEHGYASSFPSMPSPRLQHSKPPRRLSRAQKHSSGSSNTSTANRRAHLRLCLERLKVLIPLGPDCTRHTTLGLLNKAKAHIKKLEEAERKSQHQLENLEREQRFLKWRLEQLQGPQEMERIRMDSIGSTISSDRSDSEREEIEVDVESTEFSHGEVDNISTTSISDIDDHSSLPSIGSDEGYSSASVKLSFTS

SEQ ID NO: 6919 - protein, 47 aa, Artificial Sequence
  Synthetic polypeptide
GGRGVCGKGVRVWEGRARVGGAGAGRGARAWGGVCAEIVSGGVCERV

SEQ ID NO: 6920 - protein, 47 aa, Artificial Sequence; identical to SEQ ID NO: 6919
  Synthetic polypeptide

SEQ ID NO: 6921 - protein, 47 aa, Artificial Sequence; identical to SEQ ID NO: 6919
  Synthetic polypeptide

SEQ ID NO: 6922 - protein, 47 aa, Artificial Sequence; identical to SEQ ID NO: 6919
  Synthetic polypeptide

SEQ ID NO: 6923 - protein, 210 aa, Artificial Sequence
  Synthetic polypeptide
VEACVRECEHGYASSFPSMPSPRLQHSKPPRRLSRAQKHSSGSSNTSTANRSTHNELEKNRRAHLRLCLERLKVLIPLGPDCTRHTTLGLLNKAKAHIKKLEEAERKSQHQLENLEREQRFLKWRLEQLQGPQEMERIRMDSIGSTISSDRSDSEREEIEVDVESTEFSHGEVDNISTTSISDIDDHSSLPSIGSDEGYSSASVKLSFTS

SEQ ID NO: 6924 - protein, 210 aa, Artificial Sequence; identical to SEQ ID NO: 6923
  Synthetic polypeptide

SEQ ID NO: 6925 - protein, 27 aa, Artificial Sequence
  Synthetic polypeptide
ESVNMATPLHSRPCRAPDCSIQSPHGG

SEQ ID NO: 6926 - protein, 27 aa, Artificial Sequence
  Synthetic polypeptide
ESVNMATPLHSRPCRAPDCSIQSPHGG

SEQ ID NO: 6927 - protein, 27 aa, Artificial Sequence
  Synthetic polypeptide
ESVNMATPLHSRPCRAPDCSIQSPHGG

SEQ ID NO: 6928 - protein, 27 aa, Artificial Sequence
  Synthetic polypeptide
ESVNMATPLHSRPCRAPDCSIQSPHGG

SEQ ID NO: 6929 - protein, 141 aa, Artificial Sequence
  Synthetic polypeptide
VEACVRECEHGYASSFPSMPSPRLQHSKPPRRLSRAQKHSSGSSNTSTANRRAHLRLCLERLKVLIPLGPDCTRHTTLGLLNKAKAHIKKLEEAERKSQHQLENLEREQRFLKWRLEQLQGPQEMERIRMDSIGSTISSDR

SEQ ID NO: 6930 - protein, 200 aa, Artificial Sequence
  Synthetic polypeptide
VEACVRECEHGYASSFPSMPSPRLQHSKPPRRLSRAQKHSSGSSNTSTANRRAHLRLCLERLKVLIPLGPDCTRHTTLGLLNKAKAHIKKLEEAERKSQHQLENLEREQRFLKWRLEQLQGPQEMERIRMDSIGSTISSDRSDSEREEIEVDVESTEFSHGEVDNISTTSISDIDDHSSLPSIGSDEGYSSASVKLSFTS

SEQ ID NO: 6931 - protein, 21 aa, Artificial Sequence
  Synthetic polypeptide
VSERKWPPLKNCPGTAADRVG

SEQ ID NO: 6932 - protein, 21 aa, Artificial Sequence
  Synthetic polypeptide
VSERKWPPLKNCPGTAADRVG

SEQ ID NO: 6933 - protein, 21 aa, Artificial Sequence
  Synthetic polypeptide
VSERKWPPLKNCPGTAADRVG

SEQ ID NO: 6934 - protein, 21 aa, Artificial Sequence
  Synthetic polypeptide
VSERKWPPLKNCPGTAADRVG

SEQ ID NO: 6935 - protein, 815 aa, Artificial Sequence
  Synthetic polypeptide
RTALEQLLTELDDFLKILDQENLSSTALVKKSCLAELLRLYTKSSSSDEEYIYMNKVTINKQQNAESQGKAPEEQGLLPNGEPSQHSSAPQKSLPDLPPPKMIPERKQLAIPKTESPEGYYEEAEPYDTSLNEDGEAVSSSYESYDEEDGSKGKSAPYQWPSPEAGIELMRDARICAFLWRKKWLGQWAKQLCVIKDNRLLCYKSSKDHSPQLDVNLLGSSVIHKEKQVRKKEHKLKITPMNADVIVLGLQSKDQAEQWLRVIQEVSGLPSEGASEGNQYTPDAQRFNCQKPDIAEKYLSASEYGSSVDGHPEVPETKDVKKKCSAGLKLSNLMNLGRKKSTSLEPVERSLETSSYLNVLVNSQWKSRWCSVRDNHLHFYQDRNRSKVAQQPLSLVGCEVVPDPSPDHLYSFRILHKGEELAKLEAKSSEEMGHWLGLLLSESGSKTDPEEFTYDYVDADRVSCIVSAAKNSLLLMQRKFSEPNTYIDGLPSQDRQEELYDDVDLSELTAAVEPTEEATPVADDPNERESDRVYLDLTPVKSFLHGPSSAQAQASSPTLSCLDNATEALPADSGPGPTPDEPCIKCPENLGEQQLESLEPEDPSLRITTVKIQTEQQRISFPPSCPDAVVATPPGASPPVKDRLRVTSAEIKLGKNRTEAEVKRYTEEKERLEKKKEEIRGHLAQLRKEKRELKETLLKCTDKEVLASLEQKLKEIDEECRGEESRRVDLELSIMEVKDNLKKAEAGPVTLGTTVDTTHLENVSPRPKAVTPASAPDCTPVNSATTLKNRPLSVVVTGKGTVLQKAKEWEKKGAS

SEQ ID NO: 6936 - protein, 23 aa, Artificial Sequence
  Synthetic polypeptide
EYFLQLSIRKKMATPEELPWNSC

SEQ ID NO: 6937 - protein, 23 aa, Artificial Sequence
  Synthetic polypeptide
EYFLQLSIRKKMATPEELPWNSC

SEQ ID NO: 6938 - protein, 23 aa, Artificial Sequence
  Synthetic polypeptide
EYFLQLSIRKKMATPEELPWNSC

SEQ ID NO: 6939 - protein, 23 aa, Artificial Sequence
  Synthetic polypeptide
EYFLQLSIRKKMATPEELPWNSC

SEQ ID NO: 6940 - protein, 811 aa, Artificial Sequence
  Synthetic polypeptide
RTALEQLLTELDDFLKILDQENLSSTALVKKSCLAELLRLYTKSSSSDEEYIYMNKVTINKQQNAESQGKAPEEQGLLPNGEPSQHSSAPQKSLPDLPPPKMIPERKQLAIPKTESPEGYYEEAEPYDTSLNEDGEAVSSSYESYDEEDGSKGKSAPYQWPSPEAGIELMRDARICAFLWRKKWLGQWAKQLCVIKDNRLLCYKSSKDHSPQLDVNLLGSSVIHKEKQVRKKEHKLKITPMNADVIVLGLQSKDQAEQWLRVIQEVSGLPSEGASEGNQYTPDAQRFNCQKPDIAEKYLSASEYGSSVDGHPEVPETKDVKKKCSAGLKLSNLMNLGRKKSTSLEPVERSLETSSYLNVLVNSQWKSRWCSVRDNHLHFYQDRNRSKVAQQPLSLVGCEVVPDPSPDHLYSFRILHKGEELAKLEAKSSEEMGHWLGLLLSESGSKTDPEEFTYDYVDADRVSCIVSAAKNSLLLMQRKFSEPNTYIDGLPSQDRQEELYDDVDLSELTAAVEPTEEATPVADDPNERESDRVYLDLTPVKSFLHGPSSAQAQASSPTLSCLDNATEALPADSGPGPTPDEPCIKCPENLGEQQLESLEPEDPSLRITTVKIQTEQQRISFPPSCPDAVVATPPGASPPVKDRLRVTSAEIKLGKNRTEAEVKRYTEEKERLEKKKEEIRGHLAQLRKEKRELKETLLKCTDKEVLASLEQKLKEIDEECRGEESRRVDLELSIMEVKDNLKKAEAGPVTLGTTVDTTHLENPKAVTPASAPDCTPVNSATTLKNRPLSVVVTGKGTVLQKAKEWEKKGAS

SEQ ID NO: 6941 - protein, 868 aa, Artificial Sequence
  Synthetic polypeptide
RTALEQLLTELDDFLKILDQENLSSTALVKKSCLAELLRLYTKSSSSDEEYIYMNKVTINKQQNAESQGKAPEEQGLLPNGEPSQHSSAPQKSLPDLPPPKMRILTLGQISGAQSFSPDGTHLTGTEFLGGWSWRPSQIRLMSPGTHWGDLTATEIPERKQLAIPKTESPEGYYEEAEPYDTSLNEDGEAVSSSYESYDEEDGSKGKSAPYQWPSPEAGIELMRDARICAFLWRKKWLGQWAKQLCVIKDNRLLCYKSSKDHSPQLDVNLLGSSVIHKEKQVRKKEHKLKITPMNADVIVLGLQSKDQAEQWLRVIQEVSGLPSEGASEGNQYTPDAQRFNCQKPDIAEKYLSASEYGSSVDGHPEVPETKDVKKKCSAGLKLSNLMNLGRKKSTSLEPVERSLETSSYLNVLVNSQWKSRWCSVRDNHLHFYQDRNRSKVAQQPLSLVGCEVVPDPSPDHLYSFRILHKGEELAKLEAKSSEEMGHWLGLLLSESGSKTDPEEFTYDYVDADRVSCIVSAAKNSLLLMQRKFSEPNTYIDGLPSQDRQEELYDDVDLSELTAAVEPTEEATPVADDPNERESDRVYLDLTPVKSFLHGPSSAQAQASSPTLSCLDNATEALPADSGPGPTPDEPCIKCPENLGEQQLESLEPEDPSLRITTVKIQTEQQRISFPPSCPDAVVATPPGASPPVKDRLRVTSAEIKLGKNRTEAEVKRYTEEKERLEKKKEEIRGHLAQLRKEKRELKETLLKCTDKEVLASLEQKLKEIDEECRGEESRRVDLELSIMEVKDNLKKAEAGPVTLGTTVDTTHLENVSPRPKAVTPASAPDCTPVNSATTLKNRPLSVVVTGKGTVLQKAKEWEKKGAS

SEQ ID NO: 6942 - protein, 291 aa, Artificial Sequence
  Synthetic polypeptide
RTALEQLLTELDDFLKILDQENLSSTALVKKSCLAELLRLYTKSSSSDEEYIYMNKVTINKQQNAESQGKAPEEQGLLPNGEPSQHSSAPQKSLPDLPPPKMIPERKQLAIPKTESPEGYYEEAEPYDTSLNEDGEAVSSSYESYDEEDGSKGKSAPYQWPSPEAGIELMRDARICAFLWRKKWLGQWAKQLCVIKDNRLLCYKSSKDHSPQLDVNLLGSSVIHKEKQVRKKEHKLKITPMNADVIVLGLQSKDQAEQWLRVIQEVSGLPSEGASEGNQYTPDAQRFNCQK

SEQ ID NO: 6943 - protein, 62 aa, Artificial Sequence
  Synthetic polypeptide
LGHENSTLIGGICAVIERQLQFLLVLSCPLAFCHGMTQQEGPHQMPAVWSSTFQPSELQPFD

SEQ ID NO: 6944 - protein, 62 aa, Artificial Sequence; identical to SEQ ID NO: 6943
  Synthetic polypeptide

SEQ ID NO: 6945 - protein, 62 aa, Artificial Sequence; identical to SEQ ID NO: 6943
  Synthetic polypeptide

SEQ ID NO: 6946 - protein, 293 aa, Artificial Sequence
  Synthetic polypeptide
HSKKALTRCQLFGLLLSSLQNYSLLIDYQFTFSLLQEDDRHHTAINFIANPEQSNKNLDISINASNNFNLNITWSVGSTAGTISGEETSIVSKNNIKEYRDSFSYEKFNFRSNPNITFYVYVSNFSWPIKIQIAFSQHNTIMDLVQFFVTFFSCFLSLLLVAAVVWKIKQTCWASRRREQLLRERQQMASRPFASVDVALEVGAEQTEFLRGPLEGAPKPIAIEPCAGNRAAVLTVFLCLPRGSSGAPPPGQSGLAIASALIDISQQKASDSKDKTSGVRNRKHLSTRQGTCV

SEQ ID NO: 6947 - protein, 293 aa, Artificial Sequence; identical to SEQ ID NO: 6946
  Synthetic polypeptide

SEQ ID NO: 6948 - protein, 44 aa, Artificial Sequence
  Synthetic polypeptide
KATSVPSCSLLPFGLLPWDDTARRPSPDASCLVFYFPAFRTTAF

SEQ ID NO: 6949 - protein, 44 aa, Artificial Sequence; identical to SEQ ID NO: 6948
  Synthetic polypeptide

SEQ ID NO: 6950 - protein, 44 aa, Artificial Sequence; identical to SEQ ID NO: 6948
  Synthetic polypeptide

SEQ ID NO: 6951 - protein, 46 aa, Artificial Sequence
  Synthetic polypeptide
HSKKALTRCQLFGLLLSSLQNYSLLIDYQFTFSLLQEDDRHHTAIN

SEQ ID NO: 6952 - protein, 37 aa, Artificial Sequence
  Synthetic polypeptide
APVIPTTPEAEISPCGFFYQLPARVKVCQQLSKGKLR

SEQ ID NO: 6953 - protein, 37 aa, Artificial Sequence; identical to SEQ ID NO: 6952
  Synthetic polypeptide

SEQ ID NO: 6954 - protein, 37 aa, Artificial Sequence; identical to SEQ ID NO: 6952
  Synthetic polypeptide

SEQ ID NO: 6955 - protein, 37 aa, Artificial Sequence; identical to SEQ ID NO: 6952
  Synthetic polypeptide

SEQ ID NO: 6956 - protein, 37 aa, Artificial Sequence; identical to SEQ ID NO: 6952
  Synthetic polypeptide

SEQ ID NO: 6957 - protein, 216 aa, Artificial Sequence
  Synthetic polypeptide
SQLLQRLRSRLADFFTNCQPESRSVSSCLKENYADCLLAYSGLIGTVMTPNYIDSSSLSVAPWCDCSNSGNDLEECLKFLNFFKDNTCLKNAIQAFGNGSDVTVWQPAFPVQTTTATTTTALRVKNKPLGPAGSENEIPTHVLPPCANLQAQKLKSNVSGNTHLCISNGNYEKEGLGASSHITTKSMAAPPSCGLSPLLVLVVTALSTLLSLTETS

SEQ ID NO: 6958 - protein, 216 aa, Artificial Sequence; identical to SEQ ID NO: 6957
  Synthetic polypeptide

SEQ ID NO: 6959 - protein, 216 aa, Artificial Sequence; identical to SEQ ID NO: 6957
  Synthetic polypeptide

SEQ ID NO: 6960 - protein, 216 aa, Artificial Sequence; identical to SEQ ID NO: 6957
  Synthetic polypeptide

SEQ ID NO: 6961 - protein, 216 aa, Artificial Sequence; identical to SEQ ID NO: 6957
  Synthetic polypeptide

SEQ ID NO: 6962 - protein, 445 aa, Artificial Sequence
  Synthetic polypeptide
VLRRSDGFTSIWHFPCWHSFSFLLPCEEVPFTLIISFLRLPQPFGTEISAVNSSTIQASYFGTDKITRINIAGWKTDGKWQRDMCNVLLQLEDINCINLDWINGSREYIHAVNNLRVVGAEVAYFIDVLMKKFEYSPSKVHLIGHSLGAHLAGEAGSRIPGLGRITGLDPAGPFFHNTPKEVRLDPSDANFVDVIHTNAARILFELGVGTIDACGHLDFYPNGGKHMPGCEDLITPLLKFNFNAYKKEMASFFDCNHARSYQFYAESILNPDAFIAYPCRSYTSFKAGNCFFCSKEGCPTMGHFADRFHFKNMKTNGSHYFLNTGSLSPFARWRHKLSVKLSGSEVTQGTVFLRVGGAVRKTGEFAIVSGKLEPGMTYTKLIDADVNVGNITSVQFIWKKHLFEDSQNKLGAEMVINTSGKYGYKSTFCSQDIMGPNILQNLKPC

SEQ ID NO: 6963 - protein, 32 aa, Artificial Sequence
  Synthetic polypeptide
GFPSHLELRSVRLILQLSKPHILEQTRSPVST

SEQ ID NO: 6964 - protein, 44 aa, Artificial Sequence
  Synthetic polypeptide
LTNESVQGGKCELYLCGLERWLPNWIHTSLAEHQDRGSRSGIFC

SEQ ID NO: 6965 - protein, 359 aa, Artificial Sequence
  Synthetic polypeptide
QTNLFKVESVNCICVDWKGGSRTGYTQASQNIRIVGAEVAYFVEFLQSAFGYSPSNVHVIGHSLGAHAAGEAGRRTNGTIGRITGLDPAEPCFQGTPELVRLDPSDAKFVDVIHTDGAPIVPNLGFGMSQVVGHLDFFPNGGVEMPGCKKNILSQIVDIDGIWEGTRDFAACNHLRSYKYYTDSIVNPDGFAGFPCASYNVFTANKCFPCPSGGCPQMGHYADRYPGKTNDVGQKFYLDTGDASNFARWRYKVSVTLSGKKVTGHILVSLFGNKGNSKQYEIFKGTLKPDSTHSNEFDSDVDVGDLQMVKFIWYNNVINPTLPRVGASKIIVETNVGKQFNFCSPETVREEVLLTLTPC

SEQ ID NO: 6966 - protein, 10 aa, Artificial Sequence
  Synthetic polypeptide
NKRICSRWKV

SEQ ID NO: 6967 - protein, 69 aa, Artificial Sequence
  Synthetic polypeptide
HAVQICSLGATGCTTQPSRRSVTHLPMCMSLATAWVPTLLGRLEGEPMGPLDASQGWTQQNLAFRAHLN

SEQ ID NO: 6968 - protein, 59 aa, Artificial Sequence
  Synthetic polypeptide
EQQAVPHSPVGVRLLTFQCACHWPQPGCPRCWGGWKENQWDHWTHHRVGPSRTLLSGHT

SEQ ID NO: 6969 - protein, 323 aa, Artificial Sequence
  Synthetic polypeptide
PRSNRLYHTAQSAFGYSPSNVHVIGHSLGAHAAGEAGRRTNGTIGRITGLDPAEPCFQGTPELVRLDPSDAKFVDVIHTDGAPIVPNLGFGMSQVVGHLDFFPNGGVEMPGCKKNILSQIVDIDGIWEGTRDFAACNHLRSYKYYTDSIVNPDGFAGFPCASYNVFTANKCFPCPSGGCPQMGHYADRYPGKTNDVGQKFYLDTGDASNFARWRYKVSVTLSGKKVTGHILVSLFGNKGNSKQYEIFKGTLKPDSTHSNEFDSDVDVGDLQMVKFIWYNNVINPTLPRVGASKIIVETNVGKQFNFCSPETVREEVLLTLTPC

SEQ ID NO: 6970 - protein, 8 aa, Artificial Sequence
  Synthetic polypeptide
PSFSNRRI

SEQ ID NO: 6971 - protein, 8 aa, Artificial Sequence
  Synthetic polypeptide
PSFSNRRI

SEQ ID NO: 6972 - protein, 8 aa, Artificial Sequence
  Synthetic polypeptide
PSFSNRRI

SEQ ID NO: 6973 - protein, 693 aa, Artificial Sequence
  Synthetic polypeptide
HLSLLSCFPLSPYDRSTRLFPFAFCQGWKQPEAINTNRCWCHVPCRACRAMSQINFFTNDPASAIGEYEDLRAENQKTKEKCDKIRQERDEAVKKLEEFQKISHMVIEEVNFMQNHLEIEKTCRESAEALATKLNKENKTLKRISMLYMAKLGPDVITEEINIDDEDSTTDTDGAAETCVSVQCQKQIKELRDQIVSVQEEKKILAIELENLKSKLVEVIEEVNKVKQEKTVLNSEVLEQRKVLEKCNRVSMLAVEEYEEMQVNLELEKDLRKKAESFAQEMFIEQNKLKRQSHLLLQSSIPDQQLLKALDENAKLTQQLEEERIQHQQKVKELEEQLENETLHKEIHNLKQQLELLEEDKKELELKYQNSEEKARNLKHSVDELQKRVNQSENSVPPPPPPPPPLPPPPPNPIRSLMSMIRKRSHPSGSGAKKEKATQPETTEEVTDLKRQAVEEMMDRIKKGVHLRPVNQTARPKTKPESSKGCESAVDELKGILGTLNKSTSSRSLKSLDPENSETELERILRRRKVTAEADSSSPTGILATSESKSMPVLGSVSSVTKTALNKKTLEAEFNSPSPPTPEPGEGPRKLEGCTSSKVTFQPPSSIGCRKKYIDGEKQAEPVVVLDPVSTHEPQTKDQVAEKDPTQHKEDEGEIQPENKEDSIENFFPFHFGFEGVLPLAGVTLSTKARDPK

SEQ ID NO: 6974 - protein, 10 aa, Artificial Sequence
  Synthetic polypeptide
TSLQMTQLQQ

SEQ ID NO: 6975 - protein, 10 aa, Artificial Sequence
  Synthetic polypeptide
TSLQMTQLQQ

SEQ ID NO: 6976 - protein, 10 aa, Artificial Sequence
  Synthetic polypeptide
TSLQMTQLQQ

SEQ ID NO: 6977 - protein, 500 aa, Artificial Sequence
  Synthetic polypeptide
HLSLLSCFPLSPYDRSTRLFPFAFCQGWKQPEAINTNRCWCHVPCRACRAMSQINFFTNDPASAIGEYEDLRAENQKTKEKCDKIRQERDEAVKKLEEFQKISHMVIEEVNFMQNHLEIEKTCRESAEALATKLNKENKTLKRISMLYMAKLGPDVITEEINIDDEDSTTDTDGAAETCVSVQCQKQIKELRDQIVSVQEEKKILAIELENLKSKLVEVIEEVNKVKQEKTVLNSEVLEQRKVLEKCNRVSMLAVEEYEEMQVNLELEKDLRKKAESFAQEMFIEQNKLKRQSHLLLQSSIPDQQLLKALDENAKLTQQLEEERIQHQQKVKELEEQLENETLHKEIHNLKQQLELLEEDKKELELKYQNSEEKARNLKHSVDELQKRVNQSENSVPPPPPPPPPLPPPPPNPIRSLMSMIRKRSHPSGSGAKKEKATQPETTEEVTDLKRQAVEEMMDRIKKGVHLRPVNQTARPKTKPESSKGCESAVDELKGILASQ

SEQ ID NO: 6978 - protein, 675 aa, Artificial Sequence
  Synthetic polypeptide
HLSLLSCFPLSPYDRSTRLFPFAFCQGWKQPEAINTNRCWCHVPCRACRAMSQINFFTNDPASAIGEYEDLRAENQKTKEKCDKIRQERDEAVKKLEEFQKISHMVIEEVNFMQNHLEIEKTCRESAEALATKLNKENKTLKRISMLYMAKLGPDVITEEINIDDEDSTTDTDGAAETCVSVQCQKQIKELRDQIVSVQEEKKILAIELENLKSKLVEVIEEVNKVKQEKTVLNSEVLEQRKVLEKCNRVSMLAVEEYEEMQVNLELEKDLRKKAESFAQEMFIEQNKLKRQSHLLLQSSIPDQQLLKALDENAKLTQQLEEERIQHQQKVKELEEQLENETLHKEIHNLKQQLELLEEDKKELELKYQNSEEKARNLKHSVDELQKRVNQSENSVPPPPPPPPPLPPPPPNPIRSLMSMIRKRSHPSGSGAKKEKATQPETTEEVTDLKRQAVEEMMDRIKKGVHLRPVNQTARPKTKPESSKGCESAVDELKGILGTLNKSTSSRSLKSLDPENSETELERILRRRKVTAEADSSSPTGILATSESKSMPVLGSVSSVTKTALNKKTLEAEFNSPSPPTPEPGEGPRKLEGCTSSKVTFQPPSSIGCRKKYIDGEKQAEPVVVLDPVSTHEPQTKDQVAEKDPTQHKEDEGEIQPENKEDSIENVRETDSSNC

SEQ ID NO: 6979 - protein, 65 aa, Artificial Sequence
  Synthetic polypeptide
TSAFSSKNWLSNSHICGILHHVCLNNYVCLLQQLCLPADCQVAAGHRLVLLLCGWDGHACQCLHR

SEQ ID NO: 6980 - protein, 381 aa, Artificial Sequence
  Synthetic polypeptide
HWLALQPWVSHSVSEPQLSHLRIGYPIPIFAGFCIMFVSTIMFAFSSSYAFLLIARSLQGIGSSCSSVAGMGMLASVYTDDEERGNVMGIALGGLAMGVLVGPPFGSVLYEFVGKTAPFLVLAALVLLDGAIQLFVLQPSRVQPESQKGTPLTTLLKDPYILIAAGSICFANMGIAMLEPALPIWMMETMCSRKWQLGVAFLPASISYLIGTNIFGILAHKMGRWLCALLGMIIVGVSILCIPFAKNIYGLIAPNFGVGFAIGMVDSSMMPIMGYLVDLRHVSVYGSVYAIADVAFCMGYAIGPSAGGAIAKAIGFPWLMTIIGIIDILFAPLCFFLRSPPAKEEKMAILMDHNCPIKTKMYTQNNIQSYPIGEDEESESD

SEQ ID NO: 6981 - protein, 27 aa, Artificial Sequence
  Synthetic polypeptide
AHIQYCSLEEKIQSPTEETEIFYHRGV

SEQ ID NO: 6982 - protein, 27 aa, Artificial Sequence
  Synthetic polypeptide
AHIQYCSLEEKIQSPTEETEIFYHRGV

SEQ ID NO: 6983 - protein, 31 aa, Artificial Sequence
  Synthetic polypeptide
FLSEHIYSTVVLKRKFSLQQKKQKSFITEGC

SEQ ID NO: 6984 - protein, 31 aa, Artificial Sequence; identical to SEQ ID NO: 6983
  Synthetic polypeptide

SEQ ID NO: 6985 - protein, 7 aa, Artificial Sequence
  Synthetic polypeptide
VSTYTVL

SEQ ID NO: 6986 - protein, 7 aa, Artificial Sequence
  Synthetic polypeptide
VSTYTVL

SEQ ID NO: 6987 - protein, 68 aa, Artificial Sequence
  Synthetic polypeptide
GNGIPPSRCLQPSGRLITDAGKGKGDLHDLSVQQGLITGQRGGAVSAQREDPGRTAPSDVPETPGPDL

SEQ ID NO: 6988 - protein, 68 aa, Artificial Sequence; identical to SEQ ID NO: 6987
  Synthetic polypeptide

SEQ ID NO: 6989 - protein, 68 aa, Artificial Sequence; identical to SEQ ID NO: 6987
  Synthetic polypeptide

SEQ ID NO: 6990 - protein, 97 aa, Artificial Sequence
  Synthetic polypeptide
LMQEKAKEIYMTFLSSKASSQVNVEGQSRLNEKILEEPHPLMFQKLQDQIFNLMKYDSYSRFLKSDLFLKHKRTEEEEEDLPDAQTAAKRASRIYNT

SEQ ID NO: 6991 - protein, 97 aa, Artificial Sequence; identical to SEQ ID NO: 6990
  Synthetic polypeptide

SEQ ID NO: 6992 - protein, 97 aa, Artificial Sequence; identical to SEQ ID NO: 6990
  Synthetic polypeptide

SEQ ID NO: 6993 - protein, 186 aa, Artificial Sequence
  Synthetic polypeptide
QGCQSVFISDATSNQLILTLWNAVLTGILSPESLAAGNGISQRDYTQYYDHISKQKEEIRRCIQDFFKKHIQYKFLDEDFVFDIYRDSRGKVWLIDFNPFGEVTDSLLFTWEELISENNLNGDFSEVDAQEQDSPAFRCTNSEVTVQPSPYLSYRLPKDFVDLSTGEDAHKLIDFLKLKRNQQEDD

SEQ ID NO: 6994 - protein, 46 aa, Artificial Sequence
  Synthetic polypeptide
AQSHLPQETVFLKETTHNTMIIFLNKRKKFADAYKTFSRNTYSTNS

SEQ ID NO: 6995 - protein, 46 aa, Artificial Sequence; identical to SEQ ID NO: 6994
  Synthetic polypeptide

SEQ ID NO: 6996 - protein, 35 aa, Artificial Sequence
  Synthetic polypeptide
PVDTDSLECCVDRNPEPRVTCRRKRYFSKRLHTIL

SEQ ID NO: 6997 - protein, 35 aa, Artificial Sequence; identical to SEQ ID NO: 6996
  Synthetic polypeptide

SEQ ID NO: 6998 - protein, 35 aa, Artificial Sequence; identical to SEQ ID NO: 6996
  Synthetic polypeptide

SEQ ID NO: 6999 - protein, 65 aa, Artificial Sequence
  Synthetic polypeptide
QGCQSVFISDATSNQLILTLWNAVLTGILSPESLAAGNGISQRDYTQYYDHISKQKEEIRRCIQD

SEQ ID NO: 7000 - protein, 36 aa, Artificial Sequence
  Synthetic polypeptide
AQSHLPQETVFLKETTHNTMIIFLNKRKKFADAYKT

SEQ ID NO: 7001 - protein, 140 aa, Artificial Sequence
  Synthetic polypeptide
QGCQSVFISDATSNQLILTLWNAVLTGILSPESLAAGNGISQRDYTQYYDHISKQKEEIRRCIQDFFKKHIQYKFLDEDFVFDIYRDSRGKVWLIDFNPFGEVTDSLLFTWEELISENNLNGDFSEVDAQEQKRNQQEDD

SEQ ID NO: 7002 - protein, 40 aa, Artificial Sequence
  Synthetic polypeptide
AVSRMMAPQMSTSHWLEPVNMLGCMAKETKAADGTKVIYL

SEQ ID NO: 7003 - protein, 40 aa, Artificial Sequence; identical to SEQ ID NO: 7002
  Synthetic polypeptide

SEQ ID NO: 7004 - protein, 259 aa, Artificial Sequence
  Synthetic polypeptide
ICWVVWQRKLRLQMELRLFTFSEFHLLKTMLLWVFLQLNYKIQAIPTYETVMTFFKSFPENCCFLDRDIGRSLRPLFLCLRLHGITKGKDLEVLRHLNFFPESWLDQVTVNHYHALENGGDMVHLKDLNTQAVRFGLLFNQENTTYSKTIALYGFFFKIKGLKHDTTSYSFYMQRIKHTDLESPSAVYEHNHVSLRAARLVKYEIRAEALVDGKWQEFRTNQIKQKFGLTTSSCKSHTLKIQTVGIPIYVSFAFIFPAS

SEQ ID NO: 7005 - protein, 259 aa, Artificial Sequence; identical to SEQ ID NO: 7004
  Synthetic polypeptide

SEQ ID NO: 7006 - protein, 42 aa, Artificial Sequence
  Synthetic polypeptide
NLNFYIYKSKDYILTLQDGCVELNEKIYRKHLGNTWHIVIYL

SEQ ID NO: 7007 - protein, 42 aa, Artificial Sequence; identical to SEQ ID NO: 7006
  Synthetic polypeptide

SEQ ID NO: 7008 - protein, 23 aa, Artificial Sequence
  Synthetic polypeptide
KNLQKTSWEHLAHSYLPLVNSIF

SEQ ID NO: 7009 - protein, 23 aa, Artificial Sequence
  Synthetic polypeptide
KNLQKTSWEHLAHSYLPLVNSIF

SEQ ID NO: 7010 - protein, 53 aa, Artificial Sequence
  Synthetic polypeptide
FCDCDHLCPMHTFYFPCETAQILFCLLLASSESTGHSARHTGEWGRHGPPERS

SEQ ID NO: 7011 - protein, 53 aa, Artificial Sequence; identical to SEQ ID NO: 7010
  Synthetic polypeptide

SEQ ID NO: 7012 - protein, 191 aa, Artificial Sequence
  Synthetic polypeptide
GALLALDFVTVIISAPCTHFISHVRLLRYFFVFSLHPLRALDTVPDTLENGGDMVHLKDLNTQAVRFGLLFNQENTTYSKTIALYGFFFKIKGLKHDTTSYSFYMQRIKHTDLESPSAVYEHNHVSLRAARLVKYEIRAEALVDGKWQEFRTNQIKQKFGLTTSSCKSHTLKIQTVGIPIYVSFAFIFPAS

SEQ ID NO: 7013 - protein, 191 aa, Artificial Sequence; identical to SEQ ID NO: 7012
  Synthetic polypeptide

SEQ ID NO: 7014 - protein, 18 aa, Artificial Sequence
  Synthetic polypeptide
EHWTQCQTHWRMGATWST

SEQ ID NO: 7015 - protein, 18 aa, Artificial Sequence
  Synthetic polypeptide
EHWTQCQTHWRMGATWST

SEQ ID NO: 7016 - protein, 56 aa, Artificial Sequence
  Synthetic polypeptide
FCDCDHLCPMHTFYFPCETAQILFCLLLASSESTGHSARHREYNLFENDCSIWILL

SEQ ID NO: 7017 - protein, 56 aa, Artificial Sequence; identical to SEQ ID NO: 7016
  Synthetic polypeptide

SEQ ID NO: 7018 - protein, 165 aa, Artificial Sequence
  Synthetic polypeptide
GALLALDFVTVIISAPCTHFISHVRLLRYFFVFSLHPLRALDTVPDTENTTYSKTIALYGFFFKIKGLKHDTTSYSFYMQRIKHTDLESPSAVYEHNHVSLRAARLVKYEIRAEALVDGKWQEFRTNQIKQKFGLTTSSCKSHTLKIQTVGIPIYVSFAFIFPAS

SEQ ID NO: 7019 - protein, 165 aa, Artificial Sequence; identical to SEQ ID NO: 7018
  Synthetic polypeptide

SEQ ID NO: 7020 - protein, 26 aa, Artificial Sequence
  Synthetic polypeptide
EHWTQCQTQRIQLIRKRLLYMDSSLR

SEQ ID NO: 7021 - protein, 26 aa, Artificial Sequence
  Synthetic polypeptide
EHWTQCQTQRIQLIRKRLLYMDSSLR

SEQ ID NO: 7022 - protein, 264 aa, Artificial Sequence
  Synthetic polypeptide
KIHEQIFHQKIKDKQMKEEVNECGESIDRNNLKRSQSHLPYFTPKPPQDSAVIKAGYCVKQGAVMKNWKRRYFQLDENTIGYFKSELEKEPLRVIPLKEVHKVQECKQSDIMMRDNLFEIVTTSRTFYVQADSPEEMHSWIKAVSGAIVAQRGPGRSASSEHPPGPSESKHAFRPTNAATATSHSTASRSNSLVSTFTMEKRGFYESLAKVKPGNFKVQTVSPREPASKVTEQALLRPQSKNGPQEKDCDLVDLDDASLPVSDV

SEQ ID NO: 7023 - protein, 264 aa, Artificial Sequence; identical to SEQ ID NO: 7022
  Synthetic polypeptide

SEQ ID NO: 7024 - protein, 264 aa, Artificial Sequence; identical to SEQ ID NO: 7022
  Synthetic polypeptide

SEQ ID NO: 7025 - protein, 7 aa, Artificial Sequence
  Synthetic polypeptide
TDERRSK

SEQ ID NO: 7026 - protein, 7 aa, Artificial Sequence
  Synthetic polypeptide
TDERRSK

SEQ ID NO: 7027 - protein, 7 aa, Artificial Sequence
  Synthetic polypeptide
TDERRSK

SEQ ID NO: 7028 - protein, 7 aa, Artificial Sequence
  Synthetic polypeptide
TDERRSK

SEQ ID NO: 7029 - protein, 7 aa, Artificial Sequence
  Synthetic polypeptide
TDERRSK

SEQ ID NO: 7030 - protein, 7 aa, Artificial Sequence
  Synthetic polypeptide
TDERRSK

SEQ ID NO: 7031 - protein, 243 aa, Artificial Sequence
  Synthetic polypeptide
KIHEQIFHQKIKDKQMKEEVNECGESIDRNNLKRSQSHLPYFTPKPPQDSAVIKAGYCVKQGAVMKNWKRRYFQLDENTIGYFKSELEKEPLRVIPLKEVHKVQECKQSDIMMRDNLFEIVTTSRTFYVQADSPEEMHSWIKAVSGAIVAQRGPGRSASSMRQARRLSNPCIQRSIPPVLQNPNTLSVLPTQPPPPHIPQPLAATLWSQPLPWRSEDFTSLLPRSSQGTSRSRLSLQENQLPK

SEQ ID NO: 7032 - protein, 243 aa, Artificial Sequence; identical to SEQ ID NO: 7031
  Synthetic polypeptide

SEQ ID NO: 7033 - protein, 194 aa, Artificial Sequence
  Synthetic polypeptide
KIHEQIFHQKIKDKQMKEEVNECGESIDRNNLKRSQSHLPYFTPKPPQDSAVIKAGYCVKQGAVMKNWKRRYFQLDENTIGYFKSELEKEPLRVIPLKEVHKVQECKQSDIMMRDNLFEIVTTSRTFYVQADSPEEMHSWIKAVSGAIVAQRGPGRSASSMRQARRLSNPCIQRYTSRAGECSTYVGSHANVPS

SEQ ID NO: 7034 - protein, 349 aa, Artificial Sequence
  Synthetic polypeptide
SLFFSSFCRLVMRCTLQACRLAGVIKGQEDPNSLRHKYNFIADVVEKIAPAVVHIELFRKLPFSKREVPVASGSGFIVSEDGLIVTNAHVVTNKHRVKVELKNGATYEAKIKDVDEKADIALIKIDHQGKLPVLLLGRSSELRPGEFVVAIGSPFSLQNTVTTGIVSTTQRGGKELGLRNSDMDYIQTDAIINYGNSGGPLVNLDGEVIGINTLKVTAGISFAIPSDKIKKFLTESHDRQAKGKAITKKKYIGIRMMSLTSSKAKELKDRHRDFPDVISGAYIIEVIPDTPAEAGGLKENDVIISINGQSVVSANDVSDVIKRESTLNMVVRRGNEDIMITVIPEEIDP

SEQ ID NO: 7035 - protein, 58 aa, Artificial Sequence
  Synthetic polypeptide
LKGRKIPTVCAINITLSRTWWRRSPLPWFISNCFASFRFLNERCRWLVGLGLLCRKMD

SEQ ID NO: 7036 - protein, 48 aa, Artificial Sequence
  Synthetic polypeptide
KCLVAGKRAQATIDSTLWRALMKMIFMTERGAREEMTSSSGLKWMLGA

SEQ ID NO: 7037 - protein, 17 aa, Artificial Sequence
  Synthetic polypeptide
LQENELRLPLILRYGGH

SEQ ID NO: 7038 - protein, 589 aa, Artificial Sequence
  Synthetic polypeptide
FYVMAGINENDFYDGAWCAGRNDLQQWIEVDARRLTRFTGVITQGRNSLWLSDWVTSYKVMVSNDSHTWVTVKNGSGDMIFEGNSEKEIPVLNELPVPMVARYIRINPQSWFDNGSICMRMEILGCPLPDPNNYYHRRNEMTTTDDLDFKHHNYKEMRQLMKVVNEMCPNITRIYNIGKSHQGLKLYAVEISDHPGEHEVGEPEFHYIAGAHGNEVLGRELLLLLVQFVCQEYLARNARIVHLVEETRIHVLPSLNPDGYEKAYEGGSELGGWSLGRWTHDGIDINNNFPDLNTLLWEAEDRQNVPRKVPNHYIAIPEWFLSENATVAAETRAVIAWMEKIPFVLGGNLQGGELVVAYPYDLVRSPWKTQEHTPTPDDHVFRWLAYSYASTHRLMTDARRRVCHTEDFQKEEGTVNGASWHTVAGSLNDFSYLHTNCFELSIYVGCDKYPHESQLPEEWENNRESLIVFMEQVHRGIKGLVRDSHGKGIPNAIISVEGINHDIRTANDGDYWRLLNPGEYVVTAKAEGFTASTKNCMVGYDMGATRCDFTLSKTNMARIREIMEKFGKQPVSLPARRLKLRGQKRRQRG

SEQ ID NO: 7039 - protein, 115 aa, Artificial Sequence
  Synthetic polypeptide
WCQVRLQVGLYAVYLLDWLSVFDKQQFLILRLEDHASNVKYTMHKVFQFLNLGPLSEKQEALMTKSPASNARRPEDRNLGPMWPITQKILRDFYRPFNARLAQVLADEAFAWKTT

SEQ ID NO: 7040 - protein, 115 aa, Artificial Sequence; identical to SEQ ID NO: 7039
  Synthetic polypeptide

SEQ ID NO: 7041 - protein, 3 aa, Artificial Sequence
  Synthetic polypeptide
GAR

SEQ ID NO: 7042 - protein, 3 aa, Artificial Sequence
  Synthetic polypeptide
GAR

SEQ ID NO: 7043 - protein, 21 aa, Artificial Sequence
  Synthetic polypeptide
VPGEAPGWALCCVPSGLAQRF

SEQ ID NO: 7044 - protein, 21 aa, Artificial Sequence
  Synthetic polypeptide
VPGEAPGWALCCVPSGLAQRF

SEQ ID NO: 7045 - protein, 3 aa, Artificial Sequence
  Synthetic polypeptide
NIR

SEQ ID NO: 7046 - protein, 3 aa, Artificial Sequence
  Synthetic polypeptide
NIR

SEQ ID NO: 7047 - protein, 105 aa, Artificial Sequence
  Synthetic polypeptide
YKVEDFLNLSTQLSGFHICIDKGTFDAISLNPDNAIEKRKQYVKSLSRVLKVKGFFLITSCNWTKEELLNEFSEGFELLEELPTPKFSFGGRSGNSVAALVFQKM

SEQ ID NO: 7048 - protein, 160 aa, Artificial Sequence
  Synthetic polypeptide
YKVEDFLNLSTQLSGFHICIDKGTFDAISLNPDNAIEKRKQYVKSLSRVLKVKGFFLITSCNWTKEELLNEFSEGWSTVAGFWLTAALTSWAQAIFSTSASRVGGTTGTHHHAWIIFVFLAETRFCHVVQAGLELLGSSDSPTWPPKVLGLYHARPSLAF

SEQ ID NO: 7049 - protein, 66 aa, Artificial Sequence
  Synthetic polypeptide
GVSCNAPDQGSSNHQGHQRQGPSETLSQPRGVQGDMAAKCDEVLGRNGKLGISIFYLGERITQNRV

SEQ ID NO: 7050 - protein, 186 aa, Artificial Sequence
  Synthetic polypeptide
PQAIYEENLRQIPTEECPAMHLTRAPQTIKVINGKGHLRPCHSQEESKEIWQRNVMRSLAEMENWVSAFSTWEKELHKIVFDPRYLLLNSEERKQIFEQFVKTRIKEEYKEKKSKLLLAKEEFKKLLEESKVSPRTTFKEFAEKYGRDQRFRLVQKRKDQEHFFNQFILILKKRDKENRLRLRKMR

SEQ ID NO: 7051 - protein, 48 aa, Artificial Sequence
  Synthetic polypeptide
GPWQKWKIGYQHFLPGRKNYTKSCLTHAISCSTLRNESRYLNSLSRQE

SEQ ID NO: 7052 - protein, 37 aa, Artificial Sequence
  Synthetic polypeptide
HLCPSVVIRTKYGEIYGNHFEESWAHGMSLKKSAERR

SEQ ID NO: 7053 - protein, 37 aa, Artificial Sequence; identical to SEQ ID NO: 7052
  Synthetic polypeptide

SEQ ID NO: 7054 - protein, 37 aa, Artificial Sequence; identical to SEQ ID NO: 7052
  Synthetic polypeptide

SEQ ID NO: 7055 - protein, 33 aa, Artificial Sequence
  Synthetic polypeptide
NGDNNSTYVLVLLLGLNTVKYMETTLKRAGHME

SEQ ID NO: 7056 - protein, 33 aa, Artificial Sequence; identical to SEQ ID NO: 7055
  Synthetic polypeptide

SEQ ID NO: 7057 - protein, 33 aa, Artificial Sequence; identical to SEQ ID NO: 7055
  Synthetic polypeptide

SEQ ID NO: 7058 - protein, 262 aa, Artificial Sequence
  Synthetic polypeptide
RELGTWNEFEKICRKEVKPLGLTVMRDVTISKSEYAPSEKMITKVQDFQEDKELFRYCTLPEILKYVECFTGPNIMAMHTMLINKPPDSGKKTSRHPLHQDLHYFPFRPSDLIVCAWTAMEHISRNNGCLVVLPGTHKGSLKPHDYPKWEGGVNKMFHGIQDYEENKARVHLVMEKGDTVFFHPLLIHGSGQNKTQGFRKAISCHFASADCHYIDVKGTSQENIEKEVVGIAHKFFGAENSVNLKDIWMFRARLVKGERTNL

SEQ ID NO: 7059 - protein, 264 aa, Artificial Sequence
  Synthetic polypeptide
RELGTWNEFEKICRKEVKPLGLTVMRDVTISKSEYAPSEKMITKVQDFQEDKELFRYCTLPEILKYVECFTGPNIMAMHTMLINKPPDSGNCKKTSRHPLHQDLHYFPFRPSDLIVCAWTAMEHISRNNGCLVVLPGTHKGSLKPHDYPKWEGGVNKMFHGIQDYEENKARVHLVMEKGDTVFFHPLLIHGSGQNKTQGFRKAISCHFASADCHYIDVKGTSQENIEKEVVGIAHKFFGAENSVNLKDIWMFRARLVKGERTNL

SEQ ID NO: 7060 - protein, 134 aa, Artificial Sequence
  Synthetic polypeptide
RELGTWNEFEKICRKEVKPLGLTVMRDVTISKSEYAPSEKMITKVQDFQEDKELFRYCTLPEILKYVECFTGPNIMAMHTMLINKPPDSGNCKKTSRHPLHQDLHYFPFRPSDLIVCAWTAMEHISRNNGCLVV

SEQ ID NO: 7061 - protein, 203 aa, Artificial Sequence
  Synthetic polypeptide
KSVWQFLMKLNMLLYDAAIVLLDIHSKKLKTYIHTKACRQMFIAALFIIARTWKQPFISSVAAGLMHTFNAHAATDITGFGILGHAQNLAKQQRNEVSFVIHNLPVLAKMAAVSKACGNMFGLMHGTCPETSGGLLICLPREQAARFCAEIKSPKYGEGHQAWIIGIVEKGNRTARIIDKPRIIEVAPQVATQNVNPTPGATS

SEQ ID NO: 7062 - protein, 203 aa, Artificial Sequence; identical to SEQ ID NO: 7061
  Synthetic polypeptide

SEQ ID NO: 7063 - protein, 52 aa, Artificial Sequence
  Synthetic polypeptide
YSLKKVENLHSHKSLQTNVHSSIIHNCQNLEAAIHFFSSCRTHAHVQCPRRH

SEQ ID NO: 7064 - protein, 52 aa, Artificial Sequence; identical to SEQ ID NO: 7063
  Synthetic polypeptide

SEQ ID NO: 7065 - protein, 52 aa, Artificial Sequence; identical to SEQ ID NO: 7063
  Synthetic polypeptide

SEQ ID NO: 7066 - protein, 135 aa, Artificial Sequence
  Synthetic polypeptide
KSVWQFLMKLNMLLYDAAIVLLDIHSKKLKTYIHTKACRQMFIAALFIIARTWKQPFISSVAAGLMHTFNAHAATDITGFGILGHAQNLAKQQRNEVSFVIHNLPVLAKMAAVSKACGNMFGLMHGTCPETSDVQ

SEQ ID NO: 7067 - protein, 196 aa, Artificial Sequence
  Synthetic polypeptide
CFGSNVFLHVASGMVVKGSWVELHFSNNGNGGSVPASVSIYNGDMEKILLDAQHESGRSSSKSSHCDSPPRSQTPQDTNRASETDTHSIGEKNSSQSEEDDIERRKEVESILKKNSDWIWDWSSRPENIPPKEFLFKHPKRTATLSMRNTSVMKKGGIFSAEFLKVFLPSLLLSHLLAIGLGIYIGRRLTTSTSTF

SEQ ID NO: 7068 - protein, 4 aa, Artificial Sequence
  Synthetic polypeptide
KAPG

SEQ ID NO: 7069 - protein, 4 aa, Artificial Sequence
  Synthetic polypeptide
KAPG

SEQ ID NO: 7070 - protein, 26 aa, Artificial Sequence
  Synthetic polypeptide
LWFECVPPCCQWDGSKRLLGRTALQQ

SEQ ID NO: 7071 - protein, 26 aa, Artificial Sequence
  Synthetic polypeptide
LWFECVPPCCQWDGSKRLLGRTALQQ

SEQ ID NO: 7072 - protein, 182 aa, Artificial Sequence
  Synthetic polypeptide
CFGSNVFLHVASGMVVKGSWVELHFSNNGNGGSVPASVSIYNGDMEKILLDAQHESGRSSSKSSHCDSPPRSQTPQDTNRASETDTHSIGEKNSSQSEEDDIERRKEVESILKKNSDWIWDWSSRPENIPPKEFLFKHPKRTATLSMRNTSVMKKGGIFSAEFLKVFLPSLLLSHLLAIGLG

SEQ ID NO: 7073 - protein, 4 aa, Artificial Sequence
  Synthetic polypeptide
AAGE

SEQ ID NO: 7074 - protein, 4 aa, Artificial Sequence
  Synthetic polypeptide
AAGE

SEQ ID NO: 7075 - protein, 4 aa, Artificial Sequence
  Synthetic polypeptide
AAGE

SEQ ID NO: 7076 - protein, 4 aa, Artificial Sequence
  Synthetic polypeptide
AAGE

SEQ ID NO: 7077 - protein, 34 aa, Artificial Sequence
  Synthetic polypeptide
VVMKWSPSQPAVRELLCLLQLPCLDNWLSRQREN

SEQ ID NO: 7078 - protein, 31 aa, Artificial Sequence
  Synthetic polypeptide
NGLLHSRLCVNYSVSCSSPVLIIGCLGSGRM

SEQ ID NO: 7079 - protein, 101 aa, Artificial Sequence
  Synthetic polypeptide
VVMKWSPSQPAVRELLCLLQLPCLDNWLSRQRENDYLQDCLDAIQQDFVIFNREKLKRSQDLPREPLPAPESRDAAEPVEDEAERSALPMCGPICPSAGSG

SEQ ID NO: 7080 - protein, 101 aa, Artificial Sequence; identical to SEQ ID NO: 7079
  Synthetic polypeptide

SEQ ID NO: 7081 - protein, 101 aa, Artificial Sequence; identical to SEQ ID NO: 7079
  Synthetic polypeptide

SEQ ID NO: 7082 - protein, 45 aa, Artificial Sequence
  Synthetic polypeptide
NGLLHSRLCVNYSVSCSSPVLIIGCLGSGRMTIFKTASMPSSKTS

SEQ ID NO: 7083 - protein, 45 aa, Artificial Sequence; identical to SEQ ID NO: 7082
  Synthetic polypeptide

SEQ ID NO: 7084 - protein, 45 aa, Artificial Sequence; identical to SEQ ID NO: 7082
  Synthetic polypeptide

SEQ ID NO: 7085 - protein, 59 aa, Artificial Sequence
  Synthetic polypeptide
IDKQGVARAHGAPTPAVRGKEHACSRVGESHGDFTEENEPDGKTALCAPPLSCRTSTRP

SEQ ID NO: 7086 - protein, 59 aa, Artificial Sequence; identical to SEQ ID NO: 7085
  Synthetic polypeptide

SEQ ID NO: 7087 - protein, 73 aa, Artificial Sequence
  Synthetic polypeptide
EGRSMRAAAWGSLTVTLPRKMNQTERQHSVRLHLVAERQHAPDEEAGAPQARPRGNGSGHAPVHLGGGPRAAE

SEQ ID NO: 7088 - protein, 73 aa, Artificial Sequence; identical to SEQ ID NO: 7087
  Synthetic polypeptide

SEQ ID NO: 7089 - protein, 125 aa, Artificial Sequence
  Synthetic polypeptide
EIKTWFQNRRMKHKRQMQDPQLHSPFSGSLHAPPAFYSTSSGLANGLQLLCPWAPLSGPQALMLPPGSFWGLCQVAQEALASAGASCCGQPLASHPPTPGRPSLGPALSTGPRGLCAMPQTGDAF

SEQ ID NO: 7090 - protein, 15 aa, Artificial Sequence
  Synthetic polypeptide
NTRTQPLFHLTGTRC

SEQ ID NO: 7091 - protein, 264 aa, Artificial Sequence
  Synthetic polypeptide
LVQGANFEYIIAEKRGKNNTVGLIQLNRPKALNALCDGLIDELNQALKTFEEDPAVGAIVLTGGDKAFAAGADIKEMQNLSFQDCYSSKFLKHWDHLTQVKKPVIAAVNGYAFGGGCELAMMCDIIYAGEKAQFAQPEILIGTIPGAGGTQRLTRAVGKSLAMEMVLTGDRISAQDAKQAGLVSKICPVETLVEEAIQCAEKIASNSKIVVAMAKESVNAAFEMTLTEGSKLEKKLFYSTFATDDRKEGMTAFVEKRKANFKDQ

SEQ ID NO: 7092 - protein, 32 aa, Artificial Sequence
  Synthetic polypeptide
HTDTTSFPSDWYKVLTLSTSSQKKEGRITPWG

SEQ ID NO: 7093 - protein, 40 aa, Artificial Sequence
  Synthetic polypeptide
NSGAEEDAEQPEAGGLYHRGPRCPDPTFRPQPSVSGNPWA

SEQ ID NO: 7094 - protein, 40 aa, Artificial Sequence; identical to SEQ ID NO: 7093
  Synthetic polypeptide

SEQ ID NO: 7095 - protein, 40 aa, Artificial Sequence; identical to SEQ ID NO: 7093
  Synthetic polypeptide

SEQ ID NO: 7096 - protein, 306 aa, Artificial Sequence
  Synthetic polypeptide
VFWGLNETVGLKKMQSSLKLVDCIIEVHDARIPLSGRNPLFQETLGLKPHLLVLNKMDLADLTEQQKIMQHLEGEGLKNVIFTNCVKDENVKQIIPMVTELIGRSHRYHRKENLEYCIMVIGVPNVGKSSLINSLRRQHLRKGKATRVGGEPGITRAVMSKIQVSERPLMFLLDTPGVLAPRIESVETGLKLALCGTVLDHLVGEETMADYLLYTLNKHQRFGYVQHYGLGSACDNVERVLKSVAVKLGKTQKVKVLTGTGNVNIIQPNYPAAARDFLQTFRRGLLGSVMLDLDVLRGHPPAETLP

SEQ ID NO: 7097 - protein, 306 aa, Artificial Sequence; identical to SEQ ID NO: 7096
  Synthetic polypeptide

SEQ ID NO: 7098 - protein, 5 aa, Artificial Sequence
  Synthetic polypeptide
MKQWG

SEQ ID NO: 7099 - protein, 5 aa, Artificial Sequence
  Synthetic polypeptide
MKQWG

SEQ ID NO: 7100 - protein, 5 aa, Artificial Sequence
  Synthetic polypeptide
MKQWG

SEQ ID NO: 7101 - protein, 255 aa, Artificial Sequence
  Synthetic polypeptide
VFWGLNETVGLKKMQSSLKLVDCIIEVHDARIPLSGRNPLFQETLGLKPHLLVLNKMDLADLTEQQKIMQHLEGEGLKNVIFTNCVKDENVKQIIPMVTELIGRSHRYHRKEVSERPLMFLLDTPGVLAPRIESVETGLKLALCGTVLDHLVGEETMADYLLYTLNKHQRFGYVQHYGLGSACDNVERVLKSVAVKLGKTQKVKVLTGTGNVNIIQPNYPAAARDFLQTFRRGLLGSVMLDLDVLRGHPPAETLP

SEQ ID NO: 7102 - protein, 29 aa, Artificial Sequence
  Synthetic polypeptide
SVPVSHYPQMGPSSCRKTSSGLPLILRDG

SEQ ID NO: 7103 - protein, 411 aa, Artificial Sequence
  Synthetic polypeptide
FCVMADCVVIIGGASNEAGKWMDDTCDSKRGYICQTRSDPSLTNPPATIQTDGFVKYGKSSYSLMRQKFQWHEAETYCKLHNSLIASILDPYSNAFAWLQMETSNERVWIALNSNLTDNQYTWTDKWRVRYTNWAADEPKLKSACVYLDLDGYWKTAHCNESFYFLCKRSDEIPATEPPQLPGRCPESDHTAWIPFHGHCYYIESSYTRNWGQASLECLRMGSSLVSIESAAESSFLSYRVEPLKSKTNFWIGLFRNVEGTWLWINNSPVSFVNWNTGDPSGERNDCVALHASSGFWSNIHCSSYKGYICKRPKIIDAKPTHELLTTKADTRKMDPSKPSSNVAGVVIIVILLILTGAGLAAYFFYKKRRVHLPQEGAFENTLYFNSQSSPGTSDMKDLVGNIEQNEHSVI

SEQ ID NO: 7104 - protein, 29 aa, Artificial Sequence
  Synthetic polypeptide
SVPVSHYPQMGPSSCRKTSSGLPLILRDG

SEQ ID NO: 7105 - protein, 411 aa, Artificial Sequence; identical to SEQ ID NO: 7103
  Synthetic polypeptide

SEQ ID NO: 7106 - protein, 15 aa, Artificial Sequence
  Synthetic polypeptide
LVERLRWLLIRFSGT

SEQ ID NO: 7107 - protein, 232 aa, Artificial Sequence
  Synthetic polypeptide
YVLAAPEWTEEDLSQLTRSMVKFPGGTPGRWEKIAHELGRSVTDVTTKAKQLKDSVTCSPGMVRLSELKSTVQNSRPIKTATTLPDDMITQREDAEGVAAEEEQEGDSGEQETGATDARPRRRKPARLLEATAKPEPEEKSRAKRQKDFDIAEQNESSDEESLRKERARSAEEPWTQNQQKLLELALQQYPRGSSDRWDKIARCVPSKSKEDCIARYKLLVELVQKKKQAKS

SEQ ID NO: 7108 - protein, 31 aa, Artificial Sequence
  Synthetic polypeptide
GASPFAGCSFFCLLLPCEEGCVCFPFCHDHQ

SEQ ID NO: 7109 - protein, 397 aa, Artificial Sequence
  Synthetic polypeptide
FSRDLMILNKELLLLLGVHSSACCCHVKKDVFASPSAMIINELSHVQIPVMLMPDDFKAYSKIKVDNHLFNKENMPSHFKFKEYCPMVFRNLRERFGIDDQDFQNSLTRSAPLPNDSQARSGARFHTSYDKRYIIKTITSEDVAEMHNILKKYHQYIVECHGITLLPQFLGMYRLNVDGVEIYVIVTRNVFSHRLSVYRKYDLKGSTVAREASDKEKAKELPTLKDNDFINEGQKIYIDDNNKKVFLEKLKKDVEFLAQLKLMDYSLLVGIHDVERAEQEEVECEENDGEEEGESDGTHPVGTPPDSPGNTLNSSPPLAPGEFDPNIDVYGIKCHENSPRKEVYFMAIIDILTHYDAKKKAAHAAKTVKHGAGAEISTVNPEQYSKRFLDFIGHILT

SEQ ID NO: 7110 - protein, 145 aa, Artificial Sequence
  Synthetic polypeptide
WEGSLATCELPLAKSEWQKKLTPEQFYVTREKGTEPPFSGIYLNNKEAGMYHCVCCDSPLFSSEKKYCSGTGWPSFSEAHGTSGSDESHTGILRRLDTSLGSARTEVVCKQCEAHLGHVFPDGPGPNGQRFCINSVALKFKPRKH

SEQ ID NO: 7111 - protein, 23 aa, Artificial Sequence
  Synthetic polypeptide
TASGKGLLQRVSCLLPRVSGKRN

SEQ ID NO: 7112 - protein, 23 aa, Artificial Sequence
  Synthetic polypeptide
TASGKGLLQRVSCLLPRVSGKRN

SEQ ID NO: 7113 - protein, 49 aa, Artificial Sequence
  Synthetic polypeptide
RMHNKATMSYHYTEPEHLQLKSLDFQVLARMKNNWNSHRLLVGRVSCNV

SEQ ID NO: 7114 - protein, 49 aa, Artificial Sequence; identical to SEQ ID NO: 7113
  Synthetic polypeptide

SEQ ID NO: 7115 - protein, 122 aa, Artificial Sequence
  Synthetic polypeptide
WEGSLATCELPLAKSEWQKKLTPEQFYVTREKGTEPPFSGIYLNNKEAGMYHCVCCDSPLFRSLLDIQKEVFSIKGSRSPSTSRGNGFDSEVLRKSTALALGGLRFPRLMVRLALMKATQGS

SEQ ID NO: 7116 - protein, 14 aa, Artificial Sequence
  Synthetic polypeptide
SQHFGRTSSSSRCT

SEQ ID NO: 7117 - protein, 24 aa, Artificial Sequence
  Synthetic polypeptide
PGAVAHTCNPSTLGGQARRQGAHE

SEQ ID NO: 7118 - protein, 505 aa, Artificial Sequence
  Synthetic polypeptide
RARWLTPVIPALWEDKLVVKVHMNDNSTKSLMVDERQLARDVLDNLFEKTHCDCNVDWCLYEIYPELQIERFFEDHENVVEVLSDWTRDTENKILFLEKEEKYAVFKNPQNFYLDNRGKKESKETNEKMNAKNKESLLEESFCGTSIIVPELEGALYLKEDGKKSWKRRYFLLRASGIYYVPKGKTKTSRDLACFIQFENVNIYYGTQHKMKYKAPTDYCFVLKHPQIQKESQYIKYLCCDDTRTLNQWVMGIRIAKYGKTLYDNYQRAVAKAGLASRWTNLGTVNAAAPAQPSTGPKTGTTQPNGQIPQATHSVSAVLQEAQRHAETSKDKKPALGNHHDPAVPRAPHAPKSSLPPPPPVRRSSDTSGSPATPLKAKGTGGGGLPAPPDDFLPPPPPPPPLDDPELPPPPPDFMEPPPDFVPPPPPSYAGIAGSELPPPPPPPPAPAPAPVPDSARPPPAVAKRPPVPPKRQENPGHPGGAGGGEQDFMSDLMKALQKKRGNVS

SEQ ID NO: 7119 - protein, 423 aa, Artificial Sequence
  Synthetic polypeptide
MNLCCFSLVTLSLVLGVSAMTSAMGEEKNFYLDNRGKKESKETNEKMNAKNKESLLEESFCGTSIIVPELEGALYLKEDGKKSWKRRYFLLRASGIYYVPKGKTKTSRDLACFIQFENVNIYYGTQHKMKYKAPTDYCFVLKHPQIQKESQYIKYLCCDDTRTLNQWVMGIRIAKYGKTLYDNYQRAVAKAGLASRWTNLGTVNAAAPAQPSTGPKTGTTQPNGQIPQATHSVSAVLQEAQRHAETSKDKKPALGNHHDPAVPRAPHAPKSSLPPPPPVRRSSDTSGSPATPLKAKGTGGGGLPAPPDDFLPPPPPPPPLDDPELPPPPPDFMEPPPDFVPPPPPSYAGIAGSELPPPPPPPPAPAPAPVPDSARPPPAVAKRPPVPPKRQENPGHPGGAGGGEQDFMSDLMKALQKKRGNVS

SEQ ID NO: 7120 - protein, 26 aa, Artificial Sequence
  Synthetic polypeptide
PLQWVRKRISTWITEEKKKARKLMRK

SEQ ID NO: 7121 - protein, 7 aa, Artificial Sequence
  Synthetic polypeptide
GKEFLLG

SEQ ID NO: 7122 - protein, 23 aa, Artificial Sequence
  Synthetic polypeptide
GLPRSFHEVFEPRAQLLVPSMAQ

SEQ ID NO: 7123 - protein, 23 aa, Artificial Sequence
  Synthetic polypeptide
GLPRSFHEVFEPRAQLLVPSMAQ

SEQ ID NO: 7124 - protein, 23 aa, Artificial Sequence
  Synthetic polypeptide
GLPRSFHEVFEPRAQLLVPSMAQ

SEQ ID NO: 7125 - protein, 23 aa, Artificial Sequence
  Synthetic polypeptide
GLPRSFHEVFEPRAQLLVPSMAQ

SEQ ID NO: 7126 - protein, 23 aa, Artificial Sequence
  Synthetic polypeptide
GLPRSFHEVFEPRAQLLVPSMAQ

SEQ ID NO: 7127 - protein, 23 aa, Artificial Sequence
  Synthetic polypeptide
GLPRSFHEVFEPRAQLLVPSMAQ

SEQ ID NO: 7128 - protein, 23 aa, Artificial Sequence
  Synthetic polypeptide
GLPRSFHEVFEPRAQLLVPSMAQ

SEQ ID NO: 7129 - protein, 23 aa, Artificial Sequence
  Synthetic polypeptide
GLPRSFHEVFEPRAQLLVPSMAQ

SEQ ID NO: 7130 - protein, 23 aa, Artificial Sequence
  Synthetic polypeptide
GLPRSFHEVFEPRAQLLVPSMAQ

SEQ ID NO: 7131 - protein, 23 aa, Artificial Sequence
  Synthetic polypeptide
GLPRSFHEVFEPRAQLLVPSMAQ

SEQ ID NO: 7132 - protein, 23 aa, Artificial Sequence
  Synthetic polypeptide
GLPRSFHEVFEPRAQLLVPSMAQ

SEQ ID NO: 7133 - protein, 62 aa, Artificial Sequence
  Synthetic polypeptide
GTPEDYQDPFMKFLSPGLSSWFPVWHNDQADISTQLYYFFDIFWWIQTNSLCDCSIFCSASC

SEQ ID NO: 7134 - protein, 62 aa, Artificial Sequence; identical to SEQ ID NO: 7133
  Synthetic polypeptide

SEQ ID NO: 7135 - protein, 62 aa, Artificial Sequence; identical to SEQ ID NO: 7133
  Synthetic polypeptide

SEQ ID NO: 7136 - protein, 62 aa, Artificial Sequence; identical to SEQ ID NO: 7133
  Synthetic polypeptide

SEQ ID NO: 7137 - protein, 62 aa, Artificial Sequence; identical to SEQ ID NO: 7133
  Synthetic polypeptide

SEQ ID NO: 7138 - protein, 62 aa, Artificial Sequence; identical to SEQ ID NO: 7133
  Synthetic polypeptide

SEQ ID NO: 7139 - protein, 62 aa, Artificial Sequence; identical to SEQ ID NO: 7133
  Synthetic polypeptide

SEQ ID NO: 7140 - protein, 62 aa, Artificial Sequence; identical to SEQ ID NO: 7133
  Synthetic polypeptide

SEQ ID NO: 7141 - protein, 62 aa, Artificial Sequence; identical to SEQ ID NO: 7133
  Synthetic polypeptide

SEQ ID NO: 7142 - protein, 62 aa, Artificial Sequence; identical to SEQ ID NO: 7133
  Synthetic polypeptide

SEQ ID NO: 7143 - protein, 62 aa, Artificial Sequence; identical to SEQ ID NO: 7133
  Synthetic polypeptide

SEQ ID NO: 7144 - protein, 54 aa, Artificial Sequence
  Synthetic polypeptide
SQELKRHPLFSDVDWENLQHQTMPFIPQPDDETDTSYFEARNTAQHLTVSGFSL

SEQ ID NO: 7145 - protein, 54 aa, Artificial Sequence; identical to SEQ ID NO: 7144
  Synthetic polypeptide

SEQ ID NO: 7146 - protein, 54 aa, Artificial Sequence; identical to SEQ ID NO: 7144
  Synthetic polypeptide

SEQ ID NO: 7147 - protein, 14 aa, Artificial Sequence
  Synthetic polypeptide
SQHFGRLRRADHKS

SEQ ID NO: 7148 - protein, 14 aa, Artificial Sequence
  Synthetic polypeptide
SQHFGRLRRADHKS

SEQ ID NO: 7149 - protein, 14 aa, Artificial Sequence
  Synthetic polypeptide
SQHFGRLRRADHKS

SEQ ID NO: 7150 - protein, 14 aa, Artificial Sequence
  Synthetic polypeptide
GGLITRAKTSSSLQ

SEQ ID NO: 7151 - protein, 14 aa, Artificial Sequence
  Synthetic polypeptide
GGLITRAKTSSSLQ

SEQ ID NO: 7152 - protein, 14 aa, Artificial Sequence
  Synthetic polypeptide
GGLITRAKTSSSLQ

SEQ ID NO: 7153 - protein, 14 aa, Artificial Sequence
  Synthetic polypeptide
SQHFGRLRRMDHKV

SEQ ID NO: 7154 - protein, 14 aa, Artificial Sequence
  Synthetic polypeptide
SQHFGRLRRMDHKV

SEQ ID NO: 7155 - protein, 123 aa, Artificial Sequence
  Synthetic polypeptide
GGWITRYERCRPCRGAHGYLRGGQGVLHLRGLPGHGGRRLKHRRGRLGECLQHPASGRDDHWQCAVPGLPHAGRPPEGCLQPAAARHHQPVCDRRGREPHRGQPLPEGVEWAAGGAGQERPDR

SEQ ID NO: 7156 - protein, 768 aa, Artificial Sequence
  Synthetic polypeptide
RVQWLKPVISALWEAEADGSQGMNAAVRAVVRMGIYVGAKVYFIYEGYQGMVDGGSNIAEADWESVSSILQVGGTIIGSARCQAFRTREGRLKAACNLLQRGITNLCVIGGDGSLTGANLFRKEWSGLLEELARNGQIDKEAVQKYAYLNVVGMVGSIDNDFCGTDMTIGTDSALHRIIEVVDAIMTTAQSHQRTFVLEVMGRHCGYLALVSALACGADWVFLPESPPEEGWEEQMCVKLSENRARKKRLNIIIVAEGAIDTQNKPITSEKIKELVVTQLGYDTRVTILGHVQRGGTPSAFDRILASRMGVEAVIALLEATPDTPACVVSLNGNHAVRLPLMECVQMTQDVQKAMDERRFQDAVRLRGRSFAGNLNTYKRLAIKLPDDQIPKTNCNVAVINVGAPAAGMNAAVRSAVRVGIADGHRMLAIYDGFDGFAKGQIKEIGWTDVGGWTGQGGSILGTKRVLPGKYLEEIATQMRTHSINALLIIGGFEAYLGLLELSAAREKHEEFCVPMVMVPATVSNNVPGSDFSIGADTALNTITDTCDRIKQSASGTKRRVFIIETMGGYCGYLANMGGLAAGADAAYIFEEPFDIRDLQSNVEHLTEKMKTTIQRGLVLRNESCSENYTTDFIYQLYSEEGKGVFDCRKNVLGHMQQGGAPSPFDRNFGTKISARAMEWITAKLKEARGRGKKFTTDDSICVLGISKRNVIFQPVAELKKQTDFEHRIPKEQWWLKLRPLMKILAKYKASYDVSDSGQLEHVQPWSV

SEQ ID NO: 7157 - protein, 779 aa, Artificial Sequence
  Synthetic polypeptide
GGWITRYERCRPCRGAHGYLRGGQGVLHLRGLPGHGGRRLKHRRGRLGECLQHPASGAVRGDWREKPGCWSHRFPCPGRHALVGGTIIGSARCQAFRTREGRLKAACNLLQRGITNLCVIGGDGSLTGANLFRKEWSGLLEELARNGQIDKEAVQKYAYLNVVGMVGSIDNDFCGTDMTIGTDSALHRIIEVVDAIMTTAQSHQRTFVLEVMGRHCGYLALVSALACGADWVFLPESPPEEGWEEQMCVKLSENRARKKRLNIIIVAEGAIDTQNKPITSEKIKELVVTQLGYDTRVTILGHVQRGGTPSAFDRILASRMGVEAVIALLEATPDTPACVVSLNGNHAVRLPLMECVQMTQDVQKAMDERRFQDAVRLRGRSFAGNLNTYKRLAIKLPDDQIPKTNCNVAVINVGAPAAGMNAAVRSAVRVGIADGHRMLAIYDGFDGFAKGQIKEIGWTDVGGWTGQGGSILGTKRVLPGKYLEEIATQMRTHSINALLIIGGFEAYLGLLELSAAREKHEEFCVPMVMVPATVSNNVPGSDFSIGADTALNTITDTCDRIKQSASGTKRRVFIIETMGGYCGYLANMGGLAAGADAAYIFEEPFDIRDLQSNVEHLTEKMKTTIQRGLVLRNESCSENYTTDFIYQLYSEEGKGVFDCRKNVLGHMQQGGAPSPFDRNFGTKISARAMEWITAKLKEARGRGKKFTTDDSICVLGISKRNVIFQPVAELKKQTDFEHRIPKEQWWLKLRPLMKILAKYKASYDVSDSGQLEHVQPWSV

SEQ ID NO: 7158 - protein, 74 aa, Artificial Sequence
  Synthetic polypeptide
RVQWLKPVISALWEAEADGSQGMNAAVRAVVRMGIYVGAKVYFIYEGYQGMVDGGSNIAEADWESVSSILQVVL

SEQ ID NO: 7159 - protein, 124 aa, Artificial Sequence
  Synthetic polypeptide
SQYFGRLRRMDPLRSGVKDQRGQHDETPSLLRTQQGYQGMVDGGSNIAEADWESVSSILQVGGTIIGSARCQAFRTREGRLKAACNLLQRGITNLCVIGGDGSLTGANLFRKEWSGLLEELARN

SEQ ID NO: 7160 - protein, 49 aa, Artificial Sequence
  Synthetic polypeptide
EHNRATRAWWTEAQTSQRPTGRVSPASCKWAGRSLAVRGARPSARGKAA

SEQ ID NO: 7161 - protein, 49 aa, Artificial Sequence; identical to SEQ ID NO: 7160
  Synthetic polypeptide

SEQ ID NO: 7162 - protein, 49 aa, Artificial Sequence; identical to SEQ ID NO: 7160
  Synthetic polypeptide

SEQ ID NO: 7163 - protein, 99 aa, Artificial Sequence
  Synthetic polypeptide
RNSVSTKNTTGLPGHGGRRLKHRRGRLGECLQHPASGRDDHWQCAVPGLPHAGRPPEGCLQPAAARHHQPVCDRRGREPHRGQPLPEGVEWAAGGAGQE

SEQ ID NO: 7164 - protein, 757 aa, Artificial Sequence
  Synthetic polypeptide
SQYFGRLRRMDPLRSGVKDQRGQHDETPSLLRTQQGYQGMVDGGSNIAEADWESVSSILQVGGTIIGSARCQAFRTREGRLKAACNLLQRGITNLCVIGGDGSLTGANLFRKEWSGLLEELARNGQIDKEAVQKYAYLNVVGMVGSIDNDFCGTDMTIGTDSALHRIIEVVDAIMTTAQSHQRTFVLEVMGRHCGYLALVSALACGADWVFLPESPPEEGWEEQMCVKLSENRARKKRLNIIIVAEGAIDTQNKPITSEKIKELVVTQLGYDTRVTILGHVQRGGTPSAFDRILASRMGVEAVIALLEATPDTPACVVSLNGNHAVRLPLMECVQMTQDVQKAMDERRFQDAVRLRGRSFAGNLNTYKRLAIKLPDDQIPKTNCNVAVINVGAPAAGMNAAVRSAVRVGIADGHRMLAIYDGFDGFAKGQIKEIGWTDVGGWTGQGGSILGTKRVLPGKYLEEIATQMRTHSINALLIIGGFEAYLGLLELSAAREKHEEFCVPMVMVPATVSNNVPGSDFSIGADTALNTITDTCDRIKQSASGTKRRVFIIETMGGYCGYLANMGGLAAGADAAYIFEEPFDIRDLQSNVEHLTEKMKTTIQRGLVLRNESCSENYTTDFIYQLYSEEGKGVFDCRKNVLGHMQQGGAPSPFDRNFGTKISARAMEWITAKLKEARGRGKKFTTDDSICVLGISKRNVIFQPVAELKKQTDFEHRIPKEQWWLKLRPLMKILAKYKASYDVSDSGQLEHVQPWSV

SEQ ID NO: 7165 - protein, 103 aa, Artificial Sequence
  Synthetic polypeptide
RNSVSTKNTTGLPGHGGRRLKHRRGRLGECLQHPASGRDDHWQCAVPGLPHAGRPPEGCLQPAAARHHQPVCDRRGREPHRGQPLPEGVEWAAGGAGQERPDR

SEQ ID NO: 7166 - protein, 103 aa, Artificial Sequence; identical to SEQ ID NO: 7165
  Synthetic polypeptide

SEQ ID NO: 7167 - protein, 63 aa, Artificial Sequence
  Synthetic polypeptide
SQYFGRLRRMDPLRSGVKDQRGQHDETPSLLRTQQGYQGMVDGGSNIAEADWESVSSILQVVL

SEQ ID NO: 7168 - protein, 34 aa, Artificial Sequence
  Synthetic polypeptide
EHNRATRAWWTEAQTSQRPTGRVSPASCKWCCKG

SEQ ID NO: 7169 - protein, 759 aa, Artificial Sequence
  Synthetic polypeptide
RNSVSTKNTTGLPGHGGRRLKHRRGRLGECLQHPASGAVRGDWREKPGCWSHRFPCPGRHALVGGTIIGSARCQAFRTREGRLKAACNLLQRGITNLCVIGGDGSLTGANLFRKEWSGLLEELARNGQIDKEAVQKYAYLNVVGMVGSIDNDFCGTDMTIGTDSALHRIIEVVDAIMTTAQSHQRTFVLEVMGRHCGYLALVSALACGADWVFLPESPPEEGWEEQMCVKLSENRARKKRLNIIIVAEGAIDTQNKPITSEKIKELVVTQLGYDTRVTILGHVQRGGTPSAFDRILASRMGVEAVIALLEATPDTPACVVSLNGNHAVRLPLMECVQMTQDVQKAMDERRFQDAVRLRGRSFAGNLNTYKRLAIKLPDDQIPKTNCNVAVINVGAPAAGMNAAVRSAVRVGIADGHRMLAIYDGFDGFAKGQIKEIGWTDVGGWTGQGGSILGTKRVLPGKYLEEIATQMRTHSINALLIIGGFEAYLGLLELSAAREKHEEFCVPMVMVPATVSNNVPGSDFSIGADTALNTITDTCDRIKQSASGTKRRVFIIETMGGYCGYLANMGGLAAGADAAYIFEEPFDIRDLQSNVEHLTEKMKTTIQRGLVLRNESCSENYTTDFIYQLYSEEGKGVFDCRKNVLGHMQQGGAPSPFDRNFGTKISARAMEWITAKLKEARGRGKKFTTDDSICVLGISKRNVIFQPVAELKKQTDFEHRIPKEQWWLKLRPLMKILAKYKASYDVSDSGQLEHVQPWSV

SEQ ID NO: 7170 - protein, 221 aa, Artificial Sequence
  Synthetic polypeptide
SQYFGRLRRMDPLRSGVKDQRGQHDETPSLLRTQQGYQGMVDGGSNIAEADWESVSSILQVGGTIIGSARCQAFRTREGRLKAACNLLQRGITNLCVIGGDGSLTGANLFRKEWSGLLEELARNGQIDKEAVQKYAYLNVVGMVGSIDNDFCGTDMTIGTDSALHRIIEVVDAIMTTAQSHQRTFVLEVMGRHCGYLALVSALACGADWVFLPESPPEEGW

SEQ ID NO: 7171 - protein, 41 aa, Artificial Sequence
  Synthetic polypeptide
SGAHACSHDQFRIHHHSCRTEERKGKKSWGLKLRQMKQDVQ

SEQ ID NO: 7172 - protein, 41 aa, Artificial Sequence; identical to SEQ ID NO: 7171
  Synthetic polypeptide

SEQ ID NO: 7173 - protein, 41 aa, Artificial Sequence; identical to SEQ ID NO: 7171
  Synthetic polypeptide

SEQ ID NO: 7174 - protein, 41 aa, Artificial Sequence; identical to SEQ ID NO: 7171
  Synthetic polypeptide

SEQ ID NO: 7175 - protein, 41 aa, Artificial Sequence; identical to SEQ ID NO: 7171
  Synthetic polypeptide

SEQ ID NO: 7176 - protein, 41 aa, Artificial Sequence; identical to SEQ ID NO: 7171
  Synthetic polypeptide

SEQ ID NO: 7177 - protein, 41 aa, Artificial Sequence; identical to SEQ ID NO: 7171
  Synthetic polypeptide

SEQ ID NO: 7178 - protein, 60 aa, Artificial Sequence
  Synthetic polypeptide
AAAAKRDSGHPPPSALHPSGYICCLPHQDRVGPMHVHMTNSGSTTIPAGLRKGRARNPGA

SEQ ID NO: 7179 - protein, 60 aa, Artificial Sequence; identical to SEQ ID NO: 7178
  Synthetic polypeptide

SEQ ID NO: 7180 - protein, 60 aa, Artificial Sequence; identical to SEQ ID NO: 7178
  Synthetic polypeptide

SEQ ID NO: 7181 - protein, 60 aa, Artificial Sequence; identical to SEQ ID NO: 7178
  Synthetic polypeptide

SEQ ID NO: 7182 - protein, 60 aa, Artificial Sequence; identical to SEQ ID NO: 7178
  Synthetic polypeptide

SEQ ID NO: 7183 - protein, 60 aa, Artificial Sequence; identical to SEQ ID NO: 7178
  Synthetic polypeptide

SEQ ID NO: 7184 - protein, 60 aa, Artificial Sequence; identical to SEQ ID NO: 7178
  Synthetic polypeptide

SEQ ID NO: 7185 - protein, 38 aa, Artificial Sequence
  Synthetic polypeptide
TAQPNIIPADKYTALRNEERKGKKSWGLKLRQMKQDVQ

SEQ ID NO: 7186 - protein, 38 aa, Artificial Sequence; identical to SEQ ID NO: 7185
  Synthetic polypeptide

SEQ ID NO: 7187 - protein, 38 aa, Artificial Sequence; identical to SEQ ID NO: 7185
  Synthetic polypeptide

SEQ ID NO: 7188 - protein, 38 aa, Artificial Sequence; identical to SEQ ID NO: 7185
  Synthetic polypeptide

SEQ ID NO: 7189 - protein, 38 aa, Artificial Sequence; identical to SEQ ID NO: 7185
  Synthetic polypeptide

SEQ ID NO: 7190 - protein, 38 aa, Artificial Sequence; identical to SEQ ID NO: 7185
  Synthetic polypeptide

SEQ ID NO: 7191 - protein, 38 aa, Artificial Sequence; identical to SEQ ID NO: 7185
  Synthetic polypeptide

SEQ ID NO: 7192 - protein, 12 aa, Artificial Sequence
  Synthetic polypeptide
GMRKGRARNPGA

SEQ ID NO: 7193 - protein, 12 aa, Artificial Sequence
  Synthetic polypeptide
GMRKGRARNPGA

SEQ ID NO: 7194 - protein, 12 aa, Artificial Sequence
  Synthetic polypeptide
GMRKGRARNPGA

SEQ ID NO: 7195 - protein, 12 aa, Artificial Sequence
  Synthetic polypeptide
GMRKGRARNPGA

SEQ ID NO: 7196 - protein, 12 aa, Artificial Sequence
  Synthetic polypeptide
GMRKGRARNPGA

SEQ ID NO: 7197 - protein, 12 aa, Artificial Sequence
  Synthetic polypeptide
GMRKGRARNPGA

SEQ ID NO: 7198 - protein, 12 aa, Artificial Sequence
  Synthetic polypeptide
GMRKGRARNPGA

SEQ ID NO: 7199 - protein, 55 aa, Artificial Sequence
  Synthetic polypeptide
GWIWWLKPVTPALWEAKMIILALECWVWCLDLFLTPRSHHPTKGTETGCLKTSAW

SEQ ID NO: 7200 - protein, 55 aa, Artificial Sequence; identical to SEQ ID NO: 7199
  Synthetic polypeptide

SEQ ID NO: 7201 - protein, 55 aa, Artificial Sequence; identical to SEQ ID NO: 7199
  Synthetic polypeptide

SEQ ID NO: 7202 - protein, 55 aa, Artificial Sequence; identical to SEQ ID NO: 7199
  Synthetic polypeptide

SEQ ID NO: 7203 - protein, 55 aa, Artificial Sequence; identical to SEQ ID NO: 7199
  Synthetic polypeptide

SEQ ID NO: 7204 - protein, 55 aa, Artificial Sequence; identical to SEQ ID NO: 7199
  Synthetic polypeptide

SEQ ID NO: 7205 - protein, 55 aa, Artificial Sequence; identical to SEQ ID NO: 7199
  Synthetic polypeptide

SEQ ID NO: 7206 - protein, 55 aa, Artificial Sequence; identical to SEQ ID NO: 7199
  Synthetic polypeptide

SEQ ID NO: 7207 - protein, 55 aa, Artificial Sequence; identical to SEQ ID NO: 7199
  Synthetic polypeptide

SEQ ID NO: 7208 - protein, 506 aa, Artificial Sequence
  Synthetic polypeptide
MDMVAQACDPSTLGGQNDYPCSGMLGMVSGLISDSQITSSNQGDRNWMPENIRLVTSRSGWALPPAPHSYINEWLQIDLGEEKIVRGIIIQGGKHRENKVFMRKFKIGYSNNGSDWKMIMDDSKRKAKSFEGNNNYDTPELRTFPALSTRFIRIYPERATHGGLGLRMELLGCEVEAPTAGPTTPNGNLVDECDDDQANCHSGTGGTTVLATEKPTVIDSTIQSEFPTYGFNCEFGWGSHKTFCHWEHDNHVQLKWSVLTSKTGPIQDHTGDGNFIYSQADENQKGKVARLVSPVVYSQNSAHCMTFWYHMSGSHVGTLRVKLRYQKPEEYDQLVWMAIGHQGDHWKEGRVLLHKSLKLYQVIFEGEIGKGNLGGIAVDDISINNHISQEDCAKPADLDKKNPEIKIDETGSTPGYEGEGEGDKNISRKPGNVLKTLDPILITIIAMSALGVLLGAVCGVVLYCACWHNGMSERNLSALENYNFELVDGVKLKKDKLNTQSTYSEA

SEQ ID NO: 7209 - protein, 513 aa, Artificial Sequence
  Synthetic polypeptide
MDMVAQACDPSTLGGQNDYPCSGMLGMVSGLISDSQITSSNQGDRNWMPENIRLVTSRSGWALPPAPHSYINEWLQIDLGEEKIVRGIIIQGGKHRENKVFMRKFKIGYSNNGSDWKMIMDDSKRKAKSFEGNNNYDTPELRTFPALSTRFIRIYPERATHGGLGLRMELLGCEVEAPTAGPTTPNGNLVDECDDDQANCHSGTGDDFQLTGGTTVLATEKPTVIDSTIQSEFPTYGFNCEFGWGSHKTFCHWEHDNHVQLKWSVLTSKTGPIQDHTGDGNFIYSQADENQKGKVARLVSPVVYSQNSAHCMTFWYHMSGSHVGTLRVKLRYQKPEEYDQLVWMAIGHQGDHWKEGRVLLHKSLKLYQVIFEGEIGKGNLGGIAVDDISINNHISQEDCAKPADLDKKNPEIKIDETGSTPGYEGEGEGDKNISRKPGNVLKTLDPILITIIAMSALGVLLGAVCGVVLYCACWHNGMSERNLSALENYNFELVDGVKLKKDKLNTQSTYSEA

SEQ ID NO: 7210 - protein, 513 aa, Artificial Sequence; identical to SEQ ID NO: 7209
  Synthetic polypeptide

SEQ ID NO: 7211 - protein, 496 aa, Artificial Sequence
  Synthetic polypeptide
MDMVAQACDPSTLGGQNDYPCSGMLGMVSGLISDSQITSSNQGDRNWMPENIRLVTSRSGWALPPAPHSYINEWLQIDLGEEKIVRGIIIQGGKHRENKVFMRKFKIGYSNNGSDWKMIMDDSKRKAKSFEGNNNYDTPELRTFPALSTRFIRIYPERATHGGLGLRMELLGCEVEAPTAGPTTPNGNLVDECDDDQANCHSGTGDDFQLTGGTTVLATEKPTVIDSTIQSEFPTYGFNCEFGWGSHKTFCHWEHDNHVQLKWSVLTSKTGPIQDHTGDGNFIYSQADENQKGKVARLVSPVVYSQNSAHCMTFWYHMSGSHVGTLRVKLRYQKPEEYDQLVWMAIGHQGDHWKEGRVLLHKSLKLYQVIFEGEIGKGNLGGIAVDDISINNHISQEDCARSTPGYEGEGEGDKNISRKPGNVLKTLDPILITIIAMSALGVLLGAVCGVVLYCACWHNGMSERNLSALENYNFELVDGVKLKKDKLNTQSTYSEA

SEQ ID NO: 7212 - protein, 199 aa, Artificial Sequence
  Synthetic polypeptide
MDMVAQACDPSTLGGQNDYPCSGMLGMVSGLISDSQITSSNQGDRNWMPENIRLVTSRSGWALPPAPHSYINEWLQIDLGEEKIVRGIIIQGGKHRENKVFMRKFKIGYSNNGSDWKMIMDDSKRKAKSFEGNNNYDTPELRTFPALSTRFIRIYPERATHGGLGLRMELLGCEVEGGTTVLATEKPTVIDSTIQSGIK

SEQ ID NO: 7213 - protein, 234 aa, Artificial Sequence
  Synthetic polypeptide
MDMVAQACDPSTLGGQNDYPCSGMLGMVSGLISDSQITSSNQGDRNWMPENIRLVTSRSGWALPPAPHSYINEWLQIDLGEEKIVRGIIIQGGKHRENKVFMRKFKIGYSNNGSDWKMIMDDSKRKAKSFEGNNNYDTPELRTFPALSTRFIRIYPERATHGGLGLRMELLGCEVEAPTAGPTTPNGNLVDECDDDQANCHSGTGDDFQLTGGTTVLATEKPTVIDSTIQSGIK

SEQ ID NO: 7214 - protein, 294 aa, Artificial Sequence
  Synthetic polypeptide
MDMVAQACDPSTLGGQNDYPCSGMLGMVSGLISDSQITSSNQGDRNWMPENIRLVTSRSGWALPPAPHSYINEWLQIDLGEEKIVRGIIIQGGKHRENKVFMRKFKIGYSNNGSDWKMIMDDSKRKAKSFEGNNNYDTPELRTFPALSTRFIRIYPERATHGGLGLRMELLGCEVEAPTAGPTTPNGNLVDECDDDQANCHSGTGDDFQLTGAETIFIPLLYHFSSCLSWDQLTPVCVLVTPHGRELPRNRSCLARTRASSFPHVIWIDELFLIATTICNNNLSHFESQRLGLS

SEQ ID NO: 7215 - protein, 231 aa, Artificial Sequence
  Synthetic polypeptide
MDMVAQACDPSTLGGQNDYPCSGMLGMVSGLISDSQITSSNQGDRNWMPENIRLVTSRSGWALPPAPHSYINEWLQIDLGEEKIVRGIIIQGGKHRENKVFMRKFKIGYSNNGSDWKMIMDDSKRKAKSFEGNNNYDTPELRTFPALSTRFIRIYPERATHGGLGLRMELLGCEVEGTINTDQECPCARALAKDAKKKKRWADSTHCRCVRSIHGEMWSSGKGVCSLDANL

SEQ ID NO: 7216 - protein, 187 aa, Artificial Sequence
  Synthetic polypeptide
MDMVAQACDPSTLGGQNDYPCSGMLGMVSGLISDSQITSSNQGDRNWMPENIRLVTSRSGWALPPAPHSYINEWLQIDLGEEKIVRGIIIQGGKHRENKVFMRKFKIGYSNNGSDWKMIMDDSKRKAKVRAGDWEEVIPYVLDFNQGPLAFSRGRASYFLPAMTLEEVCDGVSKTLDSRKTGIWHEK

SEQ ID NO: 7217 - protein, 1077 aa, Artificial Sequence
  Synthetic polypeptide
RCSFQDEDGTEEDNSRVEPVGHADTGLEHIPNFSLDDMVKLVEVPNDGGPLGIHVVPFSARGGRTLGLLVKRLEKGGKAEHENLFRENDCIVRINDGDLRNRRFEQAQHMFRQAMRTPIIWFHVVPAANKEQYEQLSQSEKNNYYSSRFSPDSQYIDNRSVNSAGLHTVQRAPRLNHPPEQIDSHSRLPHSAHPSGKPPSAPASAPQNVFSTTVSSGYNTKKIGKRLNIQLKKGTEGLGFSITSRDVTIGGSAPIYVKNILPRGAAIQDGRLKAGDRLIEVNGVDLVGKSQEEVVSLLRSTKMEGTVSLLVFRQEDAFHPRELKAEDEDIVLTPDGTREFLTFEVPLNDSGSAGLGVSVKGNRSKENHADLGIFVKSIINGGAASKDGRLRVNDQLIAVNGESLLGKTNQDAMETLRRSMSTEGNKRGMIQLIVARRISKCNELKSPGSPPGPELPIETALDDRERRISHSLYSGIEGLDESPSRNAALSRIMGKYQLSPTVNMPQDDTVIIEDDRLPVLPPHLSDQSSSSSHDDVGFVTADAGTWAKAAISDSADCSLSPDVDPVLAFQREGFGRQIADETKLNTVDDQKAGSPSRDVGPSLGLKKSSSLESLQTAVAEVTLNGDIPFHRPRPRIIRGRGCNESFRAAIDKSYDKPAVDDDDEGMETLEEDTEESSRSGRESVSTASDQPSHSLERQMNGNQEKGDKTDRKKDKTGKEKKKDRDKEKDKMKAKKGMLKGLGDMFRFGKHRKDDKIEKTGKIKIQESFTSEEERIRMKQEQERIQAKTREFRERQARERDYAEIQDFHRTFGCDDELMYGGVSSYEGSMALNARPQSPREGHMMDALYAQVKKPRNSKPSPVDSNRSTPSNHDRIQRLRQEFQQAKQDEDVEDRRRTYSFEQPWPNARPATQSGRHSVSVEVQMQRQRQEERESSQQAQRQYSSLPRQSRKNASSVSQDSWEQNYSPGEGFQSAKENPRYSSYQGSRNGYLGGHGFNARVMLETQELLRQEQRRKEQQMKKQPPSEGPSNYDSYKKVQDPSYAPPKGPFRQDVPPSPSQVARLNRLQTPEKGRPFYS

SEQ ID NO: 7218 - protein, 1077 aa, Artificial Sequence; identical to SEQ ID NO: 7217
  Synthetic polypeptide

SEQ ID NO: 7219 - protein, 50 aa, Artificial Sequence
  Synthetic polypeptide
PRNLLPSASIDEGVAFRMRMGQKRITVVLNLLDMLTRVWSIYPTFLWMIW

SEQ ID NO: 7220 - protein, 50 aa, Artificial Sequence; identical to SEQ ID NO: 7219
  Synthetic polypeptide

SEQ ID NO: 7221 - protein, 50 aa, Artificial Sequence; identical to SEQ ID NO: 7219
  Synthetic polypeptide

SEQ ID NO: 7222 - protein, 50 aa, Artificial Sequence; identical to SEQ ID NO: 7219
  Synthetic polypeptide

SEQ ID NO: 7223 - protein, 50 aa, Artificial Sequence; identical to SEQ ID NO: 7219
  Synthetic polypeptide

SEQ ID NO: 7224 - protein, 50 aa, Artificial Sequence; identical to SEQ ID NO: 7219
  Synthetic polypeptide

SEQ ID NO: 7225 - protein, 50 aa, Artificial Sequence; identical to SEQ ID NO: 7219
  Synthetic polypeptide

SEQ ID NO: 7226 - protein, 50 aa, Artificial Sequence; identical to SEQ ID NO: 7219
  Synthetic polypeptide

SEQ ID NO: 7227 - protein, 50 aa, Artificial Sequence; identical to SEQ ID NO: 7219
  Synthetic polypeptide

SEQ ID NO: 7228 - protein, 50 aa, Artificial Sequence; identical to SEQ ID NO: 7219
  Synthetic polypeptide

SEQ ID NO: 7229 - protein, 50 aa, Artificial Sequence; identical to SEQ ID NO: 7219
  Synthetic polypeptide

SEQ ID NO: 7230 - protein, 3 aa, Artificial Sequence
  Synthetic polypeptide
LSG

SEQ ID NO: 7231 - protein, 3 aa, Artificial Sequence
  Synthetic polypeptide
LSG

SEQ ID NO: 7232 - protein, 3 aa, Artificial Sequence
  Synthetic polypeptide
LSG

SEQ ID NO: 7233 - protein, 3 aa, Artificial Sequence
  Synthetic polypeptide
LSG

SEQ ID NO: 7234 - protein, 3 aa, Artificial Sequence
  Synthetic polypeptide
LSG

SEQ ID NO: 7235 - protein, 3 aa, Artificial Sequence
  Synthetic polypeptide
LSG

SEQ ID NO: 7236 - protein, 3 aa, Artificial Sequence
  Synthetic polypeptide
LSG

SEQ ID NO: 7237 - protein, 3 aa, Artificial Sequence
  Synthetic polypeptide
LSG

SEQ ID NO: 7238 - protein, 3 aa, Artificial Sequence
  Synthetic polypeptide
LSG

SEQ ID NO: 7239 - protein, 3 aa, Artificial Sequence
  Synthetic polypeptide
LSG

SEQ ID NO: 7240 - protein, 3 aa, Artificial Sequence
  Synthetic polypeptide
LSG

SEQ ID NO: 7241 - protein, 1107 aa, Artificial Sequence
  Synthetic polypeptide
RCSFQDEDGTEEDNSRVEPVGHADTGLEHIPNFSLDDMVKLVEVPNDGGPLGIHVVPFSARGGRTLGLLVKRLEKGGKAEHENLFRENDCIVRINDGDLRNRRFEQAQHMFRQAMRTPIIWFHVVPAANKEQYEQLSQSEKNNYYSSRFSPDSQYIDNRSVNSAGLHTVQRAPRLNHPPEQIDSHSRLPHSAHPSGKPPSAPASAPQNVFSTTVSSGYNTKKIGKRLNIQLKKGTEGLGFSITSRDVTIGGSAPIYVKNILPRGAAIQDGRLKAGDRLIEVNGVDLVGKSQEEVVSLLRSTKMEGTVSLLVFRQEDAFHPRELKAEDEDIVLTPDGTREFLTFEVPLNDSGSAGLGVSVKGNRSKENHADLGIFVKSIINGGAASKDGRLRVNDQLIAVNGESLLGKTNQDAMETLRRSMSTEGNKRGMIQLIVARRISKCNELKSPGSPPGPELPIETALDDRERRISHSLYSGIEGLDESPSRNAALSRIMGKYQLSPTVNMPQDDTVIIEDDRLPVLPPHLSDQSSSSSHDDVGFVTADAGTWAKAAISDSADCSLSPDVDPVLAFQREGFGRQSMSEKRTKQFSDASQLDFVKTRKSKSMDLGIADETKLNTVDDQKAGSPSRDVGPSLGLKKSSSLESLQTAVAEVTLNGDIPFHRPRPRIIRGRGCNESFRAAIDKSYDKPAVDDDDEGMETLEEDTEESSRSGRESVSTASDQPSHSLERQMNGNQEKGDKTDRKKDKTGKEKKKDRDKEKDKMKAKKGMLKGLGDMFRFGKHRKDDKIEKTGKIKIQESFTSEEERIRMKQEQERIQAKTREFRERQARERDYAEIQDFHRTFGCDDELMYGGVSSYEGSMALNARPQSPREGHMMDALYAQVKKPRNSKPSPVDSNRSTPSNHDRIQRLRQEFQQAKQDEDVEDRRRTYSFEQPWPNARPATQSGRHSVSVEVQMQRQRQEERESSQQAQRQYSSLPRQSRKNASSVSQDSWEQNYSPGEGFQSAKENPRYSSYQGSRNGYLGGHGFNARVMLETQELLRQEQRRKEQQMKKQPPSEGPSNYDSYKKVQDPSYAPPKGPFRQDVPPSPSQVARLNRLQTPEKGRPFYS

SEQ ID NO: 7242 - protein, 1107 aa, Artificial Sequence; identical to SEQ ID NO: 7241
  Synthetic polypeptide

SEQ ID NO: 7243 - protein, 1086 aa, Artificial Sequence
  Synthetic polypeptide
RCSFQDEDGTEEDNSRVEPVGHADTGLEHIPNFSLDDMVKLVEVPNDGGPLGIHVVPFSARGGRTLGLLVKRLEKGGKAEHENLFRENDCIVRINDGDLRNRRFEQAQHMFRQAMRTPIIWFHVVPAANKEQYEQLSQSEKNNYYSSRFSPDSQYIDNRSVNSAGLHTVQRAPRLNHPPEQIDSHSRLPHSAHPSGKPPSAPASAPQNVFSTTVSSGYNTKKIGKRLNIQLKKGTEGLGFSITSRDVTIGGSAPIYVKNILPRGAAIQDGRLKAGDRLIEVNGVDLVGKSQEEVVSLLRSTKMEGTVSLLVFRQEDAFHPRELNAEPSQMQIPKETKAEDEDIVLTPDGTREFLTFEVPLNDSGSAGLGVSVKGNRSKENHADLGIFVKSIINGGAASKDGRLRVNDQLIAVNGESLLGKTNQDAMETLRRSMSTEGNKRGMIQLIVARRISKCNELKSPGSPPGPELPIETALDDRERRISHSLYSGIEGLDESPSRNAALSRIMGESGKYQLSPTVNMPQDDTVIIEDDRLPVLPPHLSDQSSSSSHDDVGFVTADAGTWAKAAISDSADCSLSPDVDPVLAFQREGFGRQSMSEKRTKQFSDASQLDFVKTRKSKSMDLGIADETKLNTVDDQKAGSPSRDVGPSLGLKKSSSLESLQTAVAEVTLNGDIPFHRPRPRIIRGRGCNESFRAAIDKSYDKPAVDDDDEGMETLEEDTEESSRSGRESVSTASDQPSHSLERQMNGNQEKGDKTDRKKDKTGKEKKKDRDKEKDKMKAKKGMLKGLGDMFRIQAKTREFRERQARERDYAEIQDFHRTFGCDDELMYGGVSSYEGSMALNARPQSPREGHMMDALYAQVKKPRNSKPSPVDSNRSTPSNHDRIQRLRQEFQQAKQDEDVEDRRRTYSFEQPWPNARPATQSGRHSVSVEVQMQRQRQEERESSQQAQRQYSSLPRQSRKNASSVSQDSWEQNYSPGEGFQSAKENPRYSSYQGSRNGYLGGHGFNARVMLETQELLRQEQRRKEQQMKKQPPSEGPSNYDSYKKVQDPSYAPPKGPFRQDVPPSPSQVARLNRLQTPEKGRPFYS

SEQ ID NO: 7244 - protein, 1120 aa, Artificial Sequence
  Synthetic polypeptide
RCSFQDEDGTEEDNSRVEPVGHADTGLEHIPNFSLDDMVKLVEVPNDGGPLGIHVVPFSARGGRTLGLLVKRLEKGGKAEHENLFRENDCIVRINDGDLRNRRFEQAQHMFRQAMRTPIIWFHVVPAANKEQYEQLSQSEKNNYYSSRFSPDSQYIDNRSVNSAGLHTVQRAPRLNHPPEQIDSHSRLPHSAHPSGKPPSAPASAPQNVFSTTVSSGYNTKKIGKRLNIQLKKGTEGLGFSITSRDVTIGGSAPIYVKNILPRGAAIQDGRLKAGDRLIEVNGVDLVGKSQEEVVSLLRSTKMEGTVSLLVFRQEDAFHPRELNAEPSQMQIPKETKAEDEDIVLTPDGTREFLTFEVPLNDSGSAGLGVSVKGNRSKENHADLGIFVKSIINGGAASKDGRLRVNDQLIAVNGESLLGKTNQDAMETLRRSMSTEGNKRGMIQLIVARRISKCNELKSPGSPPGPELPIETALDDRERRISHSLYSGIEGLDESPSRNAALSRIMGKYQLSPTVNMPQDDTVIIEDDRLPVLPPHLSDQSSSSSHDDVGFVTADAGTWAKAAISDSADCSLSPDVDPVLAFQREGFGRQSMSEKRTKQFSDASQLDFVKTRKSKSMDLGIADETKLNTVDDQKAGSPSRDVGPSLGLKKSSSLESLQTAVAEVTLNGDIPFHRPRPRIIRGRGCNESFRAAIDKSYDKPAVDDDDEGMETLEEDTEESSRSGRESVSTASDQPSHSLERQMNGNQEKGDKTDRKKDKTGKEKKKDRDKEKDKMKAKKGMLKGLGDMFRFGKHRKDDKIEKTGKIKIQESFTSEEERIRMKQEQERIQAKTREFRERQARERDYAEIQDFHRTFGCDDELMYGGVSSYEGSMALNARPQSPREGHMMDALYAQVKKPRNSKPSPVDSNRSTPSNHDRIQRLRQEFQQAKQDEDVEDRRRTYSFEQPWPNARPATQSGRHSVSVEVQMQRQRQEERESSQQAQRQYSSLPRQSRKNASSVSQDSWEQNYSPGEGFQSAKENPRYSSYQGSRNGYLGGHGFNARVMLETQELLRQEQRRKEQQMKKQPPSEGPSNYDSYKKVQDPSYAPPKGPFRQDVPPSPSQVARLNRLQTPEKGRPFYS

SEQ ID NO: 7245 - protein, 1123 aa, Artificial Sequence
  Synthetic polypeptide
RCSFQDEDGTEEDNSRVEPVGHADTGLEHIPNFSLDDMVKLVEVPNDGGPLGIHVVPFSARGGRTLGLLVKRLEKGGKAEHENLFRENDCIVRINDGDLRNRRFEQAQHMFRQAMRTPIIWFHVVPAANKEQYEQLSQSEKNNYYSSRFSPDSQYIDNRSVNSAGLHTVQRAPRLNHPPEQIDSHSRLPHSAHPSGKPPSAPASAPQNVFSTTVSSGYNTKKIGKRLNIQLKKGTEGLGFSITSRDVTIGGSAPIYVKNILPRGAAIQDGRLKAGDRLIEVNGVDLVGKSQEEVVSLLRSTKMEGTVSLLVFRQEDAFHPRELNAEPSQMQIPKETKAEDEDIVLTPDGTREFLTFEVPLNDSGSAGLGVSVKGNRSKENHADLGIFVKSIINGGAASKDGRLRVNDQLIAVNGESLLGKTNQDAMETLRRSMSTEGNKRGMIQLIVARRISKCNELKSPGSPPGPELPIETALDDRERRISHSLYSGIEGLDESPSRNAALSRIMGESGKYQLSPTVNMPQDDTVIIEDDRLPVLPPHLSDQSSSSSHDDVGFVTADAGTWAKAAISDSADCSLSPDVDPVLAFQREGFGRQSMSEKRTKQFSDASQLDFVKTRKSKSMDLGIADETKLNTVDDQKAGSPSRDVGPSLGLKKSSSLESLQTAVAEVTLNGDIPFHRPRPRIIRGRGCNESFRAAIDKSYDKPAVDDDDEGMETLEEDTEESSRSGRESVSTASDQPSHSLERQMNGNQEKGDKTDRKKDKTGKEKKKDRDKEKDKMKAKKGMLKGLGDMFRFGKHRKDDKIEKTGKIKIQESFTSEEERIRMKQEQERIQAKTREFRERQARERDYAEIQDFHRTFGCDDELMYGGVSSYEGSMALNARPQSPREGHMMDALYAQVKKPRNSKPSPVDSNRSTPSNHDRIQRLRQEFQQAKQDEDVEDRRRTYSFEQPWPNARPATQSGRHSVSVEVQMQRQRQEERESSQQAQRQYSSLPRQSRKNASSVSQDSWEQNYSPGEGFQSAKENPRYSSYQGSRNGYLGGHGFNARVMLETQELLRQEQRRKEQQMKKQPPSEGPSNYDSYKKVQDPSYAPPKGPFRQDVPPSPSQVARLNRLQTPEKGRPFYS

SEQ ID NO: 7246 - protein, 1055 aa, Artificial Sequence
  Synthetic polypeptide
RCSFQDEDGTEEDNSRVEPVGHADTGLEHIPNFSLDDMVKLVEVPNDGGPLGIHVVPFSARGGRTLGLLVKRLEKGGKAEHENLFRENDCIVRINDGDLRNRRFEQAQHMFRQAMRTPIIWFHVVPAANKEQYEQLSQSEKNNYYSSRFSPDSQYIDNRSVNSAGLHTVQRAPRLNHPPEQIDSHSRLPHSAHPSGKPPSAPASAPQNVFSTTVSSGYNTKKIGKRLNIQLKKGTEGLGFSITSRDVTIGGSAPIYVKNILPRGAAIQDGRLKAGDRLIEVNGVDLVGKSQEEVVSLLRSTKMEGTVSLLVFRQEDAFHPRELKAEDEDIVLTPDGTREFLTFEVPLNDSGSAGLGVSVKGNRSKENHADLGIFVKSIINGGAASKDGRLRVNDQLIAVNGESLLGKTNQDAMETLRRSMSTEGNKRGMIQLIVARRISKCNELKSPGSPPGPELPIETALDDRERRISHSLYSGIEGLDESPSRNAALSRIMGKYQLSPTVNMPQDDTVIIEDDRLPVLPPHLSDQSSSSSHDDVGFVTADAGTWAKAAISDSADCSLSPDVDPVLAFQREGFGRQSMSEKRTKQFSDASQLDFVKTRKSKSMDLGSSPSRDVGPSLGLKKSSSLESLQTAVAEVTLNGDIPFHRPRPRIIRGRGCNESFRAAIDKSYDKPAVDDDDEGMETLEEDTEESSRSGRESVSTASDQPSHSLERQMNGNQEKGDKTDRKKDKTGKEKKKDRDKEKDKMKAKKGMLKGLGDMFRIQAKTREFRERQARERDYAEIQDFHRTFGCDDELMYGGVSSYEGSMALNARPQSPREGHMMDALYAQVKKPRNSKPSPVDSNRSTPSNHDRIQRLRQEFQQAKQDEDVEDRRRTYSFEQPWPNARPATQSGRHSVSVEVQMQRQRQEERESSQQAQRQYSSLPRQSRKNASSVSQDSWEQNYSPGEGFQSAKENPRYSSYQGSRNGYLGGHGFNARVMLETQELLRQEQRRKEQQMKKQPPSEGPSNYDSYKKVQDPSYAPPKGPFRQDVPPSPSQVARLNRLQTPEKGRPFYS

SEQ ID NO: 7247 - protein, 755 aa, Artificial Sequence
  Synthetic polypeptide
RCSFQDEDGTEEDNSRVEPVGHADTGLEHIPNFSLDDMVKLVEVPNDGGPLGIHVVPFSARGGRTLGLLVKRLEKGGKAEHENLFRENDCIVRINDGDLRNRRFEQAQHMFRQAMRTPIIWFHVVPAANKEQYEQLSQSEKNNYYSSRFSPDSQYIDNRSVNSAGLHTVQRAPRLNHPPEQIDSHSRLPHSAHPSGKPPSAPASAPQNVFSTTVSSGYNTKKIGKRLNIQLKKGTEGLGFSITSRDVTIGGSAPIYVKNILPRGAAIQDGRLKAGDRLIEVNGVDLVGKSQEEVVSLLRSTKMEGTVSLLVFRQEDAFHPRELKAEDEDIVLTPDGTREFLTFEVPLNDSGSAGLGVSVKGNRSKENHADLGIFVKSIINGGAASKDGRLRVNDQLIAVNGESLLGKTNQDAMETLRRSMSTEGNKRGMIQLIVARRISKCNELKSPGSPPGPELPIETALDDRERRISHSLYSGIEGLDESPSRNAALSRIMGKYQLSPTVNMPQDDTVIIEDDRLPVLPPHLSDQSSSSSHDDVGFVTADAGTWAKAAISDSADCSLSPDVDPVLAFQREGFGRQIADETKLNTVDDQKAGSPSRDVGPSLGLKKSSSLESLQTAVAEVTLNGDIPFHRPRPRIIRGRGCNESFRAAIDKSYDKPAVDDDDEGMETLEEDTEESSRSGRESVSTASDQPSHSLERQMNGNQEKGDKTDRKKDKTGKEKKKDRDKEKDKMKAKKGMLKGLGDMFSLAKLKPEKR

SEQ ID NO: 7248 - protein, 798 aa, Artificial Sequence
  Synthetic polypeptide
RCSFQDEDGTEEDNSRVEPVGHADTGLEHIPNFSLDDMVKLVEVPNDGGPLGIHVVPFSARGGRTLGLLVKRLEKGGKAEHENLFRENDCIVRINDGDLRNRRFEQAQHMFRQAMRTPIIWFHVVPAANKEQYEQLSQSEKNNYYSSRFSPDSQYIDNRSVNSAGLHTVQRAPRLNHPPEQIDSHSRLPHSAHPSGKPPSAPASAPQNVFSTTVSSGYNTKKIGKRLNIQLKKGTEGLGFSITSRDVTIGGSAPIYVKNILPRGAAIQDGRLKAGDRLIEVNGVDLVGKSQEEVVSLLRSTKMEGTVSLLVFRQEDAFHPRELNAEPSQMQIPKETKAEDEDIVLTPDGTREFLTFEVPLNDSGSAGLGVSVKGNRSKENHADLGIFVKSIINGGAASKDGRLRVNDQLIAVNGESLLGKTNQDAMETLRRSMSTEGNKRGMIQLIVARRISKCNELKSPGSPPGPELPIETALDDRERRISHSLYSGIEGLDESPSRNAALSRIMGKYQLSPTVNMPQDDTVIIEDDRLPVLPPHLSDQSSSSSHDDVGFVTADAGTWAKAAISDSADCSLSPDVDPVLAFQREGFGRQSMSEKRTKQFSDASQLDFVKTRKSKSMDLGIADETKLNTVDDQKAGSPSRDVGPSLGLKKSSSLESLQTAVAEVTLNGDIPFHRPRPRIIRGRGCNESFRAAIDKSYDKPAVDDDDEGMETLEEDTEESSRSGRESVSTASDQPSHSLERQMNGNQEKGDKTDRKKDKTGKEKKKDRDKEKDKMKAKKGMLKGLGDMFSLAKLKPEKR

SEQ ID NO: 7249 - protein, 768 aa, Artificial Sequence
  Synthetic polypeptide
RCSFQDEDGTEEDNSRVEPVGHADTGLEHIPNFSLDDMVKLVEVPNDGGPLGIHVVPFSARGGRTLGLLVKRLEKGGKAEHENLFRENDCIVRINDGDLRNRRFEQAQHMFRQAMRTPIIWFHVVPAANKEQYEQLSQSEKNNYYSSRFSPDSQYIDNRSVNSAGLHTVQRAPRLNHPPEQIDSHSRLPHSAHPSGKPPSAPASAPQNVFSTTVSSGYNTKKIGKRLNIQLKKGTEGLGFSITSRDVTIGGSAPIYVKNILPRGAAIQDGRLKAGDRLIEVNGVDLVGKSQEEVVSLLRSTKMEGTVSLLVFRQEDAFHPRELNAEPSQMQIPKETKAEDEDIVLTPDGTREFLTFEVPLNDSGSAGLGVSVKGNRSKENHADLGIFVKSIINGGAASKDGRLRVNDQLIAVNGESLLGKTNQDAMETLRRSMSTEGNKRGMIQLIVARRISKCNELKSPGSPPGPELPIETALDDRERRISHSLYSGIEGLDESPSRNAALSRIMGKYQLSPTVNMPQDDTVIIEDDRLPVLPPHLSDQSSSSSHDDVGFVTADAGTWAKAAISDSADCSLSPDVDPVLAFQREGFGRQIADETKLNTVDDQKAGSPSRDVGPSLGLKKSSSLESLQTAVAEVTLNGDIPFHRPRPRIIRGRGCNESFRAAIDKSYDKPAVDDDDEGMETLEEDTEESSRSGRESVSTASDQPSHSLERQMNGNQEKGDKTDRKKDKTGKEKKKDRDKEKDKMKAKKGMLKGLGDMFSLAKLKPEKR

SEQ ID NO: 7250 - protein, 6 aa, Artificial Sequence
  Synthetic polypeptide
REAQQI

SEQ ID NO: 7251 - protein, 24 aa, Artificial Sequence
  Synthetic polypeptide
GRLSRFEHGIQSFRSSSGQHNIPQ

SEQ ID NO: 7252 - protein, 294 aa, Artificial Sequence
  Synthetic polypeptide
GGSADLNMEFNPSDHPRASTIFLSKSQTDVREKRKSLFINHHPPGQIARKYSSCSTIFLDDSTVSQPNLKYTIKCVALAIYYHIKNRDPDGRMLLDIFDENLHPLSKSEVPPDYDKHNPEQKQIYRFVRTLFSAAQLTAECAIVTLVYLERLLTYAEIDICPANWKRIVLGAILLASKVWDDQAVWNVDYCQILKDITVEDMNELERQFLELLQFNINVPSSVYAKYYFDLRSLAEANNLSFPLEPLSRERAHKLEAISRLCEDKYKDLRRSARKRSASADNLTLPRWSPAIIS

SEQ ID NO: 7253 - protein, 15 aa, Artificial Sequence
  Synthetic polypeptide
SQLLGRLRRNICRNT

SEQ ID NO: 7254 - protein, 15 aa, Artificial Sequence
  Synthetic polypeptide
SQLLGRLRRNICRNT

SEQ ID NO: 7255 - protein, 15 aa, Artificial Sequence
  Synthetic polypeptide
SQLLGRLRRNICRNT

SEQ ID NO: 7256 - protein, 141 aa, Artificial Sequence
  Synthetic polypeptide
KISWVIWPTSVIPATWETEKEHLQEHLMRLHPWRKEHLTQLKAWWKKHLMRLHPWWKEHLTRLKAWWKKHLMRLHPWWREHLTKFNVWRKRHLESSNSQQKKHLGKLRVLQKKHLRNLRGQQKEDLGRSHGRKKKTHLGKL

SEQ ID NO: 7257 - protein, 141 aa, Artificial Sequence; identical to SEQ ID NO: 7256
  Synthetic polypeptide

SEQ ID NO: 7258 - protein, 141 aa, Artificial Sequence; identical to SEQ ID NO: 7256
  Synthetic polypeptide

SEQ ID NO: 7259 - protein, 699 aa, Artificial Sequence
  Synthetic polypeptide
SQLLRRLRQENGVNPRGGACGSPVKDGLLKANCGMKVSIPTKALELMDMQTFKAEPPEKPSAFEPAIEMQKSVPNKALELKNEQTLRADEILPSESKQKDYEESSWDSESLCETVSQKDVCLPKATHQKEIDKINGKLEESPDNDGFLKAPCRMKVSIPTKALELMDMQTFKAEPPEKPSAFEPAIEMQKSVPNKALELKNEQTLRADQMFPSESKQKKVEENSWDSESLRETVSQKDVCVPKATHQKEMDKISGKLEDSTSLSKILDTVHSCERARELQKDHCEQRTGKMEQMKKKFCVLKKKLSEAKEIKSQLENQKVKWEQELCSVRLTLNQEEEKRRNADILNEKIREELGRIEEQHRKELEVKQQLEQALRIQDIELKSVESNLNQVSHTHENENYLLHENCMLKKEIAMLKLEIATLKHQYQEKENKYFEDIKILKEKNAELQMTLKLKEESLTKRASQYSGQLKVLIAENTMLTSKLKEKQDKEILEAEIESHHPRLASAVQDHDQIVTSRKSQEPAFHIAGDACLQRKMNVDVSSTIYNNEVLHQPLSEAQRKSKSLKINLNYAGDALRENTLVSEHAQRDQRETQCQMKEAEHMYQNEQDNVNKHTEQQESLDQKLFQLQSKNMWLQQQLVHAHKKADNKSKITIDIHFLERKMQHHLLKEKNEEIFNYNNHLKNRIYQYEKEKAETENS

SEQ ID NO: 7260 - protein, 15 aa, Artificial Sequence
  Synthetic polypeptide
TREAELVGLLLKMVF

SEQ ID NO: 7261 - protein, 15 aa, Artificial Sequence
  Synthetic polypeptide
TREAELVGLLLKMVF

SEQ ID NO: 7262 - protein, 46 aa, Artificial Sequence
  Synthetic polypeptide
HGETSPLLEIQKISRAWWWVPVVPATPEAEAREWREPARRSLWVSC

SEQ ID NO: 7263 - protein, 46 aa, Artificial Sequence; identical to SEQ ID NO: 7262
  Synthetic polypeptide

SEQ ID NO: 7264 - protein, 818 aa, Artificial Sequence
  Synthetic polypeptide
SQLLRRLRQENGVNPRGGACGSPVKDGLLKANCGMKVSIPTKALELMDMQTFKAEPPEKPSAFEPAIEMQKSVPNKALELKNEQTLRADEILPSESKQKDYEESSWDSESLCETVSQKDVCLPKAAHQKEIDKINGKLEGSPVKDGLLKANCGMKVSIPTKALELMDMQTFKAEPPEKPSAFEPAIEMQKSVPNKALELKNEQTLRADEILPSESKQKDYEESSWDSESLCETVSQKDVCLPKATHQKEIDKINGKLEESPDNDGFLKAPCRMKVSIPTKALELMDMQTFKAEPPEKPSAFEPAIEMQKSVPNKALELKNEQTLRADQMFPSESKQKKVEENSWDSESLRETVSQKDVCVPKATHQKEMDKISGKLEDSTSLSKILDTVHSCERARELQKDHCEQRTGKMEQMKKKFCVLKKKLSEAKEIKSQLENQKVKWEQELCSVRLTLNQEEEKRRNADILNEKIREELGRIEEQHRKELEVKQQLEQALRIQDIELKSVESNLNQVSHTHENENYLLHENCMLKKEIAMLKLEIATLKHQYQEKENKYFEDIKILKEKNAELQMTLKLKEESLTKRASQYSGQLKVLIAENTMLTSKLKEKQDKEILEAEIESHHPRLASAVQDHDQIVTSRKSQEPAFHIAGDACLQRKMNVDVSSTIYNNEVLHQPLSEAQRKSKSLKINLNYAGDALRENTLVSEHAQRDQRETQCQMKEAEHMYQNEQDNVNKHTEQQESLDQKLFQLQSKNMWLQQQLVHAHKKADNKSKITIDIHFLERKMQHHLLKEKNEEIFNYNNHLKNRIYQYEKEKAETENS

SEQ ID NO: 7265 - protein, 699 aa, Artificial Sequence; identical to SEQ ID NO: 7259
  Synthetic polypeptide

SEQ ID NO: 7266 - protein, 699 aa, Artificial Sequence; identical to SEQ ID NO: 7259
  Synthetic polypeptide

SEQ ID NO: 7267 - protein, 15 aa, Artificial Sequence
  Synthetic polypeptide
TREAELVGLLLKMVF

SEQ ID NO: 7268 - protein, 15 aa, Artificial Sequence
  Synthetic polypeptide
TREAELVGLLLKMVF

SEQ ID NO: 7269 - protein, 46 aa, Artificial Sequence; identical to SEQ ID NO: 7262
  Synthetic polypeptide

SEQ ID NO: 7270 - protein, 46 aa, Artificial Sequence; identical to SEQ ID NO: 7262
  Synthetic polypeptide

SEQ ID NO: 7271 - protein, 580 aa, Artificial Sequence
  Synthetic polypeptide
SQLLRRLRQENGVNPRGGACESPDNDGFLKAPCRMKVSIPTKALELMDMQTFKAEPPEKPSAFEPAIEMQKSVPNKALELKNEQTLRADQMFPSESKQKKVEENSWDSESLRETVSQKDVCVPKATHQKEMDKISGKLEDSTSLSKILDTVHSCERARELQKDHCEQRTGKMEQMKKKFCVLKKKLSEAKEIKSQLENQKVKWEQELCSVRLTLNQEEEKRRNADILNEKIREELGRIEEQHRKELEVKQQLEQALRIQDIELKSVESNLNQVSHTHENENYLLHENCMLKKEIAMLKLEIATLKHQYQEKENKYFEDIKILKEKNAELQMTLKLKEESLTKRASQYSGQLKVLIAENTMLTSKLKEKQDKEILEAEIESHHPRLASAVQDHDQIVTSRKSQEPAFHIAGDACLQRKMNVDVSSTIYNNEVLHQPLSEAQRKSKSLKINLNYAGDALRENTLVSEHAQRDQRETQCQMKEAEHMYQNEQDNVNKHTEQQESLDQKLFQLQSKNMWLQQQLVHAHKKADNKSKITIDIHFLERKMQHHLLKEKNEEIFNYNNHLKNRIYQYEKEKAETENS

SEQ ID NO: 7272 - protein, 580 aa, Artificial Sequence; identical to SEQ ID NO: 7271
  Synthetic polypeptide

SEQ ID NO: 7273 - protein, 580 aa, Artificial Sequence; identical to SEQ ID NO: 7271
  Synthetic polypeptide

SEQ ID NO: 7274 - protein, 15 aa, Artificial Sequence
  Synthetic polypeptide
TREAELVSLLIMMVF

SEQ ID NO: 7275 - protein, 15 aa, Artificial Sequence
  Synthetic polypeptide
TREAELVSLLIMMVF

SEQ ID NO: 7276 - protein, 15 aa, Artificial Sequence
  Synthetic polypeptide
TREAELVSLLIMMVF

SEQ ID NO: 7277 - protein, 699 aa, Artificial Sequence; identical to SEQ ID NO: 7259
  Synthetic polypeptide

SEQ ID NO: 7278 - protein, 699 aa, Artificial Sequence; identical to SEQ ID NO: 7259
  Synthetic polypeptide

SEQ ID NO: 7279 - protein, 15 aa, Artificial Sequence
  Synthetic polypeptide
TREAELVGLLLKMVF

SEQ ID NO: 7280 - protein, 15 aa, Artificial Sequence
  Synthetic polypeptide
TREAELVGLLLKMVF

SEQ ID NO: 7281 - protein, 46 aa, Artificial Sequence; identical to SEQ ID NO: 7262
  Synthetic polypeptide

SEQ ID NO: 7282 - protein, 46 aa, Artificial Sequence; identical to SEQ ID NO: 7262
  Synthetic polypeptide

SEQ ID NO: 7283 - protein, 580 aa, Artificial Sequence; identical to SEQ ID NO: 7271
  Synthetic polypeptide

SEQ ID NO: 7284 - protein, 580 aa, Artificial Sequence; identical to SEQ ID NO: 7271
  Synthetic polypeptide

SEQ ID NO: 7285 - protein, 580 aa, Artificial Sequence; identical to SEQ ID NO: 7271
  Synthetic polypeptide

SEQ ID NO: 7286 - protein, 15 aa, Artificial Sequence
  Synthetic polypeptide
TREAELVSLLIMMVF

SEQ ID NO: 7287 - protein, 15 aa, Artificial Sequence
  Synthetic polypeptide
TREAELVSLLIMMVF

SEQ ID NO: 7288 - protein, 15 aa, Artificial Sequence
  Synthetic polypeptide
TREAELVSLLIMMVF

SEQ ID NO: 7289 - protein, 15 aa, Artificial Sequence
  Synthetic polypeptide
TREAELVSLLIMMVF

SEQ ID NO: 7290 - protein, 15 aa, Artificial Sequence
  Synthetic polypeptide
TREAELVSLLIMMVF

SEQ ID NO: 7291 - protein, 15 aa, Artificial Sequence
  Synthetic polypeptide
TREAELVSLLIMMVF

SEQ ID NO: 7292 - protein, 580 aa, Artificial Sequence
  Synthetic polypeptide
SQLLRRLRQKNGVNPRGGACESPDNDGFLKAPCRMKVSIPTKALELMDMQTFKAEPPEKPSAFEPAIEMQKSVPNKALELKNEQTLRADQMFPSESKQKKVEENSWDSESLRETVSQKDVCVPKATHQKEMDKISGKLEDSTSLSKILDTVHSCERARELQKDHCEQRTGKMEQMKKKFCVLKKKLSEAKEIKSQLENQKVKWEQELCSVRLTLNQEEEKRRNADILNEKIREELGRIEEQHRKELEVKQQLEQALRIQDIELKSVESNLNQVSHTHENENYLLHENCMLKKEIAMLKLEIATLKHQYQEKENKYFEDIKILKEKNAELQMTLKLKEESLTKRASQYSGQLKVLIAENTMLTSKLKEKQDKEILEAEIESHHPRLASAVQDHDQIVTSRKSQEPAFHIAGDACLQRKMNVDVSSTIYNNEVLHQPLSEAQRKSKSLKINLNYAGDALRENTLVSEHAQRDQRETQCQMKEAEHMYQNEQDNVNKHTEQQESLDQKLFQLQSKNMWLQQQLVHAHKKADNKSKITIDIHFLERKMQHHLLKEKNEEIFNYNNHLKNRIYQYEKEKAETENS

SEQ ID NO: 7293 - protein, 580 aa, Artificial Sequence; identical to SEQ ID NO: 7292
  Synthetic polypeptide

SEQ ID NO: 7294 - protein, 580 aa, Artificial Sequence; identical to SEQ ID NO: 7292
  Synthetic polypeptide

SEQ ID NO: 7295 - protein, 24 aa, Artificial Sequence
  Synthetic polypeptide
WDLGQVSFKCDLGDTSSYHTKRCR

SEQ ID NO: 7296 - protein, 24 aa, Artificial Sequence
  Synthetic polypeptide
WDLGQVSFKCDLGDTSSYHTKRCR

SEQ ID NO: 7297 - protein, 27 aa, Artificial Sequence
  Synthetic polypeptide
GTLGKSVLSVTLEIPHHITQRFPPCTL

SEQ ID NO: 7298 - protein, 501 aa, Artificial Sequence
  Synthetic polypeptide
GTLGKSVLSVTLEIPHHITQRDADRSLSIPDEQLHSFAVSTVHIMKKRNGGGSLNNYSSSIPPTPSTSQEDPQFSVPPTANTPTPVCKLSMRWSNLFTSEKGSDPDKERKAPENHADTIGSGRAIPIKQGMLLKRSGKWLKTWKKKYVTLCSNGVLTYYSSLGDYMKNIHKKEIDLRTSTIKVPGKWPSLATSACAPISSSKSNGLSKDMDTGLGDSICFSPGISSTTSPKLNPPPSPHANKKKHLKKKSTNNFMIVSATGQTWHFEATTYEERDAWVQAIQSQILASLQSCKSSKSKSQLTSQSEAMALQSIQNMRGNAHCVDCETQNPKWASLNLGVLMCIECSGIHRSFGTRLSRVRSLELDDWPVELRKVMSSIGNELANSIWEGSSQGQTKPSIKSTREEKEWWIRSKYEEKLFLAPLPCTELSLGQQLLRATTDEDLQTAILLLAHGSREEVNETCGEGDGCTALHLACRKGNVVLEQLLTGWTSWPEMPTGTQR

SEQ ID NO: 7299 - protein, 484 aa, Artificial Sequence
  Synthetic polypeptide
WDLGQVSFKCDLGDTSSYHTKVSTVHIMKKRNGGGSLNNYSSSIPPTPSTSQEDPQFSVPPTANTPTPVCKLSMRWSNLFTSEKGSDPDKERKAPENHADTIGSGRAIPIKQGMLLKRSGKWLKTWKKKYVTLCSNGVLTYYSSLGDYMKNIHKKEIDLRTSTIKVPGKWPSLATSACAPISSSKSNGLSKDMDTGLGDSICFSPGISSTTSPKLNPPPSPHANKKKHLKKKSTNNFMIVSATGQTWHFEATTYEERDAWVQAIQSQILASLQSCKSSKSKSQLTSQSEAMALQSIQNMRGNAHCVDCETQNPKWASLNLGVLMCIECSGIHRSFGTRLSRVRSLELDDWPVELRKVMSSIGNELANSIWEGSSQGQTKPSIKSTREEKEWWIRSKYEEKLFLAPLPCTELSLGQQLLRATTDEDLQTAILLLAHGSREEVNETCGEGDGCTALHLACRKGNVVLEQLLTGWTSWPEMPTGTQR

SEQ ID NO: 7300 - protein, 481 aa, Artificial Sequence
  Synthetic polypeptide
GTLGKSVLSVTLEIPHHITQRDADRSLSIPDEQLHSFAVSTVHIMKKRNGGGSLNNYSSSIPPTPSTSQEDPQFSVPPTANTPTPVCKLSMRWSNLFTSEKGSDPDKERKAPENHADTIGSGRAIPIKQGMLLKRSGKWLKTWKKKYVTLCSNGVLTYYSSLGDYMKNIHKKEIDLRTSTIKVPGKWPSLATSACAPISSSKSNGLSKDMDTGLGDSICFSPGISSTTSPKLNPPPSPHANKKKHLKKKSTNNFMIVSATGQTWHFEATTYEERDAWVQAIQSQSEAMALQSIQNMRGNAHCVDCETQNPKWASLNLGVLMCIECSGIHRSFGTRLSRVRSLELDDWPVELRKVMSSIGNELANSIWEGSSQGQTKPSIKSTREEKEWWIRSKYEEKLFLAPLPCTELSLGQQLLRATTDEDLQTAILLLAHGSREEVNETCGEGDGCTALHLACRKGNVVLEQLLTGWTSWPEMPTGTQR

SEQ ID NO: 7301 - protein, 24 aa, Artificial Sequence
  Synthetic polypeptide
WDLGQVSFKCDLGDTSSYHTKRCR

SEQ ID NO: 7302 - protein, 484 aa, Artificial Sequence
  Synthetic polypeptide
WDLGQVSFKCDLGDTSSYHTKVSTVHIMKKRNGGGSLNNYSSSIPPTPSTSQEDPQFSVPPTANTPTPVCKRSMRWSNLFTSEKGSDPDKERKAPENHADTIGSGRAIPIKQGMLLKRSGKWLKTWKKKYVTLCSNGVLTYYSSLGDYMKNIHKKEIDLRTSTIKVPGKWPSLATSACAPISSSKSNGLSKDMDTGLGDSICFSPGISSTTSPKLNPPPSPHANKKKHLKKKSTNNFMIVSATGQTWHFEATTYEERDAWVQAIQSQILASLQSCKSSKSKSQLTSQSEAMALQSIQNMRGNAHCVDCETQNPKWASLNLGVLMCIECSGIHRSFGTRLSRVRSLELDDWPVELRKVMSSIGNELANSIWEGSSQGQTKPSIKSTREEKEWWIRSKYEEKLFLAPLPCTELSLGQQLLRATTDEDLQTAILLLAHGSREEVNETCGEGDGCTALHLACRKGNVVLEQLLTGWTSWPEMPTGTQR

SEQ ID NO: 7303 - protein, 27 aa, Artificial Sequence
  Synthetic polypeptide
GTLGKSVLSVTLEIPHHITQRFPPCTL

SEQ ID NO: 7304 - protein, 501 aa, Artificial Sequence
  Synthetic polypeptide
GTLGKSVLSVTLEIPHHITQRDADRSLSIPDEQLHSFAVSTVHIMKKRNGGGSLNNYSSSIPPTPSTSQEDPQFSVPPTANTPTPVCKRSMRWSNLFTSEKGSDPDKERKAPENHADTIGSGRAIPIKQGMLLKRSGKWLKTWKKKYVTLCSNGVLTYYSSLGDYMKNIHKKEIDLRTSTIKVPGKWPSLATSACAPISSSKSNGLSKDMDTGLGDSICFSPGISSTTSPKLNPPPSPHANKKKHLKKKSTNNFMIVSATGQTWHFEATTYEERDAWVQAIQSQILASLQSCKSSKSKSQLTSQSEAMALQSIQNMRGNAHCVDCETQNPKWASLNLGVLMCIECSGIHRSFGTRLSRVRSLELDDWPVELRKVMSSIGNELANSIWEGSSQGQTKPSIKSTREEKEWWIRSKYEEKLFLAPLPCTELSLGQQLLRATTDEDLQTAILLLAHGSREEVNETCGEGDGCTALHLACRKGNVVLEQLLTGWTSWPEMPTGTQR

SEQ ID NO: 7305 - protein, 31 aa, Artificial Sequence
  Synthetic polypeptide
GLRDPGPMWQAGQCSLQCIYGVFPTPGQGLQ

SEQ ID NO: 7306 - protein, 31 aa, Artificial Sequence; identical to SEQ ID NO: 7305
  Synthetic polypeptide

SEQ ID NO: 7307 - protein, 31 aa, Artificial Sequence; identical to SEQ ID NO: 7305
  Synthetic polypeptide

SEQ ID NO: 7308 - protein, 81 aa, Artificial Sequence
  Synthetic polypeptide
ASGTQAPCGKLASVPCNASTESSPPLAKGYNEQRIRQNVQVFEFQLTSEEMKAIDGLNRNVRYLTLDIFAGPPNYPFSDEY

SEQ ID NO: 7309 - protein, 81 aa, Artificial Sequence; identical to SEQ ID NO: 7308
  Synthetic polypeptide

SEQ ID NO: 7310 - protein, 45 aa, Artificial Sequence
  Synthetic polypeptide
PQGPRPHVASWPVFPAMHLRSLPHPWPRATMSSASDRTCRCLNSS

SEQ ID NO: 7311 - protein, 45 aa, Artificial Sequence; identical to SEQ ID NO: 7310
  Synthetic polypeptide

SEQ ID NO: 7312 - protein, 39 aa, Artificial Sequence
  Synthetic polypeptide
ASGTQAPCGKLASVPCNASTESSPPLAKGYNEQRIRQNV

SEQ ID NO: 7313 - protein, 39 aa, Artificial Sequence
  Synthetic polypeptide
PQGPRPHVASWPVFPAMHLRSLPHPWPRATMSSASDRTC

SEQ ID NO: 7314 - protein, 308 aa, Artificial Sequence
  Synthetic polypeptide
KHVAPPPSFSLSLCLSLSLSLYLPLSCQPSEDMLASPSPSSIMEQVGLAIRSKIADGSVKREDIFYTSKLWCNSHRPELVRPALERSLKNLQLDYVDLYLIHFPVSVKPGEEVIPKDENGKILFDTVDLCATWEAVEKCKDAGLAKSIGVSNFNRRQLEMILNKPGLKYKPVCNQVECHPYFNQRKLLDFCKSKDIVLVAYSALGSHREEPWVDPNSPVLLEDPVLCALAKKHKRTPALIALRYQLQRGVVVLAKSYNEQRIRQNVQVFEFQLTSEEMKAIDGLNRNVRYLTLDIFAGPPNYPFSDEY

SEQ ID NO: 7315 - protein, 308 aa, Artificial Sequence; identical to SEQ ID NO: 7314
  Synthetic polypeptide

SEQ ID NO: 7316 - protein, 55 aa, Artificial Sequence
  Synthetic polypeptide
HLHLLSLSLSASLSLSLSTSPSPASQVKTCLLPLHLPPSWSRLDWPSEARLQMAV

SEQ ID NO: 7317 - protein, 55 aa, Artificial Sequence; identical to SEQ ID NO: 7316
  Synthetic polypeptide

SEQ ID NO: 7318 - protein, 55 aa, Artificial Sequence; identical to SEQ ID NO: 7316
  Synthetic polypeptide

SEQ ID NO: 7319 - protein, 65 aa, Artificial Sequence
  Synthetic polypeptide
RHACFPFTFLHHGAGWTGHPKQDCRWQCEERRHILHFKALVQFPSTRVGPTSLGKVTEKSSIGLC

SEQ ID NO: 7320 - protein, 65 aa, Artificial Sequence; identical to SEQ ID NO: 7319
  Synthetic polypeptide

SEQ ID NO: 7321 - protein, 65 aa, Artificial Sequence; identical to SEQ ID NO: 7319
  Synthetic polypeptide

SEQ ID NO: 7322 - protein, 188 aa, Artificial Sequence
  Synthetic polypeptide
KHVAPPPSFSLSLCLSLSLSLYLPLSCQPSEDMLASPSPSSIMEQVGLAIRSKIADGSVKREDIFYTSKLWCNSHRPELVRPALERSLKNLQLDYVDLYLIHFPVSVKPGEEVIPKDENGKILFDTVDLCATWEAVEKCKDAGLAKSIGVSNFNRRQLEMILNKPGLKYKPVCNQPRDNSIFSLSPDW

SEQ ID NO: 7323 - protein, 306 aa, Artificial Sequence
  Synthetic polypeptide
KHVAPPPSFSLSLCLSLSLSLYLPLSCQPSEDMLASPSPSSIMVGLAIRSKIADGSVKREDIFYTSKLWCNSHRPELVRPALERSLKNLQLDYVDLYLIHFPVSVKPGEEVIPKDENGKILFDTVDLCATWEAVEKCKDAGLAKSIGVSNFNRRQLEMILNKPGLKYKPVCNQVECHPYFNQRKLLDFCKSKDIVLVAYSALGSHREEPWVDPNSPVLLEDPVLCALAKKHKRTPALIALRYQLQRGVVVLAKSYNEQRIRQNVQVFEFQLTSEEMKAIDGLNRNVRYLTLDIFAGPPNYPFSDEY

SEQ ID NO: 7324 - protein, 306 aa, Artificial Sequence; identical to SEQ ID NO: 7323
  Synthetic polypeptide

SEQ ID NO: 7325 - protein, 53 aa, Artificial Sequence
  Synthetic polypeptide
HLHLLSLSLSASLSLSLSTSPSPASQVKTCLLPLHLPPSWLDWPSEARLQMAV

SEQ ID NO: 7326 - protein, 53 aa, Artificial Sequence; identical to SEQ ID NO: 7325
  Synthetic polypeptide

SEQ ID NO: 7327 - protein, 53 aa, Artificial Sequence; identical to SEQ ID NO: 7325
  Synthetic polypeptide

SEQ ID NO: 7328 - protein, 53 aa, Artificial Sequence; identical to SEQ ID NO: 7325
  Synthetic polypeptide

SEQ ID NO: 7329 - protein, 63 aa, Artificial Sequence
  Synthetic polypeptide
RHACFPFTFLHHGWTGHPKQDCRWQCEERRHILHFKALVQFPSTRVGPTSLGKVTEKSSIGLC

SEQ ID NO: 7330 - protein, 63 aa, Artificial Sequence; identical to SEQ ID NO: 7329
  Synthetic polypeptide

SEQ ID NO: 7331 - protein, 63 aa, Artificial Sequence; identical to SEQ ID NO: 7329
  Synthetic polypeptide

SEQ ID NO: 7332 - protein, 63 aa, Artificial Sequence; identical to SEQ ID NO: 7329
  Synthetic polypeptide

SEQ ID NO: 7333 - protein, 264 aa, Artificial Sequence
  Synthetic polypeptide
KHVAPPPSFSLSLCLSLSLSLYLPLSCQPSEDMLASPSPSSIMVGLAIRSKIADGSVKREDIFYTSKLWCNSHRPELVRPALERSLKNLQLDYVDLYLIHFPVSVKPGEEVIPKDENGKILFDTVDLCATWEAVEKCKDAGLAKSIGVSNFNRRQLEMILNKPGLKYKPVCNQVECHPYFNQRKLLDFCKSKDIVLVAYSALGSHREEPWVDPNSPVLLEDPVLCALAKKHKRTPALIALRYQLQRGVVVLAKSYNEQRIRQNV

SEQ ID NO: 7334 - protein, 186 aa, Artificial Sequence
  Synthetic polypeptide
KHVAPPPSFSLSLCLSLSLSLYLPLSCQPSEDMLASPSPSSIMVGLAIRSKIADGSVKREDIFYTSKLWCNSHRPELVRPALERSLKNLQLDYVDLYLIHFPVSVKPGEEVIPKDENGKILFDTVDLCATWEAVEKCKDAGLAKSIGVSNFNRRQLEMILNKPGLKYKPVCNQPRDNSIFSLSPDW

SEQ ID NO: 7335 - protein, 62 aa, Artificial Sequence
  Synthetic polypeptide
KHVAPPPSFSLSLCLSLSLSLYLPLSCQPSEDMLASPSPSSIMVSFLRPPLPCLLCSLQNCS

SEQ ID NO: 7336 - protein, 62 aa, Artificial Sequence; identical to SEQ ID NO: 7335
  Synthetic polypeptide

SEQ ID NO: 7337 - protein, 62 aa, Artificial Sequence; identical to SEQ ID NO: 7335
  Synthetic polypeptide

SEQ ID NO: 7338 - protein, 308 aa, Artificial Sequence
  Synthetic polypeptide
GLPCHASCAACRTVPKSKALEATKLAIEAGFRHIDSAHLYNNEEQVGLAIRSKIADGSVKREDIFYTSKLWCNSHRPELVRPALERSLKNLQLDYVDLYLIHFPVSVKPGEEVIPKDENGKILFDTVDLCATWEAVEKCKDAGLAKSIGVSNFNRRQLEMILNKPGLKYKPVCNQVECHPYFNQRKLLDFCKSKDIVLVAYSALGSHREEPWVDPNSPVLLEDPVLCALAKKHKRTPALIALRYQLQRGVVVLAKSYNEQRIRQNVQVFEFQLTSEEMKAIDGLNRNVRYLTLDIFAGPPNYPFSDEY

SEQ ID NO: 7339 - protein, 308 aa, Artificial Sequence; identical to SEQ ID NO: 7338
  Synthetic polypeptide

SEQ ID NO: 7340 - protein, 36 aa, Artificial Sequence
  Synthetic polypeptide
RHACFPFTFLHHGKFPEASPAMPPVQPAELFLKVKL

SEQ ID NO: 7341 - protein, 36 aa, Artificial Sequence; identical to SEQ ID NO: 7340
  Synthetic polypeptide

SEQ ID NO: 7342 - protein, 36 aa, Artificial Sequence; identical to SEQ ID NO: 7340
  Synthetic polypeptide

SEQ ID NO: 7343 - protein, 188 aa, Artificial Sequence
  Synthetic polypeptide
GLPCHASCAACRTVPKSKALEATKLAIEAGFRHIDSAHLYNNEEQVGLAIRSKIADGSVKREDIFYTSKLWCNSHRPELVRPALERSLKNLQLDYVDLYLIHFPVSVKPGEEVIPKDENGKILFDTVDLCATWEAVEKCKDAGLAKSIGVSNFNRRQLEMILNKPGLKYKPVCNQPRDNSIFSLSPDW

SEQ ID NO: 7344 - protein, 23 aa, Artificial Sequence
  Synthetic polypeptide
FHRKSSIRSRLDWPSEARLQMAV

SEQ ID NO: 7345 - protein, 23 aa, Artificial Sequence
  Synthetic polypeptide
FHRKSSIRSRLDWPSEARLQMAV

SEQ ID NO: 7346 - protein, 23 aa, Artificial Sequence
  Synthetic polypeptide
FHRKSSIRSRLDWPSEARLQMAV

SEQ ID NO: 7347 - protein, 350 aa, Artificial Sequence
  Synthetic polypeptide
PLSCKVGNEVLIIANQLFYVWDCPTSVLGRDLLCKLEALIVFEPEKRPMCLQVPPESRLQLQALLMKSKTPQLEVEMIPPEVLNKEQVGLAIRSKIADGSVKREDIFYTSKLWCNSHRPELVRPALERSLKNLQLDYVDLYLIHFPVSVKPGEEVIPKDENGKILFDTVDLCATWEAVEKCKDAGLAKSIGVSNFNRRQLEMILNKPGLKYKPVCNQVECHPYFNQRKLLDFCKSKDIVLVAYSALGSHREEPWVDPNSPVLLEDPVLCALAKKHKRTPALIALRYQLQRGVVVLAKSYNEQRIRQNVQVFEFQLTSEEMKAIDGLNRNVRYLTLDIFAGPPNYPFSDEY

SEQ ID NO: 7348 - protein, 350 aa, Artificial Sequence; identical to SEQ ID NO: 7347
  Synthetic polypeptide

SEQ ID NO: 7349 - protein, 230 aa, Artificial Sequence
  Synthetic polypeptide
PLSCKVGNEVLIIANQLFYVWDCPTSVLGRDLLCKLEALIVFEPEKRPMCLQVPPESRLQLQALLMKSKTPQLEVEMIPPEVLNKEQVGLAIRSKIADGSVKREDIFYTSKLWCNSHRPELVRPALERSLKNLQLDYVDLYLIHFPVSVKPGEEVIPKDENGKILFDTVDLCATWEAVEKCKDAGLAKSIGVSNFNRRQLEMILNKPGLKYKPVCNQPRDNSIFSLSPDW

SEQ ID NO: 7350 - protein, 21 aa, Artificial Sequence
  Synthetic polypeptide
FHRKSSIRLDWPSEARLQMAV

SEQ ID NO: 7351 - protein, 21 aa, Artificial Sequence
  Synthetic polypeptide
FHRKSSIRLDWPSEARLQMAV

SEQ ID NO: 7352 - protein, 21 aa, Artificial Sequence
  Synthetic polypeptide
FHRKSSIRLDWPSEARLQMAV

SEQ ID NO: 7353 - protein, 21 aa, Artificial Sequence
  Synthetic polypeptide
FHRKSSIRLDWPSEARLQMAV

SEQ ID NO: 7354 - protein, 348 aa, Artificial Sequence
  Synthetic polypeptide
PLSCKVGNEVLIIANQLFYVWDCPTSVLGRDLLCKLEALIVFEPEKRPMCLQVPPESRLQLQALLMKSKTPQLEVEMIPPEVLNKVGLAIRSKIADGSVKREDIFYTSKLWCNSHRPELVRPALERSLKNLQLDYVDLYLIHFPVSVKPGEEVIPKDENGKILFDTVDLCATWEAVEKCKDAGLAKSIGVSNFNRRQLEMILNKPGLKYKPVCNQVECHPYFNQRKLLDFCKSKDIVLVAYSALGSHREEPWVDPNSPVLLEDPVLCALAKKHKRTPALIALRYQLQRGVVVLAKSYNEQRIRQNVQVFEFQLTSEEMKAIDGLNRNVRYLTLDIFAGPPNYPFSDEY

SEQ ID NO: 7355 - protein, 348 aa, Artificial Sequence; identical to SEQ ID NO: 7354
  Synthetic polypeptide

SEQ ID NO: 7356 - protein, 306 aa, Artificial Sequence
  Synthetic polypeptide
PLSCKVGNEVLIIANQLFYVWDCPTSVLGRDLLCKLEALIVFEPEKRPMCLQVPPESRLQLQALLMKSKTPQLEVEMIPPEVLNKVGLAIRSKIADGSVKREDIFYTSKLWCNSHRPELVRPALERSLKNLQLDYVDLYLIHFPVSVKPGEEVIPKDENGKILFDTVDLCATWEAVEKCKDAGLAKSIGVSNFNRRQLEMILNKPGLKYKPVCNQVECHPYFNQRKLLDFCKSKDIVLVAYSALGSHREEPWVDPNSPVLLEDPVLCALAKKHKRTPALIALRYQLQRGVVVLAKSYNEQRIRQNV

SEQ ID NO: 7357 - protein, 228 aa, Artificial Sequence
  Synthetic polypeptide
PLSCKVGNEVLIIANQLFYVWDCPTSVLGRDLLCKLEALIVFEPEKRPMCLQVPPESRLQLQALLMKSKTPQLEVEMIPPEVLNKVGLAIRSKIADGSVKREDIFYTSKLWCNSHRPELVRPALERSLKNLQLDYVDLYLIHFPVSVKPGEEVIPKDENGKILFDTVDLCATWEAVEKCKDAGLAKSIGVSNFNRRQLEMILNKPGLKYKPVCNQPRDNSIFSLSPDW

SEQ ID NO: 7358 - protein, 26 aa, Artificial Sequence
  Synthetic polypeptide
FHRKSSISFGAIPIDQSWSDQPWKGH

SEQ ID NO: 7359 - protein, 26 aa, Artificial Sequence
  Synthetic polypeptide
FHRKSSISFGAIPIDQSWSDQPWKGH

SEQ ID NO: 7360 - protein, 26 aa, Artificial Sequence
  Synthetic polypeptide
FHRKSSISFGAIPIDQSWSDQPWKGH

SEQ ID NO: 7361 - protein, 26 aa, Artificial Sequence
  Synthetic polypeptide
FHRKSSISFGAIPIDQSWSDQPWKGH

SEQ ID NO: 7362 - protein, 324 aa, Artificial Sequence
  Synthetic polypeptide
PLSCKVGNEVLIIANQLFYVWDCPTSVLGRDLLCKLEALIVFEPEKRPMCLQVPPESRLQLQALLMKSKTPQLEVEMIPPEVLNKLWCNSHRPELVRPALERSLKNLQLDYVDLYLIHFPVSVKPGEEVIPKDENGKILFDTVDLCATWEAVEKCKDAGLAKSIGVSNFNRRQLEMILNKPGLKYKPVCNQVECHPYFNQRKLLDFCKSKDIVLVAYSALGSHREEPWVDPNSPVLLEDPVLCALAKKHKRTPALIALRYQLQRGVVVLAKSYNEQRIRQNVQVFEFQLTSEEMKAIDGLNRNVRYLTLDIFAGPPNYPFSDEY

SEQ ID NO: 7363 - protein, 324 aa, Artificial Sequence; identical to SEQ ID NO: 7362
  Synthetic polypeptide

SEQ ID NO: 7364 - protein, 282 aa, Artificial Sequence
  Synthetic polypeptide
PLSCKVGNEVLIIANQLFYVWDCPTSVLGRDLLCKLEALIVFEPEKRPMCLQVPPESRLQLQALLMKSKTPQLEVEMIPPEVLNKLWCNSHRPELVRPALERSLKNLQLDYVDLYLIHFPVSVKPGEEVIPKDENGKILFDTVDLCATWEAVEKCKDAGLAKSIGVSNFNRRQLEMILNKPGLKYKPVCNQVECHPYFNQRKLLDFCKSKDIVLVAYSALGSHREEPWVDPNSPVLLEDPVLCALAKKHKRTPALIALRYQLQRGVVVLAKSYNEQRIRQNV

SEQ ID NO: 7365 - protein, 204 aa, Artificial Sequence
  Synthetic polypeptide
PLSCKVGNEVLIIANQLFYVWDCPTSVLGRDLLCKLEALIVFEPEKRPMCLQVPPESRLQLQALLMKSKTPQLEVEMIPPEVLNKLWCNSHRPELVRPALERSLKNLQLDYVDLYLIHFPVSVKPGEEVIPKDENGKILFDTVDLCATWEAVEKCKDAGLAKSIGVSNFNRRQLEMILNKPGLKYKPVCNQPRDNSIFSLSPDW

SEQ ID NO: 7366 - protein, 29 aa, Artificial Sequence
  Synthetic polypeptide
QLQPGKAMGIKLQTVRAAMWAAPCKATGS

SEQ ID NO: 7367 - protein, 29 aa, Artificial Sequence
  Synthetic polypeptide
QLQPGKAMGIKLQTVRAAMWAAPCKATGS

SEQ ID NO: 7368 - protein, 29 aa, Artificial Sequence
  Synthetic polypeptide
QLQPGKAMGIKLQTVRAAMWAAPCKATGS

SEQ ID NO: 7369 - protein, 307 aa, Artificial Sequence
  Synthetic polypeptide
EQPCGLHPAKPQVPKSKALEATKLAIEAGFRHIDSAHLYNNEEQVGLAIRSKIADGSVKREDIFYTSKLWCNSHRPELVRPALERSLKNLQLDYVDLYLIHFPVSVKPGEEVIPKDENGKILFDTVDLCATWEAVEKCKDAGLAKSIGVSNFNRRQLEMILNKPGLKYKPVCNQVECHPYFNQRKLLDFCKSKDIVLVAYSALGSHREEPWVDPNSPVLLEDPVLCALAKKHKRTPALIALRYQLQRGVVVLAKSYNEQRIRQNVQVFEFQLTSEEMKAIDGLNRNVRYLTLDIFAGPPNYPFSDEY

SEQ ID NO: 7370 - protein, 307 aa, Artificial Sequence; identical to SEQ ID NO: 7369
  Synthetic polypeptide

SEQ ID NO: 7371 - protein, 23 aa, Artificial Sequence
  Synthetic polypeptide
TPNCESSHVGCTLQSHRFLKVKL

SEQ ID NO: 7372 - protein, 23 aa, Artificial Sequence
  Synthetic polypeptide
TPNCESSHVGCTLQSHRFLKVKL

SEQ ID NO: 7373 - protein, 23 aa, Artificial Sequence
  Synthetic polypeptide
TPNCESSHVGCTLQSHRFLKVKL

SEQ ID NO: 7374 - protein, 187 aa, Artificial Sequence
  Synthetic polypeptide
EQPCGLHPAKPQVPKSKALEATKLAIEAGFRHIDSAHLYNNEEQVGLAIRSKIADGSVKREDIFYTSKLWCNSHRPELVRPALERSLKNLQLDYVDLYLIHFPVSVKPGEEVIPKDENGKILFDTVDLCATWEAVEKCKDAGLAKSIGVSNFNRRQLEMILNKPGLKYKPVCNQPRDNSIFSLSPDW

SEQ ID NO: 7375 - protein, 23 aa, Artificial Sequence
  Synthetic polypeptide
TPNCESSHVGCTLQSHRFLKVKL

SEQ ID NO: 7376 - protein, 23 aa, Artificial Sequence
  Synthetic polypeptide
TPNCESSHVGCTLQSHRFLKVKL

SEQ ID NO: 7377 - protein, 23 aa, Artificial Sequence
  Synthetic polypeptide
TPNCESSHVGCTLQSHRFLKVKL

SEQ ID NO: 7378 - protein, 23 aa, Artificial Sequence
  Synthetic polypeptide
TPNCESSHVGCTLQSHRFLKVKL

SEQ ID NO: 7379 - protein, 23 aa, Artificial Sequence
  Synthetic polypeptide
TPNCESSHVGCTLQSHRFLKVKL

SEQ ID NO: 7380 - protein, 66 aa, Artificial Sequence
  Synthetic polypeptide
YVVGALQGVSMGALCSKAVGERPYPSKFQNYKSISRLQLQPGKAMGIKLQTVRAAMWAAPCKATGS

SEQ ID NO: 7381 - protein, 66 aa, Artificial Sequence; identical to SEQ ID NO: 7380
  Synthetic polypeptide

SEQ ID NO: 7382 - protein, 66 aa, Artificial Sequence; identical to SEQ ID NO: 7380
  Synthetic polypeptide

SEQ ID NO: 7383 - protein, 66 aa, Artificial Sequence; identical to SEQ ID NO: 7380
  Synthetic polypeptide

SEQ ID NO: 7384 - protein, 66 aa, Artificial Sequence; identical to SEQ ID NO: 7380
  Synthetic polypeptide

SEQ ID NO: 7385 - protein, 307 aa, Artificial Sequence
  Synthetic polypeptide
EQPCGLHPAKPQVPKSKALEAVKLAIEAGFHHIDSAHVYNNEEQVGLAIRSKIADGSVKREDIFYTSKLWSNSHRPELVRPALERSLKNLQLDYVDLYLIHFPVSVKPGEEVIPKDENGKILFDTVDLCATWEAMEKCKDAGLAKSIGVSNFNHRLLEMILNKPGLKYKPVCNQVECHPYFNQRKLLDFCKSKDIVLVAYSALGSHREEPWVDPNSPVLLEDPVLCALAKKHKRTPALIALRYQLQRGVVVLAKSYNEQRIRQNVQVFEFQLTSEEMKAIDGLNRNVRYLTLDIFAGPPNYPFSDEY

SEQ ID NO: 7386 - protein, 307 aa, Artificial Sequence; identical to SEQ ID NO: 7385
  Synthetic polypeptide

SEQ ID NO: 7387 - protein, 281 aa, Artificial Sequence
  Synthetic polypeptide
EQPCGLHPAKPQVPKSKALEAVKLAIEAGFHHIDSAHVYNNEEQVGLAIRSKIADGSVKREDIFYTSKLWSNSHRPELVRPALERSLKNLQLDYVDLYLIHFPVSVKAMEKCKDAGLAKSIGVSNFNHRLLEMILNKPGLKYKPVCNQVECHPYFNQRKLLDFCKSKDIVLVAYSALGSHREEPWVDPNSPVLLEDPVLCALAKKHKRTPALIALRYQLQRGVVVLAKSYNEQRIRQNVQVFEFQLTSEEMKAIDGLNRNVRYLTLDIFAGPPNYPFSDEY

SEQ ID NO: 7388 - protein, 184 aa, Artificial Sequence
  Synthetic polypeptide
EQPCGLHPAKPQVPKSKALEAVKLAIEAGFHHIDSAHVYNNEEQVGLAIRSKIADGSVKREDIFYTSKLWSNSHRPELVRPALERSLKNLQLDYVDLYLIHFPVSVKPGEEVIPKDENGKILFDTVDLCATWEAMEKCKDAGLAKSIGVSNFNHRLLEMILNKPGLKYKPVCNQVECHPYFNQR

SEQ ID NO: 7389 - protein, 123 aa, Artificial Sequence
  Synthetic polypeptide
EQPCGLHPAKPQVPKSKALEAVKLAIEAGFHHIDSAHVYNNEEQVGLAIRSKIADGSVKREDIFYTSKLWSNSHRPELVRPALERSLKNLQLDYVDLYLIHFPVSVKEDIGILTWKKSPKHNS

SEQ ID NO: 7390 - protein, 19 aa, Artificial Sequence
  Synthetic polypeptide
VNCPYESLASVQRFLKVKL

SEQ ID NO: 7391 - protein, 19 aa, Artificial Sequence
  Synthetic polypeptide
VNCPYESLASVQRFLKVKL

SEQ ID NO: 7392 - protein, 19 aa, Artificial Sequence
  Synthetic polypeptide
VNCPYESLASVQRFLKVKL

SEQ ID NO: 7393 - protein, 19 aa, Artificial Sequence
  Synthetic polypeptide
VNCPYESLASVQRFLKVKL

SEQ ID NO: 7394 - protein, 19 aa, Artificial Sequence
  Synthetic polypeptide
VNCPYESLASVQRFLKVKL

SEQ ID NO: 7395 - protein, 13 aa, Artificial Sequence
  Synthetic polypeptide
IALMRALHLSKGS

SEQ ID NO: 7396 - protein, 13 aa, Artificial Sequence
  Synthetic polypeptide
IALMRALHLSKGS

SEQ ID NO: 7397 - protein, 13 aa, Artificial Sequence
  Synthetic polypeptide
IALMRALHLSKGS

SEQ ID NO: 7398 - protein, 13 aa, Artificial Sequence
  Synthetic polypeptide
IALMRALHLSKGS

SEQ ID NO: 7399 - protein, 13 aa, Artificial Sequence
  Synthetic polypeptide
IALMRALHLSKGS

SEQ ID NO: 7400 - protein, 302 aa, Artificial Sequence
  Synthetic polypeptide
EPCICPKVPKSKALEAVKLAIEAGFHHIDSAHVYNNEEQVGLAIRSKIADGSVKREDIFYTSKLWSNSHRPELVRPALERSLKNLQLDYVDLYLIHFPVSVKPGEEVIPKDENGKILFDTVDLCATWEAMEKCKDAGLAKSIGVSNFNHRLLEMILNKPGLKYKPVCNQVECHPYFNQRKLLDFCKSKDIVLVAYSALGSHREEPWVDPNSPVLLEDPVLCALAKKHKRTPALIALRYQLQRGVVVLAKSYNEQRIRQNVQVFEFQLTSEEMKAIDGLNRNVRYLTLDIFAGPPNYPFSDEY

SEQ ID NO: 7401 - protein, 302 aa, Artificial Sequence; identical to SEQ ID NO: 7400
  Synthetic polypeptide

SEQ ID NO: 7402 - protein, 276 aa, Artificial Sequence
  Synthetic polypeptide
EPCICPKVPKSKALEAVKLAIEAGFHHIDSAHVYNNEEQVGLAIRSKIADGSVKREDIFYTSKLWSNSHRPELVRPALERSLKNLQLDYVDLYLIHFPVSVKAMEKCKDAGLAKSIGVSNFNHRLLEMILNKPGLKYKPVCNQVECHPYFNQRKLLDFCKSKDIVLVAYSALGSHREEPWVDPNSPVLLEDPVLCALAKKHKRTPALIALRYQLQRGVVVLAKSYNEQRIRQNVQVFEFQLTSEEMKAIDGLNRNVRYLTLDIFAGPPNYPFSDEY

SEQ ID NO: 7403 - protein, 179 aa, Artificial Sequence
  Synthetic polypeptide
EPCICPKVPKSKALEAVKLAIEAGFHHIDSAHVYNNEEQVGLAIRSKIADGSVKREDIFYTSKLWSNSHRPELVRPALERSLKNLQLDYVDLYLIHFPVSVKPGEEVIPKDENGKILFDTVDLCATWEAMEKCKDAGLAKSIGVSNFNHRLLEMILNKPGLKYKPVCNQVECHPYFNQR

SEQ ID NO: 7404 - protein, 118 aa, Artificial Sequence
  Synthetic polypeptide
EPCICPKVPKSKALEAVKLAIEAGFHHIDSAHVYNNEEQVGLAIRSKIADGSVKREDIFYTSKLWSNSHRPELVRPALERSLKNLQLDYVDLYLIHFPVSVKEDIGILTWKKSPKHNS

SEQ ID NO: 7405 - protein, 311 aa, Artificial Sequence
  Synthetic polypeptide
VSRGLPCHAFCTACRTVPKSKALEAVKLAIEAGFHHIDSAHVYNNEEQVGLAIRSKIADGSVKREDIFYTSKLWSNSHRPELVRPALERSLKNLQLDYVDLYLIHFPVSVKPGEEVIPKDENGKILFDTVDLCATWEAMEKCKDAGLAKSIGVSNFNHRLLEMILNKPGLKYKPVCNQVECHPYFNQRKLLDFCKSKDIVLVAYSALGSHREEPWVDPNSPVLLEDPVLCALAKKHKRTPALIALRYQLQRGVVVLAKSYNEQRIRQNVQVFEFQLTSEEMKAIDGLNRNVRYLTLDIFAGPPNYPFSDEY

SEQ ID NO: 7406 - protein, 311 aa, Artificial Sequence; identical to SEQ ID NO: 7405
  Synthetic polypeptide

SEQ ID NO: 7407 - protein, 36 aa, Artificial Sequence
  Synthetic polypeptide
RHAYFPFTFLHDGKFPEASRAMPSVQPAELFLKVKL

SEQ ID NO: 7408 - protein, 36 aa, Artificial Sequence; identical to SEQ ID NO: 7407
  Synthetic polypeptide

SEQ ID NO: 7409 - protein, 36 aa, Artificial Sequence; identical to SEQ ID NO: 7407
  Synthetic polypeptide

SEQ ID NO: 7410 - protein, 36 aa, Artificial Sequence; identical to SEQ ID NO: 7407
  Synthetic polypeptide

SEQ ID NO: 7411 - protein, 36 aa, Artificial Sequence; identical to SEQ ID NO: 7407
  Synthetic polypeptide

SEQ ID NO: 7412 - protein, 52 aa, Artificial Sequence
  Synthetic polypeptide
KCVAPPPSLSLSLSLSCQPSEDMLTSPSPSFMMVSFPRPPVPCLLYSLQNCS

SEQ ID NO: 7413 - protein, 52 aa, Artificial Sequence; identical to SEQ ID NO: 7412
  Synthetic polypeptide

SEQ ID NO: 7414 - protein, 52 aa, Artificial Sequence; identical to SEQ ID NO: 7412
  Synthetic polypeptide

SEQ ID NO: 7415 - protein, 52 aa, Artificial Sequence; identical to SEQ ID NO: 7412
  Synthetic polypeptide

SEQ ID NO: 7416 - protein, 52 aa, Artificial Sequence; identical to SEQ ID NO: 7412
  Synthetic polypeptide

SEQ ID NO: 7417 - protein, 285 aa, Artificial Sequence
  Synthetic polypeptide
VSRGLPCHAFCTACRTVPKSKALEAVKLAIEAGFHHIDSAHVYNNEEQVGLAIRSKIADGSVKREDIFYTSKLWSNSHRPELVRPALERSLKNLQLDYVDLYLIHFPVSVKAMEKCKDAGLAKSIGVSNFNHRLLEMILNKPGLKYKPVCNQVECHPYFNQRKLLDFCKSKDIVLVAYSALGSHREEPWVDPNSPVLLEDPVLCALAKKHKRTPALIALRYQLQRGVVVLAKSYNEQRIRQNVQVFEFQLTSEEMKAIDGLNRNVRYLTLDIFAGPPNYPFSDEY

SEQ ID NO: 7418 - protein, 188 aa, Artificial Sequence
  Synthetic polypeptide
VSRGLPCHAFCTACRTVPKSKALEAVKLAIEAGFHHIDSAHVYNNEEQVGLAIRSKIADGSVKREDIFYTSKLWSNSHRPELVRPALERSLKNLQLDYVDLYLIHFPVSVKPGEEVIPKDENGKILFDTVDLCATWEAMEKCKDAGLAKSIGVSNFNHRLLEMILNKPGLKYKPVCNQVECHPYFNQR

SEQ ID NO: 7419 - protein, 127 aa, Artificial Sequence
  Synthetic polypeptide
VSRGLPCHAFCTACRTVPKSKALEAVKLAIEAGFHHIDSAHVYNNEEQVGLAIRSKIADGSVKREDIFYTSKLWSNSHRPELVRPALERSLKNLQLDYVDLYLIHFPVSVKEDIGILTWKKSPKHNS

SEQ ID NO: 7420 - protein, 14 aa, Artificial Sequence
  Synthetic polypeptide
RHAYFPFTFLHDGV

SEQ ID NO: 7421 - protein, 14 aa, Artificial Sequence
  Synthetic polypeptide
RHAYFPFTFLHDGV

SEQ ID NO: 7422 - protein, 14 aa, Artificial Sequence
  Synthetic polypeptide
RHAYFPFTFLHDGV

SEQ ID NO: 7423 - protein, 74 aa, Artificial Sequence
  Synthetic polypeptide
KCVAPPPSLSLSLSLSCQPSEDMLTSPSPSFMMVFEFQLTSEEMKAIDGLNRNVRYLTLDIFAGPPNYPFSDEY

SEQ ID NO: 7424 - protein, 74 aa, Artificial Sequence; identical to SEQ ID NO: 7423
  Synthetic polypeptide

SEQ ID NO: 7425 - protein, 74 aa, Artificial Sequence; identical to SEQ ID NO: 7423
  Synthetic polypeptide

SEQ ID NO: 7426 - protein, 38 aa, Artificial Sequence
  Synthetic polypeptide
RHAYFPFTFLHDGGMSSLLQPEKTAGFLQVKRHCSGCL

SEQ ID NO: 7427 - protein, 38 aa, Artificial Sequence; identical to SEQ ID NO: 7426
  Synthetic polypeptide

SEQ ID NO: 7428 - protein, 38 aa, Artificial Sequence; identical to SEQ ID NO: 7426
  Synthetic polypeptide

SEQ ID NO: 7429 - protein, 166 aa, Artificial Sequence
  Synthetic polypeptide
KCVAPPPSLSLSLSLSCQPSEDMLTSPSPSFMMVECHPYFNQRKLLDFCKSKDIVLVAYSALGSHREEPWVDPNSPVLLEDPVLCALAKKHKRTPALIALRYQLQRGVVVLAKSYNEQRIRQNVQVFEFQLTSEEMKAIDGLNRNVRYLTLDIFAGPPNYPFSDEY

SEQ ID NO: 7430 - protein, 166 aa, Artificial Sequence; identical to SEQ ID NO: 7429
  Synthetic polypeptide

SEQ ID NO: 7431 - protein, 166 aa, Artificial Sequence; identical to SEQ ID NO: 7429
  Synthetic polypeptide

SEQ ID NO: 7432 - protein, 23 aa, Artificial Sequence
  Synthetic polypeptide
RHAYFPFTFLHDGGMSSLLQPEK

SEQ ID NO: 7433 - protein, 43 aa, Artificial Sequence
  Synthetic polypeptide
KCVAPPPSLSLSLSLSCQPSEDMLTSPSPSFMMVECHPYFNQR

SEQ ID NO: 7434 - protein, 17 aa, Artificial Sequence
  Synthetic polypeptide
RHAYFPFTFLHDGHGEV

SEQ ID NO: 7435 - protein, 17 aa, Artificial Sequence
  Synthetic polypeptide
RHAYFPFTFLHDGHGEV

SEQ ID NO: 7436 - protein, 17 aa, Artificial Sequence
  Synthetic polypeptide
RHAYFPFTFLHDGHGEV

SEQ ID NO: 7437 - protein, 17 aa, Artificial Sequence
  Synthetic polypeptide
RHAYFPFTFLHDGHGEV

SEQ ID NO: 7438 - protein, 207 aa, Artificial Sequence
  Synthetic polypeptide
KCVAPPPSLSLSLSLSCQPSEDMLTSPSPSFMMAMEKCKDAGLAKSIGVSNFNHRLLEMILNKPGLKYKPVCNQVECHPYFNQRKLLDFCKSKDIVLVAYSALGSHREEPWVDPNSPVLLEDPVLCALAKKHKRTPALIALRYQLQRGVVVLAKSYNEQRIRQNVQVFEFQLTSEEMKAIDGLNRNVRYLTLDIFAGPPNYPFSDEY

SEQ ID NO: 7439 - protein, 207 aa, Artificial Sequence; identical to SEQ ID NO: 7438
  Synthetic polypeptide

SEQ ID NO: 7440 - protein, 207 aa, Artificial Sequence; identical to SEQ ID NO: 7438
  Synthetic polypeptide

SEQ ID NO: 7441 - protein, 84 aa, Artificial Sequence
  Synthetic polypeptide
KCVAPPPSLSLSLSLSCQPSEDMLTSPSPSFMMAMEKCKDAGLAKSIGVSNFNHRLLEMILNKPGLKYKPVCNQVECHPYFNQR

SEQ ID NO: 7442 - protein, 39 aa, Artificial Sequence
  Synthetic polypeptide
RHAYFPFTFLHDALEQFPSTRVGPTSLGKVTEKSSIGLC

SEQ ID NO: 7443 - protein, 39 aa, Artificial Sequence; identical to SEQ ID NO: 7442
  Synthetic polypeptide

SEQ ID NO: 7444 - protein, 39 aa, Artificial Sequence; identical to SEQ ID NO: 7442
  Synthetic polypeptide

SEQ ID NO: 7445 - protein, 39 aa, Artificial Sequence; identical to SEQ ID NO: 7442
  Synthetic polypeptide

SEQ ID NO: 7446 - protein, 39 aa, Artificial Sequence; identical to SEQ ID NO: 7442
  Synthetic polypeptide

SEQ ID NO: 7447 - protein, 272 aa, Artificial Sequence
  Synthetic polypeptide
KCVAPPPSLSLSLSLSCQPSEDMLTSPSPSFMMLWSNSHRPELVRPALERSLKNLQLDYVDLYLIHFPVSVKPGEEVIPKDENGKILFDTVDLCATWEAMEKCKDAGLAKSIGVSNFNHRLLEMILNKPGLKYKPVCNQVECHPYFNQRKLLDFCKSKDIVLVAYSALGSHREEPWVDPNSPVLLEDPVLCALAKKHKRTPALIALRYQLQRGVVVLAKSYNEQRIRQNVQVFEFQLTSEEMKAIDGLNRNVRYLTLDIFAGPPNYPFSDEY

SEQ ID NO: 7448 - protein, 272 aa, Artificial Sequence; identical to SEQ ID NO: 7447
  Synthetic polypeptide

SEQ ID NO: 7449 - protein, 246 aa, Artificial Sequence
  Synthetic polypeptide
KCVAPPPSLSLSLSLSCQPSEDMLTSPSPSFMMLWSNSHRPELVRPALERSLKNLQLDYVDLYLIHFPVSVKAMEKCKDAGLAKSIGVSNFNHRLLEMILNKPGLKYKPVCNQVECHPYFNQRKLLDFCKSKDIVLVAYSALGSHREEPWVDPNSPVLLEDPVLCALAKKHKRTPALIALRYQLQRGVVVLAKSYNEQRIRQNVQVFEFQLTSEEMKAIDGLNRNVRYLTLDIFAGPPNYPFSDEY

SEQ ID NO: 7450 - protein, 149 aa, Artificial Sequence
  Synthetic polypeptide
KCVAPPPSLSLSLSLSCQPSEDMLTSPSPSFMMLWSNSHRPELVRPALERSLKNLQLDYVDLYLIHFPVSVKPGEEVIPKDENGKILFDTVDLCATWEAMEKCKDAGLAKSIGVSNFNHRLLEMILNKPGLKYKPVCNQVECHPYFNQR

SEQ ID NO: 7451 - protein, 88 aa, Artificial Sequence
  Synthetic polypeptide
KCVAPPPSLSLSLSLSCQPSEDMLTSPSPSFMMLWSNSHRPELVRPALERSLKNLQLDYVDLYLIHFPVSVKEDIGILTWKKSPKHNS

SEQ ID NO: 7452 - protein, 63 aa, Artificial Sequence
  Synthetic polypeptide
RHAYFPFTFLHDGWTGHPKQDCRWQCEERRHILHFKALEQFPSTRVGPTSLGKVTEKSSIGLC

SEQ ID NO: 7453 - protein, 63 aa, Artificial Sequence; identical to SEQ ID NO: 7452
  Synthetic polypeptide

SEQ ID NO: 7454 - protein, 63 aa, Artificial Sequence; identical to SEQ ID NO: 7452
  Synthetic polypeptide

SEQ ID NO: 7455 - protein, 63 aa, Artificial Sequence; identical to SEQ ID NO: 7452
  Synthetic polypeptide

SEQ ID NO: 7456 - protein, 63 aa, Artificial Sequence; identical to SEQ ID NO: 7452
  Synthetic polypeptide

SEQ ID NO: 7457 - protein, 296 aa, Artificial Sequence
  Synthetic polypeptide
KCVAPPPSLSLSLSLSCQPSEDMLTSPSPSFMMVGLAIRSKIADGSVKREDIFYTSKLWSNSHRPELVRPALERSLKNLQLDYVDLYLIHFPVSVKPGEEVIPKDENGKILFDTVDLCATWEAMEKCKDAGLAKSIGVSNFNHRLLEMILNKPGLKYKPVCNQVECHPYFNQRKLLDFCKSKDIVLVAYSALGSHREEPWVDPNSPVLLEDPVLCALAKKHKRTPALIALRYQLQRGVVVLAKSYNEQRIRQNVQVFEFQLTSEEMKAIDGLNRNVRYLTLDIFAGPPNYPFSDEY

SEQ ID NO: 7458 - protein, 296 aa, Artificial Sequence; identical to SEQ ID NO: 7457
  Synthetic polypeptide

SEQ ID NO: 7459 - protein, 270 aa, Artificial Sequence
  Synthetic polypeptide
KCVAPPPSLSLSLSLSCQPSEDMLTSPSPSFMMVGLAIRSKIADGSVKREDIFYTSKLWSNSHRPELVRPALERSLKNLQLDYVDLYLIHFPVSVKAMEKCKDAGLAKSIGVSNFNHRLLEMILNKPGLKYKPVCNQVECHPYFNQRKLLDFCKSKDIVLVAYSALGSHREEPWVDPNSPVLLEDPVLCALAKKHKRTPALIALRYQLQRGVVVLAKSYNEQRIRQNVQVFEFQLTSEEMKAIDGLNRNVRYLTLDIFAGPPNYPFSDEY

SEQ ID NO: 7460 - protein, 173 aa, Artificial Sequence
  Synthetic polypeptide
KCVAPPPSLSLSLSLSCQPSEDMLTSPSPSFMMVGLAIRSKIADGSVKREDIFYTSKLWSNSHRPELVRPALERSLKNLQLDYVDLYLIHFPVSVKPGEEVIPKDENGKILFDTVDLCATWEAMEKCKDAGLAKSIGVSNFNHRLLEMILNKPGLKYKPVCNQVECHPYFNQR

SEQ ID NO: 7461 - protein, 112 aa, Artificial Sequence
  Synthetic polypeptide
KCVAPPPSLSLSLSLSCQPSEDMLTSPSPSFMMVGLAIRSKIADGSVKREDIFYTSKLWSNSHRPELVRPALERSLKNLQLDYVDLYLIHFPVSVKEDIGILTWKKSPKHNS

SEQ ID NO: 7462 - protein, 65 aa, Artificial Sequence
  Synthetic polypeptide
RHAYFPFTFLHDGAGWTGHPKQDCRWQCEERRHILHFKALEQFPSTRVGPTSLGKVTEKSSIGLC

SEQ ID NO: 7463 - protein, 65 aa, Artificial Sequence; identical to SEQ ID NO: 7462
  Synthetic polypeptide

SEQ ID NO: 7464 - protein, 65 aa, Artificial Sequence; identical to SEQ ID NO: 7462
  Synthetic polypeptide

SEQ ID NO: 7465 - protein, 65 aa, Artificial Sequence; identical to SEQ ID NO: 7462
  Synthetic polypeptide

SEQ ID NO: 7466 - protein, 65 aa, Artificial Sequence; identical to SEQ ID NO: 7462
  Synthetic polypeptide

SEQ ID NO: 7467 - protein, 298 aa, Artificial Sequence
  Synthetic polypeptide
KCVAPPPSLSLSLSLSCQPSEDMLTSPSPSFMMEQVGLAIRSKIADGSVKREDIFYTSKLWSNSHRPELVRPALERSLKNLQLDYVDLYLIHFPVSVKPGEEVIPKDENGKILFDTVDLCATWEAMEKCKDAGLAKSIGVSNFNHRLLEMILNKPGLKYKPVCNQVECHPYFNQRKLLDFCKSKDIVLVAYSALGSHREEPWVDPNSPVLLEDPVLCALAKKHKRTPALIALRYQLQRGVVVLAKSYNEQRIRQNVQVFEFQLTSEEMKAIDGLNRNVRYLTLDIFAGPPNYPFSDEY

SEQ ID NO: 7468 - protein, 298 aa, Artificial Sequence; identical to SEQ ID NO: 7467
  Synthetic polypeptide

SEQ ID NO: 7469 - protein, 272 aa, Artificial Sequence
  Synthetic polypeptide
KCVAPPPSLSLSLSLSCQPSEDMLTSPSPSFMMEQVGLAIRSKIADGSVKREDIFYTSKLWSNSHRPELVRPALERSLKNLQLDYVDLYLIHFPVSVKAMEKCKDAGLAKSIGVSNFNHRLLEMILNKPGLKYKPVCNQVECHPYFNQRKLLDFCKSKDIVLVAYSALGSHREEPWVDPNSPVLLEDPVLCALAKKHKRTPALIALRYQLQRGVVVLAKSYNEQRIRQNVQVFEFQLTSEEMKAIDGLNRNVRYLTLDIFAGPPNYPFSDEY

SEQ ID NO: 7470 - protein, 175 aa, Artificial Sequence
  Synthetic polypeptide
KCVAPPPSLSLSLSLSCQPSEDMLTSPSPSFMMEQVGLAIRSKIADGSVKREDIFYTSKLWSNSHRPELVRPALERSLKNLQLDYVDLYLIHFPVSVKPGEEVIPKDENGKILFDTVDLCATWEAMEKCKDAGLAKSIGVSNFNHRLLEMILNKPGLKYKPVCNQVECHPYFNQR

SEQ ID NO: 7471 - protein, 114 aa, Artificial Sequence
  Synthetic polypeptide
KCVAPPPSLSLSLSLSCQPSEDMLTSPSPSFMMEQVGLAIRSKIADGSVKREDIFYTSKLWSNSHRPELVRPALERSLKNLQLDYVDLYLIHFPVSVKEDIGILTWKKSPKHNS

SEQ ID NO: 7472 - protein, 39 aa, Artificial Sequence
  Synthetic polypeptide
KWRTHRQRTPEDVSKKLGGRAERSEEPRFREVKLWRSQN

SEQ ID NO: 7473 - protein, 39 aa, Artificial Sequence; identical to SEQ ID NO: 7472
  Synthetic polypeptide

SEQ ID NO: 7474 - protein, 39 aa, Artificial Sequence; identical to SEQ ID NO: 7472
  Synthetic polypeptide

SEQ ID NO: 7475 - protein, 38 aa, Artificial Sequence
  Synthetic polypeptide
RNARVCESGGRIVKGHLRTSQRSSAGELSARKNQGSEK

SEQ ID NO: 7476 - protein, 38 aa, Artificial Sequence; identical to SEQ ID NO: 7475
  Synthetic polypeptide

SEQ ID NO: 7477 - protein, 38 aa, Artificial Sequence; identical to SEQ ID NO: 7475
  Synthetic polypeptide

SEQ ID NO: 7478 - protein, 156 aa, Artificial Sequence
  Synthetic polypeptide
ALGRTKVPRSKALEVTKLAIEAGFRHIDSAHLYNNEEQVGLAIRSKIADGSVKREDIFYTSKLWSTFHRPELVRPALENSLKKAQLDYVDLYLIHSPMSLKPGEELSPTDENGKVIFDIVDLCTTWEAMEKCKDAGLAKSIGVSNFNRRQLEMILN

SEQ ID NO: 7479 - protein, 301 aa, Artificial Sequence
  Synthetic polypeptide
ALGRTKVPRSKALEVTKLAIEAGFRHIDSAHLYNNEEQVGLAIRSKIADGSVKREDIFYTSKLWSTFHRPELVRPALENSLKKAQLDYVDLYLIHSPMSLKPGEELSPTDENGKVIFDIVDLCTTWEAMEKCKDAGLAKSIGVSNFNRRQLEMILNKPGLKYKPVCNQVECHPYFNRSKLLDFCKSKDIVLVAYSALGSQRDKRWVDPNSPVLLEDPVLCALAKKHKRTPALIALRYQLQRGVVVLAKSYNEQRIRQNVQVFEFQLTAEDMKAIDGLDRNLHYFNSDSFASHPNYPYSDEY

SEQ ID NO: 7480 - protein, 301 aa, Artificial Sequence; identical to SEQ ID NO: 7479
  Synthetic polypeptide

SEQ ID NO: 7481 - protein, 162 aa, Artificial Sequence
  Synthetic polypeptide
NLVSTENTKISQVPRSKALEVTKLAIEAGFRHIDSAHLYNNEEQVGLAIRSKIADGSVKREDIFYTSKLWSTFHRPELVRPALENSLKKAQLDYVDLYLIHSPMSLKPGEELSPTDENGKVIFDIVDLCTTWEAMEKCKDAGLAKSIGVSNFNRRQLEMILN

SEQ ID NO: 7482 - protein, 42 aa, Artificial Sequence
  Synthetic polypeptide
GWEFETSLANLVWPVNGGETSSLLKIQKLARFREVKLWRSQN

SEQ ID NO: 7483 - protein, 42 aa, Artificial Sequence; identical to SEQ ID NO: 7482
  Synthetic polypeptide

SEQ ID NO: 7484 - protein, 42 aa, Artificial Sequence; identical to SEQ ID NO: 7482
  Synthetic polypeptide

SEQ ID NO: 7485 - protein, 5 aa, Artificial Sequence
  Synthetic polypeptide
PGSEK

SEQ ID NO: 7486 - protein, 5 aa, Artificial Sequence
  Synthetic polypeptide
PGSEK

SEQ ID NO: 7487 - protein, 5 aa, Artificial Sequence
  Synthetic polypeptide
PGSEK

SEQ ID NO: 7488 - protein, 307 aa, Artificial Sequence
  Synthetic polypeptide
NLVSTENTKISQVPRSKALEVTKLAIEAGFRHIDSAHLYNNEEQVGLAIRSKIADGSVKREDIFYTSKLWSTFHRPELVRPALENSLKKAQLDYVDLYLIHSPMSLKPGEELSPTDENGKVIFDIVDLCTTWEAMEKCKDAGLAKSIGVSNFNRRQLEMILNKPGLKYKPVCNQVECHPYFNRSKLLDFCKSKDIVLVAYSALGSQRDKRWVDPNSPVLLEDPVLCALAKKHKRTPALIALRYQLQRGVVVLAKSYNEQRIRQNVQVFEFQLTAEDMKAIDGLDRNLHYFNSDSFASHPNYPYSDEY

SEQ ID NO: 7489 - protein, 307 aa, Artificial Sequence; identical to SEQ ID NO: 7488
  Synthetic polypeptide

SEQ ID NO: 7490 - protein, 46 aa, Artificial Sequence
  Synthetic polypeptide
YRKREGKCWLEEDVVPGYGSTASDLGSEEQSCRGHQISNRSWLPPY

SEQ ID NO: 7491 - protein, 46 aa, Artificial Sequence; identical to SEQ ID NO: 7490
  Synthetic polypeptide

SEQ ID NO: 7492 - protein, 32 aa, Artificial Sequence
  Synthetic polypeptide
IQKAGREVLARGGRGPWLRLHRLGPRFRGTEL

SEQ ID NO: 7493 - protein, 32 aa, Artificial Sequence; identical to SEQ ID NO: 7492
  Synthetic polypeptide

SEQ ID NO: 7494 - protein, 115 aa, Artificial Sequence
  Synthetic polypeptide
QGRDRTGWTLRGSHRQRNTQVARHLEKCTERHQYASGPPTGRSRMTLSLAGAVRRQSRLLSSRTLGENVPTPSPSDFPPSYLHSMKPCTHSPSPGSEEQSCRGHQISNRSWLPPY

SEQ ID NO: 7495 - protein, 115 aa, Artificial Sequence; identical to SEQ ID NO: 7494
  Synthetic polypeptide

SEQ ID NO: 7496 - protein, 304 aa, Artificial Sequence
  Synthetic polypeptide
NPALIHQAQVPRNRAVEVTKLAIEAGFRHIDSAYLYNNEEQVGLAIRSKIADGSVKREDIFYTSKLWCTFFQPQMVQPALESSLKKLQLDYVDLYLLHFPMALKPGETPLPKDENGKVIFDTVDLSATWEVMEKCKDAGLAKSIGVSNFNCRQLEMILNKPGLKYKPVCNQVECHPYLNQSKLLDFCKSKDIVLVAHSALGTQRHKLWVDPNSPVLLEDPVLCALAKKHKQTPALIALRYQLQRGVVVLAKSYNEQRIRENIQVFEFQLTSEDMKVLDGLNRNYRYVVMDFLMDHPDYPFSDEY

SEQ ID NO: 7497 - protein, 304 aa, Artificial Sequence; identical to SEQ ID NO: 7496
  Synthetic polypeptide

SEQ ID NO: 7498 - protein, 25 aa, Artificial Sequence
  Synthetic polypeptide
LPPKLPPLNETLHSFTKPRFRGTEL

SEQ ID NO: 7499 - protein, 25 aa, Artificial Sequence
  Synthetic polypeptide
LPPKLPPLNETLHSFTKPRFRGTEL

SEQ ID NO: 7500 - protein, 317 aa, Artificial Sequence
  Synthetic polypeptide
SDPSGKPKQELRIQKALCPCHKVPRNRAVEVTKLAIEAGFRHIDSAYLYNNEEQVGLAIRSKIADGSVKREDIFYTSKLWCTFFQPQMVQPALESSLKKLQLDYVDLYLLHFPMALKPGETPLPKDENGKVIFDTVDLSATWEVMEKCKDAGLAKSIGVSNFNCRQLEMILNKPGLKYKPVCNQVECHPYLNQSKLLDFCKSKDIVLVAHSALGTQRHKLWVDPNSPVLLEDPVLCALAKKHKQTPALIALRYQLQRGVVVLAKSYNEQRIRENIQVFEFQLTSEDMKVLDGLNRNYRYVVMDFLMDHPDYPFSDEY

SEQ ID NO: 7501 - protein, 317 aa, Artificial Sequence; identical to SEQ ID NO: 7500
  Synthetic polypeptide

SEQ ID NO: 7502 - protein, 49 aa, Artificial Sequence
  Synthetic polypeptide
LPPKLPPLNETLHSFTKPRCDPILPVNQSKNSGYRKPSVLAIRFRGTEL

SEQ ID NO: 7503 - protein, 49 aa, Artificial Sequence; identical to SEQ ID NO: 7502
  Synthetic polypeptide

SEQ ID NO: 7504 - protein, 49 aa, Artificial Sequence
  Synthetic polypeptide
GEGRAEREVSVGERRAEREMFPSERQLLHILNTWPQLGLHFEKKTQRER

SEQ ID NO: 7505 - protein, 561 aa, Artificial Sequence
  Synthetic polypeptide
GSGGPNGRCSLRRGSSFTFLTPGPNWDFTLKRKRREKDDDVVSLSSLDLKEPSNKRVRPLARVTSLANLISPVRNGAVRRFGQTIQSFTLRGDHRSPASAQKFSSRSTVPTPAKRRSSALWSEMLDITMKESLTTREIRRQEAIYEMSRGEQDLIEDLKLARKAYHDPMLKLSIMSEEELTHIFGDLDSYIPLHEDLLTRIGEATKPDGTVEQIGHILVSWLPRLNAYRGYCSNQLAAKALLDQKKQDPRVQDFLQRCLESPFSRKLDLWSFLDIPRSRLVKYPLLLKEILKHTPKEHPDVQLLEDAILIIQGVLSDINLKKGESECQYYIDKLEYLDEKQRDPRIEASKVLLCHGELRSKSGHKLYIFLFQDILVLTRPVTRNERHSYQVYRQPIPVQELVLEDLQDGDVRMGGSFRGAFSNSEKAKNIFRIRFHDPSPAQSHTLQANDVFHKQQWFNCIRAAIAPFQSAGSPPELQGLPELHEECEGNHPSARKLTAQRRASTVSSVTQVEVDENAYRCGSGMQMAEDSKSLKTHQTQPGIRRARDKALSGGKRKETLV

SEQ ID NO: 7506 - protein, 30 aa, Artificial Sequence
  Synthetic polypeptide
GGEGRTGGECRGAEGRTGDVPFGEAAPSHS

SEQ ID NO: 7507 - protein, 96 aa, Artificial Sequence
  Synthetic polypeptide
ASILRASQKGITYFLRGSAFPSTSVKLASRLGTPAGNSIAWNMESSQMALFLTLNRISWKMQKWSTQMHLSIPSSVRQELGSMCLEHSSWTWSQLL

SEQ ID NO: 7508 - protein, 463 aa, Artificial Sequence
  Synthetic polypeptide
AMSIHFESITERHYILFERECLSIHIGQAGIQIGDACWELYCLEHGIQPNGVVLDTQQDQLENAKMEHTNASFDTFFCETRAGKHVPRALFVDLEPTVIDGIRTGQHRSLFHPEQLLSGKEDAANNYARGRYSVGSEVIDLVLERTRKLAEQCGGLQGFLIFRSFGGGTGSGFTSLLMERLTGEYSRKTKLEFSVYPAPRISTAVVEPYNSVLTTHSTTEHTDCTFMVDNEAVYDICHRKLGVECPSHASINRLVVQVVSSITASLRFEGPLNVDLIEFQTNLVPYPRIHFPMTAFAPIVSADKAYHEQFSVSDITTACFESSNQLVKCDPRLGKYMACCLLYRGDVVPKEVNAAIAATKSRHSVQFVDWCPTGFKVGINNRPPTVMPGGDLAKVHRSICMLSNTTAIVEAWARLDHKFDLMYAKRAFLHWYLREGMEEAEFLEAREDLAALERDYEEVAQSF

SEQ ID NO: 7509 - protein, 63 aa, Artificial Sequence
  Synthetic polypeptide
NSTSNLNTNVECKWPTCSTLKIQNSRMDKNSSTKYLLSSRDSPDTKGLKFKAKCYLWRYLYAE

SEQ ID NO: 7510 - protein, 63 aa, Artificial Sequence; identical to SEQ ID NO: 7509
  Synthetic polypeptide

SEQ ID NO: 7511 - protein, 63 aa, Artificial Sequence; identical to SEQ ID NO: 7509
  Synthetic polypeptide

SEQ ID NO: 7512 - protein, 63 aa, Artificial Sequence; identical to SEQ ID NO: 7509
  Synthetic polypeptide

SEQ ID NO: 7513 - protein, 63 aa, Artificial Sequence; identical to SEQ ID NO: 7509
  Synthetic polypeptide

SEQ ID NO: 7514 - protein, 236 aa, Artificial Sequence
  Synthetic polypeptide
RYRIAEWIRTHQPSICCLQEIHQTQKDSNLRLSAIYGGTYMLNKPIEEIIVQNGKVIGVKSEGEIARCKQLICDPSYVKDRVEKVGQVIRVICILSHPIKNTNDANSCQIIIPQNQVNRKSDIYVCMISFAHNVAAQGKYIAIVSTTVETKEPEKEIRPALELLEPIEQKFVSISDLLVPKDLGTESQIFISRTYDATTHFETTCDDIKNIYKRMTGSEFDFEEMKRKKNDIYGED

SEQ ID NO: 7515 - protein, 236 aa, Artificial Sequence; identical to SEQ ID NO: 7514
  Synthetic polypeptide

SEQ ID NO: 7516 - protein, 236 aa, Artificial Sequence; identical to SEQ ID NO: 7514
  Synthetic polypeptide

SEQ ID NO: 7517 - protein, 166 aa, Artificial Sequence
  Synthetic polypeptide
RYRIAEWIRTHQPSICCLQEIHQTQKDSNLRLSAIYGGTYMLNKPIEEIIVQNGKVIGVKSEGEIARCKQLICDPSYVKDRVEKVGQVIRVICILSHPIKNTNDANSCQIIIPQNQVNRKSDLLASVTSWYQKTWEQKARSLFPAHMMPPLILRQRVMTLKTSIRG

SEQ ID NO: 7518 - protein, 64 aa, Artificial Sequence
  Synthetic polypeptide
RYRIAEWIRTHQPSICCLQEIHQTQKDSNLRLSAIYGGTYMLNKPIEEIIVQNGKVIGVKSEGE

SEQ ID NO: 7519 - protein, 926 aa, Artificial Sequence
  Synthetic polypeptide
PRFKMVRLRPPSWQPAAAEGKGRSGEDFFQKIMEETNTQIAWPSKLKIGAKSKKDPHIKVSGKKEDVKEAKEMIMSVLDTKSNRVTLKMDVSHTEHSHVIGKGGNNIKKVMEETGCHIHFPDSNRNNQAEKSNQVSIAGQPAGVESARVRIRELLPLVLMFELPIAGILQPVPDPNSPSIQHISQTYNISVSFKQRSRMYGATVIVRGSQNNTSAVKEGTAMLLEHLAGSLASAIPVSTQLDIAAQHHLFMMGRNGSNIKHIMQRTGAQIHFPDPSNPQKKSTVYLQGTIESVCLARQYLMGCLPLVLMFDMKEEIEVDPQFIAQLMEQLDVFISIKPKPKQPSKSVIVKSVERNALNMYEARKCLLGLESSGVTIATSPSPASCPAGLACPSLDILASAGLGLTGLGLLGPTTLSLNTSTTPNSLLNALNSSVSPLQSPSSGTPSPTLWAPPLANTSSATGFSAIPHLMIPSTAQATLTNILLSGVPTYGHTAPSPPPGLTPVDVHINSMQTEGKKISAALNGHAQSPDIKYGAISTSSLGEKVLSANHGDPSIQTSGSEQTSPKSSPTEGCNDAFVEVGMPRSPSHSGNAGDLKQMMCPSKVSCAKRQTVELLQGTKNSHLHSTDRLLSDPELSATESPLADKKAPGSERAAERAAAAQQNSERAHLAPRSSYVNMQAFDYEQKKLLATKAMLKKPVVTEVRTPTNTWSGLGFSKSMPAETIKELRRANHVSYKPTMTTTYEGSSMSLSRSNSREHLGGGSESDNWRDRNGIGPGSHSEFAASIGSPKRKQNKSTEHYLSSSNYMDCISSLTGSNGCNLNSSFKGSDLPELFSKLGLGKYTDVFQQQEIDLQTFLTLTDQDLKELGITTFGARRKMLLAISELNKNRRKLFESPNARTSFLEGGASGRLPRQYHSDIASVSGRW

SEQ ID NO: 7520 - protein, 37 aa, Artificial Sequence
  Synthetic polypeptide
DHLPGSQLLLKGKAEVGKTFFKRSWRKQIRRLLGHQN

SEQ ID NO: 7521 - protein, 14 aa, Artificial Sequence
  Synthetic polypeptide
DGAAETTFLAASCC

SEQ ID NO: 7522 - protein, 84 aa, Artificial Sequence
  Synthetic polypeptide
CSLPSQDSAQSPQQQEGPHQIQPLDLGLLSLHNHFWPYKPPSFGVERFSLSSFSASPTCALDHFSQLSLDSRKSLDVFHGYCRI

SEQ ID NO: 7523 - protein, 185 aa, Artificial Sequence
  Synthetic polypeptide
EEEERPELAHSVPLLCDVLYHLRTLHRVPNSKKALTRYSPLTWDFSASITIFGHINHHLSGLKDSHCLVFLQAPPVPWIILASFLWILGNPWTSSTATAGFSQIWVLFPFCGGTFHHNEKDVLGLQDFERESVSTSQSRNISLLTLGQLQNCVIGKLTIIDLLTEHLLGVRHGVICFPWGLPSSS

SEQ ID NO: 7524 - protein, 22 aa, Artificial Sequence
  Synthetic polypeptide
SRKKIYETGTNQSGTRGHGKKP

SEQ ID NO: 7525 - protein, 582 aa, Artificial Sequence
  Synthetic polypeptide
NFILSQNRKNPFAKISKTQKVYYPQTYYERITKGRNPERRYMKPERISPGHEAMEKNLEDNLQSLATRLAPIYKQYAPVAYQNQVEYENVARECRLGSKEGRPFSGVTACLDFCAHPHRDIHNMNNGSTVVCTLTREDNRSLGVIPQDEQLHVLPLYKLSDTDEFGSKEGMEAKIKSGAIEVLAPRRKKRTCFTQPVPRSGKKRAAMMTEVLAHKIRAVEKKPIPRIKRKNNSTTTNNSKPSSLPTLGSNTETVQPEVKSETEPHFILKSSDNTKTYSLMPSAPHPVKEASPGFSWSPKTASATPAPLKNDATASCGFSERSSTPHCTMPSGRLSGANAAAADGPGISQLGEVAPLPTLSAPVMEPLINSEPSTGVTEPLTPHQPNHQPSFLTSPQDLASSPMEEDEQHSEADEPPSDEPLSDDPLSPAEEKLPHIDEYWSDSEHIFLDANIGGVAIAPAHGSVLIECARRELHATTPVEHPNRNHPTRLSLVFYQHKNLNKPQHGFELNKIKFEAKEAKNKKMKASEQKDQAANEGPEQSSEVNELNQIPSHKALTLTHDNVVTVSPYALTHVAGPYNHWV

SEQ ID NO: 7526 - protein, 26 aa, Artificial Sequence
  Synthetic polypeptide
NRNESVRDTRPWKKTLKITYRVWLHD

SEQ ID NO: 7527 - protein, 29 aa, Artificial Sequence
  Synthetic polypeptide
DTSEEDRKKRLGLPDGKMCCKTEVITIRS

SEQ ID NO: 7528 - protein, 16 aa, Artificial Sequence
  Synthetic polypeptide
GADWGPGPVCGHLCRG

SEQ ID NO: 7529 - protein, 268 aa, Artificial Sequence
  Synthetic polypeptide
SHYNKELIGALVLSVGIYAEVERQKYKTLESAFLAPAIILILLGVVMFMVSFIGVLASLRDNLYLLQAFMYILGICLIMELIGGVVALTFRNQTIDFLNDNIRRGIENYYDDLDFKNIMDFVQKKFKCCGGEDYRDWSKNQYHDCSAPGPLACGVPYTCCIRNTTEVVNTMCGYKTIDKERFSVQDVIYVRGCTNAVIIWFMDNYTIMAGILLGILLPQFLGVLLTLLYITRVEDIIMEHSVTDGLLGPGAKPSVEAAGTGCCLCYPN

SEQ ID NO: 7530 - protein, 9 aa, Artificial Sequence
  Synthetic polypeptide
SQLLRRLSC

SEQ ID NO: 7531 - protein, 295 aa, Artificial Sequence
  Synthetic polypeptide
PGWWQVPVIPAAQEAELLKGVTIASGGVLPRIHPELLAKKRGTKGKSETILSPPPEKRGRKATSGKKGGKKSKAAKPRTSKKSKPKDSDKEGTSNSTSEDGPGDGFTILSSKSLVLGQKLSLTQSDISHIGSMRVEGIVHPTTAEIDLKEDIGKALEKAGGKEFLETVKELRKSQGPLEVAEAAVSQSSGLAAKFVIHCHIPQWGSDKCEEQLEETIKNCLSAAEDKKLKSVAFPPFPSGRNCFPKQTAAQVTLKAISAHFDDSSASSLKNVYFLLFDSESIGIYVQEMAKLDAK

SEQ ID NO: 7532 - protein, 38 aa, Artificial Sequence
  Synthetic polypeptide
AKITPLHTILGDRKMRKDNIYLHFMIFQFMQIRMCFTW

SEQ ID NO: 7533 - protein, 38 aa, Artificial Sequence; identical to SEQ ID NO: 7532
  Synthetic polypeptide

SEQ ID NO: 7534 - protein, 38 aa, Artificial Sequence; identical to SEQ ID NO: 7532
  Synthetic polypeptide

SEQ ID NO: 7535 - protein, 38 aa, Artificial Sequence
  Synthetic polypeptide
FQRLRRLRLEDHLSLQEGNRSGSEPRSHHCTPSWVTEK

SEQ ID NO: 7536 - protein, 38 aa, Artificial Sequence; identical to SEQ ID NO: 7535
  Synthetic polypeptide

SEQ ID NO: 7537 - protein, 38 aa, Artificial Sequence; identical to SEQ ID NO: 7535
  Synthetic polypeptide

SEQ ID NO: 7538 - protein, 269 aa, Artificial Sequence
  Synthetic polypeptide
QKNEKGQYISPFHDIPIYADKDVFHMVVEVPRWSNAKMEIATKDPLNPIKQDVKKGKLRYVANLFPYKGYIWNYGAIPQTWEDPGHNDKHTGCCGDNDPIDVCEIGSKVCARGEIIGVKVLGILAMIDEGETDWKVIAINVDDPDAANYNDINDVKRLKPGYLEATVDWFRRYKVPDGKPENEFAFNAEFKDKDFAIDIIKSTHDHWKALVTKKTNGKGISCMNTTLSESPFKCDPDAARAIVDALPPPCESACTVPTDVDKWFHHQKN

SEQ ID NO: 7539 - protein, 158 aa, Artificial Sequence
  Synthetic polypeptide
QKNEKGQYISPFHDIPIYADKDVFHMVVEVPRWSNAKMEIATKDPLNPIKQDVKKGKLRYVANLFPYKGYIWNYGAIPQTWEDPGHNDKHTGCCGDNDPIDVCEIGSKVCARGEIIGVKVLGILAMIDEGETDWKVIAINVDDPDAANYNVCNSVVIL

SEQ ID NO: 7540 - protein, 158 aa, Artificial Sequence; identical to SEQ ID NO: 7539
  Synthetic polypeptide

SEQ ID NO: 7541 - protein, 60 aa, Artificial Sequence
  Synthetic polypeptide
LTAALRTTQLSCLEGAEGGASAGAGGKVLSRDWEAHPRFHPGCRPPQISPGPAESVFQQT

SEQ ID NO: 7542 - protein, 60 aa, Artificial Sequence; identical to SEQ ID NO: 7541
  Synthetic polypeptide

SEQ ID NO: 7543 - protein, 185 aa, Artificial Sequence
  Synthetic polypeptide
AVWKEQKEEPLREQGAKYSAETGRLIPASTRAVGRRRSHQGQQSQSSSRHEGVQAFLLQDQELLVLELLCRILETDLLSAIQFWLLYAPPKEKDLALGLLQTAVAQLLPQPLVSIPTEKLLSQLPEVHEPPQEKQEPPCSQSPKKTKISPFTKSEKPEYIGEAQVLQMHSSQNTEKKTSKPRAES

SEQ ID NO: 7544 - protein, 103 aa, Artificial Sequence
  Synthetic polypeptide
EWTGRGPASHSCSQLTHCSTQDNSAKLSGRSRRRSLCGSRGQSTQQRLGGSSPLPPGLSAAADLTRASRVSLPADMKESRLSSFRIRSCWSWSSCVGSWKQTC

SEQ ID NO: 7545 - protein, 84 aa, Artificial Sequence
  Synthetic polypeptide
AVWKEQKEEPLREQGAKYSAETGRLIPASTRAVGRRRSHQGQQSQSSSRHEGVQAFLLQDQELLKKTSLWDSCRQQWLSSFPSP

SEQ ID NO: 7546 - protein, 89 aa, Artificial Sequence
  Synthetic polypeptide
EWTGRGPASHSCSQLTHCSTQDNSAKLSGRSRRRSLCGSRGQSTQQRLGGSSPLPPGLSAAADLTRASRVSLPADMKESRLSSFRIRSC

SEQ ID NO: 7547 - protein, 24 aa, Artificial Sequence
  Synthetic polypeptide
PPGLMEILHGVTPCIQISSQDYAR

SEQ ID NO: 7548 - protein, 24 aa, Artificial Sequence
  Synthetic polypeptide
PPGLMEILHGVTPCIQISSQDYAR

SEQ ID NO: 7549 - protein, 24 aa, Artificial Sequence
  Synthetic polypeptide
PPGLMEILHGVTPCIQISSQDYAR

SEQ ID NO: 7550 - protein, 10 aa, Artificial Sequence
  Synthetic polypeptide
LLGLWRFCME

SEQ ID NO: 7551 - protein, 10 aa, Artificial Sequence
  Synthetic polypeptide
LLGLWRFCME

SEQ ID NO: 7552 - protein, 10 aa, Artificial Sequence
  Synthetic polypeptide
LLGLWRFCME

SEQ ID NO: 7553 - protein, 408 aa, Artificial Sequence
  Synthetic polypeptide
SWAYGDFAWSNPLHPDIFPGLRKIEAEIVRIACSLFNGGPDSCGCVTSGGTESILMACKAYRDLAFEKGIKTPEIVAPQSAHAAFNKAASYFGMKIVRVPLTKMMEVDVRAMRRAISRNTAMLVCSTPQFPHGVIDPVPEVAKLAVKYKIPLHVDACLGGFLIVFMEKAGYPLEHPFDFRVKGVTSISADTHKYGYAPKGSSLVLYSDKKYRNYQFFVDTDWQGGIYASPTIAGSRPGGISAACWAALMHFGENGYVEATKQIIKTARFLKSELENIKGIFVFGNPQLSVIALGSRDFDIYRLSNLMTAKGWNLNQLQFPPSIHFCITLLHARKRVAIQFLKDIRESVTQIMKNPKAKTTGMGAIYGMAQTTVDRNMVAELSSVFLDSLYSTDTVTQGSQMNGSPKPH

SEQ ID NO: 7554 - protein, 59 aa, Artificial Sequence
  Synthetic polypeptide
SWAYGDFAWSNPLHPDIFPGLRKIEAEIVRIACSLFNGGPDSCGCEALFLFCFSNMLAP

SEQ ID NO: 7555 - protein, 61 aa, Artificial Sequence
  Synthetic polypeptide
SWAYGDFAWSNPLHPDIFPGLRKIEAEIVRIACSLFNGGPDSCGCVSICKGHPIALFFRLK

SEQ ID NO: 7556 - protein, 12 aa, Artificial Sequence
  Synthetic polypeptide
HSPRGSAASFLK

SEQ ID NO: 7557 - protein, 407 aa, Artificial Sequence
  Synthetic polypeptide
ASETTNAPEGRNSGHIRTSEGTNSRRATLRAVTLTARVRGFILEVTSGGTESILMACKAYRDLAFEKGIKTPEIVAPQSAHAAFNKAASYFGMKIVRVPLTKMMEVDVRAMRRAISRNTAMLVCSTPQFPHGVIDPVPEVAKLAVKYKIPLHVDACLGGFLIVFMEKAGYPLEHPFDFRVKGVTSISADTHKYGYAPKGSSLVLYSDKKYRNYQFFVDTDWQGGIYASPTIAGSRPGGISAACWAALMHFGENGYVEATKQIIKTARFLKSELENIKGIFVFGNPQLSVIALGSRDFDIYRLSNLMTAKGWNLNQLQFPPSIHFCITLLHARKRVAIQFLKDIRESVTQIMKNPKAKTTGMGAIYGMAQTTVDRNMVAELSSVFLDSLYSTDTVTQGSQMNGSPKPH

SEQ ID NO: 7558 - protein, 11 aa, Artificial Sequence
  Synthetic polypeptide
ASCLRTSTLAP

SEQ ID NO: 7559 - protein, 11 aa, Artificial Sequence
  Synthetic polypeptide
ASCLRTSTLAP

SEQ ID NO: 7560 - protein, 11 aa, Artificial Sequence
  Synthetic polypeptide
ASCLRTSTLAP

SEQ ID NO: 7561 - protein, 11 aa, Artificial Sequence
  Synthetic polypeptide
ASCLRTSTLAP

SEQ ID NO: 7562 - protein, 3 aa, Artificial Sequence
  Synthetic polypeptide
PVV

SEQ ID NO: 7563 - protein, 3 aa, Artificial Sequence
  Synthetic polypeptide
PVV

SEQ ID NO: 7564 - protein, 3 aa, Artificial Sequence
  Synthetic polypeptide
PVV

SEQ ID NO: 7565 - protein, 3 aa, Artificial Sequence
  Synthetic polypeptide
PVV

SEQ ID NO: 7566 - protein, 3 aa, Artificial Sequence
  Synthetic polypeptide
PVV

SEQ ID NO: 7567 - protein, 3 aa, Artificial Sequence
  Synthetic polypeptide
PVV

SEQ ID NO: 7568 - protein, 39 aa, Artificial Sequence
  Synthetic polypeptide
QLFENFYFGSLKLNSIHISQRFTVDSFGNYASCGQIDFS

SEQ ID NO: 7569 - protein, 39 aa, Artificial Sequence; identical to SEQ ID NO: 7568
  Synthetic polypeptide

SEQ ID NO: 7570 - protein, 39 aa, Artificial Sequence; identical to SEQ ID NO: 7568
  Synthetic polypeptide

SEQ ID NO: 7571 - protein, 39 aa, Artificial Sequence; identical to SEQ ID NO: 7568
  Synthetic polypeptide

SEQ ID NO: 7572 - protein, 4 aa, Artificial Sequence
  Synthetic polypeptide
ASCL

SEQ ID NO: 7573 - protein, 4 aa, Artificial Sequence
  Synthetic polypeptide
ASCL

SEQ ID NO: 7574 - protein, 3 aa, Artificial Sequence
  Synthetic polypeptide
QLF

SEQ ID NO: 7575 - protein, 3 aa, Artificial Sequence
  Synthetic polypeptide
QLF

SEQ ID NO: 7576 - protein, 334 aa, Artificial Sequence
  Synthetic polypeptide
DWAWWLTPVIPALWEAEAGGSRHQEIETILAKTVHQRIASWQNLGAVYCSTVVPSDDVTVVYQNGLPVISVRLPSRRERCQFTLKPISDSVGVFLRQLQEEDRGIDRVAIYSPDGVRVAASTGIDLLLLDDFKLVINDLTYHVRPPKRDLLSHENAATLNDVKTLVQQLYTTLCIEQHQLNKERELIERLEDLKEQLAPLEKVRIEISRKAEKRTTLVLWGGLAYMATQFGILARLTWWEYSWDIMEPVTYFITYGSAMAMYAYFVMTRQEYVYPEARDRQYLLFFHKGAKKSRFDLEKYNQLKDAIAQAEMDLKRLRDPLQVHLPLRQIGEKD

SEQ ID NO: 7577 - protein, 334 aa, Artificial Sequence; identical to SEQ ID NO: 7576
  Synthetic polypeptide

SEQ ID NO: 7578 - protein, 58 aa, Artificial Sequence
  Synthetic polypeptide
SQHFGRPRRVDHDIRRSRPSWLRRYTRGSLPGRIWELFIAALLCPLMMLQWFIKMGYL

SEQ ID NO: 7579 - protein, 58 aa, Artificial Sequence; identical to SEQ ID NO: 7578
  Synthetic polypeptide

SEQ ID NO: 7580 - protein, 58 aa, Artificial Sequence; identical to SEQ ID NO: 7578
  Synthetic polypeptide

SEQ ID NO: 7581 - protein, 23 aa, Artificial Sequence
  Synthetic polypeptide
DGTPEDRFLAEFGSCLLQHCCAL

SEQ ID NO: 7582 - protein, 23 aa, Artificial Sequence
  Synthetic polypeptide
DGTPEDRFLAEFGSCLLQHCCAL

SEQ ID NO: 7583 - protein, 23 aa, Artificial Sequence
  Synthetic polypeptide
DGTPEDRFLAEFGSCLLQHCCAL

SEQ ID NO: 7584 - protein, 23 aa, Artificial Sequence
  Synthetic polypeptide
DGTPEDRFLAEFGSCLLQHCCAL

SEQ ID NO: 7585 - protein, 313 aa, Artificial Sequence
  Synthetic polypeptide
DWAWWLTPVIPALWEAEAGGSRHQEIETILAKTVHQRIASWQNLGAVYCSTVVPSDDVTVVYQNGLPVISVRLPSRRERCQFTLKPISDSVGVFLRQLQEEDRGIDRVAIYSPDGVRVAASTGIDLLLLDDFKLVINDLTYHVRPPKRVEMGFCHVGQNGFELLTSSYLPASASQSAEIIAVRIEISRKAEKRTTLVLWGGLAYMATQFGILARLTWWEYSWDIMEPVTYFITYGSAMAMYAYFVMTRQEYVYPEARDRQYLLFFHKGAKKSRFDLEKYNQLKDAIAQAEMDLKRLRDPLQVHLPLRQIGEKD

SEQ ID NO: 7586 - protein, 78 aa, Artificial Sequence
  Synthetic polypeptide
DWAWWLTPVIPALWEAEAGGSRHQEIETILAKTVHQRIASWQNLGAVYCSTVVPSDGECYSGLSKWVTCDICEATIPA

SEQ ID NO: 7587 - protein, 177 aa, Artificial Sequence
  Synthetic polypeptide
SQHFGRPRRVDHDIRRSRPSWLRRYTRGSLPGRIWELFIAALLCPLMVNVTVVYQNGLPVISVRLPSRRERCQFTLKPISDSVGVFLRQLQEEDRGIDRVAIYSPDGVRVAASTGIDLLLLDDFKLVINDLTYHVRPPKRDLLSHENAATLNDVKTLVQQLYTTLCIEQHQLNKERE

SEQ ID NO: 7588 - protein, 4 aa, Artificial Sequence
  Synthetic polypeptide
TETS

SEQ ID NO: 7589 - protein, 4 aa, Artificial Sequence
  Synthetic polypeptide
TETS

SEQ ID NO: 7590 - protein, 4 aa, Artificial Sequence
  Synthetic polypeptide
TETS

SEQ ID NO: 7591 - protein, 33 aa, Artificial Sequence
  Synthetic polypeptide
CWKCSQEAEKSDMTLQEKVGLLDTYRRLRPLKS

SEQ ID NO: 7592 - protein, 33 aa, Artificial Sequence; identical to SEQ ID NO: 7591
  Synthetic polypeptide

SEQ ID NO: 7593 - protein, 33 aa, Artificial Sequence; identical to SEQ ID NO: 7591
  Synthetic polypeptide

SEQ ID NO: 7594 - protein, 39 aa, Artificial Sequence
  Synthetic polypeptide
INYDEVTQYNIMEMNRLQLHTKGICLSRSQRQTILTIFP

SEQ ID NO: 7595 - protein, 39 aa, Artificial Sequence; identical to SEQ ID NO: 7594
  Synthetic polypeptide

SEQ ID NO: 7596 - protein, 39 aa, Artificial Sequence; identical to SEQ ID NO: 7594
  Synthetic polypeptide

SEQ ID NO: 7597 - protein, 72 aa, Artificial Sequence
  Synthetic polypeptide
IDCSYTQKEYVYPEARDRQYLLFFHKGAKKSRFDLEKYNQLKDAIAQAEMDLKRLRDPLQVHLPLRQIGEKD

SEQ ID NO: 7598 - protein, 72 aa, Artificial Sequence; identical to SEQ ID NO: 7597
  Synthetic polypeptide

SEQ ID NO: 7599 - protein, 72 aa, Artificial Sequence; identical to SEQ ID NO: 7597
  Synthetic polypeptide

SEQ ID NO: 7600 - protein, 33 aa, Artificial Sequence
  Synthetic polypeptide
TAATHKRNMFIQKPETDNTYYFSIKEPKSHVLT

SEQ ID NO: 7601 - protein, 33 aa, Artificial Sequence; identical to SEQ ID NO: 7600
  Synthetic polypeptide

SEQ ID NO: 7602 - protein, 33 aa, Artificial Sequence; identical to SEQ ID NO: 7600
  Synthetic polypeptide

SEQ ID NO: 7603 - protein, 139 aa, Artificial Sequence
  Synthetic polypeptide
REGLDPSNSCHPATGKAPMPRPGYKPQEPNGCGSYFLGLKVPESMDLGIPAMTKCCNQLDVCYDTCGANKYRCDAKFRWCLHSICSDLKRSLGFVSKVEAACDSLVDTVFNTVWTLGCRPFMNSQRAACICAEEEKEEL

SEQ ID NO: 7604 - protein, 72 aa, Artificial Sequence
  Synthetic polypeptide
GLARGKYEEVTCITFWSVFTEERGWTLPTPAILLQERHQCPDLATSPKSPMAAAPISWVSRYQKVWTWAFQQ

SEQ ID NO: 7605 - protein, 70 aa, Artificial Sequence
  Synthetic polypeptide
HSGVCLLKRGAGPFQLLPSCYRKGTNAQTWLQAPRAQWLRLLFPGSQGTRKYGLGHSSNDKVLQPAGCLL

SEQ ID NO: 7606 - protein, 19 aa, Artificial Sequence
  Synthetic polypeptide
GRCGGSRLKSQHFGRLSGW

SEQ ID NO: 7607 - protein, 19 aa, Artificial Sequence
  Synthetic polypeptide
GRCGGSRLKSQHFGRLSGW

SEQ ID NO: 7608 - protein, 19 aa, Artificial Sequence
  Synthetic polypeptide
GRCGGSRLKSQHFGRLSGW

SEQ ID NO: 7609 - protein, 28 aa, Artificial Sequence
  Synthetic polypeptide
PVWWLTPEIPALWEAEWMVIPTLLWISP

SEQ ID NO: 7610 - protein, 28 aa, Artificial Sequence
  Synthetic polypeptide
PVWWLTPEIPALWEAEWMVIPTLLWISP

SEQ ID NO: 7611 - protein, 28 aa, Artificial Sequence
  Synthetic polypeptide
PVWWLTPEIPALWEAEWMVIPTLLWISP

SEQ ID NO: 7612 - protein, 56 aa, Artificial Sequence
  Synthetic polypeptide
LLGGQMVTPAMEPQLCCAQAKVNNSSLIGVGYTQTLRPGVKLTLSALVDGKSINAG

SEQ ID NO: 7613 - protein, 30 aa, Artificial Sequence
  Synthetic polypeptide
GTFDSWVVRWSPLLWSHNCAVLRQKSTTLA

SEQ ID NO: 7614 - protein, 30 aa, Artificial Sequence; identical to SEQ ID NO: 7613
  Synthetic polypeptide

SEQ ID NO: 7615 - protein, 30 aa, Artificial Sequence; identical to SEQ ID NO: 7613
  Synthetic polypeptide

SEQ ID NO: 7616 - protein, 30 aa, Artificial Sequence; identical to SEQ ID NO: 7613
  Synthetic polypeptide

SEQ ID NO: 7617 - protein, 30 aa, Artificial Sequence; identical to SEQ ID NO: 7613
  Synthetic polypeptide

SEQ ID NO: 7618 - protein, 48 aa, Artificial Sequence
  Synthetic polypeptide
LEWLIEAWFRKKKDKWMGNEELLTPGWSDGHPCYGATTVLCSGKSQQL

SEQ ID NO: 7619 - protein, 48 aa, Artificial Sequence; identical to SEQ ID NO: 7618
  Synthetic polypeptide

SEQ ID NO: 7620 - protein, 48 aa, Artificial Sequence; identical to SEQ ID NO: 7618
  Synthetic polypeptide

SEQ ID NO: 7621 - protein, 48 aa, Artificial Sequence; identical to SEQ ID NO: 7618
  Synthetic polypeptide

SEQ ID NO: 7622 - protein, 48 aa, Artificial Sequence; identical to SEQ ID NO: 7618
  Synthetic polypeptide

SEQ ID NO: 7623 - protein, 68 aa, Artificial Sequence
  Synthetic polypeptide
LLGGQMVTPAMEPQLCCAQAKVNNSSLIGVGYTQTLRPGVKLTLSALVDGKSINAGGHKVGLALELEA

SEQ ID NO: 7624 - protein, 68 aa, Artificial Sequence; identical to SEQ ID NO: 7623
  Synthetic polypeptide

SEQ ID NO: 7625 - protein, 68 aa, Artificial Sequence; identical to SEQ ID NO: 7623
  Synthetic polypeptide

SEQ ID NO: 7626 - protein, 68 aa, Artificial Sequence; identical to SEQ ID NO: 7623
  Synthetic polypeptide

SEQ ID NO: 7627 - protein, 41 aa, Artificial Sequence
  Synthetic polypeptide
FYRLIGRRYLPCPRWDFGLWTFELMQKMDSGSRGKSDCCRG

SEQ ID NO: 7628 - protein, 41 aa, Artificial Sequence; identical to SEQ ID NO: 7627
  Synthetic polypeptide

SEQ ID NO: 7629 - protein, 41 aa, Artificial Sequence; identical to SEQ ID NO: 7627
  Synthetic polypeptide

SEQ ID NO: 7630 - protein, 50 aa, Artificial Sequence
  Synthetic polypeptide
CRRWTQGPEASQTVAEAENQTFDDRILSEVYHHFPLCLHYGFLQNAEQSF

SEQ ID NO: 7631 - protein, 50 aa, Artificial Sequence; identical to SEQ ID NO: 7630
  Synthetic polypeptide

SEQ ID NO: 7632 - protein, 50 aa, Artificial Sequence; identical to SEQ ID NO: 7630
  Synthetic polypeptide

SEQ ID NO: 7633 - protein, 930 aa, Artificial Sequence
  Synthetic polypeptide
VDAEDGLRVPRQVRLLQRLKTKPLMTEFSVKSTIISRYAFTTVSCRMLNRASEDQDIEFQMQIPAAAFITNFTMLIGDKVYQGEITEREKKSGDRVKEKRNKTTEENGEKGTEIFRASAVIPSKDKAAFFLSYEELLQRRLGKYEHSISVRPQQLSGRLSVDVNILESAGIASLEVLPLHNSRQRGSGRGEDDSGPPPSTVINQNETFANIIFKPTVVQQARIAQNGILGDFIIRYDVNREQSIGDIQVLNGYFVHYFAPKDLPPLPKNVVFVLDSSASMVGTKLRQTKDALFTILHDLRPQDRFSIIGFSNRIKVWKDHLISVTPDSIRDGKVYIHHMSPTGGTDINGALQRAIRLLNKYVAHSGIGDRSVSLIVFLTDGKPTVGETHTLKILNNTREAARGQVCIFTIGIGNDVDFRLLEKLSLENCGLTRRVHEEEDAGSQLIGFYDEIRTPLLSDIRIDYPPSSVVQATKTLFPNYFNGSEIIIAGKLVDRKLDHLHVEVTASNSKKFIILKTDVPVRPQKAGKDVTGSPRPGGDGEGDTNHIERLWSYLTTKELLSSWLQSDDEPEKERLRQRAQALAVSYRFLTPFTSMKLRGPVPRMDGLEEAHGMSAAMGPEPVVQSVRGAGTQPGPLLKKPYQPRIKISKTSVDGDPHFVVDFPLSRLTVCFNIDGQPGDILRLVSDHRDSGVTVNGELIGAPAPPNGHKKQRTYLRTITILINKPERSYLEITPSRVILDGGDRLVLPCNQSVVVGSWGLEVSVSANANVTVTIQGSIAFVILIHLYKKPAPFQRHHLGFYIANSEGLSSNCHGLLGQFLNQDARLTEDPAGPSQNLTHPLLLQVGEGPEAVLTVKGHQVPVVWKQRKIYNGEEQIDCWFARNNAAKLIDGEYKDYLAFHPFDTGMDTWPGNVQGALKLAALKMQVHEGQ

SEQ ID NO: 7634 - protein, 669 aa, Artificial Sequence
  Synthetic polypeptide
VDAEDGLRVPRQVRLLQRLKTKPLMTEFSVKSTIISRYAFTTVSCRMLNRASEDQDIEFQMQIPAAAFITNFTMLIGDKVYQGEITEREKKSGDRVKEKRNKTTEENGEKGTEIFRASAVIPSKDKAAFFLSYEELLQRRLGKYEHSISVRPQQLSGRLSVDVNILESAGIASLEVLPLHNSRQRGSGRGEDDSGPPPSTVINQNETFANIIFKPTVVQQARIAQNGILGDFIIRYDVNREQSIGDIQVLNGYFVHYFAPKDLPPLPKNVVFVLDSSASMVGTKLRQTKDALFTILHDLRPQDRFSIIGFSNRIKVWKDHLISVTPDSIRDGKVYIHHMSPTGGTDINGALQRAIRLLNKYVAHSGIGDRSVSLIVFLTDGKPTVGETHTLKILNNTREAARGQVCIFTIGIGNDVDFRLLEKLSLENCGLTRRVHEEEDAGSQLIGFYDEIRTPLLSDIRIDYPPSSVVQATKTLFPNYFNGSEIIIAGKLVDRKLDHLHVEVTASNSKKFIILKTDVPVRPQKAGKDVTGSPRPGGDGEGDTNHIERLWSYLTTKELLSSWLQSDDEPEKERLRQRAQALAVSYRFLTPFTSMKLRGPVPRMDGLEEAHGMSAAMGPEPVVQSVRGAGTQPGPLLKKPPNSVKKKQNKTKKRHGRDGVFPLHHLGIR

SEQ ID NO: 7635 - protein, 676 aa, Artificial Sequence
  Synthetic polypeptide
VDAEDGLRVPRQVRLLQRLKTKPLMTEFSVKSTIISRYAFTTVSCRMLNRASEDQDIEFQMQIPAAAFITNFTMLIGDKVYQGEITEREKKSGDRVKEKRNKTTEENGEKGTEIFRASAVIPSKDKAAFFLSYEELLQRRLGKYEHSISVRPQQLSGRLSVDVNILESAGIASLEVLPLHNSRQRGSGRGEDDSGPPPSTVINQNETFANIIFKPTVVQQARIAQNGILGDFIIRYDVNREQSIGDIQVLNGYFVHYFAPKDLPPLPKNVVFVLDSSASMVGTKLRQTKDALFTILHDLRPQDRFSIIGFSNRIKVWKDHLISVTPDSIRDGKVYIHHMSPTGGTDINGALQRAIRLLNKYVAHSGIGDRSVSLIVFLTDGKPTVGETHTLKILNNTREAARGQVCIFTIGIGNDVDFRLLEKLSLENCGLTRRVHEEEDAGSQLIGFYDEIRTPLLSDIRIDYPPSSVVQATKTLFPNYFNGSEIIIAGKLVDRKLDHLHVEVTASNSKKFIILKTDVPVRPQKAGKDVTGSPRPGGDGEGDTNHIERLWSYLTTKELLSSWLQSDDEPEKERLRQRAQALAVSYRFLTPFTSMKLRGPVPRMDGLEEAHGMSAAMGPEPVVQSVRGAGTQPGPLLKKPYQPRIKISKTSVRGFRREEQIFSNVMKFPFASILEL

SEQ ID NO: 7636 - protein, 62 aa, Artificial Sequence
  Synthetic polypeptide
VSLTLSDGFKKGSFPSQAHFLPAAIHVRCDLLLLVFHHDCEASSYMKLMDSGSRGKSDCCRG

SEQ ID NO: 7637 - protein, 62 aa, Artificial Sequence; identical to SEQ ID NO: 7636
  Synthetic polypeptide

SEQ ID NO: 7638 - protein, 62 aa, Artificial Sequence; identical to SEQ ID NO: 7636
  Synthetic polypeptide

SEQ ID NO: 7639 - protein, 933 aa, Artificial Sequence
  Synthetic polypeptide
GFQLHETDGLRVPRQVRLLQRLKTKPLMTEFSVKSTIISRYAFTTVSCRMLNRASEDQDIEFQMQIPAAAFITNFTMLIGDKVYQGEITEREKKSGDRVKEKRNKTTEENGEKGTEIFRASAVIPSKDKAAFFLSYEELLQRRLGKYEHSISVRPQQLSGRLSVDVNILESAGIASLEVLPLHNSRQRGSGRGEDDSGPPPSTVINQNETFANIIFKPTVVQQARIAQNGILGDFIIRYDVNREQSIGDIQVLNGYFVHYFAPKDLPPLPKNVVFVLDSSASMVGTKLRQTKDALFTILHDLRPQDRFSIIGFSNRIKVWKDHLISVTPDSIRDGKVYIHHMSPTGGTDINGALQRAIRLLNKYVAHSGIGDRSVSLIVFLTDGKPTVGETHTLKILNNTREAARGQVCIFTIGIGNDVDFRLLEKLSLENCGLTRRVHEEEDAGSQLIGFYDEIRTPLLSDIRIDYPPSSVVQATKTLFPNYFNGSEIIIAGKLVDRKLDHLHVEVTASNSKKFIILKTDVPVRPQKAGKDVTGSPRPGGDGEGDTNHIERLWSYLTTKELLSSWLQSDDEPEKERLRQRAQALAVSYRFLTPFTSMKLRGPVPRMDGLEEAHGMSAAMGPEPVVQSVRGAGTQPGPLLKKPYQPRIKISKTSVDGDPHFVVDFPLSRLTVCFNIDGQPGDILRLVSDHRDSGVTVNGELIGAPAPPNGHKKQRTYLRTITILINKPERSYLEITPSRVILDGGDRLVLPCNQSVVVGSWGLEVSVSANANVTVTIQGSIAFVILIHLYKKPAPFQRHHLGFYIANSEGLSSNCHGLLGQFLNQDARLTEDPAGPSQNLTHPLLLQVGEGPEAVLTVKGHQVPVVWKQRKIYNGEEQIDCWFARNNAAKLIDGEYKDYLAFHPFDTGMDTWPGNVQGALKLAALKMQVHEGQ

SEQ ID NO: 7640 - protein, 672 aa, Artificial Sequence
  Synthetic polypeptide
GFQLHETDGLRVPRQVRLLQRLKTKPLMTEFSVKSTIISRYAFTTVSCRMLNRASEDQDIEFQMQIPAAAFITNFTMLIGDKVYQGEITEREKKSGDRVKEKRNKTTEENGEKGTEIFRASAVIPSKDKAAFFLSYEELLQRRLGKYEHSISVRPQQLSGRLSVDVNILESAGIASLEVLPLHNSRQRGSGRGEDDSGPPPSTVINQNETFANIIFKPTVVQQARIAQNGILGDFIIRYDVNREQSIGDIQVLNGYFVHYFAPKDLPPLPKNVVFVLDSSASMVGTKLRQTKDALFTILHDLRPQDRFSIIGFSNRIKVWKDHLISVTPDSIRDGKVYIHHMSPTGGTDINGALQRAIRLLNKYVAHSGIGDRSVSLIVFLTDGKPTVGETHTLKILNNTREAARGQVCIFTIGIGNDVDFRLLEKLSLENCGLTRRVHEEEDAGSQLIGFYDEIRTPLLSDIRIDYPPSSVVQATKTLFPNYFNGSEIIIAGKLVDRKLDHLHVEVTASNSKKFIILKTDVPVRPQKAGKDVTGSPRPGGDGEGDTNHIERLWSYLTTKELLSSWLQSDDEPEKERLRQRAQALAVSYRFLTPFTSMKLRGPVPRMDGLEEAHGMSAAMGPEPVVQSVRGAGTQPGPLLKKPPNSVKKKQNKTKKRHGRDGVFPLHHLGIR

SEQ ID NO: 7641 - protein, 679 aa, Artificial Sequence
  Synthetic polypeptide
GFQLHETDGLRVPRQVRLLQRLKTKPLMTEFSVKSTIISRYAFTTVSCRMLNRASEDQDIEFQMQIPAAAFITNFTMLIGDKVYQGEITEREKKSGDRVKEKRNKTTEENGEKGTEIFRASAVIPSKDKAAFFLSYEELLQRRLGKYEHSISVRPQQLSGRLSVDVNILESAGIASLEVLPLHNSRQRGSGRGEDDSGPPPSTVINQNETFANIIFKPTVVQQARIAQNGILGDFIIRYDVNREQSIGDIQVLNGYFVHYFAPKDLPPLPKNVVFVLDSSASMVGTKLRQTKDALFTILHDLRPQDRFSIIGFSNRIKVWKDHLISVTPDSIRDGKVYIHHMSPTGGTDINGALQRAIRLLNKYVAHSGIGDRSVSLIVFLTDGKPTVGETHTLKILNNTREAARGQVCIFTIGIGNDVDFRLLEKLSLENCGLTRRVHEEEDAGSQLIGFYDEIRTPLLSDIRIDYPPSSVVQATKTLFPNYFNGSEIIIAGKLVDRKLDHLHVEVTASNSKKFIILKTDVPVRPQKAGKDVTGSPRPGGDGEGDTNHIERLWSYLTTKELLSSWLQSDDEPEKERLRQRAQALAVSYRFLTPFTSMKLRGPVPRMDGLEEAHGMSAAMGPEPVVQSVRGAGTQPGPLLKKPYQPRIKISKTSVRGFRREEQIFSNVMKFPFASILEL

SEQ ID NO: 7642 - protein, 39 aa, Artificial Sequence
  Synthetic polypeptide
DLGFYLQRPVHHALRLRKQQLPQQCGHYREGAVPTTPPH

SEQ ID NO: 7643 - protein, 39 aa, Artificial Sequence; identical to SEQ ID NO: 7642
  Synthetic polypeptide

SEQ ID NO: 7644 - protein, 39 aa, Artificial Sequence; identical to SEQ ID NO: 7642
  Synthetic polypeptide

SEQ ID NO: 7645 - protein, 1820 aa, Artificial Sequence
  Synthetic polypeptide
TSGSTYSVLSTMPSDSESSSSLSSVGTTGKAPSPPPLLTDQQVNEKVENLSIQLRLMTRERNELRKRLAFATHGTAFDKRPYHRLNPDYERLKIQCVRAMSDLQSLQNQHTNALKRCEEVAKETDFYHTLHSRLLSDQTRLKDDVDMLRRENGQLLRERNLLQQSWEDMKRLHEEDQKEIGDLRAQQQQVLKHNGSSEILNKLYDTAMDKLEVVKKDYDALRKRYSEKVAIHNADLSRLEQLGEENQRLLKQTEMLTQQRDTAIQLQHQCALSLRRFEAIHHELNKATAQNKDLQWEMELLQSELTELRTTQVKTAKESEKYREERDAVYSEYKLIMSERDQVISELDKLQTEVELAESKLKSSTSEKKAANEEMEALRQIKDTVTMDAGRANKEVEILRKQCKALCQELKEALQEADVAKCRRDWAFQERDKIVAERDSIRTLCDNLRRERDRAVSELAEALRSLDDTRKQKNDVSRELKELKEQMESQLEKEARFRQLMAHSSHDSAIDTDSMEWETEVVEFERETEDIDLKALGFDMAEGVNEPCFPGDCGIFVTKVDKGSIADGRLRVNDWLLRINDVDLINKDKKQAIKALLNGEGAINMVVRRRKSLGGKVVTPLHINLSGQKDSGISLENGVYAAAVLPGSPAAKEGSLAVGDRIVAINGIALDNKSLNECESLLRSCQDSLTLSLLKVFPQSSSWSGQNIFENIKDSDKMLSFRAHGPEVQAHNKRNLIQHNNSTQTDIFYTDRLEDRKEPGPPGGSSSFLHKPFPGGPLQVCPQACPSASERSLSSFRSDASGDRGFGLVDVRGRRPLLPFETEVGPCGVGEASLDKADSEGSNSGGTWPKAMLSSTAVPEKLSVYKKPKQRKSIFDPNTFKRPQTPPKIDYLLPGPGPAHSPQPSKRAGPLTPPKPPRRSDSIKFQHRLETSSESEATLVGSSPSTSPPSALPPDVDPGEPMHASPPRKARVRIASSYYPEGDGDSSHLPAKKSCDEDLTSQKVDELGQKRRRPKSAPSFRPKLAPVVIPAQFLEEQKCVPASGELSPELQEWAPYSPGHSSRHSNPPLYPSRPSVGTVPRSLTPSTTVSSILRNPIYTVRSHRVGPCSSPPAARDAGPQGLHPSVQHQGRLSLDLSHRTCSDYSEMRATHGSNSLPSSARLGSSSNLQFKAERIKIPSTPRYPRSVVGSERGSVSHSECSTPPQSPLNIDTLSSCSQSQTSASTLPRIAVNPASLGERRKDRPYVEEPRHVKVQKGSEPLGISIVSGEKGGIYVSKVTVGSIAHQAGLEYGDQLLEFNGINLRSATEQQARLIIGQQCDTITILAQYNPHVHQLSSHSRSSSHLDPAGTHSTLQGSGTTTPEHPSVIDPLMEQDEGPSTPPAKQSSSRIAGDANKKTLEPRVVFIKKSQLELGVHLCGGNLHGVFVAEVEDDSPAKGPDGLVPGDLILEYGSLDVRNKTVEEVYVEMLKPRDGVRLKVQYRPEEFTKAKGLPGDSFYIRALYDRLADVEQELSFKKDDILYVDDTLPQGTFGSWMAWQLDENAQKIQRGQIPSKYVMDQEFSRRLSMSEVKDDNSATKTLSAAARRSFFRRKHKHKRSGSKDGKDLLALDAFSSDSIPLFEDSVSLAYQRVQKVDCTALRPVLILGPLLDVVKEMLVNEAPGKFCRCPLEVMKASQQAIERGVKDCLFVDYKRRSGHFDVTTVASIKEITEKNRHCLLDIAPHAIERLHHMHIYPIVIFIHYKSAKHIKEQRDPIYLRDKVTQRHSKEQFEAAQKLEQEYSRYFTGVIQGGALSSICTQILAMVNQEQNKVLWIPACPL

SEQ ID NO: 7646 - protein, 42 aa, Artificial Sequence
  Synthetic polypeptide
PRVLPTASCPPCPQTQKAAAPSAVWALPGRRRPHHPSSLTSK

SEQ ID NO: 7647 - protein, 42 aa, Artificial Sequence; identical to SEQ ID NO: 7646
  Synthetic polypeptide

SEQ ID NO: 7648 - protein, 42 aa, Artificial Sequence; identical to SEQ ID NO: 7646
  Synthetic polypeptide

SEQ ID NO: 7649 - protein, 1480 aa, Artificial Sequence
  Synthetic polypeptide
TSGSTYSVLSTMPSDSESSSSLSSVGTTGKAPSPPPLLTDQQVNEKVENLSIQLRLMTRERNELRKRLAFATHGTAFDKRPYHRLNPDYERLKIQCVRAMSDLQSLQNQHTNALKRCEEVAKETDFYHTLHSRLLSDQTRLKDDVDMLRRENGQLLRERNLLQQSWEDMKRLHEEDQKEIGDLRAQQQQVLKHNGSSEILNKLYDTAMDKLEVVKKDYDALRKRYSEKVAIHNADLSRLEQLGEENQRLLKQTEMLTQQRDTAIQLQHQCALSLRRFEAIHHELNKATAQNKDLQWEMELLQSELTELRTTQVKTAKESEKYREERDAVYSEYKLIMSERDQVISELDKLQTEVELAESKLKSSTSEKKAANEEMEALRQIKDTVTMDAGRANKEVEILRKQCKALCQELKEALQEADVAKCRRDWAFQERDKIVAERDSIRTLCDNLRRERDRAVSELAEALRSLDDTRKQKNDVSRELKELKEQMESQLEKEARFRQLMAHSSHDSAIDTDSMEWETEVVEFERETEDIDLKALGFDMAEGVNEPCFPGDCGIFVTKVDKGSIADGRLRVNDWLLRINDVDLINKDKKQAIKALLNGEGAINMVVRRRKSLGGKVVTPLHINLSGQKDSGISLENGVYAAAVLPGSPAAKEGSLAVGDRIVAINGIALDNKSLNECESLLRSCQDSLTLSLLKEQKCVPASGELSPELQEWAPYSPGHSSRHSNPPLYPSRPSVGTVPRSLTPSTTVSSILRNPIYTVRSHRVGPCSSPPAARDAGPQGLHPSVQHQGRLSLDLSHRTCSDYSEMRATHGSNSLPSSARLGSSSNLQFKAERIKIPSTPRYPRSVVGSERGSVSHSECSTPPQSPLNIDTLSSCSQSQTSASTLPRIAVNPASLGERRKDRPYVEEPRHVKVQKGSEPLGISIVSGEKGGIYVSKVTVGSIAHQAGLEYGDQLLEFNGINLRSATEQQARLIIGQQCDTITILAQYNPHVHQLSSHSRSSSHLDPAGTHSTLQGSGTTTPEHPSVIDPLMEQDEGPSTPPAKQSSSRIAGDANKKTLEPRVVFIKKSQLELGVHLCGGNLHGVFVAEVEDDSPAKGPDGLVPGDLILEYGSLDVRNKTVEEVYVEMLKPRDGVRLKVQYRPEEFTKAKGLPGDSFYIRALYDRLADVEQELSFKKDDILYVDDTLPQGTFGSWMAWQLDENAQKIQRGQIPSKYVMDQEFSRRLSMSEVKDDNSATKTLSAAARRSFFRRKHKHKRSGSKDGKDLLALDAFSSDSIPLFEDSVSLAYQRVQKVDCTALRPVLILGPLLDVVKEMLVNEAPGKFCRCPLEVMKASQQAIERGVKDCLFVDYKRRSGHFDVTTVASIKEITEKNRHCLLDIAPHAIERLHHMHIYPIVIFIHYKSAKHIKEQRDPIYLRDKVTQRHSKEQFEAAQKLEQEYSRYFTGVIQGGALSSICTQILAMVNQEQNKVLWIPACPL

SEQ ID NO: 7650 - protein, 190 aa, Artificial Sequence
  Synthetic polypeptide
TSGSTYSVLSTMPSDSESSSSLSSVGTTGKAPSPPPLLTDQQVNEKVENLSIQLRLMTRERNELRKRLAFATHGTAFDKRPYHRLNPDYERLKIQCVRAMSDLQSLQNQHTNALKRCEEVAKETDFYHTLHSRLLSDQTRLKDDVDMLRRENGQLLRERNLLQQSWEDMKRLHEEDQKEIGDLRAQQQQS

SEQ ID NO: 7651 - protein, 156 aa, Artificial Sequence
  Synthetic polypeptide
WWLTPVIPALWEAEAGGSLESAARRAGTSCANCQTTTTTLWRRNANGDPVCNACGLYYKLHNINRPLTMKKEGIQTRNRKMSSKSKKCKKVHDSLEDFPKNSSFNPAALSRHMSSLSHISPFSHSSHMLTTPTPMHPPSSLSFGPHHPSSMVTAMG

SEQ ID NO: 7652 - protein, 156 aa, Artificial Sequence; identical to SEQ ID NO: 7651
  Synthetic polypeptide

SEQ ID NO: 7653 - protein, 60 aa, Artificial Sequence
  Synthetic polypeptide
YRHFGRPRQVDHLSLQPGEQGRPVRTVRPPQPHSGGGMPMGTLSAMPVGSTTSFTILTDP

SEQ ID NO: 7654 - protein, 60 aa, Artificial Sequence; identical to SEQ ID NO: 7653
  Synthetic polypeptide

SEQ ID NO: 7655 - protein, 255 aa, Artificial Sequence
  Synthetic polypeptide
AGPRRRCRRRARLAGVVFLGVGLWAWSEKGVLSDLTKVTRMHGIDPVVLVLMVGVVMFTLGFAGCVGALRENICLLNFFCGTIVLIFFLELAVAVLAFLFQDWVRDRFREFFESNIKSYRDDIDLQNLIDSLQKANQCCGAYGPEDWDLNVYFNCSGASYSREKCGVPFSCCVPDPAQKVVNTQCGYDVRIQLKSKWDESIFTKGCIQALESWLPRNIYIVAGVFIAISLLQIFGIFLARTLISDIEAVKAGHHF

SEQ ID NO: 7656 - protein, 255 aa, Artificial Sequence; identical to SEQ ID NO: 7655
  Synthetic polypeptide

SEQ ID NO: 7657 - protein, 255 aa, Artificial Sequence; identical to SEQ ID NO: 7655
  Synthetic polypeptide

SEQ ID NO: 7658 - protein, 37 aa, Artificial Sequence
  Synthetic polypeptide
PGRAAAAAAARGWLELSSLESGCGHGAKRVCCPTSPK

SEQ ID NO: 7659 - protein, 37 aa, Artificial Sequence; identical to SEQ ID NO: 7658
  Synthetic polypeptide

SEQ ID NO: 7660 - protein, 37 aa, Artificial Sequence; identical to SEQ ID NO: 7658
  Synthetic polypeptide

SEQ ID NO: 7661 - protein, 37 aa, Artificial Sequence; identical to SEQ ID NO: 7658
  Synthetic polypeptide

SEQ ID NO: 7662 - protein, 134 aa, Artificial Sequence
  Synthetic polypeptide
RAAPPLPPPRAVGWSCLPWSRAVGMERKGCAVRPHQSDPDAWNRPCGAGPDGGRGDVHPGVRRLRGGSAGEYLLAQLFLWHHRAHLLPGAGCGRAGLPVPGLGEGPVPGVLREQHQVLPGRYRSAKPHRLPSES

SEQ ID NO: 7663 - protein, 134 aa, Artificial Sequence; identical to SEQ ID NO: 7662
  Synthetic polypeptide

SEQ ID NO: 7664 - protein, 134 aa, Artificial Sequence; identical to SEQ ID NO: 7662
  Synthetic polypeptide

SEQ ID NO: 7665 - protein, 198 aa, Artificial Sequence
  Synthetic polypeptide
AGPRRRCRRRARLAGVVFLGVGLWAWSEKGVLSDLTKVTRMHGIDPVVLVLMVGVVMFTLGFAGCVGALRENICLLNFNQCCGAYGPEDWDLNVYFNCSGASYSREKCGVPFSCCVPDPAQKVVNTQCGYDVRIQLKSKWDESIFTKGCIQALESWLPRNIYIVAGVFIAISLLQIFGIFLARTLISDIEAVKAGHHF

SEQ ID NO: 7666 - protein, 77 aa, Artificial Sequence
  Synthetic polypeptide
RAAPPLPPPRAVGWSCLPWSRAVGMERKGCAVRPHQSDPDAWNRPCGAGPDGGRGDVHPGVRRLRGGSAGEYLLAQL

SEQ ID NO: 7667 - protein, 28 aa, Artificial Sequence
  Synthetic polypeptide
HVFAHAIPSWNALPCTVLQLSPVSASIP

SEQ ID NO: 7668 - protein, 28 aa, Artificial Sequence
  Synthetic polypeptide
HVFAHAIPSWNALPCTVLQLSPVSASIP

SEQ ID NO: 7669 - protein, 116 aa, Artificial Sequence
  Synthetic polypeptide
MSLHMLFPPGMLFHALSCSSLRSQPQYPDHLLFLQDPGAADSLPPTGAELGSCGQWDQPECPRCSHIQPSPCLPQALALRLGRLPGSRLPGLCDSVGQHLQQCSHRMGALSPLLHP

SEQ ID NO: 7670 - protein, 287 aa, Artificial Sequence
  Synthetic polypeptide
CLCTCYSLLECSSMHCPAALSGLSLNTLTIFSFCKTPELRTPCHLLVLSLALADSGISLNALVAATSSLLRVSHRRWPYGSDGCQAHGFQGFVTALASICSSAAIAWGRYHHYCTRSQLAWNSAVSLVLFVWLSSAFWAALPLLGWGHYDYEPLGTCCTLDYSKGDRNFTSFLFTMSFFNFAMPLFITITSYSLMEQKLGKSGHLQVNTTLPARTLLLGWGPYAILYLYAVIADVTSISPKLQMVPALIAKMVPTINAINYALGNEMVCRGIWQCLSPQKREKDRTK

SEQ ID NO: 7671 - protein, 112 aa, Artificial Sequence
  Synthetic polypeptide
MSLHMLFPPGMLFHALSCSSLRSQPQYPDHLLFLQDPGAADSLPPTGAELGSCGQWDQPECPRCSHIQPSPALALRLGRLPGSRLPGLCDSVGQHLQQCSHRMGALSPLLHP

SEQ ID NO: 7672 - protein, 245 aa, Artificial Sequence
  Synthetic polypeptide
CLCTCYSLLECSSMHCPAALSGLSLNTLTIFSFCKTPELRTPCHLLVLSLALADSGISLNALVAATSSLLRRWPYGSDGCQAHGFQGFVTALASICSSAAIAWGRYHHYCTRSQLAWNSAVSLVLFVWLSSAFWAALPLLGWGHYDYEPLGTCCTLDYSKGDRNFTSFLFTMSFFNFAMPLFITITSYSLMEQKLGKSGHLQVPALIAKMVPTINAINYALGNEMVCRGIWQCLSPQKREKDRTK

SEQ ID NO: 7673 - protein, 9 aa, Artificial Sequence
  Synthetic polypeptide
ASFCARTKK

SEQ ID NO: 7674 - protein, 9 aa, Artificial Sequence
  Synthetic polypeptide
ASFCARTKK

SEQ ID NO: 7675 - protein, 38 aa, Artificial Sequence
  Synthetic polypeptide
WSCDSDESLNLPEPEPPFVQGQRSELGAGPPAHEQPHG

SEQ ID NO: 7676 - protein, 38 aa, Artificial Sequence; identical to SEQ ID NO: 7675
  Synthetic polypeptide

SEQ ID NO: 7677 - protein, 153 aa, Artificial Sequence
  Synthetic polypeptide
TFLSLSLLLCKDKEVNLEQVHRRMNSLMDEDIAHKQISPASIELSALEMGGLAPTQTLEPTREYQNTQLSVSTFLPEQSSHGTSRTLSSGPSSNLPLPLSSSATMPSMQCKHRSPNGGLFRQSPVKTPIPMSFQPVPGGVLPEALDTSHGTSI

SEQ ID NO: 7678 - protein, 153 aa, Artificial Sequence; identical to SEQ ID NO: 7677
  Synthetic polypeptide

SEQ ID NO: 7679 - protein, 354 aa, Artificial Sequence
  Synthetic polypeptide
YLLHNRFLDSKHKNHYKIYNLCAERHYDTAKFNCRVAQYPFEDHNPPQLELIKPFCEDLDQWLSEDDNHVAAIHCKAGKGRTGVMICAYLLHRGKFLKAQEALDFYGEVRTRDKKGVTIPSQRRYVYYYSYLLKNHLDYRPVALLFHKMMFETIPMFSGGTCNPQFVVCQLKVKIYSSNSGPTRREDKFMYFEFPQPLPVCGDIKVEFFHKQNKMLKKDKMFHFWVNTFFIPGPEETSEKVENGSLCDQEIDSICSIERADNDKEYLVLTLTKNDLDKANKDKANRYFSPNFKVKLYFTKTVEEPSNPEASSSTSVTPDVSDNEPDHYRYSDTTDSDPENEPFDEDQHTQITKV

SEQ ID NO: 7680 - protein, 56 aa, Artificial Sequence
  Synthetic polypeptide
CCRYAHSSICYITGFWIQSIKTITRYTIFVLKDIMTPPNLIAELHNILLKTITHHS

SEQ ID NO: 7681 - protein, 7 aa, Artificial Sequence
  Synthetic polypeptide
QVFGFKA

SEQ ID NO: 7682 - protein, 40 aa, Artificial Sequence
  Synthetic polypeptide
WFCKGQLYICCLACHHVSHAFALSLSSTVIVRPFQHVELN

SEQ ID NO: 7683 - protein, 40 aa, Artificial Sequence; identical to SEQ ID NO: 7682
  Synthetic polypeptide

SEQ ID NO: 7684 - protein, 40 aa, Artificial Sequence; identical to SEQ ID NO: 7682
  Synthetic polypeptide

SEQ ID NO: 7685 - protein, 147 aa, Artificial Sequence
  Synthetic polypeptide
GLSSMWNLISECQRQQLEAVSYSSRYALGLFYEAGTKIDVPWAGQYITSNPCIRFVSIDNKKRNIESSEIGPSLVIHTTVPFGVTYLEHSIEDVQELVFQQLENILPGLPQPIATKCQKWRHSQVPSAGVILGCAKSPWMMAIGFPI

SEQ ID NO: 7686 - protein, 147 aa, Artificial Sequence; identical to SEQ ID NO: 7685
  Synthetic polypeptide

SEQ ID NO: 7687 - protein, 174 aa, Artificial Sequence
  Synthetic polypeptide
GLSSMWNLISECQRQQLEAVSYSSRYALGLFYEAGTKIDVPWAGQYITSNPCIRFVSIDNKKRNIESSEIGPSLVIHTTVPFGVTYLEHSIEDVQELVFQQLENILPGLPQPIATKCQKWRHSQVTNAAANCPGQMTLHHKPFLACGGDGFTQSNFDGCITSALCVLEALKNYI

SEQ ID NO: 7688 - protein, 152 aa, Artificial Sequence
  Synthetic polypeptide
RAVVHMLSCLPPLISECQRQQLEAVSYSSRYALGLFYEAGTKIDVPWAGQYITSNPCIRFVSIDNKKRNIESSEIGPSLVIHTTVPFGVTYLEHSIEDVQELVFQQLENILPGLPQPIATKCQKWRHSQVPSAGVILGCAKSPWMMAIGFPI

SEQ ID NO: 7689 - protein, 152 aa, Artificial Sequence; identical to SEQ ID NO: 7688
  Synthetic polypeptide

SEQ ID NO: 7690 - protein, 24 aa, Artificial Sequence
  Synthetic polypeptide
ISLVRSDGFVKGSCTYAVLPATTN

SEQ ID NO: 7691 - protein, 24 aa, Artificial Sequence
  Synthetic polypeptide
ISLVRSDGFVKGSCTYAVLPATTN

SEQ ID NO: 7692 - protein, 24 aa, Artificial Sequence
  Synthetic polypeptide
ISLVRSDGFVKGSCTYAVLPATTN

SEQ ID NO: 7693 - protein, 179 aa, Artificial Sequence
  Synthetic polypeptide
RAVVHMLSCLPPLISECQRQQLEAVSYSSRYALGLFYEAGTKIDVPWAGQYITSNPCIRFVSIDNKKRNIESSEIGPSLVIHTTVPFGVTYLEHSIEDVQELVFQQLENILPGLPQPIATKCQKWRHSQVTNAAANCPGQMTLHHKPFLACGGDGFTQSNFDGCITSALCVLEALKNYI

SEQ ID NO: 7694 - protein, 36 aa, Artificial Sequence
  Synthetic polypeptide
NRIFTSTRSSVPTSLLQCDSHECTNCSVERWQGPVG

SEQ ID NO: 7695 - protein, 36 aa, Artificial Sequence; identical to SEQ ID NO: 7694
  Synthetic polypeptide

SEQ ID NO: 7696 - protein, 36 aa, Artificial Sequence; identical to SEQ ID NO: 7694
  Synthetic polypeptide

SEQ ID NO: 7697 - protein, 36 aa, Artificial Sequence; identical to SEQ ID NO: 7694
  Synthetic polypeptide

SEQ ID NO: 7698 - protein, 100 aa, Artificial Sequence
  Synthetic polypeptide
MQNLRLFPRSTETEFLLQQDLQSQPPYYNVTAMNVPIAVWNGGKDLLADPQDVGLLLPKLPNLIYHKEIPFYNHLDFIWAMDAPQEVYNDIVSMISEDKK

SEQ ID NO: 7699 - protein, 100 aa, Artificial Sequence; identical to SEQ ID NO: 7698
  Synthetic polypeptide

SEQ ID NO: 7700 - protein, 100 aa, Artificial Sequence; identical to SEQ ID NO: 7698
  Synthetic polypeptide

SEQ ID NO: 7701 - protein, 100 aa, Artificial Sequence; identical to SEQ ID NO: 7698
  Synthetic polypeptide

SEQ ID NO: 7702 - protein, 46 aa, Artificial Sequence
  Synthetic polypeptide
MLFRAWFGANGISITYECRISGCSPDLLKQNFYFNKIFSPNLPTTM

SEQ ID NO: 7703 - protein, 46 aa, Artificial Sequence; identical to SEQ ID NO: 7702
  Synthetic polypeptide

SEQ ID NO: 7704 - protein, 46 aa, Artificial Sequence; identical to SEQ ID NO: 7702
  Synthetic polypeptide

SEQ ID NO: 7705 - protein, 46 aa, Artificial Sequence; identical to SEQ ID NO: 7702
  Synthetic polypeptide

SEQ ID NO: 7706 - protein, 63 aa, Artificial Sequence
  Synthetic polypeptide
GASLPGRPSSEMWGAPLPRHPVWDVRSASTRPRPRLGGESCSDSLHVSLPASVNILNADATGQ

SEQ ID NO: 7707 - protein, 63 aa, Artificial Sequence; identical to SEQ ID NO: 7706
  Synthetic polypeptide

SEQ ID NO: 7708 - protein, 63 aa, Artificial Sequence; identical to SEQ ID NO: 7706
  Synthetic polypeptide

SEQ ID NO: 7709 - protein, 63 aa, Artificial Sequence; identical to SEQ ID NO: 7706
  Synthetic polypeptide

SEQ ID NO: 7710 - protein, 63 aa, Artificial Sequence; identical to SEQ ID NO: 7706
  Synthetic polypeptide

SEQ ID NO: 7711 - protein, 63 aa, Artificial Sequence; identical to SEQ ID NO: 7706
  Synthetic polypeptide

SEQ ID NO: 7712 - protein, 165 aa, Artificial Sequence
  Synthetic polypeptide
GAPLPGRDPVWEGKVAQTACMSACQHLSTSLMQMLLDSELKQISMGAVQQFNLDVIQCELFASSEPVPGFQGDTLQLAFIDLRQLLDLFMVWDWSTYLADYGQPASKYLRVNPNTALTLLEKMKDTSKKNNIFAQFRKNDRDKQKLIETVVKQLRSLVNGMSQHM

SEQ ID NO: 7713 - protein, 165 aa, Artificial Sequence; identical to SEQ ID NO: 7712
  Synthetic polypeptide

SEQ ID NO: 7714 - protein, 165 aa, Artificial Sequence; identical to SEQ ID NO: 7712
  Synthetic polypeptide

SEQ ID NO: 7715 - protein, 165 aa, Artificial Sequence; identical to SEQ ID NO: 7712
  Synthetic polypeptide

SEQ ID NO: 7716 - protein, 45 aa, Artificial Sequence
  Synthetic polypeptide
DVGSASAPPPRLGCEERLYPAATPSGRGKLLRQLACQPASICQHP

SEQ ID NO: 7717 - protein, 45 aa, Artificial Sequence; identical to SEQ ID NO: 7716
  Synthetic polypeptide

SEQ ID NO: 7718 - protein, 45 aa, Artificial Sequence; identical to SEQ ID NO: 7716
  Synthetic polypeptide

SEQ ID NO: 7719 - protein, 45 aa, Artificial Sequence; identical to SEQ ID NO: 7716
  Synthetic polypeptide

SEQ ID NO: 7720 - protein, 45 aa, Artificial Sequence; identical to SEQ ID NO: 7716
  Synthetic polypeptide

SEQ ID NO: 7721 - protein, 45 aa, Artificial Sequence; identical to SEQ ID NO: 7716
  Synthetic polypeptide

SEQ ID NO: 7722 - protein, 88 aa, Artificial Sequence
  Synthetic polypeptide
GAPLPGRDPVWEGKVAQTACMSACQHLSTSLMQMLLDSELKQISMGAVQQFNLDVIQCEYEVLLCCPDWSQTPGLKSSSCLGIPKCWN

SEQ ID NO: 7723 - protein, 84 aa, Artificial Sequence
  Synthetic polypeptide
GAPLPGRDPVWEGKVAQTACMSACQHLSTSLMQMLLDSELKQISMGAVQQFNLDVIQCELFASSEPVPGFQGDTLQLAFIDLRQ

SEQ ID NO: 7724 - protein, 18 aa, Artificial Sequence
  Synthetic polypeptide
AFQQMFSARGSTVLGGDL

SEQ ID NO: 7725 - protein, 466 aa, Artificial Sequence
  Synthetic polypeptide
GFSLTKDAGGSSPASSFPQRGKDHARTPELSNRCSAPGDPQFWEVISDEHAIDSAGTYHGDSHLQLERINVYYNEASGGRYVPRAVLVDLEPGTMDSVRSGPFGQVFRPDNFIFGQCGAGNNWAKGHYTEGAELMESVMDVVRKEAESCDCLQGFQLTHSLGGGTGSGMGTLLLSKIREEYPDRIINTFSILPSPKVSDTVVEPYNATLSVHQLIENADETFCIDNEALYDICSKTLKLPTPTYGDLNHLVSATMSGVTTCLRFPGQLNADLRKLAVNMVPFPRLHFFMPGFAPLTSRGSQQYRALTVAELTQQMFDAKNMMAACDPRHGRYLTAAAIFRGRMPMREVDEQMFNIQDKNSSYFADWLPNNVKTAVCDIPPRGLKMSATFIGNNTAIQELFKRVSEQFTAMFRRKAFLHWYTGEGMDEMEFTEAESNMNDLVSEYQQYQDATAEEEEDEEYAEEEVA

SEQ ID NO: 7726 - protein, 106 aa, Artificial Sequence
  Synthetic polypeptide
LSPVEFTCGRPFLTTDLLIDEKTHQLQKYVINLGQVQRHSVHMETRVFPSHMGGKFSFSSARDLVLLKTREEVLQRAAFPNVERTTQGHLSFPTDVQRQGIHSSGR

SEQ ID NO: 7727 - protein, 28 aa, Artificial Sequence
  Synthetic polypeptide
NYIVGRMLEELQMFTWEKSERMGGKRKL

SEQ ID NO: 7728 - protein, 61 aa, Artificial Sequence
  Synthetic polypeptide
EECWRNCRCLPGRRVKGWEGRGNSDEEESASESELWKGPLPETDEKSQEEEFDEYFQDLFL

SEQ ID NO: 7729 - protein, 46 aa, Artificial Sequence
  Synthetic polypeptide
KDGREEETLMRKKVLQNLNFGRVHYQRQMKNHRKKNLMSIFRICFY

SEQ ID NO: 7730 - protein, 324 aa, Artificial Sequence
  Synthetic polypeptide
QQPVTAPLLLRLASSICFQHSNQSAENVTPGSKAALANLCIGDVITAIDGENTSNMTHLEAQNRIKGCTDNLTLTVARSEHKVWSPLVTEEGKRHPYKMNLASEPQEVLHIGSAHNRSAMPFTASPASSTTARVITNQYNNPAGLYSSENISNFNNALESKTAASGVEANSRPLDHAQPPSSLVIDKESEVYKMLQEKQELNEPPKQSTSFLVLQEILESEEKGDPNKPSGFRSVKAPVTKVAASIGNAQKLPMCDKCGTGIVGVFVKLRDRHRHPECYVCTDCGTNLKQKGHFFVEDQIYCEKHARERVTPPEGYEVVTVFPK

SEQ ID NO: 7731 - protein, 62 aa, Artificial Sequence
  Synthetic polypeptide
PGSKHCCKLLDSHPGPKPVISSCLDDNNSRLLLPCFCGLPPPSVFNTAIRVLKTSLLEARRL

SEQ ID NO: 7732 - protein, 11 aa, Artificial Sequence
  Synthetic polypeptide
KRHSWKQGGSS

SEQ ID NO: 7733 - protein, 24 aa, Artificial Sequence
  Synthetic polypeptide
HFGRLRLQVMKFSGTHAFILDIRR

SEQ ID NO: 7734 - protein, 24 aa, Artificial Sequence
  Synthetic polypeptide
HFGRLRLQVMKFSGTHAFILDIRR

SEQ ID NO: 7735 - protein, 24 aa, Artificial Sequence
  Synthetic polypeptide
HFGRLRLQVMKFSGTHAFILDIRR

SEQ ID NO: 7736 - protein, 24 aa, Artificial Sequence
  Synthetic polypeptide
HFGRLRLQVMKFSGTHAFILDIRR

SEQ ID NO: 7737 - protein, 24 aa, Artificial Sequence
  Synthetic polypeptide
HFGRLRLQVMKFSGTHAFILDIRR

SEQ ID NO: 7738 - protein, 24 aa, Artificial Sequence
  Synthetic polypeptide
HFGRLRLQVMKFSGTHAFILDIRR

SEQ ID NO: 7739 - protein, 244 aa, Artificial Sequence
  Synthetic polypeptide
LWEAEVASNEILRDPCFHPGYKKVVNVSDLYKTPCTKRFEMTLPFQQFEIQGIGNYQQCHQSILELFNTSYCPYSQCAFNGIFLPPLQGDFGAFSAFYFVMKFLNLTSEKVSQEKVTEMMKKFCAQPWEEIKTSYAGVKEKYLSEYCFSGTYILSLLLQGYHFTADSWEHIHFIGKIQGSDAGWTLGYMLNLTNMIPAEQPLSTPLSHSTYVFLMVLFSLVLFTVAIIGLLIFHKPSYFWKDMV

SEQ ID NO: 7740 - protein, 244 aa, Artificial Sequence; identical to SEQ ID NO: 7739
  Synthetic polypeptide

SEQ ID NO: 7741 - protein, 244 aa, Artificial Sequence; identical to SEQ ID NO: 7739
  Synthetic polypeptide

SEQ ID NO: 7742 - protein, 244 aa, Artificial Sequence; identical to SEQ ID NO: 7739
  Synthetic polypeptide

SEQ ID NO: 7743 - protein, 244 aa, Artificial Sequence; identical to SEQ ID NO: 7739
  Synthetic polypeptide

SEQ ID NO: 7744 - protein, 244 aa, Artificial Sequence; identical to SEQ ID NO: 7739
  Synthetic polypeptide

SEQ ID NO: 7745 - protein, 67 aa, Artificial Sequence
  Synthetic polypeptide
PGERSQAQKDNEVPEVTRSRSPGPPQVDGTPTMSLERPPRVPPRAASQRPPTRETFHPPPPVPPRGR

SEQ ID NO: 7746 - protein, 67 aa, Artificial Sequence; identical to SEQ ID NO: 7745
  Synthetic polypeptide

SEQ ID NO: 7747 - protein, 67 aa, Artificial Sequence; identical to SEQ ID NO: 7745
  Synthetic polypeptide

SEQ ID NO: 7748 - protein, 67 aa, Artificial Sequence
  Synthetic polypeptide
QVKGARHKRIMKSLRLPEVAVQAPHKWMGHPPCPSRDPPGCLRELPHRGLRPGRPSILLHLFHPEDA

SEQ ID NO: 7749 - protein, 67 aa, Artificial Sequence; identical to SEQ ID NO: 7748
  Synthetic polypeptide

SEQ ID NO: 7750 - protein, 67 aa, Artificial Sequence; identical to SEQ ID NO: 7748
  Synthetic polypeptide

SEQ ID NO: 7751 - protein, 7 aa, Artificial Sequence
  Synthetic polypeptide
KEPGTKG

SEQ ID NO: 7752 - protein, 7 aa, Artificial Sequence
  Synthetic polypeptide
KEPGTKG

SEQ ID NO: 7753 - protein, 7 aa, Artificial Sequence
  Synthetic polypeptide
KEPGTKG

SEQ ID NO: 7754 - protein, 2 aa, Artificial Sequence
  Synthetic polypeptide
PG

SEQ ID NO: 7755 - protein, 2 aa, Artificial Sequence
  Synthetic polypeptide
PG

SEQ ID NO: 7756 - protein, 2 aa, Artificial Sequence
  Synthetic polypeptide
PG

SEQ ID NO: 7757 - protein, 59 aa, Artificial Sequence
  Synthetic polypeptide
QDNEVPEVTRSRSPGPPQVDGTPTMSLERPPRVPPRAASQRPPTRETFHPPPPVPPRGR

SEQ ID NO: 7758 - protein, 59 aa, Artificial Sequence; identical to SEQ ID NO: 7757
  Synthetic polypeptide

SEQ ID NO: 7759 - protein, 59 aa, Artificial Sequence; identical to SEQ ID NO: 7757
  Synthetic polypeptide

SEQ ID NO: 7760 - protein, 100 aa, Artificial Sequence
  Synthetic polypeptide
QDPLRLNICPPCDPPTPTRPGRSGARAHLHPVLRLLPGHVHLQQWHRGLSWKRPHCHPGQPARDHDGDTPGAERHQVHPSWSLLTLQKATEDRPEQQSDR

SEQ ID NO: 7761 - protein, 100 aa, Artificial Sequence; identical to SEQ ID NO: 7760
  Synthetic polypeptide

SEQ ID NO: 7762 - protein, 100 aa, Artificial Sequence; identical to SEQ ID NO: 7760
  Synthetic polypeptide

SEQ ID NO: 7763 - protein, 1284 aa, Artificial Sequence
  Synthetic polypeptide
GSTSVHPVTLQLLLGQGEAGRVPTCTLSSGSCPAMCTCSNGIVDCRGKGLTAIPANLPETMTEIRLELNGIKSIPPGAFSPYRKLRRIDLSNNQIAEIAPDAFQGLRSLNSLVLYGNKITDLPRGVFGGLYTLQLLLLNANKINCIRPDAFQDLQNLSLLSLYDNKIQSLAKGTFTSLRAIQTLHLAQNPFICDCNLKWLADFLRTNPIETSGARCASPRRLANKRIGQIKSKKFRCSAKEQYFIPGTEDYQLNSECNSDVVCPHKCRCEANVVECSSLKLTKIPERIPQSTAELRLNNNEISILEATGMFKKLTHLKKINLSNNKVSEIEDGAFEGAASVSELHLTANQLESIRSGMFRGLDGLRTLMLRNNRISCIHNDSFTGLRNVRLLSLYDNQITTVSPGAFDTLQSLSTLNLLANPFNCNCQLAWLGGWLRKRKIVTGNPRCQNPDFLRQIPLQDVAFPDFRCEEGQEEGGCLPRPQCPQECACLDTVVRCSNKHLRALPKGIPKNVTELYLDGNQFTLVPGQLSTFKYLQLVDLSNNKISSLSNSSFTNMSQLTTLILSYNALQCIPPLAFQGLRSLRLLSLHGNDISTLQEGIFADVTSLSHLAIGANPLYCDCHLRWLSSWVKTGYKEPGIARCAGPQDMEGKLLLTTPAKKFECQGPPTLAVQAKCDLCLSSPCQNQGTCHNDPLEVYRCACPSGYKGRDCEVSLDSCSSGPCENGGTCHAQEGEDAPFTCSCPTGFEGPTCGVNTDDCVDHACANGGVCVDGVGNYTCQCPLQYEGKACEQLVDLCSPDLNPCQHEAQCVGTPDGPRCECMPGYAGDNCSENQDDCRDHRCQNGAQCMDEVNSYSCLCAEGYSGQLCEIPPHLPAPKSPCEGTECQNGANCVDQGNRPVCQCLPGFGGPECEKLLSVNFVDRDTYLQFTDLQNWPRANITLQVSTAEDNGILLYNGDNDHIAVELYQGHVRVSYDPGSYPSSAIYSAETINDGQFHTVELVAFDQMVNLSIDGGSPMTMDNFGKHYTLNSEAPLYVGGMPVDVNSAAFRLWQILNGTGFHGCIRNLYINNELQDFTKTQMKPGVVPGCEPCRKLYCLHGICQPNATPGPMCHCEAGWVGLHCDQPADGPCHGHKCVHGQCVPLDALSYSCQCQDGYSGALCNQAGALAEPCRGLQCLHGHCQASGTKGAHCVCDPGFSGELCEQESECRGDPVRDFHQVQRGYAICQTTRPLSWVECRGSCPGQGCCQGLRLKRRKFTFECSDGTSFAEEVEKPTKCGCALCA

SEQ ID NO: 7764 - protein, 1211 aa, Artificial Sequence
  Synthetic polypeptide
GSTSVHPVTLQLLLGQGEAGRVPTCTLSSGSCPAMCTCSNGIVDCRGKGLTAIPANLPETMTEIRLELNGIKSIPPGAFSPYRKLRRIDLSNNQIAEIAPDAFQGLRSLNSLVLYGNKITDLPRGVFGGLYTLQLLLLNANKINCIRPDAFQDLQNLSLLSLYDNKIQSLAKGTFTSLRAIQTLHLAQNPFICDCNLKWLADFLRTNPIETSGARCASPRRLANKRIGQIKSKKFRCSAKEQYFIPGTEDYQLNSECNSDVVCPHKCRCEANVVECSSLKLTKIPERIPQSTAELRLNNNEISILEATGMFKKLTHLKKINLSNNKVSEIEDGAFEGAASVSELHLTANQLESIRSGMFRGLDGLRTLMLRNNRISCIHNDSFTGLRNVRLLSLYDNQITTVSPGAFDTLQSLSTLNLLANPFNCNCQLAWLGGWLRKRKIVTGNPRCQNPDFLRQIPLQDVAFPDFRCEEGQEEGGCLPRPQCPQECACLDTVVRCSNKHLRALPKGIPKNVTELYLDGNQFTLVPGQLSTFKYLQLVDLSNNKISSLSNSSFTNMSQLTTLILSYNALQCIPPLAFQGLRSLRLLSLHGNDISTLQEGIFADVTSLSHLAIGANPLYCDCHLRWLSSWVKTGYKEPGIARCAGPQDMEGKLLLTTPAKKFECQGPPTLAVQAKCDLCLSSPCQNQGTCHNDPLEVYRCACPSGYKGRDCEVSLDSCSSGPCENGGTCHAQEGEDAPFTCSCPTGFEGPTCGVNTDDCVDHACANGGVCVDGVGNYTCQCPLQYEGKACEQLVDLCSPDLNPCQHEAQCVGTPDGPRCECMPGYAGDNCSENQDDCRDHRCQNGAQCMDEVNSYSCLCAEGYSGQLCEIPPHLPAPKSPCEGTECQNGANCVDQGNRPVCQCLPGFGGPECEKLLSVNFVDRDTYLQFTDLQNWPRANITLQVSTAEDNGILLYNGDNDHIAVELYQGHVRVSYDPGSYPSSAIYSAETINDGQFHTVELVAFDQMVNLSIDGGSPMTMDNFGKHYTLNSEAPLYVGGMPVDVNSAAFRLWQILNGTGFHGCIRNLYINNELQDFTKTQMKPGVVPGCEPCRKLYCLHGICQPNATPGPMCHCEAGWVGLHCDQPADGPCHGHKCVHGQCVPLDALSYSCQCQDGYSGALCNQSPSAGGTLSGTFTRSRGAMPSARPRAPCHGWSAGARAQARAAARAFG

SEQ ID NO: 7765 - protein, 110 aa, Artificial Sequence
  Synthetic polypeptide
QDPLRLNICPPCDPPTPTRPGRSGARAHLHPVLRLLPGHVHLQQWHRGLSWKRPHCHPGQPARDHDGDTPGAERHQVHPSWSLLTLQKATEDMPPLLLLTLQRPEQQSDR

SEQ ID NO: 7766 - protein, 548 aa, Artificial Sequence
  Synthetic polypeptide
GSTSVHPVTLQLLLGQGEAGRVPTCTLSSGSCPAMCTCSNGIVDCRGKGLTAIPANLPETMTEIRLELNGIKSIPPGAFSPYRKLRRICPLSFCSPCRDLSNNQIAEIAPDAFQGLRSLNSLVLYGNKITDLPRGVFGGLYTLQLLLLNANKINCIRPDAFQDLQNLSLLSLYDNKIQSLAKGTFTSLRAIQTLHLAQNPFICDCNLKWLADFLRTNPIETSGARCASPRRLANKRIGQIKSKKFRCSAKEQYFIPGTEDYQLNSECNSDVVCPHKCRCEANVVECSSLKLTKIPERIPQSTAELRLNNNEISILEATGMFKKLTHLKKINLSNNKVSEIEDGAFEGAASVSELHLTANQLESIRSGMFRGLDGLRTLMLRNNRISCIHNDSFTGLRNVRLLSLYDNQITTVSPGAFDTLQSLSTLNLLANPFNCNCQLAWLGGWLRKRKIVTGNPRCQNPDFLRQIPLQDVAFPDFRCEEGQEEGGCLPRPQCPQECACLDTVVRCSNKHLRALPKGIPKNVTELYLDGNQFTLVPGQLSTFKYLQL

SEQ ID NO: 7767 - protein, 159 aa, Artificial Sequence
  Synthetic polypeptide
GSTSVHPVTLQLLLGQGEAGRVPTCTLSSGSCPAMCTCSNGIVDCRGKGLTAIPANLPETMTEIRLELNGIKSIPPGAFSPYRKLRRIDLSNNQIAEIAPDAFQGLRSLNSLHTGPVTCPHTTGTHSSHCRAFAVAVPHSRNDLEAMFEEEVPRIFYSA

SEQ ID NO: 7768 - protein, 58 aa, Artificial Sequence
  Synthetic polypeptide
LFDLGLVTLSVSELLVSHLQKHEEWGWFVLVVSESPPELACWRLWHSSPCGQEGYAWG

SEQ ID NO: 7769 - protein, 58 aa, Artificial Sequence; identical to SEQ ID NO: 7768
  Synthetic polypeptide

SEQ ID NO: 7770 - protein, 58 aa, Artificial Sequence; identical to SEQ ID NO: 7768
  Synthetic polypeptide

SEQ ID NO: 7771 - protein, 58 aa, Artificial Sequence; identical to SEQ ID NO: 7768
  Synthetic polypeptide

SEQ ID NO: 7772 - protein, 109 aa, Artificial Sequence
  Synthetic polypeptide
FLICKNMRNGGGSCWSSQRVLLSWHAGGSGIHRPVAKKAMPGAEYKAKKAKGDVKKKGRPDPYAYIPLNRSKLNRRKKMKLQGQFKGLVKAARRGSQVGHKNRRKDRRP

SEQ ID NO: 7773 - protein, 109 aa, Artificial Sequence; identical to SEQ ID NO: 7772
  Synthetic polypeptide

SEQ ID NO: 7774 - protein, 109 aa, Artificial Sequence; identical to SEQ ID NO: 7772
  Synthetic polypeptide

SEQ ID NO: 7775 - protein, 109 aa, Artificial Sequence; identical to SEQ ID NO: 7772
  Synthetic polypeptide

SEQ ID NO: 7776 - protein, 31 aa, Artificial Sequence
  Synthetic polypeptide
AGMLEALAFIALWPRRLCLGLNTRPRKQKVM

SEQ ID NO: 7777 - protein, 31 aa, Artificial Sequence; identical to SEQ ID NO: 7776
  Synthetic polypeptide

SEQ ID NO: 7778 - protein, 31 aa, Artificial Sequence; identical to SEQ ID NO: 7776
  Synthetic polypeptide

SEQ ID NO: 7779 - protein, 31 aa, Artificial Sequence; identical to SEQ ID NO: 7776
  Synthetic polypeptide

SEQ ID NO: 7780 - protein, 143 aa, Artificial Sequence
  Synthetic polypeptide
KIVTKICAQCEMEHSADGLMEQMCSSDFVVKMRIKEIKIENGDRKLIGAQKKKKLLKPGPLKRKDTKRLVLHMKNGAGCPCPQLDSLAGSFLVMGRKVDGQLLLMAVYRWDKKNKEMKFAVKFMFSYPCSLYYPFFYGAAEPH

SEQ ID NO: 7781 - protein, 9 aa, Artificial Sequence
  Synthetic polypeptide
NSDQDLRPV

SEQ ID NO: 7782 - protein, 164 aa, Artificial Sequence
  Synthetic polypeptide
EVHNLQELRRSASLATKVFIQRDYSDGTICQFQTKFPPELDSRIERQLFEETVKTLNGFYAEAEKIGGSSYLEGCLACATAYFIFLCMETHYEKVLKKISRYIQEQNEKIFAPRGLLLTDPVERGMRVIEISIYEDRCSSGSSSSGSSSGSGSSSGGGGGAGAR

SEQ ID NO: 7783 - protein, 79 aa, Artificial Sequence
  Synthetic polypeptide
EVRRPSAWQLPRLRSEEPLRPAAAPSEKSTICRSSGEVPHWPPRSLSRETTAMGPSVSSRPNSPQSWTAGSSGSSLKRL

SEQ ID NO: 7784 - protein, 62 aa, Artificial Sequence
  Synthetic polypeptide
EVRSPSARQLPRLRSPQSAGAPAKCLTGHQGLYPERLQRWDHLSVPDQIPPRAGQPDRAAAL

SEQ ID NO: 7785 - protein, 62 aa, Artificial Sequence
  Synthetic polypeptide
EVRSPSARLTPRLGSPQSAGAPAKCLTGHQGLYPERLQRWDHLSVPDQIPPRAGQPDRAAAL

SEQ ID NO: 7786 - protein, 168 aa, Artificial Sequence
  Synthetic polypeptide
HPVWEVHNLQELRRSASLATKVFIQRDYSDGTICQFQTKFPPELDSRIERQLFEETVKTLNGFYAEAEKIGGSSYLEGCLACATAYFIFLCMETHYEKVLKKISRYIQEQNEKIFAPRGLLLTDPVERGMRVIEISIYEDRCSSGSSSSGSSSGSGSSSGGGGGAGAR

SEQ ID NO: 7787 - protein, 79 aa, Artificial Sequence
  Synthetic polypeptide
EVRSPSARQLPRLRSEEPLRPADTPSGKSTICRSSGEVPHWPPRSLSRETTAMGPSVSSRPNSPQSWTAGSSGSSLKRL

SEQ ID NO: 7788 - protein, 63 aa, Artificial Sequence
  Synthetic polypeptide
QKLVLPPPAARGMHVFFRLHIAIMVWTTPTSMGEVSPWLTSTVMAKWTSSMATGMAPTASICK

SEQ ID NO: 7789 - protein, 63 aa, Artificial Sequence; identical to SEQ ID NO: 7788
  Synthetic polypeptide

SEQ ID NO: 7790 - protein, 63 aa, Artificial Sequence; identical to SEQ ID NO: 7788
  Synthetic polypeptide

SEQ ID NO: 7791 - protein, 63 aa, Artificial Sequence; identical to SEQ ID NO: 7788
  Synthetic polypeptide

SEQ ID NO: 7792 - protein, 63 aa, Artificial Sequence; identical to SEQ ID NO: 7788
  Synthetic polypeptide

SEQ ID NO: 7793 - protein, 103 aa, Artificial Sequence
  Synthetic polypeptide
APGPQLCSSSFLCTHPPPTSGPLHLPWPLPGLPSPFSTCRTSFSLHRSPQISPLQRFSSLPVPPSRNWSFLLLLPVACTSSSGSTLPSWCGRPPPAWARCRPG

SEQ ID NO: 7794 - protein, 103 aa, Artificial Sequence; identical to SEQ ID NO: 7793
  Synthetic polypeptide

SEQ ID NO: 7795 - protein, 103 aa, Artificial Sequence; identical to SEQ ID NO: 7793
  Synthetic polypeptide

SEQ ID NO: 7796 - protein, 103 aa, Artificial Sequence; identical to SEQ ID NO: 7793
  Synthetic polypeptide

SEQ ID NO: 7797 - protein, 103 aa, Artificial Sequence; identical to SEQ ID NO: 7793
  Synthetic polypeptide

SEQ ID NO: 7798 - protein, 433 aa, Artificial Sequence
  Synthetic polypeptide
PQAPSCAPPPSSALIPHPPQGLCTCHGLCLDCPPPSLPAERRLAFIVHLKYHLCRDFPHSLCHLAETGPSSSCCPWHARLLQAPHCHHGVDDPHQHGRGVALADFNRDGKVDIVYGNWNGPHRLYLQMSTHGKVRFRDIASPKFSMPSPVRTVITADFDNDQELEIFFNNIAYRSSSANRLFRVIRREHGDPLIEELNPGDALEPEGRGTGGVVTDFDGDGMLDLILSHGESMAQPLSVFRGNQGFNNNWLRVVPRTRFGAFARGAKVVLYTKKSGAHLRIIDGGSGYLCEMEPVAHFGLGKDEASSVEVTWPDGKMVSRNVASGEMNSVLEILYPRDEDTLQDPAPLETPMNASSSHSCALETSPYVSTPMEATGAGPTRSAVGATSPTRMAQPAWGLSASHRAPAPPPPPLLLPLPLLLPLLELPLLHRSS

SEQ ID NO: 7799 - protein, 433 aa, Artificial Sequence; identical to SEQ ID NO: 7798
  Synthetic polypeptide

SEQ ID NO: 7800 - protein, 466 aa, Artificial Sequence
  Synthetic polypeptide
PQAPSCAPPPSSALIPHPPQGLCTCHGLCLDCPPPSLPAERRLAFIVHLKYHLCRDFPHSLCHLAETGPSSSCCPWHARLLQAPHCHHGVDDPHQHGRGVALADFNRDGKVDIVYGNWNGPHRLYLQMSTHGKVRFRDIASPKFSMPSPVRTVITADFDNDQELEIFFNNIAYRSSSANRLFRVIRREHGDPLIEELNPGDALEPEGRGTGGVVTDFDGDGMLDLILSHGESMAQPLSVFRGNQGFNNNWLRVVPRTRFGAFARGAKVVLYTKKSGAHLRIIDGGSGYLCEMEPVAHFGLGKDEASSVEVTWPDGKMVSRNVASGEMNSVLEILYPRDEDTLQDPAPLECGQGFSQQENGHCMDTNECIQFPFVCPRDKPVCVNTYGSYRCRTNKKCSRGYEPNEDGTACVGTLGQSPGPRPTTPTAAAATAAAAAAAGAATAAPVLVDGDLNLGSVVKESCEPSC

SEQ ID NO: 7801 - protein, 450 aa, Artificial Sequence
  Synthetic polypeptide
PQAPSCAPPPSSALIPHPPQGLCTCHGLCLDCPPPSLPAERRLAFIVHLKYHLCRDFPHSLCHLAETGPSSSCCPWHARLLQAPHCHHGVDDPHQHGRGVALADFNRDGKVDIVYGNWNGPHRLYLQMSTHGKVRFRDIASPKFSMPSPVRTVITADFDNDQELEIFFNNIAYRSSSANRLFRVIRREHGDPLIEELNPGDALEPEGRGTGGVVTDFDGDGMLDLILSHGESMAQPLSVFRGNQGFNNNWLRVVPRTRFGAFARGAKVVLYTKKSGAHLRIIDGGSGYLCEMEPVAHFGLGKDEASSVEVTWPDGKMVSRNVASGEMNSVLEILYPRDEDTLQDPAPLECGQGFSQQENGHCMDTNECIQFPFVCPRDKPVCVNTYGSYRCRTNKKCSRGYEPNEDGTACVAQVAFLGGYSSAASRISEPLSRASYLSLGLGLCLQLYAL

SEQ ID NO: 7802 - protein, 450 aa, Artificial Sequence; identical to SEQ ID NO: 7801
  Synthetic polypeptide

SEQ ID NO: 7803 - protein, 39 aa, Artificial Sequence
  Synthetic polypeptide
RSQDGRIGTAPVYSSQRERRRRRVISAFPSEFRRQHPPM

SEQ ID NO: 7804 - protein, 39 aa, Artificial Sequence; identical to SEQ ID NO: 7803
  Synthetic polypeptide

SEQ ID NO: 7805 - protein, 39 aa, Artificial Sequence; identical to SEQ ID NO: 7803
  Synthetic polypeptide

SEQ ID NO: 7806 - protein, 39 aa, Artificial Sequence; identical to SEQ ID NO: 7803
  Synthetic polypeptide

SEQ ID NO: 7807 - protein, 39 aa, Artificial Sequence; identical to SEQ ID NO: 7803
  Synthetic polypeptide

SEQ ID NO: 7808 - protein, 23 aa, Artificial Sequence
  Synthetic polypeptide
FLHFHLSSEDSTHQCKRKKWKKA

SEQ ID NO: 7809 - protein, 23 aa, Artificial Sequence
  Synthetic polypeptide
FLHFHLSSEDSTHQCKRKKWKKA

SEQ ID NO: 7810 - protein, 23 aa, Artificial Sequence
  Synthetic polypeptide
FLHFHLSSEDSTHQCKRKKWKKA

SEQ ID NO: 7811 - protein, 23 aa, Artificial Sequence
  Synthetic polypeptide
FLHFHLSSEDSTHQCKRKKWKKA

SEQ ID NO: 7812 - protein, 23 aa, Artificial Sequence
  Synthetic polypeptide
FLHFHLSSEDSTHQCKRKKWKKA

SEQ ID NO: 7813 - protein, 21 aa, Artificial Sequence
  Synthetic polypeptide
GQQIETILANMVLFLMDGNKP

SEQ ID NO: 7814 - protein, 21 aa, Artificial Sequence
  Synthetic polypeptide
GQQIETILANMVLFLMDGNKP

SEQ ID NO: 7815 - protein, 21 aa, Artificial Sequence
  Synthetic polypeptide
GQQIETILANMVLFLMDGNKP

SEQ ID NO: 7816 - protein, 21 aa, Artificial Sequence
  Synthetic polypeptide
GQQIETILANMVLFLMDGNKP

SEQ ID NO: 7817 - protein, 30 aa, Artificial Sequence
  Synthetic polypeptide
SRHSQHFGRPTRADHEVNRSRPSWPTWSSS

SEQ ID NO: 7818 - protein, 30 aa, Artificial Sequence; identical to SEQ ID NO: 7817
  Synthetic polypeptide

SEQ ID NO: 7819 - protein, 30 aa, Artificial Sequence; identical to SEQ ID NO: 7817
  Synthetic polypeptide

SEQ ID NO: 7820 - protein, 30 aa, Artificial Sequence; identical to SEQ ID NO: 7817
  Synthetic polypeptide

SEQ ID NO: 7821 - protein, 307 aa, Artificial Sequence
  Synthetic polypeptide
PGVVADHATPSTLGGQRGQIMRSTDRDHPGQHGPLPDGWEQAMTQDGEIYYINHKNKTTSWLDPRLDPRFAMNQRISQSAPVKQPPPLAPQSPQGGVMGGSNSNQQQQMRLQQLQMEKERLRLKQQELLRQAMRNINPSTANSPKCQELALRSQLPTLEQDGGTQNPVSSPGMSQELRTMTTNSSDPFLNSGTYHSRDESTDSGLSMSSYSVPRTPDDFLNSVDEMDTGDTINQSTLPSQQNRFPDYLEAIPGTNVDLGTLEGDGMNIEGEELMPSLQEALSSDILNDMESVLAATKLDKESFLTWL

SEQ ID NO: 7822 - protein, 307 aa, Artificial Sequence; identical to SEQ ID NO: 7821
  Synthetic polypeptide

SEQ ID NO: 7823 - protein, 295 aa, Artificial Sequence
  Synthetic polypeptide
PGVVADHATPSTLGGQRGQIMRSTDRDHPGQHGPLPDGWEQAMTQDGEIYYINHKNKTTSWLDPRLDPRFAMNQRISQSAPVKQPPPLAPQSPQGGVMGGSNSNQQQQMRLQQLQMEKERLRLKQQELLRQVRPQELALRSQLPTLEQDGGTQNPVSSPGMSQELRTMTTNSSDPFLNSGTYHSRDESTDSGLSMSSYSVPRTPDDFLNSVDEMDTGDTINQSTLPSQQNRFPDYLEAIPGTNVDLGTLEGDGMNIEGEELMPSLQEALSSDILNDMESVLAATKLDKESFLTWL

SEQ ID NO: 7824 - protein, 291 aa, Artificial Sequence
  Synthetic polypeptide
PGVVADHATPSTLGGQRGQIMRSTDRDHPGQHGPLPDGWEQAMTQDGEIYYINHKNKTTSWLDPRLDPRFAMNQRISQSAPVKQPPPLAPQSPQGGVMGGSNSNQQQQMRLQQLQMEKERLRLKQQELLRQELALRSQLPTLEQDGGTQNPVSSPGMSQELRTMTTNSSDPFLNSGTYHSRDESTDSGLSMSSYSVPRTPDDFLNSVDEMDTGDTINQSTLPSQQNRFPDYLEAIPGTNVDLGTLEGDGMNIEGEELMPSLQEALSSDILNDMESVLAATKLDKESFLTWL

SEQ ID NO: 7825 - protein, 67 aa, Artificial Sequence
  Synthetic polypeptide
ASHEPENQSECSSETATTPGSPEPTGRRHGWQQLQPAATDATAATADGEGEAAAETARTASAGVSPA

SEQ ID NO: 7826 - protein, 67 aa, Artificial Sequence; identical to SEQ ID NO: 7825
  Synthetic polypeptide

SEQ ID NO: 7827 - protein, 222 aa, Artificial Sequence
  Synthetic polypeptide
PAMNQRISQSAPVKQPPPLAPQSPQGGVMGGSNSNQQQQMRLQQLQMEKERLRLKQQELLRQELALRSQLPTLEQDGGTQNPVSSPGMSQELRTMTTNSSDPFLNSGTYHSRDESTDSGLSMSSYSVPRTPDDFLNSVDEMDTGDTINQSTLPSQQNRFPDYLEAIPGTNVDLGTLEGDGMNIEGEELMPSLQEALSSDILNDMESVLAATKLDKESFLTWL

SEQ ID NO: 7828 - protein, 222 aa, Artificial Sequence; identical to SEQ ID NO: 7827
  Synthetic polypeptide

SEQ ID NO: 7829 - protein, 2 aa, Artificial Sequence
  Synthetic polypeptide
QP

SEQ ID NO: 7830 - protein, 2 aa, Artificial Sequence
  Synthetic polypeptide
QP

SEQ ID NO: 7831 - protein, 2 aa, Artificial Sequence
  Synthetic polypeptide
QP

SEQ ID NO: 7832 - protein, 2 aa, Artificial Sequence
  Synthetic polypeptide
QP

SEQ ID NO: 7833 - protein, 2 aa, Artificial Sequence
  Synthetic polypeptide
QP

SEQ ID NO: 7834 - protein, 2 aa, Artificial Sequence
  Synthetic polypeptide
QP

SEQ ID NO: 7835 - protein, 2 aa, Artificial Sequence
  Synthetic polypeptide
QP

SEQ ID NO: 7836 - protein, 83 aa, Artificial Sequence
  Synthetic polypeptide
ASHEPENQSECSSETATTPGSPEPTGRRHGWQQLQPAATDATAATADGEGEAAAETARTASAGNAEYQSQHSKFSKMSGVSPA

SEQ ID NO: 7837 - protein, 83 aa, Artificial Sequence; identical to SEQ ID NO: 7836
  Synthetic polypeptide

SEQ ID NO: 7838 - protein, 238 aa, Artificial Sequence
  Synthetic polypeptide
PAMNQRISQSAPVKQPPPLAPQSPQGGVMGGSNSNQQQQMRLQQLQMEKERLRLKQQELLRQAMRNINPSTANSPKCQELALRSQLPTLEQDGGTQNPVSSPGMSQELRTMTTNSSDPFLNSGTYHSRDESTDSGLSMSSYSVPRTPDDFLNSVDEMDTGDTINQSTLPSQQNRFPDYLEAIPGTNVDLGTLEGDGMNIEGEELMPSLQEALSSDILNDMESVLAATKLDKESFLTWL

SEQ ID NO: 7839 - protein, 238 aa, Artificial Sequence; identical to SEQ ID NO: 7838
  Synthetic polypeptide

SEQ ID NO: 7840 - protein, 71 aa, Artificial Sequence
  Synthetic polypeptide
ASHEPENQSECSSETATTPGSPEPTGRRHGWQQLQPAATDATAATADGEGEAAAETARTASAGEATGVSPA

SEQ ID NO: 7841 - protein, 71 aa, Artificial Sequence; identical to SEQ ID NO: 7840
  Synthetic polypeptide

SEQ ID NO: 7842 - protein, 226 aa, Artificial Sequence
  Synthetic polypeptide
PAMNQRISQSAPVKQPPPLAPQSPQGGVMGGSNSNQQQQMRLQQLQMEKERLRLKQQELLRQVRPQELALRSQLPTLEQDGGTQNPVSSPGMSQELRTMTTNSSDPFLNSGTYHSRDESTDSGLSMSSYSVPRTPDDFLNSVDEMDTGDTINQSTLPSQQNRFPDYLEAIPGTNVDLGTLEGDGMNIEGEELMPSLQEALSSDILNDMESVLAATKLDKESFLTWL

SEQ ID NO: 7843 - protein, 226 aa, Artificial Sequence; identical to SEQ ID NO: 7842
  Synthetic polypeptide

SEQ ID NO: 7844 - protein, 87 aa, Artificial Sequence
  Synthetic polypeptide
ASHEPENQSECSSETATTPGSPEPTGRRHGWQQLQPAATDATAATADGEGEAAAETARTASAGEATGNAEYQSQHSKFSKMSGVSPA

SEQ ID NO: 7845 - protein, 242 aa, Artificial Sequence
  Synthetic polypeptide
PAMNQRISQSAPVKQPPPLAPQSPQGGVMGGSNSNQQQQMRLQQLQMEKERLRLKQQELLRQVRPQAMRNINPSTANSPKCQELALRSQLPTLEQDGGTQNPVSSPGMSQELRTMTTNSSDPFLNSGTYHSRDESTDSGLSMSSYSVPRTPDDFLNSVDEMDTGDTINQSTLPSQQNRFPDYLEAIPGTNVDLGTLEGDGMNIEGEELMPSLQEALSSDILNDMESVLAATKLDKESFLTWL

SEQ ID NO: 7846 - protein, 188 aa, Artificial Sequence
  Synthetic polypeptide
NQQSPIYSIPTSPSIYHSFLCPSVTLFQTLWASCETLCAPCQINKSSGIVEASRIMNLYQFIQLYKDITSQAAGVLAQSSTSEEPDENSSSVTSCQASLWMGRVKQLTDEEECCICMDGRADLILPCAHSFCQKCIDKWSDRHRNCPICRLQMTGANESWVVSDAPTEDDMANYILNMADEAGQPHRP

SEQ ID NO: 7847 - protein, 81 aa, Artificial Sequence
  Synthetic polypeptide
IILLLGSKPPPVTSHALGIKATVITEISKVLYILFPPHRLSTTPSSVRLSLCSKHSGLLVRLSVLLARLTKAVALWRHHGS

SEQ ID NO: 7848 - protein, 81 aa, Artificial Sequence; identical to SEQ ID NO: 7847
  Synthetic polypeptide

SEQ ID NO: 7849 - protein, 81 aa, Artificial Sequence; identical to SEQ ID NO: 7847
  Synthetic polypeptide

SEQ ID NO: 7850 - protein, 8 aa, Artificial Sequence
  Synthetic polypeptide
DSLCSLPD

SEQ ID NO: 7851 - protein, 8 aa, Artificial Sequence
  Synthetic polypeptide
DSLCSLPD

SEQ ID NO: 7852 - protein, 8 aa, Artificial Sequence
  Synthetic polypeptide
DSLCSLPD

SEQ ID NO: 7853 - protein, 139 aa, Artificial Sequence
  Synthetic polypeptide
NQQSPIYSIPTSPSIYHSFLCPSVTLFQTLWASCETLCAPCQINKSSGIVEASRIMNLYQFIQLYKDITSQAAGVLAQSSTSEEPDENSSSVTSCQASLWMGRVKQLTDEEECCICMDGRADLILPCAHSFCQKCIDKW

SEQ ID NO: 7854 - protein, 138 aa, Artificial Sequence
  Synthetic polypeptide
NQQSPIYSIPTSPSIYHSFLCPSVTLFQTLWASCETLCAPCQINKSSGIVEASRIMNLYQFIQLYKDITSQAAGVLAQSSTSEEPDENSSSVTSCQASLWMGRVKQLTDEEECCICMDGRADLILPCAHSFCQKCIDK

SEQ ID NO: 7855 - protein, 28 aa, Artificial Sequence
  Synthetic polypeptide
DQLGSGHSKCYKNTHWIFFRQPFLAASH

SEQ ID NO: 7856 - protein, 28 aa, Artificial Sequence
  Synthetic polypeptide
DQLGSGHSKCYKNTHWIFFRQPFLAASH

SEQ ID NO: 7857 - protein, 28 aa, Artificial Sequence
  Synthetic polypeptide
DQLGSGHSKCYKNTHWIFFRQPFLAASH

SEQ ID NO: 7858 - protein, 395 aa, Artificial Sequence
  Synthetic polypeptide
AQEFETSLEVVIVSATRTPIGSFLGSLSLLPATKLGSIAIQGAIEKAGIPKEEVKEAYMGNVLQGGEGQAPTRQAVLGAGLPISTPCTTINKVCASGMKAIMMASQSLMCGHQDVMVAGGMESMSNVPYVMNRGSTPYGGVKLEDLIVKDGLTDVYNKIHMGSCAENTAKKLNIARNEQDAYAINSYTRSKAAWEAGKFGNEVIPVTVTVKGQPDVVVKEDEEYKRVDFSKVPKLKTVFQKENGTVTAANASTLNDGAAALVLMTADAAKRLNVTPLARIVAFADAAVEPIDFPIAPVYAASMVLKDVGLKKEDIAMWEVNEAFSLVVLANIKMLEIDPQKVNINGGAVSLGHPIGMSGARIVGHLTHALKQGEYGLASICNGGGGASAMLIQKL

SEQ ID NO: 7859 - protein, 33 aa, Artificial Sequence
  Synthetic polypeptide
RAQWLTPVIPALWKANAGGSLEPRSLRPAWKWS

SEQ ID NO: 7860 - protein, 33 aa, Artificial Sequence; identical to SEQ ID NO: 7859
  Synthetic polypeptide

SEQ ID NO: 7861 - protein, 33 aa, Artificial Sequence; identical to SEQ ID NO: 7859
  Synthetic polypeptide

SEQ ID NO: 7862 - protein, 130 aa, Artificial Sequence
  Synthetic polypeptide
AQEFETSLEVVIVSATRTPIGSFLGSLSLLPATKLGSIAIQGAIEKAGIPKEEVKEAYMGNVLQGGEGQAPTRQAVLGAGLPISTPCTTINKVCASGMKAIMMASQSLMCGHQIKQETGSLAKICCHVRR

SEQ ID NO: 7863 - protein, 109 aa, Artificial Sequence
  Synthetic polypeptide
AQEFETSLEVVIVSATRTPIGSFLGSLSLLPATKLGSIAIQGAIEKAGIPKEEVKEAYMGNVLQGGEGQAPTRQAVLGAGCDGGRWDGEHVQCSICNEQRINTIWWGKA

SEQ ID NO: 7864 - protein, 149 aa, Artificial Sequence
  Synthetic polypeptide
VESPCVEVICRDLKLGFGTDCLTCLTCSEDKITVHFINRDGETLTTKGKVGDSLLDVVVENNLDIDGFGACEGTLACSTCHLIFEDHIYEKLDAITDEENDMLDLAYGLTDRSRLGCQICLTKSMDNMTVRVPETVADARQSIDVGKTS

SEQ ID NO: 7865 - protein, 6 aa, Artificial Sequence
  Synthetic polypeptide
LAQKIK

SEQ ID NO: 7866 - protein, 10 aa, Artificial Sequence
  Synthetic polypeptide
LSDVPNLLRR

SEQ ID NO: 7867 - protein, 132 aa, Artificial Sequence
  Synthetic polypeptide
RINELIQRYSSEDKITVHFINRDGETLTTKGKVGDSLLDVVVENNLDIDGFGACEGTLACSTCHLIFEDHIYEKLDAITDEENDMLDLAYGLTDRSRLGCQICLTKSMDNMTVRVPETVADARQSIDVGKTS

SEQ ID NO: 7868 - protein, 9 aa, Artificial Sequence
  Synthetic polypeptide
YSDTAQKIK

SEQ ID NO: 7869 - protein, 9 aa, Artificial Sequence
  Synthetic polypeptide
VNTAIQLRR

SEQ ID NO: 7870 - protein, 118 aa, Artificial Sequence
  Synthetic polypeptide
FTDLTSCFTSLLGNLTYLKQLLPFFLLMKPVLPRVFPTSVMSTTRLLEPETVEHHSFLFLPNLTSSPSAPPASCAPKIRLQHVLLAPSLQSARGAGQPLGAWSCANLLLLWSLTARCM

SEQ ID NO: 7871 - protein, 83 aa, Artificial Sequence
  Synthetic polypeptide
QPGACEGTLACSTCHLIFEDHIYEKLDAITDEENDMLDLAYGLTDRSRLGCQICLTKSMDNMTVRVPETVADARQSIDVGKTS

SEQ ID NO: 7872 - protein, 33 aa, Artificial Sequence
  Synthetic polypeptide
PASALEFNSQVHVREPWLVQPVTSSLKITYMRS

SEQ ID NO: 7873 - protein, 45 aa, Artificial Sequence
  Synthetic polypeptide
ASDSLYVRSRLGCQICLTKSMDNMTVRVPETVADARQSIDVGKTS

SEQ ID NO: 7874 - protein, 28 aa, Artificial Sequence
  Synthetic polypeptide
LRFLICKITVGLPNLFDKIYGQYDCSSA

SEQ ID NO: 7875 - protein, 405 aa, Artificial Sequence
  Synthetic polypeptide
GRFQDGRIRTAPVHSSQHERRRRRMISAFPTETLDGHMVVRSHARVSSLTLKSIQYTDAGEYICTASNTIGQDSQSMYLEVQYAPKLQGPVAVYTWEGNQVNITCEVFAYPSATISWFRDGQLLPSSNYSNIKIYNTPSASYLEVTPDSENDFGNYNCTAVNRIGQESLEFILVQADTPSSPSIDQVEPYSSTAQVQFDEPEATGGVPILKYKAEWRAVGEEVWHSKWYDAKEASMEGIVTIVGLKPETTYAVRLAALNGKGLGEISAASEFKTQPVQGEPSAPKLEGQMGEDGNSIKVNLIKQDDGGSPIRHYLVRYRALSSEWKPEIRLPSGSDHVMLKSLDWNAEYEVYVVAENQQGKSKAAHFVFRTSAQPTAIPATLGGNSASYTFVSLLFSAVTLLLLC

SEQ ID NO: 7876 - protein, 23 aa, Artificial Sequence
  Synthetic polypeptide
FLHFQLRLWMGTWWCVAMPVCRR

SEQ ID NO: 7877 - protein, 23 aa, Artificial Sequence
  Synthetic polypeptide
FLHFQLRLWMGTWWCVAMPVCRR

SEQ ID NO: 7878 - protein, 23 aa, Artificial Sequence
  Synthetic polypeptide
FLHFQLRLWMGTWWCVAMPVCRR

SEQ ID NO: 7879 - protein, 23 aa, Artificial Sequence
  Synthetic polypeptide
FLHFQLRLWMGTWWCVAMPVCRR

SEQ ID NO: 7880 - protein, 23 aa, Artificial Sequence
  Synthetic polypeptide
FLHFQLRLWMGTWWCVAMPVCRR

SEQ ID NO: 7881 - protein, 527 aa, Artificial Sequence
  Synthetic polypeptide
GRFQDGRIRTAPVHSSQHERRRRRMISAFPTETLDGHMVVRSHARVSSLTLKSIQYTDAGEYICTASNTIGQDSQSMYLEVQYAPKLQGPVAVYTWEGNQVNITCEVFAYPSATISWFRDGQLLPSSNYSNIKIYNTPSASYLEVTPDSENDFGNYNCTAVNRIGQESLEFILVQADTPSSPSIDQVEPYSSTAQVQFDEPEATGGVPILKYKAEWRAVGEEVWHSKWYDAKEASMEGIVTIVGLKPETTYAVRLAALNGKGLGEISAASEFKTQPVQGEPSAPKLEGQMGEDGNSIKVNLIKQDDGGSPIRHYLVRYRALSSEWKPEIRLPSGSDHVMLKSLDWNAEYEVYVVAENQQGKSKAAHFVFRTSAQPTAIPANGSPTSGLSTGAIVGILIVIFVLLLVVVDITCYFLNKCGLFMCIAVNLCGKAGPGAKGKDMEEGKAAFSKDESKEPIVEVRTEEERTPNHDGGKHTEPNETTPLTEPEKGPVEAKPECQETETKPAPAEVKTVPNDATQTKENESKA

SEQ ID NO: 7882 - protein, 440 aa, Artificial Sequence
  Synthetic polypeptide
GRFQDGRIRTAPVHSSQHERRRRRMISAFPTETLDGHMVVRSHARVSSLTLKSIQYTDAGEYICTASNTIGQDSQSMYLEVQYAPKLQGPVAVYTWEGNQVNITCEVFAYPSATISWFRDGQLLPSSNYSNIKIYNTPSASYLEVTPDSENDFGNYNCTAVNRIGQESLEFILVQADTPSSPSIDQVEPYSSTAQVQFDEPEATGGVPILKYKAEWRAVGEEVWHSKWYDAKEASMEGIVTIVGLKPETTYAVRLAALNGKGLGEISAASEFKTQPVHSPPPPASASSSTPVPLSPPDTTWPLPALATTEPAKGEPSAPKLEGQMGEDGNSIKVNLIKQDDGGSPIRHYLVRYRALSSEWKPEIRLPSGSDHVMLKSLDWNAEYEVYVVAENQQGKSKAAHFVFRTSAQPTAIPATLGGNSASYTFVSLLFSAVTLLLLC

SEQ ID NO: 7883 - protein, 334 aa, Artificial Sequence
  Synthetic polypeptide
GRFQDGRIRTAPVHSSQHERRRRRMISAFPTETLDGHMVVRSHARVSSLTLKSIQYTDAGEYICTASNTIGQDSQSMYLEVQYAPKLQGPVAVYTWEGNQVNITCEVFAYPSATISWFRDGQLLPSSNYSNIKIYNTPSASYLEVTPDSENDFGNYNCTAVNRIGQESLEFILVQADTPSSPSIDQVEPYSSTAQVQFDEPEATGGVPILKYKAEWRAVGEEVWHSKWYDAKEASMEGIVTIVGLKPETTYAVRLAALNGKGLGEISAASEFKTQPVQAPPPTASASSSTPVPLSPPDTTWPLPALATTEPAKNIAQNHCCNMFQAGLHNALMK

SEQ ID NO: 7884 - protein, 527 aa, Artificial Sequence
  Synthetic polypeptide
GRFQDGRIRTAPVHSSQHERRRRRMISAFPTETLDGHMVVRSHARVSSLTLKSIQYTDAGEYICTASNTIGQDSQSMYLEVQYAPKLQGPVAVYTWEGNQVNITCEVFAYPSATISWFRDGQLLPSSNYSNIKIYNTPSASYLEVTPDSENDFGNYNCTAVNRIGQESLEFILVQADTPSSPSIDQVEPYSSTAQVQFDEPEATGGVPILKYKAEWRAVGEEVWHSKWYDAKEASMEGIVTIVGLKPETTYAVRLAALNGKGLGEISAASEFKTQPVPGEPSAPKLEGQMGEDGNSIKVNLIKQDDGGSPIRHYLVRYRALSSEWKPEIRLPSGSDHVMLKSLDWNAEYEVYVVAENQQGKSKAAHFVFRTSAQPTAIPANGSPTSGLSTGAIVGILIVIFVLLLVVVDITCYFLNKCGLFMCIAVNLCGKAGPGAKGKDMEEGKAAFSKDESKEPIVEVRTEEERTPNHDGGKHTEPNETTPLTEPEKGPVEAKPECQETETKPAPAEVKTVPNDATQTKENESKA

SEQ ID NO: 7885 - protein, 45 aa, Artificial Sequence
  Synthetic polypeptide
KDEFMSFVGTWMKLETIVLSKVSQGQKTKHCMFSLIDSGWAHGGA

SEQ ID NO: 7886 - protein, 45 aa, Artificial Sequence; identical to SEQ ID NO: 7885
  Synthetic polypeptide

SEQ ID NO: 7887 - protein, 45 aa, Artificial Sequence; identical to SEQ ID NO: 7885
  Synthetic polypeptide

SEQ ID NO: 7888 - protein, 45 aa, Artificial Sequence; identical to SEQ ID NO: 7885
  Synthetic polypeptide

SEQ ID NO: 7889 - protein, 45 aa, Artificial Sequence; identical to SEQ ID NO: 7885
  Synthetic polypeptide

SEQ ID NO: 7890 - protein, 50 aa, Artificial Sequence
  Synthetic polypeptide
VYVLCRDMDEAGNHRSQQSIPRTKNQTLHVLTHRLWMGTWWCVAMPVCRR

SEQ ID NO: 7891 - protein, 50 aa, Artificial Sequence; identical to SEQ ID NO: 7890
  Synthetic polypeptide

SEQ ID NO: 7892 - protein, 50 aa, Artificial Sequence; identical to SEQ ID NO: 7890
  Synthetic polypeptide

SEQ ID NO: 7893 - protein, 50 aa, Artificial Sequence; identical to SEQ ID NO: 7890
  Synthetic polypeptide

SEQ ID NO: 7894 - protein, 50 aa, Artificial Sequence; identical to SEQ ID NO: 7890
  Synthetic polypeptide

SEQ ID NO: 7895 - protein, 32 aa, Artificial Sequence
  Synthetic polypeptide
IVTPDGLSPPLDERVLHEQSADPCGHSEPHRG

SEQ ID NO: 7896 - protein, 104 aa, Artificial Sequence
  Synthetic polypeptide
MNVYYTSSQQIHVGILSPTVDDDDNRCLVDVNSRPRLIECSYAKAKRMKLHWQFSQGGPIQNRKSKRCLELQENSDLEFGFQLVLQKCSGQHWSITNVLRSLAS

SEQ ID NO: 7897 - protein, 31 aa, Artificial Sequence
  Synthetic polypeptide
PFWKTIRLFLAKLFNLAVALLESRVQRRRRS

SEQ ID NO: 7898 - protein, 31 aa, Artificial Sequence; identical to SEQ ID NO: 7897
  Synthetic polypeptide

SEQ ID NO: 7899 - protein, 25 aa, Artificial Sequence
  Synthetic polypeptide
QLHSLSQGSREGGEVETGGQAGAEV

SEQ ID NO: 7900 - protein, 25 aa, Artificial Sequence
  Synthetic polypeptide
QLHSLSQGSREGGEVETGGQAGAEV

SEQ ID NO: 7901 - protein, 162 aa, Artificial Sequence
  Synthetic polypeptide
VITGLMLSPATHPSTISMRVKGPEKEEKLRQAVKQVLKCDVTQSQPLGAVPLPPADCVLSTLCLDAACPDLPTYCRALRNLGSLLKPGGFLVIMDALKSSYYMIGEQKFSSLPLGREAVEAAVKEAGYTIEWFEVISQSYSSTMANNEGLFSLVARKLSRPL

SEQ ID NO: 7902 - protein, 162 aa, Artificial Sequence; identical to SEQ ID NO: 7901
  Synthetic polypeptide

SEQ ID NO: 7903 - protein, 70 aa, Artificial Sequence
  Synthetic polypeptide
SSRSRGAPNISPLVPCSFPSLHLSVLISTPMSDHWVNAFSRHPPVYNLHESQGSREGGEVETGGQAGAEV

SEQ ID NO: 7904 - protein, 70 aa, Artificial Sequence; identical to SEQ ID NO: 7903
  Synthetic polypeptide

SEQ ID NO: 7905 - protein, 9 aa, Artificial Sequence
  Synthetic polypeptide
QALDDRIGH

SEQ ID NO: 7906 - protein, 9 aa, Artificial Sequence
  Synthetic polypeptide
QALDDRIGH

SEQ ID NO: 7907 - protein, 9 aa, Artificial Sequence
  Synthetic polypeptide
QALDDRIGH

SEQ ID NO: 7908 - protein, 9 aa, Artificial Sequence
  Synthetic polypeptide
QALDDRIGH

SEQ ID NO: 7909 - protein, 9 aa, Artificial Sequence
  Synthetic polypeptide
QALDDRIGH

SEQ ID NO: 7910 - protein, 9 aa, Artificial Sequence
  Synthetic polypeptide
QALDDRIGH

SEQ ID NO: 7911 - protein, 9 aa, Artificial Sequence
  Synthetic polypeptide
QALDDRIGH

SEQ ID NO: 7912 - protein, 210 aa, Artificial Sequence
  Synthetic polypeptide
QFYLLCICPGVESQCLTNSRPLMTGLDIEKDQIIEMACLITDSDLNILAEGPNLIIKQPDELLDSMSDWCKEHHGKSGLTKAVKESTITLQQAEYEFLSFVRQQTPPGLCPLAGNSVHEDKKFLDKYMPQFMKHLHYRIIDVSTVKELCRRWYPEEYEFAPKKAASHRALDDISESIKELQFYRNNIFKKKIDEKKRKIIENGENEKTVS

SEQ ID NO: 7913 - protein, 210 aa, Artificial Sequence; identical to SEQ ID NO: 7912
  Synthetic polypeptide

SEQ ID NO: 7914 - protein, 58 aa, Artificial Sequence
  Synthetic polypeptide
QFYLLCICPGVESQCLTNSRPLMTGLDIEKDQIIEMACLITDSDLNILAEVKEVRTYF

SEQ ID NO: 7915 - protein, 195 aa, Artificial Sequence
  Synthetic polypeptide
QFYLLCICPGVESQCLTNSRPLMTGLDIEKDQIIEMACLITDSDLNILAEGPNLIIKQPDELLDSMSDWCKEHHGKQAEYEFLSFVRQQTPPGLCPLAGNSVHEDKKFLDKYMPQFMKHLHYRIIDVSTVKELCRRWYPEEYEFAPKKAASHRALDDISESIKELQFYRNNIFKKKIDEKKRKIIENGENEKTVS

SEQ ID NO: 7916 - protein, 52 aa, Artificial Sequence
  Synthetic polypeptide
QFYLLCICPGVESQCLTNSRPLMTGLDIEKDQIIEMACLITDSDLNILAEGT

SEQ ID NO: 7917 - protein, 94 aa, Artificial Sequence
  Synthetic polypeptide
QFYLLCICPGVESQCLTNSRPLMTGLDIEKDQIIEMACLITDSDLNILAEGPNLIIKQPDELLDSMSDWCKEHHGKEIQFMKIRSFLTNTCPSS

SEQ ID NO: 7918 - protein, 68 aa, Artificial Sequence
  Synthetic polypeptide
QFYLLCICPGVESQCLTNSRPLMTGLDIEKDQIIEMACLITDSDLNILAEEIQFMKIRSFLTNTCPSS

SEQ ID NO: 7919 - protein, 62 aa, Artificial Sequence
  Synthetic polypeptide
GCHNGGSPKGDVDPFYYDYETVRNGGLIFAGLAFIVGLLILLSRRFRCGGNKKRRQINEDEP

SEQ ID NO: 7920 - protein, 62 aa, Artificial Sequence; identical to SEQ ID NO: 7919
  Synthetic polypeptide

SEQ ID NO: 7921 - protein, 62 aa, Artificial Sequence; identical to SEQ ID NO: 7919
  Synthetic polypeptide

SEQ ID NO: 7922 - protein, 62 aa, Artificial Sequence; identical to SEQ ID NO: 7919
  Synthetic polypeptide

SEQ ID NO: 7923 - protein, 65 aa, Artificial Sequence
  Synthetic polypeptide
FLGSNTSSTPDLLYNCGGISSLHFHPLVDYTRMTLTPHKVAIMAAAPRGTWTRSTMTMRPFAMGA

SEQ ID NO: 7924 - protein, 65 aa, Artificial Sequence; identical to SEQ ID NO: 7923
  Synthetic polypeptide

SEQ ID NO: 7925 - protein, 65 aa, Artificial Sequence; identical to SEQ ID NO: 7923
  Synthetic polypeptide

SEQ ID NO: 7926 - protein, 65 aa, Artificial Sequence; identical to SEQ ID NO: 7923
  Synthetic polypeptide

SEQ ID NO: 7927 - protein, 26 aa, Artificial Sequence
  Synthetic polypeptide
GCHNGGSPKGDVDPFYYGRRFRCGGN

SEQ ID NO: 7928 - protein, 65 aa, Artificial Sequence
  Synthetic polypeptide
FLGSNTSSTPDLLYNCGGISSLHFHPLVDYTRMTLTPHKVAIMAAAPRGTWTRSTMAEDSAVGAI

SEQ ID NO: 7929 - protein, 338 aa, Artificial Sequence
  Synthetic polypeptide
AVKRKAITIMDEYVLYYYSNLSVPIGRFQNRVHLMGDILCNDGSLLLQDVQEADQGTYICEIRLKGESQVFKKAVVLHVLPEEPKELMVHVGGLIQMGCVFQSTEVKHVTKVEWIFSGRRAKEEIVFRYYHKLRMSVEYSQSWGHFQNRVNLVGDIFRNDGSIMLQGVRESDGGNYTCSIHLGNLVFKKTIVLHVSPEEPRTLVTPAALRPLVLGGNQLVIIVGIVCATILLLPVLILIVKKTCGNKSSVNSTVLVKNTKKTNPEIKEKPCHFERCEGEKHIYSPIIVREVIEEEEPSEKSEATYMTMHPVWPSLRSDRNNSLEKKSGGGMPKTQQAF

SEQ ID NO: 7930 - protein, 338 aa, Artificial Sequence; identical to SEQ ID NO: 7929
  Synthetic polypeptide

SEQ ID NO: 7931 - protein, 338 aa, Artificial Sequence; identical to SEQ ID NO: 7929
  Synthetic polypeptide

SEQ ID NO: 7932 - protein, 78 aa, Artificial Sequence
  Synthetic polypeptide
EPGLWRLSELGLVLAQEFGYVISWVSKLLNLADLSFLSCEEEGNYNNGRICAILLLQSQCAYWALPEPRTLDGGHLMQ

SEQ ID NO: 7933 - protein, 78 aa, Artificial Sequence; identical to SEQ ID NO: 7932
  Synthetic polypeptide

SEQ ID NO: 7934 - protein, 78 aa, Artificial Sequence; identical to SEQ ID NO: 7932
  Synthetic polypeptide

SEQ ID NO: 7935 - protein, 78 aa, Artificial Sequence; identical to SEQ ID NO: 7932
  Synthetic polypeptide

SEQ ID NO: 7936 - protein, 78 aa, Artificial Sequence; identical to SEQ ID NO: 7932
  Synthetic polypeptide

SEQ ID NO: 7937 - protein, 78 aa, Artificial Sequence; identical to SEQ ID NO: 7932
  Synthetic polypeptide

SEQ ID NO: 7938 - protein, 78 aa, Artificial Sequence; identical to SEQ ID NO: 7932
  Synthetic polypeptide

SEQ ID NO: 7939 - protein, 78 aa, Artificial Sequence; identical to SEQ ID NO: 7932
  Synthetic polypeptide

SEQ ID NO: 7940 - protein, 327 aa, Artificial Sequence
  Synthetic polypeptide
AVKRKAITIMDEYVLYYYSNLSVPIGRFQNRVHLMGDILCNDGSLLLQDVQEADQGTYICEIRLKGESQVFKKAVVLHVLPEEPKELMVHVGGLIQMGCVFQSTEVKHVTKEEIVFRYYHKLRMSVEYSQSWGHFQNRVNLVGDIFRNDGSIMLQGVRESDGGNYTCSIHLGNLVFKKTIVLHVSPEEPRTLVTPAALRPLVLGGNQLVIIVGIVCATILLLPVLILIVKKTCGNKSSVNSTVLVKNTKKTNPEIKEKPCHFERCEGEKHIYSPIIVREVIEEEEPSEKSEATYMTMHPVWPSLRSDRNNSLEKKSGGGMPKTQQAF

SEQ ID NO: 7941 - protein, 288 aa, Artificial Sequence
  Synthetic polypeptide
AVKRKAITIMDEYVLYYYSNLSVPIGRFQNRVHLMGDILCNDGSLLLQDVQEADQGTYICEIRLKGESQVFKKAVVLHVLPEEPKELMVHVGGLIQMGCVFQSTEVKHVTKVEWIFSGRRAKEEIVFRYYHKLRMSVEYSQSWGHFQNRVNLVGDIFRNDGSIMLQGVRESDGGNYTCSIHLGNLVFKKTIVLHVSPEEPRTLVTPAALRPLVLGGNQLVIIVGIVCATILLLPVLILIVKKTCGNKSSVNSTVLVKNTKKTNPEIKEKPCHFERCEGEVNTRFSLKH

SEQ ID NO: 7942 - protein, 103 aa, Artificial Sequence
  Synthetic polypeptide
AVKRKAITIMDEYVLYYYSNLSVPIGRFQNRVHLMGDILCNDGSLLLQDVQEADQGTYICEIRLKGESQVFKKAVVLHVLPEEPKELMVHVGGLIQMGCVFQS

SEQ ID NO: 7943 - protein, 41 aa, Artificial Sequence
  Synthetic polypeptide
AVKRKAITIMDEYVLYYYSNLSVPIGRFQNRVHLMGDILCN

SEQ ID NO: 7944 - protein, 99 aa, Artificial Sequence
  Synthetic polypeptide
AVKRKAITIMDEYVLYYYSNLSVPIGRFQNRVHLMGDILCNDGSLLLQDVQEADQGTYICEIRLKGESQVFKKAVVLHVLPEEPKELMVHVGGLIQMGC

SEQ ID NO: 7945 - protein, 6 aa, Artificial Sequence
  Synthetic polypeptide
AWLFGL

SEQ ID NO: 7946 - protein, 6 aa, Artificial Sequence
  Synthetic polypeptide
AWLFGL

SEQ ID NO: 7947 - protein, 41 aa, Artificial Sequence
  Synthetic polypeptide
VEEGSWSLELKPSCTTSQLCKLGSLAYSSCGNLYLPGAGGC

SEQ ID NO: 7948 - protein, 41 aa, Artificial Sequence; identical to SEQ ID NO: 7947
  Synthetic polypeptide

SEQ ID NO: 7949 - protein, 208 aa, Artificial Sequence
  Synthetic polypeptide
SPVVLLPSYVSLALWPIAAVEIYTSRVLEAVNGTDARLKCTFSSFAPVGDALTVTWNFRPLDGGPEQFVFYYHIDPFQPMSGRFKDRVSWDGNPERYDASILLWKLQFDDNGTYTCQVKNPPDVDGVIGEIRLSVVHTVRFSEIHFLALAIGSACALMIIIVIVVVLFQHYRKKRWAERAHKVVEIKSKEEERLNQEKKVSVYLEDTD

SEQ ID NO: 7950 - protein, 208 aa, Artificial Sequence; identical to SEQ ID NO: 7949
  Synthetic polypeptide

SEQ ID NO: 7951 - protein, 7 aa, Artificial Sequence
  Synthetic polypeptide
TSRKPLG

SEQ ID NO: 7952 - protein, 164 aa, Artificial Sequence
  Synthetic polypeptide
QTVTHEPVGNHLVKVYDYQEDGSVLLTCDAEAKNITWFKDGKMIGFLTEDKKKWNLGSNAKDPRGMYQCKGSQNKSKPLQVYYRMCQNCIELNAATISGFLFAEIVSIFVLAVGVYFIAGQDGVRQSRASDKQTLLPNDQLYQPLKDREDDQYSHLQGNQLRRN

SEQ ID NO: 7953 - protein, 12 aa, Artificial Sequence
  Synthetic polypeptide
QAPWRIWNARWS

SEQ ID NO: 7954 - protein, 12 aa, Artificial Sequence
  Synthetic polypeptide
QAPWRIWNARWS

SEQ ID NO: 7955 - protein, 123 aa, Artificial Sequence
  Synthetic polypeptide
EQGETWTSVPALPLSGLAVELNSSTVFICVMGITIRTSSRRPGGSGTRGGAERRPGPRRPPELCAARTPGAAAGPRRRRPQGLREGGTAGQPLRAAPAGAAQPLRRAVQPHAGRHDGAAAPPP

SEQ ID NO: 7956 - protein, 123 aa, Artificial Sequence; identical to SEQ ID NO: 7955
  Synthetic polypeptide

SEQ ID NO: 7957 - protein, 93 aa, Artificial Sequence
  Synthetic polypeptide
RSVPLAGALEDLERAVELSGGRGRAARQSFVQRGLLARLQGRDDDARRDFERAARLGSPFARRQLVLLNPYAALCNRMLADMMGQLRRPRDSR

SEQ ID NO: 7958 - protein, 93 aa, Artificial Sequence; identical to SEQ ID NO: 7957
  Synthetic polypeptide

SEQ ID NO: 7959 - protein, 9 aa, Artificial Sequence
  Synthetic polypeptide
LNQGSSLWF

SEQ ID NO: 7960 - protein, 9 aa, Artificial Sequence
  Synthetic polypeptide
LNQGSSLWF

SEQ ID NO: 7961 - protein, 9 aa, Artificial Sequence
  Synthetic polypeptide
LNQGSSLWF

SEQ ID NO: 7962 - protein, 9 aa, Artificial Sequence
  Synthetic polypeptide
LNQGSSLWF

SEQ ID NO: 7963 - protein, 9 aa, Artificial Sequence
  Synthetic polypeptide
LNQGSSLWF

SEQ ID NO: 7964 - protein, 9 aa, Artificial Sequence
  Synthetic polypeptide
LNQGSSLWF

SEQ ID NO: 7965 - protein, 12 aa, Artificial Sequence
  Synthetic polypeptide
LIRDQVCGSSRS

SEQ ID NO: 7966 - protein, 12 aa, Artificial Sequence
  Synthetic polypeptide
LIRDQVCGSSRS

SEQ ID NO: 7967 - protein, 12 aa, Artificial Sequence
  Synthetic polypeptide
LIRDQVCGSSRS

SEQ ID NO: 7968 - protein, 12 aa, Artificial Sequence
  Synthetic polypeptide
LIRDQVCGSSRS

SEQ ID NO: 7969 - protein, 12 aa, Artificial Sequence
  Synthetic polypeptide
LIRDQVCGSSRS

SEQ ID NO: 7970 - protein, 12 aa, Artificial Sequence
  Synthetic polypeptide
LIRDQVCGSSRS

SEQ ID NO: 7971 - protein, 69 aa, Artificial Sequence
  Synthetic polypeptide
SGIKFVVLADPRQAGIDSLLRKIYEIYSDFALKNPFYSLEMPIRCELFDQNLKLALEVAEKAGTFGPGS

SEQ ID NO: 7972 - protein, 69 aa, Artificial Sequence; identical to SEQ ID NO: 7971
  Synthetic polypeptide

SEQ ID NO: 7973 - protein, 69 aa, Artificial Sequence; identical to SEQ ID NO: 7971
  Synthetic polypeptide

SEQ ID NO: 7974 - protein, 69 aa, Artificial Sequence; identical to SEQ ID NO: 7971
  Synthetic polypeptide

SEQ ID NO: 7975 - protein, 107 aa, Artificial Sequence
  Synthetic polypeptide
SGIKFVVLADPRQAGIDSLLRKIYEIYSDFALKNPFYSLEMPIRACRGKATVGWCSGTWTLFTQPSWTLGPSWCGCFVGGRRQPCWPHKSLQPPRRLCSNCSAWQWC

SEQ ID NO: 7976 - protein, 11 aa, Artificial Sequence
  Synthetic polypeptide
SGIKFVVLADP

SEQ ID NO: 7977 - protein, 8 aa, Artificial Sequence
  Synthetic polypeptide
QGIRARRH

SEQ ID NO: 7978 - protein, 8 aa, Artificial Sequence
  Synthetic polypeptide
QGIRARRH

SEQ ID NO: 7979 - protein, 8 aa, Artificial Sequence
  Synthetic polypeptide
QGIRARRH

SEQ ID NO: 7980 - protein, 38 aa, Artificial Sequence
  Synthetic polypeptide
RGSEPGDTEPLELGGPGAEPEQKEQSTGQKRPLKNDEL

SEQ ID NO: 7981 - protein, 38 aa, Artificial Sequence; identical to SEQ ID NO: 7980
  Synthetic polypeptide

SEQ ID NO: 7982 - protein, 38 aa, Artificial Sequence; identical to SEQ ID NO: 7980
  Synthetic polypeptide

SEQ ID NO: 7983 - protein, 12 aa, Artificial Sequence
  Synthetic polypeptide
GDPSQETLSLWS

SEQ ID NO: 7984 - protein, 12 aa, Artificial Sequence
  Synthetic polypeptide
GDPSQETLSLWS

SEQ ID NO: 7985 - protein, 12 aa, Artificial Sequence
  Synthetic polypeptide
GDPSQETLSLWS

SEQ ID NO: 7986 - protein, 2049 aa, Artificial Sequence
  Synthetic polypeptide
AQEFETSLGNMYIFADAYAQYLWITFDFCNTLQGFSIPFRAADLLLHSKASNLLLGFDRSHPNKQLWKSDDFGQTWIMIQEHVKSFSWGIDPYDKPNTIYIERHEPSGYSTVFRSTDFFQSRENQEVILEEVRDFQLRDKYMFATKVVHLLGSEQQSSVQLWVSFGRKPMRAAQFVTRHPINEYYIADASEDQVFVCVSHSNNRTNLYISEAEGLKFSLSLENVLYYSPGGAGSDTLVRYFANEPFADFHRVEGLQGVYIATLINGSMNEENMRSVITFDKGGTWEFLQAPAFTGYGEKINCELSQGCSLHLAQRLSQLLNLQLRRMPILSKESAPGLIIATGSVGKNLASKTNVYISSSAGARWREALPGPHYYTWGDHGGIITAIAQGMETNELKYSTNEGETWKTFIFSEKPVFVYGLLTEPGEKSTVFTIFGSNKENVHSWLILQVNATDALGVPCTENDYKLWSPSDERGNECLLGHKTVFKRRTPHATCFNGEDFDRPVVVSNCSCTREDYECDFGFKMSEDLSLEVCVPDPEFSGKSYSPPVPCPVGSTYRRTRGYRKISGDTCSGGDVEARLEGELVPCPLAEENEFILYAVRKSIYRYDLASGATEQLPLTGLRAAVALDFDYEHNCLYWSDLALDVIQRLCLNGSTGQEVIINSGLETVEALAFEPLSQLLYWVDAGFKKIEVANPDGDFRLTIVNSSVLDRPRALVLVPQEGVMFWTDWGDLKPGIYRSNMDGSAAYHLVSEDVKWPNGISVDDQWIYWTDAYLECIERITFSGQQRSVILDNLPHPYAIAVFKNEIYWDDWSQLSIFRASKYSGSQMEILANQLTGLMDMKIFYKGKNTGSNACVPRPCSLLCLPKANNSRSCRCPEDVSSSVLPSGDLMCDCPQGYQLKNNTCVKQENTCLRNQYRCSNGNCINSIWWCDFDNDCGDMSDERNCPTTICDLDTQFRCQESGTCIPLSYKCDLEDDCGDNSDESHCEMHQCRSDEYNCSSGMCIRSSWVCDGDNDCRDWSDEANCTAIYHTCEASNFQCRNGHCIPQRWACDGDTDCQDGSDEDPVNCEKKCNGFRCPNGTCIPSSKHCDGLRDCSDGSDEQHCEPLCTHFMDFVCKNRQQCLFHSMVCDGIIQCRDGSDEDAAFAGCSQDPEFHKVCDEFGFQCQNGVCISLIWKCDGMDDCGDYSDEANCENPTEAPNCSRYFQFRCENGHCIPNRWKCDRENDCGDWSDEKDCGDSHILPFSTPGPSTCLPNYYRCSSGTCVMDTWVCDGYRDCADGSDEEACPLLANVTAASTPTQLGRCDRFEFECHQPKTCIPNWKRCDGHQDCQDGRDEANCPTHSTLTCMSREFQCEDGEACIVLSERCDGFLDCSDESDEKACSDELTVYKVQNLQWTADFSGDVTLTWMRPKKMPSASCVYNVYYRVVGESIWKTLETHSNKTNTVLKVLKPDTTYQVKVQVQCLSKAHNTNDFVTLRTPEGLPDAPRNLQLSLPREAEGVIVGHWAPPIHTHGLIREYIVEYSRSGSKMWASQRAASNFTEIKNLLVNTLYTVRVAAVTSRGIGNWSDSKSITTIKGKVIPPPDIHIDSYGENYLSFTLTMESDIKVNGYVVNLFWAFDTHKQERRTLNFRGSILSHKVGNLTAHTSYEISAWAKTDLGDSPLAFEHVMTRGVRPPAPSLKAKAINQTAVECTWTGPRNVVYGIFYATSFLDLYRNPKSLTTSLHNKTVIVSKDEQYLFLVRVVVPYQGPSSDYVVVKMIPDSRLPPRHLHVVHTGKTSVVIKWESPYDSPDQDLLYAVAVKDLIRKTDRSYKVKSRNSTVEYTLNKLEPGGKYHIIVQLGNMSKDSSIKITTVSLSAPDALKIITENDHVLLFWKSLALKEKHFNESRGYEIHMFDSAMNITAYLGNTTDNFFKISNLKMGHNYTFTVQARCLFGNQICGEPAILLYDELGSGADASATQAARSTDVAAVVVPILFLILLSLGVGFAILYTKHRRLQSSFTAFANSHYSSRLGSAIFSSGDDLGEDDEDAPMITGFSDDVPMVIA

SEQ ID NO: 7987 - protein, 80 aa, Artificial Sequence
  Synthetic polypeptide
WLELRSLRPAWATCTSLQTLMPSTSGSRLTSATLFKAFPSHFGQLISSYTVRPPTFSWALTGPTPTSSCGSQMTLARPGS

SEQ ID NO: 7988 - protein, 21 aa, Artificial Sequence
  Synthetic polypeptide
DQPGQHVHLCRRLCPVPLDHV

SEQ ID NO: 7989 - protein, 4 aa, Artificial Sequence
  Synthetic polypeptide
KRPL

SEQ ID NO: 7990 - protein, 23 aa, Artificial Sequence
  Synthetic polypeptide
SPQKPTGPTQTLSNSHSRRGLSD

SEQ ID NO: 7991 - protein, 384 aa, Artificial Sequence
  Synthetic polypeptide
VTLTVEEASLTNHTETITVEEGQTLTLKCVTSLRKNSSLQWLTPSGFTIFLNEYPALKNSKYQLLHHSANQLSITVPNVTLQDEGVYKCLHYSDSVSTKEVKVIVLATPFKPILEASVIRKQNGEEHVVLMCSTMRSKPPPQITWLLGNSMEVSGGTLHEFETDGKKCNTTSTLIIHTYGKNSTVDCIIRHRGLQGRKLVAPFRFEDLVTDEETASDALERNSLSSQDPQQPTSTVSVTEDSSTSEIDKEEKEQTTQDPDLTTEANPQYLGLARKKSGILLLTLVSFLIFILFIIVQLFIMKLRKAHVIWKKENEVSEHTLESYRSRSNNEETSSEEKNGQSSHPMRCMNYITKLYSEAKTKRKENVQHSKLEEKHIQVPESIV

SEQ ID NO: 7992 - protein, 24 aa, Artificial Sequence
  Synthetic polypeptide
QKGSYVGWKEQMRCLASSFSPTSP

SEQ ID NO: 7993 - protein, 24 aa, Artificial Sequence
  Synthetic polypeptide
QKGSYVGWKEQMRCLASSFSPTSP

SEQ ID NO: 7994 - protein, 5 aa, Artificial Sequence
  Synthetic polypeptide
GGKNR

SEQ ID NO: 7995 - protein, 5 aa, Artificial Sequence
  Synthetic polypeptide
GGKNR

SEQ ID NO: 7996 - protein, 142 aa, Artificial Sequence
  Synthetic polypeptide
KRQLCRVERTDEVSGQLILTNLSLTSSGTYRCVATNQMGSASCELTLSVTEPSQGRVAGALIGVLLGVLLLSVAAFCLVRFQKERGKKPKETYGGSDLREDAIAPGISEHTCMRADSSKGFLERPSSASTVTTTKSKLPMVV

SEQ ID NO: 7997 - protein, 99 aa, Artificial Sequence
  Synthetic polypeptide
KRQLCRVERTDEVSGQLILTNLSLTSSGTYRCVATNQMGSASCELTLSVTEPSQGRVAGALIGVLLGVLLLSVAAFCLVRFQKERGKKPKETYGGSDLR

SEQ ID NO: 7998 - protein, 69 aa, Artificial Sequence
  Synthetic polypeptide
GIWIRPPGGGEHHQPRAPDPWHRGEVGSAFCAVQQYQQRQACSEVAAEAGQASDRGAVHWHRGHRHPAA

SEQ ID NO: 7999 - protein, 20 aa, Artificial Sequence
  Synthetic polypeptide
KGTWQQPLVLGNMDKTPWRG

SEQ ID NO: 8000 - protein, 262 aa, Artificial Sequence
  Synthetic polypeptide
SQLWETEIHEKEEEEFNEKSENDSGINEEPLLTADQVIEEIEEMMQNSPDPEEEEEVLEEEDGGETSSQADSVLLQEMQALTQTFNNNWSYEGLRHMSGSELTELLDQVEGAIRDFSEELVQQLARRDELEFEKEVKNSFITVLIEVQNKQKEQRELMKKRRKEKGLSLQSSRIEKGNQMPLKRFSMEGISNILQSGIRQTFGSSGTDKQYLNTVIPYEKKASPPSVEDLQMLTNILFAMKEDNEKVPTLLTDYILKVLCPT

SEQ ID NO: 8001 - protein, 42 aa, Artificial Sequence
  Synthetic polypeptide
EAHACNLSFGRPRSMRKKRKSSMRRVKMIPVSTRSLCSQQIR

SEQ ID NO: 8002 - protein, 42 aa, Artificial Sequence; identical to SEQ ID NO: 8001
  Synthetic polypeptide

SEQ ID NO: 8003 - protein, 14 aa, Artificial Sequence
  Synthetic polypeptide
RLMPVISALGDRDP

SEQ ID NO: 8004 - protein, 14 aa, Artificial Sequence
  Synthetic polypeptide
RLMPVISALGDRDP

SEQ ID NO: 8005 - protein, 144 aa, Artificial Sequence
  Synthetic polypeptide
SQLWETEIHEKEEEEFNEKSENDSGINEEPLLTADQVIEEIEEMMQNSPDPEEEEEVLEEEDGGETSSQADSVLLQEMQALTQTFNNNWSYEGLRHMSGSELTELLDQVEGAIRDFSEELVQQLARRDELEFEKEVKNSFITVL

SEQ ID NO: 8006 - protein, 30 aa, Artificial Sequence
  Synthetic polypeptide
PLSHLSSLALQWRWPEAAGMTALPRNPAAC

SEQ ID NO: 8007 - protein, 39 aa, Artificial Sequence
  Synthetic polypeptide
PEFQCQLRSSRAVQPGPVTDPFPTLVPWLYNGGGPRQPG

SEQ ID NO: 8008 - protein, 25 aa, Artificial Sequence
  Synthetic polypeptide
FPGSTMEVARGSRDDSSPQESCCLL

SEQ ID NO: 8009 - protein, 30 aa, Artificial Sequence; identical to SEQ ID NO: 8006
  Synthetic polypeptide

SEQ ID NO: 8010 - protein, 25 aa, Artificial Sequence
  Synthetic polypeptide
FPGSTMEVARGSRDDSSPQESCCLL

SEQ ID NO: 8011 - protein, 39 aa, Artificial Sequence
  Synthetic polypeptide
PEFQCQLHSSRAVQPGPVTDPFPTLVPWLYNGGGPRQPG

SEQ ID NO: 8012 - protein, 31 aa, Artificial Sequence
  Synthetic polypeptide
SVSRPGCILESQRRWPEAAGMTALPRNPAAC

SEQ ID NO: 8013 - protein, 11 aa, Artificial Sequence
  Synthetic polypeptide
NHRGGGPRQPG

SEQ ID NO: 8014 - protein, 31 aa, Artificial Sequence
  Synthetic polypeptide
CFPPRLHFRITEEVARGSRDDSSPQESCCLL

SEQ ID NO: 8015 - protein, 6 aa, Artificial Sequence
  Synthetic polypeptide
KVSKSV

SEQ ID NO: 8016 - protein, 6 aa, Artificial Sequence
  Synthetic polypeptide
KVSKSV

SEQ ID NO: 8017 - protein, 6 aa, Artificial Sequence
  Synthetic polypeptide
KVSKSV

SEQ ID NO: 8018 - protein, 6 aa, Artificial Sequence
  Synthetic polypeptide
KVSKSV

SEQ ID NO: 8019 - protein, 6 aa, Artificial Sequence
  Synthetic polypeptide
KVSKSV

SEQ ID NO: 8020 - protein, 180 aa, Artificial Sequence
  Synthetic polypeptide
KGSMVGWNEHKVPRVRKFRNQYDNDVTVWSPQGRIHQIEYAMEAVKQGSATVGLKSKTHAVLVALKRAQSELAAHQKKILHVDNHIGISIAGLTADARLLCNFMRQECLDSRFVFDRPLPVSRLVSLIGSSILFMIWALTFSKPVHLLTILTAEPCPLEPVPNQLVLTWRDICLNLWSVI

SEQ ID NO: 8021 - protein, 180 aa, Artificial Sequence; identical to SEQ ID NO: 8020
  Synthetic polypeptide

SEQ ID NO: 8022 - protein, 53 aa, Artificial Sequence
  Synthetic polypeptide
KVAWWDGMSTRCPELESFEISMTMMSLFGAPRAGFIKLNMQWKLLNKVQPQLV

SEQ ID NO: 8023 - protein, 53 aa, Artificial Sequence; identical to SEQ ID NO: 8022
  Synthetic polypeptide

SEQ ID NO: 8024 - protein, 53 aa, Artificial Sequence; identical to SEQ ID NO: 8022
  Synthetic polypeptide

SEQ ID NO: 8025 - protein, 53 aa, Artificial Sequence; identical to SEQ ID NO: 8022
  Synthetic polypeptide

SEQ ID NO: 8026 - protein, 53 aa, Artificial Sequence; identical to SEQ ID NO: 8022
  Synthetic polypeptide

SEQ ID NO: 8027 - protein, 279 aa, Artificial Sequence
  Synthetic polypeptide
KGSMVGWNEHKVPRVRKFRNQYDNDVTVWSPQGRIHQIEYAMEAVKQGSATVGLKSKTHAVLVALKRAQSELAAHQKKILHVDNHIGISIAGLTADARLLCNFMRQECLDSRFVFDRPLPVSRLVSLIGSKTQIPTQRYGRRPYGVGLLIAGYDDMGPHIFQTCPSANYFDCRAMSIGARSQSARTYLERHMSEFMECNLNELVKHGLRALRETLPAEQDLTTKNVSIGIVGKDLEFTIYDDDDVSPFLEGLEERPQRKAQPAQPADEPAEKADEPMEH

SEQ ID NO: 8028 - protein, 279 aa, Artificial Sequence; identical to SEQ ID NO: 8027
  Synthetic polypeptide

SEQ ID NO: 8029 - protein, 279 aa, Artificial Sequence; identical to SEQ ID NO: 8027
  Synthetic polypeptide

SEQ ID NO: 8030 - protein, 38 aa, Artificial Sequence
  Synthetic polypeptide
ESFEISMTMMSLFGAPRAGFIKLNMQWKLLNKVQPQLV

SEQ ID NO: 8031 - protein, 38 aa, Artificial Sequence; identical to SEQ ID NO: 8030
  Synthetic polypeptide

SEQ ID NO: 8032 - protein, 38 aa, Artificial Sequence; identical to SEQ ID NO: 8030
  Synthetic polypeptide

SEQ ID NO: 8033 - protein, 38 aa, Artificial Sequence; identical to SEQ ID NO: 8030
  Synthetic polypeptide

SEQ ID NO: 8034 - protein, 38 aa, Artificial Sequence; identical to SEQ ID NO: 8030
  Synthetic polypeptide

SEQ ID NO: 8035 - protein, 6 aa, Artificial Sequence
  Synthetic polypeptide
KVSKSV

SEQ ID NO: 8036 - protein, 6 aa, Artificial Sequence
  Synthetic polypeptide
KVSKSV

SEQ ID NO: 8037 - protein, 6 aa, Artificial Sequence
  Synthetic polypeptide
KVSKSV

SEQ ID NO: 8038 - protein, 6 aa, Artificial Sequence
  Synthetic polypeptide
KVSKSV

SEQ ID NO: 8039 - protein, 6 aa, Artificial Sequence
  Synthetic polypeptide
KVSKSV

SEQ ID NO: 8040 - protein, 164 aa, Artificial Sequence
  Synthetic polypeptide
KFRNQYDNDVTVWSPQGRIHQIEYAMEAVKQGSATVGLKSKTHAVLVALKRAQSELAAHQKKILHVDNHIGISIAGLTADARLLCNFMRQECLDSRFVFDRPLPVSRLVSLIGSSILFMIWALTFSKPVHLLTILTAEPCPLEPVPNQLVLTWRDICLNLWSVI

SEQ ID NO: 8041 - protein, 164 aa, Artificial Sequence; identical to SEQ ID NO: 8040
  Synthetic polypeptide

SEQ ID NO: 8042 - protein, 263 aa, Artificial Sequence
  Synthetic polypeptide
KFRNQYDNDVTVWSPQGRIHQIEYAMEAVKQGSATVGLKSKTHAVLVALKRAQSELAAHQKKILHVDNHIGISIAGLTADARLLCNFMRQECLDSRFVFDRPLPVSRLVSLIGSKTQIPTQRYGRRPYGVGLLIAGYDDMGPHIFQTCPSANYFDCRAMSIGARSQSARTYLERHMSEFMECNLNELVKHGLRALRETLPAEQDLTTKNVSIGIVGKDLEFTIYDDDDVSPFLEGLEERPQRKAQPAQPADEPAEKADEPMEH

SEQ ID NO: 8043 - protein, 263 aa, Artificial Sequence; identical to SEQ ID NO: 8042
  Synthetic polypeptide

SEQ ID NO: 8044 - protein, 263 aa, Artificial Sequence; identical to SEQ ID NO: 8042
  Synthetic polypeptide

SEQ ID NO: 8045 - protein, 54 aa, Artificial Sequence
  Synthetic polypeptide
NHHYMVFHPQGAELSLNLIGSGSCMAAVADSDTDGAELPTGFGWGHPTTFLAAG

SEQ ID NO: 8046 - protein, 16 aa, Artificial Sequence
  Synthetic polypeptide
VVTEPYWFRLLHGSCS

SEQ ID NO: 8047 - protein, 97 aa, Artificial Sequence
  Synthetic polypeptide
VCSLRSGCSQVCGSSSPLAPTLTMWCACSCFAFHREENSLRASPEAEQRLWIILLPVQLLQALLLPVQLLCPRVLPVQLLQALLLPVQLLCPCVLPV

SEQ ID NO: 8048 - protein, 59 aa, Artificial Sequence
  Synthetic polypeptide
GPPQKLSRGCGSSCCQSSCCKPCCCQSSCCVPVCCQSSCCKPCCCQSNCCVPVCCQCKI

SEQ ID NO: 8049 - protein, 53 aa, Artificial Sequence
  Synthetic polypeptide
AEAVDHPAASPAAASPAAASPAAVSPCAASPAAASPVAASPTVVSLCAASVRS

SEQ ID NO: 8050 - protein, 17 aa, Artificial Sequence
  Synthetic polypeptide
GLPNHMELWSVLLLGLE

SEQ ID NO: 8051 - protein, 17 aa, Artificial Sequence
  Synthetic polypeptide
GLPNHMELWSVLLLGLE

SEQ ID NO: 8052 - protein, 157 aa, Artificial Sequence
  Synthetic polypeptide
ISLTRSDGFKKGSFSAQALSLPATISVRCDLLLLVFCHDCEASPTTWNCGVCYSWGWNEHGMCGDGTEANVWAPKPVQALLSSSGLLVGCGAGHSLALCQLPAHPALVQDPKVTYLSPDAIEDTESQKAMDKERNWKERQSETSTQSQSDWSRNGGL

SEQ ID NO: 8053 - protein, 130 aa, Artificial Sequence
  Synthetic polypeptide
DVTCFSLSSATIVRPPQPHGTVECVTLGAGMSMACAEMALKPTSGPQSRCRLCCHRQDSLWAVGLATPWPSASCQLTLHWSRTPRSPTFPQMPSRTLNLRKPWTKRETGRKDNQKLQPKANLTGPEMGDC

SEQ ID NO: 8054 - protein, 134 aa, Artificial Sequence
  Synthetic polypeptide
ISLTRSDGFKKGSFSAQALSLPATISVRCDLLLLVFCHDCEASPTTWNCGVCYSWGWNEHGMCGDGTEANVWAPKPVQALLSSSGLLVGCGAGHSLALCQLPAHPALVQDPKVTYLSPDAIEDTESQKAMDKER

SEQ ID NO: 8055 - protein, 107 aa, Artificial Sequence
  Synthetic polypeptide
DVTCFSLSSATIVRPPQPHGTVECVTLGAGMSMACAEMALKPTSGPQSRCRLCCHRQDSLWAVGLATPWPSASCQLTLHWSRTPRSPTFPQMPSRTLNLRKPWTKRE

SEQ ID NO: 8056 - protein, 121 aa, Artificial Sequence
  Synthetic polypeptide
YPLPEVVLPNGIGGVCYSWGWNEHGMCGDGTEANVWAPKPVQALLSSSGLLVGCGAGHSLALCQLPAHPALVQDPKVTYLSPDAIEDTESQKAMDKERNWKERQSETSTQSQSDWSRNGGL

SEQ ID NO: 8057 - protein, 31 aa, Artificial Sequence
  Synthetic polypeptide
FLICKIDIMIPTPRSCSSQWHRWSVLLLGLE

SEQ ID NO: 8058 - protein, 31 aa, Artificial Sequence; identical to SEQ ID NO: 8057
  Synthetic polypeptide

SEQ ID NO: 8059 - protein, 98 aa, Artificial Sequence
  Synthetic polypeptide
YPLPEVVLPNGIGGVCYSWGWNEHGMCGDGTEANVWAPKPVQALLSSSGLLVGCGAGHSLALCQLPAHPALVQDPKVTYLSPDAIEDTESQKAMDKER

SEQ ID NO: 8060 - protein, 52 aa, Artificial Sequence
  Synthetic polypeptide
DVRGPLLSGAWRTRRRPSTSNASMRETGSFRPRTRREAAMSPSGRSRRCSSA

SEQ ID NO: 8061 - protein, 52 aa, Artificial Sequence; identical to SEQ ID NO: 8060
  Synthetic polypeptide

SEQ ID NO: 8062 - protein, 52 aa, Artificial Sequence; identical to SEQ ID NO: 8060
  Synthetic polypeptide

SEQ ID NO: 8063 - protein, 52 aa, Artificial Sequence; identical to SEQ ID NO: 8060
  Synthetic polypeptide

SEQ ID NO: 8064 - protein, 52 aa, Artificial Sequence; identical to SEQ ID NO: 8060
  Synthetic polypeptide

SEQ ID NO: 8065 - protein, 21 aa, Artificial Sequence
  Synthetic polypeptide
EAHCSVERGGRGGGRPRAMPA

SEQ ID NO: 8066 - protein, 21 aa, Artificial Sequence
  Synthetic polypeptide
EAHCSVERGGRGGGRPRAMPA

SEQ ID NO: 8067 - protein, 21 aa, Artificial Sequence
  Synthetic polypeptide
EAHCSVERGGRGGGRPRAMPA

SEQ ID NO: 8068 - protein, 21 aa, Artificial Sequence
  Synthetic polypeptide
EAHCSVERGGRGGGRPRAMPA

SEQ ID NO: 8069 - protein, 21 aa, Artificial Sequence
  Synthetic polypeptide
EAHCSVERGGRGGGRPRAMPA

SEQ ID NO: 8070 - protein, 340 aa, Artificial Sequence
  Synthetic polypeptide
VGAPATSSAPWDPCVRRERPTAQWSVEDEEEAVHEQCQHERDRQLQAQDEEGGGHVPERPKQEMLLSLKPSEAPELDEDEGFGDWSQRPEQRQQHEGAQGALDSGEPPQCRSPEGEQEDRPGLHAYEKEDSDEVHLEELSLSKEGPGPEDTVQDNLGAAGAEEEQEEHQKCQQPRTPSPLVLEGTIEQSSPPLSPTTKLIDRTESLNRSIEKSNSVKKSQPDLPISKIDQWLEQYTQAIETAGRTPKLARQASIELPSMAVASTKSRWETGEVQAQSAAKTPSCKDIVAGDMSKKSLWEQKGGSKTSSTIKSTPSGKRYKFVATGHGKYEKVLVEGGPAP

SEQ ID NO: 8071 - protein, 340 aa, Artificial Sequence; identical to SEQ ID NO: 8070
  Synthetic polypeptide

SEQ ID NO: 8072 - protein, 285 aa, Artificial Sequence
  Synthetic polypeptide
VGAPATSSAPWDPCVRRERPTAQWSVEDEEEAVHEQCQHERDRQLQAQDEEGGGHVPERPKQEMLLSLKPSEAPELDEDEGFGDWSQRPEQRQQHEGAQGALDSGEPPQCRSPEGEQEDRPGLHAYEKEDSDEVHLEELSLSKEGPGPEDTVQDNLGAAGAEEEQEEHQKCQQPRTPSPLVLEGTIEQSSPPLSPTTKLIDRTESLNRSIEKSNSVKKSQPDLPISKIDQWLEQYTQAIETAGRTPKLARQASIELPSMAVASTKSRWETGEVQAQSAAKTPSCK

SEQ ID NO: 8073 - protein, 193 aa, Artificial Sequence
  Synthetic polypeptide
VGAPATSSAPWDPCVRRERPTAQWSVEDEEEAVHEQCQHERDRQLQAQDEEGGGHVPERPKQEMLLSLKPSEAPELDEDEGFGDWSQRPEQRQQHEGAQGALDSGEPPQCRSPEGEQEDRPGLHAYEKEDSDEVHLEELSLSKEGPGPEDTVQDNLGAAGAEEEQEEHQKCQQPRTPSPLVLEGTIEQSSPPL

SEQ ID NO: 8074 - protein, 105 aa, Artificial Sequence
  Synthetic polypeptide
VGAPATSSAPWDPCVRRERPTAQWSVEDEEEAVHEQCQHERDRQLQAQDEEGGGHVPERPKQEMLLSLKPSEAPELDEDEGFGDWSQRPEQRQQHEGAQGALDSG

SEQ ID NO: 8075 - protein, 39 aa, Artificial Sequence
  Synthetic polypeptide
KRLTWNDICPVIVPQHSKKMDYGLTSIRLWPVPLGFYIS

SEQ ID NO: 8076 - protein, 39 aa, Artificial Sequence; identical to SEQ ID NO: 8075
  Synthetic polypeptide

SEQ ID NO: 8077 - protein, 65 aa, Artificial Sequence
  Synthetic polypeptide
PGMIFVQSLCHNIQRRWIMDLPQSDCGLFPLGFIYLDASNFPFLMVNIFIIKSTLSDCLSGPDLP

SEQ ID NO: 8078 - protein, 65 aa, Artificial Sequence; identical to SEQ ID NO: 8077
  Synthetic polypeptide

SEQ ID NO: 8079 - protein, 14 aa, Artificial Sequence
  Synthetic polypeptide
SCLGTIVKWPAPQL

SEQ ID NO: 8080 - protein, 38 aa, Artificial Sequence
  Synthetic polypeptide
MPGHHSEVASPPTMRCSRRSTRWLCWGRPTTLLPRRPP

SEQ ID NO: 8081 - protein, 39 aa, Artificial Sequence
  Synthetic polypeptide
QLPGHHSEVASPPTMRCSRRSTRWLCWGRPTTLLPRRPP

SEQ ID NO: 8082 - protein, 14 aa, Artificial Sequence
  Synthetic polypeptide
SCLGTIVKWPAPQL

SEQ ID NO: 8083 - protein, 14 aa, Artificial Sequence
  Synthetic polypeptide
SCLGTIVKWPAPQL

SEQ ID NO: 8084 - protein, 38 aa, Artificial Sequence; identical to SEQ ID NO: 8080
  Synthetic polypeptide

SEQ ID NO: 8085 - protein, 15 aa, Artificial Sequence
  Synthetic polypeptide
SSCLGTIVKWPAPQL

SEQ ID NO: 8086 - protein, 75 aa, Artificial Sequence
  Synthetic polypeptide
GHHSEGYGIIQLPGHHSEGNGIIQLPGHHSEGNGIIQLPGHHSEVASPPTMRCSRRSTRWLCWGRPTTLLPRRPP

SEQ ID NO: 8087 - protein, 15 aa, Artificial Sequence
  Synthetic polypeptide
SSCLGTIVKWPAPQL

SEQ ID NO: 8088 - protein, 62 aa, Artificial Sequence
  Synthetic polypeptide
GHHSEGYGIIQLPGHHSEGNGIIQLPGHHSEVASPPTMRCSRRSTRWLCWGRPTTLLPRRPP

SEQ ID NO: 8089 - protein, 15 aa, Artificial Sequence
  Synthetic polypeptide
SSCLGTIVKWPAPQL

SEQ ID NO: 8090 - protein, 49 aa, Artificial Sequence
  Synthetic polypeptide
GHHSEGYGIIQLPGHHSEVASPPTMRCSRRSTRWLCWGRPTTLLPRRPP

SEQ ID NO: 8091 - protein, 15 aa, Artificial Sequence
  Synthetic polypeptide
SSCLGTIVKWPAPQL

SEQ ID NO: 8092 - protein, 49 aa, Artificial Sequence; identical to SEQ ID NO: 8090
  Synthetic polypeptide

SEQ ID NO: 8093 - protein, 15 aa, Artificial Sequence
  Synthetic polypeptide
SSCLGTIVKWPAPQL

SEQ ID NO: 8094 - protein, 49 aa, Artificial Sequence; identical to SEQ ID NO: 8090
  Synthetic polypeptide

SEQ ID NO: 8095 - protein, 15 aa, Artificial Sequence
  Synthetic polypeptide
SSCLGTIVKWPAPQL

SEQ ID NO: 8096 - protein, 49 aa, Artificial Sequence; identical to SEQ ID NO: 8090
  Synthetic polypeptide

SEQ ID NO: 8097 - protein, 15 aa, Artificial Sequence
  Synthetic polypeptide
SSCLGTIVKWPAPQL

SEQ ID NO: 8098 - protein, 49 aa, Artificial Sequence; identical to SEQ ID NO: 8090
  Synthetic polypeptide

SEQ ID NO: 8099 - protein, 15 aa, Artificial Sequence
  Synthetic polypeptide
SSCLGTIVKWPAPQL

SEQ ID NO: 8100 - protein, 49 aa, Artificial Sequence; identical to SEQ ID NO: 8090
  Synthetic polypeptide

SEQ ID NO: 8101 - protein, 14 aa, Artificial Sequence
  Synthetic polypeptide
SCLGTIVKWPAPQL

SEQ ID NO: 8102 - protein, 38 aa, Artificial Sequence; identical to SEQ ID NO: 8080
  Synthetic polypeptide

SEQ ID NO: 8103 - protein, 19 aa, Artificial Sequence
  Synthetic polypeptide
SGNYIQLTGCRAQWPAPQL

SEQ ID NO: 8104 - protein, 144 aa, Artificial Sequence
  Synthetic polypeptide
NSSGLNLIIKNKVEITYSLQAAELSGQPPNYEMLKEEHEVAVLGAPHNPAPPTSTVIHIRSETSVPDHVVWSLFNTLFMNPCCLGFIAFAYSVKSRDRKMVGDVTGAQAYASTAKCLNIWALILGILMTILLIVIPVLIFQAYG

SEQ ID NO: 8105 - protein, 48 aa, Artificial Sequence
  Synthetic polypeptide
LLKIKWKLHTAYRLQSSVASPPTMRCSRRSTRWLCWGRPTTLLPRRPP

SEQ ID NO: 8106 - protein, 9 aa, Artificial Sequence
  Synthetic polypeptide
RKMWPAPQL

SEQ ID NO: 8107 - protein, 155 aa, Artificial Sequence
  Synthetic polypeptide
LCLPLPEIPLLGIPRSPPNEKSWFAHKNKNYIEERCGQPPNYEMLKEEHEVAVLGAPHNPAPPTSTVIHIRSETSVPDHVVWSLFNTLFMNPCCLGFIAFAYSVKSRDRKMVGDVTGAQAYASTAKCLNIWALILGILMTILLIVIPVLIFQAYG

SEQ ID NO: 8108 - protein, 71 aa, Artificial Sequence
  Synthetic polypeptide
RGSLSYASRSRRFPSWGSQGPLQTKSLGLPTRIRTTLKKDVASPPTMRCSRRSTRWLCWGRPTTLLPRRPP

SEQ ID NO: 8109 - protein, 80 aa, Artificial Sequence
  Synthetic polypeptide
GQEFETSLANTVTARSPSTGRPATVTRPRTMRRSSPTTHSSMRIPWASRARWVSSSTRCRPRSMAATPPPTAAPAARLCC

SEQ ID NO: 8110 - protein, 80 aa, Artificial Sequence; identical to SEQ ID NO: 8109
  Synthetic polypeptide

SEQ ID NO: 8111 - protein, 80 aa, Artificial Sequence; identical to SEQ ID NO: 8109
  Synthetic polypeptide

SEQ ID NO: 8112 - protein, 80 aa, Artificial Sequence; identical to SEQ ID NO: 8109
  Synthetic polypeptide

SEQ ID NO: 8113 - protein, 80 aa, Artificial Sequence; identical to SEQ ID NO: 8109
  Synthetic polypeptide

SEQ ID NO: 8114 - protein, 80 aa, Artificial Sequence; identical to SEQ ID NO: 8109
  Synthetic polypeptide

SEQ ID NO: 8115 - protein, 48 aa, Artificial Sequence
  Synthetic polypeptide
EAVGSPEVRSLRPAWPTRLQHGHLRRDAQLRSHALAPCGAVPQPLIQA

SEQ ID NO: 8116 - protein, 48 aa, Artificial Sequence; identical to SEQ ID NO: 8115
  Synthetic polypeptide

SEQ ID NO: 8117 - protein, 48 aa, Artificial Sequence; identical to SEQ ID NO: 8115
  Synthetic polypeptide

SEQ ID NO: 8118 - protein, 48 aa, Artificial Sequence; identical to SEQ ID NO: 8115
  Synthetic polypeptide

SEQ ID NO: 8119 - protein, 48 aa, Artificial Sequence; identical to SEQ ID NO: 8115
  Synthetic polypeptide

SEQ ID NO: 8120 - protein, 48 aa, Artificial Sequence; identical to SEQ ID NO: 8115
  Synthetic polypeptide

SEQ ID NO: 8121 - protein, 305 aa, Artificial Sequence
  Synthetic polypeptide
DQPGQHGYSTVTFDGTPSYGHTPSHHAAQFPNHSFKHEDPMGQQGSLGEQQYSVPPPVYGCHTPTDSCTGSQALLLRTPYSSDNLYQMTSQLECMTWNQMNLGATLKGVAAGSSSSVKWTEGQSNHSTGYESDNHTTPILCGAQYRIHTHGVFRGIQDVRRVPGVAPTLVRSASETSEKRPFMCAYPGCNKRYFKLSHLQMHSRKHTGEKPYQCDFKDCERRFSRSDQLKRHQRRHTGVKPFQCKTCQRKFSRSDHLKTHTRTHTGEKPFSCRWPSCQKKFARSDELVRHHNMHQRNMTKLQLAL

SEQ ID NO: 8122 - protein, 305 aa, Artificial Sequence; identical to SEQ ID NO: 8121
  Synthetic polypeptide

SEQ ID NO: 8123 - protein, 108 aa, Artificial Sequence
  Synthetic polypeptide
DQPGQHGYSTVTFDGTPSYGHTPSHHAAQFPNHSFKHEDPMGQQGSLGEQQYSVPPPVYGCHTPTDSCTGSQALLLRTPYSSDNLYQMTSQLECMTWNQMNLGATLKG

SEQ ID NO: 8124 - protein, 308 aa, Artificial Sequence
  Synthetic polypeptide
DQPGQHGYSTVTFDGTPSYGHTPSHHAAQFPNHSFKHEDPMGQQGSLGEQQYSVPPPVYGCHTPTDSCTGSQALLLRTPYSSDNLYQMTSQLECMTWNQMNLGATLKGVAAGSSSSVKWTEGQSNHSTGYESDNHTTPILCGAQYRIHTHGVFRGIQDVRRVPGVAPTLVRSASETSEKRPFMCAYPGCNKRYFKLSHLQMHSRKHTGEKPYQCDFKDCERRFSRSDQLKRHQRRHTGVKPFQCKTCQRKFSRSDHLKTHTRTHTGKTSEKPFSCRWPSCQKKFARSDELVRHHNMHQRNMTKLQLAL

SEQ ID NO: 8125 - protein, 291 aa, Artificial Sequence
  Synthetic polypeptide
DQPGQHGYSTVTFDGTPSYGHTPSHHAAQFPNHSFKHEDPMGQQGSLGEQQYSVPPPVYGCHTPTDSCTGSQALLLRTPYSSDNLYQMTSQLECMTWNQMNLGATLKGHSTGYESDNHTTPILCGAQYRIHTHGVFRGIQDVRRVPGVAPTLVRSASETSEKRPFMCAYPGCNKRYFKLSHLQMHSRKHTGEKPYQCDFKDCERRFSRSDQLKRHQRRHTGVKPFQCKTCQRKFSRSDHLKTHTRTHTGKTSEKPFSCRWPSCQKKFARSDELVRHHNMHQRNMTKLQLAL

SEQ ID NO: 8126 - protein, 288 aa, Artificial Sequence
  Synthetic polypeptide
DQPGQHGYSTVTFDGTPSYGHTPSHHAAQFPNHSFKHEDPMGQQGSLGEQQYSVPPPVYGCHTPTDSCTGSQALLLRTPYSSDNLYQMTSQLECMTWNQMNLGATLKGHSTGYESDNHTTPILCGAQYRIHTHGVFRGIQDVRRVPGVAPTLVRSASETSEKRPFMCAYPGCNKRYFKLSHLQMHSRKHTGEKPYQCDFKDCERRFSRSDQLKRHQRRHTGVKPFQCKTCQRKFSRSDHLKTHTRTHTGEKPFSCRWPSCQKKFARSDELVRHHNMHQRNMTKLQLAL

SEQ ID NO: 8127 - protein, 76 aa, Artificial Sequence
  Synthetic polypeptide
EAVGSPEVTARSPSTGRPATVTRPRTMRRSSPTTHSSMRIPWASRARWVSSSTRCRPRSMAATPPPTAAPAARLCC

SEQ ID NO: 8128 - protein, 76 aa, Artificial Sequence; identical to SEQ ID NO: 8127
  Synthetic polypeptide

SEQ ID NO: 8129 - protein, 76 aa, Artificial Sequence; identical to SEQ ID NO: 8127
  Synthetic polypeptide

SEQ ID NO: 8130 - protein, 76 aa, Artificial Sequence; identical to SEQ ID NO: 8127
  Synthetic polypeptide

SEQ ID NO: 8131 - protein, 76 aa, Artificial Sequence; identical to SEQ ID NO: 8127
  Synthetic polypeptide

SEQ ID NO: 8132 - protein, 76 aa, Artificial Sequence; identical to SEQ ID NO: 8127
  Synthetic polypeptide

SEQ ID NO: 8133 - protein, 37 aa, Artificial Sequence
  Synthetic polypeptide
RRLDHLRLQHGHLRRDAQLRSHALAPCGAVPQPLIQA

SEQ ID NO: 8134 - protein, 37 aa, Artificial Sequence; identical to SEQ ID NO: 8133
  Synthetic polypeptide

SEQ ID NO: 8135 - protein, 37 aa, Artificial Sequence; identical to SEQ ID NO: 8133
  Synthetic polypeptide

SEQ ID NO: 8136 - protein, 37 aa, Artificial Sequence; identical to SEQ ID NO: 8133
  Synthetic polypeptide

SEQ ID NO: 8137 - protein, 37 aa, Artificial Sequence; identical to SEQ ID NO: 8133
  Synthetic polypeptide

SEQ ID NO: 8138 - protein, 37 aa, Artificial Sequence; identical to SEQ ID NO: 8133
  Synthetic polypeptide

SEQ ID NO: 8139 - protein, 32 aa, Artificial Sequence
  Synthetic polypeptide
GPARWLRGIIPALWRPRRADHEACYMNRIWQK

SEQ ID NO: 8140 - protein, 32 aa, Artificial Sequence; identical to SEQ ID NO: 8139
  Synthetic polypeptide

SEQ ID NO: 8141 - protein, 32 aa, Artificial Sequence; identical to SEQ ID NO: 8139
  Synthetic polypeptide

SEQ ID NO: 8142 - protein, 16 aa, Artificial Sequence
  Synthetic polypeptide
SQHFGGRGGRITRPVT

SEQ ID NO: 8143 - protein, 16 aa, Artificial Sequence
  Synthetic polypeptide
SQHFGGRGGRITRPVT

SEQ ID NO: 8144 - protein, 16 aa, Artificial Sequence
  Synthetic polypeptide
SQHFGGRGGRITRPVT

SEQ ID NO: 8145 - protein, 123 aa, Artificial Sequence
  Synthetic polypeptide
RYNPSTLEAEAGGSRGLLHEQNMAKMRLLTFMGMAVENKEISFDTMQQELQIGADDVEAFVIDAVRTKMVYCKIDQTQRKVVVSHSTHRTFGKQQWQQLYDTLNAWKQNLNKVKNSLLSLSDT

SEQ ID NO: 8146 - protein, 123 aa, Artificial Sequence; identical to SEQ ID NO: 8145
  Synthetic polypeptide

SEQ ID NO: 8147 - protein, 128 aa, Artificial Sequence
  Synthetic polypeptide
RYNPSTLEAEAGGSRGLLHEQNMAKMRLLTFMGMAVENKEISFDTMQQELQIGADDVEAFVIDAVRTKMVYCKIDQTQRKVVVSCSGELEGLGSICHSTHRTFGKQQWQQLYDTLNAWKQNLNKVKNS

SEQ ID NO: 8148 - protein, 10 aa, Artificial Sequence
  Synthetic polypeptide
DQNPAVGRCL

SEQ ID NO: 8149 - protein, 10 aa, Artificial Sequence
  Synthetic polypeptide
DQNPAVGRCL

SEQ ID NO: 8150 - protein, 10 aa, Artificial Sequence
  Synthetic polypeptide
DQNPAVGRCL

SEQ ID NO: 8151 - protein, 86 aa, Artificial Sequence
  Synthetic polypeptide
TRTRQWAGVCDFREPTCVLPQHHLCHHRQLRHFCAGGGPAGTGLAPPAEAEQPHDAARAPAAAPCAAVPPGGPGPPPPLQRHLQRQ

SEQ ID NO: 8152 - protein, 86 aa, Artificial Sequence; identical to SEQ ID NO: 8151
  Synthetic polypeptide

SEQ ID NO: 8153 - protein, 86 aa, Artificial Sequence; identical to SEQ ID NO: 8151
  Synthetic polypeptide

SEQ ID NO: 8154 - protein, 195 aa, Artificial Sequence
  Synthetic polypeptide
PEPGSGQVFVTSENQLVYYPSITYAIIGSSVIFVLVVALLALVLHHQRKRNNLMTLPVHRLQHPVLLSRLVVLDHPHHCNVTYNVNNGIQYVASQAEQNASEVGSPPSYSEALLDQRPAWYDLPPPPYSSDTESLNQADLPPYRSRSGSANSASSQAASSLLSVEDTSHSPGQPGPQEGTAEPRDSEPSQGTEEV

SEQ ID NO: 8155 - protein, 195 aa, Artificial Sequence; identical to SEQ ID NO: 8154
  Synthetic polypeptide

SEQ ID NO: 8156 - protein, 195 aa, Artificial Sequence; identical to SEQ ID NO: 8154
  Synthetic polypeptide

SEQ ID NO: 8157 - protein, 189 aa, Artificial Sequence
  Synthetic polypeptide
TEIAPLRSSLGDRDQRPPREVHAPGGLVEAGRVPRQRLHDGPLRADGHHHGPEADAQQLRRVPGPVGDPQVPLSAGLRVRAPAPGPRAQGLAAQLPSEPGQHLQPVRRVHGDDDPVRLHHHLRGRLPAGAAARALQQPRGDPPGRHQDGLVAAAPGAAQGQGHRDLAAGAGDHRCAGGHCQWDGHCLHI

SEQ ID NO: 8158 - protein, 372 aa, Artificial Sequence
  Synthetic polypeptide
SQLLGRLRHKNHLNPGGRGCSELKSHHCAPAWVTEINGHPGKSTRLAGLWKLEECHASGCMMDLFVQMAIIMGLKQTLSNCVEYLVPWVTHKCRSLRASESGHLPRDPELRDWRRNYLLNPVNTFSLFDEFMEMMIQYGFTTIFVAAFPLAPLLALFSNLVEIRLDAIKMVWLQRRLVPRKAKDIGTWLQVLETIGVLAVIANGMVIAFTSEFIPRVVYKYRYSPCLKEGNSTVDCLKGYVNHSLSVFHTKDFQDPDGIEGSENVTLCRYRDYRNPPDYNFSEQFWFLLAIRLAFVILFEHVALCIKLIAAWFVPDIPQSVKNKVLEVKYQRLREKMWHGRQRLGGVGAGSRPPMPAHPTPASIFSARSTDV

SEQ ID NO: 8159 - protein, 27 aa, Artificial Sequence
  Synthetic polypeptide
QRSTATPGSPRAWRACGSWKSATPAAA

SEQ ID NO: 8160 - protein, 50 aa, Artificial Sequence
  Synthetic polypeptide
GTKPPPARLGWGPMSSSAWGQSLCSWASWAASAPSTRSAACWGCTLLSCS

SEQ ID NO: 8161 - protein, 50 aa, Artificial Sequence; identical to SEQ ID NO: 8160
  Synthetic polypeptide

SEQ ID NO: 8162 - protein, 50 aa, Artificial Sequence; identical to SEQ ID NO: 8160
  Synthetic polypeptide

SEQ ID NO: 8163 - protein, 50 aa, Artificial Sequence; identical to SEQ ID NO: 8160
  Synthetic polypeptide

SEQ ID NO: 8164 - protein, 50 aa, Artificial Sequence; identical to SEQ ID NO: 8160
  Synthetic polypeptide

SEQ ID NO: 8165 - protein, 50 aa, Artificial Sequence; identical to SEQ ID NO: 8160
  Synthetic polypeptide

SEQ ID NO: 8166 - protein, 64 aa, Artificial Sequence
  Synthetic polypeptide
SGKSVALEICIFSNSSSGPCLFAFLSLIFFFCEMAMLVPARQGDVRVGDGVWKAHEAQNLLQLA

SEQ ID NO: 8167 - protein, 64 aa, Artificial Sequence; identical to SEQ ID NO: 8166
  Synthetic polypeptide

SEQ ID NO: 8168 - protein, 64 aa, Artificial Sequence; identical to SEQ ID NO: 8166
  Synthetic polypeptide

SEQ ID NO: 8169 - protein, 64 aa, Artificial Sequence; identical to SEQ ID NO: 8166
  Synthetic polypeptide

SEQ ID NO: 8170 - protein, 64 aa, Artificial Sequence; identical to SEQ ID NO: 8166
  Synthetic polypeptide

SEQ ID NO: 8171 - protein, 64 aa, Artificial Sequence; identical to SEQ ID NO: 8166
  Synthetic polypeptide

SEQ ID NO: 8172 - protein, 64 aa, Artificial Sequence; identical to SEQ ID NO: 8166
  Synthetic polypeptide

SEQ ID NO: 8173 - protein, 64 aa, Artificial Sequence; identical to SEQ ID NO: 8166
  Synthetic polypeptide

SEQ ID NO: 8174 - protein, 95 aa, Artificial Sequence
  Synthetic polypeptide
CLPGRVMSELETACGKPMRHKTSSSSLRMGAYVFIGVGAVTMLMGFLGCIGAVNEVRCLLGLYFAFLLLILIAQVTAGALFYFNMGKLKQEMGGI

SEQ ID NO: 8175 - protein, 242 aa, Artificial Sequence
  Synthetic polypeptide
CLPGRVMSELETACGKPMRHKTSSSSLRMGAYVFIGVGAVTMLMGFLGCIGAVNEVRCLLGLYFAFLLLILIAQVTAGALFYFNMGKLKQEMGGIVTELIRDYNSSREDSLQDAWDYVQAQVKCCGWVSFYNWTDNAELMNRPEVTYPCSCEVKGEEDNSLSVRKGFCEAPGNRTQSGNHPEDWPVYQEGCMEKVQAWLQENLGIILGVGVGVAIIELLGMVLSICLCRHVHSEDYSKVPKY

SEQ ID NO: 8176 - protein, 44 aa, Artificial Sequence
  Synthetic polypeptide
GTKPPPARLGWGPMSSSAWGQSLCSWASWAASAPSTRSAACWGC

SEQ ID NO: 8177 - protein, 217 aa, Artificial Sequence
  Synthetic polypeptide
CLPGRVMSELETACGKPMRHKTSSSSLRMGAYVFIGVGAVTMLMGFLGCIGAVNEVRCLLGLLKQEMGGIVTELIRDYNSSREDSLQDAWDYVQAQVKCCGWVSFYNWTDNAELMNRPEVTYPCSCEVKGEEDNSLSVRKGFCEAPGNRTQSGNHPEDWPVYQEGCMEKVQAWLQENLGIILGVGVGVAIIELLGMVLSICLCRHVHSEDYSKVPKY

SEQ ID NO: 8178 - protein, 83 aa, Artificial Sequence
  Synthetic polypeptide
CLPGRVMSELETACGKPMRHKTSSSSLRMGAYVFIGVGAVTMLMGFLGCIGAVNEVRCLLGLYFAFLLLILIAQVTAGALFYF

SEQ ID NO: 8179 - protein, 90 aa, Artificial Sequence
  Synthetic polypeptide
CLPGRVMSELETACGKPMRHKTSSSSLRMGAYVFIGVGAVTMLMGFLGCIGAVNEVRCLLGLYFAFLLLILIAQVTAGALFYFNMGKVSP

SEQ ID NO: 8180 - protein, 24 aa, Artificial Sequence
  Synthetic polypeptide
GTKPPPARLGWGPMSSSAWGQSLC

SEQ ID NO: 8181 - protein, 43 aa, Artificial Sequence
  Synthetic polypeptide
CLPGRVMSELETACGKPMRHKTSSSSLRMGAYVFIGVGAVTML

SEQ ID NO: 8182 - protein, 79 aa, Artificial Sequence
  Synthetic polypeptide
CLPGRVMSELETACGKPMRHKTSSSSLRMGAYVFIGVGAVTMLMGFLGCIGAVNEVRCLLGLYFAFLLLILIAQVTAGA

SEQ ID NO: 8183 - protein, 151 aa, Artificial Sequence
  Synthetic polypeptide
CLPGRVMSELETACGKPMRHKTSSSSLRMGAYVFIGVGAVTMLMGFLGCIGAVNEVRCLLGLYFAFLLLILIAQVTAGALFYFNMGKLKQEMGGIVTELIRDYNSSREDSLQDAWDYVQAQVKCCGWVSFYNWTDNAELMNRPEVTYPCSC

SEQ ID NO: 8184 - protein, 486 aa, Artificial Sequence
  Synthetic polypeptide
MHFPEHLDHFTENMEDFSNDLFSSFFDDPVLDEKSPLLDMELDSPTPGIQAEHSYSLSGDSAPQSPLVPIKMEDTTQDAEHGAWALGHKLCSIMVKQEQSPELPVDPLAAPSAMAAAAAMATTPLLGLSPLSRLPIPHQAPGEMTQLPVIKAEPLEVNQFLKVTPEDLVQMPPTPPSSHGSDSDGSQSPRSLPPSSPVRPMARSSTAISTSPLLTAPHKLQGTSGPLLLTEEEKRTLIAEGYPIPTKLPLTKAEEKALKRVRRKIKNKISAQESRRKKKEYVECLEKKVETFTSENNELWKKVETLENANRTLLQQLQKLQTLVTNKISRPYKMAATQTGTCLMVAALCFVLVLGSLVPCLPEFSSGSQTVKEDPLAADGVYTASQMPSRSLLFYDDGAGLWEDGRSTLLPMEPPDGWEINPGGPAEQRPRDHLQHDHLDSTHETTKYLSEAWPKDGGNGTSPDFSHSKEWFHDRDLGPNTTIKLS

SEQ ID NO: 8185 - protein, 486 aa, Artificial Sequence; identical to SEQ ID NO: 8184
  Synthetic polypeptide

SEQ ID NO: 8186 - protein, 8 aa, Artificial Sequence
  Synthetic polypeptide
SQHFGRPR

SEQ ID NO: 8187 - protein, 8 aa, Artificial Sequence
  Synthetic polypeptide
SQHFGRPR

SEQ ID NO: 8188 - protein, 8 aa, Artificial Sequence
  Synthetic polypeptide
SQHFGRPR

SEQ ID NO: 8189 - protein, 8 aa, Artificial Sequence
  Synthetic polypeptide
SQHFGRPR

SEQ ID NO: 8190 - protein, 8 aa, Artificial Sequence
  Synthetic polypeptide
SQHFGRPR

SEQ ID NO: 8191 - protein, 8 aa, Artificial Sequence
  Synthetic polypeptide
SQHFGRPR

SEQ ID NO: 8192 - protein, 8 aa, Artificial Sequence
  Synthetic polypeptide
SQHFGRPR

SEQ ID NO: 8193 - protein, 8 aa, Artificial Sequence
  Synthetic polypeptide
SQHFGRPR

SEQ ID NO: 8194 - protein, 8 aa, Artificial Sequence
  Synthetic polypeptide
SQHFGRPR

SEQ ID NO: 8195 - protein, 8 aa, Artificial Sequence
  Synthetic polypeptide
SQHFGRPR

SEQ ID NO: 8196 - protein, 798 aa, Artificial Sequence
  Synthetic polypeptide
GRVRWLMPVIPALWEAEINFRCKPSFRESGSRNVREPTFVRHHWVHRRRQDGKCRHCGKGFQQKFTFHSKEIVAISCSWCKQAYHSKVSCFMLQQIEEPCSLGVHAAVVIPPTWILRARRPQNTLKASKKKKRASFKRKSSKKGPEEGRWRPFIIRPTPSPLMKPLLVFVNPKSGGNQGAKIIQSFLWYLNPRQVFDLSQGGPKEALEMYRKVHNLRILACGGDGTVGWILSTLDQLRLKPPPPVAILPLGTGNDLARTLNWGGGYTDEPVSKILSHVEEGNVVQLDRWDLHAEPNPEAGPEDRDEGATDRLPLDVFNNYFSLGFDAHVTLEFHESREANPEKFNSRFRNKMFYAGTAFSDFLMGSSKDLAKHIRVVCDGMDLTPKIQDLKPQCVVFLNIPRYCAGTMPWGHPGEHHDFEPQRHDDGYLEVIGFTMTSLAALQVGGHGERLTQCREVVLTTSKAIPVQVDGEPCKLAASRIRIALRNQATMVQKAKRRSAAPLHSDQQPVPEQLRIQVSRVSMHDYEALHYDKEQLKEASVPLGTVVVPGDSDLELCRAHIERLQQEPDGAGAKSPTCQKLSPKWCFLDATTASRFYRIDRAQEHLNYVTEIAQDEIYILDPELLGASARPDLPTPTSPLPTSPCSPTPRSLQGDAAPPQGEELIEAAKRNDFCKLQELHRAGGDLMHRDEQSRTLLHHAVSTGSKDVVRYLLDHAPPEILDAVEENGETCLHQAAALGQRTICHYIVEAGASLMKTDQQGDTPRQRAEKAQDTELAAYLENRQHYQMIQREDQETAV

SEQ ID NO: 8197 - protein, 798 aa, Artificial Sequence; identical to SEQ ID NO: 8196
  Synthetic polypeptide

SEQ ID NO: 8198 - protein, 798 aa, Artificial Sequence; identical to SEQ ID NO: 8196
  Synthetic polypeptide

SEQ ID NO: 8199 - protein, 798 aa, Artificial Sequence; identical to SEQ ID NO: 8196
  Synthetic polypeptide

SEQ ID NO: 8200 - protein, 798 aa, Artificial Sequence; identical to SEQ ID NO: 8196
  Synthetic polypeptide

SEQ ID NO: 8201 - protein, 798 aa, Artificial Sequence; identical to SEQ ID NO: 8196
  Synthetic polypeptide

SEQ ID NO: 8202 - protein, 21 aa, Artificial Sequence
  Synthetic polypeptide
PSAVAHACNPSTLGGRDKFPL

SEQ ID NO: 8203 - protein, 21 aa, Artificial Sequence
  Synthetic polypeptide
PSAVAHACNPSTLGGRDKFPL

SEQ ID NO: 8204 - protein, 21 aa, Artificial Sequence
  Synthetic polypeptide
PSAVAHACNPSTLGGRDKFPL

SEQ ID NO: 8205 - protein, 21 aa, Artificial Sequence
  Synthetic polypeptide
PSAVAHACNPSTLGGRDKFPL

SEQ ID NO: 8206 - protein, 21 aa, Artificial Sequence
  Synthetic polypeptide
PSAVAHACNPSTLGGRDKFPL

SEQ ID NO: 8207 - protein, 21 aa, Artificial Sequence
  Synthetic polypeptide
PSAVAHACNPSTLGGRDKFPL

SEQ ID NO: 8208 - protein, 21 aa, Artificial Sequence
  Synthetic polypeptide
PSAVAHACNPSTLGGRDKFPL

SEQ ID NO: 8209 - protein, 21 aa, Artificial Sequence
  Synthetic polypeptide
PSAVAHACNPSTLGGRDKFPL

SEQ ID NO: 8210 - protein, 21 aa, Artificial Sequence
  Synthetic polypeptide
PSAVAHACNPSTLGGRDKFPL

SEQ ID NO: 8211 - protein, 803 aa, Artificial Sequence
  Synthetic polypeptide
GRVRWLMPVIPALWEAEINFRCKPSFRESGSRNVREPTFVRHHWVHRRRQDGKCRHCGKGFQQKFTFHSKEIVAISCSWCKQAYHSKVSCFMLQQIEEPCSLGVHAAVVIPPTWILRARRPQNTLKASKKKKRASFKRKSSKKGPEEGRWRPFIIRPTPSPLMKPLLVFVNPKSGGNQGAKIIQSFLWYLNPRQVFDLSQGGPKEALEMYRKVHNLRILACGGDGTVGWILSTLDQLRLKPPPPVAILPLGTGNDLARTLNWGGGYTDEPVSKILSHVEEGNVVQLDRWDLHAEPNPEAGPEDRDEGATDRLPLDVFNNYFSLGFDAHVTLEFHESREANPEKFNSRFRNKMFYAGTAFSDFLMGSSKDLAKHIRVVCDGMDLTPKIQDLKPQCVVFLNIPRYCAGTMPWGHPGEHHDFEPQRHDDGYLEVIGFTMTSLAALQVGGHGERLTQCREVVLTTSKAIPVQVDGEPCKLAASRIRIALRNQATMVQKAKRRSAAPLHSDQQPVPEQLRIQVSRVSMHDYEALHYDKEQLKEASVPLGTVVVPGDSDLELCRAHIERLQQEPDGAGAKSPTCQKLSPKWCFLDATTASRFYRIDRAQEHLNYVTEIAQDEIYILDPELLGASARPDLPTPTSPLPTSPCSPTPRSLQGDAAPPQGEELIEAAKRNDFCKLQELHRAGGDLMHRDEQSRTLLHHAVSTGSKDVVRYLLDHAPPEILDAVEENPCSPSGETCLHQAAALGQRTICHYIVEAGASLMKTDQQGDTPRQRAEKAQDTELAAYLENRQHYQMIQREDQETAV

SEQ ID NO: 8212 - protein, 18 aa, Artificial Sequence
  Synthetic polypeptide
GRVRWLMPVIPALWEAEI

SEQ ID NO: 8213 - protein, 17 aa, Artificial Sequence
  Synthetic polypeptide
PSAVAHACNPSTLGGRD

SEQ ID NO: 8214 - protein, 775 aa, Artificial Sequence
  Synthetic polypeptide
GRVRWLMPVIPALWEAEINFRCKPSFRESGSRNVREGFQQKFTFHSKEIVAISCSWCKQAYHSKVSCFMLQQIEEPCSLGVHAAVVIPPTWILRARRPQNTLKASKKKKRASFKRKSSKKGPEEGRWRPFIIRPTPSPLMKPLLVFVNPKSGGNQGAKIIQSFLWYLNPRQVFDLSQGGPKEALEMYRKVHNLRILACGGDGTVGWILSTLDQLRLKPPPPVAILPLGTGNDLARTLNWGGGYTDEPVSKILSHVEEGNVVQLDRWDLHAEPNPEAGPEDRDEGATDRLPLDVFNNYFSLGFDAHVTLEFHESREANPEKFNSRFRNKMFYAGTAFSDFLMGSSKDLAKHIRVVCDGMDLTPKIQDLKPQCVVFLNIPRYCAGTMPWGHPGEHHDFEPQRHDDGYLEVIGFTMTSLAALQVGGHGERLTQCREVVLTTSKAIPVQVDGEPCKLAASRIRIALRNQATMVQKAKRRSAAPLHSDQQPVPEQLRIQVSRVSMHDYEALHYDKEQLKEASVPLGTVVVPGDSDLELCRAHIERLQQEPDGAGAKSPTCQKLSPKWCFLDATTASRFYRIDRAQEHLNYVTEIAQDEIYILDPELLGASARPDLPTPTSPLPTSPCSPTPRSLQGDAAPPQGEELIEAAKRNDFCKLQELHRAGGDLMHRDEQSRTLLHHAVSTGSKDVVRYLLDHAPPEILDAVEENGETCLHQAAALGQRTICHYIVEAGASLMKTDQQGDTPRQRAEKAQDTELAAYLENRQHYQMIQREDQETAV

SEQ ID NO: 8215 - protein, 83 aa, Artificial Sequence
  Synthetic polypeptide
GRVRWLMPVIPALWEAEINFRCKPSFRESGSRNVREPTFVRHHWVHRRRQDGKCRHCGKGFQQKFTFHSKEIVAISCSWCKQA

SEQ ID NO: 8216 - protein, 123 aa, Artificial Sequence
  Synthetic polypeptide
RAAAPDKVKKGGPGSECAEWAWGPCTPSSKDCGVGFREGTCGAQTQRIRCRVPCNWKKEFGADCKYKFENWGACDGGTGTKVRQGTLKKARYNAQCQETIRVTKPCTPKTKAKAKAKKGKGKD

SEQ ID NO: 8217 - protein, 123 aa, Artificial Sequence; identical to SEQ ID NO: 8216
  Synthetic polypeptide

SEQ ID NO: 8218 - protein, 123 aa, Artificial Sequence; identical to SEQ ID NO: 8216
  Synthetic polypeptide

SEQ ID NO: 8219 - protein, 123 aa, Artificial Sequence; identical to SEQ ID NO: 8216
  Synthetic polypeptide

SEQ ID NO: 8220 - protein, 123 aa, Artificial Sequence; identical to SEQ ID NO: 8216
  Synthetic polypeptide

SEQ ID NO: 8221 - protein, 7 aa, Artificial Sequence
  Synthetic polypeptide
ARRPLIR

SEQ ID NO: 8222 - protein, 7 aa, Artificial Sequence
  Synthetic polypeptide
ARRPLIR

SEQ ID NO: 8223 - protein, 7 aa, Artificial Sequence
  Synthetic polypeptide
ARRPLIR

SEQ ID NO: 8224 - protein, 7 aa, Artificial Sequence
  Synthetic polypeptide
ARRPLIR

SEQ ID NO: 8225 - protein, 7 aa, Artificial Sequence
  Synthetic polypeptide
ARRPLIR

SEQ ID NO: 8226 - protein, 7 aa, Artificial Sequence
  Synthetic polypeptide
ARRPLIR

SEQ ID NO: 8227 - protein, 7 aa, Artificial Sequence
  Synthetic polypeptide
ARRPLIR

SEQ ID NO: 8228 - protein, 7 aa, Artificial Sequence
  Synthetic polypeptide
ARRPLIR

SEQ ID NO: 8229 - protein, 29 aa, Artificial Sequence
  Synthetic polypeptide
RAAAPDKVKKGGPGSECAEWAWGPCTPSS

SEQ ID NO: 8230 - protein, 111 aa, Artificial Sequence
  Synthetic polypeptide
RAAAPDKVKKGGPGSECAEWAWGPCTPSSKDCGVGFREGTCGAQTQRIRCRVPCNWKKEFGADCKYKFENWGACDGGTGTKVRQGTLKKARYNAQCQETIRVTKPCTPKTK

SEQ ID NO: 8231 - protein, 136 aa, Artificial Sequence
  Synthetic polypeptide
RAAAPDKVKKGGPGSECAEWAWGPCTPSSKDCGVGFREGTCGAQTQRIRCRVPCNWKKEFGADCKYKFENWGACDGGTGTKVRQGTLKKARYNAQCQETIRVTKPCTPKTKAKAKGQRKEKGVGLSRGAAPPPPRL

SEQ ID NO: 8232 - protein, 13 aa, Artificial Sequence
  Synthetic polypeptide
SYGRFHGAGNMVS

SEQ ID NO: 8233 - protein, 13 aa, Artificial Sequence
  Synthetic polypeptide
SYGRFHGAGNMVS

SEQ ID NO: 8234 - protein, 13 aa, Artificial Sequence
  Synthetic polypeptide
SYGRFHGAGNMVS

SEQ ID NO: 8235 - protein, 13 aa, Artificial Sequence
  Synthetic polypeptide
SYGRFHGAGNMVS

SEQ ID NO: 8236 - protein, 13 aa, Artificial Sequence
  Synthetic polypeptide
SYGRFHGAGNMVS

SEQ ID NO: 8237 - protein, 13 aa, Artificial Sequence
  Synthetic polypeptide
SYGRFHGAGNMVS

SEQ ID NO: 8238 - protein, 13 aa, Artificial Sequence
  Synthetic polypeptide
SYGRFHGAGNMVS

SEQ ID NO: 8239 - protein, 13 aa, Artificial Sequence
  Synthetic polypeptide
SYGRFHGAGNMVS

SEQ ID NO: 8240 - protein, 13 aa, Artificial Sequence
  Synthetic polypeptide
SYGRFHGAGNMVS

SEQ ID NO: 8241 - protein, 13 aa, Artificial Sequence
  Synthetic polypeptide
SYGRFHGAGNMVS

SEQ ID NO: 8242 - protein, 13 aa, Artificial Sequence
  Synthetic polypeptide
SYGRFHGAGNMVS

SEQ ID NO: 8243 - protein, 432 aa, Artificial Sequence
  Synthetic polypeptide
NDSHMGDSMELEIWCLEMNEKCDKEIKVSYTVYNRLSLLLKSLLAITRVTPAYRLSRKQGHEYVILYRIYFGEVQLSGLGEGFQTVRVGTVGTPVGTITLSCAYRINLAFMSTRQFERTPPIMGIIIDHFVDRPYPSSSPMHPCNYRTAGEDTGVIYPSVEDSQEVCTTSFSTSPPSQLSSSRLSYQPAALGVGSADLAYPVVFAAGLNATHPHQLMVPGKEGGVPLAPNQPVHGTQADQERLATCTPSDRTHCAATPSSSEDTETVSNSSEGRASPHDVLETIFVRKVGAFVNKPINQVTLTSLDIPFAMFAPKNLELEDTDPMVNPPDSPETESPLQGSLHSDGSSGGSSGNTHDDFVMIDFKPAFSKDDILPMDLGTFYREFQNPPQLSSLSIDIGAQSMAEDLDSLPEKLAVHEKNVREFDAFVETLQ

SEQ ID NO: 8244 - protein, 432 aa, Artificial Sequence; identical to SEQ ID NO: 8243
  Synthetic polypeptide

SEQ ID NO: 8245 - protein, 432 aa, Artificial Sequence; identical to SEQ ID NO: 8243
  Synthetic polypeptide

SEQ ID NO: 8246 - protein, 432 aa, Artificial Sequence; identical to SEQ ID NO: 8243
  Synthetic polypeptide

SEQ ID NO: 8247 - protein, 31 aa, Artificial Sequence
  Synthetic polypeptide
NNLYVQELEDWLDKMIVIWEIPWSWKYGVLK

SEQ ID NO: 8248 - protein, 31 aa, Artificial Sequence; identical to SEQ ID NO: 8247
  Synthetic polypeptide

SEQ ID NO: 8249 - protein, 31 aa, Artificial Sequence; identical to SEQ ID NO: 8247
  Synthetic polypeptide

SEQ ID NO: 8250 - protein, 31 aa, Artificial Sequence; identical to SEQ ID NO: 8247
  Synthetic polypeptide

SEQ ID NO: 8251 - protein, 31 aa, Artificial Sequence; identical to SEQ ID NO: 8247
  Synthetic polypeptide

SEQ ID NO: 8252 - protein, 31 aa, Artificial Sequence; identical to SEQ ID NO: 8247
  Synthetic polypeptide

SEQ ID NO: 8253 - protein, 31 aa, Artificial Sequence; identical to SEQ ID NO: 8247
  Synthetic polypeptide

SEQ ID NO: 8254 - protein, 31 aa, Artificial Sequence; identical to SEQ ID NO: 8247
  Synthetic polypeptide

SEQ ID NO: 8255 - protein, 31 aa, Artificial Sequence; identical to SEQ ID NO: 8247
  Synthetic polypeptide

SEQ ID NO: 8256 - protein, 31 aa, Artificial Sequence; identical to SEQ ID NO: 8247
  Synthetic polypeptide

SEQ ID NO: 8257 - protein, 31 aa, Artificial Sequence; identical to SEQ ID NO: 8247
  Synthetic polypeptide

SEQ ID NO: 8258 - protein, 395 aa, Artificial Sequence
  Synthetic polypeptide
NDSHMGDSMELEIWCLEMNEKCDKEIKVSYTVYNRLSLLLKSLLAITRVTPAYRLSRKQGHEYVILYRIYFGEVQLSGLGEGFQTVRVGTVGTPVGTITLSCAYRINLAFMSTRQFERTPPIMGIIIDHFVDRPYPSSSPMHPCNYRTAGEDTGVIYPSVEDSQEVCTTSFSTSPPSQLMVPGKEGGVPLAPNQPVHGTQADQERLATCTPSDRTHCAATPSSSEDTETVSNSSEGRASPHDVLETIFVRKVGAFVNKPINQVTLTSLDIPFAMFAPKNLELEDTDPMVNPPDSPETESPLQGSLHSDGSSGGSSGNTHDDFVMIDFKPAFSKDDILPMDLGTFYREFQNPPQLSSLSIDIGAQSMAEDLDSLPEKLAVHEKNVREFDAFVETLQ

SEQ ID NO: 8259 - protein, 395 aa, Artificial Sequence; identical to SEQ ID NO: 8258
  Synthetic polypeptide

SEQ ID NO: 8260 - protein, 395 aa, Artificial Sequence; identical to SEQ ID NO: 8258
  Synthetic polypeptide

SEQ ID NO: 8261 - protein, 395 aa, Artificial Sequence; identical to SEQ ID NO: 8258
  Synthetic polypeptide

SEQ ID NO: 8262 - protein, 34 aa, Artificial Sequence
  Synthetic polypeptide
NDSHMGDSMELEIWCLEMNEKCDKEIKVSYTVYN

SEQ ID NO: 8263 - protein, 465 aa, Artificial Sequence
  Synthetic polypeptide
NDSHMGDSMELEIWCLEMNEKCDKEIKVSYTVYNRLSLLLKSLLAITRVTPAYRLSRKQGHEYVILYRIYFGEVQLSGLGEGFQTVRVGTVGTPVGTITLSCAYRINLAFMSTRQFERTPPIMGIIIDHFVDRPYPSSSPMHPCNYRTAGEDTGVIYPSVEDSQEVCTTSFSTSPPSQCVFTVTKAHFQTPTPVVTDTLRVPMAGLAFSHQLSSSRLSYQPAALGVGSADLAYPVVFAAGLNATHPHQLMVPGKEGGVPLAPNQPVHGTQADQERLATCTPSDRTHCAATPSSSEDTETVSNSSEGRASPHDVLETIFVRKVGAFVNKPINQVTLTSLDIPFAMFAPKNLELEDTDPMVNPPDSPETESPLQGSLHSDGSSGGSSGNTHDDFVMIDFKPAFSKDDILPMDLGTFYREFQNPPQLSSLSIDIGAQSMAEDLDSLPEKLAVHEKNVREFDAFVETLQ

SEQ ID NO: 8264 - protein, 113 aa, Artificial Sequence
  Synthetic polypeptide
NDSHMGDSMELEIWCLEMNEKCDKEIKVSYTVYNRLSLLLKSLLAITRVTPAYRLSRKQGHEYVILYRIYFGEVQLSGLGEGFQTVRVGTVGTPVGTITLSCAYRINLAFMST

SEQ ID NO: 8265 - protein, 17 aa, Artificial Sequence
  Synthetic polypeptide
LSYWLMCTEHPTVPVIW

SEQ ID NO: 8266 - protein, 17 aa, Artificial Sequence
  Synthetic polypeptide
LSYWLMCTEHPTVPVIW

SEQ ID NO: 8267 - protein, 17 aa, Artificial Sequence
  Synthetic polypeptide
LSYWLMCTEHPTVPVIW

SEQ ID NO: 8268 - protein, 528 aa, Artificial Sequence
  Synthetic polypeptide
CVLSTRQCLSYGNCAEGLGTNYRGHVNITRSGIECQLWRSRYPHKPEINSTTHPGADLQENFCRNPDSSTTGPWCYTTDPTVRRQECSIPVCGQDQVTVAMTPRSEGSSVNLSPPLEQCVPDRGQQYQGRLAVTTHGLPCLAWASAQAKALSKHQDFNSAVQLVENFCRNPDGDEEGVWCYVAGKPGDFGYCDLNYCEEAVEEETGDGLDEDSDRAIEGRTATSEYQTFFNPRTFGSGEADCGLRPLFEKKSLEDKTERELLESYIDGRIVEGSDAEIGMSPWQVMLFRKSPQELLCGASLISDRWVLTAAHCLLYPPWDKNFTENDLLVRIGKHSRTRYERNIEKISMLEKIYIHPRYNWRENLDRDIALMKLKKPVAFSDYIHPVCLPDRETAASLLQAGYKGRVTGWGNLKETWTANVGKGQPSVLQVVNLPIVERPVCKDSTRIRITDNMFCAGYKPDEGKRGDACEGDSGGPFVMKSPFNNRWYQMGIVSWGEGCDRDGKYGFYTHVFRLKKWIQKVIDQFGE

SEQ ID NO: 8269 - protein, 22 aa, Artificial Sequence
  Synthetic polypeptide
APDSACHMVTVLRVWVRTTEGM

SEQ ID NO: 8270 - protein, 22 aa, Artificial Sequence
  Synthetic polypeptide
APDSACHMVTVLRVWVRTTEGM

SEQ ID NO: 8271 - protein, 22 aa, Artificial Sequence
  Synthetic polypeptide
APDSACHMVTVLRVWVRTTEGM

SEQ ID NO: 8272 - protein, 489 aa, Artificial Sequence
  Synthetic polypeptide
CVLSTRQCLSYGNCAEGLGTNYRGHVNITRSGIECQLWRSRYPHKPEINSTTHPGADLQENFCRNPDSSTTGPWCYTTDPTVRRQECSIPVCGQDQVTVAMTPRSEGSSVNLSPPLEQCVPDRGQQYQGRLAVTTHGLPCLAWASAQAKALSKHQDFNSAVQLVENFCRNPDGDEEGVWCYVAGKPGDFGYCDLNYCEEAVEEETGDGLDEDSDRAIEGRTATSEYQTFFNPRTFGSGEADCGLRPLFEKKSLEDKTERELLESYIDGRIVEGSDAEIGMSPWQVMLFRKSPQELLCGASLISDRWVLTAAHCLLYPPWDKNFTENDLLVRIGKHSRTRYERNIEKISMLEKIYIHPSLLQAGYKGRVTGWGNLKETWTANVGKGQPSVLQVVNLPIVERPVCKDSTRIRITDNMFCAGYKPDEGKRGDACEGDSGGPFVMKSPFNNRWYQMGIVSWGEGCDRDGKYGFYTHVFRLKKWIQKVIDQFGE

SEQ ID NO: 8273 - protein, 240 aa, Artificial Sequence
  Synthetic polypeptide
CVLSTRQCLSYGNCAEGLGTNYRGHVNITRSGIECQLWRSRYPHKPEINSTTHPGADLQENFCRNPDSSTTGPWCYTTDPTVRRQECSIPVCGQDQVTVAMTPRSEGSSVNLSPPLEQCVPDRGQQYQGRLAVTTHGLPCLAWASAQAKALSKHQDFNSAVQLVENFCRNPDGDEEGVWCYVAGKPGDFGYCDLNYCEEAVEEETGDGLDEDSDRAIEGRTATSEYQTFFNPRTFGSGEA

SEQ ID NO: 8274 - protein, 56 aa, Artificial Sequence
  Synthetic polypeptide
LFWGFNSVCQGTHILFREFSFVQATPHNRVSFLRAFWRCFRTVGKNGDFYIQGKPN

SEQ ID NO: 8275 - protein, 57 aa, Artificial Sequence
  Synthetic polypeptide
DSSGVLTVYAREHTFSFENSASSKPPPTIGYHFYGPSGDASELWAKMAIFIYKENQT

SEQ ID NO: 8276 - protein, 5 aa, Artificial Sequence
  Synthetic polypeptide
TLLGF

SEQ ID NO: 8277 - protein, 5 aa, Artificial Sequence
  Synthetic polypeptide
TLLGF

SEQ ID NO: 8278 - protein, 5 aa, Artificial Sequence
  Synthetic polypeptide
TLLGF

SEQ ID NO: 8279 - protein, 5 aa, Artificial Sequence
  Synthetic polypeptide
TLLGF

SEQ ID NO: 8280 - protein, 5 aa, Artificial Sequence
  Synthetic polypeptide
TLLGF

SEQ ID NO: 8281 - protein, 5 aa, Artificial Sequence
  Synthetic polypeptide
TLLGF

SEQ ID NO: 8282 - protein, 285 aa, Artificial Sequence
  Synthetic polypeptide
LFWGFNSVCQGTHILFREFSFVQATPHNRVSFLRAFWRCFRTVGKNGDLLTMKEYHCLLQLLCPDFPLELTQKAARIVLMDDAMDCLMSFSDFLFAFQIQFYYSEFLDSVAAIYEDLLSGKNPNTVIVPTSSSGQHRQRPALGGAGTLEGVEASLFYQCLENLCDRHKYSCPPPALVKEALSNVQRLTFYGFLMALSKHRGINQALGALPDKGDLMHDPAMDEELERLLAQVPGLVNSVTASPEASCLPSRTPPRVGSPWRPLHHSRKVDGESDGSTEETDESET

SEQ ID NO: 8283 - protein, 50 aa, Artificial Sequence
  Synthetic polypeptide
DSSGVLTVYAREHTFSFENSASSKPPPTIGYHFYGPSGDASELWAKMAIC

SEQ ID NO: 8284 - protein, 50 aa, Artificial Sequence; identical to SEQ ID NO: 8283
  Synthetic polypeptide

SEQ ID NO: 8285 - protein, 50 aa, Artificial Sequence; identical to SEQ ID NO: 8283
  Synthetic polypeptide

SEQ ID NO: 8286 - protein, 50 aa, Artificial Sequence; identical to SEQ ID NO: 8283
  Synthetic polypeptide

SEQ ID NO: 8287 - protein, 50 aa, Artificial Sequence; identical to SEQ ID NO: 8283
  Synthetic polypeptide

SEQ ID NO: 8288 - protein, 280 aa, Artificial Sequence
  Synthetic polypeptide
LFWGFNSVCQGTHILFREFSFVQATPHNRVSFLRAFWRCFRTVGKNGDLLTMKEYHCLLQLLCPDFPLELTQKAARIVLMDDAMDCLMSFSDFLFAFQIQFYYSEFLDSVAAIYEDLLSGKNPNTVIVPTSSSGQHRQRPALGGAGTLEGVEASLFYQCLENLCDRHKYSCPPPALVKEALSNVQRLTFYGFLMALSKHRGINQALGALPDKGDLMHDPAMDEELERLVVRSKLHRTSRQHRAKEPGAFGFQRREKQEALERVSSASVPTPYHYRWEPRE

SEQ ID NO: 8289 - protein, 228 aa, Artificial Sequence
  Synthetic polypeptide
LFWGFNSVCQGTHILFREFSFVQATPHNRVSFLRAFWRCFRTVGKNGDLLTMKEYHCLLQLLCPDFPLELTQKAARIVLMDDAMDCLMSFSDFLFAFQIQFYYSEFLDSVAAIYEDLLSGKNPNTVIVPTSSSGQHRQRPALGGAGTLEGVEASLFYQCLENLCDRHKYSCPPPALVKEALSNVQRLTFYGFLMALSKHRGINQALGALPDKGDLMHDPAMDEELERL

SEQ ID NO: 8290 - protein, 291 aa, Artificial Sequence
  Synthetic polypeptide
LFWGFNSVCQGTHILFREFSFVQATPHNRVSFLRAFWRCFRTVGKNGDLLTMKEYHCLLQLLCPDFPLELTQKAARIVLMDDAMDCLMSFSDFLFAFQIQFYYSEFLDSVAAIYEDLLSGKNPNTVIVPTSSSGQHRQRPALGGAGTLEGVEASLFYQCLENLCDRHKYSCPPPALVKEALSNVQRLTFYGFLMALSKHRGINQALGALPDKGDLMHDPAMDEELERLLLPFFRLAQVPGLVNSVTASPEASCLPSRTPPRVGSPWRPLHHSRKVDGESDGSTEETDESET

SEQ ID NO: 8291 - protein, 50 aa, Artificial Sequence
  Synthetic polypeptide
LFWGFNSVCQGTHILFREFSFVQATPHNRVSFLRAFWRCFRTVGKNGDLL

SEQ ID NO: 8292 - protein, 13 aa, Artificial Sequence
  Synthetic polypeptide
VYRAPDNHGHPPA

SEQ ID NO: 8293 - protein, 13 aa, Artificial Sequence
  Synthetic polypeptide
VYRAPDNHGHPPA

SEQ ID NO: 8294 - protein, 13 aa, Artificial Sequence
  Synthetic polypeptide
VYRAPDNHGHPPA

SEQ ID NO: 8295 - protein, 13 aa, Artificial Sequence
  Synthetic polypeptide
VYRAPDNHGHPPA

SEQ ID NO: 8296 - protein, 125 aa, Artificial Sequence
  Synthetic polypeptide
RLILGASTYMDSSTRPLLTSSSKFGSWACSPGHSIHPFLPSACECIGLLTTMAILLHEIPHEVGDFAILLRAGFDRWSAAKLQLSTALGGLLGAGFAICTQSPKGRRRQPGSCPSPLAAFSTSPW

SEQ ID NO: 8297 - protein, 30 aa, Artificial Sequence
  Synthetic polypeptide
PPHLNLVPGPAPLGTLSILSFPAPVSVSGS

SEQ ID NO: 8298 - protein, 30 aa, Artificial Sequence; identical to SEQ ID NO: 8297
  Synthetic polypeptide

SEQ ID NO: 8299 - protein, 30 aa, Artificial Sequence; identical to SEQ ID NO: 8297
  Synthetic polypeptide

SEQ ID NO: 8300 - protein, 30 aa, Artificial Sequence; identical to SEQ ID NO: 8297
  Synthetic polypeptide

SEQ ID NO: 8301 - protein, 94 aa, Artificial Sequence
  Synthetic polypeptide
RLILGASTYMDSSTRPLLTSSSKFGSWACSPGHSIHPFLPSACECIGLLTTMAILLHEIPHEVGDFAILLRAGFDRWSAAKLQLSTALGGLLGA

SEQ ID NO: 8302 - protein, 171 aa, Artificial Sequence
  Synthetic polypeptide
RLILGASTYMDSSTRPLLTSSSKFGSWACSPGHSIHPFLPSACECIGLLTTMAILLHEIPHEVGDFAILLRAGFDRWSAAKLQLSTALGGLLGAGFAICTQSPKGVVGCSPAAEETAAWVLPFTSGGFLYIALVNVLPDLLEEEDPWRSLQQLLLLCAGIVVMVLFSLFVD

SEQ ID NO: 8303 - protein, 164 aa, Artificial Sequence
  Synthetic polypeptide
RLILGASTYMDSSTRPLLTSSSKFGSWACSPGHSIHPFLPSACECIGLLTTMAILLHEIPHEVGDFAILLRAGFDRWSAAKLQLSTALGGLLGAGFAICTQSPKGVEETAAWVLPFTSGGFLYIALVNVLPDLLEEEDPWRSLQQLLLLCAGIVVMVLFSLFVD

SEQ ID NO: 8304 - protein, 6 aa, Artificial Sequence
  Synthetic polypeptide
GQSLLS

SEQ ID NO: 8305 - protein, 6 aa, Artificial Sequence
  Synthetic polypeptide
GQSLLS

SEQ ID NO: 8306 - protein, 6 aa, Artificial Sequence
  Synthetic polypeptide
GQSLLS

SEQ ID NO: 8307 - protein, 6 aa, Artificial Sequence
  Synthetic polypeptide
GQSLLS

SEQ ID NO: 8308 - protein, 6 aa, Artificial Sequence
  Synthetic polypeptide
GQSLLS

SEQ ID NO: 8309 - protein, 382 aa, Artificial Sequence
  Synthetic polypeptide
NLRQLAIGVDPPAQHSSPAEKWLDCLKKKKRKEKKGQAPLKGHQPQRLKADKPTKMRKDQYKNIENSKCHSALFPPNDCITSPARFRNRVEAEMPEMTEVEFIIWIGTKFTELKSPDEGFEGKSLYESWTKKSPSPEFSGMPRISKLGSGNDFEVFFQRLGIASGRARYTKNWETNKFSGYPLYHSVYETYELVEKFYDPMFKYHLTVAQVRGGMVFELANSIVLPFDCRDYAVVLRKYADKIYSISMKHPQEMKTYSVSFDSLFSAVKNFTEIASKFSERLQDFDKSNPIVLRMMNDQLMFLERAFIDPLGLPDRPFYRHVIYAPSSHNKYAGESFPGIYDALFDIESKVDPSKAWGEVKRQIYVAAFTVQAAAETLSEVA

SEQ ID NO: 8310 - protein, 382 aa, Artificial Sequence; identical to SEQ ID NO: 8309
  Synthetic polypeptide

SEQ ID NO: 8311 - protein, 382 aa, Artificial Sequence; identical to SEQ ID NO: 8309
  Synthetic polypeptide

SEQ ID NO: 8312 - protein, 351 aa, Artificial Sequence
  Synthetic polypeptide
NLRQLAIGVDPPAQHSSPAEKWLDCLKKKKRKEKKGQAPLKGHQPQRLKADKPTKMRKDQYKNIENSKCHSALFPPNDCITSPARFRNRVEAEMPEMTEVEFIIWIGTKFTELKSPDEGFEGKSLYESWTKKSPSPEFSGMPRISKLGSGNDFEVFFQRLGIASGRARYTKNWETNKFSGYPLYHSVYETYELVEKFYDPMFKYHLTVAQVRGGMVFELANSIVLPFDCRDYAVVLRKYADKIYSISMKHPQEMKTYSVSFDSLFSAVKNFTEIASKFSERLQDFDKSKHVIYAPSSHNKYAGESFPGIYDALFDIESKVDPSKAWGEVKRQIYVAAFTVQAAAETLSEVA

SEQ ID NO: 8313 - protein, 351 aa, Artificial Sequence; identical to SEQ ID NO: 8312
  Synthetic polypeptide

SEQ ID NO: 8314 - protein, 18 aa, Artificial Sequence
  Synthetic polypeptide
EAGCILYCFTAITDDSSS

SEQ ID NO: 8315 - protein, 18 aa, Artificial Sequence
  Synthetic polypeptide
EAGCILYCFTAITDDSSS

SEQ ID NO: 8316 - protein, 18 aa, Artificial Sequence
  Synthetic polypeptide
EAGCILYCFTAITDDSSS

SEQ ID NO: 8317 - protein, 18 aa, Artificial Sequence
  Synthetic polypeptide
EAGCILYCFTAITDDSSS

SEQ ID NO: 8318 - protein, 18 aa, Artificial Sequence
  Synthetic polypeptide
EAGCILYCFTAITDDSSS

SEQ ID NO: 8319 - protein, 83 aa, Artificial Sequence
  Synthetic polypeptide
SGPSPQHSCSTKTWPGYFLNWVPDPFPPVWVRPPSGVSSHLLQVCSGWQHVYNSLGRRSYSKKQAAFFTVSQPSPMIPPAEKP

SEQ ID NO: 8320 - protein, 83 aa, Artificial Sequence; identical to SEQ ID NO: 8319
  Synthetic polypeptide

SEQ ID NO: 8321 - protein, 83 aa, Artificial Sequence; identical to SEQ ID NO: 8319
  Synthetic polypeptide

SEQ ID NO: 8322 - protein, 83 aa, Artificial Sequence; identical to SEQ ID NO: 8319
  Synthetic polypeptide

SEQ ID NO: 8323 - protein, 83 aa, Artificial Sequence; identical to SEQ ID NO: 8319
  Synthetic polypeptide

SEQ ID NO: 8324 - protein, 273 aa, Artificial Sequence
  Synthetic polypeptide
FLQLKSPDEGFEGKSLYESWTKKSPSPEFSGMPRISKLGSGNDFEVFFQRLGIASGRARYTKNWETNKFSGYPLYHSVYETYELVEKFYDPMFKYHLTVAQVRGGMVFELANSIVLPFDCRDYAVVLRKYADKIYSISMKHPQEMKTYSVSFDSLFSAVKNFTEIASKFSERLQDFDKSNPIVLRMMNDQLMFLERAFIDPLGLPDRPFYRHVIYAPSSHNKYAGESFPGIYDALFDIESKVDPSKAWGEVKRQIYVAAFTVQAAAETLSEVA

SEQ ID NO: 8325 - protein, 273 aa, Artificial Sequence; identical to SEQ ID NO: 8324
  Synthetic polypeptide

SEQ ID NO: 8326 - protein, 273 aa, Artificial Sequence; identical to SEQ ID NO: 8324
  Synthetic polypeptide

SEQ ID NO: 8327 - protein, 242 aa, Artificial Sequence
  Synthetic polypeptide
FLQLKSPDEGFEGKSLYESWTKKSPSPEFSGMPRISKLGSGNDFEVFFQRLGIASGRARYTKNWETNKFSGYPLYHSVYETYELVEKFYDPMFKYHLTVAQVRGGMVFELANSIVLPFDCRDYAVVLRKYADKIYSISMKHPQEMKTYSVSFDSLFSAVKNFTEIASKFSERLQDFDKSKHVIYAPSSHNKYAGESFPGIYDALFDIESKVDPSKAWGEVKRQIYVAAFTVQAAAETLSEVA

SEQ ID NO: 8328 - protein, 242 aa, Artificial Sequence; identical to SEQ ID NO: 8327
  Synthetic polypeptide

SEQ ID NO: 8329 - protein, 16 aa, Artificial Sequence
  Synthetic polypeptide
SLTLIQVFLFYAQGGL

SEQ ID NO: 8330 - protein, 16 aa, Artificial Sequence
  Synthetic polypeptide
SLTLIQVFLFYAQGGL

SEQ ID NO: 8331 - protein, 16 aa, Artificial Sequence
  Synthetic polypeptide
SLTLIQVFLFYAQGGL

SEQ ID NO: 8332 - protein, 16 aa, Artificial Sequence
  Synthetic polypeptide
SLTLIQVFLFYAQGGL

SEQ ID NO: 8333 - protein, 16 aa, Artificial Sequence
  Synthetic polypeptide
SLTLIQVFLFYAQGGL

SEQ ID NO: 8334 - protein, 16 aa, Artificial Sequence
  Synthetic polypeptide
SKSFCFMHRVVYKILQ

SEQ ID NO: 8335 - protein, 16 aa, Artificial Sequence
  Synthetic polypeptide
SKSFCFMHRVVYKILQ

SEQ ID NO: 8336 - protein, 16 aa, Artificial Sequence
  Synthetic polypeptide
SKSFCFMHRVVYKILQ

SEQ ID NO: 8337 - protein, 16 aa, Artificial Sequence
  Synthetic polypeptide
SKSFCFMHRVVYKILQ

SEQ ID NO: 8338 - protein, 16 aa, Artificial Sequence
  Synthetic polypeptide
SKSFCFMHRVVYKILQ

SEQ ID NO: 8339 - protein, 755 aa, Artificial Sequence
  Synthetic polypeptide
LSPPPTGLHPLHPVHFSDLSSSISSSVWCFLIPHSNPSLSVLCTGWFIKSSNEATNITPKHNMKAFLDELKAENIKKFLYNFTQIPHLAGTEQNFQLAKQIQSQWKEFGLDSVELAHYDVLLSYPNKTHPNYISIINEDGNEIFNTSLFEPPPPGYENVSDIVPPFSAFSPQGMPEGDLVYVNYARTEDFFKLERDMKINCSGKIVIARYGKVFRGNKVKNAQLAGAKGVILYSDPADYFAPGVKSYPDGWNLPGGGVQRGNILNLNGAGDPLTPGYPANEYAYRRGIAEAVGLPSIPVHPIGYYDAQKLLEKMGGSAPPDSSWRGSLKVPYNVGPGFTGNFSTQKVKMHIHSTNEVTRIYNVIGTLRGAVEPDRYVILGGHRDSWVFGGIDPQSGAAVVHEIVRSFGTLKKEGWRPRRTILFASWDAEEFGLLGSTEWAEENSRLLQERGVAYINADSSIEGNYTLRVDCTPLMYSLVHNLTKELKSPDEGFEGKSLYESWTKKSPSPEFSGMPRISKLGSGNDFEVFFQRLGIASGRARYTKNWETNKFSGYPLYHSVYETYELVEKFYDPMFKYHLTVAQVRGGMVFELANSIVLPFDCRDYAVVLRKYADKIYSISMKHPQEMKTYSVSFDSLFSAVKNFTEIASKFSERLQDFDKSNPIVLRMMNDQLMFLERAFIDPLGLPDRPFYRHVIYAPSSHNKYAGESFPGIYDALFDIESKVDPSKAWGEVKRQIYVAAFTVQAAAETLSEVA

SEQ ID NO: 8340 - protein, 755 aa, Artificial Sequence; identical to SEQ ID NO: 8339
  Synthetic polypeptide

SEQ ID NO: 8341 - protein, 724 aa, Artificial Sequence
  Synthetic polypeptide
LSPPPTGLHPLHPVHFSDLSSSISSSVWCFLIPHSNPSLSVLCTGWFIKSSNEATNITPKHNMKAFLDELKAENIKKFLYNFTQIPHLAGTEQNFQLAKQIQSQWKEFGLDSVELAHYDVLLSYPNKTHPNYISIINEDGNEIFNTSLFEPPPPGYENVSDIVPPFSAFSPQGMPEGDLVYVNYARTEDFFKLERDMKINCSGKIVIARYGKVFRGNKVKNAQLAGAKGVILYSDPADYFAPGVKSYPDGWNLPGGGVQRGNILNLNGAGDPLTPGYPANEYAYRRGIAEAVGLPSIPVHPIGYYDAQKLLEKMGGSAPPDSSWRGSLKVPYNVGPGFTGNFSTQKVKMHIHSTNEVTRIYNVIGTLRGAVEPDRYVILGGHRDSWVFGGIDPQSGAAVVHEIVRSFGTLKKEGWRPRRTILFASWDAEEFGLLGSTEWAEENSRLLQERGVAYINADSSIEGNYTLRVDCTPLMYSLVHNLTKELKSPDEGFEGKSLYESWTKKSPSPEFSGMPRISKLGSGNDFEVFFQRLGIASGRARYTKNWETNKFSGYPLYHSVYETYELVEKFYDPMFKYHLTVAQVRGGMVFELANSIVLPFDCRDYAVVLRKYADKIYSISMKHPQEMKTYSVSFDSLFSAVKNFTEIASKFSERLQDFDKSKHVIYAPSSHNKYAGESFPGIYDALFDIESKVDPSKAWGEVKRQIYVAAFTVQAAAETLSEVA

SEQ ID NO: 8342 - protein, 724 aa, Artificial Sequence; identical to SEQ ID NO: 8341
  Synthetic polypeptide

SEQ ID NO: 8343 - protein, 79 aa, Artificial Sequence
  Synthetic polypeptide
LSPPPTGLHPLHPVHFSDLSSSISSSVWCFLIPHSNPSLSVLCTGWFIKSSNEATNITPKHNMKAFLDELKAENIKKFL

SEQ ID NO: 8344 - protein, 40 aa, Artificial Sequence
  Synthetic polypeptide
IPVLTLPLLSGLEQVTESLSALVTLFYDEDNIICKLLGGL

SEQ ID NO: 8345 - protein, 40 aa, Artificial Sequence; identical to SEQ ID NO: 8344
  Synthetic polypeptide

SEQ ID NO: 8346 - protein, 40 aa, Artificial Sequence; identical to SEQ ID NO: 8344
  Synthetic polypeptide

SEQ ID NO: 8347 - protein, 40 aa, Artificial Sequence; identical to SEQ ID NO: 8344
  Synthetic polypeptide

SEQ ID NO: 8348 - protein, 40 aa, Artificial Sequence; identical to SEQ ID NO: 8344
  Synthetic polypeptide

SEQ ID NO: 8349 - protein, 22 aa, Artificial Sequence
  Synthetic polypeptide
LPYFMMRIILSANYWVVYKILQ

SEQ ID NO: 8350 - protein, 22 aa, Artificial Sequence
  Synthetic polypeptide
LPYFMMRIILSANYWVVYKILQ

SEQ ID NO: 8351 - protein, 22 aa, Artificial Sequence
  Synthetic polypeptide
LPYFMMRIILSANYWVVYKILQ

SEQ ID NO: 8352 - protein, 22 aa, Artificial Sequence
  Synthetic polypeptide
LPYFMMRIILSANYWVVYKILQ

SEQ ID NO: 8353 - protein, 22 aa, Artificial Sequence
  Synthetic polypeptide
LPYFMMRIILSANYWVVYKILQ

SEQ ID NO: 8354 - protein, 717 aa, Artificial Sequence
  Synthetic polypeptide
YYLQIIGWFIKSSNEATNITPKHNMKAFLDELKAENIKKFLYNFTQIPHLAGTEQNFQLAKQIQSQWKEFGLDSVELAHYDVLLSYPNKTHPNYISIINEDGNEIFNTSLFEPPPPGYENVSDIVPPFSAFSPQGMPEGDLVYVNYARTEDFFKLERDMKINCSGKIVIARYGKVFRGNKVKNAQLAGAKGVILYSDPADYFAPGVKSYPDGWNLPGGGVQRGNILNLNGAGDPLTPGYPANEYAYRRGIAEAVGLPSIPVHPIGYYDAQKLLEKMGGSAPPDSSWRGSLKVPYNVGPGFTGNFSTQKVKMHIHSTNEVTRIYNVIGTLRGAVEPDRYVILGGHRDSWVFGGIDPQSGAAVVHEIVRSFGTLKKEGWRPRRTILFASWDAEEFGLLGSTEWAEENSRLLQERGVAYINADSSIEGNYTLRVDCTPLMYSLVHNLTKELKSPDEGFEGKSLYESWTKKSPSPEFSGMPRISKLGSGNDFEVFFQRLGIASGRARYTKNWETNKFSGYPLYHSVYETYELVEKFYDPMFKYHLTVAQVRGGMVFELANSIVLPFDCRDYAVVLRKYADKIYSISMKHPQEMKTYSVSFDSLFSAVKNFTEIASKFSERLQDFDKSNPIVLRMMNDQLMFLERAFIDPLGLPDRPFYRHVIYAPSSHNKYAGESFPGIYDALFDIESKVDPSKAWGEVKRQIYVAAFTVQAAAETLSEVA

SEQ ID NO: 8355 - protein, 717 aa, Artificial Sequence; identical to SEQ ID NO: 8354
  Synthetic polypeptide

SEQ ID NO: 8356 - protein, 686 aa, Artificial Sequence
  Synthetic polypeptide
YYLQIIGWFIKSSNEATNITPKHNMKAFLDELKAENIKKFLYNFTQIPHLAGTEQNFQLAKQIQSQWKEFGLDSVELAHYDVLLSYPNKTHPNYISIINEDGNEIFNTSLFEPPPPGYENVSDIVPPFSAFSPQGMPEGDLVYVNYARTEDFFKLERDMKINCSGKIVIARYGKVFRGNKVKNAQLAGAKGVILYSDPADYFAPGVKSYPDGWNLPGGGVQRGNILNLNGAGDPLTPGYPANEYAYRRGIAEAVGLPSIPVHPIGYYDAQKLLEKMGGSAPPDSSWRGSLKVPYNVGPGFTGNFSTQKVKMHIHSTNEVTRIYNVIGTLRGAVEPDRYVILGGHRDSWVFGGIDPQSGAAVVHEIVRSFGTLKKEGWRPRRTILFASWDAEEFGLLGSTEWAEENSRLLQERGVAYINADSSIEGNYTLRVDCTPLMYSLVHNLTKELKSPDEGFEGKSLYESWTKKSPSPEFSGMPRISKLGSGNDFEVFFQRLGIASGRARYTKNWETNKFSGYPLYHSVYETYELVEKFYDPMFKYHLTVAQVRGGMVFELANSIVLPFDCRDYAVVLRKYADKIYSISMKHPQEMKTYSVSFDSLFSAVKNFTEIASKFSERLQDFDKSKHVIYAPSSHNKYAGESFPGIYDALFDIESKVDPSKAWGEVKRQIYVAAFTVQAAAETLSEVA

SEQ ID NO: 8357 - protein, 686 aa, Artificial Sequence; identical to SEQ ID NO: 8356
  Synthetic polypeptide

SEQ ID NO: 8358 - protein, 41 aa, Artificial Sequence
  Synthetic polypeptide
YYLQIIGWFIKSSNEATNITPKHNMKAFLDELKAENIKKFL

SEQ ID NO: 8359 - protein, 524 aa, Artificial Sequence
  Synthetic polypeptide
LGFESQLPSLLSVGDFAESSTNTTQDEQRRWPGCDQQDEMLNLGFTIGSFVLSATTLPLGILMDRFGPRPVRLVGSACFTASCTLMALASRDVEALSPLIFLALSLNGFGGICLTFTSLTLPNMFGNLRSTLMALMIGSYASSAITFPGIKLIYDAGVAFVVIMFTWSGLACLIFLNCTLNWPIEAFPAPEEVNYTKKIKLSGLALDHKVTGDLFYTHVTTMGQRLSQKAPSLEDGSDAFMSPQDVRGTSENLPERSVPLRKSLCSPTFLWSLLTMGMTQLRIIFYMAAVNKMLEYLVTGGQEHETNEQQQKVAETVGFYSSVFGAMQLLCLLTCPLIGYIMDWRIKDCVDAPTQGTVLGDARDGVATKSIRPRYCKIQKLTNAISAFTLTNLLLVGFGITCLINNLHLQFVTFVLHTIVRGFFHSACGSLYAAVFPSNHFGTLTGLQSLISAVFALLQQPLFMAMVGPLKGEPFWVNLGLLLFSLLGFLLPSYLFYYRARLQQEYAANGMGPLKVLSGSEVTA

SEQ ID NO: 8360 - protein, 524 aa, Artificial Sequence; identical to SEQ ID NO: 8359
  Synthetic polypeptide

SEQ ID NO: 8361 - protein, 104 aa, Artificial Sequence
  Synthetic polypeptide
LGRKFSLDLNPSFHHFYQLVTSLRAAPTPPRMSSAGGQAVTSRTRCSTWASPLVPSCSAPPPCHWGSSWTALAPDPCGWLAVPASLRPAPSWPWPPGTWKLCLR

SEQ ID NO: 8362 - protein, 104 aa, Artificial Sequence; identical to SEQ ID NO: 8361
  Synthetic polypeptide

SEQ ID NO: 8363 - protein, 104 aa, Artificial Sequence; identical to SEQ ID NO: 8361
  Synthetic polypeptide

SEQ ID NO: 8364 - protein, 104 aa, Artificial Sequence; identical to SEQ ID NO: 8361
  Synthetic polypeptide

SEQ ID NO: 8365 - protein, 2 aa, Artificial Sequence
  Synthetic polypeptide
LR

SEQ ID NO: 8366 - protein, 2 aa, Artificial Sequence
  Synthetic polypeptide
LR

SEQ ID NO: 8367 - protein, 2 aa, Artificial Sequence
  Synthetic polypeptide
LR

SEQ ID NO: 8368 - protein, 2 aa, Artificial Sequence
  Synthetic polypeptide
LR

SEQ ID NO: 8369 - protein, 2 aa, Artificial Sequence
  Synthetic polypeptide
LR

SEQ ID NO: 8370 - protein, 2 aa, Artificial Sequence
  Synthetic polypeptide
LR

SEQ ID NO: 8371 - protein, 74 aa, Artificial Sequence
  Synthetic polypeptide
LGFESQLPSLLSVGDFAESSTNTTQDEQRRWPGCDQQDEMLNLGFTIGSFVLSATTLPLGILMDRFGPRPVRLL

SEQ ID NO: 8372 - protein, 80 aa, Artificial Sequence
  Synthetic polypeptide
LGRKFSLDLNPSFHHFYQLVTSLRAAPTPPRMSSAGGQAVTSRTRCSTWASPLVPSCSAPPPCHWGSSWTALAPDPCGCC

SEQ ID NO: 8373 - protein, 136 aa, Artificial Sequence
  Synthetic polypeptide
LGFESQLPSLLSVGDFAESSTNTTQDEQRRWPGCDQQDEMLNLGFTIGSFVLSATTLPLGILMDRFGPRPVRLVGSACFTASCTLMALASRDVEALSPLIFLALSLNGFGGICLTFTSLTEEDQAEWAGPGPQGDR

SEQ ID NO: 8374 - protein, 224 aa, Artificial Sequence
  Synthetic polypeptide
LGFESQLPSLLSVGDFAESSTNTTQDEQRRWPGCDQQDEMLNLGFTIGSFVLSATTLPLGILMDRFGPRPVRLVGSACFTASCTLMALASRDVEALSPLIFLALSLNGFGGICLTFTSLTLIYDAGVAFVVIMFTWSGLACLIFLNCTLNWPIEAFPAPEEVNYTKKIKLSGLALDHKVTGDLFYTHVTTMGQRLSQKAPSLEDGSDAFMSPQDVRGTSENLPE

SEQ ID NO: 8375 - protein, 75 aa, Artificial Sequence
  Synthetic polypeptide
LGFESQLPSLLSVGDFAESSTNTTQDEQRRWPGCDQQDEMLNLGFTIGSFVLSATTLPLGILMDRFGPRPVRLVG

SEQ ID NO: 8376 - protein, 81 aa, Artificial Sequence
  Synthetic polypeptide
LGRKFSLDLNPSFHHFYQLVTSLRAAPTPPRMSSAGGQAVTSRTRCSTWASPLVPSCSAPPPCHWGSSWTALAPDPCGWLA

SEQ ID NO: 8377 - protein, 172 aa, Artificial Sequence
  Synthetic polypeptide
LTSVIPALWEAEAGGSRGQEIKTILDNTELEDLQKKPPPYLRNLSSDDANVLVWHALLLPDQPPYHLKAFNLRISFPPEYPFKPPMIKFTTKIYHPNVDENGQICLPIISSENWKPCTKTCQVLEALNVLVNRPNIREPLRMDLADLLTQNPELFRKNAEEFTLRFGVDRPS

SEQ ID NO: 8378 - protein, 62 aa, Artificial Sequence
  Synthetic polypeptide
SQHFGRLRRADHEVRRSRPSWITRSWRIFRRSLPHTCGTCPAMMPMSWCGTLSSYPTNLPTT

SEQ ID NO: 8379 - protein, 62 aa, Artificial Sequence; identical to SEQ ID NO: 8378
  Synthetic polypeptide

SEQ ID NO: 8380 - protein, 20 aa, Artificial Sequence
  Synthetic polypeptide
HGAGGSSEEASPIPAEPVQR

SEQ ID NO: 8381 - protein, 20 aa, Artificial Sequence
  Synthetic polypeptide
HGAGGSSEEASPIPAEPVQR

SEQ ID NO: 8382 - protein, 139 aa, Artificial Sequence
  Synthetic polypeptide
LTSVIPALWEAEAGGSRGQEIKTILDNTELEDLQKKPPPYLRNLSSDDANVLVWHALLLPDQPPYHLKAFNLRISFPPEYPFKPPMIKFTTKIYHPNVDENGQICLPIISSENWKPCTKTCQVLEALNVLVNRPNIREP

SEQ ID NO: 8383 - protein, 44 aa, Artificial Sequence
  Synthetic polypeptide
YGSQRWPQRRLRTPKELPETGERSGDPDVSQCHCDDEEPQIQRN

SEQ ID NO: 8384 - protein, 44 aa, Artificial Sequence; identical to SEQ ID NO: 8383
  Synthetic polypeptide

SEQ ID NO: 8385 - protein, 62 aa, Artificial Sequence
  Synthetic polypeptide
NMAPNVGLREDSEPQRSCPRLEREVEILMFLSAIVMMKNRRSRGTRTGQEGHLDCGVLCQLV

SEQ ID NO: 8386 - protein, 62 aa, Artificial Sequence; identical to SEQ ID NO: 8385
  Synthetic polypeptide

SEQ ID NO: 8387 - protein, 27 aa, Artificial Sequence
  Synthetic polypeptide
IWLPTLASEKTQNPKGVARDWREKWRS

SEQ ID NO: 8388 - protein, 27 aa, Artificial Sequence
  Synthetic polypeptide
IWLPTLASEKTQNPKGVARDWREKWRS

SEQ ID NO: 8389 - protein, 27 aa, Artificial Sequence
  Synthetic polypeptide
IWLPTLASEKTQNPKGVARDWREKWRS

SEQ ID NO: 8390 - protein, 27 aa, Artificial Sequence
  Synthetic polypeptide
IWLPTLASEKTQNPKGVARDWREKWRS

SEQ ID NO: 8391 - protein, 27 aa, Artificial Sequence
  Synthetic polypeptide
IWLPTLASEKTQNPKGVARDWREKWRS

SEQ ID NO: 8392 - protein, 27 aa, Artificial Sequence
  Synthetic polypeptide
IWLPTLASEKTQNPKGVARDWREKWRS

SEQ ID NO: 8393 - protein, 27 aa, Artificial Sequence
  Synthetic polypeptide
IWLPTLASEKTQNPKGVARDWREKWRS

SEQ ID NO: 8394 - protein, 27 aa, Artificial Sequence
  Synthetic polypeptide
IWLPTLASEKTQNPKGVARDWREKWRS

SEQ ID NO: 8395 - protein, 27 aa, Artificial Sequence
  Synthetic polypeptide
IWLPTLASEKTQNPKGVARDWREKWRS

SEQ ID NO: 8396 - protein, 55 aa, Artificial Sequence
  Synthetic polypeptide
YGSQRWPQRRLRTPKELPETGERSGDPDVSQCHCDDEEPQIHVPDDVQTPPIYGP

SEQ ID NO: 8397 - protein, 217 aa, Artificial Sequence
  Synthetic polypeptide
NMAPNVGLREDSEPQRSCPRLEREVEILMFLSAIVMMKNRRSMFLMTCKPPLYMGPEYIKYFNDKTIDEELERDKRVTWIVEFFANWSNDCQSFAPIYADLSLKYNCTGLNFGKVDVGRYTDVSTRYKVSTSPLTKQLPTLILFQGGKEAMRRPQIDKKGRAVSWTFSEENVIREFNLNELYQRAKKLSKAGDNIPEEQPVASTPTTVSDGENKKDK

SEQ ID NO: 8398 - protein, 62 aa, Artificial Sequence
  Synthetic polypeptide
YGSQRWPQRRLRTPKELPETGERSGDPDVSQCHCDDEEPQIHSLLPASSLLWWLGCFFHDFL

SEQ ID NO: 8399 - protein, 62 aa, Artificial Sequence
  Synthetic polypeptide
NMAPNVGLREDSEPQRSCPRLEREVEILMFLSAIVMMKNRRSTLSFLLPPCCGGWDASSMIF

SEQ ID NO: 8400 - protein, 45 aa, Artificial Sequence
  Synthetic polypeptide
YGSQRWPQRRLRTPKELPETGERSGDPDVSQCHCDDEEPQIQYKV

SEQ ID NO: 8401 - protein, 45 aa, Artificial Sequence
  Synthetic polypeptide
NMAPNVGLREDSEPQRSCPRLEREVEILMFLSAIVMMKNRRSSTK

SEQ ID NO: 8402 - protein, 54 aa, Artificial Sequence
  Synthetic polypeptide
YGSQRWPQRRLRTPKELPETGERSGDPDVSQCHCDDEEPQIHHCGATYRQHFHV

SEQ ID NO: 8403 - protein, 255 aa, Artificial Sequence
  Synthetic polypeptide
NMAPNVGLREDSEPQRSCPRLEREVEILMFLSAIVMMKNRRSITVEQHIGNIFMFSKVANTILFFRLDIRMGLLYITLCIVFLMTCKPPLYMGPEYIKYFNDKTIDEELERDKRVTWIVEFFANWSNDCQSFAPIYADLSLKYNCTGLNFGKVDVGRYTDVSTRYKVSTSPLTKQLPTLILFQGGKEAMRRPQIDKKGRAVSWTFSEENVIREFNLNELYQRAKKLSKAGDNIPEEQPVASTPTTVSDGENKKDK

SEQ ID NO: 8404 - protein, 44 aa, Artificial Sequence
  Synthetic polypeptide
YGSQRWPQRRLRTPKELPETGERSGDPDVSQCHCDDEEPQIHAP

SEQ ID NO: 8405 - protein, 44 aa, Artificial Sequence; identical to SEQ ID NO: 8404
  Synthetic polypeptide

SEQ ID NO: 8406 - protein, 74 aa, Artificial Sequence
  Synthetic polypeptide
NMAPNVGLREDSEPQRSCPRLEREVEILMFLSAIVMMKNRRSMPHEEGQRMGYRSAQPSLTCDISVFQSLWSNI

SEQ ID NO: 8407 - protein, 74 aa, Artificial Sequence; identical to SEQ ID NO: 8406
  Synthetic polypeptide

SEQ ID NO: 8408 - protein, 43 aa, Artificial Sequence
  Synthetic polypeptide
YGSQRWPQRRLRTPKELPETGERSGDPDVSQCHCDDEEPQIQL

SEQ ID NO: 8409 - protein, 43 aa, Artificial Sequence
  Synthetic polypeptide
NMAPNVGLREDSEPQRSCPRLEREVEILMFLSAIVMMKNRRSS

SEQ ID NO: 8410 - protein, 73 aa, Artificial Sequence
  Synthetic polypeptide
FPPSLALYSRGADPLGFPGSRISWSSLSSTNGRHCGKTAGEAQEPKESPPPSKTSAAAQLDELMAHLTEMQAK

SEQ ID NO: 8411 - protein, 75 aa, Artificial Sequence
  Synthetic polypeptide
GPLWPISHDFLLLLLCIPGELTPWVFQAPGSVGPHCLQPMGGTVERLQVKPKSQRNHHHLLKRQQLLSWMSSWLT

SEQ ID NO: 8412 - protein, 75 aa, Artificial Sequence; identical to SEQ ID NO: 8411
  Synthetic polypeptide

SEQ ID NO: 8413 - protein, 75 aa, Artificial Sequence; identical to SEQ ID NO: 8411
  Synthetic polypeptide

SEQ ID NO: 8414 - protein, 75 aa, Artificial Sequence; identical to SEQ ID NO: 8411
  Synthetic polypeptide

SEQ ID NO: 8415 - protein, 353 aa, Artificial Sequence
  Synthetic polypeptide
FPPSLALYSRGADPLGFPGSRISWSSLSSTNGRHCGKTAGEAQEPKESPPPSKTSAAAQLDELMAHLTEMQAKVAVRADAGKKHLPDKQDHKASLDSMLGGLEQELQDLGIATVPKGHCASCQKPIAGKVIHALGQSWHPEHFVCTHCKEEIGSSPFFERSGLAYCPNDYHQLFSPRCAYCAAPILDKVLTAMNQTWHPEHFFCSHCGEVFGAEGFHEKDKKPYCRKDFLAMFSPKCGGCNRPVLENYLSAMDTVWHPECFVCGDCFTSFSTGSFFELDGRPFCELHYHHRRGTLCHGCGQPITGRCISAMGYKFHPEHFVCAFCLTQLSKGIFREQNDKTYCQPCFNKLFPL

SEQ ID NO: 8416 - protein, 353 aa, Artificial Sequence; identical to SEQ ID NO: 8415
  Synthetic polypeptide

SEQ ID NO: 8417 - protein, 353 aa, Artificial Sequence; identical to SEQ ID NO: 8415
  Synthetic polypeptide

SEQ ID NO: 8418 - protein, 64 aa, Artificial Sequence
  Synthetic polypeptide
MELSAQFAATTTTPPRPLGRAWCGSGRTTMAPGRPTTWKWASPSSMPMRSSTPGSTSLPLALAT

SEQ ID NO: 8419 - protein, 77 aa, Artificial Sequence
  Synthetic polypeptide
RKIQAESGDKQLWLSFQAHCLLRDLDQVSKWNSPPSSPQLLRPLLGPWEGRGVGVGERQWLLDALRHGSGHHHPACL

SEQ ID NO: 8420 - protein, 579 aa, Artificial Sequence
  Synthetic polypeptide
GRSRLRVETNNCGSHSRLTVYSVTLTKSLNGTLRPVRRNYYDPSSAPGKGVVWEWENDNGSWTPYDMEVGITIQHAYEKQHPWIDLTSIGFSYVIDFNTMGQINRQTQRQRRVRRRLDLIYPMVTGTLPKAQSWPVSPGPATSPPMSPCSCPQCVLVMSVKAAVVNGSTGPLQLPVTRKNMPPPGVVKLPPLPGSGAKPLDSTGTIRGPLKTAPSQVIRRQASSMPTGTTMGSPASPPGPNSKTGRVALATLNRTNLQRLAIAQSRVLIASGVPTVPVKNLNGSSPVNPALAGITGILMSAAGLPVCLTRPPKLVLHPPPVSKSEIKSIPGVSNTSRKTTKKQAKKGKTPEEVLKKYLQKVRHPPDEDCTICMERLTAPSGYKGPQPTVKPDLVGKLSRCGHVYHIYCLVAMYNNGNKDGSLQCPTCKTIYGVKTGTQPPGKMEYHLIPHSLPGHPDCKTIRIIYSIPPGIQGPEHPNPGKSFSARGFPRHCYLPDSEKGRKVLKLLLVAWDRRLIFAIGTSSTTGESDTVIWNEVHHKTEFGSNLTGHGYPDANYLDNVLAELAAQGISEDSTAQEKD

SEQ ID NO: 8421 - protein, 8 aa, Artificial Sequence
  Synthetic polypeptide
NAGSLCNT

SEQ ID NO: 8422 - protein, 8 aa, Artificial Sequence
  Synthetic polypeptide
NAGSLCNT

SEQ ID NO: 8423 - protein, 205 aa, Artificial Sequence
  Synthetic polypeptide
PEIYSLWCLGLSFSTGKMQALSVTPEPSKKEWNCKKTTDMILNEIKQGKFHNPMSIAQILPSLKGKTYLDVPQVTCSPDHEVQPTLPSNPGPGPTSASNITVIYTINNQLRGVELLFNETINVSVKSGSVLLVVLEEAQRKNPMFKFETTMTSWGLVVSSINNIAENVNHKTYWQFLSGVTPLNEGVADYIPFNHEHITANFTQY

SEQ ID NO: 8424 - protein, 205 aa, Artificial Sequence; identical to SEQ ID NO: 8423
  Synthetic polypeptide

SEQ ID NO: 8425 - protein, 24 aa, Artificial Sequence
  Synthetic polypeptide
YDLRYILCGAWASVSLLVKCRLSL

SEQ ID NO: 8426 - protein, 24 aa, Artificial Sequence
  Synthetic polypeptide
YDLRYILCGAWASVSLLVKCRLSL

SEQ ID NO: 8427 - protein, 33 aa, Artificial Sequence
  Synthetic polypeptide
FSVSQWRSAHGGPISPVFRAYVPTIMTEPTGNF

SEQ ID NO: 8428 - protein, 37 aa, Artificial Sequence
  Synthetic polypeptide
GQEICIFIMSSSDSQFHNGGALMGALYHLYSGPMCQQ

SEQ ID NO: 8429 - protein, 66 aa, Artificial Sequence
  Synthetic polypeptide
CHQVILSFTMEERSWGPYITCIQGLCANNNDRTYWELLSGGEPLSQGAGSYVVRNGENLEVRWSKY

SEQ ID NO: 8430 - protein, 124 aa, Artificial Sequence
  Synthetic polypeptide
SLDSAVADRIQVLTATRFSQMLQDKPLRTSWQRKMKERQERKLAKDFARHLEEEKERRRQEKKQRRAENLKRRLENERKAEVVQVIRNPAKLKRAKKKQLRSIEKRDTLALLQKQPPQQPAAKI

SEQ ID NO: 8431 - protein, 21 aa, Artificial Sequence
  Synthetic polypeptide
LPQDSPRCFRTSPCAHRGSGR

SEQ ID NO: 8432 - protein, 59 aa, Artificial Sequence
  Synthetic polypeptide
QDSSPDCHKILPDASGQAPAHIVAAEDEGTTGEEAGQGLCPSPGGGEGEAPPGEETAPG

SEQ ID NO: 8433 - protein, 48 aa, Artificial Sequence
  Synthetic polypeptide
GIEDFHGGSNCRCGGNEHSGLTTGVAFGHHAKFIASTGMDRSLKFYSL

SEQ ID NO: 8434 - protein, 48 aa, Artificial Sequence; identical to SEQ ID NO: 8433
  Synthetic polypeptide

SEQ ID NO: 8435 - protein, 43 aa, Artificial Sequence
  Synthetic polypeptide
TMNIKRSLEEIDSNPSALMDDFEGLRTSMEGVTADVEEMSIAA

SEQ ID NO: 8436 - protein, 43 aa, Artificial Sequence; identical to SEQ ID NO: 8435
  Synthetic polypeptide

SEQ ID NO: 8437 - protein, 31 aa, Artificial Sequence
  Synthetic polypeptide
ASVTSSVKCGLWPGSPGPCLPAGSPGAPRRP

SEQ ID NO: 8438 - protein, 31 aa, Artificial Sequence; identical to SEQ ID NO: 8437
  Synthetic polypeptide

SEQ ID NO: 8439 - protein, 991 aa, Artificial Sequence
  Synthetic polypeptide
NVDCGQAPLDPVYLPAALELLDAPEHFRVQQVGHYPPANSSLSSRSETFLLLQPWPRAQPLLRASYPPFATQQVVPPRVTEPHQRPVPWDVRAVSVEAAVTPAEPYARVLFHLKGQDWPPGSGSLPCARLHATHPAGTAHQACRFQPSLGACVVELELPSHWFSQASTTRAELAYTLEPAAEGPGGCGSGEENDPGEQALPVGGVELRPADPPQYQEVPLDEAVTLRVPDMPVRPGQLFSATLLLRHNFTASLLTLRIKVKKGLHVTAARPAQPTLWTAKLDRFKGSRHHTTLITCHRAGLTEPDSSPLELSEFLWVDFVVENSTGGGVAVTRPVTWQLEYPGQAPEAEKDKMVWEILVSERDIRALIPLAKAEELVNTAPLTGVPQHVPVRLVTVDGGGALVEVTEHVGCESANTQVLQVSEACDAVFVAGKESRGARGVRVDFWWRRLRASLRLTVWAPLLPLRIELTDTTLEQVRGWRVPGPAEGPAEPAAEASDEAERRARGCHLQYQRAGVRFLAPFAAHPLDGGRRLTHLLGPDWLLDVSHLVAPHARVLDSRVASLEGGRVVVGREPGVTSIEVRSPLSDSILGEQALAVTDDKVSVLELRVQPVMGISLTLSRGTAHPGEVTATCWAQSALPAPKQEVALSLWLSFSDHTVAPAELYDRRDLGLSVSAEEPGAILPAEEQGAQLGVVVSGAGAEGLPLHVALHPPEPCRRGRHRVPLASGTAWLGLPPASTPAPALPSSPAWSPPATEATMGGKRQVAGSVGGNTGVRGKFERAEEEARKEETEAREEEEEEEEEMVPAPQHVTELELGMYALLGVFCVAIFIFLVNGVVFVLRYQRKEPPDSATDPTSPQPHNWVWLGTDQEELSRQLDRQSPGPPKGEGSCPCESGGGGEAPTLAPGPPGGTTSSSSTLARKEAGGRRKRVEFVTFAPAPPAQSPEEPVGAPAVQSILVAGEEDIRWVCEDMGLKDPEELRNYMERIRGSS

SEQ ID NO: 8440 - protein, 31 aa, Artificial Sequence
  Synthetic polypeptide
GSLSLSDLICEMWTVARLPWTLSTCRQPWSS

SEQ ID NO: 8441 - protein, 31 aa, Artificial Sequence; identical to SEQ ID NO: 8440
  Synthetic polypeptide

SEQ ID NO: 8442 - protein, 992 aa, Artificial Sequence
  Synthetic polypeptide
NVDCGQAPLDPVYLPAALELLDAPEHFRVQQVGHYPPANSSLSSRSETFLLLQPWPRAQPLLRASYPPFATQQVVPPRVTEPHQRPVPWDVRAVSVEAAVTPAEPYARVLFHLKGQDWPPGSGSLPCARLHATHPAGTAHQACRFQPSLGACVVELELPSHWFSQASTTRAELAYTLEPAAEGPGGCGSGEENDPGEQALPVGGVELRPADPPQYQEVPLDEAVTLRVPDMPVRPGQLFSATLLLRHNFTASLLTLRIKVKKGLHVTAARPAQPTLWTAKLDRFKGSRHHTTLITCHRAGLTEPDSSSPLELSEFLWVDFVVENSTGGGVAVTRPVTWQLEYPGQAPEAEKDKMVWEILVSERDIRALIPLAKAEELVNTAPLTGVPQHVPVRLVTVDGGGALVEVTEHVGCESANTQVLQVSEACDAVFVAGKESRGARGVRVDFWWRRLRASLRLTVWAPLLPLRIELTDTTLEQVRGWRVPGPAEGPAEPAAEASDEAERRARGCHLQYQRAGVRFLAPFAAHPLDGGRRLTHLLGPDWLLDVSHLVAPHARVLDSRVASLEGGRVVVGREPGVTSIEVRSPLSDSILGEQALAVTDDKVSVLELRVQPVMGISLTLSRGTAHPGEVTATCWAQSALPAPKQEVALSLWLSFSDHTVAPAELYDRRDLGLSVSAEEPGAILPAEEQGAQLGVVVSGAGAEGLPLHVALHPPEPCRRGRHRVPLASGTAWLGLPPASTPAPALPSSPAWSPPATEATMGGKRQVAGSVGGNTGVRGKFERAEEEARKEETEAREEEEEEEEEMVPAPQHVTELELGMYALLGVFCVAIFIFLVNGVVFVLRYQRKEPPDSATDPTSPQPHNWVWLGTDQEELSRQLDRQSPGPPKGEGSCPCESGGGGEAPTLAPGPPGGTTSSSSTLARKEAGGRRKRVEFVTFAPAPPAQSPEEPVGAPAVQSILVAGEEDIRWVCEDMGLKDPEELRNYMERIRGSS

SEQ ID NO: 8443 - protein, 32 aa, Artificial Sequence
  Synthetic polypeptide
ASVTSSVKWCGLWPGSPGPCLPAGSPGAPRRP

SEQ ID NO: 8444 - protein, 32 aa, Artificial Sequence; identical to SEQ ID NO: 8443
  Synthetic polypeptide

SEQ ID NO: 8445 - protein, 992 aa, Artificial Sequence
  Synthetic polypeptide
NGVDCGQAPLDPVYLPAALELLDAPEHFRVQQVGHYPPANSSLSSRSETFLLLQPWPRAQPLLRASYPPFATQQVVPPRVTEPHQRPVPWDVRAVSVEAAVTPAEPYARVLFHLKGQDWPPGSGSLPCARLHATHPAGTAHQACRFQPSLGACVVELELPSHWFSQASTTRAELAYTLEPAAEGPGGCGSGEENDPGEQALPVGGVELRPADPPQYQEVPLDEAVTLRVPDMPVRPGQLFSATLLLRHNFTASLLTLRIKVKKGLHVTAARPAQPTLWTAKLDRFKGSRHHTTLITCHRAGLTEPDSSPLELSEFLWVDFVVENSTGGGVAVTRPVTWQLEYPGQAPEAEKDKMVWEILVSERDIRALIPLAKAEELVNTAPLTGVPQHVPVRLVTVDGGGALVEVTEHVGCESANTQVLQVSEACDAVFVAGKESRGARGVRVDFWWRRLRASLRLTVWAPLLPLRIELTDTTLEQVRGWRVPGPAEGPAEPAAEASDEAERRARGCHLQYQRAGVRFLAPFAAHPLDGGRRLTHLLGPDWLLDVSHLVAPHARVLDSRVASLEGGRVVVGREPGVTSIEVRSPLSDSILGEQALAVTDDKVSVLELRVQPVMGISLTLSRGTAHPGEVTATCWAQSALPAPKQEVALSLWLSFSDHTVAPAELYDRRDLGLSVSAEEPGAILPAEEQGAQLGVVVSGAGAEGLPLHVALHPPEPCRRGRHRVPLASGTAWLGLPPASTPAPALPSSPAWSPPATEATMGGKRQVAGSVGGNTGVRGKFERAEEEARKEETEAREEEEEEEEEMVPAPQHVTELELGMYALLGVFCVAIFIFLVNGVVFVLRYQRKEPPDSATDPTSPQPHNWVWLGTDQEELSRQLDRQSPGPPKGEGSCPCESGGGGEAPTLAPGPPGGTTSSSSTLARKEAGGRRKRVEFVTFAPAPPAQSPEEPVGAPAVQSILVAGEEDIRWVCEDMGLKDPEELRNYMERIRGSS

SEQ ID NO: 8446 - protein, 32 aa, Artificial Sequence
  Synthetic polypeptide
GSLSLSDLICEMVWTVARLPWTLSTCRQPWSS

SEQ ID NO: 8447 - protein, 32 aa, Artificial Sequence; identical to SEQ ID NO: 8446
  Synthetic polypeptide

SEQ ID NO: 8448 - protein, 993 aa, Artificial Sequence
  Synthetic polypeptide
NGVDCGQAPLDPVYLPAALELLDAPEHFRVQQVGHYPPANSSLSSRSETFLLLQPWPRAQPLLRASYPPFATQQVVPPRVTEPHQRPVPWDVRAVSVEAAVTPAEPYARVLFHLKGQDWPPGSGSLPCARLHATHPAGTAHQACRFQPSLGACVVELELPSHWFSQASTTRAELAYTLEPAAEGPGGCGSGEENDPGEQALPVGGVELRPADPPQYQEVPLDEAVTLRVPDMPVRPGQLFSATLLLRHNFTASLLTLRIKVKKGLHVTAARPAQPTLWTAKLDRFKGSRHHTTLITCHRAGLTEPDSSSPLELSEFLWVDFVVENSTGGGVAVTRPVTWQLEYPGQAPEAEKDKMVWEILVSERDIRALIPLAKAEELVNTAPLTGVPQHVPVRLVTVDGGGALVEVTEHVGCESANTQVLQVSEACDAVFVAGKESRGARGVRVDFWWRRLRASLRLTVWAPLLPLRIELTDTTLEQVRGWRVPGPAEGPAEPAAEASDEAERRARGCHLQYQRAGVRFLAPFAAHPLDGGRRLTHLLGPDWLLDVSHLVAPHARVLDSRVASLEGGRVVVGREPGVTSIEVRSPLSDSILGEQALAVTDDKVSVLELRVQPVMGISLTLSRGTAHPGEVTATCWAQSALPAPKQEVALSLWLSFSDHTVAPAELYDRRDLGLSVSAEEPGAILPAEEQGAQLGVVVSGAGAEGLPLHVALHPPEPCRRGRHRVPLASGTAWLGLPPASTPAPALPSSPAWSPPATEATMGGKRQVAGSVGGNTGVRGKFERAEEEARKEETEAREEEEEEEEEMVPAPQHVTELELGMYALLGVFCVAIFIFLVNGVVFVLRYQRKEPPDSATDPTSPQPHNWVWLGTDQEELSRQLDRQSPGPPKGEGSCPCESGGGGEAPTLAPGPPGGTTSSSSTLARKEAGGRRKRVEFVTFAPAPPAQSPEEPVGAPAVQSILVAGEEDIRWVCEDMGLKDPEELRNYMERIRGSS

SEQ ID NO: 8449 - protein, 222 aa, Artificial Sequence
  Synthetic polypeptide
PHWVCLCICEMAECDQMMQHQLQLDRRAGDARRAGIPGRLLPAGARGRLAGRRVPGPLPRGRAQPAALPGRLGPAARHRLPRRPQLLLRRDARVAAGTCLPLGRLPALLAQPLLRARPLRGPAATRPGRQLRPEQPHLLRCRPGDGSRPRRHPPLLQLVLLEHQPGCCAVAAGGGVYSAEHQLPAGLQHPCGLCGPGIFHLPLCHPRLHHQAPDGQPSVLYA

SEQ ID NO: 8450 - protein, 222 aa, Artificial Sequence; identical to SEQ ID NO: 8449
  Synthetic polypeptide

SEQ ID NO: 8451 - protein, 396 aa, Artificial Sequence
  Synthetic polypeptide
CSTNFNWTGEQATRAALVFLGASYLLAPVGGWLADVYLGRYRAVALSLLLYLAASGLLPATAFPDGRSSFCGEMPASPLGPACPSAGCPRSSPSPYCAPVLYAGLLLLGLAASSVRSNLTSFGADQVMDLGRDATRRFFNWFYWSINLGAVLSLLVVAFIQQNISFLLGYSIPVGCVGLAFFIFLFATPVFITKPPMGSQVSSMLKLALQNCCPQLWQRHSARDRQCARVLADERSPQPGASPQEDIANFQVLVKILPVMVTLVPYWMVYFQMQSTYVLQGLHLHIPNIFPANPANISVALRAQGSSYTESWRWSAYTTSTTTRPCPSRLGRSCTTRHHCPSGGRSLSTCSLGSVRSLPASQAWSLPTQRPRAPCRVPSWASSSACRGWAHCWAPA

SEQ ID NO: 8452 - protein, 129 aa, Artificial Sequence
  Synthetic polypeptide
PNDAAPTSTGPASRRRAPRWYSWAPPTCWRPWAAGWPTCTWAATARSRSACCSTWPPRACCPPPPSPTAAAPSAERCPRRRWDLPAPRPAARAPRPAPTARPSSTRACCYSAWPPAPSGATSPPSVPTR

SEQ ID NO: 8453 - protein, 129 aa, Artificial Sequence; identical to SEQ ID NO: 8452
  Synthetic polypeptide

SEQ ID NO: 8454 - protein, 521 aa, Artificial Sequence
  Synthetic polypeptide
CSTNFNWTGEQATRAALVFLGASYLLAPVGGWLADVYLGRYRAVALSLLLYLAASGLLPATAFPDGRSSFCGEMPASPLGPACPSAGCPRSSPSPYCAPVLYAGLLLLGLAASSVRSNLTSFGADQVMDLGRDATRRFFNWFYWSINLGAVLSLLVVAFIQQNISFLLGYSIPVGCVGLAFFIFLFATPVFITKPPMGSQVSSMLKLALQNCCPQLWQRHSARDRQCARVLADERSPQPGASPQEDIANFQVLVKILPVMVTLVPYWMVYFQMQSTYVLQGLHLHIPNIFPANPANISVALRAQGSSYTIPEAWLLLANVVVVLILVPLKDRLIDPLLLRCKLLPSALQKMALGMFFGFTSVIVAGVLEMERLHYIHHNETVSQQIGEVLYNAAPLSIWWQIPQYLLIGISEIFASIPGLEFAYSEAPRSMQGAIMGIFFCLSGVGSLLGSSLVALLSLPGGWLHCPKDFGNINNCRMDLYFFLLAGIQAVTALLFVWIAGRYERASQGPASHSRFSRDRG

SEQ ID NO: 8455 - protein, 52 aa, Artificial Sequence
  Synthetic polypeptide
EVRRPSARQPPSLRSPGPTAGTGDGTGHQPEPGRAELGVPGSPGDQPLKPLG

SEQ ID NO: 8456 - protein, 52 aa, Artificial Sequence; identical to SEQ ID NO: 8455
  Synthetic polypeptide

SEQ ID NO: 8457 - protein, 325 aa, Artificial Sequence
  Synthetic polypeptide
EVQDLQLEREMALATNRSLAERNLEFQGPLEISRSNLSDRYQELRKLVERCQEQKAKLEKFSSALQPGTLLDLLQVEGMKIEEESEAMAEKFLEGEVPLETFLENFSSMRMLSHLRRVRVEKLQEVVRKPRASQELAGDAPPPRPPPPVRPVPQGTPPVVEEQPQPPLAMPPYPLPYSPSPSLPVGPTAHGALPPAPFPVVSQPSFYSGPLGPTYPAAQLGPRGAAGYSWSPQRSMPPRPGYPGTPMGASGPGYPLRGGRAPSPGYPQQSPYPATGGKPPYPIQPQLPSFPGQPQPSVPLQPPYPPGPAPPYGFPPPPGPAWPGY

SEQ ID NO: 8458 - protein, 107 aa, Artificial Sequence
  Synthetic polypeptide
GPPLPGRDPVWEVRSVSAWPPRLRSEETLRPAAAQSEKSRTYSWNGRWHWPPTGAWQSGTWSSRVPWRSAAQTSRIDTRSSGSSWSGARSRRQSWRNFLQHCSQGPC

SEQ ID NO: 8459 - protein, 107 aa, Artificial Sequence; identical to SEQ ID NO: 8458
  Synthetic polypeptide

SEQ ID NO: 8460 - protein, 118 aa, Artificial Sequence
  Synthetic polypeptide
EVQDLQLEREMALATNRSLAERNLEFQGPLEISRSNLSDRYQELRKLVERCQEQKAKLEKFSSALQPGTLLDLLQVEGMKIEEESEAMAEKFLEGEVPLETFLENFSSMRMLSHLRRV

SEQ ID NO: 8461 - protein, 25 aa, Artificial Sequence
  Synthetic polypeptide
GCLVSLGISHAWQRHHHERRGHRLR

SEQ ID NO: 8462 - protein, 25 aa, Artificial Sequence
  Synthetic polypeptide
GCLVSLGISHAWQRHHHERRGHRLR

SEQ ID NO: 8463 - protein, 25 aa, Artificial Sequence
  Synthetic polypeptide
GCLVSLGISHAWQRHHHERRGHRLR

SEQ ID NO: 8464 - protein, 170 aa, Artificial Sequence
  Synthetic polypeptide
LIILPFCQHNLSCQLGRELPAAWNCEAVLFHLAFPMPGRDITMNGEAIACAEGCQAIVDTGTSLLTGPTSPIANIQSDIGASENSDGDMVVSCSAISSLPDIVFTINGVQYPVPPSAYILQSEGSCISGFQGMNLPTESGELWILGDVFIRQYFTVFDRANNQVGLAPVA

SEQ ID NO: 8465 - protein, 170 aa, Artificial Sequence; identical to SEQ ID NO: 8464
  Synthetic polypeptide

SEQ ID NO: 8466 - protein, 27 aa, Artificial Sequence
  Synthetic polypeptide
AGSSLQPGTVRLSCFTWHFPCLAETSP

SEQ ID NO: 8467 - protein, 27 aa, Artificial Sequence
  Synthetic polypeptide
AGSSLQPGTVRLSCFTWHFPCLAETSP

SEQ ID NO: 8468 - protein, 27 aa, Artificial Sequence
  Synthetic polypeptide
AGSSLQPGTVRLSCFTWHFPCLAETSP

SEQ ID NO: 8469 - protein, 120 aa, Artificial Sequence
  Synthetic polypeptide
LIILPFCQHNLSCQLGRELPAAWNCEAVLFHLAFPMPGRDITMNGEAIACAEGCQAIVDTGTSLLTGPTSPIANIQSDIGASENSDGDMVVSCSAISSLPDIVFTINGVQYPVPPSAYIL

SEQ ID NO: 8470 - protein, 25 aa, Artificial Sequence
  Synthetic polypeptide
GCLVSLGISHAWQRHHHERRGHRLR

SEQ ID NO: 8471 - protein, 25 aa, Artificial Sequence
  Synthetic polypeptide
GCLVSLGISHAWQRHHHERRGHRLR

SEQ ID NO: 8472 - protein, 170 aa, Artificial Sequence; identical to SEQ ID NO: 8464
  Synthetic polypeptide

SEQ ID NO: 8473 - protein, 170 aa, Artificial Sequence; identical to SEQ ID NO: 8464
  Synthetic polypeptide

SEQ ID NO: 8474 - protein, 27 aa, Artificial Sequence
  Synthetic polypeptide
AGSSLQPGTVRLSCFTWHFPCLAETSP

SEQ ID NO: 8475 - protein, 27 aa, Artificial Sequence
  Synthetic polypeptide
AGSSLQPGTVRLSCFTWHFPCLAETSP

SEQ ID NO: 8476 - protein, 468 aa, Artificial Sequence
  Synthetic polypeptide
NKSILWMGPGIRIVCLSSLALANNSTLTIGTIDEIQKLHIRTVPLYESPRKICYQEVSQCFGVLSSRIEVQDTSGGTTALRPSASTQALSSSVSSSKLFSSSTAPHETSFGEEVEVHNLLIIDQHTFEVLHAHQFLQNEYALSLVSCKLGKDPNTYFIVGTAMVYPEEAEPKQGRIVVFQYSDGKLQTVAEKEVKGAVYSMVEFNGKLLASINSTVRLYEWTTEKELRTECNHYNNIMALYLKTKGDFILVGDLMRSVLLLAYKPMEGNFEEIARDFNPNWMSAVEILDDDNFLGAENAFNLFVCQKDSAATTDEERQHLQEVGLFHLGEFVNVFCHGSLVMQNLGETSTPTQGSVLFGTVNGMIGLVTSLSESWYNLLLDMQNRLNKVIKSVGKIEHSFWRSFHTERKTEPATGFIDGDLIESFLDISRPKMQEVVANLQYDDGSGMKREATADDLIKVVEELTRIH

SEQ ID NO: 8477 - protein, 90 aa, Artificial Sequence
  Synthetic polypeptide
KSQPRLTQTNEIRVSCGWDQESELSVSPAWRWPTIAPSPLAPSMRSRSCTFAQFPSMSLQGRSATRKCPSVSGSSPAALKSKTRVGARQP

SEQ ID NO: 8478 - protein, 90 aa, Artificial Sequence; identical to SEQ ID NO: 8477
  Synthetic polypeptide

SEQ ID NO: 8479 - protein, 90 aa, Artificial Sequence; identical to SEQ ID NO: 8477
  Synthetic polypeptide

SEQ ID NO: 8480 - protein, 22 aa, Artificial Sequence
  Synthetic polypeptide
EYLVDGTRNQNCLSLQPGAGQQ

SEQ ID NO: 8481 - protein, 22 aa, Artificial Sequence
  Synthetic polypeptide
EYLVDGTRNQNCLSLQPGAGQQ

SEQ ID NO: 8482 - protein, 22 aa, Artificial Sequence
  Synthetic polypeptide
EYLVDGTRNQNCLSLQPGAGQQ

SEQ ID NO: 8483 - protein, 420 aa, Artificial Sequence
  Synthetic polypeptide
NKSILWMGPGIRIVCLSSLALANNSTLTIGTIDEIQKLHIRTVPLYESPRKICYQEVSQCFGVLSSRIEVQDTSGGTTALRPSASTQALSSSVSSSKLFSSSTAPHETSFGEEVEVHNLLIIDQHTFEVLHAHQFLQNEYALSLVSCKLGKDPNTYFIVGTAMVYPEEAEPKQGRIVVFQYSDGKLQTVAEKEVKGAVYSMVEFNGKLLASINSTVRLYEWTTEKELRTECNHYNNIMALYLKTKGDFILVGDLMRSVLLLAYKPMEGNFEEIARDFNPNWMSAVEILDDDNFLGAENAFNLFVCQKDSAATTDEERQHLQEVGLFHLGEFVNVFCHGSLVMQNLGETSTPTQGSVLFGTVNGMIGLVTSLSESWYNLLLDMQNRLNKVIKSVGKIEHSFHLEILSHRAEDRTSHRFHRR

SEQ ID NO: 8484 - protein, 128 aa, Artificial Sequence
  Synthetic polypeptide
NKSILWMGPGIRIVCLSSLALANNSTLTIGTIDEIQKLHIRTVPLYESPRKICYQEVSQCFGVLSSRIEVQDTSGGTTALRPSASTQALSSSVSSSKLFSSSTAPHETSFGEEVEVHNLLIIDQHTFE

SEQ ID NO: 8485 - protein, 754 aa, Artificial Sequence
  Synthetic polypeptide
GRAQCLMPVIPALWEAEAGRSQGLWPLRSDPNRETDDTLVLSFVGQTRVLMLNGEEVEETELMGFVDDQQTFFCGNVAHQQLIQITSASVRLVSQEPKALVSEWKEPQAKNISVASCNSSQVVVAVGRALYYLQIHPQELRQISHTEMEHEVACLDITPLGDSNGLSPLCAIGLWTDISARILKLPSFELLHKEMLGGEIIPRSILMTTFESSHYLLCALGDGALFYFGLNIETGLLSDRKKVTLGTQPTVLRTFRSLSTTNVFACSDRPTVIYSSNHKLVFSNVNLKEVNYMCPLNSDGYPDSLALANNSTLTIGTIDEIQKLHIRTVPLYESPRKICYQEVSQCFGVLSSRIEVQDTSGGTTALRPSASTQALSSSVSSSKLFSSSTAPHETSFGEEVEVHNLLIIDQHTFEVLHAHQFLQNEYALSLVSCKLGKDPNTYFIVGTAMVYPEEAEPKQGRIVVFQYSDGKLQTVAEKEVKGAVYSMVEFNGKLLASINSTVRLYEWTTEKELRTECNHYNNIMALYLKTKGDFILVGDLMRSVLLLAYKPMEGNFEEIARDFNPNWMSAVEILDDDNFLGAENAFNLFVCQKDSAATTDEERQHLQEVGLFHLGEFVNVFCHGSLVMQNLGETSTPTQGSVLFGTVNGMIGLVTSLSESWYNLLLDMQNRLNKVIKSVGKIEHSFWRSFHTERKTEPATGFIDGDLIESFLDISRPKMQEVVANLQYDDGSGMKREATADDLIKVVEELTRIH

SEQ ID NO: 8486 - protein, 42 aa, Artificial Sequence
  Synthetic polypeptide
SQHFGRPRRADHKDYGHCGLTLIVRLMTLWCSLLWARQEFSC

SEQ ID NO: 8487 - protein, 42 aa, Artificial Sequence; identical to SEQ ID NO: 8486
  Synthetic polypeptide

SEQ ID NO: 8488 - protein, 42 aa, Artificial Sequence; identical to SEQ ID NO: 8486
  Synthetic polypeptide

SEQ ID NO: 8489 - protein, 42 aa, Artificial Sequence; identical to SEQ ID NO: 8486
  Synthetic polypeptide

SEQ ID NO: 8490 - protein, 42 aa, Artificial Sequence; identical to SEQ ID NO: 8486
  Synthetic polypeptide

SEQ ID NO: 8491 - protein, 28 aa, Artificial Sequence
  Synthetic polypeptide
PGAMPHACNPSTLGGRGGQITRIMATAV

SEQ ID NO: 8492 - protein, 28 aa, Artificial Sequence
  Synthetic polypeptide
PGAMPHACNPSTLGGRGGQITRIMATAV

SEQ ID NO: 8493 - protein, 28 aa, Artificial Sequence
  Synthetic polypeptide
PGAMPHACNPSTLGGRGGQITRIMATAV

SEQ ID NO: 8494 - protein, 28 aa, Artificial Sequence
  Synthetic polypeptide
PGAMPHACNPSTLGGRGGQITRIMATAV

SEQ ID NO: 8495 - protein, 28 aa, Artificial Sequence
  Synthetic polypeptide
PGAMPHACNPSTLGGRGGQITRIMATAV

SEQ ID NO: 8496 - protein, 706 aa, Artificial Sequence
  Synthetic polypeptide
GRAQCLMPVIPALWEAEAGRSQGLWPLRSDPNRETDDTLVLSFVGQTRVLMLNGEEVEETELMGFVDDQQTFFCGNVAHQQLIQITSASVRLVSQEPKALVSEWKEPQAKNISVASCNSSQVVVAVGRALYYLQIHPQELRQISHTEMEHEVACLDITPLGDSNGLSPLCAIGLWTDISARILKLPSFELLHKEMLGGEIIPRSILMTTFESSHYLLCALGDGALFYFGLNIETGLLSDRKKVTLGTQPTVLRTFRSLSTTNVFACSDRPTVIYSSNHKLVFSNVNLKEVNYMCPLNSDGYPDSLALANNSTLTIGTIDEIQKLHIRTVPLYESPRKICYQEVSQCFGVLSSRIEVQDTSGGTTALRPSASTQALSSSVSSSKLFSSSTAPHETSFGEEVEVHNLLIIDQHTFEVLHAHQFLQNEYALSLVSCKLGKDPNTYFIVGTAMVYPEEAEPKQGRIVVFQYSDGKLQTVAEKEVKGAVYSMVEFNGKLLASINSTVRLYEWTTEKELRTECNHYNNIMALYLKTKGDFILVGDLMRSVLLLAYKPMEGNFEEIARDFNPNWMSAVEILDDDNFLGAENAFNLFVCQKDSAATTDEERQHLQEVGLFHLGEFVNVFCHGSLVMQNLGETSTPTQGSVLFGTVNGMIGLVTSLSESWYNLLLDMQNRLNKVIKSVGKIEHSFHLEILSHRAEDRTSHRFHRR

SEQ ID NO: 8497 - protein, 235 aa, Artificial Sequence
  Synthetic polypeptide
GRAQCLMPVIPALWEAEAGRSQGLWPLRSDPNRETDDTLVLSFVGQTRVLMLNGEEVEETELMGFVDDQQTFFCGNVAHQQLIQITSASVRLVSQEPKALVSEWKEPQAKNISVASCNSSQVVVAVGRALYYLQIHPQELRQISHTEMEHEVACLDITPLGDSNGLSPLCAIGLWTDISARILKLPSFELLHKEMLGGEIIPRSILMTTFESSHYLLCALGDGALFYFGLNIETG

SEQ ID NO: 8498 - protein, 198 aa, Artificial Sequence
  Synthetic polypeptide
GRAQCLMPVIPALWEAEAGRSQGLWPLRSDPNRETDDTLVLSFVGQTRVLMLNGEEVEETELMGFVDDQQTFFCGNVAHQQLIQITSASVRLVSQEPKALVSEWKEPQAKNISVASCNSSQVVVAVGRALYYLQIHPQELRQISHTEMEHEVACLDITPLGDSNGLSPLCAIGLWTDISARILKLPSFELLHKEMLGG

SEQ ID NO: 8499 - protein, 85 aa, Artificial Sequence
  Synthetic polypeptide
GRAQCLMPVIPALWEAEAGRSQGLWPLRSDPNRETDDTLVLSFVGQTRVLMLNGEEVEETELMGFVDDQQTFFCGNVAHQQLIQV

SEQ ID NO: 8500 - protein, 185 aa, Artificial Sequence
  Synthetic polypeptide
TVVRASLVYRLPQSWVGPKLPWKLLHAALHLMAFVLTVVGLVAVFTFHNHGRTANLYSLHSWLGITTVFLFACQWFLGFAVFLLPWASMWLRSLLKPIHVFFGAAILSLSIASVISGINEKLFFSLKNTTRPYHSLPSEAVFANSTGMLVVAFGLLVLYILLASSWKRPEPGILTDRQPLLHDGE

SEQ ID NO: 8501 - protein, 185 aa, Artificial Sequence; identical to SEQ ID NO: 8500
  Synthetic polypeptide

SEQ ID NO: 8502 - protein, 185 aa, Artificial Sequence; identical to SEQ ID NO: 8500
  Synthetic polypeptide

SEQ ID NO: 8503 - protein, 30 aa, Artificial Sequence
  Synthetic polypeptide
MWLGRHWCTACPSRGWGPNCPGNSSMQRCT

SEQ ID NO: 8504 - protein, 30 aa, Artificial Sequence; identical to SEQ ID NO: 8503
  Synthetic polypeptide

SEQ ID NO: 8505 - protein, 30 aa, Artificial Sequence; identical to SEQ ID NO: 8503
  Synthetic polypeptide

SEQ ID NO: 8506 - protein, 30 aa, Artificial Sequence; identical to SEQ ID NO: 8503
  Synthetic polypeptide

SEQ ID NO: 8507 - protein, 30 aa, Artificial Sequence; identical to SEQ ID NO: 8503
  Synthetic polypeptide

SEQ ID NO: 8508 - protein, 30 aa, Artificial Sequence; identical to SEQ ID NO: 8503
  Synthetic polypeptide

SEQ ID NO: 8509 - protein, 30 aa, Artificial Sequence; identical to SEQ ID NO: 8503
  Synthetic polypeptide

SEQ ID NO: 8510 - protein, 206 aa, Artificial Sequence
  Synthetic polypeptide
TVVRASLVYRLPQSWVGPKLPWKLLHAALHLMAFVLTVVGLVAVFTFHNHGRTANLYSLHSWLGITTVFLFACQWFLGFAVFLLPWASMWLRSLLKPIHVFFGAAILSLSIASVISGINEKLFFSLKNTTRPYHSLPSEAVFANSTGMLVVAFGLLVLYILLASSWKRPEPGILTDRQLLLQLRPGSRPFPVTYVSVTGRQPYKSW

SEQ ID NO: 8511 - protein, 142 aa, Artificial Sequence
  Synthetic polypeptide
TVVRASLVYRLPQSWVGPKLPWKLLHAALHLMAFVLTVVGLVAVFTFHNHGRTANLYSLHSWLGITTVFLFACQWFLGFAVFLLPWASMWLRSLLKPIHVFFGAAILSLSIASVISGINEKLFFSLKNTTRPYHSLPSEAVF

SEQ ID NO: 8512 - protein, 125 aa, Artificial Sequence
  Synthetic polypeptide
TVVRASLVYRLPQSWVGPKLPWKLLHAALHLMAFVLTVVGLVAVFTFHNHGRTANLYSLHSWLGITTVFLFACQWFLGFAVFLLPWASMWLRSLLKPIHVFFGAAILSLSIASVISGINEKLFFS

SEQ ID NO: 8513 - protein, 58 aa, Artificial Sequence
  Synthetic polypeptide
TVVRASLVYRLPQSWVGPKLPWKLLHAALHLMAFVLTVVGLVAVFTFHNHGRTANLYS

SEQ ID NO: 8514 - protein, 465 aa, Artificial Sequence
  Synthetic polypeptide
INLWNLLPRKPKDPEFNNTDQIDLYDDVLTATSQPSDDRSSSTEPPPPVRQEPSPKPNNKTPAILYTYSGLRNRRAAVYVGSFSWWTTDQQLIQVIRSIGVYDVVELKFAENRANGQSKGYAEVVVASENSVHKLLELLPGKVLNGEKVDVRPATRQNLSQFEAQARKRECVRVPRGGIPPRAHSRDSSDSADGRATPSENLVPSSARVDKPPSVLPYFNRPPSALPLMGLPPPPIPPPPPLSSSFGVPPPPPGIHYQHLMPPPPRLPPHLAVPPPGAIPPALHLNPAFFPPPNATVGPPPDTYMKASAPYNHHGSRDSGPPPSTVSEAEFEDIMKRNRAISSSAISKAVSGASAGDYSDAIETLLTAIAVIKQSRVANDERCRVLISSLKDCLHGIEAKSYSVGASGSSSRKRHRSRERSPSRSRESSRRHRDLLHNEDRHDDYFQERNREHERHRDRERDRHH

SEQ ID NO: 8515 - protein, 465 aa, Artificial Sequence; identical to SEQ ID NO: 8514
  Synthetic polypeptide

SEQ ID NO: 8516 - protein, 31 aa, Artificial Sequence
  Synthetic polypeptide
NGESTCGIYSPGSQRTQSSTIQIRLTCMMMC

SEQ ID NO: 8517 - protein, 31 aa, Artificial Sequence; identical to SEQ ID NO: 8516
  Synthetic polypeptide

SEQ ID NO: 8518 - protein, 31 aa, Artificial Sequence; identical to SEQ ID NO: 8516
  Synthetic polypeptide

SEQ ID NO: 8519 - protein, 31 aa, Artificial Sequence; identical to SEQ ID NO: 8516
  Synthetic polypeptide

SEQ ID NO: 8520 - protein, 31 aa, Artificial Sequence; identical to SEQ ID NO: 8516
  Synthetic polypeptide

SEQ ID NO: 8521 - protein, 31 aa, Artificial Sequence; identical to SEQ ID NO: 8516
  Synthetic polypeptide

SEQ ID NO: 8522 - protein, 31 aa, Artificial Sequence; identical to SEQ ID NO: 8516
  Synthetic polypeptide

SEQ ID NO: 8523 - protein, 31 aa, Artificial Sequence; identical to SEQ ID NO: 8516
  Synthetic polypeptide

SEQ ID NO: 8524 - protein, 31 aa, Artificial Sequence; identical to SEQ ID NO: 8516
  Synthetic polypeptide

SEQ ID NO: 8525 - protein, 31 aa, Artificial Sequence; identical to SEQ ID NO: 8516
  Synthetic polypeptide

SEQ ID NO: 8526 - protein, 31 aa, Artificial Sequence; identical to SEQ ID NO: 8516
  Synthetic polypeptide

SEQ ID NO: 8527 - protein, 31 aa, Artificial Sequence; identical to SEQ ID NO: 8516
  Synthetic polypeptide

SEQ ID NO: 8528 - protein, 31 aa, Artificial Sequence; identical to SEQ ID NO: 8516
  Synthetic polypeptide

SEQ ID NO: 8529 - protein, 31 aa, Artificial Sequence; identical to SEQ ID NO: 8516
  Synthetic polypeptide

SEQ ID NO: 8530 - protein, 31 aa, Artificial Sequence; identical to SEQ ID NO: 8516
  Synthetic polypeptide

SEQ ID NO: 8531 - protein, 31 aa, Artificial Sequence; identical to SEQ ID NO: 8516
  Synthetic polypeptide

SEQ ID NO: 8532 - protein, 31 aa, Artificial Sequence; identical to SEQ ID NO: 8516
  Synthetic polypeptide

SEQ ID NO: 8533 - protein, 31 aa, Artificial Sequence; identical to SEQ ID NO: 8516
  Synthetic polypeptide

SEQ ID NO: 8534 - protein, 33 aa, Artificial Sequence
  Synthetic polypeptide
EQIKSRCNRMVNQPVEFTPQEAKGPRVQQYRSD

SEQ ID NO: 8535 - protein, 33 aa, Artificial Sequence; identical to SEQ ID NO: 8534
  Synthetic polypeptide

SEQ ID NO: 8536 - protein, 33 aa, Artificial Sequence; identical to SEQ ID NO: 8534
  Synthetic polypeptide

SEQ ID NO: 8537 - protein, 33 aa, Artificial Sequence; identical to SEQ ID NO: 8534
  Synthetic polypeptide

SEQ ID NO: 8538 - protein, 33 aa, Artificial Sequence; identical to SEQ ID NO: 8534
  Synthetic polypeptide

SEQ ID NO: 8539 - protein, 33 aa, Artificial Sequence; identical to SEQ ID NO: 8534
  Synthetic polypeptide

SEQ ID NO: 8540 - protein, 33 aa, Artificial Sequence; identical to SEQ ID NO: 8534
  Synthetic polypeptide

SEQ ID NO: 8541 - protein, 33 aa, Artificial Sequence; identical to SEQ ID NO: 8534
  Synthetic polypeptide

SEQ ID NO: 8542 - protein, 33 aa, Artificial Sequence; identical to SEQ ID NO: 8534
  Synthetic polypeptide

SEQ ID NO: 8543 - protein, 33 aa, Artificial Sequence; identical to SEQ ID NO: 8534
  Synthetic polypeptide

SEQ ID NO: 8544 - protein, 33 aa, Artificial Sequence; identical to SEQ ID NO: 8534
  Synthetic polypeptide

SEQ ID NO: 8545 - protein, 33 aa, Artificial Sequence; identical to SEQ ID NO: 8534
  Synthetic polypeptide

SEQ ID NO: 8546 - protein, 33 aa, Artificial Sequence; identical to SEQ ID NO: 8534
  Synthetic polypeptide

SEQ ID NO: 8547 - protein, 33 aa, Artificial Sequence; identical to SEQ ID NO: 8534
  Synthetic polypeptide

SEQ ID NO: 8548 - protein, 33 aa, Artificial Sequence; identical to SEQ ID NO: 8534
  Synthetic polypeptide

SEQ ID NO: 8549 - protein, 33 aa, Artificial Sequence; identical to SEQ ID NO: 8534
  Synthetic polypeptide

SEQ ID NO: 8550 - protein, 33 aa, Artificial Sequence; identical to SEQ ID NO: 8534
  Synthetic polypeptide

SEQ ID NO: 8551 - protein, 33 aa, Artificial Sequence; identical to SEQ ID NO: 8534
  Synthetic polypeptide

SEQ ID NO: 8552 - protein, 456 aa, Artificial Sequence
  Synthetic polypeptide
INLWNLLPRKPKDPEFNNTDQIDLYDDVLTATSQPSDDRSSSTEPPPPVRQEPSPKPNNKTPAILYTYSGLRNRRAAVYVGSFSWWTTDQQLIQVIRSIGVYDVVELKFAENRANGQSKGYAEVVVASENSVHKLLELLPGKVLNGEKVDVRPATRQNLSQFEAQARKRIPPRAHSRDSSDSADGRATPSENLVPSSARVDKPPSVLPYFNRPPSALPLMGLPPPPIPPPPPLSSSFGVPPPPPGIHYQHLMPPPPRLPPHLAVPPPGAIPPALHLNPAFFPPPNATVGPPPDTYMKASAPYNHHGSRDSGPPPSTVSEAEFEDIMKRNRAISSSAISKAVSGASAGDYSDAIETLLTAIAVIKQSRVANDERCRVLISSLKDCLHGIEAKSYSVGASGSSSRKRHRSRERSPSRSRESSRRHRDLLHNEDRHDDYFQERNREHERHRDRERDRHH

SEQ ID NO: 8553 - protein, 456 aa, Artificial Sequence; identical to SEQ ID NO: 8552
  Synthetic polypeptide

SEQ ID NO: 8554 - protein, 368 aa, Artificial Sequence
  Synthetic polypeptide
INLWNLLPRKPKDPEFNNTDQIDLYDDVLTATSQPSDDRSSSTEPPPPVRQEPSPKPNNKTPAILYTYSGLRNRRAAVYVGSFSWWTTDQQLIQVIRSIGVYDVVELKFAENRANGQSKGYAEVVVASENSVHKLLELLPGKVLNGEKVDVRPATRQNLSQFEAQARKRIPPRAHSRDSSDSADGRATPSENLVPSSARVDKPPSVLPYFNRPPSALPLMVGPPPDTYMKASAPYNHHGSRDSGPPPSTVSEAEFEDIMKRNRAISSSAISKAVSGASAGDYSDAIETLLTAIAVIKQSRVANDERCRVLISSLKDCLHGIEAKSYSVGASGSSSRKRHRSRERSPSRSRESSRRHRDLLHNEDRHDD

SEQ ID NO: 8555 - protein, 282 aa, Artificial Sequence
  Synthetic polypeptide
INLWNLLPRKPKDPEFNNTDQIDLYDDVLTATSQPSDDRSSSTEPPPPVRQEPSPKPNNKTPAILYTYSGLRNRRAAVYVGSFSWWTTDQQLIQVIRSIGVYDVVELKFAENRANGQSKGYAEVVVASENSVHKLLELLPGKVLNGEKVDVRPATRQNLSQFEAQARKRIPPRAHSRDSSDSADGRATPSENLVPSSARVDKPPSVLPYFNRPPSALPLMGLPPPPIPPPPPLSSSFGVPPPPPGIHYQHLMPPPPRLPPHLAVPPPGAIPPALHLNPAFFP

SEQ ID NO: 8556 - protein, 94 aa, Artificial Sequence
  Synthetic polypeptide
INLWNLLPRKPKDPEFNNTDQIDLYDDVLTATSQPSDDRSSSTEPPPPVRQEPSPKPNNKTPAILYTYSGLRNRRAAVYVGSFSWGHLRDEISE

SEQ ID NO: 8557 - protein, 96 aa, Artificial Sequence
  Synthetic polypeptide
INLWNLLPRKPKDPEFNNTDQIDLYDDVLTATSQPSDDRSSSTEPPPPVRQEPSPKPNNKTPAILYTYSGLRNRRAAVYVGSFSWWTTDQQLIQVC

SEQ ID NO: 8558 - protein, 213 aa, Artificial Sequence
  Synthetic polypeptide
INLWNLLPRKPKDPEFNNTDQIDLYDDVLTATSQPSDDRSSSTEPPPPVRQEPSPKPNNKTPAILYTYSGLRNRRAAVYVGSFSWWTTDQQLIQVIRSIGVYDVVELKFAENRANGQSKGYAEVVVASENSVHKLLELLPGKVLNGEKVDVRPATRQNLSQFEAQARKRIPPRAHSRDSSDSADGRATPSENLVPSSARVDKPPSVLPYFNRP

SEQ ID NO: 8559 - protein, 198 aa, Artificial Sequence
  Synthetic polypeptide
INLWNLLPRKPKDPEFNNTDQIDLYDDVLTATSQPSDDRSSSTEPPPPVRQEPSPKPNNKTPAILYTYSGLRNRRAAVYVGSFSWWTTDQQLIQVIRSIGVYDVVELKFAENRANGQSKGYAEVVVASENSVHKLLELLPGKVLNGEKVDVRPATRQNLSQFEAQARKRIPPRAHSRDSSDSADGRATPSENLVPSSA

SEQ ID NO: 8560 - protein, 95 aa, Artificial Sequence
  Synthetic polypeptide
INLWNLLPRKPKDPEFNNTDQIDLYDDVLTATSQPSDDRSSSTEPPPPVRQEPSPKPNNKTPAILYTYSGLRNRRAAVYVGSFSWVGLISERELS

SEQ ID NO: 8561 - protein, 95 aa, Artificial Sequence; identical to SEQ ID NO: 8560
  Synthetic polypeptide

SEQ ID NO: 8562 - protein, 87 aa, Artificial Sequence
  Synthetic polypeptide
INLWNLLPRKPKDPEFNNTDQIDLYDDVLTATSQPSDDRSSSTEPPPPVRQEPSPKPNNKTPAILYTYSGLRNRRAAVYVGSFSWVC

SEQ ID NO: 8563 - protein, 92 aa, Artificial Sequence
  Synthetic polypeptide
INLWNLLPRKPKDPEFNNTDQIDLYDDVLTATSQPSDDRSSSTEPPPPVRQEPSPKPNNKTPAILYTYSGLRNRRAAVYVGSFSWESMMWWS

SEQ ID NO: 8564 - protein, 139 aa, Artificial Sequence
  Synthetic polypeptide
INLWNLLPRKPKDPEFNNTDQIDLYDDVLTATSQPSDDRSSSTEPPPPVRQEPSPKPNNKTPAILYTYSGLRNRRAAVYVGSFSWWTTDQQLIQVIRSIGVYDVVELKFAENRANGQSKGYAEVVVASENSVHKLLELL

SEQ ID NO: 8565 - protein, 137 aa, Artificial Sequence
  Synthetic polypeptide
INLWNLLPRKPKDPEFNNTDQIDLYDDVLTATSQPSDDRSSSTEPPPPVRQEPSPKPNNKTPAILYTYSGLRNRRAAVYVGSFSWWTTDQQLIQVIRSIGVYDVVELKFAENRANGQSKGYAEVVVASENSVHKLLE

SEQ ID NO: 8566 - protein, 132 aa, Artificial Sequence
  Synthetic polypeptide
INLWNLLPRKPKDPEFNNTDQIDLYDDVLTATSQPSDDRSSSTEPPPPVRQEPSPKPNNKTPAILYTYSGLRNRRAAVYVGSFSWWTTDQQLIQVIRSIGVYDVVELKFAENRANGQSKGYAEVVVASENSV

SEQ ID NO: 8567 - protein, 95 aa, Artificial Sequence
  Synthetic polypeptide
INLWNLLPRKPKDPEFNNTDQIDLYDDVLTATSQPSDDRSSSTEPPPPVRQEPSPKPNNKTPAILYTYSGLRNRRAAVYVGSFSWQGHLRDEISE

SEQ ID NO: 8568 - protein, 631 aa, Artificial Sequence
  Synthetic polypeptide
MGETASRSTRASNPGQFESDSDVLWQRAQVPDTVFHHGRVGINTDRPDEALVVHGNVKVMGSLMHPSDLRAKEHVQEVDTTEQLKRISRMRLVHYRYKPEFAASAGIEATAPETGVIAQEVKEILPEAVKDTGDMVFANGKTIENFLVVNKERIFMENVGAVKELCKLTDNLETRIDELERWSHKLAKLRRLDSLKSTGSSGAFSHAGSQFSRAGSVPHKKRPPKVASKSSSVVPDQACISQRFLQGTIIALVVVMAFSVVSMSTLYVLSLRTEEDLVDTDGSFAVSTSCLLALLRPQPPGGSEALCPWSSQSFGTTQLRQSPLTTGLPGIQPSLLLVTTSLTSSAPGSAVRTLDMCSSHPCPVICCSSPTTNPTTGPSLGPSFNPGHVLSPSPSPSTNRSGPSQMALLPVTNIRAKSWGLSVNGIGHSKHHKSLEPLASPAVPFPGGQGKAKNSPSLGFHGRARRGALQSSVGPAEPTWAQGQSASLLAEPVPSLTSIQVLENSMSITSQYCAPGDACRPGNFTYHIPVSSGTPLHLSLTLQMNSSSPVSVVLCSLRSKEEPCEEGSLPQSLHTHQDTQGTSHRWPITILSFREFTYHFRVALLGQANCSSEALAQPATDYHFHFYRLCD

SEQ ID NO: 8569 - protein, 83 aa, Artificial Sequence
  Synthetic polypeptide
WEKQQAEVPGPPTQASSRATAMCCGSGHRCPTPSSTTAAWASTQTGRMRRWLCTGMSRSWARLCTPPTCAPRNTCRRWTPPSN

SEQ ID NO: 8570 - protein, 83 aa, Artificial Sequence; identical to SEQ ID NO: 8569
  Synthetic polypeptide

SEQ ID NO: 8571 - protein, 83 aa, Artificial Sequence; identical to SEQ ID NO: 8569
  Synthetic polypeptide

SEQ ID NO: 8572 - protein, 47 aa, Artificial Sequence
  Synthetic polypeptide
GRNSKQKYPGLQPRPVRERQRCVVAAGTGARHRLPPRPRGHQHRPAG

SEQ ID NO: 8573 - protein, 47 aa, Artificial Sequence; identical to SEQ ID NO: 8572
  Synthetic polypeptide

SEQ ID NO: 8574 - protein, 47 aa, Artificial Sequence; identical to SEQ ID NO: 8572
  Synthetic polypeptide

SEQ ID NO: 8575 - protein, 600 aa, Artificial Sequence
  Synthetic polypeptide
MGETASRSTRASNPGQFESDSDVLWQRAQVPDTVFHHGRVGINTDRPDEALVVHGNVKVMGSLMHPSDLRAKEHVQEVDTTEQLKRISRMRLVHYRYKPEFAASAGIEATAPETGVIAQEVKEILPEAVKDTGDMVFANGKTIENFLVVNKERIFMENVGAVKELCKLTDNLETRIDELERWSHKLAKLRRLDSLKSTGSSGAFSHAGSQFSRAGSVPHKKRPPKVASKSSSVVPDQACISQRFLQGTIIALVVVMAFSVVSMSTLYVLSLRTEEDLVDTDGRSSQSFGTTQLRQSPLTTGLPGIQPSLLLVTTSLTSSAPGSAVRTLDMCSSHPCPVICCSSPTTNPTTGPSLGPSFNPGHVLSPSPSPSTNRSGPSQMALLPVTNIRAKSWGLSVNGIGHSKHHKSLEPLASPAVPFPGGQGKAKNSPSLGFHGRARRGALQSSVGPAEPTWAQGQSEPVPSLTSIQVLENSMSITSQYCAPGDACRPGNFTYHIPVSSGTPLHLSLTLQMNSSSPVSVVLCSLRSKEEPCEEGSLPQSLHTHQDTQGTSHRWPITILSFREFTYHFRVALLGQANCSSEALAQPATDYHFHFYRLCD

SEQ ID NO: 8576 - protein, 337 aa, Artificial Sequence
  Synthetic polypeptide
MGETASRSTRASNPGQFESDSDVLWQRAQVPDTVFHHGRVGINTDRPDEALVVHGNVKVMGSLMHPSDLRAKEHVQEVDTTEQLKRISRMRLVHYRYKPEFAASAGIEATAPETGVIAQEVKEILPEAVKDTGDMVFANGKTIENFLVVNKVCGLKYVVYCEDDVCHLPVLSLGAKEAWAVKELCKLTDNLETRIDELERWSHKLAKLRRLDSLKSTGSSGAFSHAGSQFSRAGSVPHKKRPPKVASKVGSSSVVPDQACISQRFLQGTIIALVVVMAFRHHLGAQPQEQGPQPCPRERALDGGSSSNGHPFLWLQRGVHVHTVRAEPAHRGGPGRH

SEQ ID NO: 8577 - protein, 12 aa, Artificial Sequence
  Synthetic polypeptide
SQLLERLRSSRP

SEQ ID NO: 8578 - protein, 12 aa, Artificial Sequence
  Synthetic polypeptide
SQLLERLRSSRP

SEQ ID NO: 8579 - protein, 12 aa, Artificial Sequence
  Synthetic polypeptide
SQLLERLRSSRP

SEQ ID NO: 8580 - protein, 12 aa, Artificial Sequence
  Synthetic polypeptide
SQLLERLRSSRP

SEQ ID NO: 8581 - protein, 12 aa, Artificial Sequence
  Synthetic polypeptide
SQLLERLRSSRP

SEQ ID NO: 8582 - protein, 132 aa, Artificial Sequence
  Synthetic polypeptide
SQYFGRPRQADHLRSGIQDHPGQHGKTPSLLKIQKLDVVVRTCNPIVPATREAEELEAMSRYTSPVNPAVFPHLTVVLLAIGMFFTAWFFVYEVTSTKYTRDIYKELLISLVASLFMGFGVLFLLLWVGIYV

SEQ ID NO: 8583 - protein, 132 aa, Artificial Sequence; identical to SEQ ID NO: 8582
  Synthetic polypeptide

SEQ ID NO: 8584 - protein, 102 aa, Artificial Sequence
  Synthetic polypeptide
SQYFGRPRQADHLRSGIQDHPGQHGKTPSLLKIQKLDVVVRTCNPIVPATREAEELEAMSRYTSPVNPAVFPHLTVVLLAIGMFFTAWFFVYPFTEQPEDQH

SEQ ID NO: 8585 - protein, 102 aa, Artificial Sequence; identical to SEQ ID NO: 8584
  Synthetic polypeptide

SEQ ID NO: 8586 - protein, 102 aa, Artificial Sequence; identical to SEQ ID NO: 8584
  Synthetic polypeptide

SEQ ID NO: 8587 - protein, 22 aa, Artificial Sequence
  Synthetic polypeptide
LLGCGILSRHPCHSGPYSQLPG

SEQ ID NO: 8588 - protein, 22 aa, Artificial Sequence
  Synthetic polypeptide
LLGCGILSRHPCHSGPYSQLPG

SEQ ID NO: 8589 - protein, 22 aa, Artificial Sequence
  Synthetic polypeptide
LLGCGILSRHPCHSGPYSQLPG

SEQ ID NO: 8590 - protein, 22 aa, Artificial Sequence
  Synthetic polypeptide
LLGCGILSRHPCHSGPYSQLPG

SEQ ID NO: 8591 - protein, 22 aa, Artificial Sequence
  Synthetic polypeptide
LLGCGILSRHPCHSGPYSQLPG

SEQ ID NO: 8592 - protein, 22 aa, Artificial Sequence
  Synthetic polypeptide
LLGCGILSRHPCHSGPYSQLPG

SEQ ID NO: 8593 - protein, 331 aa, Artificial Sequence
  Synthetic polypeptide
AGIRVILDLTPNYRGENSWFSTQVDTVATKVKDALEFWLQAGVDGFQVRDIENLKDASSFLAEWQNITKGFSEDRLLIAGTNSSDLQQILSLLESNKDLLLTSSYLSDSGSTGEHTKSLVTQYLNATGNRWCSWSLSQARLLTSFLPAQLLRLYQLMLFTLPGTPVFSYGDEIGLDAAALPGQPMEAPVMLWDESSFPDIPGAVSANMTVKGQSEDPGSLLSLFRRLSDQRSKERSLLHGDFHAFSAGPGLFSYIRHWDQNERFLVVLNFGDVGLSAGLQASDLPASASLPAKADLLLSTQPGREEGSPLELERLKLEPHEGLLLRFPYAA

SEQ ID NO: 8594 - protein, 331 aa, Artificial Sequence; identical to SEQ ID NO: 8593
  Synthetic polypeptide

SEQ ID NO: 8595 - protein, 331 aa, Artificial Sequence; identical to SEQ ID NO: 8593
  Synthetic polypeptide

SEQ ID NO: 8596 - protein, 331 aa, Artificial Sequence; identical to SEQ ID NO: 8593
  Synthetic polypeptide

SEQ ID NO: 8597 - protein, 331 aa, Artificial Sequence; identical to SEQ ID NO: 8593
  Synthetic polypeptide

SEQ ID NO: 8598 - protein, 331 aa, Artificial Sequence; identical to SEQ ID NO: 8593
  Synthetic polypeptide

SEQ ID NO: 8599 - protein, 37 aa, Artificial Sequence
  Synthetic polypeptide
TWLWNLEQASVSFWTLLPTTGVRTRGSPLRLTLWPPR

SEQ ID NO: 8600 - protein, 37 aa, Artificial Sequence; identical to SEQ ID NO: 8599
  Synthetic polypeptide

SEQ ID NO: 8601 - protein, 37 aa, Artificial Sequence; identical to SEQ ID NO: 8599
  Synthetic polypeptide

SEQ ID NO: 8602 - protein, 37 aa, Artificial Sequence; identical to SEQ ID NO: 8599
  Synthetic polypeptide

SEQ ID NO: 8603 - protein, 37 aa, Artificial Sequence; identical to SEQ ID NO: 8599
  Synthetic polypeptide

SEQ ID NO: 8604 - protein, 37 aa, Artificial Sequence; identical to SEQ ID NO: 8599
  Synthetic polypeptide

SEQ ID NO: 8605 - protein, 48 aa, Artificial Sequence
  Synthetic polypeptide
TGRGGILTDILDPVCCSLIMTVDASPCFSGMLWSFGCKLAWMGSRFGT

SEQ ID NO: 8606 - protein, 48 aa, Artificial Sequence; identical to SEQ ID NO: 8605
  Synthetic polypeptide

SEQ ID NO: 8607 - protein, 48 aa, Artificial Sequence; identical to SEQ ID NO: 8605
  Synthetic polypeptide

SEQ ID NO: 8608 - protein, 48 aa, Artificial Sequence; identical to SEQ ID NO: 8605
  Synthetic polypeptide

SEQ ID NO: 8609 - protein, 48 aa, Artificial Sequence; identical to SEQ ID NO: 8605
  Synthetic polypeptide

SEQ ID NO: 8610 - protein, 48 aa, Artificial Sequence; identical to SEQ ID NO: 8605
  Synthetic polypeptide

SEQ ID NO: 8611 - protein, 39 aa, Artificial Sequence
  Synthetic polypeptide
LWTRLPASLGCSGVLAASWRGWVPGSGHRESEGCILILG

SEQ ID NO: 8612 - protein, 39 aa, Artificial Sequence; identical to SEQ ID NO: 8611
  Synthetic polypeptide

SEQ ID NO: 8613 - protein, 39 aa, Artificial Sequence; identical to SEQ ID NO: 8611
  Synthetic polypeptide

SEQ ID NO: 8614 - protein, 39 aa, Artificial Sequence; identical to SEQ ID NO: 8611
  Synthetic polypeptide

SEQ ID NO: 8615 - protein, 39 aa, Artificial Sequence; identical to SEQ ID NO: 8611
  Synthetic polypeptide

SEQ ID NO: 8616 - protein, 39 aa, Artificial Sequence; identical to SEQ ID NO: 8611
  Synthetic polypeptide

SEQ ID NO: 8617 - protein, 320 aa, Artificial Sequence
  Synthetic polypeptide
HFRSCLLLTDYDCGRVSLLLWDALEFWLQAGVDGFQVRDIENLKDASSFLAEWQNITKGFSEDRLLIAGTNSSDLQQILSLLESNKDLLLTSSYLSDSGSTGEHTKSLVTQYLNATGNRWCSWSLSQARLLTSFLPAQLLRLYQLMLFTLPGTPVFSYGDEIGLDAAALPGQPMEAPVMLWDESSFPDIPGAVSANMTVKGQSEDPGSLLSLFRRLSDQRSKERSLLHGDFHAFSAGPGLFSYIRHWDQNERFLVVLNFGDVGLSAGLQASDLPASASLPAKADLLLSTQPGREEGSPLELERLKLEPHEGLLLRFPYAA

SEQ ID NO: 8618 - protein, 320 aa, Artificial Sequence; identical to SEQ ID NO: 8617
  Synthetic polypeptide

SEQ ID NO: 8619 - protein, 320 aa, Artificial Sequence; identical to SEQ ID NO: 8617
  Synthetic polypeptide

SEQ ID NO: 8620 - protein, 320 aa, Artificial Sequence; identical to SEQ ID NO: 8617
  Synthetic polypeptide

SEQ ID NO: 8621 - protein, 320 aa, Artificial Sequence; identical to SEQ ID NO: 8617
  Synthetic polypeptide

SEQ ID NO: 8622 - protein, 320 aa, Artificial Sequence; identical to SEQ ID NO: 8617
  Synthetic polypeptide

SEQ ID NO: 8623 - protein, 33 aa, Artificial Sequence
  Synthetic polypeptide
GGGQAAVGGRGGRRIQETGARRWGRTGRRRGGQ

SEQ ID NO: 8624 - protein, 33 aa, Artificial Sequence; identical to SEQ ID NO: 8623
  Synthetic polypeptide

SEQ ID NO: 8625 - protein, 33 aa, Artificial Sequence; identical to SEQ ID NO: 8623
  Synthetic polypeptide

SEQ ID NO: 8626 - protein, 33 aa, Artificial Sequence; identical to SEQ ID NO: 8623
  Synthetic polypeptide

SEQ ID NO: 8627 - protein, 33 aa, Artificial Sequence; identical to SEQ ID NO: 8623
  Synthetic polypeptide

SEQ ID NO: 8628 - protein, 564 aa, Artificial Sequence
  Synthetic polypeptide
GGGAGAGSRRPELGAGAGRGGGGEVNELKEKGNKALSVGNIDDALQCYSEAIKLDPHNHVLYSNRSAAYAKKGDYQKAYEDGCKTVDLKPDWGKGYSRKAAALEFLNRFEEAKRTYEEGLKHEANNPQLKEGLQNMEARLAERKFMNPFNMPNLYQKLESDPRTRTLLSDPTYRELIEQLRNKPSDLGTKLQDPRIMTTLSVLLGVDLGSMDEEEEIATPPPPPPPKKETKPEPMEEDLPENKKQALKEKELGNDAYKKKDFDTALKHYDKAKELDPTNMTYITNQAAVYFEKGDYNKCRELCEKAIEVGRENREDYRQIAKAYARIGNSYFKEEKYKDAIHFYNKSLAEHRTPDVLKKCQQAEKILKEQERLAYINPDLALEEKNKGNECFQKGDYPQAMKHYTEAIKRNPKDAKLYSNRAACYTKLLEFQLALKDCEECIQLEPTFIKGYTRKAAALEAMKDYTKAMDVYQKALDLDSSCKEAADGYQRCMMAQYNRHDSPEDVKRRAMADPEVQQIMSDPAMRLILEQMQKDPQALSEHLKNPVIAQKIQKLMDVGLIAIR

SEQ ID NO: 8629 - protein, 564 aa, Artificial Sequence; identical to SEQ ID NO: 8628
  Synthetic polypeptide

SEQ ID NO: 8630 - protein, 34 aa, Artificial Sequence
  Synthetic polypeptide
RWPGRGRGAGRAPDPGDRSSALGPDGAAAGRSMS

SEQ ID NO: 8631 - protein, 34 aa, Artificial Sequence; identical to SEQ ID NO: 8630
  Synthetic polypeptide

SEQ ID NO: 8632 - protein, 34 aa, Artificial Sequence; identical to SEQ ID NO: 8630
  Synthetic polypeptide

SEQ ID NO: 8633 - protein, 34 aa, Artificial Sequence; identical to SEQ ID NO: 8630
  Synthetic polypeptide

SEQ ID NO: 8634 - protein, 34 aa, Artificial Sequence; identical to SEQ ID NO: 8630
  Synthetic polypeptide

SEQ ID NO: 8635 - protein, 159 aa, Artificial Sequence
  Synthetic polypeptide
GGGAGAGSRRPELGAGAGRGGGGEVNELKEKGNKALSVGNIDDALQCYSEAIKLDPHNHVLYSNRSAAYAKKGDYQKAYEDGCKTVDLKPDWGKGYSRKAAALEFLNRFEEAKRTYEEGLKHEANNPQLKEGLQNMEARLAVQPARQPRRCEATSHGRP

SEQ ID NO: 8636 - protein, 540 aa, Artificial Sequence
  Synthetic polypeptide
GGGAGAGSRRPELGAGAGRGGGGEVNELKEKGNKALSVGNIDDALQCYSEAIKLDPHNHVLYSNRSAAYAKKGDYQKAYEDGCKTVDLKPDWGKGLKHEANNPQLKEGLQNMEARLAERKFMNPFNMPNLYQKLESDPRTRTLLSDPTYRELIEQLRNKPSDLGTKLQDPRIMTTLSVLLGVDLGSMDEEEEIATPPPPPPPKKETKPEPMEEDLPENKKQALKEKELGNDAYKKKDFDTALKHYDKAKELDPTNMTYITNQAAVYFEKGDYNKCRELCEKAIEVGRENREDYRQIAKAYARIGNSYFKEEKYKDAIHFYNKSLAEHRTPDVLKKCQQAEKILKEQERLAYINPDLALEEKNKGNECFQKGDYPQAMKHYTEAIKRNPKDAKLYSNRAACYTKLLEFQLALKDCEECIQLEPTFIKGYTRKAAALEAMKDYTKAMDVYQKALDLDSSCKEAADGYQRCMMAQYNRHDSPEDVKRRAMADPEVQQIMSDPAMRLILEQMQKDPQALSEHLKNPVIAQKIQKLMDVGLIAIR

SEQ ID NO: 8637 - protein, 257 aa, Artificial Sequence
  Synthetic polypeptide
GGGAGAGSRRPELGAGAGRGGGGEVNELKEKGNKALSVGNIDDALQCYSEAIKLDPHNHVLYSNRSAAYAKKGDYQKAYEDGCKTVDLKPDWGKGYSRKAAALEFLNRFEEAKRTYEEGLKHEANNPQLKEGLQNMEARLAERKFMNPFNMPNLYQKLESDPRTRTLLSDPTYRELIEQLRNKPSDLGTKLQDPRIMTTLSVLLGVDLGSMDEEEEIATPPPPPPPKKETKPEPMEEDLPENKKQVLFFSLLTVTYL

SEQ ID NO: 8638 - protein, 588 aa, Artificial Sequence
  Synthetic polypeptide
CSAHIIPLAASSVLPRLSSGMKSPWALRVRGSSGVEFVVPTSVFHGTLYRLLYKDLCTCVTLFCDHVFLCLSPSVDCELLEGRNRVLLISVFPAPSTVPGTDPTYKWKRQVTQRNPVGQKKRKMSLLFDHLEPMELAEHLTYLEYRSFCKILFQDYHSFVTHGCTVDNPVLERFISLFNSVSQWVQLMILSKPTAPQRALVITHFVHVAEKLLQLQNFNTLMAVVGGLSHSSISRLKETHSHVSPETIKLWEGLTELVTATGNYGNYRRRLAACVGFRFPILGVHLKDLVALQLALPDWLDPARTRLNGAKMKQLFSILEELAMVTSLRPPVQANPDLLSLLTVSLDQYQTEDELYQLSLQREPRSKSSPTSPTSCTPPPRPPVLEEWTSAAKPKLDQALVVEHIEKMVESVFRNFDVDGDGHISQEEFQIIRGNFPYLSAFGDLDQNQDGCISREEMVSYFLRSSSVLGGRMGFVHNFQESNSLRPVACRHCKALILGIYKQGLKCRACGVNCHKQCKDRLSVECRRRAQSVSLEGSAPSPSPMHSHHHRAFSFSLPRPGRRGSRPPAEIREEEVQTVEDGVFDIHL

SEQ ID NO: 8639 - protein, 35 aa, Artificial Sequence
  Synthetic polypeptide
TVSSSRAGTVSYSSLYSQRLAQCLAQTLPTSGSGR

SEQ ID NO: 8640 - protein, 35 aa, Artificial Sequence; identical to SEQ ID NO: 8639
  Synthetic polypeptide

SEQ ID NO: 8641 - protein, 35 aa, Artificial Sequence; identical to SEQ ID NO: 8639
  Synthetic polypeptide

SEQ ID NO: 8642 - protein, 35 aa, Artificial Sequence; identical to SEQ ID NO: 8639
  Synthetic polypeptide

SEQ ID NO: 8643 - protein, 35 aa, Artificial Sequence; identical to SEQ ID NO: 8639
  Synthetic polypeptide

SEQ ID NO: 8644 - protein, 32 aa, Artificial Sequence
  Synthetic polypeptide
HSAWHRPYLQVEAAGDSAEPCGTEKAQDVPVV

SEQ ID NO: 8645 - protein, 32 aa, Artificial Sequence; identical to SEQ ID NO: 8644
  Synthetic polypeptide

SEQ ID NO: 8646 - protein, 32 aa, Artificial Sequence; identical to SEQ ID NO: 8644
  Synthetic polypeptide

SEQ ID NO: 8647 - protein, 32 aa, Artificial Sequence; identical to SEQ ID NO: 8644
  Synthetic polypeptide

SEQ ID NO: 8648 - protein, 32 aa, Artificial Sequence; identical to SEQ ID NO: 8644
  Synthetic polypeptide

SEQ ID NO: 8649 - protein, 587 aa, Artificial Sequence
  Synthetic polypeptide
CSAHIIPLAASSVLPRLSSGMKSPWALRVRGSSGVEFVVPTSVFHGTLYRLLYKDLCTCVTLFCDHVFLCLSPSVDCELLEGRNRVLLISVFPAPSTVPGTDPTYKWKRQVTQRNPVGQKKRKMSLLFDHLEPMELAEHLTYLEYRSFCKILFQDYHSFVTHGCTVDNPVLERFISLFNSVSQWVQLMILSKPTAPQRALVITHFVHVAEKLLQLQNFNTLMAVVGGLSHSSISRLKETHSHVSPETIKLWEGLTELVTATGNYGNYRRRLAACVGFRFPILGVHLKDLVALQLALPDWLDPARTRLNGAKMKQLFSILEELAMVTSLRPPVQANPDLLSLLTVSLDQYQTEDELYQLSLQREPRSKSSPTSPTSCTPPPRPPVLEEWTSAAKPKLDQALVVEHIEKMVESVFRNFDVDGDGHISQEEFQIIRGNFPYLSAFGDLDQNQDGCISREEMVSYFLRSSSVLGGRMGFVHNFQESNSLRPVACRHCKALILGIYKQGLKCRACGVNCHKQCKDRLSVECRRRAQSVSLEGSAPSPSPMHSHHHRAFSFSLPRPGRRGSRPPEIREEEVQTVEDGVFDIHL

SEQ ID NO: 8650 - protein, 587 aa, Artificial Sequence; identical to SEQ ID NO: 8649
  Synthetic polypeptide

SEQ ID NO: 8651 - protein, 587 aa, Artificial Sequence; identical to SEQ ID NO: 8649
  Synthetic polypeptide

SEQ ID NO: 8652 - protein, 210 aa, Artificial Sequence
  Synthetic polypeptide
CSAHIIPLAASSVLPRLSSGMKSPWALRVRGSSGVEFVVPTSVFHGTLYRLLYKDLCTCVTLFCDHVFLCLSPSVDCELLEGRNRVLLISVFPAPSTVPGTDPTYKWKRQVTQRNPVGQKKRKMSLLFDHLEPMELAEHLTYLEYRSFCKILFQDYHSFVTHGCTVDNPVLERFISLFNSVSQWVQLMILSKPTAPQRALVITHFVHVAE

SEQ ID NO: 8653 - protein, 96 aa, Artificial Sequence
  Synthetic polypeptide
SDPAGLPALSLGTCLCSGHTLLSPVLKAPCACVHHILSPSHLSLHEIAGPALEPSPSPTLTTPGDNLPAGSAAHHVHCAAAGRERGGAGTLAAGAG

SEQ ID NO: 8654 - protein, 525 aa, Artificial Sequence
  Synthetic polypeptide
LLLVTTSQLAVPPTTCTVLLLAESEGERERWLQVLGELQRLLLDARPRPRPVYTLKEAYDNGLPLLPHTLCAAILDQDRLALGTEEGLFVIHLRSNDIFQVGECRRVQQLTLSPSAGLLVVLCGRGPSVRLFALAELENIEVAGAKIPESRGCQVLAAGSILQARTPVLCVAVKRQVLCYQLGPGPGPWQRRIRELQAPATVQSLGLLGDRLCVGAAGGFALYPLLNEAAPLALGAGLVPEELPPSRGGLGEALGAVELSLSEFLLLFTTAGIYVDGAGRKSRGHELLWPAAPMGWGYAAPYLTVFSENSIDVFDVRRAEWVQTVPLKKVRPLNPEGSLFLYGTEKVRLTYLRNQLAEKDEFDIPDLTDNSRRQLFRTKSKRRFFFRVSEEQQKQQRREMLKDPFVRSKLISPPTNFNHLVHVGPANGRPGARDKSPAPEEKGRVARGSGPQRPHSFSEALRRPASMGSEGLGGDADPMKRKPWTSLSSESVSCPQGSLSPATSLMQVSERPRSLPLSPELESSP

SEQ ID NO: 8655 - protein, 62 aa, Artificial Sequence
  Synthetic polypeptide
PCRPPSPLPWHLSLLWSHLALSSSEGALCLCAPHSQSFTSVFARNCRPCTGAQPLTYLDYSW

SEQ ID NO: 8656 - protein, 25 aa, Artificial Sequence
  Synthetic polypeptide
ESQSPDSSPVKVPYLLYLFHWACLN

SEQ ID NO: 8657 - protein, 25 aa, Artificial Sequence
  Synthetic polypeptide
SLRAQILVLLKFLTCCISFTGPASM

SEQ ID NO: 8658 - protein, 14 aa, Artificial Sequence
  Synthetic polypeptide
SSLPAVSLSLGLPQ

SEQ ID NO: 8659 - protein, 14 aa, Artificial Sequence
  Synthetic polypeptide
SSLPAVSLSLGLPQ

SEQ ID NO: 8660 - protein, 14 aa, Artificial Sequence
  Synthetic polypeptide
SSLPAVSLSLGLPQ

SEQ ID NO: 8661 - protein, 14 aa, Artificial Sequence
  Synthetic polypeptide
SSLPAVSLSLGLPQ

SEQ ID NO: 8662 - protein, 14 aa, Artificial Sequence
  Synthetic polypeptide
SSLPAVSLSLGLPQ

SEQ ID NO: 8663 - protein, 14 aa, Artificial Sequence
  Synthetic polypeptide
SSLPAVSLSLGLPQ

SEQ ID NO: 8664 - protein, 63 aa, Artificial Sequence
  Synthetic polypeptide
ESQSPDSSPVKVPYLLYLFHWACLNERAAQLPRNTAPAGYQCPSCNGPIFPPTNLAGPVASAL

SEQ ID NO: 8665 - protein, 62 aa, Artificial Sequence
  Synthetic polypeptide
SLRAQILVLLKFLTCCISFTGPASMNVLPSYPETRHLPAISAPAAMAPSSPQPTWLAPWPPH

SEQ ID NO: 8666 - protein, 62 aa, Artificial Sequence; identical to SEQ ID NO: 8665
  Synthetic polypeptide

SEQ ID NO: 8667 - protein, 62 aa, Artificial Sequence; identical to SEQ ID NO: 8665
  Synthetic polypeptide

SEQ ID NO: 8668 - protein, 62 aa, Artificial Sequence; identical to SEQ ID NO: 8665
  Synthetic polypeptide

SEQ ID NO: 8669 - protein, 62 aa, Artificial Sequence; identical to SEQ ID NO: 8665
  Synthetic polypeptide

SEQ ID NO: 8670 - protein, 255 aa, Artificial Sequence
  Synthetic polypeptide
ESQSPDSSPVKVPYLLYLFHWACLNERAAQLPRNTAPAGYQCPSCNGPIFPPTNLAGPVASALREKLATVNWARAGLGLPLIDEVVSPEPEPLNTSDFSDWSSFNASSTPGPEEVDSASAAPAFYSQAPRPPASPGRPEQHTVIHMGNPEPLTHAPRKVYDTRDDDRTPGLHGDCDDDKYRRRPALGWLARLLRSRAGSRKRPLTLLQRAGLLLLLGLLGFLALLALMSRLGRAAADSDPNLDPLMNPHIRVGPS

SEQ ID NO: 8671 - protein, 133 aa, Artificial Sequence
  Synthetic polypeptide
ESQSPDSSPVKVPYLLYLFHWACLNERAAQLPRNTAPAGYQCPSCNGPIFPPTNLAGPVASALREKLATVNWARAGLGLPLIDEVVSPEPEPLNTSDFSDWSSFNASSTPGPEEVDSASAAPAFYSQAPRPPA

SEQ ID NO: 8672 - protein, 123 aa, Artificial Sequence
  Synthetic polypeptide
ESQSPDSSPVKVPYLLYLFHWACLNERAAQLPRNTAPAGYQCPSCNGPIFPPTNLAGPVASALREKLATVNWARAGLGLPLIDEVVSPEPEPLNTSDFSDWSSFNASSTPGPEEVDSASAAPA

SEQ ID NO: 8673 - protein, 152 aa, Artificial Sequence
  Synthetic polypeptide
ESQSPDSSPVKVPYLLYLFHWACLNERAAQLPRNTAPAGYQCPSCNGPIFPPTNLAGPVASALREKLATVNWARAGLGLPLIDEVVSPEPEPLNTSDFSDWSSFNASSTPGPEEVDSASAAPAFYSQAPRPPASPGRPEQHTVIHMGNPEPL

SEQ ID NO: 8674 - protein, 49 aa, Artificial Sequence
  Synthetic polypeptide
LVHWLLSAISTSNHLSTQQPECSFPAKGFSEASYLYPRNPPNKKECVNS

SEQ ID NO: 8675 - protein, 49 aa, Artificial Sequence; identical to SEQ ID NO: 8674
  Synthetic polypeptide

SEQ ID NO: 8676 - protein, 506 aa, Artificial Sequence
  Synthetic polypeptide
SIGFFLPYPPLTTSPPSSQSAPFQQKGSQKRAISTPETPLTKRSVSTRSPHQLLSPSSFSPSATPSQKYNSRSNRGEVVTSFGLAQGVSWSGRGGAGNISLKVLGCPEALTGSYKSMFQKLPDIREVLTCKIEELGSELKEHYKIEAFTPLLAPAQEPVTLLGQIGCDSNGKLNNKSVILEGDREHSSGAQIPVDLSELKEYSLFPGQVVIMEGINTTGRKLVATKLYEGVPLPFYQPTEEDADFEQSMVLVACGPYTTSDSITYDPLLDLIAVINHDRPDVCILFGPFLDAKHEQVENCLLTSPFEDIFKQCLRTIIEGTRSSGSHLVFVPSLRDVHHEPVYPQPPFSYSDLSREDKKQVQFVSEPCSLSINGVIFGLTSTDLLFHLGAEEISSSSGTSDRFSRILKHILTQRSYYPLYPPQEDMAIDYESFYVYAQLPVTPDVLIIPSELRYFVKDVLGCVCVNPGRLTKGQVGGTFARLYLRRPAADGAERQSPCIAVQVVRI

SEQ ID NO: 8677 - protein, 28 aa, Artificial Sequence
  Synthetic polypeptide
PPLHPAARVLLSSKRVLRSELSLPQKPP

SEQ ID NO: 8678 - protein, 28 aa, Artificial Sequence
  Synthetic polypeptide
PPLHPAARVLLSSKRVLRSELSLPQKPP

SEQ ID NO: 8679 - protein, 94 aa, Artificial Sequence
  Synthetic polypeptide
SIGFFLPYPPLTTSPPSSQSAPFQQKGSQKRAISTPETPLTKRSVSTRSPHQLLSPSSFSPSATPSQKYNSRSNRGEVVTSFGLAQGVSWSGRG

SEQ ID NO: 8680 - protein, 9 aa, Artificial Sequence
  Synthetic polypeptide
NFGFAAAAH

SEQ ID NO: 8681 - protein, 604 aa, Artificial Sequence
  Synthetic polypeptide
ETLVLLLQPIESDDMEHKTLKITDFGLAREWHKTTQMSAAGTYAWMAPEVIKASTFSKGSDVWSFGVLLWELLTGEVPYRGIDCLAVAYGVAVNKLTLPIPSTCPEPFAQLMADCWAQDPHRRPDFASILQQLEALEAQVLREMPRDSFHSMQEGWKREIQGLFDELRAKEKELLSREEELTRAAREQRSQAEQLRRREHLLAQWELEVFERELTLLLQQVDRERPHVRRRRGTFKRSKLRARDGGERISMPLDFKHRITVQASPGLDRRRNVFEVGPGDSPTFPRFRAIQLEPAEPGQAWGRQSPRRLEDSSNGERRACWAWGPSSPKPGEAQNGRRRSRMDEATWYLDSDDSSPLGSPSTPPALNGNPPRPSLEPEEPKRPVPAERGSSSGTPKLIQRALLRGTALLASLGLGRDLQPPGGPGRERGESPTTPPTPTPAPCPTEPPPSPLICFSLKTPDSPPTPAPLLLDLGIPVGQRSAKSPRREEEPRGGTVSPPPGTSRSAPGTPGTPRSPPLGLISRPRPSPLRSRIDPWSFVSAGPRPSPLPSPQPAPRRAPWTLFPDSDPFWDSPPANPFQGGPQDCRAQTKDMGAQAPWVPEAGP

SEQ ID NO: 8682 - protein, 19 aa, Artificial Sequence
  Synthetic polypeptide
KLWFCCCSPLRVTTWSTRP

SEQ ID NO: 8683 - protein, 25 aa, Artificial Sequence
  Synthetic polypeptide
VPSRLCGPGPPVWLSLMVSSRCSTT

SEQ ID NO: 8684 - protein, 25 aa, Artificial Sequence
  Synthetic polypeptide
VPSRLCGPGPPVWLSLMVSSRCSTT

SEQ ID NO: 8685 - protein, 25 aa, Artificial Sequence
  Synthetic polypeptide
VPSRLCGPGPPVWLSLMVSSRCSTT

SEQ ID NO: 8686 - protein, 25 aa, Artificial Sequence
  Synthetic polypeptide
VPSRLCGPGPPVWLSLMVSSRCSTT

SEQ ID NO: 8687 - protein, 25 aa, Artificial Sequence
  Synthetic polypeptide
VPSRLCGPGPPVWLSLMVSSRCSTT

SEQ ID NO: 8688 - protein, 15 aa, Artificial Sequence
  Synthetic polypeptide
SPAGFVALGLRCGCL

SEQ ID NO: 8689 - protein, 15 aa, Artificial Sequence
  Synthetic polypeptide
SPAGFVALGLRCGCL

SEQ ID NO: 8690 - protein, 15 aa, Artificial Sequence
  Synthetic polypeptide
SPAGFVALGLRCGCL

SEQ ID NO: 8691 - protein, 15 aa, Artificial Sequence
  Synthetic polypeptide
SPAGFVALGLRCGCL

SEQ ID NO: 8692 - protein, 15 aa, Artificial Sequence
  Synthetic polypeptide
SPAGFVALGLRCGCL

SEQ ID NO: 8693 - protein, 173 aa, Artificial Sequence
  Synthetic polypeptide
PQQALWPWASGVAVSDGVIKVFNDMKVRKSSTPEEVKKRKKAVLFCLSEDKKNIILEEGKEILVGDVGQTVDDPYATFVKMLPDKDCRYALYDATYETKESKKEDLVFIFWAPESAPLKSKMIYASSKDAIKKKLTGIKHELQANCYEEVKDRCTLAEKLGGSAVISLEGKPL

SEQ ID NO: 8694 - protein, 173 aa, Artificial Sequence; identical to SEQ ID NO: 8693
  Synthetic polypeptide

SEQ ID NO: 8695 - protein, 173 aa, Artificial Sequence; identical to SEQ ID NO: 8693
  Synthetic polypeptide

SEQ ID NO: 8696 - protein, 166 aa, Artificial Sequence
  Synthetic polypeptide
PQQALWPWASGVAVSDGVIKVFNDMKVRKSSTPEEVKKRKKAVLFCLSEDKKNIILEEGKEILVGDVGQTVDDPYATFVKMLPDKDCRYALYDATYETKESKKEDLVFIFWAPESAPLKSKMIYASSKDAIKKKLTGIKHELQANCYEEVKDRCTLAEKLGGSAVI

SEQ ID NO: 8697 - protein, 97 aa, Artificial Sequence
  Synthetic polypeptide
PQQALWPWASGVAVSDGVIKVFNDMKVRKSSTPEEVKKRKKAVLFCLSEDKKNIILEEGKEILVGDVGQTVDDPYATFVKMLPDKDCRYALYDATYE

SEQ ID NO: 8698 - protein, 149 aa, Artificial Sequence
  Synthetic polypeptide
DMDLTTPLCCCVLFNASPQNFCVKIIAFDELRTDFKNPIDQGNPARARERLKNIERICCLLRKLVVPEYSIHGLFCLMFLCAAEWVTLGLNIPLLFYHLWRYFHRPADGSEVMYDAVSIMNADILNYCQKESWCKLAFYLLSFFYYLYR

SEQ ID NO: 8699 - protein, 21 aa, Artificial Sequence
  Synthetic polypeptide
PPHSAAVYSSMPPPKIFVLKS

SEQ ID NO: 8700 - protein, 21 aa, Artificial Sequence
  Synthetic polypeptide
PPHSAAVYSSMPPPKIFVLKS

SEQ ID NO: 8701 - protein, 21 aa, Artificial Sequence
  Synthetic polypeptide
PPHSAAVYSSMPPPKIFVLKS

SEQ ID NO: 8702 - protein, 157 aa, Artificial Sequence
  Synthetic polypeptide
DMDLTTPLCCCVLFNASPQNFCVKIIAFDELRTDFKNPIDQGNPARARERLKNIERICCLLRKLVVPEYSIHGLFCLMFLCAAEWVTLGLNIPLLFYHLWRYFHRPADGSEVMYDAVSIMNADILNYCQKESWCKLAFYLLSFFYYLYSMVYTLVSF

SEQ ID NO: 8703 - protein, 59 aa, Artificial Sequence
  Synthetic polypeptide
DMDLTTPLCCCVLFNASPQNFCVKIIAFDELRTDFKNPIDQGNPARAVSDTCAVPSASV

SEQ ID NO: 8704 - protein, 41 aa, Artificial Sequence
  Synthetic polypeptide
RHRENVAIFELREAFPSTSFARSSMRGQRTSRKAFLCLPRF

SEQ ID NO: 8705 - protein, 41 aa, Artificial Sequence; identical to SEQ ID NO: 8704
  Synthetic polypeptide

SEQ ID NO: 8706 - protein, 41 aa, Artificial Sequence; identical to SEQ ID NO: 8704
  Synthetic polypeptide

SEQ ID NO: 8707 - protein, 41 aa, Artificial Sequence; identical to SEQ ID NO: 8704
  Synthetic polypeptide

SEQ ID NO: 8708 - protein, 153 aa, Artificial Sequence
  Synthetic polypeptide
VKRGVSINQFCKEFNERTKDIKEGIPLPTKILVKPDRTFEIKIGQPTVSYFLKAAAGIEKGARQTGKEVAGLVTLKHVYEIARIKAQDEAFALQDVPLSSVVRSIIGSARSLGIRVVKDLSSEELAAFQKERAIFLAAQKEADLAAQEEAAKK

SEQ ID NO: 8709 - protein, 153 aa, Artificial Sequence; identical to SEQ ID NO: 8708
  Synthetic polypeptide

SEQ ID NO: 8710 - protein, 36 aa, Artificial Sequence
  Synthetic polypeptide
VKRGVSINQFCKEFNERTKDIKEGIPLPTKILVKDI

SEQ ID NO: 8711 - protein, 142 aa, Artificial Sequence
  Synthetic polypeptide
VKRGVSINQFCKEFNERTKDIKEGIPLPTKILVKPDRTFEIKIGQPTVSYFLKAAAGIEKGARQTGKEVAGLVTLKHVYEIARIKAQDEAFALQDVPLSSVVRSIIGSARSLGIRVVKERCSANVLRNGKISMKDPSGRSSV

SEQ ID NO: 8712 - protein, 111 aa, Artificial Sequence
  Synthetic polypeptide
EVRSPSARQLPRLRIGVRGADDLSELCGRGAQIPARGGRCPGCGGALGGPDGLGTHHSTQPGGAGSPGRHGAAGGTQGHGQRPVAESGGSSGHPGGAWHRAGGGALPTADP

SEQ ID NO: 8713 - protein, 111 aa, Artificial Sequence; identical to SEQ ID NO: 8712
  Synthetic polypeptide

SEQ ID NO: 8714 - protein, 262 aa, Artificial Sequence
  Synthetic polypeptide
ELEFAVQMTCQSCVDAVRKSLQGVAGVQDVEVHLEDQMVLVHTTLPSQEVQALLEGTGRQAVLKGMGSGQLQNLGAAVAILGGPGTVQGVVRFLQLTPERCLIEGTIDGLEPGLHGLHVHQYGDLTNNCNSCGNHFNPDGASHGGPQDSDRHRGDLGNVRADADGRAIFRMEDEQLKVWDVIGRSLIIDEGEDDLGRGGHPLSKITGNSGERLACGIIARSAGLFQNPKQICSCDGLTIWEERGRPIAGKGRKESAQPPAHL

SEQ ID NO: 8715 - protein, 34 aa, Artificial Sequence
  Synthetic polypeptide
EVRRPSAWQPPRLRSEEPLRPAAAPSENWSSRCR

SEQ ID NO: 8716 - protein, 34 aa, Artificial Sequence; identical to SEQ ID NO: 8715
  Synthetic polypeptide

SEQ ID NO: 8717 - protein, 237 aa, Artificial Sequence
  Synthetic polypeptide
ELEFAVQMTCQSCVDAVRKSLQGVAGVQDVEVHLEDQMVLVHTTLPSQEVQALLEGTGRQAVLKGMGSGQLQNLGAAVAILGGPGTVQGVVRFLQLTPERCLIEGTIDGLEPGLHGLHVHQYGDLTNNCNSCGNHFNPDGASHGGPQDSDRTGPRGPCLPSPWGAQILRDWYPQEEMGTLGKQEEASESGNQKIAAWHHVAHIPYTHTGSHSSTAETWAMSVLMLTAAPSSEWRMSS

SEQ ID NO: 8718 - protein, 251 aa, Artificial Sequence
  Synthetic polypeptide
EVRSPSARQLPRLRSVQDVEVHLEDQMVLVHTTLPSQEVQALLEGTGRQAVLKGMGSGQLQNLGAAVAILGGPGTVQGVVRFLQLTPERCLIEGTIDGLEPGLHGLHVHQYGDLTNNCNSCGNHFNPDGASHGGPQDSDRHRGDLGNVRADADGRAIFRMEDEQLKVWDVIGRSLIIDEGEDDLGRGGHPLSKITGNSGERLACGIIARSAGLFQNPKQICSCDGLTIWEERGRPIAGKGRKESAQPPAHL

SEQ ID NO: 8719 - protein, 251 aa, Artificial Sequence; identical to SEQ ID NO: 8718
  Synthetic polypeptide

SEQ ID NO: 8720 - protein, 71 aa, Artificial Sequence
  Synthetic polypeptide
EVSRMWRCTWRTRWSWYTPLYPARRCRLSWKARGGRRYSRAWAAASCRIWGQQWPSWGGLAPCRGWCASYS

SEQ ID NO: 8721 - protein, 71 aa, Artificial Sequence; identical to SEQ ID NO: 8720
  Synthetic polypeptide

SEQ ID NO: 8722 - protein, 71 aa, Artificial Sequence; identical to SEQ ID NO: 8720
  Synthetic polypeptide

SEQ ID NO: 8723 - protein, 100 aa, Artificial Sequence
  Synthetic polypeptide
EVRRPSAWQPPRLRSEEPLRPAAAPSEKCPGCGGALGGPDGLGTHHSTQPGGAGSPGRHGAAGGTQGHGQRPVAESGGSSGHPGGAWHRAGGGALPTADP

SEQ ID NO: 8724 - protein, 100 aa, Artificial Sequence; identical to SEQ ID NO: 8723
  Synthetic polypeptide

SEQ ID NO: 8725 - protein, 100 aa, Artificial Sequence; identical to SEQ ID NO: 8723
  Synthetic polypeptide

SEQ ID NO: 8726 - protein, 226 aa, Artificial Sequence
  Synthetic polypeptide
EVRSPSARQLPRLRSVQDVEVHLEDQMVLVHTTLPSQEVQALLEGTGRQAVLKGMGSGQLQNLGAAVAILGGPGTVQGVVRFLQLTPERCLIEGTIDGLEPGLHGLHVHQYGDLTNNCNSCGNHFNPDGASHGGPQDSDRTGPRGPCLPSPWGAQILRDWYPQEEMGTLGKQEEASESGNQKIAAWHHVAHIPYTHTGSHSSTAETWAMSVLMLTAAPSSEWRMSS

SEQ ID NO: 8727 - protein, 16 aa, Artificial Sequence
  Synthetic polypeptide
RNISIKGVVAWWMSWT

SEQ ID NO: 8728 - protein, 16 aa, Artificial Sequence
  Synthetic polypeptide
RNISIKGVVAWWMSWT

SEQ ID NO: 8729 - protein, 689 aa, Artificial Sequence
  Synthetic polypeptide
SHMKKYLDKGSRRMVDVMDVNTQKGIEMTMAQWTRYYETPEEEREKLYNVISLEFSHTRLENMVQRPSTVDFIDWVDNMWPRHLKESQTESTNAILEMQYPKVQKYCLMSVRGCYTDFHVDFGGTSVWYHIHQGGKVFWLIPPTAHNLELYENWLLSGKQGDIFLGDRVSDCQRIELKQGYTFVIPSGWIHAVYTPTDTLVFGGNFLHSFNIPMQLKIYNIEDRTRVPNKFRYPFYYEMCWYVLERYVYCITNRSHLTKEFQKESLSMDLELNGLESGNGDEEAVDREPRRLSSRRSVLTSPVANGVNLDYDGLGKTCRSLPSLKKTLAGDSSSDCSRGSHNGQVWDPQCAPRKDRQVHLTHFELEGLRCLVDKLESLPLHKKCVPTGIEDEDALIADVKILLEELANSDPKLALTGVPIVQWPKRDKLKFPTRPKVRVPTIPITKPHTMKPAPRLTPVRPAAASPIVSGARRRRVRCRKCKACVQGECGVCHYCRDMKKFGGPGRMKQSCVLRQCLAPRLPHSVTCSLCGEVDQNEETQDFEKKLMECCICNEIVHPGCLQMDGEGLLNEELPNCWECPKCYQEDSSEKAQKRKMEESDEEAVQAKVLRPLRSCDEPLTPPPHSPTSMLQLIHDPVSPRGMVTRSSPGAGPSDHHSASRDERFKRRQLLRLQATERTMVLRQETLDKN

SEQ ID NO: 8730 - protein, 1069 aa, Artificial Sequence
  Synthetic polypeptide
SHMKKYLDKGSRRMVDVMDVNTQKGIEMTMAQWTRYYETPEEEREKLYNVISLEFSHTRLENMVQRPSTVDFIDWVDNMWPRHLKESQTESTNAILEMQYPKVQKYCLMSVRGCYTDFHVDFGGTSVWYHIHQGGKVFWLIPPTAHNLELYENWLLSGKQGDIFLGDRVSDCQRIELKQGYTFVIPSGWIHAVYTPTDTLVFGGNFLHSFNIPMQLKIYNIEDRTRVPNKFRYPFYYEMCWYVLERYVYCITNRSHLTKEFQKESLSMDLELNGLESGNGDEEAVDREPRRLSSRRSVLTSPVANGVNLDYDGLGKTCRSLPSLKKTLAGDSSSDCSRGSHNGQVWDPQCAPRKDRQVHLTHFELEGLRCLVDKLESLPLHKKCVPTGIEDEDALIADVKILLEELANSDPKLALTGVPIVQWPKRDKLKFPTRPKVRVPTIPITKPHTMKPAPRLTPVRPAAASPIVSGARRRRVRCRKCKACVQGECGVCHYCRDMKKFGGPGRMKQSCVLRQCLAPRLPHSVTCSLCGEVDQNEETQDFEKKLMECCICNEIVHPGCLQMDGEGLLNEELPNCWECPKCYQEDSSEKAQKRKMEESDEEAVQAKVLRPLRSCDEPLTPPPHSPTSMLQLIHDPVSPRGMVTRSSPGAGPSDHHSASRDERFKRRQLLRLQATERTMVREKENNPSGKKELSEVEKAKIRGSYLTVTLQRPTKELHGTSIVPKLQAITASSANLRHSPRVLVQHCPARTPQRGDEEGLGGEEEEEEEEEEEDDSAEEGGAARLNGRGSWAQDGDESWMQREVWMSVFRYLSRRELCECMRVCKTWYKWCCDKRLWTKIDLSRCKAIVPQALSGIIKRQPVSLDLSWTNISKKQLTWLVNRLPGLKDLLLAGCSWSAVSALSTSSCPLLRTLDLRWAVGIKDPQIRDLLTPPADKPGQDNRSKLRNMTDFRLAGLDITDATLRLIIRHMPLLSRLDLSHCSHLTDQSSNLLTAVGSSTRYSLTELNMAGCNKLTDQTLIYLRRIANVTLIDLRGCKQITRKACEHFISDLSINSLYCLSDEKLIQKIS

SEQ ID NO: 8731 - protein, 29 aa, Artificial Sequence
  Synthetic polypeptide
WGLSTLPWSYLVTLASAVSCRSTWRTGAR

SEQ ID NO: 8732 - protein, 29 aa, Artificial Sequence
  Synthetic polypeptide
WGLSTLPWSYLVTLASAVSCRSTWRTGAR

SEQ ID NO: 8733 - protein, 19 aa, Artificial Sequence
  Synthetic polypeptide
LWHPQCHAEVPGGPGRGDL

SEQ ID NO: 8734 - protein, 19 aa, Artificial Sequence
  Synthetic polypeptide
LWHPQCHAEVPGGPGRGDL

SEQ ID NO: 8735 - protein, 665 aa, Artificial Sequence
  Synthetic polypeptide
GPVHTAVVLSCDSGIRSVMQKYLEDRGEVTFEKIFSQKLGYLLFRDFCLNHLEEARPLVEFYEEIKKYEKLETEEERVARSREIFDSYIMKELLACSHPFSKSATEHVQGHLGKKQVPPDLFQPYIEEICQNLRGDVFQKFIESDKFTRFCQWKNVELNIHLTMNDFSVHRIIGRGGFGEVYGCRKADTGKMYAMKCLDKKRIKMKQGETLALNERIMLSLVSTGDCPFIVCMSYAFHTPDKLSFILDLMNGGDLHYHLSQHGVFSEADMRFYAAEIILGLEHMHNRFVVYRDLKPANILLDEHGHVRISDLGLACDFSKKKPHASVGTHGYMAPEVLQKGVAYDSSADWFSLGCMLFKLLRGHSPFRQHKTKDKHEIDRMTLTMAVELPDSFSPELRSLLEGLLQRDVNRRLGCLGRGAQEVKESPFFRSLDWQMVFLQKYPPPLIPPRGEVNAADAFDIGSFDEEDTKGIKLLDSDQELYRNFPLTISERWQQEVAETVFDTINAETDRLEARKKAKNKQLGHEEDYALGKDCIMHGYMSKMGNPFLTQWQRRYFYLFPNRLEWRGEGEAPQSLLTMEEIQSVEETQIKERKCLLLKIRGGKQFILQCDSDPELVQWKKELRDAYREAQQLVQRVPKMKNKPRSPVVELSKVPLVQRGSANGL

SEQ ID NO: 8736 - protein, 384 aa, Artificial Sequence
  Synthetic polypeptide
GPVHTAVVLSCDSGIRSVMQKYLEDRGEVTFEKIFSQKLGYLLFRDFCLNHLEEARPLVEFYEEIKKYEKLETEEERVARSREIFDSYIMKELLACSHPFSKSATEHVQGHLGKKQVPPDLFQPYIEEICQNLRGDVFQKFIESDKFTRFCQWKNVELNIHLTMNDFSVHRIIGRGGFGEVYGCRKADTGKMYAMKCLDKKRIKMKQGETLALNERIMLSLVSTGDCPFIVCMSYAFHTPDKLSFILDLMNGGDLHYHLSQHGVFSEADMRFYAAEIILGLEHMHNRFVVYRDLKPANILLDEHGHVRISDLGLACDFSKKKPHASVGTHGYMAPEVLQKGSRCLCGVAPSPPRGWVGAPSPPVYSFPGAFLCRFLNVILKSEK

SEQ ID NO: 8737 - protein, 32 aa, Artificial Sequence
  Synthetic polypeptide
SPSSARRGKQDAVNLWQPSWRHPGLPGSATCW

SEQ ID NO: 8738 - protein, 32 aa, Artificial Sequence; identical to SEQ ID NO: 8737
  Synthetic polypeptide

SEQ ID NO: 8739 - protein, 32 aa, Artificial Sequence; identical to SEQ ID NO: 8737
  Synthetic polypeptide

SEQ ID NO: 8740 - protein, 31 aa, Artificial Sequence
  Synthetic polypeptide
IFGSPAGGTPASPAPLPAGSFYTRRRRSEPG

SEQ ID NO: 8741 - protein, 31 aa, Artificial Sequence; identical to SEQ ID NO: 8740
  Synthetic polypeptide

SEQ ID NO: 8742 - protein, 31 aa, Artificial Sequence; identical to SEQ ID NO: 8740
  Synthetic polypeptide

SEQ ID NO: 8743 - protein, 561 aa, Artificial Sequence
  Synthetic polypeptide
AVLSKTWQTRCSESLAAQLEAPRPPRLRYLLVVSTREGEGLSQDETVLLGVDFPDSSSPSCTLGLVLPLWSDTQVYLDGDGGFSVTSGGQSRIFKPISIQTMWATLQVLHQACEAALGSGLVPGGSALTWASHYQERLNSEQSCLNEWTAMADLESLRPPSAEPGGSSEQEQMEQAIRAELWKVLDVSDLESVTSKEIRQALELRLGLPLQQYRDFIDNQMLLLVAQRDRASRIFPHLYLGSEWNAANLEELQRNRVTHILNMAREIDNFYPERFTYHNVRLWDEESAQLLPHWKETHRFIEAARAQGTHVLVHCKMGVSRSAATVLAYAMKQYECSLEQALRHVQELRPIARPNPGFLRQLQIYQGILTASRQSHVWEQKVGGVSPEEHPAPEVSTPFPPLPPEPEGGGEEKVVGMEESQAAPKEEPGPRPRINLRGVMRSISLLEPSLELESTSETSDMPEVFSSHESSHEEPLQPFPQLARTKGGQQVDRGPQPALKSRQSVVTLQGSAVVANRTQAFQEQEQGQGQGQGEPCISSTPRFRKVVRQASVHDSGEEGEA

SEQ ID NO: 8744 - protein, 296 aa, Artificial Sequence
  Synthetic polypeptide
AVLSKTWQTRCSESLAAQLEAPRPPRLRYLLVVSTREGEGLSQDETVLLGVDFPDSSSPSCTLGLVLPLWSDTQVYLDGDGGFSVTSGGQSRIFKPISIQTMWATLQVLHQACEAALGSGLVPGGSALTWASHYQERLNSEQSCLNEWTAMADLESLRPPSAEPGGSSEQEQMEQAIRAELWKVLDLESTSETSDMPEVFSSHESSHEEPLQPFPQLARTKGGQQVDRGPQPALKSRQSVVTLQGSAVVANRTQAFQEQEQGQGQGQGEPCISSTPRFRKVVRQASVHDSGEEGEA

SEQ ID NO: 8745 - protein, 373 aa, Artificial Sequence
  Synthetic polypeptide
AVLSKTWQTRCSESLAAQLEAPRPPRLRYLLVVSTREGEGLSQDETVLLGVDFPDSSSPSCTLGLVLPLWSDTQVYLDGDGGFSVTSGGQSRIFKPISIQTMWATLQVLHQACEAALGSGLVPGGSALTWASHYQERLNSEQSCLNEWTAMADLESLRPPSAEPGGSSEQEQMEQAIRAELWKVLDVSDLESVTSKEIRQALELRLGLPLQQYRDFIDNQMLLLVAQRDRASRIFPHLYLGSEWNAANLEELQRNRVTHILNMAREIDNFYPERFTYHNVRLWDEESAQLLPHWKETHRFIEAARAQGTHVLVHCKMGVSRSAATVLAYAMKQYECSLEQALRHVQELRPIARPNPGFLRQLQIYQGILTART

SEQ ID NO: 8746 - protein, 60 aa, Artificial Sequence
  Synthetic polypeptide
GRARWLTLVIPALWESKGPNFEFSTETHEELLYNKEKLLNNGDKWEAEIAANIQADYLYR

SEQ ID NO: 8747 - protein, 60 aa, Artificial Sequence; identical to SEQ ID NO: 8746
  Synthetic polypeptide

SEQ ID NO: 8748 - protein, 51 aa, Artificial Sequence
  Synthetic polypeptide
SQHFGSPRAPTLSSPRRPMRSCCTTRRSCSTTGTSGRPRSPPTSRLTTCIG

SEQ ID NO: 8749 - protein, 51 aa, Artificial Sequence; identical to SEQ ID NO: 8748
  Synthetic polypeptide

SEQ ID NO: 8750 - protein, 20 aa, Artificial Sequence
  Synthetic polypeptide
PGTVAHACNPSTLGVQGPQL

SEQ ID NO: 8751 - protein, 20 aa, Artificial Sequence
  Synthetic polypeptide
PGTVAHACNPSTLGVQGPQL

SEQ ID NO: 8752 - protein, 20 aa, Artificial Sequence
  Synthetic polypeptide
PGTVAHACNPSTLGVQGPQL

SEQ ID NO: 8753 - protein, 34 aa, Artificial Sequence
  Synthetic polypeptide
GRARWLTLVIPALWESKGPNFEFSTETHEELLYN

SEQ ID NO: 8754 - protein, 25 aa, Artificial Sequence
  Synthetic polypeptide
SQHFGSPRAPTLSSPRRPMRSCCTT

SEQ ID NO: 8755 - protein, 467 aa, Artificial Sequence
  Synthetic polypeptide
PLIHLSLIAVTFAIVLGVIIYRISMAAALAMNSSPSVRSNIRVTVTATAVIINLVVIILLDEVYGCIARWLTKIEVPKTEKSFEERLIFKAFLLKFVNSYTPIFYVAFFKGRFVGRPGDYVYIFRSFRMEECAPGGCLMELCIQLSIIMLGKQLIQNNLFEIGIPKMKKLIRYLKLKQQSPPDHEECVKRKQRYEVDYNLEPFAGLTPEYMEMIIQFGFVTLFVASFPLAPLFALLNNIIEIRLDAKKFVTELRRPVAVRAKDIGIWYNILRGIGKLAVIINAFVISFTSDFIPRLVYLYMYSKNGTMHGFVNHTLSSFNVSDFQNGTAPNDPLDLGYEVQICRYKDYREPPWSENKYDISKDFWAVLAARLAFVIVFQNLVMFMSDFVDWVIPDIPKDISQQIHKEKVLMVELFMREEQDKQQLLETWMEKERQKDEPPCNHHNTKACPDSLGSPAPSHAYHGGVL

SEQ ID NO: 8756 - protein, 467 aa, Artificial Sequence; identical to SEQ ID NO: 8755
  Synthetic polypeptide

SEQ ID NO: 8757 - protein, 467 aa, Artificial Sequence; identical to SEQ ID NO: 8755
  Synthetic polypeptide

SEQ ID NO: 8758 - protein, 467 aa, Artificial Sequence; identical to SEQ ID NO: 8755
  Synthetic polypeptide

SEQ ID NO: 8759 - protein, 467 aa, Artificial Sequence; identical to SEQ ID NO: 8755
  Synthetic polypeptide

SEQ ID NO: 8760 - protein, 94 aa, Artificial Sequence
  Synthetic polypeptide
TSVSLSMEQKLAPHPSVSDCSDVCHRPRRHHLQNLHGRRLGHELLPLRAVQHPGHSHSHRSHHQPSGHHPPGRGVWLHSPMAHQDRGPKDGEKL

SEQ ID NO: 8761 - protein, 94 aa, Artificial Sequence; identical to SEQ ID NO: 8760
  Synthetic polypeptide

SEQ ID NO: 8762 - protein, 94 aa, Artificial Sequence; identical to SEQ ID NO: 8760
  Synthetic polypeptide

SEQ ID NO: 8763 - protein, 94 aa, Artificial Sequence; identical to SEQ ID NO: 8760
  Synthetic polypeptide

SEQ ID NO: 8764 - protein, 94 aa, Artificial Sequence; identical to SEQ ID NO: 8760
  Synthetic polypeptide

SEQ ID NO: 8765 - protein, 94 aa, Artificial Sequence; identical to SEQ ID NO: 8760
  Synthetic polypeptide

SEQ ID NO: 8766 - protein, 181 aa, Artificial Sequence
  Synthetic polypeptide
PLIHLSLIAVTFAIVLGVIIYRISMAAALAMNSSPSVRSNIRVTVTATAVIINLVVIILLDEVYGCIARWLTKIEVPKTEKSFEERLIFKAFLLKFVNSYTPIFYVAFFKGRFVGRPGDYVYIFRSFRMEEVTEILFISGSPFCLAYDLSTPCTWEKQLQHICSAKSSRFLSFLLETFLFP

SEQ ID NO: 8767 - protein, 81 aa, Artificial Sequence
  Synthetic polypeptide
PLIHLSLIAVTFAIVLGVIIYRISMAAALAMNSSPSVRSNIRVTVTATAVIINLVVIILLDEVYGCIARWLTKIEVPKTEK

SEQ ID NO: 8768 - protein, 92 aa, Artificial Sequence
  Synthetic polypeptide
TSVSLSMEQKLAPHPSVSDCSDVCHRPRRHHLQNLHGRRLGHELLPLRAVQHPGHSHSHRSHHQPSGHHPPGRGVWLHSPMAHQDRGPKDGE

SEQ ID NO: 8769 - protein, 29 aa, Artificial Sequence
  Synthetic polypeptide
GRARGSGLSSQHFRWLRLDWDQMGSGSSS

SEQ ID NO: 8770 - protein, 29 aa, Artificial Sequence
  Synthetic polypeptide
GRARGSGLSSQHFRWLRLDWDQMGSGSSS

SEQ ID NO: 8771 - protein, 29 aa, Artificial Sequence
  Synthetic polypeptide
GRARGSGLSSQHFRWLRLDWDQMGSGSSS

SEQ ID NO: 8772 - protein, 31 aa, Artificial Sequence
  Synthetic polypeptide
VAKAGLGSDGKRKLIMTRNCFPTESTWRWQS

SEQ ID NO: 8773 - protein, 31 aa, Artificial Sequence; identical to SEQ ID NO: 8772
  Synthetic polypeptide

SEQ ID NO: 8774 - protein, 31 aa, Artificial Sequence; identical to SEQ ID NO: 8772
  Synthetic polypeptide

SEQ ID NO: 8775 - protein, 40 aa, Artificial Sequence
  Synthetic polypeptide
PTCALQVLPRAIRPAREAQAAAHPHHVHQRAAQGAGARFR

SEQ ID NO: 8776 - protein, 236 aa, Artificial Sequence
  Synthetic polypeptide
SQHFGRPRRVDHLRSRVQDQPNQHVPYKFFPEPSGLHEKRKQRRIRTTFTSAQLKELERVFAETHYPDIYTREELALKIDLTEARVQVWFQNRRAKFRKQERAASAKGAAGAAGAKKGEARCSSEDDDSKESTCSPTPDSTASLPPPPAPGLASPRLSPSPLPVALGSGPGPGPGPQPLKGALWAGVAGGGGGGPGAGAAELLKAWQPAESGPGPFSGVLSSFHRKPGPALKTNLF

SEQ ID NO: 8777 - protein, 143 aa, Artificial Sequence
  Synthetic polypeptide
GQEFKTSLTNMCPTSSSQSHPACTRSASSGASAPRSPARSSRSWSAFSLRPTTPTFTRVRSWRSRSTSLRLACRSGSRTAGPSSANRSARPAPRARRARRAPKRARRAAPPRTTIPRSPRAAPRPIAPPRCRRRLRPAWPARA

SEQ ID NO: 8778 - protein, 18 aa, Artificial Sequence
  Synthetic polypeptide
NAFPQSSAGAGVSLVTGS

SEQ ID NO: 8779 - protein, 18 aa, Artificial Sequence
  Synthetic polypeptide
NAFPQSSAGAGVSLVTGS

SEQ ID NO: 8780 - protein, 18 aa, Artificial Sequence
  Synthetic polypeptide
NAFPQSSAGAGVSLVTGS

SEQ ID NO: 8781 - protein, 18 aa, Artificial Sequence
  Synthetic polypeptide
NAFPQSSAGAGVSLVTGS

SEQ ID NO: 8782 - protein, 18 aa, Artificial Sequence
  Synthetic polypeptide
NAFPQSSAGAGVSLVTGS

SEQ ID NO: 8783 - protein, 18 aa, Artificial Sequence
  Synthetic polypeptide
NAFPQSSAGAGVSLVTGS

SEQ ID NO: 8784 - protein, 18 aa, Artificial Sequence
  Synthetic polypeptide
NAFPQSSAGAGVSLVTGS

SEQ ID NO: 8785 - protein, 18 aa, Artificial Sequence
  Synthetic polypeptide
NAFPQSSAGAGVSLVTGS

SEQ ID NO: 8786 - protein, 18 aa, Artificial Sequence
  Synthetic polypeptide
NAFPQSSAGAGVSLVTGS

SEQ ID NO: 8787 - protein, 75 aa, Artificial Sequence
  Synthetic polypeptide
MISAFHSLPNSEENPQEPAQLATTPITSLNHPPNHSAGLLTVSQTRRHLPGSLPVLFPLPEMHSPRVQPALVCPW

SEQ ID NO: 8788 - protein, 75 aa, Artificial Sequence; identical to SEQ ID NO: 8787
  Synthetic polypeptide

SEQ ID NO: 8789 - protein, 75 aa, Artificial Sequence; identical to SEQ ID NO: 8787
  Synthetic polypeptide

SEQ ID NO: 8790 - protein, 75 aa, Artificial Sequence; identical to SEQ ID NO: 8787
  Synthetic polypeptide

SEQ ID NO: 8791 - protein, 75 aa, Artificial Sequence; identical to SEQ ID NO: 8787
  Synthetic polypeptide

SEQ ID NO: 8792 - protein, 75 aa, Artificial Sequence; identical to SEQ ID NO: 8787
  Synthetic polypeptide

SEQ ID NO: 8793 - protein, 75 aa, Artificial Sequence; identical to SEQ ID NO: 8787
  Synthetic polypeptide

SEQ ID NO: 8794 - protein, 75 aa, Artificial Sequence; identical to SEQ ID NO: 8787
  Synthetic polypeptide

SEQ ID NO: 8795 - protein, 75 aa, Artificial Sequence; identical to SEQ ID NO: 8787
  Synthetic polypeptide

SEQ ID NO: 8796 - protein, 708 aa, Artificial Sequence
  Synthetic polypeptide
TTPLITLPVSSLFLRHVVTYQDLCLCCSLCLKCIPPEFSRRWCVLGDGVLSYFENERAVTPNGEIRASEIVCLAVPPPDTHGFEHTFEVYTEGERLYLFGLESAEQAHEWVKCIAKAFVPPLAEDLLARDFERLGRLPYKAGLSLQRAQEGWFSLSGSELRAVFPEGPCEEPLQLRKLQELSIQGDSENQVLVLVERRRTLYIQGERRLDFMGWLGAIQKAAASMGDTLSEQQLGDSDIPVIVYRCVDYITQCGLTSEGIYRKCGQTSKTQRLLESLRQDARSVHLKEGEQHVDDVSSALKRFLRDLPDGLFTRAQRLTWLEASEIEDEEEKVSRYRELLVRLPPVNRATVKALISHLYCVQCFSDTNQMNVHNLAIVFGPTLFQTDGQDYKAGRVVEDLINHYVVVFSVDEEELRKQREEITAIVKMRVAGTASGTQHAGDFICTVYLEEKKAETEQHIKVPASMTAEELTLEILDRRNVGIREKDYWTCFEVNEREEAERPLHFAEKVLPILHGLGTDSHLVVKKHQAMEAMLLYLASRVGDTKHGMMKFREDRSLLGLGLPSGGFHDRYFILNSSCLRLYKEVRSHRPEKEWPIKSLKVYLGVKKKLRPPTCWGFTVVHETEKHEKQQWYLCCDTQMELREWFATFLFVQHDGLVWPSEPSRVSRAVPEVRLGSVSLIPLRGSENEMRRSVAAFTADPLSLLRNV

SEQ ID NO: 8797 - protein, 708 aa, Artificial Sequence; identical to SEQ ID NO: 8796
  Synthetic polypeptide

SEQ ID NO: 8798 - protein, 708 aa, Artificial Sequence; identical to SEQ ID NO: 8796
  Synthetic polypeptide

SEQ ID NO: 8799 - protein, 708 aa, Artificial Sequence; identical to SEQ ID NO: 8796
  Synthetic polypeptide

SEQ ID NO: 8800 - protein, 719 aa, Artificial Sequence
  Synthetic polypeptide
TTPLITLPVSSLFLRHVVTYQDLCLCCSLCLKCIPPEFSRRWCVLGDGVLSYFENERAVTPNGEIRASEIVCLAVPPPDTHGFEHTFEVYTEGERLYLFGLESAEQAHEWVKCIAKAFVPPLAEDLLARDFERLGRLPYKAGLSLQRAQEGWFSLSGSELRAVFPEGPCEEPLQLRKLQELSIQGDSENQVLVLVERRRTLYIQGERRLDFMGWLGAIQKAAASMGDTLSEQQLGDSDIPVIVYRCVDYITQCGLTSEGIYRKCGQTSKTQRLLESLRQDARSVHLKEGEQHVDDVSSALKRFLRDLPDGLFTRAQRLTWLEASEIEDEEEKVSRYRELLVRLPPVNRATVKALISHLYCVQCFSDTNQMNVHNLAIVFGPTLFQTDGQDYKAGRVVEDLINHYVVVFSVDEEELRKQREEITAIVKMRVAGTASGTQHAGDFICTVYLEEKKAETEQHIKVPASMTAEELTLEILDRRNVGIREKDYWTCFEVNEREEAERPLHFAEKVLPILHGLGTDSHLVVKKHQAMEAMLLYLASRVGDTKHGMMKFREDRSLLGLGLPSGGFHDRYFILNSSCLRLYKEVRSQRPWSGAPETSHRPEKEWPIKSLKVYLGVKKKLRPPTCWGFTVVHETEKHEKQQWYLCCDTQMELREWFATFLFVQHDGLVWPSEPSRVSRAVPEVRLGSVSLIPLRGSENEMRRSVAAFTADPLSLLRNV

SEQ ID NO: 8801 - protein, 719 aa, Artificial Sequence; identical to SEQ ID NO: 8800
  Synthetic polypeptide

SEQ ID NO: 8802 - protein, 719 aa, Artificial Sequence; identical to SEQ ID NO: 8800
  Synthetic polypeptide

SEQ ID NO: 8803 - protein, 288 aa, Artificial Sequence
  Synthetic polypeptide
TTPLITLPVSSLFLRHVVTYQDLCLCCSLCLKCIPPEFSRRWCVLGDGVLSYFENERAVTPNGEIRASEIVCLAVPPPDTHGFEHTFEVYTEGERLYLFGLESAEQAHEWVKCIAKAFVPPLAEDLLARDFERLGRLPYKAGLSLQRAQEGWFSLSGSELRAVFPEGPCEEPLQLRKLQELSIQGDSENQVLVLVERRRTLYIQGERRLDFMGWLGAIQKAAASMGDTLSEQQLGDSDIPVIVYRCVDYITQCGLTSEGIYRKCGQTSKTQRLLESLRQDARSVHLKE

SEQ ID NO: 8804 - protein, 235 aa, Artificial Sequence
  Synthetic polypeptide
TTPLITLPVSSLFLRHVVTYQDLCLCCSLCLKCIPPEFSRRWCVLGDGVLSYFENERAVTPNGEIRASEIVCLAVPPPDTHGFEHTFEVYTEGERLYLFGLESAEQAHEWVKCIAKAFVPPLAEDLLARDFERLGRLPYKAGLSLQRAQEGWFSLSGSELRAVFPEGPCEEPLQLRKLQELSIQGDSENQVLVLVERRRTLYIQGERRLDFMGWLGAIQKAAASMGDTLSEQQLG

SEQ ID NO: 8805 - protein, 234 aa, Artificial Sequence
  Synthetic polypeptide
PTSSRQAWATPQNPISTKNIKIIWMWWCVPVVPATLEAEVLEDGRQWWKLRSRSGQAGYVPCNILGEARPEDAGAPFEQAGQKYWGPASPTHKLPPSFPGNKDELMQHMDEVNDELIRKISNIRAQPQRHFRVERSQPVSQPLTYESGPDEVRAWLEAKAFSPRIVENLGILTGPQLFSLNKEELKKVCGEEGVRVYSQLTMQKAFLEKQQSGSELEELMNKFHSMNQRRGEDS

SEQ ID NO: 8806 - protein, 234 aa, Artificial Sequence; identical to SEQ ID NO: 8805
  Synthetic polypeptide

SEQ ID NO: 8807 - protein, 234 aa, Artificial Sequence; identical to SEQ ID NO: 8805
  Synthetic polypeptide

SEQ ID NO: 8808 - protein, 234 aa, Artificial Sequence; identical to SEQ ID NO: 8805
  Synthetic polypeptide

SEQ ID NO: 8809 - protein, 44 aa, Artificial Sequence
  Synthetic polypeptide
KLSGCGGVCLWSQLLWRLRCWRTAGSGGSCAAAAARRGTCPATS

SEQ ID NO: 8810 - protein, 44 aa, Artificial Sequence; identical to SEQ ID NO: 8809
  Synthetic polypeptide

SEQ ID NO: 8811 - protein, 44 aa, Artificial Sequence; identical to SEQ ID NO: 8809
  Synthetic polypeptide

SEQ ID NO: 8812 - protein, 44 aa, Artificial Sequence; identical to SEQ ID NO: 8809
  Synthetic polypeptide

SEQ ID NO: 8813 - protein, 242 aa, Artificial Sequence
  Synthetic polypeptide
SQDCWVPPDSALESPFEEMALVRGGWLWRQSSILRRWKRNWFALWLDGTLGYYHDETAQDEEDRVLIHFNVRDIKIGPECHDVQPPEGRSRDGLLTVNLREGGRLHLCAETKDDALAWKTALLEANSTPAPAGATVPPRSRRVCSKVRCVTRSWSPCKVERRIWVRVYSPYQDYYEVVPPNAHEATYVRSYYGPPYAGPGVTHVIVREDPCYSAGAPLAMGMLAGAATGAALGSLMWSPCWF

SEQ ID NO: 8814 - protein, 24 aa, Artificial Sequence
  Synthetic polypeptide
RFEARTAGSRLTPLWKVLLKKWPW

SEQ ID NO: 8815 - protein, 24 aa, Artificial Sequence
  Synthetic polypeptide
RFEARTAGSRLTPLWKVLLKKWPW

SEQ ID NO: 8816 - protein, 10 aa, Artificial Sequence
  Synthetic polypeptide
GLKPGLLGPA

SEQ ID NO: 8817 - protein, 10 aa, Artificial Sequence
  Synthetic polypeptide
GLKPGLLGPA

SEQ ID NO: 8818 - protein, 207 aa, Artificial Sequence
  Synthetic polypeptide
SQDCWVPPDSALESPFEEMALVRGGWLWRQSSILRRWKRNWFALWLDGTLGYYHDETAQDEEDRVLIHFNVRDIKIGPECHDVQPPEGRSRDGLLTVNLREGGRLHLCAETKDDALAWKTALLEANSTPVRVYSPYQDYYEVVPPNAHEATYVRSYYGPPYAGPGVTHVIVREDPCYSAGAPLAMGMLAGAATGAALGSLMWSPCWF

SEQ ID NO: 8819 - protein, 48 aa, Artificial Sequence
  Synthetic polypeptide
LRCLYGTWHKARCASTARTKTTTRWCPPMHTRPRMSAATTDRPTQALA

SEQ ID NO: 8820 - protein, 48 aa, Artificial Sequence; identical to SEQ ID NO: 8819
  Synthetic polypeptide

SEQ ID NO: 8821 - protein, 48 aa, Artificial Sequence; identical to SEQ ID NO: 8819
  Synthetic polypeptide

SEQ ID NO: 8822 - protein, 48 aa, Artificial Sequence; identical to SEQ ID NO: 8819
  Synthetic polypeptide

SEQ ID NO: 8823 - protein, 48 aa, Artificial Sequence; identical to SEQ ID NO: 8819
  Synthetic polypeptide

SEQ ID NO: 8824 - protein, 48 aa, Artificial Sequence; identical to SEQ ID NO: 8819
  Synthetic polypeptide

SEQ ID NO: 8825 - protein, 48 aa, Artificial Sequence; identical to SEQ ID NO: 8819
  Synthetic polypeptide

SEQ ID NO: 8826 - protein, 48 aa, Artificial Sequence; identical to SEQ ID NO: 8819
  Synthetic polypeptide

SEQ ID NO: 8827 - protein, 48 aa, Artificial Sequence; identical to SEQ ID NO: 8819
  Synthetic polypeptide

SEQ ID NO: 8828 - protein, 106 aa, Artificial Sequence
  Synthetic polypeptide
SSMRPRTSSKARMRPDCAASMELGTRLGARLQPVPRLLRGGAPQCTRGHVCPQLLRTALRRPWRDARDSAGGSLLQRRRPSGHGHACGSRHWGGAGLAHVVALLVL

SEQ ID NO: 8829 - protein, 106 aa, Artificial Sequence; identical to SEQ ID NO: 8828
  Synthetic polypeptide

SEQ ID NO: 8830 - protein, 106 aa, Artificial Sequence; identical to SEQ ID NO: 8828
  Synthetic polypeptide

SEQ ID NO: 8831 - protein, 106 aa, Artificial Sequence; identical to SEQ ID NO: 8828
  Synthetic polypeptide

SEQ ID NO: 8832 - protein, 106 aa, Artificial Sequence; identical to SEQ ID NO: 8828
  Synthetic polypeptide

SEQ ID NO: 8833 - protein, 106 aa, Artificial Sequence; identical to SEQ ID NO: 8828
  Synthetic polypeptide

SEQ ID NO: 8834 - protein, 13 aa, Artificial Sequence
  Synthetic polypeptide
LRCLYGTWHKARC

SEQ ID NO: 8835 - protein, 28 aa, Artificial Sequence
  Synthetic polypeptide
SSMRPRTSSKARMRPDCAASMELGTRLG

SEQ ID NO: 8836 - protein, 16 aa, Artificial Sequence
  Synthetic polypeptide
LRCLYGTWHKARCAST

SEQ ID NO: 8837 - protein, 32 aa, Artificial Sequence
  Synthetic polypeptide
SSMRPRTSSKARMRPDCAASMELGTRLGARLQ

SEQ ID NO: 8838 - protein, 17 aa, Artificial Sequence
  Synthetic polypeptide
LRCLYGTWHKARCASTA

SEQ ID NO: 8839 - protein, 33 aa, Artificial Sequence
  Synthetic polypeptide
SSMRPRTSSKARMRPDCAASMELGTRLGARLQP

SEQ ID NO: 8840 - protein, 52 aa, Artificial Sequence
  Synthetic polypeptide
LRCLYGTWHKARCASTARTKTTTRWCPPMHTRPRMSAATTDRPTQVSLQRAP

SEQ ID NO: 8841 - protein, 61 aa, Artificial Sequence
  Synthetic polypeptide
SSMRPRTSSKARMRPDCAASMELGTRLGARLQPVPRLLRGGAPQCTRGHVCPQLLRTALRR

SEQ ID NO: 8842 - protein, 71 aa, Artificial Sequence
  Synthetic polypeptide
SSMRPRTSSKARMRPDCAASMELGTRLGARLQPVPRLLRGGAPQCTRGHVCPQLLRTALRRPWRDARDSAG

SEQ ID NO: 8843 - protein, 79 aa, Artificial Sequence
  Synthetic polypeptide
SSMRPRTSSKARMRPDCAASMELGTRLGARLQPVPRLLRGGAPQCTRGHVCPQLLRTALRRPWRDARDSAGGSLLQRRR

SEQ ID NO: 8844 - protein, 26 aa, Artificial Sequence
  Synthetic polypeptide
LRCLYGTWHKARCASTARTKTTTRWC

SEQ ID NO: 8845 - protein, 41 aa, Artificial Sequence
  Synthetic polypeptide
SSMRPRTSSKARMRPDCAASMELGTRLGARLQPVPRLLRGG

SEQ ID NO: 8846 - protein, 89 aa, Artificial Sequence
  Synthetic polypeptide
SSMRPRTSSKARMRPDCAASMELGTRLGARLQPVPRLLRGGAPQCTRGHVCPQLLRTALRRPWRDARDSAGGSLLQRRRPSGHGHACGS

SEQ ID NO: 8847 - protein, 389 aa, Artificial Sequence
  Synthetic polypeptide
RALGAHVSCYRLHCPPVHCPQPVTEPQQCCPKCVEPHTPSGLRAPPKSCQHNGTMYQHGEIFSAHELFPSRLPNQCVLCSCTEGQIYCGLTTCPEPGCPAPLPLPDSCCQACKDEASEQSDEEDSVQSLHGVRHPQDPCSSDAGRKRGPGTPAPTGLSAPLSFIPRHFRPKGAGSTTVKIVLKEKHKKACVHGGKTYSHGEVWHPAFRAFGPLPCILCTCEDGRQDCQRVTCPTEYPCRHPEKVAGKCCKICPEDKADPGHSEISSTRCPKAPGRVLVHTSVSPSPDNLRRFALEHEASDLVEIYLWKLVKDEETEAQRGEVPGPRPHSQNLPLDSDQESQEARLPERGTALPTARWPPRRSLERLPSPDPGAEGHGQSRQSDQDITKT

SEQ ID NO: 8848 - protein, 6 aa, Artificial Sequence
  Synthetic polypeptide
GPWAPM

SEQ ID NO: 8849 - protein, 6 aa, Artificial Sequence
  Synthetic polypeptide
GPWAPM

SEQ ID NO: 8850 - protein, 6 aa, Artificial Sequence
  Synthetic polypeptide
GPWAPM

SEQ ID NO: 8851 - protein, 6 aa, Artificial Sequence
  Synthetic polypeptide
GPWAPM

SEQ ID NO: 8852 - protein, 64 aa, Artificial Sequence
  Synthetic polypeptide
GPGRPCELLPPPLSACPLPPACDGATAMLSQVCGTSHSLWTPGPTKVLPAQRDHVPTRRDLQCP

SEQ ID NO: 8853 - protein, 64 aa, Artificial Sequence; identical to SEQ ID NO: 8852
  Synthetic polypeptide

SEQ ID NO: 8854 - protein, 64 aa, Artificial Sequence; identical to SEQ ID NO: 8852
  Synthetic polypeptide

SEQ ID NO: 8855 - protein, 64 aa, Artificial Sequence; identical to SEQ ID NO: 8852
  Synthetic polypeptide

SEQ ID NO: 8856 - protein, 367 aa, Artificial Sequence
  Synthetic polypeptide
RALGAHVSCYRLHCPPVHCPQPVTEPQQCCPKCVEPHTPSGLRAPPKSCQHNGTMYQHGEIFSAHELFPSRLPNQCVLCSCTEGQIYCGLTTCPEPGCPAPLPLPDSCCQACKDEASEQSDEEDSVQSLHGVRHPQDPCSSDAGRKRGPGTPAPTGLSAPLSFIPRHFRPKGAGSTTVKIVLKEKHKKACVHGGKTYSHGEVWHPAFRAFGPLPCILCTCEDGRQDCQRVTCPTEYPCRHPEKVAGKCCKICPEDKADPGHSEISSTRCPKAPGRVLVHTSVSPSPDNLRRFALEHEASDLVEIYLWKLVKGIFHLTQIKKVRKQDFQKEAQHFRLLAGPHEGHWNVFLAQTLELKVTASPDKVTKT

SEQ ID NO: 8857 - protein, 100 aa, Artificial Sequence
  Synthetic polypeptide
RALGAHVSCYRLHCPPVHCPQPVTEPQQCCPKCVEPHTPSGLRAPPKSCQHNGTMYQHGEIFSAHELFPSRLPNQCVLCSCTMRQVSNRMKRTVCSRSMG

SEQ ID NO: 8858 - protein, 246 aa, Artificial Sequence
  Synthetic polypeptide
RALGAHVSCYRLHCPPVHCPQPVTEPQQCCPKCVEPHTPSGLRAPPKSCQHNGTMYQHGEIFSAHELFPSRLPNQCVLCSCTEGQIYCGLTTCPEPGCPAPLPLPDSCCQACKDEASEQSDEEDSVQSLHGVRHPQDPCSSDAGRKRGPGTPAPTGLSAPLSFIPRHFRPKGAGSTTVKIVLKEKHKKEDKADPGHSEISSTRCPKAPGRVLVHTSVSPSPDNLRRFALEHEASDLVEIYLWKLVK

SEQ ID NO: 8859 - protein, 25 aa, Artificial Sequence
  Synthetic polypeptide
GSTQWLNTEKELTFGVQTSEVWASG

SEQ ID NO: 8860 - protein, 713 aa, Artificial Sequence
  Synthetic polypeptide
HLESRHLKFGPAGEVPQVPDKETKATMGTENTPGGKASPDPQDVRPSVFHNIKLFVLCHSLLQLAQLMISGYLKSSISTVEKRFGLSSQTSGLLASFNEVGNTALIVFVSYFGSRVHRPRMIGYGAILVALAGLLMTLPHFISEPYRYDNTSPEDMPQDFKASLCLPTTSAPASAPSNGNCSSYTETQHLSVVGIMFVAQTLLGVGGVPIQPFGISYIDDFAHNSNSPLYLGILFAVTMMGPGLAFGLGSLMLRLYVDINQMPEGGISLTIKDPRWVGAWWLGFLIAAGAVALAAIPYFFFPKEMPKEKRELQFRRKVLAVTDSPARKGKDSPSKQSPGESTKKQDGLVQIAPNLTVIQFIKVFPRVLLQTLRHPIFLLVVLSQVCLSSMAAGMAIFLPKFLERQFSITASYANLLIGCLSFPSVIVGIVVGGVLVKRLHLGPVGCGALCLLGMLLCLFFSLPLFFIGCSSHQIAGITHQTSAHPGLELSPSCMEACSCPLDGFNPVCDPSTRVEYITPCHAGCSSWVVQDALDNSQVFYTNCSCVVEGNPVLAGSCDSTCSHLVVPFLLLVSLGSALACLTHTPSFMLILRGVKKEDKTLAVGIQFMFLRILAWMPSPVIHGSAIDTTCVHWALSCGRRAVCRYYNNDLLRNRFIGLQFFFKTGSVICFALVLAVLRQQDKEARTKESRSSPAVEQQLLVSGPGKKPEDSRV

SEQ ID NO: 8861 - protein, 60 aa, Artificial Sequence
  Synthetic polypeptide
SLGQRVRYPRYQTRKPKPQWAQKTHLEAKPAQTLRTCGQVCSITSSCSFCATACCSWRSS

SEQ ID NO: 8862 - protein, 43 aa, Artificial Sequence
  Synthetic polypeptide
LWVLRPSFQKGSHHIPWRKECCTEDGKKPSTSTSPRMLPPTRP

SEQ ID NO: 8863 - protein, 43 aa, Artificial Sequence; identical to SEQ ID NO: 8862
  Synthetic polypeptide

SEQ ID NO: 8864 - protein, 43 aa, Artificial Sequence; identical to SEQ ID NO: 8862
  Synthetic polypeptide

SEQ ID NO: 8865 - protein, 71 aa, Artificial Sequence
  Synthetic polypeptide
DPHFKRGPITYPGGRNVARRTVRSHRRVQAPGCYHQPVPDPGRSTDARLPGAGGGGDCLWPEAGRVTRGPD

SEQ ID NO: 8866 - protein, 71 aa, Artificial Sequence; identical to SEQ ID NO: 8865
  Synthetic polypeptide

SEQ ID NO: 8867 - protein, 306 aa, Artificial Sequence
  Synthetic polypeptide
EAIDEYKPQDATTNPSLILAAAQMPAYQELVEEAIAYGRKLGGSQEDQIKNAIDKLFVLFGAEILKKIPGRVSTEVDARLSFDKDAMVARARRLIELYKEAGISKDRILIKLSSTWEGIQAGKELEEQHGIHCNMTLLFSFAQAVACAEAGVTLISPFVGRILDWHVANTDKKSYEPLEDPGVKSVTKIYNYYKKFSYKTIVMGASFRNTGEIKALAGCDFLTISPKLLGELLQDNAKLVPVLSAKAAQASDLEKIHLDEKSFRWLHNEDQMAVEKLSDGIRKFAADAVKLERMLTERMFNAENGK

SEQ ID NO: 8868 - protein, 287 aa, Artificial Sequence
  Synthetic polypeptide
EAIDEYKPQDATTNPSLILAAAQMPAYQELVEEAIAYGRKLGGSQEDQIKNAIDKLFVLFGAEILKKIPGRVSTEVDARLSFDKDAMVARARRLIELYKEAGISKDRILIKLSSTWEGIQAGKELEEQHGIHCNMTLLFSFAQAVACAEAGVTLISPFVGRILDWHVANTDKKSYEPLEDPGVKSVTKIYNYYKKFSYKTIVMGASFRNTGEIKALAGCDFLTISPKLLGELLQDNAKLVPVLSAKPKPVTWKKSTWMRSLSVGCTTRTRWLWRSSLTGSASLPLMQ

SEQ ID NO: 8869 - protein, 67 aa, Artificial Sequence
  Synthetic polypeptide
DPHFKRGPITYPGGRNVARRTVRSHRRVQAPGCYHQPVPDPGRSTDARLPGAGGGGDCLWPEAGRKY

SEQ ID NO: 8870 - protein, 62 aa, Artificial Sequence
  Synthetic polypeptide
EAIDEYKPQDATTNPSLILAAAQMPAYQELVEEAIAYGRKLGGNTKEDSGPSIHRSRRKALL

SEQ ID NO: 8871 - protein, 23 aa, Artificial Sequence
  Synthetic polypeptide
SLVSFWCQAIAERGCQQHLVGIQ

SEQ ID NO: 8872 - protein, 23 aa, Artificial Sequence
  Synthetic polypeptide
SLVSFWCQAIAERGCQQHLVGIQ

SEQ ID NO: 8873 - protein, 23 aa, Artificial Sequence
  Synthetic polypeptide
SLVSFWCQAIAERGCQQHLVGIQ

SEQ ID NO: 8874 - protein, 23 aa, Artificial Sequence
  Synthetic polypeptide
SLVSFWCQAIAERGCQQHLVGIQ

SEQ ID NO: 8875 - protein, 23 aa, Artificial Sequence
  Synthetic polypeptide
SLVSFWCQAIAERGCQQHLVGIQ

SEQ ID NO: 8876 - protein, 23 aa, Artificial Sequence
  Synthetic polypeptide
SLVSFWCQAIAERGCQQHLVGIQ

SEQ ID NO: 8877 - protein, 261 aa, Artificial Sequence
  Synthetic polypeptide
GFPSAHLLKLGQLLVPGYCRTWLSAAPSGNTVSNLIMIIPPMFGAVQSVRDGLEKRYIASYLALTVVGMGSWCFHMTLKYEMQLLDELPMIYSCCIFVYCMFECFKIKNSVNYHLLFTLVLFSLIVTTVYLKVKEPIFHQVMYGMLVFTLVLRSIYIVTWVYPWLRGLGYTSLGIFLLGFLFWNIDNIFCESLRNFRKKVPPIIGITTQFHAWWHILTGLGSYLHILFSLYTRTLYLRYRPKVKFLFGIWPVILFEPLRKH

SEQ ID NO: 8878 - protein, 33 aa, Artificial Sequence
  Synthetic polypeptide
GFPSAHLLKLGQLLVPGYCRTWLSAAPSGNTVS

SEQ ID NO: 8879 - protein, 33 aa, Artificial Sequence; identical to SEQ ID NO: 8878
  Synthetic polypeptide

SEQ ID NO: 8880 - protein, 74 aa, Artificial Sequence
  Synthetic polypeptide
GFPSAHLLKLGQLLVPGYCRTWLSAAPSGNTVSNLIMIIPPMFGAVQSVRDGLEKRYIASYLALTDGVSLCRRG

SEQ ID NO: 8881 - protein, 68 aa, Artificial Sequence
  Synthetic polypeptide
GFPSAHLLKLGQLLVPGYCRTWLSAAPSGNTVSNLIMIIPPMFGAVQSVRDGLEKRYIASYLALTAIG

SEQ ID NO: 8882 - protein, 70 aa, Artificial Sequence
  Synthetic polypeptide
GFPSAHLLKLGQLLVPGYCRTWLSAAPSGNTVSNLIMIIPPMFGAVQSVRDGLEKRYIASYLALTEVLQI

SEQ ID NO: 8883 - protein, 24 aa, Artificial Sequence
  Synthetic polypeptide
RRRRVISAFPTEILRVEVRMRKID

SEQ ID NO: 8884 - protein, 12 aa, Artificial Sequence
  Synthetic polypeptide
FLHFQLRYSEWK

SEQ ID NO: 8885 - protein, 20 aa, Artificial Sequence
  Synthetic polypeptide
RRRRVISAFPTEILRVEICT

SEQ ID NO: 8886 - protein, 72 aa, Artificial Sequence
  Synthetic polypeptide
FLHFQLRYSEWKFAHSHETSCPSCGRSLDSSSPLPGSTQEWKGTPRPFQFCSTIQETTTYQECCHTFEAWQA

SEQ ID NO: 8887 - protein, 16 aa, Artificial Sequence
  Synthetic polypeptide
ITSYKHLTDTSHGVRN

SEQ ID NO: 8888 - protein, 16 aa, Artificial Sequence
  Synthetic polypeptide
KKIKYKYQSKSQAISI

SEQ ID NO: 8889 - protein, 16 aa, Artificial Sequence
  Synthetic polypeptide
KKIKYKYQSKSQAISI

SEQ ID NO: 8890 - protein, 16 aa, Artificial Sequence
  Synthetic polypeptide
KKIKYKYQSKSQAISI

SEQ ID NO: 8891 - protein, 811 aa, Artificial Sequence
  Synthetic polypeptide
ITSYKHLTDTSHGVRNKCLQLLGNLGSLEKSVTKDAEGLAARDVQKIIGDYFSDQDPRVRTAAIKAMLQLHERGLKLHQTIYNQACKLLSDDYEQVRSAAVQLIWVVSQLYPESIVPIPSSNEEIRLVDDAFGKICHMVSDGSWVVRVQAAKLLGSMEQVSSHFLEQTLDKKLMSDLRRKRTAHERAKELYSSGEFSSGRKWGDDAPKEEVDTGAVNLIESGACGAFVHGLEDEMYEVRIAAVEALCMLAQSSPSFAEKCLDFLVDMFNDEIEEVRLQSIHTMRKISNNITLREDQLDTVLAVLEDSSRDIREALHELLCCTNVSTKEGIHLALVELLKNLTKYPTDRDSIWKCLKFLGSRHPTLVLPLVPELLSTHPFFDTAEPDMDDPAYIAVLVLIFNAAKTCPTMPALFSDHTFRHYAYLRDSLSHLVPALRLPGRKLVSSAVSPSIIPQEDPSQQFLQQSLERVYSLQHLDPQGAQELLEFTIRDLQRLGELQSELAGVADFSATYLRCQLLLIKALQEKLWNVAAPLYLKQSDLASAAAKQIMEETYKMEFMYSGVENKQVVIIHHMRLQAKALQLIVTARTTRGLDPLFGMCEKFLQEVDFFQRYFIADLPHLQDSFVDKLLDLMPRLMTSKPAEVVKILQTMLRQSAFLHLPLPEQIHKASATIIEPAGESDNPLRFTSGLVVALDVDATLEHVQDPQNTVKVQVLYPDGQAQMIHPKPADFRNPGPGRHRLITQVYLSHTAWTEACQVEVRLLLAYNSSARIPKCPWMEGGEMSPQVETSIEGTIPFSKPVKVYIMPKPARR

SEQ ID NO: 8892 - protein, 353 aa, Artificial Sequence
  Synthetic polypeptide
ITSYKHLTDTSHGVRNKCLQLLGNLGSLEKSVTKDAEGLAARDVQKIIGDYFSDQDPRVRTAAIKAMLQLHERGLKLHQTIYNQACKLLSDDYEQVRSAAVQLIWVVSQLYPESIVPIPSSNEEIRLVDDAFGKICHMVSDGSWVVRVQAAKLLGSMEQVSSHFLEQTLDKKLMSDLRRKRTAHERAKELYSSGEFSSGRKWGDDAPKEEVDTGAVNLIESGACGAFVHGLEDEMYEVRIAAVEALCMLAQSSPSFAEKCLDFLVDMFNDEIEEVRLQSIHTMRKISNNITLREDQLDTVLAVLEDSSRDIREALHELLCCTNVSTKEGIHLALVELLKNLTKYPTDRDSIWK

SEQ ID NO: 8893 - protein, 3 aa, Artificial Sequence
  Synthetic polypeptide
WDD

SEQ ID NO: 8894 - protein, 3 aa, Artificial Sequence
  Synthetic polypeptide
WDD

SEQ ID NO: 8895 - protein, 275 aa, Artificial Sequence
  Synthetic polypeptide
SGMIDWVSWPLGKNIDKWIIALLKGLAAVKKFSILIEVSLTKIEKVFSKLLYPIVRGAALSVLKYMLLTFQHSHEAFHLLLPHIPPMVASLVKEDSNSGTSCLEQLAELVHCMVFRFPGFPDLYEPVMEAIKDLHVPNEDRIKQLLGQDAWTSQKSELAGFYPRLMAKSDTGKIGLINLGNTCYVNSILQALFMASDFRHCVLRLTENNSQPLMTKLQWLFGFLEHSQRPAISPENFLSASWTPWFSPGTQQDCSEYLKYLLDRLHEEEKTGTRI

SEQ ID NO: 8896 - protein, 2 aa, Artificial Sequence
  Synthetic polypeptide
VG

SEQ ID NO: 8897 - protein, 2 aa, Artificial Sequence
  Synthetic polypeptide
VG

SEQ ID NO: 8898 - protein, 751 aa, Artificial Sequence
  Synthetic polypeptide
SGMIDWVSWPLGKNIDKWIIALLKGLAAVKKFSILIEVSLTKIEKVFSKLLYPIVRGAALSVLKYMLLTFQHSHEAFHLLLPHIPPMVASLVKEDSNSGTSCLEQLAELVHCMVFRFPGFPDLYEPVMEAIKDLHVPNEDRIKQLLGQDAWTSQKSELAGFYPRLMAKSDTGKIGLINLGNTCYVNSILQALFMASDFRHCVLRLTENNSQPLMTKLQWLFGFLEHSQRPAISPENFLSASWTPWFSPGTQQDCSEYLKYLLDRLHEEEKTGTRICQKLKQSSSPSPPEEPPAPSSTSVEKMFGGKIVTRICCLCCLNVSSREEAFTDLSLAFPPPERCRRRRLGSVMRPTEDITARELPPPTSAQGPGRVGPRRQRKHCITEDTPPTSLYIEGLDSKEAGGQSSQEERIEREEEGKEERTEKEEVGEEEESTRGEGEREKEEEVEEEEEKVEKETEKEAEQEKEEDSLGAGTHPDAAIPSGERTCGSEGSRSVLDLVNYFLSPEKLTAENRYYCESCASLQDAEKVVELSQGPCYLILTLLRFSFDLRTMRRRKILDDVSIPLLLRLPLAGGRGQAYDLCSVVVHSGVSSESGHYYCYAREGAARPAASLGTADRPEPENQWYLFNDTRVSFSSFESVSNVTSFFPKDTAYVLFYRQRPREGPEAELGSSRVRTEPTLHKDLMEAISKDNILYLQEQEKEARSRAAYISALPTSPHWGRGFDEDKDEDEGSPGGCNPAGGNGGDFHRLVF

SEQ ID NO: 8899 - protein, 10 aa, Artificial Sequence
  Synthetic polypeptide
WVRVWALEDD

SEQ ID NO: 8900 - protein, 10 aa, Artificial Sequence
  Synthetic polypeptide
WVRVWALEDD

SEQ ID NO: 8901 - protein, 279 aa, Artificial Sequence
  Synthetic polypeptide
ECGLSRMIDWVSWPLGKNIDKWIIALLKGLAAVKKFSILIEVSLTKIEKVFSKLLYPIVRGAALSVLKYMLLTFQHSHEAFHLLLPHIPPMVASLVKEDSNSGTSCLEQLAELVHCMVFRFPGFPDLYEPVMEAIKDLHVPNEDRIKQLLGQDAWTSQKSELAGFYPRLMAKSDTGKIGLINLGNTCYVNSILQALFMASDFRHCVLRLTENNSQPLMTKLQWLFGFLEHSQRPAISPENFLSASWTPWFSPGTQQDCSEYLKYLLDRLHEEEKTGTRI

SEQ ID NO: 8902 - protein, 9 aa, Artificial Sequence
  Synthetic polypeptide
VGKSVGSRG

SEQ ID NO: 8903 - protein, 9 aa, Artificial Sequence
  Synthetic polypeptide
VGKSVGSRG

SEQ ID NO: 8904 - protein, 755 aa, Artificial Sequence
  Synthetic polypeptide
ECGLSRMIDWVSWPLGKNIDKWIIALLKGLAAVKKFSILIEVSLTKIEKVFSKLLYPIVRGAALSVLKYMLLTFQHSHEAFHLLLPHIPPMVASLVKEDSNSGTSCLEQLAELVHCMVFRFPGFPDLYEPVMEAIKDLHVPNEDRIKQLLGQDAWTSQKSELAGFYPRLMAKSDTGKIGLINLGNTCYVNSILQALFMASDFRHCVLRLTENNSQPLMTKLQWLFGFLEHSQRPAISPENFLSASWTPWFSPGTQQDCSEYLKYLLDRLHEEEKTGTRICQKLKQSSSPSPPEEPPAPSSTSVEKMFGGKIVTRICCLCCLNVSSREEAFTDLSLAFPPPERCRRRRLGSVMRPTEDITARELPPPTSAQGPGRVGPRRQRKHCITEDTPPTSLYIEGLDSKEAGGQSSQEERIEREEEGKEERTEKEEVGEEEESTRGEGEREKEEEVEEEEEKVEKETEKEAEQEKEEDSLGAGTHPDAAIPSGERTCGSEGSRSVLDLVNYFLSPEKLTAENRYYCESCASLQDAEKVVELSQGPCYLILTLLRFSFDLRTMRRRKILDDVSIPLLLRLPLAGGRGQAYDLCSVVVHSGVSSESGHYYCYAREGAARPAASLGTADRPEPENQWYLFNDTRVSFSSFESVSNVTSFFPKDTAYVLFYRQRPREGPEAELGSSRVRTEPTLHKDLMEAISKDNILYLQEQEKEARSRAAYISALPTSPHWGRGFDEDKDEDEGSPGGCNPAGGNGGDFHRLVF

SEQ ID NO: 8905 - protein, 480 aa, Artificial Sequence
  Synthetic polypeptide
LLEENISMILRSASFSQGTRASFLMRSDTAVQKLAQGNGHCVNGISGQVHGFYSLPKPSRHNTEFRDSTYDLPRSLASHGHTKGSLTGSETDNEDVYTFKTPSNTLCREFGDLLVDNMDVPATPLSAYQIPRTFTLDKNHNAMTVATPGDSAIAPPPRPPKPSQAETPRWGSPQQRPPISENSRSVAATIPRRNTLPAMDNSRLHRASSCETYEYPQRGGESAGRSAESMSDGVGSFLPGKMIVGRSDSTNSEDNYVPMNPGSSTLLAMERAGDNSQSVYIPMSPGAHHFDSLGYPSTTLPVHRGPSRGSEIQPPPVNRNLKPDRKAKPTPLDLRNNTVIDELPFKSPITKSWSRANHTFNSSSSQYCRPISTQSITSTDSGDSEENYVPMQNPVSASPVPSGTNSPAPKKSTGSVDYLALDFQPSSPSPHRKPSTSSVTSDEKVDYVQVDKEKTQALQNTMQEWTDVRQSSEPSKGAKL

SEQ ID NO: 8906 - protein, 480 aa, Artificial Sequence; identical to SEQ ID NO: 8905
  Synthetic polypeptide

SEQ ID NO: 8907 - protein, 26 aa, Artificial Sequence
  Synthetic polypeptide
SRRKHLHDLEECQLLSGHQSLFSHEE

SEQ ID NO: 8908 - protein, 26 aa, Artificial Sequence
  Synthetic polypeptide
SRRKHLHDLEECQLLSGHQSLFSHEE

SEQ ID NO: 8909 - protein, 19 aa, Artificial Sequence
  Synthetic polypeptide
MAYSLEETLVYPAEWPDER

SEQ ID NO: 8910 - protein, 654 aa, Artificial Sequence
  Synthetic polypeptide
WHTAWKKRWFILRSGRMSGDPDVLEYYKNDHSKKPLRIINLNFCEQVDAGLTFNKKELQDSFVFDIKTSERTFYLVAETEEDMNKWVQSICQICGFNQAEESTDSLRNVSSAGHGPRSSPAELSSSSQHLLRERKSSAPSHSSQPTLFTFEPPVSNHMQPTLSTSAPQEYLYLHQCISRRAENARSASFSQGTRASFLMRSDTAVQKLAQGNGHCVNGISGQVHGFYSLPKPSRHNTEFRDSTYDLPRSLASHGHTKGSLTGSETDNEDVYTFKTPSNTLCREFGDLLVDNMDVPATPLSAYQIPRTFTLDKNHNAMTVATPGDSAIAPPPRPPKPSQAETPRWGSPQQRPPISENSRSVAATIPRRNTLPAMDNSRLHRASSCETYEYPQRGGESAGRSAESMSDGVGSFLPGKMIVGRSDSTNSEDNYVPMNPGSSTLLAMERAGDNSQSVYIPMSPGAHHFDSLGYPSTTLPVHRGPSRGSEIQPPPVNRNLKPDRKAKPTPLDLRNNTVIDELPFKSPITKSWSRANHTFNSSSSQYCRPISTQSITSTDSGDSEENYVPMQNPVSASPVPSGTNSPAPKKSTGSVDYLALDFQPSSPSPHRKPSTSSVTSDEKVDYVQVDKEKTQALQNTMQEWTDVRQSSEPSKGAKL

SEQ ID NO: 8911 - protein, 16 aa, Artificial Sequence
  Synthetic polypeptide
GIQPGRNAGLSCGVAG

SEQ ID NO: 8912 - protein, 193 aa, Artificial Sequence
  Synthetic polypeptide
PKNQVVCQYLKNPNVSDSLLLQNIFQALNVYYNYSGQVKCLNISETATSSLGTLGWSYQACTEVVMPFCTNGVDDMFEPHSWNLKELSDDCFQQWGVRPRPSWITTMYGGKNISSHTNIVFSNGELDPWSGGGVTKDITDTLVAVTISEGAHHLDLRTKNALDPMSVLLARSLEVRHMKNWIRDFYDSAGKQH

SEQ ID NO: 8913 - protein, 193 aa, Artificial Sequence; identical to SEQ ID NO: 8912
  Synthetic polypeptide

SEQ ID NO: 8914 - protein, 193 aa, Artificial Sequence; identical to SEQ ID NO: 8912
  Synthetic polypeptide

SEQ ID NO: 8915 - protein, 6 aa, Artificial Sequence
  Synthetic polypeptide
LNLRIR

SEQ ID NO: 8916 - protein, 6 aa, Artificial Sequence
  Synthetic polypeptide
LNLRIR

SEQ ID NO: 8917 - protein, 6 aa, Artificial Sequence
  Synthetic polypeptide
LNLRIR

SEQ ID NO: 8918 - protein, 6 aa, Artificial Sequence
  Synthetic polypeptide
LNLRIR

SEQ ID NO: 8919 - protein, 14 aa, Artificial Sequence
  Synthetic polypeptide
ESGSVPVFEKSQCI

SEQ ID NO: 8920 - protein, 14 aa, Artificial Sequence
  Synthetic polypeptide
ESGSVPVFEKSQCI

SEQ ID NO: 8921 - protein, 14 aa, Artificial Sequence
  Synthetic polypeptide
ESGSVPVFEKSQCI

SEQ ID NO: 8922 - protein, 14 aa, Artificial Sequence
  Synthetic polypeptide
ESGSVPVFEKSQCI

SEQ ID NO: 8923 - protein, 35 aa, Artificial Sequence
  Synthetic polypeptide
PKNQVVCQYLKNPNVSDSLLLQNIFQALNVYYNYS

SEQ ID NO: 8924 - protein, 20 aa, Artificial Sequence
  Synthetic polypeptide
LYLDYPEEMKHDFQNELNLS

SEQ ID NO: 8925 - protein, 20 aa, Artificial Sequence
  Synthetic polypeptide
LYLDYPEEMKHDFQNELNLS

SEQ ID NO: 8926 - protein, 20 aa, Artificial Sequence
  Synthetic polypeptide
LYLDYPEEMKHDFQNELNLS

SEQ ID NO: 8927 - protein, 12 aa, Artificial Sequence
  Synthetic polypeptide
GWDDCILITRRK

SEQ ID NO: 8928 - protein, 12 aa, Artificial Sequence
  Synthetic polypeptide
GWDDCILITRRK

SEQ ID NO: 8929 - protein, 12 aa, Artificial Sequence
  Synthetic polypeptide
GWDDCILITRRK

SEQ ID NO: 8930 - protein, 11 aa, Artificial Sequence
  Synthetic polypeptide
LPGGNETRFPK

SEQ ID NO: 8931 - protein, 11 aa, Artificial Sequence
  Synthetic polypeptide
LPGGNETRFPK

SEQ ID NO: 8932 - protein, 11 aa, Artificial Sequence
  Synthetic polypeptide
LPGGNETRFPK

SEQ ID NO: 8933 - protein, 210 aa, Artificial Sequence
  Synthetic polypeptide
LYLDYPEVFKMAASMHGQPSPSLEDAKLRRPMVIEIIEKNFDYLRKEMTQNIYQMATFGTTAGFSGIFSNFLFRRCFKVKHDALKTYASLATLPFLSTVVTDKLFVIDALYSDNISKENCVFRSSLIGIVCGVFYPSSLAFTKNGRLATKYHTVPLPPKGRVLIHWMTLCQTQMKLMAIPLVFQIMFGILNGLYHYAVFEETLEKTIHEE

SEQ ID NO: 8934 - protein, 26 aa, Artificial Sequence
  Synthetic polypeptide
GWDDCILITRRFSRWQHLCMVSPVLL

SEQ ID NO: 8935 - protein, 26 aa, Artificial Sequence
  Synthetic polypeptide
GWDDCILITRRFSRWQHLCMVSPVLL

SEQ ID NO: 8936 - protein, 37 aa, Artificial Sequence
  Synthetic polypeptide
LPGGFQDGSIYAWSAQSFSRRCKTQKTNGHRNHRKKF

SEQ ID NO: 8937 - protein, 37 aa, Artificial Sequence; identical to SEQ ID NO: 8936
  Synthetic polypeptide

SEQ ID NO: 8938 - protein, 150 aa, Artificial Sequence
  Synthetic polypeptide
LYLDYPEVFKMAASMHGQPSPSLEDAKLRRPMVIEIIEKNFDYLRKEMTQNIYQMATFGTTAGFSGIFSNFLFRRCFKVKHDALKTYASLATLPFLSTVVTDKLFVIDALYSDNISKENCVFRSSLIGIVCGVFYPSSLAFTKNGRLATK

SEQ ID NO: 8939 - protein, 26 aa, Artificial Sequence
  Synthetic polypeptide
NPTHIGASANPIRISAALCWPWKCYQ

SEQ ID NO: 8940 - protein, 26 aa, Artificial Sequence
  Synthetic polypeptide
NPTHIGASANPIRISAALCWPWKCYQ

SEQ ID NO: 8941 - protein, 26 aa, Artificial Sequence
  Synthetic polypeptide
NPTHIGASANPIRISAALCWPWKCYQ

SEQ ID NO: 8942 - protein, 26 aa, Artificial Sequence
  Synthetic polypeptide
NPTHIGASANPIRISAALCWPWKCYQ

SEQ ID NO: 8943 - protein, 288 aa, Artificial Sequence
  Synthetic polypeptide
FLTVGLHHTLLRMLKTLRILEPPLIRSEYLQHYVGHGNAINELKFHPRDPNLLLSVSKDHALRLWNIQTDTLVAIFGGVEGHRDEVLSADYDLLGEKIMSCGMDHSLKLWRINSKRMMNAIKESYDYNPNKTNRPFISQKIHFPDFSTRDIHRNYVDCVRWLGDLILSKSCENAIVCWKPGKMEDDIDKIKPSESNVTILGRFDYSQCDIWYMRFSMDFWQKMLALGNQVGKLYVWDLEVEDPHKAKCTTLTHHKCGAAIRQTSFSRDSSILIAVCDDASIWRWDRLR

SEQ ID NO: 8944 - protein, 18 aa, Artificial Sequence
  Synthetic polypeptide
SDQNICSTMLAMEMLSMS

SEQ ID NO: 8945 - protein, 18 aa, Artificial Sequence
  Synthetic polypeptide
SDQNICSTMLAMEMLSMS

SEQ ID NO: 8946 - protein, 18 aa, Artificial Sequence
  Synthetic polypeptide
SDQNICSTMLAMEMLSMS

SEQ ID NO: 8947 - protein, 18 aa, Artificial Sequence
  Synthetic polypeptide
SDQNICSTMLAMEMLSMS

SEQ ID NO: 8948 - protein, 208 aa, Artificial Sequence
  Synthetic polypeptide
FLTVGLHHTLLRMLKTLRILEPPLIRSEYLQHYVGHGNAINELKFHPRDPNLLLSVSKDHALRLWNIQTDTLVAIFGGVEGHRDEVLSASCENAIVCWKPGKMEDDIDKIKPSESNVTILGRFDYSQCDIWYMRFSMDFWQKMLALGNQVGKLYVWDLEVEDPHKAKCTTLTHHKCGAAIRQTSFSRDSSILIAVCDDASIWRWDRLR

SEQ ID NO: 8949 - protein, 247 aa, Artificial Sequence
  Synthetic polypeptide
FLTVGLHHTLLRMLKTLRILEPPLIRSEYLQHYVGHGNAINELKFHPRDPNLLLSVSKDHALRLWNIQTDTLVAIFGGVEGHRDEVLSADYDLLGEKIMSCGMDHSLKLWRINSKRMMNAIKESYDYNPNKTNRPFISQKIHFPDFSTRDIHRNYVDCVRWLGDLILSKSCENAIVCWKPGKMEDDIDKIKPSESNVTILGRFDYSQCDIWYMRFSMDFWQKMLALGNQVGKLYVWDLEVEDPHKAK

SEQ ID NO: 8950 - protein, 313 aa, Artificial Sequence
  Synthetic polypeptide
FLTVGLHHTLLRMLKTLRILEPPLIRSEYLQHYVGHGNAINELKFHPRDPNLLLSVSKDHALRLWNIQTDTLVAIFGGVEGHRDEVLSADYDLLGEKIMSCGMDHSLKLWRINSKRMMNAIKESYDYNPNKTNRPFISQKIHFPDFSTRDIHRNYVDCVRWLGDLILSKSGRAILHSHQQCMRDPVSPNLRQHLSCENAIVCWKPGKMEDDIDKIKPSESNVTILGRFDYSQCDIWYMRFSMDFWQKMLALGNQVGKLYVWDLEVEDPHKAKCTTLTHHKCGAAIRQTSFSRDSSILIAVCDDASIWRWDRLR

SEQ ID NO: 8951 - protein, 28 aa, Artificial Sequence
  Synthetic polypeptide
HISPASAHSLSCHPLRRCLRHDWDGLYP

SEQ ID NO: 8952 - protein, 28 aa, Artificial Sequence
  Synthetic polypeptide
HISPASAHSLSCHPLRRCLRHDWDGLYP

SEQ ID NO: 8953 - protein, 28 aa, Artificial Sequence
  Synthetic polypeptide
HISPASAHSLSCHPLRRCLRHDWDGLYP

SEQ ID NO: 8954 - protein, 28 aa, Artificial Sequence
  Synthetic polypeptide
HISPASAHSLSCHPLRRCLRHDWDGLYP

SEQ ID NO: 8955 - protein, 28 aa, Artificial Sequence
  Synthetic polypeptide
HISPASAHSLSCHPLRRCLRHDWDGLYP

SEQ ID NO: 8956 - protein, 28 aa, Artificial Sequence
  Synthetic polypeptide
HISPASAHSLSCHPLRRCLRHDWDGLYP

SEQ ID NO: 8957 - protein, 550 aa, Artificial Sequence
  Synthetic polypeptide
GGAFAMIGMAFTLEERLQLGIHGLIPPCFLSQDVQLLRIMRYYERQQSDLDKYIILMTLQDRNEKLFYRVLTSDVEKFMPIVYTPTVGLACQHYGLTFRRPRGLFITIHDKGHLATMLNSWPEDNIKAVVVTDGERILGLGDLGCYGMGIPVGKLALYTACGGVNPQQCLPVLLDVGTNNEELLRDPLYIGLKHQRVHGKAYDDLLDEFMQAVTDKFGINCLIQFEDFANANAFRLLNKYRNKYCMFNDDIQGTASVAVAGILAALRITKNKLSNHVFVFQGAGEAAMGIAHLLVMALEKEGVPKAEATRKIWMVDSKGLIVKGRSHLNHEKEMFAQDHPEVNSLEEVVRLVKPTAIIGVAAIAGAFTEQILRDMASFHERPIIFALSNPTSKAECTAEKCYRVTEGRGIFASGSPFKSVTLEDGKTFIPGQGNNAYVFPGVALGVIAGGIRHIPDEIFLLTAEQIAQEVSEQHLSQGRLYPPLSTIRDVSLRIAIKVLDYAYKHNLASYYPEPKDKEAFVRSLVYTPDYDSFTLDSYTWPKEAMNVQTV

SEQ ID NO: 8958 - protein, 550 aa, Artificial Sequence; identical to SEQ ID NO: 8957
  Synthetic polypeptide

SEQ ID NO: 8959 - protein, 550 aa, Artificial Sequence; identical to SEQ ID NO: 8957
  Synthetic polypeptide

SEQ ID NO: 8960 - protein, 526 aa, Artificial Sequence
  Synthetic polypeptide
GGAFAMIGMAFTLEERLQLGIHGLIPPCFLSQDVQLLRIMRYYERQQSDLDKYIILMTLQDRNEKLFYRVLTSDVEKFMPIVYTPTVGLACQHYGLTFRRPRGLFITIHDKGHLATMLNSWPEDNIKAVVVTDGERILGLGDLGCYGMGIPVGKLALYTACGGVNPQQCLPVLLDVGTNNEELLRDPLYIGLKHQRVHGKAYDDLLDEFMQAVTDKFGINCLIQFEDFANANAFRLLNKYRNKYCMFNDDIQGTASVAVAGILAALRITKNKLSNHVFVFQGAGEAAMGIAHLLVMALEKEGVPKAEATRKIWMVDSKGLIVKGRSHLNHEKEMFAQDHPEVNSLEEVVRLVKPTAIIGVAAIAGAFTEQILRDMASFHERPIIFALSNPTSKAECTAEKCYRVTEGRGIFASGSPFKSVTLEDGKTFIPGQGNNAYVFPGVALGVIAGGIRHIPDEIFLLTAEQIAQEVSEQHLSQGRLYPPLSTIRDVSLRIAIKVLDYAYKHNLASYYPEPKDKEAFVRSLVY

SEQ ID NO: 8961 - protein, 288 aa, Artificial Sequence
  Synthetic polypeptide
GGAFAMIGMAFTLEERLQLGIHGLIPPCFLSQDVQLLRIMRYYERQQSDLDKYIILMTLQDRNEKLFYRVLTSDVEKFMPIVYTPTVGLACQHYGLTFRRPRGLFITIHDKGHLATMLNSWPEDNIKAVVVTDGERILGLGDLGCYGMGIPVGKLALYTACGGVNPQQCLPVLLDVGTNNEELLRDPLYIGLKHQRVHGKAYDDLLDEFMQAVTDKFGINCLIQFEDFANANAFRLLNKYRNKYCMFNDDIQGTTCHTFSCPWHLWAQVMFQHIPGPMGFSEWLPRNS

SEQ ID NO: 8962 - protein, 97 aa, Artificial Sequence
  Synthetic polypeptide
GGAFAMIGMAFTLEERLQLGIHGLIPPCFLSQDVQLLRIMRYYERQQSDLDKYIILMTLQDRNEKLFYRVLTSDVEKFMPIVYTPTVGLACQHYGLT

SEQ ID NO: 8963 - protein, 56 aa, Artificial Sequence
  Synthetic polypeptide
LIAQIPELNCLHLDPYFTLHVVGNLRSRKIWKHDEGLLPRSYGCIYCLRCHQASHI

SEQ ID NO: 8964 - protein, 56 aa, Artificial Sequence; identical to SEQ ID NO: 8963
  Synthetic polypeptide

SEQ ID NO: 8965 - protein, 147 aa, Artificial Sequence
  Synthetic polypeptide
AILGQERFGNMTRVYYREAMGAFIVFDVTRPATFEAVAKWKNDLDSKLSLPNGKPVSVVLLANKCDQGKDVLMNNGLKMDQFCKEHGFVGWFETSAKENINIDEASRCLVKHILANECDLMESIEPDVVKPHLTSTKVASCSGCAKS

SEQ ID NO: 8966 - protein, 147 aa, Artificial Sequence; identical to SEQ ID NO: 8965
  Synthetic polypeptide

SEQ ID NO: 8967 - protein, 150 aa, Artificial Sequence
  Synthetic polypeptide
PASGRNVCLIHLNLPSIFEQWLRRHRPLQEVYPEANAPIGHNRESYMVPFIPLYRNGDFFISSKDLGYDYSYLQDSDPDSFQDYIKSYLEQASRIWSWLLGAAMVGAVLTALLAGLVSLLCRHKRKQLPEEKQPLLMEKEDYHSLYQSHL

SEQ ID NO: 8968 - protein, 92 aa, Artificial Sequence
  Synthetic polypeptide
IYPLFLSSGSEGTVLFKKFIQKPMHPLDITGNPTWFLLYHCTEMVISLFHPKIWAMTIAIYKIQTQTLFKTTLSPIWNKRVGSGHGSLGRRW

SEQ ID NO: 8969 - protein, 20 aa, Artificial Sequence
  Synthetic polypeptide
DVTCLRKKCLPHTLKFTLYF

SEQ ID NO: 8970 - protein, 24 aa, Artificial Sequence
  Synthetic polypeptide
PASGRNVCLIHLNLPSPRLFSRLH

SEQ ID NO: 8971 - protein, 77 aa, Artificial Sequence
  Synthetic polypeptide
IYPHPDSFQDYIKSYLEQASRIWSWLLGAAMVGAVLTALLAGLVSLLCRHKRKQLPEEKQPLLMEKEDYHSLYQSHL

SEQ ID NO: 8972 - protein, 46 aa, Artificial Sequence
  Synthetic polypeptide
DVTCLRKKCLPHTLKFTLTQTLFKTTLSPIWNKRVGSGHGSLGRRW

SEQ ID NO: 8973 - protein, 22 aa, Artificial Sequence
  Synthetic polypeptide
RQYDGSGKNPGLTISRFTTASI

SEQ ID NO: 8974 - protein, 22 aa, Artificial Sequence
  Synthetic polypeptide
RQYDGSGKNPGLTISRFTTASI

SEQ ID NO: 8975 - protein, 22 aa, Artificial Sequence
  Synthetic polypeptide
RQYDGSGKNPGLTISRFTTASI

SEQ ID NO: 8976 - protein, 22 aa, Artificial Sequence
  Synthetic polypeptide
RQYDGSGKNPGLTISRFTTASI

SEQ ID NO: 8977 - protein, 22 aa, Artificial Sequence
  Synthetic polypeptide
RQYDGSGKNPGLTISRFTTASI

SEQ ID NO: 8978 - protein, 22 aa, Artificial Sequence
  Synthetic polypeptide
RQYDGSGKNPGLTISRFTTASI

SEQ ID NO: 8979 - protein, 22 aa, Artificial Sequence
  Synthetic polypeptide
RQYDGSGKNPGLTISRFTTASI

SEQ ID NO: 8980 - protein, 22 aa, Artificial Sequence
  Synthetic polypeptide
RQYDGSGKNPGLTISRFTTASI

SEQ ID NO: 8981 - protein, 22 aa, Artificial Sequence
  Synthetic polypeptide
RQYDGSGKNPGLTISRFTTASI

SEQ ID NO: 8982 - protein, 22 aa, Artificial Sequence
  Synthetic polypeptide
RQYDGSGKNPGLTISRFTTASI

SEQ ID NO: 8983 - protein, 22 aa, Artificial Sequence
  Synthetic polypeptide
RQYDGSGKNPGLTISRFTTASI

SEQ ID NO: 8984 - protein, 22 aa, Artificial Sequence
  Synthetic polypeptide
RQYDGSGKNPGLTISRFTTASI

SEQ ID NO: 8985 - protein, 22 aa, Artificial Sequence
  Synthetic polypeptide
RQYDGSGKNPGLTISRFTTASI

SEQ ID NO: 8986 - protein, 50 aa, Artificial Sequence
  Synthetic polypeptide
RQWKEPWTNDFEIYYCLHLVKTPKFCPSFNLEIIPSCILMVLLEVHLRNH

SEQ ID NO: 8987 - protein, 50 aa, Artificial Sequence; identical to SEQ ID NO: 8986
  Synthetic polypeptide

SEQ ID NO: 8988 - protein, 50 aa, Artificial Sequence; identical to SEQ ID NO: 8986
  Synthetic polypeptide

SEQ ID NO: 8989 - protein, 50 aa, Artificial Sequence; identical to SEQ ID NO: 8986
  Synthetic polypeptide

SEQ ID NO: 8990 - protein, 50 aa, Artificial Sequence; identical to SEQ ID NO: 8986
  Synthetic polypeptide

SEQ ID NO: 8991 - protein, 50 aa, Artificial Sequence; identical to SEQ ID NO: 8986
  Synthetic polypeptide

SEQ ID NO: 8992 - protein, 50 aa, Artificial Sequence; identical to SEQ ID NO: 8986
  Synthetic polypeptide

SEQ ID NO: 8993 - protein, 50 aa, Artificial Sequence; identical to SEQ ID NO: 8986
  Synthetic polypeptide

SEQ ID NO: 8994 - protein, 50 aa, Artificial Sequence; identical to SEQ ID NO: 8986
  Synthetic polypeptide

SEQ ID NO: 8995 - protein, 50 aa, Artificial Sequence; identical to SEQ ID NO: 8986
  Synthetic polypeptide

SEQ ID NO: 8996 - protein, 96 aa, Artificial Sequence
  Synthetic polypeptide
RQWKEPWTNDFEIYYCLHLVKTPKFCPSFNLEIIPRMTGNHTSLEDYTLFGYAEISSPSVGLQIYSVCCITSFGKRTDLTMSTSSCTSVKQMGYRR

SEQ ID NO: 8997 - protein, 96 aa, Artificial Sequence; identical to SEQ ID NO: 8996
  Synthetic polypeptide

SEQ ID NO: 8998 - protein, 96 aa, Artificial Sequence; identical to SEQ ID NO: 8996
  Synthetic polypeptide

SEQ ID NO: 8999 - protein, 7 aa, Artificial Sequence
  Synthetic polypeptide
CGSWNTS

SEQ ID NO: 9000 - protein, 7 aa, Artificial Sequence
  Synthetic polypeptide
CGSWNTS

SEQ ID NO: 9001 - protein, 7 aa, Artificial Sequence
  Synthetic polypeptide
CGSWNTS

SEQ ID NO: 9002 - protein, 7 aa, Artificial Sequence
  Synthetic polypeptide
CGSWNTS

SEQ ID NO: 9003 - protein, 450 aa, Artificial Sequence
  Synthetic polypeptide
VDHGILLDSERRKSDASSLMPPLRISLIQDMRHIQNIGEIKTDVGKARAWVRLSMEKKLLSRHLKQLLSDHELTKKLYKRYAFLRCDDEKEQFLYHLLSFNAVDYFCFTNVFTTILIPYHILIVPSKKLGGSMFTANPWICISGELGETQIMQIPRNVLEMTFECQNLGKLTTVQIGHDNSGLYAKWLVEYVMVRNEITGHTYKFPCGRWLGKGMDDGSLERILVGELLTSQPEVDERPCRTPPLQQSPSVIRRLVTISPNNKPKLNTGQIQESIGEAVNGIVKHFHKPEKERGSLTLLLCGECGLVSALEQAFQHGFKSPRLFKNVFIWDFLEKAQTYYETLEKNEVVPEENWHTRARNFCRFVTAINNTPRNIGKDGKFQMLVCLGARDHLLHHWIALLADCPITAHMYEDVALIKDHTLVNSLIRVLQTLQEFNITLETSLVKGIDI

SEQ ID NO: 9004 - protein, 450 aa, Artificial Sequence; identical to SEQ ID NO: 9003
  Synthetic polypeptide

SEQ ID NO: 9005 - protein, 22 aa, Artificial Sequence
  Synthetic polypeptide
WIMEYFLIQNVGSLMPAHSCLP

SEQ ID NO: 9006 - protein, 22 aa, Artificial Sequence
  Synthetic polypeptide
WIMEYFLIQNVGSLMPAHSCLP

SEQ ID NO: 9007 - protein, 22 aa, Artificial Sequence
  Synthetic polypeptide
WIMEYFLIQNVGSLMPAHSCLP

SEQ ID NO: 9008 - protein, 22 aa, Artificial Sequence
  Synthetic polypeptide
WIMEYFLIQNVGSLMPAHSCLP

SEQ ID NO: 9009 - protein, 404 aa, Artificial Sequence
  Synthetic polypeptide
VDHGILLDSERRKSDASSLMPPLRISLIQDMRHIQNIGEIKTDVGKARAWVRLSMEKKLLSRHLKQLLSDHELTKKLYKRYAFLRCDDEKEQFLYHLLSFNAVDYFCFTNVFTTILIPYHILIVPSKKLGGSMFTANPWICISGELGETQIMQIPRNVLEMTFECQNLGKLTTVQIGHDNSGLYAKWLVEYVMVRNEITGHTYKFPCGRWLGKGMDDGSLERILVGELLTSQPEVDERPCRTPPLQQSPSVIRRLVTISPNNKPKLNTGQIQESIGEAVNGIVKHFHKPEKERGSLTLLLCGECGLVSALEQAFQHGFKSPRLFKNVFIWDFLEKAQTYYETLEKNEVVPEENWHTRARNFCRFVTAINNTPRNIGKDEITSYTTGLPCWLTAPSLHTCMRMWH

SEQ ID NO: 9010 - protein, 23 aa, Artificial Sequence
  Synthetic polypeptide
VDHGILLDSERRKSDASSLMPPL

SEQ ID NO: 9011 - protein, 42 aa, Artificial Sequence
  Synthetic polypeptide
GQVQWVKPAIPTPRWEYCLKPGVQDQPRQESIGILHTSVPFL

SEQ ID NO: 9012 - protein, 22 aa, Artificial Sequence
  Synthetic polypeptide
NQEFKTSLGKKVLAYSTHLYHS

SEQ ID NO: 9013 - protein, 14 aa, Artificial Sequence
  Synthetic polypeptide
ARKYWHTPHICTIL

SEQ ID NO: 9014 - protein, 54 aa, Artificial Sequence
  Synthetic polypeptide
GQVQWVKPAIPTPRWEYCLKPGVQDQPRQESFYLENMVSGVKGIGILHTSVPFL

SEQ ID NO: 9015 - protein, 34 aa, Artificial Sequence
  Synthetic polypeptide
NQEFKTSLGKKAFILRTWCLELKVLAYSTHLYHS

SEQ ID NO: 9016 - protein, 6 aa, Artificial Sequence
  Synthetic polypeptide
ARKLLS

SEQ ID NO: 9017 - protein, 6 aa, Artificial Sequence
  Synthetic polypeptide
ARKLLS

SEQ ID NO: 9018 - protein, 34 aa, Artificial Sequence
  Synthetic polypeptide
GQVQWVKPAIPTPRWEYCLKPGVQDQPRQESFYL

SEQ ID NO: 9019 - protein, 15 aa, Artificial Sequence
  Synthetic polypeptide
NQEFKTSLGKKAFIL

SEQ ID NO: 9020 - protein, 36 aa, Artificial Sequence
  Synthetic polypeptide
EVRSPSARQPPRLRSEEPLRPAATPSGKFLYIFINV

SEQ ID NO: 9021 - protein, 286 aa, Artificial Sequence
  Synthetic polypeptide
EVRSLSARQPPHLGNFFTYSSMSEEVTYADLQFQNSSEMEKIPEIGKFGEKAPPAPSHVWRPAALFLTLLCLLLLIGLGVLASMFHVTLKIEMKKMNKLQNISEELQRNISLQLMSNMNISNKIRNLSTTLQTIATKLCRELYSKEQEHKCKPCPRRWIWHKDSCYFLSDDVQTWQESKMACAAQNASLLKINNKNALEFIKSQSRSYDYWLGLSPEEDSTRGMRVDNIINSSAWVIRNAPDLNNMYCGYINRLYVQYYHCTYKKRMICEKMANPVQLGSTYFREA

SEQ ID NO: 9022 - protein, 64 aa, Artificial Sequence
  Synthetic polypeptide
GASPPGSHPIWEISLHIHQCLKKLLMQIFNSRTPVRWKKSQKLANLGKKHLQLPLMYGVQQPCF

SEQ ID NO: 9023 - protein, 39 aa, Artificial Sequence
  Synthetic polypeptide
RCGEIGTLIHCRRPDAPVPDGESEKTVEESSDSESSFSD

SEQ ID NO: 9024 - protein, 39 aa, Artificial Sequence; identical to SEQ ID NO: 9023
  Synthetic polypeptide

SEQ ID NO: 9025 - protein, 39 aa, Artificial Sequence; identical to SEQ ID NO: 9023
  Synthetic polypeptide

SEQ ID NO: 9026 - protein, 35 aa, Artificial Sequence
  Synthetic polypeptide
RQTITSVADGVEKLEPSYIAGGQMLQCLMAKVRKL

SEQ ID NO: 9027 - protein, 35 aa, Artificial Sequence; identical to SEQ ID NO: 9026
  Synthetic polypeptide

SEQ ID NO: 9028 - protein, 35 aa, Artificial Sequence; identical to SEQ ID NO: 9026
  Synthetic polypeptide

SEQ ID NO: 9029 - protein, 23 aa, Artificial Sequence
  Synthetic polypeptide
QVLLTVWRNWNPHTLQEARCSSA

SEQ ID NO: 9030 - protein, 23 aa, Artificial Sequence
  Synthetic polypeptide
QVLLTVWRNWNPHTLQEARCSSA

SEQ ID NO: 9031 - protein, 23 aa, Artificial Sequence
  Synthetic polypeptide
QVLLTVWRNWNPHTLQEARCSSA

SEQ ID NO: 9032 - protein, 27 aa, Artificial Sequence
  Synthetic polypeptide
GLPSHVELIGSFHYEQLVESRCHFLKQ

SEQ ID NO: 9033 - protein, 52 aa, Artificial Sequence
  Synthetic polypeptide
ISLTRSDRLIRGFRFCCCFIFLLLPPCEKCLSPPAMILRPPQPCGTNWFLPL

SEQ ID NO: 9034 - protein, 48 aa, Artificial Sequence
  Synthetic polypeptide
ILPLLLSSSLSLDKFLSFSVPVSLSRTVGPWKERSRNWPRKPICPLCL

SEQ ID NO: 9035 - protein, 48 aa, Artificial Sequence; identical to SEQ ID NO: 9034
  Synthetic polypeptide

SEQ ID NO: 9036 - protein, 48 aa, Artificial Sequence; identical to SEQ ID NO: 9034
  Synthetic polypeptide

SEQ ID NO: 9037 - protein, 48 aa, Artificial Sequence; identical to SEQ ID NO: 9034
  Synthetic polypeptide

SEQ ID NO: 9038 - protein, 48 aa, Artificial Sequence; identical to SEQ ID NO: 9034
  Synthetic polypeptide

SEQ ID NO: 9039 - protein, 48 aa, Artificial Sequence; identical to SEQ ID NO: 9034
  Synthetic polypeptide

SEQ ID NO: 9040 - protein, 67 aa, Artificial Sequence
  Synthetic polypeptide
AWTSFLAFLYLFPCLGRSGPGRNALGIGRGNRSARCVCETEKDRRPWSNLEGLSGGQTSKATKNERP

SEQ ID NO: 9041 - protein, 67 aa, Artificial Sequence; identical to SEQ ID NO: 9040
  Synthetic polypeptide

SEQ ID NO: 9042 - protein, 67 aa, Artificial Sequence; identical to SEQ ID NO: 9040
  Synthetic polypeptide

SEQ ID NO: 9043 - protein, 67 aa, Artificial Sequence; identical to SEQ ID NO: 9040
  Synthetic polypeptide

SEQ ID NO: 9044 - protein, 67 aa, Artificial Sequence; identical to SEQ ID NO: 9040
  Synthetic polypeptide

SEQ ID NO: 9045 - protein, 67 aa, Artificial Sequence; identical to SEQ ID NO: 9040
  Synthetic polypeptide

SEQ ID NO: 9046 - protein, 40 aa, Artificial Sequence
  Synthetic polypeptide
ISNSLAILFSSPSRIDPKSNHFVQPLQFLWTFVGPGCGFV

SEQ ID NO: 9047 - protein, 92 aa, Artificial Sequence
  Synthetic polypeptide
IPNPTTLYNLCSSFGPLLAQDVALFEMNQSDSKEVDSSEESSQDSSENSSESEDEDDSIPSEVTIDNIKLPNSEGGKGKIEVLDSPASKKKK

SEQ ID NO: 9048 - protein, 39 aa, Artificial Sequence
  Synthetic polypeptide
FISHSIQLSLQNRSQIQPLCTTSAVPLDLCWPRMWLCLR

SEQ ID NO: 9049 - protein, 36 aa, Artificial Sequence
  Synthetic polypeptide
ISNSLAILFSSPSRIDPKSNHFVQPLQFLWTFVGPG

SEQ ID NO: 9050 - protein, 33 aa, Artificial Sequence
  Synthetic polypeptide
FISHSIQLSLQNRSQIQPLCTTSAVPLDLCWPR

SEQ ID NO: 9051 - protein, 189 aa, Artificial Sequence
  Synthetic polypeptide
EEAGMEGQLGWQLPDCLGSPVFTPIKADISGNITKIKAVYDTNPAKFRTLQNILEVEKEMYGAEWPKVGATLALMWLKRGLRFIQVFLQSICDGERDENHPNLIRVNATKAYEMALKKYHGWIVQKIFQAALYAAPYKSDFLKALSKGQNVTEEECLEKIRLFLVNYTATIDVIYEMYTQMNAELNYKV

SEQ ID NO: 9052 - protein, 28 aa, Artificial Sequence
  Synthetic polypeptide
KRQAWRGSLDGNFQIALGPQCLLPSRQT

SEQ ID NO: 9053 - protein, 28 aa, Artificial Sequence
  Synthetic polypeptide
KRQAWRGSLDGNFQIALGPQCLLPSRQT

SEQ ID NO: 9054 - protein, 28 aa, Artificial Sequence
  Synthetic polypeptide
KRQAWRGSLDGNFQIALGPQCLLPSRQT

SEQ ID NO: 9055 - protein, 28 aa, Artificial Sequence
  Synthetic polypeptide
KRQAWRGSLDGNFQIALGPQCLLPSRQT

SEQ ID NO: 9056 - protein, 28 aa, Artificial Sequence
  Synthetic polypeptide
KRQAWRGSLDGNFQIALGPQCLLPSRQT

SEQ ID NO: 9057 - protein, 136 aa, Artificial Sequence
  Synthetic polypeptide
RGRHGGAAWMATSRLPWVPSVYSHQGRHKRQHHENQSCVRHQPSQVPDPAEHPGGGERNVWSRVAQSRGHTGADVAEKRPPLHPGLPPEHLRRGAGREPPQPHPCQRHQGLRDGPQEVPWLDRAEDLPGSTVRSTL

SEQ ID NO: 9058 - protein, 170 aa, Artificial Sequence
  Synthetic polypeptide
EEAGMEGQLGWQLPDCLGSPVFTPIKADISGNITKIKAVYDTNPAKFRTLQNILEVEKEIGLRFIQVFLQSICDGERDENHPNLIRVNATKAYEMALKKYHGWIVQKIFQAALYAAPYKSDFLKALSKGQNVTEEECLEKIRLFLVNYTATIDVIYEMYTQMNAELNYKV

SEQ ID NO: 9059 - protein, 117 aa, Artificial Sequence
  Synthetic polypeptide
RGRHGGAAWMATSRLPWVPSVYSHQGRHKRQHHENQSCVRHQPSQVPDPAEHPGGGERNRPPLHPGLPPEHLRRGAGREPPQPHPCQRHQGLRDGPQEVPWLDRAEDLPGSTVRSTL

SEQ ID NO: 9060 - protein, 131 aa, Artificial Sequence
  Synthetic polypeptide
EEAGMEGQLGWQLPDCLGSPVFTPIKADISGNITKIKAVYDTNPAKFRTLQNILEVEKEMYGAEWPKVGATLALMWLKRASATGSGTRTTPTSSVSTPPRPTRWPSRSTMAGSCRRSSRQHCTQHPISLTS

SEQ ID NO: 9061 - protein, 178 aa, Artificial Sequence
  Synthetic polypeptide
RGRHGGAAWMATSRLPWVPSVYSHQGRHKRQHHENQSCVRHQPSQVPDPAEHPGGGERNVWSRVAQSRGHTGADVAEKSICDGERDENHPNLIRVNATKAYEMALKKYHGWIVQKIFQAALYAAPYKSDFLKALSKGQNVTEEECLEKIRLFLVNYTATIDVIYEMYTQMNAELNYKV

SEQ ID NO: 9062 - protein, 47 aa, Artificial Sequence
  Synthetic polypeptide
EEAGMEGQLGWQLPDCLGSPVFTPIKADISGNITMRKLRLRGVEGLA

SEQ ID NO: 9063 - protein, 47 aa, Artificial Sequence; identical to SEQ ID NO: 9062
  Synthetic polypeptide

SEQ ID NO: 9064 - protein, 42 aa, Artificial Sequence
  Synthetic polypeptide
RGRHGGAAWMATSRLPWVPSVYSHQGRHKRQHHDEEAETQRG

SEQ ID NO: 9065 - protein, 42 aa, Artificial Sequence; identical to SEQ ID NO: 9064
  Synthetic polypeptide

SEQ ID NO: 9066 - protein, 78 aa, Artificial Sequence
  Synthetic polypeptide
SRVATTSTPQPPALASQSAQSAASARPPPRLGSEERLCLAAHRLGCEEPLCLAAQSGNSNDMSINFEARVQFSKRSIR

SEQ ID NO: 9067 - protein, 78 aa, Artificial Sequence; identical to SEQ ID NO: 9066
  Synthetic polypeptide

SEQ ID NO: 9068 - protein, 78 aa, Artificial Sequence; identical to SEQ ID NO: 9066
  Synthetic polypeptide

SEQ ID NO: 9069 - protein, 32 aa, Artificial Sequence
  Synthetic polypeptide
EVRSVSAWPPIVWDVRSPSAWLPSLEIQTICQ

SEQ ID NO: 9070 - protein, 32 aa, Artificial Sequence; identical to SEQ ID NO: 9069
  Synthetic polypeptide

SEQ ID NO: 9071 - protein, 32 aa, Artificial Sequence; identical to SEQ ID NO: 9069
  Synthetic polypeptide

SEQ ID NO: 9072 - protein, 291 aa, Artificial Sequence
  Synthetic polypeptide
GAPLPGCPVWKFKRYVNKLRSKSTVFKKKHQIIAELKAEFGLLQRTEELLKQRHENIQQQLQTMEEKKGISGYSYTQEELERVSALKSEVDEMKGRTLDDMSEMVKKLYSLVSEKKSALASVIKELRQLRQKYQELTQECDEKKSQYDSCAAGLESNRSKLEQEVRRLREECLQEESRYHYTNCMIKNLEVQLRRATDEMKAYISSDQQEKRKAIREQYTKNTAEQENLGKKLREKQKVIRESHGPNMKQAKMWRDLEQLMECKKQCFLKQQSQTSIGQVIQEGGEDRLIL

SEQ ID NO: 9073 - protein, 291 aa, Artificial Sequence; identical to SEQ ID NO: 9072
  Synthetic polypeptide

SEQ ID NO: 9074 - protein, 269 aa, Artificial Sequence
  Synthetic polypeptide
GAPLPGCPVWKFKRYVNKLRSKSTVFKKKHQIIAELKAEFGLLQRTEELLKQRHENIQQQLQTMEEKKGISGYSYTQEELERVSALKSEVDEMKGRTLDDMSEMVKKLYSLVSEKKSALASVIKELRQLRQKYQELTQECDEKKSQYDSCAAGLESNRSKLEQEVRRLREECLQEESRYHYTNCMIKNLEVQLRRATDEMKAYISSDQQEKRKAIREQYTKNTAEQENLGKRRNLTLLPRLECSGTILAHSAFQYRWDFTMLARLVSNS

SEQ ID NO: 9075 - protein, 19 aa, Artificial Sequence
  Synthetic polypeptide
GASPPGSRPVREGVQTICQ

SEQ ID NO: 9076 - protein, 19 aa, Artificial Sequence
  Synthetic polypeptide
GASPPGSRPVREGVQTICQ

SEQ ID NO: 9077 - protein, 19 aa, Artificial Sequence
  Synthetic polypeptide
GASPPGSRPVREGVQTICQ

SEQ ID NO: 9078 - protein, 321 aa, Artificial Sequence
  Synthetic polypeptide
EVRSVSAWPPIVWDVRSPSAWLPSLESEERLRPAAAPSGREFKRYVNKLRSKSTVFKKKHQIIAELKAEFGLLQRTEELLKQRHENIQQQLQTMEEKKGISGYSYTQEELERVSALKSEVDEMKGRTLDDMSEMVKKLYSLVSEKKSALASVIKELRQLRQKYQELTQECDEKKSQYDSCAAGLESNRSKLEQEVRRLREECLQEESRYHYTNCMIKNLEVQLRRATDEMKAYISSDQQEKRKAIREQYTKNTAEQENLGKKLREKQKVIRESHGPNMKQAKMWRDLEQLMECKKQCFLKQQSQTSIGQVIQEGGEDRLIL

SEQ ID NO: 9079 - protein, 321 aa, Artificial Sequence; identical to SEQ ID NO: 9078
  Synthetic polypeptide

SEQ ID NO: 9080 - protein, 46 aa, Artificial Sequence
  Synthetic polypeptide
GAPLPGCPVWKVRSVSARQPPRPGGSSNDMSINFEARVQFSKRSIR

SEQ ID NO: 9081 - protein, 46 aa, Artificial Sequence; identical to SEQ ID NO: 9080
  Synthetic polypeptide

SEQ ID NO: 9082 - protein, 46 aa, Artificial Sequence; identical to SEQ ID NO: 9080
  Synthetic polypeptide

SEQ ID NO: 9083 - protein, 299 aa, Artificial Sequence
  Synthetic polypeptide
EVRSVSAWPPIVWDVRSPSAWLPSLESEERLRPAAAPSGREFKRYVNKLRSKSTVFKKKHQIIAELKAEFGLLQRTEELLKQRHENIQQQLQTMEEKKGISGYSYTQEELERVSALKSEVDEMKGRTLDDMSEMVKKLYSLVSEKKSALASVIKELRQLRQKYQELTQECDEKKSQYDSCAAGLESNRSKLEQEVRRLREECLQEESRYHYTNCMIKNLEVQLRRATDEMKAYISSDQQEKRKAIREQYTKNTAEQENLGKRRNLTLLPRLECSGTILAHSAFQYRWDFTMLARLVSNS

SEQ ID NO: 9084 - protein, 64 aa, Artificial Sequence
  Synthetic polypeptide
GASPPGSRPVREGGGGQPPPGQPPCPGGRWGGQPPTRPAAPSRSSNDMSINFEARVQFSKRSIR

SEQ ID NO: 9085 - protein, 64 aa, Artificial Sequence; identical to SEQ ID NO: 9084
  Synthetic polypeptide

SEQ ID NO: 9086 - protein, 64 aa, Artificial Sequence; identical to SEQ ID NO: 9084
  Synthetic polypeptide

SEQ ID NO: 9087 - protein, 77 aa, Artificial Sequence
  Synthetic polypeptide
EVRSVSAWPPIVWDVRSPSAWLPSLESEERLRPAAAPSGREVGVSPRQASRPVQEGGGGVSPPPGQPPRPGVQTICQ

SEQ ID NO: 9088 - protein, 77 aa, Artificial Sequence; identical to SEQ ID NO: 9087
  Synthetic polypeptide

SEQ ID NO: 9089 - protein, 77 aa, Artificial Sequence; identical to SEQ ID NO: 9087
  Synthetic polypeptide

SEQ ID NO: 9090 - protein, 336 aa, Artificial Sequence
  Synthetic polypeptide
GAPLPGCPVWKVRSVSARQPPRPGGRWGSAPARPAALSRREVGGSAPHPASRPVQEFKRYVNKLRSKSTVFKKKHQIIAELKAEFGLLQRTEELLKQRHENIQQQLQTMEEKKGISGYSYTQEELERVSALKSEVDEMKGRTLDDMSEMVKKLYSLVSEKKSALASVIKELRQLRQKYQELTQECDEKKSQYDSCAAGLESNRSKLEQEVRRLREECLQEESRYHYTNCMIKNLEVQLRRATDEMKAYISSDQQEKRKAIREQYTKNTAEQENLGKKLREKQKVIRESHGPNMKQAKMWRDLEQLMECKKQCFLKQQSQTSIGQVIQEGGEDRLIL

SEQ ID NO: 9091 - protein, 336 aa, Artificial Sequence; identical to SEQ ID NO: 9090
  Synthetic polypeptide

SEQ ID NO: 9092 - protein, 314 aa, Artificial Sequence
  Synthetic polypeptide
GAPLPGCPVWKVRSVSARQPPRPGGRWGSAPARPAALSRREVGGSAPHPASRPVQEFKRYVNKLRSKSTVFKKKHQIIAELKAEFGLLQRTEELLKQRHENIQQQLQTMEEKKGISGYSYTQEELERVSALKSEVDEMKGRTLDDMSEMVKKLYSLVSEKKSALASVIKELRQLRQKYQELTQECDEKKSQYDSCAAGLESNRSKLEQEVRRLREECLQEESRYHYTNCMIKNLEVQLRRATDEMKAYISSDQQEKRKAIREQYTKNTAEQENLGKRRNLTLLPRLECSGTILAHSAFQYRWDFTMLARLVSNS

SEQ ID NO: 9093 - protein, 27 aa, Artificial Sequence
  Synthetic polypeptide
HITETSGKTKSYTRKSWSKYETSKNVA

SEQ ID NO: 9094 - protein, 27 aa, Artificial Sequence
  Synthetic polypeptide
HITETSGKTKSYTRKSWSKYETSKNVA

SEQ ID NO: 9095 - protein, 61 aa, Artificial Sequence
  Synthetic polypeptide
QKLREKQKVIRESHGPNMKQAKMWRDLEQLMECKKQCFLKQQSQTSIGQVIQEGGEDRLIL

SEQ ID NO: 9096 - protein, 61 aa, Artificial Sequence; identical to SEQ ID NO: 9095
  Synthetic polypeptide

SEQ ID NO: 9097 - protein, 31 aa, Artificial Sequence
  Synthetic polypeptide
PVFHLKLQAYLTYNRNFGKNKKLYEKVMVQI

SEQ ID NO: 9098 - protein, 31 aa, Artificial Sequence; identical to SEQ ID NO: 9097
  Synthetic polypeptide

SEQ ID NO: 9099 - protein, 48 aa, Artificial Sequence
  Synthetic polypeptide
VMGSNMEDGNMLQPIVSCKEASAAALHQETQARQPGVSSRRARGACCP

SEQ ID NO: 9100 - protein, 48 aa, Artificial Sequence; identical to SEQ ID NO: 9099
  Synthetic polypeptide

SEQ ID NO: 9101 - protein, 48 aa, Artificial Sequence; identical to SEQ ID NO: 9099
  Synthetic polypeptide

SEQ ID NO: 9102 - protein, 48 aa, Artificial Sequence; identical to SEQ ID NO: 9099
  Synthetic polypeptide

SEQ ID NO: 9103 - protein, 48 aa, Artificial Sequence; identical to SEQ ID NO: 9099
  Synthetic polypeptide

SEQ ID NO: 9104 - protein, 455 aa, Artificial Sequence
  Synthetic polypeptide
WAVTWKMGICYNPSFLVKKHLLQLCTKRLRLDNLVFHPEEPEVLAVLDWELSTLGDPLADVAYSCLAHYLPSSFPVLRGINDCDLTQLGIPAAEEYFRMYCLQMGLPPTENWNFYMAFSFFRVAAILQGVYKRSLTGQASSTYAEQTGKLTEFVSNLAWDFAVKEGFRVFKEMPFTNPLTRSYHTWARPQSQWCPTGSRSYSSVPEASPAHTSRGGLVISPESLSPPVRELYHRLKHFMEQRVYPAEPELQSHQASAARWSPSPLIEDLKEKAKAEGLWNLFLPLEADPEKKYGAGLTNVEYAHLCELMGTSLYAPEVCNCSAPDTGNMELLVRYGTEAQKARWLIPLLEGKARSCFAMTEPQVASSDATNIEASIREEDSFYVINGHKWWITGILDPRCQLCVFMGKTDPHAPRHRQQSVLLVPMDTPGIKIIRPLTVYGLEDAPGCFLPSFSL

SEQ ID NO: 9105 - protein, 59 aa, Artificial Sequence
  Synthetic polypeptide
RSICCSFAPRDSGSTTWCFIQKSQRCLLSLTGNFLPWATPLLMWPTAAWLITCHPVFPC

SEQ ID NO: 9106 - protein, 59 aa, Artificial Sequence; identical to SEQ ID NO: 9105
  Synthetic polypeptide

SEQ ID NO: 9107 - protein, 59 aa, Artificial Sequence; identical to SEQ ID NO: 9105
  Synthetic polypeptide

SEQ ID NO: 9108 - protein, 59 aa, Artificial Sequence; identical to SEQ ID NO: 9105
  Synthetic polypeptide

SEQ ID NO: 9109 - protein, 275 aa, Artificial Sequence
  Synthetic polypeptide
WAVTWKMGICYNPSFLVKKHLLQLCTKRLRLDNLVFHPEEPEVLAVLDWELSTLGDPLADVAYSCLAHYLPSSFPVLRGINDCDLTQLGIPAAEEYFRMYCLQMGLPPTENWNFYMAFSFFRVAAILQGVYKRSLTGQASSTYAEQTGKLTEFVSNLAWDFAVKEGFRVFKEMPFTNPLTRSYHTWARPQSQWCPTGSRSYSSVPEASPAHTSRGGLVISPESLSPPVRELYHRLKHFMEQRVYPAEPELQSHQASAARWSPSPLIEDLKVKQPW

SEQ ID NO: 9110 - protein, 624 aa, Artificial Sequence
  Synthetic polypeptide
WAVTWKMGICYNPSFLVKKHLLQLCTKRLRLDNLVFHPEEPEVLAVLDWELSTLGDPLADVAYSCLAHYLPSSFPVLRGINDCDLTQLGIPAAEEYFRMYCLQMGLPPTENWNFYMAFSFFRVAAILQGVYKRSLTGQASSTYAEQTGKLTEFVSNLAWDFAVKEGFRVFKEMPFTNPLTRSYHTWARPQSQWCPTGSRSYSSVPEASPAHTSRGGLVISPESLSPPVRELYHRLKHFMEQRVYPAEPELQSHQASAARWSPSPLIEDLKEKAKAEGLWNLFLPLEADPEKKYGAGLTNVEYAHLCELMGTSLYAPEVCNCSAPDTGNMELLVRYGTEAQKARWLIPLLEGKARSCFAMTEPQVASSDATNIEASIREEDSFYVINGHKWWITGILDPRCQLCVFMGKTDPHAPRHRQQSVLLVPMDTPGIKIIRPLTVYGLEDAPGGHGEVRFEHVRVPKENMVLGPGRGFEIAQGRLGPGRIHHCMRLIGFSERALALMKARVKSRLAFGKPLVEQGTVLADIAQSRVEIEQARLLVLRAAHLMDLAGNKAAALDIAMIKMVAPSMASRVIDRAIQAFGAAGLSSDYPLAQFFTWARALRFADGPDEVHRATVAKLELKHRI

SEQ ID NO: 9111 - protein, 624 aa, Artificial Sequence; identical to SEQ ID NO: 9110
  Synthetic polypeptide

SEQ ID NO: 9112 - protein, 71 aa, Artificial Sequence
  Synthetic polypeptide
WAVTWKMGICYNPSFLVKKHLLQLCTKRLRLDNLVFHPEEPEVLAVLDWELSTLGDPLADVAYSCLAHYLP

SEQ ID NO: 9113 - protein, 54 aa, Artificial Sequence
  Synthetic polypeptide
RSICCSFAPRDSGSTTWCFIQKSQRCLLSLTGNFLPWATPLLMWPTAAWLITCH

SEQ ID NO: 9114 - protein, 32 aa, Artificial Sequence
  Synthetic polypeptide
TCMCLRIQQPYYLGAYLRGDPRTCTSSSTCTG

SEQ ID NO: 9115 - protein, 32 aa, Artificial Sequence; identical to SEQ ID NO: 9114
  Synthetic polypeptide

SEQ ID NO: 9116 - protein, 32 aa, Artificial Sequence; identical to SEQ ID NO: 9114
  Synthetic polypeptide

SEQ ID NO: 9117 - protein, 62 aa, Artificial Sequence
  Synthetic polypeptide
CRWRHALGHKLTSTCGVEPACALGSSSPTTWVHTLEVTHGHAQAHLHALDEHGGELLRPLRV

SEQ ID NO: 9118 - protein, 62 aa, Artificial Sequence; identical to SEQ ID NO: 9117
  Synthetic polypeptide

SEQ ID NO: 9119 - protein, 435 aa, Artificial Sequence
  Synthetic polypeptide
PTDMHKLIYMHWMNTVVNYCGPFEYEVGYCERLKSFLEANLEWMQEEMESNPDSPYWHQVRLTLLQLKGLEDSYEGRVSFPAGKFTIKPLGFLLLQLSGDLEDLELALNKTKIKPSLGSGSCSALIKLLPGQSDLLVAHNTWNNYQHMLRVIKKYWLQFREGPWGDYPLVPGNKLVFSSYPGTIFSCDDFYILGSGLVTLETTIGNKNPALWKYVRPRGCVLEWVRNIVANRLASDGATWADIFKRFNSGTGMVVVADKTSELYQKTYWASYNIPSFETVFNASGLQALVAQYGDWFSYDGSPRAQIFRRNQSLVQDMDSMVRLMRYNDFLHDPLSLCKACNPQPNGENAISARSDLNPANGSYPFQALRQRSHGGIDVKVTSMSLARILSLLAASGPTWDQVPPFQWSTSPFSGLLHMGQPDLWKFAPVKVSWD

SEQ ID NO: 9120 - protein, 467 aa, Artificial Sequence
  Synthetic polypeptide
PTDMHKLIYMHWMNTVVNYCGPFEYEVGYCERLKSFLEANLEWMQEEMESNPDSPYWHQVRLTLLQLKGLEDSYEGRVSFPAGKFTIKPLGFLLLQLSGDLEDLELALNKTKIKPSLGSGSCSALIKLLPGQSDLLVAHNTWNNYQHMLRVIKKYWLQFREGPWGDYPLVPGNKLVFSSYPGTIFSCDDFYILGSGLVTLETTIGNKNPALWKYVRPRGCVLEWVRNIVANRLASDGATWADIFKRFNSGTYNNQWMIVDYKAFIPGGPSPGSRVLTILEQIPGMVVVADKTSELYQKTYWASYNIPSFETVFNASGLQALVAQYGDWFSYDGSPRAQIFRRNQSLVQDMDSMVRLMRYNDFLHDPLSLCKACNPQPNGENAISARSDLNPANGSYPFQALRQRSHGGIDVKVTSMSLARILSLLAASGPTWDQVPPFQWSTSPFSGLLHMGQPDLWKFAPVKVSWD

SEQ ID NO: 9121 - protein, 50 aa, Artificial Sequence
  Synthetic polypeptide
CRWRHALGHKLTSTCGVEPACALGSSSPTTWVHTLEVTHGHAQAHLHALD

SEQ ID NO: 9122 - protein, 13 aa, Artificial Sequence
  Synthetic polypeptide
PTDMHKLIYMHWM

SEQ ID NO: 9123 - protein, 62 aa, Artificial Sequence
  Synthetic polypeptide
QGSPTPVHALLGTRPHSMRFVLEQYNALSWLTCNPATQDRTSCLPVHFVVLTQLYNAIMNIL

SEQ ID NO: 9124 - protein, 47 aa, Artificial Sequence
  Synthetic polypeptide
EPGPTACGLFWSSTTLCPGSRAIRPPRTVLPAFPSTLWCSLSCTMPS

SEQ ID NO: 9125 - protein, 62 aa, Artificial Sequence
  Synthetic polypeptide
GVPNPRPCLVRNQAPQHAVCFGAVQRSVLAHVQSGHPGPYFLPSRPLCGAHSVVQCHHEYTL

SEQ ID NO: 9126 - protein, 128 aa, Artificial Sequence
  Synthetic polypeptide
RVGQQGICKENFNNVPDLELNPIRSKIVRAFFDNRNLRKGPSGLADEINFEDFLTIMSYFRPIDTTMDEEQVELSRKEKLRFLFHMYDSDSDGRITLEEYRNVKWSRSCCRETLTSRRSPLAPSPTGP

SEQ ID NO: 9127 - protein, 53 aa, Artificial Sequence
  Synthetic polypeptide
ESGSRVSARRTSTMSRTWSSTPSDPKLFVPSSTTGTCARDPVAWLMRSISRTS

SEQ ID NO: 9128 - protein, 53 aa, Artificial Sequence; identical to SEQ ID NO: 9127
  Synthetic polypeptide

SEQ ID NO: 9129 - protein, 53 aa, Artificial Sequence; identical to SEQ ID NO: 9127
  Synthetic polypeptide

SEQ ID NO: 9130 - protein, 53 aa, Artificial Sequence; identical to SEQ ID NO: 9127
  Synthetic polypeptide

SEQ ID NO: 9131 - protein, 44 aa, Artificial Sequence
  Synthetic polypeptide
SRAAGYLQGELQQCPGPGAQPHPIQNCSCLLRQQEPAQGTQWPG

SEQ ID NO: 9132 - protein, 44 aa, Artificial Sequence; identical to SEQ ID NO: 9131
  Synthetic polypeptide

SEQ ID NO: 9133 - protein, 44 aa, Artificial Sequence; identical to SEQ ID NO: 9131
  Synthetic polypeptide

SEQ ID NO: 9134 - protein, 44 aa, Artificial Sequence; identical to SEQ ID NO: 9131
  Synthetic polypeptide

SEQ ID NO: 9135 - protein, 179 aa, Artificial Sequence
  Synthetic polypeptide
RVGQQGICKENFNNVPDLELNPIRSKIVRAFFDNRNLRKGPSGLADEINFEDFLTIMSYFRPIDTTMDEEQVELSRKEKLRFLFHMYDSDSDGRITLEEYRNVVEELLSGNPHIEKESARSIADGAMMEAASVCMGQMEPDQVYEGITFEDFLKIWQGIDIETKMHVRFLNMETMALCH

SEQ ID NO: 9136 - protein, 179 aa, Artificial Sequence; identical to SEQ ID NO: 9135
  Synthetic polypeptide

SEQ ID NO: 9137 - protein, 100 aa, Artificial Sequence
  Synthetic polypeptide
RVGQQGICKENFNNVPDLELNPIRSKIVRAFFDNRNLRKGPSGLADEINFEDFLTIMSYFRPIDTTMDEEQVELSRKEKLRSCGFLGLEGGCAVDVKQGP

SEQ ID NO: 9138 - protein, 17 aa, Artificial Sequence
  Synthetic polypeptide
VSFSEDNQASVFSKLPS

SEQ ID NO: 9139 - protein, 17 aa, Artificial Sequence
  Synthetic polypeptide
VSFSEDNQASVFSKLPS

SEQ ID NO: 9140 - protein, 17 aa, Artificial Sequence
  Synthetic polypeptide
VSFSEDNQASVFSKLPS

SEQ ID NO: 9141 - protein, 72 aa, Artificial Sequence
  Synthetic polypeptide
HSRQIKSASRRTTRHPYSLSSPVDFPSSVRIHLLTKMADIEYRLSVGTNEKIQLSSLIAAFQVTRDLIVAEA

SEQ ID NO: 9142 - protein, 72 aa, Artificial Sequence; identical to SEQ ID NO: 9141
  Synthetic polypeptide

SEQ ID NO: 9143 - protein, 72 aa, Artificial Sequence; identical to SEQ ID NO: 9141
  Synthetic polypeptide

SEQ ID NO: 9144 - protein, 14 aa, Artificial Sequence
  Synthetic polypeptide
APQLTFHLQFEYIY

SEQ ID NO: 9145 - protein, 14 aa, Artificial Sequence
  Synthetic polypeptide
APQLTFHLQFEYIY

SEQ ID NO: 9146 - protein, 14 aa, Artificial Sequence
  Synthetic polypeptide
APQLTFHLQFEYIY

SEQ ID NO: 9147 - protein, 43 aa, Artificial Sequence
  Synthetic polypeptide
GQSLSKILDVASLEVLNEVNRRSLKKLASQADSTEQVDDTILT

SEQ ID NO: 9148 - protein, 15 aa, Artificial Sequence
  Synthetic polypeptide
ASPSPRSWMWPVWRC

SEQ ID NO: 9149 - protein, 18 aa, Artificial Sequence
  Synthetic polypeptide
PVPLQDPGCGQFGGAERG

SEQ ID NO: 9150 - protein, 32 aa, Artificial Sequence
  Synthetic polypeptide
VVSSMSGRRRQRHQPSGRVAVPQNDQVRDPGE

SEQ ID NO: 9151 - protein, 32 aa, Artificial Sequence; identical to SEQ ID NO: 9150
  Synthetic polypeptide

SEQ ID NO: 9152 - protein, 36 aa, Artificial Sequence
  Synthetic polypeptide
ITFIIYCFSLPLGCKLHEWPPPTAASALGPCGSSAK

SEQ ID NO: 9153 - protein, 36 aa, Artificial Sequence; identical to SEQ ID NO: 9152
  Synthetic polypeptide

SEQ ID NO: 9154 - protein, 44 aa, Artificial Sequence
  Synthetic polypeptide
GHARWLTPVIPALWEAKPFPWGDGNHTLFHNPHVNPLPTGYEDE

SEQ ID NO: 9155 - protein, 24 aa, Artificial Sequence
  Synthetic polypeptide
SQHFGRPSRFPGEMVTILYSITLM

SEQ ID NO: 9156 - protein, 23 aa, Artificial Sequence
  Synthetic polypeptide
PCAVAHACNPSTLGGQAVSLGRW

SEQ ID NO: 9157 - protein, 8 aa, Artificial Sequence
  Synthetic polypeptide
LRSSHLEG

SEQ ID NO: 9158 - protein, 64 aa, Artificial Sequence
  Synthetic polypeptide
SKRITSKASSSGPHIWKGETSYIRVYPERSTSYGYSRSRSGSRGRDSPYQSRGSPHYFSPFRPY

SEQ ID NO: 9159 - protein, 60 aa, Artificial Sequence
  Synthetic polypeptide
RLKHLAQVLTSGRVKLPTSEFILREAPAMATHGLGLGQGAVTLHTKAGVPHTTSLLSGPT

SEQ ID NO: 9160 - protein, 16 aa, Artificial Sequence
  Synthetic polypeptide
TRKHGNGAPKSCGSPG

SEQ ID NO: 9161 - protein, 16 aa, Artificial Sequence
  Synthetic polypeptide
TRKHGNGAPKSCGSPG

SEQ ID NO: 9162 - protein, 59 aa, Artificial Sequence
  Synthetic polypeptide
CCCEDERESTGTGRQNHAGALGRARQVWEGEVCCAADVWGHHTHPGGEDELHRPILAWI

SEQ ID NO: 9163 - protein, 59 aa, Artificial Sequence; identical to SEQ ID NO: 9162
  Synthetic polypeptide

SEQ ID NO: 9164 - protein, 303 aa, Artificial Sequence
  Synthetic polypeptide
RMEMIIVLLHNVAVRMNEKARERGAKIMREPWVEQDKFGKVKFAVLQTYGDTTHTLVEKMNYIGQFLPGYEAPAFMDPLLPKLPKCSLEMIDHIVGNQPDQEMVSASEWYLKNLQFHRFWSVDDTQVHTEYSSLRSIVVANYEESIKMPINEPAPGKKKSQIQEYVDYNGGAGVQHIALKTEDIITAIRHLRERGLEFLSVPSTYYKQLREKLKTAKIKVKENIDALEELKILVDYDEKGYLLQIFTKPVQDRPTLFLEVIQRHNHQGFGAGNFNSLFKAFEEEQNLRGNLTNMETNGVVPGM

SEQ ID NO: 9165 - protein, 303 aa, Artificial Sequence; identical to SEQ ID NO: 9164
  Synthetic polypeptide

SEQ ID NO: 9166 - protein, 29 aa, Artificial Sequence
  Synthetic polypeptide
SLQIQSVRSRARLSRKHGNGAPKSCGSPG

SEQ ID NO: 9167 - protein, 29 aa, Artificial Sequence
  Synthetic polypeptide
SLQIQSVRSRARLSRKHGNGAPKSCGSPG

SEQ ID NO: 9168 - protein, 66 aa, Artificial Sequence
  Synthetic polypeptide
AYRFRVCVPEPGSPESTGTGRQNHAGALGRARQVWEGEVCCAADVWGHHTHPGGEDELHRPILAWI

SEQ ID NO: 9169 - protein, 66 aa, Artificial Sequence; identical to SEQ ID NO: 9168
  Synthetic polypeptide

SEQ ID NO: 9170 - protein, 299 aa, Artificial Sequence
  Synthetic polypeptide
PTDSECAFQSQALQKARERGAKIMREPWVEQDKFGKVKFAVLQTYGDTTHTLVEKMNYIGQFLPGYEAPAFMDPLLPKLPKCSLEMIDHIVGNQPDQEMVSASEWYLKNLQFHRFWSVDDTQVHTEYSSLRSIVVANYEESIKMPINEPAPGKKKSQIQEYVDYNGGAGVQHIALKTEDIITAIRHLRERGLEFLSVPSTYYKQLREKLKTAKIKVKENIDALEELKILVDYDEKGYLLQIFTKPVQDRPTLFLEVIQRHNHQGFGAGNFNSLFKAFEEEQNLRGNLTNMETNGVVPGM

SEQ ID NO: 9171 - protein, 299 aa, Artificial Sequence; identical to SEQ ID NO: 9170
  Synthetic polypeptide

SEQ ID NO: 9172 - protein, 37 aa, Artificial Sequence
  Synthetic polypeptide
ASPQIQSKLVVFKAWRETEWLLNSMKRGIHWLTVPHF

SEQ ID NO: 9173 - protein, 37 aa, Artificial Sequence; identical to SEQ ID NO: 9172
  Synthetic polypeptide

SEQ ID NO: 9174 - protein, 45 aa, Artificial Sequence
  Synthetic polypeptide
KTPDTKVTCCMMPFLWNVQHRQVHRYRVNWWFSRPGERRSGCLIV

SEQ ID NO: 9175 - protein, 45 aa, Artificial Sequence; identical to SEQ ID NO: 9174
  Synthetic polypeptide

SEQ ID NO: 9176 - protein, 39 aa, Artificial Sequence
  Synthetic polypeptide
ASPQIQSKLVVFKAWRETEWLLNRPSTSLWESLASPSFT

SEQ ID NO: 9177 - protein, 39 aa, Artificial Sequence; identical to SEQ ID NO: 9176
  Synthetic polypeptide

SEQ ID NO: 9178 - protein, 53 aa, Artificial Sequence
  Synthetic polypeptide
KTPDTKVTCCMMPFLWNVQHRQVHRYRVNWWFSRPGERRSGCLIDLQQACGKV

SEQ ID NO: 9179 - protein, 53 aa, Artificial Sequence; identical to SEQ ID NO: 9178
  Synthetic polypeptide

SEQ ID NO: 9180 - protein, 661 aa, Artificial Sequence
  Synthetic polypeptide
ASPQIQSKLVVFKAWRETEWLLNSYIVTGDIKGNIKFYDHTLSIVNWYSHLKLGAIRTLSFSKTPATPPTEKSNYPPDCTLKGDLFVLRNFIIGTSDAAVYHLTTDGTKLEKLFVEPKDAICAISCHPYQPLIAIGSICGMIKVWNYENKQYLFSRVFEKGLGVQSLTYNPEGALLGAGFTEGTVYILDAMSLENESPEPFKYSRTSVTHISFSHDSQYMATADRSFTVAVYMLVVRNGQRVWEYLARLRSHRKSIRSLLFGVYLDSNEPRLLSLGTDRLLIEYDLLRSYKDHLEVLDIHHTDQGCYPTCMVWYPPLTRELFLLICNSGYKVKLFNATTKMCRKTLLGPAYGSPIEQTQVLPVRSMAELQKRYLVFINRDKVGLQILPVDGNPHKTSAIVCHPNGVAGMAVSYDGCYAFTAGGHDRSVVQWKITLSVLEAAVSLGGEDLTPFYGLLSGGREGKFYRELEDYFYYSQLRSQGIDTMETRKVSEHICLSELPFVMRAIGFYPSEEKIDDIFNEIKFGEYVDTGKLIDKINLPDFLKVYLNHKPPFGNTMSGIHKSFEVLGYTNSKGKKAIRREDFLRLLVTKGEHMTEEEMLDCFASLFGLNPEGWKSEPATCSVKGSEICLEEELPDEITAEIFATEILGLTISEDSGQDGQ

SEQ ID NO: 9181 - protein, 71 aa, Artificial Sequence
  Synthetic polypeptide
KTPDTKVTCCMMPFLWNVQHRQVHRYRVNWWFSRPGERRSGCLIATLSQVTLRGTLSSMITPCLLLTGTVT

SEQ ID NO: 9182 - protein, 71 aa, Artificial Sequence; identical to SEQ ID NO: 9181
  Synthetic polypeptide

SEQ ID NO: 9183 - protein, 453 aa, Artificial Sequence
  Synthetic polypeptide
ASPQIQSKLVVFKAWRETEWLLNSYIVTGDIKGNIKFYDHTLSIVNWYSHLKLGAIRTLSFSKTPATPPTEKSNYPPDCTLKGDLFVLRNFIIGTSDAAVYHLTTDGTKLEKLFVEPKDAICAISCHPYQPLIAIGSICGMIKVWNYENKQYLFSRVFEKGLGVQSLTYNPEGALLGAGFTEGTVYILDAMSLENESPEPFKYSRTSVTHISFSHDSQYMATADRSFTVAVYMLVVRNGQRVWEYLARLRSHRKSIRSLLFGVYLDSNEPRLLSLGTDRLLIEYDLLRSYKDHLEVLDIHHTDQGCYPTCMVWYPPLTRELFLLICNSGYKVKLFNATTKMCRKTLLGPAYGSPIEQTQVLPVRSMAELQKRYLVFINRDKVGLQILPVDGNPHKTSAIVCHPNGVAGMAVSYDGCYAFTAGGHDRSVVQWKITLSHPGSQAPILSPSDTSRS

SEQ ID NO: 9184 - protein, 108 aa, Artificial Sequence
  Synthetic polypeptide
GASLPGRPSSEMWGAPLPRRPIWDVRSASARPRPRLGGEHMTEEEMLDCFASLFGLNPEGWKSEPATCSVKGSEICLEEELPDEITAEIFATEILGLTISEDSGQDGQ

SEQ ID NO: 9185 - protein, 15 aa, Artificial Sequence
  Synthetic polypeptide
GVPLPGRDPVWEVSI

SEQ ID NO: 9186 - protein, 27 aa, Artificial Sequence
  Synthetic polypeptide
DVGSASAPPPHLGCEECLCPAETPSGR

SEQ ID NO: 9187 - protein, 148 aa, Artificial Sequence
  Synthetic polypeptide
EIDDIFNEIKFGEYVDTGKLIDKINLPDFLKVYLNHKPPFGNTMSGIHKSFEVLGYTNSKGKKAIRREDFLRLLVTKGEHMTEEEMLDCFASLFGLNPEGWKSEPATCSVKGSEICLEEELPDEITAEIFATEILGLTISEDSGQDGQ

SEQ ID NO: 9188 - protein, 68 aa, Artificial Sequence
  Synthetic polypeptide
GASLPGRPSSEMWGAPLPRRPIWDVRSASARPRPRLGGEERLCPAAPSEKLMIYLTKSNLVNMWTLES

SEQ ID NO: 9189 - protein, 25 aa, Artificial Sequence
  Synthetic polypeptide
GVPLPGRDPVWEVRSVSARPPRLRN

SEQ ID NO: 9190 - protein, 4 aa, Artificial Sequence
  Synthetic polypeptide
EVSI

SEQ ID NO: 9191 - protein, 38 aa, Artificial Sequence
  Synthetic polypeptide
GVPLPGRDPVWEVRSVSARPPRLRSEETLCLATTPSEK

SEQ ID NO: 9192 - protein, 85 aa, Artificial Sequence
  Synthetic polypeptide
EVRRPSAWQPPRLRSEHMTEEEMLDCFASLFGLNPEGWKSEPATCSVKGSEICLEEELPDEITAEIFATEILGLTISEDSGQDGQ

SEQ ID NO: 9193 - protein, 66 aa, Artificial Sequence
  Synthetic polypeptide
EVRSPSARPAPRPGGRWGGQPPARPAAPSGREVGGVSPPARPAAPSGRLMIYLTKSNLVNMWTLES

SEQ ID NO: 9194 - protein, 46 aa, Artificial Sequence
  Synthetic polypeptide
GAPLPGQHPVREGGGGVSPPPGQPPRPGGRWGGSAPPPGQPPRPGD

SEQ ID NO: 9195 - protein, 208 aa, Artificial Sequence
  Synthetic polypeptide
EVRRPSAWQPPRLRSEEPLCPASTPSGREVGGSAPRPASRPVREGGGGGQPPRPASRPVREIDDIFNEIKFGEYVDTGKLIDKINLPDFLKVYLNHKPPFGNTMSGIHKSFEVLGYTNSKGKKAIRREDFLRLLVTKGEHMTEEEMLDCFASLFGLNPEGWKSEPATCSVKGSEICLEEELPDEITAEIFATEILGLTISEDSGQDGQ

SEQ ID NO: 9196 - protein, 30 aa, Artificial Sequence
  Synthetic polypeptide
GAPLPGQPPRPGGRWGGSAPPPGQPPRPGD

SEQ ID NO: 9197 - protein, 236 aa, Artificial Sequence
  Synthetic polypeptide
GAPLPGQHPVREGGGGVSPPPGQPPRPGGRWGGGQPPRLASRPIREVRGASARRPLLGSEEPLCPASRPVREGGGGGQPPRPASRPVREIDDIFNEIKFGEYVDTGKLIDKINLPDFLKVYLNHKPPFGNTMSGIHKSFEVLGYTNSKGKKAIRREDFLRLLVTKGEHMTEEEMLDCFASLFGLNPEGWKSEPATCSVKGSEICLEEELPDEITAEIFATEILGLTISEDSGQDGQ

SEQ ID NO: 9198 - protein, 60 aa, Artificial Sequence
  Synthetic polypeptide
GAPLPGGPYWEVRSPSARPAAPSGREVGGVSPPARPAAPSGRLMIYLTKSNLVNMWTLES

SEQ ID NO: 9199 - protein, 193 aa, Artificial Sequence
  Synthetic polypeptide
GAPLPGQPPRPGGRWGGQPPRSASRPVREGGGGGQPPCPASRPVREIDDIFNEIKFGEYVDTGKLIDKINLPDFLKVYLNHKPPFGNTMSGIHKSFEVLGYTNSKGKKAIRREDFLRLLVTKGEHMTEEEMLDCFASLFGLNPEGWKSEPATCSVKGSEICLEEELPDEITAEIFATEILGLTISEDSGQDGQ

SEQ ID NO: 9200 - protein, 167 aa, Artificial Sequence
  Synthetic polypeptide
GAPLPGQHPVREGGGGVSPPPGQPPRPGGRWGGGQPPRLASRPIREVRGASARRPLLGSEEPLCPASRPVREGGGGGQPPRPASRPVREVRGASARPPLLGSEEPLCPASRPVREGGGGVSPPARPAAPSGREVGGVSPPARPAAPSGRLMIYLTKSNLVNMWTLES

SEQ ID NO: 9201 - protein, 59 aa, Artificial Sequence
  Synthetic polypeptide
GAPLPGRPYWEVRSPSARPAAPSGREVGGSAPPLGQPPRPGGRWGGSAPLPGQPPRPGD

SEQ ID NO: 9202 - protein, 28 aa, Artificial Sequence
  Synthetic polypeptide
SPKCNRLFLGGGIEVGSWCLQSGRISRA

SEQ ID NO: 9203 - protein, 30 aa, Artificial Sequence
  Synthetic polypeptide
VAELKWEVGVSKVEEFQGPEATVERQDPAQ

SEQ ID NO: 9204 - protein, 1003 aa, Artificial Sequence
  Synthetic polypeptide
DVLFLDLDAASSVCGRLSESKRYPLESTSLPYCSLNEGDGLVLPVINSISALLQNLQESSQWELALRFVVGSFGTCLQHSVSNFMNATLSEKLFGETTLVKSRHVVMELKEKAVIFIRENATTLLHKVFNCRLVDLDLALGYCTLLPQKDVFENLWKLIDKAWQNYDKILAISLVGSELASLYQEIEMGLKFRELSTDAQWGIRLGKLGISFQPVFRQHFLTKKDLIKALVENIDMDTSLILEYCSTFQLDCDAVLQLFIETLLHNTNAGQGQGDASMDSAKRRHPKLLAKALEMVPLLTSTKDLVISLSGILHKLDPYDYEMIEVVLKVIERADEKITNININQALSILKHLKSYRRISPPVDLEYQYMLEHVITLPSAAQTRLPFHLIFFGTAQNFWKILSTELSEESFPTLLLISKLMKFSLDTLYVSTAKHVFEKKLKPKLLKLTQAKSSTLINKEITKITQTIESCLLSIVNPEWAVAIAISLAQDIPEGSFKISALKFCLYLAERWLQNIPSQDEKREKAEALLKKLHIQYRRSGTEAVLIAHKLNTEEYLRVIGKPAHLIVSLYEHPSINQRIQNSSGTDYPDIHAAAKEIAEVNEINLEKVWDMLLEKWLCPSTKPGEKPSELFELQEDEALRRVQYLLLSRPIDYSSRMLFVFATSTTTTLGMHQLTFAHRTRALQCLFYLADKETIESLFKKPIEEVKSYLRCITFLASFETLNIPITYELFCSSPKEGMIKGLWKNHSHESMAVRLVTELCLEYKIYDLQLWNGLLQKLLGFNMIPYLRKVLKAISSIHSLWQVPYFSKAWQRVIQIPLLSASCPLSPDQLSDCSESLIAVLECPVSGDLDLIGVARQYIQLELPAFALACLMLMPHSEKRHQQIKNFLGSCDPQVILKQLEEHMNTGQLAGFSHQIRSLILNNIINKKEFGILAKTKYFQMLKMHAMNTNNITELVNYLANDLSLDEASVLITEYSKHCGKPVPPDTAPCEILKMFLSGLS

SEQ ID NO: 9205 - protein, 45 aa, Artificial Sequence
  Synthetic polypeptide
MFYFLIWMLLLQFVDVYQKARDIPWSLPVCHTAPLMKEMALFYLL

SEQ ID NO: 9206 - protein, 29 aa, Artificial Sequence
  Synthetic polypeptide
SGCCFFSLWTFIRKQEISLGVYQFAILLP

SEQ ID NO: 9207 - protein, 111 aa, Artificial Sequence
  Synthetic polypeptide
MAGPGTRLPGFPFCFCHFQLCGFSPRRHGSRRLPQALEESQPVPGTGVGKEKEEEQERHLEELLGLHIPRSQGQHGPWGGGLTFSLHHREKQAEGPEENKIQLLLLFFQFF

SEQ ID NO: 9208 - protein, 269 aa, Artificial Sequence
  Synthetic polypeptide
WQRGEWQGQEPGCPGSHSASATSSCVALARGAMAHVGSRKRSRSRSRSRGRGSEKRKKKSRKDTSRNCSASTSQGRKASTAPGAEASPSPCITERSKQKARRRTRSSSSSSSSSSSSSSSSSSSSSSSSSDGRKKRGKYKDKRRKKKKKRKKLKKKGKEKAEAQQVEALPGPSLDQWHRSAGEEEDGPVLTDEQKSRIQAMKPMTKEEWDARQSIIRKVVDPETGRTRLIKGDGEVLEEIVTKERHREINKQATRGDCLAFQMRAGLLP

SEQ ID NO: 9209 - protein, 92 aa, Artificial Sequence
  Synthetic polypeptide
MAGPGTRLPGFPFCFCHFQLCGFSPRRHGSRRLPQALEESQPVPGTGVGKEKEEEQERHLEELLGLHIPREKQAEGPEENKIQLLLLFFQFF

SEQ ID NO: 9210 - protein, 92 aa, Artificial Sequence; identical to SEQ ID NO: 9209
  Synthetic polypeptide

SEQ ID NO: 9211 - protein, 250 aa, Artificial Sequence
  Synthetic polypeptide
WQRGEWQGQEPGCPGSHSASATSSCVALARGAMAHVGSRKRSRSRSRSRGRGSEKRKKKSRKDTSRNCSASTSQERSKQKARRRTRSSSSSSSSSSSSSSSSSSSSSSSSSDGRKKRGKYKDKRRKKKKKRKKLKKKGKEKAEAQQVEALPGPSLDQWHRSAGEEEDGPVLTDEQKSRIQAMKPMTKEEWDARQSIIRKVVDPETGRTRLIKGDGEVLEEIVTKERHREINKQATRGDCLAFQMRAGLLP

SEQ ID NO: 9212 - protein, 120 aa, Artificial Sequence
  Synthetic polypeptide
MAGPGTRLPGFPFCFCHFQLCGFSPRRHGSRRLPQALEESQPVPGTGVGKEKEEEQERHLEELLGLHIPRSQGQHGPWGGGSSSSSSSSSSSSSSSSDGRKKRGKYKDKRRKKKKKRKKL

SEQ ID NO: 9213 - protein, 124 aa, Artificial Sequence
  Synthetic polypeptide
WQRGEWQGQEPGCPGSHSASATSSCVALARGAMAHVGSRKRSRSRSRSRGRGSEKRKKKSRKDTSRNCSASTSQGRKASTAPGAEVLLAPLLPPRPPPLPPVMAGRSGGSTRTRGGRRRRRGRS

SEQ ID NO: 9214 - protein, 100 aa, Artificial Sequence
  Synthetic polypeptide
MAGPGTRLPGFPFCFCHFQLCGFSPRRHGSRRLPQALEESQPVPGTGVGKEKEEEQERHLEELLGLHIPSLTFSLHHREKQAEGPEENKIQLLLLFFQFF

SEQ ID NO: 9215 - protein, 216 aa, Artificial Sequence
  Synthetic polypeptide
WQRGEWQGQEPGCPGSHSASATSSCVALARGAMAHVGSRKRSRSRSRSRGRGSEKRKKKSRKDTSRNCSASTSQASPSPCITERSKQKARRRTRSSSSSSSSSSSSSSSSSSSSSSSSSDGRKKRGKYKDKRRKKKKKRKKLKKKGKEKAEAQQVEALPGPSLDQWHRSAGEEEDGPVLTDEQKSRIQAMKPMTKEEWDARQSIIRKVVDPETGRT

SEQ ID NO: 9216 - protein, 247 aa, Artificial Sequence
  Synthetic polypeptide
WQRGEWQGQEPGCPGSHSASATSSCVALARGAMAHVGSRKRSRSRSRSRGRGSEKRKKKSRKDTSRNCSASTSQERSKQKARRRTRSSSSSSSSSSSSSSSSSSSSSSSSSDGRKKRGKYKDKRRKKKKKRKKLKKKGKEKAEAQQVEALPGPSLDQWHRSAGEEEDGPVLTDEQKSRIQAMKPMTKEEWDARQSIIRKVVDPETGRTRLIKGDGEVLEEIVTKERHREINKVGVAPLPAIRPQLCL

SEQ ID NO: 9217 - protein, 103 aa, Artificial Sequence
  Synthetic polypeptide
MAGPGTRLPGFPFCFCHFQLCGFSPRRHGSRRLPQALEESQPVPGTGVGKEKEEEQERHLEELLGLHIPRSQGQHGPWGGGEKQAEGPEENKIQLLLLFFQFF

SEQ ID NO: 9218 - protein, 261 aa, Artificial Sequence
  Synthetic polypeptide
WQRGEWQGQEPGCPGSHSASATSSCVALARGAMAHVGSRKRSRSRSRSRGRGSEKRKKKSRKDTSRNCSASTSQGRKASTAPGAEERSKQKARRRTRSSSSSSSSSSSSSSSSSSSSSSSSSDGRKKRGKYKDKRRKKKKKRKKLKKKGKEKAEAQQVEALPGPSLDQWHRSAGEEEDGPVLTDEQKSRIQAMKPMTKEEWDARQSIIRKVVDPETGRTRLIKGDGEVLEEIVTKERHREINKQATRGDCLAFQMRAGLLP

SEQ ID NO: 9219 - protein, 362 aa, Artificial Sequence
  Synthetic polypeptide
GRGARRHGPGRAAGRKMSKPRAVEAAAAAAAVAATAPGPEMVERRGPGRPRTDGENVFTGQSKIYSYMSPNKCSGMRFPLQEENSVTHHEVKCQGKPLAGIYRKREEKRNAGNAVRSAMKSEEQKIKDARKGPLVPFPNQKSEAAEPPKTPPSSCDSTNAAIAKQALKKPIKGKQAPRKKAQGKTQQNRKLTDFYPVRRSSRKSKAELQSEERKRIDELIESGKEEGMKIDLIDGKGRGVIATKQFSRGDFVVEYHGDLIEITDAKKREALYAQDPSTGCYMYYFQYLSKTYCVDATRETNRLGRLINHSKCGNCQTKLHDIDGVPHLILIASRDIAAGEELLYDYGDRSKASIEAHPWLKH

SEQ ID NO: 9220 - protein, 362 aa, Artificial Sequence; identical to SEQ ID NO: 9219
  Synthetic polypeptide

SEQ ID NO: 9221 - protein, 67 aa, Artificial Sequence
  Synthetic polypeptide
GAGRAAMGLAGLQAGRCPSPARWRRRRRRRRWQRRPRARRWWSGGARGGPAPTGRTYLPGSQRSIPT

SEQ ID NO: 9222 - protein, 67 aa, Artificial Sequence; identical to SEQ ID NO: 9221
  Synthetic polypeptide

SEQ ID NO: 9223 - protein, 141 aa, Artificial Sequence
  Synthetic polypeptide
ARGAPPWAWPGCRQEDVQAPRGGGGGGGGGGGSDGPGPGDGGAEGPGEAPHRRGERIYRAVKDLFLHEPEQMLWNAFPPSGRELSYTSRSQMPGETISRNLQETRREKKCWERSTERHEVRGTEDQRRQERSPGTFSKPKI

SEQ ID NO: 9224 - protein, 141 aa, Artificial Sequence; identical to SEQ ID NO: 9223
  Synthetic polypeptide

SEQ ID NO: 9225 - protein, 66 aa, Artificial Sequence
  Synthetic polypeptide
GRGARRHGPGRAAGRCPSPARWRRRRRRRRWQRRPRARRWWSGGARGGPAPTGRTYLPGSQRSIPT

SEQ ID NO: 9226 - protein, 66 aa, Artificial Sequence; identical to SEQ ID NO: 9225
  Synthetic polypeptide

SEQ ID NO: 9227 - protein, 140 aa, Artificial Sequence
  Synthetic polypeptide
GAGRAAMGLAGLQEDVQAPRGGGGGGGGGGGSDGPGPGDGGAEGPGEAPHRRGERIYRAVKDLFLHEPEQMLWNAFPPSGRELSYTSRSQMPGETISRNLQETRREKKCWERSTERHEVRGTEDQRRQERSPGTFSKPKI

SEQ ID NO: 9228 - protein, 140 aa, Artificial Sequence; identical to SEQ ID NO: 9227
  Synthetic polypeptide

SEQ ID NO: 9229 - protein, 360 aa, Artificial Sequence
  Synthetic polypeptide
ARGAPPWAWPGCRKMSKPRAVEAAAAAAAVAATAPGPEMVERRGPGRPRTDGENVFTGQSKIYSYMSPNKCSGMRFPLQEENSVTHHEVKCQGKPLAGIYRKREEKRNAGNAVRSAMKSEEQKIKDARKGPLVPFPNQKSEAAEPPKTPPSSCDSTNAAIAKQALKKPIKGKQAPRKKAQGKTQQNRKLTDFYPVRRSSRKSKAELQSEERKRIDELIESGKEEGMKIDLIDGKGRGVIATKQFSRGDFVVEYHGDLIEITDAKKREALYAQDPSTGCYMYYFQYLSKTYCVDATRETNRLGRLINHSKCGNCQTKLHDIDGVPHLILIASRDIAAGEELLYDYGDRSKASIEAHPWLKH

SEQ ID NO: 9230 - protein, 360 aa, Artificial Sequence; identical to SEQ ID NO: 9229
  Synthetic polypeptide

SEQ ID NO: 9231 - protein, 74 aa, Artificial Sequence
  Synthetic polypeptide
GRGARRHGPGRAAGRELSYTSRSQMPGETISRNLQETRREKKCWERSTERHEVRGTEDQRRQERSPGTFSKPKI

SEQ ID NO: 9232 - protein, 74 aa, Artificial Sequence; identical to SEQ ID NO: 9231
  Synthetic polypeptide

SEQ ID NO: 9233 - protein, 74 aa, Artificial Sequence; identical to SEQ ID NO: 9231
  Synthetic polypeptide

SEQ ID NO: 9234 - protein, 74 aa, Artificial Sequence; identical to SEQ ID NO: 9231
  Synthetic polypeptide

SEQ ID NO: 9235 - protein, 294 aa, Artificial Sequence
  Synthetic polypeptide
GAGRAAMGLAGLQEENSVTHHEVKCQGKPLAGIYRKREEKRNAGNAVRSAMKSEEQKIKDARKGPLVPFPNQKSEAAEPPKTPPSSCDSTNAAIAKQALKKPIKGKQAPRKKAQGKTQQNRKLTDFYPVRRSSRKSKAELQSEERKRIDELIESGKEEGMKIDLIDGKGRGVIATKQFSRGDFVVEYHGDLIEITDAKKREALYAQDPSTGCYMYYFQYLSKTYCVDATRETNRLGRLINHSKCGNCQTKLHDIDGVPHLILIASRDIAAGEELLYDYGDRSKASIEAHPWLKH

SEQ ID NO: 9236 - protein, 294 aa, Artificial Sequence; identical to SEQ ID NO: 9235
  Synthetic polypeptide

SEQ ID NO: 9237 - protein, 29 aa, Artificial Sequence
  Synthetic polypeptide
ARGAPPWAWPGCRKRTQLHITKSNARGNH

SEQ ID NO: 9238 - protein, 29 aa, Artificial Sequence
  Synthetic polypeptide
ARGAPPWAWPGCRKRTQLHITKSNARGNH

SEQ ID NO: 9239 - protein, 29 aa, Artificial Sequence
  Synthetic polypeptide
ARGAPPWAWPGCRKRTQLHITKSNARGNH

SEQ ID NO: 9240 - protein, 29 aa, Artificial Sequence
  Synthetic polypeptide
ARGAPPWAWPGCRKRTQLHITKSNARGNH

SEQ ID NO: 9241 - protein, 74 aa, Artificial Sequence
  Synthetic polypeptide
GAGRAAMGLAGLQEENSVTHHEVKCQGKPLAGIYRKREEKRNAGNAVRSAMKSEEQKIKDARKGPLVPFPNQKS

SEQ ID NO: 9242 - protein, 250 aa, Artificial Sequence
  Synthetic polypeptide
GAGRAAMGLAGLQEENSVTHHEVKCQGKPLAGIYRKREEKRNAGNAVRSAMKSEEQKIKDARKGPLVPFPNQKSEAAEPPKTPPSSCDSTNAAIAKQALKKPIKGKQAPRKKAQGKTQQNRKLTDFYPVRRSSRKSKAELQSEERKRIDELIESGKEEGMKIDLIDGKGRGVIATKQFSRGDFVVEYHGDLIEITDAKKREALYAQDPSTGCYMYYFQYLSKTYCVDATRETNRLGRLINHSKCGNCQTK

SEQ ID NO: 9243 - protein, 56 aa, Artificial Sequence
  Synthetic polypeptide
GQAWCLTPGIPALWEAEGPEDTVSQPGLAAGPDRPPSPYTPLLPDSPSGQPPSPTA

SEQ ID NO: 9244 - protein, 22 aa, Artificial Sequence
  Synthetic polypeptide
ARHGVSRLESQRFGRLRVLRTP

SEQ ID NO: 9245 - protein, 19 aa, Artificial Sequence
  Synthetic polypeptide
GQAWCLTPGIPALWEAEGP

SEQ ID NO: 9246 - protein, 19 aa, Artificial Sequence
  Synthetic polypeptide
ARHGVSRLESQRFGRLRVL

SEQ ID NO: 9247 - protein, 392 aa, Artificial Sequence
  Synthetic polypeptide
RLNEMIHVKHLALALGVTDVLCEACDQLGWTKPTKIQIEAIPLALQGRDIIGLAETGSGKTGAFALPILNALLETPQRLFALVLTPTRELAFQISEQFEALGSSIGVQSAVIVGGIDSMSQSLALAKKPHIIIATPGRLIDHLENTKGFNLRALKYLVMDEADRILNMDFETEVDKILKVIPRDRKTFLFSATMTKKVQKLQRAALKNPVKCAVSSKYQTVEKLQQYYIFIPSKFKSKRLGSLNKFKAKARSILLATDVASRGLDIPHVDVVVNFDIPTHSKDYIHRVGRTARAGRSGKAITFVTQYDVELFQRIEHLIGKKLPGFPTQDDEVMMLTERVAEAQRFARMELREHGEKKKRSREDAGDNDDTEGAIGVRNKVAGGKMKKRKGR

SEQ ID NO: 9248 - protein, 8 aa, Artificial Sequence
  Synthetic polypeptide
STWPWPWV

SEQ ID NO: 9249 - protein, 8 aa, Artificial Sequence
  Synthetic polypeptide
STWPWPWV

SEQ ID NO: 9250 - protein, 8 aa, Artificial Sequence
  Synthetic polypeptide
STWPWPWV

SEQ ID NO: 9251 - protein, 18 aa, Artificial Sequence
  Synthetic polypeptide
DDTCKAPGLGLGCDRCVV

SEQ ID NO: 9252 - protein, 18 aa, Artificial Sequence
  Synthetic polypeptide
DDTCKAPGLGLGCDRCVV

SEQ ID NO: 9253 - protein, 18 aa, Artificial Sequence
  Synthetic polypeptide
DDTCKAPGLGLGCDRCVV

SEQ ID NO: 9254 - protein, 441 aa, Artificial Sequence
  Synthetic polypeptide
RLNEMIHVKHLALALGVTDVLCEACDQLGWTKPTKIQIEAIPLALQGRDIIGLAETGSGKTGAFALPILNALLETPQRLFALVLTPTRELAFQISEQFEALGSSIGVQSAVIVGGIDSMSQSLALAKKPHIIIATPGRLIDHLENTKGFNLRALKYLVMDEADRILNMDFETEVDKILKVIPRDRKTFLFSATMTKKVQKLQRAALKNPVKCAVSSKYQTVEKLQQYYIFIPSKFKDTYLVYILNELAGNSFMIFCSTCNNTQRTALLLRNLGFTAIPLHGQMSQSKRLGSLNKFKAKARSILLATDVASRGLDIPHVDVVVNFDIPTHSKDYIHRVGRTARAGRSGKAITFVTQYDVELFQRIEHLIGKKLPGFPTQDDEVMMLTERVAEAQRFARMELREHGEKKKRSREDAGDNDDTEGAIGVRNKVAGGKMKKRKGR

SEQ ID NO: 9255 - protein, 182 aa, Artificial Sequence
  Synthetic polypeptide
RLNEMIHVKHLALALGVTDVLCEACDQLGWTKPTKIQIEAIPLALQAVIVGGIDSMSQSLALAKKPHIIIATPGRLIDHLENTKGFNLRALKYLVMDEADRILNMDFETEVDKILKVIPRDRKTFLFSATMTKKVQKLQRAALKNPVKCAVSSKYQTVEKLQQYYIFIPSKFKSKRLGSLNK

SEQ ID NO: 9256 - protein, 34 aa, Artificial Sequence
  Synthetic polypeptide
SFSFVCRRREQLTEALQGVNENIRNGLHTVSTLD

SEQ ID NO: 9257 - protein, 13 aa, Artificial Sequence
  Synthetic polypeptide
MKIYVMDFTQYPP

SEQ ID NO: 9258 - protein, 136 aa, Artificial Sequence
  Synthetic polypeptide
WTSHSIHPRLTVIVVKKRVNTRFFAQSGGRLQNPLPGTVIDVEVTRPEWYDFFIVSQAVRSGSVSPTHYNVIYDNSGLKPDHIQRLTYKLCHIYYNWPGVIRVPAPCQYAHKLAFLVGQSIHREPNLSLSNRLYYL

SEQ ID NO: 9259 - protein, 92 aa, Artificial Sequence
  Synthetic polypeptide
VHTAVWVNVKSRAVREANHSRHPWALRSSLRREPIKAQRLRSRRPRPGRCPRCQAWSAAASSAPRASCPLPAPRPMPRPARGPRPAPAPIPW

SEQ ID NO: 9260 - protein, 92 aa, Artificial Sequence; identical to SEQ ID NO: 9259
  Synthetic polypeptide

SEQ ID NO: 9261 - protein, 11 aa, Artificial Sequence
  Synthetic polypeptide
EKPITVGIRGL

SEQ ID NO: 9262 - protein, 11 aa, Artificial Sequence
  Synthetic polypeptide
EKPITVGIRGL

SEQ ID NO: 9263 - protein, 24 aa, Artificial Sequence
  Synthetic polypeptide
DRARGAGLRGAVAFCQHLGTSWPR

SEQ ID NO: 9264 - protein, 24 aa, Artificial Sequence
  Synthetic polypeptide
DRARGAGLRGAVAFCQHLGTSWPR

SEQ ID NO: 9265 - protein, 25 aa, Artificial Sequence
  Synthetic polypeptide
TGRGERVCGARWHFVSTWELPGPDD

SEQ ID NO: 9266 - protein, 25 aa, Artificial Sequence
  Synthetic polypeptide
TGRGERVCGARWHFVSTWELPGPDD

SEQ ID NO: 9267 - protein, 165 aa, Artificial Sequence
  Synthetic polypeptide
QGEGSGSAGRGGILSALGNFLAQMIEKKRKKENSRSLDVGGPLRYAVYGFFFTGPLSHFFYFFMEHWIPPEVPLAGLRRLLLDRLVFAPAFLMLFFLIMNFLEGKDASAFAAKMRGGFWPALRMNWRVWTPLQFININYVPLKFRVLFANLAALFWYAYLASLGK

SEQ ID NO: 9268 - protein, 130 aa, Artificial Sequence
  Synthetic polypeptide
QGEGSGSAGRGGILSALGNFLAQMIEKKRKKENSRSLDVGGPLRYAVYGSGCSSPTWQLCSGMPTWPPWGSDDRWENIRCTVDVGLGVSPAQREQNQSSQDVTDSKSGDSRCPKMMDRETEISECQNPVF

SEQ ID NO: 9269 - protein, 37 aa, Artificial Sequence
  Synthetic polypeptide
DRARGAGLRGAGEDRARGAGLRGAVAFCQHLGTSWPR

SEQ ID NO: 9270 - protein, 37 aa, Artificial Sequence; identical to SEQ ID NO: 9269
  Synthetic polypeptide

SEQ ID NO: 9271 - protein, 38 aa, Artificial Sequence
  Synthetic polypeptide
TGRGERVCGARVKTGRGERVCGARWHFVSTWELPGPDD

SEQ ID NO: 9272 - protein, 38 aa, Artificial Sequence; identical to SEQ ID NO: 9271
  Synthetic polypeptide

SEQ ID NO: 9273 - protein, 166 aa, Artificial Sequence
  Synthetic polypeptide
RQGEGSGSAGRGGILSALGNFLAQMIEKKRKKENSRSLDVGGPLRYAVYGFFFTGPLSHFFYFFMEHWIPPEVPLAGLRRLLLDRLVFAPAFLMLFFLIMNFLEGKDASAFAAKMRGGFWPALRMNWRVWTPLQFININYVPLKFRVLFANLAALFWYAYLASLGK

SEQ ID NO: 9274 - protein, 131 aa, Artificial Sequence
  Synthetic polypeptide
RQGEGSGSAGRGGILSALGNFLAQMIEKKRKKENSRSLDVGGPLRYAVYGSGCSSPTWQLCSGMPTWPPWGSDDRWENIRCTVDVGLGVSPAQREQNQSSQDVTDSKSGDSRCPKMMDRETEISECQNPVF

SEQ ID NO: 9275 - protein, 166 aa, Artificial Sequence; identical to SEQ ID NO: 9273
  Synthetic polypeptide

SEQ ID NO: 9276 - protein, 131 aa, Artificial Sequence; identical to SEQ ID NO: 9274
  Synthetic polypeptide

SEQ ID NO: 9277 - protein, 63 aa, Artificial Sequence
  Synthetic polypeptide
DRARGAGLRGAGEDRARGAGLRGAGEDRARGAGLGGAGEDRARGAGLRGAVAFCQHLGTSWPR

SEQ ID NO: 9278 - protein, 63 aa, Artificial Sequence; identical to SEQ ID NO: 9277
  Synthetic polypeptide

SEQ ID NO: 9279 - protein, 64 aa, Artificial Sequence
  Synthetic polypeptide
TGRGERVCGARVKTGRGERVCGARVKTGRGERVLGARVKTGRGERVCGARWHFVSTWELPGPDD

SEQ ID NO: 9280 - protein, 64 aa, Artificial Sequence; identical to SEQ ID NO: 9279
  Synthetic polypeptide

SEQ ID NO: 9281 - protein, 54 aa, Artificial Sequence
  Synthetic polypeptide
NQPGQHSETPISTKNTKKIGRARWRAPVVPATREAEARTTVSDQRAEEERGIWG

SEQ ID NO: 9282 - protein, 79 aa, Artificial Sequence
  Synthetic polypeptide
PGAVAQACNPSVWEAEAGGSLEKFETSLGNIVRPPSLQKIQKKLAERGGARLWSQLLGRLRREPLSLINVRKRNVESGE

SEQ ID NO: 9283 - protein, 100 aa, Artificial Sequence
  Synthetic polypeptide
NQPGQHSETPISTKNTKKIGRARWRAPVVPATREAEARTTVSDQRAEEERGIWGRRAGVQAGPLQSQGHAAHLPHQAFPVPRGWLPGEGPHSDPAGSGAG

SEQ ID NO: 9284 - protein, 100 aa, Artificial Sequence; identical to SEQ ID NO: 9283
  Synthetic polypeptide

SEQ ID NO: 9285 - protein, 100 aa, Artificial Sequence; identical to SEQ ID NO: 9283
  Synthetic polypeptide

SEQ ID NO: 9286 - protein, 125 aa, Artificial Sequence
  Synthetic polypeptide
PGAVAQACNPSVWEAEAGGSLEKFETSLGNIVRPPSLQKIQKKLAERGGARLWSQLLGRLRREPLSLINVRKRNVESGEEELASKLDHYKAKATRHIFLIRHSQYHVDGSLEKDRTLTPLGREQA

SEQ ID NO: 9287 - protein, 252 aa, Artificial Sequence
  Synthetic polypeptide
PGAVAQACNPSVWEAEAGGSLEKFETSLGNIVRPPSLQKIQKKLAERGGARLWSQLLGRLRREPLSLINVRKRNVESGEEELASKLDHYKAKATRHIFLIRHSQYHVDGSLEKDRTLTPLGREQAELTGLRLASLGLKFNKIVHSSMTRAIETTDIISRHLPGVCKVSTDLLREGAPIEPDPPVSHWKPEAVQYYEDGARIEAAFRNYIHRADARQEEDSYEIFICHANVIRYIVCSIPPLLSAGDFVLLGS

SEQ ID NO: 9288 - protein, 286 aa, Artificial Sequence
  Synthetic polypeptide
PGAVAQACNPSVWEAEAGGSLEKFETSLGNIVRPPSLQKIQKKLAERGGARLWSQLLGRLRREPLSLINVRKRNVESGEEELASKLDHYKAKATRHIFLIRHSQYHVDGSLEKDRTLTPLGREQAELTGLRLASLGLKFNKIVHSSMTRAIETTDIISRHLPGVCKVSTDLLREGAPIEPDPPVSHWKPEAVQYYEDGARIEAAFRNYIHRADARQEEDSYEIFICHANVIRYIVCRALQFPPEGWLRLSLNNGSITHLVIRPNGRVALRTLGDTGFMPPDKITRS

SEQ ID NO: 9289 - protein, 26 aa, Artificial Sequence
  Synthetic polypeptide
GAPLPGRDPVWEIQNGQFRRTSEKSL

SEQ ID NO: 9290 - protein, 1299 aa, Artificial Sequence
  Synthetic polypeptide
DVGSASAPPPHLGCEERLCPAATPSGRFRMDSLEEPQKKVFKARKTMRVSDRQQLEAVYKVKEELLKTDVKLLNGNHENGDLDPTSPLENMDYIKDKEEVNGIEEICFDPEGSKAEWKETPCILSVNVKNKQDDDLNCEPLSPHNITPEPVSKLPAEPVSGDPAPGDLDAGDPASGVLASGDSTSGDPTSSEPSSSDAASGDATSGDAPSGDVSPGDATSGDATADDLSSGDPTSSDPIPGEPVPVEPISGDCAADDIASSEITSVDLASGAPASTDPASDDLASGDLSSSELASDDLATGELASDELTSESTFDRTFEPKSVPVCEPVPEIDNIEPSSNKDDDFLEKNGADEKLEQIQSKDSLDEKNKADNNIDANEETLETDDTTICSDRPPENEKKVEEDIITELALGEDAISSSMEIDQGEKNEDETSADLVETINENVIEDNKSENILENTDSMETDEIIPILEKLAPSEDELTCFSKTSLLPIDETNPDLEEKMESSFGSPSKQESSESLPKEAFLVLSDEEDISGEKDESEVISQNETCSPAEVESNEKDNKPEEEEQVIHEDDERPSEKNEFSRRKRSKSEDMDNVQSKRRRYMEEEYEAEFQVKITAKGDINQKLQKVIQWLLEEKLCALQCAVFDKTLAELKTRVEKIECNKRHKTVLTELQAKIARLTKRFEAAKEDLKKRHEHPPNPPVSPGKTVNDVNSNNNMSYRNAGTVRQMLESKRNVSESAPPSFQTPVNTVSSTNLVTPPAVVSSQPKLQTPVTSGSLTATSVLPAPNTATVVATTQVPSGNPQPTISLQPLPVILHVPVAVSSQPQLLQSHPGTLVTNQPSGNVEFISVQSPPTVSGLTKNPVSLPSLPNPTKPNNVPSVPSPSIQRNPTASAAPLGTTLAVQAVPTAHSIVQATRTSLPTVGPSGLYSPSTNRGPIQMKIPISAFSTSSAAEQNSNTTPRIENQTNKTIDASVSKKAADSTSQCGKATGSDSSGVIDLTMDDEESGASQDPKKLNHTPVSTMSSSQPVSRPLQPIQPAPPLQPSGVPTSGPSQTTIHLLPTAPTTVNVTHRPVTQVTTRLPVPRAPANHQVVYTTLPAPPAQAPLRGTVMQAPAVRQVNPQNSVTVRVPQTTTYVVNNGLTLGSTGPQLTVHHRPPQVHTEPPRPVHPAPLPEAPQPQRLPPEAASTSLPQKPHLKLARVQSQNGIVLSWSVLEVDRSCATVDSYHLYAYHEEPSATVPSQWKKIGEVKALPLPMACTLTQFVSGSKYYFAVRAKDIYGRFGPFCDPQSTDVISSTQSS

SEQ ID NO: 9291 - protein, 43 aa, Artificial Sequence
  Synthetic polypeptide
GASLPGRPSSEMWGAPLPRHPIWDVRSASARPRPRLGDSEWTV

SEQ ID NO: 9292 - protein, 1310 aa, Artificial Sequence
  Synthetic polypeptide
GAPLPGRDPVWEVRSISARPPRLRSEEPLCPAAAPSDKFRMDSLEEPQKKVFKARKTMRVSDRQQLEAVYKVKEELLKTDVKLLNGNHENGDLDPTSPLENMDYIKDKEEVNGIEEICFDPEGSKAEWKETPCILSVNVKNKQDDDLNCEPLSPHNITPEPVSKLPAEPVSGDPAPGDLDAGDPASGVLASGDSTSGDPTSSEPSSSDAASGDATSGDAPSGDVSPGDATSGDATADDLSSGDPTSSDPIPGEPVPVEPISGDCAADDIASSEITSVDLASGAPASTDPASDDLASGDLSSSELASDDLATGELASDELTSESTFDRTFEPKSVPVCEPVPEIDNIEPSSNKDDDFLEKNGADEKLEQIQSKDSLDEKNKADNNIDANEETLETDDTTICSDRPPENEKKVEEDIITELALGEDAISSSMEIDQGEKNEDETSADLVETINENVIEDNKSENILENTDSMETDEIIPILEKLAPSEDELTCFSKTSLLPIDETNPDLEEKMESSFGSPSKQESSESLPKEAFLVLSDEEDISGEKDESEVISQNETCSPAEVESNEKDNKPEEEEQVIHEDDERPSEKNEFSRRKRSKSEDMDNVQSKRRRYMEEEYEAEFQVKITAKGDINQKLQKVIQWLLEEKLCALQCAVFDKTLAELKTRVEKIECNKRHKTVLTELQAKIARLTKRFEAAKEDLKKRHEHPPNPPVSPGKTVNDVNSNNNMSYRNAGTVRQMLESKRNVSESAPPSFQTPVNTVSSTNLVTPPAVVSSQPKLQTPVTSGSLTATSVLPAPNTATVVATTQVPSGNPQPTISLQPLPVILHVPVAVSSQPQLLQSHPGTLVTNQPSGNVEFISVQSPPTVSGLTKNPVSLPSLPNPTKPNNVPSVPSPSIQRNPTASAAPLGTTLAVQAVPTAHSIVQATRTSLPTVGPSGLYSPSTNRGPIQMKIPISAFSTSSAAEQNSNTTPRIENQTNKTIDASVSKKAADSTSQCGKATGSDSSGVIDLTMDDEESGASQDPKKLNHTPVSTMSSSQPVSRPLQPIQPAPPLQPSGVPTSGPSQTTIHLLPTAPTTVNVTHRPVTQVTTRLPVPRAPANHQVVYTTLPAPPAQAPLRGTVMQAPAVRQVNPQNSVTVRVPQTTTYVVNNGLTLGSTGPQLTVHHRPPQVHTEPPRPVHPAPLPEAPQPQRLPPEAASTSLPQKPHLKLARVQSQNGIVLSWSVLEVDRSCATVDSYHLYAYHEEPSATVPSQWKKIGEVKALPLPMACTLTQFVSGSKYYFAVRAKDIYGRFGPFCDPQSTDVISSTQSS

SEQ ID NO: 9293 - protein, 20 aa, Artificial Sequence
  Synthetic polypeptide
EVRSPSARQPPRLTNSEWTV

SEQ ID NO: 9294 - protein, 15 aa, Artificial Sequence
  Synthetic polypeptide
QIQNGQFRRTSEKSL

SEQ ID NO: 9295 - protein, 20 aa, Artificial Sequence
  Synthetic polypeptide
QDPRLYKKLKNLARVFGVSG

SEQ ID NO: 9296 - protein, 273 aa, Artificial Sequence
  Synthetic polypeptide
PGFLESLDDFYILSSGLILLQTTNSVFNKTLLKQVIPETLLSWQRVRVANMMADSGKRWADIFSKYNSGTYNNQYMVLDLKKVKLNHSLDKGTLYIVEQIPTYVEYSEQTDVLRKGYWPSYNVPFHEKIYNWSGYPLLVQKLGLDYSYDLAPRAKIFRRDQGKVTDTASMKYIMRYNNYKKDPYSRGDPCNTICCREDLNSPNPSPGGCYDTKVADIYLASQYTSYAISGPTVQGGLPVFRWDRFNKTLHQGMPEVYNFDFITMKPILKLDIK

SEQ ID NO: 9297 - protein, 40 aa, Artificial Sequence
  Synthetic polypeptide
AQKFETRLCNIARPPSLQKIKKFSQGFWSLWMIFTFLAVD

SEQ ID NO: 9298 - protein, 12 aa, Artificial Sequence
  Synthetic polypeptide
LNNQLIAMHILL

SEQ ID NO: 9299 - protein, 12 aa, Artificial Sequence
  Synthetic polypeptide
LNNQLIAMHILL

SEQ ID NO: 9300 - protein, 12 aa, Artificial Sequence
  Synthetic polypeptide
LNNQLIAMHILL

SEQ ID NO: 9301 - protein, 12 aa, Artificial Sequence
  Synthetic polypeptide
LNNQLIAMHILL

SEQ ID NO: 9302 - protein, 12 aa, Artificial Sequence
  Synthetic polypeptide
LNNQLIAMHILL

SEQ ID NO: 9303 - protein, 12 aa, Artificial Sequence
  Synthetic polypeptide
LNNQLIAMHILL

SEQ ID NO: 9304 - protein, 24 aa, Artificial Sequence
  Synthetic polypeptide
STTSSLPCTYSCSEISDQTVHLGI

SEQ ID NO: 9305 - protein, 24 aa, Artificial Sequence
  Synthetic polypeptide
STTSSLPCTYSCSEISDQTVHLGI

SEQ ID NO: 9306 - protein, 24 aa, Artificial Sequence
  Synthetic polypeptide
STTSSLPCTYSCSEISDQTVHLGI

SEQ ID NO: 9307 - protein, 24 aa, Artificial Sequence
  Synthetic polypeptide
STTSSLPCTYSCSEISDQTVHLGI

SEQ ID NO: 9308 - protein, 24 aa, Artificial Sequence
  Synthetic polypeptide
STTSSLPCTYSCSEISDQTVHLGI

SEQ ID NO: 9309 - protein, 24 aa, Artificial Sequence
  Synthetic polypeptide
STTSSLPCTYSCSEISDQTVHLGI

SEQ ID NO: 9310 - protein, 188 aa, Artificial Sequence
  Synthetic polypeptide
QQPAHCHAHTLVVRFLTKRFIWEYDPTLESTYRHQATIDDEVVSMEILDTAGQEDTIQREGHMRWGEGFVLVYDITDRGSFEEVLPLKNILDEIKKPKNVTLILVGNKADLDHSRQVSTEEGEKLATELACAFYECSACTGEGNITEIFYELCREVRRRRMVQGKTRRRSSTTHVKQAINKMLTKISS

SEQ ID NO: 9311 - protein, 188 aa, Artificial Sequence; identical to SEQ ID NO: 9310
  Synthetic polypeptide

SEQ ID NO: 9312 - protein, 188 aa, Artificial Sequence; identical to SEQ ID NO: 9310
  Synthetic polypeptide

SEQ ID NO: 9313 - protein, 89 aa, Artificial Sequence
  Synthetic polypeptide
QQPAHCHAHTLVVRFLTKRFIWEYDPTLESTYRHQATIDDEVVSMEILDTAGQEDTIQREGHMRWGEGFVLVYDITDRGSFEEVLPLKN

SEQ ID NO: 9314 - protein, 59 aa, Artificial Sequence
  Synthetic polypeptide
QQPAHCHAHTLVVRFLTKRFIWEYDPTLESTYRHQATIDDEVVSMEILDTAGQVNKEFS

SEQ ID NO: 9315 - protein, 27 aa, Artificial Sequence
  Synthetic polypeptide
QQPAHCHAHTLVVRFLTKRFIWEYDPT

SEQ ID NO: 9316 - protein, 44 aa, Artificial Sequence
  Synthetic polypeptide
GNHPSRFSQNRLICVFCPGIRIPSLSEVFRSCSEISDQTVHLGI

SEQ ID NO: 9317 - protein, 44 aa, Artificial Sequence; identical to SEQ ID NO: 9316
  Synthetic polypeptide

SEQ ID NO: 9318 - protein, 44 aa, Artificial Sequence; identical to SEQ ID NO: 9316
  Synthetic polypeptide

SEQ ID NO: 9319 - protein, 44 aa, Artificial Sequence; identical to SEQ ID NO: 9316
  Synthetic polypeptide

SEQ ID NO: 9320 - protein, 44 aa, Artificial Sequence; identical to SEQ ID NO: 9316
  Synthetic polypeptide

SEQ ID NO: 9321 - protein, 44 aa, Artificial Sequence; identical to SEQ ID NO: 9316
  Synthetic polypeptide

SEQ ID NO: 9322 - protein, 188 aa, Artificial Sequence
  Synthetic polypeptide
GSLHSRKCSALVVRFLTKRFIWEYDPTLESTYRHQATIDDEVVSMEILDTAGQEDTIQREGHMRWGEGFVLVYDITDRGSFEEVLPLKNILDEIKKPKNVTLILVGNKADLDHSRQVSTEEGEKLATELACAFYECSACTGEGNITEIFYELCREVRRRRMVQGKTRRRSSTTHVKQAINKMLTKISS

SEQ ID NO: 9323 - protein, 188 aa, Artificial Sequence; identical to SEQ ID NO: 9322
  Synthetic polypeptide

SEQ ID NO: 9324 - protein, 188 aa, Artificial Sequence; identical to SEQ ID NO: 9322
  Synthetic polypeptide

SEQ ID NO: 9325 - protein, 30 aa, Artificial Sequence
  Synthetic polypeptide
PSITVFPEQADLRLLSWHKDPFTLGSVPLL

SEQ ID NO: 9326 - protein, 30 aa, Artificial Sequence; identical to SEQ ID NO: 9325
  Synthetic polypeptide

SEQ ID NO: 9327 - protein, 30 aa, Artificial Sequence; identical to SEQ ID NO: 9325
  Synthetic polypeptide

SEQ ID NO: 9328 - protein, 30 aa, Artificial Sequence; identical to SEQ ID NO: 9325
  Synthetic polypeptide

SEQ ID NO: 9329 - protein, 30 aa, Artificial Sequence; identical to SEQ ID NO: 9325
  Synthetic polypeptide

SEQ ID NO: 9330 - protein, 30 aa, Artificial Sequence; identical to SEQ ID NO: 9325
  Synthetic polypeptide

SEQ ID NO: 9331 - protein, 89 aa, Artificial Sequence
  Synthetic polypeptide
GSLHSRKCSALVVRFLTKRFIWEYDPTLESTYRHQATIDDEVVSMEILDTAGQEDTIQREGHMRWGEGFVLVYDITDRGSFEEVLPLKN

SEQ ID NO: 9332 - protein, 59 aa, Artificial Sequence
  Synthetic polypeptide
GSLHSRKCSALVVRFLTKRFIWEYDPTLESTYRHQATIDDEVVSMEILDTAGQVNKEFS

SEQ ID NO: 9333 - protein, 27 aa, Artificial Sequence
  Synthetic polypeptide
GSLHSRKCSALVVRFLTKRFIWEYDPT

SEQ ID NO: 9334 - protein, 106 aa, Artificial Sequence
  Synthetic polypeptide
YIKNCYKSKKVKVNNPKQIFHRKIQKSLEQMKTSATSLTVKKKCKIKLQYTIFTSNNGKAQSLQMYGTGKNVGRQALSRIDAKGTSCCFFPCRDHLQPSSCHCLQL

SEQ ID NO: 9335 - protein, 106 aa, Artificial Sequence; identical to SEQ ID NO: 9334
  Synthetic polypeptide

SEQ ID NO: 9336 - protein, 106 aa, Artificial Sequence; identical to SEQ ID NO: 9334
  Synthetic polypeptide

SEQ ID NO: 9337 - protein, 459 aa, Artificial Sequence
  Synthetic polypeptide
GGRHCHALMPKEPVAVSSHVVTISSLLPATAYNCSVTSFSHDSPSVPTFIAVSTMVTEMNPNVVVISVLAILSTLLIGLLLVTLIILRKKHLQMARECGAGTFVNFASLERDGKLPYNWRRSIFAFLTLLPSCLWTDYLLAFYINPWSKNGLKKRKLTNPVQLDDFDAYIKDMAKDSDYKFSLQFEELKLIGLDIPHFAADLPLNRCKNRYTNILPYDFSRVRLVSMNEEEGADYINANYIPGYNSPQEYIATQGPLPETRNDFWKMVLQQKSQIIVMLTQCNEKRRVKCDHYWPFTEEPIAYGDITVEMISEEEQDDWACRHFRINYADEMQDVMHFNYTAWPDHGVPTANAAESILQFVHMVRQQATKSKGPMIIHCSAGVGRTGTFIALDRLLQHIRDHEFVDILGLVSEMRSYRMSMVQTEEQYIFIHQCVQLMWMKKKQQFCISDVIYENVSKS

SEQ ID NO: 9338 - protein, 12 aa, Artificial Sequence
  Synthetic polypeptide
CQRNQLLFLPMS

SEQ ID NO: 9339 - protein, 12 aa, Artificial Sequence
  Synthetic polypeptide
CQRNQLLFLPMS

SEQ ID NO: 9340 - protein, 12 aa, Artificial Sequence
  Synthetic polypeptide
CQRNQLLFLPMS

SEQ ID NO: 9341 - protein, 431 aa, Artificial Sequence
  Synthetic polypeptide
GGRHCHALMPKEPVAVSSHVVTISSLLPATAYNCSVTSFSHDSPSVPTFIAVSTMVTEMNPNVVVISVLAILSTLLIGLLLVTLIILRKKHLQMARECGAGTFVNFASLERDGKLPYNWSKNGLKKRKLTNPVQLDDFDAYIKDMAKDSDYKFSLQFEELKLIGLDIPHFAADLPLNRCKNRYTNILPYDFSRVRLVSMNEEEGADYINANYIPGYNSPQEYIATQGPLPETRNDFWKMVLQQKSQIIVMLTQCNEKRRVKCDHYWPFTEEPIAYGDITVEMISEEEQDDWACRHFRINYADEMQDVMHFNYTAWPDHGVPTANAAESILQFVHMVRQQATKSKGPMIIHCSAGVGRTGTFIALDRLLQHIRDHEFVDILGLVSEMRSYRMSMVQTEEQYIFIHQCVQLMWMKKKQQFCISDVIYENVSKS

SEQ ID NO: 9342 - protein, 68 aa, Artificial Sequence
  Synthetic polypeptide
GGRHCHALMPKEPVAVSSHVVTISSLLPATAYNCSVTSFSHDSPSVPTFIAVSTMGSVELVHLSILHP

SEQ ID NO: 9343 - protein, 522 aa, Artificial Sequence
  Synthetic polypeptide
YLLSIHFLISQPEGVLTLRAKPPPPDEFLDCFQKFKHGFNLLAKLKSHIQNPSAADLVHFLFTPLNMVVQATGGPELASSVLSPLLNKDTIDFLNYTVNGDERQLWMSLGGTWMKARAEWPKEQFIPPYVPRFRNGWEPPMLNFMGATMEQDLYQLAESVANVAEHQRKQEIKRLSTEHSSVSEYHPADGYAFSSNIYTRGSHLDQGEAAVAFKPTSNRHIDRNYEPLKTQPKKYAKSKYDFVARNNSELSVLKDDILEILDDRKQWWKVRNASGDSGFVPNNILDIVRPPESGLGRADPPYTHTIQKQRMEYGPRPADTPPAPSPPPTPAPVPVPLPPSTPAPVPVSKVPANITRQNSSSSDSGGSIVRDSQRHKQLPVDRRKSQMEEVQDELIHRLTIGRSAAQKKFHVPRQNVPVINITYDSTPEDVKTWLQSKGFNPVTVNSLGVLNGAQLFSLNKDELRTVCPEGARVYSQITVQKAALEDSSGSSELQEIMRRRQEKISAAASDSGVESFDEGSSH

SEQ ID NO: 9344 - protein, 522 aa, Artificial Sequence; identical to SEQ ID NO: 9343
  Synthetic polypeptide

SEQ ID NO: 9345 - protein, 522 aa, Artificial Sequence; identical to SEQ ID NO: 9343
  Synthetic polypeptide

SEQ ID NO: 9346 - protein, 522 aa, Artificial Sequence; identical to SEQ ID NO: 9343
  Synthetic polypeptide

SEQ ID NO: 9347 - protein, 522 aa, Artificial Sequence; identical to SEQ ID NO: 9343
  Synthetic polypeptide

SEQ ID NO: 9348 - protein, 12 aa, Artificial Sequence
  Synthetic polypeptide
VSISLSPNQRVF

SEQ ID NO: 9349 - protein, 12 aa, Artificial Sequence
  Synthetic polypeptide
VSISLSPNQRVF

SEQ ID NO: 9350 - protein, 12 aa, Artificial Sequence
  Synthetic polypeptide
VSISLSPNQRVF

SEQ ID NO: 9351 - protein, 12 aa, Artificial Sequence
  Synthetic polypeptide
VSISLSPNQRVF

SEQ ID NO: 9352 - protein, 12 aa, Artificial Sequence
  Synthetic polypeptide
VSISLSPNQRVF

SEQ ID NO: 9353 - protein, 65 aa, Artificial Sequence
  Synthetic polypeptide
NSPFPCFCLCCFYPTMMFFPPHHPGPNFFKSHLISYFLHLIPFKYPFPYLPTRGCFNAAGKTSTS

SEQ ID NO: 9354 - protein, 65 aa, Artificial Sequence; identical to SEQ ID NO: 9353
  Synthetic polypeptide

SEQ ID NO: 9355 - protein, 65 aa, Artificial Sequence; identical to SEQ ID NO: 9353
  Synthetic polypeptide

SEQ ID NO: 9356 - protein, 65 aa, Artificial Sequence; identical to SEQ ID NO: 9353
  Synthetic polypeptide

SEQ ID NO: 9357 - protein, 65 aa, Artificial Sequence; identical to SEQ ID NO: 9353
  Synthetic polypeptide

SEQ ID NO: 9358 - protein, 631 aa, Artificial Sequence
  Synthetic polypeptide
HPPGALAKISPLSSPCSSPLQGTPASSLVSKISAVQFPESADTTAKQSLGSHRALTYTQSAPDLSPQILTPPVICSSCGRPYSQGNPADEPLERSGVATRTPSRTDDTAQVTSDYETNNNSDSSDIVQNEDETECLREPLRKASACSTYAPETMMFLDKPILAPEPLVMDNLDSIMEQLNTWNFPIFDLVENIGRKCGRILSQVSYRLFEDMGLFEAFKIPIREFMNYFHALEIGYRDIPYHNRIHATDVLHAVWYLTTQPIPGLSTVINDHGSTSDSDSDSGFTHGHMGYVFSKTYNVTDDKYGCLSGNIPALELMALYVAAAMHDYDHPGRTNAFLVATSAPQAVLYNDRSVLENHHAAAAWNLFMSRPEYNFLINLDHVEFKHFRFLVIEAILATDLKKHFDFVAKFNGKVNDDVGIDWTNENDRLLVCQMCIKLADINGPAKCKELHLQWTDGIVNEFYEQGDEEASLGLPISPFMDRSAPQLANLQESFISHIVGPLCNSYDSAGLMPGKWVEDSDESGDTDDPEEEEEEAPAPNEEETCENNESPKKKTFKRRKIYCQITQHLLQNHKMWKKVIEEEQRLAGIENQSLDQTPQSHSSEQIQAIKEEEEEKGKPRGEEIPTQKPDQ

SEQ ID NO: 9359 - protein, 55 aa, Artificial Sequence
  Synthetic polypeptide
PPDCSSDIPQVPSLKFHLFHRPAPHLSKGLLPAAWSAKFLQCSFQNLLTQLPNKA

SEQ ID NO: 9360 - protein, 30 aa, Artificial Sequence
  Synthetic polypeptide
PRSLPLFLLFAKLPATDLLTAPLTSPRCPR

SEQ ID NO: 9361 - protein, 15 aa, Artificial Sequence
  Synthetic polypeptide
RFSHQHFTEAALSKL

SEQ ID NO: 9362 - protein, 15 aa, Artificial Sequence
  Synthetic polypeptide
RFSHQHFTEAALSKL

SEQ ID NO: 9363 - protein, 15 aa, Artificial Sequence
  Synthetic polypeptide
RFSHQHFTEAALSKL

SEQ ID NO: 9364 - protein, 15 aa, Artificial Sequence
  Synthetic polypeptide
RFSHQHFTEAALSKL

SEQ ID NO: 9365 - protein, 15 aa, Artificial Sequence
  Synthetic polypeptide
RFSHQHFTEAALSKL

SEQ ID NO: 9366 - protein, 185 aa, Artificial Sequence
  Synthetic polypeptide
GFPISISLKLLFLSYRYSKETHINPSENSTSSLSTCLINQTLSFNGTSPEIVEKDCVKESGSHMWIYVFMGNMLRGIGETPIVPLGISYIDDFAKEGHSSLYLGSLNAIGMIGPVIGFALGSLFAKMYVDIGYVDLSTIRITPKDSRWVGAWWLGFLVSGLFSIISSIPFFFLPKNPNKPQKERK

SEQ ID NO: 9367 - protein, 596 aa, Artificial Sequence
  Synthetic polypeptide
GFPISISLKLLFLSYRYSKETHINPSENSTSSLSTCLINQTLSFNGTSPEIVEKDCVKESGSHMWIYVFMGNMLRGIGETPIVPLGISYIDDFAKEGHSSLYLGSLNAIGMIGPVIGFALGSLFAKMYVDIGYVDLSTIRITPKDSRWVGAWWLGFLVSGLFSIISSIPFFFLPKNPNKPQKERKISLSLHVLKTNDDRNQTANLTNQGKNVTKNVTGFFQSLKSILTNPLYVIFLLLTLLQVSSFIGSFTYVFKYMEQQYGQSASHANFLLGIITIPTVATGMFLGGFIIKKFKLSLVGIAKFSFLTSMISFLFQLLYFPLICESKSVAGLTLTYDGNNSVASHVDVPLSYCNSECNCDESQWEPVCGNNGITYLSPCLAGCKSSSGIKKHTVFYNCSCVEVTGLQNRNYSAHLGECPRDNTCTRKFFIYVAIQVINSLFSATGGTTFILLTVKIVQPELKALAMGFQSMVIRTLGGILAPIYFGALIDKTCMKWSTNSCGAQGACRIYNSVFFGRVYLGLSIALRFPALVLYIVFIFAMKKKFQGKDTKASDNERKVMDEANLEFLNNGEHFVPSAGTDSKTCNLDMQDNAAAN

SEQ ID NO: 9368 - protein, 596 aa, Artificial Sequence; identical to SEQ ID NO: 9367
  Synthetic polypeptide

SEQ ID NO: 9369 - protein, 642 aa, Artificial Sequence
  Synthetic polypeptide
GFPISISLKLLFLSYRYSKETHINPSENSTSSLSTCLINQTLSFNGTSPEIVEKDCVKESGSHMWIYVFMGNMLRGIGETPIVPLGISYIDDFAKEGHSSLYLGSLNAIGMIGPVIGFALGSLFAKMYVDIGYVDLSTIRITPKDSRWVGAWWLGFLVSGLFSIISSIPFFFLPKNPNKPQKERKISLSLHVLKTNDDRNQTANLTNQGKNVTKNVTGFFQSLKSILTNPLYVIFLLLTLLQVSSFIGSFTYVFKYMEQQYGQSASHANFLLGIITIPTVATGMFLGGFIIKKFKLSLVGIAKFSFLTSMISFLFQLLYFPLICESKSVAGLTLTYDGNNSVASHVDVPLSYCNSECNCDESQWEPVCGNNGITYLSPCLAGCKSSSGIKKHTVFYNCSCVEVTGLQNRNYSAHLGECPRDNTCTRKFFIYVAIQVINSLFSATGGTTFILLTVKIVQPELKALAMGFQSMVIRTLGGILAPIYFGALIDKTCMKWSTNSCGAQGACRIYNSVFFGIVQPELKALAIGFHSMIMRSLGGILVPIYFGALIDTTCMKWSTNSCGARGACRIYNSTYLGRAFFGLKVALIFPVLVLLTVFIFVVRKKSHGKDTKVLENERQVMDEANLEFLNDSEHFVPSAEEQ

SEQ ID NO: 9370 - protein, 642 aa, Artificial Sequence; identical to SEQ ID NO: 9369
  Synthetic polypeptide

SEQ ID NO: 9371 - protein, 48 aa, Artificial Sequence
  Synthetic polypeptide
MTLEDINSVSLKDRGQIHLPRIAGSTKRIKLCSSLNHLNSFEEVSSTW

SEQ ID NO: 9372 - protein, 48 aa, Artificial Sequence; identical to SEQ ID NO: 9371
  Synthetic polypeptide

SEQ ID NO: 9373 - protein, 48 aa, Artificial Sequence; identical to SEQ ID NO: 9371
  Synthetic polypeptide

SEQ ID NO: 9374 - protein, 48 aa, Artificial Sequence; identical to SEQ ID NO: 9371
  Synthetic polypeptide

SEQ ID NO: 9375 - protein, 82 aa, Artificial Sequence
  Synthetic polypeptide
IVSLSRTEGRYIYLGLPAALRGSSFVPALIILILLRKCHLPGENASSGTELIETKVKGKENECKDIYQKSTVLKDDELKTKL

SEQ ID NO: 9376 - protein, 82 aa, Artificial Sequence; identical to SEQ ID NO: 9375
  Synthetic polypeptide

SEQ ID NO: 9377 - protein, 82 aa, Artificial Sequence; identical to SEQ ID NO: 9375
  Synthetic polypeptide

SEQ ID NO: 9378 - protein, 82 aa, Artificial Sequence; identical to SEQ ID NO: 9375
  Synthetic polypeptide

SEQ ID NO: 9379 - protein, 18 aa, Artificial Sequence
  Synthetic polypeptide
CLSQGQRADTSTSDCRQH

SEQ ID NO: 9380 - protein, 18 aa, Artificial Sequence
  Synthetic polypeptide
CLSQGQRADTSTSDCRQH

SEQ ID NO: 9381 - protein, 18 aa, Artificial Sequence
  Synthetic polypeptide
CLSQGQRADTSTSDCRQH

SEQ ID NO: 9382 - protein, 18 aa, Artificial Sequence
  Synthetic polypeptide
CLSQGQRADTSTSDCRQH

SEQ ID NO: 9383 - protein, 29 aa, Artificial Sequence
  Synthetic polypeptide
SNWVKYVFMSKFTFLSKFSQIWKPCFCWQ

SEQ ID NO: 9384 - protein, 29 aa, Artificial Sequence
  Synthetic polypeptide
SNWVKYVFMSKFTFLSKFSQIWKPCFCWQ

SEQ ID NO: 9385 - protein, 29 aa, Artificial Sequence
  Synthetic polypeptide
SNWVKYVFMSKFTFLSKFSQIWKPCFCWQ

SEQ ID NO: 9386 - protein, 29 aa, Artificial Sequence
  Synthetic polypeptide
SNWVKYVFMSKFTFLSKFSQIWKPCFCWQ

SEQ ID NO: 9387 - protein, 29 aa, Artificial Sequence
  Synthetic polypeptide
SNWVKYVFMSKFTFLSKFSQIWKPCFCWQ

SEQ ID NO: 9388 - protein, 29 aa, Artificial Sequence
  Synthetic polypeptide
SNWVKYVFMSKFTFLSKFSQIWKPCFCWQ

SEQ ID NO: 9389 - protein, 29 aa, Artificial Sequence
  Synthetic polypeptide
SNWVKYVFMSKFTFLSKFSQIWKPCFCWQ

SEQ ID NO: 9390 - protein, 29 aa, Artificial Sequence
  Synthetic polypeptide
SNWVKYVFMSKFTFLSKFSQIWKPCFCWQ

SEQ ID NO: 9391 - protein, 29 aa, Artificial Sequence
  Synthetic polypeptide
SNWVKYVFMSKFTFLSKFSQIWKPCFCWQ

SEQ ID NO: 9392 - protein, 29 aa, Artificial Sequence
  Synthetic polypeptide
SNWVKYVFMSKFTFLSKFSQIWKPCFCWQ

SEQ ID NO: 9393 - protein, 29 aa, Artificial Sequence
  Synthetic polypeptide
SNWVKYVFMSKFTFLSKFSQIWKPCFCWQ

SEQ ID NO: 9394 - protein, 29 aa, Artificial Sequence
  Synthetic polypeptide
SNWVKYVFMSKFTFLSKFSQIWKPCFCWQ

SEQ ID NO: 9395 - protein, 55 aa, Artificial Sequence
  Synthetic polypeptide
ANLPFSPSSPKFGNHVSVGNNMCICIQNTVWILYEFHAHTNRETIQHPNISSWIH

SEQ ID NO: 9396 - protein, 55 aa, Artificial Sequence; identical to SEQ ID NO: 9395
  Synthetic polypeptide

SEQ ID NO: 9397 - protein, 55 aa, Artificial Sequence; identical to SEQ ID NO: 9395
  Synthetic polypeptide

SEQ ID NO: 9398 - protein, 55 aa, Artificial Sequence; identical to SEQ ID NO: 9395
  Synthetic polypeptide

SEQ ID NO: 9399 - protein, 55 aa, Artificial Sequence; identical to SEQ ID NO: 9395
  Synthetic polypeptide

SEQ ID NO: 9400 - protein, 55 aa, Artificial Sequence; identical to SEQ ID NO: 9395
  Synthetic polypeptide

SEQ ID NO: 9401 - protein, 55 aa, Artificial Sequence; identical to SEQ ID NO: 9395
  Synthetic polypeptide

SEQ ID NO: 9402 - protein, 55 aa, Artificial Sequence; identical to SEQ ID NO: 9395
  Synthetic polypeptide

SEQ ID NO: 9403 - protein, 55 aa, Artificial Sequence; identical to SEQ ID NO: 9395
  Synthetic polypeptide

SEQ ID NO: 9404 - protein, 55 aa, Artificial Sequence; identical to SEQ ID NO: 9395
  Synthetic polypeptide

SEQ ID NO: 9405 - protein, 55 aa, Artificial Sequence; identical to SEQ ID NO: 9395
  Synthetic polypeptide

SEQ ID NO: 9406 - protein, 679 aa, Artificial Sequence
  Synthetic polypeptide
IIYSLEQLGEVCFYEQIYLSLQVLPNLETMFLLAITCAFVSKTLSGSYMNSMLTQIERQFNIPTSLVGFINGSFEIGNLLLIIFVSYFGTKLHRPIMIGIGCVVMGLGCFLKSLPHFLMNQYEYESTVSVSGNLSSNSFLCMENGTQILRPTQDPSECTKEVKSLMWVYVLVGNIVRGMGETPILPLGISYIEDFAKFENSPLYIGLVETGAIIGPLIGLLLASFCANVYVDTGFVNTDDLIITPTDTRWVGAWWFGFLICAGVNVLTAIPFFFLPNTLPKEGLETNADIIKNENEDKQKEEVKKEKYGITKDFLPFMKSLSCNPIYMLFILVSVIQFNAFVNMISFMPKYLEQQYGISSSDAIFLMGIYNLPPICIGYIIGGLIMKKFKITVKQAAHIGCWLSLLEYLLYFLSFLMTCENSSVVGINTSYEGIPQDLYVENDIFADCNVDCNCPSKIWDPVCGNNGLSYLSACLAGCETSIGTGINMVFQNCSCIQTSGNSSAVLGLCDKGPDCSLMLQYFLILSAMSSFIYSLAAIPGYMVLLRCMKSEEKSLGVGLHTFCTRVFAGIPAPIYFGALMDSTCLHWGTLKCGESGACRIYDSTTFRYIYLGLPAALRGSSFVPALIILILLRKCHLPGENASSGTELIETKVKGKENECKDIYQKSTVLKDDELKTKL

SEQ ID NO: 9407 - protein, 679 aa, Artificial Sequence; identical to SEQ ID NO: 9406
  Synthetic polypeptide

SEQ ID NO: 9408 - protein, 104 aa, Artificial Sequence
  Synthetic polypeptide
IIYSLEQLGEVCFYEQIYLSLQVLPNLETMFLLAITCAFVSKTLSGSYMNSMLTQIERQFNIPTSLVGFINGSFEIDMNMNLQFQFQATCPQTVSCVWKMEPRF

SEQ ID NO: 9409 - protein, 104 aa, Artificial Sequence; identical to SEQ ID NO: 9408
  Synthetic polypeptide

SEQ ID NO: 9410 - protein, 590 aa, Artificial Sequence
  Synthetic polypeptide
IIYSLEQLGEVCFYEQIYLSLQVLPNLETMFLLAITCAFVSKTLSGSYMNSMLTQIERQFNIPTSLVGFINGSFEIGNLLLIIFVSYFGTKLHRPIMIGIGCVVMGLGCFLKSLPHFLMNQYEYESTVSVSGNLSSNSFLCMENGTQILRPTQDPSECTKEVKSLMWVYVLVGNIVRGMGETPILPLGISYIEDFAKFENSPLYIGLVETGAIIGPLIGLLLASFCANVYVDTGFVNTDDLIITPTDTRWVGAWWFGFLICAGVNVLTAIPFFFLPNTLPKEGLETNADIIKNENEDKQKEEVKKEKYGITKDFLPFMKSLSCNPIYMLFILVSVIQFNAFVNMISFMPKYLEQQYGISSSDAIFLMGIYNLPPICIGYIIGGLIMKKFKITVKQAAHIGCWLSLLEYLLYFLSFLMTCENSSVVGINTSYEGIPQDLYVENDIFADCNVDCNCPSKIWDPVCGNNGLSYLSACLAGCETSIGTGINMVFQNCSCIQTSGNSSAVLGLCDKGPDCSLMLQYFLILSAMSSFIYSLAAIPGYMVLLRCMKSEEKSLGVGLHTFCTRVFGKNSYFFPHPIRTILLLLFFITL

SEQ ID NO: 9411 - protein, 156 aa, Artificial Sequence
  Synthetic polypeptide
IIYSLEQLGEVCFYEQIYLSLQVLPNLETMFLLAITCAFVSKTLSGSYMNSMLTQIERQFNIPTSLVGFINGSFEIGNLLLIIFVSYFGTKLHRPIMIGIGCVVMGLGCFLKSLPHFLMNQYEYESTVSVSGNLSSNSFLCMENGTQILRPTQDPS

SEQ ID NO: 9412 - protein, 145 aa, Artificial Sequence
  Synthetic polypeptide
IIYSLEQLGEVCFYEQIYLSLQVLPNLETMFLLAITCAFVSKTLSGSYMNSMLTQIERQFNIPTSLVGFINGSFEIGNLLLIIFVSYFGTKLHRPIMIGIGCVVMGLGCFLKSLPHFLMNQYEYESTVSVSGNLSSNSFLCMENG

SEQ ID NO: 9413 - protein, 108 aa, Artificial Sequence
  Synthetic polypeptide
IIYSLEQLGEVCFYEQIYLSLQVLPNLETMFLLAITCAFVSKTLSGSYMNSMLTQIERQFNIPTSLVGFINGSFEIGNLLLIIFVSYFGTKLHRPIMIGIGCVVMGLG

SEQ ID NO: 9414 - protein, 100 aa, Artificial Sequence
  Synthetic polypeptide
IIYSLEQLGEVCFYEQIYLSLQVLPNLETMFLLAITCAFVSKTLSGSYMNSMLTQIERQFNIPTSLVGFINGSFEIGNLLLIIFVSYFGTKLHRPIMIGI

SEQ ID NO: 9415 - protein, 97 aa, Artificial Sequence
  Synthetic polypeptide
IIYSLEQLGEVCFYEQIYLSLQVLPNLETMFLLAITCAFVSKTLSGSYMNSMLTQIERQFNIPTSLVGFINGSFEIGNLLLIIFVSYFGTKLHRPIM

SEQ ID NO: 9416 - protein, 82 aa, Artificial Sequence
  Synthetic polypeptide
IIYSLEQLGEVCFYEQIYLSLQVLPNLETMFLLAITCAFVSKTLSGSYMNSMLTQIERQFNIPTSLVGFINGSFEIGNLLLI

SEQ ID NO: 9417 - protein, 45 aa, Artificial Sequence
  Synthetic polypeptide
ANLPFSPSSPKFGNHVSVGNNMCICIQNTVWILYEFHAHTNRETI

SEQ ID NO: 9418 - protein, 60 aa, Artificial Sequence
  Synthetic polypeptide
IIYSLEQLGEVCFYEQIYLSLQVLPNLETMFLLAITCAFVSKTLSGSYMNSMLTQIERQF

SEQ ID NO: 9419 - protein, 28 aa, Artificial Sequence
  Synthetic polypeptide
QQLPGYQIHQVMSLKKESTGRSKCYSYQ

SEQ ID NO: 9420 - protein, 28 aa, Artificial Sequence
  Synthetic polypeptide
QQLPGYQIHQVMSLKKESTGRSKCYSYQ

SEQ ID NO: 9421 - protein, 28 aa, Artificial Sequence
  Synthetic polypeptide
QQLPGYQIHQVMSLKKESTGRSKCYSYQ

SEQ ID NO: 9422 - protein, 28 aa, Artificial Sequence
  Synthetic polypeptide
QQLPGYQIHQVMSLKKESTGRSKCYSYQ

SEQ ID NO: 9423 - protein, 28 aa, Artificial Sequence
  Synthetic polypeptide
QQLPGYQIHQVMSLKKESTGRSKCYSYQ

SEQ ID NO: 9424 - protein, 28 aa, Artificial Sequence
  Synthetic polypeptide
QQLPGYQIHQVMSLKKESTGRSKCYSYQ

SEQ ID NO: 9425 - protein, 28 aa, Artificial Sequence
  Synthetic polypeptide
QQLPGYQIHQVMSLKKESTGRSKCYSYQ

SEQ ID NO: 9426 - protein, 493 aa, Artificial Sequence
  Synthetic polypeptide
NSCQVTKSIRLCRLKKKAQAEANATAISNLLPFMEYEVHTQLMNKLKLKGMNALFGLRIQITVGENMLMGLASATGVYLAALPTPGGIQIAGKTPNDGSYEQHISHMQKKINDTIAKNKELYEINPPEISEEIIGSPIPEPRQRSRLLRSQSESSDEVTELDLSHGKKDAFVLEIDDTDAMEDVHSLLTDVPPPSGFYSCNTEIMPGINNWTSEIQMFTSVRVIRLSSLNLTNQALNKNFNDLCENLLKSLYFKLRSMIPCCLCHVNFTVSLPEDELIQVTVTAVAITFDKNQALQTTKTPVEKSLQRASTDNEELLQFPLELCSDSLPSHPFPPAKAMTVEKASPVGDGNFRNRSAPPCANSTVGVVKMTPLSFIPGAKITKYLGIINMFFIRETTSLREEGGVSGFLHAFIAEVFAMVRAHVAALGGNAVVSYIMKQCVFMENPNKNQAQCLINVSGDAVVFVRESDLEVVSSQQPTTNCQSSCTEGEVTT

SEQ ID NO: 9427 - protein, 13 aa, Artificial Sequence
  Synthetic polypeptide
TAARLPNPSGYVA

SEQ ID NO: 9428 - protein, 13 aa, Artificial Sequence
  Synthetic polypeptide
TAARLPNPSGYVA

SEQ ID NO: 9429 - protein, 13 aa, Artificial Sequence
  Synthetic polypeptide
TAARLPNPSGYVA

SEQ ID NO: 9430 - protein, 13 aa, Artificial Sequence
  Synthetic polypeptide
TAARLPNPSGYVA

SEQ ID NO: 9431 - protein, 13 aa, Artificial Sequence
  Synthetic polypeptide
TAARLPNPSGYVA

SEQ ID NO: 9432 - protein, 13 aa, Artificial Sequence
  Synthetic polypeptide
TAARLPNPSGYVA

SEQ ID NO: 9433 - protein, 13 aa, Artificial Sequence
  Synthetic polypeptide
TAARLPNPSGYVA

SEQ ID NO: 9434 - protein, 544 aa, Artificial Sequence
  Synthetic polypeptide
NSCQVTKSIRLCRLKKKAQAEANATAISNLLPFMEYEVHTQLMNKLKLKGMNALFGLRIQITVGENMLMGLASATGVYLAALPTPGGIQIAGKTPNDGSYEQHISHMQKKINDTIAKNKELYEINPPEISEEIIGSPIPEPRQRSRLLRSQSESSDEVTELDLSHGKKDAFVLEIDDTDAMEDVHSLLTDVPPPSGFYSCNTEIMPGINNWTSEIQMFTSVRVIRLSSLNLTNQALNKNFNDLCENLLKSLYFKLRSMIPCCLCHVNFTVSLPEDELIQVTVTAVAITFDKNQALQTTKTPVEKSLQRASTDNEELLQFPLELCSDSLPSHPFPPAKEHLESASSNSGIPAAQRATSVDYSSFADRCSSWIELIKLKAQTIRRGSIKTTMTVEKASPVGDGNFRNRSAPPCANSTVGVVKMTPLSFIPGAKITKYLGIINMFFIRETTSLREEGGVSGFLHAFIAEVFAMVRAHVAALGGNAVVSYIMKQCVFMENPNKNQAQCLINVSGDAVVFVRESDLEVVSSQQPTTNCQSSCTEGEVTT

SEQ ID NO: 9435 - protein, 544 aa, Artificial Sequence; identical to SEQ ID NO: 9434
  Synthetic polypeptide

SEQ ID NO: 9436 - protein, 544 aa, Artificial Sequence; identical to SEQ ID NO: 9434
  Synthetic polypeptide

SEQ ID NO: 9437 - protein, 544 aa, Artificial Sequence; identical to SEQ ID NO: 9434
  Synthetic polypeptide

SEQ ID NO: 9438 - protein, 534 aa, Artificial Sequence
  Synthetic polypeptide
NSCQVTKSIRLCRLKKKAQAEANATAISNLLPFMEYEVHTQLMNKLKLKGMNALFGLRIQITVGENMLMGLASATGVYLAALPTPGGIQIAGKTPNDGSYEQHISHMQKKINDTIAKNKELYEINPPEISEEIIGSPIPEPRQRSRLLRSQSESSDEVTELDLSHGKKDAFVLEIDDTDAMEDVHSLLTDVPPPSGFYSCNTEIMPGINNWTSEIQMFTSVRVIRLSSLNLTNQALNKNFNDLCENLLKSLYFKLRSMIPCCLCHVNFTVSLPEDELIQVTVTAVAITFDKNQALQTTKTPVEKSLQRASTDNEELLQFPLELCSDSLPSHPFPPAKEHLESASSNSGIPAAQRDRCSSWIELIKLKAQTIRRGSIKTTMTVEKASPVGDGNFRNRSAPPCANSTVGVVKMTPLSFIPGAKITKYLGIINMFFIRETTSLREEGGVSGFLHAFIAEVFAMVRAHVAALGGNAVVSYIMKQCVFMENPNKNQAQCLINVSGDAVVFVRESDLEVVSSQQPTTNCQSSCTEGEVTT

SEQ ID NO: 9439 - protein, 534 aa, Artificial Sequence; identical to SEQ ID NO: 9438
  Synthetic polypeptide

SEQ ID NO: 9440 - protein, 64 aa, Artificial Sequence
  Synthetic polypeptide
GSRQTGRENTMQQKERLKCWQLQAKKHLGYQKLEEERIAVTDAPQSVPEKEDQKRWWGLLRLKT

SEQ ID NO: 9441 - protein, 64 aa, Artificial Sequence; identical to SEQ ID NO: 9440
  Synthetic polypeptide

SEQ ID NO: 9442 - protein, 64 aa, Artificial Sequence; identical to SEQ ID NO: 9440
  Synthetic polypeptide

SEQ ID NO: 9443 - protein, 64 aa, Artificial Sequence; identical to SEQ ID NO: 9440
  Synthetic polypeptide

SEQ ID NO: 9444 - protein, 6 aa, Artificial Sequence
  Synthetic polypeptide
KKKGLQ

SEQ ID NO: 9445 - protein, 6 aa, Artificial Sequence
  Synthetic polypeptide
KKKGLQ

SEQ ID NO: 9446 - protein, 6 aa, Artificial Sequence
  Synthetic polypeptide
KKKGLQ

SEQ ID NO: 9447 - protein, 6 aa, Artificial Sequence
  Synthetic polypeptide
KKKGLQ

SEQ ID NO: 9448 - protein, 420 aa, Artificial Sequence
  Synthetic polypeptide
KQTDRKGKHNATEGEIEVLAAASQETPGLPEARRRKDCSNGCSAECTGEGGSKEVVGTFKAKDLIVTPATILKEKPDPNNLVFGTVFTDHMLTVEWSSEFGWEKPHIKPLQNLSLHPGSSALHYAVELFEGLKAFRGVDNKIRLFQPNLNMDRMYRSAVRATLPVFDKEELLECIQQLVKLDQEWVPYSTSASLYIRPTFIGTEPSLGVKKPTKALLFVLLSPVGPYFSSGTFNPVSLWANPKYVRAWKGGTGDCKMGGNYGSSLFAQCEAVDNGCQQVLWLYGEDHQITEVGTMNLFLYWINEDGEEELATPPLDGIILPGVTRRCILDLAHQWGEFKVSERYLTMDDLTTALEGNRVREMFGSGTACVVCPVSDILYKGETIHIPTMENGPKLASRILSKLTDIQYGREESDWTIVLS

SEQ ID NO: 9449 - protein, 420 aa, Artificial Sequence; identical to SEQ ID NO: 9448
  Synthetic polypeptide

SEQ ID NO: 9450 - protein, 420 aa, Artificial Sequence; identical to SEQ ID NO: 9448
  Synthetic polypeptide

SEQ ID NO: 9451 - protein, 383 aa, Artificial Sequence
  Synthetic polypeptide
KQTDRKGKHNATEGEIEVLAAASQETPGLPEARRRKDCSNGCSAECTGEGGSKEVVGTFKAKDLIVTPATILKEKPDPNNLVFGTVFTDHMLTVEWSSEFGWEKPHIKPLQNLSLHPGSSALHYAVEVFDKEELLECIQQLVKLDQEWVPYSTSASLYIRPTFIGTEPSLGVKKPTKALLFVLLSPVGPYFSSGTFNPVSLWANPKYVRAWKGGTGDCKMGGNYGSSLFAQCEAVDNGCQQVLWLYGEDHQITEVGTMNLFLYWINEDGEEELATPPLDGIILPGVTRRCILDLAHQWGEFKVSERYLTMDDLTTALEGNRVREMFGSGTACVVCPVSDILYKGETIHIPTMENGPKLASRILSKLTDIQYGREESDWTIVLS

SEQ ID NO: 9452 - protein, 351 aa, Artificial Sequence
  Synthetic polypeptide
GQEIETILANKVVTLTANDKTSVSFSSLPGQGVIYNVIVWDPFLNTSAAYIPAHTYACSFEAGEGSCASLGRVSSKVFFTLFALLGFFICFFGHRFWKTELFFIGFIIMGFFFYILITRLTPIKYDVNLILTAVTGSVGGMFLVAVWWRFGILSICMLCVGLVLGFLISSVTFFTPLGNLKIFHDDGVFWVTFSCIAILIPVVFMGCLRILNILTCGVIGSYSVVLAIDSYWSTSLSYITLNVLKRALNKDFHRAFTNVPFQTNDFIILAVWGMLAVSGITLQIRRERGRPFFPPHPYKLWKQERERRVTNILDPSYHIPPLRERLYGRLTQIKGLFQKEQPAGERTPLLL

SEQ ID NO: 9453 - protein, 27 aa, Artificial Sequence
  Synthetic polypeptide
SQHFGRPRRVDHEVRRSRPSWLTRWLP

SEQ ID NO: 9454 - protein, 27 aa, Artificial Sequence
  Synthetic polypeptide
SQHFGRPRRVDHEVRRSRPSWLTRWLP

SEQ ID NO: 9455 - protein, 27 aa, Artificial Sequence
  Synthetic polypeptide
SQHFGRPRRVDHEVRRSRPSWLTRWLP

SEQ ID NO: 9456 - protein, 27 aa, Artificial Sequence
  Synthetic polypeptide
SQHFGRPRRVDHEVRRSRPSWLTRWLP

SEQ ID NO: 9457 - protein, 27 aa, Artificial Sequence
  Synthetic polypeptide
SQHFGRPRRVDHEVRRSRPSWLTRWLP

SEQ ID NO: 9458 - protein, 27 aa, Artificial Sequence
  Synthetic polypeptide
SQHFGRPRRVDHEVRRSRPSWLTRWLP

SEQ ID NO: 9459 - protein, 7 aa, Artificial Sequence
  Synthetic polypeptide
QGGYPNS

SEQ ID NO: 9460 - protein, 7 aa, Artificial Sequence
  Synthetic polypeptide
QGGYPNS

SEQ ID NO: 9461 - protein, 7 aa, Artificial Sequence
  Synthetic polypeptide
QGGYPNS

SEQ ID NO: 9462 - protein, 7 aa, Artificial Sequence
  Synthetic polypeptide
QGGYPNS

SEQ ID NO: 9463 - protein, 7 aa, Artificial Sequence
  Synthetic polypeptide
QGGYPNS

SEQ ID NO: 9464 - protein, 7 aa, Artificial Sequence
  Synthetic polypeptide
QGGYPNS

SEQ ID NO: 9465 - protein, 144 aa, Artificial Sequence
  Synthetic polypeptide
GQEIETILANKVVTLTANDKTSVSFSSLPGQGVIYNVIVWDPFLNTSAAYIPAHTYACSFEAGEGSCASLGRVSSKVFFTLFALLGFFICFFGHRFWKTELFFIGFIIMGFFFYILITRLTPIKYDAEHTDLWSHWLLFGGFSH

SEQ ID NO: 9466 - protein, 190 aa, Artificial Sequence
  Synthetic polypeptide
GQEIETILANKVVTLTANDKTSVSFSSLPGQGVIYNVIVWDPFLNTSAAYIPAHTYACSFEAGEGSCASLGRVSSKVFFTLFALLGFFICFFGHRFWKTELFFIGFIIMGFFFYILITRLTPIKYDVNLILTAVTGSVGGMFLVAVWWRFGILSICMLCVGLVLGFLISSVTFFTPLETGSLSVTHAGLQ

SEQ ID NO: 9467 - protein, 91 aa, Artificial Sequence
  Synthetic polypeptide
GQEIETILANKVVTLTANDKTSVSFSSLPGQGVIYNVIVWDPFLNTSAAYIPAHTYACSFEAGEGSCASLAVLYLLLCLSTSSPSFITGLF

SEQ ID NO: 9468 - protein, 126 aa, Artificial Sequence
  Synthetic polypeptide
GQEIETILANKVVTLTANDKTSVSFSSLPGQGVIYNVIVWDPFLNTSAAYIPAHTYACSFEAGEGSCASLGRVSSKVFFTLFALLGFFICFFGHRFWKTELFFIGFIIMGFFFYILITRLTPIKYD

SEQ ID NO: 9469 - protein, 126 aa, Artificial Sequence; identical to SEQ ID NO: 9468
  Synthetic polypeptide

SEQ ID NO: 9470 - protein, 39 aa, Artificial Sequence
  Synthetic polypeptide
GWSQDGRIGTAPVYSSQHERHRRRVLSAFPAEVTVFFIP

SEQ ID NO: 9471 - protein, 39 aa, Artificial Sequence; identical to SEQ ID NO: 9470
  Synthetic polypeptide

SEQ ID NO: 9472 - protein, 39 aa, Artificial Sequence; identical to SEQ ID NO: 9470
  Synthetic polypeptide

SEQ ID NO: 9473 - protein, 39 aa, Artificial Sequence; identical to SEQ ID NO: 9470
  Synthetic polypeptide

SEQ ID NO: 9474 - protein, 39 aa, Artificial Sequence; identical to SEQ ID NO: 9470
  Synthetic polypeptide

SEQ ID NO: 9475 - protein, 39 aa, Artificial Sequence; identical to SEQ ID NO: 9470
  Synthetic polypeptide

SEQ ID NO: 9476 - protein, 39 aa, Artificial Sequence; identical to SEQ ID NO: 9470
  Synthetic polypeptide

SEQ ID NO: 9477 - protein, 39 aa, Artificial Sequence; identical to SEQ ID NO: 9470
  Synthetic polypeptide

SEQ ID NO: 9478 - protein, 131 aa, Artificial Sequence
  Synthetic polypeptide
EQLQSTAPSMSDTEDGCFLHFQLRLQSSSYLDDSSPTGLMKDTHTVNCRSMSNKELFPPSPSEMGELEATRQNQSTVAVHSHEPLLSDGAQLDFDALCDNDDTAMAAFMNYLEAEGGLGDPGDFSDIQWTL

SEQ ID NO: 9479 - protein, 131 aa, Artificial Sequence; identical to SEQ ID NO: 9478
  Synthetic polypeptide

SEQ ID NO: 9480 - protein, 131 aa, Artificial Sequence; identical to SEQ ID NO: 9478
  Synthetic polypeptide

SEQ ID NO: 9481 - protein, 131 aa, Artificial Sequence; identical to SEQ ID NO: 9478
  Synthetic polypeptide

SEQ ID NO: 9482 - protein, 131 aa, Artificial Sequence; identical to SEQ ID NO: 9478
  Synthetic polypeptide

SEQ ID NO: 9483 - protein, 131 aa, Artificial Sequence; identical to SEQ ID NO: 9478
  Synthetic polypeptide

SEQ ID NO: 9484 - protein, 131 aa, Artificial Sequence; identical to SEQ ID NO: 9478
  Synthetic polypeptide

SEQ ID NO: 9485 - protein, 72 aa, Artificial Sequence
  Synthetic polypeptide
EQLQSTAPSMSDTEDGCFLHFQLRLQSSSYLDDSSPTGLMKDTHTVNCRSVMVHSWISMPYVTMMTQPWLHL

SEQ ID NO: 9486 - protein, 71 aa, Artificial Sequence
  Synthetic polypeptide
ASNPPLCDSEKGDLIPSSRINSVSGVHLSPSSPEIVLDRDHSSSIGCLSSDAIISSPENTHAANSIVSQTI

SEQ ID NO: 9487 - protein, 77 aa, Artificial Sequence
  Synthetic polypeptide
YLSNRSFVLFRLLTLLYVTQRKETSFQVPGLILYLESIFHHLLLRLYWTVTTLLPLAASLLMPLFHHQRIHMQQIAL

SEQ ID NO: 9488 - protein, 77 aa, Artificial Sequence; identical to SEQ ID NO: 9487
  Synthetic polypeptide

SEQ ID NO: 9489 - protein, 77 aa, Artificial Sequence; identical to SEQ ID NO: 9487
  Synthetic polypeptide

SEQ ID NO: 9490 - protein, 77 aa, Artificial Sequence; identical to SEQ ID NO: 9487
  Synthetic polypeptide

SEQ ID NO: 9491 - protein, 77 aa, Artificial Sequence; identical to SEQ ID NO: 9487
  Synthetic polypeptide

SEQ ID NO: 9492 - protein, 77 aa, Artificial Sequence; identical to SEQ ID NO: 9487
  Synthetic polypeptide

SEQ ID NO: 9493 - protein, 77 aa, Artificial Sequence; identical to SEQ ID NO: 9487
  Synthetic polypeptide

SEQ ID NO: 9494 - protein, 77 aa, Artificial Sequence; identical to SEQ ID NO: 9487
  Synthetic polypeptide

SEQ ID NO: 9495 - protein, 77 aa, Artificial Sequence; identical to SEQ ID NO: 9487
  Synthetic polypeptide

SEQ ID NO: 9496 - protein, 77 aa, Artificial Sequence; identical to SEQ ID NO: 9487
  Synthetic polypeptide

SEQ ID NO: 9497 - protein, 12 aa, Artificial Sequence
  Synthetic polypeptide
FCIWSPSFTIFS

SEQ ID NO: 9498 - protein, 12 aa, Artificial Sequence
  Synthetic polypeptide
FCIWSPSFTIFS

SEQ ID NO: 9499 - protein, 12 aa, Artificial Sequence
  Synthetic polypeptide
FCIWSPSFTIFS

SEQ ID NO: 9500 - protein, 12 aa, Artificial Sequence
  Synthetic polypeptide
FCIWSPSFTIFS

SEQ ID NO: 9501 - protein, 12 aa, Artificial Sequence
  Synthetic polypeptide
FCIWSPSFTIFS

SEQ ID NO: 9502 - protein, 12 aa, Artificial Sequence
  Synthetic polypeptide
FCIWSPSFTIFS

SEQ ID NO: 9503 - protein, 12 aa, Artificial Sequence
  Synthetic polypeptide
FCIWSPSFTIFS

SEQ ID NO: 9504 - protein, 12 aa, Artificial Sequence
  Synthetic polypeptide
FCIWSPSFTIFS

SEQ ID NO: 9505 - protein, 12 aa, Artificial Sequence
  Synthetic polypeptide
FCIWSPSFTIFS

SEQ ID NO: 9506 - protein, 12 aa, Artificial Sequence
  Synthetic polypeptide
FCIWSPSFTIFS

SEQ ID NO: 9507 - protein, 391 aa, Artificial Sequence
  Synthetic polypeptide
ASNPPLCDSEKGDLIPSSRINSVSGVHLSPSSPEIVLDRDHSSSIGCLSSDAIISSPENTHAANSIVSQTIPKAQIQQSTHTHLDISLFPLGLTDEKSNGTIALVDDSEDPGANVSNIQLQQKISSLEIKLKVSEEEKQRIKQDVESLMEKHNVLEKGFLKEKEQEAISFQDRYKELQEKHKQELEDMRKAGHEALSIIVDEYKHQRLLEMLDTEKELLKEKIKEALIQQSQEQKEILEKCLEEERQRNKEALVSAAKLEKEAVKDAVLKVVEEERKNLEKAHAEERELWKTEHAKDQEKVSQEIQKAIQEQRKISQETVKAAIIEEQKRSEKAVEEAVKRTRDELIEYIKEQKRLDQVIRQRSLSSLELFLSCAQKQLSALIATEPVDIE

SEQ ID NO: 9508 - protein, 391 aa, Artificial Sequence; identical to SEQ ID NO: 9507
  Synthetic polypeptide

SEQ ID NO: 9509 - protein, 347 aa, Artificial Sequence
  Synthetic polypeptide
ASNPPLCDSEKGDLIPSSRINSVSGVHLSPSSPEIVLDRDHSSSIGCLSSDAIISSPENTHAANSIVSQTIPKAQIQQSTHTHLDISLFPLGLTDEKSNGTIALVDDSEDPGANVSNIQLQQKISSLEIKLKVSEEEKQRIKQDVESLMEKHNVLEKGFLKEKEQEAISFQDRYKELQEKHKQELEDMRKAGHEALSIIVDEYKALLQSSVKQQVEAIEKQYISAIEKQAHKCEELLNAQHQRLLEMLDTEKELLKEKIKEALIQQSQEQKEILEKCLEEERQRNKEALVSAAKLEKEAVKDAVLKVVEEERKNLEKAHAEERELWKTEHAKDQEKVSQEIQKAIQE

SEQ ID NO: 9510 - protein, 427 aa, Artificial Sequence
  Synthetic polypeptide
ASNPPLCDSEKGDLIPSSRINSVSGVHLSPSSPEIVLDRDHSSSIGCLSSDAIISSPENTHAANSIVSQTIPKAQIQQSTHTHLDISLFPLGLTDEKSNGTIALVDDSEDPGANVSNIQLQQKISSLEIKLKVSEEEKQRIKQDVESLMEKHNVLEKGFLKEKEQEAISFQDRYKELQEKHKQELEDMRKAGHEALSIIVDEYKALLQSSVKQQVEAIEKQYISAIEKQAHKCEELLNAQHQRLLEMLDTEKELLKEKIKEALIQQSQEQKEILEKCLEEERQRNKEALVSAAKLEKEAVKDAVLKVVEEERKNLEKAHAEERELWKTEHAKDQEKVSQEIQKAIQEQRKISQETVKAAIIEEQKRSEKAVEEAVKRTRDELIEYIKEQKRLDQVIRQRSLSSLELFLSCAQKQLSALIATEPVDIE

SEQ ID NO: 9511 - protein, 427 aa, Artificial Sequence; identical to SEQ ID NO: 9510
  Synthetic polypeptide

SEQ ID NO: 9512 - protein, 427 aa, Artificial Sequence; identical to SEQ ID NO: 9510
  Synthetic polypeptide

SEQ ID NO: 9513 - protein, 77 aa, Artificial Sequence
  Synthetic polypeptide
ASNPPLCDSEKGDLIPSSRINSVSGVHLSPSSPEIVLDRDHSSSIGCLSSDAIISSPENTHAANSIVSQTIPKAQIQ

SEQ ID NO: 9514 - protein, 253 aa, Artificial Sequence
  Synthetic polypeptide
ASNPPLCDSEKGDLIPSSRINSVSGVHLSPSSPEIVLDRDHSSSIGCLSSDAIISSPENTHAANSIVSQTIPKAQIQQSTHTHLDISLFPLGLTDEKSNGTIALVDDSEDPGANVSNIQLQQKISSLEIKLKVSEEEKQRIKQDVESLMEKHNVLEKGFLKEKEQEAISFQDRYKELQEKHKQELEDMRKAGHEALSIIVDEYKALLQSSVKQQVEAIEKQYISAIEKQAHKCEELLNAQSALFSILPAIGCF

SEQ ID NO: 9515 - protein, 348 aa, Artificial Sequence
  Synthetic polypeptide
ASNPPLCDSEKGDLIPSSRINSVSGVHLSPSSPEIVLDRDHSSSIGCLSSDAIISSPENTHAANSIVSQTIPKAQIQQSTHTHLDISLFPLGLTDEKSNGTIALVDDSEDPGANVSNIQLQQKISSLEIKLKVSEEEKQRIKQDVESLMEKHNVLEKGFLKEKEQEAISFQDRYKELQEKHKQELEDMRKAGHEALSIIVDEYKALLQSSVKQQVEAIEKQYISAIEKQAHKCEELLNAQHQRLLEMLDTEKELLKEKIKEALIQQSQEQKEILEKCLEEERQRNKEALVSAAKLEKEAVKDAVLKVVEEERKNLEKAHAEERELWKTEHAKDQEKVSQEIQKAIQEQ

SEQ ID NO: 9516 - protein, 29 aa, Artificial Sequence
  Synthetic polypeptide
ASNPPLCDSEKGDLIPSSRINSGTTAVFS

SEQ ID NO: 9517 - protein, 29 aa, Artificial Sequence
  Synthetic polypeptide
ASNPPLCDSEKGDLIPSSRINSGTTAVFS

SEQ ID NO: 9518 - protein, 29 aa, Artificial Sequence
  Synthetic polypeptide
ASNPPLCDSEKGDLIPSSRINSGTTAVFS

SEQ ID NO: 9519 - protein, 29 aa, Artificial Sequence
  Synthetic polypeptide
ASNPPLCDSEKGDLIPSSRINSGTTAVFS

SEQ ID NO: 9520 - protein, 29 aa, Artificial Sequence
  Synthetic polypeptide
ASNPPLCDSEKGDLIPSSRINSGTTAVFS

SEQ ID NO: 9521 - protein, 29 aa, Artificial Sequence
  Synthetic polypeptide
ASNPPLCDSEKGDLIPSSRINSGTTAVFS

SEQ ID NO: 9522 - protein, 29 aa, Artificial Sequence
  Synthetic polypeptide
ASNPPLCDSEKGDLIPSSRINSGTTAVFS

SEQ ID NO: 9523 - protein, 139 aa, Artificial Sequence
  Synthetic polypeptide
YLSNRSFVLFRLLTLLYVTQRKETSFQVPGLILALLQSSVKQQVEAIEKQYISAIEKQAHKCEELLNAQHQRLLEMLDTEKELLKEKIKEALIQQSQEQKEILEKCLEEERQRNKEALVSAAKLEKEAVKDAVLKVVEE

SEQ ID NO: 9524 - protein, 12 aa, Artificial Sequence
  Synthetic polypeptide
FWHYCSLQLSNK

SEQ ID NO: 9525 - protein, 12 aa, Artificial Sequence
  Synthetic polypeptide
FWHYCSLQLSNK

SEQ ID NO: 9526 - protein, 12 aa, Artificial Sequence
  Synthetic polypeptide
FWHYCSLQLSNK

SEQ ID NO: 9527 - protein, 12 aa, Artificial Sequence
  Synthetic polypeptide
FWHYCSLQLSNK

SEQ ID NO: 9528 - protein, 12 aa, Artificial Sequence
  Synthetic polypeptide
FWHYCSLQLSNK

SEQ ID NO: 9529 - protein, 12 aa, Artificial Sequence
  Synthetic polypeptide
FWHYCSLQLSNK

SEQ ID NO: 9530 - protein, 12 aa, Artificial Sequence
  Synthetic polypeptide
FWHYCSLQLSNK

SEQ ID NO: 9531 - protein, 176 aa, Artificial Sequence
  Synthetic polypeptide
YLSNRSFVLFRLLTLLYVTQRKETSFQVPGLILALLQSSVKQQVEAIEKQYISAIEKQAHKCEELLNAQHQRLLEMLDTEKELLKEKIKEALIQQSQEQKEILEKCLEEERQRNKEALVSAAKLEKEAVKDAVLKVVEEERKNLEKAHAEERELWKTEHAKDQEKVSQEIQKAIQE

SEQ ID NO: 9532 - protein, 256 aa, Artificial Sequence
  Synthetic polypeptide
YLSNRSFVLFRLLTLLYVTQRKETSFQVPGLILALLQSSVKQQVEAIEKQYISAIEKQAHKCEELLNAQHQRLLEMLDTEKELLKEKIKEALIQQSQEQKEILEKCLEEERQRNKEALVSAAKLEKEAVKDAVLKVVEEERKNLEKAHAEERELWKTEHAKDQEKVSQEIQKAIQEQRKISQETVKAAIIEEQKRSEKAVEEAVKRTRDELIEYIKEQKRLDQVIRQRSLSSLELFLSCAQKQLSALIATEPVDIE

SEQ ID NO: 9533 - protein, 256 aa, Artificial Sequence; identical to SEQ ID NO: 9532
  Synthetic polypeptide

SEQ ID NO: 9534 - protein, 256 aa, Artificial Sequence; identical to SEQ ID NO: 9532
  Synthetic polypeptide

SEQ ID NO: 9535 - protein, 82 aa, Artificial Sequence
  Synthetic polypeptide
YLSNRSFVLFRLLTLLYVTQRKETSFQVPGLILALLQSSVKQQVEAIEKQYISAIEKQAHKCEELLNAQSALFSILPAIGCF

SEQ ID NO: 9536 - protein, 177 aa, Artificial Sequence
  Synthetic polypeptide
YLSNRSFVLFRLLTLLYVTQRKETSFQVPGLILALLQSSVKQQVEAIEKQYISAIEKQAHKCEELLNAQHQRLLEMLDTEKELLKEKIKEALIQQSQEQKEILEKCLEEERQRNKEALVSAAKLEKEAVKDAVLKVVEEERKNLEKAHAEERELWKTEHAKDQEKVSQEIQKAIQEQ

SEQ ID NO: 9537 - protein, 77 aa, Artificial Sequence
  Synthetic polypeptide
IPPGRIKHQRLLEMLDTEKELLKEKIKEALIQQSQEQKEILEKCLEEERQRNKEALVSAAKLEKEAVKDAVLKVVEE

SEQ ID NO: 9538 - protein, 11 aa, Artificial Sequence
  Synthetic polypeptide
STRKNKASEAP

SEQ ID NO: 9539 - protein, 11 aa, Artificial Sequence
  Synthetic polypeptide
STRKNKASEAP

SEQ ID NO: 9540 - protein, 11 aa, Artificial Sequence
  Synthetic polypeptide
STRKNKASEAP

SEQ ID NO: 9541 - protein, 11 aa, Artificial Sequence
  Synthetic polypeptide
STRKNKASEAP

SEQ ID NO: 9542 - protein, 11 aa, Artificial Sequence
  Synthetic polypeptide
STRKNKASEAP

SEQ ID NO: 9543 - protein, 11 aa, Artificial Sequence
  Synthetic polypeptide
STRKNKASEAP

SEQ ID NO: 9544 - protein, 11 aa, Artificial Sequence
  Synthetic polypeptide
STRKNKASEAP

SEQ ID NO: 9545 - protein, 11 aa, Artificial Sequence
  Synthetic polypeptide
STRKNKASEAP

SEQ ID NO: 9546 - protein, 194 aa, Artificial Sequence
  Synthetic polypeptide
IPPGRIKHQRLLEMLDTEKELLKEKIKEALIQQSQEQKEILEKCLEEERQRNKEALVSAAKLEKEAVKDAVLKVVEEERKNLEKAHAEERELWKTEHAKDQEKVSQEIQKAIQEQRKISQETVKAAIIEEQKRSEKAVEEAVKRTRDELIEYIKEQKRLDQVIRQRSLSSLELFLSCAQKQLSALIATEPVDIE

SEQ ID NO: 9547 - protein, 194 aa, Artificial Sequence; identical to SEQ ID NO: 9546
  Synthetic polypeptide

SEQ ID NO: 9548 - protein, 194 aa, Artificial Sequence; identical to SEQ ID NO: 9546
  Synthetic polypeptide

SEQ ID NO: 9549 - protein, 194 aa, Artificial Sequence; identical to SEQ ID NO: 9546
  Synthetic polypeptide

SEQ ID NO: 9550 - protein, 194 aa, Artificial Sequence; identical to SEQ ID NO: 9546
  Synthetic polypeptide

SEQ ID NO: 9551 - protein, 114 aa, Artificial Sequence
  Synthetic polypeptide
IPPGRIKHQRLLEMLDTEKELLKEKIKEALIQQSQEQKEILEKCLEEERQRNKEALVSAAKLEKEAVKDAVLKVVEEERKNLEKAHAEERELWKTEHAKDQEKVSQEIQKAIQE

SEQ ID NO: 9552 - protein, 115 aa, Artificial Sequence
  Synthetic polypeptide
IPPGRIKHQRLLEMLDTEKELLKEKIKEALIQQSQEQKEILEKCLEEERQRNKEALVSAAKLEKEAVKDAVLKVVEEERKNLEKAHAEERELWKTEHAKDQEKVSQEIQKAIQEQ

SEQ ID NO: 9553 - protein, 212 aa, Artificial Sequence
  Synthetic polypeptide
GQIFLLAARKRKKSKTANYLISIDPVDLSREGESYVGKLRSNLMGTKFTVYDRGICPMKGRGLVGAAHTRQELAAISYETNVLGFKGPRKMSVIIPGMTLNHKQIPYQPQNNHDSLLSRWQNRTMENLVELHNKAPVWNSDTQSYVLNFRGRVTQASVKNFQIVHKNDPDYIVMQFGRVADDVFTLDYNYPLCAVQAFGIGLSSFDSKLACE

SEQ ID NO: 9554 - protein, 57 aa, Artificial Sequence
  Synthetic polypeptide
ARYFFLQLESGKRAKQPTTLSPLIQLIYLVKEKVMSASLDPTSWGPSLQFMTVASAP

SEQ ID NO: 9555 - protein, 57 aa, Artificial Sequence; identical to SEQ ID NO: 9554
  Synthetic polypeptide

SEQ ID NO: 9556 - protein, 7 aa, Artificial Sequence
  Synthetic polypeptide
PDISSCS

SEQ ID NO: 9557 - protein, 7 aa, Artificial Sequence
  Synthetic polypeptide
PDISSCS

SEQ ID NO: 9558 - protein, 271 aa, Artificial Sequence
  Synthetic polypeptide
GQIFLLAARKRKKSKTANYLISIDPVDLSREGESYVGKLRSNLMGTKFTVYDRGICPMKGRGLVGAAHTRQELAAISYETNVLGFKGPRKMSVIIPGMTLNHKQIPYQPQNNHDSLLSRWQNRTMENLVELHNKAPVWNSDTQSYVLNFRGRVTQASVKNFQIVHKNDPDYIVMQFGRVADDVFTLDYNYPLCAVQAFGIGLSSFDKCIQTLRMQELCELHRQHHSAASLVHRTVCQRWVGHPWRLLPQTSLLWTDLSPPPVVPAPHQISM

SEQ ID NO: 9559 - protein, 9 aa, Artificial Sequence
  Synthetic polypeptide
RNCGLPTRL

SEQ ID NO: 9560 - protein, 9 aa, Artificial Sequence
  Synthetic polypeptide
RNCGLPTRL

SEQ ID NO: 9561 - protein, 9 aa, Artificial Sequence
  Synthetic polypeptide
RNCGLPTRL

SEQ ID NO: 9562 - protein, 9 aa, Artificial Sequence
  Synthetic polypeptide
RNCGLPTRL

SEQ ID NO: 9563 - protein, 9 aa, Artificial Sequence
  Synthetic polypeptide
RNCGLPTRL

SEQ ID NO: 9564 - protein, 9 aa, Artificial Sequence
  Synthetic polypeptide
RNCGLPTRL

SEQ ID NO: 9565 - protein, 9 aa, Artificial Sequence
  Synthetic polypeptide
RNCGLPTRL

SEQ ID NO: 9566 - protein, 9 aa, Artificial Sequence
  Synthetic polypeptide
RNCGLPTRL

SEQ ID NO: 9567 - protein, 9 aa, Artificial Sequence
  Synthetic polypeptide
RNCGLPTRL

SEQ ID NO: 9568 - protein, 9 aa, Artificial Sequence
  Synthetic polypeptide
RNCGLPTRL

SEQ ID NO: 9569 - protein, 99 aa, Artificial Sequence
  Synthetic polypeptide
KRYLYTYIYSSTTCNCEIMGPTQMSISQRVDKETVVYRQDCETFGMVVKMLIEKDPSLEKSIQFALRQNLHEIGERCVEELKHFIAEYDTSTQDFGEPF

SEQ ID NO: 9570 - protein, 99 aa, Artificial Sequence; identical to SEQ ID NO: 9569
  Synthetic polypeptide

SEQ ID NO: 9571 - protein, 99 aa, Artificial Sequence; identical to SEQ ID NO: 9569
  Synthetic polypeptide

SEQ ID NO: 9572 - protein, 99 aa, Artificial Sequence; identical to SEQ ID NO: 9569
  Synthetic polypeptide

SEQ ID NO: 9573 - protein, 99 aa, Artificial Sequence; identical to SEQ ID NO: 9569
  Synthetic polypeptide

SEQ ID NO: 9574 - protein, 159 aa, Artificial Sequence
  Synthetic polypeptide
TILKRRHTNGQKIYEKMLNITNDQRNANQNHNAVPPYSCKNGRNQKNQKTVDVWHGCGEEGTLLHCRWECKLVQPLWKTVWRFLKELKVELPFDPAIPLLGIYPEEKKSLYEKDTCTHIFIAAQLATVKSWDQPKCPSVNEWIKKLWFTDKTVKLSGWW

SEQ ID NO: 9575 - protein, 159 aa, Artificial Sequence; identical to SEQ ID NO: 9574
  Synthetic polypeptide

SEQ ID NO: 9576 - protein, 159 aa, Artificial Sequence; identical to SEQ ID NO: 9574
  Synthetic polypeptide

SEQ ID NO: 9577 - protein, 159 aa, Artificial Sequence; identical to SEQ ID NO: 9574
  Synthetic polypeptide

SEQ ID NO: 9578 - protein, 159 aa, Artificial Sequence; identical to SEQ ID NO: 9574
  Synthetic polypeptide

SEQ ID NO: 9579 - protein, 159 aa, Artificial Sequence; identical to SEQ ID NO: 9574
  Synthetic polypeptide

SEQ ID NO: 9580 - protein, 159 aa, Artificial Sequence; identical to SEQ ID NO: 9574
  Synthetic polypeptide

SEQ ID NO: 9581 - protein, 159 aa, Artificial Sequence; identical to SEQ ID NO: 9574
  Synthetic polypeptide

SEQ ID NO: 9582 - protein, 159 aa, Artificial Sequence; identical to SEQ ID NO: 9574
  Synthetic polypeptide

SEQ ID NO: 9583 - protein, 159 aa, Artificial Sequence; identical to SEQ ID NO: 9574
  Synthetic polypeptide

SEQ ID NO: 9584 - protein, 127 aa, Artificial Sequence
  Synthetic polypeptide
KRYLYTYIYSSTTCNCEIMGPTQMSISQRVDKETVVYRQDCETFGMVVKMLIEKDPSLEKSIQFALRQNLHEIESAGQTWQQVPPVRNTEMDHDGTPENEGEETAQSNLETALIKSTLEPALCAFFL

SEQ ID NO: 9585 - protein, 190 aa, Artificial Sequence
  Synthetic polypeptide
KRYLYTYIYSSTTCNCEIMGPTQMSISQRVDKETVVYRQDCETFGMVVKMLIEKDPSLEKSIQFALRQNLHEIESAGQTWQQVPPVRNTEMDHDGTPENEGEETAQSAPQPPQAPQPLQPRKKRVRRTTQLRRTTGAPDITWGMLKKTTQEAERILLRTQTPFTPENLFLAMLSVVHCNSRKDVKPENKQ

SEQ ID NO: 9586 - protein, 215 aa, Artificial Sequence
  Synthetic polypeptide
KRYLYTYIYSSTTCNCEIMGPTQMSISQRVDKETVVYRQDCETFGMVVKMLIEKDPSLEKSIQFALRQNLHEIESAGQTWQQVPPVRNTEMDHDGTPENEGEETAQSHDASNHTIVGLGPNQVPEMKETTLQAPQPPQAPQPLQPRKKRVRRTTQLRRTTGAPDITWGMLKKTTQEAERILLRTQTPFTPENLFLAMLSVVHCNSRKDVKPENKQ

SEQ ID NO: 9587 - protein, 102 aa, Artificial Sequence
  Synthetic polypeptide
KRYLYTYIYSSTTCNCEIMGPTQMSISQRVDKETVVYRQDCETFGMVVKMLIEKDPSLEKSIQFALRQNLHEIAGADTIQCLPGQRGFEGTSWPHNKMHSVS

SEQ ID NO: 9588 - protein, 221 aa, Artificial Sequence
  Synthetic polypeptide
KRYLYTYIYSSTTCNCEIMGPTQMSISQRVDKETVVYRQDCETFGMVVKMLIEKDPSLEKSIQFALRQNLHEIESAGQTWQQVPPVRNTEMDHDGTPENEGEETAQSALFGFQHDASNHTIVGLGPNQVPEMKETTLQAPQPPQAPQPLQPRKKRVRRTTQLRRTTGAPDITWGMLKKTTQEAERILLRTQTPFTPENLFLAMLSVVHCNSRKDVKPENKQ

SEQ ID NO: 9589 - protein, 8 aa, Artificial Sequence
  Synthetic polypeptide
KKPDIQTP

SEQ ID NO: 9590 - protein, 8 aa, Artificial Sequence
  Synthetic polypeptide
KKPDIQTP

SEQ ID NO: 9591 - protein, 255 aa, Artificial Sequence
  Synthetic polypeptide
LIYTAIWMNLGNIILSERSQIYRLPEGTFSIPASAVPCTKMALDDKLYQRDLEVALALSVKELPTVTTNVQNSQDKSIEKHGSSKIETMNKSPHISNCSVASDYLDLDKITVEDDVGGVQGKRKAASKAAAQQRKILLEGSDGDSANDTEPDFAPGEDSEDDSDFCESEDNDEDFSMRKSKVKEIKKKEVKVKSPVEKKEKKSKSKCNALAASGGSRSSSSPLVVVSVKSPNQSLRLGLSRLARVKPLHPNATST

SEQ ID NO: 9592 - protein, 27 aa, Artificial Sequence
  Synthetic polypeptide
VKEARYTDSLKVLLVFQLVQCLVQRWL

SEQ ID NO: 9593 - protein, 27 aa, Artificial Sequence
  Synthetic polypeptide
VKEARYTDSLKVLLVFQLVQCLVQRWL

SEQ ID NO: 9594 - protein, 305 aa, Artificial Sequence
  Synthetic polypeptide
LIYTAIWMNLGNIILSERSQIYRLPEGTFSIPASAVPCTKMALDDKLYQRDLEVALALSVKELPTVTTNVQNSQDKSIEKHGSSKIETMNKSPHISNCSVASDYLDLDKITVEDDVGGVQGKRKAASKAAAQQRKILLEGSDGDSANDTEPDFAPGEDSEDDSDFCESEDNDEDFSMRKSKVKEIKKKEVKVKSPVEKKEKKSKSKCNALVTSVDSAPAAVKSESQSLPKKVSLSSDTTRKPLEIRSPSAESKKPKWVPPAASGGSRSSSSPLVVVSVKSPNQSLRLGLSRLARVKPLHPNATST

SEQ ID NO: 9595 - protein, 79 aa, Artificial Sequence
  Synthetic polypeptide
REQETESQERFCHYCNSHICVSRPTLSPASSCPHASWERWTFLSQWDCGHCVWSNRIPGAICCQPPWTHGVTGNHTLSV

SEQ ID NO: 9596 - protein, 79 aa, Artificial Sequence; identical to SEQ ID NO: 9595
  Synthetic polypeptide

SEQ ID NO: 9597 - protein, 370 aa, Artificial Sequence
  Synthetic polypeptide
GNRKLRVRKGSAITAIATSVCHGPPCRQLHHALMPHGKGGRSSVSGIVATVFGATGFLGRYVVNHLGRMGSQVIIPYRCDKYDIMHLRPMGDLGQLLFLEWDARDKDSIRRVVQHSNVVINLIGRDWETKNFDFEDVFVKIPQAIAQLSKEAGVEKFIHVSHLNANIKSSSRYLRNKAVGEKVVRDAFPEAIIVKPSDIFGREDRFLNSFASMHRFGPIPLGSLGWKTVKQPVYVVDVSKGIVNAVKDPDANGKSFAFVGPSRYLLFHLVKYIFAVAHRLFLPFPLPLFAYRWVARVFEISPFEPWITRDKVERMHITDMKLPHLPGLEDLGIQATPLELKAIEVLRRHRTYRWLSAEIEDVKPAKTVNI

SEQ ID NO: 9598 - protein, 10 aa, Artificial Sequence
  Synthetic polypeptide
ESGKVLPLLQ

SEQ ID NO: 9599 - protein, 10 aa, Artificial Sequence
  Synthetic polypeptide
ESGKVLPLLQ

SEQ ID NO: 9600 - protein, 120 aa, Artificial Sequence
  Synthetic polypeptide
GNRKLRVRKGSAITAIATSVCHGPPCRQLHHALMPHGKGGRSSVSGIVATVFGATGFLGRYVVNHLGRMGSQVIIPYRCDKYDIMHLRPMGDLGQLLFLEWDARDKDSIRRVVQHSNVVI

SEQ ID NO: 9601 - protein, 20 aa, Artificial Sequence
  Synthetic polypeptide
VKHGKRLEWFWHATSCTCII

SEQ ID NO: 9602 - protein, 20 aa, Artificial Sequence
  Synthetic polypeptide
VKHGKRLEWFWHATSCTCII

SEQ ID NO: 9603 - protein, 20 aa, Artificial Sequence
  Synthetic polypeptide
VKHGKRLEWFWHATSCTCII

SEQ ID NO: 9604 - protein, 35 aa, Artificial Sequence
  Synthetic polypeptide
NGSGMQPVARALFNHIDKSGLKDSSVEELKKRYGG

SEQ ID NO: 9605 - protein, 35 aa, Artificial Sequence; identical to SEQ ID NO: 9604
  Synthetic polypeptide

SEQ ID NO: 9606 - protein, 35 aa, Artificial Sequence; identical to SEQ ID NO: 9604
  Synthetic polypeptide

SEQ ID NO: 9607 - protein, 21 aa, Artificial Sequence
  Synthetic polypeptide
TWKALRMVLACNQLHVHYLIT

SEQ ID NO: 9608 - protein, 21 aa, Artificial Sequence
  Synthetic polypeptide
TWKALRMVLACNQLHVHYLIT

SEQ ID NO: 9609 - protein, 21 aa, Artificial Sequence
  Synthetic polypeptide
TWKALRMVLACNQLHVHYLIT

SEQ ID NO: 9610 - protein, 30 aa, Artificial Sequence
  Synthetic polypeptide
ITKNTSQAWWHTPVVLAAWKAEGCWHCGSW

SEQ ID NO: 9611 - protein, 30 aa, Artificial Sequence; identical to SEQ ID NO: 9610
  Synthetic polypeptide

SEQ ID NO: 9612 - protein, 97 aa, Artificial Sequence
  Synthetic polypeptide
SWLLGRLRGAGTVGPGDARDVHARLLEDLAQGAARLLLRGRPLLGRLHRCLLHLPRAGHHPASEPHRPHQLLPLQRLELHFLQVGLPAQPLCPPLPG

SEQ ID NO: 9613 - protein, 16 aa, Artificial Sequence
  Synthetic polypeptide
SWLLGRLRGAGTVGPG

SEQ ID NO: 9614 - protein, 66 aa, Artificial Sequence
  Synthetic polypeptide
GASLPGRPSSGMWGVPLPRRPVWDVRSASARPPPRLGGWARSRLTATSASRVQAILLSQPPLSALL

SEQ ID NO: 9615 - protein, 94 aa, Artificial Sequence
  Synthetic polypeptide
GAPLPGRHPVWEDGHDLGSLQPPPPGFKQFSCLSLPSVHFYKPSSEPLGSPRSSKREPRSLSGTSLTDMSKLSVTGGNPEVLTTGFVEGSRVRS

SEQ ID NO: 9616 - protein, 93 aa, Artificial Sequence
  Synthetic polypeptide
EVRSVSARPPIVWDVGSASAPPPCLGCEERLCPAATPSGRMGTISAHCNLRLPGSSNSPVSASPQCTFINRPQNPWEAQDRQKENQEVYPAPV

SEQ ID NO: 9617 - protein, 58 aa, Artificial Sequence
  Synthetic polypeptide
PEKCWQVVQARTSMHRILTAAGPSTSSEDENPAWHRWQASGLTPLWRPPTSSNQARKS

SEQ ID NO: 9618 - protein, 65 aa, Artificial Sequence
  Synthetic polypeptide
VTYAWIFFCFCHPGNSKTNPSSSSSPQPTRCEDNEDEDLYDDTLPLNNQKNAGRWCKQGHLCIEF

SEQ ID NO: 9619 - protein, 74 aa, Artificial Sequence
  Synthetic polypeptide
MTCKQHGFKLHESLMHGFSSASATPGTARPTLPLPPLLSLLGVKTMRMKTFTMIHFHLITRKMLAGGASKDIYA

SEQ ID NO: 9620 - protein, 105 aa, Artificial Sequence
  Synthetic polypeptide
NPDLMKASSYLLTGLFSSLRLLTHAHPAKAEENLAVIQSVSASPSTLARLVSRLAMPAGSSTAWNTASSPMARCQVTRPLGEEMIPSTPSSVKRVLASMCPGQCL

SEQ ID NO: 9621 - protein, 16 aa, Artificial Sequence
  Synthetic polypeptide
RLRATFLQDSSAPCAF

SEQ ID NO: 9622 - protein, 16 aa, Artificial Sequence
  Synthetic polypeptide
RLRATFLQDSSAPCAF

SEQ ID NO: 9623 - protein, 16 aa, Artificial Sequence
  Synthetic polypeptide
RLRATFLQDSSAPCAF

SEQ ID NO: 9624 - protein, 16 aa, Artificial Sequence
  Synthetic polypeptide
RLRATFLQDSSAPCAF

SEQ ID NO: 9625 - protein, 486 aa, Artificial Sequence
  Synthetic polypeptide
SGSDEGFELPSYRTLQLPAPFNTCTSSKSRGEPGCDSKRECISIHVGQAGVQIGNACWELYCLEHGIQPDGQMPSDKTIGGGDDSFNTFFSETGAGKHVPRAVFVDLEPTVIDEVRTGTYRQLFHPEQLITGKEDAANNYARGHYTIGKEIIDLVLDRIRKLADQCTGLQGFLVFHSFGGGTGSGFTSLLMERLSVDYGKKSKLEFSIYPAPQVSTAVVEPYNSILTTHTTLEHSDCAFMVDNEAIYDICRRNLDIERPTYTNLNRLISQIVSSITASLRFDGALNVDLTEFQTNLVPYPRIHFPLATYAPVISAEKAYHEQLTVAEITNACFEPANQMVKCDPRHGKYMACCLLYRGDVVPKDVNAAIATIKTKRTIQFVDWCPTGFKVGINYQPPTVVPGGDLAKVQRAVCMLSNTTAVAEAWARLDHKFDLMYAKRAFVHWYVGEGMEEGEFSEAREDMAALEKDYEEVGADSADGEDEGEEY

SEQ ID NO: 9626 - protein, 40 aa, Artificial Sequence
  Synthetic polypeptide
NPDLMKASSYLLTGLFSSLRLLTHAHPAKAEENLAVIQSV

SEQ ID NO: 9627 - protein, 40 aa, Artificial Sequence; identical to SEQ ID NO: 9626
  Synthetic polypeptide

SEQ ID NO: 9628 - protein, 55 aa, Artificial Sequence
  Synthetic polypeptide
SGSDEGFELPSYRTLQLPAPFNTCTSSKSRGEPGCDSKCVNPALSLGFRTYKWSS

SEQ ID NO: 9629 - protein, 55 aa, Artificial Sequence; identical to SEQ ID NO: 9628
  Synthetic polypeptide

SEQ ID NO: 9630 - protein, 73 aa, Artificial Sequence
  Synthetic polypeptide
NPDLMKASSYLLTGLFSSLRLLTHAHPAKAEENLAVIQRVSLYCPGWSAVVQSWLTAASAFRVPVILLPQPPK

SEQ ID NO: 9631 - protein, 78 aa, Artificial Sequence
  Synthetic polypeptide
SGSDEGFELPSYRTLQLPAPFNTCTSSKSRGEPGCDSKSLTLLPRLECSGTILAHCSLRLPGSSDPPASASQVAEITA

SEQ ID NO: 9632 - protein, 481 aa, Artificial Sequence
  Synthetic polypeptide
GPARWLTPVIPALWEAEAGGSRDQEIETILANTRECISIHVGQAGVQIGNACWELYCLEHGIQPDGQMPSDKTIGGGDDSFNTFFSETGAGKHVPRAVFVDLEPTVIDEVRTGTYRQLFHPEQLITGKEDAANNYARGHYTIGKEIIDLVLDRIRKLADQCTGLQGFLVFHSFGGGTGSGFTSLLMERLSVDYGKKSKLEFSIYPAPQVSTAVVEPYNSILTTHTTLEHSDCAFMVDNEAIYDICRRNLDIERPTYTNLNRLISQIVSSITASLRFDGALNVDLTEFQTNLVPYPRIHFPLATYAPVISAEKAYHEQLTVAEITNACFEPANQMVKCDPRHGKYMACCLLYRGDVVPKDVNAAIATIKTKRTIQFVDWCPTGFKVGINYQPPTVVPGGDLAKVQRAVCMLSNTTAVAEAWARLDHKFDLMYAKRAFVHWYVGEGMEEGEFSEAREDMAALEKDYEEVGADSADGEDEGEEY

SEQ ID NO: 9633 - protein, 481 aa, Artificial Sequence; identical to SEQ ID NO: 9632
  Synthetic polypeptide

SEQ ID NO: 9634 - protein, 90 aa, Artificial Sequence
  Synthetic polypeptide
SQHFGRLRLVDHEIRKSRPSWLTRVSASPSTLARLVSRLAMPAGSSTAWNTASSPMARCQVTRPLGEEMIPSTPSSVKRVLASMCPGQCL

SEQ ID NO: 9635 - protein, 90 aa, Artificial Sequence; identical to SEQ ID NO: 9634
  Synthetic polypeptide

SEQ ID NO: 9636 - protein, 90 aa, Artificial Sequence; identical to SEQ ID NO: 9634
  Synthetic polypeptide

SEQ ID NO: 9637 - protein, 2 aa, Artificial Sequence
  Synthetic polypeptide
HA

SEQ ID NO: 9638 - protein, 2 aa, Artificial Sequence
  Synthetic polypeptide
HA

SEQ ID NO: 9639 - protein, 2 aa, Artificial Sequence
  Synthetic polypeptide
HA

SEQ ID NO: 9640 - protein, 2 aa, Artificial Sequence
  Synthetic polypeptide
HA

SEQ ID NO: 9641 - protein, 34 aa, Artificial Sequence
  Synthetic polypeptide
GPARWLTPVIPALWEAEAGGSRDQEIETILANTR

SEQ ID NO: 9642 - protein, 25 aa, Artificial Sequence
  Synthetic polypeptide
SQHFGRLRLVDHEIRKSRPSWLTRV

SEQ ID NO: 9643 - protein, 162 aa, Artificial Sequence
  Synthetic polypeptide
GPARWLTPVIPALWEAEAGGSRDQEIETILANTRECISIHVGQAGVQIGNACWELYCLEHGIQPDGQMPSDKTIGGGDDSFNTFFSETGAGKHVPRAVFVDLEPTVIDEVRTGTYRQLFHPEQLITGKEDAANNYARGHYTIGKEIIDLVLDRIRKLVSIVL

SEQ ID NO: 9644 - protein, 30 aa, Artificial Sequence
  Synthetic polypeptide
RPQLEGPLSQEAFPNFLPHSHSSWHLTPSC

SEQ ID NO: 9645 - protein, 30 aa, Artificial Sequence; identical to SEQ ID NO: 9644
  Synthetic polypeptide

SEQ ID NO: 9646 - protein, 30 aa, Artificial Sequence; identical to SEQ ID NO: 9644
  Synthetic polypeptide

SEQ ID NO: 9647 - protein, 30 aa, Artificial Sequence; identical to SEQ ID NO: 9644
  Synthetic polypeptide

SEQ ID NO: 9648 - protein, 25 aa, Artificial Sequence
  Synthetic polypeptide
GLSLKVPSPRKPSLTSCHTHIVPGT

SEQ ID NO: 9649 - protein, 25 aa, Artificial Sequence
  Synthetic polypeptide
GLSLKVPSPRKPSLTSCHTHIVPGT

SEQ ID NO: 9650 - protein, 25 aa, Artificial Sequence
  Synthetic polypeptide
GLSLKVPSPRKPSLTSCHTHIVPGT

SEQ ID NO: 9651 - protein, 25 aa, Artificial Sequence
  Synthetic polypeptide
GLSLKVPSPRKPSLTSCHTHIVPGT

SEQ ID NO: 9652 - protein, 169 aa, Artificial Sequence
  Synthetic polypeptide
QCGAVVMSRDSGARVPGFSSCFCSVVAGWPWTSRLTSPCLSSKCCVLCNLPDPGLLFWTQEAFPLEPDSPDRLYPVHGLPHWDAVQLLQHHLRAAVPGHHGPCLPLSHRLQLPDQVRLHLLPGRALRASHDSFLQRTHPGHPPTLPICALAPCSLCSTGSGCIYIVPGT

SEQ ID NO: 9653 - protein, 169 aa, Artificial Sequence; identical to SEQ ID NO: 9652
  Synthetic polypeptide

SEQ ID NO: 9654 - protein, 169 aa, Artificial Sequence; identical to SEQ ID NO: 9652
  Synthetic polypeptide

SEQ ID NO: 9655 - protein, 179 aa, Artificial Sequence
  Synthetic polypeptide
PPRASAVNAVFFATYLTLACCSGPRRHFPWNLILLTVFTLSMAYLTGMLSSYYNTTSVLLCLGITALVCLSVTVFSFQTKFDFTSCQGVLFVLLMTLFFSGLILAILLPFQYVPWLHAVYAALGAGVFTLFLALDTQLLMGNRRHSLSPEEYIFGALNIYLDIIYIFTFFLQLFGTNRE

SEQ ID NO: 9656 - protein, 179 aa, Artificial Sequence; identical to SEQ ID NO: 9655
  Synthetic polypeptide

SEQ ID NO: 9657 - protein, 101 aa, Artificial Sequence
  Synthetic polypeptide
QCGAVVMSRDSGARVPGFSSCFCSVVAGWPWTSRLTSPCLSSKCCVLCNLPDPGLLFWTQEAFPLEPDSPDRLYPVHGLPHWDAVQFDFTSCQGVLFVLLM

SEQ ID NO: 9658 - protein, 65 aa, Artificial Sequence
  Synthetic polypeptide
PPRASAVNAVFFATYLTLACCSGPRRHFPWNLILLTVFTLSMAYLTGMLSSSTSPPARACSSCFS

SEQ ID NO: 9659 - protein, 171 aa, Artificial Sequence
  Synthetic polypeptide
PPRASAVNAVFFATYLTLACCSGPRRHFPWNLILLTVFTLSMAYLTGMLSSYYNTTSVLLCLGITALVCLSVTVFSFQTKFDFTSCQGVLFVLLMTLFFSGLILAILLPFQYVPWLHAVYAALGAGVFTLFLALDTQLLMGNRRHSLSPEEYIFGALNIYLDIIYIFTFFL

SEQ ID NO: 9660 - protein, 151 aa, Artificial Sequence
  Synthetic polypeptide
QCGAVVMSRDSGARVPGFSSCFCSVVAGWPWTSRLTSPCLSSKCCVLCNLPDPGLLFWTQEAFPLEPDSPDRLYPVHGLPHWDAVQLLQHHLRAAVPGHHGPCLPLSHRLQLPDQVRLHLLPGRALRASHDSFLQRTHPGHPPTLPIFPGT

SEQ ID NO: 9661 - protein, 139 aa, Artificial Sequence
  Synthetic polypeptide
PPRASAVNAVFFATYLTLACCSGPRRHFPWNLILLTVFTLSMAYLTGMLSSYYNTTSVLLCLGITALVCLSVTVFSFQTKFDFTSCQGVLFVLLMTLFFSGLILAILLPFQYFLALDTQLLMGNRRHSLSPEEYIFGAL

SEQ ID NO: 9662 - protein, 147 aa, Artificial Sequence
  Synthetic polypeptide
QCGAVVMSRDSGARVPGFSSCFCSVVAGWPWTSRLTSPCLSSKCCVLCNLPDPGLLFWTQEAFPLEPDSPDRLYPVHGLPHWDAVQLLQHHLRAAVPGHHGPCLPLSHRLQLPDQVRLHLLPGRALRASHDSFLQRTHPGHPPTLPI

SEQ ID NO: 9663 - protein, 111 aa, Artificial Sequence
  Synthetic polypeptide
PPRASAVNAVFFATYLTLACCSGPRRHFPWNLILLTVFTLSMAYLTGMLSSYYNTTSVLLCLGITALVCLSVTVFSFQTKFDFTSCQGVLFVLLMTLFFSGLILAILLPFQ

SEQ ID NO: 9664 - protein, 55 aa, Artificial Sequence
  Synthetic polypeptide
QCGAVVMSRDSGARVPGFSSCFCSVVAGWPWTSRLTSPCLSSKCCVLCNLPDPGL

SEQ ID NO: 9665 - protein, 20 aa, Artificial Sequence
  Synthetic polypeptide
PPRASAVNAVFFATYLTLAC

SEQ ID NO: 9666 - protein, 13 aa, Artificial Sequence
  Synthetic polypeptide
SQHFWRPRQQLQL

SEQ ID NO: 9667 - protein, 13 aa, Artificial Sequence
  Synthetic polypeptide
SQHFWRPRQQLQL

SEQ ID NO: 9668 - protein, 13 aa, Artificial Sequence
  Synthetic polypeptide
SQHFWRPRQQLQL

SEQ ID NO: 9669 - protein, 13 aa, Artificial Sequence
  Synthetic polypeptide
SQHFWRPRQQLQL

SEQ ID NO: 9670 - protein, 13 aa, Artificial Sequence
  Synthetic polypeptide
SQHFWRPRQQLQL

SEQ ID NO: 9671 - protein, 13 aa, Artificial Sequence
  Synthetic polypeptide
SQHFWRPRQQLQL

SEQ ID NO: 9672 - protein, 262 aa, Artificial Sequence
  Synthetic polypeptide
MGTVAHTCNPSTFGGQGSSSSYDNGFPTGDHELFTTFSWDDQKVRRVFVRKVYTILLIQLLVTLAVVALFTFCDPVKDYVQANPGWYWASYAVFFATYLTLACCSGPRRHFPWNLILLTVFTLSMAYLTGMLSSYYNTTSVLLCLGITALVCLSVTVFSFQTKFDFTSCQGVLFVLLMTLFFSGLILAILLPFQYVPWLHAVYAALGAGVFTLFLALDTQLLMGNRRHSLSPEEYIFGALNIYLDIIYIFTFFLQLFGTNRE

SEQ ID NO: 9673 - protein, 262 aa, Artificial Sequence; identical to SEQ ID NO: 9672
  Synthetic polypeptide

SEQ ID NO: 9674 - protein, 56 aa, Artificial Sequence
  Synthetic polypeptide
WAQWLIPVIPALLEAKAAAPAMTTVSPPETMSSSPLSAGMTRKFVESLSERSTPSC

SEQ ID NO: 9675 - protein, 56 aa, Artificial Sequence; identical to SEQ ID NO: 9674
  Synthetic polypeptide

SEQ ID NO: 9676 - protein, 56 aa, Artificial Sequence; identical to SEQ ID NO: 9674
  Synthetic polypeptide

SEQ ID NO: 9677 - protein, 56 aa, Artificial Sequence; identical to SEQ ID NO: 9674
  Synthetic polypeptide

SEQ ID NO: 9678 - protein, 56 aa, Artificial Sequence; identical to SEQ ID NO: 9674
  Synthetic polypeptide

SEQ ID NO: 9679 - protein, 154 aa, Artificial Sequence
  Synthetic polypeptide
MGTVAHTCNPSTFGGQGSSSSYDNGFPTGDHELFTTFSWDDQKVRRVFVRKNPSHPQVYTILLIQLLVTLAVVALFTFCDPVKDYVQANPGWYWASYAVFFATYLTLACCSGPRRHFPWNLILLTVFTLSMAYLTGMLSSSTSPPARACSSCFS

SEQ ID NO: 9680 - protein, 62 aa, Artificial Sequence
  Synthetic polypeptide
WAQWLIPVIPALLEAKAAAPAMTTVSPPETMSSSPLSAGMTRKFVESLSERTPPTPRSTPSC

SEQ ID NO: 9681 - protein, 254 aa, Artificial Sequence
  Synthetic polypeptide
MGTVAHTCNPSTFGGQGSSSSYDNGFPTGDHELFTTFSWDDQKVRRVFVRKVYTILLIQLLVTLAVVALFTFCDPVKDYVQANPGWYWASYAVFFATYLTLACCSGPRRHFPWNLILLTVFTLSMAYLTGMLSSYYNTTSVLLCLGITALVCLSVTVFSFQTKFDFTSCQGVLFVLLMTLFFSGLILAILLPFQYVPWLHAVYAALGAGVFTLFLALDTQLLMGNRRHSLSPEEYIFGALNIYLDIIYIFTFFL

SEQ ID NO: 9682 - protein, 194 aa, Artificial Sequence
  Synthetic polypeptide
MGTVAHTCNPSTFGGQGSSSSYDNGFPTGDHELFTTFSWDDQKVRRVFVRKVYTILLIQLLVTLAVVALFTFCDPVKDYVQANPGWYWASYAVFFATYLTLACCSGPRRHFPWNLILLTVFTLSMAYLTGMLSSYYNTTSVLLCLGITALVCLSVTVFSFQTKFDFTSCQGVLFVLLMTLFFSGLILAILLPFQ

SEQ ID NO: 9683 - protein, 103 aa, Artificial Sequence
  Synthetic polypeptide
MGTVAHTCNPSTFGGQGSSSSYDNGFPTGDHELFTTFSWDDQKVRRVFVRKVYTILLIQLLVTLAVVALFTFCDPVKDYVQANPGWYWASYAVFFATYLTLAC

SEQ ID NO: 9684 - protein, 66 aa, Artificial Sequence
  Synthetic polypeptide
WFYKELFPLLLCTSCCCHVKDMFASPSAMIQSLEEDCVSILQLEKPRSRKDPQVVGRINLQQLLTI

SEQ ID NO: 9685 - protein, 62 aa, Artificial Sequence
  Synthetic polypeptide
GAFPPFALHFLLLPCEGHVCFPFCHDSVPGGGLCVHFTAGEAEIQKGPPSCGQNKSTAAFNY

SEQ ID NO: 9686 - protein, 287 aa, Artificial Sequence
  Synthetic polypeptide
VSQGMLADFVSQTSPMIPSIVVHCVNEIEQRGLTETGLYRISGCDRTVKELKEKFLRVKTVPLLSKVDDIHAICSLLKDFLRNLKEPLLTFRLNRAFMEAAEITDEDNSIAAMYQAVGELPQANRDTLAFLMIHLQRVAQSPHTKMDVANLAKVFGPTIVAHAVPNPDPVTMLQDIKRQPKVVERLLSLPLEYWSQFMMVEQENIDPLHVIENSNAFSTPQTPDIKVSLLGPVTTPEHQLLKTPSSSSLSQRVRSTLTKNTPRFGSKSKSATNLGRQGNFFASPMLK

SEQ ID NO: 9687 - protein, 287 aa, Artificial Sequence; identical to SEQ ID NO: 9686
  Synthetic polypeptide

SEQ ID NO: 9688 - protein, 287 aa, Artificial Sequence; identical to SEQ ID NO: 9686
  Synthetic polypeptide

SEQ ID NO: 9689 - protein, 287 aa, Artificial Sequence; identical to SEQ ID NO: 9686
  Synthetic polypeptide

SEQ ID NO: 9690 - protein, 287 aa, Artificial Sequence; identical to SEQ ID NO: 9686
  Synthetic polypeptide

SEQ ID NO: 9691 - protein, 287 aa, Artificial Sequence; identical to SEQ ID NO: 9686
  Synthetic polypeptide

SEQ ID NO: 9692 - protein, 18 aa, Artificial Sequence
  Synthetic polypeptide
INKLARECWQTLCPRLLQ

SEQ ID NO: 9693 - protein, 18 aa, Artificial Sequence
  Synthetic polypeptide
INKLARECWQTLCPRLLQ

SEQ ID NO: 9694 - protein, 18 aa, Artificial Sequence
  Synthetic polypeptide
INKLARECWQTLCPRLLQ

SEQ ID NO: 9695 - protein, 18 aa, Artificial Sequence
  Synthetic polypeptide
INKLARECWQTLCPRLLQ

SEQ ID NO: 9696 - protein, 18 aa, Artificial Sequence
  Synthetic polypeptide
INKLARECWQTLCPRLLQ

SEQ ID NO: 9697 - protein, 18 aa, Artificial Sequence
  Synthetic polypeptide
INKLARECWQTLCPRLLQ

SEQ ID NO: 9698 - protein, 18 aa, Artificial Sequence
  Synthetic polypeptide
INKLARECWQTLCPRLLQ

SEQ ID NO: 9699 - protein, 24 aa, Artificial Sequence
  Synthetic polypeptide
PGNAGRLCVPDFSNDPLHCCALCK

SEQ ID NO: 9700 - protein, 24 aa, Artificial Sequence
  Synthetic polypeptide
PGNAGRLCVPDFSNDPLHCCALCK

SEQ ID NO: 9701 - protein, 24 aa, Artificial Sequence
  Synthetic polypeptide
PGNAGRLCVPDFSNDPLHCCALCK

SEQ ID NO: 9702 - protein, 24 aa, Artificial Sequence
  Synthetic polypeptide
PGNAGRLCVPDFSNDPLHCCALCK

SEQ ID NO: 9703 - protein, 24 aa, Artificial Sequence
  Synthetic polypeptide
PGNAGRLCVPDFSNDPLHCCALCK

SEQ ID NO: 9704 - protein, 24 aa, Artificial Sequence
  Synthetic polypeptide
PGNAGRLCVPDFSNDPLHCCALCK

SEQ ID NO: 9705 - protein, 24 aa, Artificial Sequence
  Synthetic polypeptide
PGNAGRLCVPDFSNDPLHCCALCK

SEQ ID NO: 9706 - protein, 199 aa, Artificial Sequence
  Synthetic polypeptide
VSQGMLADFVSQTSPMIPSIVVHCVNEIEQRGLTETGLYRISGCDRTVKELKEKFLRVKTVPLLSKVDDIHAICSLLKDFLRNLKEPLLTFRLNRAFMEAAEITDEDNSIAAMYQAVGELPQANRDTLAFLMIHLQRVAQSPHTKMDVANLAKVFGPTIVAHAVPNPDPVTMLQDIKRQPKVVERLLSLPLEYWSQFMM

SEQ ID NO: 9707 - protein, 15 aa, Artificial Sequence
  Synthetic polypeptide
SQHFGRPRPTDRLRQ

SEQ ID NO: 9708 - protein, 15 aa, Artificial Sequence
  Synthetic polypeptide
SQHFGRPRPTDRLRQ

SEQ ID NO: 9709 - protein, 15 aa, Artificial Sequence
  Synthetic polypeptide
SQHFGRPRPTDRLRQ

SEQ ID NO: 9710 - protein, 15 aa, Artificial Sequence
  Synthetic polypeptide
SQHFGRPRPTDRLRQ

SEQ ID NO: 9711 - protein, 73 aa, Artificial Sequence
  Synthetic polypeptide
RAWWLTPVIPALWEAEADGSLETMTDVVGNPEEERRAEFYFQPWAQEAVCRYFYSKVQQRRQELEQALGIRNT

SEQ ID NO: 9712 - protein, 73 aa, Artificial Sequence; identical to SEQ ID NO: 9711
  Synthetic polypeptide

SEQ ID NO: 9713 - protein, 73 aa, Artificial Sequence; identical to SEQ ID NO: 9711
  Synthetic polypeptide

SEQ ID NO: 9714 - protein, 73 aa, Artificial Sequence; identical to SEQ ID NO: 9711
  Synthetic polypeptide

SEQ ID NO: 9715 - protein, 168 aa, Artificial Sequence
  Synthetic polypeptide
EAGEHCHPKEVINVESDGYDLLPNPVHSVLASRTVVLIRPNPMPSLKRCSYLLPSILIRKGWRACQSSWIGMSEKSNAGFAIGGIRTSPQRLLNSVKACGDSHFIYVYSAMELDFSGRHLGSGTSDSAGITIHFSLFQVGFITIISWNWPSIGPLCFLSLQTLKERTS

SEQ ID NO: 9716 - protein, 168 aa, Artificial Sequence; identical to SEQ ID NO: 9715
  Synthetic polypeptide

SEQ ID NO: 9717 - protein, 168 aa, Artificial Sequence; identical to SEQ ID NO: 9715
  Synthetic polypeptide

SEQ ID NO: 9718 - protein, 33 aa, Artificial Sequence
  Synthetic polypeptide
MLKVMDMIYCQTLCTLYWHRGQWSLSGPTQCHP

SEQ ID NO: 9719 - protein, 33 aa, Artificial Sequence; identical to SEQ ID NO: 9718
  Synthetic polypeptide

SEQ ID NO: 9720 - protein, 33 aa, Artificial Sequence; identical to SEQ ID NO: 9718
  Synthetic polypeptide

SEQ ID NO: 9721 - protein, 33 aa, Artificial Sequence; identical to SEQ ID NO: 9718
  Synthetic polypeptide

SEQ ID NO: 9722 - protein, 33 aa, Artificial Sequence; identical to SEQ ID NO: 9718
  Synthetic polypeptide

SEQ ID NO: 9723 - protein, 33 aa, Artificial Sequence; identical to SEQ ID NO: 9718
  Synthetic polypeptide

SEQ ID NO: 9724 - protein, 110 aa, Artificial Sequence
  Synthetic polypeptide
EAGEHCHPKEVINVESDGYDLLPNPVHSVLASRTVVLIRPNPMPSLKRCSYLLPSILIRKGWRACQSSWIGMSEKSNAGFAIGGIRTSPQRLLNSVKAFTLVLGHPTVLA

SEQ ID NO: 9725 - protein, 110 aa, Artificial Sequence; identical to SEQ ID NO: 9724
  Synthetic polypeptide

SEQ ID NO: 9726 - protein, 137 aa, Artificial Sequence
  Synthetic polypeptide
EAGEHCHPKEVINVESDGYDLLPNPVHSVLASRTVVLIRPNPMPSLKRCSYLLPSILIRKGWRACQSSWIGMSEKSNAGFAIGGIRTSPQRLLNSVKACGDSHFIYVYSAMELDFSGRHLGSGTSDSAGITIHFRTS

SEQ ID NO: 9727 - protein, 20 aa, Artificial Sequence
  Synthetic polypeptide
DRVPWLNTYNPSTWDGRLSR

SEQ ID NO: 9728 - protein, 20 aa, Artificial Sequence
  Synthetic polypeptide
DRVPWLNTYNPSTWDGRLSR

SEQ ID NO: 9729 - protein, 20 aa, Artificial Sequence
  Synthetic polypeptide
DRVPWLNTYNPSTWDGRLSR

SEQ ID NO: 9730 - protein, 20 aa, Artificial Sequence
  Synthetic polypeptide
DRVPWLNTYNPSTWDGRLSR

SEQ ID NO: 9731 - protein, 20 aa, Artificial Sequence
  Synthetic polypeptide
DRVPWLNTYNPSTWDGRLSR

SEQ ID NO: 9732 - protein, 20 aa, Artificial Sequence
  Synthetic polypeptide
DRVPWLNTYNPSTWDGRLSR

SEQ ID NO: 9733 - protein, 20 aa, Artificial Sequence
  Synthetic polypeptide
DRVPWLNTYNPSTWDGRLSR

SEQ ID NO: 9734 - protein, 656 aa, Artificial Sequence
  Synthetic polypeptide
SQHLGWEAKQVASKGTGLNPNAKVWQEIAPGNTDATPVTHGTESSWHEIAATSGAHPEGNAELSEDICKEYEVMYSSSCETTRNTTGIEESTDGMILGPEDLSYQIYDVSGESNSAVSTEDLKECLKKQLEFCFSRENLSKDLYLISQMDSDQFIPIWTVANMEEIKKLTTDPDLILEVLRSSPMVQVDEKGEKVRPSHKRCIVILREIPETTPIEEVKGLFKSENCPKVISCEFAHNSNWYITFQSDTDAQQAFKYLREEVKTFQGKPIMARIKAINTFFAKNGYRLMDSSIYSHPIQTQAQYASPVFMQPVYNPHQQYSVYSIVPQSWSPNPTPYFETPLAPFPNGSFVNGFNSPGSYKTNAAAMNMGRPFQKNRRTLFRGRRRREDDRISRPHPSTAESKAPTPKFDLLASNFPPLPGSSSRMPGELVLENRMSDVVKGVYKEKDNEELTISCPVPADEQTECTSAQQLNMSTSSPCAAELTALSTTQQEKDLIEDSSVQKDGLNQTTIPVSPPSTTKPSRASTASPCNNNINAATAVALQEPRKLSYAEVCQKPPKEPSSVLVQPLRELRSNVVSPTKNEDNGAPENSVEKPHEKPEARASKDYSGFRGNIIPRGAAGKIREQRRQFSHRAIPQGVTRRNGKEQYVPPRSPK

SEQ ID NO: 9735 - protein, 733 aa, Artificial Sequence
  Synthetic polypeptide
SQHLGWEAKQVASKGTGLNPNAKVWQEIAPGNTDATPVTHGTESSWHEIAATSGAHPEVSVFNTGNAELSEDICKEYEVMYSSSCETTRNTTGIEESTDGMILGPEDLSYQIYDVSGESNSAVSTEDLKECLKKQLEFCFSRENLSKDLYLISQMDSDQFIPIWTVANMEEIKKLTTDPDLILEVLRSSPMVQVDEKGEKVRPSHKRCIVILREIPETTPIEEVKGLFKSENCPKVISCEFAHNSNWYITFQSDTDAQQAFKYLREEVKTFQGKPIMARIKAINTFFAKNGYRLMDSSIYSHPIQTQAQYASPVFMQPVYNPHQQYSVYSIVPQSWSPNPTPYFETPLAPFPNGSFVNGFNSPGSYKTNAAAMNMGRPFQKNRVKPQFRSSGGSEHSTEGSVSLGDGQLNRYSSRNFPAERHNPTVTGHQEQTYLQKETSTLQVEQNGDYGRGRRTLFRGRRRREDDRISRPHPSTAESKAPTPKFDLLASNFPPLPGSSSRMPGELVLENRMSDVVKGVYKEKDNEELTISCPVPADEQTECTSAQQLNMSTSSPCAAELTALSTTQQEKDLIEDSSVQKDGLNQTTIPVSPPSTTKPSRASTASPCNNNINAATAVALQEPRKLSYAEVCQKPPKEPSSVLVQPLRELRSNVVSPTKNEDNGAPENSVEKPHEKPEARASKDYSGFRGNIIPRGAAGKIREQRRQFSHRAIPQGVTRRNGKEQYVPPRSPK

SEQ ID NO: 9736 - protein, 110 aa, Artificial Sequence
  Synthetic polypeptide
SQHLGWEAKQVASKGTGLNPNAKVWQEIAPGNTDATPVTHGTESSWHEIAATSGAHPEGNAELSEDICKEYEVMYSSSCETTRNTTGIEESTDGMILGPEDLSYQIYDVS

SEQ ID NO: 9737 - protein, 727 aa, Artificial Sequence
  Synthetic polypeptide
SQHLGWEAKQVASKGTGLNPNAKVWQEIAPGNTDATPVTHGTESSWHEIAATSGAHPEGNAELSEDICKEYEVMYSSSCETTRNTTGIEESTDGMILGPEDLSYQIYDVSGESNSAVSTEDLKECLKKQLEFCFSRENLSKDLYLISQMDSDQFIPIWTVANMEEIKKLTTDPDLILEVLRSSPMVQVDEKGEKVRPSHKRCIVILREIPETTPIEEVKGLFKSENCPKVISCEFAHNSNWYITFQSDTDAQQAFKYLREEVKTFQGKPIMARIKAINTFFAKNGYRLMDSSIYSHPIQTQAQYASPVFMQPVYNPHQQYSVYSIVPQSWSPNPTPYFETPLAPFPNGSFVNGFNSPGSYKTNAAAMNMGRPFQKNRVKPQFRSSGGSEHSTEGSVSLGDGQLNRYSSRNFPAERHNPTVTGHQEQTYLQKETSTLQVEQNGDYGRGRRTLFRGRRRREDDRISRPHPSTAESKAPTPKFDLLASNFPPLPGSSSRMPGELVLENRMSDVVKGVYKEKDNEELTISCPVPADEQTECTSAQQLNMSTSSPCAAELTALSTTQQEKDLIEDSSVQKDGLNQTTIPVSPPSTTKPSRASTASPCNNNINAATAVALQEPRKLSYAEVCQKPPKEPSSVLVQPLRELRSNVVSPTKNEDNGAPENSVEKPHEKPEARASKDYSGFRGNIIPRGAAGKIREQRRQFSHRAIPQGVTRRNGKEQYVPPRSPK

SEQ ID NO: 9738 - protein, 448 aa, Artificial Sequence
  Synthetic polypeptide
SQHLGWEAKQVASKGTGLNPNAKVWQEIAPGNTDATPVTHGTESSWHEIAATSGAHPEGNAELSEDICKEYEVMYSSSCETTRNTTGIEESTDGMILGPEDLSYQIYDVSGESNSAVSTEDLKECLKKQLEFCFSRENLSKDLYLISQMDSDQFIPIWTVANMEEIKKLTTDPDLILEVLRSSPMVQVDEKGEKVRPSHKRCIVILREIPETTPIEEVKGLFKSENCPKVISCEFAHNSNWYITFQSDTDAQQAFKYLREEVKTFQGKPIMARIKAINTFFAKNGYRLMDSSIYSHPIQTQAQYASPVFMQPVYNPHQQYSVYSIVPQSWSPNPTPYFETPLAPFPNGSFVNGFNSPGSYKTNAAAMNMGRPFQKNRVKPQFRSSGGSEHSTEGSVSLGDGQLNRYSSRNFPAERHNPTVTGHQEQTYLQKETSTLQVEQNGDYGRGR

SEQ ID NO: 9739 - protein, 172 aa, Artificial Sequence
  Synthetic polypeptide
SQHLGWEAKQVASKGTGLNPNAKVWQEIAPGNTDATPVTHGTESSWHEIAATSGAHPEGNAELSEDICKEYEVMYSSSCETTRNTTGIEESTDGMILGPEDLSYQIYDVSESNSAVSTEDLKECLKKQLEFCFSRENLSKDLYLISQMDSDQFIPIWTVANMEEIKKLTTDP

SEQ ID NO: 9740 - protein, 656 aa, Artificial Sequence
  Synthetic polypeptide
SQHLGWEAKQVASKGTGLNPNAKVWQEIAPGNTDATPVTHGTESSWHEIAATSGAHPEGNAELSEDICKEYEVMYSSSCETTRNTTGIEESTDGMILGPEDLSYQIYDVSGESNSAVSTEDLKECLKKQLEFCFSRENLSKDLYLISQMDSDQFIPIWTVANMEEIKKLTTDPDLILEVLRSSPMVQVDEKGEKVRPSHKRCIVILREIPETTPIEEVKGLFKSENCPKVISCEFAHNSNWYITFQSDTDAQQAFKYLREEVKTFQGKPIMAPFPNGSFVNGFNSPGSYKTNAAAMNMGRPFQKNRVKPQFRSSGGSEHSTEGSVSLGDGQLNRYSSRNFPAERHNPTVTGHQEQTYLQKETSTLQVEQNGDYGRGRRTLFRGRRRREDDRISRPHPSTAESKAPTPKFDLLASNFPPLPGSSSRMPGELVLENRMSDVVKGVYKEKDNEELTISCPVPADEQTECTSAQQLNMSTSSPCAAELTALSTTQQEKDLIEDSSVQKDGLNQTTIPVSPPSTTKPSRASTASPCNNNINAATAVALQEPRKLSYAEVCQKPPKEPSSVLVQPLRELRSNVVSPTKNEDNGAPENSVEKPHEKPEARASKDYSGFRGNIIPRGAAGKIREQRRQFSHRAIPQGVTRRNGKEQYVPPRSPK

SEQ ID NO: 9741 - protein, 7 aa, Artificial Sequence
  Synthetic polypeptide
MLTAGSI

SEQ ID NO: 9742 - protein, 7 aa, Artificial Sequence
  Synthetic polypeptide
MLTAGSI

SEQ ID NO: 9743 - protein, 7 aa, Artificial Sequence
  Synthetic polypeptide
MLTAGSI

SEQ ID NO: 9744 - protein, 7 aa, Artificial Sequence
  Synthetic polypeptide
MLTAGSI

SEQ ID NO: 9745 - protein, 7 aa, Artificial Sequence
  Synthetic polypeptide
MLTAGSI

SEQ ID NO: 9746 - protein, 7 aa, Artificial Sequence
  Synthetic polypeptide
MLTAGSI

SEQ ID NO: 9747 - protein, 7 aa, Artificial Sequence
  Synthetic polypeptide
MLTAGSI

SEQ ID NO: 9748 - protein, 648 aa, Artificial Sequence
  Synthetic polypeptide
QQVASKGTGLNPNAKVWQEIAPGNTDATPVTHGTESSWHEIAATSGAHPEGNAELSEDICKEYEVMYSSSCETTRNTTGIEESTDGMILGPEDLSYQIYDVSGESNSAVSTEDLKECLKKQLEFCFSRENLSKDLYLISQMDSDQFIPIWTVANMEEIKKLTTDPDLILEVLRSSPMVQVDEKGEKVRPSHKRCIVILREIPETTPIEEVKGLFKSENCPKVISCEFAHNSNWYITFQSDTDAQQAFKYLREEVKTFQGKPIMARIKAINTFFAKNGYRLMDSSIYSHPIQTQAQYASPVFMQPVYNPHQQYSVYSIVPQSWSPNPTPYFETPLAPFPNGSFVNGFNSPGSYKTNAAAMNMGRPFQKNRRTLFRGRRRREDDRISRPHPSTAESKAPTPKFDLLASNFPPLPGSSSRMPGELVLENRMSDVVKGVYKEKDNEELTISCPVPADEQTECTSAQQLNMSTSSPCAAELTALSTTQQEKDLIEDSSVQKDGLNQTTIPVSPPSTTKPSRASTASPCNNNINAATAVALQEPRKLSYAEVCQKPPKEPSSVLVQPLRELRSNVVSPTKNEDNGAPENSVEKPHEKPEARASKDYSGFRGNIIPRGAAGKIREQRRQFSHRAIPQGVTRRNGKEQYVPPRSPK

SEQ ID NO: 9749 - protein, 6 aa, Artificial Sequence
  Synthetic polypeptide
VNVDSR

SEQ ID NO: 9750 - protein, 6 aa, Artificial Sequence
  Synthetic polypeptide
VNVDSR

SEQ ID NO: 9751 - protein, 6 aa, Artificial Sequence
  Synthetic polypeptide
VNVDSR

SEQ ID NO: 9752 - protein, 6 aa, Artificial Sequence
  Synthetic polypeptide
VNVDSR

SEQ ID NO: 9753 - protein, 6 aa, Artificial Sequence
  Synthetic polypeptide
VNVDSR

SEQ ID NO: 9754 - protein, 6 aa, Artificial Sequence
  Synthetic polypeptide
VNVDSR

SEQ ID NO: 9755 - protein, 6 aa, Artificial Sequence
  Synthetic polypeptide
VNVDSR

SEQ ID NO: 9756 - protein, 725 aa, Artificial Sequence
  Synthetic polypeptide
QQVASKGTGLNPNAKVWQEIAPGNTDATPVTHGTESSWHEIAATSGAHPEVSVFNTGNAELSEDICKEYEVMYSSSCETTRNTTGIEESTDGMILGPEDLSYQIYDVSGESNSAVSTEDLKECLKKQLEFCFSRENLSKDLYLISQMDSDQFIPIWTVANMEEIKKLTTDPDLILEVLRSSPMVQVDEKGEKVRPSHKRCIVILREIPETTPIEEVKGLFKSENCPKVISCEFAHNSNWYITFQSDTDAQQAFKYLREEVKTFQGKPIMARIKAINTFFAKNGYRLMDSSIYSHPIQTQAQYASPVFMQPVYNPHQQYSVYSIVPQSWSPNPTPYFETPLAPFPNGSFVNGFNSPGSYKTNAAAMNMGRPFQKNRVKPQFRSSGGSEHSTEGSVSLGDGQLNRYSSRNFPAERHNPTVTGHQEQTYLQKETSTLQVEQNGDYGRGRRTLFRGRRRREDDRISRPHPSTAESKAPTPKFDLLASNFPPLPGSSSRMPGELVLENRMSDVVKGVYKEKDNEELTISCPVPADEQTECTSAQQLNMSTSSPCAAELTALSTTQQEKDLIEDSSVQKDGLNQTTIPVSPPSTTKPSRASTASPCNNNINAATAVALQEPRKLSYAEVCQKPPKEPSSVLVQPLRELRSNVVSPTKNEDNGAPENSVEKPHEKPEARASKDYSGFRGNIIPRGAAGKIREQRRQFSHRAIPQGVTRRNGKEQYVPPRSPK

SEQ ID NO: 9757 - protein, 102 aa, Artificial Sequence
  Synthetic polypeptide
QQVASKGTGLNPNAKVWQEIAPGNTDATPVTHGTESSWHEIAATSGAHPEGNAELSEDICKEYEVMYSSSCETTRNTTGIEESTDGMILGPEDLSYQIYDVS

SEQ ID NO: 9758 - protein, 719 aa, Artificial Sequence
  Synthetic polypeptide
QQVASKGTGLNPNAKVWQEIAPGNTDATPVTHGTESSWHEIAATSGAHPEGNAELSEDICKEYEVMYSSSCETTRNTTGIEESTDGMILGPEDLSYQIYDVSGESNSAVSTEDLKECLKKQLEFCFSRENLSKDLYLISQMDSDQFIPIWTVANMEEIKKLTTDPDLILEVLRSSPMVQVDEKGEKVRPSHKRCIVILREIPETTPIEEVKGLFKSENCPKVISCEFAHNSNWYITFQSDTDAQQAFKYLREEVKTFQGKPIMARIKAINTFFAKNGYRLMDSSIYSHPIQTQAQYASPVFMQPVYNPHQQYSVYSIVPQSWSPNPTPYFETPLAPFPNGSFVNGFNSPGSYKTNAAAMNMGRPFQKNRVKPQFRSSGGSEHSTEGSVSLGDGQLNRYSSRNFPAERHNPTVTGHQEQTYLQKETSTLQVEQNGDYGRGRRTLFRGRRRREDDRISRPHPSTAESKAPTPKFDLLASNFPPLPGSSSRMPGELVLENRMSDVVKGVYKEKDNEELTISCPVPADEQTECTSAQQLNMSTSSPCAAELTALSTTQQEKDLIEDSSVQKDGLNQTTIPVSPPSTTKPSRASTASPCNNNINAATAVALQEPRKLSYAEVCQKPPKEPSSVLVQPLRELRSNVVSPTKNEDNGAPENSVEKPHEKPEARASKDYSGFRGNIIPRGAAGKIREQRRQFSHRAIPQGVTRRNGKEQYVPPRSPK

SEQ ID NO: 9759 - protein, 440 aa, Artificial Sequence
  Synthetic polypeptide
QQVASKGTGLNPNAKVWQEIAPGNTDATPVTHGTESSWHEIAATSGAHPEGNAELSEDICKEYEVMYSSSCETTRNTTGIEESTDGMILGPEDLSYQIYDVSGESNSAVSTEDLKECLKKQLEFCFSRENLSKDLYLISQMDSDQFIPIWTVANMEEIKKLTTDPDLILEVLRSSPMVQVDEKGEKVRPSHKRCIVILREIPETTPIEEVKGLFKSENCPKVISCEFAHNSNWYITFQSDTDAQQAFKYLREEVKTFQGKPIMARIKAINTFFAKNGYRLMDSSIYSHPIQTQAQYASPVFMQPVYNPHQQYSVYSIVPQSWSPNPTPYFETPLAPFPNGSFVNGFNSPGSYKTNAAAMNMGRPFQKNRVKPQFRSSGGSEHSTEGSVSLGDGQLNRYSSRNFPAERHNPTVTGHQEQTYLQKETSTLQVEQNGDYGRGR

SEQ ID NO: 9760 - protein, 164 aa, Artificial Sequence
  Synthetic polypeptide
QQVASKGTGLNPNAKVWQEIAPGNTDATPVTHGTESSWHEIAATSGAHPEGNAELSEDICKEYEVMYSSSCETTRNTTGIEESTDGMILGPEDLSYQIYDVSESNSAVSTEDLKECLKKQLEFCFSRENLSKDLYLISQMDSDQFIPIWTVANMEEIKKLTTDP

SEQ ID NO: 9761 - protein, 648 aa, Artificial Sequence
  Synthetic polypeptide
QQVASKGTGLNPNAKVWQEIAPGNTDATPVTHGTESSWHEIAATSGAHPEGNAELSEDICKEYEVMYSSSCETTRNTTGIEESTDGMILGPEDLSYQIYDVSGESNSAVSTEDLKECLKKQLEFCFSRENLSKDLYLISQMDSDQFIPIWTVANMEEIKKLTTDPDLILEVLRSSPMVQVDEKGEKVRPSHKRCIVILREIPETTPIEEVKGLFKSENCPKVISCEFAHNSNWYITFQSDTDAQQAFKYLREEVKTFQGKPIMAPFPNGSFVNGFNSPGSYKTNAAAMNMGRPFQKNRVKPQFRSSGGSEHSTEGSVSLGDGQLNRYSSRNFPAERHNPTVTGHQEQTYLQKETSTLQVEQNGDYGRGRRTLFRGRRRREDDRISRPHPSTAESKAPTPKFDLLASNFPPLPGSSSRMPGELVLENRMSDVVKGVYKEKDNEELTISCPVPADEQTECTSAQQLNMSTSSPCAAELTALSTTQQEKDLIEDSSVQKDGLNQTTIPVSPPSTTKPSRASTASPCNNNINAATAVALQEPRKLSYAEVCQKPPKEPSSVLVQPLRELRSNVVSPTKNEDNGAPENSVEKPHEKPEARASKDYSGFRGNIIPRGAAGKIREQRRQFSHRAIPQGVTRRNGKEQYVPPRSPK

SEQ ID NO: 9762 - protein, 6 aa, Artificial Sequence
  Synthetic polypeptide
MLTGSI

SEQ ID NO: 9763 - protein, 6 aa, Artificial Sequence
  Synthetic polypeptide
MLTGSI

SEQ ID NO: 9764 - protein, 6 aa, Artificial Sequence
  Synthetic polypeptide
MLTGSI

SEQ ID NO: 9765 - protein, 6 aa, Artificial Sequence
  Synthetic polypeptide
MLTGSI

SEQ ID NO: 9766 - protein, 6 aa, Artificial Sequence
  Synthetic polypeptide
MLTGSI

SEQ ID NO: 9767 - protein, 6 aa, Artificial Sequence
  Synthetic polypeptide
MLTGSI

SEQ ID NO: 9768 - protein, 6 aa, Artificial Sequence
  Synthetic polypeptide
MLTGSI

SEQ ID NO: 9769 - protein, 6 aa, Artificial Sequence
  Synthetic polypeptide
MLTGSI

SEQ ID NO: 9770 - protein, 6 aa, Artificial Sequence
  Synthetic polypeptide
MLTGSI

SEQ ID NO: 9771 - protein, 647 aa, Artificial Sequence
  Synthetic polypeptide
QVASKGTGLNPNAKVWQEIAPGNTDATPVTHGTESSWHEIAATSGAHPEGNAELSEDICKEYEVMYSSSCETTRNTTGIEESTDGMILGPEDLSYQIYDVSGESNSAVSTEDLKECLKKQLEFCFSRENLSKDLYLISQMDSDQFIPIWTVANMEEIKKLTTDPDLILEVLRSSPMVQVDEKGEKVRPSHKRCIVILREIPETTPIEEVKGLFKSENCPKVISCEFAHNSNWYITFQSDTDAQQAFKYLREEVKTFQGKPIMARIKAINTFFAKNGYRLMDSSIYSHPIQTQAQYASPVFMQPVYNPHQQYSVYSIVPQSWSPNPTPYFETPLAPFPNGSFVNGFNSPGSYKTNAAAMNMGRPFQKNRRTLFRGRRRREDDRISRPHPSTAESKAPTPKFDLLASNFPPLPGSSSRMPGELVLENRMSDVVKGVYKEKDNEELTISCPVPADEQTECTSAQQLNMSTSSPCAAELTALSTTQQEKDLIEDSSVQKDGLNQTTIPVSPPSTTKPSRASTASPCNNNINAATAVALQEPRKLSYAEVCQKPPKEPSSVLVQPLRELRSNVVSPTKNEDNGAPENSVEKPHEKPEARASKDYSGFRGNIIPRGAAGKIREQRRQFSHRAIPQGVTRRNGKEQYVPPRSPK

SEQ ID NO: 9772 - protein, 5 aa, Artificial Sequence
  Synthetic polypeptide
VNVDR

SEQ ID NO: 9773 - protein, 5 aa, Artificial Sequence
  Synthetic polypeptide
VNVDR

SEQ ID NO: 9774 - protein, 5 aa, Artificial Sequence
  Synthetic polypeptide
VNVDR

SEQ ID NO: 9775 - protein, 5 aa, Artificial Sequence
  Synthetic polypeptide
VNVDR

SEQ ID NO: 9776 - protein, 5 aa, Artificial Sequence
  Synthetic polypeptide
VNVDR

SEQ ID NO: 9777 - protein, 5 aa, Artificial Sequence
  Synthetic polypeptide
VNVDR

SEQ ID NO: 9778 - protein, 5 aa, Artificial Sequence
  Synthetic polypeptide
VNVDR

SEQ ID NO: 9779 - protein, 5 aa, Artificial Sequence
  Synthetic polypeptide
VNVDR

SEQ ID NO: 9780 - protein, 5 aa, Artificial Sequence
  Synthetic polypeptide
VNVDR

SEQ ID NO: 9781 - protein, 724 aa, Artificial Sequence
  Synthetic polypeptide
QVASKGTGLNPNAKVWQEIAPGNTDATPVTHGTESSWHEIAATSGAHPEVSVFNTGNAELSEDICKEYEVMYSSSCETTRNTTGIEESTDGMILGPEDLSYQIYDVSGESNSAVSTEDLKECLKKQLEFCFSRENLSKDLYLISQMDSDQFIPIWTVANMEEIKKLTTDPDLILEVLRSSPMVQVDEKGEKVRPSHKRCIVILREIPETTPIEEVKGLFKSENCPKVISCEFAHNSNWYITFQSDTDAQQAFKYLREEVKTFQGKPIMARIKAINTFFAKNGYRLMDSSIYSHPIQTQAQYASPVFMQPVYNPHQQYSVYSIVPQSWSPNPTPYFETPLAPFPNGSFVNGFNSPGSYKTNAAAMNMGRPFQKNRVKPQFRSSGGSEHSTEGSVSLGDGQLNRYSSRNFPAERHNPTVTGHQEQTYLQKETSTLQVEQNGDYGRGRRTLFRGRRRREDDRISRPHPSTAESKAPTPKFDLLASNFPPLPGSSSRMPGELVLENRMSDVVKGVYKEKDNEELTISCPVPADEQTECTSAQQLNMSTSSPCAAELTALSTTQQEKDLIEDSSVQKDGLNQTTIPVSPPSTTKPSRASTASPCNNNINAATAVALQEPRKLSYAEVCQKPPKEPSSVLVQPLRELRSNVVSPTKNEDNGAPENSVEKPHEKPEARASKDYSGFRGNIIPRGAAGKIREQRRQFSHRAIPQGVTRRNGKEQYVPPRSPK

SEQ ID NO: 9782 - protein, 101 aa, Artificial Sequence
  Synthetic polypeptide
QVASKGTGLNPNAKVWQEIAPGNTDATPVTHGTESSWHEIAATSGAHPEGNAELSEDICKEYEVMYSSSCETTRNTTGIEESTDGMILGPEDLSYQIYDVS

SEQ ID NO: 9783 - protein, 718 aa, Artificial Sequence
  Synthetic polypeptide
QVASKGTGLNPNAKVWQEIAPGNTDATPVTHGTESSWHEIAATSGAHPEGNAELSEDICKEYEVMYSSSCETTRNTTGIEESTDGMILGPEDLSYQIYDVSGESNSAVSTEDLKECLKKQLEFCFSRENLSKDLYLISQMDSDQFIPIWTVANMEEIKKLTTDPDLILEVLRSSPMVQVDEKGEKVRPSHKRCIVILREIPETTPIEEVKGLFKSENCPKVISCEFAHNSNWYITFQSDTDAQQAFKYLREEVKTFQGKPIMARIKAINTFFAKNGYRLMDSSIYSHPIQTQAQYASPVFMQPVYNPHQQYSVYSIVPQSWSPNPTPYFETPLAPFPNGSFVNGFNSPGSYKTNAAAMNMGRPFQKNRVKPQFRSSGGSEHSTEGSVSLGDGQLNRYSSRNFPAERHNPTVTGHQEQTYLQKETSTLQVEQNGDYGRGRRTLFRGRRRREDDRISRPHPSTAESKAPTPKFDLLASNFPPLPGSSSRMPGELVLENRMSDVVKGVYKEKDNEELTISCPVPADEQTECTSAQQLNMSTSSPCAAELTALSTTQQEKDLIEDSSVQKDGLNQTTIPVSPPSTTKPSRASTASPCNNNINAATAVALQEPRKLSYAEVCQKPPKEPSSVLVQPLRELRSNVVSPTKNEDNGAPENSVEKPHEKPEARASKDYSGFRGNIIPRGAAGKIREQRRQFSHRAIPQGVTRRNGKEQYVPPRSPK

SEQ ID NO: 9784 - protein, 718 aa, Artificial Sequence; identical to SEQ ID NO: 9783
  Synthetic polypeptide

SEQ ID NO: 9785 - protein, 439 aa, Artificial Sequence
  Synthetic polypeptide
QVASKGTGLNPNAKVWQEIAPGNTDATPVTHGTESSWHEIAATSGAHPEGNAELSEDICKEYEVMYSSSCETTRNTTGIEESTDGMILGPEDLSYQIYDVSGESNSAVSTEDLKECLKKQLEFCFSRENLSKDLYLISQMDSDQFIPIWTVANMEEIKKLTTDPDLILEVLRSSPMVQVDEKGEKVRPSHKRCIVILREIPETTPIEEVKGLFKSENCPKVISCEFAHNSNWYITFQSDTDAQQAFKYLREEVKTFQGKPIMARIKAINTFFAKNGYRLMDSSIYSHPIQTQAQYASPVFMQPVYNPHQQYSVYSIVPQSWSPNPTPYFETPLAPFPNGSFVNGFNSPGSYKTNAAAMNMGRPFQKNRVKPQFRSSGGSEHSTEGSVSLGDGQLNRYSSRNFPAERHNPTVTGHQEQTYLQKETSTLQVEQNGDYGRGR

SEQ ID NO: 9786 - protein, 163 aa, Artificial Sequence
  Synthetic polypeptide
QVASKGTGLNPNAKVWQEIAPGNTDATPVTHGTESSWHEIAATSGAHPEGNAELSEDICKEYEVMYSSSCETTRNTTGIEESTDGMILGPEDLSYQIYDVSESNSAVSTEDLKECLKKQLEFCFSRENLSKDLYLISQMDSDQFIPIWTVANMEEIKKLTTDP

SEQ ID NO: 9787 - protein, 647 aa, Artificial Sequence
  Synthetic polypeptide
QVASKGTGLNPNAKVWQEIAPGNTDATPVTHGTESSWHEIAATSGAHPEGNAELSEDICKEYEVMYSSSCETTRNTTGIEESTDGMILGPEDLSYQIYDVSGESNSAVSTEDLKECLKKQLEFCFSRENLSKDLYLISQMDSDQFIPIWTVANMEEIKKLTTDPDLILEVLRSSPMVQVDEKGEKVRPSHKRCIVILREIPETTPIEEVKGLFKSENCPKVISCEFAHNSNWYITFQSDTDAQQAFKYLREEVKTFQGKPIMAPFPNGSFVNGFNSPGSYKTNAAAMNMGRPFQKNRVKPQFRSSGGSEHSTEGSVSLGDGQLNRYSSRNFPAERHNPTVTGHQEQTYLQKETSTLQVEQNGDYGRGRRTLFRGRRRREDDRISRPHPSTAESKAPTPKFDLLASNFPPLPGSSSRMPGELVLENRMSDVVKGVYKEKDNEELTISCPVPADEQTECTSAQQLNMSTSSPCAAELTALSTTQQEKDLIEDSSVQKDGLNQTTIPVSPPSTTKPSRASTASPCNNNINAATAVALQEPRKLSYAEVCQKPPKEPSSVLVQPLRELRSNVVSPTKNEDNGAPENSVEKPHEKPEARASKDYSGFRGNIIPRGAAGKIREQRRQFSHRAIPQGVTRRNGKEQYVPPRSPK

SEQ ID NO: 9788 - protein, 186 aa, Artificial Sequence
  Synthetic polypeptide
QVASKGTGLNPNAKVWQEIAPGNTDATPVTHGTESSWHEIAATSGAHPEGNAELSEDICKEYEVMYSSSCETTRNTTGIEESTDGMILGPEDLSYQIYDVSESNSAVSTEDLKECLKKQLEFCFSRENLSKDLYLISQMDSDQFIPIWTVANMEEIKKLTTDPDLILEVLRSSPMVQVDEKGEKVR

SEQ ID NO: 9789 - protein, 1546 aa, Artificial Sequence
  Synthetic polypeptide
ILSCQVGSNQKARQHTLKVRRWGSRYTCTLLVVMQCGKNCFGGGIFQDVTKFNTYLLFYLEFSLVRIYSEDIHTEAVQAALAKHKEQKMALPMPTKRRSTFVQSPADACTPPDTSSASEDEGSLRRQAALSAALQQSLQNAESWINRSIQGSSTSSSASSTLSHGEVKGTSGSLADVFANTRIENFSAPPDVTTTTSSSSSSSSIRPANIDLPPSGIVKGMHKGSNRSSLMDTADGVPVSSRVSTKIQQLLNTLKRPKRPPLKEFFVDDSEEIVEVPQPDPNQPKPEGRQMTPVKGEPLGVICNWPPALESALQRWGTTQAKCSCLTALDMTGKPVYTLTYGKLWSRSLKLAYTLLNKLGTKNEPVLKPGDRVALVYPNNDPVMFMVAFYGCLLAEVIPVPIEVPLTRKDAGGQQIGFLLGSCGIALALTSEVCLKGLPKTQNGEIVQFKGWPRLKWVVTDSKYLSKPPKDWQPHISPAGTEPAYIEYKTSKEGSVMGVTVSRLAMLSHCQALSQACNYSEGETIVNVLDFKKDAGLWHGMFANVMNKMHTISVPYSVMKTCPLSWVQRVHAHKAKVALVKCRDLHWAMMAHRDQRDVSLSSLRMLIVTDGANPWSVSSCDAFLSLFQSHGLKPEAICPCATSAEAMTVAIRRPGVPGAPLPGRAILSMNGLSYGVIRVNTEDKNSALTVQDVGHVMPGGMMCIVKPDGPPQLCKTDEIGEICVSSRTGGMMYFGLAGVTKNTFEVIPVNSAGSPVGDVPFIRSGLLGFVGPGSLVFVVGKMDGLLMVSGRRHNADDIVATGLAVESIKTVYRGRIAVFSVSVFYDERIVVVAEQRPDASEEDSFQWMSRVLQAIDSIHQVGVYCLALVPANTLPKTPLGGIHISQTKQLFLEGSLHPCNILMCPHTCVTNLPKPRQKQPGVGPASVMVGNLVAGKRIAQAAGRDLGQIEENDLVRKHQFLAEILQWRAQATPDHVLFMLLNAKGTTVCTASCLQLHKRAERIASVLGDKGHLNAGDNVVLLYPPGIELIAAFYGCLYAGCIPVTVRPPHAQNLTATLPTVRMIVDVSKAACILTSQTLMRLLRSREAAAAVDVKTWPTIIDTDDLPRKRLPQLYKPPTPEMLAYLDFSVSTTGMLTGVKMSHSAVNALCRAIKLQCELYSSRQIAICLDPYCGLGFALWCLCSVYSGHQSVLIPPMELENNLFLWLSTVNQYKIRDTFCSYSVMELCTKGLGNQVEVLKTRGINLSCVRTCVVVAEERPRVALQQSFSKLFKDIGLSPRAVSTTFGSRVNVAICLQGTSGPDPTTVYVDLKSLRHDRVRLVERGAPQSLLLSESGKILPGVKVVIVNPETKGPVGDSHLGEIWVNSPHTASGYYTIYDSETLQADHFNTRLSFGDAAQTLWARTGYLGFVRRTELTAATGERHDALYVVGALDETLELRGLRYHPIDIETSVSRIHRSIAECAVFTWTNLLVVVVELCGSEQEALDLVPLVTNVVLEEHYLIVGVVVVVDPGVIPINSRGEKQRMHLRDSFLADQLDPIYVAYNM

SEQ ID NO: 9790 - protein, 63 aa, Artificial Sequence
  Synthetic polypeptide
NSLLSEFTLKISTQKQFRLHWQSIKNRRWLCPCQPKGDPHLFSLLQMPAHLLTHLRPLRMRAL

SEQ ID NO: 9791 - protein, 117 aa, Artificial Sequence
  Synthetic polypeptide
TSLRTNFILPPMASQVHWDLPWPGSDLSPSRSLLHHFAPGTLAFLLFLKPAKLVPTSEPFRFPFLLPGNLFLQIFAWLASSPHSELLCFLCLYFMMSALWWLRNKDLMLLRKIVSSG

SEQ ID NO: 9792 - protein, 94 aa, Artificial Sequence
  Synthetic polypeptide
PPSEPTSSSLPWPLRSTGICPGLGLTSLPPGLCFTTLLQAHWPSCCSSNLPSSSLPQNLFAFRSFCPETSSSRSSRGSRPHLIQNCCVFCVCIL

SEQ ID NO: 9793 - protein, 790 aa, Artificial Sequence
  Synthetic polypeptide
PLSLPVSASPLCSRHTGLLAVPQTCQARPYLRTFSLSVPSARKPLPPDLRVARVLTSFRIAVFSVSVFYDERIVVVAEQRPDASEEDSFQWMSRVLQAIDSIHQVGVYCLALVPANTLPKTPLGGIHISQTKQLFLEGSLHPCNILMCPHTCVTNLPKPRQKQPGVGPASVMVGNLVAGKRIAQAAGRDLGQIEENDLVRKHQFLAEILQWRAQATPDHVLFMLLNAKGTTVCTASCLQLHKRAERIASVLGDKGHLNAGDNVVLLYPPGIELIAAFYGCLYAGCIPVTVRPPHAQNLTATLPTVRMIVDVSKAACILTSQTLMRLLRSREAAAAVDVKTWPTIIDTDDLPRKRLPQLYKPPTPEMLAYLDFSVSTTGMLTGVKMSHSAVNALCRAIKLQCELYSSRQIAICLDPYCGLGFALWCLCSVYSGHQSVLIPPMELENNLFLWLSTVNQYKIRDTFCSYSVMELCTKGLGNQVEVLKTRGINLSCVRTCVVVAEERPRVALQQSFSKLFKDIGLSPRAVSTTFGSRVNVAICLQGTSGPDPTTVYVDLKSLRHDRVRLVERGAPQSLLLSESGKILPGVKVVIVNPETKGPVGDSHLGEIWVNSPHTASGYYTIYDSETLQADHFNTRLSFGDAAQTLWARTGYLGFVRRTELTAATGERHDALYVVGALDETLELRGLRYHPIDIETSVSRIHRSIAECAVFTWTNLLVVVVELCGSEQEALDLVPLVTNVVLEEHYLIVGVVVVVDPGVIPINSRGEKQRMHLRDSFLADQLDPIYVAYNM

SEQ ID NO: 9794 - protein, 41 aa, Artificial Sequence
  Synthetic polypeptide
GRARWLMPVIPALWEAEAGGFPGPRPASSLHGTRKQQPHST

SEQ ID NO: 9795 - protein, 41 aa, Artificial Sequence; identical to SEQ ID NO: 9794
  Synthetic polypeptide

SEQ ID NO: 9796 - protein, 41 aa, Artificial Sequence; identical to SEQ ID NO: 9794
  Synthetic polypeptide

SEQ ID NO: 9797 - protein, 46 aa, Artificial Sequence
  Synthetic polypeptide
SQHFGRQRRADSQGQDQLQVSMVPENNNLTAPEPQEEVSTSENPQL

SEQ ID NO: 9798 - protein, 46 aa, Artificial Sequence; identical to SEQ ID NO: 9797
  Synthetic polypeptide

SEQ ID NO: 9799 - protein, 46 aa, Artificial Sequence; identical to SEQ ID NO: 9797
  Synthetic polypeptide

SEQ ID NO: 9800 - protein, 55 aa, Artificial Sequence
  Synthetic polypeptide
PGAVAHACNPSTLGGRGGRIPRAKTSFKSPWYQKTTTSQHLNLKKRYPQVKIHNS

SEQ ID NO: 9801 - protein, 55 aa, Artificial Sequence; identical to SEQ ID NO: 9800
  Synthetic polypeptide

SEQ ID NO: 9802 - protein, 55 aa, Artificial Sequence; identical to SEQ ID NO: 9800
  Synthetic polypeptide

SEQ ID NO: 9803 - protein, 16 aa, Artificial Sequence
  Synthetic polypeptide
EEEEEEAKAGGGGETR

SEQ ID NO: 9804 - protein, 16 aa, Artificial Sequence
  Synthetic polypeptide
EEEEEEAKAGGGGETR

SEQ ID NO: 9805 - protein, 1041 aa, Artificial Sequence
  Synthetic polypeptide
RRKRKRRRLAEEERPDEEAVVDQGGTSTILNIHYEKEELEGHRTLYVGVRMPLGRQSHRHHRTHGQKHRRRGRGKGASQGEEGLEALAHDTPSQRVQFILGTEEDEEHVPHELFTELDEICMKEGEDAEWKETARWLKFEEDVEDGGERWSKPYVATLSLHSLFELRSCLINGTVLLDMHANSIEEISDLILDQQELSSDLNDSMRVKVREALLKKHHHQNEKKRNNLIPIVRSFAEVGKKQSDPHLMDKHGQTVSPQSVPTTNLEVKNGVNCEHSPVDLSKVDLHFMKKIPTGAEASNVLVGEVDILDRPIVAFVRLSPAVLLSGLTEVPIPTRFLFILLGPVGKGQQYHEIGRSMATIMTDEIFHDVAYKAKERDDLLAGIDEFLDQVTVLPPGEWDPSIRIEPPKNVPSQEKRKMPGVPNGNVCHIEQEPHGGHSGPELQRTGRLFGGLVLDIKRKAPWYWSDYRDALSLQCLASFLFLYCACMSPVITFGGLLGEATEGRISAIESLFGASMTGIAYSLFAGQALTILGSTGPVLVFEKILFKFCKDYALSYLSLRACIGLWTAFLCIVLVATDASSLVCYITRFTEEAFASLICIIFIYEAIEKLIHLAETYPIHMHSQLDHLSLYYCRCTLPENPNNHTLQYWKDHNIVTAEVHWANLTVSECQEMHGEFMGSACGHHGPYTPDVLFWSCILFFTTFILSSTLKTFKTSRYFPTRVRSMVSDFAVFLTIFTMVIIDFLIGVPSPKLQVPSVFKPTRDDRGWIINPIGPNPWWTVIAAIIPALLCTILIFMDQQITAVIINRKEHKLKKGCGYHLDLLMVAIMLGVCSIMGLPWFVAATVLSITHVNSLKLESECSAPGEQPKFLGIREQRVTGLMIFVLMGCSVFMTAILKFIPMPVLYGVFLYMGVSSLQGIQFFDRLKLFGMPAKHQPDFIYLRHVPLRKVHLFTLIQLTCLVLLWVIKASPAAIVFPMMVLALVFVRKVMDLCFSKRELSWLDDLMPESKKKKLDDAKKKAKEEEVIVLAPTVYLGASNYRT

SEQ ID NO: 9806 - protein, 121 aa, Artificial Sequence
  Synthetic polypeptide
GGRGRGEGWRRRRDQMKKLWWIRVGPVQFSTFTMKKKSWKVTELCMWEFGCRLAGRAIGITALMARSTGDEGGAKEPARGRKAWKPWPTTHHLSVFSSFLAPRKMKSMCLMSCLQSWMRSV

SEQ ID NO: 9807 - protein, 121 aa, Artificial Sequence; identical to SEQ ID NO: 9806
  Synthetic polypeptide

SEQ ID NO: 9808 - protein, 1090 aa, Artificial Sequence
  Synthetic polypeptide
RRKRKRRRLAEEERPDEEAVVDQGGTSTILNIHYEKEELEGHRTLYVGVRMPLGRQSHRHHRTHGQKHRRRGRGKGASQGEEGLEALAHDTPSQRVQFILGTEEDEEHVPHELFTELDEICMKEGEDAEWKETARWLKFEEDVEDGGERWSKPYVATLSLHSLFELRSCLINGTVLLDMHANSIEEISDLILDQQELSSDLNDSMRVKVREALLKKHHHQNEKKRNNLIPIVRSFAEVGKKQSDPHLMDKHGQTVSPQSVPTTNLEVKNGVNCEHSPVDLSKVDLHFMKKIPTGAEASNVLVGEVDILDRPIVAFVRLSPAVLLSGLTEVPIPTRFLFILLGPVGKGQQYHEIGRSMATIMTDEIFHDVAYKAKERDDLLAGIDEFLDQVTVLPPGEWDPSIRIEPPKNVPSQEKRKMPGVPNGNVCHIEQEPHGGHSGPELQRTGRLFGGLVLDIKRKAPWYWSDYRDALSLQCLASFLFLYCACMSPVITFGGLLGEATEGRISAIESLFGASMTGIAYSLFAGQALTILGSTGPVLVFEKILFKFCKDYALSYLSLRACIGLWTAFLCIVLVATDASSLVCYITRFTEEAFASLICIIFIYEAIEKLIHLAETYPIHMHSQLDHLSLYYCRCTLPENPNNHTLQYWKDHNIVTAEVHWANLTVSECQEMHGEFMGSACGHHGPYTPDVLFWSCILFFTTFILSSTLKTFKTSRYFPTRVRSMVSDFAVFLTIFTMVIIDFLIGVPSPKLQVPSVFKPTRDDRGWIINPIGPNPWWTVIAAIIPALLCTILIFMDQQITAVIINRKEHKLKKGCGYHLDLLMVAIMLGVCSIMGLPWFVAATVLSITHVNSLKLESECSAPGEQPKFLGIREQRVTGLMIFVLMGCSVFMTAILKFIPMPVLYGVFLYMGVSSLQGIQFFDRLKLFGMPAKHQPDFIYLRHVPLRKVHLFTLIQLTCLVLLWVIKASPAAIVFPMMVLALVFVRKVMDLCFSKRELSWLDDLMPESKKKKLDDAKKKAKEEEEAEKMLEIGGDKFPLESRKLLSSPGKNISCRCDPSEINISDEMPKTTVWKALSMNSGNAKEKSLFN

SEQ ID NO: 9809 - protein, 32 aa, Artificial Sequence
  Synthetic polypeptide
DRPQWLMPVIPTLWRMSSAVCVHQLPPGQLHV

SEQ ID NO: 9810 - protein, 32 aa, Artificial Sequence; identical to SEQ ID NO: 9809
  Synthetic polypeptide

SEQ ID NO: 9811 - protein, 32 aa, Artificial Sequence; identical to SEQ ID NO: 9809
  Synthetic polypeptide

SEQ ID NO: 9812 - protein, 32 aa, Artificial Sequence; identical to SEQ ID NO: 9809
  Synthetic polypeptide

SEQ ID NO: 9813 - protein, 70 aa, Artificial Sequence
  Synthetic polypeptide
PATVAHACNPNTLENELCCVRAPAASRPTTRVRQMGPAWFPFSIWMGWSTMCAPASPKWSWSLPGSPSTA

SEQ ID NO: 9814 - protein, 70 aa, Artificial Sequence; identical to SEQ ID NO: 9813
  Synthetic polypeptide

SEQ ID NO: 9815 - protein, 70 aa, Artificial Sequence; identical to SEQ ID NO: 9813
  Synthetic polypeptide

SEQ ID NO: 9816 - protein, 70 aa, Artificial Sequence; identical to SEQ ID NO: 9813
  Synthetic polypeptide

SEQ ID NO: 9817 - protein, 54 aa, Artificial Sequence
  Synthetic polypeptide
PSASAIISLSLFVYKMRKSWHKFEKISQAPPGSEIRDALYPSPIWDTSTESGTP

SEQ ID NO: 9818 - protein, 54 aa, Artificial Sequence; identical to SEQ ID NO: 9817
  Synthetic polypeptide

SEQ ID NO: 9819 - protein, 54 aa, Artificial Sequence; identical to SEQ ID NO: 9817
  Synthetic polypeptide

SEQ ID NO: 9820 - protein, 54 aa, Artificial Sequence; identical to SEQ ID NO: 9817
  Synthetic polypeptide

SEQ ID NO: 9821 - protein, 54 aa, Artificial Sequence; identical to SEQ ID NO: 9817
  Synthetic polypeptide

SEQ ID NO: 9822 - protein, 126 aa, Artificial Sequence
  Synthetic polypeptide
GRVGTSLKRFLRLHPVLKFEMPCIQAQYGTPAPSPGPRDHLASDPLTPEFIKPTMDLASPEAAPAAPTALPSFSTFMDGYTGEFDTFLYQLPGTVQPCSSASSSASSTSSSSATSPASASFKFEDF

SEQ ID NO: 9823 - protein, 28 aa, Artificial Sequence
  Synthetic polypeptide
NSRCPVSKPNMGHQHRVRDPVTTWQATP

SEQ ID NO: 9824 - protein, 28 aa, Artificial Sequence
  Synthetic polypeptide
NSRCPVSKPNMGHQHRVRDPVTTWQATP

SEQ ID NO: 9825 - protein, 28 aa, Artificial Sequence
  Synthetic polypeptide
NSRCPVSKPNMGHQHRVRDPVTTWQATP

SEQ ID NO: 9826 - protein, 28 aa, Artificial Sequence
  Synthetic polypeptide
NSRCPVSKPNMGHQHRVRDPVTTWQATP

SEQ ID NO: 9827 - protein, 28 aa, Artificial Sequence
  Synthetic polypeptide
NSRCPVSKPNMGHQHRVRDPVTTWQATP

SEQ ID NO: 9828 - protein, 618 aa, Artificial Sequence
  Synthetic polypeptide
GRVGTSLKRFLRLHPVLKFEMPCIQAQYGTPAPSPGPRDHLASDPLTPEFIKPTMDLASPEAAPAAPTALPSFSTFMDGYTGEFDTFLYQLPGTVQPCSSASSSASSTSSSSATSPASASFKFEDFQVYGCYPGPLSGPVDEALSSSGSDYYGSPCSAPSPSTPSFQPPQLSPWDGSFGHFSPSQTYEGLRAWTEQLPKASGPPQPPAFFSFSPPTGPSPSLAQSPLKLFPSQATHQLGEGESYSMPTAFPGLAPTSPHLEGSGILDTPVTSTKARSGAPGGSEGRCAVCGDNASCQHYGVRTCEGCKGFFKRTVQKNAKYICLANKDCPVDKRRRNRCQFCRFQKCLAVGMVKEVVRTDSLKGRRGRLPSKPKQPPDASPANLLTSLVRAHLDSGPSTAKLDYSKFQELVLPHFGKEDAGDVQQFYDLLSGSLEVIRKWAEKIPGFAELSPADQDLLLESAFLELFILRLAYRSKPGEGKLIFCSGLVLHRLQCARGFGDWIDSILAFSRSLHSLLVDVPAFACLSALVLITDRHGLQEPRRVEELQNRIASCLKEHVAAVAGEPQPASCLSRLLGKLPELRTLCTQGLQRIFYLKLEDLVPPPPIIDKIFMDTLPF

SEQ ID NO: 9829 - protein, 618 aa, Artificial Sequence; identical to SEQ ID NO: 9828
  Synthetic polypeptide

SEQ ID NO: 9830 - protein, 618 aa, Artificial Sequence; identical to SEQ ID NO: 9828
  Synthetic polypeptide

SEQ ID NO: 9831 - protein, 309 aa, Artificial Sequence
  Synthetic polypeptide
GRVGTSLKRFLRLHPVLKFEMPCIQAQYGTPAPSPGPRDHLASDPLTPEFIKPTMDLASPEAAPAAPTALPSFSTFMDGYTGEFDTFLYQLPGTVQPCSSASSSASSTSSSSATSPASASFKFEDFQVYGCYPGPLSGPVDEALSSSGSDYYGSPCSAPSPSTPSFQPPQLSPWDGSFGHFSPSQTYEGLRAWTEQLPKASGPPQPPAFFSFSPPTGPSPSLAQSPLKLFPSQATHQLGEGESYSMPTAFPGLAPTSPHLEGSGILDTPVTSTKARSGAPGGSEGRCAVCGDNASCQHYGVRTCEGCKG

SEQ ID NO: 9832 - protein, 537 aa, Artificial Sequence
  Synthetic polypeptide
KQTNKNSTNQWQIKEKDRVHYRINNLKRHGSRILYGLGGSKRISIGGGSCAISGGYGSRAGGSYGFGGAGSGFGFGGGAGIGFGLGGGAGLAGGFGGPGFPVCPPGGIQEVTVNQSLLTPLNLQIDPAIQRVRAEEREQIKTLNNKFASFIDKVRFLEQQNKVLDTKWTLLQEQGTKTVRQNLEPLFEQYINNLRRQLDNIVGERGRLDSELRNMQDLVEDLKNKYEDEINKRTAAENEFVTLKKDVDAAYMNKVELQAKADTLTDEINFLRALYDAELSQMQTHISDTSVVLSMDNNRNLDLDSIIAEVKAQYEEIAQRSRAEAESWYQTKYEELQITAGRHGDDLRNTKQEIAEINRMIQRLRSEIDHVKKQCANLQAAIADAEQRGEMALKDAKNKLEGLEDALQKAKQDLARLLKEYQELMNVKLALDVEIATYRKLLEGEECRLNGEGVGQVNISVVQSTVSSGYGGASGVGSGLGLGGGSSYSYGSGLGVGGGFSSSSGRATGGGLSSVGGGSSTIKYTTTSSSSRKSYKH

SEQ ID NO: 9833 - protein, 94 aa, Artificial Sequence
  Synthetic polypeptide
ITLKDMAAEFCMAWGAPRGSPLEGAAVPSVAAMAAEPEAAMALVAPGVDLVSVVEPALALVWVVEPALLVALGALASLCAPLEASKRSLSTRVS

SEQ ID NO: 9834 - protein, 98 aa, Artificial Sequence
  Synthetic polypeptide
KTWQPNSVWPGGLQEDLHWRGQLCHQWRLWQQSRRQLWLWWRREWIWFRWWSRHWLWSGWWSRPCWWLWGPWLPCVPPWRHPRGHCQPESPDSPQPAN

SEQ ID NO: 9835 - protein, 25 aa, Artificial Sequence
  Synthetic polypeptide
ADTPTAAGVVASTATPPPPGRASRA

SEQ ID NO: 9836 - protein, 15 aa, Artificial Sequence
  Synthetic polypeptide
LPLLHLLLPEELQEL

SEQ ID NO: 9837 - protein, 24 aa, Artificial Sequence
  Synthetic polypeptide
RHPHCCWSSSFHCYTSSSRKSFKS

SEQ ID NO: 9838 - protein, 178 aa, Artificial Sequence
  Synthetic polypeptide
VGGSRGQEIETILANMDLRLVRPACLHSCLYHVHQGDPEVLQGVHLWPPGLQQPLLHEWARFPHQLLELLPSGQQQLSRWPGRRLWWGQRHGRHHRSYGQPEPAEPPCPGGGPQHPGRAHPGEGADQDPQQQVCLLHRQGTVPGAAEQDAGDQVEPPAAAEDGSKQHGQHVRELHQQP

SEQ ID NO: 9839 - protein, 178 aa, Artificial Sequence; identical to SEQ ID NO: 9838
  Synthetic polypeptide

SEQ ID NO: 9840 - protein, 501 aa, Artificial Sequence
  Synthetic polypeptide
PTWISAWFGPPASTPASTMSIRVTQKSYKVSTSGPRAFSSRSYTSGPGSRISSSSFSRVGSSNFRGGLGGGYGGASGMGGITAVTVNQSLLSPLVLEVDPNIQAVRTQEKEQIKTLNNKFASFIDKVRFLEQQNKMLETKWSLLQQQKTARSNMDNMFESYINNLRRQLETLGQEKLKLEAELGNMQGLVEDFKNKYEDEINKRTEMENEFVLIKKDVDEAYMNKVELESRLEGLTDEINFLRQLYEEEIRELQSQISDTSVVLSMDNSRSLDMDSIIAEVKAQYEDIANRSRAEAESMYQIKYEELQSLAGKHGDDLRRTKTEISEMNRNISRLQAEIEGLKGQRASLEAAIADAEQRGELAIKDANAKLSELEAALQRAKQDMARQLREYQELMNVKLALDIEIATYRKLLEGEESRLESGMQNMSIHTKTTSGYAGGLSSAYGGLTSPGLSYSLGSSFGSGAGSSSFSRTSSSRAVVVKKIETRDGKLVSESSDVLPK

SEQ ID NO: 9841 - protein, 52 aa, Artificial Sequence
  Synthetic polypeptide
PGAVAHACNLSTLGGLGGRITRSGDRDHPSQHGSPPGSARLPPLLPLPCPSG

SEQ ID NO: 9842 - protein, 52 aa, Artificial Sequence; identical to SEQ ID NO: 9841
  Synthetic polypeptide

SEQ ID NO: 9843 - protein, 52 aa, Artificial Sequence; identical to SEQ ID NO: 9841
  Synthetic polypeptide

SEQ ID NO: 9844 - protein, 267 aa, Artificial Sequence
  Synthetic polypeptide
PTWISAWFGPPASTPASTMSIRVTQKSYKVSTSGPRAFSSRSYTSGPGSRISSSSFSRVGSSNFRGGLGGGYGGASGMGGITAVTVNQSLLSPLVLEVDPNIQAVRTQEKEQIKTLNNKFASFIDKVRFLEQQNKMLETKWSLLQQQKTARSNMDNMFESYINNLRRQLETLGQEKLKLEAELGNMQGLVEDFKNKYEDEINKRTEMENEFVLIKKDVDEAYMNKVELESRLEGLTDEINFLRQLYEEEIRELQSQISDTSVVLSMD

SEQ ID NO: 9845 - protein, 133 aa, Artificial Sequence
  Synthetic polypeptide
VGGSRGQEIETILANMDLRLVRPACLHSCLYHVHQGDPEVLQGVHLWPPGLQQPLLHEWARFPHQLLELLPSGQQQLSRWPGRRLWWGQRHGRHHRSYGQPEPAEPPCPGGGPQHPGRAHPGEGADQDPQQQV

SEQ ID NO: 9846 - protein, 120 aa, Artificial Sequence
  Synthetic polypeptide
PTWISAWFGPPASTPASTMSIRVTQKSYKVSTSGPRAFSSRSYTSGPGSRISSSSFSRVGSSNFRGGLGGGYGGASGMGGITAVTVNQSLLSPLVLEVDPNIQAVRTQEKEQIKTLNNKF

SEQ ID NO: 9847 - protein, 506 aa, Artificial Sequence
  Synthetic polypeptide
SQHFGRPRISAWFGPPASTPASTMSIRVTQKSYKVSTSGPRAFSSRSYTSGPGSRISSSSFSRVGSSNFRGGLGGGYGGASGMGGITAVTVNQSLLSPLVLEVDPNIQAVRTQEKEQIKTLNNKFASFIDKVRFLEQQNKMLETKWSLLQQQKTARSNMDNMFESYINNLRRQLETLGQEKLKLEAELGNMQGLVEDFKNKYEDEINKRTEMENEFVLIKKDVDEAYMNKVELESRLEGLTDEINFLRQLYEEEIRELQSQISDTSVVLSMDNSRSLDMDSIIAEVKAQYEDIANRSRAEAESMYQIKYEELQSLAGKHGDDLRRTKTEISEMNRNISRLQAEIEGLKGQRASLEAAIADAEQRGELAIKDANAKLSELEAALQRAKQDMARQLREYQELMNVKLALDIEIATYRKLLEGEESRLESGMQNMSIHTKTTSGYAGGLSSAYGGLTSPGLSYSLGSSFGSGAGSSSFSRTSSSRAVVVKKIETRDGKLVSESSDVLPK

SEQ ID NO: 9848 - protein, 36 aa, Artificial Sequence
  Synthetic polypeptide
PGAVAHACNLSTLGGLGSPPGSARLPPLLPLPCPSG

SEQ ID NO: 9849 - protein, 36 aa, Artificial Sequence; identical to SEQ ID NO: 9848
  Synthetic polypeptide

SEQ ID NO: 9850 - protein, 36 aa, Artificial Sequence; identical to SEQ ID NO: 9848
  Synthetic polypeptide

SEQ ID NO: 9851 - protein, 272 aa, Artificial Sequence
  Synthetic polypeptide
SQHFGRPRISAWFGPPASTPASTMSIRVTQKSYKVSTSGPRAFSSRSYTSGPGSRISSSSFSRVGSSNFRGGLGGGYGGASGMGGITAVTVNQSLLSPLVLEVDPNIQAVRTQEKEQIKTLNNKFASFIDKVRFLEQQNKMLETKWSLLQQQKTARSNMDNMFESYINNLRRQLETLGQEKLKLEAELGNMQGLVEDFKNKYEDEINKRTEMENEFVLIKKDVDEAYMNKVELESRLEGLTDEINFLRQLYEEEIRELQSQISDTSVVLSMD

SEQ ID NO: 9852 - protein, 125 aa, Artificial Sequence
  Synthetic polypeptide
SQHFGRPRISAWFGPPASTPASTMSIRVTQKSYKVSTSGPRAFSSRSYTSGPGSRISSSSFSRVGSSNFRGGLGGGYGGASGMGGITAVTVNQSLLSPLVLEVDPNIQAVRTQEKEQIKTLNNKF

SEQ ID NO: 9853 - protein, 429 aa, Artificial Sequence
  Synthetic polypeptide
WKQKSGEREQIKTLNNKFASFIDKVRFLEQQNKVLDTKWTLLQEQGTKTVRQNLEPLFEQYINNLRRQLDSIVGERGRLDSELRNMQDLVEDFKNKYEDEINKRTTAENEFVMLKKDVDAAYMNKVELEAKVDALMDEINFMKMFFDAELSQMQTHVSDTSVVLSMDNNRNLDLDSIIAEVKAQYEEIANRSRTEAESWYQTKYEELQQTAGRHGDDLRNTKHEISEMNRMIQRLRAEIDNVKKQCANLQNAIADAEQRGELALKDARNKLAELEEALQKAKQDMARLLREYQELMNTKLALDVEIATYRKLLEGEECRLSGEGVGPVNISVVTSSVSSGYGSGSGYGGGLGGGLGGGLGGGLAGGSSGSYYSSSSGGVGLGGGLSVGGSGFSASSGRGLGVGFGSGGGSSSSVKFVSTTSSSRKSFKS

SEQ ID NO: 9854 - protein, 63 aa, Artificial Sequence
  Synthetic polypeptide
EGGRRVRERRCEDNGSRSQERGNRSRPSTISLPPSSTRCGSWSSRTRFWTPSGPCCRSRAPRL

SEQ ID NO: 9855 - protein, 63 aa, Artificial Sequence; identical to SEQ ID NO: 9854
  Synthetic polypeptide

SEQ ID NO: 9856 - protein, 49 aa, Artificial Sequence
  Synthetic polypeptide
VGEIMLIVWVNLMSSKDPYKKEAEGSEKGDVRIMEAEVRREGTDQDPQQ

SEQ ID NO: 9857 - protein, 49 aa, Artificial Sequence; identical to SEQ ID NO: 9856
  Synthetic polypeptide

SEQ ID NO: 9858 - protein, 49 aa, Artificial Sequence; identical to SEQ ID NO: 9856
  Synthetic polypeptide

SEQ ID NO: 9859 - protein, 127 aa, Artificial Sequence
  Synthetic polypeptide
WKQKSGEREQIKTLNNKFASFIDKVRFLEQQNKVLDTKWTLLQEQGTKTVRQNLEPLFEQYINNLRRQLDSIVGERGRLDSELRNMQDLVEDFKNKYEDEINKRTTAENEFVMLKKDVDAAYMNKVE

SEQ ID NO: 9860 - protein, 21 aa, Artificial Sequence
  Synthetic polypeptide
WKQKSGEREQIKTLNNKFASF

SEQ ID NO: 9861 - protein, 34 aa, Artificial Sequence
  Synthetic polypeptide
EGGRRVRERRCEDNGSRSQERGNRSRPSTISLPP

SEQ ID NO: 9862 - protein, 37 aa, Artificial Sequence
  Synthetic polypeptide
SSALAENSVYICITTLTIVYSFYKVLHPVNHEAGGHT

SEQ ID NO: 9863 - protein, 41 aa, Artificial Sequence
  Synthetic polypeptide
TMRLEDTPKHVESQCRAARAKSISPQYWVPWRFQSCPPTTY

SEQ ID NO: 9864 - protein, 85 aa, Artificial Sequence
  Synthetic polypeptide
GQVRWLIPVIPALWEAKLIGCIIGRQGAKINEIRQMSGAQIKIANPVEGSTDRQVTITGSAASISLAQYLINVRLSSETGGMGSS

SEQ ID NO: 9865 - protein, 85 aa, Artificial Sequence; identical to SEQ ID NO: 9864
  Synthetic polypeptide

SEQ ID NO: 9866 - protein, 85 aa, Artificial Sequence; identical to SEQ ID NO: 9864
  Synthetic polypeptide

SEQ ID NO: 9867 - protein, 85 aa, Artificial Sequence; identical to SEQ ID NO: 9864
  Synthetic polypeptide

SEQ ID NO: 9868 - protein, 85 aa, Artificial Sequence; identical to SEQ ID NO: 9864
  Synthetic polypeptide

SEQ ID NO: 9869 - protein, 85 aa, Artificial Sequence; identical to SEQ ID NO: 9864
  Synthetic polypeptide

SEQ ID NO: 9870 - protein, 85 aa, Artificial Sequence; identical to SEQ ID NO: 9864
  Synthetic polypeptide

SEQ ID NO: 9871 - protein, 85 aa, Artificial Sequence; identical to SEQ ID NO: 9864
  Synthetic polypeptide

SEQ ID NO: 9872 - protein, 85 aa, Artificial Sequence; identical to SEQ ID NO: 9864
  Synthetic polypeptide

SEQ ID NO: 9873 - protein, 85 aa, Artificial Sequence; identical to SEQ ID NO: 9864
  Synthetic polypeptide

SEQ ID NO: 9874 - protein, 85 aa, Artificial Sequence; identical to SEQ ID NO: 9864
  Synthetic polypeptide

SEQ ID NO: 9875 - protein, 85 aa, Artificial Sequence; identical to SEQ ID NO: 9864
  Synthetic polypeptide

SEQ ID NO: 9876 - protein, 85 aa, Artificial Sequence; identical to SEQ ID NO: 9864
  Synthetic polypeptide

SEQ ID NO: 9877 - protein, 85 aa, Artificial Sequence; identical to SEQ ID NO: 9864
  Synthetic polypeptide

SEQ ID NO: 9878 - protein, 8 aa, Artificial Sequence
  Synthetic polypeptide
SQHFGRPS

SEQ ID NO: 9879 - protein, 8 aa, Artificial Sequence
  Synthetic polypeptide
SQHFGRPS

SEQ ID NO: 9880 - protein, 8 aa, Artificial Sequence
  Synthetic polypeptide
SQHFGRPS

SEQ ID NO: 9881 - protein, 8 aa, Artificial Sequence
  Synthetic polypeptide
SQHFGRPS

SEQ ID NO: 9882 - protein, 8 aa, Artificial Sequence
  Synthetic polypeptide
SQHFGRPS

SEQ ID NO: 9883 - protein, 8 aa, Artificial Sequence
  Synthetic polypeptide
SQHFGRPS

SEQ ID NO: 9884 - protein, 8 aa, Artificial Sequence
  Synthetic polypeptide
SQHFGRPS

SEQ ID NO: 9885 - protein, 8 aa, Artificial Sequence
  Synthetic polypeptide
SQHFGRPS

SEQ ID NO: 9886 - protein, 8 aa, Artificial Sequence
  Synthetic polypeptide
SQHFGRPS

SEQ ID NO: 9887 - protein, 8 aa, Artificial Sequence
  Synthetic polypeptide
SQHFGRPS

SEQ ID NO: 9888 - protein, 8 aa, Artificial Sequence
  Synthetic polypeptide
SQHFGRPS

SEQ ID NO: 9889 - protein, 8 aa, Artificial Sequence
  Synthetic polypeptide
SQHFGRPS

SEQ ID NO: 9890 - protein, 8 aa, Artificial Sequence
  Synthetic polypeptide
SQHFGRPS

SEQ ID NO: 9891 - protein, 8 aa, Artificial Sequence
  Synthetic polypeptide
SQHFGRPS

SEQ ID NO: 9892 - protein, 8 aa, Artificial Sequence
  Synthetic polypeptide
SQHFGRPS

SEQ ID NO: 9893 - protein, 30 aa, Artificial Sequence
  Synthetic polypeptide
PGSVAYTCNPSTLGGQVDWLHNRASRRQNQ

SEQ ID NO: 9894 - protein, 30 aa, Artificial Sequence; identical to SEQ ID NO: 9893
  Synthetic polypeptide

SEQ ID NO: 9895 - protein, 30 aa, Artificial Sequence; identical to SEQ ID NO: 9893
  Synthetic polypeptide

SEQ ID NO: 9896 - protein, 30 aa, Artificial Sequence; identical to SEQ ID NO: 9893
  Synthetic polypeptide

SEQ ID NO: 9897 - protein, 30 aa, Artificial Sequence; identical to SEQ ID NO: 9893
  Synthetic polypeptide

SEQ ID NO: 9898 - protein, 30 aa, Artificial Sequence; identical to SEQ ID NO: 9893
  Synthetic polypeptide

SEQ ID NO: 9899 - protein, 30 aa, Artificial Sequence; identical to SEQ ID NO: 9893
  Synthetic polypeptide

SEQ ID NO: 9900 - protein, 30 aa, Artificial Sequence; identical to SEQ ID NO: 9893
  Synthetic polypeptide

SEQ ID NO: 9901 - protein, 30 aa, Artificial Sequence; identical to SEQ ID NO: 9893
  Synthetic polypeptide

SEQ ID NO: 9902 - protein, 30 aa, Artificial Sequence; identical to SEQ ID NO: 9893
  Synthetic polypeptide

SEQ ID NO: 9903 - protein, 30 aa, Artificial Sequence; identical to SEQ ID NO: 9893
  Synthetic polypeptide

SEQ ID NO: 9904 - protein, 30 aa, Artificial Sequence; identical to SEQ ID NO: 9893
  Synthetic polypeptide

SEQ ID NO: 9905 - protein, 30 aa, Artificial Sequence; identical to SEQ ID NO: 9893
  Synthetic polypeptide

SEQ ID NO: 9906 - protein, 30 aa, Artificial Sequence; identical to SEQ ID NO: 9893
  Synthetic polypeptide

SEQ ID NO: 9907 - protein, 30 aa, Artificial Sequence; identical to SEQ ID NO: 9893
  Synthetic polypeptide

SEQ ID NO: 9908 - protein, 189 aa, Artificial Sequence
  Synthetic polypeptide
GQVRWLIPVIPALWEAKLIGCIIGRQGAKINEIRQMSGAQIKIANPVEGSTDRQVTITGSAASISLAQYLINVSLENAKPSSQAASVTIPDHLSINLSQPSTPSSSSSSTTTPSLATAGTSDAPSSLPNPLPTAPCVSSLLGMKPIPLLALNVVSAAKGTGASATTTTTSAVPCVTNKLKGEKQRFSPY

SEQ ID NO: 9909 - protein, 39 aa, Artificial Sequence
  Synthetic polypeptide
CKLFEHIEGQTMVFGQEHLTAAEPSAICSGAETTGDTDR

SEQ ID NO: 9910 - protein, 39 aa, Artificial Sequence; identical to SEQ ID NO: 9909
  Synthetic polypeptide

SEQ ID NO: 9911 - protein, 39 aa, Artificial Sequence; identical to SEQ ID NO: 9909
  Synthetic polypeptide

SEQ ID NO: 9912 - protein, 39 aa, Artificial Sequence; identical to SEQ ID NO: 9909
  Synthetic polypeptide

SEQ ID NO: 9913 - protein, 144 aa, Artificial Sequence
  Synthetic polypeptide
ASVSFLSTLKARLWCLVKSTSQLLSRPLSAVVLKRPEILTDESLSSLAVSCPLTSLVSSRSFQTSAISRDIDTAAKFIGAGAATVGVAGSGAGIGTVFGSLIIGYARNPSLKQQLFSYAILGFALSEAMGLFCLMVAFLILFAM

SEQ ID NO: 9914 - protein, 144 aa, Artificial Sequence; identical to SEQ ID NO: 9913
  Synthetic polypeptide

SEQ ID NO: 9915 - protein, 144 aa, Artificial Sequence; identical to SEQ ID NO: 9913
  Synthetic polypeptide

SEQ ID NO: 9916 - protein, 144 aa, Artificial Sequence; identical to SEQ ID NO: 9913
  Synthetic polypeptide

SEQ ID NO: 9917 - protein, 14 aa, Artificial Sequence
  Synthetic polypeptide
RPDYGVWSRAPHSC

SEQ ID NO: 9918 - protein, 14 aa, Artificial Sequence
  Synthetic polypeptide
RPDYGVWSRAPHSC

SEQ ID NO: 9919 - protein, 14 aa, Artificial Sequence
  Synthetic polypeptide
RPDYGVWSRAPHSC

SEQ ID NO: 9920 - protein, 14 aa, Artificial Sequence
  Synthetic polypeptide
RPDYGVWSRAPHSC

SEQ ID NO: 9921 - protein, 22 aa, Artificial Sequence
  Synthetic polypeptide
IRISTLTQSLSDVTPGDRLPGP

SEQ ID NO: 9922 - protein, 22 aa, Artificial Sequence
  Synthetic polypeptide
IRISTLTQSLSDVTPGDRLPGP

SEQ ID NO: 9923 - protein, 22 aa, Artificial Sequence
  Synthetic polypeptide
IRISTLTQSLSDVTPGDRLPGP

SEQ ID NO: 9924 - protein, 174 aa, Artificial Sequence
  Synthetic polypeptide
HLETDSLDPEKLLQCPYDKNHQIRACRFPYHLIKCRKNHPDVASKLATCPFNARHQVPRAEISHHISSCDDRSCIEQDVVNQTRSLRQETLAESTWQCPPCDEDWDKDLWEQTSTPFVWGTTHYSDNNSPASNIVTEHKNNLASGMRVPKSLPYVLPWKNNSDSLDFSLCYCLS

SEQ ID NO: 9925 - protein, 135 aa, Artificial Sequence
  Synthetic polypeptide
CNTWRPTPWTLRSYCNAPMTKTIKSGLAGFLIILSSAERIILMLQANWLLVPSMLATRFLELKLVIISQAVMTEVVLSKMLSTKPGALDKRLWLRALGSALLAMKTGIKICGSRPAPHLSGAQLTTLTTTALRAT

SEQ ID NO: 9926 - protein, 135 aa, Artificial Sequence; identical to SEQ ID NO: 9925
  Synthetic polypeptide

SEQ ID NO: 9927 - protein, 135 aa, Artificial Sequence; identical to SEQ ID NO: 9925
  Synthetic polypeptide

SEQ ID NO: 9928 - protein, 165 aa, Artificial Sequence
  Synthetic polypeptide
HLETDSLDPEKLLQCPYDKNHQIRACRFPYHLIKCRKNHPDVASKLATCPFNARHQVPRAEISHHISSCDDRSCIEQDVVNQTRSLRQETLAESTWQCPPCDEDWDKDLWEQTSTPFVWGTTHYSDNNSPASNIVTEHKNNLASGMRVPKSLPYVLPWKNNGNAQ

SEQ ID NO: 9929 - protein, 165 aa, Artificial Sequence; identical to SEQ ID NO: 9928
  Synthetic polypeptide

SEQ ID NO: 9930 - protein, 28 aa, Artificial Sequence
  Synthetic polypeptide
LEAENRKKTLETDWMFCTLRESDNSCSS

SEQ ID NO: 9931 - protein, 28 aa, Artificial Sequence
  Synthetic polypeptide
LEAENRKKTLETDWMFCTLRESDNSCSS

SEQ ID NO: 9932 - protein, 89 aa, Artificial Sequence
  Synthetic polypeptide
RLKTEKKLWKQTGCFVHSENPTTAAPADTYPATGPADDEAPDAETTAAATTATTAAPTTATTAASTTARKDIPVLPKWVGDLPNGRVCP

SEQ ID NO: 9933 - protein, 89 aa, Artificial Sequence; identical to SEQ ID NO: 9932
  Synthetic polypeptide

SEQ ID NO: 9934 - protein, 87 aa, Artificial Sequence
  Synthetic polypeptide
KQKKNFGNRLDVLYTQRIRQQLLQLTRIQLLVLLMMKPLMLKPLLLQPLQPLLLLPLQPPLLLPLLVKTFQFYPNGLGISRMVECVP

SEQ ID NO: 9935 - protein, 87 aa, Artificial Sequence; identical to SEQ ID NO: 9934
  Synthetic polypeptide

SEQ ID NO: 9936 - protein, 23 aa, Artificial Sequence
  Synthetic polypeptide
LEAENRKKTLETDWMFCTLSWSC

SEQ ID NO: 9937 - protein, 23 aa, Artificial Sequence
  Synthetic polypeptide
LEAENRKKTLETDWMFCTLSWSC

SEQ ID NO: 9938 - protein, 75 aa, Artificial Sequence
  Synthetic polypeptide
RLKTEKKLWKQTGCFVHSAGPADDEAPDAETTAAATTATTAAPTTATTAASTTARKDIPVLPKWVGDLPNGRVCP

SEQ ID NO: 9939 - protein, 75 aa, Artificial Sequence; identical to SEQ ID NO: 9938
  Synthetic polypeptide

SEQ ID NO: 9940 - protein, 73 aa, Artificial Sequence
  Synthetic polypeptide
KQKKNFGNRLDVLYTQLVLLMMKPLMLKPLLLQPLQPLLLLPLQPPLLLPLLVKTFQFYPNGLGISRMVECVP

SEQ ID NO: 9941 - protein, 73 aa, Artificial Sequence; identical to SEQ ID NO: 9940
  Synthetic polypeptide

SEQ ID NO: 9942 - protein, 75 aa, Artificial Sequence
  Synthetic polypeptide
SRRKRIRQQLLQLTRIQLLVLLMMKPLMLKPLLLQPLQPLLLLPLQPPLLLPLLVKTFQFYPNGLGISRMVECVP

SEQ ID NO: 9943 - protein, 75 aa, Artificial Sequence; identical to SEQ ID NO: 9942
  Synthetic polypeptide

SEQ ID NO: 9944 - protein, 15 aa, Artificial Sequence
  Synthetic polypeptide
KYKVEERESDNSCSS

SEQ ID NO: 9945 - protein, 15 aa, Artificial Sequence
  Synthetic polypeptide
KYKVEERESDNSCSS

SEQ ID NO: 9946 - protein, 73 aa, Artificial Sequence
  Synthetic polypeptide
KKENPTTAAPADTYPATGPADDEAPDAETTAAATTATTAAPTTATTAASTTARKDIPVLPKWVGDLPNGRVCP

SEQ ID NO: 9947 - protein, 73 aa, Artificial Sequence; identical to SEQ ID NO: 9946
  Synthetic polypeptide

SEQ ID NO: 9948 - protein, 81 aa, Artificial Sequence
  Synthetic polypeptide
CYKEALTRCRLLTLDLPASRIAFSTTTTACGLTELASKKKLKATSCRKLHCPQHPAPTPWSSKPPNSAGERQHGTWGGRPD

SEQ ID NO: 9949 - protein, 19 aa, Artificial Sequence
  Synthetic polypeptide
PWICQPPELLSPPPQQHVV

SEQ ID NO: 9950 - protein, 19 aa, Artificial Sequence
  Synthetic polypeptide
PWICQPPELLSPPPQQHVV

SEQ ID NO: 9951 - protein, 110 aa, Artificial Sequence
  Synthetic polypeptide
ACYKTKFGCVLLSCPLTLSSPSIFRHGMMLQGGPHQMQAFDLGFASLQNCFLHHHNSMWSDRIGFKEETKSHLLQETALPSTSSPYSLVLQTPKLCRRKAAWYMGRKTRL

SEQ ID NO: 9952 - protein, 41 aa, Artificial Sequence
  Synthetic polypeptide
CYKEALTRCRLLTLDLPASRIAFSTTTTACGLTELASKKKL

SEQ ID NO: 9953 - protein, 69 aa, Artificial Sequence
  Synthetic polypeptide
ACYKTKFGCVLLSCPLTLSSPSIFRHGMMLQGGPHQMQAFDLGFASLQNCFLHHHNSMWSDRIGFKEET

SEQ ID NO: 9954 - protein, 19 aa, Artificial Sequence
  Synthetic polypeptide
VHFPPRKRGGERLSLQRPA

SEQ ID NO: 9955 - protein, 19 aa, Artificial Sequence
  Synthetic polypeptide
VHFPPRKRGGERLSLQRPA

SEQ ID NO: 9956 - protein, 19 aa, Artificial Sequence
  Synthetic polypeptide
VHFPPRKRGGERLSLQRPA

SEQ ID NO: 9957 - protein, 19 aa, Artificial Sequence
  Synthetic polypeptide
VHFPPRKRGGERLSLQRPA

SEQ ID NO: 9958 - protein, 66 aa, Artificial Sequence
  Synthetic polypeptide
WRKSAWESGVLGAAADFLASLSESISLPGKEEARGYHCSDLPDRSFGGSPQCGCGPGLHEPEKAGP

SEQ ID NO: 9959 - protein, 66 aa, Artificial Sequence; identical to SEQ ID NO: 9958
  Synthetic polypeptide

SEQ ID NO: 9960 - protein, 66 aa, Artificial Sequence; identical to SEQ ID NO: 9958
  Synthetic polypeptide

SEQ ID NO: 9961 - protein, 66 aa, Artificial Sequence; identical to SEQ ID NO: 9958
  Synthetic polypeptide

SEQ ID NO: 9962 - protein, 112 aa, Artificial Sequence
  Synthetic polypeptide
VSPFPSQEKRRREAITAATCLTEALVDHLNVGVAQAYMNQRKLDHEVKTLQVQAAQFAKQTGQWIGMVENFNQALKEIGDVENWARSIELDMRTIATALEYVYKGQLQSAPS

SEQ ID NO: 9963 - protein, 112 aa, Artificial Sequence; identical to SEQ ID NO: 9962
  Synthetic polypeptide

SEQ ID NO: 9964 - protein, 81 aa, Artificial Sequence
  Synthetic polypeptide
VSPFPSQEKRRREAITAATCLTEALVDHLNVGVAQAYMNQRKLDHEVKTLQVQAAQFAKQTGQWIGMVENFNQALKGFLVW

SEQ ID NO: 9965 - protein, 101 aa, Artificial Sequence
  Synthetic polypeptide
VSPFPSQEKRRREAITAATCLTEALVDHLNVGVAQAYMNQRKLDHEVKTLQVQAAQFAKQTGQWIGMVENFNQALKVGHTPYLTTPILGPHWLPPVRLPQV

SEQ ID NO: 9966 - protein, 19 aa, Artificial Sequence
  Synthetic polypeptide
VHFPPRCGPGLHEPEKAGP

SEQ ID NO: 9967 - protein, 19 aa, Artificial Sequence
  Synthetic polypeptide
VHFPPRCGPGLHEPEKAGP

SEQ ID NO: 9968 - protein, 19 aa, Artificial Sequence
  Synthetic polypeptide
VHFPPRCGPGLHEPEKAGP

SEQ ID NO: 9969 - protein, 19 aa, Artificial Sequence
  Synthetic polypeptide
VHFPPRCGPGLHEPEKAGP

SEQ ID NO: 9970 - protein, 109 aa, Artificial Sequence
  Synthetic polypeptide
WRKSAWESGVLGAAADFLASLSESISLPGVAQAYMNQRKLDHEVKTLQVQAAQFAKQTGQWIGMVENFNQALKEIGDVENWARSIELDMRTIATALEYVYKGQLQSAPS

SEQ ID NO: 9971 - protein, 109 aa, Artificial Sequence; identical to SEQ ID NO: 9970
  Synthetic polypeptide

SEQ ID NO: 9972 - protein, 13 aa, Artificial Sequence
  Synthetic polypeptide
VSPFPSQVWPRPT

SEQ ID NO: 9973 - protein, 13 aa, Artificial Sequence
  Synthetic polypeptide
VSPFPSQVWPRPT

SEQ ID NO: 9974 - protein, 13 aa, Artificial Sequence
  Synthetic polypeptide
VSPFPSQVWPRPT

SEQ ID NO: 9975 - protein, 13 aa, Artificial Sequence
  Synthetic polypeptide
VSPFPSQVWPRPT

SEQ ID NO: 9976 - protein, 13 aa, Artificial Sequence
  Synthetic polypeptide
VSPFPSQVWPRPT

SEQ ID NO: 9977 - protein, 13 aa, Artificial Sequence
  Synthetic polypeptide
VSPFPSQVWPRPT

SEQ ID NO: 9978 - protein, 12 aa, Artificial Sequence
  Synthetic polypeptide
VHFPPRCGPGLH

SEQ ID NO: 9979 - protein, 12 aa, Artificial Sequence
  Synthetic polypeptide
VHFPPRCGPGLH

SEQ ID NO: 9980 - protein, 35 aa, Artificial Sequence
  Synthetic polypeptide
WRKSAWESGVLGAAADFLASLSESISLPGVAQAYM

SEQ ID NO: 9981 - protein, 35 aa, Artificial Sequence; identical to SEQ ID NO: 9980
  Synthetic polypeptide

SEQ ID NO: 9982 - protein, 78 aa, Artificial Sequence
  Synthetic polypeptide
WRKSAWESGVLGAAADFLASLSESISLPGVAQAYMNQRKLDHEVKTLQVQAAQFAKQTGQWIGMVENFNQALKGFLVW

SEQ ID NO: 9983 - protein, 98 aa, Artificial Sequence
  Synthetic polypeptide
WRKSAWESGVLGAAADFLASLSESISLPGVAQAYMNQRKLDHEVKTLQVQAAQFAKQTGQWIGMVENFNQALKVGHTPYLTTPILGPHWLPPVRLPQV

SEQ ID NO: 9984 - protein, 80 aa, Artificial Sequence
  Synthetic polypeptide
EFKTSLGNMVKPSLYKKTKISWACWLAPVVPAAWKAESEDDEKLKKRKERFGIVTSSAGTGTTEDTEAKKRKRAERFGIA

SEQ ID NO: 9985 - protein, 80 aa, Artificial Sequence; identical to SEQ ID NO: 9984
  Synthetic polypeptide

SEQ ID NO: 9986 - protein, 80 aa, Artificial Sequence; identical to SEQ ID NO: 9984
  Synthetic polypeptide

SEQ ID NO: 9987 - protein, 80 aa, Artificial Sequence; identical to SEQ ID NO: 9984
  Synthetic polypeptide

SEQ ID NO: 9988 - protein, 33 aa, Artificial Sequence
  Synthetic polypeptide
NPLSTKKQKLVGRVGLRLWSQLLGRLSLKMMRN

SEQ ID NO: 9989 - protein, 33 aa, Artificial Sequence; identical to SEQ ID NO: 9988
  Synthetic polypeptide

SEQ ID NO: 9990 - protein, 33 aa, Artificial Sequence; identical to SEQ ID NO: 9988
  Synthetic polypeptide

SEQ ID NO: 9991 - protein, 33 aa, Artificial Sequence; identical to SEQ ID NO: 9988
  Synthetic polypeptide

SEQ ID NO: 9992 - protein, 33 aa, Artificial Sequence; identical to SEQ ID NO: 9988
  Synthetic polypeptide

SEQ ID NO: 9993 - protein, 83 aa, Artificial Sequence
  Synthetic polypeptide
EFKTSLGNMVKPSLYKKTKISWACWLAPVVPAAWKAESEDDEKLKKRKERFGIVTSSAGTGTTEDTEVKIYLERFIDLEGKLE

SEQ ID NO: 9994 - protein, 35 aa, Artificial Sequence
  Synthetic polypeptide
LLHLSLSLKVQMPAQSCLRKVLQVPWAPCWMVQPP

SEQ ID NO: 9995 - protein, 35 aa, Artificial Sequence; identical to SEQ ID NO: 9994
  Synthetic polypeptide

SEQ ID NO: 9996 - protein, 35 aa, Artificial Sequence; identical to SEQ ID NO: 9994
  Synthetic polypeptide

SEQ ID NO: 9997 - protein, 35 aa, Artificial Sequence; identical to SEQ ID NO: 9994
  Synthetic polypeptide

SEQ ID NO: 9998 - protein, 35 aa, Artificial Sequence; identical to SEQ ID NO: 9994
  Synthetic polypeptide

SEQ ID NO: 9999 - protein, 35 aa, Artificial Sequence; identical to SEQ ID NO: 9994
  Synthetic polypeptide

SEQ ID NO: 10000 - protein, 35 aa, Artificial Sequence; identical to SEQ ID NO: 9994
  Synthetic polypeptide

SEQ ID NO: 10001 - protein, 35 aa, Artificial Sequence; identical to SEQ ID NO: 9994
  Synthetic polypeptide

SEQ ID NO: 10002 - protein, 35 aa, Artificial Sequence; identical to SEQ ID NO: 9994
  Synthetic polypeptide

SEQ ID NO: 10003 - protein, 35 aa, Artificial Sequence; identical to SEQ ID NO: 9994
  Synthetic polypeptide

SEQ ID NO: 10004 - protein, 11 aa, Artificial Sequence
  Synthetic polypeptide
LHPLCSCYTYP

SEQ ID NO: 10005 - protein, 11 aa, Artificial Sequence
  Synthetic polypeptide
LHPLCSCYTYP

SEQ ID NO: 10006 - protein, 11 aa, Artificial Sequence
  Synthetic polypeptide
LHPLCSCYTYP

SEQ ID NO: 10007 - protein, 11 aa, Artificial Sequence
  Synthetic polypeptide
LHPLCSCYTYP

SEQ ID NO: 10008 - protein, 11 aa, Artificial Sequence
  Synthetic polypeptide
LHPLCSCYTYP

SEQ ID NO: 10009 - protein, 11 aa, Artificial Sequence
  Synthetic polypeptide
LHPLCSCYTYP

SEQ ID NO: 10010 - protein, 11 aa, Artificial Sequence
  Synthetic polypeptide
LHPLCSCYTYP

SEQ ID NO: 10011 - protein, 11 aa, Artificial Sequence
  Synthetic polypeptide
LHPLCSCYTYP

SEQ ID NO: 10012 - protein, 11 aa, Artificial Sequence
  Synthetic polypeptide
LHPLCSCYTYP

SEQ ID NO: 10013 - protein, 11 aa, Artificial Sequence
  Synthetic polypeptide
LHPLCSCYTYP

SEQ ID NO: 10014 - protein, 245 aa, Artificial Sequence
  Synthetic polypeptide
STHSVVVTPIPEPEGPDASSIMSTESITGSLGPLLDGTATLRLVKRQVPLDCVLYRYGSFSVTLDIVQGIESAEILQAVPSGEGDAFELTVSCQGGLPKEACMEISSPGCQPPAQRLCQPVLPSPACQLVLHQILKGGSGTYCLNVSLADTNSLAVVSTQLIMPVPGILLTGQEAGLGQVPLIVGILLVLMAVVLASLIYRRRLMKQDFSVPQLPHSSSHWLRLPRIFCSCPIGENSPLLSGQQV

SEQ ID NO: 10015 - protein, 245 aa, Artificial Sequence; identical to SEQ ID NO: 10014
  Synthetic polypeptide

SEQ ID NO: 10016 - protein, 245 aa, Artificial Sequence; identical to SEQ ID NO: 10014
  Synthetic polypeptide

SEQ ID NO: 10017 - protein, 238 aa, Artificial Sequence
  Synthetic polypeptide
STHSVVVTPIPEPEGPDASSIMSTESITGSLGPLLDGTATLRLVKRQVPLDCVLYRYGSFSVTLDIVQGIESAEILQAVPSGEGDAFELTVSCQGGLPKEACMEISSPGCQPPAQRLCQPVLPSPACQLVLHQILKGGSGTYCLNVSLADTNSLAVVSTQLIMPGQEAGLGQVPLIVGILLVLMAVVLASLIYRRRLMKQDFSVPQLPHSSSHWLRLPRIFCSCPIGENSPLLSGQQV

SEQ ID NO: 10018 - protein, 238 aa, Artificial Sequence; identical to SEQ ID NO: 10017
  Synthetic polypeptide

SEQ ID NO: 10019 - protein, 238 aa, Artificial Sequence; identical to SEQ ID NO: 10017
  Synthetic polypeptide

SEQ ID NO: 10020 - protein, 238 aa, Artificial Sequence; identical to SEQ ID NO: 10017
  Synthetic polypeptide

SEQ ID NO: 10021 - protein, 238 aa, Artificial Sequence; identical to SEQ ID NO: 10017
  Synthetic polypeptide

SEQ ID NO: 10022 - protein, 183 aa, Artificial Sequence
  Synthetic polypeptide
STHSVVVTPIPEPEGPDASSIMSTESITGSLGPLLDGTATLRLVKRQVPLDCVLYRYGSFSVTLDIVQGIESAEILQAVPSGEGDAFELTVSCQGGLPKEACMEISSPGCQPPAQRLCQPVLPSPACQLVLHQILKGGSGTYCLNVSLADTNSLAVVSTQLIMPVPGILLTGQEAGLGQVPLI

SEQ ID NO: 10023 - protein, 64 aa, Artificial Sequence
  Synthetic polypeptide
STHSVVVTPIPEPEGPDASSIMSTESITGSLGPLLDGTATLRLVKRQVPLDCVLYRYGSFSVTL

SEQ ID NO: 10024 - protein, 26 aa, Artificial Sequence
  Synthetic polypeptide
TVFPFPKIKGLLEPGVGRTASVSPGN

SEQ ID NO: 10025 - protein, 26 aa, Artificial Sequence
  Synthetic polypeptide
TVFPFPKIKGLLEPGVGRTASVSPGN

SEQ ID NO: 10026 - protein, 26 aa, Artificial Sequence
  Synthetic polypeptide
TVFPFPKIKGLLEPGVGRTASVSPGN

SEQ ID NO: 10027 - protein, 26 aa, Artificial Sequence
  Synthetic polypeptide
TVFPFPKIKGLLEPGVGRTASVSPGN

(The sequence listing continues in the following parts.)
